United States Patent Application Publication US 2018/0305689 A1 - sequence listing, part 56

SEQ ID NO: 793956 - RNA, 19 nt, Artificial Sequence
  Description of Artificial Sequence: Synthetic oligonucleotide
  Sense strand starting at position 2228 of SEQ ID NO: 587461
gcauccucagaagaucuuu

SEQ ID NO: 793957 - RNA, 19 nt, Artificial Sequence
  Description of Artificial Sequence: Synthetic oligonucleotide
  Antisense strand to SEQ ID NO: 793956
aaagaucuucugaggaugc

SEQ ID NO: 793958 - RNA, 19 nt, Artificial Sequence
  Description of Artificial Sequence: Synthetic oligonucleotide
  Sense strand starting at position 2251 of SEQ ID NO: 587461
uucuguuaucaccagcuga

SEQ ID NO: 793959 - RNA, 19 nt, Artificial Sequence
  Description of Artificial Sequence: Synthetic oligonucleotide
  Antisense strand to SEQ ID NO: 793958
ucagcuggugauaacagaa

SEQ ID NO: 793960 - RNA, 19 nt, Artificial Sequence
  Description of Artificial Sequence: Synthetic oligonucleotide
  Sense strand starting at position 2388 of SEQ ID NO: 587461
ccugacaaugcuggacuaa

SEQ ID NO: 793961 - RNA, 19 nt, Artificial Sequence
  Description of Artificial Sequence: Synthetic oligonucleotide
  Antisense strand to SEQ ID NO: 793960
uuaguccagcauugucagg

SEQ ID NO: 793962 - RNA, 19 nt, Artificial Sequence
  Description of Artificial Sequence: Synthetic oligonucleotide
  Sense strand starting at position 2449 of SEQ ID NO: 587461
acugaacaaugugcucauu

SEQ ID NO: 793963 - RNA, 19 nt, Artificial Sequence
  Description of Artificial Sequence: Synthetic oligonucleotide
  Antisense strand to SEQ ID NO: 793962
aaugagcacauuguucagu

SEQ ID NO: 793964 - RNA, 19 nt, Artificial Sequence
  Description of Artificial Sequence: Synthetic oligonucleotide
  Sense strand starting at position 2792 of SEQ ID NO: 587461
gccucaguaggagagcauu

SEQ ID NO: 793965 - RNA, 19 nt, Artificial Sequence
  Description of Artificial Sequence: Synthetic oligonucleotide
  Antisense strand to SEQ ID NO: 793964
aaugcucuccuacugaggc

SEQ ID NO: 793966 - RNA, 19 nt, Artificial Sequence
  Description of Artificial Sequence: Synthetic oligonucleotide
  Sense strand starting at position 2837 of SEQ ID NO: 587461
auuccaaaucuuugaugug

SEQ ID NO: 793967 - RNA, 19 nt, Artificial Sequence
  Description of Artificial Sequence: Synthetic oligonucleotide
  Antisense strand to SEQ ID NO: 793966
cacaucaaagauuuggaau

SEQ ID NO: 793968 - RNA, 19 nt, Artificial Sequence
  Description of Artificial Sequence: Synthetic oligonucleotide
  Sense strand starting at position 2920 of SEQ ID NO: 587461
cucgaauggcauuacaguu

SEQ ID NO: 793969 - RNA, 19 nt, Artificial Sequence
  Description of Artificial Sequence: Synthetic oligonucleotide
  Antisense strand to SEQ ID NO: 793968
aacuguaaugccauucgag

SEQ ID NO: 793970 - RNA, 19 nt, Artificial Sequence
  Description of Artificial Sequence: Synthetic oligonucleotide
  Sense strand starting at position 3039 of SEQ ID NO: 587461
ccaacugucuugguauaau

SEQ ID NO: 793971 - RNA, 19 nt, Artificial Sequence
  Description of Artificial Sequence: Synthetic oligonucleotide
  Antisense strand to SEQ ID NO: 793970
auuauaccaagacaguugg

SEQ ID NO: 793972 - RNA, 19 nt, Artificial Sequence
  Description of Artificial Sequence: Synthetic oligonucleotide
  Sense strand starting at position 3042 of SEQ ID NO: 587461
acugucuugguauaauguu

SEQ ID NO: 793973 - RNA, 19 nt, Artificial Sequence
  Description of Artificial Sequence: Synthetic oligonucleotide
  Antisense strand to SEQ ID NO: 793972
aacauuauaccaagacagu

SEQ ID NO: 793974 - RNA, 19 nt, Artificial Sequence
  Description of Artificial Sequence: Synthetic oligonucleotide
  Sense strand starting at position 3087 of SEQ ID NO: 587461
caauacgugcaggaugaaa

SEQ ID NO: 793975 - RNA, 19 nt, Artificial Sequence
  Description of Artificial Sequence: Synthetic oligonucleotide
  Antisense strand to SEQ ID NO: 793974
uuucauccugcacguauug

SEQ ID NO: 793976 - RNA, 19 nt, Artificial Sequence
  Description of Artificial Sequence: Synthetic oligonucleotide
  Sense strand starting at position 3120 of SEQ ID NO: 587461
gacgcuugaguauaagaua

SEQ ID NO: 793977 - RNA, 19 nt, Artificial Sequence
  Description of Artificial Sequence: Synthetic oligonucleotide
  Antisense strand to SEQ ID NO: 793976
uaucuuauacucaagcguc

SEQ ID NO: 793978 - RNA, 19 nt, Artificial Sequence
  Description of Artificial Sequence: Synthetic oligonucleotide
  Sense strand starting at position 3230 of SEQ ID NO: 587461
agugguuuccuuuagaaag

SEQ ID NO: 793979 - RNA, 19 nt, Artificial Sequence
  Description of Artificial Sequence: Synthetic oligonucleotide
  Antisense strand to SEQ ID NO: 793978
cuuucuaaaggaaaccacu

SEQ ID NO: 793980 - RNA, 19 nt, Artificial Sequence
  Description of Artificial Sequence: Synthetic oligonucleotide
  Sense strand starting at position 3361 of SEQ ID NO: 587461
ggcuuaauuaugugaaaga

SEQ ID NO: 793981 - RNA, 19 nt, Artificial Sequence
  Description of Artificial Sequence: Synthetic oligonucleotide
  Antisense strand to SEQ ID NO: 793980
ucuuucacauaauuaagcc

SEQ ID NO: 793982 - RNA, 19 nt, Artificial Sequence
  Description of Artificial Sequence: Synthetic oligonucleotide
  Sense strand starting at position 3426 of SEQ ID NO: 587461
uuaacauuagcuggaaagu

SEQ ID NO: 793983 - RNA, 19 nt, Artificial Sequence
  Description of Artificial Sequence: Synthetic oligonucleotide
  Antisense strand to SEQ ID NO: 793982
acuuuccagcuaauguuaa

SEQ ID NO: 793984 - RNA, 19 nt, Artificial Sequence
  Description of Artificial Sequence: Synthetic oligonucleotide
  Sense strand starting at position 3441 of SEQ ID NO: 587461
aaguacaauguuggaaaua

SEQ ID NO: 793985 - RNA, 19 nt, Artificial Sequence
  Description of Artificial Sequence: Synthetic oligonucleotide
  Antisense strand to SEQ ID NO: 793984
uauuuccaacauuguacuu

SEQ ID NO: 793986 - RNA, 19 nt, Artificial Sequence
  Description of Artificial Sequence: Synthetic oligonucleotide
  Sense strand starting at position 3482 of SEQ ID NO: 587461
uuugaaaguuugguuagau

SEQ ID NO: 793987 - RNA, 19 nt, Artificial Sequence
  Description of Artificial Sequence: Synthetic oligonucleotide
  Antisense strand to SEQ ID NO: 793986
aucuaaccaaacuuucaaa

SEQ ID NO: 793988 - RNA, 19 nt, Artificial Sequence
  Description of Artificial Sequence: Synthetic oligonucleotide
  Sense strand starting at position 3483 of SEQ ID NO: 587461
uugaaaguuugguuagauu

SEQ ID NO: 793989 - RNA, 19 nt, Artificial Sequence
  Description of Artificial Sequence: Synthetic oligonucleotide
  Antisense strand to SEQ ID NO: 793988
aaucuaaccaaacuuucaa

SEQ ID NO: 793990 - RNA, 19 nt, Artificial Sequence
  Description of Artificial Sequence: Synthetic oligonucleotide
  Sense strand starting at position 3540 of SEQ ID NO: 587461
gucaaacuguuguuaauaa

SEQ ID NO: 793991 - RNA, 19 nt, Artificial Sequence
  Description of Artificial Sequence: Synthetic oligonucleotide
  Antisense strand to SEQ ID NO: 793990
uuauuaacaacaguuugac

SEQ ID NO: 793992 - RNA, 19 nt, Artificial Sequence
  Description of Artificial Sequence: Synthetic oligonucleotide
  Sense strand starting at position 3688 of SEQ ID NO: 587461
gaaaguccauaugcaugau

SEQ ID NO: 793993 - RNA, 19 nt, Artificial Sequence
  Description of Artificial Sequence: Synthetic oligonucleotide
  Antisense strand to SEQ ID NO: 793992
aucaugcauauggacuuuc

SEQ ID NO: 793994 - RNA, 19 nt, Artificial Sequence
  Description of Artificial Sequence: Synthetic oligonucleotide
  Sense strand starting at position 3742 of SEQ ID NO: 587461
uugugucucagggauuauu

SEQ ID NO: 793995 - RNA, 19 nt, Artificial Sequence
  Description of Artificial Sequence: Synthetic oligonucleotide
  Antisense strand to SEQ ID NO: 793994
aauaaucccugagacacaa

SEQ ID NO: 793996 - RNA, 19 nt, Artificial Sequence
  Description of Artificial Sequence: Synthetic oligonucleotide
  Sense strand starting at position 3767 of SEQ ID NO: 587461
auguguuguguguuacugu

SEQ ID NO: 793997 - RNA, 19 nt, Artificial Sequence
  Description of Artificial Sequence: Synthetic oligonucleotide
  Antisense strand to SEQ ID NO: 793996
acaguaacacacaacacau

SEQ ID NO: 793998 - RNA, 19 nt, Artificial Sequence
  Description of Artificial Sequence: Synthetic oligonucleotide
  Sense strand starting at position 3982 of SEQ ID NO: 587461
uuauguguaguacaagauu

SEQ ID NO: 793999 - RNA, 19 nt, Artificial Sequence
  Description of Artificial Sequence: Synthetic oligonucleotide
  Antisense strand to SEQ ID NO: 793998
aaucuuguacuacacauaa

SEQ ID NO: 794000 - RNA, 19 nt, Artificial Sequence
  Description of Artificial Sequence: Synthetic oligonucleotide
  Sense strand starting at position 116 of SEQ ID NO: 587462
augaguacugauugguaag

SEQ ID NO: 794001 - RNA, 19 nt, Artificial Sequence
  Description of Artificial Sequence: Synthetic oligonucleotide
  Antisense strand to SEQ ID NO: 794000
cuuaccaaucaguacucau

SEQ ID NO: 794002 - RNA, 19 nt, Artificial Sequence
  Description of Artificial Sequence: Synthetic oligonucleotide
  Sense strand starting at position 122 of SEQ ID NO: 587462
acugauugguaagucacau

SEQ ID NO: 794003 - RNA, 19 nt, Artificial Sequence
  Description of Artificial Sequence: Synthetic oligonucleotide
  Antisense strand to SEQ ID NO: 794002
augugacuuaccaaucagu

SEQ ID NO: 794004 - RNA, 19 nt, Artificial Sequence
  Description of Artificial Sequence: Synthetic oligonucleotide
  Sense strand starting at position 278 of SEQ ID NO: 587462
gccauugggagucauggaa

SEQ ID NO: 794005 - RNA, 19 nt, Artificial Sequence
  Description of Artificial Sequence: Synthetic oligonucleotide
  Antisense strand to SEQ ID NO: 794004
uuccaugacucccaauggc

SEQ ID NO: 794006 - RNA, 19 nt, Artificial Sequence
  Description of Artificial Sequence: Synthetic oligonucleotide
  Sense strand starting at position 300 of SEQ ID NO: 587462
cuauuuauaugagaguuac

SEQ ID NO: 794007 - RNA, 19 nt, Artificial Sequence
  Description of Artificial Sequence: Synthetic oligonucleotide
  Antisense strand to SEQ ID NO: 794006
guaacucucauauaaauag

SEQ ID NO: 794008 - RNA, 19 nt, Artificial Sequence
  Description of Artificial Sequence: Synthetic oligonucleotide
  Sense strand starting at position 306 of SEQ ID NO: 587462
auaugagaguuaccgaguu

SEQ ID NO: 794009 - RNA, 19 nt, Artificial Sequence
  Description of Artificial Sequence: Synthetic oligonucleotide
  Antisense strand to SEQ ID NO: 794008
aacucgguaacucucauau

SEQ ID NO: 794010 - RNA, 19 nt, Artificial Sequence
  Description of Artificial Sequence: Synthetic oligonucleotide
  Sense strand starting at position 308 of SEQ ID NO: 587462
augagaguuaccgaguuug

SEQ ID NO: 794011 - RNA, 19 nt, Artificial Sequence
  Description of Artificial Sequence: Synthetic oligonucleotide
  Antisense strand to SEQ ID NO: 794010
caaacucgguaacucucau

SEQ ID NO: 794012 - RNA, 19 nt, Artificial Sequence
  Description of Artificial Sequence: Synthetic oligonucleotide
  Sense strand starting at position 810 of SEQ ID NO: 587462
gaucacucuucuguggaau

SEQ ID NO: 794013 - RNA, 19 nt, Artificial Sequence
  Description of Artificial Sequence: Synthetic oligonucleotide
  Antisense strand to SEQ ID NO: 794012
auuccacagaagagugauc

SEQ ID NO: 794014 - RNA, 19 nt, Artificial Sequence
  Description of Artificial Sequence: Synthetic oligonucleotide
  Sense strand starting at position 811 of SEQ ID NO: 587462
aucacucuucuguggaauc

SEQ ID NO: 794015 - RNA, 19 nt, Artificial Sequence
  Description of Artificial Sequence: Synthetic oligonucleotide
  Antisense strand to SEQ ID NO: 794014
gauuccacagaagagugau

SEQ ID NO: 794016 - RNA, 19 nt, Artificial Sequence
  Description of Artificial Sequence: Synthetic oligonucleotide
  Sense strand starting at position 946 of SEQ ID NO: 587462
ugagauaguccugaugcau

SEQ ID NO: 794017 - RNA, 19 nt, Artificial Sequence
  Description of Artificial Sequence: Synthetic oligonucleotide
  Antisense strand to SEQ ID NO: 794016
augcaucaggacuaucuca

SEQ ID NO: 794018 - RNA, 19 nt, Artificial Sequence
  Description of Artificial Sequence: Synthetic oligonucleotide
  Sense strand starting at position 1149 of SEQ ID NO: 587462
ugucacuuacucugggaaa

SEQ ID NO: 794019 - RNA, 19 nt, Artificial Sequence
  Description of Artificial Sequence: Synthetic oligonucleotide
  Antisense strand to SEQ ID NO: 794018
uuucccagaguaagugaca

SEQ ID NO: 794020 - RNA, 19 nt, Artificial Sequence
  Description of Artificial Sequence: Synthetic oligonucleotide
  Sense strand starting at position 1151 of SEQ ID NO: 587462
ucacuuacucugggaaaua

SEQ ID NO: 794021 - RNA, 19 nt, Artificial Sequence
  Description of Artificial Sequence: Synthetic oligonucleotide
  Antisense strand to SEQ ID NO: 794020
uauuucccagaguaaguga

SEQ ID NO: 794022 - RNA, 19 nt, Artificial Sequence
  Description of Artificial Sequence: Synthetic oligonucleotide
  Sense strand starting at position 1232 of SEQ ID NO: 587462
cucugaaaguucuuagacu

SEQ ID NO: 794023 - RNA, 19 nt, Artificial Sequence
  Description of Artificial Sequence: Synthetic oligonucleotide
  Antisense strand to SEQ ID NO: 794022
agucuaagaacuuucagag

SEQ ID NO: 794024 - RNA, 19 nt, Artificial Sequence
  Description of Artificial Sequence: Synthetic oligonucleotide
  Sense strand starting at position 1476 of SEQ ID NO: 587462
gagguuuaauguuuacaua

SEQ ID NO: 794025 - RNA, 19 nt, Artificial Sequence
  Description of Artificial Sequence: Synthetic oligonucleotide
  Antisense strand to SEQ ID NO: 794024
uauguaaacauuaaaccuc

SEQ ID NO: 794026 - RNA, 19 nt, Artificial Sequence
  Description of Artificial Sequence: Synthetic oligonucleotide
  Sense strand starting at position 1554 of SEQ ID NO: 587462
uaauuuagaggucgcacuu

SEQ ID NO: 794027 - RNA, 19 nt, Artificial Sequence
  Description of Artificial Sequence: Synthetic oligonucleotide
  Antisense strand to SEQ ID NO: 794026
aagugcgaccucuaaauua

SEQ ID NO: 794028 - RNA, 19 nt, Artificial Sequence
  Description of Artificial Sequence: Synthetic oligonucleotide
  Sense strand starting at position 1571 of SEQ ID NO: 587462
uuacauugacuauggguau

SEQ ID NO: 794029 - RNA, 19 nt, Artificial Sequence
  Description of Artificial Sequence: Synthetic oligonucleotide
  Antisense strand to SEQ ID NO: 794028
auacccauagucaauguaa

SEQ ID NO: 794030 - RNA, 19 nt, Artificial Sequence
  Description of Artificial Sequence: Synthetic oligonucleotide
  Sense strand starting at position 1975 of SEQ ID NO: 587462
ucugaacuggcuugagaug

SEQ ID NO: 794031 - RNA, 19 nt, Artificial Sequence
  Description of Artificial Sequence: Synthetic oligonucleotide
  Antisense strand to SEQ ID NO: 794030
caucucaagccaguucaga

SEQ ID NO: 794032 - RNA, 19 nt, Artificial Sequence
  Description of Artificial Sequence: Synthetic oligonucleotide
  Sense strand starting at position 2139 of SEQ ID NO: 587462
aaggcauauugucuuuaag

SEQ ID NO: 794033 - RNA, 19 nt, Artificial Sequence
  Description of Artificial Sequence: Synthetic oligonucleotide
  Antisense strand to SEQ ID NO: 794032
cuuaaagacaauaugccuu

SEQ ID NO: 794034 - RNA, 19 nt, Artificial Sequence
  Description of Artificial Sequence: Synthetic oligonucleotide
  Sense strand starting at position 2227 of SEQ ID NO: 587462
gccaaaugacgugauagug

SEQ ID NO: 794035 - RNA, 19 nt, Artificial Sequence
  Description of Artificial Sequence: Synthetic oligonucleotide
  Antisense strand to SEQ ID NO: 794034
cacuaucacgucauuuggc

SEQ ID NO: 794036 - RNA, 19 nt, Artificial Sequence
  Description of Artificial Sequence: Synthetic oligonucleotide
  Sense strand starting at position 2248 of SEQ ID NO: 587462
ucaucacuggccuaugaca

SEQ ID NO: 794037 - RNA, 19 nt, Artificial Sequence
  Description of Artificial Sequence: Synthetic oligonucleotide
  Antisense strand to SEQ ID NO: 794036
ugucauaggccagugauga

SEQ ID NO: 794038 - RNA, 19 nt, Artificial Sequence
  Description of Artificial Sequence: Synthetic oligonucleotide
  Sense strand starting at position 2362 of SEQ ID NO: 587462
aaaugaucguguuuaacag

SEQ ID NO: 794039 - RNA, 19 nt, Artificial Sequence
  Description of Artificial Sequence: Synthetic oligonucleotide
  Antisense strand to SEQ ID NO: 794038
cuguuaaacacgaucauuu

SEQ ID NO: 794040 - RNA, 19 nt, Artificial Sequence
  Description of Artificial Sequence: Synthetic oligonucleotide
  Sense strand starting at position 2406 of SEQ ID NO: 587462
gcauccucagaagaucuuu

SEQ ID NO: 794041 - RNA, 19 nt, Artificial Sequence
  Description of Artificial Sequence: Synthetic oligonucleotide
  Antisense strand to SEQ ID NO: 794040
aaagaucuucugaggaugc

SEQ ID NO: 794042 - RNA, 19 nt, Artificial Sequence
  Description of Artificial Sequence: Synthetic oligonucleotide
  Sense strand starting at position 2429 of SEQ ID NO: 587462
uucuguuaucaccagcuga

SEQ ID NO: 794043 - RNA, 19 nt, Artificial Sequence
  Description of Artificial Sequence: Synthetic oligonucleotide
  Antisense strand to SEQ ID NO: 794042
ucagcuggugauaacagaa

SEQ ID NO: 794044 - RNA, 19 nt, Artificial Sequence
  Description of Artificial Sequence: Synthetic oligonucleotide
  Sense strand starting at position 2566 of SEQ ID NO: 587462
ccugacaaugcuggacuaa

SEQ ID NO: 794045 - RNA, 19 nt, Artificial Sequence
  Description of Artificial Sequence: Synthetic oligonucleotide
  Antisense strand to SEQ ID NO: 794044
uuaguccagcauugucagg

SEQ ID NO: 794046 - RNA, 19 nt, Artificial Sequence
  Description of Artificial Sequence: Synthetic oligonucleotide
  Sense strand starting at position 2627 of SEQ ID NO: 587462
acugaacaaugugcucauu

SEQ ID NO: 794047 - RNA, 19 nt, Artificial Sequence
  Description of Artificial Sequence: Synthetic oligonucleotide
  Antisense strand to SEQ ID NO: 794046
aaugagcacauuguucagu

SEQ ID NO: 794048 - RNA, 19 nt, Artificial Sequence
  Description of Artificial Sequence: Synthetic oligonucleotide
  Sense strand starting at position 2970 of SEQ ID NO: 587462
gccucaguaggagagcauu

SEQ ID NO: 794049 - RNA, 19 nt, Artificial Sequence
  Description of Artificial Sequence: Synthetic oligonucleotide
  Antisense strand to SEQ ID NO: 794048
aaugcucuccuacugaggc

SEQ ID NO: 794050 - RNA, 19 nt, Artificial Sequence
  Description of Artificial Sequence: Synthetic oligonucleotide
  Sense strand starting at position 3015 of SEQ ID NO: 587462
auuccaaaucuuugaugug

SEQ ID NO: 794051 - RNA, 19 nt, Artificial Sequence
  Description of Artificial Sequence: Synthetic oligonucleotide
  Antisense strand to SEQ ID NO: 794050
cacaucaaagauuuggaau

SEQ ID NO: 794052 - RNA, 19 nt, Artificial Sequence
  Description of Artificial Sequence: Synthetic oligonucleotide
  Sense strand starting at position 3098 of SEQ ID NO: 587462
cucgaauggcauuacaguu

SEQ ID NO: 794053 - RNA, 19 nt, Artificial Sequence
  Description of Artificial Sequence: Synthetic oligonucleotide
  Antisense strand to SEQ ID NO: 794052
aacuguaaugccauucgag

SEQ ID NO: 794054 - RNA, 19 nt, Artificial Sequence
  Description of Artificial Sequence: Synthetic oligonucleotide
  Sense strand starting at position 3220 of SEQ ID NO: 587462
acugucuugguauaauguu

SEQ ID NO: 794055 - RNA, 19 nt, Artificial Sequence
  Description of Artificial Sequence: Synthetic oligonucleotide
  Antisense strand to SEQ ID NO: 794054
aacauuauaccaagacagu

SEQ ID NO: 794056 - RNA, 19 nt, Artificial Sequence
  Description of Artificial Sequence: Synthetic oligonucleotide
  Sense strand starting at position 3265 of SEQ ID NO: 587462
caauacgugcaggaugaaa

SEQ ID NO: 794057 - RNA, 19 nt, Artificial Sequence
  Description of Artificial Sequence: Synthetic oligonucleotide
  Antisense strand to SEQ ID NO: 794056
uuucauccugcacguauug

SEQ ID NO: 794058 - RNA, 19 nt, Artificial Sequence
  Description of Artificial Sequence: Synthetic oligonucleotide
  Sense strand starting at position 3298 of SEQ ID NO: 587462
gacgcuugaguauaagaua

SEQ ID NO: 794059 - RNA, 19 nt, Artificial Sequence
  Description of Artificial Sequence: Synthetic oligonucleotide
  Antisense strand to SEQ ID NO: 794058
uaucuuauacucaagcguc

SEQ ID NO: 794060 - RNA, 19 nt, Artificial Sequence
  Description of Artificial Sequence: Synthetic oligonucleotide
  Sense strand starting at position 3408 of SEQ ID NO: 587462
agugguuuccuuuagaaag

SEQ ID NO: 794061 - RNA, 19 nt, Artificial Sequence
  Description of Artificial Sequence: Synthetic oligonucleotide
  Antisense strand to SEQ ID NO: 794060
cuuucuaaaggaaaccacu

SEQ ID NO: 794062 - RNA, 19 nt, Artificial Sequence
  Description of Artificial Sequence: Synthetic oligonucleotide
  Sense strand starting at position 3539 of SEQ ID NO: 587462
ggcuuaauuaugugaaaga

SEQ ID NO: 794063 - RNA, 19 nt, Artificial Sequence
  Description of Artificial Sequence: Synthetic oligonucleotide
  Antisense strand to SEQ ID NO: 794062
ucuuucacauaauuaagcc

SEQ ID NO: 794064 - RNA, 19 nt, Artificial Sequence
  Description of Artificial Sequence: Synthetic oligonucleotide
  Sense strand starting at position 3604 of SEQ ID NO: 587462
uuaacauuagcuggaaagu

SEQ ID NO: 794065 - RNA, 19 nt, Artificial Sequence
  Description of Artificial Sequence: Synthetic oligonucleotide
  Antisense strand to SEQ ID NO: 794064
acuuuccagcuaauguuaa

SEQ ID NO: 794066 - RNA, 19 nt, Artificial Sequence
  Description of Artificial Sequence: Synthetic oligonucleotide
  Sense strand starting at position 3619 of SEQ ID NO: 587462
aaguacaauguuggaaaua

SEQ ID NO: 794067 - RNA, 19 nt, Artificial Sequence
  Description of Artificial Sequence: Synthetic oligonucleotide
  Antisense strand to SEQ ID NO: 794066
uauuuccaacauuguacuu

SEQ ID NO: 794068 - RNA, 19 nt, Artificial Sequence
  Description of Artificial Sequence: Synthetic oligonucleotide
  Sense strand starting at position 3660 of SEQ ID NO: 587462
uuugaaaguuugguuagau

SEQ ID NO: 794069 - RNA, 19 nt, Artificial Sequence
  Description of Artificial Sequence: Synthetic oligonucleotide
  Antisense strand to SEQ ID NO: 794068
aucuaaccaaacuuucaaa

SEQ ID NO: 794070 - RNA, 19 nt, Artificial Sequence
  Description of Artificial Sequence: Synthetic oligonucleotide
  Sense strand starting at position 3661 of SEQ ID NO: 587462
uugaaaguuugguuagauu

SEQ ID NO: 794071 - RNA, 19 nt, Artificial Sequence
  Description of Artificial Sequence: Synthetic oligonucleotide
  Antisense strand to SEQ ID NO: 794070
aaucuaaccaaacuuucaa

SEQ ID NO: 794072 - RNA, 19 nt, Artificial Sequence
  Description of Artificial Sequence: Synthetic oligonucleotide
  Sense strand starting at position 3718 of SEQ ID NO: 587462
gucaaacuguuguuaauaa

SEQ ID NO: 794073 - RNA, 19 nt, Artificial Sequence
  Description of Artificial Sequence: Synthetic oligonucleotide
  Antisense strand to SEQ ID NO: 794072
uuauuaacaacaguuugac

SEQ ID NO: 794074 - RNA, 19 nt, Artificial Sequence
  Description of Artificial Sequence: Synthetic oligonucleotide
  Sense strand starting at position 3866 of SEQ ID NO: 587462
gaaaguccauaugcaugau

SEQ ID NO: 794075 - RNA, 19 nt, Artificial Sequence
  Description of Artificial Sequence: Synthetic oligonucleotide
  Antisense strand to SEQ ID NO: 794074
aucaugcauauggacuuuc

SEQ ID NO: 794076 - RNA, 19 nt, Artificial Sequence
  Description of Artificial Sequence: Synthetic oligonucleotide
  Sense strand starting at position 3920 of SEQ ID NO: 587462
uugugucucagggauuauu

SEQ ID NO: 794077 - RNA, 19 nt, Artificial Sequence
  Description of Artificial Sequence: Synthetic oligonucleotide
  Antisense strand to SEQ ID NO: 794076
aauaaucccugagacacaa

SEQ ID NO: 794078 - RNA, 19 nt, Artificial Sequence
  Description of Artificial Sequence: Synthetic oligonucleotide
  Sense strand starting at position 3945 of SEQ ID NO: 587462
auguguuguguguuacugu

SEQ ID NO: 794079 - RNA, 19 nt, Artificial Sequence
  Description of Artificial Sequence: Synthetic oligonucleotide
  Antisense strand to SEQ ID NO: 794078
acaguaacacacaacacau

SEQ ID NO: 794080 - RNA, 19 nt, Artificial Sequence
  Description of Artificial Sequence: Synthetic oligonucleotide
  Sense strand starting at position 52 of SEQ ID NO: 587463
cuuacuuaccgaggaugau

SEQ ID NO: 794081 - RNA, 19 nt, Artificial Sequence
  Description of Artificial Sequence: Synthetic oligonucleotide
  Antisense strand to SEQ ID NO: 794080
aucauccucgguaaguaag

SEQ ID NO: 794082 - RNA, 19 nt, Artificial Sequence
  Description of Artificial Sequence: Synthetic oligonucleotide
  Sense strand starting at position 61 of SEQ ID NO: 587463
cgaggaugauaucugacua

SEQ ID NO: 794083 - RNA, 19 nt, Artificial Sequence
  Description of Artificial Sequence: Synthetic oligonucleotide
  Antisense strand to SEQ ID NO: 794082
uagucagauaucauccucg

SEQ ID NO: 794084 - RNA, 19 nt, Artificial Sequence
  Description of Artificial Sequence: Synthetic oligonucleotide
  Sense strand starting at position 87 of SEQ ID NO: 587463
uuugaaaugugucugaaag

SEQ ID NO: 794085 - RNA, 19 nt, Artificial Sequence
  Description of Artificial Sequence: Synthetic oligonucleotide
  Antisense strand to SEQ ID NO: 794084
cuuucagacacauuucaaa

SEQ ID NO: 794086 - RNA, 19 nt, Artificial Sequence
  Description of Artificial Sequence: Synthetic oligonucleotide
  Sense strand starting at position 88 of SEQ ID NO: 587463
uugaaaugugucugaaaga

SEQ ID NO: 794087 - RNA, 19 nt, Artificial Sequence
  Description of Artificial Sequence: Synthetic oligonucleotide
  Antisense strand to SEQ ID NO: 794086
ucuuucagacacauuucaa

SEQ ID NO: 794088 - RNA, 19 nt, Artificial Sequence
  Description of Artificial Sequence: Synthetic oligonucleotide
  Sense strand starting at position 141 of SEQ ID NO: 587463
uggcgugauuuccucaaac

SEQ ID NO: 794089 - RNA, 19 nt, Artificial Sequence
  Description of Artificial Sequence: Synthetic oligonucleotide
  Antisense strand to SEQ ID NO: 794088
guuugaggaaaucacgcca

SEQ ID NO: 794090 - RNA, 19 nt, Artificial Sequence
  Description of Artificial Sequence: Synthetic oligonucleotide
  Sense strand starting at position 218 of SEQ ID NO: 587463
ugaugacaucuccaucugu

SEQ ID NO: 794091 - RNA, 19 nt, Artificial Sequence
  Description of Artificial Sequence: Synthetic oligonucleotide
  Antisense strand to SEQ ID NO: 794090
acagauggagaugucauca

SEQ ID NO: 794092 - RNA, 19 nt, Artificial Sequence
  Description of Artificial Sequence: Synthetic oligonucleotide
  Sense strand starting at position 507 of SEQ ID NO: 587463
auagacuaucuuugcagaa

SEQ ID NO: 794093 - RNA, 19 nt, Artificial Sequence
  Description of Artificial Sequence: Synthetic oligonucleotide
  Antisense strand to SEQ ID NO: 794092
uucugcaaagauagucuau

SEQ ID NO: 794094 - RNA, 19 nt, Artificial Sequence
  Description of Artificial Sequence: Synthetic oligonucleotide
  Sense strand starting at position 699 of SEQ ID NO: 587463
gccagauauuuagcucuuc

SEQ ID NO: 794095 - RNA, 19 nt, Artificial Sequence
  Description of Artificial Sequence: Synthetic oligonucleotide
  Antisense strand to SEQ ID NO: 794094
gaagagcuaaauaucuggc

SEQ ID NO: 794096 - RNA, 19 nt, Artificial Sequence
  Description of Artificial Sequence: Synthetic oligonucleotide
  Sense strand starting at position 1057 of SEQ ID NO: 587463
cucccuguugaugaacaau

SEQ ID NO: 794097 - RNA, 19 nt, Artificial Sequence
  Description of Artificial Sequence: Synthetic oligonucleotide
  Antisense strand to SEQ ID NO: 794096
auuguucaucaacagggag

SEQ ID NO: 794098 - RNA, 19 nt, Artificial Sequence
  Description of Artificial Sequence: Synthetic oligonucleotide
  Sense strand starting at position 1104 of SEQ ID NO: 587463
auaauuaugcagugaacau

SEQ ID NO: 794099 - RNA, 19 nt, Artificial Sequence
  Description of Artificial Sequence: Synthetic oligonucleotide
  Antisense strand to SEQ ID NO: 794098
auguucacugcauaauuau

SEQ ID NO: 794100 - RNA, 19 nt, Artificial Sequence
  Description of Artificial Sequence: Synthetic oligonucleotide
  Sense strand starting at position 1291 of SEQ ID NO: 587463
auuggauaaugguuccuaa

SEQ ID NO: 794101 - RNA, 19 nt, Artificial Sequence
  Description of Artificial Sequence: Synthetic oligonucleotide
  Antisense strand to SEQ ID NO: 794100
uuaggaaccauuauccaau

SEQ ID NO: 794102 - RNA, 19 nt, Artificial Sequence
  Description of Artificial Sequence: Synthetic oligonucleotide
  Sense strand starting at position 1742 of SEQ ID NO: 587463
gagagauuauugucaacuc

SEQ ID NO: 794103 - RNA, 19 nt, Artificial Sequence
  Description of Artificial Sequence: Synthetic oligonucleotide
  Antisense strand to SEQ ID NO: 794102
gaguugacaauaaucucuc

SEQ ID NO: 794104 - RNA, 19 nt, Artificial Sequence
  Description of Artificial Sequence: Synthetic oligonucleotide
  Sense strand starting at position 1752 of SEQ ID NO: 587463
ugucaacuccaacauaguu

SEQ ID NO: 794105 - RNA, 19 nt, Artificial Sequence
  Description of Artificial Sequence: Synthetic oligonucleotide
  Antisense strand to SEQ ID NO: 794104
aacuauguuggaguugaca

SEQ ID NO: 794106 - RNA, 19 nt, Artificial Sequence
  Description of Artificial Sequence: Synthetic oligonucleotide
  Sense strand starting at position 1775 of SEQ ID NO: 587463
acagaacuauauccuggua

SEQ ID NO: 794107 - RNA, 19 nt, Artificial Sequence
  Description of Artificial Sequence: Synthetic oligonucleotide
  Antisense strand to SEQ ID NO: 794106
uaccaggauauaguucugu

SEQ ID NO: 794108 - RNA, 19 nt, Artificial Sequence
  Description of Artificial Sequence: Synthetic oligonucleotide
  Sense strand starting at position 1896 of SEQ ID NO: 587463
cuggauaugauaugcaagu

SEQ ID NO: 794109 - RNA, 19 nt, Artificial Sequence
  Description of Artificial Sequence: Synthetic oligonucleotide
  Antisense strand to SEQ ID NO: 794108
acuugcauaucauauccag

SEQ ID NO: 794110 - RNA, 19 nt, Artificial Sequence
  Description of Artificial Sequence: Synthetic oligonucleotide
  Sense strand starting at position 1897 of SEQ ID NO: 587463
uggauaugauaugcaagua

SEQ ID NO: 794111 - RNA, 19 nt, Artificial Sequence
  Description of Artificial Sequence: Synthetic oligonucleotide
  Antisense strand to SEQ ID NO: 794110
uacuugcauaucauaucca

SEQ ID NO: 794112 - RNA, 19 nt, Artificial Sequence
  Description of Artificial Sequence: Synthetic oligonucleotide
  Sense strand starting at position 1982 of SEQ ID NO: 587463
cuuggagcuggucaaucau

SEQ ID NO: 794113 - RNA, 19 nt, Artificial Sequence
  Description of Artificial Sequence: Synthetic oligonucleotide
  Antisense strand to SEQ ID NO: 794112
augauugaccagcuccaag

SEQ ID NO: 794114 - RNA, 19 nt, Artificial Sequence
  Description of Artificial Sequence: Synthetic oligonucleotide
  Sense strand starting at position 2000 of SEQ ID NO: 587463
uucugucugagauaaguug

SEQ ID NO: 794115 - RNA, 19 nt, Artificial Sequence
  Description of Artificial Sequence: Synthetic oligonucleotide
  Antisense strand to SEQ ID NO: 794114
caacuuaucucagacagaa

SEQ ID NO: 794116 - RNA, 19 nt, Artificial Sequence
  Description of Artificial Sequence: Synthetic oligonucleotide
  Sense strand starting at position 2060 of SEQ ID NO: 587463
ugaaguaguaugggaacuu

SEQ ID NO: 794117 - RNA, 19 nt, Artificial Sequence
  Description of Artificial Sequence: Synthetic oligonucleotide
  Antisense strand to SEQ ID NO: 794116
aaguucccauacuacuuca

SEQ ID NO: 794118 - RNA, 19 nt, Artificial Sequence
  Description of Artificial Sequence: Synthetic oligonucleotide
  Sense strand starting at position 2159 of SEQ ID NO: 587463
ccuugaguaucaucuaaag

SEQ ID NO: 794119 - RNA, 19 nt, Artificial Sequence
  Description of Artificial Sequence: Synthetic oligonucleotide
  Antisense strand to SEQ ID NO: 794118
cuuuagaugauacucaagg

SEQ ID NO: 794120 - RNA, 19 nt, Artificial Sequence
  Description of Artificial Sequence: Synthetic oligonucleotide
  Sense strand starting at position 2231 of SEQ ID NO: 587463
gaguguuuagcagaacuag

SEQ ID NO: 794121 - RNA, 19 nt, Artificial Sequence
  Description of Artificial Sequence: Synthetic oligonucleotide
  Antisense strand to SEQ ID NO: 794120
cuaguucugcuaaacacuc

SEQ ID NO: 794122 - RNA, 19 nt, Artificial Sequence
  Description of Artificial Sequence: Synthetic oligonucleotide
  Sense strand starting at position 2438 of SEQ ID NO: 587463
guuugaagaucauucucau

SEQ ID NO: 794123 - RNA, 19 nt, Artificial Sequence
  Description of Artificial Sequence: Synthetic oligonucleotide
  Antisense strand to SEQ ID NO: 794122
augagaaugaucuucaaac

SEQ ID NO: 794124 - RNA, 19 nt, Artificial Sequence
  Description of Artificial Sequence: Synthetic oligonucleotide
  Sense strand starting at position 2449 of SEQ ID NO: 587463
auucucauucuugauaguu

SEQ ID NO: 794125 - RNA, 19 nt, Artificial Sequence
  Description of Artificial Sequence: Synthetic oligonucleotide
  Antisense strand to SEQ ID NO: 794124
aacuaucaagaaugagaau

SEQ ID NO: 794126 - RNA, 19 nt, Artificial Sequence
  Description of Artificial Sequence: Synthetic oligonucleotide
  Sense strand starting at position 2491 of SEQ ID NO: 587463
cauagaugguacuugacau

SEQ ID NO: 794127 - RNA, 19 nt, Artificial Sequence
  Description of Artificial Sequence: Synthetic oligonucleotide
  Antisense strand to SEQ ID NO: 794126
augucaaguaccaucuaug

SEQ ID NO: 794128 - RNA, 19 nt, Artificial Sequence
  Description of Artificial Sequence: Synthetic oligonucleotide
  Sense strand starting at position 2555 of SEQ ID NO: 587463
aagucaugugcacaaugaa

SEQ ID NO: 794129 - RNA, 19 nt, Artificial Sequence
  Description of Artificial Sequence: Synthetic oligonucleotide
  Antisense strand to SEQ ID NO: 794128
uucauugugcacaugacuu

SEQ ID NO: 794130 - RNA, 19 nt, Artificial Sequence
  Description of Artificial Sequence: Synthetic oligonucleotide
  Sense strand starting at position 2700 of SEQ ID NO: 587463
gguuuagagagccaucauu

SEQ ID NO: 794131 - RNA, 19 nt, Artificial Sequence
  Description of Artificial Sequence: Synthetic oligonucleotide
  Antisense strand to SEQ ID NO: 794130
aaugauggcucucuaaacc

SEQ ID NO: 794132 - RNA, 19 nt, Artificial Sequence
  Description of Artificial Sequence: Synthetic oligonucleotide
  Sense strand starting at position 2711 of SEQ ID NO: 587463
ccaucauugccaugagaac

SEQ ID NO: 794133 - RNA, 19 nt, Artificial Sequence
  Description of Artificial Sequence: Synthetic oligonucleotide
  Antisense strand to SEQ ID NO: 794132
guucucauggcaaugaugg

SEQ ID NO: 794134 - RNA, 19 nt, Artificial Sequence
  Description of Artificial Sequence: Synthetic oligonucleotide
  Sense strand starting at position 2798 of SEQ ID NO: 587463
cucaguguccacuaauaac

SEQ ID NO: 794135 - RNA, 19 nt, Artificial Sequence
  Description of Artificial Sequence: Synthetic oligonucleotide
  Antisense strand to SEQ ID NO: 794134
guuauuaguggacacugag

SEQ ID NO: 794136 - RNA, 19 nt, Artificial Sequence
  Description of Artificial Sequence: Synthetic oligonucleotide
  Sense strand starting at position 2896 of SEQ ID NO: 587463
ggacaaacaugcccuuaua

SEQ ID NO: 794137 - RNA, 19 nt, Artificial Sequence
  Description of Artificial Sequence: Synthetic oligonucleotide
  Antisense strand to SEQ ID NO: 794136
uauaagggcauguuugucc

SEQ ID NO: 794138 - RNA, 19 nt, Artificial Sequence
  Description of Artificial Sequence: Synthetic oligonucleotide
  Sense strand starting at position 2927 of SEQ ID NO: 587463
cccugaggacaucauuguu

SEQ ID NO: 794139 - RNA, 19 nt, Artificial Sequence
  Description of Artificial Sequence: Synthetic oligonucleotide
  Antisense strand to SEQ ID NO: 794138
aacaaugauguccucaggg

SEQ ID NO: 794140 - RNA, 19 nt, Artificial Sequence
  Description of Artificial Sequence: Synthetic oligonucleotide
  Sense strand starting at position 2930 of SEQ ID NO: 587463
ugaggacaucauuguuaau

SEQ ID NO: 794141 - RNA, 19 nt, Artificial Sequence
  Description of Artificial Sequence: Synthetic oligonucleotide
  Antisense strand to SEQ ID NO: 794140
auuaacaaugauguccuca

SEQ ID NO: 794142 - RNA, 19 nt, Artificial Sequence
  Description of Artificial Sequence: Synthetic oligonucleotide
  Sense strand starting at position 2932 of SEQ ID NO: 587463
aggacaucauuguuaauuc

SEQ ID NO: 794143 - RNA, 19 nt, Artificial Sequence
  Description of Artificial Sequence: Synthetic oligonucleotide
  Antisense strand to SEQ ID NO: 794142
gaauuaacaaugauguccu

SEQ ID NO: 794144 - RNA, 19 nt, Artificial Sequence
  Description of Artificial Sequence: Synthetic oligonucleotide
  Sense strand starting at position 3182 of SEQ ID NO: 587463
cugauuaaauguuccagau

SEQ ID NO: 794145 - RNA, 19 nt, Artificial Sequence
  Description of Artificial Sequence: Synthetic oligonucleotide
  Antisense strand to SEQ ID NO: 794144
aucuggaacauuuaaucag

SEQ ID NO: 794146 - RNA, 19 nt, Artificial Sequence
  Description of Artificial Sequence: Synthetic oligonucleotide
  Sense strand starting at position 3194 of SEQ ID NO: 587463
uccagauaugguugguaaa

SEQ ID NO: 794147 - RNA, 19 nt, Artificial Sequence
  Description of Artificial Sequence: Synthetic oligonucleotide
  Antisense strand to SEQ ID NO: 794146
uuuaccaaccauaucugga

SEQ ID NO: 794148 - RNA, 19 nt, Artificial Sequence
  Description of Artificial Sequence: Synthetic oligonucleotide
  Sense strand starting at position 3195 of SEQ ID NO: 587463
ccagauaugguugguaaag

SEQ ID NO: 794149 - RNA, 19 nt, Artificial Sequence
  Description of Artificial Sequence: Synthetic oligonucleotide
  Antisense strand to SEQ ID NO: 794148
cuuuaccaaccauaucugg

SEQ ID NO: 794150 - RNA, 19 nt, Artificial Sequence
  Description of Artificial Sequence: Synthetic oligonucleotide
  Sense strand starting at position 3570 of SEQ ID NO: 587463
gaguaauuuguacgacugu

SEQ ID NO: 794151 - RNA, 19 nt, Artificial Sequence
  Description of Artificial Sequence: Synthetic oligonucleotide
  Antisense strand to SEQ ID NO: 794150
acagucguacaaauuacuc

SEQ ID NO: 794152 - RNA, 19 nt, Artificial Sequence
  Description of Artificial Sequence: Synthetic oligonucleotide
  Sense strand starting at position 3642 of SEQ ID NO: 587463
aggguaaucugggcacuga

SEQ ID NO: 794153 - RNA, 19 nt, Artificial Sequence
  Description of Artificial Sequence: Synthetic oligonucleotide
  Antisense strand to SEQ ID NO: 794152
ucagugcccagauuacccu

SEQ ID NO: 794154 - RNA, 19 nt, Artificial Sequence
  Description of Artificial Sequence: Synthetic oligonucleotide
  Sense strand starting at position 3643 of SEQ ID NO: 587463
ggguaaucugggcacugaa

SEQ ID NO: 794155 - RNA, 19 nt, Artificial Sequence
  Description of Artificial Sequence: Synthetic oligonucleotide
  Antisense strand to SEQ ID NO: 794154
uucagugcccagauuaccc

SEQ ID NO: 794156 - RNA, 19 nt, Artificial Sequence
  Description of Artificial Sequence: Synthetic oligonucleotide
  Sense strand starting at position 3695 of SEQ ID NO: 587463
gucgaaugugcugccacau

SEQ ID NO: 794157 - RNA, 19 nt, Artificial Sequence
  Description of Artificial Sequence: Synthetic oligonucleotide
  Antisense strand to SEQ ID NO: 794156
auguggcagcacauucgac

SEQ ID NO: 794158 - RNA, 19 nt, Artificial Sequence
  Description of Artificial Sequence: Synthetic oligonucleotide
  Sense strand starting at position 3761 of SEQ ID NO: 587463
agaucaccuccuugaagau

SEQ ID NO: 794159 - RNA, 19 nt, Artificial Sequence
  Description of Artificial Sequence: Synthetic oligonucleotide
  Antisense strand to SEQ ID NO: 794158
aucuucaaggaggugaucu

SEQ ID NO: 794160 - RNA, 19 nt, Artificial Sequence
  Description of Artificial Sequence: Synthetic oligonucleotide
  Sense strand starting at position 26 of SEQ ID NO: 587464
gugauaucauugcuaauaa

SEQ ID NO: 794161 - RNA, 19 nt, Artificial Sequence
  Description of Artificial Sequence: Synthetic oligonucleotide
  Antisense strand to SEQ ID NO: 794160
uuauuagcaaugauaucac

SEQ ID NO: 794162 - RNA, 19 nt, Artificial Sequence
  Description of Artificial Sequence: Synthetic oligonucleotide
  Sense strand starting at position 64 of SEQ ID NO: 587464
agggacuagucaucaaauu

SEQ ID NO: 794163 - RNA, 19 nt, Artificial Sequence
  Description of Artificial Sequence: Synthetic oligonucleotide
  Antisense strand to SEQ ID NO: 794162
aauuugaugacuagucccu

SEQ ID NO: 794164 - RNA, 19 nt, Artificial Sequence
  Description of Artificial Sequence: Synthetic oligonucleotide
  Sense strand starting at position 208 of SEQ ID NO: 587464
gugcaagguauggaaugaa

SEQ ID NO: 794165 - RNA, 19 nt, Artificial Sequence
  Description of Artificial Sequence: Synthetic oligonucleotide
  Antisense strand to SEQ ID NO: 794164
uucauuccauaccuugcac

SEQ ID NO: 794166 - RNA, 19 nt, Artificial Sequence
  Description of Artificial Sequence: Synthetic oligonucleotide
  Sense strand starting at position 281 of SEQ ID NO: 587464
guuuauggcagucauagau

SEQ ID NO: 794167 - RNA, 19 nt, Artificial Sequence
  Description of Artificial Sequence: Synthetic oligonucleotide
  Antisense strand to SEQ ID NO: 794166
aucuaugacugccauaaac

SEQ ID NO: 794168 - RNA, 19 nt, Artificial Sequence
  Description of Artificial Sequence: Synthetic oligonucleotide
  Sense strand starting at position 311 of SEQ ID NO: 587464
uuuaaacaugugcauguaa

SEQ ID NO: 794169 - RNA, 19 nt, Artificial Sequence
  Description of Artificial Sequence: Synthetic oligonucleotide
  Antisense strand to SEQ ID NO: 794168
uuacaugcacauguuuaaa

SEQ ID NO: 794170 - RNA, 19 nt, Artificial Sequence
  Description of Artificial Sequence: Synthetic oligonucleotide
  Sense strand starting at position 537 of SEQ ID NO: 587464
aacugagugugauucuaga

SEQ ID NO: 794171 - RNA, 19 nt, Artificial Sequence
  Description of Artificial Sequence: Synthetic oligonucleotide
  Antisense strand to SEQ ID NO: 794170
ucuagaaucacacucaguu

SEQ ID NO: 794172 - RNA, 19 nt, Artificial Sequence
  Description of Artificial Sequence: Synthetic oligonucleotide
  Sense strand starting at position 545 of SEQ ID NO: 587464
gugauucuagaaugacuga

SEQ ID NO: 794173 - RNA, 19 nt, Artificial Sequence
  Description of Artificial Sequence: Synthetic oligonucleotide
  Antisense strand to SEQ ID NO: 794172
ucagucauucuagaaucac

SEQ ID NO: 794174 - RNA, 19 nt, Artificial Sequence
  Description of Artificial Sequence: Synthetic oligonucleotide
  Sense strand starting at position 1031 of SEQ ID NO: 587464
caguucugacuuuauugga

SEQ ID NO: 794175 - RNA, 19 nt, Artificial Sequence
  Description of Artificial Sequence: Synthetic oligonucleotide
  Antisense strand to SEQ ID NO: 794174
uccaauaaagucagaacug

SEQ ID NO: 794176 - RNA, 19 nt, Artificial Sequence
  Description of Artificial Sequence: Synthetic oligonucleotide
  Sense strand starting at position 1039 of SEQ ID NO: 587464
acuuuauuggacugucaug

SEQ ID NO: 794177 - RNA, 19 nt, Artificial Sequence
  Description of Artificial Sequence: Synthetic oligonucleotide
  Antisense strand to SEQ ID NO: 794176
caugacaguccaauaaagu

SEQ ID NO: 794178 - RNA, 19 nt, Artificial Sequence
  Description of Artificial Sequence: Synthetic oligonucleotide
  Sense strand starting at position 1127 of SEQ ID NO: 587464
ccuccauaguuaucugaga

SEQ ID NO: 794179 - RNA, 19 nt, Artificial Sequence
  Description of Artificial Sequence: Synthetic oligonucleotide
  Antisense strand to SEQ ID NO: 794178
ucucagauaacuauggagg

SEQ ID NO: 794180 - RNA, 19 nt, Artificial Sequence
  Description of Artificial Sequence: Synthetic oligonucleotide
  Sense strand starting at position 1128 of SEQ ID NO: 587464
cuccauaguuaucugagag

SEQ ID NO: 794181 - RNA, 19 nt, Artificial Sequence
  Description of Artificial Sequence: Synthetic oligonucleotide
  Antisense strand to SEQ ID NO: 794180
cucucagauaacuauggag

SEQ ID NO: 794182 - RNA, 19 nt, Artificial Sequence
  Description of Artificial Sequence: Synthetic oligonucleotide
  Sense strand starting at position 1156 of SEQ ID NO: 587464
caaugacaugcugacaguu

SEQ ID NO: 794183 - RNA, 19 nt, Artificial Sequence
  Description of Artificial Sequence: Synthetic oligonucleotide
  Antisense strand to SEQ ID NO: 794182
aacugucagcaugucauug

SEQ ID NO: 794184 - RNA, 19 nt, Artificial Sequence
  Description of Artificial Sequence: Synthetic oligonucleotide
  Sense strand starting at position 1254 of SEQ ID NO: 587464
uugauaauucuauggcaua

SEQ ID NO: 794185 - RNA, 19 nt, Artificial Sequence
  Description of Artificial Sequence: Synthetic oligonucleotide
  Antisense strand to SEQ ID NO: 794184
uaugccauagaauuaucaa

SEQ ID NO: 794186 - RNA, 19 nt, Artificial Sequence
  Description of Artificial Sequence: Synthetic oligonucleotide
  Sense strand starting at position 1403 of SEQ ID NO: 587464
cuaacauacgguuacugaa

SEQ ID NO: 794187 - RNA, 19 nt, Artificial Sequence
  Description of Artificial Sequence: Synthetic oligonucleotide
  Antisense strand to SEQ ID NO: 794186
uucaguaaccguauguuag

SEQ ID NO: 794188 - RNA, 19 nt, Artificial Sequence
  Description of Artificial Sequence: Synthetic oligonucleotide
  Sense strand starting at position 1891 of SEQ ID NO: 587464
ggagacaaguuuccaggua

SEQ ID NO: 794189 - RNA, 19 nt, Artificial Sequence
  Description of Artificial Sequence: Synthetic oligonucleotide
  Antisense strand to SEQ ID NO: 794188
uaccuggaaacuugucucc

SEQ ID NO: 794190 - RNA, 19 nt, Artificial Sequence
  Description of Artificial Sequence: Synthetic oligonucleotide
  Sense strand starting at position 1998 of SEQ ID NO: 587464
cccucuugaguccagauaa

SEQ ID NO: 794191 - RNA, 19 nt, Artificial Sequence
  Description of Artificial Sequence: Synthetic oligonucleotide
  Antisense strand to SEQ ID NO: 794190
uuaucuggacucaagaggg

SEQ ID NO: 794192 - RNA, 19 nt, Artificial Sequence
  Description of Artificial Sequence: Synthetic oligonucleotide
  Sense strand starting at position 2161 of SEQ ID NO: 587464
ggcaaauagucacuggacu

SEQ ID NO: 794193 - RNA, 19 nt, Artificial Sequence
  Description of Artificial Sequence: Synthetic oligonucleotide
  Antisense strand to SEQ ID NO: 794192
aguccagugacuauuugcc

SEQ ID NO: 794194 - RNA, 19 nt, Artificial Sequence
  Description of Artificial Sequence: Synthetic oligonucleotide
  Sense strand starting at position 2162 of SEQ ID NO: 587464
gcaaauagucacuggacuu

SEQ ID NO: 794195 - RNA, 19 nt, Artificial Sequence
  Description of Artificial Sequence: Synthetic oligonucleotide
  Antisense strand to SEQ ID NO: 794194
aaguccagugacuauuugc

SEQ ID NO: 794196 - RNA, 19 nt, Artificial Sequence
  Description of Artificial Sequence: Synthetic oligonucleotide
  Sense strand starting at position 2245 of SEQ ID NO: 587464
ugcucagugcacugaauuu

SEQ ID NO: 794197 - RNA, 19 nt, Artificial Sequence
  Description of Artificial Sequence: Synthetic oligonucleotide
  Antisense strand to SEQ ID NO: 794196
aaauucagugcacugagca

SEQ ID NO: 794198 - RNA, 19 nt, Artificial Sequence
  Description of Artificial Sequence: Synthetic oligonucleotide
  Sense strand starting at position 2317 of SEQ ID NO: 587464
ugagauaaacuucgaccuu

SEQ ID NO: 794199 - RNA, 19 nt, Artificial Sequence
  Description of Artificial Sequence: Synthetic oligonucleotide
  Antisense strand to SEQ ID NO: 794198
aaggucgaaguuuaucuca

SEQ ID NO: 794200 - RNA, 19 nt, Artificial Sequence
  Description of Artificial Sequence: Synthetic oligonucleotide
  Sense strand starting at position 2402 of SEQ ID NO: 587464
uaagaacugccucggagau

SEQ ID NO: 794201 - RNA, 19 nt, Artificial Sequence
  Description of Artificial Sequence: Synthetic oligonucleotide
  Antisense strand to SEQ ID NO: 794200
aucuccgaggcaguucuua

SEQ ID NO: 794202 - RNA, 19 nt, Artificial Sequence
  Description of Artificial Sequence: Synthetic oligonucleotide
  Sense strand starting at position 2403 of SEQ ID NO: 587464
aagaacugccucggagauu

SEQ ID NO: 794203 - RNA, 19 nt, Artificial Sequence
  Description of Artificial Sequence: Synthetic oligonucleotide
  Antisense strand to SEQ ID NO: 794202
aaucuccgaggcaguucuu

SEQ ID NO: 794204 - RNA, 19 nt, Artificial Sequence
  Description of Artificial Sequence: Synthetic oligonucleotide
  Sense strand starting at position 2464 of SEQ ID NO: 587464
gaauuaccuggcgauuaaa

SEQ ID NO: 794205 - RNA, 19 nt, Artificial Sequence
  Description of Artificial Sequence: Synthetic oligonucleotide
  Antisense strand to SEQ ID NO: 794204
uuuaaucgccagguaauuc

SEQ ID NO: 794206 - RNA, 19 nt, Artificial Sequence
  Description of Artificial Sequence: Synthetic oligonucleotide
  Sense strand starting at position 2569 of SEQ ID NO: 587464
accaguaaucuggacugua

SEQ ID NO: 794207 - RNA, 19 nt, Artificial Sequence
  Description of Artificial Sequence: Synthetic oligonucleotide
  Antisense strand to SEQ ID NO: 794206
uacaguccagauuacuggu

SEQ ID NO: 794208 - RNA, 19 nt, Artificial Sequence
  Description of Artificial Sequence: Synthetic oligonucleotide
  Sense strand starting at position 2572 of SEQ ID NO: 587464
aguaaucuggacuguagau

SEQ ID NO: 794209 - RNA, 19 nt, Artificial Sequence
  Description of Artificial Sequence: Synthetic oligonucleotide
  Antisense strand to SEQ ID NO: 794208
aucuacaguccagauuacu

SEQ ID NO: 794210 - RNA, 19 nt, Artificial Sequence
  Description of Artificial Sequence: Synthetic oligonucleotide
  Sense strand starting at position 2729 of SEQ ID NO: 587464
acuguauuauaaguucuga

SEQ ID NO: 794211 - RNA, 19 nt, Artificial Sequence
  Description of Artificial Sequence: Synthetic oligonucleotide
  Antisense strand to SEQ ID NO: 794210
ucagaacuuauaauacagu

SEQ ID NO: 794212 - RNA, 19 nt, Artificial Sequence
  Description of Artificial Sequence: Synthetic oligonucleotide
  Sense strand starting at position 2813 of SEQ ID NO: 587464
gugaccaaucugugaaacu

SEQ ID NO: 794213 - RNA, 19 nt, Artificial Sequence
  Description of Artificial Sequence: Synthetic oligonucleotide
  Antisense strand to SEQ ID NO: 794212
aguuucacagauuggucac

SEQ ID NO: 794214 - RNA, 19 nt, Artificial Sequence
  Description of Artificial Sequence: Synthetic oligonucleotide
  Sense strand starting at position 2906 of SEQ ID NO: 587464
gcaaauucccacgaacaua

SEQ ID NO: 794215 - RNA, 19 nt, Artificial Sequence
  Description of Artificial Sequence: Synthetic oligonucleotide
  Antisense strand to SEQ ID NO: 794214
uauguucgugggaauuugc

SEQ ID NO: 794216 - RNA, 19 nt, Artificial Sequence
  Description of Artificial Sequence: Synthetic oligonucleotide
  Sense strand starting at position 2982 of SEQ ID NO: 587464
uguguaucccacugaacag

SEQ ID NO: 794217 - RNA, 19 nt, Artificial Sequence
  Description of Artificial Sequence: Synthetic oligonucleotide
  Antisense strand to SEQ ID NO: 794216
cuguucagugggauacaca

SEQ ID NO: 794218 - RNA, 19 nt, Artificial Sequence
  Description of Artificial Sequence: Synthetic oligonucleotide
  Sense strand starting at position 2983 of SEQ ID NO: 587464
guguaucccacugaacagu

SEQ ID NO: 794219 - RNA, 19 nt, Artificial Sequence
  Description of Artificial Sequence: Synthetic oligonucleotide
  Antisense strand to SEQ ID NO: 794218
acuguucagugggauacac

SEQ ID NO: 794220 - RNA, 19 nt, Artificial Sequence
  Description of Artificial Sequence: Synthetic oligonucleotide
  Sense strand starting at position 3079 of SEQ ID NO: 587464
uucuguaagcaacaggauu

SEQ ID NO: 794221 - RNA, 19 nt, Artificial Sequence
  Description of Artificial Sequence: Synthetic oligonucleotide
  Antisense strand to SEQ ID NO: 794220
aauccuguugcuuacagaa

SEQ ID NO: 794222 - RNA, 19 nt, Artificial Sequence
  Description of Artificial Sequence: Synthetic oligonucleotide
  Sense strand starting at position 3106 of SEQ ID NO: 587464
gaaagcaaguugcuaugaa

SEQ ID NO: 794223 - RNA, 19 nt, Artificial Sequence
  Description of Artificial Sequence: Synthetic oligonucleotide
  Antisense strand to SEQ ID NO: 794222
uucauagcaacuugcuuuc

SEQ ID NO: 794224 - RNA, 19 nt, Artificial Sequence
  Description of Artificial Sequence: Synthetic oligonucleotide
  Sense strand starting at position 3126 of SEQ ID NO: 587464
gccugauaaaguuagguuu

SEQ ID NO: 794225 - RNA, 19 nt, Artificial Sequence
  Description of Artificial Sequence: Synthetic oligonucleotide
  Antisense strand to SEQ ID NO: 794224
aaaccuaacuuuaucaggc

SEQ ID NO: 794226 - RNA, 19 nt, Artificial Sequence
  Description of Artificial Sequence: Synthetic oligonucleotide
  Sense strand starting at position 3150 of SEQ ID NO: 587464
uuguuaauggcacaguaau

SEQ ID NO: 794227 - RNA, 19 nt, Artificial Sequence
  Description of Artificial Sequence: Synthetic oligonucleotide
  Antisense strand to SEQ ID NO: 794226
auuacugugccauuaacaa

SEQ ID NO: 794228 - RNA, 19 nt, Artificial Sequence
  Description of Artificial Sequence: Synthetic oligonucleotide
  Sense strand starting at position 3163 of SEQ ID NO: 587464
aguaauaacgcucaucuac

SEQ ID NO: 794229 - RNA, 19 nt, Artificial Sequence
  Description of Artificial Sequence: Synthetic oligonucleotide
  Antisense strand to SEQ ID NO: 794228
guagaugagcguuauuacu

SEQ ID NO: 794230 - RNA, 19 nt, Artificial Sequence
  Description of Artificial Sequence: Synthetic oligonucleotide
  Sense strand starting at position 3184 of SEQ ID NO: 587464
uggacuguugcauagauac

SEQ ID NO: 794231 - RNA, 19 nt, Artificial Sequence
  Description of Artificial Sequence: Synthetic oligonucleotide
  Antisense strand to SEQ ID NO: 794230
guaucuaugcaacagucca

SEQ ID NO: 794232 - RNA, 19 nt, Artificial Sequence
  Description of Artificial Sequence: Synthetic oligonucleotide
  Sense strand starting at position 3305 of SEQ ID NO: 587464
aucuuaauagagggauguu

SEQ ID NO: 794233 - RNA, 19 nt, Artificial Sequence
  Description of Artificial Sequence: Synthetic oligonucleotide
  Antisense strand to SEQ ID NO: 794232
aacaucccucuauuaagau

SEQ ID NO: 794234 - RNA, 19 nt, Artificial Sequence
  Description of Artificial Sequence: Synthetic oligonucleotide
  Sense strand starting at position 3383 of SEQ ID NO: 587464
acauacuauguguauucua

SEQ ID NO: 794235 - RNA, 19 nt, Artificial Sequence
  Description of Artificial Sequence: Synthetic oligonucleotide
  Antisense strand to SEQ ID NO: 794234
uagaauacacauaguaugu

SEQ ID NO: 794236 - RNA, 19 nt, Artificial Sequence
  Description of Artificial Sequence: Synthetic oligonucleotide
  Sense strand starting at position 3485 of SEQ ID NO: 587464
uguaauaaagucuggacuu

SEQ ID NO: 794237 - RNA, 19 nt, Artificial Sequence
  Description of Artificial Sequence: Synthetic oligonucleotide
  Antisense strand to SEQ ID NO: 794236
aaguccagacuuuauuaca

SEQ ID NO: 794238 - RNA, 19 nt, Artificial Sequence
  Description of Artificial Sequence: Synthetic oligonucleotide
  Sense strand starting at position 3707 of SEQ ID NO: 587464
ccaccacaugccuggauaa

SEQ ID NO: 794239 - RNA, 19 nt, Artificial Sequence
  Description of Artificial Sequence: Synthetic oligonucleotide
  Antisense strand to SEQ ID NO: 794238
uuauccaggcauguggugg

SEQ ID NO: 794240 - RNA, 19 nt, Artificial Sequence
  Description of Artificial Sequence: Synthetic oligonucleotide
  Sense strand starting at position 79 of SEQ ID NO: 587465
gugccuuaugcuguuaauu

SEQ ID NO: 794241 - RNA, 19 nt, Artificial Sequence
  Description of Artificial Sequence: Synthetic oligonucleotide
  Antisense strand to SEQ ID NO: 794240
aauuaacagcauaaggcac

SEQ ID NO: 794242 - RNA, 19 nt, Artificial Sequence
  Description of Artificial Sequence: Synthetic oligonucleotide
  Sense strand starting at position 100 of SEQ ID NO: 587465
gucauuauguacucucacu

SEQ ID NO: 794243 - RNA, 19 nt, Artificial Sequence
  Description of Artificial Sequence: Synthetic oligonucleotide
  Antisense strand to SEQ ID NO: 794242
agugagaguacauaaugac

SEQ ID NO: 794244 - RNA, 19 nt, Artificial Sequence
  Description of Artificial Sequence: Synthetic oligonucleotide
  Sense strand starting at position 108 of SEQ ID NO: 587465
guacucucacuuuggacaa

SEQ ID NO: 794245 - RNA, 19 nt, Artificial Sequence
  Description of Artificial Sequence: Synthetic oligonucleotide
  Antisense strand to SEQ ID NO: 794244
uuguccaaagugagaguac

SEQ ID NO: 794246 - RNA, 19 nt, Artificial Sequence
  Description of Artificial Sequence: Synthetic oligonucleotide
  Sense strand starting at position 153 of SEQ ID NO: 587465
ugugacugcucccuaauga

SEQ ID NO: 794247 - RNA, 19 nt, Artificial Sequence
  Description of Artificial Sequence: Synthetic oligonucleotide
  Antisense strand to SEQ ID NO: 794246
ucauuagggagcagucaca

SEQ ID NO: 794248 - RNA, 19 nt, Artificial Sequence
  Description of Artificial Sequence: Synthetic oligonucleotide
  Sense strand starting at position 154 of SEQ ID NO: 587465
gugacugcucccuaaugaa

SEQ ID NO: 794249 - RNA, 19 nt, Artificial Sequence
  Description of Artificial Sequence: Synthetic oligonucleotide
  Antisense strand to SEQ ID NO: 794248
uucauuagggagcagucac

SEQ ID NO: 794250 - RNA, 19 nt, Artificial Sequence
  Description of Artificial Sequence: Synthetic oligonucleotide
  Sense strand starting at position 240 of SEQ ID NO: 587465
gcuuucuacaggcagagaa

SEQ ID NO: 794251 - RNA, 19 nt, Artificial Sequence
  Description of Artificial Sequence: Synthetic oligonucleotide
  Antisense strand to SEQ ID NO: 794250
uucucugccuguagaaagc

SEQ ID NO: 794252 - RNA, 19 nt, Artificial Sequence
  Description of Artificial Sequence: Synthetic oligonucleotide
  Sense strand starting at position 264 of SEQ ID NO: 587465
uucuuugggccuuaaacuu

SEQ ID NO: 794253 - RNA, 19 nt, Artificial Sequence
  Description of Artificial Sequence: Synthetic oligonucleotide
  Antisense strand to SEQ ID NO: 794252
aaguuuaaggcccaaagaa

SEQ ID NO: 794254 - RNA, 19 nt, Artificial Sequence
  Description of Artificial Sequence: Synthetic oligonucleotide
  Sense strand starting at position 350 of SEQ ID NO: 587465
uuuccagagucaucuugau

SEQ ID NO: 794255 - RNA, 19 nt, Artificial Sequence
  Description of Artificial Sequence: Synthetic oligonucleotide
  Antisense strand to SEQ ID NO: 794254
aucaagaugacucuggaaa

SEQ ID NO: 794256 - RNA, 19 nt, Artificial Sequence
  Description of Artificial Sequence: Synthetic oligonucleotide
  Sense strand starting at position 354 of SEQ ID NO: 587465
cagagucaucuugauguag

SEQ ID NO: 794257 - RNA, 19 nt, Artificial Sequence
  Description of Artificial Sequence: Synthetic oligonucleotide
  Antisense strand to SEQ ID NO: 794256
cuacaucaagaugacucug

SEQ ID NO: 794258 - RNA, 19 nt, Artificial Sequence
  Description of Artificial Sequence: Synthetic oligonucleotide
  Sense strand starting at position 358 of SEQ ID NO: 587465
gucaucuugauguagguuu

SEQ ID NO: 794259 - RNA, 19 nt, Artificial Sequence
  Description of Artificial Sequence: Synthetic oligonucleotide
  Antisense strand to SEQ ID NO: 794258
aaaccuacaucaagaugac

SEQ ID NO: 794260 - RNA, 19 nt, Artificial Sequence
  Description of Artificial Sequence: Synthetic oligonucleotide
  Sense strand starting at position 458 of SEQ ID NO: 587465
ccacauggucuuggauaaa

SEQ ID NO: 794261 - RNA, 19 nt, Artificial Sequence
  Description of Artificial Sequence: Synthetic oligonucleotide
  Antisense strand to SEQ ID NO: 794260
uuuauccaagaccaugugg

SEQ ID NO: 794262 - RNA, 19 nt, Artificial Sequence
  Description of Artificial Sequence: Synthetic oligonucleotide
  Sense strand starting at position 553 of SEQ ID NO: 587465
gagcaaccggguuaacauu

SEQ ID NO: 794263 - RNA, 19 nt, Artificial Sequence
  Description of Artificial Sequence: Synthetic oligonucleotide
  Antisense strand to SEQ ID NO: 794262
aauguuaacccgguugcuc

SEQ ID NO: 794264 - RNA, 19 nt, Artificial Sequence
  Description of Artificial Sequence: Synthetic oligonucleotide
  Sense strand starting at position 676 of SEQ ID NO: 587465
ccuaguggccugugacaaa

SEQ ID NO: 794265 - RNA, 19 nt, Artificial Sequence
  Description of Artificial Sequence: Synthetic oligonucleotide
  Antisense strand to SEQ ID NO: 794264
uuugucacaggccacuagg

SEQ ID NO: 794266 - RNA, 19 nt, Artificial Sequence
  Description of Artificial Sequence: Synthetic oligonucleotide
  Sense strand starting at position 707 of SEQ ID NO: 587465
uuugcaauuuauccagugu

SEQ ID NO: 794267 - RNA, 19 nt, Artificial Sequence
  Description of Artificial Sequence: Synthetic oligonucleotide
  Antisense strand to SEQ ID NO: 794266
acacuggauaaauugcaaa

SEQ ID NO: 794268 - RNA, 19 nt, Artificial Sequence
  Description of Artificial Sequence: Synthetic oligonucleotide
  Sense strand starting at position 1563 of SEQ ID NO: 587465
ggaccaccuccggaaucuu

SEQ ID NO: 794269 - RNA, 19 nt, Artificial Sequence
  Description of Artificial Sequence: Synthetic oligonucleotide
  Antisense strand to SEQ ID NO: 794268
aagauuccggagguggucc

SEQ ID NO: 794270 - RNA, 19 nt, Artificial Sequence
  Description of Artificial Sequence: Synthetic oligonucleotide
  Sense strand starting at position 2362 of SEQ ID NO: 587465
ggcuguuugguuuauugau

SEQ ID NO: 794271 - RNA, 19 nt, Artificial Sequence
  Description of Artificial Sequence: Synthetic oligonucleotide
  Antisense strand to SEQ ID NO: 794270
aucaauaaaccaaacagcc

SEQ ID NO: 794272 - RNA, 19 nt, Artificial Sequence
  Description of Artificial Sequence: Synthetic oligonucleotide
  Sense strand starting at position 2508 of SEQ ID NO: 587465
ugaguugagcuagaggauu

SEQ ID NO: 794273 - RNA, 19 nt, Artificial Sequence
  Description of Artificial Sequence: Synthetic oligonucleotide
  Antisense strand to SEQ ID NO: 794272
aauccucuagcucaacuca

SEQ ID NO: 794274 - RNA, 19 nt, Artificial Sequence
  Description of Artificial Sequence: Synthetic oligonucleotide
  Sense strand starting at position 2545 of SEQ ID NO: 587465
gggacgucucgggaagugu

SEQ ID NO: 794275 - RNA, 19 nt, Artificial Sequence
  Description of Artificial Sequence: Synthetic oligonucleotide
  Antisense strand to SEQ ID NO: 794274
acacuucccgagacguccc

SEQ ID NO: 794276 - RNA, 19 nt, Artificial Sequence
  Description of Artificial Sequence: Synthetic oligonucleotide
  Sense strand starting at position 2746 of SEQ ID NO: 587465
uacacaugugcguagaaca

SEQ ID NO: 794277 - RNA, 19 nt, Artificial Sequence
  Description of Artificial Sequence: Synthetic oligonucleotide
  Antisense strand to SEQ ID NO: 794276
uguucuacgcacaugugua

SEQ ID NO: 794278 - RNA, 19 nt, Artificial Sequence
  Description of Artificial Sequence: Synthetic oligonucleotide
  Sense strand starting at position 2860 of SEQ ID NO: 587465
caggcuggccguuucgaua

SEQ ID NO: 794279 - RNA, 19 nt, Artificial Sequence
  Description of Artificial Sequence: Synthetic oligonucleotide
  Antisense strand to SEQ ID NO: 794278
uaucgaaacggccagccug

SEQ ID NO: 794280 - RNA, 19 nt, Artificial Sequence
  Description of Artificial Sequence: Synthetic oligonucleotide
  Sense strand starting at position 2867 of SEQ ID NO: 587465
gccguuucgauagcgguaa

SEQ ID NO: 794281 - RNA, 19 nt, Artificial Sequence
  Description of Artificial Sequence: Synthetic oligonucleotide
  Antisense strand to SEQ ID NO: 794280
uuaccgcuaucgaaacggc

SEQ ID NO: 794282 - RNA, 19 nt, Artificial Sequence
  Description of Artificial Sequence: Synthetic oligonucleotide
  Sense strand starting at position 2878 of SEQ ID NO: 587465
agcgguaaugugcauuuau

SEQ ID NO: 794283 - RNA, 19 nt, Artificial Sequence
  Description of Artificial Sequence: Synthetic oligonucleotide
  Antisense strand to SEQ ID NO: 794282
auaaaugcacauuaccgcu

SEQ ID NO: 794284 - RNA, 19 nt, Artificial Sequence
  Description of Artificial Sequence: Synthetic oligonucleotide
  Sense strand starting at position 2888 of SEQ ID NO: 587465
ugcauuuauugaguagcua

SEQ ID NO: 794285 - RNA, 19 nt, Artificial Sequence
  Description of Artificial Sequence: Synthetic oligonucleotide
  Antisense strand to SEQ ID NO: 794284
uagcuacucaauaaaugca

SEQ ID NO: 794286 - RNA, 19 nt, Artificial Sequence
  Description of Artificial Sequence: Synthetic oligonucleotide
  Sense strand starting at position 2892 of SEQ ID NO: 587465
uuuauugaguagcuacuaa

SEQ ID NO: 794287 - RNA, 19 nt, Artificial Sequence
  Description of Artificial Sequence: Synthetic oligonucleotide
  Antisense strand to SEQ ID NO: 794286
uuaguagcuacucaauaaa

SEQ ID NO: 794288 - RNA, 19 nt, Artificial Sequence
  Description of Artificial Sequence: Synthetic oligonucleotide
  Sense strand starting at position 2940 of SEQ ID NO: 587465
agacauuggucuccacuau

SEQ ID NO: 794289 - RNA, 19 nt, Artificial Sequence
  Description of Artificial Sequence: Synthetic oligonucleotide
  Antisense strand to SEQ ID NO: 794288
auaguggagaccaaugucu

SEQ ID NO: 794290 - RNA, 19 nt, Artificial Sequence
  Description of Artificial Sequence: Synthetic oligonucleotide
  Sense strand starting at position 3012 of SEQ ID NO: 587465
uaguucucacagugguaga

SEQ ID NO: 794291 - RNA, 19 nt, Artificial Sequence
  Description of Artificial Sequence: Synthetic oligonucleotide
  Antisense strand to SEQ ID NO: 794290
ucuaccacugugagaacua

SEQ ID NO: 794292 - RNA, 19 nt, Artificial Sequence
  Description of Artificial Sequence: Synthetic oligonucleotide
  Sense strand starting at position 3013 of SEQ ID NO: 587465
aguucucacagugguagaa

SEQ ID NO: 794293 - RNA, 19 nt, Artificial Sequence
  Description of Artificial Sequence: Synthetic oligonucleotide
  Antisense strand to SEQ ID NO: 794292
uucuaccacugugagaacu

SEQ ID NO: 794294 - RNA, 19 nt, Artificial Sequence
  Description of Artificial Sequence: Synthetic oligonucleotide
  Sense strand starting at position 3327 of SEQ ID NO: 587465
ccaauaagggucugcaugu

SEQ ID NO: 794295 - RNA, 19 nt, Artificial Sequence
  Description of Artificial Sequence: Synthetic oligonucleotide
  Antisense strand to SEQ ID NO: 794294
acaugcagacccuuauugg

SEQ ID NO: 794296 - RNA, 19 nt, Artificial Sequence
  Description of Artificial Sequence: Synthetic oligonucleotide
  Sense strand starting at position 3356 of SEQ ID NO: 587465
aggcccuacugcucagaaa

SEQ ID NO: 794297 - RNA, 19 nt, Artificial Sequence
  Description of Artificial Sequence: Synthetic oligonucleotide
  Antisense strand to SEQ ID NO: 794296
uuucugagcaguagggccu

SEQ ID NO: 794298 - RNA, 19 nt, Artificial Sequence
  Description of Artificial Sequence: Synthetic oligonucleotide
  Sense strand starting at position 3373 of SEQ ID NO: 587465
aaauauucguguucugagg

SEQ ID NO: 794299 - RNA, 19 nt, Artificial Sequence
  Description of Artificial Sequence: Synthetic oligonucleotide
  Antisense strand to SEQ ID NO: 794298
ccucagaacacgaauauuu

SEQ ID NO: 794300 - RNA, 19 nt, Artificial Sequence
  Description of Artificial Sequence: Synthetic oligonucleotide
  Sense strand starting at position 3391 of SEQ ID NO: 587465
ggaagcugagugcaucauu

SEQ ID NO: 794301 - RNA, 19 nt, Artificial Sequence
  Description of Artificial Sequence: Synthetic oligonucleotide
  Antisense strand to SEQ ID NO: 794300
aaugaugcacucagcuucc

SEQ ID NO: 794302 - RNA, 19 nt, Artificial Sequence
  Description of Artificial Sequence: Synthetic oligonucleotide
  Sense strand starting at position 3614 of SEQ ID NO: 587465
agauaauggcacuggagua

SEQ ID NO: 794303 - RNA, 19 nt, Artificial Sequence
  Description of Artificial Sequence: Synthetic oligonucleotide
  Antisense strand to SEQ ID NO: 794302
uacuccagugccauuaucu

SEQ ID NO: 794304 - RNA, 19 nt, Artificial Sequence
  Description of Artificial Sequence: Synthetic oligonucleotide
  Sense strand starting at position 3629 of SEQ ID NO: 587465
aguacuagauacuuaggua

SEQ ID NO: 794305 - RNA, 19 nt, Artificial Sequence
  Description of Artificial Sequence: Synthetic oligonucleotide
  Antisense strand to SEQ ID NO: 794304
uaccuaaguaucuaguacu

SEQ ID NO: 794306 - RNA, 19 nt, Artificial Sequence
  Description of Artificial Sequence: Synthetic oligonucleotide
  Sense strand starting at position 3633 of SEQ ID NO: 587465
cuagauacuuagguacuua

SEQ ID NO: 794307 - RNA, 19 nt, Artificial Sequence
  Description of Artificial Sequence: Synthetic oligonucleotide
  Antisense strand to SEQ ID NO: 794306
uaaguaccuaaguaucuag

SEQ ID NO: 794308 - RNA, 19 nt, Artificial Sequence
  Description of Artificial Sequence: Synthetic oligonucleotide
  Sense strand starting at position 3762 of SEQ ID NO: 587465
gcuauauggccagaauaau

SEQ ID NO: 794309 - RNA, 19 nt, Artificial Sequence
  Description of Artificial Sequence: Synthetic oligonucleotide
  Antisense strand to SEQ ID NO: 794308
auuauucuggccauauagc

SEQ ID NO: 794310 - RNA, 19 nt, Artificial Sequence
  Description of Artificial Sequence: Synthetic oligonucleotide
  Sense strand starting at position 3771 of SEQ ID NO: 587465
ccagaauaauaaccguuau

SEQ ID NO: 794311 - RNA, 19 nt, Artificial Sequence
  Description of Artificial Sequence: Synthetic oligonucleotide
  Antisense strand to SEQ ID NO: 794310
auaacgguuauuauucugg

SEQ ID NO: 794312 - RNA, 19 nt, Artificial Sequence
  Description of Artificial Sequence: Synthetic oligonucleotide
  Sense strand starting at position 3789 of SEQ ID NO: 587465
uuguaucuuguggaacaaa

SEQ ID NO: 794313 - RNA, 19 nt, Artificial Sequence
  Description of Artificial Sequence: Synthetic oligonucleotide
  Antisense strand to SEQ ID NO: 794312
uuuguuccacaagauacaa

SEQ ID NO: 794314 - RNA, 19 nt, Artificial Sequence
  Description of Artificial Sequence: Synthetic oligonucleotide
  Sense strand starting at position 3886 of SEQ ID NO: 587465
acagauguaugauuggagu

SEQ ID NO: 794315 - RNA, 19 nt, Artificial Sequence
  Description of Artificial Sequence: Synthetic oligonucleotide
  Antisense strand to SEQ ID NO: 794314
acuccaaucauacaucugu

SEQ ID NO: 794316 - RNA, 19 nt, Artificial Sequence
  Description of Artificial Sequence: Synthetic oligonucleotide
  Sense strand starting at position 3888 of SEQ ID NO: 587465
agauguaugauuggaguag

SEQ ID NO: 794317 - RNA, 19 nt, Artificial Sequence
  Description of Artificial Sequence: Synthetic oligonucleotide
  Antisense strand to SEQ ID NO: 794316
cuacuccaaucauacaucu

SEQ ID NO: 794318 - RNA, 19 nt, Artificial Sequence
  Description of Artificial Sequence: Synthetic oligonucleotide
  Sense strand starting at position 3944 of SEQ ID NO: 587465
ucuuuccuucuccagagua

SEQ ID NO: 794319 - RNA, 19 nt, Artificial Sequence
  Description of Artificial Sequence: Synthetic oligonucleotide
  Antisense strand to SEQ ID NO: 794318
uacucuggagaaggaaaga

SEQ ID NO: 794320 - RNA, 19 nt, Artificial Sequence
  Description of Artificial Sequence: Synthetic oligonucleotide
  Sense strand starting at position 280 of SEQ ID NO: 587466
ugacacaucuuacuguaga

SEQ ID NO: 794321 - RNA, 19 nt, Artificial Sequence
  Description of Artificial Sequence: Synthetic oligonucleotide
  Antisense strand to SEQ ID NO: 794320
ucuacaguaagauguguca

SEQ ID NO: 794322 - RNA, 19 nt, Artificial Sequence
  Description of Artificial Sequence: Synthetic oligonucleotide
  Sense strand starting at position 307 of SEQ ID NO: 587466
guuagacaucugcaucaca

SEQ ID NO: 794323 - RNA, 19 nt, Artificial Sequence
  Description of Artificial Sequence: Synthetic oligonucleotide
  Antisense strand to SEQ ID NO: 794322
ugugaugcagaugucuaac

SEQ ID NO: 794324 - RNA, 19 nt, Artificial Sequence
  Description of Artificial Sequence: Synthetic oligonucleotide
  Sense strand starting at position 417 of SEQ ID NO: 587466
aauaguaaaguguggauaa

SEQ ID NO: 794325 - RNA, 19 nt, Artificial Sequence
  Description of Artificial Sequence: Synthetic oligonucleotide
  Antisense strand to SEQ ID NO: 794324
uuauccacacuuuacuauu

SEQ ID NO: 794326 - RNA, 19 nt, Artificial Sequence
  Description of Artificial Sequence: Synthetic oligonucleotide
  Sense strand starting at position 419 of SEQ ID NO: 587466
uaguaaaguguggauaacu

SEQ ID NO: 794327 - RNA, 19 nt, Artificial Sequence
  Description of Artificial Sequence: Synthetic oligonucleotide
  Antisense strand to SEQ ID NO: 794326
aguuauccacacuuuacua

SEQ ID NO: 794328 - RNA, 19 nt, Artificial Sequence
  Description of Artificial Sequence: Synthetic oligonucleotide
  Sense strand starting at position 427 of SEQ ID NO: 587466
uguggauaacuguauacuu

SEQ ID NO: 794329 - RNA, 19 nt, Artificial Sequence
  Description of Artificial Sequence: Synthetic oligonucleotide
  Antisense strand to SEQ ID NO: 794328
aaguauacaguuauccaca

SEQ ID NO: 794330 - RNA, 19 nt, Artificial Sequence
  Description of Artificial Sequence: Synthetic oligonucleotide
  Sense strand starting at position 841 of SEQ ID NO: 587466
gcuguuauucuugcuugua

SEQ ID NO: 794331 - RNA, 19 nt, Artificial Sequence
  Description of Artificial Sequence: Synthetic oligonucleotide
  Antisense strand to SEQ ID NO: 794330
uacaagcaagaauaacagc

SEQ ID NO: 794332 - RNA, 19 nt, Artificial Sequence
  Description of Artificial Sequence: Synthetic oligonucleotide
  Sense strand starting at position 1012 of SEQ ID NO: 587466
agugaauauugacuacauc

SEQ ID NO: 794333 - RNA, 19 nt, Artificial Sequence
  Description of Artificial Sequence: Synthetic oligonucleotide
  Antisense strand to SEQ ID NO: 794332
gauguagucaauauucacu

SEQ ID NO: 794334 - RNA, 19 nt, Artificial Sequence
  Description of Artificial Sequence: Synthetic oligonucleotide
  Sense strand starting at position 1094 of SEQ ID NO: 587466
cauugucuagaaugaguaa

SEQ ID NO: 794335 - RNA, 19 nt, Artificial Sequence
  Description of Artificial Sequence: Synthetic oligonucleotide
  Antisense strand to SEQ ID NO: 794334
uuacucauucuagacaaug

SEQ ID NO: 794336 - RNA, 19 nt, Artificial Sequence
  Description of Artificial Sequence: Synthetic oligonucleotide
  Sense strand starting at position 1097 of SEQ ID NO: 587466
ugucuagaaugaguaaaca

SEQ ID NO: 794337 - RNA, 19 nt, Artificial Sequence
  Description of Artificial Sequence: Synthetic oligonucleotide
  Antisense strand to SEQ ID NO: 794336
uguuuacucauucuagaca

SEQ ID NO: 794338 - RNA, 19 nt, Artificial Sequence
  Description of Artificial Sequence: Synthetic oligonucleotide
  Sense strand starting at position 1209 of SEQ ID NO: 587466
aagggagguuucucuuaau

SEQ ID NO: 794339 - RNA, 19 nt, Artificial Sequence
  Description of Artificial Sequence: Synthetic oligonucleotide
  Antisense strand to SEQ ID NO: 794338
auuaagagaaaccucccuu

SEQ ID NO: 794340 - RNA, 19 nt, Artificial Sequence
  Description of Artificial Sequence: Synthetic oligonucleotide
  Sense strand starting at position 1316 of SEQ ID NO: 587466
guaacuaaaugacuugagu

SEQ ID NO: 794341 - RNA, 19 nt, Artificial Sequence
  Description of Artificial Sequence: Synthetic oligonucleotide
  Antisense strand to SEQ ID NO: 794340
acucaagucauuuaguuac

SEQ ID NO: 794342 - RNA, 19 nt, Artificial Sequence
  Description of Artificial Sequence: Synthetic oligonucleotide
  Sense strand starting at position 1343 of SEQ ID NO: 587466
aaaggauugguaggguuua

SEQ ID NO: 794343 - RNA, 19 nt, Artificial Sequence
  Description of Artificial Sequence: Synthetic oligonucleotide
  Antisense strand to SEQ ID NO: 794342
uaaacccuaccaauccuuu

SEQ ID NO: 794344 - RNA, 19 nt, Artificial Sequence
  Description of Artificial Sequence: Synthetic oligonucleotide
  Sense strand starting at position 1348 of SEQ ID NO: 587466
auugguaggguuuauaauu

SEQ ID NO: 794345 - RNA, 19 nt, Artificial Sequence
  Description of Artificial Sequence: Synthetic oligonucleotide
  Antisense strand to SEQ ID NO: 794344
aauuauaaacccuaccaau

SEQ ID NO: 794346 - RNA, 19 nt, Artificial Sequence
  Description of Artificial Sequence: Synthetic oligonucleotide
  Sense strand starting at position 1370 of SEQ ID NO: 587466
aggaauauccaguggugag

SEQ ID NO: 794347 - RNA, 19 nt, Artificial Sequence
  Description of Artificial Sequence: Synthetic oligonucleotide
  Antisense strand to SEQ ID NO: 794346
cucaccacuggauauuccu

SEQ ID NO: 794348 - RNA, 19 nt, Artificial Sequence
  Description of Artificial Sequence: Synthetic oligonucleotide
  Sense strand starting at position 1371 of SEQ ID NO: 587466
ggaauauccaguggugaga

SEQ ID NO: 794349 - RNA, 19 nt, Artificial Sequence
  Description of Artificial Sequence: Synthetic oligonucleotide
  Antisense strand to SEQ ID NO: 794348
ucucaccacuggauauucc

SEQ ID NO: 794350 - RNA, 19 nt, Artificial Sequence
  Description of Artificial Sequence: Synthetic oligonucleotide
  Sense strand starting at position 1566 of SEQ ID NO: 587466
uuuaauuguagguagugau

SEQ ID NO: 794351 - RNA, 19 nt, Artificial Sequence
  Description of Artificial Sequence: Synthetic oligonucleotide
  Antisense strand to SEQ ID NO: 794350
aucacuaccuacaauuaaa

SEQ ID NO: 794352 - RNA, 19 nt, Artificial Sequence
  Description of Artificial Sequence: Synthetic oligonucleotide
  Sense strand starting at position 1579 of SEQ ID NO: 587466
agugauuacugucuauaaa

SEQ ID NO: 794353 - RNA, 19 nt, Artificial Sequence
  Description of Artificial Sequence: Synthetic oligonucleotide
  Antisense strand to SEQ ID NO: 794352
uuuauagacaguaaucacu

SEQ ID NO: 794354 - RNA, 19 nt, Artificial Sequence
  Description of Artificial Sequence: Synthetic oligonucleotide
  Sense strand starting at position 1580 of SEQ ID NO: 587466
gugauuacugucuauaaau

SEQ ID NO: 794355 - RNA, 19 nt, Artificial Sequence
  Description of Artificial Sequence: Synthetic oligonucleotide
  Antisense strand to SEQ ID NO: 794354
auuuauagacaguaaucac

SEQ ID NO: 794356 - RNA, 19 nt, Artificial Sequence
  Description of Artificial Sequence: Synthetic oligonucleotide
  Sense strand starting at position 1808 of SEQ ID NO: 587466
gucuauauacccuaggauc

SEQ ID NO: 794357 - RNA, 19 nt, Artificial Sequence
  Description of Artificial Sequence: Synthetic oligonucleotide
  Antisense strand to SEQ ID NO: 794356
gauccuaggguauauagac

SEQ ID NO: 794358 - RNA, 19 nt, Artificial Sequence
  Description of Artificial Sequence: Synthetic oligonucleotide
  Sense strand starting at position 1915 of SEQ ID NO: 587466
ugguauuucucacccaguu

SEQ ID NO: 794359 - RNA, 19 nt, Artificial Sequence
  Description of Artificial Sequence: Synthetic oligonucleotide
  Antisense strand to SEQ ID NO: 794358
aacugggugagaaauacca

SEQ ID NO: 794360 - RNA, 19 nt, Artificial Sequence
  Description of Artificial Sequence: Synthetic oligonucleotide
  Sense strand starting at position 1937 of SEQ ID NO: 587466
ucauguaauccucaaaguu

SEQ ID NO: 794361 - RNA, 19 nt, Artificial Sequence
  Description of Artificial Sequence: Synthetic oligonucleotide
  Antisense strand to SEQ ID NO: 794360
aacuuugaggauuacauga

SEQ ID NO: 794362 - RNA, 19 nt, Artificial Sequence
  Description of Artificial Sequence: Synthetic oligonucleotide
  Sense strand starting at position 2002 of SEQ ID NO: 587466
auggaacacuugcugagaa

SEQ ID NO: 794363 - RNA, 19 nt, Artificial Sequence
  Description of Artificial Sequence: Synthetic oligonucleotide
  Antisense strand to SEQ ID NO: 794362
uucucagcaaguguuccau

SEQ ID NO: 794364 - RNA, 19 nt, Artificial Sequence
  Description of Artificial Sequence: Synthetic oligonucleotide
  Sense strand starting at position 2217 of SEQ ID NO: 587466
auuaaauucuggucaauga

SEQ ID NO: 794365 - RNA, 19 nt, Artificial Sequence
  Description of Artificial Sequence: Synthetic oligonucleotide
  Antisense strand to SEQ ID NO: 794364
ucauugaccagaauuuaau

SEQ ID NO: 794366 - RNA, 19 nt, Artificial Sequence
  Description of Artificial Sequence: Synthetic oligonucleotide
  Sense strand starting at position 2275 of SEQ ID NO: 587466
gacaaauauuacuugugga

SEQ ID NO: 794367 - RNA, 19 nt, Artificial Sequence
  Description of Artificial Sequence: Synthetic oligonucleotide
  Antisense strand to SEQ ID NO: 794366
uccacaaguaauauuuguc

SEQ ID NO: 794368 - RNA, 19 nt, Artificial Sequence
  Description of Artificial Sequence: Synthetic oligonucleotide
  Sense strand starting at position 2512 of SEQ ID NO: 587466
caggguugauggguugaua

SEQ ID NO: 794369 - RNA, 19 nt, Artificial Sequence
  Description of Artificial Sequence: Synthetic oligonucleotide
  Antisense strand to SEQ ID NO: 794368
uaucaacccaucaacccug

SEQ ID NO: 794370 - RNA, 19 nt, Artificial Sequence
  Description of Artificial Sequence: Synthetic oligonucleotide
  Sense strand starting at position 2515 of SEQ ID NO: 587466
gguugauggguugauauua

SEQ ID NO: 794371 - RNA, 19 nt, Artificial Sequence
  Description of Artificial Sequence: Synthetic oligonucleotide
  Antisense strand to SEQ ID NO: 794370
uaauaucaacccaucaacc

SEQ ID NO: 794372 - RNA, 19 nt, Artificial Sequence
  Description of Artificial Sequence: Synthetic oligonucleotide
  Sense strand starting at position 2553 of SEQ ID NO: 587466
cuauaauugcuuggaggga

SEQ ID NO: 794373 - RNA, 19 nt, Artificial Sequence
  Description of Artificial Sequence: Synthetic oligonucleotide
  Antisense strand to SEQ ID NO: 794372
ucccuccaagcaauuauag

SEQ ID NO: 794374 - RNA, 19 nt, Artificial Sequence
  Description of Artificial Sequence: Synthetic oligonucleotide
  Sense strand starting at position 2605 of SEQ ID NO: 587466
guuaaucgaagguaauuga

SEQ ID NO: 794375 - RNA, 19 nt, Artificial Sequence
  Description of Artificial Sequence: Synthetic oligonucleotide
  Antisense strand to SEQ ID NO: 794374
ucaauuaccuucgauuaac

SEQ ID NO: 794376 - RNA, 19 nt, Artificial Sequence
  Description of Artificial Sequence: Synthetic oligonucleotide
  Sense strand starting at position 2944 of SEQ ID NO: 587466
aguagcuguugauuuacau

SEQ ID NO: 794377 - RNA, 19 nt, Artificial Sequence
  Description of Artificial Sequence: Synthetic oligonucleotide
  Antisense strand to SEQ ID NO: 794376
auguaaaucaacagcuacu

SEQ ID NO: 794378 - RNA, 19 nt, Artificial Sequence
  Description of Artificial Sequence: Synthetic oligonucleotide
  Sense strand starting at position 2987 of SEQ ID NO: 587466
uuagaagauguuggaaagu

SEQ ID NO: 794379 - RNA, 19 nt, Artificial Sequence
  Description of Artificial Sequence: Synthetic oligonucleotide
  Antisense strand to SEQ ID NO: 794378
acuuuccaacaucuucuaa

SEQ ID NO: 794380 - RNA, 19 nt, Artificial Sequence
  Description of Artificial Sequence: Synthetic oligonucleotide
  Sense strand starting at position 3004 of SEQ ID NO: 587466
guuagugucagggaccaga

SEQ ID NO: 794381 - RNA, 19 nt, Artificial Sequence
  Description of Artificial Sequence: Synthetic oligonucleotide
  Antisense strand to SEQ ID NO: 794380
ucuggucccugacacuaac

SEQ ID NO: 794382 - RNA, 19 nt, Artificial Sequence
  Description of Artificial Sequence: Synthetic oligonucleotide
  Sense strand starting at position 3192 of SEQ ID NO: 587466
augugauaucuuuaugggu

SEQ ID NO: 794383 - RNA, 19 nt, Artificial Sequence
  Description of Artificial Sequence: Synthetic oligonucleotide
  Antisense strand to SEQ ID NO: 794382
acccauaaagauaucacau

SEQ ID NO: 794384 - RNA, 19 nt, Artificial Sequence
  Description of Artificial Sequence: Synthetic oligonucleotide
  Sense strand starting at position 3196 of SEQ ID NO: 587466
gauaucuuuauggguggga

SEQ ID NO: 794385 - RNA, 19 nt, Artificial Sequence
  Description of Artificial Sequence: Synthetic oligonucleotide
  Antisense strand to SEQ ID NO: 794384
ucccacccauaaagauauc

SEQ ID NO: 794386 - RNA, 19 nt, Artificial Sequence
  Description of Artificial Sequence: Synthetic oligonucleotide
  Sense strand starting at position 3198 of SEQ ID NO: 587466
uaucuuuaugggugggaca

SEQ ID NO: 794387 - RNA, 19 nt, Artificial Sequence
  Description of Artificial Sequence: Synthetic oligonucleotide
  Antisense strand to SEQ ID NO: 794386
ugucccacccauaaagaua

SEQ ID NO: 794388 - RNA, 19 nt, Artificial Sequence
  Description of Artificial Sequence: Synthetic oligonucleotide
  Sense strand starting at position 3199 of SEQ ID NO: 587466
aucuuuaugggugggacaa

SEQ ID NO: 794389 - RNA, 19 nt, Artificial Sequence
  Description of Artificial Sequence: Synthetic oligonucleotide
  Antisense strand to SEQ ID NO: 794388
uugucccacccauaaagau

SEQ ID NO: 794390 - RNA, 19 nt, Artificial Sequence
  Description of Artificial Sequence: Synthetic oligonucleotide
  Sense strand starting at position 3200 of SEQ ID NO: 587466
ucuuuaugggugggacaau

SEQ ID NO: 794391 - RNA, 19 nt, Artificial Sequence
  Description of Artificial Sequence: Synthetic oligonucleotide
  Antisense strand to SEQ ID NO: 794390
auugucccacccauaaaga

SEQ ID NO: 794392 - RNA, 19 nt, Artificial Sequence
  Description of Artificial Sequence: Synthetic oligonucleotide
  Sense strand starting at position 3209 of SEQ ID NO: 587466
gugggacaauuauuaaauu

SEQ ID NO: 794393 - RNA, 19 nt, Artificial Sequence
  Description of Artificial Sequence: Synthetic oligonucleotide
  Antisense strand to SEQ ID NO: 794392
aauuuaauaauugucccac

SEQ ID NO: 794394 - RNA, 19 nt, Artificial Sequence
  Description of Artificial Sequence: Synthetic oligonucleotide
  Sense strand starting at position 3353 of SEQ ID NO: 587466
aguuguuaaacguuugcuu

SEQ ID NO: 794395 - RNA, 19 nt, Artificial Sequence
  Description of Artificial Sequence: Synthetic oligonucleotide
  Antisense strand to SEQ ID NO: 794394
aagcaaacguuuaacaacu

SEQ ID NO: 794396 - RNA, 19 nt, Artificial Sequence
  Description of Artificial Sequence: Synthetic oligonucleotide
  Sense strand starting at position 3354 of SEQ ID NO: 587466
guuguuaaacguuugcuua

SEQ ID NO: 794397 - RNA, 19 nt, Artificial Sequence
  Description of Artificial Sequence: Synthetic oligonucleotide
  Antisense strand to SEQ ID NO: 794396
uaagcaaacguuuaacaac

SEQ ID NO: 794398 - RNA, 19 nt, Artificial Sequence
  Description of Artificial Sequence: Synthetic oligonucleotide
  Sense strand starting at position 3501 of SEQ ID NO: 587466
ccugucauagaaugauauu

SEQ ID NO: 794399 - RNA, 19 nt, Artificial Sequence
  Description of Artificial Sequence: Synthetic oligonucleotide
  Antisense strand to SEQ ID NO: 794398
aauaucauucuaugacagg

SEQ ID NO: 794400 - RNA, 19 nt, Artificial Sequence
  Description of Artificial Sequence: Synthetic oligonucleotide
  Sense strand starting at position 226 of SEQ ID NO: 587467
guaauauuagcugacaccu

SEQ ID NO: 794401 - RNA, 19 nt, Artificial Sequence
  Description of Artificial Sequence: Synthetic oligonucleotide
  Antisense strand to SEQ ID NO: 794400
aggugucagcuaauauuac

SEQ ID NO: 794402 - RNA, 19 nt, Artificial Sequence
  Description of Artificial Sequence: Synthetic oligonucleotide
  Sense strand starting at position 356 of SEQ ID NO: 587467
gauuaaauaccguagggua

SEQ ID NO: 794403 - RNA, 19 nt, Artificial Sequence
  Description of Artificial Sequence: Synthetic oligonucleotide
  Antisense strand to SEQ ID NO: 794402
uacccuacgguauuuaauc

SEQ ID NO: 794404 - RNA, 19 nt, Artificial Sequence
  Description of Artificial Sequence: Synthetic oligonucleotide
  Sense strand starting at position 358 of SEQ ID NO: 587467
uuaaauaccguaggguaaa

SEQ ID NO: 794405 - RNA, 19 nt, Artificial Sequence
  Description of Artificial Sequence: Synthetic oligonucleotide
  Antisense strand to SEQ ID NO: 794404
uuuacccuacgguauuuaa

SEQ ID NO: 794406 - RNA, 19 nt, Artificial Sequence
  Description of Artificial Sequence: Synthetic oligonucleotide
  Sense strand starting at position 370 of SEQ ID NO: 587467
ggguaaaccaaugggaugu

SEQ ID NO: 794407 - RNA, 19 nt, Artificial Sequence
  Description of Artificial Sequence: Synthetic oligonucleotide
  Antisense strand to SEQ ID NO: 794406
acaucccauugguuuaccc

SEQ ID NO: 794408 - RNA, 19 nt, Artificial Sequence
  Description of Artificial Sequence: Synthetic oligonucleotide
  Sense strand starting at position 371 of SEQ ID NO: 587467
gguaaaccaaugggauguu

SEQ ID NO: 794409 - RNA, 19 nt, Artificial Sequence
  Description of Artificial Sequence: Synthetic oligonucleotide
  Antisense strand to SEQ ID NO: 794408
aacaucccauugguuuacc

SEQ ID NO: 794410 - RNA, 19 nt, Artificial Sequence
  Description of Artificial Sequence: Synthetic oligonucleotide
  Sense strand starting at position 383 of SEQ ID NO: 587467
ggauguuaucagugaagga

SEQ ID NO: 794411 - RNA, 19 nt, Artificial Sequence
  Description of Artificial Sequence: Synthetic oligonucleotide
  Antisense strand to SEQ ID NO: 794410
uccuucacugauaacaucc

SEQ ID NO: 794412 - RNA, 19 nt, Artificial Sequence
  Description of Artificial Sequence: Synthetic oligonucleotide
  Sense strand starting at position 387 of SEQ ID NO: 587467
guuaucagugaaggauucu

SEQ ID NO: 794413 - RNA, 19 nt, Artificial Sequence
  Description of Artificial Sequence: Synthetic oligonucleotide
  Antisense strand to SEQ ID NO: 794412
agaauccuucacugauaac

SEQ ID NO: 794414 - RNA, 19 nt, Artificial Sequence
  Description of Artificial Sequence: Synthetic oligonucleotide
  Sense strand starting at position 396 of SEQ ID NO: 587467
gaaggauucuaguuuacca

SEQ ID NO: 794415 - RNA, 19 nt, Artificial Sequence
  Description of Artificial Sequence: Synthetic oligonucleotide
  Antisense strand to SEQ ID NO: 794414
ugguaaacuagaauccuuc

SEQ ID NO: 794416 - RNA, 19 nt, Artificial Sequence
  Description of Artificial Sequence: Synthetic oligonucleotide
  Sense strand starting at position 398 of SEQ ID NO: 587467
aggauucuaguuuaccauu

SEQ ID NO: 794417 - RNA, 19 nt, Artificial Sequence
  Description of Artificial Sequence: Synthetic oligonucleotide
  Antisense strand to SEQ ID NO: 794416
aaugguaaacuagaauccu

SEQ ID NO: 794418 - RNA, 19 nt, Artificial Sequence
  Description of Artificial Sequence: Synthetic oligonucleotide
  Sense strand starting at position 523 of SEQ ID NO: 587467
cccagaaaucacuacgugu

SEQ ID NO: 794419 - RNA, 19 nt, Artificial Sequence
  Description of Artificial Sequence: Synthetic oligonucleotide
  Antisense strand to SEQ ID NO: 794418
acacguagugauuucuggg

SEQ ID NO: 794420 - RNA, 19 nt, Artificial Sequence
  Description of Artificial Sequence: Synthetic oligonucleotide
  Sense strand starting at position 525 of SEQ ID NO: 587467
cagaaaucacuacguguaa

SEQ ID NO: 794421 - RNA, 19 nt, Artificial Sequence
  Description of Artificial Sequence: Synthetic oligonucleotide
  Antisense strand to SEQ ID NO: 794420
uuacacguagugauuucug

SEQ ID NO: 794422 - RNA, 19 nt, Artificial Sequence
  Description of Artificial Sequence: Synthetic oligonucleotide
  Sense strand starting at position 526 of SEQ ID NO: 587467
agaaaucacuacguguaaa

SEQ ID NO: 794423 - RNA, 19 nt, Artificial Sequence
  Description of Artificial Sequence: Synthetic oligonucleotide
  Antisense strand to SEQ ID NO: 794422
uuuacacguagugauuucu

SEQ ID NO: 794424 - RNA, 19 nt, Artificial Sequence
  Description of Artificial Sequence: Synthetic oligonucleotide
  Sense strand starting at position 717 of SEQ ID NO: 587467
ggacauaaguuggcuguga

SEQ ID NO: 794425 - RNA, 19 nt, Artificial Sequence
  Description of Artificial Sequence: Synthetic oligonucleotide
  Antisense strand to SEQ ID NO: 794424
ucacagccaacuuaugucc

SEQ ID NO: 794426 - RNA, 19 nt, Artificial Sequence
  Description of Artificial Sequence: Synthetic oligonucleotide
  Sense strand starting at position 721 of SEQ ID NO: 587467
auaaguuggcugugaggaa

SEQ ID NO: 794427 - RNA, 19 nt, Artificial Sequence
  Description of Artificial Sequence: Synthetic oligonucleotide
  Antisense strand to SEQ ID NO: 794426
uuccucacagccaacuuau

SEQ ID NO: 794428 - RNA, 19 nt, Artificial Sequence
  Description of Artificial Sequence: Synthetic oligonucleotide
  Sense strand starting at position 1212 of SEQ ID NO: 587467
caguaauucucagcaaagg

SEQ ID NO: 794429 - RNA, 19 nt, Artificial Sequence
  Description of Artificial Sequence: Synthetic oligonucleotide
  Antisense strand to SEQ ID NO: 794428
ccuuugcugagaauuacug

SEQ ID NO: 794430 - RNA, 19 nt, Artificial Sequence
  Description of Artificial Sequence: Synthetic oligonucleotide
  Sense strand starting at position 1237 of SEQ ID NO: 587467
ugguauugauacucucaua

SEQ ID NO: 794431 - RNA, 19 nt, Artificial Sequence
  Description of Artificial Sequence: Synthetic oligonucleotide
  Antisense strand to SEQ ID NO: 794430
uaugagaguaucaauacca

SEQ ID NO: 794432 - RNA, 19 nt, Artificial Sequence
  Description of Artificial Sequence: Synthetic oligonucleotide
  Sense strand starting at position 2016 of SEQ ID NO: 587467
aggcuucgccggagaguga

SEQ ID NO: 794433 - RNA, 19 nt, Artificial Sequence
  Description of Artificial Sequence: Synthetic oligonucleotide
  Antisense strand to SEQ ID NO: 794432
ucacucuccggcgaagccu

SEQ ID NO: 794434 - RNA, 19 nt, Artificial Sequence
  Description of Artificial Sequence: Synthetic oligonucleotide
  Sense strand starting at position 2401 of SEQ ID NO: 587467
cugugcccugaaugagaua

SEQ ID NO: 794435 - RNA, 19 nt, Artificial Sequence
  Description of Artificial Sequence: Synthetic oligonucleotide
  Antisense strand to SEQ ID NO: 794434
uaucucauucagggcacag

SEQ ID NO: 794436 - RNA, 19 nt, Artificial Sequence
  Description of Artificial Sequence: Synthetic oligonucleotide
  Sense strand starting at position 2502 of SEQ ID NO: 587467
guccuagcuuaauuucuga

SEQ ID NO: 794437 - RNA, 19 nt, Artificial Sequence
  Description of Artificial Sequence: Synthetic oligonucleotide
  Antisense strand to SEQ ID NO: 794436
ucagaaauuaagcuaggac

SEQ ID NO: 794438 - RNA, 19 nt, Artificial Sequence
  Description of Artificial Sequence: Synthetic oligonucleotide
  Sense strand starting at position 2587 of SEQ ID NO: 587467
auguacuaccucugaaaug

SEQ ID NO: 794439 - RNA, 19 nt, Artificial Sequence
  Description of Artificial Sequence: Synthetic oligonucleotide
  Antisense strand to SEQ ID NO: 794438
cauuucagagguaguacau

SEQ ID NO: 794440 - RNA, 19 nt, Artificial Sequence
  Description of Artificial Sequence: Synthetic oligonucleotide
  Sense strand starting at position 2674 of SEQ ID NO: 587467
ugagaauacuuucugcuua

SEQ ID NO: 794441 - RNA, 19 nt, Artificial Sequence
  Description of Artificial Sequence: Synthetic oligonucleotide
  Antisense strand to SEQ ID NO: 794440
uaagcagaaaguauucuca

SEQ ID NO: 794442 - RNA, 19 nt, Artificial Sequence
  Description of Artificial Sequence: Synthetic oligonucleotide
  Sense strand starting at position 2676 of SEQ ID NO: 587467
agaauacuuucugcuuaga

SEQ ID NO: 794443 - RNA, 19 nt, Artificial Sequence
  Description of Artificial Sequence: Synthetic oligonucleotide
  Antisense strand to SEQ ID NO: 794442
ucuaagcagaaaguauucu

SEQ ID NO: 794444 - RNA, 19 nt, Artificial Sequence
  Description of Artificial Sequence: Synthetic oligonucleotide
  Sense strand starting at position 2686 of SEQ ID NO: 587467
cugcuuagauuugcuuaau

SEQ ID NO: 794445 - RNA, 19 nt, Artificial Sequence
  Description of Artificial Sequence: Synthetic oligonucleotide
  Antisense strand to SEQ ID NO: 794444
auuaagcaaaucuaagcag

SEQ ID NO: 794446 - RNA, 19 nt, Artificial Sequence
  Description of Artificial Sequence: Synthetic oligonucleotide
  Sense strand starting at position 2711 of SEQ ID NO: 587467
guuguuucaggagaggauu

SEQ ID NO: 794447 - RNA, 19 nt, Artificial Sequence
  Description of Artificial Sequence: Synthetic oligonucleotide
  Antisense strand to SEQ ID NO: 794446
aauccucuccugaaacaac

SEQ ID NO: 794448 - RNA, 19 nt, Artificial Sequence
  Description of Artificial Sequence: Synthetic oligonucleotide
  Sense strand starting at position 2925 of SEQ ID NO: 587467
ucagaaagaucguuuauau

SEQ ID NO: 794449 - RNA, 19 nt, Artificial Sequence
  Description of Artificial Sequence: Synthetic oligonucleotide
  Antisense strand to SEQ ID NO: 794448
auauaaacgaucuuucuga

SEQ ID NO: 794450 - RNA, 19 nt, Artificial Sequence
  Description of Artificial Sequence: Synthetic oligonucleotide
  Sense strand starting at position 3071 of SEQ ID NO: 587467
acaugauacugggauuuaa

SEQ ID NO: 794451 - RNA, 19 nt, Artificial Sequence
  Description of Artificial Sequence: Synthetic oligonucleotide
  Antisense strand to SEQ ID NO: 794450
uuaaaucccaguaucaugu

SEQ ID NO: 794452 - RNA, 19 nt, Artificial Sequence
  Description of Artificial Sequence: Synthetic oligonucleotide
  Sense strand starting at position 3092 of SEQ ID NO: 587467
ggaacuuuccuuuggcaua

SEQ ID NO: 794453 - RNA, 19 nt, Artificial Sequence
  Description of Artificial Sequence: Synthetic oligonucleotide
  Antisense strand to SEQ ID NO: 794452
uaugccaaaggaaaguucc

SEQ ID NO: 794454 - RNA, 19 nt, Artificial Sequence
  Description of Artificial Sequence: Synthetic oligonucleotide
  Sense strand starting at position 3328 of SEQ ID NO: 587467
ugacauugugagggauaug

SEQ ID NO: 794455 - RNA, 19 nt, Artificial Sequence
  Description of Artificial Sequence: Synthetic oligonucleotide
  Antisense strand to SEQ ID NO: 794454
cauaucccucacaauguca

SEQ ID NO: 794456 - RNA, 19 nt, Artificial Sequence
  Description of Artificial Sequence: Synthetic oligonucleotide
  Sense strand starting at position 3361 of SEQ ID NO: 587467
auuagaauaucgucugaga

SEQ ID NO: 794457 - RNA, 19 nt, Artificial Sequence
  Description of Artificial Sequence: Synthetic oligonucleotide
  Antisense strand to SEQ ID NO: 794456
ucucagacgauauucuaau

SEQ ID NO: 794458 - RNA, 19 nt, Artificial Sequence
  Description of Artificial Sequence: Synthetic oligonucleotide
  Sense strand starting at position 3363 of SEQ ID NO: 587467
uagaauaucgucugagaac

SEQ ID NO: 794459 - RNA, 19 nt, Artificial Sequence
  Description of Artificial Sequence: Synthetic oligonucleotide
  Antisense strand to SEQ ID NO: 794458
guucucagacgauauucua

SEQ ID NO: 794460 - RNA, 19 nt, Artificial Sequence
  Description of Artificial Sequence: Synthetic oligonucleotide
  Sense strand starting at position 3391 of SEQ ID NO: 587467
ggguccuuucccugacuga

SEQ ID NO: 794461 - RNA, 19 nt, Artificial Sequence
  Description of Artificial Sequence: Synthetic oligonucleotide
  Antisense strand to SEQ ID NO: 794460
ucagucagggaaaggaccc

SEQ ID NO: 794462 - RNA, 19 nt, Artificial Sequence
  Description of Artificial Sequence: Synthetic oligonucleotide
  Sense strand starting at position 3527 of SEQ ID NO: 587467
ugaugacaucaauggccau

SEQ ID NO: 794463 - RNA, 19 nt, Artificial Sequence
  Description of Artificial Sequence: Synthetic oligonucleotide
  Antisense strand to SEQ ID NO: 794462
auggccauugaugucauca

SEQ ID NO: 794464 - RNA, 19 nt, Artificial Sequence
  Description of Artificial Sequence: Synthetic oligonucleotide
  Sense strand starting at position 3547 of SEQ ID NO: 587467
cgaagacagucaccucuaa

SEQ ID NO: 794465 - RNA, 19 nt, Artificial Sequence
  Description of Artificial Sequence: Synthetic oligonucleotide
  Antisense strand to SEQ ID NO: 794464
uuagaggugacugucuucg

SEQ ID NO: 794466 - RNA, 19 nt, Artificial Sequence
  Description of Artificial Sequence: Synthetic oligonucleotide
  Sense strand starting at position 3632 of SEQ ID NO: 587467
ugaguuaaguuucuuucca

SEQ ID NO: 794467 - RNA, 19 nt, Artificial Sequence
  Description of Artificial Sequence: Synthetic oligonucleotide
  Antisense strand to SEQ ID NO: 794466
uggaaagaaacuuaacuca

SEQ ID NO: 794468 - RNA, 19 nt, Artificial Sequence
  Description of Artificial Sequence: Synthetic oligonucleotide
  Sense strand starting at position 3633 of SEQ ID NO: 587467
gaguuaaguuucuuuccag

SEQ ID NO: 794469 - RNA, 19 nt, Artificial Sequence
  Description of Artificial Sequence: Synthetic oligonucleotide
  Antisense strand to SEQ ID NO: 794468
cuggaaagaaacuuaacuc

SEQ ID NO: 794470 - RNA, 19 nt, Artificial Sequence
  Description of Artificial Sequence: Synthetic oligonucleotide
  Sense strand starting at position 3634 of SEQ ID NO: 587467
aguuaaguuucuuuccaga

SEQ ID NO: 794471 - RNA, 19 nt, Artificial Sequence
  Description of Artificial Sequence: Synthetic oligonucleotide
  Antisense strand to SEQ ID NO: 794470
ucuggaaagaaacuuaacu

SEQ ID NO: 794472 - RNA, 19 nt, Artificial Sequence
  Description of Artificial Sequence: Synthetic oligonucleotide
  Sense strand starting at position 3636 of SEQ ID NO: 587467
uuaaguuucuuuccagaag

SEQ ID NO: 794473 - RNA, 19 nt, Artificial Sequence
  Description of Artificial Sequence: Synthetic oligonucleotide
  Antisense strand to SEQ ID NO: 794472
cuucuggaaagaaacuuaa

SEQ ID NO: 794474 - RNA, 19 nt, Artificial Sequence
  Description of Artificial Sequence: Synthetic oligonucleotide
  Sense strand starting at position 3639 of SEQ ID NO: 587467
aguuucuuuccagaagacu

SEQ ID NO: 794475 - RNA, 19 nt, Artificial Sequence
  Description of Artificial Sequence: Synthetic oligonucleotide
  Antisense strand to SEQ ID NO: 794474
agucuucuggaaagaaacu

SEQ ID NO: 794476 - RNA, 19 nt, Artificial Sequence
  Description of Artificial Sequence: Synthetic oligonucleotide
  Sense strand starting at position 3685 of SEQ ID NO: 587467
uaugaucgaugcuuugaaa

SEQ ID NO: 794477 - RNA, 19 nt, Artificial Sequence
  Description of Artificial Sequence: Synthetic oligonucleotide
  Antisense strand to SEQ ID NO: 794476
uuucaaagcaucgaucaua

SEQ ID NO: 794478 - RNA, 19 nt, Artificial Sequence
  Description of Artificial Sequence: Synthetic oligonucleotide
  Sense strand starting at position 3709 of SEQ ID NO: 587467
gaauguaaccaaugaguuu

SEQ ID NO: 794479 - RNA, 19 nt, Artificial Sequence
  Description of Artificial Sequence: Synthetic oligonucleotide
  Antisense strand to SEQ ID NO: 794478
aaacucauugguuacauuc

SEQ ID NO: 794480 - RNA, 19 nt, Artificial Sequence
  Description of Artificial Sequence: Synthetic oligonucleotide
  Sense strand starting at position 165 of SEQ ID NO: 587468
uuauguugcccugagugaa

SEQ ID NO: 794481 - RNA, 19 nt, Artificial Sequence
  Description of Artificial Sequence: Synthetic oligonucleotide
  Antisense strand to SEQ ID NO: 794480
uucacucagggcaacauaa

SEQ ID NO: 794482 - RNA, 19 nt, Artificial Sequence
  Description of Artificial Sequence: Synthetic oligonucleotide
  Sense strand starting at position 208 of SEQ ID NO: 587468
cacugugagucacugacua

SEQ ID NO: 794483 - RNA, 19 nt, Artificial Sequence
  Description of Artificial Sequence: Synthetic oligonucleotide
  Antisense strand to SEQ ID NO: 794482
uagucagugacucacagug

SEQ ID NO: 794484 - RNA, 19 nt, Artificial Sequence
  Description of Artificial Sequence: Synthetic oligonucleotide
  Sense strand starting at position 212 of SEQ ID NO: 587468
gugagucacugacuaauau

SEQ ID NO: 794485 - RNA, 19 nt, Artificial Sequence
  Description of Artificial Sequence: Synthetic oligonucleotide
  Antisense strand to SEQ ID NO: 794484
auauuagucagugacucac

SEQ ID NO: 794486 - RNA, 19 nt, Artificial Sequence
  Description of Artificial Sequence: Synthetic oligonucleotide
  Sense strand starting at position 246 of SEQ ID NO: 587468
guaguugauggauguuuaa

SEQ ID NO: 794487 - RNA, 19 nt, Artificial Sequence
  Description of Artificial Sequence: Synthetic oligonucleotide
  Antisense strand to SEQ ID NO: 794486
uuaaacauccaucaacuac

SEQ ID NO: 794488 - RNA, 19 nt, Artificial Sequence
  Description of Artificial Sequence: Synthetic oligonucleotide
  Sense strand starting at position 249 of SEQ ID NO: 587468
guugauggauguuuaauga

SEQ ID NO: 794489 - RNA, 19 nt, Artificial Sequence
  Description of Artificial Sequence: Synthetic oligonucleotide
  Antisense strand to SEQ ID NO: 794488
ucauuaaacauccaucaac

SEQ ID NO: 794490 - RNA, 19 nt, Artificial Sequence
  Description of Artificial Sequence: Synthetic oligonucleotide
  Sense strand starting at position 369 of SEQ ID NO: 587468
aucccauuggauugugauu

SEQ ID NO: 794491 - RNA, 19 nt, Artificial Sequence
  Description of Artificial Sequence: Synthetic oligonucleotide
  Antisense strand to SEQ ID NO: 794490
aaucacaauccaaugggau

SEQ ID NO: 794492 - RNA, 19 nt, Artificial Sequence
  Description of Artificial Sequence: Synthetic oligonucleotide
  Sense strand starting at position 403 of SEQ ID NO: 587468
caagacuuguuaguuagua

SEQ ID NO: 794493 - RNA, 19 nt, Artificial Sequence
  Description of Artificial Sequence: Synthetic oligonucleotide
  Antisense strand to SEQ ID NO: 794492
uacuaacuaacaagucuug

SEQ ID NO: 794494 - RNA, 19 nt, Artificial Sequence
  Description of Artificial Sequence: Synthetic oligonucleotide
  Sense strand starting at position 404 of SEQ ID NO: 587468
aagacuuguuaguuaguau

SEQ ID NO: 794495 - RNA, 19 nt, Artificial Sequence
  Description of Artificial Sequence: Synthetic oligonucleotide
  Antisense strand to SEQ ID NO: 794494
auacuaacuaacaagucuu

SEQ ID NO: 794496 - RNA, 19 nt, Artificial Sequence
  Description of Artificial Sequence: Synthetic oligonucleotide
  Sense strand starting at position 405 of SEQ ID NO: 587468
agacuuguuaguuaguauc

SEQ ID NO: 794497 - RNA, 19 nt, Artificial Sequence
  Description of Artificial Sequence: Synthetic oligonucleotide
  Antisense strand to SEQ ID NO: 794496
gauacuaacuaacaagucu

SEQ ID NO: 794498 - RNA, 19 nt, Artificial Sequence
  Description of Artificial Sequence: Synthetic oligonucleotide
  Sense strand starting at position 610 of SEQ ID NO: 587468
agaugagagguuggccaaa

SEQ ID NO: 794499 - RNA, 19 nt, Artificial Sequence
  Description of Artificial Sequence: Synthetic oligonucleotide
  Antisense strand to SEQ ID NO: 794498
uuuggccaaccucucaucu

SEQ ID NO: 794500 - RNA, 19 nt, Artificial Sequence
  Description of Artificial Sequence: Synthetic oligonucleotide
  Sense strand starting at position 612 of SEQ ID NO: 587468
augagagguuggccaaauc

SEQ ID NO: 794501 - RNA, 19 nt, Artificial Sequence
  Description of Artificial Sequence: Synthetic oligonucleotide
  Antisense strand to SEQ ID NO: 794500
gauuuggccaaccucucau

SEQ ID NO: 794502 - RNA, 19 nt, Artificial Sequence
  Description of Artificial Sequence: Synthetic oligonucleotide
  Sense strand starting at position 759 of SEQ ID NO: 587468
cugccuauccuggauauua

SEQ ID NO: 794503 - RNA, 19 nt, Artificial Sequence
  Description of Artificial Sequence: Synthetic oligonucleotide
  Antisense strand to SEQ ID NO: 794502
uaauauccaggauaggcag

SEQ ID NO: 794504 - RNA, 19 nt, Artificial Sequence
  Description of Artificial Sequence: Synthetic oligonucleotide
  Sense strand starting at position 761 of SEQ ID NO: 587468
gccuauccuggauauuauu

SEQ ID NO: 794505 - RNA, 19 nt, Artificial Sequence
  Description of Artificial Sequence: Synthetic oligonucleotide
  Antisense strand to SEQ ID NO: 794504
aauaauauccaggauaggc

SEQ ID NO: 794506 - RNA, 19 nt, Artificial Sequence
  Description of Artificial Sequence: Synthetic oligonucleotide
  Sense strand starting at position 866 of SEQ ID NO: 587468
ugaucugaguuuguaauca

SEQ ID NO: 794507 - RNA, 19 nt, Artificial Sequence
  Description of Artificial Sequence: Synthetic oligonucleotide
  Antisense strand to SEQ ID NO: 794506
ugauuacaaacucagauca

SEQ ID NO: 794508 - RNA, 19 nt, Artificial Sequence
  Description of Artificial Sequence: Synthetic oligonucleotide
  Sense strand starting at position 914 of SEQ ID NO: 587468
ugcagauguaguuaacagu

SEQ ID NO: 794509 - RNA, 19 nt, Artificial Sequence
  Description of Artificial Sequence: Synthetic oligonucleotide
  Antisense strand to SEQ ID NO: 794508
acuguuaacuacaucugca

SEQ ID NO: 794510 - RNA, 19 nt, Artificial Sequence
  Description of Artificial Sequence: Synthetic oligonucleotide
  Sense strand starting at position 958 of SEQ ID NO: 587468
gugccucucggcuuugaca

SEQ ID NO: 794511 - RNA, 19 nt, Artificial Sequence
  Description of Artificial Sequence: Synthetic oligonucleotide
  Antisense strand to SEQ ID NO: 794510
ugucaaagccgagaggcac

SEQ ID NO: 794512 - RNA, 19 nt, Artificial Sequence
  Description of Artificial Sequence: Synthetic oligonucleotide
  Sense strand starting at position 1062 of SEQ ID NO: 587468
gucugaaagcgagauaguu

SEQ ID NO: 794513 - RNA, 19 nt, Artificial Sequence
  Description of Artificial Sequence: Synthetic oligonucleotide
  Antisense strand to SEQ ID NO: 794512
aacuaucucgcuuucagac

SEQ ID NO: 794514 - RNA, 19 nt, Artificial Sequence
  Description of Artificial Sequence: Synthetic oligonucleotide
  Sense strand starting at position 1095 of SEQ ID NO: 587468
gagcaaggauugucacuau

SEQ ID NO: 794515 - RNA, 19 nt, Artificial Sequence
  Description of Artificial Sequence: Synthetic oligonucleotide
  Antisense strand to SEQ ID NO: 794514
auagugacaauccuugcuc

SEQ ID NO: 794516 - RNA, 19 nt, Artificial Sequence
  Description of Artificial Sequence: Synthetic oligonucleotide
  Sense strand starting at position 1098 of SEQ ID NO: 587468
caaggauugucacuaugag

SEQ ID NO: 794517 - RNA, 19 nt, Artificial Sequence
  Description of Artificial Sequence: Synthetic oligonucleotide
  Antisense strand to SEQ ID NO: 794516
cucauagugacaauccuug

SEQ ID NO: 794518 - RNA, 19 nt, Artificial Sequence
  Description of Artificial Sequence: Synthetic oligonucleotide
  Sense strand starting at position 1099 of SEQ ID NO: 587468
aaggauugucacuaugagc

SEQ ID NO: 794519 - RNA, 19 nt, Artificial Sequence
  Description of Artificial Sequence: Synthetic oligonucleotide
  Antisense strand to SEQ ID NO: 794518
gcucauagugacaauccuu

SEQ ID NO: 794520 - RNA, 19 nt, Artificial Sequence
  Description of Artificial Sequence: Synthetic oligonucleotide
  Sense strand starting at position 1106 of SEQ ID NO: 587468
gucacuaugagcgauguga

SEQ ID NO: 794521 - RNA, 19 nt, Artificial Sequence
  Description of Artificial Sequence: Synthetic oligonucleotide
  Antisense strand to SEQ ID NO: 794520
ucacaucgcucauagugac

SEQ ID NO: 794522 - RNA, 19 nt, Artificial Sequence
  Description of Artificial Sequence: Synthetic oligonucleotide
  Sense strand starting at position 1331 of SEQ ID NO: 587468
ugaagcuggcucuacagau

SEQ ID NO: 794523 - RNA, 19 nt, Artificial Sequence
  Description of Artificial Sequence: Synthetic oligonucleotide
  Antisense strand to SEQ ID NO: 794522
aucuguagagccagcuuca

SEQ ID NO: 794524 - RNA, 19 nt, Artificial Sequence
  Description of Artificial Sequence: Synthetic oligonucleotide
  Sense strand starting at position 2076 of SEQ ID NO: 587468
gguugcuaugguuauggaa

SEQ ID NO: 794525 - RNA, 19 nt, Artificial Sequence
  Description of Artificial Sequence: Synthetic oligonucleotide
  Antisense strand to SEQ ID NO: 794524
uuccauaaccauagcaacc

SEQ ID NO: 794526 - RNA, 19 nt, Artificial Sequence
  Description of Artificial Sequence: Synthetic oligonucleotide
  Sense strand starting at position 2759 of SEQ ID NO: 587468
acaaguagaugccugagaa

SEQ ID NO: 794527 - RNA, 19 nt, Artificial Sequence
  Description of Artificial Sequence: Synthetic oligonucleotide
  Antisense strand to SEQ ID NO: 794526
uucucaggcaucuacuugu

SEQ ID NO: 794528 - RNA, 19 nt, Artificial Sequence
  Description of Artificial Sequence: Synthetic oligonucleotide
  Sense strand starting at position 2760 of SEQ ID NO: 587468
caaguagaugccugagaaa

SEQ ID NO: 794529 - RNA, 19 nt, Artificial Sequence
  Description of Artificial Sequence: Synthetic oligonucleotide
  Antisense strand to SEQ ID NO: 794528
uuucucaggcaucuacuug

SEQ ID NO: 794530 - RNA, 19 nt, Artificial Sequence
  Description of Artificial Sequence: Synthetic oligonucleotide
  Sense strand starting at position 2767 of SEQ ID NO: 587468
augccugagaaaggguaaa

SEQ ID NO: 794531 - RNA, 19 nt, Artificial Sequence
  Description of Artificial Sequence: Synthetic oligonucleotide
  Antisense strand to SEQ ID NO: 794530
uuuacccuuucucaggcau

SEQ ID NO: 794532 - RNA, 19 nt, Artificial Sequence
  Description of Artificial Sequence: Synthetic oligonucleotide
  Sense strand starting at position 2904 of SEQ ID NO: 587468
agauucuguccacggagga

SEQ ID NO: 794533 - RNA, 19 nt, Artificial Sequence
  Description of Artificial Sequence: Synthetic oligonucleotide
  Antisense strand to SEQ ID NO: 794532
uccuccguggacagaaucu

SEQ ID NO: 794534 - RNA, 19 nt, Artificial Sequence
  Description of Artificial Sequence: Synthetic oligonucleotide
  Sense strand starting at position 3015 of SEQ ID NO: 587468
uggcaaguucucguggcau

SEQ ID NO: 794535 - RNA, 19 nt, Artificial Sequence
  Description of Artificial Sequence: Synthetic oligonucleotide
  Antisense strand to SEQ ID NO: 794534
augccacgagaacuugcca

SEQ ID NO: 794536 - RNA, 19 nt, Artificial Sequence
  Description of Artificial Sequence: Synthetic oligonucleotide
  Sense strand starting at position 3032 of SEQ ID NO: 587468
augccugugacagaugaca

SEQ ID NO: 794537 - RNA, 19 nt, Artificial Sequence
  Description of Artificial Sequence: Synthetic oligonucleotide
  Antisense strand to SEQ ID NO: 794536
ugucaucugucacaggcau

SEQ ID NO: 794538 - RNA, 19 nt, Artificial Sequence
  Description of Artificial Sequence: Synthetic oligonucleotide
  Sense strand starting at position 3034 of SEQ ID NO: 587468
gccugugacagaugacaaa

SEQ ID NO: 794539 - RNA, 19 nt, Artificial Sequence
  Description of Artificial Sequence: Synthetic oligonucleotide
  Antisense strand to SEQ ID NO: 794538
uuugucaucugucacaggc

SEQ ID NO: 794540 - RNA, 19 nt, Artificial Sequence
  Description of Artificial Sequence: Synthetic oligonucleotide
  Sense strand starting at position 3158 of SEQ ID NO: 587468
ggcauuagaggaugacuau

SEQ ID NO: 794541 - RNA, 19 nt, Artificial Sequence
  Description of Artificial Sequence: Synthetic oligonucleotide
  Antisense strand to SEQ ID NO: 794540
auagucauccucuaaugcc

SEQ ID NO: 794542 - RNA, 19 nt, Artificial Sequence
  Description of Artificial Sequence: Synthetic oligonucleotide
  Sense strand starting at position 3366 of SEQ ID NO: 587468
ugcucuuuccaggacaaga

SEQ ID NO: 794543 - RNA, 19 nt, Artificial Sequence
  Description of Artificial Sequence: Synthetic oligonucleotide
  Antisense strand to SEQ ID NO: 794542
ucuuguccuggaaagagca

SEQ ID NO: 794544 - RNA, 19 nt, Artificial Sequence
  Description of Artificial Sequence: Synthetic oligonucleotide
  Sense strand starting at position 3460 of SEQ ID NO: 587468
aggcgaguggugagguuua

SEQ ID NO: 794545 - RNA, 19 nt, Artificial Sequence
  Description of Artificial Sequence: Synthetic oligonucleotide
  Antisense strand to SEQ ID NO: 794544
uaaaccucaccacucgccu

SEQ ID NO: 794546 - RNA, 19 nt, Artificial Sequence
  Description of Artificial Sequence: Synthetic oligonucleotide
  Sense strand starting at position 3525 of SEQ ID NO: 587468
guuggaauuugacaaugug

SEQ ID NO: 794547 - RNA, 19 nt, Artificial Sequence
  Description of Artificial Sequence: Synthetic oligonucleotide
  Antisense strand to SEQ ID NO: 794546
cacauugucaaauuccaac

SEQ ID NO: 794548 - RNA, 19 nt, Artificial Sequence
  Description of Artificial Sequence: Synthetic oligonucleotide
  Sense strand starting at position 3636 of SEQ ID NO: 587468
agaucaccuuaguugaagu

SEQ ID NO: 794549 - RNA, 19 nt, Artificial Sequence
  Description of Artificial Sequence: Synthetic oligonucleotide
  Antisense strand to SEQ ID NO: 794548
acuucaacuaaggugaucu

SEQ ID NO: 794550 - RNA, 19 nt, Artificial Sequence
  Description of Artificial Sequence: Synthetic oligonucleotide
  Sense strand starting at position 3688 of SEQ ID NO: 587468
ugcagaaagagguguccua

SEQ ID NO: 794551 - RNA, 19 nt, Artificial Sequence
  Description of Artificial Sequence: Synthetic oligonucleotide
  Antisense strand to SEQ ID NO: 794550
uaggacaccucuuucugca

SEQ ID NO: 794552 - RNA, 19 nt, Artificial Sequence
  Description of Artificial Sequence: Synthetic oligonucleotide
  Sense strand starting at position 3801 of SEQ ID NO: 587468
ugcauacccucaguaaaug

SEQ ID NO: 794553 - RNA, 19 nt, Artificial Sequence
  Description of Artificial Sequence: Synthetic oligonucleotide
  Antisense strand to SEQ ID NO: 794552
cauuuacugaggguaugca

SEQ ID NO: 794554 - RNA, 19 nt, Artificial Sequence
  Description of Artificial Sequence: Synthetic oligonucleotide
  Sense strand starting at position 3802 of SEQ ID NO: 587468
gcauacccucaguaaaugu

SEQ ID NO: 794555 - RNA, 19 nt, Artificial Sequence
  Description of Artificial Sequence: Synthetic oligonucleotide
  Antisense strand to SEQ ID NO: 794554
acauuuacugaggguaugc

SEQ ID NO: 794556 - RNA, 19 nt, Artificial Sequence
  Description of Artificial Sequence: Synthetic oligonucleotide
  Sense strand starting at position 3817 of SEQ ID NO: 587468
auguuuggugaauggcaaa

SEQ ID NO: 794557 - RNA, 19 nt, Artificial Sequence
  Description of Artificial Sequence: Synthetic oligonucleotide
  Antisense strand to SEQ ID NO: 794556
uuugccauucaccaaacau

SEQ ID NO: 794558 - RNA, 19 nt, Artificial Sequence
  Description of Artificial Sequence: Synthetic oligonucleotide
  Sense strand starting at position 3926 of SEQ ID NO: 587468
ugcuauugacauugcauuu

SEQ ID NO: 794559 - RNA, 19 nt, Artificial Sequence
  Description of Artificial Sequence: Synthetic oligonucleotide
  Antisense strand to SEQ ID NO: 794558
aaaugcaaugucaauagca

SEQ ID NO: 794560 - RNA, 19 nt, Artificial Sequence
  Description of Artificial Sequence: Synthetic oligonucleotide
  Sense strand starting at position 63 of SEQ ID NO: 587469
aacagaaggucugaaugaa

SEQ ID NO: 794561 - RNA, 19 nt, Artificial Sequence
  Description of Artificial Sequence: Synthetic oligonucleotide
  Antisense strand to SEQ ID NO: 794560
uucauucagaccuucuguu

SEQ ID NO: 794562 - RNA, 19 nt, Artificial Sequence
  Description of Artificial Sequence: Synthetic oligonucleotide
  Sense strand starting at position 201 of SEQ ID NO: 587469
gcaugaucugugugcacca

SEQ ID NO: 794563 - RNA, 19 nt, Artificial Sequence
  Description of Artificial Sequence: Synthetic oligonucleotide
  Antisense strand to SEQ ID NO: 794562
uggugcacacagaucaugc

SEQ ID NO: 794564 - RNA, 19 nt, Artificial Sequence
  Description of Artificial Sequence: Synthetic oligonucleotide
  Sense strand starting at position 508 of SEQ ID NO: 587469
cgaagaaaguuuguggagu

SEQ ID NO: 794565 - RNA, 19 nt, Artificial Sequence
  Description of Artificial Sequence: Synthetic oligonucleotide
  Antisense strand to SEQ ID NO: 794564
acuccacaaacuuucuucg

SEQ ID NO: 794566 - RNA, 19 nt, Artificial Sequence
  Description of Artificial Sequence: Synthetic oligonucleotide
  Sense strand starting at position 514 of SEQ ID NO: 587469
aaguuuguggagugaauaa

SEQ ID NO: 794567 - RNA, 19 nt, Artificial Sequence
  Description of Artificial Sequence: Synthetic oligonucleotide
  Antisense strand to SEQ ID NO: 794566
uuauucacuccacaaacuu

SEQ ID NO: 794568 - RNA, 19 nt, Artificial Sequence
  Description of Artificial Sequence: Synthetic oligonucleotide
  Sense strand starting at position 521 of SEQ ID NO: 587469
uggagugaauaaguauaua

SEQ ID NO: 794569 - RNA, 19 nt, Artificial Sequence
  Description of Artificial Sequence: Synthetic oligonucleotide
  Antisense strand to SEQ ID NO: 794568
uauauacuuauucacucca

SEQ ID NO: 794570 - RNA, 19 nt, Artificial Sequence
  Description of Artificial Sequence: Synthetic oligonucleotide
  Sense strand starting at position 942 of SEQ ID NO: 587469
gacuucucugccuguggau

SEQ ID NO: 794571 - RNA, 19 nt, Artificial Sequence
  Description of Artificial Sequence: Synthetic oligonucleotide
  Antisense strand to SEQ ID NO: 794570
auccacaggcagagaaguc

SEQ ID NO: 794572 - RNA, 19 nt, Artificial Sequence
  Description of Artificial Sequence: Synthetic oligonucleotide
  Sense strand starting at position 1035 of SEQ ID NO: 587469
gaaccugacuguccaaagu

SEQ ID NO: 794573 - RNA, 19 nt, Artificial Sequence
  Description of Artificial Sequence: Synthetic oligonucleotide
  Antisense strand to SEQ ID NO: 794572
acuuuggacagucagguuc

SEQ ID NO: 794574 - RNA, 19 nt, Artificial Sequence
  Description of Artificial Sequence: Synthetic oligonucleotide
  Sense strand starting at position 1203 of SEQ ID NO: 587469
ggugucuacggacagcaau

SEQ ID NO: 794575 - RNA, 19 nt, Artificial Sequence
  Description of Artificial Sequence: Synthetic oligonucleotide
  Antisense strand to SEQ ID NO: 794574
auugcuguccguagacacc

SEQ ID NO: 794576 - RNA, 19 nt, Artificial Sequence
  Description of Artificial Sequence: Synthetic oligonucleotide
  Sense strand starting at position 1378 of SEQ ID NO: 587469
auagaaagcugaucccauu

SEQ ID NO: 794577 - RNA, 19 nt, Artificial Sequence
  Description of Artificial Sequence: Synthetic oligonucleotide
  Antisense strand to SEQ ID NO: 794576
aaugggaucagcuuucuau

SEQ ID NO: 794578 - RNA, 19 nt, Artificial Sequence
  Description of Artificial Sequence: Synthetic oligonucleotide
  Sense strand starting at position 1418 of SEQ ID NO: 587469
aacucucaaccgugguaaa

SEQ ID NO: 794579 - RNA, 19 nt, Artificial Sequence
  Description of Artificial Sequence: Synthetic oligonucleotide
  Antisense strand to SEQ ID NO: 794578
uuuaccacgguugagaguu

SEQ ID NO: 794580 - RNA, 19 nt, Artificial Sequence
  Description of Artificial Sequence: Synthetic oligonucleotide
  Sense strand starting at position 1419 of SEQ ID NO: 587469
acucucaaccgugguaaau

SEQ ID NO: 794581 - RNA, 19 nt, Artificial Sequence
  Description of Artificial Sequence: Synthetic oligonucleotide
  Antisense strand to SEQ ID NO: 794580
auuuaccacgguugagagu

SEQ ID NO: 794582 - RNA, 19 nt, Artificial Sequence
  Description of Artificial Sequence: Synthetic oligonucleotide
  Sense strand starting at position 1430 of SEQ ID NO: 587469
ugguaaaucuaauucgcuu

SEQ ID NO: 794583 - RNA, 19 nt, Artificial Sequence
  Description of Artificial Sequence: Synthetic oligonucleotide
  Antisense strand to SEQ ID NO: 794582
aagcgaauuagauuuacca

SEQ ID NO: 794584 - RNA, 19 nt, Artificial Sequence
  Description of Artificial Sequence: Synthetic oligonucleotide
  Sense strand starting at position 2658 of SEQ ID NO: 587469
aggugaaaucgccaagguu

SEQ ID NO: 794585 - RNA, 19 nt, Artificial Sequence
  Description of Artificial Sequence: Synthetic oligonucleotide
  Antisense strand to SEQ ID NO: 794584
aaccuuggcgauuucaccu

SEQ ID NO: 794586 - RNA, 19 nt, Artificial Sequence
  Description of Artificial Sequence: Synthetic oligonucleotide
  Sense strand starting at position 2723 of SEQ ID NO: 587469
agggaacucuuauaaagag

SEQ ID NO: 794587 - RNA, 19 nt, Artificial Sequence
  Description of Artificial Sequence: Synthetic oligonucleotide
  Antisense strand to SEQ ID NO: 794586
cucuuuauaagaguucccu

SEQ ID NO: 794588 - RNA, 19 nt, Artificial Sequence
  Description of Artificial Sequence: Synthetic oligonucleotide
  Sense strand starting at position 2779 of SEQ ID NO: 587469
agucguucugauuaaagug

SEQ ID NO: 794589 - RNA, 19 nt, Artificial Sequence
  Description of Artificial Sequence: Synthetic oligonucleotide
  Antisense strand to SEQ ID NO: 794588
cacuuuaaucagaacgacu

SEQ ID NO: 794590 - RNA, 19 nt, Artificial Sequence
  Description of Artificial Sequence: Synthetic oligonucleotide
  Sense strand starting at position 2858 of SEQ ID NO: 587469
gcuuuauugcuuuauguua

SEQ ID NO: 794591 - RNA, 19 nt, Artificial Sequence
  Description of Artificial Sequence: Synthetic oligonucleotide
  Antisense strand to SEQ ID NO: 794590
uaacauaaagcaauaaagc

SEQ ID NO: 794592 - RNA, 19 nt, Artificial Sequence
  Description of Artificial Sequence: Synthetic oligonucleotide
  Sense strand starting at position 2891 of SEQ ID NO: 587469
uguugaaauugcucgcuaa

SEQ ID NO: 794593 - RNA, 19 nt, Artificial Sequence
  Description of Artificial Sequence: Synthetic oligonucleotide
  Antisense strand to SEQ ID NO: 794592
uuagcgagcaauuucaaca

SEQ ID NO: 794594 - RNA, 19 nt, Artificial Sequence
  Description of Artificial Sequence: Synthetic oligonucleotide
  Sense strand starting at position 2892 of SEQ ID NO: 587469
guugaaauugcucgcuaau

SEQ ID NO: 794595 - RNA, 19 nt, Artificial Sequence
  Description of Artificial Sequence: Synthetic oligonucleotide
  Antisense strand to SEQ ID NO: 794594
auuagcgagcaauuucaac

SEQ ID NO: 794596 - RNA, 19 nt, Artificial Sequence
  Description of Artificial Sequence: Synthetic oligonucleotide
  Sense strand starting at position 2894 of SEQ ID NO: 587469
ugaaauugcucgcuaauca

SEQ ID NO: 794597 - RNA, 19 nt, Artificial Sequence
  Description of Artificial Sequence: Synthetic oligonucleotide
  Antisense strand to SEQ ID NO: 794596
ugauuagcgagcaauuuca

SEQ ID NO: 794598 - RNA, 19 nt, Artificial Sequence
  Description of Artificial Sequence: Synthetic oligonucleotide
  Sense strand starting at position 3040 of SEQ ID NO: 587469
agaaaucuugugggucaca

SEQ ID NO: 794599 - RNA, 19 nt, Artificial Sequence
  Description of Artificial Sequence: Synthetic oligonucleotide
  Antisense strand to SEQ ID NO: 794598
ugugacccacaagauuucu

SEQ ID NO: 794600 - RNA, 19 nt, Artificial Sequence
  Description of Artificial Sequence: Synthetic oligonucleotide
  Sense strand starting at position 3043 of SEQ ID NO: 587469
aaucuugugggucacagau

SEQ ID NO: 794601 - RNA, 19 nt, Artificial Sequence
  Description of Artificial Sequence: Synthetic oligonucleotide
  Antisense strand to SEQ ID NO: 794600
aucugugacccacaagauu

SEQ ID NO: 794602 - RNA, 19 nt, Artificial Sequence
  Description of Artificial Sequence: Synthetic oligonucleotide
  Sense strand starting at position 3122 of SEQ ID NO: 587469
cuaagaaauugggaagcaa

SEQ ID NO: 794603 - RNA, 19 nt, Artificial Sequence
  Description of Artificial Sequence: Synthetic oligonucleotide
  Antisense strand to SEQ ID NO: 794602
uugcuucccaauuucuuag

SEQ ID NO: 794604 - RNA, 19 nt, Artificial Sequence
  Description of Artificial Sequence: Synthetic oligonucleotide
  Sense strand starting at position 3151 of SEQ ID NO: 587469
gcaggagcccugugaaauc

SEQ ID NO: 794605 - RNA, 19 nt, Artificial Sequence
  Description of Artificial Sequence: Synthetic oligonucleotide
  Antisense strand to SEQ ID NO: 794604
gauuucacagggcuccugc

SEQ ID NO: 794606 - RNA, 19 nt, Artificial Sequence
  Description of Artificial Sequence: Synthetic oligonucleotide
  Sense strand starting at position 3162 of SEQ ID NO: 587469
gugaaaucgugccuuugga

SEQ ID NO: 794607 - RNA, 19 nt, Artificial Sequence
  Description of Artificial Sequence: Synthetic oligonucleotide
  Antisense strand to SEQ ID NO: 794606
uccaaaggcacgauuucac

SEQ ID NO: 794608 - RNA, 19 nt, Artificial Sequence
  Description of Artificial Sequence: Synthetic oligonucleotide
  Sense strand starting at position 3196 of SEQ ID NO: 587469
gaaguuguuacacagguga

SEQ ID NO: 794609 - RNA, 19 nt, Artificial Sequence
  Description of Artificial Sequence: Synthetic oligonucleotide
  Antisense strand to SEQ ID NO: 794608
ucaccuguguaacaacuuc

SEQ ID NO: 794610 - RNA, 19 nt, Artificial Sequence
  Description of Artificial Sequence: Synthetic oligonucleotide
  Sense strand starting at position 3198 of SEQ ID NO: 587469
aguuguuacacaggugaag

SEQ ID NO: 794611 - RNA, 19 nt, Artificial Sequence
  Description of Artificial Sequence: Synthetic oligonucleotide
  Antisense strand to SEQ ID NO: 794610
cuucaccuguguaacaacu

SEQ ID NO: 794612 - RNA, 19 nt, Artificial Sequence
  Description of Artificial Sequence: Synthetic oligonucleotide
  Sense strand starting at position 3239 of SEQ ID NO: 587469
cuguuaagcacgcauagga

SEQ ID NO: 794613 - RNA, 19 nt, Artificial Sequence
  Description of Artificial Sequence: Synthetic oligonucleotide
  Antisense strand to SEQ ID NO: 794612
uccuaugcgugcuuaacag

SEQ ID NO: 794614 - RNA, 19 nt, Artificial Sequence
  Description of Artificial Sequence: Synthetic oligonucleotide
  Sense strand starting at position 3249 of SEQ ID NO: 587469
cgcauaggaaucugguauu

SEQ ID NO: 794615 - RNA, 19 nt, Artificial Sequence
  Description of Artificial Sequence: Synthetic oligonucleotide
  Antisense strand to SEQ ID NO: 794614
aauaccagauuccuaugcg

SEQ ID NO: 794616 - RNA, 19 nt, Artificial Sequence
  Description of Artificial Sequence: Synthetic oligonucleotide
  Sense strand starting at position 3259 of SEQ ID NO: 587469
ucugguauuuccuaagcaa

SEQ ID NO: 794617 - RNA, 19 nt, Artificial Sequence
  Description of Artificial Sequence: Synthetic oligonucleotide
  Antisense strand to SEQ ID NO: 794616
uugcuuaggaaauaccaga

SEQ ID NO: 794618 - RNA, 19 nt, Artificial Sequence
  Description of Artificial Sequence: Synthetic oligonucleotide
  Sense strand starting at position 3317 of SEQ ID NO: 587469
ccacaagagucuuccuaga

SEQ ID NO: 794619 - RNA, 19 nt, Artificial Sequence
  Description of Artificial Sequence: Synthetic oligonucleotide
  Antisense strand to SEQ ID NO: 794618
ucuaggaagacucuugugg

SEQ ID NO: 794620 - RNA, 19 nt, Artificial Sequence
  Description of Artificial Sequence: Synthetic oligonucleotide
  Sense strand starting at position 3358 of SEQ ID NO: 587469
gcccuacuuagguggaaua

SEQ ID NO: 794621 - RNA, 19 nt, Artificial Sequence
  Description of Artificial Sequence: Synthetic oligonucleotide
  Antisense strand to SEQ ID NO: 794620
uauuccaccuaaguagggc

SEQ ID NO: 794622 - RNA, 19 nt, Artificial Sequence
  Description of Artificial Sequence: Synthetic oligonucleotide
  Sense strand starting at position 3359 of SEQ ID NO: 587469
cccuacuuagguggaauaa

SEQ ID NO: 794623 - RNA, 19 nt, Artificial Sequence
  Description of Artificial Sequence: Synthetic oligonucleotide
  Antisense strand to SEQ ID NO: 794622
uuauuccaccuaaguaggg

SEQ ID NO: 794624 - RNA, 19 nt, Artificial Sequence
  Description of Artificial Sequence: Synthetic oligonucleotide
  Sense strand starting at position 3505 of SEQ ID NO: 587469
ggaaaugcaguaugaaaua

SEQ ID NO: 794625 - RNA, 19 nt, Artificial Sequence
  Description of Artificial Sequence: Synthetic oligonucleotide
  Antisense strand to SEQ ID NO: 794624
uauuucauacugcauuucc

SEQ ID NO: 794626 - RNA, 19 nt, Artificial Sequence
  Description of Artificial Sequence: Synthetic oligonucleotide
  Sense strand starting at position 3516 of SEQ ID NO: 587469
augaaauaaugcuggagaa

SEQ ID NO: 794627 - RNA, 19 nt, Artificial Sequence
  Description of Artificial Sequence: Synthetic oligonucleotide
  Antisense strand to SEQ ID NO: 794626
uucuccagcauuauuucau

SEQ ID NO: 794628 - RNA, 19 nt, Artificial Sequence
  Description of Artificial Sequence: Synthetic oligonucleotide
  Sense strand starting at position 3575 of SEQ ID NO: 587469
accaucuauccggagcaaa

SEQ ID NO: 794629 - RNA, 19 nt, Artificial Sequence
  Description of Artificial Sequence: Synthetic oligonucleotide
  Antisense strand to SEQ ID NO: 794628
uuugcuccggauagauggu

SEQ ID NO: 794630 - RNA, 19 nt, Artificial Sequence
  Description of Artificial Sequence: Synthetic oligonucleotide
  Sense strand starting at position 3626 of SEQ ID NO: 587469
cucuuccucuacguugaaa

SEQ ID NO: 794631 - RNA, 19 nt, Artificial Sequence
  Description of Artificial Sequence: Synthetic oligonucleotide
  Antisense strand to SEQ ID NO: 794630
uuucaacguagaggaagag

SEQ ID NO: 794632 - RNA, 19 nt, Artificial Sequence
  Description of Artificial Sequence: Synthetic oligonucleotide
  Sense strand starting at position 3758 of SEQ ID NO: 587469
aggugaagagguugaacuu

SEQ ID NO: 794633 - RNA, 19 nt, Artificial Sequence
  Description of Artificial Sequence: Synthetic oligonucleotide
  Antisense strand to SEQ ID NO: 794632
aaguucaaccucuucaccu

SEQ ID NO: 794634 - RNA, 19 nt, Artificial Sequence
  Description of Artificial Sequence: Synthetic oligonucleotide
  Sense strand starting at position 3789 of SEQ ID NO: 587469
cacuguguaccaugugaag

SEQ ID NO: 794635 - RNA, 19 nt, Artificial Sequence
  Description of Artificial Sequence: Synthetic oligonucleotide
  Antisense strand to SEQ ID NO: 794634
cuucacaugguacacagug

SEQ ID NO: 794636 - RNA, 19 nt, Artificial Sequence
  Description of Artificial Sequence: Synthetic oligonucleotide
  Sense strand starting at position 3791 of SEQ ID NO: 587469
cuguguaccaugugaagga

SEQ ID NO: 794637 - RNA, 19 nt, Artificial Sequence
  Description of Artificial Sequence: Synthetic oligonucleotide
  Antisense strand to SEQ ID NO: 794636
uccuucacaugguacacag

SEQ ID NO: 794638 - RNA, 19 nt, Artificial Sequence
  Description of Artificial Sequence: Synthetic oligonucleotide
  Sense strand starting at position 3891 of SEQ ID NO: 587469
gacucuggguaguucugaa

SEQ ID NO: 794639 - RNA, 19 nt, Artificial Sequence
  Description of Artificial Sequence: Synthetic oligonucleotide
  Antisense strand to SEQ ID NO: 794638
uucagaacuacccagaguc

SEQ ID NO: 794640 - RNA, 19 nt, Artificial Sequence
  Description of Artificial Sequence: Synthetic oligonucleotide
  Sense strand starting at position 7 of SEQ ID NO: 587470
ggagcagucuuccuacuca

SEQ ID NO: 794641 - RNA, 19 nt, Artificial Sequence
  Description of Artificial Sequence: Synthetic oligonucleotide
  Antisense strand to SEQ ID NO: 794640
ugaguaggaagacugcucc

SEQ ID NO: 794642 - RNA, 19 nt, Artificial Sequence
  Description of Artificial Sequence: Synthetic oligonucleotide
  Sense strand starting at position 28 of SEQ ID NO: 587470
gaguaaucaguugacuuac

SEQ ID NO: 794643 - RNA, 19 nt, Artificial Sequence
  Description of Artificial Sequence: Synthetic oligonucleotide
  Antisense strand to SEQ ID NO: 794642
guaagucaacugauuacuc

SEQ ID NO: 794644 - RNA, 19 nt, Artificial Sequence
  Description of Artificial Sequence: Synthetic oligonucleotide
  Sense strand starting at position 30 of SEQ ID NO: 587470
guaaucaguugacuuacua

SEQ ID NO: 794645 - RNA, 19 nt, Artificial Sequence
  Description of Artificial Sequence: Synthetic oligonucleotide
  Antisense strand to SEQ ID NO: 794644
uaguaagucaacugauuac

SEQ ID NO: 794646 - RNA, 19 nt, Artificial Sequence
  Description of Artificial Sequence: Synthetic oligonucleotide
  Sense strand starting at position 34 of SEQ ID NO: 587470
ucaguugacuuacuaggau

SEQ ID NO: 794647 - RNA, 19 nt, Artificial Sequence
  Description of Artificial Sequence: Synthetic oligonucleotide
  Antisense strand to SEQ ID NO: 794646
auccuaguaagucaacuga

SEQ ID NO: 794648 - RNA, 19 nt, Artificial Sequence
  Description of Artificial Sequence: Synthetic oligonucleotide
  Sense strand starting at position 38 of SEQ ID NO: 587470
uugacuuacuaggaucaca

SEQ ID NO: 794649 - RNA, 19 nt, Artificial Sequence
  Description of Artificial Sequence: Synthetic oligonucleotide
  Antisense strand to SEQ ID NO: 794648
ugugauccuaguaagucaa

SEQ ID NO: 794650 - RNA, 19 nt, Artificial Sequence
  Description of Artificial Sequence: Synthetic oligonucleotide
  Sense strand starting at position 61 of SEQ ID NO: 587470
gugaccaaggcuugggaaa

SEQ ID NO: 794651 - RNA, 19 nt, Artificial Sequence
  Description of Artificial Sequence: Synthetic oligonucleotide
  Antisense strand to SEQ ID NO: 794650
uuucccaagccuuggucac

SEQ ID NO: 794652 - RNA, 19 nt, Artificial Sequence
  Description of Artificial Sequence: Synthetic oligonucleotide
  Sense strand starting at position 161 of SEQ ID NO: 587470
agccuauauggucaauacu

SEQ ID NO: 794653 - RNA, 19 nt, Artificial Sequence
  Description of Artificial Sequence: Synthetic oligonucleotide
  Antisense strand to SEQ ID NO: 794652
aguauugaccauauaggcu

SEQ ID NO: 794654 - RNA, 19 nt, Artificial Sequence
  Description of Artificial Sequence: Synthetic oligonucleotide
  Sense strand starting at position 237 of SEQ ID NO: 587470
gccacugaugccuguacuu

SEQ ID NO: 794655 - RNA, 19 nt, Artificial Sequence
  Description of Artificial Sequence: Synthetic oligonucleotide
  Antisense strand to SEQ ID NO: 794654
aaguacaggcaucaguggc

SEQ ID NO: 794656 - RNA, 19 nt, Artificial Sequence
  Description of Artificial Sequence: Synthetic oligonucleotide
  Sense strand starting at position 250 of SEQ ID NO: 587470
guacuucugucauuggaag

SEQ ID NO: 794657 - RNA, 19 nt, Artificial Sequence
  Description of Artificial Sequence: Synthetic oligonucleotide
  Antisense strand to SEQ ID NO: 794656
cuuccaaugacagaaguac

SEQ ID NO: 794658 - RNA, 19 nt, Artificial Sequence
  Description of Artificial Sequence: Synthetic oligonucleotide
  Sense strand starting at position 530 of SEQ ID NO: 587470
cuagccugggcucagaaau

SEQ ID NO: 794659 - RNA, 19 nt, Artificial Sequence
  Description of Artificial Sequence: Synthetic oligonucleotide
  Antisense strand to SEQ ID NO: 794658
auuucugagcccaggcuag

SEQ ID NO: 794660 - RNA, 19 nt, Artificial Sequence
  Description of Artificial Sequence: Synthetic oligonucleotide
  Sense strand starting at position 651 of SEQ ID NO: 587470
agagguaugaauugguuua

SEQ ID NO: 794661 - RNA, 19 nt, Artificial Sequence
  Description of Artificial Sequence: Synthetic oligonucleotide
  Antisense strand to SEQ ID NO: 794660
uaaaccaauucauaccucu

SEQ ID NO: 794662 - RNA, 19 nt, Artificial Sequence
  Description of Artificial Sequence: Synthetic oligonucleotide
  Sense strand starting at position 652 of SEQ ID NO: 587470
gagguaugaauugguuuau

SEQ ID NO: 794663 - RNA, 19 nt, Artificial Sequence
  Description of Artificial Sequence: Synthetic oligonucleotide
  Antisense strand to SEQ ID NO: 794662
auaaaccaauucauaccuc

SEQ ID NO: 794664 - RNA, 19 nt, Artificial Sequence
  Description of Artificial Sequence: Synthetic oligonucleotide
  Sense strand starting at position 658 of SEQ ID NO: 587470
ugaauugguuuaucagauc

SEQ ID NO: 794665 - RNA, 19 nt, Artificial Sequence
  Description of Artificial Sequence: Synthetic oligonucleotide
  Antisense strand to SEQ ID NO: 794664
gaucugauaaaccaauuca

SEQ ID NO: 794666 - RNA, 19 nt, Artificial Sequence
  Description of Artificial Sequence: Synthetic oligonucleotide
  Sense strand starting at position 661 of SEQ ID NO: 587470
auugguuuaucagaucacu

SEQ ID NO: 794667 - RNA, 19 nt, Artificial Sequence
  Description of Artificial Sequence: Synthetic oligonucleotide
  Antisense strand to SEQ ID NO: 794666
agugaucugauaaaccaau

SEQ ID NO: 794668 - RNA, 19 nt, Artificial Sequence
  Description of Artificial Sequence: Synthetic oligonucleotide
  Sense strand starting at position 798 of SEQ ID NO: 587470
gguggaggaagucauaguu

SEQ ID NO: 794669 - RNA, 19 nt, Artificial Sequence
  Description of Artificial Sequence: Synthetic oligonucleotide
  Antisense strand to SEQ ID NO: 794668
aacuaugacuuccuccacc

SEQ ID NO: 794670 - RNA, 19 nt, Artificial Sequence
  Description of Artificial Sequence: Synthetic oligonucleotide
  Sense strand starting at position 983 of SEQ ID NO: 587470
gcagaaguauugcugacuu

SEQ ID NO: 794671 - RNA, 19 nt, Artificial Sequence
  Description of Artificial Sequence: Synthetic oligonucleotide
  Antisense strand to SEQ ID NO: 794670
aagucagcaauacuucugc

SEQ ID NO: 794672 - RNA, 19 nt, Artificial Sequence
  Description of Artificial Sequence: Synthetic oligonucleotide
  Sense strand starting at position 985 of SEQ ID NO: 587470
agaaguauugcugacuuua

SEQ ID NO: 794673 - RNA, 19 nt, Artificial Sequence
  Description of Artificial Sequence: Synthetic oligonucleotide
  Antisense strand to SEQ ID NO: 794672
uaaagucagcaauacuucu

SEQ ID NO: 794674 - RNA, 19 nt, Artificial Sequence
  Description of Artificial Sequence: Synthetic oligonucleotide
  Sense strand starting at position 1006 of SEQ ID NO: 587470
gacagcuucuuggcagagu

SEQ ID NO: 794675 - RNA, 19 nt, Artificial Sequence
  Description of Artificial Sequence: Synthetic oligonucleotide
  Antisense strand to SEQ ID NO: 794674
acucugccaagaagcuguc

SEQ ID NO: 794676 - RNA, 19 nt, Artificial Sequence
  Description of Artificial Sequence: Synthetic oligonucleotide
  Sense strand starting at position 1088 of SEQ ID NO: 587470
cuacaucuugcugaacgaa

SEQ ID NO: 794677 - RNA, 19 nt, Artificial Sequence
  Description of Artificial Sequence: Synthetic oligonucleotide
  Antisense strand to SEQ ID NO: 794676
uucguucagcaagauguag

SEQ ID NO: 794678 - RNA, 19 nt, Artificial Sequence
  Description of Artificial Sequence: Synthetic oligonucleotide
  Sense strand starting at position 1176 of SEQ ID NO: 587470
gugaaacaucaauggacuc

SEQ ID NO: 794679 - RNA, 19 nt, Artificial Sequence
  Description of Artificial Sequence: Synthetic oligonucleotide
  Antisense strand to SEQ ID NO: 794678
gaguccauugauguuucac

SEQ ID NO: 794680 - RNA, 19 nt, Artificial Sequence
  Description of Artificial Sequence: Synthetic oligonucleotide
  Sense strand starting at position 1231 of SEQ ID NO: 587470
gcggcaugucccuaacuca

SEQ ID NO: 794681 - RNA, 19 nt, Artificial Sequence
  Description of Artificial Sequence: Synthetic oligonucleotide
  Antisense strand to SEQ ID NO: 794680
ugaguuagggacaugccgc

SEQ ID NO: 794682 - RNA, 19 nt, Artificial Sequence
  Description of Artificial Sequence: Synthetic oligonucleotide
  Sense strand starting at position 1433 of SEQ ID NO: 587470
ccuggaguugucugggaga

SEQ ID NO: 794683 - RNA, 19 nt, Artificial Sequence
  Description of Artificial Sequence: Synthetic oligonucleotide
  Antisense strand to SEQ ID NO: 794682
ucucccagacaacuccagg

SEQ ID NO: 794684 - RNA, 19 nt, Artificial Sequence
  Description of Artificial Sequence: Synthetic oligonucleotide
  Sense strand starting at position 1435 of SEQ ID NO: 587470
uggaguugucugggagauc

SEQ ID NO: 794685 - RNA, 19 nt, Artificial Sequence
  Description of Artificial Sequence: Synthetic oligonucleotide
  Antisense strand to SEQ ID NO: 794684
gaucucccagacaacucca

SEQ ID NO: 794686 - RNA, 19 nt, Artificial Sequence
  Description of Artificial Sequence: Synthetic oligonucleotide
  Sense strand starting at position 1436 of SEQ ID NO: 587470
ggaguugucugggagauca

SEQ ID NO: 794687 - RNA, 19 nt, Artificial Sequence
  Description of Artificial Sequence: Synthetic oligonucleotide
  Antisense strand to SEQ ID NO: 794686
ugaucucccagacaacucc

SEQ ID NO: 794688 - RNA, 19 nt, Artificial Sequence
  Description of Artificial Sequence: Synthetic oligonucleotide
  Sense strand starting at position 2470 of SEQ ID NO: 587470
gggauuaaggcgggagcua

SEQ ID NO: 794689 - RNA, 19 nt, Artificial Sequence
  Description of Artificial Sequence: Synthetic oligonucleotide
  Antisense strand to SEQ ID NO: 794688
uagcucccgccuuaauccc

SEQ ID NO: 794690 - RNA, 19 nt, Artificial Sequence
  Description of Artificial Sequence: Synthetic oligonucleotide
  Sense strand starting at position 2471 of SEQ ID NO: 587470
ggauuaaggcgggagcuaa

SEQ ID NO: 794691 - RNA, 19 nt, Artificial Sequence
  Description of Artificial Sequence: Synthetic oligonucleotide
  Antisense strand to SEQ ID NO: 794690
uuagcucccgccuuaaucc

SEQ ID NO: 794692 - RNA, 19 nt, Artificial Sequence
  Description of Artificial Sequence: Synthetic oligonucleotide
  Sense strand starting at position 2561 of SEQ ID NO: 587470
ugaugagcuccugaaaugu

SEQ ID NO: 794693 - RNA, 19 nt, Artificial Sequence
  Description of Artificial Sequence: Synthetic oligonucleotide
  Antisense strand to SEQ ID NO: 794692
acauuucaggagcucauca

SEQ ID NO: 794694 - RNA, 19 nt, Artificial Sequence
  Description of Artificial Sequence: Synthetic oligonucleotide
  Sense strand starting at position 2571 of SEQ ID NO: 587470
cugaaaugugcugguccca

SEQ ID NO: 794695 - RNA, 19 nt, Artificial Sequence
  Description of Artificial Sequence: Synthetic oligonucleotide
  Antisense strand to SEQ ID NO: 794694
ugggaccagcacauuucag

SEQ ID NO: 794696 - RNA, 19 nt, Artificial Sequence
  Description of Artificial Sequence: Synthetic oligonucleotide
  Sense strand starting at position 2668 of SEQ ID NO: 587470
ggcuuauauugauuacaua

SEQ ID NO: 794697 - RNA, 19 nt, Artificial Sequence
  Description of Artificial Sequence: Synthetic oligonucleotide
  Antisense strand to SEQ ID NO: 794696
uauguaaucaauauaagcc

SEQ ID NO: 794698 - RNA, 19 nt, Artificial Sequence
  Description of Artificial Sequence: Synthetic oligonucleotide
  Sense strand starting at position 2688 of SEQ ID NO: 587470
ugaaaugacuauuaggugu

SEQ ID NO: 794699 - RNA, 19 nt, Artificial Sequence
  Description of Artificial Sequence: Synthetic oligonucleotide
  Antisense strand to SEQ ID NO: 794698
acaccuaauagucauuuca

SEQ ID NO: 794700 - RNA, 19 nt, Artificial Sequence
  Description of Artificial Sequence: Synthetic oligonucleotide
  Sense strand starting at position 2711 of SEQ ID NO: 587470
gguuaaauaacguauauug

SEQ ID NO: 794701 - RNA, 19 nt, Artificial Sequence
  Description of Artificial Sequence: Synthetic oligonucleotide
  Antisense strand to SEQ ID NO: 794700
caauauacguuauuuaacc

SEQ ID NO: 794702 - RNA, 19 nt, Artificial Sequence
  Description of Artificial Sequence: Synthetic oligonucleotide
  Sense strand starting at position 2846 of SEQ ID NO: 587470
guuugaucacuugaggcca

SEQ ID NO: 794703 - RNA, 19 nt, Artificial Sequence
  Description of Artificial Sequence: Synthetic oligonucleotide
  Antisense strand to SEQ ID NO: 794702
uggccucaagugaucaaac

SEQ ID NO: 794704 - RNA, 19 nt, Artificial Sequence
  Description of Artificial Sequence: Synthetic oligonucleotide
  Sense strand starting at position 2939 of SEQ ID NO: 587470
ggugguauguggaggcuaa

SEQ ID NO: 794705 - RNA, 19 nt, Artificial Sequence
  Description of Artificial Sequence: Synthetic oligonucleotide
  Antisense strand to SEQ ID NO: 794704
uuagccuccacauaccacc

SEQ ID NO: 794706 - RNA, 19 nt, Artificial Sequence
  Description of Artificial Sequence: Synthetic oligonucleotide
  Sense strand starting at position 3159 of SEQ ID NO: 587470
ugaagauccugucuugaca

SEQ ID NO: 794707 - RNA, 19 nt, Artificial Sequence
  Description of Artificial Sequence: Synthetic oligonucleotide
  Antisense strand to SEQ ID NO: 794706
ugucaagacaggaucuuca

SEQ ID NO: 794708 - RNA, 19 nt, Artificial Sequence
  Description of Artificial Sequence: Synthetic oligonucleotide
  Sense strand starting at position 3338 of SEQ ID NO: 587470
gugucucucuaagaaacaa

SEQ ID NO: 794709 - RNA, 19 nt, Artificial Sequence
  Description of Artificial Sequence: Synthetic oligonucleotide
  Antisense strand to SEQ ID NO: 794708
uuguuucuuagagagacac

SEQ ID NO: 794710 - RNA, 19 nt, Artificial Sequence
  Description of Artificial Sequence: Synthetic oligonucleotide
  Sense strand starting at position 3396 of SEQ ID NO: 587470
ccggaauugguagguucau

SEQ ID NO: 794711 - RNA, 19 nt, Artificial Sequence
  Description of Artificial Sequence: Synthetic oligonucleotide
  Antisense strand to SEQ ID NO: 794710
augaaccuaccaauuccgg

SEQ ID NO: 794712 - RNA, 19 nt, Artificial Sequence
  Description of Artificial Sequence: Synthetic oligonucleotide
  Sense strand starting at position 3397 of SEQ ID NO: 587470
cggaauugguagguucauu

SEQ ID NO: 794713 - RNA, 19 nt, Artificial Sequence
  Description of Artificial Sequence: Synthetic oligonucleotide
  Antisense strand to SEQ ID NO: 794712
aaugaaccuaccaauuccg

SEQ ID NO: 794714 - RNA, 19 nt, Artificial Sequence
  Description of Artificial Sequence: Synthetic oligonucleotide
  Sense strand starting at position 3485 of SEQ ID NO: 587470
ucuggaguuugcucugaug

SEQ ID NO: 794715 - RNA, 19 nt, Artificial Sequence
  Description of Artificial Sequence: Synthetic oligonucleotide
  Antisense strand to SEQ ID NO: 794714
caucagagcaaacuccaga

SEQ ID NO: 794716 - RNA, 19 nt, Artificial Sequence
  Description of Artificial Sequence: Synthetic oligonucleotide
  Sense strand starting at position 3487 of SEQ ID NO: 587470
uggaguuugcucugauguu

SEQ ID NO: 794717 - RNA, 19 nt, Artificial Sequence
  Description of Artificial Sequence: Synthetic oligonucleotide
  Antisense strand to SEQ ID NO: 794716
aacaucagagcaaacucca

SEQ ID NO: 794718 - RNA, 19 nt, Artificial Sequence
  Description of Artificial Sequence: Synthetic oligonucleotide
  Sense strand starting at position 3517 of SEQ ID NO: 587470
ggacuuucuuccuucuagu

SEQ ID NO: 794719 - RNA, 19 nt, Artificial Sequence
  Description of Artificial Sequence: Synthetic oligonucleotide
  Antisense strand to SEQ ID NO: 794718
acuagaaggaagaaagucc

SEQ ID NO: 794720 - RNA, 19 nt, Artificial Sequence
  Description of Artificial Sequence: Synthetic oligonucleotide
  Sense strand starting at position 48 of SEQ ID NO: 587471
gcaaguaguuucuuccuca

SEQ ID NO: 794721 - RNA, 19 nt, Artificial Sequence
  Description of Artificial Sequence: Synthetic oligonucleotide
  Antisense strand to SEQ ID NO: 794720
ugaggaagaaacuacuugc

SEQ ID NO: 794722 - RNA, 19 nt, Artificial Sequence
  Description of Artificial Sequence: Synthetic oligonucleotide
  Sense strand starting at position 121 of SEQ ID NO: 587471
uuauuucccugccagaguu

SEQ ID NO: 794723 - RNA, 19 nt, Artificial Sequence
  Description of Artificial Sequence: Synthetic oligonucleotide
  Antisense strand to SEQ ID NO: 794722
aacucuggcagggaaauaa

SEQ ID NO: 794724 - RNA, 19 nt, Artificial Sequence
  Description of Artificial Sequence: Synthetic oligonucleotide
  Sense strand starting at position 182 of SEQ ID NO: 587471
cuggcaauuuaguagaaau

SEQ ID NO: 794725 - RNA, 19 nt, Artificial Sequence
  Description of Artificial Sequence: Synthetic oligonucleotide
  Antisense strand to SEQ ID NO: 794724
auuucuacuaaauugccag

SEQ ID NO: 794726 - RNA, 19 nt, Artificial Sequence
  Description of Artificial Sequence: Synthetic oligonucleotide
  Sense strand starting at position 192 of SEQ ID NO: 587471
aguagaaauccaugcaugu

SEQ ID NO: 794727 - RNA, 19 nt, Artificial Sequence
  Description of Artificial Sequence: Synthetic oligonucleotide
  Antisense strand to SEQ ID NO: 794726
acaugcauggauuucuacu

SEQ ID NO: 794728 - RNA, 19 nt, Artificial Sequence
  Description of Artificial Sequence: Synthetic oligonucleotide
  Sense strand starting at position 208 of SEQ ID NO: 587471
uguaauugcgaggaccaga

SEQ ID NO: 794729 - RNA, 19 nt, Artificial Sequence
  Description of Artificial Sequence: Synthetic oligonucleotide
  Antisense strand to SEQ ID NO: 794728
ucugguccucgcaauuaca

SEQ ID NO: 794730 - RNA, 19 nt, Artificial Sequence
  Description of Artificial Sequence: Synthetic oligonucleotide
  Sense strand starting at position 361 of SEQ ID NO: 587471
gcaagcuccuaauagaaga

SEQ ID NO: 794731 - RNA, 19 nt, Artificial Sequence
  Description of Artificial Sequence: Synthetic oligonucleotide
  Antisense strand to SEQ ID NO: 794730
ucuucuauuaggagcuugc

SEQ ID NO: 794732 - RNA, 19 nt, Artificial Sequence
  Description of Artificial Sequence: Synthetic oligonucleotide
  Sense strand starting at position 462 of SEQ ID NO: 587471
ucauuucaucugggcguga

SEQ ID NO: 794733 - RNA, 19 nt, Artificial Sequence
  Description of Artificial Sequence: Synthetic oligonucleotide
  Antisense strand to SEQ ID NO: 794732
ucacgcccagaugaaauga

SEQ ID NO: 794734 - RNA, 19 nt, Artificial Sequence
  Description of Artificial Sequence: Synthetic oligonucleotide
  Sense strand starting at position 464 of SEQ ID NO: 587471
auuucaucugggcgugagu

SEQ ID NO: 794735 - RNA, 19 nt, Artificial Sequence
  Description of Artificial Sequence: Synthetic oligonucleotide
  Antisense strand to SEQ ID NO: 794734
acucacgcccagaugaaau

SEQ ID NO: 794736 - RNA, 19 nt, Artificial Sequence
  Description of Artificial Sequence: Synthetic oligonucleotide
  Sense strand starting at position 651 of SEQ ID NO: 587471
auaauagagucuccuugaa

SEQ ID NO: 794737 - RNA, 19 nt, Artificial Sequence
  Description of Artificial Sequence: Synthetic oligonucleotide
  Antisense strand to SEQ ID NO: 794736
uucaaggagacucuauuau

SEQ ID NO: 794738 - RNA, 19 nt, Artificial Sequence
  Description of Artificial Sequence: Synthetic oligonucleotide
  Sense strand starting at position 653 of SEQ ID NO: 587471
aauagagucuccuugaaga

SEQ ID NO: 794739 - RNA, 19 nt, Artificial Sequence
  Description of Artificial Sequence: Synthetic oligonucleotide
  Antisense strand to SEQ ID NO: 794738
ucuucaaggagacucuauu

SEQ ID NO: 794740 - RNA, 19 nt, Artificial Sequence
  Description of Artificial Sequence: Synthetic oligonucleotide
  Sense strand starting at position 701 of SEQ ID NO: 587471
ugcgaaggguuucuaagua

SEQ ID NO: 794741 - RNA, 19 nt, Artificial Sequence
  Description of Artificial Sequence: Synthetic oligonucleotide
  Antisense strand to SEQ ID NO: 794740
uacuuagaaacccuucgca

SEQ ID NO: 794742 - RNA, 19 nt, Artificial Sequence
  Description of Artificial Sequence: Synthetic oligonucleotide
  Sense strand starting at position 706 of SEQ ID NO: 587471
aggguuucuaaguagugca

SEQ ID NO: 794743 - RNA, 19 nt, Artificial Sequence
  Description of Artificial Sequence: Synthetic oligonucleotide
  Antisense strand to SEQ ID NO: 794742
ugcacuacuuagaaacccu

SEQ ID NO: 794744 - RNA, 19 nt, Artificial Sequence
  Description of Artificial Sequence: Synthetic oligonucleotide
  Sense strand starting at position 716 of SEQ ID NO: 587471
aguagugcaugguccauaa

SEQ ID NO: 794745 - RNA, 19 nt, Artificial Sequence
  Description of Artificial Sequence: Synthetic oligonucleotide
  Antisense strand to SEQ ID NO: 794744
uuauggaccaugcacuacu

SEQ ID NO: 794746 - RNA, 19 nt, Artificial Sequence
  Description of Artificial Sequence: Synthetic oligonucleotide
  Sense strand starting at position 718 of SEQ ID NO: 587471
uagugcaugguccauaaau

SEQ ID NO: 794747 - RNA, 19 nt, Artificial Sequence
  Description of Artificial Sequence: Synthetic oligonucleotide
  Antisense strand to SEQ ID NO: 794746
auuuauggaccaugcacua

SEQ ID NO: 794748 - RNA, 19 nt, Artificial Sequence
  Description of Artificial Sequence: Synthetic oligonucleotide
  Sense strand starting at position 753 of SEQ ID NO: 587471
agcugucaucuuuauccau

SEQ ID NO: 794749 - RNA, 19 nt, Artificial Sequence
  Description of Artificial Sequence: Synthetic oligonucleotide
  Antisense strand to SEQ ID NO: 794748
auggauaaagaugacagcu

SEQ ID NO: 794750 - RNA, 19 nt, Artificial Sequence
  Description of Artificial Sequence: Synthetic oligonucleotide
  Sense strand starting at position 904 of SEQ ID NO: 587471
gcuccaucccgagcuuagu

SEQ ID NO: 794751 - RNA, 19 nt, Artificial Sequence
  Description of Artificial Sequence: Synthetic oligonucleotide
  Antisense strand to SEQ ID NO: 794750
acuaagcucgggauggagc

SEQ ID NO: 794752 - RNA, 19 nt, Artificial Sequence
  Description of Artificial Sequence: Synthetic oligonucleotide
  Sense strand starting at position 939 of SEQ ID NO: 587471
ucuacugugucagugggaa

SEQ ID NO: 794753 - RNA, 19 nt, Artificial Sequence
  Description of Artificial Sequence: Synthetic oligonucleotide
  Antisense strand to SEQ ID NO: 794752
uucccacugacacaguaga

SEQ ID NO: 794754 - RNA, 19 nt, Artificial Sequence
  Description of Artificial Sequence: Synthetic oligonucleotide
  Sense strand starting at position 1005 of SEQ ID NO: 587471
gugaucucaucuucuggga

SEQ ID NO: 794755 - RNA, 19 nt, Artificial Sequence
  Description of Artificial Sequence: Synthetic oligonucleotide
  Antisense strand to SEQ ID NO: 794754
ucccagaagaugagaucac

SEQ ID NO: 794756 - RNA, 19 nt, Artificial Sequence
  Description of Artificial Sequence: Synthetic oligonucleotide
  Sense strand starting at position 1040 of SEQ ID NO: 587471
gggaguuuguggaaacuug

SEQ ID NO: 794757 - RNA, 19 nt, Artificial Sequence
  Description of Artificial Sequence: Synthetic oligonucleotide
  Antisense strand to SEQ ID NO: 794756
caaguuuccacaaacuccc

SEQ ID NO: 794758 - RNA, 19 nt, Artificial Sequence
  Description of Artificial Sequence: Synthetic oligonucleotide
  Sense strand starting at position 1052 of SEQ ID NO: 587471
aaacuugacuugggagaac

SEQ ID NO: 794759 - RNA, 19 nt, Artificial Sequence
  Description of Artificial Sequence: Synthetic oligonucleotide
  Antisense strand to SEQ ID NO: 794758
guucucccaagucaaguuu

SEQ ID NO: 794760 - RNA, 19 nt, Artificial Sequence
  Description of Artificial Sequence: Synthetic oligonucleotide
  Sense strand starting at position 1140 of SEQ ID NO: 587471
aggucccaguccucagaau

SEQ ID NO: 794761 - RNA, 19 nt, Artificial Sequence
  Description of Artificial Sequence: Synthetic oligonucleotide
  Antisense strand to SEQ ID NO: 794760
auucugaggacugggaccu

SEQ ID NO: 794762 - RNA, 19 nt, Artificial Sequence
  Description of Artificial Sequence: Synthetic oligonucleotide
  Sense strand starting at position 1141 of SEQ ID NO: 587471
ggucccaguccucagaauu

SEQ ID NO: 794763 - RNA, 19 nt, Artificial Sequence
  Description of Artificial Sequence: Synthetic oligonucleotide
  Antisense strand to SEQ ID NO: 794762
aauucugaggacugggacc

SEQ ID NO: 794764 - RNA, 19 nt, Artificial Sequence
  Description of Artificial Sequence: Synthetic oligonucleotide
  Sense strand starting at position 1225 of SEQ ID NO: 587471
accuaacuuggcugaagaa

SEQ ID NO: 794765 - RNA, 19 nt, Artificial Sequence
  Description of Artificial Sequence: Synthetic oligonucleotide
  Antisense strand to SEQ ID NO: 794764
uucuucagccaaguuaggu

SEQ ID NO: 794766 - RNA, 19 nt, Artificial Sequence
  Description of Artificial Sequence: Synthetic oligonucleotide
  Sense strand starting at position 2185 of SEQ ID NO: 587471
acuacaugccuucgccaaa

SEQ ID NO: 794767 - RNA, 19 nt, Artificial Sequence
  Description of Artificial Sequence: Synthetic oligonucleotide
  Antisense strand to SEQ ID NO: 794766
uuuggcgaaggcauguagu

SEQ ID NO: 794768 - RNA, 19 nt, Artificial Sequence
  Description of Artificial Sequence: Synthetic oligonucleotide
  Sense strand starting at position 2296 of SEQ ID NO: 587471
gucagaaguuuguccgcau

SEQ ID NO: 794769 - RNA, 19 nt, Artificial Sequence
  Description of Artificial Sequence: Synthetic oligonucleotide
  Antisense strand to SEQ ID NO: 794768
augcggacaaacuucugac

SEQ ID NO: 794770 - RNA, 19 nt, Artificial Sequence
  Description of Artificial Sequence: Synthetic oligonucleotide
  Sense strand starting at position 2297 of SEQ ID NO: 587471
ucagaaguuuguccgcaug

SEQ ID NO: 794771 - RNA, 19 nt, Artificial Sequence
  Description of Artificial Sequence: Synthetic oligonucleotide
  Antisense strand to SEQ ID NO: 794770
caugcggacaaacuucuga

SEQ ID NO: 794772 - RNA, 19 nt, Artificial Sequence
  Description of Artificial Sequence: Synthetic oligonucleotide
  Sense strand starting at position 2299 of SEQ ID NO: 587471
agaaguuuguccgcaugga

SEQ ID NO: 794773 - RNA, 19 nt, Artificial Sequence
  Description of Artificial Sequence: Synthetic oligonucleotide
  Antisense strand to SEQ ID NO: 794772
uccaugcggacaaacuucu

SEQ ID NO: 794774 - RNA, 19 nt, Artificial Sequence
  Description of Artificial Sequence: Synthetic oligonucleotide
  Sense strand starting at position 2300 of SEQ ID NO: 587471
gaaguuuguccgcauggag

SEQ ID NO: 794775 - RNA, 19 nt, Artificial Sequence
  Description of Artificial Sequence: Synthetic oligonucleotide
  Antisense strand to SEQ ID NO: 794774
cuccaugcggacaaacuuc

SEQ ID NO: 794776 - RNA, 19 nt, Artificial Sequence
  Description of Artificial Sequence: Synthetic oligonucleotide
  Sense strand starting at position 2451 of SEQ ID NO: 587471
ggcaucucuggcugccaga

SEQ ID NO: 794777 - RNA, 19 nt, Artificial Sequence
  Description of Artificial Sequence: Synthetic oligonucleotide
  Antisense strand to SEQ ID NO: 794776
ucuggcagccagagaugcc

SEQ ID NO: 794778 - RNA, 19 nt, Artificial Sequence
  Description of Artificial Sequence: Synthetic oligonucleotide
  Sense strand starting at position 3090 of SEQ ID NO: 587471
ggagacaucuugccaguac

SEQ ID NO: 794779 - RNA, 19 nt, Artificial Sequence
  Description of Artificial Sequence: Synthetic oligonucleotide
  Antisense strand to SEQ ID NO: 794778
guacuggcaagaugucucc

SEQ ID NO: 794780 - RNA, 19 nt, Artificial Sequence
  Description of Artificial Sequence: Synthetic oligonucleotide
  Sense strand starting at position 3140 of SEQ ID NO: 587471
uaagcuagcggguguauua

SEQ ID NO: 794781 - RNA, 19 nt, Artificial Sequence
  Description of Artificial Sequence: Synthetic oligonucleotide
  Antisense strand to SEQ ID NO: 794780
uaauacacccgcuagcuua

SEQ ID NO: 794782 - RNA, 19 nt, Artificial Sequence
  Description of Artificial Sequence: Synthetic oligonucleotide
  Sense strand starting at position 3175 of SEQ ID NO: 587471
gagucacagccuugaucca

SEQ ID NO: 794783 - RNA, 19 nt, Artificial Sequence
  Description of Artificial Sequence: Synthetic oligonucleotide
  Antisense strand to SEQ ID NO: 794782
uggaucaaggcugugacuc

SEQ ID NO: 794784 - RNA, 19 nt, Artificial Sequence
  Description of Artificial Sequence: Synthetic oligonucleotide
  Sense strand starting at position 3187 of SEQ ID NO: 587471
ugauccagaucuucugauu

SEQ ID NO: 794785 - RNA, 19 nt, Artificial Sequence
  Description of Artificial Sequence: Synthetic oligonucleotide
  Antisense strand to SEQ ID NO: 794784
aaucagaagaucuggauca

SEQ ID NO: 794786 - RNA, 19 nt, Artificial Sequence
  Description of Artificial Sequence: Synthetic oligonucleotide
  Sense strand starting at position 3394 of SEQ ID NO: 587471
ggaaacucuuaagaaugga

SEQ ID NO: 794787 - RNA, 19 nt, Artificial Sequence
  Description of Artificial Sequence: Synthetic oligonucleotide
  Antisense strand to SEQ ID NO: 794786
uccauucuuaagaguuucc

SEQ ID NO: 794788 - RNA, 19 nt, Artificial Sequence
  Description of Artificial Sequence: Synthetic oligonucleotide
  Sense strand starting at position 3422 of SEQ ID NO: 587471
ucagcugcuucugcuuaaa

SEQ ID NO: 794789 - RNA, 19 nt, Artificial Sequence
  Description of Artificial Sequence: Synthetic oligonucleotide
  Antisense strand to SEQ ID NO: 794788
uuuaagcagaagcagcuga

SEQ ID NO: 794790 - RNA, 19 nt, Artificial Sequence
  Description of Artificial Sequence: Synthetic oligonucleotide
  Sense strand starting at position 3689 of SEQ ID NO: 587471
caaguuuaccugugagguu

SEQ ID NO: 794791 - RNA, 19 nt, Artificial Sequence
  Description of Artificial Sequence: Synthetic oligonucleotide
  Antisense strand to SEQ ID NO: 794790
aaccucacagguaaacuug

SEQ ID NO: 794792 - RNA, 19 nt, Artificial Sequence
  Description of Artificial Sequence: Synthetic oligonucleotide
  Sense strand starting at position 3708 of SEQ ID NO: 587471
auuugauuaguaugugucu

SEQ ID NO: 794793 - RNA, 19 nt, Artificial Sequence
  Description of Artificial Sequence: Synthetic oligonucleotide
  Antisense strand to SEQ ID NO: 794792
agacacauacuaaucaaau

SEQ ID NO: 794794 - RNA, 19 nt, Artificial Sequence
  Description of Artificial Sequence: Synthetic oligonucleotide
  Sense strand starting at position 3897 of SEQ ID NO: 587471
cguggugaaugcuccaaga

SEQ ID NO: 794795 - RNA, 19 nt, Artificial Sequence
  Description of Artificial Sequence: Synthetic oligonucleotide
  Antisense strand to SEQ ID NO: 794794
ucuuggagcauucaccacg

SEQ ID NO: 794796 - RNA, 19 nt, Artificial Sequence
  Description of Artificial Sequence: Synthetic oligonucleotide
  Sense strand starting at position 3899 of SEQ ID NO: 587471
uggugaaugcuccaagauc

SEQ ID NO: 794797 - RNA, 19 nt, Artificial Sequence
  Description of Artificial Sequence: Synthetic oligonucleotide
  Antisense strand to SEQ ID NO: 794796
gaucuuggagcauucacca

SEQ ID NO: 794798 - RNA, 19 nt, Artificial Sequence
  Description of Artificial Sequence: Synthetic oligonucleotide
  Sense strand starting at position 3944 of SEQ ID NO: 587471
cuggaaaugcuuuguccca

SEQ ID NO: 794799 - RNA, 19 nt, Artificial Sequence
  Description of Artificial Sequence: Synthetic oligonucleotide
  Antisense strand to SEQ ID NO: 794798
ugggacaaagcauuuccag

SEQ ID NO: 794800 - RNA, 19 nt, Artificial Sequence
  Description of Artificial Sequence: Synthetic oligonucleotide
  Sense strand starting at position 53 of SEQ ID NO: 587472
uacugaagugguuauccaa

SEQ ID NO: 794801 - RNA, 19 nt, Artificial Sequence
  Description of Artificial Sequence: Synthetic oligonucleotide
  Antisense strand to SEQ ID NO: 794800
uuggauaaccacuucagua

SEQ ID NO: 794802 - RNA, 19 nt, Artificial Sequence
  Description of Artificial Sequence: Synthetic oligonucleotide
  Sense strand starting at position 175 of SEQ ID NO: 587472
ucauaaugauaugcaggua

SEQ ID NO: 794803 - RNA, 19 nt, Artificial Sequence
  Description of Artificial Sequence: Synthetic oligonucleotide
  Antisense strand to SEQ ID NO: 794802
uaccugcauaucauuauga

SEQ ID NO: 794804 - RNA, 19 nt, Artificial Sequence
  Description of Artificial Sequence: Synthetic oligonucleotide
  Sense strand starting at position 178 of SEQ ID NO: 587472
uaaugauaugcagguaggu

SEQ ID NO: 794805 - RNA, 19 nt, Artificial Sequence
  Description of Artificial Sequence: Synthetic oligonucleotide
  Antisense strand to SEQ ID NO: 794804
accuaccugcauaucauua

SEQ ID NO: 794806 - RNA, 19 nt, Artificial Sequence
  Description of Artificial Sequence: Synthetic oligonucleotide
  Sense strand starting at position 191 of SEQ ID NO: 587472
guagguguacuuuaggacu

SEQ ID NO: 794807 - RNA, 19 nt, Artificial Sequence
  Description of Artificial Sequence: Synthetic oligonucleotide
  Antisense strand to SEQ ID NO: 794806
aguccuaaaguacaccuac

SEQ ID NO: 794808 - RNA, 19 nt, Artificial Sequence
  Description of Artificial Sequence: Synthetic oligonucleotide
  Sense strand starting at position 222 of SEQ ID NO: 587472
uucguuauuauggauauga

SEQ ID NO: 794809 - RNA, 19 nt, Artificial Sequence
  Description of Artificial Sequence: Synthetic oligonucleotide
  Antisense strand to SEQ ID NO: 794808
ucauauccauaauaacgaa

SEQ ID NO: 794810 - RNA, 19 nt, Artificial Sequence
  Description of Artificial Sequence: Synthetic oligonucleotide
  Sense strand starting at position 278 of SEQ ID NO: 587472
uaugaaugcugauuaggga

SEQ ID NO: 794811 - RNA, 19 nt, Artificial Sequence
  Description of Artificial Sequence: Synthetic oligonucleotide
  Antisense strand to SEQ ID NO: 794810
ucccuaaucagcauucaua

SEQ ID NO: 794812 - RNA, 19 nt, Artificial Sequence
  Description of Artificial Sequence: Synthetic oligonucleotide
  Sense strand starting at position 424 of SEQ ID NO: 587472
uuucuugagguauauuagu

SEQ ID NO: 794813 - RNA, 19 nt, Artificial Sequence
  Description of Artificial Sequence: Synthetic oligonucleotide
  Antisense strand to SEQ ID NO: 794812
acuaauauaccucaagaaa

SEQ ID NO: 794814 - RNA, 19 nt, Artificial Sequence
  Description of Artificial Sequence: Synthetic oligonucleotide
  Sense strand starting at position 429 of SEQ ID NO: 587472
ugagguauauuagucuaaa

SEQ ID NO: 794815 - RNA, 19 nt, Artificial Sequence
  Description of Artificial Sequence: Synthetic oligonucleotide
  Antisense strand to SEQ ID NO: 794814
uuuagacuaauauaccuca

SEQ ID NO: 794816 - RNA, 19 nt, Artificial Sequence
  Description of Artificial Sequence: Synthetic oligonucleotide
  Sense strand starting at position 455 of SEQ ID NO: 587472
gcgauaguaagucaccaaa

SEQ ID NO: 794817 - RNA, 19 nt, Artificial Sequence
  Description of Artificial Sequence: Synthetic oligonucleotide
  Antisense strand to SEQ ID NO: 794816
uuuggugacuuacuaucgc

SEQ ID NO: 794818 - RNA, 19 nt, Artificial Sequence
  Description of Artificial Sequence: Synthetic oligonucleotide
  Sense strand starting at position 475 of SEQ ID NO: 587472
acccgagugacugaaauuc

SEQ ID NO: 794819 - RNA, 19 nt, Artificial Sequence
  Description of Artificial Sequence: Synthetic oligonucleotide
  Antisense strand to SEQ ID NO: 794818
gaauuucagucacucgggu

SEQ ID NO: 794820 - RNA, 19 nt, Artificial Sequence
  Description of Artificial Sequence: Synthetic oligonucleotide
  Sense strand starting at position 720 of SEQ ID NO: 587472
aucaguauuccgcacauag

SEQ ID NO: 794821 - RNA, 19 nt, Artificial Sequence
  Description of Artificial Sequence: Synthetic oligonucleotide
  Antisense strand to SEQ ID NO: 794820
cuaugugcggaauacugau

SEQ ID NO: 794822 - RNA, 19 nt, Artificial Sequence
  Description of Artificial Sequence: Synthetic oligonucleotide
  Sense strand starting at position 748 of SEQ ID NO: 587472
aacaauguugcugacagau

SEQ ID NO: 794823 - RNA, 19 nt, Artificial Sequence
  Description of Artificial Sequence: Synthetic oligonucleotide
  Antisense strand to SEQ ID NO: 794822
aucugucagcaacauuguu

SEQ ID NO: 794824 - RNA, 19 nt, Artificial Sequence
  Description of Artificial Sequence: Synthetic oligonucleotide
  Sense strand starting at position 754 of SEQ ID NO: 587472
guugcugacagaugagaca

SEQ ID NO: 794825 - RNA, 19 nt, Artificial Sequence
  Description of Artificial Sequence: Synthetic oligonucleotide
  Antisense strand to SEQ ID NO: 794824
ugucucaucugucagcaac

SEQ ID NO: 794826 - RNA, 19 nt, Artificial Sequence
  Description of Artificial Sequence: Synthetic oligonucleotide
  Sense strand starting at position 967 of SEQ ID NO: 587472
ccagaauagccaugagguu

SEQ ID NO: 794827 - RNA, 19 nt, Artificial Sequence
  Description of Artificial Sequence: Synthetic oligonucleotide
  Antisense strand to SEQ ID NO: 794826
aaccucauggcuauucugg

SEQ ID NO: 794828 - RNA, 19 nt, Artificial Sequence
  Description of Artificial Sequence: Synthetic oligonucleotide
  Sense strand starting at position 1015 of SEQ ID NO: 587472
ugccacuuccacuagaguu

SEQ ID NO: 794829 - RNA, 19 nt, Artificial Sequence
  Description of Artificial Sequence: Synthetic oligonucleotide
  Antisense strand to SEQ ID NO: 794828
aacucuaguggaaguggca

SEQ ID NO: 794830 - RNA, 19 nt, Artificial Sequence
  Description of Artificial Sequence: Synthetic oligonucleotide
  Sense strand starting at position 1022 of SEQ ID NO: 587472
uccacuagaguuugacagu

SEQ ID NO: 794831 - RNA, 19 nt, Artificial Sequence
  Description of Artificial Sequence: Synthetic oligonucleotide
  Antisense strand to SEQ ID NO: 794830
acugucaaacucuagugga

SEQ ID NO: 794832 - RNA, 19 nt, Artificial Sequence
  Description of Artificial Sequence: Synthetic oligonucleotide
  Sense strand starting at position 1118 of SEQ ID NO: 587472
acuuuaaacgcugaucauu

SEQ ID NO: 794833 - RNA, 19 nt, Artificial Sequence
  Description of Artificial Sequence: Synthetic oligonucleotide
  Antisense strand to SEQ ID NO: 794832
aaugaucagcguuuaaagu

SEQ ID NO: 794834 - RNA, 19 nt, Artificial Sequence
  Description of Artificial Sequence: Synthetic oligonucleotide
  Sense strand starting at position 1120 of SEQ ID NO: 587472
uuuaaacgcugaucauuaa

SEQ ID NO: 794835 - RNA, 19 nt, Artificial Sequence
  Description of Artificial Sequence: Synthetic oligonucleotide
  Antisense strand to SEQ ID NO: 794834
uuaaugaucagcguuuaaa

SEQ ID NO: 794836 - RNA, 19 nt, Artificial Sequence
  Description of Artificial Sequence: Synthetic oligonucleotide
  Sense strand starting at position 1121 of SEQ ID NO: 587472
uuaaacgcugaucauuaau

SEQ ID NO: 794837 - RNA, 19 nt, Artificial Sequence
  Description of Artificial Sequence: Synthetic oligonucleotide
  Antisense strand to SEQ ID NO: 794836
auuaaugaucagcguuuaa

SEQ ID NO: 794838 - RNA, 19 nt, Artificial Sequence
  Description of Artificial Sequence: Synthetic oligonucleotide
  Sense strand starting at position 1144 of SEQ ID NO: 587472
aggacaacgcaguaucuaa

SEQ ID NO: 794839 - RNA, 19 nt, Artificial Sequence
  Description of Artificial Sequence: Synthetic oligonucleotide
  Antisense strand to SEQ ID NO: 794838
uuagauacugcguuguccu

SEQ ID NO: 794840 - RNA, 19 nt, Artificial Sequence
  Description of Artificial Sequence: Synthetic oligonucleotide
  Sense strand starting at position 1154 of SEQ ID NO: 587472
aguaucuaaguuggaagau

SEQ ID NO: 794841 - RNA, 19 nt, Artificial Sequence
  Description of Artificial Sequence: Synthetic oligonucleotide
  Antisense strand to SEQ ID NO: 794840
aucuuccaacuuagauacu

SEQ ID NO: 794842 - RNA, 19 nt, Artificial Sequence
  Description of Artificial Sequence: Synthetic oligonucleotide
  Sense strand starting at position 2201 of SEQ ID NO: 587472
cgcaaauaucgcgccgaga

SEQ ID NO: 794843 - RNA, 19 nt, Artificial Sequence
  Description of Artificial Sequence: Synthetic oligonucleotide
  Antisense strand to SEQ ID NO: 794842
ucucggcgcgauauuugcg

SEQ ID NO: 794844 - RNA, 19 nt, Artificial Sequence
  Description of Artificial Sequence: Synthetic oligonucleotide
  Sense strand starting at position 2202 of SEQ ID NO: 587472
gcaaauaucgcgccgagau

SEQ ID NO: 794845 - RNA, 19 nt, Artificial Sequence
  Description of Artificial Sequence: Synthetic oligonucleotide
  Antisense strand to SEQ ID NO: 794844
aucucggcgcgauauuugc

SEQ ID NO: 794846 - RNA, 19 nt, Artificial Sequence
  Description of Artificial Sequence: Synthetic oligonucleotide
  Sense strand starting at position 2637 of SEQ ID NO: 587472
aaauaucuagugggcagaa

SEQ ID NO: 794847 - RNA, 19 nt, Artificial Sequence
  Description of Artificial Sequence: Synthetic oligonucleotide
  Antisense strand to SEQ ID NO: 794846
uucugcccacuagauauuu

SEQ ID NO: 794848 - RNA, 19 nt, Artificial Sequence
  Description of Artificial Sequence: Synthetic oligonucleotide
  Sense strand starting at position 2638 of SEQ ID NO: 587472
aauaucuagugggcagaaa

SEQ ID NO: 794849 - RNA, 19 nt, Artificial Sequence
  Description of Artificial Sequence: Synthetic oligonucleotide
  Antisense strand to SEQ ID NO: 794848
uuucugcccacuagauauu

SEQ ID NO: 794850 - RNA, 19 nt, Artificial Sequence
  Description of Artificial Sequence: Synthetic oligonucleotide
  Sense strand starting at position 2874 of SEQ ID NO: 587472
cugagcagaucacuaagau

SEQ ID NO: 794851 - RNA, 19 nt, Artificial Sequence
  Description of Artificial Sequence: Synthetic oligonucleotide
  Antisense strand to SEQ ID NO: 794850
aucuuagugaucugcucag

SEQ ID NO: 794852 - RNA, 19 nt, Artificial Sequence
  Description of Artificial Sequence: Synthetic oligonucleotide
  Sense strand starting at position 3025 of SEQ ID NO: 587472
cagggagccuauccaugaa

SEQ ID NO: 794853 - RNA, 19 nt, Artificial Sequence
  Description of Artificial Sequence: Synthetic oligonucleotide
  Antisense strand to SEQ ID NO: 794852
uucauggauaggcucccug

SEQ ID NO: 794854 - RNA, 19 nt, Artificial Sequence
  Description of Artificial Sequence: Synthetic oligonucleotide
  Sense strand starting at position 3028 of SEQ ID NO: 587472
ggagccuauccaugaaauc

SEQ ID NO: 794855 - RNA, 19 nt, Artificial Sequence
  Description of Artificial Sequence: Synthetic oligonucleotide
  Antisense strand to SEQ ID NO: 794854
gauuucauggauaggcucc

SEQ ID NO: 794856 - RNA, 19 nt, Artificial Sequence
  Description of Artificial Sequence: Synthetic oligonucleotide
  Sense strand starting at position 3192 of SEQ ID NO: 587472
guagaaaccaaaugguaug

SEQ ID NO: 794857 - RNA, 19 nt, Artificial Sequence
  Description of Artificial Sequence: Synthetic oligonucleotide
  Antisense strand to SEQ ID NO: 794856
cauaccauuugguuucuac

SEQ ID NO: 794858 - RNA, 19 nt, Artificial Sequence
  Description of Artificial Sequence: Synthetic oligonucleotide
  Sense strand starting at position 3198 of SEQ ID NO: 587472
accaaaugguauguaacau

SEQ ID NO: 794859 - RNA, 19 nt, Artificial Sequence
  Description of Artificial Sequence: Synthetic oligonucleotide
  Antisense strand to SEQ ID NO: 794858
auguuacauaccauuuggu

SEQ ID NO: 794860 - RNA, 19 nt, Artificial Sequence
  Description of Artificial Sequence: Synthetic oligonucleotide
  Sense strand starting at position 3211 of SEQ ID NO: 587472
uaacauggugggcauauua

SEQ ID NO: 794861 - RNA, 19 nt, Artificial Sequence
  Description of Artificial Sequence: Synthetic oligonucleotide
  Antisense strand to SEQ ID NO: 794860
uaauaugcccaccauguua

SEQ ID NO: 794862 - RNA, 19 nt, Artificial Sequence
  Description of Artificial Sequence: Synthetic oligonucleotide
  Sense strand starting at position 3218 of SEQ ID NO: 587472
gugggcauauuacuuagaa

SEQ ID NO: 794863 - RNA, 19 nt, Artificial Sequence
  Description of Artificial Sequence: Synthetic oligonucleotide
  Antisense strand to SEQ ID NO: 794862
uucuaaguaauaugcccac

SEQ ID NO: 794864 - RNA, 19 nt, Artificial Sequence
  Description of Artificial Sequence: Synthetic oligonucleotide
  Sense strand starting at position 3219 of SEQ ID NO: 587472
ugggcauauuacuuagaaa

SEQ ID NO: 794865 - RNA, 19 nt, Artificial Sequence
  Description of Artificial Sequence: Synthetic oligonucleotide
  Antisense strand to SEQ ID NO: 794864
uuucuaaguaauaugccca

SEQ ID NO: 794866 - RNA, 19 nt, Artificial Sequence
  Description of Artificial Sequence: Synthetic oligonucleotide
  Sense strand starting at position 3228 of SEQ ID NO: 587472
uacuuagaaacguguugag

SEQ ID NO: 794867 - RNA, 19 nt, Artificial Sequence
  Description of Artificial Sequence: Synthetic oligonucleotide
  Antisense strand to SEQ ID NO: 794866
cucaacacguuucuaagua

SEQ ID NO: 794868 - RNA, 19 nt, Artificial Sequence
  Description of Artificial Sequence: Synthetic oligonucleotide
  Sense strand starting at position 3232 of SEQ ID NO: 587472
uagaaacguguugagucau

SEQ ID NO: 794869 - RNA, 19 nt, Artificial Sequence
  Description of Artificial Sequence: Synthetic oligonucleotide
  Antisense strand to SEQ ID NO: 794868
augacucaacacguuucua

SEQ ID NO: 794870 - RNA, 19 nt, Artificial Sequence
  Description of Artificial Sequence: Synthetic oligonucleotide
  Sense strand starting at position 3751 of SEQ ID NO: 587472
ccaagaagcuugguccacu

SEQ ID NO: 794871 - RNA, 19 nt, Artificial Sequence
  Description of Artificial Sequence: Synthetic oligonucleotide
  Antisense strand to SEQ ID NO: 794870
aguggaccaagcuucuugg

SEQ ID NO: 794872 - RNA, 19 nt, Artificial Sequence
  Description of Artificial Sequence: Synthetic oligonucleotide
  Sense strand starting at position 3752 of SEQ ID NO: 587472
caagaagcuugguccacuu

SEQ ID NO: 794873 - RNA, 19 nt, Artificial Sequence
  Description of Artificial Sequence: Synthetic oligonucleotide
  Antisense strand to SEQ ID NO: 794872
aaguggaccaagcuucuug

SEQ ID NO: 794874 - RNA, 19 nt, Artificial Sequence
  Description of Artificial Sequence: Synthetic oligonucleotide
  Sense strand starting at position 3813 of SEQ ID NO: 587472
auggaucacuguccucaau

SEQ ID NO: 794875 - RNA, 19 nt, Artificial Sequence
  Description of Artificial Sequence: Synthetic oligonucleotide
  Antisense strand to SEQ ID NO: 794874
auugaggacagugauccau

SEQ ID NO: 794876 - RNA, 19 nt, Artificial Sequence
  Description of Artificial Sequence: Synthetic oligonucleotide
  Sense strand starting at position 3859 of SEQ ID NO: 587472
ugcaaagucccuuagauau

SEQ ID NO: 794877 - RNA, 19 nt, Artificial Sequence
  Description of Artificial Sequence: Synthetic oligonucleotide
  Antisense strand to SEQ ID NO: 794876
auaucuaagggacuuugca

SEQ ID NO: 794878 - RNA, 19 nt, Artificial Sequence
  Description of Artificial Sequence: Synthetic oligonucleotide
  Sense strand starting at position 3872 of SEQ ID NO: 587472
agauaugagcucugaguaa

SEQ ID NO: 794879 - RNA, 19 nt, Artificial Sequence
  Description of Artificial Sequence: Synthetic oligonucleotide
  Antisense strand to SEQ ID NO: 794878
uuacucagagcucauaucu

SEQ ID NO: 794880 - RNA, 19 nt, Artificial Sequence
  Description of Artificial Sequence: Synthetic oligonucleotide
  Sense strand starting at position 8 of SEQ ID NO: 587473
uuagauuugucguacagaa

SEQ ID NO: 794881 - RNA, 19 nt, Artificial Sequence
  Description of Artificial Sequence: Synthetic oligonucleotide
  Antisense strand to SEQ ID NO: 794880
uucuguacgacaaaucuaa

SEQ ID NO: 794882 - RNA, 19 nt, Artificial Sequence
  Description of Artificial Sequence: Synthetic oligonucleotide
  Sense strand starting at position 469 of SEQ ID NO: 587473
gggaguuccagugauaagu

SEQ ID NO: 794883 - RNA, 19 nt, Artificial Sequence
  Description of Artificial Sequence: Synthetic oligonucleotide
  Antisense strand to SEQ ID NO: 794882
acuuaucacuggaacuccc

SEQ ID NO: 794884 - RNA, 19 nt, Artificial Sequence
  Description of Artificial Sequence: Synthetic oligonucleotide
  Sense strand starting at position 2027 of SEQ ID NO: 587473
guuugaaaucuaugaacuc

SEQ ID NO: 794885 - RNA, 19 nt, Artificial Sequence
  Description of Artificial Sequence: Synthetic oligonucleotide
  Antisense strand to SEQ ID NO: 794884
gaguucauagauuucaaac

SEQ ID NO: 794886 - RNA, 19 nt, Artificial Sequence
  Description of Artificial Sequence: Synthetic oligonucleotide
  Sense strand starting at position 2062 of SEQ ID NO: 587473
guguucuuuccagaucaga

SEQ ID NO: 794887 - RNA, 19 nt, Artificial Sequence
  Description of Artificial Sequence: Synthetic oligonucleotide
  Antisense strand to SEQ ID NO: 794886
ucugaucuggaaagaacac

SEQ ID NO: 794888 - RNA, 19 nt, Artificial Sequence
  Description of Artificial Sequence: Synthetic oligonucleotide
  Sense strand starting at position 2070 of SEQ ID NO: 587473
uccagaucagaucgugauc

SEQ ID NO: 794889 - RNA, 19 nt, Artificial Sequence
  Description of Artificial Sequence: Synthetic oligonucleotide
  Antisense strand to SEQ ID NO: 794888
gaucacgaucugaucugga

SEQ ID NO: 794890 - RNA, 19 nt, Artificial Sequence
  Description of Artificial Sequence: Synthetic oligonucleotide
  Sense strand starting at position 2075 of SEQ ID NO: 587473
aucagaucgugaucuggca

SEQ ID NO: 794891 - RNA, 19 nt, Artificial Sequence
  Description of Artificial Sequence: Synthetic oligonucleotide
  Antisense strand to SEQ ID NO: 794890
ugccagaucacgaucugau

SEQ ID NO: 794892 - RNA, 19 nt, Artificial Sequence
  Description of Artificial Sequence: Synthetic oligonucleotide
  Sense strand starting at position 2130 of SEQ ID NO: 587473
gugggcucugcuggaaaca

SEQ ID NO: 794893 - RNA, 19 nt, Artificial Sequence
  Description of Artificial Sequence: Synthetic oligonucleotide
  Antisense strand to SEQ ID NO: 794892
uguuuccagcagagcccac

SEQ ID NO: 794894 - RNA, 19 nt, Artificial Sequence
  Description of Artificial Sequence: Synthetic oligonucleotide
  Sense strand starting at position 2183 of SEQ ID NO: 587473
gucggaagaucauucugag

SEQ ID NO: 794895 - RNA, 19 nt, Artificial Sequence
  Description of Artificial Sequence: Synthetic oligonucleotide
  Antisense strand to SEQ ID NO: 794894
cucagaaugaucuuccgac

SEQ ID NO: 794896 - RNA, 19 nt, Artificial Sequence
  Description of Artificial Sequence: Synthetic oligonucleotide
  Sense strand starting at position 2186 of SEQ ID NO: 587473
ggaagaucauucugagaag

SEQ ID NO: 794897 - RNA, 19 nt, Artificial Sequence
  Description of Artificial Sequence: Synthetic oligonucleotide
  Antisense strand to SEQ ID NO: 794896
cuucucagaaugaucuucc

SEQ ID NO: 794898 - RNA, 19 nt, Artificial Sequence
  Description of Artificial Sequence: Synthetic oligonucleotide
  Sense strand starting at position 2187 of SEQ ID NO: 587473
gaagaucauucugagaagu

SEQ ID NO: 794899 - RNA, 19 nt, Artificial Sequence
  Description of Artificial Sequence: Synthetic oligonucleotide
  Antisense strand to SEQ ID NO: 794898
acuucucagaaugaucuuc

SEQ ID NO: 794900 - RNA, 19 nt, Artificial Sequence
  Description of Artificial Sequence: Synthetic oligonucleotide
  Sense strand starting at position 2189 of SEQ ID NO: 587473
agaucauucugagaaguac

SEQ ID NO: 794901 - RNA, 19 nt, Artificial Sequence
  Description of Artificial Sequence: Synthetic oligonucleotide
  Antisense strand to SEQ ID NO: 794900
guacuucucagaaugaucu

SEQ ID NO: 794902 - RNA, 19 nt, Artificial Sequence
  Description of Artificial Sequence: Synthetic oligonucleotide
  Sense strand starting at position 2280 of SEQ ID NO: 587473
uguggacaucuggguucau

SEQ ID NO: 794903 - RNA, 19 nt, Artificial Sequence
  Description of Artificial Sequence: Synthetic oligonucleotide
  Antisense strand to SEQ ID NO: 794902
augaacccagauguccaca

SEQ ID NO: 794904 - RNA, 19 nt, Artificial Sequence
  Description of Artificial Sequence: Synthetic oligonucleotide
  Sense strand starting at position 2389 of SEQ ID NO: 587473
gugagaaagcugcggaguu

SEQ ID NO: 794905 - RNA, 19 nt, Artificial Sequence
  Description of Artificial Sequence: Synthetic oligonucleotide
  Antisense strand to SEQ ID NO: 794904
aacuccgcagcuuucucac

SEQ ID NO: 794906 - RNA, 19 nt, Artificial Sequence
  Description of Artificial Sequence: Synthetic oligonucleotide
  Sense strand starting at position 2391 of SEQ ID NO: 587473
gagaaagcugcggaguuua

SEQ ID NO: 794907 - RNA, 19 nt, Artificial Sequence
  Description of Artificial Sequence: Synthetic oligonucleotide
  Antisense strand to SEQ ID NO: 794906
uaaacuccgcagcuuucuc

SEQ ID NO: 794908 - RNA, 19 nt, Artificial Sequence
  Description of Artificial Sequence: Synthetic oligonucleotide
  Sense strand starting at position 2399 of SEQ ID NO: 587473
ugcggaguuuaucuaagga

SEQ ID NO: 794909 - RNA, 19 nt, Artificial Sequence
  Description of Artificial Sequence: Synthetic oligonucleotide
  Antisense strand to SEQ ID NO: 794908
uccuuagauaaacuccgca

SEQ ID NO: 794910 - RNA, 19 nt, Artificial Sequence
  Description of Artificial Sequence: Synthetic oligonucleotide
  Sense strand starting at position 2420 of SEQ ID NO: 587473
ccuaguuaucauuggcuga

SEQ ID NO: 794911 - RNA, 19 nt, Artificial Sequence
  Description of Artificial Sequence: Synthetic oligonucleotide
  Antisense strand to SEQ ID NO: 794910
ucagccaaugauaacuagg

SEQ ID NO: 794912 - RNA, 19 nt, Artificial Sequence
  Description of Artificial Sequence: Synthetic oligonucleotide
  Sense strand starting at position 2421 of SEQ ID NO: 587473
cuaguuaucauuggcugag

SEQ ID NO: 794913 - RNA, 19 nt, Artificial Sequence
  Description of Artificial Sequence: Synthetic oligonucleotide
  Antisense strand to SEQ ID NO: 794912
cucagccaaugauaacuag

SEQ ID NO: 794914 - RNA, 19 nt, Artificial Sequence
  Description of Artificial Sequence: Synthetic oligonucleotide
  Sense strand starting at position 2515 of SEQ ID NO: 587473
ggcagagugcugugggagu

SEQ ID NO: 794915 - RNA, 19 nt, Artificial Sequence
  Description of Artificial Sequence: Synthetic oligonucleotide
  Antisense strand to SEQ ID NO: 794914
acucccacagcacucugcc

SEQ ID NO: 794916 - RNA, 19 nt, Artificial Sequence
  Description of Artificial Sequence: Synthetic oligonucleotide
  Sense strand starting at position 2580 of SEQ ID NO: 587473
gacgcuaucugcucaggga

SEQ ID NO: 794917 - RNA, 19 nt, Artificial Sequence
  Description of Artificial Sequence: Synthetic oligonucleotide
  Antisense strand to SEQ ID NO: 794916
ucccugagcagauagcguc

SEQ ID NO: 794918 - RNA, 19 nt, Artificial Sequence
  Description of Artificial Sequence: Synthetic oligonucleotide
  Sense strand starting at position 2614 of SEQ ID NO: 587473
aggauuguguggucuucaa

SEQ ID NO: 794919 - RNA, 19 nt, Artificial Sequence
  Description of Artificial Sequence: Synthetic oligonucleotide
  Antisense strand to SEQ ID NO: 794918
uugaagaccacacaauccu

SEQ ID NO: 794920 - RNA, 19 nt, Artificial Sequence
  Description of Artificial Sequence: Synthetic oligonucleotide
  Sense strand starting at position 2618 of SEQ ID NO: 587473
uuguguggucuucaaagag

SEQ ID NO: 794921 - RNA, 19 nt, Artificial Sequence
  Description of Artificial Sequence: Synthetic oligonucleotide
  Antisense strand to SEQ ID NO: 794920
cucuuugaagaccacacaa

SEQ ID NO: 794922 - RNA, 19 nt, Artificial Sequence
  Description of Artificial Sequence: Synthetic oligonucleotide
  Sense strand starting at position 2645 of SEQ ID NO: 587473
ugguaagaaccugaugucu

SEQ ID NO: 794923 - RNA, 19 nt, Artificial Sequence
  Description of Artificial Sequence: Synthetic oligonucleotide
  Antisense strand to SEQ ID NO: 794922
agacaucagguucuuacca

SEQ ID NO: 794924 - RNA, 19 nt, Artificial Sequence
  Description of Artificial Sequence: Synthetic oligonucleotide
  Sense strand starting at position 2651 of SEQ ID NO: 587473
gaaccugaugucugucagu

SEQ ID NO: 794925 - RNA, 19 nt, Artificial Sequence
  Description of Artificial Sequence: Synthetic oligonucleotide
  Antisense strand to SEQ ID NO: 794924
acugacagacaucagguuc

SEQ ID NO: 794926 - RNA, 19 nt, Artificial Sequence
  Description of Artificial Sequence: Synthetic oligonucleotide
  Sense strand starting at position 2657 of SEQ ID NO: 587473
gaugucugucaguggcaga

SEQ ID NO: 794927 - RNA, 19 nt, Artificial Sequence
  Description of Artificial Sequence: Synthetic oligonucleotide
  Antisense strand to SEQ ID NO: 794926
ucugccacugacagacauc

SEQ ID NO: 794928 - RNA, 19 nt, Artificial Sequence
  Description of Artificial Sequence: Synthetic oligonucleotide
  Sense strand starting at position 2746 of SEQ ID NO: 587473
ccagcaguaccacaguauu

SEQ ID NO: 794929 - RNA, 19 nt, Artificial Sequence
  Description of Artificial Sequence: Synthetic oligonucleotide
  Antisense strand to SEQ ID NO: 794928
aauacugugguacugcugg

SEQ ID NO: 794930 - RNA, 19 nt, Artificial Sequence
  Description of Artificial Sequence: Synthetic oligonucleotide
  Sense strand starting at position 3297 of SEQ ID NO: 587473
cuugcuucuggagauugau

SEQ ID NO: 794931 - RNA, 19 nt, Artificial Sequence
  Description of Artificial Sequence: Synthetic oligonucleotide
  Antisense strand to SEQ ID NO: 794930
aucaaucuccagaagcaag

SEQ ID NO: 794932 - RNA, 19 nt, Artificial Sequence
  Description of Artificial Sequence: Synthetic oligonucleotide
  Sense strand starting at position 3300 of SEQ ID NO: 587473
gcuucuggagauugaugua

SEQ ID NO: 794933 - RNA, 19 nt, Artificial Sequence
  Description of Artificial Sequence: Synthetic oligonucleotide
  Antisense strand to SEQ ID NO: 794932
uacaucaaucuccagaagc

SEQ ID NO: 794934 - RNA, 19 nt, Artificial Sequence
  Description of Artificial Sequence: Synthetic oligonucleotide
  Sense strand starting at position 3445 of SEQ ID NO: 587473
agggcagugguccauggau

SEQ ID NO: 794935 - RNA, 19 nt, Artificial Sequence
  Description of Artificial Sequence: Synthetic oligonucleotide
  Antisense strand to SEQ ID NO: 794934
auccauggaccacugcccu

SEQ ID NO: 794936 - RNA, 19 nt, Artificial Sequence
  Description of Artificial Sequence: Synthetic oligonucleotide
  Sense strand starting at position 3447 of SEQ ID NO: 587473
ggcagugguccauggauuu

SEQ ID NO: 794937 - RNA, 19 nt, Artificial Sequence
  Description of Artificial Sequence: Synthetic oligonucleotide
  Antisense strand to SEQ ID NO: 794936
aaauccauggaccacugcc

SEQ ID NO: 794938 - RNA, 19 nt, Artificial Sequence
  Description of Artificial Sequence: Synthetic oligonucleotide
  Sense strand starting at position 3485 of SEQ ID NO: 587473
cuccgaagcuguccauaga

SEQ ID NO: 794939 - RNA, 19 nt, Artificial Sequence
  Description of Artificial Sequence: Synthetic oligonucleotide
  Antisense strand to SEQ ID NO: 794938
ucuauggacagcuucggag

SEQ ID NO: 794940 - RNA, 19 nt, Artificial Sequence
  Description of Artificial Sequence: Synthetic oligonucleotide
  Sense strand starting at position 3653 of SEQ ID NO: 587473
ccaugugccauugaagaug

SEQ ID NO: 794941 - RNA, 19 nt, Artificial Sequence
  Description of Artificial Sequence: Synthetic oligonucleotide
  Antisense strand to SEQ ID NO: 794940
caucuucaauggcacaugg

SEQ ID NO: 794942 - RNA, 19 nt, Artificial Sequence
  Description of Artificial Sequence: Synthetic oligonucleotide
  Sense strand starting at position 3661 of SEQ ID NO: 587473
cauugaagaugguuguuau

SEQ ID NO: 794943 - RNA, 19 nt, Artificial Sequence
  Description of Artificial Sequence: Synthetic oligonucleotide
  Antisense strand to SEQ ID NO: 794942
auaacaaccaucuucaaug

SEQ ID NO: 794944 - RNA, 19 nt, Artificial Sequence
  Description of Artificial Sequence: Synthetic oligonucleotide
  Sense strand starting at position 3662 of SEQ ID NO: 587473
auugaagaugguuguuauc

SEQ ID NO: 794945 - RNA, 19 nt, Artificial Sequence
  Description of Artificial Sequence: Synthetic oligonucleotide
  Antisense strand to SEQ ID NO: 794944
gauaacaaccaucuucaau

SEQ ID NO: 794946 - RNA, 19 nt, Artificial Sequence
  Description of Artificial Sequence: Synthetic oligonucleotide
  Sense strand starting at position 3672 of SEQ ID NO: 587473
guuguuaucuuccucugga

SEQ ID NO: 794947 - RNA, 19 nt, Artificial Sequence
  Description of Artificial Sequence: Synthetic oligonucleotide
  Antisense strand to SEQ ID NO: 794946
uccagaggaagauaacaac

SEQ ID NO: 794948 - RNA, 19 nt, Artificial Sequence
  Description of Artificial Sequence: Synthetic oligonucleotide
  Sense strand starting at position 3673 of SEQ ID NO: 587473
uuguuaucuuccucuggaa

SEQ ID NO: 794949 - RNA, 19 nt, Artificial Sequence
  Description of Artificial Sequence: Synthetic oligonucleotide
  Antisense strand to SEQ ID NO: 794948
uuccagaggaagauaacaa

SEQ ID NO: 794950 - RNA, 19 nt, Artificial Sequence
  Description of Artificial Sequence: Synthetic oligonucleotide
  Sense strand starting at position 3675 of SEQ ID NO: 587473
guuaucuuccucuggaaga

SEQ ID NO: 794951 - RNA, 19 nt, Artificial Sequence
  Description of Artificial Sequence: Synthetic oligonucleotide
  Antisense strand to SEQ ID NO: 794950
ucuuccagaggaagauaac

SEQ ID NO: 794952 - RNA, 19 nt, Artificial Sequence
  Description of Artificial Sequence: Synthetic oligonucleotide
  Sense strand starting at position 3676 of SEQ ID NO: 587473
uuaucuuccucuggaagag

SEQ ID NO: 794953 - RNA, 19 nt, Artificial Sequence
  Description of Artificial Sequence: Synthetic oligonucleotide
  Antisense strand to SEQ ID NO: 794952
cucuuccagaggaagauaa

SEQ ID NO: 794954 - RNA, 19 nt, Artificial Sequence
  Description of Artificial Sequence: Synthetic oligonucleotide
  Sense strand starting at position 3715 of SEQ ID NO: 587473
gguucccauuuauguuauu

SEQ ID NO: 794955 - RNA, 19 nt, Artificial Sequence
  Description of Artificial Sequence: Synthetic oligonucleotide
  Antisense strand to SEQ ID NO: 794954
aauaacauaaaugggaacc

SEQ ID NO: 794956 - RNA, 19 nt, Artificial Sequence
  Description of Artificial Sequence: Synthetic oligonucleotide
  Sense strand starting at position 3778 of SEQ ID NO: 587473
guaccaagucuugagccua

SEQ ID NO: 794957 - RNA, 19 nt, Artificial Sequence
  Description of Artificial Sequence: Synthetic oligonucleotide
  Antisense strand to SEQ ID NO: 794956
uaggcucaagacuugguac

SEQ ID NO: 794958 - RNA, 19 nt, Artificial Sequence
  Description of Artificial Sequence: Synthetic oligonucleotide
  Sense strand starting at position 3786 of SEQ ID NO: 587473
ucuugagccuaccugagaa

SEQ ID NO: 794959 - RNA, 19 nt, Artificial Sequence
  Description of Artificial Sequence: Synthetic oligonucleotide
  Antisense strand to SEQ ID NO: 794958
uucucagguaggcucaaga

SEQ ID NO: 794960 - RNA, 19 nt, Artificial Sequence
  Description of Artificial Sequence: Synthetic oligonucleotide
  Sense strand starting at position 318 of SEQ ID NO: 587474
cuugcuucuggagauugau

SEQ ID NO: 794961 - RNA, 19 nt, Artificial Sequence
  Description of Artificial Sequence: Synthetic oligonucleotide
  Antisense strand to SEQ ID NO: 794960
aucaaucuccagaagcaag

SEQ ID NO: 794962 - RNA, 19 nt, Artificial Sequence
  Description of Artificial Sequence: Synthetic oligonucleotide
  Sense strand starting at position 321 of SEQ ID NO: 587474
gcuucuggagauugaugua

SEQ ID NO: 794963 - RNA, 19 nt, Artificial Sequence
  Description of Artificial Sequence: Synthetic oligonucleotide
  Antisense strand to SEQ ID NO: 794962
uacaucaaucuccagaagc

SEQ ID NO: 794964 - RNA, 19 nt, Artificial Sequence
  Description of Artificial Sequence: Synthetic oligonucleotide
  Sense strand starting at position 466 of SEQ ID NO: 587474
agggcagugguccauggau

SEQ ID NO: 794965 - RNA, 19 nt, Artificial Sequence
  Description of Artificial Sequence: Synthetic oligonucleotide
  Antisense strand to SEQ ID NO: 794964
auccauggaccacugcccu

SEQ ID NO: 794966 - RNA, 19 nt, Artificial Sequence
  Description of Artificial Sequence: Synthetic oligonucleotide
  Sense strand starting at position 468 of SEQ ID NO: 587474
ggcagugguccauggauuu

SEQ ID NO: 794967 - RNA, 19 nt, Artificial Sequence
  Description of Artificial Sequence: Synthetic oligonucleotide
  Antisense strand to SEQ ID NO: 794966
aaauccauggaccacugcc

SEQ ID NO: 794968 - RNA, 19 nt, Artificial Sequence
  Description of Artificial Sequence: Synthetic oligonucleotide
  Sense strand starting at position 506 of SEQ ID NO: 587474
cuccgaagcuguccauaga

SEQ ID NO: 794969 - RNA, 19 nt, Artificial Sequence
  Description of Artificial Sequence: Synthetic oligonucleotide
  Antisense strand to SEQ ID NO: 794968
ucuauggacagcuucggag

SEQ ID NO: 794970 - RNA, 19 nt, Artificial Sequence
  Description of Artificial Sequence: Synthetic oligonucleotide
  Sense strand starting at position 674 of SEQ ID NO: 587474
ccaugugccauugaagaug

SEQ ID NO: 794971 - RNA, 19 nt, Artificial Sequence
  Description of Artificial Sequence: Synthetic oligonucleotide
  Antisense strand to SEQ ID NO: 794970
caucuucaauggcacaugg

SEQ ID NO: 794972 - RNA, 19 nt, Artificial Sequence
  Description of Artificial Sequence: Synthetic oligonucleotide
  Sense strand starting at position 682 of SEQ ID NO: 587474
cauugaagaugguuguuau

SEQ ID NO: 794973 - RNA, 19 nt, Artificial Sequence
  Description of Artificial Sequence: Synthetic oligonucleotide
  Antisense strand to SEQ ID NO: 794972
auaacaaccaucuucaaug

SEQ ID NO: 794974 - RNA, 19 nt, Artificial Sequence
  Description of Artificial Sequence: Synthetic oligonucleotide
  Sense strand starting at position 683 of SEQ ID NO: 587474
auugaagaugguuguuauc

SEQ ID NO: 794975 - RNA, 19 nt, Artificial Sequence
  Description of Artificial Sequence: Synthetic oligonucleotide
  Antisense strand to SEQ ID NO: 794974
gauaacaaccaucuucaau

SEQ ID NO: 794976 - RNA, 19 nt, Artificial Sequence
  Description of Artificial Sequence: Synthetic oligonucleotide
  Sense strand starting at position 694 of SEQ ID NO: 587474
uuguuaucuuccucuggaa

SEQ ID NO: 794977 - RNA, 19 nt, Artificial Sequence
  Description of Artificial Sequence: Synthetic oligonucleotide
  Antisense strand to SEQ ID NO: 794976
uuccagaggaagauaacaa

SEQ ID NO: 794978 - RNA, 19 nt, Artificial Sequence
  Description of Artificial Sequence: Synthetic oligonucleotide
  Sense strand starting at position 696 of SEQ ID NO: 587474
guuaucuuccucuggaaga

SEQ ID NO: 794979 - RNA, 19 nt, Artificial Sequence
  Description of Artificial Sequence: Synthetic oligonucleotide
  Antisense strand to SEQ ID NO: 794978
ucuuccagaggaagauaac

SEQ ID NO: 794980 - RNA, 19 nt, Artificial Sequence
  Description of Artificial Sequence: Synthetic oligonucleotide
  Sense strand starting at position 799 of SEQ ID NO: 587474
guaccaagucuugagccua

SEQ ID NO: 794981 - RNA, 19 nt, Artificial Sequence
  Description of Artificial Sequence: Synthetic oligonucleotide
  Antisense strand to SEQ ID NO: 794980
uaggcucaagacuugguac

SEQ ID NO: 794982 - RNA, 19 nt, Artificial Sequence
  Description of Artificial Sequence: Synthetic oligonucleotide
  Sense strand starting at position 807 of SEQ ID NO: 587474
ucuugagccuaccugagaa

SEQ ID NO: 794983 - RNA, 19 nt, Artificial Sequence
  Description of Artificial Sequence: Synthetic oligonucleotide
  Antisense strand to SEQ ID NO: 794982
uucucagguaggcucaaga

SEQ ID NO: 794984 - RNA, 19 nt, Artificial Sequence
  Description of Artificial Sequence: Synthetic oligonucleotide
  Sense strand starting at position 1997 of SEQ ID NO: 587474
ucaucaaacugguugguga

SEQ ID NO: 794985 - RNA, 19 nt, Artificial Sequence
  Description of Artificial Sequence: Synthetic oligonucleotide
  Antisense strand to SEQ ID NO: 794984
ucaccaaccaguuugauga

SEQ ID NO: 794986 - RNA, 19 nt, Artificial Sequence
  Description of Artificial Sequence: Synthetic oligonucleotide
  Sense strand starting at position 1998 of SEQ ID NO: 587474
caucaaacugguuggugau

SEQ ID NO: 794987 - RNA, 19 nt, Artificial Sequence
  Description of Artificial Sequence: Synthetic oligonucleotide
  Antisense strand to SEQ ID NO: 794986
aucaccaaccaguuugaug

SEQ ID NO: 794988 - RNA, 19 nt, Artificial Sequence
  Description of Artificial Sequence: Synthetic oligonucleotide
  Sense strand starting at position 1999 of SEQ ID NO: 587474
aucaaacugguuggugauu

SEQ ID NO: 794989 - RNA, 19 nt, Artificial Sequence
  Description of Artificial Sequence: Synthetic oligonucleotide
  Antisense strand to SEQ ID NO: 794988
aaucaccaaccaguuugau

SEQ ID NO: 794990 - RNA, 19 nt, Artificial Sequence
  Description of Artificial Sequence: Synthetic oligonucleotide
  Sense strand starting at position 2004 of SEQ ID NO: 587474
acugguuggugauucucau

SEQ ID NO: 794991 - RNA, 19 nt, Artificial Sequence
  Description of Artificial Sequence: Synthetic oligonucleotide
  Antisense strand to SEQ ID NO: 794990
augagaaucaccaaccagu

SEQ ID NO: 794992 - RNA, 19 nt, Artificial Sequence
  Description of Artificial Sequence: Synthetic oligonucleotide
  Sense strand starting at position 2010 of SEQ ID NO: 587474
uggugauucucaucaguuu

SEQ ID NO: 794993 - RNA, 19 nt, Artificial Sequence
  Description of Artificial Sequence: Synthetic oligonucleotide
  Antisense strand to SEQ ID NO: 794992
aaacugaugagaaucacca

SEQ ID NO: 794994 - RNA, 19 nt, Artificial Sequence
  Description of Artificial Sequence: Synthetic oligonucleotide
  Sense strand starting at position 2011 of SEQ ID NO: 587474
ggugauucucaucaguuua

SEQ ID NO: 794995 - RNA, 19 nt, Artificial Sequence
  Description of Artificial Sequence: Synthetic oligonucleotide
  Antisense strand to SEQ ID NO: 794994
uaaacugaugagaaucacc

SEQ ID NO: 794996 - RNA, 19 nt, Artificial Sequence
  Description of Artificial Sequence: Synthetic oligonucleotide
  Sense strand starting at position 2013 of SEQ ID NO: 587474
ugauucucaucaguuuagu

SEQ ID NO: 794997 - RNA, 19 nt, Artificial Sequence
  Description of Artificial Sequence: Synthetic oligonucleotide
  Antisense strand to SEQ ID NO: 794996
acuaaacugaugagaauca

SEQ ID NO: 794998 - RNA, 19 nt, Artificial Sequence
  Description of Artificial Sequence: Synthetic oligonucleotide
  Sense strand starting at position 2019 of SEQ ID NO: 587474
ucaucaguuuagucucuca

SEQ ID NO: 794999 - RNA, 19 nt, Artificial Sequence
  Description of Artificial Sequence: Synthetic oligonucleotide
  Antisense strand to SEQ ID NO: 794998
ugagagacuaaacugauga

SEQ ID NO: 795000 - RNA, 19 nt, Artificial Sequence
  Description of Artificial Sequence: Synthetic oligonucleotide
  Sense strand starting at position 2072 of SEQ ID NO: 587474
ucguucuugccggcuguaa

SEQ ID NO: 795001 - RNA, 19 nt, Artificial Sequence
  Description of Artificial Sequence: Synthetic oligonucleotide
  Antisense strand to SEQ ID NO: 795000
uuacagccggcaagaacga

SEQ ID NO: 795002 - RNA, 19 nt, Artificial Sequence
  Description of Artificial Sequence: Synthetic oligonucleotide
  Sense strand starting at position 2073 of SEQ ID NO: 587474
cguucuugccggcuguaau

SEQ ID NO: 795003 - RNA, 19 nt, Artificial Sequence
  Description of Artificial Sequence: Synthetic oligonucleotide
  Antisense strand to SEQ ID NO: 795002
auuacagccggcaagaacg

SEQ ID NO: 795004 - RNA, 19 nt, Artificial Sequence
  Description of Artificial Sequence: Synthetic oligonucleotide
  Sense strand starting at position 2359 of SEQ ID NO: 587474
ccauuuaucuaggacagug

SEQ ID NO: 795005 - RNA, 19 nt, Artificial Sequence
  Description of Artificial Sequence: Synthetic oligonucleotide
  Antisense strand to SEQ ID NO: 795004
cacuguccuagauaaaugg

SEQ ID NO: 795006 - RNA, 19 nt, Artificial Sequence
  Description of Artificial Sequence: Synthetic oligonucleotide
  Sense strand starting at position 2816 of SEQ ID NO: 587474
auaugucucagggagucuu

SEQ ID NO: 795007 - RNA, 19 nt, Artificial Sequence
  Description of Artificial Sequence: Synthetic oligonucleotide
  Antisense strand to SEQ ID NO: 795006
aagacucccugagacauau

SEQ ID NO: 795008 - RNA, 19 nt, Artificial Sequence
  Description of Artificial Sequence: Synthetic oligonucleotide
  Sense strand starting at position 2871 of SEQ ID NO: 587474
cuucuaauuccuugagcag

SEQ ID NO: 795009 - RNA, 19 nt, Artificial Sequence
  Description of Artificial Sequence: Synthetic oligonucleotide
  Antisense strand to SEQ ID NO: 795008
cugcucaaggaauuagaag

SEQ ID NO: 795010 - RNA, 19 nt, Artificial Sequence
  Description of Artificial Sequence: Synthetic oligonucleotide
  Sense strand starting at position 2872 of SEQ ID NO: 587474
uucuaauuccuugagcagu

SEQ ID NO: 795011 - RNA, 19 nt, Artificial Sequence
  Description of Artificial Sequence: Synthetic oligonucleotide
  Antisense strand to SEQ ID NO: 795010
acugcucaaggaauuagaa

SEQ ID NO: 795012 - RNA, 19 nt, Artificial Sequence
  Description of Artificial Sequence: Synthetic oligonucleotide
  Sense strand starting at position 2912 of SEQ ID NO: 587474
gaacuuugaguugggcaca

SEQ ID NO: 795013 - RNA, 19 nt, Artificial Sequence
  Description of Artificial Sequence: Synthetic oligonucleotide
  Antisense strand to SEQ ID NO: 795012
ugugcccaacucaaaguuc

SEQ ID NO: 795014 - RNA, 19 nt, Artificial Sequence
  Description of Artificial Sequence: Synthetic oligonucleotide
  Sense strand starting at position 2926 of SEQ ID NO: 587474
gcacaacuguguccagacu

SEQ ID NO: 795015 - RNA, 19 nt, Artificial Sequence
  Description of Artificial Sequence: Synthetic oligonucleotide
  Antisense strand to SEQ ID NO: 795014
agucuggacacaguugugc

SEQ ID NO: 795016 - RNA, 19 nt, Artificial Sequence
  Description of Artificial Sequence: Synthetic oligonucleotide
  Sense strand starting at position 2937 of SEQ ID NO: 587474
uccagacugugccuaugau

SEQ ID NO: 795017 - RNA, 19 nt, Artificial Sequence
  Description of Artificial Sequence: Synthetic oligonucleotide
  Antisense strand to SEQ ID NO: 795016
aucauaggcacagucugga

SEQ ID NO: 795018 - RNA, 19 nt, Artificial Sequence
  Description of Artificial Sequence: Synthetic oligonucleotide
  Sense strand starting at position 2938 of SEQ ID NO: 587474
ccagacugugccuaugaua

SEQ ID NO: 795019 - RNA, 19 nt, Artificial Sequence
  Description of Artificial Sequence: Synthetic oligonucleotide
  Antisense strand to SEQ ID NO: 795018
uaucauaggcacagucugg

SEQ ID NO: 795020 - RNA, 19 nt, Artificial Sequence
  Description of Artificial Sequence: Synthetic oligonucleotide
  Sense strand starting at position 3095 of SEQ ID NO: 587474
acgacaacccugugaguaa

SEQ ID NO: 795021 - RNA, 19 nt, Artificial Sequence
  Description of Artificial Sequence: Synthetic oligonucleotide
  Antisense strand to SEQ ID NO: 795020
uuacucacaggguugucgu

SEQ ID NO: 795022 - RNA, 19 nt, Artificial Sequence
  Description of Artificial Sequence: Synthetic oligonucleotide
  Sense strand starting at position 3128 of SEQ ID NO: 587474
ccguuucauggaugaagga

SEQ ID NO: 795023 - RNA, 19 nt, Artificial Sequence
  Description of Artificial Sequence: Synthetic oligonucleotide
  Antisense strand to SEQ ID NO: 795022
uccuucauccaugaaacgg

SEQ ID NO: 795024 - RNA, 19 nt, Artificial Sequence
  Description of Artificial Sequence: Synthetic oligonucleotide
  Sense strand starting at position 3165 of SEQ ID NO: 587474
ccucaaaggacgugagauc

SEQ ID NO: 795025 - RNA, 19 nt, Artificial Sequence
  Description of Artificial Sequence: Synthetic oligonucleotide
  Antisense strand to SEQ ID NO: 795024
gaucucacguccuuugagg

SEQ ID NO: 795026 - RNA, 19 nt, Artificial Sequence
  Description of Artificial Sequence: Synthetic oligonucleotide
  Sense strand starting at position 3197 of SEQ ID NO: 587474
cuggguggucagugaacca

SEQ ID NO: 795027 - RNA, 19 nt, Artificial Sequence
  Description of Artificial Sequence: Synthetic oligonucleotide
  Antisense strand to SEQ ID NO: 795026
ugguucacugaccacccag

SEQ ID NO: 795028 - RNA, 19 nt, Artificial Sequence
  Description of Artificial Sequence: Synthetic oligonucleotide
  Sense strand starting at position 3236 of SEQ ID NO: 587474
ggcucuuuagcuggagaga

SEQ ID NO: 795029 - RNA, 19 nt, Artificial Sequence
  Description of Artificial Sequence: Synthetic oligonucleotide
  Antisense strand to SEQ ID NO: 795028
ucucuccagcuaaagagcc

SEQ ID NO: 795030 - RNA, 19 nt, Artificial Sequence
  Description of Artificial Sequence: Synthetic oligonucleotide
  Sense strand starting at position 3237 of SEQ ID NO: 587474
gcucuuuagcuggagagag

SEQ ID NO: 795031 - RNA, 19 nt, Artificial Sequence
  Description of Artificial Sequence: Synthetic oligonucleotide
  Antisense strand to SEQ ID NO: 795030
cucucuccagcuaaagagc

SEQ ID NO: 795032 - RNA, 19 nt, Artificial Sequence
  Description of Artificial Sequence: Synthetic oligonucleotide
  Sense strand starting at position 3284 of SEQ ID NO: 587474
uugauauuguacucucugu

SEQ ID NO: 795033 - RNA, 19 nt, Artificial Sequence
  Description of Artificial Sequence: Synthetic oligonucleotide
  Antisense strand to SEQ ID NO: 795032
acagagaguacaauaucaa

SEQ ID NO: 795034 - RNA, 19 nt, Artificial Sequence
  Description of Artificial Sequence: Synthetic oligonucleotide
  Sense strand starting at position 3331 of SEQ ID NO: 587474
ugcuuagcauuacucagaa

SEQ ID NO: 795035 - RNA, 19 nt, Artificial Sequence
  Description of Artificial Sequence: Synthetic oligonucleotide
  Antisense strand to SEQ ID NO: 795034
uucugaguaaugcuaagca

SEQ ID NO: 795036 - RNA, 19 nt, Artificial Sequence
  Description of Artificial Sequence: Synthetic oligonucleotide
  Sense strand starting at position 3452 of SEQ ID NO: 587474
gagcaagaugggugucagu

SEQ ID NO: 795037 - RNA, 19 nt, Artificial Sequence
  Description of Artificial Sequence: Synthetic oligonucleotide
  Antisense strand to SEQ ID NO: 795036
acugacacccaucuugcuc

SEQ ID NO: 795038 - RNA, 19 nt, Artificial Sequence
  Description of Artificial Sequence: Synthetic oligonucleotide
  Sense strand starting at position 3689 of SEQ ID NO: 587474
gugggagauugguuacaua

SEQ ID NO: 795039 - RNA, 19 nt, Artificial Sequence
  Description of Artificial Sequence: Synthetic oligonucleotide
  Antisense strand to SEQ ID NO: 795038
uauguaaccaaucucccac

SEQ ID NO: 795040 - RNA, 19 nt, Artificial Sequence
  Description of Artificial Sequence: Synthetic oligonucleotide
  Sense strand starting at position 105 of SEQ ID NO: 587475
ucuccagaaaggugucaga

SEQ ID NO: 795041 - RNA, 19 nt, Artificial Sequence
  Description of Artificial Sequence: Synthetic oligonucleotide
  Antisense strand to SEQ ID NO: 795040
ucugacaccuuucuggaga

SEQ ID NO: 795042 - RNA, 19 nt, Artificial Sequence
  Description of Artificial Sequence: Synthetic oligonucleotide
  Sense strand starting at position 266 of SEQ ID NO: 587475
cacacagguuccugaaugu

SEQ ID NO: 795043 - RNA, 19 nt, Artificial Sequence
  Description of Artificial Sequence: Synthetic oligonucleotide
  Antisense strand to SEQ ID NO: 795042
acauucaggaaccugugug

SEQ ID NO: 795044 - RNA, 19 nt, Artificial Sequence
  Description of Artificial Sequence: Synthetic oligonucleotide
  Sense strand starting at position 375 of SEQ ID NO: 587475
gagccacuuggcugagaau

SEQ ID NO: 795045 - RNA, 19 nt, Artificial Sequence
  Description of Artificial Sequence: Synthetic oligonucleotide
  Antisense strand to SEQ ID NO: 795044
auucucagccaaguggcuc

SEQ ID NO: 795046 - RNA, 19 nt, Artificial Sequence
  Description of Artificial Sequence: Synthetic oligonucleotide
  Sense strand starting at position 378 of SEQ ID NO: 587475
ccacuuggcugagaauguu

SEQ ID NO: 795047 - RNA, 19 nt, Artificial Sequence
  Description of Artificial Sequence: Synthetic oligonucleotide
  Antisense strand to SEQ ID NO: 795046
aacauucucagccaagugg

SEQ ID NO: 795048 - RNA, 19 nt, Artificial Sequence
  Description of Artificial Sequence: Synthetic oligonucleotide
  Sense strand starting at position 436 of SEQ ID NO: 587475
gugacauggaguugagaca

SEQ ID NO: 795049 - RNA, 19 nt, Artificial Sequence
  Description of Artificial Sequence: Synthetic oligonucleotide
  Antisense strand to SEQ ID NO: 795048
ugucucaacuccaugucac

SEQ ID NO: 795050 - RNA, 19 nt, Artificial Sequence
  Description of Artificial Sequence: Synthetic oligonucleotide
  Sense strand starting at position 457 of SEQ ID NO: 587475
ggaaauaccuggugccacu

SEQ ID NO: 795051 - RNA, 19 nt, Artificial Sequence
  Description of Artificial Sequence: Synthetic oligonucleotide
  Antisense strand to SEQ ID NO: 795050
aguggcaccagguauuucc

SEQ ID NO: 795052 - RNA, 19 nt, Artificial Sequence
  Description of Artificial Sequence: Synthetic oligonucleotide
  Sense strand starting at position 502 of SEQ ID NO: 587475
gggagaagcugucccaaca

SEQ ID NO: 795053 - RNA, 19 nt, Artificial Sequence
  Description of Artificial Sequence: Synthetic oligonucleotide
  Antisense strand to SEQ ID NO: 795052
uguugggacagcuucuccc

SEQ ID NO: 795054 - RNA, 19 nt, Artificial Sequence
  Description of Artificial Sequence: Synthetic oligonucleotide
  Sense strand starting at position 538 of SEQ ID NO: 587475
cguccucaugguugacaua

SEQ ID NO: 795055 - RNA, 19 nt, Artificial Sequence
  Description of Artificial Sequence: Synthetic oligonucleotide
  Antisense strand to SEQ ID NO: 795054
uaugucaaccaugaggacg

SEQ ID NO: 795056 - RNA, 19 nt, Artificial Sequence
  Description of Artificial Sequence: Synthetic oligonucleotide
  Sense strand starting at position 539 of SEQ ID NO: 587475
guccucaugguugacauau

SEQ ID NO: 795057 - RNA, 19 nt, Artificial Sequence
  Description of Artificial Sequence: Synthetic oligonucleotide
  Antisense strand to SEQ ID NO: 795056
auaugucaaccaugaggac

SEQ ID NO: 795058 - RNA, 19 nt, Artificial Sequence
  Description of Artificial Sequence: Synthetic oligonucleotide
  Sense strand starting at position 685 of SEQ ID NO: 587475
ggcggugucugaccauaca

SEQ ID NO: 795059 - RNA, 19 nt, Artificial Sequence
  Description of Artificial Sequence: Synthetic oligonucleotide
  Antisense strand to SEQ ID NO: 795058
uguauggucagacaccgcc

SEQ ID NO: 795060 - RNA, 19 nt, Artificial Sequence
  Description of Artificial Sequence: Synthetic oligonucleotide
  Sense strand starting at position 713 of SEQ ID NO: 587475
gaacaacccugcugauguu

SEQ ID NO: 795061 - RNA, 19 nt, Artificial Sequence
  Description of Artificial Sequence: Synthetic oligonucleotide
  Antisense strand to SEQ ID NO: 795060
aacaucagcaggguuguuc

SEQ ID NO: 795062 - RNA, 19 nt, Artificial Sequence
  Description of Artificial Sequence: Synthetic oligonucleotide
  Sense strand starting at position 726 of SEQ ID NO: 587475
gauguuguuugaggguacu

SEQ ID NO: 795063 - RNA, 19 nt, Artificial Sequence
  Description of Artificial Sequence: Synthetic oligonucleotide
  Antisense strand to SEQ ID NO: 795062
aguacccucaaacaacauc

SEQ ID NO: 795064 - RNA, 19 nt, Artificial Sequence
  Description of Artificial Sequence: Synthetic oligonucleotide
  Sense strand starting at position 736 of SEQ ID NO: 587475
gaggguacuucccgacacu

SEQ ID NO: 795065 - RNA, 19 nt, Artificial Sequence
  Description of Artificial Sequence: Synthetic oligonucleotide
  Antisense strand to SEQ ID NO: 795064
agugucgggaaguacccuc

SEQ ID NO: 795066 - RNA, 19 nt, Artificial Sequence
  Description of Artificial Sequence: Synthetic oligonucleotide
  Sense strand starting at position 808 of SEQ ID NO: 587475
gcuccaggcuguguguaau

SEQ ID NO: 795067 - RNA, 19 nt, Artificial Sequence
  Description of Artificial Sequence: Synthetic oligonucleotide
  Antisense strand to SEQ ID NO: 795066
auuacacacagccuggagc

SEQ ID NO: 795068 - RNA, 19 nt, Artificial Sequence
  Description of Artificial Sequence: Synthetic oligonucleotide
  Sense strand starting at position 956 of SEQ ID NO: 587475
guacgugucuccugggcua

SEQ ID NO: 795069 - RNA, 19 nt, Artificial Sequence
  Description of Artificial Sequence: Synthetic oligonucleotide
  Antisense strand to SEQ ID NO: 795068
uagcccaggagacacguac

SEQ ID NO: 795070 - RNA, 19 nt, Artificial Sequence
  Description of Artificial Sequence: Synthetic oligonucleotide
  Sense strand starting at position 1092 of SEQ ID NO: 587475
ggcaaugacucagcacgaa

SEQ ID NO: 795071 - RNA, 19 nt, Artificial Sequence
  Description of Artificial Sequence: Synthetic oligonucleotide
  Antisense strand to SEQ ID NO: 795070
uucgugcugagucauugcc

SEQ ID NO: 795072 - RNA, 19 nt, Artificial Sequence
  Description of Artificial Sequence: Synthetic oligonucleotide
  Sense strand starting at position 1212 of SEQ ID NO: 587475
uccugaguaucuggaagga

SEQ ID NO: 795073 - RNA, 19 nt, Artificial Sequence
  Description of Artificial Sequence: Synthetic oligonucleotide
  Antisense strand to SEQ ID NO: 795072
uccuuccagauacucagga

SEQ ID NO: 795074 - RNA, 19 nt, Artificial Sequence
  Description of Artificial Sequence: Synthetic oligonucleotide
  Sense strand starting at position 1237 of SEQ ID NO: 587475
cauggaaggaucuggaguu

SEQ ID NO: 795075 - RNA, 19 nt, Artificial Sequence
  Description of Artificial Sequence: Synthetic oligonucleotide
  Antisense strand to SEQ ID NO: 795074
aacuccagauccuuccaug

SEQ ID NO: 795076 - RNA, 19 nt, Artificial Sequence
  Description of Artificial Sequence: Synthetic oligonucleotide
  Sense strand starting at position 1269 of SEQ ID NO: 587475
gggugaaccugugccaagu

SEQ ID NO: 795077 - RNA, 19 nt, Artificial Sequence
  Description of Artificial Sequence: Synthetic oligonucleotide
  Antisense strand to SEQ ID NO: 795076
acuuggcacagguucaccc

SEQ ID NO: 795078 - RNA, 19 nt, Artificial Sequence
  Description of Artificial Sequence: Synthetic oligonucleotide
  Sense strand starting at position 1360 of SEQ ID NO: 587475
ccggaagucgcucagugau

SEQ ID NO: 795079 - RNA, 19 nt, Artificial Sequence
  Description of Artificial Sequence: Synthetic oligonucleotide
  Antisense strand to SEQ ID NO: 795078
aucacugagcgacuuccgg

SEQ ID NO: 795080 - RNA, 19 nt, Artificial Sequence
  Description of Artificial Sequence: Synthetic oligonucleotide
  Sense strand starting at position 1362 of SEQ ID NO: 587475
ggaagucgcucagugauaa

SEQ ID NO: 795081 - RNA, 19 nt, Artificial Sequence
  Description of Artificial Sequence: Synthetic oligonucleotide
  Antisense strand to SEQ ID NO: 795080
uuaucacugagcgacuucc

SEQ ID NO: 795082 - RNA, 19 nt, Artificial Sequence
  Description of Artificial Sequence: Synthetic oligonucleotide
  Sense strand starting at position 1363 of SEQ ID NO: 587475
gaagucgcucagugauaac

SEQ ID NO: 795083 - RNA, 19 nt, Artificial Sequence
  Description of Artificial Sequence: Synthetic oligonucleotide
  Antisense strand to SEQ ID NO: 795082
guuaucacugagcgacuuc

SEQ ID NO: 795084 - RNA, 19 nt, Artificial Sequence
  Description of Artificial Sequence: Synthetic oligonucleotide
  Sense strand starting at position 2389 of SEQ ID NO: 587475
cggcucagucgcuaggaaa

SEQ ID NO: 795085 - RNA, 19 nt, Artificial Sequence
  Description of Artificial Sequence: Synthetic oligonucleotide
  Antisense strand to SEQ ID NO: 795084
uuuccuagcgacugagccg

SEQ ID NO: 795086 - RNA, 19 nt, Artificial Sequence
  Description of Artificial Sequence: Synthetic oligonucleotide
  Sense strand starting at position 2906 of SEQ ID NO: 587475
ugagauuucucagacacca

SEQ ID NO: 795087 - RNA, 19 nt, Artificial Sequence
  Description of Artificial Sequence: Synthetic oligonucleotide
  Antisense strand to SEQ ID NO: 795086
uggugucugagaaaucuca

SEQ ID NO: 795088 - RNA, 19 nt, Artificial Sequence
  Description of Artificial Sequence: Synthetic oligonucleotide
  Sense strand starting at position 3203 of SEQ ID NO: 587475
acuggaucaucuguccaaa

SEQ ID NO: 795089 - RNA, 19 nt, Artificial Sequence
  Description of Artificial Sequence: Synthetic oligonucleotide
  Antisense strand to SEQ ID NO: 795088
uuuggacagaugauccagu

SEQ ID NO: 795090 - RNA, 19 nt, Artificial Sequence
  Description of Artificial Sequence: Synthetic oligonucleotide
  Sense strand starting at position 3309 of SEQ ID NO: 587475
uuccucuugccaugugauc

SEQ ID NO: 795091 - RNA, 19 nt, Artificial Sequence
  Description of Artificial Sequence: Synthetic oligonucleotide
  Antisense strand to SEQ ID NO: 795090
gaucacauggcaagaggaa

SEQ ID NO: 795092 - RNA, 19 nt, Artificial Sequence
  Description of Artificial Sequence: Synthetic oligonucleotide
  Sense strand starting at position 3401 of SEQ ID NO: 587475
accagcaugcuggaaacau

SEQ ID NO: 795093 - RNA, 19 nt, Artificial Sequence
  Description of Artificial Sequence: Synthetic oligonucleotide
  Antisense strand to SEQ ID NO: 795092
auguuuccagcaugcuggu

SEQ ID NO: 795094 - RNA, 19 nt, Artificial Sequence
  Description of Artificial Sequence: Synthetic oligonucleotide
  Sense strand starting at position 3542 of SEQ ID NO: 587475
gggucagcuguguggacua

SEQ ID NO: 795095 - RNA, 19 nt, Artificial Sequence
  Description of Artificial Sequence: Synthetic oligonucleotide
  Antisense strand to SEQ ID NO: 795094
uaguccacacagcugaccc

SEQ ID NO: 795096 - RNA, 19 nt, Artificial Sequence
  Description of Artificial Sequence: Synthetic oligonucleotide
  Sense strand starting at position 3725 of SEQ ID NO: 587475
gagggccaugcucaugauu

SEQ ID NO: 795097 - RNA, 19 nt, Artificial Sequence
  Description of Artificial Sequence: Synthetic oligonucleotide
  Antisense strand to SEQ ID NO: 795096
aaucaugagcauggcccuc

SEQ ID NO: 795098 - RNA, 19 nt, Artificial Sequence
  Description of Artificial Sequence: Synthetic oligonucleotide
  Sense strand starting at position 3727 of SEQ ID NO: 587475
gggccaugcucaugauuac

SEQ ID NO: 795099 - RNA, 19 nt, Artificial Sequence
  Description of Artificial Sequence: Synthetic oligonucleotide
  Antisense strand to SEQ ID NO: 795098
guaaucaugagcauggccc

SEQ ID NO: 795100 - RNA, 19 nt, Artificial Sequence
  Description of Artificial Sequence: Synthetic oligonucleotide
  Sense strand starting at position 3734 of SEQ ID NO: 587475
gcucaugauuacggugaga

SEQ ID NO: 795101 - RNA, 19 nt, Artificial Sequence
  Description of Artificial Sequence: Synthetic oligonucleotide
  Antisense strand to SEQ ID NO: 795100
ucucaccguaaucaugagc

SEQ ID NO: 795102 - RNA, 19 nt, Artificial Sequence
  Description of Artificial Sequence: Synthetic oligonucleotide
  Sense strand starting at position 3736 of SEQ ID NO: 587475
ucaugauuacggugagaac

SEQ ID NO: 795103 - RNA, 19 nt, Artificial Sequence
  Description of Artificial Sequence: Synthetic oligonucleotide
  Antisense strand to SEQ ID NO: 795102
guucucaccguaaucauga

SEQ ID NO: 795104 - RNA, 19 nt, Artificial Sequence
  Description of Artificial Sequence: Synthetic oligonucleotide
  Sense strand starting at position 3739 of SEQ ID NO: 587475
ugauuacggugagaacaaa

SEQ ID NO: 795105 - RNA, 19 nt, Artificial Sequence
  Description of Artificial Sequence: Synthetic oligonucleotide
  Antisense strand to SEQ ID NO: 795104
uuuguucucaccguaauca

SEQ ID NO: 795106 - RNA, 19 nt, Artificial Sequence
  Description of Artificial Sequence: Synthetic oligonucleotide
  Sense strand starting at position 3793 of SEQ ID NO: 587475
ggagaagagugcuagacuc

SEQ ID NO: 795107 - RNA, 19 nt, Artificial Sequence
  Description of Artificial Sequence: Synthetic oligonucleotide
  Antisense strand to SEQ ID NO: 795106
gagucuagcacucuucucc

SEQ ID NO: 795108 - RNA, 19 nt, Artificial Sequence
  Description of Artificial Sequence: Synthetic oligonucleotide
  Sense strand starting at position 399 of SEQ ID NO: 587476
cggcuuguagcgguacaga

SEQ ID NO: 795109 - RNA, 19 nt, Artificial Sequence
  Description of Artificial Sequence: Synthetic oligonucleotide
  Antisense strand to SEQ ID NO: 795108
ucuguaccgcuacaagccg

SEQ ID NO: 795110 - RNA, 19 nt, Artificial Sequence
  Description of Artificial Sequence: Synthetic oligonucleotide
  Sense strand starting at position 500 of SEQ ID NO: 587476
ccuggaaguuacccacaua

SEQ ID NO: 795111 - RNA, 19 nt, Artificial Sequence
  Description of Artificial Sequence: Synthetic oligonucleotide
  Antisense strand to SEQ ID NO: 795110
uauguggguaacuuccagg

SEQ ID NO: 795112 - RNA, 19 nt, Artificial Sequence
  Description of Artificial Sequence: Synthetic oligonucleotide
  Sense strand starting at position 587 of SEQ ID NO: 587476
gcagguucucgggcgugua

SEQ ID NO: 795113 - RNA, 19 nt, Artificial Sequence
  Description of Artificial Sequence: Synthetic oligonucleotide
  Antisense strand to SEQ ID NO: 795112
uacacgcccgagaaccugc

SEQ ID NO: 795114 - RNA, 19 nt, Artificial Sequence
  Description of Artificial Sequence: Synthetic oligonucleotide
  Sense strand starting at position 794 of SEQ ID NO: 587476
ccucaucgucauuggagaa

SEQ ID NO: 795115 - RNA, 19 nt, Artificial Sequence
  Description of Artificial Sequence: Synthetic oligonucleotide
  Antisense strand to SEQ ID NO: 795114
uucuccaaugacgaugagg

SEQ ID NO: 795116 - RNA, 19 nt, Artificial Sequence
  Description of Artificial Sequence: Synthetic oligonucleotide
  Sense strand starting at position 795 of SEQ ID NO: 587476
cucaucgucauuggagaaa

SEQ ID NO: 795117 - RNA, 19 nt, Artificial Sequence
  Description of Artificial Sequence: Synthetic oligonucleotide
  Antisense strand to SEQ ID NO: 795116
uuucuccaaugacgaugag

SEQ ID NO: 795118 - RNA, 19 nt, Artificial Sequence
  Description of Artificial Sequence: Synthetic oligonucleotide
  Sense strand starting at position 871 of SEQ ID NO: 587476
gugggaacuuccuuguaac

SEQ ID NO: 795119 - RNA, 19 nt, Artificial Sequence
  Description of Artificial Sequence: Synthetic oligonucleotide
  Antisense strand to SEQ ID NO: 795118
guuacaaggaaguucccac

SEQ ID NO: 795120 - RNA, 19 nt, Artificial Sequence
  Description of Artificial Sequence: Synthetic oligonucleotide
  Sense strand starting at position 872 of SEQ ID NO: 587476
ugggaacuuccuuguaacu

SEQ ID NO: 795121 - RNA, 19 nt, Artificial Sequence
  Description of Artificial Sequence: Synthetic oligonucleotide
  Antisense strand to SEQ ID NO: 795120
aguuacaaggaaguuccca

SEQ ID NO: 795122 - RNA, 19 nt, Artificial Sequence
  Description of Artificial Sequence: Synthetic oligonucleotide
  Sense strand starting at position 885 of SEQ ID NO: 587476
guaacuuaggugggucaau

SEQ ID NO: 795123 - RNA, 19 nt, Artificial Sequence
  Description of Artificial Sequence: Synthetic oligonucleotide
  Antisense strand to SEQ ID NO: 795122
auugacccaccuaaguuac

SEQ ID NO: 795124 - RNA, 19 nt, Artificial Sequence
  Description of Artificial Sequence: Synthetic oligonucleotide
  Sense strand starting at position 886 of SEQ ID NO: 587476
uaacuuaggugggucaauu

SEQ ID NO: 795125 - RNA, 19 nt, Artificial Sequence
  Description of Artificial Sequence: Synthetic oligonucleotide
  Antisense strand to SEQ ID NO: 795124
aauugacccaccuaaguua

SEQ ID NO: 795126 - RNA, 19 nt, Artificial Sequence
  Description of Artificial Sequence: Synthetic oligonucleotide
  Sense strand starting at position 1940 of SEQ ID NO: 587476
gagggacgggauuguagau

SEQ ID NO: 795127 - RNA, 19 nt, Artificial Sequence
  Description of Artificial Sequence: Synthetic oligonucleotide
  Antisense strand to SEQ ID NO: 795126
aucuacaaucccgucccuc

SEQ ID NO: 795128 - RNA, 19 nt, Artificial Sequence
  Description of Artificial Sequence: Synthetic oligonucleotide
  Sense strand starting at position 2119 of SEQ ID NO: 587476
cgccggagcggguuuaaau

SEQ ID NO: 795129 - RNA, 19 nt, Artificial Sequence
  Description of Artificial Sequence: Synthetic oligonucleotide
  Antisense strand to SEQ ID NO: 795128
auuuaaacccgcuccggcg

SEQ ID NO: 795130 - RNA, 19 nt, Artificial Sequence
  Description of Artificial Sequence: Synthetic oligonucleotide
  Sense strand starting at position 2190 of SEQ ID NO: 587476
ugccuuccgagacaaguua

SEQ ID NO: 795131 - RNA, 19 nt, Artificial Sequence
  Description of Artificial Sequence: Synthetic oligonucleotide
  Antisense strand to SEQ ID NO: 795130
uaacuugucucggaaggca

SEQ ID NO: 795132 - RNA, 19 nt, Artificial Sequence
  Description of Artificial Sequence: Synthetic oligonucleotide
  Sense strand starting at position 2247 of SEQ ID NO: 587476
ggaaggagaguuugguguu

SEQ ID NO: 795133 - RNA, 19 nt, Artificial Sequence
  Description of Artificial Sequence: Synthetic oligonucleotide
  Antisense strand to SEQ ID NO: 795132
aacaccaaacucuccuucc

SEQ ID NO: 795134 - RNA, 19 nt, Artificial Sequence
  Description of Artificial Sequence: Synthetic oligonucleotide
  Sense strand starting at position 2384 of SEQ ID NO: 587476
ccaggacagcucgaagagu

SEQ ID NO: 795135 - RNA, 19 nt, Artificial Sequence
  Description of Artificial Sequence: Synthetic oligonucleotide
  Antisense strand to SEQ ID NO: 795134
acucuucgagcuguccugg

SEQ ID NO: 795136 - RNA, 19 nt, Artificial Sequence
  Description of Artificial Sequence: Synthetic oligonucleotide
  Sense strand starting at position 2401 of SEQ ID NO: 587476
gugcgucauccuagaggug

SEQ ID NO: 795137 - RNA, 19 nt, Artificial Sequence
  Description of Artificial Sequence: Synthetic oligonucleotide
  Antisense strand to SEQ ID NO: 795136
caccucuaggaugacgcac

SEQ ID NO: 795138 - RNA, 19 nt, Artificial Sequence
  Description of Artificial Sequence: Synthetic oligonucleotide
  Sense strand starting at position 2426 of SEQ ID NO: 587476
gaguuaguagugggaaacu

SEQ ID NO: 795139 - RNA, 19 nt, Artificial Sequence
  Description of Artificial Sequence: Synthetic oligonucleotide
  Antisense strand to SEQ ID NO: 795138
aguuucccacuacuaacuc

SEQ ID NO: 795140 - RNA, 19 nt, Artificial Sequence
  Description of Artificial Sequence: Synthetic oligonucleotide
  Sense strand starting at position 2665 of SEQ ID NO: 587476
ggauguaggaauugccuaa

SEQ ID NO: 795141 - RNA, 19 nt, Artificial Sequence
  Description of Artificial Sequence: Synthetic oligonucleotide
  Antisense strand to SEQ ID NO: 795140
uuaggcaauuccuacaucc

SEQ ID NO: 795142 - RNA, 19 nt, Artificial Sequence
  Description of Artificial Sequence: Synthetic oligonucleotide
  Sense strand starting at position 2854 of SEQ ID NO: 587476
cuaaauguaggcuaccaaa

SEQ ID NO: 795143 - RNA, 19 nt, Artificial Sequence
  Description of Artificial Sequence: Synthetic oligonucleotide
  Antisense strand to SEQ ID NO: 795142
uuugguagccuacauuuag

SEQ ID NO: 795144 - RNA, 19 nt, Artificial Sequence
  Description of Artificial Sequence: Synthetic oligonucleotide
  Sense strand starting at position 3001 of SEQ ID NO: 587476
gggacuuaagaaugcgauu

SEQ ID NO: 795145 - RNA, 19 nt, Artificial Sequence
  Description of Artificial Sequence: Synthetic oligonucleotide
  Antisense strand to SEQ ID NO: 795144
aaucgcauucuuaaguccc

SEQ ID NO: 795146 - RNA, 19 nt, Artificial Sequence
  Description of Artificial Sequence: Synthetic oligonucleotide
  Sense strand starting at position 3117 of SEQ ID NO: 587476
gauccuuucuaguuuagga

SEQ ID NO: 795147 - RNA, 19 nt, Artificial Sequence
  Description of Artificial Sequence: Synthetic oligonucleotide
  Antisense strand to SEQ ID NO: 795146
uccuaaacuagaaaggauc

SEQ ID NO: 795148 - RNA, 19 nt, Artificial Sequence
  Description of Artificial Sequence: Synthetic oligonucleotide
  Sense strand starting at position 3119 of SEQ ID NO: 587476
uccuuucuaguuuaggaga

SEQ ID NO: 795149 - RNA, 19 nt, Artificial Sequence
  Description of Artificial Sequence: Synthetic oligonucleotide
  Antisense strand to SEQ ID NO: 795148
ucuccuaaacuagaaagga

SEQ ID NO: 795150 - RNA, 19 nt, Artificial Sequence
  Description of Artificial Sequence: Synthetic oligonucleotide
  Sense strand starting at position 3221 of SEQ ID NO: 587476
gcaagucugaaguauaagu

SEQ ID NO: 795151 - RNA, 19 nt, Artificial Sequence
  Description of Artificial Sequence: Synthetic oligonucleotide
  Antisense strand to SEQ ID NO: 795150
acuuauacuucagacuugc

SEQ ID NO: 795152 - RNA, 19 nt, Artificial Sequence
  Description of Artificial Sequence: Synthetic oligonucleotide
  Sense strand starting at position 3223 of SEQ ID NO: 587476
aagucugaaguauaaguua

SEQ ID NO: 795153 - RNA, 19 nt, Artificial Sequence
  Description of Artificial Sequence: Synthetic oligonucleotide
  Antisense strand to SEQ ID NO: 795152
uaacuuauacuucagacuu

SEQ ID NO: 795154 - RNA, 19 nt, Artificial Sequence
  Description of Artificial Sequence: Synthetic oligonucleotide
  Sense strand starting at position 3226 of SEQ ID NO: 587476
ucugaaguauaaguuagau

SEQ ID NO: 795155 - RNA, 19 nt, Artificial Sequence
  Description of Artificial Sequence: Synthetic oligonucleotide
  Antisense strand to SEQ ID NO: 795154
aucuaacuuauacuucaga

SEQ ID NO: 795156 - RNA, 19 nt, Artificial Sequence
  Description of Artificial Sequence: Synthetic oligonucleotide
  Sense strand starting at position 3308 of SEQ ID NO: 587476
gcgcaugugacugaaugaa

SEQ ID NO: 795157 - RNA, 19 nt, Artificial Sequence
  Description of Artificial Sequence: Synthetic oligonucleotide
  Antisense strand to SEQ ID NO: 795156
uucauucagucacaugcgc

SEQ ID NO: 795158 - RNA, 19 nt, Artificial Sequence
  Description of Artificial Sequence: Synthetic oligonucleotide
  Sense strand starting at position 3382 of SEQ ID NO: 587476
gagugauauuuguugccau

SEQ ID NO: 795159 - RNA, 19 nt, Artificial Sequence
  Description of Artificial Sequence: Synthetic oligonucleotide
  Antisense strand to SEQ ID NO: 795158
auggcaacaaauaucacuc

SEQ ID NO: 795160 - RNA, 19 nt, Artificial Sequence
  Description of Artificial Sequence: Synthetic oligonucleotide
  Sense strand starting at position 3385 of SEQ ID NO: 587476
ugauauuuguugccaucau

SEQ ID NO: 795161 - RNA, 19 nt, Artificial Sequence
  Description of Artificial Sequence: Synthetic oligonucleotide
  Antisense strand to SEQ ID NO: 795160
augauggcaacaaauauca

SEQ ID NO: 795162 - RNA, 19 nt, Artificial Sequence
  Description of Artificial Sequence: Synthetic oligonucleotide
  Sense strand starting at position 3438 of SEQ ID NO: 587476
uagagauuauggcugguca

SEQ ID NO: 795163 - RNA, 19 nt, Artificial Sequence
  Description of Artificial Sequence: Synthetic oligonucleotide
  Antisense strand to SEQ ID NO: 795162
ugaccagccauaaucucua

SEQ ID NO: 795164 - RNA, 19 nt, Artificial Sequence
  Description of Artificial Sequence: Synthetic oligonucleotide
  Sense strand starting at position 3439 of SEQ ID NO: 587476
agagauuauggcuggucau

SEQ ID NO: 795165 - RNA, 19 nt, Artificial Sequence
  Description of Artificial Sequence: Synthetic oligonucleotide
  Antisense strand to SEQ ID NO: 795164
augaccagccauaaucucu

SEQ ID NO: 795166 - RNA, 19 nt, Artificial Sequence
  Description of Artificial Sequence: Synthetic oligonucleotide
  Sense strand starting at position 3440 of SEQ ID NO: 587476
gagauuauggcuggucauc

SEQ ID NO: 795167 - RNA, 19 nt, Artificial Sequence
  Description of Artificial Sequence: Synthetic oligonucleotide
  Antisense strand to SEQ ID NO: 795166
gaugaccagccauaaucuc

SEQ ID NO: 795168 - RNA, 19 nt, Artificial Sequence
  Description of Artificial Sequence: Synthetic oligonucleotide
  Sense strand starting at position 3462 of SEQ ID NO: 587476
uguucaucagauugggaga

SEQ ID NO: 795169 - RNA, 19 nt, Artificial Sequence
  Description of Artificial Sequence: Synthetic oligonucleotide
  Antisense strand to SEQ ID NO: 795168
ucucccaaucugaugaaca

SEQ ID NO: 795170 - RNA, 19 nt, Artificial Sequence
  Description of Artificial Sequence: Synthetic oligonucleotide
  Sense strand starting at position 3473 of SEQ ID NO: 587476
uugggagaccucugcuacu

SEQ ID NO: 795171 - RNA, 19 nt, Artificial Sequence
  Description of Artificial Sequence: Synthetic oligonucleotide
  Antisense strand to SEQ ID NO: 795170
aguagcagaggucucccaa

SEQ ID NO: 795172 - RNA, 19 nt, Artificial Sequence
  Description of Artificial Sequence: Synthetic oligonucleotide
  Sense strand starting at position 3564 of SEQ ID NO: 587476
gacacaguuguaggacaau

SEQ ID NO: 795173 - RNA, 19 nt, Artificial Sequence
  Description of Artificial Sequence: Synthetic oligonucleotide
  Antisense strand to SEQ ID NO: 795172
auuguccuacaacuguguc

SEQ ID NO: 795174 - RNA, 19 nt, Artificial Sequence
  Description of Artificial Sequence: Synthetic oligonucleotide
  Sense strand starting at position 3591 of SEQ ID NO: 587476
agcacucuaggucagagau

SEQ ID NO: 795175 - RNA, 19 nt, Artificial Sequence
  Description of Artificial Sequence: Synthetic oligonucleotide
  Antisense strand to SEQ ID NO: 795174
aucucugaccuagagugcu

SEQ ID NO: 795176 - RNA, 19 nt, Artificial Sequence
  Description of Artificial Sequence: Synthetic oligonucleotide
  Sense strand starting at position 3606 of SEQ ID NO: 587476
agaucuggugggugaggaa

SEQ ID NO: 795177 - RNA, 19 nt, Artificial Sequence
  Description of Artificial Sequence: Synthetic oligonucleotide
  Antisense strand to SEQ ID NO: 795176
uuccucacccaccagaucu

SEQ ID NO: 795178 - RNA, 19 nt, Artificial Sequence
  Description of Artificial Sequence: Synthetic oligonucleotide
  Sense strand starting at position 3670 of SEQ ID NO: 587476
uguucucaggugcacaaua

SEQ ID NO: 795179 - RNA, 19 nt, Artificial Sequence
  Description of Artificial Sequence: Synthetic oligonucleotide
  Antisense strand to SEQ ID NO: 795178
uauugugcaccugagaaca

SEQ ID NO: 795180 - RNA, 19 nt, Artificial Sequence
  Description of Artificial Sequence: Synthetic oligonucleotide
  Sense strand starting at position 3776 of SEQ ID NO: 587476
cugaguggguacucaauaa

SEQ ID NO: 795181 - RNA, 19 nt, Artificial Sequence
  Description of Artificial Sequence: Synthetic oligonucleotide
  Antisense strand to SEQ ID NO: 795180
uuauugaguacccacucag

SEQ ID NO: 795182 - RNA, 19 nt, Artificial Sequence
  Description of Artificial Sequence: Synthetic oligonucleotide
  Sense strand starting at position 3910 of SEQ ID NO: 587476
aguguagauucuuccauga

SEQ ID NO: 795183 - RNA, 19 nt, Artificial Sequence
  Description of Artificial Sequence: Synthetic oligonucleotide
  Antisense strand to SEQ ID NO: 795182
ucauggaagaaucuacacu

SEQ ID NO: 795184 - RNA, 19 nt, Artificial Sequence
  Description of Artificial Sequence: Synthetic oligonucleotide
  Sense strand starting at position 3954 of SEQ ID NO: 587476
ucuugucaccuggaacauu

SEQ ID NO: 795185 - RNA, 19 nt, Artificial Sequence
  Description of Artificial Sequence: Synthetic oligonucleotide
  Antisense strand to SEQ ID NO: 795184
aauguuccaggugacaaga

SEQ ID NO: 795186 - RNA, 19 nt, Artificial Sequence
  Description of Artificial Sequence: Synthetic oligonucleotide
  Sense strand starting at position 3967 of SEQ ID NO: 587476
aacauuuggucagagauua

SEQ ID NO: 795187 - RNA, 19 nt, Artificial Sequence
  Description of Artificial Sequence: Synthetic oligonucleotide
  Antisense strand to SEQ ID NO: 795186
uaaucucugaccaaauguu

SEQ ID NO: 795188 - RNA, 19 nt, Artificial Sequence
  Description of Artificial Sequence: Synthetic oligonucleotide
  Sense strand starting at position 466 of SEQ ID NO: 587477
cccugacuuuggugacagu

SEQ ID NO: 795189 - RNA, 19 nt, Artificial Sequence
  Description of Artificial Sequence: Synthetic oligonucleotide
  Antisense strand to SEQ ID NO: 795188
acugucaccaaagucaggg

SEQ ID NO: 795190 - RNA, 19 nt, Artificial Sequence
  Description of Artificial Sequence: Synthetic oligonucleotide
  Sense strand starting at position 728 of SEQ ID NO: 587477
ggcauuuguacucaacgcu

SEQ ID NO: 795191 - RNA, 19 nt, Artificial Sequence
  Description of Artificial Sequence: Synthetic oligonucleotide
  Antisense strand to SEQ ID NO: 795190
agcguugaguacaaaugcc

SEQ ID NO: 795192 - RNA, 19 nt, Artificial Sequence
  Description of Artificial Sequence: Synthetic oligonucleotide
  Sense strand starting at position 735 of SEQ ID NO: 587477
guacucaacgcugagaaca

SEQ ID NO: 795193 - RNA, 19 nt, Artificial Sequence
  Description of Artificial Sequence: Synthetic oligonucleotide
  Antisense strand to SEQ ID NO: 795192
uguucucagcguugaguac

SEQ ID NO: 795194 - RNA, 19 nt, Artificial Sequence
  Description of Artificial Sequence: Synthetic oligonucleotide
  Sense strand starting at position 2449 of SEQ ID NO: 587477
cguugacuaugucguagaa

SEQ ID NO: 795195 - RNA, 19 nt, Artificial Sequence
  Description of Artificial Sequence: Synthetic oligonucleotide
  Antisense strand to SEQ ID NO: 795194
uucuacgacauagucaacg

SEQ ID NO: 795196 - RNA, 19 nt, Artificial Sequence
  Description of Artificial Sequence: Synthetic oligonucleotide
  Sense strand starting at position 2451 of SEQ ID NO: 587477
uugacuaugucguagaaca

SEQ ID NO: 795197 - RNA, 19 nt, Artificial Sequence
  Description of Artificial Sequence: Synthetic oligonucleotide
  Antisense strand to SEQ ID NO: 795196
uguucuacgacauagucaa

SEQ ID NO: 795198 - RNA, 19 nt, Artificial Sequence
  Description of Artificial Sequence: Synthetic oligonucleotide
  Sense strand starting at position 2453 of SEQ ID NO: 587477
gacuaugucguagaacaug

SEQ ID NO: 795199 - RNA, 19 nt, Artificial Sequence
  Description of Artificial Sequence: Synthetic oligonucleotide
  Antisense strand to SEQ ID NO: 795198
cauguucuacgacauaguc

SEQ ID NO: 795200 - RNA, 19 nt, Artificial Sequence
  Description of Artificial Sequence: Synthetic oligonucleotide
  Sense strand starting at position 3534 of SEQ ID NO: 587477
aguacugcuccugaaaucu

SEQ ID NO: 795201 - RNA, 19 nt, Artificial Sequence
  Description of Artificial Sequence: Synthetic oligonucleotide
  Antisense strand to SEQ ID NO: 795200
agauuucaggagcaguacu

SEQ ID NO: 795202 - RNA, 19 nt, Artificial Sequence
  Description of Artificial Sequence: Synthetic oligonucleotide
  Sense strand starting at position 511 of SEQ ID NO: 587478
cccugacuuuggugacacu

SEQ ID NO: 795203 - RNA, 19 nt, Artificial Sequence
  Description of Artificial Sequence: Synthetic oligonucleotide
  Antisense strand to SEQ ID NO: 795202
agugucaccaaagucaggg

SEQ ID NO: 795204 - RNA, 19 nt, Artificial Sequence
  Description of Artificial Sequence: Synthetic oligonucleotide
  Sense strand starting at position 740 of SEQ ID NO: 587478
acgcauuuaccaugagcca

SEQ ID NO: 795205 - RNA, 19 nt, Artificial Sequence
  Description of Artificial Sequence: Synthetic oligonucleotide
  Antisense strand to SEQ ID NO: 795204
uggcucaugguaaaugcgu

SEQ ID NO: 795206 - RNA, 19 nt, Artificial Sequence
  Description of Artificial Sequence: Synthetic oligonucleotide
  Sense strand starting at position 779 of SEQ ID NO: 587478
uguacucaaugcugagaac

SEQ ID NO: 795207 - RNA, 19 nt, Artificial Sequence
  Description of Artificial Sequence: Synthetic oligonucleotide
  Antisense strand to SEQ ID NO: 795206
guucucagcauugaguaca

SEQ ID NO: 795208 - RNA, 19 nt, Artificial Sequence
  Description of Artificial Sequence: Synthetic oligonucleotide
  Sense strand starting at position 780 of SEQ ID NO: 587478
guacucaaugcugagaaca

SEQ ID NO: 795209 - RNA, 19 nt, Artificial Sequence
  Description of Artificial Sequence: Synthetic oligonucleotide
  Antisense strand to SEQ ID NO: 795208
uguucucagcauugaguac

SEQ ID NO: 795210 - RNA, 19 nt, Artificial Sequence
  Description of Artificial Sequence: Synthetic oligonucleotide
  Sense strand starting at position 782 of SEQ ID NO: 587478
acucaaugcugagaacaac

SEQ ID NO: 795211 - RNA, 19 nt, Artificial Sequence
  Description of Artificial Sequence: Synthetic oligonucleotide
  Antisense strand to SEQ ID NO: 795210
guuguucucagcauugagu

SEQ ID NO: 795212 - RNA, 19 nt, Artificial Sequence
  Description of Artificial Sequence: Synthetic oligonucleotide
  Sense strand starting at position 53 of SEQ ID NO: 587479
agaagaacuguuuguucuu

SEQ ID NO: 795213 - RNA, 19 nt, Artificial Sequence
  Description of Artificial Sequence: Synthetic oligonucleotide
  Antisense strand to SEQ ID NO: 795212
aagaacaaacaguucuucu

SEQ ID NO: 795214 - RNA, 19 nt, Artificial Sequence
  Description of Artificial Sequence: Synthetic oligonucleotide
  Sense strand starting at position 177 of SEQ ID NO: 587479
guucucccaguuuaagaua

SEQ ID NO: 795215 - RNA, 19 nt, Artificial Sequence
  Description of Artificial Sequence: Synthetic oligonucleotide
  Antisense strand to SEQ ID NO: 795214
uaucuuaaacugggagaac

SEQ ID NO: 795216 - RNA, 19 nt, Artificial Sequence
  Description of Artificial Sequence: Synthetic oligonucleotide
  Sense strand starting at position 842 of SEQ ID NO: 587479
gcguuaucuguagcccaua

SEQ ID NO: 795217 - RNA, 19 nt, Artificial Sequence
  Description of Artificial Sequence: Synthetic oligonucleotide
  Antisense strand to SEQ ID NO: 795216
uaugggcuacagauaacgc

SEQ ID NO: 795218 - RNA, 19 nt, Artificial Sequence
  Description of Artificial Sequence: Synthetic oligonucleotide
  Sense strand starting at position 856 of SEQ ID NO: 587479
ccauaucacuacuuucgua

SEQ ID NO: 795219 - RNA, 19 nt, Artificial Sequence
  Description of Artificial Sequence: Synthetic oligonucleotide
  Antisense strand to SEQ ID NO: 795218
uacgaaaguagugauaugg

SEQ ID NO: 795220 - RNA, 19 nt, Artificial Sequence
  Description of Artificial Sequence: Synthetic oligonucleotide
  Sense strand starting at position 889 of SEQ ID NO: 587479
cugcuauguuacguauuua

SEQ ID NO: 795221 - RNA, 19 nt, Artificial Sequence
  Description of Artificial Sequence: Synthetic oligonucleotide
  Antisense strand to SEQ ID NO: 795220
uaaauacguaacauagcag

SEQ ID NO: 795222 - RNA, 19 nt, Artificial Sequence
  Description of Artificial Sequence: Synthetic oligonucleotide
  Sense strand starting at position 1097 of SEQ ID NO: 587479
augucacucuuguugaaac

SEQ ID NO: 795223 - RNA, 19 nt, Artificial Sequence
  Description of Artificial Sequence: Synthetic oligonucleotide
  Antisense strand to SEQ ID NO: 795222
guuucaacaagagugacau

SEQ ID NO: 795224 - RNA, 19 nt, Artificial Sequence
  Description of Artificial Sequence: Synthetic oligonucleotide
  Sense strand starting at position 1099 of SEQ ID NO: 587479
gucacucuuguugaaacau

SEQ ID NO: 795225 - RNA, 19 nt, Artificial Sequence
  Description of Artificial Sequence: Synthetic oligonucleotide
  Antisense strand to SEQ ID NO: 795224
auguuucaacaagagugac

SEQ ID NO: 795226 - RNA, 19 nt, Artificial Sequence
  Description of Artificial Sequence: Synthetic oligonucleotide
  Sense strand starting at position 1108 of SEQ ID NO: 587479
guugaaacaucucugauaa

SEQ ID NO: 795227 - RNA, 19 nt, Artificial Sequence
  Description of Artificial Sequence: Synthetic oligonucleotide
  Antisense strand to SEQ ID NO: 795226
uuaucagagauguuucaac

SEQ ID NO: 795228 - RNA, 19 nt, Artificial Sequence
  Description of Artificial Sequence: Synthetic oligonucleotide
  Sense strand starting at position 1127 of SEQ ID NO: 587479
acccaucuugucuggagga

SEQ ID NO: 795229 - RNA, 19 nt, Artificial Sequence
  Description of Artificial Sequence: Synthetic oligonucleotide
  Antisense strand to SEQ ID NO: 795228
uccuccagacaagaugggu

SEQ ID NO: 795230 - RNA, 19 nt, Artificial Sequence
  Description of Artificial Sequence: Synthetic oligonucleotide
  Sense strand starting at position 1250 of SEQ ID NO: 587479
ccaaacaugucaguccaaa

SEQ ID NO: 795231 - RNA, 19 nt, Artificial Sequence
  Description of Artificial Sequence: Synthetic oligonucleotide
  Antisense strand to SEQ ID NO: 795230
uuuggacugacauguuugg

SEQ ID NO: 795232 - RNA, 19 nt, Artificial Sequence
  Description of Artificial Sequence: Synthetic oligonucleotide
  Sense strand starting at position 1286 of SEQ ID NO: 587479
cuugcuacucaugagacau

SEQ ID NO: 795233 - RNA, 19 nt, Artificial Sequence
  Description of Artificial Sequence: Synthetic oligonucleotide
  Antisense strand to SEQ ID NO: 795232
augucucaugaguagcaag

SEQ ID NO: 795234 - RNA, 19 nt, Artificial Sequence
  Description of Artificial Sequence: Synthetic oligonucleotide
  Sense strand starting at position 1549 of SEQ ID NO: 587479
ccugaaauuccggagguca

SEQ ID NO: 795235 - RNA, 19 nt, Artificial Sequence
  Description of Artificial Sequence: Synthetic oligonucleotide
  Antisense strand to SEQ ID NO: 795234
ugaccuccggaauuucagg

SEQ ID NO: 795236 - RNA, 19 nt, Artificial Sequence
  Description of Artificial Sequence: Synthetic oligonucleotide
  Sense strand starting at position 1551 of SEQ ID NO: 587479
ugaaauuccggaggucaag

SEQ ID NO: 795237 - RNA, 19 nt, Artificial Sequence
  Description of Artificial Sequence: Synthetic oligonucleotide
  Antisense strand to SEQ ID NO: 795236
cuugaccuccggaauuuca

SEQ ID NO: 795238 - RNA, 19 nt, Artificial Sequence
  Description of Artificial Sequence: Synthetic oligonucleotide
  Sense strand starting at position 2154 of SEQ ID NO: 587479
ccugaacagcuccaaguuu

SEQ ID NO: 795239 - RNA, 19 nt, Artificial Sequence
  Description of Artificial Sequence: Synthetic oligonucleotide
  Antisense strand to SEQ ID NO: 795238
aaacuuggagcuguucagg

SEQ ID NO: 795240 - RNA, 19 nt, Artificial Sequence
  Description of Artificial Sequence: Synthetic oligonucleotide
  Sense strand starting at position 2368 of SEQ ID NO: 587479
cucugaaugaacggcgaua

SEQ ID NO: 795241 - RNA, 19 nt, Artificial Sequence
  Description of Artificial Sequence: Synthetic oligonucleotide
  Antisense strand to SEQ ID NO: 795240
uaucgccguucauucagag

SEQ ID NO: 795242 - RNA, 19 nt, Artificial Sequence
  Description of Artificial Sequence: Synthetic oligonucleotide
  Sense strand starting at position 2370 of SEQ ID NO: 587479
cugaaugaacggcgauagu

SEQ ID NO: 795243 - RNA, 19 nt, Artificial Sequence
  Description of Artificial Sequence: Synthetic oligonucleotide
  Antisense strand to SEQ ID NO: 795242
acuaucgccguucauucag

SEQ ID NO: 795244 - RNA, 19 nt, Artificial Sequence
  Description of Artificial Sequence: Synthetic oligonucleotide
  Sense strand starting at position 2645 of SEQ ID NO: 587479
cggguugagcgagaagcau

SEQ ID NO: 795245 - RNA, 19 nt, Artificial Sequence
  Description of Artificial Sequence: Synthetic oligonucleotide
  Antisense strand to SEQ ID NO: 795244
augcuucucgcucaacccg

SEQ ID NO: 795246 - RNA, 19 nt, Artificial Sequence
  Description of Artificial Sequence: Synthetic oligonucleotide
  Sense strand starting at position 2953 of SEQ ID NO: 587479
gugauaaggucuuugggaa

SEQ ID NO: 795247 - RNA, 19 nt, Artificial Sequence
  Description of Artificial Sequence: Synthetic oligonucleotide
  Antisense strand to SEQ ID NO: 795246
uucccaaagaccuuaucac

SEQ ID NO: 795248 - RNA, 19 nt, Artificial Sequence
  Description of Artificial Sequence: Synthetic oligonucleotide
  Sense strand starting at position 2954 of SEQ ID NO: 587479
ugauaaggucuuugggaau

SEQ ID NO: 795249 - RNA, 19 nt, Artificial Sequence
  Description of Artificial Sequence: Synthetic oligonucleotide
  Antisense strand to SEQ ID NO: 795248
auucccaaagaccuuauca

SEQ ID NO: 795250 - RNA, 19 nt, Artificial Sequence
  Description of Artificial Sequence: Synthetic oligonucleotide
  Sense strand starting at position 3002 of SEQ ID NO: 587479
uagcaaacccgugaccauu

SEQ ID NO: 795251 - RNA, 19 nt, Artificial Sequence
  Description of Artificial Sequence: Synthetic oligonucleotide
  Antisense strand to SEQ ID NO: 795250
aauggucacggguuugcua

SEQ ID NO: 795252 - RNA, 19 nt, Artificial Sequence
  Description of Artificial Sequence: Synthetic oligonucleotide
  Sense strand starting at position 3015 of SEQ ID NO: 587479
accauuauuccuggcagca

SEQ ID NO: 795253 - RNA, 19 nt, Artificial Sequence
  Description of Artificial Sequence: Synthetic oligonucleotide
  Antisense strand to SEQ ID NO: 795252
ugcugccaggaauaauggu

SEQ ID NO: 795254 - RNA, 19 nt, Artificial Sequence
  Description of Artificial Sequence: Synthetic oligonucleotide
  Sense strand starting at position 3170 of SEQ ID NO: 587479
aagucugaugcuuagcaga

SEQ ID NO: 795255 - RNA, 19 nt, Artificial Sequence
  Description of Artificial Sequence: Synthetic oligonucleotide
  Antisense strand to SEQ ID NO: 795254
ucugcuaagcaucagacuu

SEQ ID NO: 795256 - RNA, 19 nt, Artificial Sequence
  Description of Artificial Sequence: Synthetic oligonucleotide
  Sense strand starting at position 3172 of SEQ ID NO: 587479
gucugaugcuuagcagaaa

SEQ ID NO: 795257 - RNA, 19 nt, Artificial Sequence
  Description of Artificial Sequence: Synthetic oligonucleotide
  Antisense strand to SEQ ID NO: 795256
uuucugcuaagcaucagac

SEQ ID NO: 795258 - RNA, 19 nt, Artificial Sequence
  Description of Artificial Sequence: Synthetic oligonucleotide
  Sense strand starting at position 3282 of SEQ ID NO: 587479
agauaagugcuuugaaccu

SEQ ID NO: 795259 - RNA, 19 nt, Artificial Sequence
  Description of Artificial Sequence: Synthetic oligonucleotide
  Antisense strand to SEQ ID NO: 795258
agguucaaagcacuuaucu

SEQ ID NO: 795260 - RNA, 19 nt, Artificial Sequence
  Description of Artificial Sequence: Synthetic oligonucleotide
  Sense strand starting at position 3289 of SEQ ID NO: 587479
ugcuuugaaccuuauguuu

SEQ ID NO: 795261 - RNA, 19 nt, Artificial Sequence
  Description of Artificial Sequence: Synthetic oligonucleotide
  Antisense strand to SEQ ID NO: 795260
aaacauaagguucaaagca

SEQ ID NO: 795262 - RNA, 19 nt, Artificial Sequence
  Description of Artificial Sequence: Synthetic oligonucleotide
  Sense strand starting at position 3294 of SEQ ID NO: 587479
ugaaccuuauguuuacaga

SEQ ID NO: 795263 - RNA, 19 nt, Artificial Sequence
  Description of Artificial Sequence: Synthetic oligonucleotide
  Antisense strand to SEQ ID NO: 795262
ucuguaaacauaagguuca

SEQ ID NO: 795264 - RNA, 19 nt, Artificial Sequence
  Description of Artificial Sequence: Synthetic oligonucleotide
  Sense strand starting at position 3338 of SEQ ID NO: 587479
cugaacucuaaccgugaga

SEQ ID NO: 795265 - RNA, 19 nt, Artificial Sequence
  Description of Artificial Sequence: Synthetic oligonucleotide
  Antisense strand to SEQ ID NO: 795264
ucucacgguuagaguucag

SEQ ID NO: 795266 - RNA, 19 nt, Artificial Sequence
  Description of Artificial Sequence: Synthetic oligonucleotide
  Sense strand starting at position 3340 of SEQ ID NO: 587479
gaacucuaaccgugagaca

SEQ ID NO: 795267 - RNA, 19 nt, Artificial Sequence
  Description of Artificial Sequence: Synthetic oligonucleotide
  Antisense strand to SEQ ID NO: 795266
ugucucacgguuagaguuc

SEQ ID NO: 795268 - RNA, 19 nt, Artificial Sequence
  Description of Artificial Sequence: Synthetic oligonucleotide
  Sense strand starting at position 3341 of SEQ ID NO: 587479
aacucuaaccgugagacau

SEQ ID NO: 795269 - RNA, 19 nt, Artificial Sequence
  Description of Artificial Sequence: Synthetic oligonucleotide
  Antisense strand to SEQ ID NO: 795268
augucucacgguuagaguu

SEQ ID NO: 795270 - RNA, 19 nt, Artificial Sequence
  Description of Artificial Sequence: Synthetic oligonucleotide
  Sense strand starting at position 3393 of SEQ ID NO: 587479
guauuaaggccuugacuug

SEQ ID NO: 795271 - RNA, 19 nt, Artificial Sequence
  Description of Artificial Sequence: Synthetic oligonucleotide
  Antisense strand to SEQ ID NO: 795270
caagucaaggccuuaauac

SEQ ID NO: 795272 - RNA, 19 nt, Artificial Sequence
  Description of Artificial Sequence: Synthetic oligonucleotide
  Sense strand starting at position 3462 of SEQ ID NO: 587479
acuaucccaguuugauaga

SEQ ID NO: 795273 - RNA, 19 nt, Artificial Sequence
  Description of Artificial Sequence: Synthetic oligonucleotide
  Antisense strand to SEQ ID NO: 795272
ucuaucaaacugggauagu

SEQ ID NO: 795274 - RNA, 19 nt, Artificial Sequence
  Description of Artificial Sequence: Synthetic oligonucleotide
  Sense strand starting at position 3564 of SEQ ID NO: 587479
aggcuauccucacuccaga

SEQ ID NO: 795275 - RNA, 19 nt, Artificial Sequence
  Description of Artificial Sequence: Synthetic oligonucleotide
  Antisense strand to SEQ ID NO: 795274
ucuggagugaggauagccu

SEQ ID NO: 795276 - RNA, 19 nt, Artificial Sequence
  Description of Artificial Sequence: Synthetic oligonucleotide
  Sense strand starting at position 3703 of SEQ ID NO: 587479
caguucuaaguguggaaga

SEQ ID NO: 795277 - RNA, 19 nt, Artificial Sequence
  Description of Artificial Sequence: Synthetic oligonucleotide
  Antisense strand to SEQ ID NO: 795276
ucuuccacacuuagaacug

SEQ ID NO: 795278 - RNA, 19 nt, Artificial Sequence
  Description of Artificial Sequence: Synthetic oligonucleotide
  Sense strand starting at position 3705 of SEQ ID NO: 587479
guucuaaguguggaagaac

SEQ ID NO: 795279 - RNA, 19 nt, Artificial Sequence
  Description of Artificial Sequence: Synthetic oligonucleotide
  Antisense strand to SEQ ID NO: 795278
guucuuccacacuuagaac

SEQ ID NO: 795280 - RNA, 19 nt, Artificial Sequence
  Description of Artificial Sequence: Synthetic oligonucleotide
  Sense strand starting at position 3843 of SEQ ID NO: 587479
gcaggugaaugccugauaa

SEQ ID NO: 795281 - RNA, 19 nt, Artificial Sequence
  Description of Artificial Sequence: Synthetic oligonucleotide
  Antisense strand to SEQ ID NO: 795280
uuaucaggcauucaccugc

SEQ ID NO: 795282 - RNA, 19 nt, Artificial Sequence
  Description of Artificial Sequence: Synthetic oligonucleotide
  Sense strand starting at position 3864 of SEQ ID NO: 587479
ucacuauauugaguuuagu

SEQ ID NO: 795283 - RNA, 19 nt, Artificial Sequence
  Description of Artificial Sequence: Synthetic oligonucleotide
  Antisense strand to SEQ ID NO: 795282
acuaaacucaauauaguga

SEQ ID NO: 795284 - RNA, 19 nt, Artificial Sequence
  Description of Artificial Sequence: Synthetic oligonucleotide
  Sense strand starting at position 3867 of SEQ ID NO: 587479
cuauauugaguuuagugga

SEQ ID NO: 795285 - RNA, 19 nt, Artificial Sequence
  Description of Artificial Sequence: Synthetic oligonucleotide
  Antisense strand to SEQ ID NO: 795284
uccacuaaacucaauauag

SEQ ID NO: 795286 - RNA, 19 nt, Artificial Sequence
  Description of Artificial Sequence: Synthetic oligonucleotide
  Sense strand starting at position 3872 of SEQ ID NO: 587479
uugaguuuaguggacacau

SEQ ID NO: 795287 - RNA, 19 nt, Artificial Sequence
  Description of Artificial Sequence: Synthetic oligonucleotide
  Antisense strand to SEQ ID NO: 795286
auguguccacuaaacucaa

SEQ ID NO: 795288 - RNA, 19 nt, Artificial Sequence
  Description of Artificial Sequence: Synthetic oligonucleotide
  Sense strand starting at position 3912 of SEQ ID NO: 587479
ugggauaaguagaggugaa

SEQ ID NO: 795289 - RNA, 19 nt, Artificial Sequence
  Description of Artificial Sequence: Synthetic oligonucleotide
  Antisense strand to SEQ ID NO: 795288
uucaccucuacuuauccca

SEQ ID NO: 795290 - RNA, 19 nt, Artificial Sequence
  Description of Artificial Sequence: Synthetic oligonucleotide
  Sense strand starting at position 3974 of SEQ ID NO: 587479
gcgacccugugacuagaaa

SEQ ID NO: 795291 - RNA, 19 nt, Artificial Sequence
  Description of Artificial Sequence: Synthetic oligonucleotide
  Antisense strand to SEQ ID NO: 795290
uuucuagucacagggucgc

SEQ ID NO: 795292 - RNA, 19 nt, Artificial Sequence
  Description of Artificial Sequence: Synthetic oligonucleotide
  Sense strand starting at position 116 of SEQ ID NO: 587480
uaggauuaccugugaauau

SEQ ID NO: 795293 - RNA, 19 nt, Artificial Sequence
  Description of Artificial Sequence: Synthetic oligonucleotide
  Antisense strand to SEQ ID NO: 795292
auauucacagguaauccua

SEQ ID NO: 795294 - RNA, 19 nt, Artificial Sequence
  Description of Artificial Sequence: Synthetic oligonucleotide
  Sense strand starting at position 175 of SEQ ID NO: 587480
aauugagaguuacuuguuu

SEQ ID NO: 795295 - RNA, 19 nt, Artificial Sequence
  Description of Artificial Sequence: Synthetic oligonucleotide
  Antisense strand to SEQ ID NO: 795294
aaacaaguaacucucaauu

SEQ ID NO: 795296 - RNA, 19 nt, Artificial Sequence
  Description of Artificial Sequence: Synthetic oligonucleotide
  Sense strand starting at position 179 of SEQ ID NO: 587480
gagaguuacuuguuuauua

SEQ ID NO: 795297 - RNA, 19 nt, Artificial Sequence
  Description of Artificial Sequence: Synthetic oligonucleotide
  Antisense strand to SEQ ID NO: 795296
uaauaaacaaguaacucuc

SEQ ID NO: 795298 - RNA, 19 nt, Artificial Sequence
  Description of Artificial Sequence: Synthetic oligonucleotide
  Sense strand starting at position 180 of SEQ ID NO: 587480
agaguuacuuguuuauuac

SEQ ID NO: 795299 - RNA, 19 nt, Artificial Sequence
  Description of Artificial Sequence: Synthetic oligonucleotide
  Antisense strand to SEQ ID NO: 795298
guaauaaacaaguaacucu

SEQ ID NO: 795300 - RNA, 19 nt, Artificial Sequence
  Description of Artificial Sequence: Synthetic oligonucleotide
  Sense strand starting at position 183 of SEQ ID NO: 587480
guuacuuguuuauuacaga

SEQ ID NO: 795301 - RNA, 19 nt, Artificial Sequence
  Description of Artificial Sequence: Synthetic oligonucleotide
  Antisense strand to SEQ ID NO: 795300
ucuguaauaaacaaguaac

SEQ ID NO: 795302 - RNA, 19 nt, Artificial Sequence
  Description of Artificial Sequence: Synthetic oligonucleotide
  Sense strand starting at position 397 of SEQ ID NO: 587480
aaccuaugccgugaaacug

SEQ ID NO: 795303 - RNA, 19 nt, Artificial Sequence
  Description of Artificial Sequence: Synthetic oligonucleotide
  Antisense strand to SEQ ID NO: 795302
caguuucacggcauagguu

SEQ ID NO: 795304 - RNA, 19 nt, Artificial Sequence
  Description of Artificial Sequence: Synthetic oligonucleotide
  Sense strand starting at position 545 of SEQ ID NO: 587480
guuugcuuccaugauacaa

SEQ ID NO: 795305 - RNA, 19 nt, Artificial Sequence
  Description of Artificial Sequence: Synthetic oligonucleotide
  Antisense strand to SEQ ID NO: 795304
uuguaucauggaagcaaac

SEQ ID NO: 795306 - RNA, 19 nt, Artificial Sequence
  Description of Artificial Sequence: Synthetic oligonucleotide
  Sense strand starting at position 584 of SEQ ID NO: 587480
uuaguaaaccauuggucaa

SEQ ID NO: 795307 - RNA, 19 nt, Artificial Sequence
  Description of Artificial Sequence: Synthetic oligonucleotide
  Antisense strand to SEQ ID NO: 795306
uugaccaaugguuuacuaa

SEQ ID NO: 795308 - RNA, 19 nt, Artificial Sequence
  Description of Artificial Sequence: Synthetic oligonucleotide
  Sense strand starting at position 586 of SEQ ID NO: 587480
aguaaaccauuggucaauu

SEQ ID NO: 795309 - RNA, 19 nt, Artificial Sequence
  Description of Artificial Sequence: Synthetic oligonucleotide
  Antisense strand to SEQ ID NO: 795308
aauugaccaaugguuuacu

SEQ ID NO: 795310 - RNA, 19 nt, Artificial Sequence
  Description of Artificial Sequence: Synthetic oligonucleotide
  Sense strand starting at position 710 of SEQ ID NO: 587480
acuuaugugccacacaaga

SEQ ID NO: 795311 - RNA, 19 nt, Artificial Sequence
  Description of Artificial Sequence: Synthetic oligonucleotide
  Antisense strand to SEQ ID NO: 795310
ucuuguguggcacauaagu

SEQ ID NO: 795312 - RNA, 19 nt, Artificial Sequence
  Description of Artificial Sequence: Synthetic oligonucleotide
  Sense strand starting at position 846 of SEQ ID NO: 587480
ccuaaagguuagcuugaaa

SEQ ID NO: 795313 - RNA, 19 nt, Artificial Sequence
  Description of Artificial Sequence: Synthetic oligonucleotide
  Antisense strand to SEQ ID NO: 795312
uuucaagcuaaccuuuagg

SEQ ID NO: 795314 - RNA, 19 nt, Artificial Sequence
  Description of Artificial Sequence: Synthetic oligonucleotide
  Sense strand starting at position 880 of SEQ ID NO: 587480
acagaacgcuucucuuuaa

SEQ ID NO: 795315 - RNA, 19 nt, Artificial Sequence
  Description of Artificial Sequence: Synthetic oligonucleotide
  Antisense strand to SEQ ID NO: 795314
uuaaagagaagcguucugu

SEQ ID NO: 795316 - RNA, 19 nt, Artificial Sequence
  Description of Artificial Sequence: Synthetic oligonucleotide
  Sense strand starting at position 951 of SEQ ID NO: 587480
ucugcaguuagguagauua

SEQ ID NO: 795317 - RNA, 19 nt, Artificial Sequence
  Description of Artificial Sequence: Synthetic oligonucleotide
  Antisense strand to SEQ ID NO: 795316
uaaucuaccuaacugcaga

SEQ ID NO: 795318 - RNA, 19 nt, Artificial Sequence
  Description of Artificial Sequence: Synthetic oligonucleotide
  Sense strand starting at position 953 of SEQ ID NO: 587480
ugcaguuagguagauuaca

SEQ ID NO: 795319 - RNA, 19 nt, Artificial Sequence
  Description of Artificial Sequence: Synthetic oligonucleotide
  Antisense strand to SEQ ID NO: 795318
uguaaucuaccuaacugca

SEQ ID NO: 795320 - RNA, 19 nt, Artificial Sequence
  Description of Artificial Sequence: Synthetic oligonucleotide
  Sense strand starting at position 971 of SEQ ID NO: 587480
aagugaaaguuuccacggu

SEQ ID NO: 795321 - RNA, 19 nt, Artificial Sequence
  Description of Artificial Sequence: Synthetic oligonucleotide
  Antisense strand to SEQ ID NO: 795320
accguggaaacuuucacuu

SEQ ID NO: 795322 - RNA, 19 nt, Artificial Sequence
  Description of Artificial Sequence: Synthetic oligonucleotide
  Sense strand starting at position 1269 of SEQ ID NO: 587480
uuucguuugagcguuccua

SEQ ID NO: 795323 - RNA, 19 nt, Artificial Sequence
  Description of Artificial Sequence: Synthetic oligonucleotide
  Antisense strand to SEQ ID NO: 795322
uaggaacgcucaaacgaaa

SEQ ID NO: 795324 - RNA, 19 nt, Artificial Sequence
  Description of Artificial Sequence: Synthetic oligonucleotide
  Sense strand starting at position 1311 of SEQ ID NO: 587480
aaacauucucguuagagau

SEQ ID NO: 795325 - RNA, 19 nt, Artificial Sequence
  Description of Artificial Sequence: Synthetic oligonucleotide
  Antisense strand to SEQ ID NO: 795324
aucucuaacgagaauguuu

SEQ ID NO: 795326 - RNA, 19 nt, Artificial Sequence
  Description of Artificial Sequence: Synthetic oligonucleotide
  Sense strand starting at position 1317 of SEQ ID NO: 587480
ucucguuagagaugagaag

SEQ ID NO: 795327 - RNA, 19 nt, Artificial Sequence
  Description of Artificial Sequence: Synthetic oligonucleotide
  Antisense strand to SEQ ID NO: 795326
cuucucaucucuaacgaga

SEQ ID NO: 795328 - RNA, 19 nt, Artificial Sequence
  Description of Artificial Sequence: Synthetic oligonucleotide
  Sense strand starting at position 1328 of SEQ ID NO: 587480
augagaaggcuucacguua

SEQ ID NO: 795329 - RNA, 19 nt, Artificial Sequence
  Description of Artificial Sequence: Synthetic oligonucleotide
  Antisense strand to SEQ ID NO: 795328
uaacgugaagccuucucau

SEQ ID NO: 795330 - RNA, 19 nt, Artificial Sequence
  Description of Artificial Sequence: Synthetic oligonucleotide
  Sense strand starting at position 1990 of SEQ ID NO: 587480
ccgggcguuucuauggaaa

SEQ ID NO: 795331 - RNA, 19 nt, Artificial Sequence
  Description of Artificial Sequence: Synthetic oligonucleotide
  Antisense strand to SEQ ID NO: 795330
uuuccauagaaacgcccgg

SEQ ID NO: 795332 - RNA, 19 nt, Artificial Sequence
  Description of Artificial Sequence: Synthetic oligonucleotide
  Sense strand starting at position 2479 of SEQ ID NO: 587480
uccgacuucguggaagaga

SEQ ID NO: 795333 - RNA, 19 nt, Artificial Sequence
  Description of Artificial Sequence: Synthetic oligonucleotide
  Antisense strand to SEQ ID NO: 795332
ucucuuccacgaagucgga

SEQ ID NO: 795334 - RNA, 19 nt, Artificial Sequence
  Description of Artificial Sequence: Synthetic oligonucleotide
  Sense strand starting at position 2480 of SEQ ID NO: 587480
ccgacuucguggaagagau

SEQ ID NO: 795335 - RNA, 19 nt, Artificial Sequence
  Description of Artificial Sequence: Synthetic oligonucleotide
  Antisense strand to SEQ ID NO: 795334
aucucuuccacgaagucgg

SEQ ID NO: 795336 - RNA, 19 nt, Artificial Sequence
  Description of Artificial Sequence: Synthetic oligonucleotide
  Sense strand starting at position 2487 of SEQ ID NO: 587480
cguggaagagauuguguua

SEQ ID NO: 795337 - RNA, 19 nt, Artificial Sequence
  Description of Artificial Sequence: Synthetic oligonucleotide
  Antisense strand to SEQ ID NO: 795336
uaacacaaucucuuccacg

SEQ ID NO: 795338 - RNA, 19 nt, Artificial Sequence
  Description of Artificial Sequence: Synthetic oligonucleotide
  Sense strand starting at position 2490 of SEQ ID NO: 587480
ggaagagauuguguuagac

SEQ ID NO: 795339 - RNA, 19 nt, Artificial Sequence
  Description of Artificial Sequence: Synthetic oligonucleotide
  Antisense strand to SEQ ID NO: 795338
gucuaacacaaucucuucc

SEQ ID NO: 795340 - RNA, 19 nt, Artificial Sequence
  Description of Artificial Sequence: Synthetic oligonucleotide
  Sense strand starting at position 2500 of SEQ ID NO: 587480
guguuagacacugggagua

SEQ ID NO: 795341 - RNA, 19 nt, Artificial Sequence
  Description of Artificial Sequence: Synthetic oligonucleotide
  Antisense strand to SEQ ID NO: 795340
uacucccagugucuaacac

SEQ ID NO: 795342 - RNA, 19 nt, Artificial Sequence
  Description of Artificial Sequence: Synthetic oligonucleotide
  Sense strand starting at position 2594 of SEQ ID NO: 587480
cgaaccugugcugagauaa

SEQ ID NO: 795343 - RNA, 19 nt, Artificial Sequence
  Description of Artificial Sequence: Synthetic oligonucleotide
  Antisense strand to SEQ ID NO: 795342
uuaucucagcacagguucg

SEQ ID NO: 795344 - RNA, 19 nt, Artificial Sequence
  Description of Artificial Sequence: Synthetic oligonucleotide
  Sense strand starting at position 3199 of SEQ ID NO: 587480
ccuaauacugucugaagga

SEQ ID NO: 795345 - RNA, 19 nt, Artificial Sequence
  Description of Artificial Sequence: Synthetic oligonucleotide
  Antisense strand to SEQ ID NO: 795344
uccuucagacaguauuagg

SEQ ID NO: 795346 - RNA, 19 nt, Artificial Sequence
  Description of Artificial Sequence: Synthetic oligonucleotide
  Sense strand starting at position 3238 of SEQ ID NO: 587480
aacaguacacuucguugau

SEQ ID NO: 795347 - RNA, 19 nt, Artificial Sequence
  Description of Artificial Sequence: Synthetic oligonucleotide
  Antisense strand to SEQ ID NO: 795346
aucaacgaaguguacuguu

SEQ ID NO: 795348 - RNA, 19 nt, Artificial Sequence
  Description of Artificial Sequence: Synthetic oligonucleotide
  Sense strand starting at position 3239 of SEQ ID NO: 587480
acaguacacuucguugauu

SEQ ID NO: 795349 - RNA, 19 nt, Artificial Sequence
  Description of Artificial Sequence: Synthetic oligonucleotide
  Antisense strand to SEQ ID NO: 795348
aaucaacgaaguguacugu

SEQ ID NO: 795350 - RNA, 19 nt, Artificial Sequence
  Description of Artificial Sequence: Synthetic oligonucleotide
  Sense strand starting at position 3240 of SEQ ID NO: 587480
caguacacuucguugauuu

SEQ ID NO: 795351 - RNA, 19 nt, Artificial Sequence
  Description of Artificial Sequence: Synthetic oligonucleotide
  Antisense strand to SEQ ID NO: 795350
aaaucaacgaaguguacug

SEQ ID NO: 795352 - RNA, 19 nt, Artificial Sequence
  Description of Artificial Sequence: Synthetic oligonucleotide
  Sense strand starting at position 3282 of SEQ ID NO: 587480
cuuugaacccuuugagaca

SEQ ID NO: 795353 - RNA, 19 nt, Artificial Sequence
  Description of Artificial Sequence: Synthetic oligonucleotide
  Antisense strand to SEQ ID NO: 795352
ugucucaaaggguucaaag

SEQ ID NO: 795354 - RNA, 19 nt, Artificial Sequence
  Description of Artificial Sequence: Synthetic oligonucleotide
  Sense strand starting at position 3334 of SEQ ID NO: 587480
ugccgugugcugcugauua

SEQ ID NO: 795355 - RNA, 19 nt, Artificial Sequence
  Description of Artificial Sequence: Synthetic oligonucleotide
  Antisense strand to SEQ ID NO: 795354
uaaucagcagcacacggca

SEQ ID NO: 795356 - RNA, 19 nt, Artificial Sequence
  Description of Artificial Sequence: Synthetic oligonucleotide
  Sense strand starting at position 3444 of SEQ ID NO: 587480
ccuugcauucgcucagcau

SEQ ID NO: 795357 - RNA, 19 nt, Artificial Sequence
  Description of Artificial Sequence: Synthetic oligonucleotide
  Antisense strand to SEQ ID NO: 795356
augcugagcgaaugcaagg

SEQ ID NO: 795358 - RNA, 19 nt, Artificial Sequence
  Description of Artificial Sequence: Synthetic oligonucleotide
  Sense strand starting at position 3470 of SEQ ID NO: 587480
guuggaugccugguguguu

SEQ ID NO: 795359 - RNA, 19 nt, Artificial Sequence
  Description of Artificial Sequence: Synthetic oligonucleotide
  Antisense strand to SEQ ID NO: 795358
aacacaccaggcauccaac

SEQ ID NO: 795360 - RNA, 19 nt, Artificial Sequence
  Description of Artificial Sequence: Synthetic oligonucleotide
  Sense strand starting at position 3482 of SEQ ID NO: 587480
guguguuccagguauuaug

SEQ ID NO: 795361 - RNA, 19 nt, Artificial Sequence
  Description of Artificial Sequence: Synthetic oligonucleotide
  Antisense strand to SEQ ID NO: 795360
cauaauaccuggaacacac

SEQ ID NO: 795362 - RNA, 19 nt, Artificial Sequence
  Description of Artificial Sequence: Synthetic oligonucleotide
  Sense strand starting at position 3566 of SEQ ID NO: 587480
uuauguggcagugauagaa

SEQ ID NO: 795363 - RNA, 19 nt, Artificial Sequence
  Description of Artificial Sequence: Synthetic oligonucleotide
  Antisense strand to SEQ ID NO: 795362
uucuaucacugccacauaa

SEQ ID NO: 795364 - RNA, 19 nt, Artificial Sequence
  Description of Artificial Sequence: Synthetic oligonucleotide
  Sense strand starting at position 3570 of SEQ ID NO: 587480
guggcagugauagaagcua

SEQ ID NO: 795365 - RNA, 19 nt, Artificial Sequence
  Description of Artificial Sequence: Synthetic oligonucleotide
  Antisense strand to SEQ ID NO: 795364
uagcuucuaucacugccac

SEQ ID NO: 795366 - RNA, 19 nt, Artificial Sequence
  Description of Artificial Sequence: Synthetic oligonucleotide
  Sense strand starting at position 3696 of SEQ ID NO: 587480
uugggauucugagugagcu

SEQ ID NO: 795367 - RNA, 19 nt, Artificial Sequence
  Description of Artificial Sequence: Synthetic oligonucleotide
  Antisense strand to SEQ ID NO: 795366
agcucacucagaaucccaa

SEQ ID NO: 795368 - RNA, 19 nt, Artificial Sequence
  Description of Artificial Sequence: Synthetic oligonucleotide
  Sense strand starting at position 3776 of SEQ ID NO: 587480
gcggcuggaugaucuaaga

SEQ ID NO: 795369 - RNA, 19 nt, Artificial Sequence
  Description of Artificial Sequence: Synthetic oligonucleotide
  Antisense strand to SEQ ID NO: 795368
ucuuagaucauccagccgc

SEQ ID NO: 795370 - RNA, 19 nt, Artificial Sequence
  Description of Artificial Sequence: Synthetic oligonucleotide
  Sense strand starting at position 3970 of SEQ ID NO: 587480
acacuauuggcggaugcaa

SEQ ID NO: 795371 - RNA, 19 nt, Artificial Sequence
  Description of Artificial Sequence: Synthetic oligonucleotide
  Antisense strand to SEQ ID NO: 795370
uugcauccgccaauagugu

SEQ ID NO: 795372 - RNA, 19 nt, Artificial Sequence
  Description of Artificial Sequence: Synthetic oligonucleotide
  Sense strand starting at position 127 of SEQ ID NO: 587481
gaaugcuauuacgguugau

SEQ ID NO: 795373 - RNA, 19 nt, Artificial Sequence
  Description of Artificial Sequence: Synthetic oligonucleotide
  Antisense strand to SEQ ID NO: 795372
aucaaccguaauagcauuc

SEQ ID NO: 795374 - RNA, 19 nt, Artificial Sequence
  Description of Artificial Sequence: Synthetic oligonucleotide
  Sense strand starting at position 182 of SEQ ID NO: 587481
gcagcugcccugcagagau

SEQ ID NO: 795375 - RNA, 19 nt, Artificial Sequence
  Description of Artificial Sequence: Synthetic oligonucleotide
  Antisense strand to SEQ ID NO: 795374
aucucugcagggcagcugc

SEQ ID NO: 795376 - RNA, 19 nt, Artificial Sequence
  Description of Artificial Sequence: Synthetic oligonucleotide
  Sense strand starting at position 551 of SEQ ID NO: 587481
gccggagagcuugaggaaa

SEQ ID NO: 795377 - RNA, 19 nt, Artificial Sequence
  Description of Artificial Sequence: Synthetic oligonucleotide
  Antisense strand to SEQ ID NO: 795376
uuuccucaagcucuccggc

SEQ ID NO: 795378 - RNA, 19 nt, Artificial Sequence
  Description of Artificial Sequence: Synthetic oligonucleotide
  Sense strand starting at position 553 of SEQ ID NO: 587481
cggagagcuugaggaaagu

SEQ ID NO: 795379 - RNA, 19 nt, Artificial Sequence
  Description of Artificial Sequence: Synthetic oligonucleotide
  Antisense strand to SEQ ID NO: 795378
acuuuccucaagcucuccg

SEQ ID NO: 795380 - RNA, 19 nt, Artificial Sequence
  Description of Artificial Sequence: Synthetic oligonucleotide
  Sense strand starting at position 843 of SEQ ID NO: 587481
ugacccacuuccuagagua

SEQ ID NO: 795381 - RNA, 19 nt, Artificial Sequence
  Description of Artificial Sequence: Synthetic oligonucleotide
  Antisense strand to SEQ ID NO: 795380
uacucuaggaaguggguca

SEQ ID NO: 795382 - RNA, 19 nt, Artificial Sequence
  Description of Artificial Sequence: Synthetic oligonucleotide
  Sense strand starting at position 845 of SEQ ID NO: 587481
acccacuuccuagaguacu

SEQ ID NO: 795383 - RNA, 19 nt, Artificial Sequence
  Description of Artificial Sequence: Synthetic oligonucleotide
  Antisense strand to SEQ ID NO: 795382
aguacucuaggaagugggu

SEQ ID NO: 795384 - RNA, 19 nt, Artificial Sequence
  Description of Artificial Sequence: Synthetic oligonucleotide
  Sense strand starting at position 932 of SEQ ID NO: 587481
accugagacuuccagugga

SEQ ID NO: 795385 - RNA, 19 nt, Artificial Sequence
  Description of Artificial Sequence: Synthetic oligonucleotide
  Antisense strand to SEQ ID NO: 795384
uccacuggaagucucaggu

SEQ ID NO: 795386 - RNA, 19 nt, Artificial Sequence
  Description of Artificial Sequence: Synthetic oligonucleotide
  Sense strand starting at position 935 of SEQ ID NO: 587481
ugagacuuccaguggauga

SEQ ID NO: 795387 - RNA, 19 nt, Artificial Sequence
  Description of Artificial Sequence: Synthetic oligonucleotide
  Antisense strand to SEQ ID NO: 795386
ucauccacuggaagucuca

SEQ ID NO: 795388 - RNA, 19 nt, Artificial Sequence
  Description of Artificial Sequence: Synthetic oligonucleotide
  Sense strand starting at position 936 of SEQ ID NO: 587481
gagacuuccaguggaugag

SEQ ID NO: 795389 - RNA, 19 nt, Artificial Sequence
  Description of Artificial Sequence: Synthetic oligonucleotide
  Antisense strand to SEQ ID NO: 795388
cucauccacuggaagucuc

SEQ ID NO: 795390 - RNA, 19 nt, Artificial Sequence
  Description of Artificial Sequence: Synthetic oligonucleotide
  Sense strand starting at position 959 of SEQ ID NO: 587481
agccucuggagcugugaaa

SEQ ID NO: 795391 - RNA, 19 nt, Artificial Sequence
  Description of Artificial Sequence: Synthetic oligonucleotide
  Antisense strand to SEQ ID NO: 795390
uuucacagcuccagaggcu

SEQ ID NO: 795392 - RNA, 19 nt, Artificial Sequence
  Description of Artificial Sequence: Synthetic oligonucleotide
  Sense strand starting at position 994 of SEQ ID NO: 587481
gaggcagagcugcacuaau

SEQ ID NO: 795393 - RNA, 19 nt, Artificial Sequence
  Description of Artificial Sequence: Synthetic oligonucleotide
  Antisense strand to SEQ ID NO: 795392
auuagugcagcucugccuc

SEQ ID NO: 795394 - RNA, 19 nt, Artificial Sequence
  Description of Artificial Sequence: Synthetic oligonucleotide
  Sense strand starting at position 3061 of SEQ ID NO: 587481
gcaucaugacccugacaug

SEQ ID NO: 795395 - RNA, 19 nt, Artificial Sequence
  Description of Artificial Sequence: Synthetic oligonucleotide
  Antisense strand to SEQ ID NO: 795394
caugucagggucaugaugc

SEQ ID NO: 795396 - RNA, 19 nt, Artificial Sequence
  Description of Artificial Sequence: Synthetic oligonucleotide
  Sense strand starting at position 360 of SEQ ID NO: 587482
acgauaagagucugcuuua

SEQ ID NO: 795397 - RNA, 19 nt, Artificial Sequence
  Description of Artificial Sequence: Synthetic oligonucleotide
  Antisense strand to SEQ ID NO: 795396
uaaagcagacucuuaucgu

SEQ ID NO: 795398 - RNA, 19 nt, Artificial Sequence
  Description of Artificial Sequence: Synthetic oligonucleotide
  Sense strand starting at position 361 of SEQ ID NO: 587482
cgauaagagucugcuuuaa

SEQ ID NO: 795399 - RNA, 19 nt, Artificial Sequence
  Description of Artificial Sequence: Synthetic oligonucleotide
  Antisense strand to SEQ ID NO: 795398
uuaaagcagacucuuaucg

SEQ ID NO: 795400 - RNA, 19 nt, Artificial Sequence
  Description of Artificial Sequence: Synthetic oligonucleotide
  Sense strand starting at position 363 of SEQ ID NO: 587482
auaagagucugcuuuaaug

SEQ ID NO: 795401 - RNA, 19 nt, Artificial Sequence
  Description of Artificial Sequence: Synthetic oligonucleotide
  Antisense strand to SEQ ID NO: 795400
cauuaaagcagacucuuau

SEQ ID NO: 795402 - RNA, 19 nt, Artificial Sequence
  Description of Artificial Sequence: Synthetic oligonucleotide
  Sense strand starting at position 365 of SEQ ID NO: 587482
aagagucugcuuuaaugga

SEQ ID NO: 795403 - RNA, 19 nt, Artificial Sequence
  Description of Artificial Sequence: Synthetic oligonucleotide
  Antisense strand to SEQ ID NO: 795402
uccauuaaagcagacucuu

SEQ ID NO: 795404 - RNA, 19 nt, Artificial Sequence
  Description of Artificial Sequence: Synthetic oligonucleotide
  Sense strand starting at position 609 of SEQ ID NO: 587482
gccacacaacucugaugau

SEQ ID NO: 795405 - RNA, 19 nt, Artificial Sequence
  Description of Artificial Sequence: Synthetic oligonucleotide
  Antisense strand to SEQ ID NO: 795404
aucaucagaguuguguggc

SEQ ID NO: 795406 - RNA, 19 nt, Artificial Sequence
  Description of Artificial Sequence: Synthetic oligonucleotide
  Sense strand starting at position 618 of SEQ ID NO: 587482
cucugaugauucuuggcuu

SEQ ID NO: 795407 - RNA, 19 nt, Artificial Sequence
  Description of Artificial Sequence: Synthetic oligonucleotide
  Antisense strand to SEQ ID NO: 795406
aagccaagaaucaucagag

SEQ ID NO: 795408 - RNA, 19 nt, Artificial Sequence
  Description of Artificial Sequence: Synthetic oligonucleotide
  Sense strand starting at position 621 of SEQ ID NO: 587482
ugaugauucuuggcuuaug

SEQ ID NO: 795409 - RNA, 19 nt, Artificial Sequence
  Description of Artificial Sequence: Synthetic oligonucleotide
  Antisense strand to SEQ ID NO: 795408
cauaagccaagaaucauca

SEQ ID NO: 795410 - RNA, 19 nt, Artificial Sequence
  Description of Artificial Sequence: Synthetic oligonucleotide
  Sense strand starting at position 622 of SEQ ID NO: 587482
gaugauucuuggcuuaugu

SEQ ID NO: 795411 - RNA, 19 nt, Artificial Sequence
  Description of Artificial Sequence: Synthetic oligonucleotide
  Antisense strand to SEQ ID NO: 795410
acauaagccaagaaucauc

SEQ ID NO: 795412 - RNA, 19 nt, Artificial Sequence
  Description of Artificial Sequence: Synthetic oligonucleotide
  Sense strand starting at position 675 of SEQ ID NO: 587482
acaguaguauacucaauau

SEQ ID NO: 795413 - RNA, 19 nt, Artificial Sequence
  Description of Artificial Sequence: Synthetic oligonucleotide
  Antisense strand to SEQ ID NO: 795412
auauugaguauacuacugu

SEQ ID NO: 795414 - RNA, 19 nt, Artificial Sequence
  Description of Artificial Sequence: Synthetic oligonucleotide
  Sense strand starting at position 1066 of SEQ ID NO: 587482
agaaauguugaccaagugu

SEQ ID NO: 795415 - RNA, 19 nt, Artificial Sequence
  Description of Artificial Sequence: Synthetic oligonucleotide
  Antisense strand to SEQ ID NO: 795414
acacuuggucaacauuucu

SEQ ID NO: 795416 - RNA, 19 nt, Artificial Sequence
  Description of Artificial Sequence: Synthetic oligonucleotide
  Sense strand starting at position 1416 of SEQ ID NO: 587482
uguagaauuguagaaaugu

SEQ ID NO: 795417 - RNA, 19 nt, Artificial Sequence
  Description of Artificial Sequence: Synthetic oligonucleotide
  Antisense strand to SEQ ID NO: 795416
acauuucuacaauucuaca

SEQ ID NO: 795418 - RNA, 19 nt, Artificial Sequence
  Description of Artificial Sequence: Synthetic oligonucleotide
  Sense strand starting at position 1468 of SEQ ID NO: 587482
ggguuauaugcagaguuua

SEQ ID NO: 795419 - RNA, 19 nt, Artificial Sequence
  Description of Artificial Sequence: Synthetic oligonucleotide
  Antisense strand to SEQ ID NO: 795418
uaaacucugcauauaaccc

SEQ ID NO: 795420 - RNA, 19 nt, Artificial Sequence
  Description of Artificial Sequence: Synthetic oligonucleotide
  Sense strand starting at position 1479 of SEQ ID NO: 587482
agaguuuacugagcauaau

SEQ ID NO: 795421 - RNA, 19 nt, Artificial Sequence
  Description of Artificial Sequence: Synthetic oligonucleotide
  Antisense strand to SEQ ID NO: 795420
auuaugcucaguaaacucu

SEQ ID NO: 795422 - RNA, 19 nt, Artificial Sequence
  Description of Artificial Sequence: Synthetic oligonucleotide
  Sense strand starting at position 1480 of SEQ ID NO: 587482
gaguuuacugagcauaaua

SEQ ID NO: 795423 - RNA, 19 nt, Artificial Sequence
  Description of Artificial Sequence: Synthetic oligonucleotide
  Antisense strand to SEQ ID NO: 795422
uauuaugcucaguaaacuc

SEQ ID NO: 795424 - RNA, 19 nt, Artificial Sequence
  Description of Artificial Sequence: Synthetic oligonucleotide
  Sense strand starting at position 1573 of SEQ ID NO: 587482
ucaggaaauuaucaagaaa

SEQ ID NO: 795425 - RNA, 19 nt, Artificial Sequence
  Description of Artificial Sequence: Synthetic oligonucleotide
  Antisense strand to SEQ ID NO: 795424
uuucuugauaauuuccuga

SEQ ID NO: 795426 - RNA, 19 nt, Artificial Sequence
  Description of Artificial Sequence: Synthetic oligonucleotide
  Sense strand starting at position 1585 of SEQ ID NO: 587482
caagaaauagcguaugggu

SEQ ID NO: 795427 - RNA, 19 nt, Artificial Sequence
  Description of Artificial Sequence: Synthetic oligonucleotide
  Antisense strand to SEQ ID NO: 795426
acccauacgcuauuucuug

SEQ ID NO: 795428 - RNA, 19 nt, Artificial Sequence
  Description of Artificial Sequence: Synthetic oligonucleotide
  Sense strand starting at position 1678 of SEQ ID NO: 587482
aaugcuugguaggcauaua

SEQ ID NO: 795429 - RNA, 19 nt, Artificial Sequence
  Description of Artificial Sequence: Synthetic oligonucleotide
  Antisense strand to SEQ ID NO: 795428
uauaugccuaccaagcauu

SEQ ID NO: 795430 - RNA, 19 nt, Artificial Sequence
  Description of Artificial Sequence: Synthetic oligonucleotide
  Sense strand starting at position 1679 of SEQ ID NO: 587482
augcuugguaggcauauaa

SEQ ID NO: 795431 - RNA, 19 nt, Artificial Sequence
  Description of Artificial Sequence: Synthetic oligonucleotide
  Antisense strand to SEQ ID NO: 795430
uuauaugccuaccaagcau

SEQ ID NO: 795432 - RNA, 19 nt, Artificial Sequence
  Description of Artificial Sequence: Synthetic oligonucleotide
  Sense strand starting at position 1692 of SEQ ID NO: 587482
auauaauuaucuguggguu

SEQ ID NO: 795433 - RNA, 19 nt, Artificial Sequence
  Description of Artificial Sequence: Synthetic oligonucleotide
  Antisense strand to SEQ ID NO: 795432
aacccacagauaauuauau

SEQ ID NO: 795434 - RNA, 19 nt, Artificial Sequence
  Description of Artificial Sequence: Synthetic oligonucleotide
  Sense strand starting at position 1693 of SEQ ID NO: 587482
uauaauuaucuguggguug

SEQ ID NO: 795435 - RNA, 19 nt, Artificial Sequence
  Description of Artificial Sequence: Synthetic oligonucleotide
  Antisense strand to SEQ ID NO: 795434
caacccacagauaauuaua

SEQ ID NO: 795436 - RNA, 19 nt, Artificial Sequence
  Description of Artificial Sequence: Synthetic oligonucleotide
  Sense strand starting at position 1696 of SEQ ID NO: 587482
aauuaucuguggguuguua

SEQ ID NO: 795437 - RNA, 19 nt, Artificial Sequence
  Description of Artificial Sequence: Synthetic oligonucleotide
  Antisense strand to SEQ ID NO: 795436
uaacaacccacagauaauu

SEQ ID NO: 795438 - RNA, 19 nt, Artificial Sequence
  Description of Artificial Sequence: Synthetic oligonucleotide
  Sense strand starting at position 1700 of SEQ ID NO: 587482
aucuguggguuguuaauuu

SEQ ID NO: 795439 - RNA, 19 nt, Artificial Sequence
  Description of Artificial Sequence: Synthetic oligonucleotide
  Antisense strand to SEQ ID NO: 795438
aaauuaacaacccacagau

SEQ ID NO: 795440 - RNA, 19 nt, Artificial Sequence
  Description of Artificial Sequence: Synthetic oligonucleotide
  Sense strand starting at position 2019 of SEQ ID NO: 587482
gggucucuuaggcaacaau

SEQ ID NO: 795441 - RNA, 19 nt, Artificial Sequence
  Description of Artificial Sequence: Synthetic oligonucleotide
  Antisense strand to SEQ ID NO: 795440
auuguugccuaagagaccc

SEQ ID NO: 795442 - RNA, 19 nt, Artificial Sequence
  Description of Artificial Sequence: Synthetic oligonucleotide
  Sense strand starting at position 2356 of SEQ ID NO: 587482
agaauucgagacugguuca

SEQ ID NO: 795443 - RNA, 19 nt, Artificial Sequence
  Description of Artificial Sequence: Synthetic oligonucleotide
  Antisense strand to SEQ ID NO: 795442
ugaaccagucucgaauucu

SEQ ID NO: 795444 - RNA, 19 nt, Artificial Sequence
  Description of Artificial Sequence: Synthetic oligonucleotide
  Sense strand starting at position 2359 of SEQ ID NO: 587482
auucgagacugguucaaug

SEQ ID NO: 795445 - RNA, 19 nt, Artificial Sequence
  Description of Artificial Sequence: Synthetic oligonucleotide
  Antisense strand to SEQ ID NO: 795444
cauugaaccagucucgaau

SEQ ID NO: 795446 - RNA, 19 nt, Artificial Sequence
  Description of Artificial Sequence: Synthetic oligonucleotide
  Sense strand starting at position 2523 of SEQ ID NO: 587482
gauggcaugcccuaauaag

SEQ ID NO: 795447 - RNA, 19 nt, Artificial Sequence
  Description of Artificial Sequence: Synthetic oligonucleotide
  Antisense strand to SEQ ID NO: 795446
cuuauuagggcaugccauc

SEQ ID NO: 795448 - RNA, 19 nt, Artificial Sequence
  Description of Artificial Sequence: Synthetic oligonucleotide
  Sense strand starting at position 2727 of SEQ ID NO: 587482
ugaacaagugcuggaggau

SEQ ID NO: 795449 - RNA, 19 nt, Artificial Sequence
  Description of Artificial Sequence: Synthetic oligonucleotide
  Antisense strand to SEQ ID NO: 795448
auccuccagcacuuguuca

SEQ ID NO: 795450 - RNA, 19 nt, Artificial Sequence
  Description of Artificial Sequence: Synthetic oligonucleotide
  Sense strand starting at position 2773 of SEQ ID NO: 587482
agguccuuuggucaaugua

SEQ ID NO: 795451 - RNA, 19 nt, Artificial Sequence
  Description of Artificial Sequence: Synthetic oligonucleotide
  Antisense strand to SEQ ID NO: 795450
uacauugaccaaaggaccu

SEQ ID NO: 795452 - RNA, 19 nt, Artificial Sequence
  Description of Artificial Sequence: Synthetic oligonucleotide
  Sense strand starting at position 2776 of SEQ ID NO: 587482
uccuuuggucaauguaaag

SEQ ID NO: 795453 - RNA, 19 nt, Artificial Sequence
  Description of Artificial Sequence: Synthetic oligonucleotide
  Antisense strand to SEQ ID NO: 795452
cuuuacauugaccaaagga

SEQ ID NO: 795454 - RNA, 19 nt, Artificial Sequence
  Description of Artificial Sequence: Synthetic oligonucleotide
  Sense strand starting at position 2785 of SEQ ID NO: 587482
caauguaaagcaggucuua

SEQ ID NO: 795455 - RNA, 19 nt, Artificial Sequence
  Description of Artificial Sequence: Synthetic oligonucleotide
  Antisense strand to SEQ ID NO: 795454
uaagaccugcuuuacauug

SEQ ID NO: 795456 - RNA, 19 nt, Artificial Sequence
  Description of Artificial Sequence: Synthetic oligonucleotide
  Sense strand starting at position 3272 of SEQ ID NO: 587482
gcagcauuuguauaucucu

SEQ ID NO: 795457 - RNA, 19 nt, Artificial Sequence
  Description of Artificial Sequence: Synthetic oligonucleotide
  Antisense strand to SEQ ID NO: 795456
agagauauacaaaugcugc

SEQ ID NO: 795458 - RNA, 19 nt, Artificial Sequence
  Description of Artificial Sequence: Synthetic oligonucleotide
  Sense strand starting at position 3275 of SEQ ID NO: 587482
gcauuuguauaucucuagu

SEQ ID NO: 795459 - RNA, 19 nt, Artificial Sequence
  Description of Artificial Sequence: Synthetic oligonucleotide
  Antisense strand to SEQ ID NO: 795458
acuagagauauacaaaugc

SEQ ID NO: 795460 - RNA, 19 nt, Artificial Sequence
  Description of Artificial Sequence: Synthetic oligonucleotide
  Sense strand starting at position 3376 of SEQ ID NO: 587482
gaaccuagguuguuugaau

SEQ ID NO: 795461 - RNA, 19 nt, Artificial Sequence
  Description of Artificial Sequence: Synthetic oligonucleotide
  Antisense strand to SEQ ID NO: 795460
auucaaacaaccuagguuc

SEQ ID NO: 795462 - RNA, 19 nt, Artificial Sequence
  Description of Artificial Sequence: Synthetic oligonucleotide
  Sense strand starting at position 3377 of SEQ ID NO: 587482
aaccuagguuguuugaauu

SEQ ID NO: 795463 - RNA, 19 nt, Artificial Sequence
  Description of Artificial Sequence: Synthetic oligonucleotide
  Antisense strand to SEQ ID NO: 795462
aauucaaacaaccuagguu

SEQ ID NO: 795464 - RNA, 19 nt, Artificial Sequence
  Description of Artificial Sequence: Synthetic oligonucleotide
  Sense strand starting at position 3422 of SEQ ID NO: 587482
ccggguuguaccuaaauga

SEQ ID NO: 795465 - RNA, 19 nt, Artificial Sequence
  Description of Artificial Sequence: Synthetic oligonucleotide
  Antisense strand to SEQ ID NO: 795464
ucauuuagguacaacccgg

SEQ ID NO: 795466 - RNA, 19 nt, Artificial Sequence
  Description of Artificial Sequence: Synthetic oligonucleotide
  Sense strand starting at position 3607 of SEQ ID NO: 587482
gaaguucccgcucauuaaa

SEQ ID NO: 795467 - RNA, 19 nt, Artificial Sequence
  Description of Artificial Sequence: Synthetic oligonucleotide
  Antisense strand to SEQ ID NO: 795466
uuuaaugagcgggaacuuc

SEQ ID NO: 795468 - RNA, 19 nt, Artificial Sequence
  Description of Artificial Sequence: Synthetic oligonucleotide
  Sense strand starting at position 3619 of SEQ ID NO: 587482
cauuaaagacuucguauug

SEQ ID NO: 795469 - RNA, 19 nt, Artificial Sequence
  Description of Artificial Sequence: Synthetic oligonucleotide
  Antisense strand to SEQ ID NO: 795468
caauacgaagucuuuaaug

SEQ ID NO: 795470 - RNA, 19 nt, Artificial Sequence
  Description of Artificial Sequence: Synthetic oligonucleotide
  Sense strand starting at position 3631 of SEQ ID NO: 587482
cguauuggugguuacaaca

SEQ ID NO: 795471 - RNA, 19 nt, Artificial Sequence
  Description of Artificial Sequence: Synthetic oligonucleotide
  Antisense strand to SEQ ID NO: 795470
uguuguaaccaccaauacg

SEQ ID NO: 795472 - RNA, 19 nt, Artificial Sequence
  Description of Artificial Sequence: Synthetic oligonucleotide
  Sense strand starting at position 3694 of SEQ ID NO: 587482
ccuguuggauuugaauauu

SEQ ID NO: 795473 - RNA, 19 nt, Artificial Sequence
  Description of Artificial Sequence: Synthetic oligonucleotide
  Antisense strand to SEQ ID NO: 795472
aauauucaaauccaacagg

SEQ ID NO: 795474 - RNA, 19 nt, Artificial Sequence
  Description of Artificial Sequence: Synthetic oligonucleotide
  Sense strand starting at position 3861 of SEQ ID NO: 587482
cauagagcuccaugucuga

SEQ ID NO: 795475 - RNA, 19 nt, Artificial Sequence
  Description of Artificial Sequence: Synthetic oligonucleotide
  Antisense strand to SEQ ID NO: 795474
ucagacauggagcucuaug

SEQ ID NO: 795476 - RNA, 19 nt, Artificial Sequence
  Description of Artificial Sequence: Synthetic oligonucleotide
  Sense strand starting at position 193 of SEQ ID NO: 587483
uagagcuuaccauaggcua

SEQ ID NO: 795477 - RNA, 19 nt, Artificial Sequence
  Description of Artificial Sequence: Synthetic oligonucleotide
  Antisense strand to SEQ ID NO: 795476
uagccuaugguaagcucua

SEQ ID NO: 795478 - RNA, 19 nt, Artificial Sequence
  Description of Artificial Sequence: Synthetic oligonucleotide
  Sense strand starting at position 207 of SEQ ID NO: 587483
ggcuacgcauuacucuaaa

SEQ ID NO: 795479 - RNA, 19 nt, Artificial Sequence
  Description of Artificial Sequence: Synthetic oligonucleotide
  Antisense strand to SEQ ID NO: 795478
uuuagaguaaugcguagcc

SEQ ID NO: 795480 - RNA, 19 nt, Artificial Sequence
  Description of Artificial Sequence: Synthetic oligonucleotide
  Sense strand starting at position 620 of SEQ ID NO: 587483
ugcuuauaaguguggacaa

SEQ ID NO: 795481 - RNA, 19 nt, Artificial Sequence
  Description of Artificial Sequence: Synthetic oligonucleotide
  Antisense strand to SEQ ID NO: 795480
uuguccacacuuauaagca

SEQ ID NO: 795482 - RNA, 19 nt, Artificial Sequence
  Description of Artificial Sequence: Synthetic oligonucleotide
  Sense strand starting at position 621 of SEQ ID NO: 587483
gcuuauaaguguggacaaa

SEQ ID NO: 795483 - RNA, 19 nt, Artificial Sequence
  Description of Artificial Sequence: Synthetic oligonucleotide
  Antisense strand to SEQ ID NO: 795482
uuuguccacacuuauaagc

SEQ ID NO: 795484 - RNA, 19 nt, Artificial Sequence
  Description of Artificial Sequence: Synthetic oligonucleotide
  Sense strand starting at position 691 of SEQ ID NO: 587483
agaaauaaguuguacucua

SEQ ID NO: 795485 - RNA, 19 nt, Artificial Sequence
  Description of Artificial Sequence: Synthetic oligonucleotide
  Antisense strand to SEQ ID NO: 795484
uagaguacaacuuauuucu

SEQ ID NO: 795486 - RNA, 19 nt, Artificial Sequence
  Description of Artificial Sequence: Synthetic oligonucleotide
  Sense strand starting at position 696 of SEQ ID NO: 587483
uaaguuguacucuaaggac

SEQ ID NO: 795487 - RNA, 19 nt, Artificial Sequence
  Description of Artificial Sequence: Synthetic oligonucleotide
  Antisense strand to SEQ ID NO: 795486
guccuuagaguacaacuua

SEQ ID NO: 795488 - RNA, 19 nt, Artificial Sequence
  Description of Artificial Sequence: Synthetic oligonucleotide
  Sense strand starting at position 699 of SEQ ID NO: 587483
guuguacucuaaggacuua

SEQ ID NO: 795489 - RNA, 19 nt, Artificial Sequence
  Description of Artificial Sequence: Synthetic oligonucleotide
  Antisense strand to SEQ ID NO: 795488
uaaguccuuagaguacaac

SEQ ID NO: 795490 - RNA, 19 nt, Artificial Sequence
  Description of Artificial Sequence: Synthetic oligonucleotide
  Sense strand starting at position 2418 of SEQ ID NO: 587483
aguuucgaaucuugucgaa

SEQ ID NO: 795491 - RNA, 19 nt, Artificial Sequence
  Description of Artificial Sequence: Synthetic oligonucleotide
  Antisense strand to SEQ ID NO: 795490
uucgacaagauucgaaacu

SEQ ID NO: 795492 - RNA, 19 nt, Artificial Sequence
  Description of Artificial Sequence: Synthetic oligonucleotide
  Sense strand starting at position 2420 of SEQ ID NO: 587483
uuucgaaucuugucgaauc

SEQ ID NO: 795493 - RNA, 19 nt, Artificial Sequence
  Description of Artificial Sequence: Synthetic oligonucleotide
  Antisense strand to SEQ ID NO: 795492
gauucgacaagauucgaaa

SEQ ID NO: 795494 - RNA, 19 nt, Artificial Sequence
  Description of Artificial Sequence: Synthetic oligonucleotide
  Sense strand starting at position 2421 of SEQ ID NO: 587483
uucgaaucuugucgaaucu

SEQ ID NO: 795495 - RNA, 19 nt, Artificial Sequence
  Description of Artificial Sequence: Synthetic oligonucleotide
  Antisense strand to SEQ ID NO: 795494
agauucgacaagauucgaa

SEQ ID NO: 795496 - RNA, 19 nt, Artificial Sequence
  Description of Artificial Sequence: Synthetic oligonucleotide
  Sense strand starting at position 2422 of SEQ ID NO: 587483
ucgaaucuugucgaaucuu

SEQ ID NO: 795497 - RNA, 19 nt, Artificial Sequence
  Description of Artificial Sequence: Synthetic oligonucleotide
  Antisense strand to SEQ ID NO: 795496
aagauucgacaagauucga

SEQ ID NO: 795498 - RNA, 19 nt, Artificial Sequence
  Description of Artificial Sequence: Synthetic oligonucleotide
  Sense strand starting at position 2428 of SEQ ID NO: 587483
cuugucgaaucuuucuaga

SEQ ID NO: 795499 - RNA, 19 nt, Artificial Sequence
  Description of Artificial Sequence: Synthetic oligonucleotide
  Antisense strand to SEQ ID NO: 795498
ucuagaaagauucgacaag

SEQ ID NO: 795500 - RNA, 19 nt, Artificial Sequence
  Description of Artificial Sequence: Synthetic oligonucleotide
  Sense strand starting at position 2430 of SEQ ID NO: 587483
ugucgaaucuuucuagaag

SEQ ID NO: 795501 - RNA, 19 nt, Artificial Sequence
  Description of Artificial Sequence: Synthetic oligonucleotide
  Antisense strand to SEQ ID NO: 795500
cuucuagaaagauucgaca

SEQ ID NO: 795502 - RNA, 19 nt, Artificial Sequence
  Description of Artificial Sequence: Synthetic oligonucleotide
  Sense strand starting at position 2431 of SEQ ID NO: 587483
gucgaaucuuucuagaagg

SEQ ID NO: 795503 - RNA, 19 nt, Artificial Sequence
  Description of Artificial Sequence: Synthetic oligonucleotide
  Antisense strand to SEQ ID NO: 795502
ccuucuagaaagauucgac

SEQ ID NO: 795504 - RNA, 19 nt, Artificial Sequence
  Description of Artificial Sequence: Synthetic oligonucleotide
  Sense strand starting at position 2433 of SEQ ID NO: 587483
cgaaucuuucuagaagguu

SEQ ID NO: 795505 - RNA, 19 nt, Artificial Sequence
  Description of Artificial Sequence: Synthetic oligonucleotide
  Antisense strand to SEQ ID NO: 795504
aaccuucuagaaagauucg

SEQ ID NO: 795506 - RNA, 19 nt, Artificial Sequence
  Description of Artificial Sequence: Synthetic oligonucleotide
  Sense strand starting at position 2436 of SEQ ID NO: 587483
aucuuucuagaagguugaa

SEQ ID NO: 795507 - RNA, 19 nt, Artificial Sequence
  Description of Artificial Sequence: Synthetic oligonucleotide
  Antisense strand to SEQ ID NO: 795506
uucaaccuucuagaaagau

SEQ ID NO: 795508 - RNA, 19 nt, Artificial Sequence
  Description of Artificial Sequence: Synthetic oligonucleotide
  Sense strand starting at position 2573 of SEQ ID NO: 587483
gccucaguuuccgccuaga

SEQ ID NO: 795509 - RNA, 19 nt, Artificial Sequence
  Description of Artificial Sequence: Synthetic oligonucleotide
  Antisense strand to SEQ ID NO: 795508
ucuaggcggaaacugaggc

SEQ ID NO: 795510 - RNA, 19 nt, Artificial Sequence
  Description of Artificial Sequence: Synthetic oligonucleotide
  Sense strand starting at position 2576 of SEQ ID NO: 587483
ucaguuuccgccuagaaac

SEQ ID NO: 795511 - RNA, 19 nt, Artificial Sequence
  Description of Artificial Sequence: Synthetic oligonucleotide
  Antisense strand to SEQ ID NO: 795510
guuucuaggcggaaacuga

SEQ ID NO: 795512 - RNA, 19 nt, Artificial Sequence
  Description of Artificial Sequence: Synthetic oligonucleotide
  Sense strand starting at position 2578 of SEQ ID NO: 587483
aguuuccgccuagaaacau

SEQ ID NO: 795513 - RNA, 19 nt, Artificial Sequence
  Description of Artificial Sequence: Synthetic oligonucleotide
  Antisense strand to SEQ ID NO: 795512
auguuucuaggcggaaacu

SEQ ID NO: 795514 - RNA, 19 nt, Artificial Sequence
  Description of Artificial Sequence: Synthetic oligonucleotide
  Sense strand starting at position 2792 of SEQ ID NO: 587483
agaaguuauuucugaagug

SEQ ID NO: 795515 - RNA, 19 nt, Artificial Sequence
  Description of Artificial Sequence: Synthetic oligonucleotide
  Antisense strand to SEQ ID NO: 795514
cacuucagaaauaacuucu

SEQ ID NO: 795516 - RNA, 19 nt, Artificial Sequence
  Description of Artificial Sequence: Synthetic oligonucleotide
  Sense strand starting at position 2851 of SEQ ID NO: 587483
augugaaggcaaugaagua

SEQ ID NO: 795517 - RNA, 19 nt, Artificial Sequence
  Description of Artificial Sequence: Synthetic oligonucleotide
  Antisense strand to SEQ ID NO: 795516
uacuucauugccuucacau

SEQ ID NO: 795518 - RNA, 19 nt, Artificial Sequence
  Description of Artificial Sequence: Synthetic oligonucleotide
  Sense strand starting at position 2981 of SEQ ID NO: 587483
gguugcggauuauucuauu

SEQ ID NO: 795519 - RNA, 19 nt, Artificial Sequence
  Description of Artificial Sequence: Synthetic oligonucleotide
  Antisense strand to SEQ ID NO: 795518
aauagaauaauccgcaacc

SEQ ID NO: 795520 - RNA, 19 nt, Artificial Sequence
  Description of Artificial Sequence: Synthetic oligonucleotide
  Sense strand starting at position 2984 of SEQ ID NO: 587483
ugcggauuauucuauuaua

SEQ ID NO: 795521 - RNA, 19 nt, Artificial Sequence
  Description of Artificial Sequence: Synthetic oligonucleotide
  Antisense strand to SEQ ID NO: 795520
uauaauagaauaauccgca

SEQ ID NO: 795522 - RNA, 19 nt, Artificial Sequence
  Description of Artificial Sequence: Synthetic oligonucleotide
  Sense strand starting at position 3029 of SEQ ID NO: 587483
uucuaugaugucuaugaua

SEQ ID NO: 795523 - RNA, 19 nt, Artificial Sequence
  Description of Artificial Sequence: Synthetic oligonucleotide
  Antisense strand to SEQ ID NO: 795522
uaucauagacaucauagaa

SEQ ID NO: 795524 - RNA, 19 nt, Artificial Sequence
  Description of Artificial Sequence: Synthetic oligonucleotide
  Sense strand starting at position 3031 of SEQ ID NO: 587483
cuaugaugucuaugauagg

SEQ ID NO: 795525 - RNA, 19 nt, Artificial Sequence
  Description of Artificial Sequence: Synthetic oligonucleotide
  Antisense strand to SEQ ID NO: 795524
ccuaucauagacaucauag

SEQ ID NO: 795526 - RNA, 19 nt, Artificial Sequence
  Description of Artificial Sequence: Synthetic oligonucleotide
  Sense strand starting at position 3032 of SEQ ID NO: 587483
uaugaugucuaugauaggu

SEQ ID NO: 795527 - RNA, 19 nt, Artificial Sequence
  Description of Artificial Sequence: Synthetic oligonucleotide
  Antisense strand to SEQ ID NO: 795526
accuaucauagacaucaua

SEQ ID NO: 795528 - RNA, 19 nt, Artificial Sequence
  Description of Artificial Sequence: Synthetic oligonucleotide
  Sense strand starting at position 3034 of SEQ ID NO: 587483
ugaugucuaugauagguuu

SEQ ID NO: 795529 - RNA, 19 nt, Artificial Sequence
  Description of Artificial Sequence: Synthetic oligonucleotide
  Antisense strand to SEQ ID NO: 795528
aaaccuaucauagacauca

SEQ ID NO: 795530 - RNA, 19 nt, Artificial Sequence
  Description of Artificial Sequence: Synthetic oligonucleotide
  Sense strand starting at position 3062 of SEQ ID NO: 587483
ugcaauaguuugccauuau

SEQ ID NO: 795531 - RNA, 19 nt, Artificial Sequence
  Description of Artificial Sequence: Synthetic oligonucleotide
  Antisense strand to SEQ ID NO: 795530
auaauggcaaacuauugca

SEQ ID NO: 795532 - RNA, 19 nt, Artificial Sequence
  Description of Artificial Sequence: Synthetic oligonucleotide
  Sense strand starting at position 3063 of SEQ ID NO: 587483
gcaauaguuugccauuaua

SEQ ID NO: 795533 - RNA, 19 nt, Artificial Sequence
  Description of Artificial Sequence: Synthetic oligonucleotide
  Antisense strand to SEQ ID NO: 795532
uauaauggcaaacuauugc

SEQ ID NO: 795534 - RNA, 19 nt, Artificial Sequence
  Description of Artificial Sequence: Synthetic oligonucleotide
  Sense strand starting at position 3095 of SEQ ID NO: 587483
agcgcuguggucugauuua

SEQ ID NO: 795535 - RNA, 19 nt, Artificial Sequence
  Description of Artificial Sequence: Synthetic oligonucleotide
  Antisense strand to SEQ ID NO: 795534
uaaaucagaccacagcgcu

SEQ ID NO: 795536 - RNA, 19 nt, Artificial Sequence
  Description of Artificial Sequence: Synthetic oligonucleotide
  Sense strand starting at position 3149 of SEQ ID NO: 587483
auuggauuguuguguaaag

SEQ ID NO: 795537 - RNA, 19 nt, Artificial Sequence
  Description of Artificial Sequence: Synthetic oligonucleotide
  Antisense strand to SEQ ID NO: 795536
cuuuacacaacaauccaau

SEQ ID NO: 795538 - RNA, 19 nt, Artificial Sequence
  Description of Artificial Sequence: Synthetic oligonucleotide
  Sense strand starting at position 3151 of SEQ ID NO: 587483
uggauuguuguguaaagca

SEQ ID NO: 795539 - RNA, 19 nt, Artificial Sequence
  Description of Artificial Sequence: Synthetic oligonucleotide
  Antisense strand to SEQ ID NO: 795538
ugcuuuacacaacaaucca

SEQ ID NO: 795540 - RNA, 19 nt, Artificial Sequence
  Description of Artificial Sequence: Synthetic oligonucleotide
  Sense strand starting at position 3190 of SEQ ID NO: 587483
acaacugauuuagagguuu

SEQ ID NO: 795541 - RNA, 19 nt, Artificial Sequence
  Description of Artificial Sequence: Synthetic oligonucleotide
  Antisense strand to SEQ ID NO: 795540
aaaccucuaaaucaguugu

SEQ ID NO: 795542 - RNA, 19 nt, Artificial Sequence
  Description of Artificial Sequence: Synthetic oligonucleotide
  Sense strand starting at position 3425 of SEQ ID NO: 587483
ggguuaugcaucugucuca

SEQ ID NO: 795543 - RNA, 19 nt, Artificial Sequence
  Description of Artificial Sequence: Synthetic oligonucleotide
  Antisense strand to SEQ ID NO: 795542
ugagacagaugcauaaccc

SEQ ID NO: 795544 - RNA, 19 nt, Artificial Sequence
  Description of Artificial Sequence: Synthetic oligonucleotide
  Sense strand starting at position 3426 of SEQ ID NO: 587483
gguuaugcaucugucucau

SEQ ID NO: 795545 - RNA, 19 nt, Artificial Sequence
  Description of Artificial Sequence: Synthetic oligonucleotide
  Antisense strand to SEQ ID NO: 795544
augagacagaugcauaacc

SEQ ID NO: 795546 - RNA, 19 nt, Artificial Sequence
  Description of Artificial Sequence: Synthetic oligonucleotide
  Sense strand starting at position 3717 of SEQ ID NO: 587483
uggcuagcauccucacaau

SEQ ID NO: 795547 - RNA, 19 nt, Artificial Sequence
  Description of Artificial Sequence: Synthetic oligonucleotide
  Antisense strand to SEQ ID NO: 795546
auugugaggaugcuagcca

SEQ ID NO: 795548 - RNA, 19 nt, Artificial Sequence
  Description of Artificial Sequence: Synthetic oligonucleotide
  Sense strand starting at position 3951 of SEQ ID NO: 587483
cagaacccauagugugaua

SEQ ID NO: 795549 - RNA, 19 nt, Artificial Sequence
  Description of Artificial Sequence: Synthetic oligonucleotide
  Antisense strand to SEQ ID NO: 795548
uaucacacuauggguucug

SEQ ID NO: 795550 - RNA, 19 nt, Artificial Sequence
  Description of Artificial Sequence: Synthetic oligonucleotide
  Sense strand starting at position 3954 of SEQ ID NO: 587483
aacccauagugugauagca

SEQ ID NO: 795551 - RNA, 19 nt, Artificial Sequence
  Description of Artificial Sequence: Synthetic oligonucleotide
  Antisense strand to SEQ ID NO: 795550
ugcuaucacacuauggguu

SEQ ID NO: 795552 - RNA, 19 nt, Artificial Sequence
  Description of Artificial Sequence: Synthetic oligonucleotide
  Sense strand starting at position 3956 of SEQ ID NO: 587483
cccauagugugauagcaga

SEQ ID NO: 795553 - RNA, 19 nt, Artificial Sequence
  Description of Artificial Sequence: Synthetic oligonucleotide
  Antisense strand to SEQ ID NO: 795552
ucugcuaucacacuauggg

SEQ ID NO: 795554 - RNA, 19 nt, Artificial Sequence
  Description of Artificial Sequence: Synthetic oligonucleotide
  Sense strand starting at position 60 of SEQ ID NO: 587484
auauuagaucauuguccuu

SEQ ID NO: 795555 - RNA, 19 nt, Artificial Sequence
  Description of Artificial Sequence: Synthetic oligonucleotide
  Antisense strand to SEQ ID NO: 795554
aaggacaaugaucuaauau

SEQ ID NO: 795556 - RNA, 19 nt, Artificial Sequence
  Description of Artificial Sequence: Synthetic oligonucleotide
  Sense strand starting at position 65 of SEQ ID NO: 587484
agaucauuguccuuaggaa

SEQ ID NO: 795557 - RNA, 19 nt, Artificial Sequence
  Description of Artificial Sequence: Synthetic oligonucleotide
  Antisense strand to SEQ ID NO: 795556
uuccuaaggacaaugaucu

SEQ ID NO: 795558 - RNA, 19 nt, Artificial Sequence
  Description of Artificial Sequence: Synthetic oligonucleotide
  Sense strand starting at position 142 of SEQ ID NO: 587484
gguaacuccagucgauaaa

SEQ ID NO: 795559 - RNA, 19 nt, Artificial Sequence
  Description of Artificial Sequence: Synthetic oligonucleotide
  Antisense strand to SEQ ID NO: 795558
uuuaucgacuggaguuacc

SEQ ID NO: 795560 - RNA, 19 nt, Artificial Sequence
  Description of Artificial Sequence: Synthetic oligonucleotide
  Sense strand starting at position 165 of SEQ ID NO: 587484
auagucugucaauagcagu

SEQ ID NO: 795561 - RNA, 19 nt, Artificial Sequence
  Description of Artificial Sequence: Synthetic oligonucleotide
  Antisense strand to SEQ ID NO: 795560
acugcuauugacagacuau

SEQ ID NO: 795562 - RNA, 19 nt, Artificial Sequence
  Description of Artificial Sequence: Synthetic oligonucleotide
  Sense strand starting at position 234 of SEQ ID NO: 587484
uccuuaugguggucccuaa

SEQ ID NO: 795563 - RNA, 19 nt, Artificial Sequence
  Description of Artificial Sequence: Synthetic oligonucleotide
  Antisense strand to SEQ ID NO: 795562
uuagggaccaccauaagga

SEQ ID NO: 795564 - RNA, 19 nt, Artificial Sequence
  Description of Artificial Sequence: Synthetic oligonucleotide
  Sense strand starting at position 282 of SEQ ID NO: 587484
caacguaaaugguuauaug

SEQ ID NO: 795565 - RNA, 19 nt, Artificial Sequence
  Description of Artificial Sequence: Synthetic oligonucleotide
  Antisense strand to SEQ ID NO: 795564
cauauaaccauuuacguug

SEQ ID NO: 795566 - RNA, 19 nt, Artificial Sequence
  Description of Artificial Sequence: Synthetic oligonucleotide
  Sense strand starting at position 306 of SEQ ID NO: 587484
gguuaauacgcucaagucu

SEQ ID NO: 795567 - RNA, 19 nt, Artificial Sequence
  Description of Artificial Sequence: Synthetic oligonucleotide
  Antisense strand to SEQ ID NO: 795566
agacuugagcguauuaacc

SEQ ID NO: 795568 - RNA, 19 nt, Artificial Sequence
  Description of Artificial Sequence: Synthetic oligonucleotide
  Sense strand starting at position 540 of SEQ ID NO: 587484
agaauucuccauugaaguc

SEQ ID NO: 795569 - RNA, 19 nt, Artificial Sequence
  Description of Artificial Sequence: Synthetic oligonucleotide
  Antisense strand to SEQ ID NO: 795568
gacuucaauggagaauucu

SEQ ID NO: 795570 - RNA, 19 nt, Artificial Sequence
  Description of Artificial Sequence: Synthetic oligonucleotide
  Sense strand starting at position 674 of SEQ ID NO: 587484
gggcuaaaugcugagaguc

SEQ ID NO: 795571 - RNA, 19 nt, Artificial Sequence
  Description of Artificial Sequence: Synthetic oligonucleotide
  Antisense strand to SEQ ID NO: 795570
gacucucagcauuuagccc

SEQ ID NO: 795572 - RNA, 19 nt, Artificial Sequence
  Description of Artificial Sequence: Synthetic oligonucleotide
  Sense strand starting at position 682 of SEQ ID NO: 587484
ugcugagagucucugaaag

SEQ ID NO: 795573 - RNA, 19 nt, Artificial Sequence
  Description of Artificial Sequence: Synthetic oligonucleotide
  Antisense strand to SEQ ID NO: 795572
cuuucagagacucucagca

SEQ ID NO: 795574 - RNA, 19 nt, Artificial Sequence
  Description of Artificial Sequence: Synthetic oligonucleotide
  Sense strand starting at position 899 of SEQ ID NO: 587484
cggagugcacucuauacaa

SEQ ID NO: 795575 - RNA, 19 nt, Artificial Sequence
  Description of Artificial Sequence: Synthetic oligonucleotide
  Antisense strand to SEQ ID NO: 795574
uuguauagagugcacuccg

SEQ ID NO: 795576 - RNA, 19 nt, Artificial Sequence
  Description of Artificial Sequence: Synthetic oligonucleotide
  Sense strand starting at position 979 of SEQ ID NO: 587484
agagcucuugugggauuca

SEQ ID NO: 795577 - RNA, 19 nt, Artificial Sequence
  Description of Artificial Sequence: Synthetic oligonucleotide
  Antisense strand to SEQ ID NO: 795576
ugaaucccacaagagcucu

SEQ ID NO: 795578 - RNA, 19 nt, Artificial Sequence
  Description of Artificial Sequence: Synthetic oligonucleotide
  Sense strand starting at position 1319 of SEQ ID NO: 587484
cacuaaagcugugugauua

SEQ ID NO: 795579 - RNA, 19 nt, Artificial Sequence
  Description of Artificial Sequence: Synthetic oligonucleotide
  Antisense strand to SEQ ID NO: 795578
uaaucacacagcuuuagug

SEQ ID NO: 795580 - RNA, 19 nt, Artificial Sequence
  Description of Artificial Sequence: Synthetic oligonucleotide
  Sense strand starting at position 1320 of SEQ ID NO: 587484
acuaaagcugugugauuaa

SEQ ID NO: 795581 - RNA, 19 nt, Artificial Sequence
  Description of Artificial Sequence: Synthetic oligonucleotide
  Antisense strand to SEQ ID NO: 795580
uuaaucacacagcuuuagu

SEQ ID NO: 795582 - RNA, 19 nt, Artificial Sequence
  Description of Artificial Sequence: Synthetic oligonucleotide
  Sense strand starting at position 1367 of SEQ ID NO: 587484
cgcgaaugucaucagacuc

SEQ ID NO: 795583 - RNA, 19 nt, Artificial Sequence
  Description of Artificial Sequence: Synthetic oligonucleotide
  Antisense strand to SEQ ID NO: 795582
gagucugaugacauucgcg

SEQ ID NO: 795584 - RNA, 19 nt, Artificial Sequence
  Description of Artificial Sequence: Synthetic oligonucleotide
  Sense strand starting at position 1391 of SEQ ID NO: 587484
gggaccagguguucuguaa

SEQ ID NO: 795585 - RNA, 19 nt, Artificial Sequence
  Description of Artificial Sequence: Synthetic oligonucleotide
  Antisense strand to SEQ ID NO: 795584
uuacagaacaccugguccc

SEQ ID NO: 795586 - RNA, 19 nt, Artificial Sequence
  Description of Artificial Sequence: Synthetic oligonucleotide
  Sense strand starting at position 1478 of SEQ ID NO: 587484
uccgaagaccucugcagaa

SEQ ID NO: 795587 - RNA, 19 nt, Artificial Sequence
  Description of Artificial Sequence: Synthetic oligonucleotide
  Antisense strand to SEQ ID NO: 795586
uucugcagaggucuucgga

SEQ ID NO: 795588 - RNA, 19 nt, Artificial Sequence
  Description of Artificial Sequence: Synthetic oligonucleotide
  Sense strand starting at position 1480 of SEQ ID NO: 587484
cgaagaccucugcagaaau

SEQ ID NO: 795589 - RNA, 19 nt, Artificial Sequence
  Description of Artificial Sequence: Synthetic oligonucleotide
  Antisense strand to SEQ ID NO: 795588
auuucugcagaggucuucg

SEQ ID NO: 795590 - RNA, 19 nt, Artificial Sequence
  Description of Artificial Sequence: Synthetic oligonucleotide
  Sense strand starting at position 1738 of SEQ ID NO: 587484
ccaguccugcccgaggaau

SEQ ID NO: 795591 - RNA, 19 nt, Artificial Sequence
  Description of Artificial Sequence: Synthetic oligonucleotide
  Antisense strand to SEQ ID NO: 795590
auuccucgggcaggacugg

SEQ ID NO: 795592 - RNA, 19 nt, Artificial Sequence
  Description of Artificial Sequence: Synthetic oligonucleotide
  Sense strand starting at position 2052 of SEQ ID NO: 587484
ggccacguggcuuuguuua

SEQ ID NO: 795593 - RNA, 19 nt, Artificial Sequence
  Description of Artificial Sequence: Synthetic oligonucleotide
  Antisense strand to SEQ ID NO: 795592
uaaacaaagccacguggcc

SEQ ID NO: 795594 - RNA, 19 nt, Artificial Sequence
  Description of Artificial Sequence: Synthetic oligonucleotide
  Sense strand starting at position 2698 of SEQ ID NO: 587484
cccucuaagagacggguua

SEQ ID NO: 795595 - RNA, 19 nt, Artificial Sequence
  Description of Artificial Sequence: Synthetic oligonucleotide
  Antisense strand to SEQ ID NO: 795594
uaacccgucucuuagaggg

SEQ ID NO: 795596 - RNA, 19 nt, Artificial Sequence
  Description of Artificial Sequence: Synthetic oligonucleotide
  Sense strand starting at position 2699 of SEQ ID NO: 587484
ccucuaagagacggguuaa

SEQ ID NO: 795597 - RNA, 19 nt, Artificial Sequence
  Description of Artificial Sequence: Synthetic oligonucleotide
  Antisense strand to SEQ ID NO: 795596
uuaacccgucucuuagagg

SEQ ID NO: 795598 - RNA, 19 nt, Artificial Sequence
  Description of Artificial Sequence: Synthetic oligonucleotide
  Sense strand starting at position 2700 of SEQ ID NO: 587484
cucuaagagacggguuaaa

SEQ ID NO: 795599 - RNA, 19 nt, Artificial Sequence
  Description of Artificial Sequence: Synthetic oligonucleotide
  Antisense strand to SEQ ID NO: 795598
uuuaacccgucucuuagag

SEQ ID NO: 795600 - RNA, 19 nt, Artificial Sequence
  Description of Artificial Sequence: Synthetic oligonucleotide
  Sense strand starting at position 2839 of SEQ ID NO: 587484
ucuuguuccggaggcauuu

SEQ ID NO: 795601 - RNA, 19 nt, Artificial Sequence
  Description of Artificial Sequence: Synthetic oligonucleotide
  Antisense strand to SEQ ID NO: 795600
aaaugccuccggaacaaga

SEQ ID NO: 795602 - RNA, 19 nt, Artificial Sequence
  Description of Artificial Sequence: Synthetic oligonucleotide
  Sense strand starting at position 2898 of SEQ ID NO: 587484
aacuauuugugugaauaag

SEQ ID NO: 795603 - RNA, 19 nt, Artificial Sequence
  Description of Artificial Sequence: Synthetic oligonucleotide
  Antisense strand to SEQ ID NO: 795602
cuuauucacacaaauaguu

SEQ ID NO: 795604 - RNA, 19 nt, Artificial Sequence
  Description of Artificial Sequence: Synthetic oligonucleotide
  Sense strand starting at position 2973 of SEQ ID NO: 587484
uaguuaugaugcuuuacag

SEQ ID NO: 795605 - RNA, 19 nt, Artificial Sequence
  Description of Artificial Sequence: Synthetic oligonucleotide
  Antisense strand to SEQ ID NO: 795604
cuguaaagcaucauaacua

SEQ ID NO: 795606 - RNA, 19 nt, Artificial Sequence
  Description of Artificial Sequence: Synthetic oligonucleotide
  Sense strand starting at position 2985 of SEQ ID NO: 587484
uuuacagccuggucuauuu

SEQ ID NO: 795607 - RNA, 19 nt, Artificial Sequence
  Description of Artificial Sequence: Synthetic oligonucleotide
  Antisense strand to SEQ ID NO: 795606
aaauagaccaggcuguaaa

SEQ ID NO: 795608 - RNA, 19 nt, Artificial Sequence
  Description of Artificial Sequence: Synthetic oligonucleotide
  Sense strand starting at position 3120 of SEQ ID NO: 587484
acugacucgguguaaucuu

SEQ ID NO: 795609 - RNA, 19 nt, Artificial Sequence
  Description of Artificial Sequence: Synthetic oligonucleotide
  Antisense strand to SEQ ID NO: 795608
aagauuacaccgagucagu

SEQ ID NO: 795610 - RNA, 19 nt, Artificial Sequence
  Description of Artificial Sequence: Synthetic oligonucleotide
  Sense strand starting at position 3326 of SEQ ID NO: 587484
uguuaaacacugugauggu

SEQ ID NO: 795611 - RNA, 19 nt, Artificial Sequence
  Description of Artificial Sequence: Synthetic oligonucleotide
  Antisense strand to SEQ ID NO: 795610
accaucacaguguuuaaca

SEQ ID NO: 795612 - RNA, 19 nt, Artificial Sequence
  Description of Artificial Sequence: Synthetic oligonucleotide
  Sense strand starting at position 3373 of SEQ ID NO: 587484
gucucuguuggagggaauu

SEQ ID NO: 795613 - RNA, 19 nt, Artificial Sequence
  Description of Artificial Sequence: Synthetic oligonucleotide
  Antisense strand to SEQ ID NO: 795612
aauucccuccaacagagac

SEQ ID NO: 795614 - RNA, 19 nt, Artificial Sequence
  Description of Artificial Sequence: Synthetic oligonucleotide
  Sense strand starting at position 3385 of SEQ ID NO: 587484
gggaauugguaucugcaua

SEQ ID NO: 795615 - RNA, 19 nt, Artificial Sequence
  Description of Artificial Sequence: Synthetic oligonucleotide
  Antisense strand to SEQ ID NO: 795614
uaugcagauaccaauuccc

SEQ ID NO: 795616 - RNA, 19 nt, Artificial Sequence
  Description of Artificial Sequence: Synthetic oligonucleotide
  Sense strand starting at position 3386 of SEQ ID NO: 587484
ggaauugguaucugcauaa

SEQ ID NO: 795617 - RNA, 19 nt, Artificial Sequence
  Description of Artificial Sequence: Synthetic oligonucleotide
  Antisense strand to SEQ ID NO: 795616
uuaugcagauaccaauucc

SEQ ID NO: 795618 - RNA, 19 nt, Artificial Sequence
  Description of Artificial Sequence: Synthetic oligonucleotide
  Sense strand starting at position 3390 of SEQ ID NO: 587484
uugguaucugcauaauuaa

SEQ ID NO: 795619 - RNA, 19 nt, Artificial Sequence
  Description of Artificial Sequence: Synthetic oligonucleotide
  Antisense strand to SEQ ID NO: 795618
uuaauuaugcagauaccaa

SEQ ID NO: 795620 - RNA, 19 nt, Artificial Sequence
  Description of Artificial Sequence: Synthetic oligonucleotide
  Sense strand starting at position 3465 of SEQ ID NO: 587484
gcuagagugagugaucaug

SEQ ID NO: 795621 - RNA, 19 nt, Artificial Sequence
  Description of Artificial Sequence: Synthetic oligonucleotide
  Antisense strand to SEQ ID NO: 795620
caugaucacucacucuagc

SEQ ID NO: 795622 - RNA, 19 nt, Artificial Sequence
  Description of Artificial Sequence: Synthetic oligonucleotide
  Sense strand starting at position 3728 of SEQ ID NO: 587484
uuaugaacaauguggguua

SEQ ID NO: 795623 - RNA, 19 nt, Artificial Sequence
  Description of Artificial Sequence: Synthetic oligonucleotide
  Antisense strand to SEQ ID NO: 795622
uaacccacauuguucauaa

SEQ ID NO: 795624 - RNA, 19 nt, Artificial Sequence
  Description of Artificial Sequence: Synthetic oligonucleotide
  Sense strand starting at position 3731 of SEQ ID NO: 587484
ugaacaauguggguuaguu

SEQ ID NO: 795625 - RNA, 19 nt, Artificial Sequence
  Description of Artificial Sequence: Synthetic oligonucleotide
  Antisense strand to SEQ ID NO: 795624
aacuaacccacauuguuca

SEQ ID NO: 795626 - RNA, 19 nt, Artificial Sequence
  Description of Artificial Sequence: Synthetic oligonucleotide
  Sense strand starting at position 3733 of SEQ ID NO: 587484
aacaauguggguuaguuau

SEQ ID NO: 795627 - RNA, 19 nt, Artificial Sequence
  Description of Artificial Sequence: Synthetic oligonucleotide
  Antisense strand to SEQ ID NO: 795626
auaacuaacccacauuguu

SEQ ID NO: 795628 - RNA, 19 nt, Artificial Sequence
  Description of Artificial Sequence: Synthetic oligonucleotide
  Sense strand starting at position 3741 of SEQ ID NO: 587484
ggguuaguuauguauuagu

SEQ ID NO: 795629 - RNA, 19 nt, Artificial Sequence
  Description of Artificial Sequence: Synthetic oligonucleotide
  Antisense strand to SEQ ID NO: 795628
acuaauacauaacuaaccc

SEQ ID NO: 795630 - RNA, 19 nt, Artificial Sequence
  Description of Artificial Sequence: Synthetic oligonucleotide
  Sense strand starting at position 3766 of SEQ ID NO: 587484
gcuacauaccuguagagac

SEQ ID NO: 795631 - RNA, 19 nt, Artificial Sequence
  Description of Artificial Sequence: Synthetic oligonucleotide
  Antisense strand to SEQ ID NO: 795630
gucucuacagguauguagc

SEQ ID NO: 795632 - RNA, 19 nt, Artificial Sequence
  Description of Artificial Sequence: Synthetic oligonucleotide
  Sense strand starting at position 3943 of SEQ ID NO: 587484
aaagcugugguagauugaa

SEQ ID NO: 795633 - RNA, 19 nt, Artificial Sequence
  Description of Artificial Sequence: Synthetic oligonucleotide
  Antisense strand to SEQ ID NO: 795632
uucaaucuaccacagcuuu

SEQ ID NO: 795634 - RNA, 19 nt, Artificial Sequence
  Description of Artificial Sequence: Synthetic oligonucleotide
  Sense strand starting at position 2 of SEQ ID NO: 587485
agcuuagccgaagagugaa

SEQ ID NO: 795635 - RNA, 19 nt, Artificial Sequence
  Description of Artificial Sequence: Synthetic oligonucleotide
  Antisense strand to SEQ ID NO: 795634
uucacucuucggcuaagcu

SEQ ID NO: 795636 - RNA, 19 nt, Artificial Sequence
  Description of Artificial Sequence: Synthetic oligonucleotide
  Sense strand starting at position 16 of SEQ ID NO: 587485
gugaauagaucugcucaug

SEQ ID NO: 795637 - RNA, 19 nt, Artificial Sequence
  Description of Artificial Sequence: Synthetic oligonucleotide
  Antisense strand to SEQ ID NO: 795636
caugagcagaucuauucac

SEQ ID NO: 795638 - RNA, 19 nt, Artificial Sequence
  Description of Artificial Sequence: Synthetic oligonucleotide
  Sense strand starting at position 114 of SEQ ID NO: 587485
ccugcaucugcccagauga

SEQ ID NO: 795639 - RNA, 19 nt, Artificial Sequence
  Description of Artificial Sequence: Synthetic oligonucleotide
  Antisense strand to SEQ ID NO: 795638
ucaucugggcagaugcagg

SEQ ID NO: 795640 - RNA, 19 nt, Artificial Sequence
  Description of Artificial Sequence: Synthetic oligonucleotide
  Sense strand starting at position 116 of SEQ ID NO: 587485
ugcaucugcccagaugaca

SEQ ID NO: 795641 - RNA, 19 nt, Artificial Sequence
  Description of Artificial Sequence: Synthetic oligonucleotide
  Antisense strand to SEQ ID NO: 795640
ugucaucugggcagaugca

SEQ ID NO: 795642 - RNA, 19 nt, Artificial Sequence
  Description of Artificial Sequence: Synthetic oligonucleotide
  Sense strand starting at position 195 of SEQ ID NO: 587485
ucaucugacucagugacau

SEQ ID NO: 795643 - RNA, 19 nt, Artificial Sequence
  Description of Artificial Sequence: Synthetic oligonucleotide
  Antisense strand to SEQ ID NO: 795642
augucacugagucagauga

SEQ ID NO: 795644 - RNA, 19 nt, Artificial Sequence
  Description of Artificial Sequence: Synthetic oligonucleotide
  Sense strand starting at position 1152 of SEQ ID NO: 587485
uuaagcuuuagguggacau

SEQ ID NO: 795645 - RNA, 19 nt, Artificial Sequence
  Description of Artificial Sequence: Synthetic oligonucleotide
  Antisense strand to SEQ ID NO: 795644
auguccaccuaaagcuuaa

SEQ ID NO: 795646 - RNA, 19 nt, Artificial Sequence
  Description of Artificial Sequence: Synthetic oligonucleotide
  Sense strand starting at position 1176 of SEQ ID NO: 587485
ugaauacuguuaucacaug

SEQ ID NO: 795647 - RNA, 19 nt, Artificial Sequence
  Description of Artificial Sequence: Synthetic oligonucleotide
  Antisense strand to SEQ ID NO: 795646
caugugauaacaguauuca

SEQ ID NO: 795648 - RNA, 19 nt, Artificial Sequence
  Description of Artificial Sequence: Synthetic oligonucleotide
  Sense strand starting at position 1487 of SEQ ID NO: 587485
ugaagagaauggcucuuua

SEQ ID NO: 795649 - RNA, 19 nt, Artificial Sequence
  Description of Artificial Sequence: Synthetic oligonucleotide
  Antisense strand to SEQ ID NO: 795648
uaaagagccauucucuuca

SEQ ID NO: 795650 - RNA, 19 nt, Artificial Sequence
  Description of Artificial Sequence: Synthetic oligonucleotide
  Sense strand starting at position 1546 of SEQ ID NO: 587485
ggccaaucucagggacauc

SEQ ID NO: 795651 - RNA, 19 nt, Artificial Sequence
  Description of Artificial Sequence: Synthetic oligonucleotide
  Antisense strand to SEQ ID NO: 795650
gaugucccugagauuggcc

SEQ ID NO: 795652 - RNA, 19 nt, Artificial Sequence
  Description of Artificial Sequence: Synthetic oligonucleotide
  Sense strand starting at position 1764 of SEQ ID NO: 587485
guaguuaaaucuucuggaa

SEQ ID NO: 795653 - RNA, 19 nt, Artificial Sequence
  Description of Artificial Sequence: Synthetic oligonucleotide
  Antisense strand to SEQ ID NO: 795652
uuccagaagauuuaacuac

SEQ ID NO: 795654 - RNA, 19 nt, Artificial Sequence
  Description of Artificial Sequence: Synthetic oligonucleotide
  Sense strand starting at position 1799 of SEQ ID NO: 587485
agaaguccagucuguugaa

SEQ ID NO: 795655 - RNA, 19 nt, Artificial Sequence
  Description of Artificial Sequence: Synthetic oligonucleotide
  Antisense strand to SEQ ID NO: 795654
uucaacagacuggacuucu

SEQ ID NO: 795656 - RNA, 19 nt, Artificial Sequence
  Description of Artificial Sequence: Synthetic oligonucleotide
  Sense strand starting at position 1800 of SEQ ID NO: 587485
gaaguccagucuguugaaa

SEQ ID NO: 795657 - RNA, 19 nt, Artificial Sequence
  Description of Artificial Sequence: Synthetic oligonucleotide
  Antisense strand to SEQ ID NO: 795656
uuucaacagacuggacuuc

SEQ ID NO: 795658 - RNA, 19 nt, Artificial Sequence
  Description of Artificial Sequence: Synthetic oligonucleotide
  Sense strand starting at position 1903 of SEQ ID NO: 587485
guaagaaugagccaguuag

SEQ ID NO: 795659 - RNA, 19 nt, Artificial Sequence
  Description of Artificial Sequence: Synthetic oligonucleotide
  Antisense strand to SEQ ID NO: 795658
cuaacuggcucauucuuac

SEQ ID NO: 795660 - RNA, 19 nt, Artificial Sequence
  Description of Artificial Sequence: Synthetic oligonucleotide
  Sense strand starting at position 2099 of SEQ ID NO: 587485
uugggaccuugcuuauaau

SEQ ID NO: 795661 - RNA, 19 nt, Artificial Sequence
  Description of Artificial Sequence: Synthetic oligonucleotide
  Antisense strand to SEQ ID NO: 795660
auuauaagcaaggucccaa

SEQ ID NO: 795662 - RNA, 19 nt, Artificial Sequence
  Description of Artificial Sequence: Synthetic oligonucleotide
  Sense strand starting at position 2100 of SEQ ID NO: 587485
ugggaccuugcuuauaauu

SEQ ID NO: 795663 - RNA, 19 nt, Artificial Sequence
  Description of Artificial Sequence: Synthetic oligonucleotide
  Antisense strand to SEQ ID NO: 795662
aauuauaagcaagguccca

SEQ ID NO: 795664 - RNA, 19 nt, Artificial Sequence
  Description of Artificial Sequence: Synthetic oligonucleotide
  Sense strand starting at position 2121 of SEQ ID NO: 587485
uccacauauuagucuggaa

SEQ ID NO: 795665 - RNA, 19 nt, Artificial Sequence
  Description of Artificial Sequence: Synthetic oligonucleotide
  Antisense strand to SEQ ID NO: 795664
uuccagacuaauaugugga

SEQ ID NO: 795666 - RNA, 19 nt, Artificial Sequence
  Description of Artificial Sequence: Synthetic oligonucleotide
  Sense strand starting at position 2148 of SEQ ID NO: 587485
aguaauugcuuauuaagga

SEQ ID NO: 795667 - RNA, 19 nt, Artificial Sequence
  Description of Artificial Sequence: Synthetic oligonucleotide
  Antisense strand to SEQ ID NO: 795666
uccuuaauaagcaauuacu

SEQ ID NO: 795668 - RNA, 19 nt, Artificial Sequence
  Description of Artificial Sequence: Synthetic oligonucleotide
  Sense strand starting at position 2218 of SEQ ID NO: 587485
uaacguacuccugggagga

SEQ ID NO: 795669 - RNA, 19 nt, Artificial Sequence
  Description of Artificial Sequence: Synthetic oligonucleotide
  Antisense strand to SEQ ID NO: 795668
uccucccaggaguacguua

SEQ ID NO: 795670 - RNA, 19 nt, Artificial Sequence
  Description of Artificial Sequence: Synthetic oligonucleotide
  Sense strand starting at position 2222 of SEQ ID NO: 587485
guacuccugggaggagaau

SEQ ID NO: 795671 - RNA, 19 nt, Artificial Sequence
  Description of Artificial Sequence: Synthetic oligonucleotide
  Antisense strand to SEQ ID NO: 795670
auucuccucccaggaguac

SEQ ID NO: 795672 - RNA, 19 nt, Artificial Sequence
  Description of Artificial Sequence: Synthetic oligonucleotide
  Sense strand starting at position 2298 of SEQ ID NO: 587485
cacugugaucaucagaagu

SEQ ID NO: 795673 - RNA, 19 nt, Artificial Sequence
  Description of Artificial Sequence: Synthetic oligonucleotide
  Antisense strand to SEQ ID NO: 795672
acuucugaugaucacagug

SEQ ID NO: 795674 - RNA, 19 nt, Artificial Sequence
  Description of Artificial Sequence: Synthetic oligonucleotide
  Sense strand starting at position 2414 of SEQ ID NO: 587485
cuggguggucuugggaaua

SEQ ID NO: 795675 - RNA, 19 nt, Artificial Sequence
  Description of Artificial Sequence: Synthetic oligonucleotide
  Antisense strand to SEQ ID NO: 795674
uauucccaagaccacccag

SEQ ID NO: 795676 - RNA, 19 nt, Artificial Sequence
  Description of Artificial Sequence: Synthetic oligonucleotide
  Sense strand starting at position 2419 of SEQ ID NO: 587485
uggucuugggaauaucagu

SEQ ID NO: 795677 - RNA, 19 nt, Artificial Sequence
  Description of Artificial Sequence: Synthetic oligonucleotide
  Antisense strand to SEQ ID NO: 795676
acugauauucccaagacca

SEQ ID NO: 795678 - RNA, 19 nt, Artificial Sequence
  Description of Artificial Sequence: Synthetic oligonucleotide
  Sense strand starting at position 2467 of SEQ ID NO: 587485
gggacuagauguucacuga

SEQ ID NO: 795679 - RNA, 19 nt, Artificial Sequence
  Description of Artificial Sequence: Synthetic oligonucleotide
  Antisense strand to SEQ ID NO: 795678
ucagugaacaucuaguccc

SEQ ID NO: 795680 - RNA, 19 nt, Artificial Sequence
  Description of Artificial Sequence: Synthetic oligonucleotide
  Sense strand starting at position 2487 of SEQ ID NO: 587485
gucccugacggucauagaa

SEQ ID NO: 795681 - RNA, 19 nt, Artificial Sequence
  Description of Artificial Sequence: Synthetic oligonucleotide
  Antisense strand to SEQ ID NO: 795680
uucuaugaccgucagggac

SEQ ID NO: 795682 - RNA, 19 nt, Artificial Sequence
  Description of Artificial Sequence: Synthetic oligonucleotide
  Sense strand starting at position 2512 of SEQ ID NO: 587485
ucauauugccuguauccua

SEQ ID NO: 795683 - RNA, 19 nt, Artificial Sequence
  Description of Artificial Sequence: Synthetic oligonucleotide
  Antisense strand to SEQ ID NO: 795682
uaggauacaggcaauauga

SEQ ID NO: 795684 - RNA, 19 nt, Artificial Sequence
  Description of Artificial Sequence: Synthetic oligonucleotide
  Sense strand starting at position 2678 of SEQ ID NO: 587485
cgcuuccaggacugaaauu

SEQ ID NO: 795685 - RNA, 19 nt, Artificial Sequence
  Description of Artificial Sequence: Synthetic oligonucleotide
  Antisense strand to SEQ ID NO: 795684
aauuucaguccuggaagcg

SEQ ID NO: 795686 - RNA, 19 nt, Artificial Sequence
  Description of Artificial Sequence: Synthetic oligonucleotide
  Sense strand starting at position 2781 of SEQ ID NO: 587485
uugagaugggcaugucaau

SEQ ID NO: 795687 - RNA, 19 nt, Artificial Sequence
  Description of Artificial Sequence: Synthetic oligonucleotide
  Antisense strand to SEQ ID NO: 795686
auugacaugcccaucucaa

SEQ ID NO: 795688 - RNA, 19 nt, Artificial Sequence
  Description of Artificial Sequence: Synthetic oligonucleotide
  Sense strand starting at position 2821 of SEQ ID NO: 587485
acauaaucucauugaacga

SEQ ID NO: 795689 - RNA, 19 nt, Artificial Sequence
  Description of Artificial Sequence: Synthetic oligonucleotide
  Antisense strand to SEQ ID NO: 795688
ucguucaaugagauuaugu

SEQ ID NO: 795690 - RNA, 19 nt, Artificial Sequence
  Description of Artificial Sequence: Synthetic oligonucleotide
  Sense strand starting at position 2887 of SEQ ID NO: 587485
aacucugaugguuggcuaa

SEQ ID NO: 795691 - RNA, 19 nt, Artificial Sequence
  Description of Artificial Sequence: Synthetic oligonucleotide
  Antisense strand to SEQ ID NO: 795690
uuagccaaccaucagaguu

SEQ ID NO: 795692 - RNA, 19 nt, Artificial Sequence
  Description of Artificial Sequence: Synthetic oligonucleotide
  Sense strand starting at position 2889 of SEQ ID NO: 587485
cucugaugguuggcuaaau

SEQ ID NO: 795693 - RNA, 19 nt, Artificial Sequence
  Description of Artificial Sequence: Synthetic oligonucleotide
  Antisense strand to SEQ ID NO: 795692
auuuagccaaccaucagag

SEQ ID NO: 795694 - RNA, 19 nt, Artificial Sequence
  Description of Artificial Sequence: Synthetic oligonucleotide
  Sense strand starting at position 2890 of SEQ ID NO: 587485
ucugaugguuggcuaaaua

SEQ ID NO: 795695 - RNA, 19 nt, Artificial Sequence
  Description of Artificial Sequence: Synthetic oligonucleotide
  Antisense strand to SEQ ID NO: 795694
uauuuagccaaccaucaga

SEQ ID NO: 795696 - RNA, 19 nt, Artificial Sequence
  Description of Artificial Sequence: Synthetic oligonucleotide
  Sense strand starting at position 2992 of SEQ ID NO: 587485
cgcuaucaggaagggauaa

SEQ ID NO: 795697 - RNA, 19 nt, Artificial Sequence
  Description of Artificial Sequence: Synthetic oligonucleotide
  Antisense strand to SEQ ID NO: 795696
uuaucccuuccugauagcg

SEQ ID NO: 795698 - RNA, 19 nt, Artificial Sequence
  Description of Artificial Sequence: Synthetic oligonucleotide
  Sense strand starting at position 3035 of SEQ ID NO: 587485
augggaugcucaccucuuu

SEQ ID NO: 795699 - RNA, 19 nt, Artificial Sequence
  Description of Artificial Sequence: Synthetic oligonucleotide
  Antisense strand to SEQ ID NO: 795698
aaagaggugagcaucccau

SEQ ID NO: 795700 - RNA, 19 nt, Artificial Sequence
  Description of Artificial Sequence: Synthetic oligonucleotide
  Sense strand starting at position 3054 of SEQ ID NO: 587485
aguacuuccuuugugaaca

SEQ ID NO: 795701 - RNA, 19 nt, Artificial Sequence
  Description of Artificial Sequence: Synthetic oligonucleotide
  Antisense strand to SEQ ID NO: 795700
uguucacaaaggaaguacu

SEQ ID NO: 795702 - RNA, 19 nt, Artificial Sequence
  Description of Artificial Sequence: Synthetic oligonucleotide
  Sense strand starting at position 3059 of SEQ ID NO: 587485
uuccuuugugaacauagau

SEQ ID NO: 795703 - RNA, 19 nt, Artificial Sequence
  Description of Artificial Sequence: Synthetic oligonucleotide
  Antisense strand to SEQ ID NO: 795702
aucuauguucacaaaggaa

SEQ ID NO: 795704 - RNA, 19 nt, Artificial Sequence
  Description of Artificial Sequence: Synthetic oligonucleotide
  Sense strand starting at position 3238 of SEQ ID NO: 587485
ugcuuaauuucugcagugu

SEQ ID NO: 795705 - RNA, 19 nt, Artificial Sequence
  Description of Artificial Sequence: Synthetic oligonucleotide
  Antisense strand to SEQ ID NO: 795704
acacugcagaaauuaagca

SEQ ID NO: 795706 - RNA, 19 nt, Artificial Sequence
  Description of Artificial Sequence: Synthetic oligonucleotide
  Sense strand starting at position 3239 of SEQ ID NO: 587485
gcuuaauuucugcagugua

SEQ ID NO: 795707 - RNA, 19 nt, Artificial Sequence
  Description of Artificial Sequence: Synthetic oligonucleotide
  Antisense strand to SEQ ID NO: 795706
uacacugcagaaauuaagc

SEQ ID NO: 795708 - RNA, 19 nt, Artificial Sequence
  Description of Artificial Sequence: Synthetic oligonucleotide
  Sense strand starting at position 3293 of SEQ ID NO: 587485
acucuaaaucuuugagagc

SEQ ID NO: 795709 - RNA, 19 nt, Artificial Sequence
  Description of Artificial Sequence: Synthetic oligonucleotide
  Antisense strand to SEQ ID NO: 795708
gcucucaaagauuuagagu

SEQ ID NO: 795710 - RNA, 19 nt, Artificial Sequence
  Description of Artificial Sequence: Synthetic oligonucleotide
  Sense strand starting at position 3676 of SEQ ID NO: 587485
gaaauuaggcuuugacaga

SEQ ID NO: 795711 - RNA, 19 nt, Artificial Sequence
  Description of Artificial Sequence: Synthetic oligonucleotide
  Antisense strand to SEQ ID NO: 795710
ucugucaaagccuaauuuc

SEQ ID NO: 795712 - RNA, 19 nt, Artificial Sequence
  Description of Artificial Sequence: Synthetic oligonucleotide
  Sense strand starting at position 3687 of SEQ ID NO: 587485
uugacagacugaguuacau

SEQ ID NO: 795713 - RNA, 19 nt, Artificial Sequence
  Description of Artificial Sequence: Synthetic oligonucleotide
  Antisense strand to SEQ ID NO: 795712
auguaacucagucugucaa

SEQ ID NO: 795714 - RNA, 19 nt, Artificial Sequence
  Description of Artificial Sequence: Synthetic oligonucleotide
  Sense strand starting at position 254 of SEQ ID NO: 587486
ggugucucacaaugcuaga

SEQ ID NO: 795715 - RNA, 19 nt, Artificial Sequence
  Description of Artificial Sequence: Synthetic oligonucleotide
  Antisense strand to SEQ ID NO: 795714
ucuagcauugugagacacc

SEQ ID NO: 795716 - RNA, 19 nt, Artificial Sequence
  Description of Artificial Sequence: Synthetic oligonucleotide
  Sense strand starting at position 267 of SEQ ID NO: 587486
gcuagaauuugggaaacuc

SEQ ID NO: 795717 - RNA, 19 nt, Artificial Sequence
  Description of Artificial Sequence: Synthetic oligonucleotide
  Antisense strand to SEQ ID NO: 795716
gaguuucccaaauucuagc

SEQ ID NO: 795718 - RNA, 19 nt, Artificial Sequence
  Description of Artificial Sequence: Synthetic oligonucleotide
  Sense strand starting at position 563 of SEQ ID NO: 587486
ccaagacguuggucucaaa

SEQ ID NO: 795719 - RNA, 19 nt, Artificial Sequence
  Description of Artificial Sequence: Synthetic oligonucleotide
  Antisense strand to SEQ ID NO: 795718
uuugagaccaacgucuugg

SEQ ID NO: 795720 - RNA, 19 nt, Artificial Sequence
  Description of Artificial Sequence: Synthetic oligonucleotide
  Sense strand starting at position 625 of SEQ ID NO: 587486
cauggacugucuguuguau

SEQ ID NO: 795721 - RNA, 19 nt, Artificial Sequence
  Description of Artificial Sequence: Synthetic oligonucleotide
  Antisense strand to SEQ ID NO: 795720
auacaacagacaguccaug

SEQ ID NO: 795722 - RNA, 19 nt, Artificial Sequence
  Description of Artificial Sequence: Synthetic oligonucleotide
  Sense strand starting at position 738 of SEQ ID NO: 587486
uuccuaaaguguucuuuaa

SEQ ID NO: 795723 - RNA, 19 nt, Artificial Sequence
  Description of Artificial Sequence: Synthetic oligonucleotide
  Antisense strand to SEQ ID NO: 795722
uuaaagaacacuuuaggaa

SEQ ID NO: 795724 - RNA, 19 nt, Artificial Sequence
  Description of Artificial Sequence: Synthetic oligonucleotide
  Sense strand starting at position 740 of SEQ ID NO: 587486
ccuaaaguguucuuuaaga

SEQ ID NO: 795725 - RNA, 19 nt, Artificial Sequence
  Description of Artificial Sequence: Synthetic oligonucleotide
  Antisense strand to SEQ ID NO: 795724
ucuuaaagaacacuuuagg

SEQ ID NO: 795726 - RNA, 19 nt, Artificial Sequence
  Description of Artificial Sequence: Synthetic oligonucleotide
  Sense strand starting at position 1182 of SEQ ID NO: 587486
ucaguaaaucuugagcucu

SEQ ID NO: 795727 - RNA, 19 nt, Artificial Sequence
  Description of Artificial Sequence: Synthetic oligonucleotide
  Antisense strand to SEQ ID NO: 795726
agagcucaagauuuacuga

SEQ ID NO: 795728 - RNA, 19 nt, Artificial Sequence
  Description of Artificial Sequence: Synthetic oligonucleotide
  Sense strand starting at position 1184 of SEQ ID NO: 587486
aguaaaucuugagcucuua

SEQ ID NO: 795729 - RNA, 19 nt, Artificial Sequence
  Description of Artificial Sequence: Synthetic oligonucleotide
  Antisense strand to SEQ ID NO: 795728
uaagagcucaagauuuacu

SEQ ID NO: 795730 - RNA, 19 nt, Artificial Sequence
  Description of Artificial Sequence: Synthetic oligonucleotide
  Sense strand starting at position 1328 of SEQ ID NO: 587486
gcaucaugauugcucaaag

SEQ ID NO: 795731 - RNA, 19 nt, Artificial Sequence
  Description of Artificial Sequence: Synthetic oligonucleotide
  Antisense strand to SEQ ID NO: 795730
cuuugagcaaucaugaugc

SEQ ID NO: 795732 - RNA, 19 nt, Artificial Sequence
  Description of Artificial Sequence: Synthetic oligonucleotide
  Sense strand starting at position 1362 of SEQ ID NO: 587486
ggugcaugccgcagggauu

SEQ ID NO: 795733 - RNA, 19 nt, Artificial Sequence
  Description of Artificial Sequence: Synthetic oligonucleotide
  Antisense strand to SEQ ID NO: 795732
aaucccugcggcaugcacc

SEQ ID NO: 795734 - RNA, 19 nt, Artificial Sequence
  Description of Artificial Sequence: Synthetic oligonucleotide
  Sense strand starting at position 1468 of SEQ ID NO: 587486
gcuggacuuagacaugagu

SEQ ID NO: 795735 - RNA, 19 nt, Artificial Sequence
  Description of Artificial Sequence: Synthetic oligonucleotide
  Antisense strand to SEQ ID NO: 795734
acucaugucuaaguccagc

SEQ ID NO: 795736 - RNA, 19 nt, Artificial Sequence
  Description of Artificial Sequence: Synthetic oligonucleotide
  Sense strand starting at position 1582 of SEQ ID NO: 587486
ucaccagggcgucaaagau

SEQ ID NO: 795737 - RNA, 19 nt, Artificial Sequence
  Description of Artificial Sequence: Synthetic oligonucleotide
  Antisense strand to SEQ ID NO: 795736
aucuuugacgcccugguga

SEQ ID NO: 795738 - RNA, 19 nt, Artificial Sequence
  Description of Artificial Sequence: Synthetic oligonucleotide
  Sense strand starting at position 2152 of SEQ ID NO: 587486
ugggaagcauuaccguauu

SEQ ID NO: 795739 - RNA, 19 nt, Artificial Sequence
  Description of Artificial Sequence: Synthetic oligonucleotide
  Antisense strand to SEQ ID NO: 795738
aauacgguaaugcuuccca

SEQ ID NO: 795740 - RNA, 19 nt, Artificial Sequence
  Description of Artificial Sequence: Synthetic oligonucleotide
  Sense strand starting at position 2216 of SEQ ID NO: 587486
guaugagaauguucccuug

SEQ ID NO: 795741 - RNA, 19 nt, Artificial Sequence
  Description of Artificial Sequence: Synthetic oligonucleotide
  Antisense strand to SEQ ID NO: 795740
caagggaacauucucauac

SEQ ID NO: 795742 - RNA, 19 nt, Artificial Sequence
  Description of Artificial Sequence: Synthetic oligonucleotide
  Sense strand starting at position 2218 of SEQ ID NO: 587486
augagaauguucccuugga

SEQ ID NO: 795743 - RNA, 19 nt, Artificial Sequence
  Description of Artificial Sequence: Synthetic oligonucleotide
  Antisense strand to SEQ ID NO: 795742
uccaagggaacauucucau

SEQ ID NO: 795744 - RNA, 19 nt, Artificial Sequence
  Description of Artificial Sequence: Synthetic oligonucleotide
  Sense strand starting at position 2219 of SEQ ID NO: 587486
ugagaauguucccuuggaa

SEQ ID NO: 795745 - RNA, 19 nt, Artificial Sequence
  Description of Artificial Sequence: Synthetic oligonucleotide
  Antisense strand to SEQ ID NO: 795744
uuccaagggaacauucuca

SEQ ID NO: 795746 - RNA, 19 nt, Artificial Sequence
  Description of Artificial Sequence: Synthetic oligonucleotide
  Sense strand starting at position 2222 of SEQ ID NO: 587486
gaauguucccuuggaaaug

SEQ ID NO: 795747 - RNA, 19 nt, Artificial Sequence
  Description of Artificial Sequence: Synthetic oligonucleotide
  Antisense strand to SEQ ID NO: 795746
cauuuccaagggaacauuc

SEQ ID NO: 795748 - RNA, 19 nt, Artificial Sequence
  Description of Artificial Sequence: Synthetic oligonucleotide
  Sense strand starting at position 2318 of SEQ ID NO: 587486
ugaggucugaaagguauga

SEQ ID NO: 795749 - RNA, 19 nt, Artificial Sequence
  Description of Artificial Sequence: Synthetic oligonucleotide
  Antisense strand to SEQ ID NO: 795748
ucauaccuuucagaccuca

SEQ ID NO: 795750 - RNA, 19 nt, Artificial Sequence
  Description of Artificial Sequence: Synthetic oligonucleotide
  Sense strand starting at position 2322 of SEQ ID NO: 587486
gucugaaagguaugaauaa

SEQ ID NO: 795751 - RNA, 19 nt, Artificial Sequence
  Description of Artificial Sequence: Synthetic oligonucleotide
  Antisense strand to SEQ ID NO: 795750
uuauucauaccuuucagac

SEQ ID NO: 795752 - RNA, 19 nt, Artificial Sequence
  Description of Artificial Sequence: Synthetic oligonucleotide
  Sense strand starting at position 2337 of SEQ ID NO: 587486
auaacuuggauacgguaaa

SEQ ID NO: 795753 - RNA, 19 nt, Artificial Sequence
  Description of Artificial Sequence: Synthetic oligonucleotide
  Antisense strand to SEQ ID NO: 795752
uuuaccguauccaaguuau

SEQ ID NO: 795754 - RNA, 19 nt, Artificial Sequence
  Description of Artificial Sequence: Synthetic oligonucleotide
  Sense strand starting at position 2348 of SEQ ID NO: 587486
acgguaaauuuguacagga

SEQ ID NO: 795755 - RNA, 19 nt, Artificial Sequence
  Description of Artificial Sequence: Synthetic oligonucleotide
  Antisense strand to SEQ ID NO: 795754
uccuguacaaauuuaccgu

SEQ ID NO: 795756 - RNA, 19 nt, Artificial Sequence
  Description of Artificial Sequence: Synthetic oligonucleotide
  Sense strand starting at position 2361 of SEQ ID NO: 587486
acaggauuauguuugcuuu

SEQ ID NO: 795757 - RNA, 19 nt, Artificial Sequence
  Description of Artificial Sequence: Synthetic oligonucleotide
  Antisense strand to SEQ ID NO: 795756
aaagcaaacauaauccugu

SEQ ID NO: 795758 - RNA, 19 nt, Artificial Sequence
  Description of Artificial Sequence: Synthetic oligonucleotide
  Sense strand starting at position 2600 of SEQ ID NO: 587486
agugaaauguguucauugu

SEQ ID NO: 795759 - RNA, 19 nt, Artificial Sequence
  Description of Artificial Sequence: Synthetic oligonucleotide
  Antisense strand to SEQ ID NO: 795758
acaaugaacacauuucacu

SEQ ID NO: 795760 - RNA, 19 nt, Artificial Sequence
  Description of Artificial Sequence: Synthetic oligonucleotide
  Sense strand starting at position 2601 of SEQ ID NO: 587486
gugaaauguguucauuguu

SEQ ID NO: 795761 - RNA, 19 nt, Artificial Sequence
  Description of Artificial Sequence: Synthetic oligonucleotide
  Antisense strand to SEQ ID NO: 795760
aacaaugaacacauuucac

SEQ ID NO: 795762 - RNA, 19 nt, Artificial Sequence
  Description of Artificial Sequence: Synthetic oligonucleotide
  Sense strand starting at position 2707 of SEQ ID NO: 587486
aauauuuacugggcgucua

SEQ ID NO: 795763 - RNA, 19 nt, Artificial Sequence
  Description of Artificial Sequence: Synthetic oligonucleotide
  Antisense strand to SEQ ID NO: 795762
uagacgcccaguaaauauu

SEQ ID NO: 795764 - RNA, 19 nt, Artificial Sequence
  Description of Artificial Sequence: Synthetic oligonucleotide
  Sense strand starting at position 2708 of SEQ ID NO: 587486
auauuuacugggcgucuau

SEQ ID NO: 795765 - RNA, 19 nt, Artificial Sequence
  Description of Artificial Sequence: Synthetic oligonucleotide
  Antisense strand to SEQ ID NO: 795764
auagacgcccaguaaauau

SEQ ID NO: 795766 - RNA, 19 nt, Artificial Sequence
  Description of Artificial Sequence: Synthetic oligonucleotide
  Sense strand starting at position 2725 of SEQ ID NO: 587486
auuauaugccagggacacu

SEQ ID NO: 795767 - RNA, 19 nt, Artificial Sequence
  Description of Artificial Sequence: Synthetic oligonucleotide
  Antisense strand to SEQ ID NO: 795766
agugucccuggcauauaau

SEQ ID NO: 795768 - RNA, 19 nt, Artificial Sequence
  Description of Artificial Sequence: Synthetic oligonucleotide
  Sense strand starting at position 2797 of SEQ ID NO: 587486
uggccuacucccuaaauga

SEQ ID NO: 795769 - RNA, 19 nt, Artificial Sequence
  Description of Artificial Sequence: Synthetic oligonucleotide
  Antisense strand to SEQ ID NO: 795768
ucauuuagggaguaggcca

SEQ ID NO: 795770 - RNA, 19 nt, Artificial Sequence
  Description of Artificial Sequence: Synthetic oligonucleotide
  Sense strand starting at position 2920 of SEQ ID NO: 587486
acucuucucugacuggaca

SEQ ID NO: 795771 - RNA, 19 nt, Artificial Sequence
  Description of Artificial Sequence: Synthetic oligonucleotide
  Antisense strand to SEQ ID NO: 795770
uguccagucagagaagagu

SEQ ID NO: 795772 - RNA, 19 nt, Artificial Sequence
  Description of Artificial Sequence: Synthetic oligonucleotide
  Sense strand starting at position 2948 of SEQ ID NO: 587486
cuggaugucccucagucau

SEQ ID NO: 795773 - RNA, 19 nt, Artificial Sequence
  Description of Artificial Sequence: Synthetic oligonucleotide
  Antisense strand to SEQ ID NO: 795772
augacugagggacauccag

SEQ ID NO: 795774 - RNA, 19 nt, Artificial Sequence
  Description of Artificial Sequence: Synthetic oligonucleotide
  Sense strand starting at position 3364 of SEQ ID NO: 587486
uaaggagcucauugguaua

SEQ ID NO: 795775 - RNA, 19 nt, Artificial Sequence
  Description of Artificial Sequence: Synthetic oligonucleotide
  Antisense strand to SEQ ID NO: 795774
uauaccaaugagcuccuua

SEQ ID NO: 795776 - RNA, 19 nt, Artificial Sequence
  Description of Artificial Sequence: Synthetic oligonucleotide
  Sense strand starting at position 3366 of SEQ ID NO: 587486
aggagcucauugguauaga

SEQ ID NO: 795777 - RNA, 19 nt, Artificial Sequence
  Description of Artificial Sequence: Synthetic oligonucleotide
  Antisense strand to SEQ ID NO: 795776
ucuauaccaaugagcuccu

SEQ ID NO: 795778 - RNA, 19 nt, Artificial Sequence
  Description of Artificial Sequence: Synthetic oligonucleotide
  Sense strand starting at position 3369 of SEQ ID NO: 587486
agcucauugguauagagca

SEQ ID NO: 795779 - RNA, 19 nt, Artificial Sequence
  Description of Artificial Sequence: Synthetic oligonucleotide
  Antisense strand to SEQ ID NO: 795778
ugcucuauaccaaugagcu

SEQ ID NO: 795780 - RNA, 19 nt, Artificial Sequence
  Description of Artificial Sequence: Synthetic oligonucleotide
  Sense strand starting at position 3383 of SEQ ID NO: 587486
gagcaagugcuguaacaga

SEQ ID NO: 795781 - RNA, 19 nt, Artificial Sequence
  Description of Artificial Sequence: Synthetic oligonucleotide
  Antisense strand to SEQ ID NO: 795780
ucuguuacagcacuugcuc

SEQ ID NO: 795782 - RNA, 19 nt, Artificial Sequence
  Description of Artificial Sequence: Synthetic oligonucleotide
  Sense strand starting at position 3606 of SEQ ID NO: 587486
uuguuauaggcagaaacua

SEQ ID NO: 795783 - RNA, 19 nt, Artificial Sequence
  Description of Artificial Sequence: Synthetic oligonucleotide
  Antisense strand to SEQ ID NO: 795782
uaguuucugccuauaacaa

SEQ ID NO: 795784 - RNA, 19 nt, Artificial Sequence
  Description of Artificial Sequence: Synthetic oligonucleotide
  Sense strand starting at position 3671 of SEQ ID NO: 587486
aagcuaagucuugggaagu

SEQ ID NO: 795785 - RNA, 19 nt, Artificial Sequence
  Description of Artificial Sequence: Synthetic oligonucleotide
  Antisense strand to SEQ ID NO: 795784
acuucccaagacuuagcuu

SEQ ID NO: 795786 - RNA, 19 nt, Artificial Sequence
  Description of Artificial Sequence: Synthetic oligonucleotide
  Sense strand starting at position 3903 of SEQ ID NO: 587486
agaguauaggcuugggaga

SEQ ID NO: 795787 - RNA, 19 nt, Artificial Sequence
  Description of Artificial Sequence: Synthetic oligonucleotide
  Antisense strand to SEQ ID NO: 795786
ucucccaagccuauacucu

SEQ ID NO: 795788 - RNA, 19 nt, Artificial Sequence
  Description of Artificial Sequence: Synthetic oligonucleotide
  Sense strand starting at position 3904 of SEQ ID NO: 587486
gaguauaggcuugggagaa

SEQ ID NO: 795789 - RNA, 19 nt, Artificial Sequence
  Description of Artificial Sequence: Synthetic oligonucleotide
  Antisense strand to SEQ ID NO: 795788
uucucccaagccuauacuc

SEQ ID NO: 795790 - RNA, 19 nt, Artificial Sequence
  Description of Artificial Sequence: Synthetic oligonucleotide
  Sense strand starting at position 3929 of SEQ ID NO: 587486
augcauuuagugugagguu

SEQ ID NO: 795791 - RNA, 19 nt, Artificial Sequence
  Description of Artificial Sequence: Synthetic oligonucleotide
  Antisense strand to SEQ ID NO: 795790
aaccucacacuaaaugcau

SEQ ID NO: 795792 - RNA, 19 nt, Artificial Sequence
  Description of Artificial Sequence: Synthetic oligonucleotide
  Sense strand starting at position 3944 of SEQ ID NO: 587486
gguuguuaaguuugaggua

SEQ ID NO: 795793 - RNA, 19 nt, Artificial Sequence
  Description of Artificial Sequence: Synthetic oligonucleotide
  Antisense strand to SEQ ID NO: 795792
uaccucaaacuuaacaacc

SEQ ID NO: 795794 - RNA, 19 nt, Artificial Sequence
  Description of Artificial Sequence: Synthetic oligonucleotide
  Sense strand starting at position 31 of SEQ ID NO: 587487
gugauuaucuguucuuuaa

SEQ ID NO: 795795 - RNA, 19 nt, Artificial Sequence
  Description of Artificial Sequence: Synthetic oligonucleotide
  Antisense strand to SEQ ID NO: 795794
uuaaagaacagauaaucac

SEQ ID NO: 795796 - RNA, 19 nt, Artificial Sequence
  Description of Artificial Sequence: Synthetic oligonucleotide
  Sense strand starting at position 162 of SEQ ID NO: 587487
agacauguuaugugauggu

SEQ ID NO: 795797 - RNA, 19 nt, Artificial Sequence
  Description of Artificial Sequence: Synthetic oligonucleotide
  Antisense strand to SEQ ID NO: 795796
accaucacauaacaugucu

SEQ ID NO: 795798 - RNA, 19 nt, Artificial Sequence
  Description of Artificial Sequence: Synthetic oligonucleotide
  Sense strand starting at position 166 of SEQ ID NO: 587487
auguuaugugauggugcua

SEQ ID NO: 795799 - RNA, 19 nt, Artificial Sequence
  Description of Artificial Sequence: Synthetic oligonucleotide
  Antisense strand to SEQ ID NO: 795798
uagcaccaucacauaacau

SEQ ID NO: 795800 - RNA, 19 nt, Artificial Sequence
  Description of Artificial Sequence: Synthetic oligonucleotide
  Sense strand starting at position 171 of SEQ ID NO: 587487
augugauggugcuauuugu

SEQ ID NO: 795801 - RNA, 19 nt, Artificial Sequence
  Description of Artificial Sequence: Synthetic oligonucleotide
  Antisense strand to SEQ ID NO: 795800
acaaauagcaccaucacau

SEQ ID NO: 795802 - RNA, 19 nt, Artificial Sequence
  Description of Artificial Sequence: Synthetic oligonucleotide
  Sense strand starting at position 175 of SEQ ID NO: 587487
gauggugcuauuuguuaga

SEQ ID NO: 795803 - RNA, 19 nt, Artificial Sequence
  Description of Artificial Sequence: Synthetic oligonucleotide
  Antisense strand to SEQ ID NO: 795802
ucuaacaaauagcaccauc

SEQ ID NO: 795804 - RNA, 19 nt, Artificial Sequence
  Description of Artificial Sequence: Synthetic oligonucleotide
  Sense strand starting at position 178 of SEQ ID NO: 587487
ggugcuauuuguuagagag

SEQ ID NO: 795805 - RNA, 19 nt, Artificial Sequence
  Description of Artificial Sequence: Synthetic oligonucleotide
  Antisense strand to SEQ ID NO: 795804
cucucuaacaaauagcacc

SEQ ID NO: 795806 - RNA, 19 nt, Artificial Sequence
  Description of Artificial Sequence: Synthetic oligonucleotide
  Sense strand starting at position 277 of SEQ ID NO: 587487
auaacagaaccauggcuua

SEQ ID NO: 795807 - RNA, 19 nt, Artificial Sequence
  Description of Artificial Sequence: Synthetic oligonucleotide
  Antisense strand to SEQ ID NO: 795806
uaagccaugguucuguuau

SEQ ID NO: 795808 - RNA, 19 nt, Artificial Sequence
  Description of Artificial Sequence: Synthetic oligonucleotide
  Sense strand starting at position 333 of SEQ ID NO: 587487
ugagauagaaggcgagauu

SEQ ID NO: 795809 - RNA, 19 nt, Artificial Sequence
  Description of Artificial Sequence: Synthetic oligonucleotide
  Antisense strand to SEQ ID NO: 795808
aaucucgccuucuaucuca

SEQ ID NO: 795810 - RNA, 19 nt, Artificial Sequence
  Description of Artificial Sequence: Synthetic oligonucleotide
  Sense strand starting at position 566 of SEQ ID NO: 587487
uccuuuaaucugcgugcaa

SEQ ID NO: 795811 - RNA, 19 nt, Artificial Sequence
  Description of Artificial Sequence: Synthetic oligonucleotide
  Antisense strand to SEQ ID NO: 795810
uugcacgcagauuaaagga

SEQ ID NO: 795812 - RNA, 19 nt, Artificial Sequence
  Description of Artificial Sequence: Synthetic oligonucleotide
  Sense strand starting at position 567 of SEQ ID NO: 587487
ccuuuaaucugcgugcaau

SEQ ID NO: 795813 - RNA, 19 nt, Artificial Sequence
  Description of Artificial Sequence: Synthetic oligonucleotide
  Antisense strand to SEQ ID NO: 795812
auugcacgcagauuaaagg

SEQ ID NO: 795814 - RNA, 19 nt, Artificial Sequence
  Description of Artificial Sequence: Synthetic oligonucleotide
  Sense strand starting at position 568 of SEQ ID NO: 587487
cuuuaaucugcgugcaauu

SEQ ID NO: 795815 - RNA, 19 nt, Artificial Sequence
  Description of Artificial Sequence: Synthetic oligonucleotide
  Antisense strand to SEQ ID NO: 795814
aauugcacgcagauuaaag

SEQ ID NO: 795816 - RNA, 19 nt, Artificial Sequence
  Description of Artificial Sequence: Synthetic oligonucleotide
  Sense strand starting at position 570 of SEQ ID NO: 587487
uuaaucugcgugcaauuaa

SEQ ID NO: 795817 - RNA, 19 nt, Artificial Sequence
  Description of Artificial Sequence: Synthetic oligonucleotide
  Antisense strand to SEQ ID NO: 795816
uuaauugcacgcagauuaa

SEQ ID NO: 795818 - RNA, 19 nt, Artificial Sequence
  Description of Artificial Sequence: Synthetic oligonucleotide
  Sense strand starting at position 593 of SEQ ID NO: 587487
agauauagaucugacugca

SEQ ID NO: 795819 - RNA, 19 nt, Artificial Sequence
  Description of Artificial Sequence: Synthetic oligonucleotide
  Antisense strand to SEQ ID NO: 795818
ugcagucagaucuauaucu

SEQ ID NO: 795820 - RNA, 19 nt, Artificial Sequence
  Description of Artificial Sequence: Synthetic oligonucleotide
  Sense strand starting at position 652 of SEQ ID NO: 587487
agcccuacucugcaggaaa

SEQ ID NO: 795821 - RNA, 19 nt, Artificial Sequence
  Description of Artificial Sequence: Synthetic oligonucleotide
  Antisense strand to SEQ ID NO: 795820
uuuccugcagaguagggcu

SEQ ID NO: 795822 - RNA, 19 nt, Artificial Sequence
  Description of Artificial Sequence: Synthetic oligonucleotide
  Sense strand starting at position 796 of SEQ ID NO: 587487
uugccuguccugcaagaaa

SEQ ID NO: 795823 - RNA, 19 nt, Artificial Sequence
  Description of Artificial Sequence: Synthetic oligonucleotide
  Antisense strand to SEQ ID NO: 795822
uuucuugcaggacaggcaa

SEQ ID NO: 795824 - RNA, 19 nt, Artificial Sequence
  Description of Artificial Sequence: Synthetic oligonucleotide
  Sense strand starting at position 1028 of SEQ ID NO: 587487
cggaguguccacuaaguac

SEQ ID NO: 795825 - RNA, 19 nt, Artificial Sequence
  Description of Artificial Sequence: Synthetic oligonucleotide
  Antisense strand to SEQ ID NO: 795824
guacuuaguggacacuccg

SEQ ID NO: 795826 - RNA, 19 nt, Artificial Sequence
  Description of Artificial Sequence: Synthetic oligonucleotide
  Sense strand starting at position 1102 of SEQ ID NO: 587487
uugggcugaucuuuacuuu

SEQ ID NO: 795827 - RNA, 19 nt, Artificial Sequence
  Description of Artificial Sequence: Synthetic oligonucleotide
  Antisense strand to SEQ ID NO: 795826
aaaguaaagaucagcccaa

SEQ ID NO: 795828 - RNA, 19 nt, Artificial Sequence
  Description of Artificial Sequence: Synthetic oligonucleotide
  Sense strand starting at position 1248 of SEQ ID NO: 587487
aguaucuggcggaguguuu

SEQ ID NO: 795829 - RNA, 19 nt, Artificial Sequence
  Description of Artificial Sequence: Synthetic oligonucleotide
  Antisense strand to SEQ ID NO: 795828
aaacacuccgccagauacu

SEQ ID NO: 795830 - RNA, 19 nt, Artificial Sequence
  Description of Artificial Sequence: Synthetic oligonucleotide
  Sense strand starting at position 1259 of SEQ ID NO: 587487
gaguguuuacagcguaauc

SEQ ID NO: 795831 - RNA, 19 nt, Artificial Sequence
  Description of Artificial Sequence: Synthetic oligonucleotide
  Antisense strand to SEQ ID NO: 795830
gauuacgcuguaaacacuc

SEQ ID NO: 795832 - RNA, 19 nt, Artificial Sequence
  Description of Artificial Sequence: Synthetic oligonucleotide
  Sense strand starting at position 1261 of SEQ ID NO: 587487
guguuuacagcguaaucag

SEQ ID NO: 795833 - RNA, 19 nt, Artificial Sequence
  Description of Artificial Sequence: Synthetic oligonucleotide
  Antisense strand to SEQ ID NO: 795832
cugauuacgcuguaaacac

SEQ ID NO: 795834 - RNA, 19 nt, Artificial Sequence
  Description of Artificial Sequence: Synthetic oligonucleotide
  Sense strand starting at position 1270 of SEQ ID NO: 587487
gcguaaucagaucaguccu

SEQ ID NO: 795835 - RNA, 19 nt, Artificial Sequence
  Description of Artificial Sequence: Synthetic oligonucleotide
  Antisense strand to SEQ ID NO: 795834
aggacugaucugauuacgc

SEQ ID NO: 795836 - RNA, 19 nt, Artificial Sequence
  Description of Artificial Sequence: Synthetic oligonucleotide
  Sense strand starting at position 1276 of SEQ ID NO: 587487
ucagaucaguccuagaaag

SEQ ID NO: 795837 - RNA, 19 nt, Artificial Sequence
  Description of Artificial Sequence: Synthetic oligonucleotide
  Antisense strand to SEQ ID NO: 795836
cuuucuaggacugaucuga

SEQ ID NO: 795838 - RNA, 19 nt, Artificial Sequence
  Description of Artificial Sequence: Synthetic oligonucleotide
  Sense strand starting at position 1278 of SEQ ID NO: 587487
agaucaguccuagaaagcu

SEQ ID NO: 795839 - RNA, 19 nt, Artificial Sequence
  Description of Artificial Sequence: Synthetic oligonucleotide
  Antisense strand to SEQ ID NO: 795838
agcuuucuaggacugaucu

SEQ ID NO: 795840 - RNA, 19 nt, Artificial Sequence
  Description of Artificial Sequence: Synthetic oligonucleotide
  Sense strand starting at position 1287 of SEQ ID NO: 587487
cuagaaagcucagaacaca

SEQ ID NO: 795841 - RNA, 19 nt, Artificial Sequence
  Description of Artificial Sequence: Synthetic oligonucleotide
  Antisense strand to SEQ ID NO: 795840
uguguucugagcuuucuag

SEQ ID NO: 795842 - RNA, 19 nt, Artificial Sequence
  Description of Artificial Sequence: Synthetic oligonucleotide
  Sense strand starting at position 1373 of SEQ ID NO: 587487
cucccauuacaguaggauu

SEQ ID NO: 795843 - RNA, 19 nt, Artificial Sequence
  Description of Artificial Sequence: Synthetic oligonucleotide
  Antisense strand to SEQ ID NO: 795842
aauccuacuguaaugggag

SEQ ID NO: 795844 - RNA, 19 nt, Artificial Sequence
  Description of Artificial Sequence: Synthetic oligonucleotide
  Sense strand starting at position 1410 of SEQ ID NO: 587487
agccuuguauugccaaauc

SEQ ID NO: 795845 - RNA, 19 nt, Artificial Sequence
  Description of Artificial Sequence: Synthetic oligonucleotide
  Antisense strand to SEQ ID NO: 795844
gauuuggcaauacaaggcu

SEQ ID NO: 795846 - RNA, 19 nt, Artificial Sequence
  Description of Artificial Sequence: Synthetic oligonucleotide
  Sense strand starting at position 1421 of SEQ ID NO: 587487
gccaaauccuagcauuuag

SEQ ID NO: 795847 - RNA, 19 nt, Artificial Sequence
  Description of Artificial Sequence: Synthetic oligonucleotide
  Antisense strand to SEQ ID NO: 795846
cuaaaugcuaggauuuggc

SEQ ID NO: 795848 - RNA, 19 nt, Artificial Sequence
  Description of Artificial Sequence: Synthetic oligonucleotide
  Sense strand starting at position 1439 of SEQ ID NO: 587487
ggaggcauuuaagaaauau

SEQ ID NO: 795849 - RNA, 19 nt, Artificial Sequence
  Description of Artificial Sequence: Synthetic oligonucleotide
  Antisense strand to SEQ ID NO: 795848
auauuucuuaaaugccucc

SEQ ID NO: 795850 - RNA, 19 nt, Artificial Sequence
  Description of Artificial Sequence: Synthetic oligonucleotide
  Sense strand starting at position 1467 of SEQ ID NO: 587487
gucuaaagccacugugaaa

SEQ ID NO: 795851 - RNA, 19 nt, Artificial Sequence
  Description of Artificial Sequence: Synthetic oligonucleotide
  Antisense strand to SEQ ID NO: 795850
uuucacaguggcuuuagac

SEQ ID NO: 795852 - RNA, 19 nt, Artificial Sequence
  Description of Artificial Sequence: Synthetic oligonucleotide
  Sense strand starting at position 2591 of SEQ ID NO: 587487
aaggccuguugagaaauca

SEQ ID NO: 795853 - RNA, 19 nt, Artificial Sequence
  Description of Artificial Sequence: Synthetic oligonucleotide
  Antisense strand to SEQ ID NO: 795852
ugauuucucaacaggccuu

SEQ ID NO: 795854 - RNA, 19 nt, Artificial Sequence
  Description of Artificial Sequence: Synthetic oligonucleotide
  Sense strand starting at position 2959 of SEQ ID NO: 587487
cgccucuccuuacuaagau

SEQ ID NO: 795855 - RNA, 19 nt, Artificial Sequence
  Description of Artificial Sequence: Synthetic oligonucleotide
  Antisense strand to SEQ ID NO: 795854
aucuuaguaaggagaggcg

SEQ ID NO: 795856 - RNA, 19 nt, Artificial Sequence
  Description of Artificial Sequence: Synthetic oligonucleotide
  Sense strand starting at position 2963 of SEQ ID NO: 587487
ucuccuuacuaagauggaa

SEQ ID NO: 795857 - RNA, 19 nt, Artificial Sequence
  Description of Artificial Sequence: Synthetic oligonucleotide
  Antisense strand to SEQ ID NO: 795856
uuccaucuuaguaaggaga

SEQ ID NO: 795858 - RNA, 19 nt, Artificial Sequence
  Description of Artificial Sequence: Synthetic oligonucleotide
  Sense strand starting at position 3588 of SEQ ID NO: 587487
guuguuaccugcccacauu

SEQ ID NO: 795859 - RNA, 19 nt, Artificial Sequence
  Description of Artificial Sequence: Synthetic oligonucleotide
  Antisense strand to SEQ ID NO: 795858
aaugugggcagguaacaac

SEQ ID NO: 795860 - RNA, 19 nt, Artificial Sequence
  Description of Artificial Sequence: Synthetic oligonucleotide
  Sense strand starting at position 3616 of SEQ ID NO: 587487
ccaccucuuccaugaggaa

SEQ ID NO: 795861 - RNA, 19 nt, Artificial Sequence
  Description of Artificial Sequence: Synthetic oligonucleotide
  Antisense strand to SEQ ID NO: 795860
uuccucauggaagaggugg

SEQ ID NO: 795862 - RNA, 19 nt, Artificial Sequence
  Description of Artificial Sequence: Synthetic oligonucleotide
  Sense strand starting at position 3619 of SEQ ID NO: 587487
ccucuuccaugaggaacau

SEQ ID NO: 795863 - RNA, 19 nt, Artificial Sequence
  Description of Artificial Sequence: Synthetic oligonucleotide
  Antisense strand to SEQ ID NO: 795862
auguuccucauggaagagg

SEQ ID NO: 795864 - RNA, 19 nt, Artificial Sequence
  Description of Artificial Sequence: Synthetic oligonucleotide
  Sense strand starting at position 3632 of SEQ ID NO: 587487
gaacauguuccauggaguu

SEQ ID NO: 795865 - RNA, 19 nt, Artificial Sequence
  Description of Artificial Sequence: Synthetic oligonucleotide
  Antisense strand to SEQ ID NO: 795864
aacuccauggaacauguuc

SEQ ID NO: 795866 - RNA, 19 nt, Artificial Sequence
  Description of Artificial Sequence: Synthetic oligonucleotide
  Sense strand starting at position 3784 of SEQ ID NO: 587487
ggaugaaggucauucuuuc

SEQ ID NO: 795867 - RNA, 19 nt, Artificial Sequence
  Description of Artificial Sequence: Synthetic oligonucleotide
  Antisense strand to SEQ ID NO: 795866
gaaagaaugaccuucaucc

SEQ ID NO: 795868 - RNA, 19 nt, Artificial Sequence
  Description of Artificial Sequence: Synthetic oligonucleotide
  Sense strand starting at position 3820 of SEQ ID NO: 587487
cuuuguauugugugacucu

SEQ ID NO: 795869 - RNA, 19 nt, Artificial Sequence
  Description of Artificial Sequence: Synthetic oligonucleotide
  Antisense strand to SEQ ID NO: 795868
agagucacacaauacaaag

SEQ ID NO: 795870 - RNA, 19 nt, Artificial Sequence
  Description of Artificial Sequence: Synthetic oligonucleotide
  Sense strand starting at position 3908 of SEQ ID NO: 587487
gacaaacguccauguccau

SEQ ID NO: 795871 - RNA, 19 nt, Artificial Sequence
  Description of Artificial Sequence: Synthetic oligonucleotide
  Antisense strand to SEQ ID NO: 795870
auggacauggacguuuguc

SEQ ID NO: 795872 - RNA, 19 nt, Artificial Sequence
  Description of Artificial Sequence: Synthetic oligonucleotide
  Sense strand starting at position 3976 of SEQ ID NO: 587487
ggaugcugucagggaaagu

SEQ ID NO: 795873 - RNA, 19 nt, Artificial Sequence
  Description of Artificial Sequence: Synthetic oligonucleotide
  Antisense strand to SEQ ID NO: 795872
acuuucccugacagcaucc

SEQ ID NO: 795874 - RNA, 19 nt, Artificial Sequence
  Description of Artificial Sequence: Synthetic oligonucleotide
  Sense strand starting at position 152 of SEQ ID NO: 587488
gcaccauauuaucagagcu

SEQ ID NO: 795875 - RNA, 19 nt, Artificial Sequence
  Description of Artificial Sequence: Synthetic oligonucleotide
  Antisense strand to SEQ ID NO: 795874
agcucugauaauauggugc

SEQ ID NO: 795876 - RNA, 19 nt, Artificial Sequence
  Description of Artificial Sequence: Synthetic oligonucleotide
  Sense strand starting at position 154 of SEQ ID NO: 587488
accauauuaucagagcuag

SEQ ID NO: 795877 - RNA, 19 nt, Artificial Sequence
  Description of Artificial Sequence: Synthetic oligonucleotide
  Antisense strand to SEQ ID NO: 795876
cuagcucugauaauauggu

SEQ ID NO: 795878 - RNA, 19 nt, Artificial Sequence
  Description of Artificial Sequence: Synthetic oligonucleotide
  Sense strand starting at position 166 of SEQ ID NO: 587488
gagcuagaauagcucaagu

SEQ ID NO: 795879 - RNA, 19 nt, Artificial Sequence
  Description of Artificial Sequence: Synthetic oligonucleotide
  Antisense strand to SEQ ID NO: 795878
acuugagcuauucuagcuc

SEQ ID NO: 795880 - RNA, 19 nt, Artificial Sequence
  Description of Artificial Sequence: Synthetic oligonucleotide
  Sense strand starting at position 168 of SEQ ID NO: 587488
gcuagaauagcucaagucu

SEQ ID NO: 795881 - RNA, 19 nt, Artificial Sequence
  Description of Artificial Sequence: Synthetic oligonucleotide
  Antisense strand to SEQ ID NO: 795880
agacuugagcuauucuagc

SEQ ID NO: 795882 - RNA, 19 nt, Artificial Sequence
  Description of Artificial Sequence: Synthetic oligonucleotide
  Sense strand starting at position 216 of SEQ ID NO: 587488
aacaguauacugugaaguc

SEQ ID NO: 795883 - RNA, 19 nt, Artificial Sequence
  Description of Artificial Sequence: Synthetic oligonucleotide
  Antisense strand to SEQ ID NO: 795882
gacuucacaguauacuguu

SEQ ID NO: 795884 - RNA, 19 nt, Artificial Sequence
  Description of Artificial Sequence: Synthetic oligonucleotide
  Sense strand starting at position 217 of SEQ ID NO: 587488
acaguauacugugaagucu

SEQ ID NO: 795885 - RNA, 19 nt, Artificial Sequence
  Description of Artificial Sequence: Synthetic oligonucleotide
  Antisense strand to SEQ ID NO: 795884
agacuucacaguauacugu

SEQ ID NO: 795886 - RNA, 19 nt, Artificial Sequence
  Description of Artificial Sequence: Synthetic oligonucleotide
  Sense strand starting at position 300 of SEQ ID NO: 587488
cucuaacagucuuucugua

SEQ ID NO: 795887 - RNA, 19 nt, Artificial Sequence
  Description of Artificial Sequence: Synthetic oligonucleotide
  Antisense strand to SEQ ID NO: 795886
uacagaaagacuguuagag

SEQ ID NO: 795888 - RNA, 19 nt, Artificial Sequence
  Description of Artificial Sequence: Synthetic oligonucleotide
  Sense strand starting at position 302 of SEQ ID NO: 587488
cuaacagucuuucuguaga

SEQ ID NO: 795889 - RNA, 19 nt, Artificial Sequence
  Description of Artificial Sequence: Synthetic oligonucleotide
  Antisense strand to SEQ ID NO: 795888
ucuacagaaagacuguuag

SEQ ID NO: 795890 - RNA, 19 nt, Artificial Sequence
  Description of Artificial Sequence: Synthetic oligonucleotide
  Sense strand starting at position 305 of SEQ ID NO: 587488
acagucuuucuguagaaag

SEQ ID NO: 795891 - RNA, 19 nt, Artificial Sequence
  Description of Artificial Sequence: Synthetic oligonucleotide
  Antisense strand to SEQ ID NO: 795890
cuuucuacagaaagacugu

SEQ ID NO: 795892 - RNA, 19 nt, Artificial Sequence
  Description of Artificial Sequence: Synthetic oligonucleotide
  Sense strand starting at position 391 of SEQ ID NO: 587488
gcuaguaucuuccucugca

SEQ ID NO: 795893 - RNA, 19 nt, Artificial Sequence
  Description of Artificial Sequence: Synthetic oligonucleotide
  Antisense strand to SEQ ID NO: 795892
ugcagaggaagauacuagc

SEQ ID NO: 795894 - RNA, 19 nt, Artificial Sequence
  Description of Artificial Sequence: Synthetic oligonucleotide
  Sense strand starting at position 547 of SEQ ID NO: 587488
auauacaacuggucgucaa

SEQ ID NO: 795895 - RNA, 19 nt, Artificial Sequence
  Description of Artificial Sequence: Synthetic oligonucleotide
  Antisense strand to SEQ ID NO: 795894
uugacgaccaguuguauau

SEQ ID NO: 795896 - RNA, 19 nt, Artificial Sequence
  Description of Artificial Sequence: Synthetic oligonucleotide
  Sense strand starting at position 548 of SEQ ID NO: 587488
uauacaacuggucgucaaa

SEQ ID NO: 795897 - RNA, 19 nt, Artificial Sequence
  Description of Artificial Sequence: Synthetic oligonucleotide
  Antisense strand to SEQ ID NO: 795896
uuugacgaccaguuguaua

SEQ ID NO: 795898 - RNA, 19 nt, Artificial Sequence
  Description of Artificial Sequence: Synthetic oligonucleotide
  Sense strand starting at position 550 of SEQ ID NO: 587488
uacaacuggucgucaaaua

SEQ ID NO: 795899 - RNA, 19 nt, Artificial Sequence
  Description of Artificial Sequence: Synthetic oligonucleotide
  Antisense strand to SEQ ID NO: 795898
uauuugacgaccaguugua

SEQ ID NO: 795900 - RNA, 19 nt, Artificial Sequence
  Description of Artificial Sequence: Synthetic oligonucleotide
  Sense strand starting at position 551 of SEQ ID NO: 587488
acaacuggucgucaaauau

SEQ ID NO: 795901 - RNA, 19 nt, Artificial Sequence
  Description of Artificial Sequence: Synthetic oligonucleotide
  Antisense strand to SEQ ID NO: 795900
auauuugacgaccaguugu

SEQ ID NO: 795902 - RNA, 19 nt, Artificial Sequence
  Description of Artificial Sequence: Synthetic oligonucleotide
  Sense strand starting at position 558 of SEQ ID NO: 587488
gucgucaaauauuuguuaa

SEQ ID NO: 795903 - RNA, 19 nt, Artificial Sequence
  Description of Artificial Sequence: Synthetic oligonucleotide
  Antisense strand to SEQ ID NO: 795902
uuaacaaauauuugacgac

SEQ ID NO: 795904 - RNA, 19 nt, Artificial Sequence
  Description of Artificial Sequence: Synthetic oligonucleotide
  Sense strand starting at position 606 of SEQ ID NO: 587488
agugacaucugccauauca

SEQ ID NO: 795905 - RNA, 19 nt, Artificial Sequence
  Description of Artificial Sequence: Synthetic oligonucleotide
  Antisense strand to SEQ ID NO: 795904
ugauauggcagaugucacu

SEQ ID NO: 795906 - RNA, 19 nt, Artificial Sequence
  Description of Artificial Sequence: Synthetic oligonucleotide
  Sense strand starting at position 628 of SEQ ID NO: 587488
aauagaaguuauucuguag

SEQ ID NO: 795907 - RNA, 19 nt, Artificial Sequence
  Description of Artificial Sequence: Synthetic oligonucleotide
  Antisense strand to SEQ ID NO: 795906
cuacagaauaacuucuauu

SEQ ID NO: 795908 - RNA, 19 nt, Artificial Sequence
  Description of Artificial Sequence: Synthetic oligonucleotide
  Sense strand starting at position 631 of SEQ ID NO: 587488
agaaguuauucuguagcaa

SEQ ID NO: 795909 - RNA, 19 nt, Artificial Sequence
  Description of Artificial Sequence: Synthetic oligonucleotide
  Antisense strand to SEQ ID NO: 795908
uugcuacagaauaacuucu

SEQ ID NO: 795910 - RNA, 19 nt, Artificial Sequence
  Description of Artificial Sequence: Synthetic oligonucleotide
  Sense strand starting at position 632 of SEQ ID NO: 587488
gaaguuauucuguagcaaa

SEQ ID NO: 795911 - RNA, 19 nt, Artificial Sequence
  Description of Artificial Sequence: Synthetic oligonucleotide
  Antisense strand to SEQ ID NO: 795910
uuugcuacagaauaacuuc

SEQ ID NO: 795912 - RNA, 19 nt, Artificial Sequence
  Description of Artificial Sequence: Synthetic oligonucleotide
  Sense strand starting at position 722 of SEQ ID NO: 587488
auguaccuguauuaaagau

SEQ ID NO: 795913 - RNA, 19 nt, Artificial Sequence
  Description of Artificial Sequence: Synthetic oligonucleotide
  Antisense strand to SEQ ID NO: 795912
aucuuuaauacagguacau

SEQ ID NO: 795914 - RNA, 19 nt, Artificial Sequence
  Description of Artificial Sequence: Synthetic oligonucleotide
  Sense strand starting at position 838 of SEQ ID NO: 587488
aaagaaagacuccgauguu

SEQ ID NO: 795915 - RNA, 19 nt, Artificial Sequence
  Description of Artificial Sequence: Synthetic oligonucleotide
  Antisense strand to SEQ ID NO: 795914
aacaucggagucuuucuuu

SEQ ID NO: 795916 - RNA, 19 nt, Artificial Sequence
  Description of Artificial Sequence: Synthetic oligonucleotide
  Sense strand starting at position 839 of SEQ ID NO: 587488
aagaaagacuccgauguuc

SEQ ID NO: 795917 - RNA, 19 nt, Artificial Sequence
  Description of Artificial Sequence: Synthetic oligonucleotide
  Antisense strand to SEQ ID NO: 795916
gaacaucggagucuuucuu

SEQ ID NO: 795918 - RNA, 19 nt, Artificial Sequence
  Description of Artificial Sequence: Synthetic oligonucleotide
  Sense strand starting at position 948 of SEQ ID NO: 587488
agaagaacuuggcugaauu

SEQ ID NO: 795919 - RNA, 19 nt, Artificial Sequence
  Description of Artificial Sequence: Synthetic oligonucleotide
  Antisense strand to SEQ ID NO: 795918
aauucagccaaguucuucu

SEQ ID NO: 795920 - RNA, 19 nt, Artificial Sequence
  Description of Artificial Sequence: Synthetic oligonucleotide
  Sense strand starting at position 956 of SEQ ID NO: 587488
uuggcugaauuugucuauu

SEQ ID NO: 795921 - RNA, 19 nt, Artificial Sequence
  Description of Artificial Sequence: Synthetic oligonucleotide
  Antisense strand to SEQ ID NO: 795920
aauagacaaauucagccaa

SEQ ID NO: 795922 - RNA, 19 nt, Artificial Sequence
  Description of Artificial Sequence: Synthetic oligonucleotide
  Sense strand starting at position 978 of SEQ ID NO: 587488
ucaauaaucgcguacgaau

SEQ ID NO: 795923 - RNA, 19 nt, Artificial Sequence
  Description of Artificial Sequence: Synthetic oligonucleotide
  Antisense strand to SEQ ID NO: 795922
auucguacgcgauuauuga

SEQ ID NO: 795924 - RNA, 19 nt, Artificial Sequence
  Description of Artificial Sequence: Synthetic oligonucleotide
  Sense strand starting at position 980 of SEQ ID NO: 587488
aauaaucgcguacgaauaa

SEQ ID NO: 795925 - RNA, 19 nt, Artificial Sequence
  Description of Artificial Sequence: Synthetic oligonucleotide
  Antisense strand to SEQ ID NO: 795924
uuauucguacgcgauuauu

SEQ ID NO: 795926 - RNA, 19 nt, Artificial Sequence
  Description of Artificial Sequence: Synthetic oligonucleotide
  Sense strand starting at position 2049 of SEQ ID NO: 587488
aggagacuggcgugauaac

SEQ ID NO: 795927 - RNA, 19 nt, Artificial Sequence
  Description of Artificial Sequence: Synthetic oligonucleotide
  Antisense strand to SEQ ID NO: 795926
guuaucacgccagucuccu

SEQ ID NO: 795928 - RNA, 19 nt, Artificial Sequence
  Description of Artificial Sequence: Synthetic oligonucleotide
  Sense strand starting at position 2050 of SEQ ID NO: 587488
ggagacuggcgugauaaca

SEQ ID NO: 795929 - RNA, 19 nt, Artificial Sequence
  Description of Artificial Sequence: Synthetic oligonucleotide
  Antisense strand to SEQ ID NO: 795928
uguuaucacgccagucucc

SEQ ID NO: 795930 - RNA, 19 nt, Artificial Sequence
  Description of Artificial Sequence: Synthetic oligonucleotide
  Sense strand starting at position 2078 of SEQ ID NO: 587488
cucauuggaggccgagaaa

SEQ ID NO: 795931 - RNA, 19 nt, Artificial Sequence
  Description of Artificial Sequence: Synthetic oligonucleotide
  Antisense strand to SEQ ID NO: 795930
uuucucggccuccaaugag

SEQ ID NO: 795932 - RNA, 19 nt, Artificial Sequence
  Description of Artificial Sequence: Synthetic oligonucleotide
  Sense strand starting at position 2392 of SEQ ID NO: 587488
gcgucuuuacuguaacaca

SEQ ID NO: 795933 - RNA, 19 nt, Artificial Sequence
  Description of Artificial Sequence: Synthetic oligonucleotide
  Antisense strand to SEQ ID NO: 795932
uguguuacaguaaagacgc

SEQ ID NO: 795934 - RNA, 19 nt, Artificial Sequence
  Description of Artificial Sequence: Synthetic oligonucleotide
  Sense strand starting at position 2494 of SEQ ID NO: 587488
cucucuaguguuuacuuga

SEQ ID NO: 795935 - RNA, 19 nt, Artificial Sequence
  Description of Artificial Sequence: Synthetic oligonucleotide
  Antisense strand to SEQ ID NO: 795934
ucaaguaaacacuagagag

SEQ ID NO: 795936 - RNA, 19 nt, Artificial Sequence
  Description of Artificial Sequence: Synthetic oligonucleotide
  Sense strand starting at position 2497 of SEQ ID NO: 587488
ucuaguguuuacuugagau

SEQ ID NO: 795937 - RNA, 19 nt, Artificial Sequence
  Description of Artificial Sequence: Synthetic oligonucleotide
  Antisense strand to SEQ ID NO: 795936
aucucaaguaaacacuaga

SEQ ID NO: 795938 - RNA, 19 nt, Artificial Sequence
  Description of Artificial Sequence: Synthetic oligonucleotide
  Sense strand starting at position 2501 of SEQ ID NO: 587488
guguuuacuugagauccag

SEQ ID NO: 795939 - RNA, 19 nt, Artificial Sequence
  Description of Artificial Sequence: Synthetic oligonucleotide
  Antisense strand to SEQ ID NO: 795938
cuggaucucaaguaaacac

SEQ ID NO: 795940 - RNA, 19 nt, Artificial Sequence
  Description of Artificial Sequence: Synthetic oligonucleotide
  Sense strand starting at position 2513 of SEQ ID NO: 587488
gauccagcuuaguccuaga

SEQ ID NO: 795941 - RNA, 19 nt, Artificial Sequence
  Description of Artificial Sequence: Synthetic oligonucleotide
  Antisense strand to SEQ ID NO: 795940
ucuaggacuaagcuggauc

SEQ ID NO: 795942 - RNA, 19 nt, Artificial Sequence
  Description of Artificial Sequence: Synthetic oligonucleotide
  Sense strand starting at position 2569 of SEQ ID NO: 587488
uguggaaacuucucucauc

SEQ ID NO: 795943 - RNA, 19 nt, Artificial Sequence
  Description of Artificial Sequence: Synthetic oligonucleotide
  Antisense strand to SEQ ID NO: 795942
gaugagagaaguuuccaca

SEQ ID NO: 795944 - RNA, 19 nt, Artificial Sequence
  Description of Artificial Sequence: Synthetic oligonucleotide
  Sense strand starting at position 3478 of SEQ ID NO: 587488
cccagauacuggcuugacu

SEQ ID NO: 795945 - RNA, 19 nt, Artificial Sequence
  Description of Artificial Sequence: Synthetic oligonucleotide
  Antisense strand to SEQ ID NO: 795944
agucaagccaguaucuggg

SEQ ID NO: 795946 - RNA, 19 nt, Artificial Sequence
  Description of Artificial Sequence: Synthetic oligonucleotide
  Sense strand starting at position 3586 of SEQ ID NO: 587488
gggucuacuugccuauauu

SEQ ID NO: 795947 - RNA, 19 nt, Artificial Sequence
  Description of Artificial Sequence: Synthetic oligonucleotide
  Antisense strand to SEQ ID NO: 795946
aauauaggcaaguagaccc

SEQ ID NO: 795948 - RNA, 19 nt, Artificial Sequence
  Description of Artificial Sequence: Synthetic oligonucleotide
  Sense strand starting at position 3892 of SEQ ID NO: 587488
aucugcuagcuaugauaaa

SEQ ID NO: 795949 - RNA, 19 nt, Artificial Sequence
  Description of Artificial Sequence: Synthetic oligonucleotide
  Antisense strand to SEQ ID NO: 795948
uuuaucauagcuagcagau

SEQ ID NO: 795950 - RNA, 19 nt, Artificial Sequence
  Description of Artificial Sequence: Synthetic oligonucleotide
  Sense strand starting at position 3893 of SEQ ID NO: 587488
ucugcuagcuaugauaaag

SEQ ID NO: 795951 - RNA, 19 nt, Artificial Sequence
  Description of Artificial Sequence: Synthetic oligonucleotide
  Antisense strand to SEQ ID NO: 795950
cuuuaucauagcuagcaga

SEQ ID NO: 795952 - RNA, 19 nt, Artificial Sequence
  Description of Artificial Sequence: Synthetic oligonucleotide
  Sense strand starting at position 3971 of SEQ ID NO: 587488
ugcuuauagugguccaaga

SEQ ID NO: 795953 - RNA, 19 nt, Artificial Sequence
  Description of Artificial Sequence: Synthetic oligonucleotide
  Antisense strand to SEQ ID NO: 795952
ucuuggaccacuauaagca

SEQ ID NO: 795954 - RNA, 19 nt, Artificial Sequence
  Description of Artificial Sequence: Synthetic oligonucleotide
  Sense strand starting at position 26 of SEQ ID NO: 587489
ggaggauggcuucagccaa

SEQ ID NO: 795955 - RNA, 19 nt, Artificial Sequence
  Description of Artificial Sequence: Synthetic oligonucleotide
  Antisense strand to SEQ ID NO: 795954
uuggcugaagccauccucc

SEQ ID NO: 795956 - RNA, 19 nt, Artificial Sequence
  Description of Artificial Sequence: Synthetic oligonucleotide
  Sense strand starting at position 57 of SEQ ID NO: 587489
uggagugagucauguucag

SEQ ID NO: 795957 - RNA, 19 nt, Artificial Sequence
  Description of Artificial Sequence: Synthetic oligonucleotide
  Antisense strand to SEQ ID NO: 795956
cugaacaugacucacucca

SEQ ID NO: 795958 - RNA, 19 nt, Artificial Sequence
  Description of Artificial Sequence: Synthetic oligonucleotide
  Sense strand starting at position 61 of SEQ ID NO: 587489
gugagucauguucaggcca

SEQ ID NO: 795959 - RNA, 19 nt, Artificial Sequence
  Description of Artificial Sequence: Synthetic oligonucleotide
  Antisense strand to SEQ ID NO: 795958
uggccugaacaugacucac

SEQ ID NO: 795960 - RNA, 19 nt, Artificial Sequence
  Description of Artificial Sequence: Synthetic oligonucleotide
  Sense strand starting at position 585 of SEQ ID NO: 587489
gcaccauauuaucagagcu

SEQ ID NO: 795961 - RNA, 19 nt, Artificial Sequence
  Description of Artificial Sequence: Synthetic oligonucleotide
  Antisense strand to SEQ ID NO: 795960
agcucugauaauauggugc

SEQ ID NO: 795962 - RNA, 19 nt, Artificial Sequence
  Description of Artificial Sequence: Synthetic oligonucleotide
  Sense strand starting at position 587 of SEQ ID NO: 587489
accauauuaucagagcuag

SEQ ID NO: 795963 - RNA, 19 nt, Artificial Sequence
  Description of Artificial Sequence: Synthetic oligonucleotide
  Antisense strand to SEQ ID NO: 795962
cuagcucugauaauauggu

SEQ ID NO: 795964 - RNA, 19 nt, Artificial Sequence
  Description of Artificial Sequence: Synthetic oligonucleotide
  Sense strand starting at position 599 of SEQ ID NO: 587489
gagcuagaauagcucaagu

SEQ ID NO: 795965 - RNA, 19 nt, Artificial Sequence
  Description of Artificial Sequence: Synthetic oligonucleotide
  Antisense strand to SEQ ID NO: 795964
acuugagcuauucuagcuc

SEQ ID NO: 795966 - RNA, 19 nt, Artificial Sequence
  Description of Artificial Sequence: Synthetic oligonucleotide
  Sense strand starting at position 601 of SEQ ID NO: 587489
gcuagaauagcucaagucu

SEQ ID NO: 795967 - RNA, 19 nt, Artificial Sequence
  Description of Artificial Sequence: Synthetic oligonucleotide
  Antisense strand to SEQ ID NO: 795966
agacuugagcuauucuagc

SEQ ID NO: 795968 - RNA, 19 nt, Artificial Sequence
  Description of Artificial Sequence: Synthetic oligonucleotide
  Sense strand starting at position 649 of SEQ ID NO: 587489
aacaguauacugugaaguc

SEQ ID NO: 795969 - RNA, 19 nt, Artificial Sequence
  Description of Artificial Sequence: Synthetic oligonucleotide
  Antisense strand to SEQ ID NO: 795968
gacuucacaguauacuguu

SEQ ID NO: 795970 - RNA, 19 nt, Artificial Sequence
  Description of Artificial Sequence: Synthetic oligonucleotide
  Sense strand starting at position 650 of SEQ ID NO: 587489
acaguauacugugaagucu

SEQ ID NO: 795971 - RNA, 19 nt, Artificial Sequence
  Description of Artificial Sequence: Synthetic oligonucleotide
  Antisense strand to SEQ ID NO: 795970
agacuucacaguauacugu

SEQ ID NO: 795972 - RNA, 19 nt, Artificial Sequence
  Description of Artificial Sequence: Synthetic oligonucleotide
  Sense strand starting at position 733 of SEQ ID NO: 587489
cucuaacagucuuucugua

SEQ ID NO: 795973 - RNA, 19 nt, Artificial Sequence
  Description of Artificial Sequence: Synthetic oligonucleotide
  Antisense strand to SEQ ID NO: 795972
uacagaaagacuguuagag

SEQ ID NO: 795974 - RNA, 19 nt, Artificial Sequence
  Description of Artificial Sequence: Synthetic oligonucleotide
  Sense strand starting at position 735 of SEQ ID NO: 587489
cuaacagucuuucuguaga

SEQ ID NO: 795975 - RNA, 19 nt, Artificial Sequence
  Description of Artificial Sequence: Synthetic oligonucleotide
  Antisense strand to SEQ ID NO: 795974
ucuacagaaagacuguuag

SEQ ID NO: 795976 - RNA, 19 nt, Artificial Sequence
  Description of Artificial Sequence: Synthetic oligonucleotide
  Sense strand starting at position 738 of SEQ ID NO: 587489
acagucuuucuguagaaag

SEQ ID NO: 795977 - RNA, 19 nt, Artificial Sequence
  Description of Artificial Sequence: Synthetic oligonucleotide
  Antisense strand to SEQ ID NO: 795976
cuuucuacagaaagacugu

SEQ ID NO: 795978 - RNA, 19 nt, Artificial Sequence
  Description of Artificial Sequence: Synthetic oligonucleotide
  Sense strand starting at position 824 of SEQ ID NO: 587489
gcuaguaucuuccucugca

SEQ ID NO: 795979 - RNA, 19 nt, Artificial Sequence
  Description of Artificial Sequence: Synthetic oligonucleotide
  Antisense strand to SEQ ID NO: 795978
ugcagaggaagauacuagc

SEQ ID NO: 795980 - RNA, 19 nt, Artificial Sequence
  Description of Artificial Sequence: Synthetic oligonucleotide
  Sense strand starting at position 980 of SEQ ID NO: 587489
auauacaacuggucgucaa

SEQ ID NO: 795981 - RNA, 19 nt, Artificial Sequence
  Description of Artificial Sequence: Synthetic oligonucleotide
  Antisense strand to SEQ ID NO: 795980
uugacgaccaguuguauau

SEQ ID NO: 795982 - RNA, 19 nt, Artificial Sequence
  Description of Artificial Sequence: Synthetic oligonucleotide
  Sense strand starting at position 981 of SEQ ID NO: 587489
uauacaacuggucgucaaa

SEQ ID NO: 795983 - RNA, 19 nt, Artificial Sequence
  Description of Artificial Sequence: Synthetic oligonucleotide
  Antisense strand to SEQ ID NO: 795982
uuugacgaccaguuguaua

SEQ ID NO: 795984 - RNA, 19 nt, Artificial Sequence
  Description of Artificial Sequence: Synthetic oligonucleotide
  Sense strand starting at position 983 of SEQ ID NO: 587489
uacaacuggucgucaaaua

SEQ ID NO: 795985 - RNA, 19 nt, Artificial Sequence
  Description of Artificial Sequence: Synthetic oligonucleotide
  Antisense strand to SEQ ID NO: 795984
uauuugacgaccaguugua

SEQ ID NO: 795986 - RNA, 19 nt, Artificial Sequence
  Description of Artificial Sequence: Synthetic oligonucleotide
  Sense strand starting at position 984 of SEQ ID NO: 587489
acaacuggucgucaaauau

SEQ ID NO: 795987 - RNA, 19 nt, Artificial Sequence
  Description of Artificial Sequence: Synthetic oligonucleotide
  Antisense strand to SEQ ID NO: 795986
auauuugacgaccaguugu

SEQ ID NO: 795988 - RNA, 19 nt, Artificial Sequence
  Description of Artificial Sequence: Synthetic oligonucleotide
  Sense strand starting at position 991 of SEQ ID NO: 587489
gucgucaaauauuuguuaa

SEQ ID NO: 795989 - RNA, 19 nt, Artificial Sequence
  Description of Artificial Sequence: Synthetic oligonucleotide
  Antisense strand to SEQ ID NO: 795988
uuaacaaauauuugacgac

SEQ ID NO: 795990 - RNA, 19 nt, Artificial Sequence
  Description of Artificial Sequence: Synthetic oligonucleotide
  Sense strand starting at position 1039 of SEQ ID NO: 587489
agugacaucugccauauca

SEQ ID NO: 795991 - RNA, 19 nt, Artificial Sequence
  Description of Artificial Sequence: Synthetic oligonucleotide
  Antisense strand to SEQ ID NO: 795990
ugauauggcagaugucacu

SEQ ID NO: 795992 - RNA, 19 nt, Artificial Sequence
  Description of Artificial Sequence: Synthetic oligonucleotide
  Sense strand starting at position 1061 of SEQ ID NO: 587489
aauagaaguuauucuguag

SEQ ID NO: 795993 - RNA, 19 nt, Artificial Sequence
  Description of Artificial Sequence: Synthetic oligonucleotide
  Antisense strand to SEQ ID NO: 795992
cuacagaauaacuucuauu

SEQ ID NO: 795994 - RNA, 19 nt, Artificial Sequence
  Description of Artificial Sequence: Synthetic oligonucleotide
  Sense strand starting at position 1064 of SEQ ID NO: 587489
agaaguuauucuguagcaa

SEQ ID NO: 795995 - RNA, 19 nt, Artificial Sequence
  Description of Artificial Sequence: Synthetic oligonucleotide
  Antisense strand to SEQ ID NO: 795994
uugcuacagaauaacuucu

SEQ ID NO: 795996 - RNA, 19 nt, Artificial Sequence
  Description of Artificial Sequence: Synthetic oligonucleotide
  Sense strand starting at position 1065 of SEQ ID NO: 587489
gaaguuauucuguagcaaa

SEQ ID NO: 795997 - RNA, 19 nt, Artificial Sequence
  Description of Artificial Sequence: Synthetic oligonucleotide
  Antisense strand to SEQ ID NO: 795996
uuugcuacagaauaacuuc

SEQ ID NO: 795998 - RNA, 19 nt, Artificial Sequence
  Description of Artificial Sequence: Synthetic oligonucleotide
  Sense strand starting at position 1155 of SEQ ID NO: 587489
auguaccuguauuaaagau

SEQ ID NO: 795999 - RNA, 19 nt, Artificial Sequence
  Description of Artificial Sequence: Synthetic oligonucleotide
  Antisense strand to SEQ ID NO: 795998
aucuuuaauacagguacau

SEQ ID NO: 796000 - RNA, 19 nt, Artificial Sequence
  Description of Artificial Sequence: Synthetic oligonucleotide
  Sense strand starting at position 1271 of SEQ ID NO: 587489
aaagaaagacuccgauguu

SEQ ID NO: 796001 - RNA, 19 nt, Artificial Sequence
  Description of Artificial Sequence: Synthetic oligonucleotide
  Antisense strand to SEQ ID NO: 796000
aacaucggagucuuucuuu

SEQ ID NO: 796002 - RNA, 19 nt, Artificial Sequence
  Description of Artificial Sequence: Synthetic oligonucleotide
  Sense strand starting at position 1272 of SEQ ID NO: 587489
aagaaagacuccgauguuc

SEQ ID NO: 796003 - RNA, 19 nt, Artificial Sequence
  Description of Artificial Sequence: Synthetic oligonucleotide
  Antisense strand to SEQ ID NO: 796002
gaacaucggagucuuucuu

SEQ ID NO: 796004 - RNA, 19 nt, Artificial Sequence
  Description of Artificial Sequence: Synthetic oligonucleotide
  Sense strand starting at position 1381 of SEQ ID NO: 587489
agaagaacuuggcugaauu

SEQ ID NO: 796005 - RNA, 19 nt, Artificial Sequence
  Description of Artificial Sequence: Synthetic oligonucleotide
  Antisense strand to SEQ ID NO: 796004
aauucagccaaguucuucu

SEQ ID NO: 796006 - RNA, 19 nt, Artificial Sequence
  Description of Artificial Sequence: Synthetic oligonucleotide
  Sense strand starting at position 1389 of SEQ ID NO: 587489
uuggcugaauuugucuauu

SEQ ID NO: 796007 - RNA, 19 nt, Artificial Sequence
  Description of Artificial Sequence: Synthetic oligonucleotide
  Antisense strand to SEQ ID NO: 796006
aauagacaaauucagccaa

SEQ ID NO: 796008 - RNA, 19 nt, Artificial Sequence
  Description of Artificial Sequence: Synthetic oligonucleotide
  Sense strand starting at position 1411 of SEQ ID NO: 587489
ucaauaaucgcguacgaau

SEQ ID NO: 796009 - RNA, 19 nt, Artificial Sequence
  Description of Artificial Sequence: Synthetic oligonucleotide
  Antisense strand to SEQ ID NO: 796008
auucguacgcgauuauuga

SEQ ID NO: 796010 - RNA, 19 nt, Artificial Sequence
  Description of Artificial Sequence: Synthetic oligonucleotide
  Sense strand starting at position 1413 of SEQ ID NO: 587489
aauaaucgcguacgaauaa

SEQ ID NO: 796011 - RNA, 19 nt, Artificial Sequence
  Description of Artificial Sequence: Synthetic oligonucleotide
  Antisense strand to SEQ ID NO: 796010
uuauucguacgcgauuauu

SEQ ID NO: 796012 - RNA, 19 nt, Artificial Sequence
  Description of Artificial Sequence: Synthetic oligonucleotide
  Sense strand starting at position 2480 of SEQ ID NO: 587489
gaaggagacuggcgugaua

SEQ ID NO: 796013 - RNA, 19 nt, Artificial Sequence
  Description of Artificial Sequence: Synthetic oligonucleotide
  Antisense strand to SEQ ID NO: 796012
uaucacgccagucuccuuc

SEQ ID NO: 796014 - RNA, 19 nt, Artificial Sequence
  Description of Artificial Sequence: Synthetic oligonucleotide
  Sense strand starting at position 2482 of SEQ ID NO: 587489
aggagacuggcgugauaac

SEQ ID NO: 796015 - RNA, 19 nt, Artificial Sequence
  Description of Artificial Sequence: Synthetic oligonucleotide
  Antisense strand to SEQ ID NO: 796014
guuaucacgccagucuccu

SEQ ID NO: 796016 - RNA, 19 nt, Artificial Sequence
  Description of Artificial Sequence: Synthetic oligonucleotide
  Sense strand starting at position 2483 of SEQ ID NO: 587489
ggagacuggcgugauaaca

SEQ ID NO: 796017 - RNA, 19 nt, Artificial Sequence
  Description of Artificial Sequence: Synthetic oligonucleotide
  Antisense strand to SEQ ID NO: 796016
uguuaucacgccagucucc

SEQ ID NO: 796018 - RNA, 19 nt, Artificial Sequence
  Description of Artificial Sequence: Synthetic oligonucleotide
  Sense strand starting at position 2511 of SEQ ID NO: 587489
cucauuggaggccgagaaa

SEQ ID NO: 796019 - RNA, 19 nt, Artificial Sequence
  Description of Artificial Sequence: Synthetic oligonucleotide
  Antisense strand to SEQ ID NO: 796018
uuucucggccuccaaugag

SEQ ID NO: 796020 - RNA, 19 nt, Artificial Sequence
  Description of Artificial Sequence: Synthetic oligonucleotide
  Sense strand starting at position 2825 of SEQ ID NO: 587489
gcgucuuuacuguaacaca

SEQ ID NO: 796021 - RNA, 19 nt, Artificial Sequence
  Description of Artificial Sequence: Synthetic oligonucleotide
  Antisense strand to SEQ ID NO: 796020
uguguuacaguaaagacgc

SEQ ID NO: 796022 - RNA, 19 nt, Artificial Sequence
  Description of Artificial Sequence: Synthetic oligonucleotide
  Sense strand starting at position 2927 of SEQ ID NO: 587489
cucucuaguguuuacuuga

SEQ ID NO: 796023 - RNA, 19 nt, Artificial Sequence
  Description of Artificial Sequence: Synthetic oligonucleotide
  Antisense strand to SEQ ID NO: 796022
ucaaguaaacacuagagag

SEQ ID NO: 796024 - RNA, 19 nt, Artificial Sequence
  Description of Artificial Sequence: Synthetic oligonucleotide
  Sense strand starting at position 2930 of SEQ ID NO: 587489
ucuaguguuuacuugagau

SEQ ID NO: 796025 - RNA, 19 nt, Artificial Sequence
  Description of Artificial Sequence: Synthetic oligonucleotide
  Antisense strand to SEQ ID NO: 796024
aucucaaguaaacacuaga

SEQ ID NO: 796026 - RNA, 19 nt, Artificial Sequence
  Description of Artificial Sequence: Synthetic oligonucleotide
  Sense strand starting at position 2934 of SEQ ID NO: 587489
guguuuacuugagauccag

SEQ ID NO: 796027 - RNA, 19 nt, Artificial Sequence
  Description of Artificial Sequence: Synthetic oligonucleotide
  Antisense strand to SEQ ID NO: 796026
cuggaucucaaguaaacac

SEQ ID NO: 796028 - RNA, 19 nt, Artificial Sequence
  Description of Artificial Sequence: Synthetic oligonucleotide
  Sense strand starting at position 2946 of SEQ ID NO: 587489
gauccagcuuaguccuaga

SEQ ID NO: 796029 - RNA, 19 nt, Artificial Sequence
  Description of Artificial Sequence: Synthetic oligonucleotide
  Antisense strand to SEQ ID NO: 796028
ucuaggacuaagcuggauc

SEQ ID NO: 796030 - RNA, 19 nt, Artificial Sequence
  Description of Artificial Sequence: Synthetic oligonucleotide
  Sense strand starting at position 3002 of SEQ ID NO: 587489
uguggaaacuucucucauc

SEQ ID NO: 796031 - RNA, 19 nt, Artificial Sequence
  Description of Artificial Sequence: Synthetic oligonucleotide
  Antisense strand to SEQ ID NO: 796030
gaugagagaaguuuccaca

SEQ ID NO: 796032 - RNA, 19 nt, Artificial Sequence
  Description of Artificial Sequence: Synthetic oligonucleotide
  Sense strand starting at position 3911 of SEQ ID NO: 587489
cccagauacuggcuugacu

SEQ ID NO: 796033 - RNA, 19 nt, Artificial Sequence
  Description of Artificial Sequence: Synthetic oligonucleotide
  Antisense strand to SEQ ID NO: 796032
agucaagccaguaucuggg

SEQ ID NO: 796034 - RNA, 19 nt, Artificial Sequence
  Description of Artificial Sequence: Synthetic oligonucleotide
  Sense strand starting at position 71 of SEQ ID NO: 587490
ggaggauggcuucagccaa

SEQ ID NO: 796035 - RNA, 19 nt, Artificial Sequence
  Description of Artificial Sequence: Synthetic oligonucleotide
  Antisense strand to SEQ ID NO: 796034
uuggcugaagccauccucc

SEQ ID NO: 796036 - RNA, 19 nt, Artificial Sequence
  Description of Artificial Sequence: Synthetic oligonucleotide
  Sense strand starting at position 102 of SEQ ID NO: 587490
uggagugagucauguucag

SEQ ID NO: 796037 - RNA, 19 nt, Artificial Sequence
  Description of Artificial Sequence: Synthetic oligonucleotide
  Antisense strand to SEQ ID NO: 796036
cugaacaugacucacucca

SEQ ID NO: 796038 - RNA, 19 nt, Artificial Sequence
  Description of Artificial Sequence: Synthetic oligonucleotide
  Sense strand starting at position 106 of SEQ ID NO: 587490
gugagucauguucaggcca

SEQ ID NO: 796039 - RNA, 19 nt, Artificial Sequence
  Description of Artificial Sequence: Synthetic oligonucleotide
  Antisense strand to SEQ ID NO: 796038
uggccugaacaugacucac

SEQ ID NO: 796040 - RNA, 19 nt, Artificial Sequence
  Description of Artificial Sequence: Synthetic oligonucleotide
  Sense strand starting at position 630 of SEQ ID NO: 587490
gcaccauauuaucagagcu

SEQ ID NO: 796041 - RNA, 19 nt, Artificial Sequence
  Description of Artificial Sequence: Synthetic oligonucleotide
  Antisense strand to SEQ ID NO: 796040
agcucugauaauauggugc

SEQ ID NO: 796042 - RNA, 19 nt, Artificial Sequence
  Description of Artificial Sequence: Synthetic oligonucleotide
  Sense strand starting at position 632 of SEQ ID NO: 587490
accauauuaucagagcuag

SEQ ID NO: 796043 - RNA, 19 nt, Artificial Sequence
  Description of Artificial Sequence: Synthetic oligonucleotide
  Antisense strand to SEQ ID NO: 796042
cuagcucugauaauauggu

SEQ ID NO: 796044 - RNA, 19 nt, Artificial Sequence
  Description of Artificial Sequence: Synthetic oligonucleotide
  Sense strand starting at position 644 of SEQ ID NO: 587490
gagcuagaauagcucaagu

SEQ ID NO: 796045 - RNA, 19 nt, Artificial Sequence
  Description of Artificial Sequence: Synthetic oligonucleotide
  Antisense strand to SEQ ID NO: 796044
acuugagcuauucuagcuc

SEQ ID NO: 796046 - RNA, 19 nt, Artificial Sequence
  Description of Artificial Sequence: Synthetic oligonucleotide
  Sense strand starting at position 646 of SEQ ID NO: 587490
gcuagaauagcucaagucu

SEQ ID NO: 796047 - RNA, 19 nt, Artificial Sequence
  Description of Artificial Sequence: Synthetic oligonucleotide
  Antisense strand to SEQ ID NO: 796046
agacuugagcuauucuagc

SEQ ID NO: 796048 - RNA, 19 nt, Artificial Sequence
  Description of Artificial Sequence: Synthetic oligonucleotide
  Sense strand starting at position 694 of SEQ ID NO: 587490
aacaguauacugugaaguc

SEQ ID NO: 796049 - RNA, 19 nt, Artificial Sequence
  Description of Artificial Sequence: Synthetic oligonucleotide
  Antisense strand to SEQ ID NO: 796048
gacuucacaguauacuguu

SEQ ID NO: 796050 - RNA, 19 nt, Artificial Sequence
  Description of Artificial Sequence: Synthetic oligonucleotide
  Sense strand starting at position 695 of SEQ ID NO: 587490
acaguauacugugaagucu

SEQ ID NO: 796051 - RNA, 19 nt, Artificial Sequence
  Description of Artificial Sequence: Synthetic oligonucleotide
  Antisense strand to SEQ ID NO: 796050
agacuucacaguauacugu

SEQ ID NO: 796052 - RNA, 19 nt, Artificial Sequence
  Description of Artificial Sequence: Synthetic oligonucleotide
  Sense strand starting at position 778 of SEQ ID NO: 587490
cucuaacagucuuucugua

SEQ ID NO: 796053 - RNA, 19 nt, Artificial Sequence
  Description of Artificial Sequence: Synthetic oligonucleotide
  Antisense strand to SEQ ID NO: 796052
uacagaaagacuguuagag

SEQ ID NO: 796054 - RNA, 19 nt, Artificial Sequence
  Description of Artificial Sequence: Synthetic oligonucleotide
  Sense strand starting at position 780 of SEQ ID NO: 587490
cuaacagucuuucuguaga

SEQ ID NO: 796055 - RNA, 19 nt, Artificial Sequence
  Description of Artificial Sequence: Synthetic oligonucleotide
  Antisense strand to SEQ ID NO: 796054
ucuacagaaagacuguuag

SEQ ID NO: 796056 - RNA, 19 nt, Artificial Sequence
  Description of Artificial Sequence: Synthetic oligonucleotide
  Sense strand starting at position 783 of SEQ ID NO: 587490
acagucuuucuguagaaag

SEQ ID NO: 796057 - RNA, 19 nt, Artificial Sequence
  Description of Artificial Sequence: Synthetic oligonucleotide
  Antisense strand to SEQ ID NO: 796056
cuuucuacagaaagacugu

SEQ ID NO: 796058 - RNA, 19 nt, Artificial Sequence
  Description of Artificial Sequence: Synthetic oligonucleotide
  Sense strand starting at position 869 of SEQ ID NO: 587490
gcuaguaucuuccucugca

SEQ ID NO: 796059 - RNA, 19 nt, Artificial Sequence
  Description of Artificial Sequence: Synthetic oligonucleotide
  Antisense strand to SEQ ID NO: 796058
ugcagaggaagauacuagc

SEQ ID NO: 796060 - RNA, 19 nt, Artificial Sequence
  Description of Artificial Sequence: Synthetic oligonucleotide
  Sense strand starting at position 1025 of SEQ ID NO: 587490
auauacaacuggucgucaa

SEQ ID NO: 796061 - RNA, 19 nt, Artificial Sequence
  Description of Artificial Sequence: Synthetic oligonucleotide
  Antisense strand to SEQ ID NO: 796060
uugacgaccaguuguauau

SEQ ID NO: 796062 - RNA, 19 nt, Artificial Sequence
  Description of Artificial Sequence: Synthetic oligonucleotide
  Sense strand starting at position 1026 of SEQ ID NO: 587490
uauacaacuggucgucaaa

SEQ ID NO: 796063 - RNA, 19 nt, Artificial Sequence
  Description of Artificial Sequence: Synthetic oligonucleotide
  Antisense strand to SEQ ID NO: 796062
uuugacgaccaguuguaua

SEQ ID NO: 796064 - RNA, 19 nt, Artificial Sequence
  Description of Artificial Sequence: Synthetic oligonucleotide
  Sense strand starting at position 1028 of SEQ ID NO: 587490
uacaacuggucgucaaaua

SEQ ID NO: 796065 - RNA, 19 nt, Artificial Sequence
  Description of Artificial Sequence: Synthetic oligonucleotide
  Antisense strand to SEQ ID NO: 796064
uauuugacgaccaguugua

SEQ ID NO: 796066 - RNA, 19 nt, Artificial Sequence
  Description of Artificial Sequence: Synthetic oligonucleotide
  Sense strand starting at position 1029 of SEQ ID NO: 587490
acaacuggucgucaaauau

SEQ ID NO: 796067 - RNA, 19 nt, Artificial Sequence
  Description of Artificial Sequence: Synthetic oligonucleotide
  Antisense strand to SEQ ID NO: 796066
auauuugacgaccaguugu

SEQ ID NO: 796068 - RNA, 19 nt, Artificial Sequence
  Description of Artificial Sequence: Synthetic oligonucleotide
  Sense strand starting at position 1036 of SEQ ID NO: 587490
gucgucaaauauuuguuaa

SEQ ID NO: 796069 - RNA, 19 nt, Artificial Sequence
  Description of Artificial Sequence: Synthetic oligonucleotide
  Antisense strand to SEQ ID NO: 796068
uuaacaaauauuugacgac

SEQ ID NO: 796070 - RNA, 19 nt, Artificial Sequence
  Description of Artificial Sequence: Synthetic oligonucleotide
  Sense strand starting at position 1084 of SEQ ID NO: 587490
agugacaucugccauauca

SEQ ID NO: 796071 - RNA, 19 nt, Artificial Sequence
  Description of Artificial Sequence: Synthetic oligonucleotide
  Antisense strand to SEQ ID NO: 796070
ugauauggcagaugucacu

SEQ ID NO: 796072 - RNA, 19 nt, Artificial Sequence
  Description of Artificial Sequence: Synthetic oligonucleotide
  Sense strand starting at position 1106 of SEQ ID NO: 587490
aauagaaguuauucuguag

SEQ ID NO: 796073 - RNA, 19 nt, Artificial Sequence
  Description of Artificial Sequence: Synthetic oligonucleotide
  Antisense strand to SEQ ID NO: 796072
cuacagaauaacuucuauu

SEQ ID NO: 796074 - RNA, 19 nt, Artificial Sequence
  Description of Artificial Sequence: Synthetic oligonucleotide
  Sense strand starting at position 1109 of SEQ ID NO: 587490
agaaguuauucuguagcaa

SEQ ID NO: 796075 - RNA, 19 nt, Artificial Sequence
  Description of Artificial Sequence: Synthetic oligonucleotide
  Antisense strand to SEQ ID NO: 796074
uugcuacagaauaacuucu

SEQ ID NO: 796076 - RNA, 19 nt, Artificial Sequence
  Description of Artificial Sequence: Synthetic oligonucleotide
  Sense strand starting at position 1110 of SEQ ID NO: 587490
gaaguuauucuguagcaaa

SEQ ID NO: 796077 - RNA, 19 nt, Artificial Sequence
  Description of Artificial Sequence: Synthetic oligonucleotide
  Antisense strand to SEQ ID NO: 796076
uuugcuacagaauaacuuc

SEQ ID NO: 796078 - RNA, 19 nt, Artificial Sequence
  Description of Artificial Sequence: Synthetic oligonucleotide
  Sense strand starting at position 1200 of SEQ ID NO: 587490
auguaccuguauuaaagau

SEQ ID NO: 796079 - RNA, 19 nt, Artificial Sequence
  Description of Artificial Sequence: Synthetic oligonucleotide
  Antisense strand to SEQ ID NO: 796078
aucuuuaauacagguacau

SEQ ID NO: 796080 - RNA, 19 nt, Artificial Sequence
  Description of Artificial Sequence: Synthetic oligonucleotide
  Sense strand starting at position 1316 of SEQ ID NO: 587490
aaagaaagacuccgauguu

SEQ ID NO: 796081 - RNA, 19 nt, Artificial Sequence
  Description of Artificial Sequence: Synthetic oligonucleotide
  Antisense strand to SEQ ID NO: 796080
aacaucggagucuuucuuu

SEQ ID NO: 796082 - RNA, 19 nt, Artificial Sequence
  Description of Artificial Sequence: Synthetic oligonucleotide
  Sense strand starting at position 1317 of SEQ ID NO: 587490
aagaaagacuccgauguuc

SEQ ID NO: 796083 - RNA, 19 nt, Artificial Sequence
  Description of Artificial Sequence: Synthetic oligonucleotide
  Antisense strand to SEQ ID NO: 796082
gaacaucggagucuuucuu

SEQ ID NO: 796084 - RNA, 19 nt, Artificial Sequence
  Description of Artificial Sequence: Synthetic oligonucleotide
  Sense strand starting at position 1426 of SEQ ID NO: 587490
agaagaacuuggcugaauu

SEQ ID NO: 796085 - RNA, 19 nt, Artificial Sequence
  Description of Artificial Sequence: Synthetic oligonucleotide
  Antisense strand to SEQ ID NO: 796084
aauucagccaaguucuucu

SEQ ID NO: 796086 - RNA, 19 nt, Artificial Sequence
  Description of Artificial Sequence: Synthetic oligonucleotide
  Sense strand starting at position 1434 of SEQ ID NO: 587490
uuggcugaauuugucuauu

SEQ ID NO: 796087 - RNA, 19 nt, Artificial Sequence
  Description of Artificial Sequence: Synthetic oligonucleotide
  Antisense strand to SEQ ID NO: 796086
aauagacaaauucagccaa

SEQ ID NO: 796088 - RNA, 19 nt, Artificial Sequence
  Description of Artificial Sequence: Synthetic oligonucleotide
  Sense strand starting at position 1456 of SEQ ID NO: 587490
ucaauaaucgcguacgaau

SEQ ID NO: 796089 - RNA, 19 nt, Artificial Sequence
  Description of Artificial Sequence: Synthetic oligonucleotide
  Antisense strand to SEQ ID NO: 796088
auucguacgcgauuauuga

SEQ ID NO: 796090 - RNA, 19 nt, Artificial Sequence
  Description of Artificial Sequence: Synthetic oligonucleotide
  Sense strand starting at position 1458 of SEQ ID NO: 587490
aauaaucgcguacgaauaa

SEQ ID NO: 796091 - RNA, 19 nt, Artificial Sequence
  Description of Artificial Sequence: Synthetic oligonucleotide
  Antisense strand to SEQ ID NO: 796090
uuauucguacgcgauuauu

SEQ ID NO: 796092 - RNA, 19 nt, Artificial Sequence
  Description of Artificial Sequence: Synthetic oligonucleotide
  Sense strand starting at position 2525 of SEQ ID NO: 587490
gaaggagacuggcgugaua

SEQ ID NO: 796093 - RNA, 19 nt, Artificial Sequence
  Description of Artificial Sequence: Synthetic oligonucleotide
  Antisense strand to SEQ ID NO: 796092
uaucacgccagucuccuuc

SEQ ID NO: 796094 - RNA, 19 nt, Artificial Sequence
  Description of Artificial Sequence: Synthetic oligonucleotide
  Sense strand starting at position 2527 of SEQ ID NO: 587490
aggagacuggcgugauaac

SEQ ID NO: 796095 - RNA, 19 nt, Artificial Sequence
  Description of Artificial Sequence: Synthetic oligonucleotide
  Antisense strand to SEQ ID NO: 796094
guuaucacgccagucuccu

SEQ ID NO: 796096 - RNA, 19 nt, Artificial Sequence
  Description of Artificial Sequence: Synthetic oligonucleotide
  Sense strand starting at position 2528 of SEQ ID NO: 587490
ggagacuggcgugauaaca

SEQ ID NO: 796097 - RNA, 19 nt, Artificial Sequence
  Description of Artificial Sequence: Synthetic oligonucleotide
  Antisense strand to SEQ ID NO: 796096
uguuaucacgccagucucc

SEQ ID NO: 796098 - RNA, 19 nt, Artificial Sequence
  Description of Artificial Sequence: Synthetic oligonucleotide
  Sense strand starting at position 2556 of SEQ ID NO: 587490
cucauuggaggccgagaaa

SEQ ID NO: 796099 - RNA, 19 nt, Artificial Sequence
  Description of Artificial Sequence: Synthetic oligonucleotide
  Antisense strand to SEQ ID NO: 796098
uuucucggccuccaaugag

SEQ ID NO: 796100 - RNA, 19 nt, Artificial Sequence
  Description of Artificial Sequence: Synthetic oligonucleotide
  Sense strand starting at position 2870 of SEQ ID NO: 587490
gcgucuuuacuguaacaca

SEQ ID NO: 796101 - RNA, 19 nt, Artificial Sequence
  Description of Artificial Sequence: Synthetic oligonucleotide
  Antisense strand to SEQ ID NO: 796100
uguguuacaguaaagacgc

SEQ ID NO: 796102 - RNA, 19 nt, Artificial Sequence
  Description of Artificial Sequence: Synthetic oligonucleotide
  Sense strand starting at position 2972 of SEQ ID NO: 587490
cucucuaguguuuacuuga

SEQ ID NO: 796103 - RNA, 19 nt, Artificial Sequence
  Description of Artificial Sequence: Synthetic oligonucleotide
  Antisense strand to SEQ ID NO: 796102
ucaaguaaacacuagagag

SEQ ID NO: 796104 - RNA, 19 nt, Artificial Sequence
  Description of Artificial Sequence: Synthetic oligonucleotide
  Sense strand starting at position 2975 of SEQ ID NO: 587490
ucuaguguuuacuugagau

SEQ ID NO: 796105 - RNA, 19 nt, Artificial Sequence
  Description of Artificial Sequence: Synthetic oligonucleotide
  Antisense strand to SEQ ID NO: 796104
aucucaaguaaacacuaga

SEQ ID NO: 796106 - RNA, 19 nt, Artificial Sequence
  Description of Artificial Sequence: Synthetic oligonucleotide
  Sense strand starting at position 2979 of SEQ ID NO: 587490
guguuuacuugagauccag

SEQ ID NO: 796107 - RNA, 19 nt, Artificial Sequence
  Description of Artificial Sequence: Synthetic oligonucleotide
  Antisense strand to SEQ ID NO: 796106
cuggaucucaaguaaacac

SEQ ID NO: 796108 - RNA, 19 nt, Artificial Sequence
  Description of Artificial Sequence: Synthetic oligonucleotide
  Sense strand starting at position 2991 of SEQ ID NO: 587490
gauccagcuuaguccuaga

SEQ ID NO: 796109 - RNA, 19 nt, Artificial Sequence
  Description of Artificial Sequence: Synthetic oligonucleotide
  Antisense strand to SEQ ID NO: 796108
ucuaggacuaagcuggauc

SEQ ID NO: 796110 - RNA, 19 nt, Artificial Sequence
  Description of Artificial Sequence: Synthetic oligonucleotide
  Sense strand starting at position 3047 of SEQ ID NO: 587490
uguggaaacuucucucauc

SEQ ID NO: 796111 - RNA, 19 nt, Artificial Sequence
  Description of Artificial Sequence: Synthetic oligonucleotide
  Antisense strand to SEQ ID NO: 796110
gaugagagaaguuuccaca

SEQ ID NO: 796112 - RNA, 19 nt, Artificial Sequence
  Description of Artificial Sequence: Synthetic oligonucleotide
  Sense strand starting at position 3956 of SEQ ID NO: 587490
cccagauacuggcuugacu

SEQ ID NO: 796113 - RNA, 19 nt, Artificial Sequence
  Description of Artificial Sequence: Synthetic oligonucleotide
  Antisense strand to SEQ ID NO: 796112
agucaagccaguaucuggg

SEQ ID NO: 796114 - RNA, 19 nt, Artificial Sequence
  Description of Artificial Sequence: Synthetic oligonucleotide
  Sense strand starting at position 31 of SEQ ID NO: 587491
ggacaaccacguuagcaau

SEQ ID NO: 796115 - RNA, 19 nt, Artificial Sequence
  Description of Artificial Sequence: Synthetic oligonucleotide
  Antisense strand to SEQ ID NO: 796114
auugcuaacgugguugucc

SEQ ID NO: 796116 - RNA, 19 nt, Artificial Sequence
  Description of Artificial Sequence: Synthetic oligonucleotide
  Sense strand starting at position 41 of SEQ ID NO: 587491
guuagcaauuaugaacaca

SEQ ID NO: 796117 - RNA, 19 nt, Artificial Sequence
  Description of Artificial Sequence: Synthetic oligonucleotide
  Antisense strand to SEQ ID NO: 796116
uguguucauaauugcuaac

SEQ ID NO: 796118 - RNA, 19 nt, Artificial Sequence
  Description of Artificial Sequence: Synthetic oligonucleotide
  Sense strand starting at position 56 of SEQ ID NO: 587491
cacaacaguccguagacaa

SEQ ID NO: 796119 - RNA, 19 nt, Artificial Sequence
  Description of Artificial Sequence: Synthetic oligonucleotide
  Antisense strand to SEQ ID NO: 796118
uugucuacggacuguugug

SEQ ID NO: 796120 - RNA, 19 nt, Artificial Sequence
  Description of Artificial Sequence: Synthetic oligonucleotide
  Sense strand starting at position 422 of SEQ ID NO: 587491
uaacgaaaguuacauuagu

SEQ ID NO: 796121 - RNA, 19 nt, Artificial Sequence
  Description of Artificial Sequence: Synthetic oligonucleotide
  Antisense strand to SEQ ID NO: 796120
acuaauguaacuuucguua

SEQ ID NO: 796122 - RNA, 19 nt, Artificial Sequence
  Description of Artificial Sequence: Synthetic oligonucleotide
  Sense strand starting at position 444 of SEQ ID NO: 587491
ccuuccuuacaugagagua

SEQ ID NO: 796123 - RNA, 19 nt, Artificial Sequence
  Description of Artificial Sequence: Synthetic oligonucleotide
  Antisense strand to SEQ ID NO: 796122
uacucucauguaaggaagg

SEQ ID NO: 796124 - RNA, 19 nt, Artificial Sequence
  Description of Artificial Sequence: Synthetic oligonucleotide
  Sense strand starting at position 446 of SEQ ID NO: 587491
uuccuuacaugagaguaau

SEQ ID NO: 796125 - RNA, 19 nt, Artificial Sequence
  Description of Artificial Sequence: Synthetic oligonucleotide
  Antisense strand to SEQ ID NO: 796124
auuacucucauguaaggaa

SEQ ID NO: 796126 - RNA, 19 nt, Artificial Sequence
  Description of Artificial Sequence: Synthetic oligonucleotide
  Sense strand starting at position 452 of SEQ ID NO: 587491
acaugagaguaaugaacuu

SEQ ID NO: 796127 - RNA, 19 nt, Artificial Sequence
  Description of Artificial Sequence: Synthetic oligonucleotide
  Antisense strand to SEQ ID NO: 796126
aaguucauuacucucaugu

SEQ ID NO: 796128 - RNA, 19 nt, Artificial Sequence
  Description of Artificial Sequence: Synthetic oligonucleotide
  Sense strand starting at position 922 of SEQ ID NO: 587491
ggcuauguucuggauaagc

SEQ ID NO: 796129 - RNA, 19 nt, Artificial Sequence
  Description of Artificial Sequence: Synthetic oligonucleotide
  Antisense strand to SEQ ID NO: 796128
gcuuauccagaacauagcc

SEQ ID NO: 796130 - RNA, 19 nt, Artificial Sequence
  Description of Artificial Sequence: Synthetic oligonucleotide
  Sense strand starting at position 924 of SEQ ID NO: 587491
cuauguucuggauaagcca

SEQ ID NO: 796131 - RNA, 19 nt, Artificial Sequence
  Description of Artificial Sequence: Synthetic oligonucleotide
  Antisense strand to SEQ ID NO: 796130
uggcuuauccagaacauag

SEQ ID NO: 796132 - RNA, 19 nt, Artificial Sequence
  Description of Artificial Sequence: Synthetic oligonucleotide
  Sense strand starting at position 958 of SEQ ID NO: 587491
aacgcugagcgcuauauca

SEQ ID NO: 796133 - RNA, 19 nt, Artificial Sequence
  Description of Artificial Sequence: Synthetic oligonucleotide
  Antisense strand to SEQ ID NO: 796132
ugauauagcgcucagcguu

SEQ ID NO: 796134 - RNA, 19 nt, Artificial Sequence
  Description of Artificial Sequence: Synthetic oligonucleotide
  Sense strand starting at position 960 of SEQ ID NO: 587491
cgcugagcgcuauaucaaa

SEQ ID NO: 796135 - RNA, 19 nt, Artificial Sequence
  Description of Artificial Sequence: Synthetic oligonucleotide
  Antisense strand to SEQ ID NO: 796134
uuugauauagcgcucagcg

SEQ ID NO: 796136 - RNA, 19 nt, Artificial Sequence
  Description of Artificial Sequence: Synthetic oligonucleotide
  Sense strand starting at position 1007 of SEQ ID NO: 587491
cggacaagcuuuccuccaa

SEQ ID NO: 796137 - RNA, 19 nt, Artificial Sequence
  Description of Artificial Sequence: Synthetic oligonucleotide
  Antisense strand to SEQ ID NO: 796136
uuggaggaaagcuuguccg

SEQ ID NO: 796138 - RNA, 19 nt, Artificial Sequence
  Description of Artificial Sequence: Synthetic oligonucleotide
  Sense strand starting at position 2013 of SEQ ID NO: 587491
uuguauucgcaguggagca

SEQ ID NO: 796139 - RNA, 19 nt, Artificial Sequence
  Description of Artificial Sequence: Synthetic oligonucleotide
  Antisense strand to SEQ ID NO: 796138
ugcuccacugcgaauacaa

SEQ ID NO: 796140 - RNA, 19 nt, Artificial Sequence
  Description of Artificial Sequence: Synthetic oligonucleotide
  Sense strand starting at position 2026 of SEQ ID NO: 587491
ggagcaguucuguaccgag

SEQ ID NO: 796141 - RNA, 19 nt, Artificial Sequence
  Description of Artificial Sequence: Synthetic oligonucleotide
  Antisense strand to SEQ ID NO: 796140
cucgguacagaacugcucc

SEQ ID NO: 796142 - RNA, 19 nt, Artificial Sequence
  Description of Artificial Sequence: Synthetic oligonucleotide
  Sense strand starting at position 2307 of SEQ ID NO: 587491
aucagaaagaguugcuguu

SEQ ID NO: 796143 - RNA, 19 nt, Artificial Sequence
  Description of Artificial Sequence: Synthetic oligonucleotide
  Antisense strand to SEQ ID NO: 796142
aacagcaacucuuucugau

SEQ ID NO: 796144 - RNA, 19 nt, Artificial Sequence
  Description of Artificial Sequence: Synthetic oligonucleotide
  Sense strand starting at position 2313 of SEQ ID NO: 587491
aagaguugcuguuuguacu

SEQ ID NO: 796145 - RNA, 19 nt, Artificial Sequence
  Description of Artificial Sequence: Synthetic oligonucleotide
  Antisense strand to SEQ ID NO: 796144
aguacaaacagcaacucuu

SEQ ID NO: 796146 - RNA, 19 nt, Artificial Sequence
  Description of Artificial Sequence: Synthetic oligonucleotide
  Sense strand starting at position 2314 of SEQ ID NO: 587491
agaguugcuguuuguacua

SEQ ID NO: 796147 - RNA, 19 nt, Artificial Sequence
  Description of Artificial Sequence: Synthetic oligonucleotide
  Antisense strand to SEQ ID NO: 796146
uaguacaaacagcaacucu

SEQ ID NO: 796148 - RNA, 19 nt, Artificial Sequence
  Description of Artificial Sequence: Synthetic oligonucleotide
  Sense strand starting at position 2321 of SEQ ID NO: 587491
cuguuuguacuauguauuu

SEQ ID NO: 796149 - RNA, 19 nt, Artificial Sequence
  Description of Artificial Sequence: Synthetic oligonucleotide
  Antisense strand to SEQ ID NO: 796148
aaauacauaguacaaacag

SEQ ID NO: 796150 - RNA, 19 nt, Artificial Sequence
  Description of Artificial Sequence: Synthetic oligonucleotide
  Sense strand starting at position 2650 of SEQ ID NO: 587491
ccuauagucuagcuacuga

SEQ ID NO: 796151 - RNA, 19 nt, Artificial Sequence
  Description of Artificial Sequence: Synthetic oligonucleotide
  Antisense strand to SEQ ID NO: 796150
ucaguagcuagacuauagg

SEQ ID NO: 796152 - RNA, 19 nt, Artificial Sequence
  Description of Artificial Sequence: Synthetic oligonucleotide
  Sense strand starting at position 2712 of SEQ ID NO: 587491
ccaggagauacacguuaca

SEQ ID NO: 796153 - RNA, 19 nt, Artificial Sequence
  Description of Artificial Sequence: Synthetic oligonucleotide
  Antisense strand to SEQ ID NO: 796152
uguaacguguaucuccugg

SEQ ID NO: 796154 - RNA, 19 nt, Artificial Sequence
  Description of Artificial Sequence: Synthetic oligonucleotide
  Sense strand starting at position 2730 of SEQ ID NO: 587491
agugaacuaugauauugua

SEQ ID NO: 796155 - RNA, 19 nt, Artificial Sequence
  Description of Artificial Sequence: Synthetic oligonucleotide
  Antisense strand to SEQ ID NO: 796154
uacaauaucauaguucacu

SEQ ID NO: 796156 - RNA, 19 nt, Artificial Sequence
  Description of Artificial Sequence: Synthetic oligonucleotide
  Sense strand starting at position 2792 of SEQ ID NO: 587491
auccaauaggagugguuaa

SEQ ID NO: 796157 - RNA, 19 nt, Artificial Sequence
  Description of Artificial Sequence: Synthetic oligonucleotide
  Antisense strand to SEQ ID NO: 796156
uuaaccacuccuauuggau

SEQ ID NO: 796158 - RNA, 19 nt, Artificial Sequence
  Description of Artificial Sequence: Synthetic oligonucleotide
  Sense strand starting at position 2793 of SEQ ID NO: 587491
uccaauaggagugguuaaa

SEQ ID NO: 796159 - RNA, 19 nt, Artificial Sequence
  Description of Artificial Sequence: Synthetic oligonucleotide
  Antisense strand to SEQ ID NO: 796158
uuuaaccacuccuauugga

SEQ ID NO: 796160 - RNA, 19 nt, Artificial Sequence
  Description of Artificial Sequence: Synthetic oligonucleotide
  Sense strand starting at position 2853 of SEQ ID NO: 587491
ucagaaugguaacagugaa

SEQ ID NO: 796161 - RNA, 19 nt, Artificial Sequence
  Description of Artificial Sequence: Synthetic oligonucleotide
  Antisense strand to SEQ ID NO: 796160
uucacuguuaccauucuga

SEQ ID NO: 796162 - RNA, 19 nt, Artificial Sequence
  Description of Artificial Sequence: Synthetic oligonucleotide
  Sense strand starting at position 2884 of SEQ ID NO: 587491
gugggagguuuaagugaac

SEQ ID NO: 796163 - RNA, 19 nt, Artificial Sequence
  Description of Artificial Sequence: Synthetic oligonucleotide
  Antisense strand to SEQ ID NO: 796162
guucacuuaaaccucccac

SEQ ID NO: 796164 - RNA, 19 nt, Artificial Sequence
  Description of Artificial Sequence: Synthetic oligonucleotide
  Sense strand starting at position 2891 of SEQ ID NO: 587491
guuuaagugaacuauguug

SEQ ID NO: 796165 - RNA, 19 nt, Artificial Sequence
  Description of Artificial Sequence: Synthetic oligonucleotide
  Antisense strand to SEQ ID NO: 796164
caacauaguucacuuaaac

SEQ ID NO: 796166 - RNA, 19 nt, Artificial Sequence
  Description of Artificial Sequence: Synthetic oligonucleotide
  Sense strand starting at position 2893 of SEQ ID NO: 587491
uuaagugaacuauguuguu

SEQ ID NO: 796167 - RNA, 19 nt, Artificial Sequence
  Description of Artificial Sequence: Synthetic oligonucleotide
  Antisense strand to SEQ ID NO: 796166
aacaacauaguucacuuaa

SEQ ID NO: 796168 - RNA, 19 nt, Artificial Sequence
  Description of Artificial Sequence: Synthetic oligonucleotide
  Sense strand starting at position 2919 of SEQ ID NO: 587491
guauauauuuccuaucaug

SEQ ID NO: 796169 - RNA, 19 nt, Artificial Sequence
  Description of Artificial Sequence: Synthetic oligonucleotide
  Antisense strand to SEQ ID NO: 796168
caugauaggaaauauauac

SEQ ID NO: 796170 - RNA, 19 nt, Artificial Sequence
  Description of Artificial Sequence: Synthetic oligonucleotide
  Sense strand starting at position 2928 of SEQ ID NO: 587491
uccuaucaugaauacguau

SEQ ID NO: 796171 - RNA, 19 nt, Artificial Sequence
  Description of Artificial Sequence: Synthetic oligonucleotide
  Antisense strand to SEQ ID NO: 796170
auacguauucaugauagga

SEQ ID NO: 796172 - RNA, 19 nt, Artificial Sequence
  Description of Artificial Sequence: Synthetic oligonucleotide
  Sense strand starting at position 3031 of SEQ ID NO: 587491
uuuacugggcaccauaaua

SEQ ID NO: 796173 - RNA, 19 nt, Artificial Sequence
  Description of Artificial Sequence: Synthetic oligonucleotide
  Antisense strand to SEQ ID NO: 796172
uauuauggugcccaguaaa

SEQ ID NO: 796174 - RNA, 19 nt, Artificial Sequence
  Description of Artificial Sequence: Synthetic oligonucleotide
  Sense strand starting at position 3061 of SEQ ID NO: 587491
cagcgucuggcacauaaau

SEQ ID NO: 796175 - RNA, 19 nt, Artificial Sequence
  Description of Artificial Sequence: Synthetic oligonucleotide
  Antisense strand to SEQ ID NO: 796174
auuuaugugccagacgcug

SEQ ID NO: 796176 - RNA, 19 nt, Artificial Sequence
  Description of Artificial Sequence: Synthetic oligonucleotide
  Sense strand starting at position 3063 of SEQ ID NO: 587491
gcgucuggcacauaaauau

SEQ ID NO: 796177 - RNA, 19 nt, Artificial Sequence
  Description of Artificial Sequence: Synthetic oligonucleotide
  Antisense strand to SEQ ID NO: 796176
auauuuaugugccagacgc

SEQ ID NO: 796178 - RNA, 19 nt, Artificial Sequence
  Description of Artificial Sequence: Synthetic oligonucleotide
  Sense strand starting at position 3320 of SEQ ID NO: 587491
gggugauguuaagccagga

SEQ ID NO: 796179 - RNA, 19 nt, Artificial Sequence
  Description of Artificial Sequence: Synthetic oligonucleotide
  Antisense strand to SEQ ID NO: 796178
uccuggcuuaacaucaccc

SEQ ID NO: 796180 - RNA, 19 nt, Artificial Sequence
  Description of Artificial Sequence: Synthetic oligonucleotide
  Sense strand starting at position 3324 of SEQ ID NO: 587491
gauguuaagccaggaguuu

SEQ ID NO: 796181 - RNA, 19 nt, Artificial Sequence
  Description of Artificial Sequence: Synthetic oligonucleotide
  Antisense strand to SEQ ID NO: 796180
aaacuccuggcuuaacauc

SEQ ID NO: 796182 - RNA, 19 nt, Artificial Sequence
  Description of Artificial Sequence: Synthetic oligonucleotide
  Sense strand starting at position 3569 of SEQ ID NO: 587491
uaguaagcauacuauggaa

SEQ ID NO: 796183 - RNA, 19 nt, Artificial Sequence
  Description of Artificial Sequence: Synthetic oligonucleotide
  Antisense strand to SEQ ID NO: 796182
uuccauaguaugcuuacua

SEQ ID NO: 796184 - RNA, 19 nt, Artificial Sequence
  Description of Artificial Sequence: Synthetic oligonucleotide
  Sense strand starting at position 3614 of SEQ ID NO: 587491
gcuugauucccaugagcca

SEQ ID NO: 796185 - RNA, 19 nt, Artificial Sequence
  Description of Artificial Sequence: Synthetic oligonucleotide
  Antisense strand to SEQ ID NO: 796184
uggcucaugggaaucaagc

SEQ ID NO: 796186 - RNA, 19 nt, Artificial Sequence
  Description of Artificial Sequence: Synthetic oligonucleotide
  Sense strand starting at position 3667 of SEQ ID NO: 587491
cccucuuggguuuaucuau

SEQ ID NO: 796187 - RNA, 19 nt, Artificial Sequence
  Description of Artificial Sequence: Synthetic oligonucleotide
  Antisense strand to SEQ ID NO: 796186
auagauaaacccaagaggg

SEQ ID NO: 796188 - RNA, 19 nt, Artificial Sequence
  Description of Artificial Sequence: Synthetic oligonucleotide
  Sense strand starting at position 3681 of SEQ ID NO: 587491
ucuauugcagucugagauu

SEQ ID NO: 796189 - RNA, 19 nt, Artificial Sequence
  Description of Artificial Sequence: Synthetic oligonucleotide
  Antisense strand to SEQ ID NO: 796188
aaucucagacugcaauaga

SEQ ID NO: 796190 - RNA, 19 nt, Artificial Sequence
  Description of Artificial Sequence: Synthetic oligonucleotide
  Sense strand starting at position 3868 of SEQ ID NO: 587491
cggagccuuccucacuuua

SEQ ID NO: 796191 - RNA, 19 nt, Artificial Sequence
  Description of Artificial Sequence: Synthetic oligonucleotide
  Antisense strand to SEQ ID NO: 796190
uaaagugaggaaggcuccg

SEQ ID NO: 796192 - RNA, 19 nt, Artificial Sequence
  Description of Artificial Sequence: Synthetic oligonucleotide
  Sense strand starting at position 3921 of SEQ ID NO: 587491
ccacaaacuugagaacuga

SEQ ID NO: 796193 - RNA, 19 nt, Artificial Sequence
  Description of Artificial Sequence: Synthetic oligonucleotide
  Antisense strand to SEQ ID NO: 796192
ucaguucucaaguuugugg

SEQ ID NO: 796194 - RNA, 19 nt, Artificial Sequence
  Description of Artificial Sequence: Synthetic oligonucleotide
  Sense strand starting at position 105 of SEQ ID NO: 587492
acagguaggcugcaucaua

SEQ ID NO: 796195 - RNA, 19 nt, Artificial Sequence
  Description of Artificial Sequence: Synthetic oligonucleotide
  Antisense strand to SEQ ID NO: 796194
uaugaugcagccuaccugu

SEQ ID NO: 796196 - RNA, 19 nt, Artificial Sequence
  Description of Artificial Sequence: Synthetic oligonucleotide
  Sense strand starting at position 183 of SEQ ID NO: 587492
cgucuucccacaggaagaa

SEQ ID NO: 796197 - RNA, 19 nt, Artificial Sequence
  Description of Artificial Sequence: Synthetic oligonucleotide
  Antisense strand to SEQ ID NO: 796196
uucuuccugugggaagacg

SEQ ID NO: 796198 - RNA, 19 nt, Artificial Sequence
  Description of Artificial Sequence: Synthetic oligonucleotide
  Sense strand starting at position 250 of SEQ ID NO: 587492
gagcauuaccuacguuaau

SEQ ID NO: 796199 - RNA, 19 nt, Artificial Sequence
  Description of Artificial Sequence: Synthetic oligonucleotide
  Antisense strand to SEQ ID NO: 796198
auuaacguagguaaugcuc

SEQ ID NO: 796200 - RNA, 19 nt, Artificial Sequence
  Description of Artificial Sequence: Synthetic oligonucleotide
  Sense strand starting at position 251 of SEQ ID NO: 587492
agcauuaccuacguuaauu

SEQ ID NO: 796201 - RNA, 19 nt, Artificial Sequence
  Description of Artificial Sequence: Synthetic oligonucleotide
  Antisense strand to SEQ ID NO: 796200
aauuaacguagguaaugcu

SEQ ID NO: 796202 - RNA, 19 nt, Artificial Sequence
  Description of Artificial Sequence: Synthetic oligonucleotide
  Sense strand starting at position 259 of SEQ ID NO: 587492
cuacguuaauucuuugaau

SEQ ID NO: 796203 - RNA, 19 nt, Artificial Sequence
  Description of Artificial Sequence: Synthetic oligonucleotide
  Antisense strand to SEQ ID NO: 796202
auucaaagaauuaacguag

SEQ ID NO: 796204 - RNA, 19 nt, Artificial Sequence
  Description of Artificial Sequence: Synthetic oligonucleotide
  Sense strand starting at position 279 of SEQ ID NO: 587492
cucagaauaccaugaggua

SEQ ID NO: 796205 - RNA, 19 nt, Artificial Sequence
  Description of Artificial Sequence: Synthetic oligonucleotide
  Antisense strand to SEQ ID NO: 796204
uaccucaugguauucugag

SEQ ID NO: 796206 - RNA, 19 nt, Artificial Sequence
  Description of Artificial Sequence: Synthetic oligonucleotide
  Sense strand starting at position 286 of SEQ ID NO: 587492
uaccaugagguagguguua

SEQ ID NO: 796207 - RNA, 19 nt, Artificial Sequence
  Description of Artificial Sequence: Synthetic oligonucleotide
  Antisense strand to SEQ ID NO: 796206
uaacaccuaccucauggua

SEQ ID NO: 796208 - RNA, 19 nt, Artificial Sequence
  Description of Artificial Sequence: Synthetic oligonucleotide
  Sense strand starting at position 340 of SEQ ID NO: 587492
cacagagagucuuuguaag

SEQ ID NO: 796209 - RNA, 19 nt, Artificial Sequence
  Description of Artificial Sequence: Synthetic oligonucleotide
  Antisense strand to SEQ ID NO: 796208
cuuacaaagacucucugug

SEQ ID NO: 796210 - RNA, 19 nt, Artificial Sequence
  Description of Artificial Sequence: Synthetic oligonucleotide
  Sense strand starting at position 342 of SEQ ID NO: 587492
cagagagucuuuguaagua

SEQ ID NO: 796211 - RNA, 19 nt, Artificial Sequence
  Description of Artificial Sequence: Synthetic oligonucleotide
  Antisense strand to SEQ ID NO: 796210
uacuuacaaagacucucug

SEQ ID NO: 796212 - RNA, 19 nt, Artificial Sequence
  Description of Artificial Sequence: Synthetic oligonucleotide
  Sense strand starting at position 346 of SEQ ID NO: 587492
gagucuuuguaaguaacca

SEQ ID NO: 796213 - RNA, 19 nt, Artificial Sequence
  Description of Artificial Sequence: Synthetic oligonucleotide
  Antisense strand to SEQ ID NO: 796212
ugguuacuuacaaagacuc

SEQ ID NO: 796214 - RNA, 19 nt, Artificial Sequence
  Description of Artificial Sequence: Synthetic oligonucleotide
  Sense strand starting at position 354 of SEQ ID NO: 587492
guaaguaaccaacaguuua

SEQ ID NO: 796215 - RNA, 19 nt, Artificial Sequence
  Description of Artificial Sequence: Synthetic oligonucleotide
  Antisense strand to SEQ ID NO: 796214
uaaacuguugguuacuuac

SEQ ID NO: 796216 - RNA, 19 nt, Artificial Sequence
  Description of Artificial Sequence: Synthetic oligonucleotide
  Sense strand starting at position 366 of SEQ ID NO: 587492
caguuuaguaagugggaga

SEQ ID NO: 796217 - RNA, 19 nt, Artificial Sequence
  Description of Artificial Sequence: Synthetic oligonucleotide
  Antisense strand to SEQ ID NO: 796216
ucucccacuuacuaaacug

SEQ ID NO: 796218 - RNA, 19 nt, Artificial Sequence
  Description of Artificial Sequence: Synthetic oligonucleotide
  Sense strand starting at position 367 of SEQ ID NO: 587492
aguuuaguaagugggagau

SEQ ID NO: 796219 - RNA, 19 nt, Artificial Sequence
  Description of Artificial Sequence: Synthetic oligonucleotide
  Antisense strand to SEQ ID NO: 796218
aucucccacuuacuaaacu

SEQ ID NO: 796220 - RNA, 19 nt, Artificial Sequence
  Description of Artificial Sequence: Synthetic oligonucleotide
  Sense strand starting at position 369 of SEQ ID NO: 587492
uuuaguaagugggagauuu

SEQ ID NO: 796221 - RNA, 19 nt, Artificial Sequence
  Description of Artificial Sequence: Synthetic oligonucleotide
  Antisense strand to SEQ ID NO: 796220
aaaucucccacuuacuaaa

SEQ ID NO: 796222 - RNA, 19 nt, Artificial Sequence
  Description of Artificial Sequence: Synthetic oligonucleotide
  Sense strand starting at position 447 of SEQ ID NO: 587492
acauuaugcugcccucaga

SEQ ID NO: 796223 - RNA, 19 nt, Artificial Sequence
  Description of Artificial Sequence: Synthetic oligonucleotide
  Antisense strand to SEQ ID NO: 796222
ucugagggcagcauaaugu

SEQ ID NO: 796224 - RNA, 19 nt, Artificial Sequence
  Description of Artificial Sequence: Synthetic oligonucleotide
  Sense strand starting at position 505 of SEQ ID NO: 587492
ggacaaccacguuagcaau

SEQ ID NO: 796225 - RNA, 19 nt, Artificial Sequence
  Description of Artificial Sequence: Synthetic oligonucleotide
  Antisense strand to SEQ ID NO: 796224
auugcuaacgugguugucc

SEQ ID NO: 796226 - RNA, 19 nt, Artificial Sequence
  Description of Artificial Sequence: Synthetic oligonucleotide
  Sense strand starting at position 530 of SEQ ID NO: 587492
cacaacaguccguagacaa

SEQ ID NO: 796227 - RNA, 19 nt, Artificial Sequence
  Description of Artificial Sequence: Synthetic oligonucleotide
  Antisense strand to SEQ ID NO: 796226
uugucuacggacuguugug

SEQ ID NO: 796228 - RNA, 19 nt, Artificial Sequence
  Description of Artificial Sequence: Synthetic oligonucleotide
  Sense strand starting at position 918 of SEQ ID NO: 587492
ccuuccuuacaugagagua

SEQ ID NO: 796229 - RNA, 19 nt, Artificial Sequence
  Description of Artificial Sequence: Synthetic oligonucleotide
  Antisense strand to SEQ ID NO: 796228
uacucucauguaaggaagg

SEQ ID NO: 796230 - RNA, 19 nt, Artificial Sequence
  Description of Artificial Sequence: Synthetic oligonucleotide
  Sense strand starting at position 1396 of SEQ ID NO: 587492
ggcuauguucuggauaagc

SEQ ID NO: 796231 - RNA, 19 nt, Artificial Sequence
  Description of Artificial Sequence: Synthetic oligonucleotide
  Antisense strand to SEQ ID NO: 796230
gcuuauccagaacauagcc

SEQ ID NO: 796232 - RNA, 19 nt, Artificial Sequence
  Description of Artificial Sequence: Synthetic oligonucleotide
  Sense strand starting at position 1398 of SEQ ID NO: 587492
cuauguucuggauaagcca

SEQ ID NO: 796233 - RNA, 19 nt, Artificial Sequence
  Description of Artificial Sequence: Synthetic oligonucleotide
  Antisense strand to SEQ ID NO: 796232
uggcuuauccagaacauag

SEQ ID NO: 796234 - RNA, 19 nt, Artificial Sequence
  Description of Artificial Sequence: Synthetic oligonucleotide
  Sense strand starting at position 1432 of SEQ ID NO: 587492
aacgcugagcgcuauauca

SEQ ID NO: 796235 - RNA, 19 nt, Artificial Sequence
  Description of Artificial Sequence: Synthetic oligonucleotide
  Antisense strand to SEQ ID NO: 796234
ugauauagcgcucagcguu

SEQ ID NO: 796236 - RNA, 19 nt, Artificial Sequence
  Description of Artificial Sequence: Synthetic oligonucleotide
  Sense strand starting at position 1434 of SEQ ID NO: 587492
cgcugagcgcuauaucaaa

SEQ ID NO: 796237 - RNA, 19 nt, Artificial Sequence
  Description of Artificial Sequence: Synthetic oligonucleotide
  Antisense strand to SEQ ID NO: 796236
uuugauauagcgcucagcg

SEQ ID NO: 796238 - RNA, 19 nt, Artificial Sequence
  Description of Artificial Sequence: Synthetic oligonucleotide
  Sense strand starting at position 1481 of SEQ ID NO: 587492
cggacaagcuuuccuccaa

SEQ ID NO: 796239 - RNA, 19 nt, Artificial Sequence
  Description of Artificial Sequence: Synthetic oligonucleotide
  Antisense strand to SEQ ID NO: 796238
uuggaggaaagcuuguccg

SEQ ID NO: 796240 - RNA, 19 nt, Artificial Sequence
  Description of Artificial Sequence: Synthetic oligonucleotide
  Sense strand starting at position 2500 of SEQ ID NO: 587492
ggagcaguucuguaccgag

SEQ ID NO: 796241 - RNA, 19 nt, Artificial Sequence
  Description of Artificial Sequence: Synthetic oligonucleotide
  Antisense strand to SEQ ID NO: 796240
cucgguacagaacugcucc

SEQ ID NO: 796242 - RNA, 19 nt, Artificial Sequence
  Description of Artificial Sequence: Synthetic oligonucleotide
  Sense strand starting at position 2781 of SEQ ID NO: 587492
aucagaaagaguugcuguu

SEQ ID NO: 796243 - RNA, 19 nt, Artificial Sequence
  Description of Artificial Sequence: Synthetic oligonucleotide
  Antisense strand to SEQ ID NO: 796242
aacagcaacucuuucugau

SEQ ID NO: 796244 - RNA, 19 nt, Artificial Sequence
  Description of Artificial Sequence: Synthetic oligonucleotide
  Sense strand starting at position 2795 of SEQ ID NO: 587492
cuguuuguacuauguauuu

SEQ ID NO: 796245 - RNA, 19 nt, Artificial Sequence
  Description of Artificial Sequence: Synthetic oligonucleotide
  Antisense strand to SEQ ID NO: 796244
aaauacauaguacaaacag

SEQ ID NO: 796246 - RNA, 19 nt, Artificial Sequence
  Description of Artificial Sequence: Synthetic oligonucleotide
  Sense strand starting at position 3124 of SEQ ID NO: 587492
ccuauagucuagcuacuga

SEQ ID NO: 796247 - RNA, 19 nt, Artificial Sequence
  Description of Artificial Sequence: Synthetic oligonucleotide
  Antisense strand to SEQ ID NO: 796246
ucaguagcuagacuauagg

SEQ ID NO: 796248 - RNA, 19 nt, Artificial Sequence
  Description of Artificial Sequence: Synthetic oligonucleotide
  Sense strand starting at position 3186 of SEQ ID NO: 587492
ccaggagauacacguuaca

SEQ ID NO: 796249 - RNA, 19 nt, Artificial Sequence
  Description of Artificial Sequence: Synthetic oligonucleotide
  Antisense strand to SEQ ID NO: 796248
uguaacguguaucuccugg

SEQ ID NO: 796250 - RNA, 19 nt, Artificial Sequence
  Description of Artificial Sequence: Synthetic oligonucleotide
  Sense strand starting at position 3266 of SEQ ID NO: 587492
auccaauaggagugguuaa

SEQ ID NO: 796251 - RNA, 19 nt, Artificial Sequence
  Description of Artificial Sequence: Synthetic oligonucleotide
  Antisense strand to SEQ ID NO: 796250
uuaaccacuccuauuggau

SEQ ID NO: 796252 - RNA, 19 nt, Artificial Sequence
  Description of Artificial Sequence: Synthetic oligonucleotide
  Sense strand starting at position 3267 of SEQ ID NO: 587492
uccaauaggagugguuaaa

SEQ ID NO: 796253 - RNA, 19 nt, Artificial Sequence
  Description of Artificial Sequence: Synthetic oligonucleotide
  Antisense strand to SEQ ID NO: 796252
uuuaaccacuccuauugga

SEQ ID NO: 796254 - RNA, 19 nt, Artificial Sequence
  Description of Artificial Sequence: Synthetic oligonucleotide
  Sense strand starting at position 3358 of SEQ ID NO: 587492
gugggagguuuaagugaac

SEQ ID NO: 796255 - RNA, 19 nt, Artificial Sequence
  Description of Artificial Sequence: Synthetic oligonucleotide
  Antisense strand to SEQ ID NO: 796254
guucacuuaaaccucccac

SEQ ID NO: 796256 - RNA, 19 nt, Artificial Sequence
  Description of Artificial Sequence: Synthetic oligonucleotide
  Sense strand starting at position 3365 of SEQ ID NO: 587492
guuuaagugaacuauguug

SEQ ID NO: 796257 - RNA, 19 nt, Artificial Sequence
  Description of Artificial Sequence: Synthetic oligonucleotide
  Antisense strand to SEQ ID NO: 796256
caacauaguucacuuaaac

SEQ ID NO: 796258 - RNA, 19 nt, Artificial Sequence
  Description of Artificial Sequence: Synthetic oligonucleotide
  Sense strand starting at position 3367 of SEQ ID NO: 587492
uuaagugaacuauguuguu

SEQ ID NO: 796259 - RNA, 19 nt, Artificial Sequence
  Description of Artificial Sequence: Synthetic oligonucleotide
  Antisense strand to SEQ ID NO: 796258
aacaacauaguucacuuaa

SEQ ID NO: 796260 - RNA, 19 nt, Artificial Sequence
  Description of Artificial Sequence: Synthetic oligonucleotide
  Sense strand starting at position 3393 of SEQ ID NO: 587492
guauauauuuccuaucaug

SEQ ID NO: 796261 - RNA, 19 nt, Artificial Sequence
  Description of Artificial Sequence: Synthetic oligonucleotide
  Antisense strand to SEQ ID NO: 796260
caugauaggaaauauauac

SEQ ID NO: 796262 - RNA, 19 nt, Artificial Sequence
  Description of Artificial Sequence: Synthetic oligonucleotide
  Sense strand starting at position 3402 of SEQ ID NO: 587492
uccuaucaugaauacguau

SEQ ID NO: 796263 - RNA, 19 nt, Artificial Sequence
  Description of Artificial Sequence: Synthetic oligonucleotide
  Antisense strand to SEQ ID NO: 796262
auacguauucaugauagga

SEQ ID NO: 796264 - RNA, 19 nt, Artificial Sequence
  Description of Artificial Sequence: Synthetic oligonucleotide
  Sense strand starting at position 3505 of SEQ ID NO: 587492
uuuacugggcaccauaaua

SEQ ID NO: 796265 - RNA, 19 nt, Artificial Sequence
  Description of Artificial Sequence: Synthetic oligonucleotide
  Antisense strand to SEQ ID NO: 796264
uauuauggugcccaguaaa

SEQ ID NO: 796266 - RNA, 19 nt, Artificial Sequence
  Description of Artificial Sequence: Synthetic oligonucleotide
  Sense strand starting at position 3535 of SEQ ID NO: 587492
cagcgucuggcacauaaau

SEQ ID NO: 796267 - RNA, 19 nt, Artificial Sequence
  Description of Artificial Sequence: Synthetic oligonucleotide
  Antisense strand to SEQ ID NO: 796266
auuuaugugccagacgcug

SEQ ID NO: 796268 - RNA, 19 nt, Artificial Sequence
  Description of Artificial Sequence: Synthetic oligonucleotide
  Sense strand starting at position 3537 of SEQ ID NO: 587492
gcgucuggcacauaaauau

SEQ ID NO: 796269 - RNA, 19 nt, Artificial Sequence
  Description of Artificial Sequence: Synthetic oligonucleotide
  Antisense strand to SEQ ID NO: 796268
auauuuaugugccagacgc

SEQ ID NO: 796270 - RNA, 19 nt, Artificial Sequence
  Description of Artificial Sequence: Synthetic oligonucleotide
  Sense strand starting at position 3794 of SEQ ID NO: 587492
gggugauguuaagccagga

SEQ ID NO: 796271 - RNA, 19 nt, Artificial Sequence
  Description of Artificial Sequence: Synthetic oligonucleotide
  Antisense strand to SEQ ID NO: 796270
uccuggcuuaacaucaccc

SEQ ID NO: 796272 - RNA, 19 nt, Artificial Sequence
  Description of Artificial Sequence: Synthetic oligonucleotide
  Sense strand starting at position 3798 of SEQ ID NO: 587492
gauguuaagccaggaguuu

SEQ ID NO: 796273 - RNA, 19 nt, Artificial Sequence
  Description of Artificial Sequence: Synthetic oligonucleotide
  Antisense strand to SEQ ID NO: 796272
aaacuccuggcuuaacauc

SEQ ID NO: 796274 - RNA, 19 nt, Artificial Sequence
  Description of Artificial Sequence: Synthetic oligonucleotide
  Sense strand starting at position 5 of SEQ ID NO: 587493
ccagcuagucgucauaaau

SEQ ID NO: 796275 - RNA, 19 nt, Artificial Sequence
  Description of Artificial Sequence: Synthetic oligonucleotide
  Antisense strand to SEQ ID NO: 796274
auuuaugacgacuagcugg

SEQ ID NO: 796276 - RNA, 19 nt, Artificial Sequence
  Description of Artificial Sequence: Synthetic oligonucleotide
  Sense strand starting at position 47 of SEQ ID NO: 587493
cuguauaaacucgaauuau

SEQ ID NO: 796277 - RNA, 19 nt, Artificial Sequence
  Description of Artificial Sequence: Synthetic oligonucleotide
  Antisense strand to SEQ ID NO: 796276
auaauucgaguuuauacag

SEQ ID NO: 796278 - RNA, 19 nt, Artificial Sequence
  Description of Artificial Sequence: Synthetic oligonucleotide
  Sense strand starting at position 119 of SEQ ID NO: 587493
guacuuaaggucugaucuc

SEQ ID NO: 796279 - RNA, 19 nt, Artificial Sequence
  Description of Artificial Sequence: Synthetic oligonucleotide
  Antisense strand to SEQ ID NO: 796278
gagaucagaccuuaaguac

SEQ ID NO: 796280 - RNA, 19 nt, Artificial Sequence
  Description of Artificial Sequence: Synthetic oligonucleotide
  Sense strand starting at position 128 of SEQ ID NO: 587493
gucugaucucagcaaucug

SEQ ID NO: 796281 - RNA, 19 nt, Artificial Sequence
  Description of Artificial Sequence: Synthetic oligonucleotide
  Antisense strand to SEQ ID NO: 796280
cagauugcugagaucagac

SEQ ID NO: 796282 - RNA, 19 nt, Artificial Sequence
  Description of Artificial Sequence: Synthetic oligonucleotide
  Sense strand starting at position 261 of SEQ ID NO: 587493
ggaggacucucuguccacu

SEQ ID NO: 796283 - RNA, 19 nt, Artificial Sequence
  Description of Artificial Sequence: Synthetic oligonucleotide
  Antisense strand to SEQ ID NO: 796282
aguggacagagaguccucc

SEQ ID NO: 796284 - RNA, 19 nt, Artificial Sequence
  Description of Artificial Sequence: Synthetic oligonucleotide
  Sense strand starting at position 263 of SEQ ID NO: 587493
aggacucucuguccacuua

SEQ ID NO: 796285 - RNA, 19 nt, Artificial Sequence
  Description of Artificial Sequence: Synthetic oligonucleotide
  Antisense strand to SEQ ID NO: 796284
uaaguggacagagaguccu

SEQ ID NO: 796286 - RNA, 19 nt, Artificial Sequence
  Description of Artificial Sequence: Synthetic oligonucleotide
  Sense strand starting at position 380 of SEQ ID NO: 587493
gcuauuacacaacauguga

SEQ ID NO: 796287 - RNA, 19 nt, Artificial Sequence
  Description of Artificial Sequence: Synthetic oligonucleotide
  Antisense strand to SEQ ID NO: 796286
ucacauguuguguaauagc

SEQ ID NO: 796288 - RNA, 19 nt, Artificial Sequence
  Description of Artificial Sequence: Synthetic oligonucleotide
  Sense strand starting at position 391 of SEQ ID NO: 587493
acaugugacuuugcuaaau

SEQ ID NO: 796289 - RNA, 19 nt, Artificial Sequence
  Description of Artificial Sequence: Synthetic oligonucleotide
  Antisense strand to SEQ ID NO: 796288
auuuagcaaagucacaugu

SEQ ID NO: 796290 - RNA, 19 nt, Artificial Sequence
  Description of Artificial Sequence: Synthetic oligonucleotide
  Sense strand starting at position 443 of SEQ ID NO: 587493
uuauuugugugauaagaca

SEQ ID NO: 796291 - RNA, 19 nt, Artificial Sequence
  Description of Artificial Sequence: Synthetic oligonucleotide
  Antisense strand to SEQ ID NO: 796290
ugucuuaucacacaaauaa

SEQ ID NO: 796292 - RNA, 19 nt, Artificial Sequence
  Description of Artificial Sequence: Synthetic oligonucleotide
  Sense strand starting at position 450 of SEQ ID NO: 587493
ugugauaagacaugcgaau

SEQ ID NO: 796293 - RNA, 19 nt, Artificial Sequence
  Description of Artificial Sequence: Synthetic oligonucleotide
  Antisense strand to SEQ ID NO: 796292
auucgcaugucuuaucaca

SEQ ID NO: 796294 - RNA, 19 nt, Artificial Sequence
  Description of Artificial Sequence: Synthetic oligonucleotide
  Sense strand starting at position 461 of SEQ ID NO: 587493
augcgaauucuaggauagu

SEQ ID NO: 796295 - RNA, 19 nt, Artificial Sequence
  Description of Artificial Sequence: Synthetic oligonucleotide
  Antisense strand to SEQ ID NO: 796294
acuauccuagaauucgcau

SEQ ID NO: 796296 - RNA, 19 nt, Artificial Sequence
  Description of Artificial Sequence: Synthetic oligonucleotide
  Sense strand starting at position 488 of SEQ ID NO: 587493
ggcagauguccacaugaac

SEQ ID NO: 796297 - RNA, 19 nt, Artificial Sequence
  Description of Artificial Sequence: Synthetic oligonucleotide
  Antisense strand to SEQ ID NO: 796296
guucauguggacaucugcc

SEQ ID NO: 796298 - RNA, 19 nt, Artificial Sequence
  Description of Artificial Sequence: Synthetic oligonucleotide
  Sense strand starting at position 607 of SEQ ID NO: 587493
ggcacuaaguacuuuauau

SEQ ID NO: 796299 - RNA, 19 nt, Artificial Sequence
  Description of Artificial Sequence: Synthetic oligonucleotide
  Antisense strand to SEQ ID NO: 796298
auauaaaguacuuagugcc

SEQ ID NO: 796300 - RNA, 19 nt, Artificial Sequence
  Description of Artificial Sequence: Synthetic oligonucleotide
  Sense strand starting at position 616 of SEQ ID NO: 587493
uacuuuauaugugcgaaau

SEQ ID NO: 796301 - RNA, 19 nt, Artificial Sequence
  Description of Artificial Sequence: Synthetic oligonucleotide
  Antisense strand to SEQ ID NO: 796300
auuucgcacauauaaagua

SEQ ID NO: 796302 - RNA, 19 nt, Artificial Sequence
  Description of Artificial Sequence: Synthetic oligonucleotide
  Sense strand starting at position 617 of SEQ ID NO: 587493
acuuuauaugugcgaaauu

SEQ ID NO: 796303 - RNA, 19 nt, Artificial Sequence
  Description of Artificial Sequence: Synthetic oligonucleotide
  Antisense strand to SEQ ID NO: 796302
aauuucgcacauauaaagu

SEQ ID NO: 796304 - RNA, 19 nt, Artificial Sequence
  Description of Artificial Sequence: Synthetic oligonucleotide
  Sense strand starting at position 629 of SEQ ID NO: 587493
cgaaauuaauccucucagc

SEQ ID NO: 796305 - RNA, 19 nt, Artificial Sequence
  Description of Artificial Sequence: Synthetic oligonucleotide
  Antisense strand to SEQ ID NO: 796304
gcugagaggauuaauuucg

SEQ ID NO: 796306 - RNA, 19 nt, Artificial Sequence
  Description of Artificial Sequence: Synthetic oligonucleotide
  Sense strand starting at position 832 of SEQ ID NO: 587493
acagguaggcugcaucaua

SEQ ID NO: 796307 - RNA, 19 nt, Artificial Sequence
  Description of Artificial Sequence: Synthetic oligonucleotide
  Antisense strand to SEQ ID NO: 796306
uaugaugcagccuaccugu

SEQ ID NO: 796308 - RNA, 19 nt, Artificial Sequence
  Description of Artificial Sequence: Synthetic oligonucleotide
  Sense strand starting at position 910 of SEQ ID NO: 587493
cgucuucccacaggaagaa

SEQ ID NO: 796309 - RNA, 19 nt, Artificial Sequence
  Description of Artificial Sequence: Synthetic oligonucleotide
  Antisense strand to SEQ ID NO: 796308
uucuuccugugggaagacg

SEQ ID NO: 796310 - RNA, 19 nt, Artificial Sequence
  Description of Artificial Sequence: Synthetic oligonucleotide
  Sense strand starting at position 986 of SEQ ID NO: 587493
cuacguuaauucuuugaau

SEQ ID NO: 796311 - RNA, 19 nt, Artificial Sequence
  Description of Artificial Sequence: Synthetic oligonucleotide
  Antisense strand to SEQ ID NO: 796310
auucaaagaauuaacguag

SEQ ID NO: 796312 - RNA, 19 nt, Artificial Sequence
  Description of Artificial Sequence: Synthetic oligonucleotide
  Sense strand starting at position 1006 of SEQ ID NO: 587493
cucagaauaccaugaggua

SEQ ID NO: 796313 - RNA, 19 nt, Artificial Sequence
  Description of Artificial Sequence: Synthetic oligonucleotide
  Antisense strand to SEQ ID NO: 796312
uaccucaugguauucugag

SEQ ID NO: 796314 - RNA, 19 nt, Artificial Sequence
  Description of Artificial Sequence: Synthetic oligonucleotide
  Sense strand starting at position 1013 of SEQ ID NO: 587493
uaccaugagguagguguua

SEQ ID NO: 796315 - RNA, 19 nt, Artificial Sequence
  Description of Artificial Sequence: Synthetic oligonucleotide
  Antisense strand to SEQ ID NO: 796314
uaacaccuaccucauggua

SEQ ID NO: 796316 - RNA, 19 nt, Artificial Sequence
  Description of Artificial Sequence: Synthetic oligonucleotide
  Sense strand starting at position 1067 of SEQ ID NO: 587493
cacagagagucuuuguaag

SEQ ID NO: 796317 - RNA, 19 nt, Artificial Sequence
  Description of Artificial Sequence: Synthetic oligonucleotide
  Antisense strand to SEQ ID NO: 796316
cuuacaaagacucucugug

SEQ ID NO: 796318 - RNA, 19 nt, Artificial Sequence
  Description of Artificial Sequence: Synthetic oligonucleotide
  Sense strand starting at position 1069 of SEQ ID NO: 587493
cagagagucuuuguaagua

SEQ ID NO: 796319 - RNA, 19 nt, Artificial Sequence
  Description of Artificial Sequence: Synthetic oligonucleotide
  Antisense strand to SEQ ID NO: 796318
uacuuacaaagacucucug

SEQ ID NO: 796320 - RNA, 19 nt, Artificial Sequence
  Description of Artificial Sequence: Synthetic oligonucleotide
  Sense strand starting at position 1073 of SEQ ID NO: 587493
gagucuuuguaaguaacca

SEQ ID NO: 796321 - RNA, 19 nt, Artificial Sequence
  Description of Artificial Sequence: Synthetic oligonucleotide
  Antisense strand to SEQ ID NO: 796320
ugguuacuuacaaagacuc

SEQ ID NO: 796322 - RNA, 19 nt, Artificial Sequence
  Description of Artificial Sequence: Synthetic oligonucleotide
  Sense strand starting at position 1081 of SEQ ID NO: 587493
guaaguaaccaacaguuua

SEQ ID NO: 796323 - RNA, 19 nt, Artificial Sequence
  Description of Artificial Sequence: Synthetic oligonucleotide
  Antisense strand to SEQ ID NO: 796322
uaaacuguugguuacuuac

SEQ ID NO: 796324 - RNA, 19 nt, Artificial Sequence
  Description of Artificial Sequence: Synthetic oligonucleotide
  Sense strand starting at position 1093 of SEQ ID NO: 587493
caguuuaguaagugggaga

SEQ ID NO: 796325 - RNA, 19 nt, Artificial Sequence
  Description of Artificial Sequence: Synthetic oligonucleotide
  Antisense strand to SEQ ID NO: 796324
ucucccacuuacuaaacug

SEQ ID NO: 796326 - RNA, 19 nt, Artificial Sequence
  Description of Artificial Sequence: Synthetic oligonucleotide
  Sense strand starting at position 1094 of SEQ ID NO: 587493
aguuuaguaagugggagau

SEQ ID NO: 796327 - RNA, 19 nt, Artificial Sequence
  Description of Artificial Sequence: Synthetic oligonucleotide
  Antisense strand to SEQ ID NO: 796326
aucucccacuuacuaaacu

SEQ ID NO: 796328 - RNA, 19 nt, Artificial Sequence
  Description of Artificial Sequence: Synthetic oligonucleotide
  Sense strand starting at position 1096 of SEQ ID NO: 587493
uuuaguaagugggagauuu

SEQ ID NO: 796329 - RNA, 19 nt, Artificial Sequence
  Description of Artificial Sequence: Synthetic oligonucleotide
  Antisense strand to SEQ ID NO: 796328
aaaucucccacuuacuaaa

SEQ ID NO: 796330 - RNA, 19 nt, Artificial Sequence
  Description of Artificial Sequence: Synthetic oligonucleotide
  Sense strand starting at position 1174 of SEQ ID NO: 587493
acauuaugcugcccucaga

SEQ ID NO: 796331 - RNA, 19 nt, Artificial Sequence
  Description of Artificial Sequence: Synthetic oligonucleotide
  Antisense strand to SEQ ID NO: 796330
ucugagggcagcauaaugu

SEQ ID NO: 796332 - RNA, 19 nt, Artificial Sequence
  Description of Artificial Sequence: Synthetic oligonucleotide
  Sense strand starting at position 1232 of SEQ ID NO: 587493
ggacaaccacguuagcaau

SEQ ID NO: 796333 - RNA, 19 nt, Artificial Sequence
  Description of Artificial Sequence: Synthetic oligonucleotide
  Antisense strand to SEQ ID NO: 796332
auugcuaacgugguugucc

SEQ ID NO: 796334 - RNA, 19 nt, Artificial Sequence
  Description of Artificial Sequence: Synthetic oligonucleotide
  Sense strand starting at position 1257 of SEQ ID NO: 587493
cacaacaguccguagacaa

SEQ ID NO: 796335 - RNA, 19 nt, Artificial Sequence
  Description of Artificial Sequence: Synthetic oligonucleotide
  Antisense strand to SEQ ID NO: 796334
uugucuacggacuguugug

SEQ ID NO: 796336 - RNA, 19 nt, Artificial Sequence
  Description of Artificial Sequence: Synthetic oligonucleotide
  Sense strand starting at position 1645 of SEQ ID NO: 587493
ccuuccuuacaugagagua

SEQ ID NO: 796337 - RNA, 19 nt, Artificial Sequence
  Description of Artificial Sequence: Synthetic oligonucleotide
  Antisense strand to SEQ ID NO: 796336
uacucucauguaaggaagg

SEQ ID NO: 796338 - RNA, 19 nt, Artificial Sequence
  Description of Artificial Sequence: Synthetic oligonucleotide
  Sense strand starting at position 2123 of SEQ ID NO: 587493
ggcuauguucuggauaagc

SEQ ID NO: 796339 - RNA, 19 nt, Artificial Sequence
  Description of Artificial Sequence: Synthetic oligonucleotide
  Antisense strand to SEQ ID NO: 796338
gcuuauccagaacauagcc

SEQ ID NO: 796340 - RNA, 19 nt, Artificial Sequence
  Description of Artificial Sequence: Synthetic oligonucleotide
  Sense strand starting at position 2125 of SEQ ID NO: 587493
cuauguucuggauaagcca

SEQ ID NO: 796341 - RNA, 19 nt, Artificial Sequence
  Description of Artificial Sequence: Synthetic oligonucleotide
  Antisense strand to SEQ ID NO: 796340
uggcuuauccagaacauag

SEQ ID NO: 796342 - RNA, 19 nt, Artificial Sequence
  Description of Artificial Sequence: Synthetic oligonucleotide
  Sense strand starting at position 2208 of SEQ ID NO: 587493
cggacaagcuuuccuccaa

SEQ ID NO: 796343 - RNA, 19 nt, Artificial Sequence
  Description of Artificial Sequence: Synthetic oligonucleotide
  Antisense strand to SEQ ID NO: 796342
uuggaggaaagcuuguccg

SEQ ID NO: 796344 - RNA, 19 nt, Artificial Sequence
  Description of Artificial Sequence: Synthetic oligonucleotide
  Sense strand starting at position 3227 of SEQ ID NO: 587493
ggagcaguucuguaccgag

SEQ ID NO: 796345 - RNA, 19 nt, Artificial Sequence
  Description of Artificial Sequence: Synthetic oligonucleotide
  Antisense strand to SEQ ID NO: 796344
cucgguacagaacugcucc

SEQ ID NO: 796346 - RNA, 19 nt, Artificial Sequence
  Description of Artificial Sequence: Synthetic oligonucleotide
  Sense strand starting at position 3508 of SEQ ID NO: 587493
aucagaaagaguugcuguu

SEQ ID NO: 796347 - RNA, 19 nt, Artificial Sequence
  Description of Artificial Sequence: Synthetic oligonucleotide
  Antisense strand to SEQ ID NO: 796346
aacagcaacucuuucugau

SEQ ID NO: 796348 - RNA, 19 nt, Artificial Sequence
  Description of Artificial Sequence: Synthetic oligonucleotide
  Sense strand starting at position 3522 of SEQ ID NO: 587493
cuguuuguacuauguauuu

SEQ ID NO: 796349 - RNA, 19 nt, Artificial Sequence
  Description of Artificial Sequence: Synthetic oligonucleotide
  Antisense strand to SEQ ID NO: 796348
aaauacauaguacaaacag

SEQ ID NO: 796350 - RNA, 19 nt, Artificial Sequence
  Description of Artificial Sequence: Synthetic oligonucleotide
  Sense strand starting at position 3851 of SEQ ID NO: 587493
ccuauagucuagcuacuga

SEQ ID NO: 796351 - RNA, 19 nt, Artificial Sequence
  Description of Artificial Sequence: Synthetic oligonucleotide
  Antisense strand to SEQ ID NO: 796350
ucaguagcuagacuauagg

SEQ ID NO: 796352 - RNA, 19 nt, Artificial Sequence
  Description of Artificial Sequence: Synthetic oligonucleotide
  Sense strand starting at position 3913 of SEQ ID NO: 587493
ccaggagauacacguuaca

SEQ ID NO: 796353 - RNA, 19 nt, Artificial Sequence
  Description of Artificial Sequence: Synthetic oligonucleotide
  Antisense strand to SEQ ID NO: 796352
uguaacguguaucuccugg

SEQ ID NO: 796354 - RNA, 19 nt, Artificial Sequence
  Description of Artificial Sequence: Synthetic oligonucleotide
  Sense strand starting at position 8 of SEQ ID NO: 587494
cccugaugcuucccugaga

SEQ ID NO: 796355 - RNA, 19 nt, Artificial Sequence
  Description of Artificial Sequence: Synthetic oligonucleotide
  Antisense strand to SEQ ID NO: 796354
ucucagggaagcaucaggg

SEQ ID NO: 796356 - RNA, 19 nt, Artificial Sequence
  Description of Artificial Sequence: Synthetic oligonucleotide
  Sense strand starting at position 9 of SEQ ID NO: 587494
ccugaugcuucccugagag

SEQ ID NO: 796357 - RNA, 19 nt, Artificial Sequence
  Description of Artificial Sequence: Synthetic oligonucleotide
  Antisense strand to SEQ ID NO: 796356
cucucagggaagcaucagg

SEQ ID NO: 796358 - RNA, 19 nt, Artificial Sequence
  Description of Artificial Sequence: Synthetic oligonucleotide
  Sense strand starting at position 267 of SEQ ID NO: 587494
ucaucauagccaugagcau

SEQ ID NO: 796359 - RNA, 19 nt, Artificial Sequence
  Description of Artificial Sequence: Synthetic oligonucleotide
  Antisense strand to SEQ ID NO: 796358
augcucauggcuaugauga

SEQ ID NO: 796360 - RNA, 19 nt, Artificial Sequence
  Description of Artificial Sequence: Synthetic oligonucleotide
  Sense strand starting at position 306 of SEQ ID NO: 587494
uuggauagguucucucaaa

SEQ ID NO: 796361 - RNA, 19 nt, Artificial Sequence
  Description of Artificial Sequence: Synthetic oligonucleotide
  Antisense strand to SEQ ID NO: 796360
uuugagagaaccuauccaa

SEQ ID NO: 796362 - RNA, 19 nt, Artificial Sequence
  Description of Artificial Sequence: Synthetic oligonucleotide
  Sense strand starting at position 446 of SEQ ID NO: 587494
cagccuuggguccaaauca

SEQ ID NO: 796363 - RNA, 19 nt, Artificial Sequence
  Description of Artificial Sequence: Synthetic oligonucleotide
  Antisense strand to SEQ ID NO: 796362
ugauuuggacccaaggcug

SEQ ID NO: 796364 - RNA, 19 nt, Artificial Sequence
  Description of Artificial Sequence: Synthetic oligonucleotide
  Sense strand starting at position 454 of SEQ ID NO: 587494
gguccaaaucaucaucugu

SEQ ID NO: 796365 - RNA, 19 nt, Artificial Sequence
  Description of Artificial Sequence: Synthetic oligonucleotide
  Antisense strand to SEQ ID NO: 796364
acagaugaugauuuggacc

SEQ ID NO: 796366 - RNA, 19 nt, Artificial Sequence
  Description of Artificial Sequence: Synthetic oligonucleotide
  Sense strand starting at position 980 of SEQ ID NO: 587494
uugaucugauagguagcua

SEQ ID NO: 796367 - RNA, 19 nt, Artificial Sequence
  Description of Artificial Sequence: Synthetic oligonucleotide
  Antisense strand to SEQ ID NO: 796366
uagcuaccuaucagaucaa

SEQ ID NO: 796368 - RNA, 19 nt, Artificial Sequence
  Description of Artificial Sequence: Synthetic oligonucleotide
  Sense strand starting at position 981 of SEQ ID NO: 587494
ugaucugauagguagcuaa

SEQ ID NO: 796369 - RNA, 19 nt, Artificial Sequence
  Description of Artificial Sequence: Synthetic oligonucleotide
  Antisense strand to SEQ ID NO: 796368
uuagcuaccuaucagauca

SEQ ID NO: 796370 - RNA, 19 nt, Artificial Sequence
  Description of Artificial Sequence: Synthetic oligonucleotide
  Sense strand starting at position 984 of SEQ ID NO: 587494
ucugauagguagcuaaaua

SEQ ID NO: 796371 - RNA, 19 nt, Artificial Sequence
  Description of Artificial Sequence: Synthetic oligonucleotide
  Antisense strand to SEQ ID NO: 796370
uauuuagcuaccuaucaga

SEQ ID NO: 796372 - RNA, 19 nt, Artificial Sequence
  Description of Artificial Sequence: Synthetic oligonucleotide
  Sense strand starting at position 1172 of SEQ ID NO: 587494
caaauaaagcguggagcuu

SEQ ID NO: 796373 - RNA, 19 nt, Artificial Sequence
  Description of Artificial Sequence: Synthetic oligonucleotide
  Antisense strand to SEQ ID NO: 796372
aagcuccacgcuuuauuug

SEQ ID NO: 796374 - RNA, 19 nt, Artificial Sequence
  Description of Artificial Sequence: Synthetic oligonucleotide
  Sense strand starting at position 1178 of SEQ ID NO: 587494
aagcguggagcuuaguuaa

SEQ ID NO: 796375 - RNA, 19 nt, Artificial Sequence
  Description of Artificial Sequence: Synthetic oligonucleotide
  Antisense strand to SEQ ID NO: 796374
uuaacuaagcuccacgcuu

SEQ ID NO: 796376 - RNA, 19 nt, Artificial Sequence
  Description of Artificial Sequence: Synthetic oligonucleotide
  Sense strand starting at position 1181 of SEQ ID NO: 587494
cguggagcuuaguuaauag

SEQ ID NO: 796377 - RNA, 19 nt, Artificial Sequence
  Description of Artificial Sequence: Synthetic oligonucleotide
  Antisense strand to SEQ ID NO: 796376
cuauuaacuaagcuccacg

SEQ ID NO: 796378 - RNA, 19 nt, Artificial Sequence
  Description of Artificial Sequence: Synthetic oligonucleotide
  Sense strand starting at position 1377 of SEQ ID NO: 587494
cuaugaguuccugaggcaa

SEQ ID NO: 796379 - RNA, 19 nt, Artificial Sequence
  Description of Artificial Sequence: Synthetic oligonucleotide
  Antisense strand to SEQ ID NO: 796378
uugccucaggaacucauag

SEQ ID NO: 796380 - RNA, 19 nt, Artificial Sequence
  Description of Artificial Sequence: Synthetic oligonucleotide
  Sense strand starting at position 1678 of SEQ ID NO: 587494
gacugcuuccauuguggaa

SEQ ID NO: 796381 - RNA, 19 nt, Artificial Sequence
  Description of Artificial Sequence: Synthetic oligonucleotide
  Antisense strand to SEQ ID NO: 796380
uuccacaauggaagcaguc

SEQ ID NO: 796382 - RNA, 19 nt, Artificial Sequence
  Description of Artificial Sequence: Synthetic oligonucleotide
  Sense strand starting at position 2045 of SEQ ID NO: 587494
aaagcuguguauucuuuga

SEQ ID NO: 796383 - RNA, 19 nt, Artificial Sequence
  Description of Artificial Sequence: Synthetic oligonucleotide
  Antisense strand to SEQ ID NO: 796382
ucaaagaauacacagcuuu

SEQ ID NO: 796384 - RNA, 19 nt, Artificial Sequence
  Description of Artificial Sequence: Synthetic oligonucleotide
  Sense strand starting at position 2079 of SEQ ID NO: 587494
ggugcuagucaggacucau

SEQ ID NO: 796385 - RNA, 19 nt, Artificial Sequence
  Description of Artificial Sequence: Synthetic oligonucleotide
  Antisense strand to SEQ ID NO: 796384
augaguccugacuagcacc

SEQ ID NO: 796386 - RNA, 19 nt, Artificial Sequence
  Description of Artificial Sequence: Synthetic oligonucleotide
  Sense strand starting at position 2194 of SEQ ID NO: 587494
ccuguuagccuagagaucu

SEQ ID NO: 796387 - RNA, 19 nt, Artificial Sequence
  Description of Artificial Sequence: Synthetic oligonucleotide
  Antisense strand to SEQ ID NO: 796386
agaucucuaggcuaacagg

SEQ ID NO: 796388 - RNA, 19 nt, Artificial Sequence
  Description of Artificial Sequence: Synthetic oligonucleotide
  Sense strand starting at position 2250 of SEQ ID NO: 587494
cagugauuccauugcacug

SEQ ID NO: 796389 - RNA, 19 nt, Artificial Sequence
  Description of Artificial Sequence: Synthetic oligonucleotide
  Antisense strand to SEQ ID NO: 796388
cagugcaauggaaucacug

SEQ ID NO: 796390 - RNA, 19 nt, Artificial Sequence
  Description of Artificial Sequence: Synthetic oligonucleotide
  Sense strand starting at position 2255 of SEQ ID NO: 587494
auuccauugcacugaaagu

SEQ ID NO: 796391 - RNA, 19 nt, Artificial Sequence
  Description of Artificial Sequence: Synthetic oligonucleotide
  Antisense strand to SEQ ID NO: 796390
acuuucagugcaauggaau

SEQ ID NO: 796392 - RNA, 19 nt, Artificial Sequence
  Description of Artificial Sequence: Synthetic oligonucleotide
  Sense strand starting at position 2378 of SEQ ID NO: 587494
gcuacuauuccacaaugga

SEQ ID NO: 796393 - RNA, 19 nt, Artificial Sequence
  Description of Artificial Sequence: Synthetic oligonucleotide
  Antisense strand to SEQ ID NO: 796392
uccauuguggaauaguagc

SEQ ID NO: 796394 - RNA, 19 nt, Artificial Sequence
  Description of Artificial Sequence: Synthetic oligonucleotide
  Sense strand starting at position 2590 of SEQ ID NO: 587494
cugaaagguuugccaagua

SEQ ID NO: 796395 - RNA, 19 nt, Artificial Sequence
  Description of Artificial Sequence: Synthetic oligonucleotide
  Antisense strand to SEQ ID NO: 796394
uacuuggcaaaccuuucag

SEQ ID NO: 796396 - RNA, 19 nt, Artificial Sequence
  Description of Artificial Sequence: Synthetic oligonucleotide
  Sense strand starting at position 2682 of SEQ ID NO: 587494
ugaggacuguuauugucau

SEQ ID NO: 796397 - RNA, 19 nt, Artificial Sequence
  Description of Artificial Sequence: Synthetic oligonucleotide
  Antisense strand to SEQ ID NO: 796396
augacaauaacaguccuca

SEQ ID NO: 796398 - RNA, 19 nt, Artificial Sequence
  Description of Artificial Sequence: Synthetic oligonucleotide
  Sense strand starting at position 2689 of SEQ ID NO: 587494
uguuauugucaugaguuua

SEQ ID NO: 796399 - RNA, 19 nt, Artificial Sequence
  Description of Artificial Sequence: Synthetic oligonucleotide
  Antisense strand to SEQ ID NO: 796398
uaaacucaugacaauaaca

SEQ ID NO: 796400 - RNA, 19 nt, Artificial Sequence
  Description of Artificial Sequence: Synthetic oligonucleotide
  Sense strand starting at position 2727 of SEQ ID NO: 587494
guguacauauauguacauu

SEQ ID NO: 796401 - RNA, 19 nt, Artificial Sequence
  Description of Artificial Sequence: Synthetic oligonucleotide
  Antisense strand to SEQ ID NO: 796400
aauguacauauauguacac

SEQ ID NO: 796402 - RNA, 19 nt, Artificial Sequence
  Description of Artificial Sequence: Synthetic oligonucleotide
  Sense strand starting at position 2865 of SEQ ID NO: 587494
gaucgacauuucuugcacu

SEQ ID NO: 796403 - RNA, 19 nt, Artificial Sequence
  Description of Artificial Sequence: Synthetic oligonucleotide
  Antisense strand to SEQ ID NO: 796402
agugcaagaaaugucgauc

SEQ ID NO: 796404 - RNA, 19 nt, Artificial Sequence
  Description of Artificial Sequence: Synthetic oligonucleotide
  Sense strand starting at position 2970 of SEQ ID NO: 587494
gaagaauuccagggccagu

SEQ ID NO: 796405 - RNA, 19 nt, Artificial Sequence
  Description of Artificial Sequence: Synthetic oligonucleotide
  Antisense strand to SEQ ID NO: 796404
acuggcccuggaauucuuc

SEQ ID NO: 796406 - RNA, 19 nt, Artificial Sequence
  Description of Artificial Sequence: Synthetic oligonucleotide
  Sense strand starting at position 3312 of SEQ ID NO: 587494
uugggaggcugaguuagau

SEQ ID NO: 796407 - RNA, 19 nt, Artificial Sequence
  Description of Artificial Sequence: Synthetic oligonucleotide
  Antisense strand to SEQ ID NO: 796406
aucuaacucagccucccaa

SEQ ID NO: 796408 - RNA, 19 nt, Artificial Sequence
  Description of Artificial Sequence: Synthetic oligonucleotide
  Sense strand starting at position 3566 of SEQ ID NO: 587494
gaagaaugguuaccucuga

SEQ ID NO: 796409 - RNA, 19 nt, Artificial Sequence
  Description of Artificial Sequence: Synthetic oligonucleotide
  Antisense strand to SEQ ID NO: 796408
ucagagguaaccauucuuc

SEQ ID NO: 796410 - RNA, 19 nt, Artificial Sequence
  Description of Artificial Sequence: Synthetic oligonucleotide
  Sense strand starting at position 3570 of SEQ ID NO: 587494
aaugguuaccucugaggag

SEQ ID NO: 796411 - RNA, 19 nt, Artificial Sequence
  Description of Artificial Sequence: Synthetic oligonucleotide
  Antisense strand to SEQ ID NO: 796410
cuccucagagguaaccauu

SEQ ID NO: 796412 - RNA, 19 nt, Artificial Sequence
  Description of Artificial Sequence: Synthetic oligonucleotide
  Sense strand starting at position 3589 of SEQ ID NO: 587494
ggacauuaauuaggaagaa

SEQ ID NO: 796413 - RNA, 19 nt, Artificial Sequence
  Description of Artificial Sequence: Synthetic oligonucleotide
  Antisense strand to SEQ ID NO: 796412
uucuuccuaauuaaugucc

SEQ ID NO: 796414 - RNA, 19 nt, Artificial Sequence
  Description of Artificial Sequence: Synthetic oligonucleotide
  Sense strand starting at position 3590 of SEQ ID NO: 587494
gacauuaauuaggaagaag

SEQ ID NO: 796415 - RNA, 19 nt, Artificial Sequence
  Description of Artificial Sequence: Synthetic oligonucleotide
  Antisense strand to SEQ ID NO: 796414
cuucuuccuaauuaauguc

SEQ ID NO: 796416 - RNA, 19 nt, Artificial Sequence
  Description of Artificial Sequence: Synthetic oligonucleotide
  Sense strand starting at position 3647 of SEQ ID NO: 587494
agacauguguaagcacaua

SEQ ID NO: 796417 - RNA, 19 nt, Artificial Sequence
  Description of Artificial Sequence: Synthetic oligonucleotide
  Antisense strand to SEQ ID NO: 796416
uaugugcuuacacaugucu

SEQ ID NO: 796418 - RNA, 19 nt, Artificial Sequence
  Description of Artificial Sequence: Synthetic oligonucleotide
  Sense strand starting at position 3840 of SEQ ID NO: 587494
uuagacuauucucucugua

SEQ ID NO: 796419 - RNA, 19 nt, Artificial Sequence
  Description of Artificial Sequence: Synthetic oligonucleotide
  Antisense strand to SEQ ID NO: 796418
uacagagagaauagucuaa

SEQ ID NO: 796420 - RNA, 19 nt, Artificial Sequence
  Description of Artificial Sequence: Synthetic oligonucleotide
  Sense strand starting at position 3915 of SEQ ID NO: 587494
uuucuugguguuugaaaug

SEQ ID NO: 796421 - RNA, 19 nt, Artificial Sequence
  Description of Artificial Sequence: Synthetic oligonucleotide
  Antisense strand to SEQ ID NO: 796420
cauuucaaacaccaagaaa

SEQ ID NO: 796422 - RNA, 19 nt, Artificial Sequence
  Description of Artificial Sequence: Synthetic oligonucleotide
  Sense strand starting at position 3920 of SEQ ID NO: 587494
ugguguuugaaauggauug

SEQ ID NO: 796423 - RNA, 19 nt, Artificial Sequence
  Description of Artificial Sequence: Synthetic oligonucleotide
  Antisense strand to SEQ ID NO: 796422
caauccauuucaaacacca

SEQ ID NO: 796424 - RNA, 19 nt, Artificial Sequence
  Description of Artificial Sequence: Synthetic oligonucleotide
  Sense strand starting at position 3921 of SEQ ID NO: 587494
gguguuugaaauggauuga

SEQ ID NO: 796425 - RNA, 19 nt, Artificial Sequence
  Description of Artificial Sequence: Synthetic oligonucleotide
  Antisense strand to SEQ ID NO: 796424
ucaauccauuucaaacacc

SEQ ID NO: 796426 - RNA, 19 nt, Artificial Sequence
  Description of Artificial Sequence: Synthetic oligonucleotide
  Sense strand starting at position 3940 of SEQ ID NO: 587494
gagaucucagcagguacaa

SEQ ID NO: 796427 - RNA, 19 nt, Artificial Sequence
  Description of Artificial Sequence: Synthetic oligonucleotide
  Antisense strand to SEQ ID NO: 796426
uuguaccugcugagaucuc

SEQ ID NO: 796428 - RNA, 19 nt, Artificial Sequence
  Description of Artificial Sequence: Synthetic oligonucleotide
  Sense strand starting at position 3964 of SEQ ID NO: 587494
uuuagagggcuguaucaga

SEQ ID NO: 796429 - RNA, 19 nt, Artificial Sequence
  Description of Artificial Sequence: Synthetic oligonucleotide
  Antisense strand to SEQ ID NO: 796428
ucugauacagcccucuaaa

SEQ ID NO: 796430 - RNA, 19 nt, Artificial Sequence
  Description of Artificial Sequence: Synthetic oligonucleotide
  Sense strand starting at position 3971 of SEQ ID NO: 587494
ggcuguaucagauggaaua

SEQ ID NO: 796431 - RNA, 19 nt, Artificial Sequence
  Description of Artificial Sequence: Synthetic oligonucleotide
  Antisense strand to SEQ ID NO: 796430
uauuccaucugauacagcc

SEQ ID NO: 796432 - RNA, 19 nt, Artificial Sequence
  Description of Artificial Sequence: Synthetic oligonucleotide
  Sense strand starting at position 3972 of SEQ ID NO: 587494
gcuguaucagauggaauau

SEQ ID NO: 796433 - RNA, 19 nt, Artificial Sequence
  Description of Artificial Sequence: Synthetic oligonucleotide
  Antisense strand to SEQ ID NO: 796432
auauuccaucugauacagc

SEQ ID NO: 796434 - RNA, 19 nt, Artificial Sequence
  Description of Artificial Sequence: Synthetic oligonucleotide
  Sense strand starting at position 115 of SEQ ID NO: 587495
gcucucagagcuggacauu

SEQ ID NO: 796435 - RNA, 19 nt, Artificial Sequence
  Description of Artificial Sequence: Synthetic oligonucleotide
  Antisense strand to SEQ ID NO: 796434
aauguccagcucugagagc

SEQ ID NO: 796436 - RNA, 19 nt, Artificial Sequence
  Description of Artificial Sequence: Synthetic oligonucleotide
  Sense strand starting at position 206 of SEQ ID NO: 587495
cugccuagccucugcaaga

SEQ ID NO: 796437 - RNA, 19 nt, Artificial Sequence
  Description of Artificial Sequence: Synthetic oligonucleotide
  Antisense strand to SEQ ID NO: 796436
ucuugcagaggcuaggcag

SEQ ID NO: 796438 - RNA, 19 nt, Artificial Sequence
  Description of Artificial Sequence: Synthetic oligonucleotide
  Sense strand starting at position 574 of SEQ ID NO: 587495
cagacagcugcuugucaga

SEQ ID NO: 796439 - RNA, 19 nt, Artificial Sequence
  Description of Artificial Sequence: Synthetic oligonucleotide
  Antisense strand to SEQ ID NO: 796438
ucugacaagcagcugucug

SEQ ID NO: 796440 - RNA, 19 nt, Artificial Sequence
  Description of Artificial Sequence: Synthetic oligonucleotide
  Sense strand starting at position 576 of SEQ ID NO: 587495
gacagcugcuugucagaca

SEQ ID NO: 796441 - RNA, 19 nt, Artificial Sequence
  Description of Artificial Sequence: Synthetic oligonucleotide
  Antisense strand to SEQ ID NO: 796440
ugucugacaagcagcuguc

SEQ ID NO: 796442 - RNA, 19 nt, Artificial Sequence
  Description of Artificial Sequence: Synthetic oligonucleotide
  Sense strand starting at position 1316 of SEQ ID NO: 587495
cauccauauugaugggagu

SEQ ID NO: 796443 - RNA, 19 nt, Artificial Sequence
  Description of Artificial Sequence: Synthetic oligonucleotide
  Antisense strand to SEQ ID NO: 796442
acucccaucaauauggaug

SEQ ID NO: 796444 - RNA, 19 nt, Artificial Sequence
  Description of Artificial Sequence: Synthetic oligonucleotide
  Sense strand starting at position 1947 of SEQ ID NO: 587495
acacuuacagagugagguu

SEQ ID NO: 796445 - RNA, 19 nt, Artificial Sequence
  Description of Artificial Sequence: Synthetic oligonucleotide
  Antisense strand to SEQ ID NO: 796444
aaccucacucuguaagugu

SEQ ID NO: 796446 - RNA, 19 nt, Artificial Sequence
  Description of Artificial Sequence: Synthetic oligonucleotide
  Sense strand starting at position 2522 of SEQ ID NO: 587495
cuggcucuggaguggaaau

SEQ ID NO: 796447 - RNA, 19 nt, Artificial Sequence
  Description of Artificial Sequence: Synthetic oligonucleotide
  Antisense strand to SEQ ID NO: 796446
auuuccacuccagagccag

SEQ ID NO: 796448 - RNA, 19 nt, Artificial Sequence
  Description of Artificial Sequence: Synthetic oligonucleotide
  Sense strand starting at position 2523 of SEQ ID NO: 587495
uggcucuggaguggaaauu

SEQ ID NO: 796449 - RNA, 19 nt, Artificial Sequence
  Description of Artificial Sequence: Synthetic oligonucleotide
  Antisense strand to SEQ ID NO: 796448
aauuuccacuccagagcca

SEQ ID NO: 796450 - RNA, 19 nt, Artificial Sequence
  Description of Artificial Sequence: Synthetic oligonucleotide
  Sense strand starting at position 2607 of SEQ ID NO: 587495
gcugauugcccgggaagga

SEQ ID NO: 796451 - RNA, 19 nt, Artificial Sequence
  Description of Artificial Sequence: Synthetic oligonucleotide
  Antisense strand to SEQ ID NO: 796450
uccuucccgggcaaucagc

SEQ ID NO: 796452 - RNA, 19 nt, Artificial Sequence
  Description of Artificial Sequence: Synthetic oligonucleotide
  Sense strand starting at position 2628 of SEQ ID NO: 587495
gguuaaggcuguccugauc

SEQ ID NO: 796453 - RNA, 19 nt, Artificial Sequence
  Description of Artificial Sequence: Synthetic oligonucleotide
  Antisense strand to SEQ ID NO: 796452
gaucaggacagccuuaacc

SEQ ID NO: 796454 - RNA, 19 nt, Artificial Sequence
  Description of Artificial Sequence: Synthetic oligonucleotide
  Sense strand starting at position 2637 of SEQ ID NO: 587495
uguccugaucggcagcaaa

SEQ ID NO: 796455 - RNA, 19 nt, Artificial Sequence
  Description of Artificial Sequence: Synthetic oligonucleotide
  Antisense strand to SEQ ID NO: 796454
uuugcugccgaucaggaca

SEQ ID NO: 796456 - RNA, 19 nt, Artificial Sequence
  Description of Artificial Sequence: Synthetic oligonucleotide
  Sense strand starting at position 2686 of SEQ ID NO: 587495
uggguuggcagguacagau

SEQ ID NO: 796457 - RNA, 19 nt, Artificial Sequence
  Description of Artificial Sequence: Synthetic oligonucleotide
  Antisense strand to SEQ ID NO: 796456
aucuguaccugccaaccca

SEQ ID NO: 796458 - RNA, 19 nt, Artificial Sequence
  Description of Artificial Sequence: Synthetic oligonucleotide
  Sense strand starting at position 2712 of SEQ ID NO: 587495
uaggaagaaucccaaugga

SEQ ID NO: 796459 - RNA, 19 nt, Artificial Sequence
  Description of Artificial Sequence: Synthetic oligonucleotide
  Antisense strand to SEQ ID NO: 796458
uccauugggauucuuccua

SEQ ID NO: 796460 - RNA, 19 nt, Artificial Sequence
  Description of Artificial Sequence: Synthetic oligonucleotide
  Sense strand starting at position 2811 of SEQ ID NO: 587495
guaguuccaucugagaaau

SEQ ID NO: 796461 - RNA, 19 nt, Artificial Sequence
  Description of Artificial Sequence: Synthetic oligonucleotide
  Antisense strand to SEQ ID NO: 796460
auuucucagauggaacuac

SEQ ID NO: 796462 - RNA, 19 nt, Artificial Sequence
  Description of Artificial Sequence: Synthetic oligonucleotide
  Sense strand starting at position 2813 of SEQ ID NO: 587495
aguuccaucugagaaauga

SEQ ID NO: 796463 - RNA, 19 nt, Artificial Sequence
  Description of Artificial Sequence: Synthetic oligonucleotide
  Antisense strand to SEQ ID NO: 796462
ucauuucucagauggaacu

SEQ ID NO: 796464 - RNA, 19 nt, Artificial Sequence
  Description of Artificial Sequence: Synthetic oligonucleotide
  Sense strand starting at position 2836 of SEQ ID NO: 587495
aguaaugccucaggguguu

SEQ ID NO: 796465 - RNA, 19 nt, Artificial Sequence
  Description of Artificial Sequence: Synthetic oligonucleotide
  Antisense strand to SEQ ID NO: 796464
aacacccugaggcauuacu

SEQ ID NO: 796466 - RNA, 19 nt, Artificial Sequence
  Description of Artificial Sequence: Synthetic oligonucleotide
  Sense strand starting at position 2865 of SEQ ID NO: 587495
gugugaaaucagcacauag

SEQ ID NO: 796467 - RNA, 19 nt, Artificial Sequence
  Description of Artificial Sequence: Synthetic oligonucleotide
  Antisense strand to SEQ ID NO: 796466
cuaugugcugauuucacac

SEQ ID NO: 796468 - RNA, 19 nt, Artificial Sequence
  Description of Artificial Sequence: Synthetic oligonucleotide
  Sense strand starting at position 2867 of SEQ ID NO: 587495
gugaaaucagcacauagca

SEQ ID NO: 796469 - RNA, 19 nt, Artificial Sequence
  Description of Artificial Sequence: Synthetic oligonucleotide
  Antisense strand to SEQ ID NO: 796468
ugcuaugugcugauuucac

SEQ ID NO: 796470 - RNA, 19 nt, Artificial Sequence
  Description of Artificial Sequence: Synthetic oligonucleotide
  Sense strand starting at position 2890 of SEQ ID NO: 587495
ucaagaugucuguguucug

SEQ ID NO: 796471 - RNA, 19 nt, Artificial Sequence
  Description of Artificial Sequence: Synthetic oligonucleotide
  Antisense strand to SEQ ID NO: 796470
cagaacacagacaucuuga

SEQ ID NO: 796472 - RNA, 19 nt, Artificial Sequence
  Description of Artificial Sequence: Synthetic oligonucleotide
  Sense strand starting at position 2891 of SEQ ID NO: 587495
caagaugucuguguucuga

SEQ ID NO: 796473 - RNA, 19 nt, Artificial Sequence
  Description of Artificial Sequence: Synthetic oligonucleotide
  Antisense strand to SEQ ID NO: 796472
ucagaacacagacaucuug

SEQ ID NO: 796474 - RNA, 19 nt, Artificial Sequence
  Description of Artificial Sequence: Synthetic oligonucleotide
  Sense strand starting at position 2893 of SEQ ID NO: 587495
agaugucuguguucugaga

SEQ ID NO: 796475 - RNA, 19 nt, Artificial Sequence
  Description of Artificial Sequence: Synthetic oligonucleotide
  Antisense strand to SEQ ID NO: 796474
ucucagaacacagacaucu

SEQ ID NO: 796476 - RNA, 19 nt, Artificial Sequence
  Description of Artificial Sequence: Synthetic oligonucleotide
  Sense strand starting at position 3069 of SEQ ID NO: 587495
ucucauacugcucgguaca

SEQ ID NO: 796477 - RNA, 19 nt, Artificial Sequence
  Description of Artificial Sequence: Synthetic oligonucleotide
  Antisense strand to SEQ ID NO: 796476
uguaccgagcaguaugaga

SEQ ID NO: 796478 - RNA, 19 nt, Artificial Sequence
  Description of Artificial Sequence: Synthetic oligonucleotide
  Sense strand starting at position 3070 of SEQ ID NO: 587495
cucauacugcucgguacaa

SEQ ID NO: 796479 - RNA, 19 nt, Artificial Sequence
  Description of Artificial Sequence: Synthetic oligonucleotide
  Antisense strand to SEQ ID NO: 796478
uuguaccgagcaguaugag

SEQ ID NO: 796480 - RNA, 19 nt, Artificial Sequence
  Description of Artificial Sequence: Synthetic oligonucleotide
  Sense strand starting at position 3071 of SEQ ID NO: 587495
ucauacugcucgguacaau

SEQ ID NO: 796481 - RNA, 19 nt, Artificial Sequence
  Description of Artificial Sequence: Synthetic oligonucleotide
  Antisense strand to SEQ ID NO: 796480
auuguaccgagcaguauga

SEQ ID NO: 796482 - RNA, 19 nt, Artificial Sequence
  Description of Artificial Sequence: Synthetic oligonucleotide
  Sense strand starting at position 3072 of SEQ ID NO: 587495
cauacugcucgguacaaug

SEQ ID NO: 796483 - RNA, 19 nt, Artificial Sequence
  Description of Artificial Sequence: Synthetic oligonucleotide
  Antisense strand to SEQ ID NO: 796482
cauuguaccgagcaguaug

SEQ ID NO: 796484 - RNA, 19 nt, Artificial Sequence
  Description of Artificial Sequence: Synthetic oligonucleotide
  Sense strand starting at position 3136 of SEQ ID NO: 587495
ggagguaguuugcucagaa

SEQ ID NO: 796485 - RNA, 19 nt, Artificial Sequence
  Description of Artificial Sequence: Synthetic oligonucleotide
  Antisense strand to SEQ ID NO: 796484
uucugagcaaacuaccucc

SEQ ID NO: 796486 - RNA, 19 nt, Artificial Sequence
  Description of Artificial Sequence: Synthetic oligonucleotide
  Sense strand starting at position 3137 of SEQ ID NO: 587495
gagguaguuugcucagaau

SEQ ID NO: 796487 - RNA, 19 nt, Artificial Sequence
  Description of Artificial Sequence: Synthetic oligonucleotide
  Antisense strand to SEQ ID NO: 796486
auucugagcaaacuaccuc

SEQ ID NO: 796488 - RNA, 19 nt, Artificial Sequence
  Description of Artificial Sequence: Synthetic oligonucleotide
  Sense strand starting at position 3159 of SEQ ID NO: 587495
ccagcuagugaauggaaua

SEQ ID NO: 796489 - RNA, 19 nt, Artificial Sequence
  Description of Artificial Sequence: Synthetic oligonucleotide
  Antisense strand to SEQ ID NO: 796488
uauuccauucacuagcugg

SEQ ID NO: 796490 - RNA, 19 nt, Artificial Sequence
  Description of Artificial Sequence: Synthetic oligonucleotide
  Sense strand starting at position 3201 of SEQ ID NO: 587495
ucuucuguucugcauggau

SEQ ID NO: 796491 - RNA, 19 nt, Artificial Sequence
  Description of Artificial Sequence: Synthetic oligonucleotide
  Antisense strand to SEQ ID NO: 796490
auccaugcagaacagaaga

SEQ ID NO: 796492 - RNA, 19 nt, Artificial Sequence
  Description of Artificial Sequence: Synthetic oligonucleotide
  Sense strand starting at position 3204 of SEQ ID NO: 587495
ucuguucugcauggauuga

SEQ ID NO: 796493 - RNA, 19 nt, Artificial Sequence
  Description of Artificial Sequence: Synthetic oligonucleotide
  Antisense strand to SEQ ID NO: 796492
ucaauccaugcagaacaga

SEQ ID NO: 796494 - RNA, 19 nt, Artificial Sequence
  Description of Artificial Sequence: Synthetic oligonucleotide
  Sense strand starting at position 3332 of SEQ ID NO: 587495
cagagagcuccaugcuguu

SEQ ID NO: 796495 - RNA, 19 nt, Artificial Sequence
  Description of Artificial Sequence: Synthetic oligonucleotide
  Antisense strand to SEQ ID NO: 796494
aacagcauggagcucucug

SEQ ID NO: 796496 - RNA, 19 nt, Artificial Sequence
  Description of Artificial Sequence: Synthetic oligonucleotide
  Sense strand starting at position 3345 of SEQ ID NO: 587495
gcuguucccucccuacaga

SEQ ID NO: 796497 - RNA, 19 nt, Artificial Sequence
  Description of Artificial Sequence: Synthetic oligonucleotide
  Antisense strand to SEQ ID NO: 796496
ucuguagggagggaacagc

SEQ ID NO: 796498 - RNA, 19 nt, Artificial Sequence
  Description of Artificial Sequence: Synthetic oligonucleotide
  Sense strand starting at position 3546 of SEQ ID NO: 587495
gagcgaaacucucaccugu

SEQ ID NO: 796499 - RNA, 19 nt, Artificial Sequence
  Description of Artificial Sequence: Synthetic oligonucleotide
  Antisense strand to SEQ ID NO: 796498
acaggugagaguuucgcuc

SEQ ID NO: 796500 - RNA, 19 nt, Artificial Sequence
  Description of Artificial Sequence: Synthetic oligonucleotide
  Sense strand starting at position 3667 of SEQ ID NO: 587495
gcaggcucuuccucgggaa

SEQ ID NO: 796501 - RNA, 19 nt, Artificial Sequence
  Description of Artificial Sequence: Synthetic oligonucleotide
  Antisense strand to SEQ ID NO: 796500
uucccgaggaagagccugc

SEQ ID NO: 796502 - RNA, 19 nt, Artificial Sequence
  Description of Artificial Sequence: Synthetic oligonucleotide
  Sense strand starting at position 3837 of SEQ ID NO: 587495
uuccucauuccuuggauga

SEQ ID NO: 796503 - RNA, 19 nt, Artificial Sequence
  Description of Artificial Sequence: Synthetic oligonucleotide
  Antisense strand to SEQ ID NO: 796502
ucauccaaggaaugaggaa

SEQ ID NO: 796504 - RNA, 19 nt, Artificial Sequence
  Description of Artificial Sequence: Synthetic oligonucleotide
  Sense strand starting at position 3838 of SEQ ID NO: 587495
uccucauuccuuggaugag

SEQ ID NO: 796505 - RNA, 19 nt, Artificial Sequence
  Description of Artificial Sequence: Synthetic oligonucleotide
  Antisense strand to SEQ ID NO: 796504
cucauccaaggaaugagga

SEQ ID NO: 796506 - RNA, 19 nt, Artificial Sequence
  Description of Artificial Sequence: Synthetic oligonucleotide
  Sense strand starting at position 3839 of SEQ ID NO: 587495
ccucauuccuuggaugaga

SEQ ID NO: 796507 - RNA, 19 nt, Artificial Sequence
  Description of Artificial Sequence: Synthetic oligonucleotide
  Antisense strand to SEQ ID NO: 796506
ucucauccaaggaaugagg

SEQ ID NO: 796508 - RNA, 19 nt, Artificial Sequence
  Description of Artificial Sequence: Synthetic oligonucleotide
  Sense strand starting at position 64 of SEQ ID NO: 587496
gacagucuugacugauagu

SEQ ID NO: 796509 - RNA, 19 nt, Artificial Sequence
  Description of Artificial Sequence: Synthetic oligonucleotide
  Antisense strand to SEQ ID NO: 796508
acuaucagucaagacuguc

SEQ ID NO: 796510 - RNA, 19 nt, Artificial Sequence
  Description of Artificial Sequence: Synthetic oligonucleotide
  Sense strand starting at position 75 of SEQ ID NO: 587496
cugauagucaaugggaauu

SEQ ID NO: 796511 - RNA, 19 nt, Artificial Sequence
  Description of Artificial Sequence: Synthetic oligonucleotide
  Antisense strand to SEQ ID NO: 796510
aauucccauugacuaucag

SEQ ID NO: 796512 - RNA, 19 nt, Artificial Sequence
  Description of Artificial Sequence: Synthetic oligonucleotide
  Sense strand starting at position 186 of SEQ ID NO: 587496
uuucuacaucuagaguuac

SEQ ID NO: 796513 - RNA, 19 nt, Artificial Sequence
  Description of Artificial Sequence: Synthetic oligonucleotide
  Antisense strand to SEQ ID NO: 796512
guaacucuagauguagaaa

SEQ ID NO: 796514 - RNA, 19 nt, Artificial Sequence
  Description of Artificial Sequence: Synthetic oligonucleotide
  Sense strand starting at position 268 of SEQ ID NO: 587496
agggaauaauuauaagaac

SEQ ID NO: 796515 - RNA, 19 nt, Artificial Sequence
  Description of Artificial Sequence: Synthetic oligonucleotide
  Antisense strand to SEQ ID NO: 796514
guucuuauaauuauucccu

SEQ ID NO: 796516 - RNA, 19 nt, Artificial Sequence
  Description of Artificial Sequence: Synthetic oligonucleotide
  Sense strand starting at position 357 of SEQ ID NO: 587496
uacggauugugggugacaa

SEQ ID NO: 796517 - RNA, 19 nt, Artificial Sequence
  Description of Artificial Sequence: Synthetic oligonucleotide
  Antisense strand to SEQ ID NO: 796516
uugucacccacaauccgua

SEQ ID NO: 796518 - RNA, 19 nt, Artificial Sequence
  Description of Artificial Sequence: Synthetic oligonucleotide
  Sense strand starting at position 358 of SEQ ID NO: 587496
acggauugugggugacaaa

SEQ ID NO: 796519 - RNA, 19 nt, Artificial Sequence
  Description of Artificial Sequence: Synthetic oligonucleotide
  Antisense strand to SEQ ID NO: 796518
uuugucacccacaauccgu

SEQ ID NO: 796520 - RNA, 19 nt, Artificial Sequence
  Description of Artificial Sequence: Synthetic oligonucleotide
  Sense strand starting at position 359 of SEQ ID NO: 587496
cggauugugggugacaaau

SEQ ID NO: 796521 - RNA, 19 nt, Artificial Sequence
  Description of Artificial Sequence: Synthetic oligonucleotide
  Antisense strand to SEQ ID NO: 796520
auuugucacccacaauccg

SEQ ID NO: 796522 - RNA, 19 nt, Artificial Sequence
  Description of Artificial Sequence: Synthetic oligonucleotide
  Sense strand starting at position 621 of SEQ ID NO: 587496
ccgaucuaguaucuuaaca

SEQ ID NO: 796523 - RNA, 19 nt, Artificial Sequence
  Description of Artificial Sequence: Synthetic oligonucleotide
  Antisense strand to SEQ ID NO: 796522
uguuaagauacuagaucgg

SEQ ID NO: 796524 - RNA, 19 nt, Artificial Sequence
  Description of Artificial Sequence: Synthetic oligonucleotide
  Sense strand starting at position 691 of SEQ ID NO: 587496
aggcacugccggagguauu

SEQ ID NO: 796525 - RNA, 19 nt, Artificial Sequence
  Description of Artificial Sequence: Synthetic oligonucleotide
  Antisense strand to SEQ ID NO: 796524
aauaccuccggcagugccu

SEQ ID NO: 796526 - RNA, 19 nt, Artificial Sequence
  Description of Artificial Sequence: Synthetic oligonucleotide
  Sense strand starting at position 775 of SEQ ID NO: 587496
agucgauaccaagauacuu

SEQ ID NO: 796527 - RNA, 19 nt, Artificial Sequence
  Description of Artificial Sequence: Synthetic oligonucleotide
  Antisense strand to SEQ ID NO: 796526
aaguaucuugguaucgacu

SEQ ID NO: 796528 - RNA, 19 nt, Artificial Sequence
  Description of Artificial Sequence: Synthetic oligonucleotide
  Sense strand starting at position 975 of SEQ ID NO: 587496
acggaaaguuaaucugcua

SEQ ID NO: 796529 - RNA, 19 nt, Artificial Sequence
  Description of Artificial Sequence: Synthetic oligonucleotide
  Antisense strand to SEQ ID NO: 796528
uagcagauuaacuuuccgu

SEQ ID NO: 796530 - RNA, 19 nt, Artificial Sequence
  Description of Artificial Sequence: Synthetic oligonucleotide
  Sense strand starting at position 1009 of SEQ ID NO: 587496
auuugcaagucucuaggua

SEQ ID NO: 796531 - RNA, 19 nt, Artificial Sequence
  Description of Artificial Sequence: Synthetic oligonucleotide
  Antisense strand to SEQ ID NO: 796530
uaccuagagacuugcaaau

SEQ ID NO: 796532 - RNA, 19 nt, Artificial Sequence
  Description of Artificial Sequence: Synthetic oligonucleotide
  Sense strand starting at position 1013 of SEQ ID NO: 587496
gcaagucucuagguagaca

SEQ ID NO: 796533 - RNA, 19 nt, Artificial Sequence
  Description of Artificial Sequence: Synthetic oligonucleotide
  Antisense strand to SEQ ID NO: 796532
ugucuaccuagagacuugc

SEQ ID NO: 796534 - RNA, 19 nt, Artificial Sequence
  Description of Artificial Sequence: Synthetic oligonucleotide
  Sense strand starting at position 1113 of SEQ ID NO: 587496
cggcgcuuccuguuauuaa

SEQ ID NO: 796535 - RNA, 19 nt, Artificial Sequence
  Description of Artificial Sequence: Synthetic oligonucleotide
  Antisense strand to SEQ ID NO: 796534
uuaauaacaggaagcgccg

SEQ ID NO: 796536 - RNA, 19 nt, Artificial Sequence
  Description of Artificial Sequence: Synthetic oligonucleotide
  Sense strand starting at position 1116 of SEQ ID NO: 587496
cgcuuccuguuauuaauuu

SEQ ID NO: 796537 - RNA, 19 nt, Artificial Sequence
  Description of Artificial Sequence: Synthetic oligonucleotide
  Antisense strand to SEQ ID NO: 796536
aaauuaauaacaggaagcg

SEQ ID NO: 796538 - RNA, 19 nt, Artificial Sequence
  Description of Artificial Sequence: Synthetic oligonucleotide
  Sense strand starting at position 2006 of SEQ ID NO: 587496
gggacuuugcacugaaaug

SEQ ID NO: 796539 - RNA, 19 nt, Artificial Sequence
  Description of Artificial Sequence: Synthetic oligonucleotide
  Antisense strand to SEQ ID NO: 796538
cauuucagugcaaaguccc

SEQ ID NO: 796540 - RNA, 19 nt, Artificial Sequence
  Description of Artificial Sequence: Synthetic oligonucleotide
  Sense strand starting at position 2052 of SEQ ID NO: 587496
gaucuucucuccuugggua

SEQ ID NO: 796541 - RNA, 19 nt, Artificial Sequence
  Description of Artificial Sequence: Synthetic oligonucleotide
  Antisense strand to SEQ ID NO: 796540
uacccaaggagagaagauc

SEQ ID NO: 796542 - RNA, 19 nt, Artificial Sequence
  Description of Artificial Sequence: Synthetic oligonucleotide
  Sense strand starting at position 2085 of SEQ ID NO: 587496
gcuggcucugcagaaauau

SEQ ID NO: 796543 - RNA, 19 nt, Artificial Sequence
  Description of Artificial Sequence: Synthetic oligonucleotide
  Antisense strand to SEQ ID NO: 796542
auauuucugcagagccagc

SEQ ID NO: 796544 - RNA, 19 nt, Artificial Sequence
  Description of Artificial Sequence: Synthetic oligonucleotide
  Sense strand starting at position 2158 of SEQ ID NO: 587496
ccgcaaacugaucagauca

SEQ ID NO: 796545 - RNA, 19 nt, Artificial Sequence
  Description of Artificial Sequence: Synthetic oligonucleotide
  Antisense strand to SEQ ID NO: 796544
ugaucugaucaguuugcgg

SEQ ID NO: 796546 - RNA, 19 nt, Artificial Sequence
  Description of Artificial Sequence: Synthetic oligonucleotide
  Sense strand starting at position 2256 of SEQ ID NO: 587496
ggagguucuguuugaaauc

SEQ ID NO: 796547 - RNA, 19 nt, Artificial Sequence
  Description of Artificial Sequence: Synthetic oligonucleotide
  Antisense strand to SEQ ID NO: 796546
gauuucaaacagaaccucc

SEQ ID NO: 796548 - RNA, 19 nt, Artificial Sequence
  Description of Artificial Sequence: Synthetic oligonucleotide
  Sense strand starting at position 2469 of SEQ ID NO: 587496
ccgugcaaccgucuuugau

SEQ ID NO: 796549 - RNA, 19 nt, Artificial Sequence
  Description of Artificial Sequence: Synthetic oligonucleotide
  Antisense strand to SEQ ID NO: 796548
aucaaagacgguugcacgg

SEQ ID NO: 796550 - RNA, 19 nt, Artificial Sequence
  Description of Artificial Sequence: Synthetic oligonucleotide
  Sense strand starting at position 2470 of SEQ ID NO: 587496
cgugcaaccgucuuugaug

SEQ ID NO: 796551 - RNA, 19 nt, Artificial Sequence
  Description of Artificial Sequence: Synthetic oligonucleotide
  Antisense strand to SEQ ID NO: 796550
caucaaagacgguugcacg

SEQ ID NO: 796552 - RNA, 19 nt, Artificial Sequence
  Description of Artificial Sequence: Synthetic oligonucleotide
  Sense strand starting at position 2499 of SEQ ID NO: 587496
agugauaaaucgccucuaa

SEQ ID NO: 796553 - RNA, 19 nt, Artificial Sequence
  Description of Artificial Sequence: Synthetic oligonucleotide
  Antisense strand to SEQ ID NO: 796552
uuagaggcgauuuaucacu

SEQ ID NO: 796554 - RNA, 19 nt, Artificial Sequence
  Description of Artificial Sequence: Synthetic oligonucleotide
  Sense strand starting at position 2524 of SEQ ID NO: 587496
cccaacuuggcagggauau

SEQ ID NO: 796555 - RNA, 19 nt, Artificial Sequence
  Description of Artificial Sequence: Synthetic oligonucleotide
  Antisense strand to SEQ ID NO: 796554
auaucccugccaaguuggg

SEQ ID NO: 796556 - RNA, 19 nt, Artificial Sequence
  Description of Artificial Sequence: Synthetic oligonucleotide
  Sense strand starting at position 2525 of SEQ ID NO: 587496
ccaacuuggcagggauaua

SEQ ID NO: 796557 - RNA, 19 nt, Artificial Sequence
  Description of Artificial Sequence: Synthetic oligonucleotide
  Antisense strand to SEQ ID NO: 796556
uauaucccugccaaguugg

SEQ ID NO: 796558 - RNA, 19 nt, Artificial Sequence
  Description of Artificial Sequence: Synthetic oligonucleotide
  Sense strand starting at position 3122 of SEQ ID NO: 587496
ucuggaauauugucauaaa

SEQ ID NO: 796559 - RNA, 19 nt, Artificial Sequence
  Description of Artificial Sequence: Synthetic oligonucleotide
  Antisense strand to SEQ ID NO: 796558
uuuaugacaauauuccaga

SEQ ID NO: 796560 - RNA, 19 nt, Artificial Sequence
  Description of Artificial Sequence: Synthetic oligonucleotide
  Sense strand starting at position 3266 of SEQ ID NO: 587496
ggaaauagucuugaggcuu

SEQ ID NO: 796561 - RNA, 19 nt, Artificial Sequence
  Description of Artificial Sequence: Synthetic oligonucleotide
  Antisense strand to SEQ ID NO: 796560
aagccucaagacuauuucc

SEQ ID NO: 796562 - RNA, 19 nt, Artificial Sequence
  Description of Artificial Sequence: Synthetic oligonucleotide
  Sense strand starting at position 3319 of SEQ ID NO: 587496
auugaagagugcuugagca

SEQ ID NO: 796563 - RNA, 19 nt, Artificial Sequence
  Description of Artificial Sequence: Synthetic oligonucleotide
  Antisense strand to SEQ ID NO: 796562
ugcucaagcacucuucaau

SEQ ID NO: 796564 - RNA, 19 nt, Artificial Sequence
  Description of Artificial Sequence: Synthetic oligonucleotide
  Sense strand starting at position 3321 of SEQ ID NO: 587496
ugaagagugcuugagcaua

SEQ ID NO: 796565 - RNA, 19 nt, Artificial Sequence
  Description of Artificial Sequence: Synthetic oligonucleotide
  Antisense strand to SEQ ID NO: 796564
uaugcucaagcacucuuca

SEQ ID NO: 796566 - RNA, 19 nt, Artificial Sequence
  Description of Artificial Sequence: Synthetic oligonucleotide
  Sense strand starting at position 3329 of SEQ ID NO: 587496
gcuugagcauauuuguaaa

SEQ ID NO: 796567 - RNA, 19 nt, Artificial Sequence
  Description of Artificial Sequence: Synthetic oligonucleotide
  Antisense strand to SEQ ID NO: 796566
uuuacaaauaugcucaagc

SEQ ID NO: 796568 - RNA, 19 nt, Artificial Sequence
  Description of Artificial Sequence: Synthetic oligonucleotide
  Sense strand starting at position 3463 of SEQ ID NO: 587496
aauugagaaucauugggca

SEQ ID NO: 796569 - RNA, 19 nt, Artificial Sequence
  Description of Artificial Sequence: Synthetic oligonucleotide
  Antisense strand to SEQ ID NO: 796568
ugcccaaugauucucaauu

SEQ ID NO: 796570 - RNA, 19 nt, Artificial Sequence
  Description of Artificial Sequence: Synthetic oligonucleotide
  Sense strand starting at position 3465 of SEQ ID NO: 587496
uugagaaucauugggcaga

SEQ ID NO: 796571 - RNA, 19 nt, Artificial Sequence
  Description of Artificial Sequence: Synthetic oligonucleotide
  Antisense strand to SEQ ID NO: 796570
ucugcccaaugauucucaa

SEQ ID NO: 796572 - RNA, 19 nt, Artificial Sequence
  Description of Artificial Sequence: Synthetic oligonucleotide
  Sense strand starting at position 3467 of SEQ ID NO: 587496
gagaaucauugggcagauu

SEQ ID NO: 796573 - RNA, 19 nt, Artificial Sequence
  Description of Artificial Sequence: Synthetic oligonucleotide
  Antisense strand to SEQ ID NO: 796572
aaucugcccaaugauucuc

SEQ ID NO: 796574 - RNA, 19 nt, Artificial Sequence
  Description of Artificial Sequence: Synthetic oligonucleotide
  Sense strand starting at position 3479 of SEQ ID NO: 587496
gcagauuuaugcuuccucu

SEQ ID NO: 796575 - RNA, 19 nt, Artificial Sequence
  Description of Artificial Sequence: Synthetic oligonucleotide
  Antisense strand to SEQ ID NO: 796574
agaggaagcauaaaucugc

SEQ ID NO: 796576 - RNA, 19 nt, Artificial Sequence
  Description of Artificial Sequence: Synthetic oligonucleotide
  Sense strand starting at position 3648 of SEQ ID NO: 587496
cucuaaaguggguauaguu

SEQ ID NO: 796577 - RNA, 19 nt, Artificial Sequence
  Description of Artificial Sequence: Synthetic oligonucleotide
  Antisense strand to SEQ ID NO: 796576
aacuauacccacuuuagag

SEQ ID NO: 796578 - RNA, 19 nt, Artificial Sequence
  Description of Artificial Sequence: Synthetic oligonucleotide
  Sense strand starting at position 3692 of SEQ ID NO: 587496
acuacugacccuuguguaa

SEQ ID NO: 796579 - RNA, 19 nt, Artificial Sequence
  Description of Artificial Sequence: Synthetic oligonucleotide
  Antisense strand to SEQ ID NO: 796578
uuacacaagggucaguagu

SEQ ID NO: 796580 - RNA, 19 nt, Artificial Sequence
  Description of Artificial Sequence: Synthetic oligonucleotide
  Sense strand starting at position 3808 of SEQ ID NO: 587496
uuuagaaacguauauugcu

SEQ ID NO: 796581 - RNA, 19 nt, Artificial Sequence
  Description of Artificial Sequence: Synthetic oligonucleotide
  Antisense strand to SEQ ID NO: 796580
agcaauauacguuucuaaa

SEQ ID NO: 796582 - RNA, 19 nt, Artificial Sequence
  Description of Artificial Sequence: Synthetic oligonucleotide
  Sense strand starting at position 3839 of SEQ ID NO: 587496
aagguugcaccagguaaau

SEQ ID NO: 796583 - RNA, 19 nt, Artificial Sequence
  Description of Artificial Sequence: Synthetic oligonucleotide
  Antisense strand to SEQ ID NO: 796582
auuuaccuggugcaaccuu

SEQ ID NO: 796584 - RNA, 19 nt, Artificial Sequence
  Description of Artificial Sequence: Synthetic oligonucleotide
  Sense strand starting at position 3841 of SEQ ID NO: 587496
gguugcaccagguaaaugu

SEQ ID NO: 796585 - RNA, 19 nt, Artificial Sequence
  Description of Artificial Sequence: Synthetic oligonucleotide
  Antisense strand to SEQ ID NO: 796584
acauuuaccuggugcaacc

SEQ ID NO: 796586 - RNA, 19 nt, Artificial Sequence
  Description of Artificial Sequence: Synthetic oligonucleotide
  Sense strand starting at position 3950 of SEQ ID NO: 587496
acauuaucacaucagugua

SEQ ID NO: 796587 - RNA, 19 nt, Artificial Sequence
  Description of Artificial Sequence: Synthetic oligonucleotide
  Antisense strand to SEQ ID NO: 796586
uacacugaugugauaaugu

SEQ ID NO: 796588 - RNA, 19 nt, Artificial Sequence
  Description of Artificial Sequence: Synthetic oligonucleotide
  Sense strand starting at position 19 of SEQ ID NO: 587497
gauagcuucugggcucaga

SEQ ID NO: 796589 - RNA, 19 nt, Artificial Sequence
  Description of Artificial Sequence: Synthetic oligonucleotide
  Antisense strand to SEQ ID NO: 796588
ucugagcccagaagcuauc

SEQ ID NO: 796590 - RNA, 19 nt, Artificial Sequence
  Description of Artificial Sequence: Synthetic oligonucleotide
  Sense strand starting at position 236 of SEQ ID NO: 587497
gccagagaagcauacgcau

SEQ ID NO: 796591 - RNA, 19 nt, Artificial Sequence
  Description of Artificial Sequence: Synthetic oligonucleotide
  Antisense strand to SEQ ID NO: 796590
augcguaugcuucucuggc

SEQ ID NO: 796592 - RNA, 19 nt, Artificial Sequence
  Description of Artificial Sequence: Synthetic oligonucleotide
  Sense strand starting at position 1447 of SEQ ID NO: 587497
gccucacuuuccuugcaga

SEQ ID NO: 796593 - RNA, 19 nt, Artificial Sequence
  Description of Artificial Sequence: Synthetic oligonucleotide
  Antisense strand to SEQ ID NO: 796592
ucugcaaggaaagugaggc

SEQ ID NO: 796594 - RNA, 19 nt, Artificial Sequence
  Description of Artificial Sequence: Synthetic oligonucleotide
  Sense strand starting at position 2024 of SEQ ID NO: 587497
aaugucaggcccuagacau

SEQ ID NO: 796595 - RNA, 19 nt, Artificial Sequence
  Description of Artificial Sequence: Synthetic oligonucleotide
  Antisense strand to SEQ ID NO: 796594
augucuagggccugacauu

SEQ ID NO: 796596 - RNA, 19 nt, Artificial Sequence
  Description of Artificial Sequence: Synthetic oligonucleotide
  Sense strand starting at position 2225 of SEQ ID NO: 587497
gggccuagcgcauaguuaa

SEQ ID NO: 796597 - RNA, 19 nt, Artificial Sequence
  Description of Artificial Sequence: Synthetic oligonucleotide
  Antisense strand to SEQ ID NO: 796596
uuaacuaugcgcuaggccc

SEQ ID NO: 796598 - RNA, 19 nt, Artificial Sequence
  Description of Artificial Sequence: Synthetic oligonucleotide
  Sense strand starting at position 2352 of SEQ ID NO: 587497
ggaacuggacccuguaaau

SEQ ID NO: 796599 - RNA, 19 nt, Artificial Sequence
  Description of Artificial Sequence: Synthetic oligonucleotide
  Antisense strand to SEQ ID NO: 796598
auuuacaggguccaguucc

SEQ ID NO: 796600 - RNA, 19 nt, Artificial Sequence
  Description of Artificial Sequence: Synthetic oligonucleotide
  Sense strand starting at position 2363 of SEQ ID NO: 587497
cuguaaauucuacagcgau

SEQ ID NO: 796601 - RNA, 19 nt, Artificial Sequence
  Description of Artificial Sequence: Synthetic oligonucleotide
  Antisense strand to SEQ ID NO: 796600
aucgcuguagaauuuacag

SEQ ID NO: 796602 - RNA, 19 nt, Artificial Sequence
  Description of Artificial Sequence: Synthetic oligonucleotide
  Sense strand starting at position 2409 of SEQ ID NO: 587497
ugcagugaaugucuaggaa

SEQ ID NO: 796603 - RNA, 19 nt, Artificial Sequence
  Description of Artificial Sequence: Synthetic oligonucleotide
  Antisense strand to SEQ ID NO: 796602
uuccuagacauucacugca

SEQ ID NO: 796604 - RNA, 19 nt, Artificial Sequence
  Description of Artificial Sequence: Synthetic oligonucleotide
  Sense strand starting at position 2412 of SEQ ID NO: 587497
agugaaugucuaggaagca

SEQ ID NO: 796605 - RNA, 19 nt, Artificial Sequence
  Description of Artificial Sequence: Synthetic oligonucleotide
  Antisense strand to SEQ ID NO: 796604
ugcuuccuagacauucacu

SEQ ID NO: 796606 - RNA, 19 nt, Artificial Sequence
  Description of Artificial Sequence: Synthetic oligonucleotide
  Sense strand starting at position 2413 of SEQ ID NO: 587497
gugaaugucuaggaagcaa

SEQ ID NO: 796607 - RNA, 19 nt, Artificial Sequence
  Description of Artificial Sequence: Synthetic oligonucleotide
  Antisense strand to SEQ ID NO: 796606
uugcuuccuagacauucac

SEQ ID NO: 796608 - RNA, 19 nt, Artificial Sequence
  Description of Artificial Sequence: Synthetic oligonucleotide
  Sense strand starting at position 2432 of SEQ ID NO: 587497
agaguaagcagugggaguu

SEQ ID NO: 796609 - RNA, 19 nt, Artificial Sequence
  Description of Artificial Sequence: Synthetic oligonucleotide
  Antisense strand to SEQ ID NO: 796608
aacucccacugcuuacucu

SEQ ID NO: 796610 - RNA, 19 nt, Artificial Sequence
  Description of Artificial Sequence: Synthetic oligonucleotide
  Sense strand starting at position 2455 of SEQ ID NO: 587497
ggagacgugugguugguuu

SEQ ID NO: 796611 - RNA, 19 nt, Artificial Sequence
  Description of Artificial Sequence: Synthetic oligonucleotide
  Antisense strand to SEQ ID NO: 796610
aaaccaaccacacgucucc

SEQ ID NO: 796612 - RNA, 19 nt, Artificial Sequence
  Description of Artificial Sequence: Synthetic oligonucleotide
  Sense strand starting at position 2459 of SEQ ID NO: 587497
acgugugguugguuuggaa

SEQ ID NO: 796613 - RNA, 19 nt, Artificial Sequence
  Description of Artificial Sequence: Synthetic oligonucleotide
  Antisense strand to SEQ ID NO: 796612
uuccaaaccaaccacacgu

SEQ ID NO: 796614 - RNA, 19 nt, Artificial Sequence
  Description of Artificial Sequence: Synthetic oligonucleotide
  Sense strand starting at position 2474 of SEQ ID NO: 587497
ggaaauuaaucacagccca

SEQ ID NO: 796615 - RNA, 19 nt, Artificial Sequence
  Description of Artificial Sequence: Synthetic oligonucleotide
  Antisense strand to SEQ ID NO: 796614
ugggcugugauuaauuucc

SEQ ID NO: 796616 - RNA, 19 nt, Artificial Sequence
  Description of Artificial Sequence: Synthetic oligonucleotide
  Sense strand starting at position 2503 of SEQ ID NO: 587497
ccuccaguacuguggaaca

SEQ ID NO: 796617 - RNA, 19 nt, Artificial Sequence
  Description of Artificial Sequence: Synthetic oligonucleotide
  Antisense strand to SEQ ID NO: 796616
uguuccacaguacuggagg

SEQ ID NO: 796618 - RNA, 19 nt, Artificial Sequence
  Description of Artificial Sequence: Synthetic oligonucleotide
  Sense strand starting at position 2546 of SEQ ID NO: 587497
cccugagucuucccgcgaa

SEQ ID NO: 796619 - RNA, 19 nt, Artificial Sequence
  Description of Artificial Sequence: Synthetic oligonucleotide
  Antisense strand to SEQ ID NO: 796618
uucgcgggaagacucaggg

SEQ ID NO: 796620 - RNA, 19 nt, Artificial Sequence
  Description of Artificial Sequence: Synthetic oligonucleotide
  Sense strand starting at position 2548 of SEQ ID NO: 587497
cugagucuucccgcgaagu

SEQ ID NO: 796621 - RNA, 19 nt, Artificial Sequence
  Description of Artificial Sequence: Synthetic oligonucleotide
  Antisense strand to SEQ ID NO: 796620
acuucgcgggaagacucag

SEQ ID NO: 796622 - RNA, 19 nt, Artificial Sequence
  Description of Artificial Sequence: Synthetic oligonucleotide
  Sense strand starting at position 2549 of SEQ ID NO: 587497
ugagucuucccgcgaagug

SEQ ID NO: 796623 - RNA, 19 nt, Artificial Sequence
  Description of Artificial Sequence: Synthetic oligonucleotide
  Antisense strand to SEQ ID NO: 796622
cacuucgcgggaagacuca

SEQ ID NO: 796624 - RNA, 19 nt, Artificial Sequence
  Description of Artificial Sequence: Synthetic oligonucleotide
  Sense strand starting at position 2552 of SEQ ID NO: 587497
gucuucccgcgaaguggua

SEQ ID NO: 796625 - RNA, 19 nt, Artificial Sequence
  Description of Artificial Sequence: Synthetic oligonucleotide
  Antisense strand to SEQ ID NO: 796624
uaccacuucgcgggaagac

SEQ ID NO: 796626 - RNA, 19 nt, Artificial Sequence
  Description of Artificial Sequence: Synthetic oligonucleotide
  Sense strand starting at position 2559 of SEQ ID NO: 587497
cgcgaagugguauaaugua

SEQ ID NO: 796627 - RNA, 19 nt, Artificial Sequence
  Description of Artificial Sequence: Synthetic oligonucleotide
  Antisense strand to SEQ ID NO: 796626
uacauuauaccacuucgcg

SEQ ID NO: 796628 - RNA, 19 nt, Artificial Sequence
  Description of Artificial Sequence: Synthetic oligonucleotide
  Sense strand starting at position 2565 of SEQ ID NO: 587497
gugguauaauguagugguu

SEQ ID NO: 796629 - RNA, 19 nt, Artificial Sequence
  Description of Artificial Sequence: Synthetic oligonucleotide
  Antisense strand to SEQ ID NO: 796628
aaccacuacauuauaccac

SEQ ID NO: 796630 - RNA, 19 nt, Artificial Sequence
  Description of Artificial Sequence: Synthetic oligonucleotide
  Sense strand starting at position 2578 of SEQ ID NO: 587497
gugguucccuaauccagau

SEQ ID NO: 796631 - RNA, 19 nt, Artificial Sequence
  Description of Artificial Sequence: Synthetic oligonucleotide
  Antisense strand to SEQ ID NO: 796630
aucuggauuagggaaccac

SEQ ID NO: 796632 - RNA, 19 nt, Artificial Sequence
  Description of Artificial Sequence: Synthetic oligonucleotide
  Sense strand starting at position 2641 of SEQ ID NO: 587497
ccugcucagacaugaggaa

SEQ ID NO: 796633 - RNA, 19 nt, Artificial Sequence
  Description of Artificial Sequence: Synthetic oligonucleotide
  Antisense strand to SEQ ID NO: 796632
uuccucaugucugagcagg

SEQ ID NO: 796634 - RNA, 19 nt, Artificial Sequence
  Description of Artificial Sequence: Synthetic oligonucleotide
  Sense strand starting at position 2654 of SEQ ID NO: 587497
gaggaaucacgcuguccca

SEQ ID NO: 796635 - RNA, 19 nt, Artificial Sequence
  Description of Artificial Sequence: Synthetic oligonucleotide
  Antisense strand to SEQ ID NO: 796634
ugggacagcgugauuccuc

SEQ ID NO: 796636 - RNA, 19 nt, Artificial Sequence
  Description of Artificial Sequence: Synthetic oligonucleotide
  Sense strand starting at position 2764 of SEQ ID NO: 587497
cagcacuuggucugaagga

SEQ ID NO: 796637 - RNA, 19 nt, Artificial Sequence
  Description of Artificial Sequence: Synthetic oligonucleotide
  Antisense strand to SEQ ID NO: 796636
uccuucagaccaagugcug

SEQ ID NO: 796638 - RNA, 19 nt, Artificial Sequence
  Description of Artificial Sequence: Synthetic oligonucleotide
  Sense strand starting at position 2774 of SEQ ID NO: 587497
ucugaaggauuccuccauu

SEQ ID NO: 796639 - RNA, 19 nt, Artificial Sequence
  Description of Artificial Sequence: Synthetic oligonucleotide
  Antisense strand to SEQ ID NO: 796638
aauggaggaauccuucaga

SEQ ID NO: 796640 - RNA, 19 nt, Artificial Sequence
  Description of Artificial Sequence: Synthetic oligonucleotide
  Sense strand starting at position 2795 of SEQ ID NO: 587497
guccaucauuuaugaaguu

SEQ ID NO: 796641 - RNA, 19 nt, Artificial Sequence
  Description of Artificial Sequence: Synthetic oligonucleotide
  Antisense strand to SEQ ID NO: 796640
aacuucauaaaugauggac

SEQ ID NO: 796642 - RNA, 19 nt, Artificial Sequence
  Description of Artificial Sequence: Synthetic oligonucleotide
  Sense strand starting at position 2805 of SEQ ID NO: 587497
uaugaaguuugauguagga

SEQ ID NO: 796643 - RNA, 19 nt, Artificial Sequence
  Description of Artificial Sequence: Synthetic oligonucleotide
  Antisense strand to SEQ ID NO: 796642
uccuacaucaaacuucaua

SEQ ID NO: 796644 - RNA, 19 nt, Artificial Sequence
  Description of Artificial Sequence: Synthetic oligonucleotide
  Sense strand starting at position 2809 of SEQ ID NO: 587497
aaguuugauguaggacaaa

SEQ ID NO: 796645 - RNA, 19 nt, Artificial Sequence
  Description of Artificial Sequence: Synthetic oligonucleotide
  Antisense strand to SEQ ID NO: 796644
uuuguccuacaucaaacuu

SEQ ID NO: 796646 - RNA, 19 nt, Artificial Sequence
  Description of Artificial Sequence: Synthetic oligonucleotide
  Sense strand starting at position 2875 of SEQ ID NO: 587497
acaagauggucauaagaau

SEQ ID NO: 796647 - RNA, 19 nt, Artificial Sequence
  Description of Artificial Sequence: Synthetic oligonucleotide
  Antisense strand to SEQ ID NO: 796646
auucuuaugaccaucuugu

SEQ ID NO: 796648 - RNA, 19 nt, Artificial Sequence
  Description of Artificial Sequence: Synthetic oligonucleotide
  Sense strand starting at position 2901 of SEQ ID NO: 587497
aauaauagcucucagugga

SEQ ID NO: 796649 - RNA, 19 nt, Artificial Sequence
  Description of Artificial Sequence: Synthetic oligonucleotide
  Antisense strand to SEQ ID NO: 796648
uccacugagagcuauuauu

SEQ ID NO: 796650 - RNA, 19 nt, Artificial Sequence
  Description of Artificial Sequence: Synthetic oligonucleotide
  Sense strand starting at position 2939 of SEQ ID NO: 587497
ggaagucacuaugaaaggu

SEQ ID NO: 796651 - RNA, 19 nt, Artificial Sequence
  Description of Artificial Sequence: Synthetic oligonucleotide
  Antisense strand to SEQ ID NO: 796650
accuuucauagugacuucc

SEQ ID NO: 796652 - RNA, 19 nt, Artificial Sequence
  Description of Artificial Sequence: Synthetic oligonucleotide
  Sense strand starting at position 2998 of SEQ ID NO: 587497
ccgaaacuuguagaaguuu

SEQ ID NO: 796653 - RNA, 19 nt, Artificial Sequence
  Description of Artificial Sequence: Synthetic oligonucleotide
  Antisense strand to SEQ ID NO: 796652
aaacuucuacaaguuucgg

SEQ ID NO: 796654 - RNA, 19 nt, Artificial Sequence
  Description of Artificial Sequence: Synthetic oligonucleotide
  Sense strand starting at position 3004 of SEQ ID NO: 587497
cuuguagaaguuugaauac

SEQ ID NO: 796655 - RNA, 19 nt, Artificial Sequence
  Description of Artificial Sequence: Synthetic oligonucleotide
  Antisense strand to SEQ ID NO: 796654
guauucaaacuucuacaag

SEQ ID NO: 796656 - RNA, 19 nt, Artificial Sequence
  Description of Artificial Sequence: Synthetic oligonucleotide
  Sense strand starting at position 3449 of SEQ ID NO: 587497
uggccaacacaguguuauu

SEQ ID NO: 796657 - RNA, 19 nt, Artificial Sequence
  Description of Artificial Sequence: Synthetic oligonucleotide
  Antisense strand to SEQ ID NO: 796656
aauaacacuguguuggcca

SEQ ID NO: 796658 - RNA, 19 nt, Artificial Sequence
  Description of Artificial Sequence: Synthetic oligonucleotide
  Sense strand starting at position 3473 of SEQ ID NO: 587497
aguagacacucaugaaauc

SEQ ID NO: 796659 - RNA, 19 nt, Artificial Sequence
  Description of Artificial Sequence: Synthetic oligonucleotide
  Antisense strand to SEQ ID NO: 796658
gauuucaugagugucuacu

SEQ ID NO: 796660 - RNA, 19 nt, Artificial Sequence
  Description of Artificial Sequence: Synthetic oligonucleotide
  Sense strand starting at position 3924 of SEQ ID NO: 587497
ccuggucaagcuugguuua

SEQ ID NO: 796661 - RNA, 19 nt, Artificial Sequence
  Description of Artificial Sequence: Synthetic oligonucleotide
  Antisense strand to SEQ ID NO: 796660
uaaaccaagcuugaccagg

SEQ ID NO: 796662 - RNA, 19 nt, Artificial Sequence
  Description of Artificial Sequence: Synthetic oligonucleotide
  Sense strand starting at position 3925 of SEQ ID NO: 587497
cuggucaagcuugguuuau

SEQ ID NO: 796663 - RNA, 19 nt, Artificial Sequence
  Description of Artificial Sequence: Synthetic oligonucleotide
  Antisense strand to SEQ ID NO: 796662
auaaaccaagcuugaccag

SEQ ID NO: 796664 - RNA, 19 nt, Artificial Sequence
  Description of Artificial Sequence: Synthetic oligonucleotide
  Sense strand starting at position 3926 of SEQ ID NO: 587497
uggucaagcuugguuuaua

SEQ ID NO: 796665 - RNA, 19 nt, Artificial Sequence
  Description of Artificial Sequence: Synthetic oligonucleotide
  Antisense strand to SEQ ID NO: 796664
uauaaaccaagcuugacca

SEQ ID NO: 796666 - RNA, 19 nt, Artificial Sequence
  Description of Artificial Sequence: Synthetic oligonucleotide
  Sense strand starting at position 3927 of SEQ ID NO: 587497
ggucaagcuugguuuauac

SEQ ID NO: 796667 - RNA, 19 nt, Artificial Sequence
  Description of Artificial Sequence: Synthetic oligonucleotide
  Antisense strand to SEQ ID NO: 796666
guauaaaccaagcuugacc

SEQ ID NO: 796668 - RNA, 19 nt, Artificial Sequence
  Description of Artificial Sequence: Synthetic oligonucleotide
  Sense strand starting at position 23 of SEQ ID NO: 587498
ggcacaucugcggaggaaa

SEQ ID NO: 796669 - RNA, 19 nt, Artificial Sequence
  Description of Artificial Sequence: Synthetic oligonucleotide
  Antisense strand to SEQ ID NO: 796668
uuuccuccgcagaugugcc

SEQ ID NO: 796670 - RNA, 19 nt, Artificial Sequence
  Description of Artificial Sequence: Synthetic oligonucleotide
  Sense strand starting at position 207 of SEQ ID NO: 587498
ggcgcuuuccugccucaaa

SEQ ID NO: 796671 - RNA, 19 nt, Artificial Sequence
  Description of Artificial Sequence: Synthetic oligonucleotide
  Antisense strand to SEQ ID NO: 796670
uuugaggcaggaaagcgcc

SEQ ID NO: 796672 - RNA, 19 nt, Artificial Sequence
  Description of Artificial Sequence: Synthetic oligonucleotide
  Sense strand starting at position 269 of SEQ ID NO: 587498
accuguagccguuauuuaa

SEQ ID NO: 796673 - RNA, 19 nt, Artificial Sequence
  Description of Artificial Sequence: Synthetic oligonucleotide
  Antisense strand to SEQ ID NO: 796672
uuaaauaacggcuacaggu

SEQ ID NO: 796674 - RNA, 19 nt, Artificial Sequence
  Description of Artificial Sequence: Synthetic oligonucleotide
  Sense strand starting at position 277 of SEQ ID NO: 587498
ccguuauuuaaacgguaaa

SEQ ID NO: 796675 - RNA, 19 nt, Artificial Sequence
  Description of Artificial Sequence: Synthetic oligonucleotide
  Antisense strand to SEQ ID NO: 796674
uuuaccguuuaaauaacgg

SEQ ID NO: 796676 - RNA, 19 nt, Artificial Sequence
  Description of Artificial Sequence: Synthetic oligonucleotide
  Sense strand starting at position 529 of SEQ ID NO: 587498
agaaacuuccaucgucaag

SEQ ID NO: 796677 - RNA, 19 nt, Artificial Sequence
  Description of Artificial Sequence: Synthetic oligonucleotide
  Antisense strand to SEQ ID NO: 796676
cuugacgauggaaguuucu

SEQ ID NO: 796678 - RNA, 19 nt, Artificial Sequence
  Description of Artificial Sequence: Synthetic oligonucleotide
  Sense strand starting at position 704 of SEQ ID NO: 587498
ggcgaauaacuuggugaga

SEQ ID NO: 796679 - RNA, 19 nt, Artificial Sequence
  Description of Artificial Sequence: Synthetic oligonucleotide
  Antisense strand to SEQ ID NO: 796678
ucucaccaaguuauucgcc

SEQ ID NO: 796680 - RNA, 19 nt, Artificial Sequence
  Description of Artificial Sequence: Synthetic oligonucleotide
  Sense strand starting at position 705 of SEQ ID NO: 587498
gcgaauaacuuggugagau

SEQ ID NO: 796681 - RNA, 19 nt, Artificial Sequence
  Description of Artificial Sequence: Synthetic oligonucleotide
  Antisense strand to SEQ ID NO: 796680
aucucaccaaguuauucgc

SEQ ID NO: 796682 - RNA, 19 nt, Artificial Sequence
  Description of Artificial Sequence: Synthetic oligonucleotide
  Sense strand starting at position 709 of SEQ ID NO: 587498
auaacuuggugagaucuua

SEQ ID NO: 796683 - RNA, 19 nt, Artificial Sequence
  Description of Artificial Sequence: Synthetic oligonucleotide
  Antisense strand to SEQ ID NO: 796682
uaagaucucaccaaguuau

SEQ ID NO: 796684 - RNA, 19 nt, Artificial Sequence
  Description of Artificial Sequence: Synthetic oligonucleotide
  Sense strand starting at position 794 of SEQ ID NO: 587498
cagaaauguuaaggaggga

SEQ ID NO: 796685 - RNA, 19 nt, Artificial Sequence
  Description of Artificial Sequence: Synthetic oligonucleotide
  Antisense strand to SEQ ID NO: 796684
ucccuccuuaacauuucug

SEQ ID NO: 796686 - RNA, 19 nt, Artificial Sequence
  Description of Artificial Sequence: Synthetic oligonucleotide
  Sense strand starting at position 826 of SEQ ID NO: 587498
ggcugaagaaucugaguuu

SEQ ID NO: 796687 - RNA, 19 nt, Artificial Sequence
  Description of Artificial Sequence: Synthetic oligonucleotide
  Antisense strand to SEQ ID NO: 796686
aaacucagauucuucagcc

SEQ ID NO: 796688 - RNA, 19 nt, Artificial Sequence
  Description of Artificial Sequence: Synthetic oligonucleotide
  Sense strand starting at position 931 of SEQ ID NO: 587498
ggcugcuacaucuggaaau

SEQ ID NO: 796689 - RNA, 19 nt, Artificial Sequence
  Description of Artificial Sequence: Synthetic oligonucleotide
  Antisense strand to SEQ ID NO: 796688
auuuccagauguagcagcc

SEQ ID NO: 796690 - RNA, 19 nt, Artificial Sequence
  Description of Artificial Sequence: Synthetic oligonucleotide
  Sense strand starting at position 933 of SEQ ID NO: 587498
cugcuacaucuggaaauug

SEQ ID NO: 796691 - RNA, 19 nt, Artificial Sequence
  Description of Artificial Sequence: Synthetic oligonucleotide
  Antisense strand to SEQ ID NO: 796690
caauuuccagauguagcag

SEQ ID NO: 796692 - RNA, 19 nt, Artificial Sequence
  Description of Artificial Sequence: Synthetic oligonucleotide
  Sense strand starting at position 1008 of SEQ ID NO: 587498
gauagcuucugggcucaga

SEQ ID NO: 796693 - RNA, 19 nt, Artificial Sequence
  Description of Artificial Sequence: Synthetic oligonucleotide
  Antisense strand to SEQ ID NO: 796692
ucugagcccagaagcuauc

SEQ ID NO: 796694 - RNA, 19 nt, Artificial Sequence
  Description of Artificial Sequence: Synthetic oligonucleotide
  Sense strand starting at position 1225 of SEQ ID NO: 587498
gccagagaagcauacgcau

SEQ ID NO: 796695 - RNA, 19 nt, Artificial Sequence
  Description of Artificial Sequence: Synthetic oligonucleotide
  Antisense strand to SEQ ID NO: 796694
augcguaugcuucucuggc

SEQ ID NO: 796696 - RNA, 19 nt, Artificial Sequence
  Description of Artificial Sequence: Synthetic oligonucleotide
  Sense strand starting at position 2436 of SEQ ID NO: 587498
gccucacuuuccuugcaga

SEQ ID NO: 796697 - RNA, 19 nt, Artificial Sequence
  Description of Artificial Sequence: Synthetic oligonucleotide
  Antisense strand to SEQ ID NO: 796696
ucugcaaggaaagugaggc

SEQ ID NO: 796698 - RNA, 19 nt, Artificial Sequence
  Description of Artificial Sequence: Synthetic oligonucleotide
  Sense strand starting at position 3013 of SEQ ID NO: 587498
aaugucaggcccuagacau

SEQ ID NO: 796699 - RNA, 19 nt, Artificial Sequence
  Description of Artificial Sequence: Synthetic oligonucleotide
  Antisense strand to SEQ ID NO: 796698
augucuagggccugacauu

SEQ ID NO: 796700 - RNA, 19 nt, Artificial Sequence
  Description of Artificial Sequence: Synthetic oligonucleotide
  Sense strand starting at position 3214 of SEQ ID NO: 587498
gggccuagcgcauaguuaa

SEQ ID NO: 796701 - RNA, 19 nt, Artificial Sequence
  Description of Artificial Sequence: Synthetic oligonucleotide
  Antisense strand to SEQ ID NO: 796700
uuaacuaugcgcuaggccc

SEQ ID NO: 796702 - RNA, 19 nt, Artificial Sequence
  Description of Artificial Sequence: Synthetic oligonucleotide
  Sense strand starting at position 3341 of SEQ ID NO: 587498
ggaacuggacccuguaaau

SEQ ID NO: 796703 - RNA, 19 nt, Artificial Sequence
  Description of Artificial Sequence: Synthetic oligonucleotide
  Antisense strand to SEQ ID NO: 796702
auuuacaggguccaguucc

SEQ ID NO: 796704 - RNA, 19 nt, Artificial Sequence
  Description of Artificial Sequence: Synthetic oligonucleotide
  Sense strand starting at position 3352 of SEQ ID NO: 587498
cuguaaauucuacagcgau

SEQ ID NO: 796705 - RNA, 19 nt, Artificial Sequence
  Description of Artificial Sequence: Synthetic oligonucleotide
  Antisense strand to SEQ ID NO: 796704
aucgcuguagaauuuacag

SEQ ID NO: 796706 - RNA, 19 nt, Artificial Sequence
  Description of Artificial Sequence: Synthetic oligonucleotide
  Sense strand starting at position 3398 of SEQ ID NO: 587498
ugcagugaaugucuaggaa

SEQ ID NO: 796707 - RNA, 19 nt, Artificial Sequence
  Description of Artificial Sequence: Synthetic oligonucleotide
  Antisense strand to SEQ ID NO: 796706
uuccuagacauucacugca

SEQ ID NO: 796708 - RNA, 19 nt, Artificial Sequence
  Description of Artificial Sequence: Synthetic oligonucleotide
  Sense strand starting at position 3401 of SEQ ID NO: 587498
agugaaugucuaggaagca

SEQ ID NO: 796709 - RNA, 19 nt, Artificial Sequence
  Description of Artificial Sequence: Synthetic oligonucleotide
  Antisense strand to SEQ ID NO: 796708
ugcuuccuagacauucacu

SEQ ID NO: 796710 - RNA, 19 nt, Artificial Sequence
  Description of Artificial Sequence: Synthetic oligonucleotide
  Sense strand starting at position 3421 of SEQ ID NO: 587498
agaguaagcagugggaguu

SEQ ID NO: 796711 - RNA, 19 nt, Artificial Sequence
  Description of Artificial Sequence: Synthetic oligonucleotide
  Antisense strand to SEQ ID NO: 796710
aacucccacugcuuacucu

SEQ ID NO: 796712 - RNA, 19 nt, Artificial Sequence
  Description of Artificial Sequence: Synthetic oligonucleotide
  Sense strand starting at position 3444 of SEQ ID NO: 587498
ggagacgugugguugguuu

SEQ ID NO: 796713 - RNA, 19 nt, Artificial Sequence
  Description of Artificial Sequence: Synthetic oligonucleotide
  Antisense strand to SEQ ID NO: 796712
aaaccaaccacacgucucc

SEQ ID NO: 796714 - RNA, 19 nt, Artificial Sequence
  Description of Artificial Sequence: Synthetic oligonucleotide
  Sense strand starting at position 3448 of SEQ ID NO: 587498
acgugugguugguuuggaa

SEQ ID NO: 796715 - RNA, 19 nt, Artificial Sequence
  Description of Artificial Sequence: Synthetic oligonucleotide
  Antisense strand to SEQ ID NO: 796714
uuccaaaccaaccacacgu

SEQ ID NO: 796716 - RNA, 19 nt, Artificial Sequence
  Description of Artificial Sequence: Synthetic oligonucleotide
  Sense strand starting at position 3463 of SEQ ID NO: 587498
ggaaauuaaucacagccca

SEQ ID NO: 796717 - RNA, 19 nt, Artificial Sequence
  Description of Artificial Sequence: Synthetic oligonucleotide
  Antisense strand to SEQ ID NO: 796716
ugggcugugauuaauuucc

SEQ ID NO: 796718 - RNA, 19 nt, Artificial Sequence
  Description of Artificial Sequence: Synthetic oligonucleotide
  Sense strand starting at position 3492 of SEQ ID NO: 587498
ccuccaguacuguggaaca

SEQ ID NO: 796719 - RNA, 19 nt, Artificial Sequence
  Description of Artificial Sequence: Synthetic oligonucleotide
  Antisense strand to SEQ ID NO: 796718
uguuccacaguacuggagg

SEQ ID NO: 796720 - RNA, 19 nt, Artificial Sequence
  Description of Artificial Sequence: Synthetic oligonucleotide
  Sense strand starting at position 3535 of SEQ ID NO: 587498
cccugagucuucccgcgaa

SEQ ID NO: 796721 - RNA, 19 nt, Artificial Sequence
  Description of Artificial Sequence: Synthetic oligonucleotide
  Antisense strand to SEQ ID NO: 796720
uucgcgggaagacucaggg

SEQ ID NO: 796722 - RNA, 19 nt, Artificial Sequence
  Description of Artificial Sequence: Synthetic oligonucleotide
  Sense strand starting at position 3537 of SEQ ID NO: 587498
cugagucuucccgcgaagu

SEQ ID NO: 796723 - RNA, 19 nt, Artificial Sequence
  Description of Artificial Sequence: Synthetic oligonucleotide
  Antisense strand to SEQ ID NO: 796722
acuucgcgggaagacucag

SEQ ID NO: 796724 - RNA, 19 nt, Artificial Sequence
  Description of Artificial Sequence: Synthetic oligonucleotide
  Sense strand starting at position 3538 of SEQ ID NO: 587498
ugagucuucccgcgaagug

SEQ ID NO: 796725 - RNA, 19 nt, Artificial Sequence
  Description of Artificial Sequence: Synthetic oligonucleotide
  Antisense strand to SEQ ID NO: 796724
cacuucgcgggaagacuca

SEQ ID NO: 796726 - RNA, 19 nt, Artificial Sequence
  Description of Artificial Sequence: Synthetic oligonucleotide
  Sense strand starting at position 3541 of SEQ ID NO: 587498
gucuucccgcgaaguggua

SEQ ID NO: 796727 - RNA, 19 nt, Artificial Sequence
  Description of Artificial Sequence: Synthetic oligonucleotide
  Antisense strand to SEQ ID NO: 796726
uaccacuucgcgggaagac

SEQ ID NO: 796728 - RNA, 19 nt, Artificial Sequence
  Description of Artificial Sequence: Synthetic oligonucleotide
  Sense strand starting at position 3548 of SEQ ID NO: 587498
cgcgaagugguauaaugua

SEQ ID NO: 796729 - RNA, 19 nt, Artificial Sequence
  Description of Artificial Sequence: Synthetic oligonucleotide
  Antisense strand to SEQ ID NO: 796728
uacauuauaccacuucgcg

SEQ ID NO: 796730 - RNA, 19 nt, Artificial Sequence
  Description of Artificial Sequence: Synthetic oligonucleotide
  Sense strand starting at position 3567 of SEQ ID NO: 587498
gugguucccuaauccagau

SEQ ID NO: 796731 - RNA, 19 nt, Artificial Sequence
  Description of Artificial Sequence: Synthetic oligonucleotide
  Antisense strand to SEQ ID NO: 796730
aucuggauuagggaaccac

SEQ ID NO: 796732 - RNA, 19 nt, Artificial Sequence
  Description of Artificial Sequence: Synthetic oligonucleotide
  Sense strand starting at position 3630 of SEQ ID NO: 587498
ccugcucagacaugaggaa

SEQ ID NO: 796733 - RNA, 19 nt, Artificial Sequence
  Description of Artificial Sequence: Synthetic oligonucleotide
  Antisense strand to SEQ ID NO: 796732
uuccucaugucugagcagg

SEQ ID NO: 796734 - RNA, 19 nt, Artificial Sequence
  Description of Artificial Sequence: Synthetic oligonucleotide
  Sense strand starting at position 3643 of SEQ ID NO: 587498
gaggaaucacgcuguccca

SEQ ID NO: 796735 - RNA, 19 nt, Artificial Sequence
  Description of Artificial Sequence: Synthetic oligonucleotide
  Antisense strand to SEQ ID NO: 796734
ugggacagcgugauuccuc

SEQ ID NO: 796736 - RNA, 19 nt, Artificial Sequence
  Description of Artificial Sequence: Synthetic oligonucleotide
  Sense strand starting at position 3753 of SEQ ID NO: 587498
cagcacuuggucugaagga

SEQ ID NO: 796737 - RNA, 19 nt, Artificial Sequence
  Description of Artificial Sequence: Synthetic oligonucleotide
  Antisense strand to SEQ ID NO: 796736
uccuucagaccaagugcug

SEQ ID NO: 796738 - RNA, 19 nt, Artificial Sequence
  Description of Artificial Sequence: Synthetic oligonucleotide
  Sense strand starting at position 3763 of SEQ ID NO: 587498
ucugaaggauuccuccauu

SEQ ID NO: 796739 - RNA, 19 nt, Artificial Sequence
  Description of Artificial Sequence: Synthetic oligonucleotide
  Antisense strand to SEQ ID NO: 796738
aauggaggaauccuucaga

SEQ ID NO: 796740 - RNA, 19 nt, Artificial Sequence
  Description of Artificial Sequence: Synthetic oligonucleotide
  Sense strand starting at position 3784 of SEQ ID NO: 587498
guccaucauuuaugaaguu

SEQ ID NO: 796741 - RNA, 19 nt, Artificial Sequence
  Description of Artificial Sequence: Synthetic oligonucleotide
  Antisense strand to SEQ ID NO: 796740
aacuucauaaaugauggac

SEQ ID NO: 796742 - RNA, 19 nt, Artificial Sequence
  Description of Artificial Sequence: Synthetic oligonucleotide
  Sense strand starting at position 3798 of SEQ ID NO: 587498
aaguuugauguaggacaaa

SEQ ID NO: 796743 - RNA, 19 nt, Artificial Sequence
  Description of Artificial Sequence: Synthetic oligonucleotide
  Antisense strand to SEQ ID NO: 796742
uuuguccuacaucaaacuu

SEQ ID NO: 796744 - RNA, 19 nt, Artificial Sequence
  Description of Artificial Sequence: Synthetic oligonucleotide
  Sense strand starting at position 3864 of SEQ ID NO: 587498
acaagauggucauaagaau

SEQ ID NO: 796745 - RNA, 19 nt, Artificial Sequence
  Description of Artificial Sequence: Synthetic oligonucleotide
  Antisense strand to SEQ ID NO: 796744
auucuuaugaccaucuugu

SEQ ID NO: 796746 - RNA, 19 nt, Artificial Sequence
  Description of Artificial Sequence: Synthetic oligonucleotide
  Sense strand starting at position 3928 of SEQ ID NO: 587498
ggaagucacuaugaaaggu

SEQ ID NO: 796747 - RNA, 19 nt, Artificial Sequence
  Description of Artificial Sequence: Synthetic oligonucleotide
  Antisense strand to SEQ ID NO: 796746
accuuucauagugacuucc

SEQ ID NO: 796748 - RNA, 19 nt, Artificial Sequence
  Description of Artificial Sequence: Synthetic oligonucleotide
  Sense strand starting at position 238 of SEQ ID NO: 587499
uuaagaaacuugcuuugaa

SEQ ID NO: 796749 - RNA, 19 nt, Artificial Sequence
  Description of Artificial Sequence: Synthetic oligonucleotide
  Antisense strand to SEQ ID NO: 796748
uucaaagcaaguuucuuaa

SEQ ID NO: 796750 - RNA, 19 nt, Artificial Sequence
  Description of Artificial Sequence: Synthetic oligonucleotide
  Sense strand starting at position 241 of SEQ ID NO: 587499
agaaacuugcuuugaaauu

SEQ ID NO: 796751 - RNA, 19 nt, Artificial Sequence
  Description of Artificial Sequence: Synthetic oligonucleotide
  Antisense strand to SEQ ID NO: 796750
aauuucaaagcaaguuucu

SEQ ID NO: 796752 - RNA, 19 nt, Artificial Sequence
  Description of Artificial Sequence: Synthetic oligonucleotide
  Sense strand starting at position 252 of SEQ ID NO: 587499
uugaaauucuggucuccau

SEQ ID NO: 796753 - RNA, 19 nt, Artificial Sequence
  Description of Artificial Sequence: Synthetic oligonucleotide
  Antisense strand to SEQ ID NO: 796752
auggagaccagaauuucaa

SEQ ID NO: 796754 - RNA, 19 nt, Artificial Sequence
  Description of Artificial Sequence: Synthetic oligonucleotide
  Sense strand starting at position 306 of SEQ ID NO: 587499
ucuggcuuacaguaaaguu

SEQ ID NO: 796755 - RNA, 19 nt, Artificial Sequence
  Description of Artificial Sequence: Synthetic oligonucleotide
  Antisense strand to SEQ ID NO: 796754
aacuuuacuguaagccaga

SEQ ID NO: 796756 - RNA, 19 nt, Artificial Sequence
  Description of Artificial Sequence: Synthetic oligonucleotide
  Sense strand starting at position 384 of SEQ ID NO: 587499
ugccuuaggcaguaucaaa

SEQ ID NO: 796757 - RNA, 19 nt, Artificial Sequence
  Description of Artificial Sequence: Synthetic oligonucleotide
  Antisense strand to SEQ ID NO: 796756
uuugauacugccuaaggca

SEQ ID NO: 796758 - RNA, 19 nt, Artificial Sequence
  Description of Artificial Sequence: Synthetic oligonucleotide
  Sense strand starting at position 443 of SEQ ID NO: 587499
uguucuuugguggacuaua

SEQ ID NO: 796759 - RNA, 19 nt, Artificial Sequence
  Description of Artificial Sequence: Synthetic oligonucleotide
  Antisense strand to SEQ ID NO: 796758
uauaguccaccaaagaaca

SEQ ID NO: 796760 - RNA, 19 nt, Artificial Sequence
  Description of Artificial Sequence: Synthetic oligonucleotide
  Sense strand starting at position 448 of SEQ ID NO: 587499
uuugguggacuauauuauu

SEQ ID NO: 796761 - RNA, 19 nt, Artificial Sequence
  Description of Artificial Sequence: Synthetic oligonucleotide
  Antisense strand to SEQ ID NO: 796760
aauaauauaguccaccaaa

SEQ ID NO: 796762 - RNA, 19 nt, Artificial Sequence
  Description of Artificial Sequence: Synthetic oligonucleotide
  Sense strand starting at position 528 of SEQ ID NO: 587499
uuaauuacgcugcauuaaa

SEQ ID NO: 796763 - RNA, 19 nt, Artificial Sequence
  Description of Artificial Sequence: Synthetic oligonucleotide
  Antisense strand to SEQ ID NO: 796762
uuuaaugcagcguaauuaa

SEQ ID NO: 796764 - RNA, 19 nt, Artificial Sequence
  Description of Artificial Sequence: Synthetic oligonucleotide
  Sense strand starting at position 717 of SEQ ID NO: 587499
aaaguuauugaacgaagua

SEQ ID NO: 796765 - RNA, 19 nt, Artificial Sequence
  Description of Artificial Sequence: Synthetic oligonucleotide
  Antisense strand to SEQ ID NO: 796764
uacuucguucaauaacuuu

SEQ ID NO: 796766 - RNA, 19 nt, Artificial Sequence
  Description of Artificial Sequence: Synthetic oligonucleotide
  Sense strand starting at position 760 of SEQ ID NO: 587499
acgcuauaggacuauaaug

SEQ ID NO: 796767 - RNA, 19 nt, Artificial Sequence
  Description of Artificial Sequence: Synthetic oligonucleotide
  Antisense strand to SEQ ID NO: 796766
cauuauaguccuauagcgu

SEQ ID NO: 796768 - RNA, 19 nt, Artificial Sequence
  Description of Artificial Sequence: Synthetic oligonucleotide
  Sense strand starting at position 768 of SEQ ID NO: 587499
ggacuauaaugcuuaggac

SEQ ID NO: 796769 - RNA, 19 nt, Artificial Sequence
  Description of Artificial Sequence: Synthetic oligonucleotide
  Antisense strand to SEQ ID NO: 796768
guccuaagcauuauagucc

SEQ ID NO: 796770 - RNA, 19 nt, Artificial Sequence
  Description of Artificial Sequence: Synthetic oligonucleotide
  Sense strand starting at position 777 of SEQ ID NO: 587499
ugcuuaggacuauaaccua

SEQ ID NO: 796771 - RNA, 19 nt, Artificial Sequence
  Description of Artificial Sequence: Synthetic oligonucleotide
  Antisense strand to SEQ ID NO: 796770
uagguuauaguccuaagca

SEQ ID NO: 796772 - RNA, 19 nt, Artificial Sequence
  Description of Artificial Sequence: Synthetic oligonucleotide
  Sense strand starting at position 790 of SEQ ID NO: 587499
aaccuaagucagugaguua

SEQ ID NO: 796773 - RNA, 19 nt, Artificial Sequence
  Description of Artificial Sequence: Synthetic oligonucleotide
  Antisense strand to SEQ ID NO: 796772
uaacucacugacuuagguu

SEQ ID NO: 796774 - RNA, 19 nt, Artificial Sequence
  Description of Artificial Sequence: Synthetic oligonucleotide
  Sense strand starting at position 1267 of SEQ ID NO: 587499
gggugaugcaccuauauau

SEQ ID NO: 796775 - RNA, 19 nt, Artificial Sequence
  Description of Artificial Sequence: Synthetic oligonucleotide
  Antisense strand to SEQ ID NO: 796774
auauauaggugcaucaccc

SEQ ID NO: 796776 - RNA, 19 nt, Artificial Sequence
  Description of Artificial Sequence: Synthetic oligonucleotide
  Sense strand starting at position 1466 of SEQ ID NO: 587499
ucuugauguccugaaaugu

SEQ ID NO: 796777 - RNA, 19 nt, Artificial Sequence
  Description of Artificial Sequence: Synthetic oligonucleotide
  Antisense strand to SEQ ID NO: 796776
acauuucaggacaucaaga

SEQ ID NO: 796778 - RNA, 19 nt, Artificial Sequence
  Description of Artificial Sequence: Synthetic oligonucleotide
  Sense strand starting at position 1612 of SEQ ID NO: 587499
gcuuuagaauaauuccuga

SEQ ID NO: 796779 - RNA, 19 nt, Artificial Sequence
  Description of Artificial Sequence: Synthetic oligonucleotide
  Antisense strand to SEQ ID NO: 796778
ucaggaauuauucuaaagc

SEQ ID NO: 796780 - RNA, 19 nt, Artificial Sequence
  Description of Artificial Sequence: Synthetic oligonucleotide
  Sense strand starting at position 1625 of SEQ ID NO: 587499
uccugagaauaucuuaagu

SEQ ID NO: 796781 - RNA, 19 nt, Artificial Sequence
  Description of Artificial Sequence: Synthetic oligonucleotide
  Antisense strand to SEQ ID NO: 796780
acuuaagauauucucagga

SEQ ID NO: 796782 - RNA, 19 nt, Artificial Sequence
  Description of Artificial Sequence: Synthetic oligonucleotide
  Sense strand starting at position 1714 of SEQ ID NO: 587499
aucuguauaucuguaacaa

SEQ ID NO: 796783 - RNA, 19 nt, Artificial Sequence
  Description of Artificial Sequence: Synthetic oligonucleotide
  Antisense strand to SEQ ID NO: 796782
uuguuacagauauacagau

SEQ ID NO: 796784 - RNA, 19 nt, Artificial Sequence
  Description of Artificial Sequence: Synthetic oligonucleotide
  Sense strand starting at position 1974 of SEQ ID NO: 587499
cuguaacugcauugggaau

SEQ ID NO: 796785 - RNA, 19 nt, Artificial Sequence
  Description of Artificial Sequence: Synthetic oligonucleotide
  Antisense strand to SEQ ID NO: 796784
auucccaaugcaguuacag

SEQ ID NO: 796786 - RNA, 19 nt, Artificial Sequence
  Description of Artificial Sequence: Synthetic oligonucleotide
  Sense strand starting at position 1975 of SEQ ID NO: 587499
uguaacugcauugggaauu

SEQ ID NO: 796787 - RNA, 19 nt, Artificial Sequence
  Description of Artificial Sequence: Synthetic oligonucleotide
  Antisense strand to SEQ ID NO: 796786
aauucccaaugcaguuaca

SEQ ID NO: 796788 - RNA, 19 nt, Artificial Sequence
  Description of Artificial Sequence: Synthetic oligonucleotide
  Sense strand starting at position 2288 of SEQ ID NO: 587499
cgaaguccagcugaaacuu

SEQ ID NO: 796789 - RNA, 19 nt, Artificial Sequence
  Description of Artificial Sequence: Synthetic oligonucleotide
  Antisense strand to SEQ ID NO: 796788
aaguuucagcuggacuucg

SEQ ID NO: 796790 - RNA, 19 nt, Artificial Sequence
  Description of Artificial Sequence: Synthetic oligonucleotide
  Sense strand starting at position 2434 of SEQ ID NO: 587499
aggugaaauggucaguuua

SEQ ID NO: 796791 - RNA, 19 nt, Artificial Sequence
  Description of Artificial Sequence: Synthetic oligonucleotide
  Antisense strand to SEQ ID NO: 796790
uaaacugaccauuucaccu

SEQ ID NO: 796792 - RNA, 19 nt, Artificial Sequence
  Description of Artificial Sequence: Synthetic oligonucleotide
  Sense strand starting at position 2508 of SEQ ID NO: 587499
acuggaagcaucgauuaua

SEQ ID NO: 796793 - RNA, 19 nt, Artificial Sequence
  Description of Artificial Sequence: Synthetic oligonucleotide
  Antisense strand to SEQ ID NO: 796792
uauaaucgaugcuuccagu

SEQ ID NO: 796794 - RNA, 19 nt, Artificial Sequence
  Description of Artificial Sequence: Synthetic oligonucleotide
  Sense strand starting at position 2518 of SEQ ID NO: 587499
ucgauuauacucuggacaa

SEQ ID NO: 796795 - RNA, 19 nt, Artificial Sequence
  Description of Artificial Sequence: Synthetic oligonucleotide
  Antisense strand to SEQ ID NO: 796794
uuguccagaguauaaucga

SEQ ID NO: 796796 - RNA, 19 nt, Artificial Sequence
  Description of Artificial Sequence: Synthetic oligonucleotide
  Sense strand starting at position 2622 of SEQ ID NO: 587499
aguuucuuacuggaaaucu

SEQ ID NO: 796797 - RNA, 19 nt, Artificial Sequence
  Description of Artificial Sequence: Synthetic oligonucleotide
  Antisense strand to SEQ ID NO: 796796
agauuuccaguaagaaacu

SEQ ID NO: 796798 - RNA, 19 nt, Artificial Sequence
  Description of Artificial Sequence: Synthetic oligonucleotide
  Sense strand starting at position 2776 of SEQ ID NO: 587499
ggacuugagcacugacgau

SEQ ID NO: 796799 - RNA, 19 nt, Artificial Sequence
  Description of Artificial Sequence: Synthetic oligonucleotide
  Antisense strand to SEQ ID NO: 796798
aucgucagugcucaagucc

SEQ ID NO: 796800 - RNA, 19 nt, Artificial Sequence
  Description of Artificial Sequence: Synthetic oligonucleotide
  Sense strand starting at position 2903 of SEQ ID NO: 587499
gccaguuagacugaaguga

SEQ ID NO: 796801 - RNA, 19 nt, Artificial Sequence
  Description of Artificial Sequence: Synthetic oligonucleotide
  Antisense strand to SEQ ID NO: 796800
ucacuucagucuaacuggc

SEQ ID NO: 796802 - RNA, 19 nt, Artificial Sequence
  Description of Artificial Sequence: Synthetic oligonucleotide
  Sense strand starting at position 3029 of SEQ ID NO: 587499
caauaaugaucucuguggu

SEQ ID NO: 796803 - RNA, 19 nt, Artificial Sequence
  Description of Artificial Sequence: Synthetic oligonucleotide
  Antisense strand to SEQ ID NO: 796802
accacagagaucauuauug

SEQ ID NO: 796804 - RNA, 19 nt, Artificial Sequence
  Description of Artificial Sequence: Synthetic oligonucleotide
  Sense strand starting at position 3030 of SEQ ID NO: 587499
aauaaugaucucuguggua

SEQ ID NO: 796805 - RNA, 19 nt, Artificial Sequence
  Description of Artificial Sequence: Synthetic oligonucleotide
  Antisense strand to SEQ ID NO: 796804
uaccacagagaucauuauu

SEQ ID NO: 796806 - RNA, 19 nt, Artificial Sequence
  Description of Artificial Sequence: Synthetic oligonucleotide
  Sense strand starting at position 3032 of SEQ ID NO: 587499
uaaugaucucugugguaaa

SEQ ID NO: 796807 - RNA, 19 nt, Artificial Sequence
  Description of Artificial Sequence: Synthetic oligonucleotide
  Antisense strand to SEQ ID NO: 796806
uuuaccacagagaucauua

SEQ ID NO: 796808 - RNA, 19 nt, Artificial Sequence
  Description of Artificial Sequence: Synthetic oligonucleotide
  Sense strand starting at position 3120 of SEQ ID NO: 587499
auaauuuagccuuguguuc

SEQ ID NO: 796809 - RNA, 19 nt, Artificial Sequence
  Description of Artificial Sequence: Synthetic oligonucleotide
  Antisense strand to SEQ ID NO: 796808
gaacacaaggcuaaauuau

SEQ ID NO: 796810 - RNA, 19 nt, Artificial Sequence
  Description of Artificial Sequence: Synthetic oligonucleotide
  Sense strand starting at position 3356 of SEQ ID NO: 587499
ggcaauccugcucagaauc

SEQ ID NO: 796811 - RNA, 19 nt, Artificial Sequence
  Description of Artificial Sequence: Synthetic oligonucleotide
  Antisense strand to SEQ ID NO: 796810
gauucugagcaggauugcc

SEQ ID NO: 796812 - RNA, 19 nt, Artificial Sequence
  Description of Artificial Sequence: Synthetic oligonucleotide
  Sense strand starting at position 3465 of SEQ ID NO: 587499
ggcaguaaggacuacucua

SEQ ID NO: 796813 - RNA, 19 nt, Artificial Sequence
  Description of Artificial Sequence: Synthetic oligonucleotide
  Antisense strand to SEQ ID NO: 796812
uagaguaguccuuacugcc

SEQ ID NO: 796814 - RNA, 19 nt, Artificial Sequence
  Description of Artificial Sequence: Synthetic oligonucleotide
  Sense strand starting at position 3490 of SEQ ID NO: 587499
auacuuuguggaggaauuc

SEQ ID NO: 796815 - RNA, 19 nt, Artificial Sequence
  Description of Artificial Sequence: Synthetic oligonucleotide
  Antisense strand to SEQ ID NO: 796814
gaauuccuccacaaaguau

SEQ ID NO: 796816 - RNA, 19 nt, Artificial Sequence
  Description of Artificial Sequence: Synthetic oligonucleotide
  Sense strand starting at position 3527 of SEQ ID NO: 587499
ggaguaacauuauuccaug

SEQ ID NO: 796817 - RNA, 19 nt, Artificial Sequence
  Description of Artificial Sequence: Synthetic oligonucleotide
  Antisense strand to SEQ ID NO: 796816
cauggaauaauguuacucc

SEQ ID NO: 796818 - RNA, 19 nt, Artificial Sequence
  Description of Artificial Sequence: Synthetic oligonucleotide
  Sense strand starting at position 3533 of SEQ ID NO: 587499
acauuauuccauggaugua

SEQ ID NO: 796819 - RNA, 19 nt, Artificial Sequence
  Description of Artificial Sequence: Synthetic oligonucleotide
  Antisense strand to SEQ ID NO: 796818
uacauccauggaauaaugu

SEQ ID NO: 796820 - RNA, 19 nt, Artificial Sequence
  Description of Artificial Sequence: Synthetic oligonucleotide
  Sense strand starting at position 3546 of SEQ ID NO: 587499
gauguacugccauaacaug

SEQ ID NO: 796821 - RNA, 19 nt, Artificial Sequence
  Description of Artificial Sequence: Synthetic oligonucleotide
  Antisense strand to SEQ ID NO: 796820
cauguuauggcaguacauc

SEQ ID NO: 796822 - RNA, 19 nt, Artificial Sequence
  Description of Artificial Sequence: Synthetic oligonucleotide
  Sense strand starting at position 3552 of SEQ ID NO: 587499
cugccauaacaugguggaa

SEQ ID NO: 796823 - RNA, 19 nt, Artificial Sequence
  Description of Artificial Sequence: Synthetic oligonucleotide
  Antisense strand to SEQ ID NO: 796822
uuccaccauguuauggcag

SEQ ID NO: 796824 - RNA, 19 nt, Artificial Sequence
  Description of Artificial Sequence: Synthetic oligonucleotide
  Sense strand starting at position 3945 of SEQ ID NO: 587499
gcaccaaagcuaugaaaug

SEQ ID NO: 796825 - RNA, 19 nt, Artificial Sequence
  Description of Artificial Sequence: Synthetic oligonucleotide
  Antisense strand to SEQ ID NO: 796824
cauuucauagcuuuggugc

SEQ ID NO: 796826 - RNA, 19 nt, Artificial Sequence
  Description of Artificial Sequence: Synthetic oligonucleotide
  Sense strand starting at position 3972 of SEQ ID NO: 587499
accugagaucacuggcuga

SEQ ID NO: 796827 - RNA, 19 nt, Artificial Sequence
  Description of Artificial Sequence: Synthetic oligonucleotide
  Antisense strand to SEQ ID NO: 796826
ucagccagugaucucaggu

SEQ ID NO: 796828 - RNA, 19 nt, Artificial Sequence
  Description of Artificial Sequence: Synthetic oligonucleotide
  Sense strand starting at position 372 of SEQ ID NO: 587500
uuaagaaacuugcuuugaa

SEQ ID NO: 796829 - RNA, 19 nt, Artificial Sequence
  Description of Artificial Sequence: Synthetic oligonucleotide
  Antisense strand to SEQ ID NO: 796828
uucaaagcaaguuucuuaa

SEQ ID NO: 796830 - RNA, 19 nt, Artificial Sequence
  Description of Artificial Sequence: Synthetic oligonucleotide
  Sense strand starting at position 375 of SEQ ID NO: 587500
agaaacuugcuuugaaauu

SEQ ID NO: 796831 - RNA, 19 nt, Artificial Sequence
  Description of Artificial Sequence: Synthetic oligonucleotide
  Antisense strand to SEQ ID NO: 796830
aauuucaaagcaaguuucu

SEQ ID NO: 796832 - RNA, 19 nt, Artificial Sequence
  Description of Artificial Sequence: Synthetic oligonucleotide
  Sense strand starting at position 386 of SEQ ID NO: 587500
uugaaauucuggucuccau

SEQ ID NO: 796833 - RNA, 19 nt, Artificial Sequence
  Description of Artificial Sequence: Synthetic oligonucleotide
  Antisense strand to SEQ ID NO: 796832
auggagaccagaauuucaa

SEQ ID NO: 796834 - RNA, 19 nt, Artificial Sequence
  Description of Artificial Sequence: Synthetic oligonucleotide
  Sense strand starting at position 440 of SEQ ID NO: 587500
ucuggcuuacaguaaaguu

SEQ ID NO: 796835 - RNA, 19 nt, Artificial Sequence
  Description of Artificial Sequence: Synthetic oligonucleotide
  Antisense strand to SEQ ID NO: 796834
aacuuuacuguaagccaga

SEQ ID NO: 796836 - RNA, 19 nt, Artificial Sequence
  Description of Artificial Sequence: Synthetic oligonucleotide
  Sense strand starting at position 518 of SEQ ID NO: 587500
ugccuuaggcaguaucaaa

SEQ ID NO: 796837 - RNA, 19 nt, Artificial Sequence
  Description of Artificial Sequence: Synthetic oligonucleotide
  Antisense strand to SEQ ID NO: 796836
uuugauacugccuaaggca

SEQ ID NO: 796838 - RNA, 19 nt, Artificial Sequence
  Description of Artificial Sequence: Synthetic oligonucleotide
  Sense strand starting at position 577 of SEQ ID NO: 587500
uguucuuugguggacuaua

SEQ ID NO: 796839 - RNA, 19 nt, Artificial Sequence
  Description of Artificial Sequence: Synthetic oligonucleotide
  Antisense strand to SEQ ID NO: 796838
uauaguccaccaaagaaca

SEQ ID NO: 796840 - RNA, 19 nt, Artificial Sequence
  Description of Artificial Sequence: Synthetic oligonucleotide
  Sense strand starting at position 582 of SEQ ID NO: 587500
uuugguggacuauauuauu

SEQ ID NO: 796841 - RNA, 19 nt, Artificial Sequence
  Description of Artificial Sequence: Synthetic oligonucleotide
  Antisense strand to SEQ ID NO: 796840
aauaauauaguccaccaaa

SEQ ID NO: 796842 - RNA, 19 nt, Artificial Sequence
  Description of Artificial Sequence: Synthetic oligonucleotide
  Sense strand starting at position 662 of SEQ ID NO: 587500
uuaauuacgcugcauuaaa

SEQ ID NO: 796843 - RNA, 19 nt, Artificial Sequence
  Description of Artificial Sequence: Synthetic oligonucleotide
  Antisense strand to SEQ ID NO: 796842
uuuaaugcagcguaauuaa

SEQ ID NO: 796844 - RNA, 19 nt, Artificial Sequence
  Description of Artificial Sequence: Synthetic oligonucleotide
  Sense strand starting at position 851 of SEQ ID NO: 587500
aaaguuauugaacgaagua

SEQ ID NO: 796845 - RNA, 19 nt, Artificial Sequence
  Description of Artificial Sequence: Synthetic oligonucleotide
  Antisense strand to SEQ ID NO: 796844
uacuucguucaauaacuuu

SEQ ID NO: 796846 - RNA, 19 nt, Artificial Sequence
  Description of Artificial Sequence: Synthetic oligonucleotide
  Sense strand starting at position 894 of SEQ ID NO: 587500
acgcuauaggacuauaaug

SEQ ID NO: 796847 - RNA, 19 nt, Artificial Sequence
  Description of Artificial Sequence: Synthetic oligonucleotide
  Antisense strand to SEQ ID NO: 796846
cauuauaguccuauagcgu

SEQ ID NO: 796848 - RNA, 19 nt, Artificial Sequence
  Description of Artificial Sequence: Synthetic oligonucleotide
  Sense strand starting at position 902 of SEQ ID NO: 587500
ggacuauaaugcuuaggac

SEQ ID NO: 796849 - RNA, 19 nt, Artificial Sequence
  Description of Artificial Sequence: Synthetic oligonucleotide
  Antisense strand to SEQ ID NO: 796848
guccuaagcauuauagucc

SEQ ID NO: 796850 - RNA, 19 nt, Artificial Sequence
  Description of Artificial Sequence: Synthetic oligonucleotide
  Sense strand starting at position 911 of SEQ ID NO: 587500
ugcuuaggacuauaaccua

SEQ ID NO: 796851 - RNA, 19 nt, Artificial Sequence
  Description of Artificial Sequence: Synthetic oligonucleotide
  Antisense strand to SEQ ID NO: 796850
uagguuauaguccuaagca

SEQ ID NO: 796852 - RNA, 19 nt, Artificial Sequence
  Description of Artificial Sequence: Synthetic oligonucleotide
  Sense strand starting at position 924 of SEQ ID NO: 587500
aaccuaagucagugaguua

SEQ ID NO: 796853 - RNA, 19 nt, Artificial Sequence
  Description of Artificial Sequence: Synthetic oligonucleotide
  Antisense strand to SEQ ID NO: 796852
uaacucacugacuuagguu

SEQ ID NO: 796854 - RNA, 19 nt, Artificial Sequence
  Description of Artificial Sequence: Synthetic oligonucleotide
  Sense strand starting at position 1401 of SEQ ID NO: 587500
gggugaugcaccuauauau

SEQ ID NO: 796855 - RNA, 19 nt, Artificial Sequence
  Description of Artificial Sequence: Synthetic oligonucleotide
  Antisense strand to SEQ ID NO: 796854
auauauaggugcaucaccc

SEQ ID NO: 796856 - RNA, 19 nt, Artificial Sequence
  Description of Artificial Sequence: Synthetic oligonucleotide
  Sense strand starting at position 1600 of SEQ ID NO: 587500
ucuugauguccugaaaugu

SEQ ID NO: 796857 - RNA, 19 nt, Artificial Sequence
  Description of Artificial Sequence: Synthetic oligonucleotide
  Antisense strand to SEQ ID NO: 796856
acauuucaggacaucaaga

SEQ ID NO: 796858 - RNA, 19 nt, Artificial Sequence
  Description of Artificial Sequence: Synthetic oligonucleotide
  Sense strand starting at position 1746 of SEQ ID NO: 587500
gcuuuagaauaauuccuga

SEQ ID NO: 796859 - RNA, 19 nt, Artificial Sequence
  Description of Artificial Sequence: Synthetic oligonucleotide
  Antisense strand to SEQ ID NO: 796858
ucaggaauuauucuaaagc

SEQ ID NO: 796860 - RNA, 19 nt, Artificial Sequence
  Description of Artificial Sequence: Synthetic oligonucleotide
  Sense strand starting at position 1759 of SEQ ID NO: 587500
uccugagaauaucuuaagu

SEQ ID NO: 796861 - RNA, 19 nt, Artificial Sequence
  Description of Artificial Sequence: Synthetic oligonucleotide
  Antisense strand to SEQ ID NO: 796860
acuuaagauauucucagga

SEQ ID NO: 796862 - RNA, 19 nt, Artificial Sequence
  Description of Artificial Sequence: Synthetic oligonucleotide
  Sense strand starting at position 1848 of SEQ ID NO: 587500
aucuguauaucuguaacaa

SEQ ID NO: 796863 - RNA, 19 nt, Artificial Sequence
  Description of Artificial Sequence: Synthetic oligonucleotide
  Antisense strand to SEQ ID NO: 796862
uuguuacagauauacagau

SEQ ID NO: 796864 - RNA, 19 nt, Artificial Sequence
  Description of Artificial Sequence: Synthetic oligonucleotide
  Sense strand starting at position 2108 of SEQ ID NO: 587500
cuguaacugcauugggaau

SEQ ID NO: 796865 - RNA, 19 nt, Artificial Sequence
  Description of Artificial Sequence: Synthetic oligonucleotide
  Antisense strand to SEQ ID NO: 796864
auucccaaugcaguuacag

SEQ ID NO: 796866 - RNA, 19 nt, Artificial Sequence
  Description of Artificial Sequence: Synthetic oligonucleotide
  Sense strand starting at position 2109 of SEQ ID NO: 587500
uguaacugcauugggaauu

SEQ ID NO: 796867 - RNA, 19 nt, Artificial Sequence
  Description of Artificial Sequence: Synthetic oligonucleotide
  Antisense strand to SEQ ID NO: 796866
aauucccaaugcaguuaca

SEQ ID NO: 796868 - RNA, 19 nt, Artificial Sequence
  Description of Artificial Sequence: Synthetic oligonucleotide
  Sense strand starting at position 2422 of SEQ ID NO: 587500
cgaaguccagcugaaacuu

SEQ ID NO: 796869 - RNA, 19 nt, Artificial Sequence
  Description of Artificial Sequence: Synthetic oligonucleotide
  Antisense strand to SEQ ID NO: 796868
aaguuucagcuggacuucg

SEQ ID NO: 796870 - RNA, 19 nt, Artificial Sequence
  Description of Artificial Sequence: Synthetic oligonucleotide
  Sense strand starting at position 2568 of SEQ ID NO: 587500
aggugaaauggucaguuua

SEQ ID NO: 796871 - RNA, 19 nt, Artificial Sequence
  Description of Artificial Sequence: Synthetic oligonucleotide
  Antisense strand to SEQ ID NO: 796870
uaaacugaccauuucaccu

SEQ ID NO: 796872 - RNA, 19 nt, Artificial Sequence
  Description of Artificial Sequence: Synthetic oligonucleotide
  Sense strand starting at position 2642 of SEQ ID NO: 587500
acuggaagcaucgauuaua

SEQ ID NO: 796873 - RNA, 19 nt, Artificial Sequence
  Description of Artificial Sequence: Synthetic oligonucleotide
  Antisense strand to SEQ ID NO: 796872
uauaaucgaugcuuccagu

SEQ ID NO: 796874 - RNA, 19 nt, Artificial Sequence
  Description of Artificial Sequence: Synthetic oligonucleotide
  Sense strand starting at position 2652 of SEQ ID NO: 587500
ucgauuauacucuggacaa

SEQ ID NO: 796875 - RNA, 19 nt, Artificial Sequence
  Description of Artificial Sequence: Synthetic oligonucleotide
  Antisense strand to SEQ ID NO: 796874
uuguccagaguauaaucga

SEQ ID NO: 796876 - RNA, 19 nt, Artificial Sequence
  Description of Artificial Sequence: Synthetic oligonucleotide
  Sense strand starting at position 2756 of SEQ ID NO: 587500
aguuucuuacuggaaaucu

SEQ ID NO: 796877 - RNA, 19 nt, Artificial Sequence
  Description of Artificial Sequence: Synthetic oligonucleotide
  Antisense strand to SEQ ID NO: 796876
agauuuccaguaagaaacu

SEQ ID NO: 796878 - RNA, 19 nt, Artificial Sequence
  Description of Artificial Sequence: Synthetic oligonucleotide
  Sense strand starting at position 2910 of SEQ ID NO: 587500
ggacuugagcacugacgau

SEQ ID NO: 796879 - RNA, 19 nt, Artificial Sequence
  Description of Artificial Sequence: Synthetic oligonucleotide
  Antisense strand to SEQ ID NO: 796878
aucgucagugcucaagucc

SEQ ID NO: 796880 - RNA, 19 nt, Artificial Sequence
  Description of Artificial Sequence: Synthetic oligonucleotide
  Sense strand starting at position 3037 of SEQ ID NO: 587500
gccaguuagacugaaguga

SEQ ID NO: 796881 - RNA, 19 nt, Artificial Sequence
  Description of Artificial Sequence: Synthetic oligonucleotide
  Antisense strand to SEQ ID NO: 796880
ucacuucagucuaacuggc

SEQ ID NO: 796882 - RNA, 19 nt, Artificial Sequence
  Description of Artificial Sequence: Synthetic oligonucleotide
  Sense strand starting at position 3163 of SEQ ID NO: 587500
caauaaugaucucuguggu

SEQ ID NO: 796883 - RNA, 19 nt, Artificial Sequence
  Description of Artificial Sequence: Synthetic oligonucleotide
  Antisense strand to SEQ ID NO: 796882
accacagagaucauuauug

SEQ ID NO: 796884 - RNA, 19 nt, Artificial Sequence
  Description of Artificial Sequence: Synthetic oligonucleotide
  Sense strand starting at position 3164 of SEQ ID NO: 587500
aauaaugaucucuguggua

SEQ ID NO: 796885 - RNA, 19 nt, Artificial Sequence
  Description of Artificial Sequence: Synthetic oligonucleotide
  Antisense strand to SEQ ID NO: 796884
uaccacagagaucauuauu

SEQ ID NO: 796886 - RNA, 19 nt, Artificial Sequence
  Description of Artificial Sequence: Synthetic oligonucleotide
  Sense strand starting at position 3166 of SEQ ID NO: 587500
uaaugaucucugugguaaa

SEQ ID NO: 796887 - RNA, 19 nt, Artificial Sequence
  Description of Artificial Sequence: Synthetic oligonucleotide
  Antisense strand to SEQ ID NO: 796886
uuuaccacagagaucauua

SEQ ID NO: 796888 - RNA, 19 nt, Artificial Sequence
  Description of Artificial Sequence: Synthetic oligonucleotide
  Sense strand starting at position 3254 of SEQ ID NO: 587500
auaauuuagccuuguguuc

SEQ ID NO: 796889 - RNA, 19 nt, Artificial Sequence
  Description of Artificial Sequence: Synthetic oligonucleotide
  Antisense strand to SEQ ID NO: 796888
gaacacaaggcuaaauuau

SEQ ID NO: 796890 - RNA, 19 nt, Artificial Sequence
  Description of Artificial Sequence: Synthetic oligonucleotide
  Sense strand starting at position 3364 of SEQ ID NO: 587500
gccacacagcccuauaagu

SEQ ID NO: 796891 - RNA, 19 nt, Artificial Sequence
  Description of Artificial Sequence: Synthetic oligonucleotide
  Antisense strand to SEQ ID NO: 796890
acuuauagggcuguguggc

SEQ ID NO: 796892 - RNA, 19 nt, Artificial Sequence
  Description of Artificial Sequence: Synthetic oligonucleotide
  Sense strand starting at position 3489 of SEQ ID NO: 587500
aggcaauccugcucagaau

SEQ ID NO: 796893 - RNA, 19 nt, Artificial Sequence
  Description of Artificial Sequence: Synthetic oligonucleotide
  Antisense strand to SEQ ID NO: 796892
auucugagcaggauugccu

SEQ ID NO: 796894 - RNA, 19 nt, Artificial Sequence
  Description of Artificial Sequence: Synthetic oligonucleotide
  Sense strand starting at position 3490 of SEQ ID NO: 587500
ggcaauccugcucagaauc

SEQ ID NO: 796895 - RNA, 19 nt, Artificial Sequence
  Description of Artificial Sequence: Synthetic oligonucleotide
  Antisense strand to SEQ ID NO: 796894
gauucugagcaggauugcc

SEQ ID NO: 796896 - RNA, 19 nt, Artificial Sequence
  Description of Artificial Sequence: Synthetic oligonucleotide
  Sense strand starting at position 3599 of SEQ ID NO: 587500
ggcaguaaggacuacucua

SEQ ID NO: 796897 - RNA, 19 nt, Artificial Sequence
  Description of Artificial Sequence: Synthetic oligonucleotide
  Antisense strand to SEQ ID NO: 796896
uagaguaguccuuacugcc

SEQ ID NO: 796898 - RNA, 19 nt, Artificial Sequence
  Description of Artificial Sequence: Synthetic oligonucleotide
  Sense strand starting at position 3624 of SEQ ID NO: 587500
auacuuuguggaggaauuc

SEQ ID NO: 796899 - RNA, 19 nt, Artificial Sequence
  Description of Artificial Sequence: Synthetic oligonucleotide
  Antisense strand to SEQ ID NO: 796898
gaauuccuccacaaaguau

SEQ ID NO: 796900 - RNA, 19 nt, Artificial Sequence
  Description of Artificial Sequence: Synthetic oligonucleotide
  Sense strand starting at position 3661 of SEQ ID NO: 587500
ggaguaacauuauuccaug

SEQ ID NO: 796901 - RNA, 19 nt, Artificial Sequence
  Description of Artificial Sequence: Synthetic oligonucleotide
  Antisense strand to SEQ ID NO: 796900
cauggaauaauguuacucc

SEQ ID NO: 796902 - RNA, 19 nt, Artificial Sequence
  Description of Artificial Sequence: Synthetic oligonucleotide
  Sense strand starting at position 3667 of SEQ ID NO: 587500
acauuauuccauggaugua

SEQ ID NO: 796903 - RNA, 19 nt, Artificial Sequence
  Description of Artificial Sequence: Synthetic oligonucleotide
  Antisense strand to SEQ ID NO: 796902
uacauccauggaauaaugu

SEQ ID NO: 796904 - RNA, 19 nt, Artificial Sequence
  Description of Artificial Sequence: Synthetic oligonucleotide
  Sense strand starting at position 3680 of SEQ ID NO: 587500
gauguacugccauaacaug

SEQ ID NO: 796905 - RNA, 19 nt, Artificial Sequence
  Description of Artificial Sequence: Synthetic oligonucleotide
  Antisense strand to SEQ ID NO: 796904
cauguuauggcaguacauc

SEQ ID NO: 796906 - RNA, 19 nt, Artificial Sequence
  Description of Artificial Sequence: Synthetic oligonucleotide
  Sense strand starting at position 3686 of SEQ ID NO: 587500
cugccauaacaugguggaa

SEQ ID NO: 796907 - RNA, 19 nt, Artificial Sequence
  Description of Artificial Sequence: Synthetic oligonucleotide
  Antisense strand to SEQ ID NO: 796906
uuccaccauguuauggcag

SEQ ID NO: 796908 - RNA, 19 nt, Artificial Sequence
  Description of Artificial Sequence: Synthetic oligonucleotide
  Sense strand starting at position 93 of SEQ ID NO: 587501
aaaucagggcaguauuauu

SEQ ID NO: 796909 - RNA, 19 nt, Artificial Sequence
  Description of Artificial Sequence: Synthetic oligonucleotide
  Antisense strand to SEQ ID NO: 796908
aauaauacugcccugauuu

SEQ ID NO: 796910 - RNA, 19 nt, Artificial Sequence
  Description of Artificial Sequence: Synthetic oligonucleotide
  Sense strand starting at position 98 of SEQ ID NO: 587501
agggcaguauuauuaccua

SEQ ID NO: 796911 - RNA, 19 nt, Artificial Sequence
  Description of Artificial Sequence: Synthetic oligonucleotide
  Antisense strand to SEQ ID NO: 796910
uagguaauaauacugcccu

SEQ ID NO: 796912 - RNA, 19 nt, Artificial Sequence
  Description of Artificial Sequence: Synthetic oligonucleotide
  Sense strand starting at position 101 of SEQ ID NO: 587501
gcaguauuauuaccuacca

SEQ ID NO: 796913 - RNA, 19 nt, Artificial Sequence
  Description of Artificial Sequence: Synthetic oligonucleotide
  Antisense strand to SEQ ID NO: 796912
ugguagguaauaauacugc

SEQ ID NO: 796914 - RNA, 19 nt, Artificial Sequence
  Description of Artificial Sequence: Synthetic oligonucleotide
  Sense strand starting at position 230 of SEQ ID NO: 587501
ugacaacagugagugcuua

SEQ ID NO: 796915 - RNA, 19 nt, Artificial Sequence
  Description of Artificial Sequence: Synthetic oligonucleotide
  Antisense strand to SEQ ID NO: 796914
uaagcacucacuguuguca

SEQ ID NO: 796916 - RNA, 19 nt, Artificial Sequence
  Description of Artificial Sequence: Synthetic oligonucleotide
  Sense strand starting at position 234 of SEQ ID NO: 587501
aacagugagugcuuacaga

SEQ ID NO: 796917 - RNA, 19 nt, Artificial Sequence
  Description of Artificial Sequence: Synthetic oligonucleotide
  Antisense strand to SEQ ID NO: 796916
ucuguaagcacucacuguu

SEQ ID NO: 796918 - RNA, 19 nt, Artificial Sequence
  Description of Artificial Sequence: Synthetic oligonucleotide
  Sense strand starting at position 250 of SEQ ID NO: 587501
agaaauuucugugaacuac

SEQ ID NO: 796919 - RNA, 19 nt, Artificial Sequence
  Description of Artificial Sequence: Synthetic oligonucleotide
  Antisense strand to SEQ ID NO: 796918
guaguucacagaaauuucu

SEQ ID NO: 796920 - RNA, 19 nt, Artificial Sequence
  Description of Artificial Sequence: Synthetic oligonucleotide
  Sense strand starting at position 265 of SEQ ID NO: 587501
cuaccuacccaguguaaca

SEQ ID NO: 796921 - RNA, 19 nt, Artificial Sequence
  Description of Artificial Sequence: Synthetic oligonucleotide
  Antisense strand to SEQ ID NO: 796920
uguuacacuggguagguag

SEQ ID NO: 796922 - RNA, 19 nt, Artificial Sequence
  Description of Artificial Sequence: Synthetic oligonucleotide
  Sense strand starting at position 657 of SEQ ID NO: 587501
agcuguugacagcagagau

SEQ ID NO: 796923 - RNA, 19 nt, Artificial Sequence
  Description of Artificial Sequence: Synthetic oligonucleotide
  Antisense strand to SEQ ID NO: 796922
aucucugcugucaacagcu

SEQ ID NO: 796924 - RNA, 19 nt, Artificial Sequence
  Description of Artificial Sequence: Synthetic oligonucleotide
  Sense strand starting at position 667 of SEQ ID NO: 587501
agcagagauucuguggcau

SEQ ID NO: 796925 - RNA, 19 nt, Artificial Sequence
  Description of Artificial Sequence: Synthetic oligonucleotide
  Antisense strand to SEQ ID NO: 796924
augccacagaaucucugcu

SEQ ID NO: 796926 - RNA, 19 nt, Artificial Sequence
  Description of Artificial Sequence: Synthetic oligonucleotide
  Sense strand starting at position 690 of SEQ ID NO: 587501
ugcgcaaugcuaguaauug

SEQ ID NO: 796927 - RNA, 19 nt, Artificial Sequence
  Description of Artificial Sequence: Synthetic oligonucleotide
  Antisense strand to SEQ ID NO: 796926
caauuacuagcauugcgca

SEQ ID NO: 796928 - RNA, 19 nt, Artificial Sequence
  Description of Artificial Sequence: Synthetic oligonucleotide
  Sense strand starting at position 698 of SEQ ID NO: 587501
gcuaguaauuguguccauu

SEQ ID NO: 796929 - RNA, 19 nt, Artificial Sequence
  Description of Artificial Sequence: Synthetic oligonucleotide
  Antisense strand to SEQ ID NO: 796928
aauggacacaauuacuagc

SEQ ID NO: 796930 - RNA, 19 nt, Artificial Sequence
  Description of Artificial Sequence: Synthetic oligonucleotide
  Sense strand starting at position 701 of SEQ ID NO: 587501
aguaauuguguccauuaua

SEQ ID NO: 796931 - RNA, 19 nt, Artificial Sequence
  Description of Artificial Sequence: Synthetic oligonucleotide
  Antisense strand to SEQ ID NO: 796930
uauaauggacacaauuacu

SEQ ID NO: 796932 - RNA, 19 nt, Artificial Sequence
  Description of Artificial Sequence: Synthetic oligonucleotide
  Sense strand starting at position 830 of SEQ ID NO: 587501
acgugagaaccugaguauu

SEQ ID NO: 796933 - RNA, 19 nt, Artificial Sequence
  Description of Artificial Sequence: Synthetic oligonucleotide
  Antisense strand to SEQ ID NO: 796932
aauacucagguucucacgu

SEQ ID NO: 796934 - RNA, 19 nt, Artificial Sequence
  Description of Artificial Sequence: Synthetic oligonucleotide
  Sense strand starting at position 1031 of SEQ ID NO: 587501
gcagguucacagggaauua

SEQ ID NO: 796935 - RNA, 19 nt, Artificial Sequence
  Description of Artificial Sequence: Synthetic oligonucleotide
  Antisense strand to SEQ ID NO: 796934
uaauucccugugaaccugc

SEQ ID NO: 796936 - RNA, 19 nt, Artificial Sequence
  Description of Artificial Sequence: Synthetic oligonucleotide
  Sense strand starting at position 1120 of SEQ ID NO: 587501
gcaagaaaguuaccgcagu

SEQ ID NO: 796937 - RNA, 19 nt, Artificial Sequence
  Description of Artificial Sequence: Synthetic oligonucleotide
  Antisense strand to SEQ ID NO: 796936
acugcgguaacuuucuugc

SEQ ID NO: 796938 - RNA, 19 nt, Artificial Sequence
  Description of Artificial Sequence: Synthetic oligonucleotide
  Sense strand starting at position 1264 of SEQ ID NO: 587501
aaaugucucugggcuccaa

SEQ ID NO: 796939 - RNA, 19 nt, Artificial Sequence
  Description of Artificial Sequence: Synthetic oligonucleotide
  Antisense strand to SEQ ID NO: 796938
uuggagcccagagacauuu

SEQ ID NO: 796940 - RNA, 19 nt, Artificial Sequence
  Description of Artificial Sequence: Synthetic oligonucleotide
  Sense strand starting at position 1745 of SEQ ID NO: 587501
gggcguuaccuguacagga

SEQ ID NO: 796941 - RNA, 19 nt, Artificial Sequence
  Description of Artificial Sequence: Synthetic oligonucleotide
  Antisense strand to SEQ ID NO: 796940
uccuguacagguaacgccc

SEQ ID NO: 796942 - RNA, 19 nt, Artificial Sequence
  Description of Artificial Sequence: Synthetic oligonucleotide
  Sense strand starting at position 2223 of SEQ ID NO: 587501
gaccguguuagugcuguua

SEQ ID NO: 796943 - RNA, 19 nt, Artificial Sequence
  Description of Artificial Sequence: Synthetic oligonucleotide
  Antisense strand to SEQ ID NO: 796942
uaacagcacuaacacgguc

SEQ ID NO: 796944 - RNA, 19 nt, Artificial Sequence
  Description of Artificial Sequence: Synthetic oligonucleotide
  Sense strand starting at position 2261 of SEQ ID NO: 587501
ggcgauuccuucuuuggac

SEQ ID NO: 796945 - RNA, 19 nt, Artificial Sequence
  Description of Artificial Sequence: Synthetic oligonucleotide
  Antisense strand to SEQ ID NO: 796944
guccaaagaaggaaucgcc

SEQ ID NO: 796946 - RNA, 19 nt, Artificial Sequence
  Description of Artificial Sequence: Synthetic oligonucleotide
  Sense strand starting at position 2376 of SEQ ID NO: 587501
ugauuaacgccugauccca

SEQ ID NO: 796947 - RNA, 19 nt, Artificial Sequence
  Description of Artificial Sequence: Synthetic oligonucleotide
  Antisense strand to SEQ ID NO: 796946
ugggaucaggcguuaauca

SEQ ID NO: 796948 - RNA, 19 nt, Artificial Sequence
  Description of Artificial Sequence: Synthetic oligonucleotide
  Sense strand starting at position 2586 of SEQ ID NO: 587501
agcagaaaucaccacugca

SEQ ID NO: 796949 - RNA, 19 nt, Artificial Sequence
  Description of Artificial Sequence: Synthetic oligonucleotide
  Antisense strand to SEQ ID NO: 796948
ugcaguggugauuucugcu

SEQ ID NO: 796950 - RNA, 19 nt, Artificial Sequence
  Description of Artificial Sequence: Synthetic oligonucleotide
  Sense strand starting at position 2660 of SEQ ID NO: 587501
aaaguaauauuuggugaag

SEQ ID NO: 796951 - RNA, 19 nt, Artificial Sequence
  Description of Artificial Sequence: Synthetic oligonucleotide
  Antisense strand to SEQ ID NO: 796950
cuucaccaaauauuacuuu

SEQ ID NO: 796952 - RNA, 19 nt, Artificial Sequence
  Description of Artificial Sequence: Synthetic oligonucleotide
  Sense strand starting at position 2662 of SEQ ID NO: 587501
aguaauauuuggugaaguu

SEQ ID NO: 796953 - RNA, 19 nt, Artificial Sequence
  Description of Artificial Sequence: Synthetic oligonucleotide
  Antisense strand to SEQ ID NO: 796952
aacuucaccaaauauuacu

SEQ ID NO: 796954 - RNA, 19 nt, Artificial Sequence
  Description of Artificial Sequence: Synthetic oligonucleotide
  Sense strand starting at position 2701 of SEQ ID NO: 587501
aucggauauaaugguguaa

SEQ ID NO: 796955 - RNA, 19 nt, Artificial Sequence
  Description of Artificial Sequence: Synthetic oligonucleotide
  Antisense strand to SEQ ID NO: 796954
uuacaccauuauauccgau

SEQ ID NO: 796956 - RNA, 19 nt, Artificial Sequence
  Description of Artificial Sequence: Synthetic oligonucleotide
  Sense strand starting at position 2842 of SEQ ID NO: 587501
gagggugggucauuaacau

SEQ ID NO: 796957 - RNA, 19 nt, Artificial Sequence
  Description of Artificial Sequence: Synthetic oligonucleotide
  Antisense strand to SEQ ID NO: 796956
auguuaaugacccacccuc

SEQ ID NO: 796958 - RNA, 19 nt, Artificial Sequence
  Description of Artificial Sequence: Synthetic oligonucleotide
  Sense strand starting at position 3072 of SEQ ID NO: 587501
guugucuuguccuuccaaa

SEQ ID NO: 796959 - RNA, 19 nt, Artificial Sequence
  Description of Artificial Sequence: Synthetic oligonucleotide
  Antisense strand to SEQ ID NO: 796958
uuuggaaggacaagacaac

SEQ ID NO: 796960 - RNA, 19 nt, Artificial Sequence
  Description of Artificial Sequence: Synthetic oligonucleotide
  Sense strand starting at position 3091 of SEQ ID NO: 587501
ggaaccaauguguaucuua

SEQ ID NO: 796961 - RNA, 19 nt, Artificial Sequence
  Description of Artificial Sequence: Synthetic oligonucleotide
  Antisense strand to SEQ ID NO: 796960
uaagauacacauugguucc

SEQ ID NO: 796962 - RNA, 19 nt, Artificial Sequence
  Description of Artificial Sequence: Synthetic oligonucleotide
  Sense strand starting at position 3195 of SEQ ID NO: 587501
ucucuuaagggcuguguca

SEQ ID NO: 796963 - RNA, 19 nt, Artificial Sequence
  Description of Artificial Sequence: Synthetic oligonucleotide
  Antisense strand to SEQ ID NO: 796962
ugacacagcccuuaagaga

SEQ ID NO: 796964 - RNA, 19 nt, Artificial Sequence
  Description of Artificial Sequence: Synthetic oligonucleotide
  Sense strand starting at position 3207 of SEQ ID NO: 587501
ugugucacaggccauuaau

SEQ ID NO: 796965 - RNA, 19 nt, Artificial Sequence
  Description of Artificial Sequence: Synthetic oligonucleotide
  Antisense strand to SEQ ID NO: 796964
auuaauggccugugacaca

SEQ ID NO: 796966 - RNA, 19 nt, Artificial Sequence
  Description of Artificial Sequence: Synthetic oligonucleotide
  Sense strand starting at position 3294 of SEQ ID NO: 587501
gggucauaugaauguaugu

SEQ ID NO: 796967 - RNA, 19 nt, Artificial Sequence
  Description of Artificial Sequence: Synthetic oligonucleotide
  Antisense strand to SEQ ID NO: 796966
acauacauucauaugaccc

SEQ ID NO: 796968 - RNA, 19 nt, Artificial Sequence
  Description of Artificial Sequence: Synthetic oligonucleotide
  Sense strand starting at position 3542 of SEQ ID NO: 587501
ccugccuuucuaugugaca

SEQ ID NO: 796969 - RNA, 19 nt, Artificial Sequence
  Description of Artificial Sequence: Synthetic oligonucleotide
  Antisense strand to SEQ ID NO: 796968
ugucacauagaaaggcagg

SEQ ID NO: 796970 - RNA, 19 nt, Artificial Sequence
  Description of Artificial Sequence: Synthetic oligonucleotide
  Sense strand starting at position 3554 of SEQ ID NO: 587501
ugugacagcuggcuguaaa

SEQ ID NO: 796971 - RNA, 19 nt, Artificial Sequence
  Description of Artificial Sequence: Synthetic oligonucleotide
  Antisense strand to SEQ ID NO: 796970
uuuacagccagcugucaca

SEQ ID NO: 796972 - RNA, 19 nt, Artificial Sequence
  Description of Artificial Sequence: Synthetic oligonucleotide
  Sense strand starting at position 3557 of SEQ ID NO: 587501
gacagcuggcuguaaagaa

SEQ ID NO: 796973 - RNA, 19 nt, Artificial Sequence
  Description of Artificial Sequence: Synthetic oligonucleotide
  Antisense strand to SEQ ID NO: 796972
uucuuuacagccagcuguc

SEQ ID NO: 796974 - RNA, 19 nt, Artificial Sequence
  Description of Artificial Sequence: Synthetic oligonucleotide
  Sense strand starting at position 3651 of SEQ ID NO: 587501
acagacaggccuuguugaa

SEQ ID NO: 796975 - RNA, 19 nt, Artificial Sequence
  Description of Artificial Sequence: Synthetic oligonucleotide
  Antisense strand to SEQ ID NO: 796974
uucaacaaggccugucugu

SEQ ID NO: 796976 - RNA, 19 nt, Artificial Sequence
  Description of Artificial Sequence: Synthetic oligonucleotide
  Sense strand starting at position 3791 of SEQ ID NO: 587501
ugcauauguggaugcuuga

SEQ ID NO: 796977 - RNA, 19 nt, Artificial Sequence
  Description of Artificial Sequence: Synthetic oligonucleotide
  Antisense strand to SEQ ID NO: 796976
ucaagcauccacauaugca

SEQ ID NO: 796978 - RNA, 19 nt, Artificial Sequence
  Description of Artificial Sequence: Synthetic oligonucleotide
  Sense strand starting at position 3850 of SEQ ID NO: 587501
cgguguucugaacaauggu

SEQ ID NO: 796979 - RNA, 19 nt, Artificial Sequence
  Description of Artificial Sequence: Synthetic oligonucleotide
  Antisense strand to SEQ ID NO: 796978
accauuguucagaacaccg

SEQ ID NO: 796980 - RNA, 19 nt, Artificial Sequence
  Description of Artificial Sequence: Synthetic oligonucleotide
  Sense strand starting at position 3900 of SEQ ID NO: 587501
gaaauugcaucccuacguu

SEQ ID NO: 796981 - RNA, 19 nt, Artificial Sequence
  Description of Artificial Sequence: Synthetic oligonucleotide
  Antisense strand to SEQ ID NO: 796980
aacguagggaugcaauuuc

SEQ ID NO: 796982 - RNA, 19 nt, Artificial Sequence
  Description of Artificial Sequence: Synthetic oligonucleotide
  Sense strand starting at position 3903 of SEQ ID NO: 587501
auugcaucccuacguuaua

SEQ ID NO: 796983 - RNA, 19 nt, Artificial Sequence
  Description of Artificial Sequence: Synthetic oligonucleotide
  Antisense strand to SEQ ID NO: 796982
uauaacguagggaugcaau

SEQ ID NO: 796984 - RNA, 19 nt, Artificial Sequence
  Description of Artificial Sequence: Synthetic oligonucleotide
  Sense strand starting at position 3906 of SEQ ID NO: 587501
gcaucccuacguuauacua

SEQ ID NO: 796985 - RNA, 19 nt, Artificial Sequence
  Description of Artificial Sequence: Synthetic oligonucleotide
  Antisense strand to SEQ ID NO: 796984
uaguauaacguagggaugc

SEQ ID NO: 796986 - RNA, 19 nt, Artificial Sequence
  Description of Artificial Sequence: Synthetic oligonucleotide
  Sense strand starting at position 3958 of SEQ ID NO: 587501
gcuuaagauucugcacaaa

SEQ ID NO: 796987 - RNA, 19 nt, Artificial Sequence
  Description of Artificial Sequence: Synthetic oligonucleotide
  Antisense strand to SEQ ID NO: 796986
uuugugcagaaucuuaagc

SEQ ID NO: 796988 - RNA, 19 nt, Artificial Sequence
  Description of Artificial Sequence: Synthetic oligonucleotide
  Sense strand starting at position 828 of SEQ ID NO: 587502
gaagcaucgguuggaggaa

SEQ ID NO: 796989 - RNA, 19 nt, Artificial Sequence
  Description of Artificial Sequence: Synthetic oligonucleotide
  Antisense strand to SEQ ID NO: 796988
uuccuccaaccgaugcuuc

SEQ ID NO: 796990 - RNA, 19 nt, Artificial Sequence
  Description of Artificial Sequence: Synthetic oligonucleotide
  Sense strand starting at position 841 of SEQ ID NO: 587502
gaggaaagguuguggcgaa

SEQ ID NO: 796991 - RNA, 19 nt, Artificial Sequence
  Description of Artificial Sequence: Synthetic oligonucleotide
  Antisense strand to SEQ ID NO: 796990
uucgccacaaccuuuccuc

SEQ ID NO: 796992 - RNA, 19 nt, Artificial Sequence
  Description of Artificial Sequence: Synthetic oligonucleotide
  Sense strand starting at position 842 of SEQ ID NO: 587502
aggaaagguuguggcgaau

SEQ ID NO: 796993 - RNA, 19 nt, Artificial Sequence
  Description of Artificial Sequence: Synthetic oligonucleotide
  Antisense strand to SEQ ID NO: 796992
auucgccacaaccuuuccu

SEQ ID NO: 796994 - RNA, 19 nt, Artificial Sequence
  Description of Artificial Sequence: Synthetic oligonucleotide
  Sense strand starting at position 845 of SEQ ID NO: 587502
aaagguuguggcgaaugga

SEQ ID NO: 796995 - RNA, 19 nt, Artificial Sequence
  Description of Artificial Sequence: Synthetic oligonucleotide
  Antisense strand to SEQ ID NO: 796994
uccauucgccacaaccuuu

SEQ ID NO: 796996 - RNA, 19 nt, Artificial Sequence
  Description of Artificial Sequence: Synthetic oligonucleotide
  Sense strand starting at position 876 of SEQ ID NO: 587502
cucguagucuucccugaag

SEQ ID NO: 796997 - RNA, 19 nt, Artificial Sequence
  Description of Artificial Sequence: Synthetic oligonucleotide
  Antisense strand to SEQ ID NO: 796996
cuucagggaagacuacgag

SEQ ID NO: 796998 - RNA, 19 nt, Artificial Sequence
  Description of Artificial Sequence: Synthetic oligonucleotide
  Sense strand starting at position 878 of SEQ ID NO: 587502
cguagucuucccugaagaa

SEQ ID NO: 796999 - RNA, 19 nt, Artificial Sequence
  Description of Artificial Sequence: Synthetic oligonucleotide
  Antisense strand to SEQ ID NO: 796998
uucuucagggaagacuacg

SEQ ID NO: 797000 - RNA, 19 nt, Artificial Sequence
  Description of Artificial Sequence: Synthetic oligonucleotide
  Sense strand starting at position 879 of SEQ ID NO: 587502
guagucuucccugaagaag

SEQ ID NO: 797001 - RNA, 19 nt, Artificial Sequence
  Description of Artificial Sequence: Synthetic oligonucleotide
  Antisense strand to SEQ ID NO: 797000
cuucuucagggaagacuac

SEQ ID NO: 797002 - RNA, 19 nt, Artificial Sequence
  Description of Artificial Sequence: Synthetic oligonucleotide
  Sense strand starting at position 914 of SEQ ID NO: 587502
ccugacggaugaucugaaa

SEQ ID NO: 797003 - RNA, 19 nt, Artificial Sequence
  Description of Artificial Sequence: Synthetic oligonucleotide
  Antisense strand to SEQ ID NO: 797002
uuucagaucauccgucagg

SEQ ID NO: 797004 - RNA, 19 nt, Artificial Sequence
  Description of Artificial Sequence: Synthetic oligonucleotide
  Sense strand starting at position 1047 of SEQ ID NO: 587502
aggacauuucugcgcggaa

SEQ ID NO: 797005 - RNA, 19 nt, Artificial Sequence
  Description of Artificial Sequence: Synthetic oligonucleotide
  Antisense strand to SEQ ID NO: 797004
uuccgcgcagaaauguccu

SEQ ID NO: 797006 - RNA, 19 nt, Artificial Sequence
  Description of Artificial Sequence: Synthetic oligonucleotide
  Sense strand starting at position 1048 of SEQ ID NO: 587502
ggacauuucugcgcggaag

SEQ ID NO: 797007 - RNA, 19 nt, Artificial Sequence
  Description of Artificial Sequence: Synthetic oligonucleotide
  Antisense strand to SEQ ID NO: 797006
cuuccgcgcagaaaugucc

SEQ ID NO: 797008 - RNA, 19 nt, Artificial Sequence
  Description of Artificial Sequence: Synthetic oligonucleotide
  Sense strand starting at position 1322 of SEQ ID NO: 587502
gcuugucaugucgcaggua

SEQ ID NO: 797009 - RNA, 19 nt, Artificial Sequence
  Description of Artificial Sequence: Synthetic oligonucleotide
  Antisense strand to SEQ ID NO: 797008
uaccugcgacaugacaagc

SEQ ID NO: 797010 - RNA, 19 nt, Artificial Sequence
  Description of Artificial Sequence: Synthetic oligonucleotide
  Sense strand starting at position 1534 of SEQ ID NO: 587502
gggccuuuaucauucggau

SEQ ID NO: 797011 - RNA, 19 nt, Artificial Sequence
  Description of Artificial Sequence: Synthetic oligonucleotide
  Antisense strand to SEQ ID NO: 797010
auccgaaugauaaaggccc

SEQ ID NO: 797012 - RNA, 19 nt, Artificial Sequence
  Description of Artificial Sequence: Synthetic oligonucleotide
  Sense strand starting at position 1537 of SEQ ID NO: 587502
ccuuuaucauucggaugga

SEQ ID NO: 797013 - RNA, 19 nt, Artificial Sequence
  Description of Artificial Sequence: Synthetic oligonucleotide
  Antisense strand to SEQ ID NO: 797012
uccauccgaaugauaaagg

SEQ ID NO: 797014 - RNA, 19 nt, Artificial Sequence
  Description of Artificial Sequence: Synthetic oligonucleotide
  Sense strand starting at position 1538 of SEQ ID NO: 587502
cuuuaucauucggauggaa

SEQ ID NO: 797015 - RNA, 19 nt, Artificial Sequence
  Description of Artificial Sequence: Synthetic oligonucleotide
  Antisense strand to SEQ ID NO: 797014
uuccauccgaaugauaaag

SEQ ID NO: 797016 - RNA, 19 nt, Artificial Sequence
  Description of Artificial Sequence: Synthetic oligonucleotide
  Sense strand starting at position 1878 of SEQ ID NO: 587502
gcuaguaggcccugaacua

SEQ ID NO: 797017 - RNA, 19 nt, Artificial Sequence
  Description of Artificial Sequence: Synthetic oligonucleotide
  Antisense strand to SEQ ID NO: 797016
uaguucagggccuacuagc

SEQ ID NO: 797018 - RNA, 19 nt, Artificial Sequence
  Description of Artificial Sequence: Synthetic oligonucleotide
  Sense strand starting at position 1879 of SEQ ID NO: 587502
cuaguaggcccugaacuau

SEQ ID NO: 797019 - RNA, 19 nt, Artificial Sequence
  Description of Artificial Sequence: Synthetic oligonucleotide
  Antisense strand to SEQ ID NO: 797018
auaguucagggccuacuag

SEQ ID NO: 797020 - RNA, 19 nt, Artificial Sequence
  Description of Artificial Sequence: Synthetic oligonucleotide
  Sense strand starting at position 2155 of SEQ ID NO: 587502
gauagcagcucugggaauu

SEQ ID NO: 797021 - RNA, 19 nt, Artificial Sequence
  Description of Artificial Sequence: Synthetic oligonucleotide
  Antisense strand to SEQ ID NO: 797020
aauucccagagcugcuauc

SEQ ID NO: 797022 - RNA, 19 nt, Artificial Sequence
  Description of Artificial Sequence: Synthetic oligonucleotide
  Sense strand starting at position 2156 of SEQ ID NO: 587502
auagcagcucugggaauua

SEQ ID NO: 797023 - RNA, 19 nt, Artificial Sequence
  Description of Artificial Sequence: Synthetic oligonucleotide
  Antisense strand to SEQ ID NO: 797022
uaauucccagagcugcuau

SEQ ID NO: 797024 - RNA, 19 nt, Artificial Sequence
  Description of Artificial Sequence: Synthetic oligonucleotide
  Sense strand starting at position 2503 of SEQ ID NO: 587502
cgugguuucccucaggacu

SEQ ID NO: 797025 - RNA, 19 nt, Artificial Sequence
  Description of Artificial Sequence: Synthetic oligonucleotide
  Antisense strand to SEQ ID NO: 797024
aguccugagggaaaccacg

SEQ ID NO: 797026 - RNA, 19 nt, Artificial Sequence
  Description of Artificial Sequence: Synthetic oligonucleotide
  Sense strand starting at position 2538 of SEQ ID NO: 587502
ugcuguguucccuagguua

SEQ ID NO: 797027 - RNA, 19 nt, Artificial Sequence
  Description of Artificial Sequence: Synthetic oligonucleotide
  Antisense strand to SEQ ID NO: 797026
uaaccuagggaacacagca

SEQ ID NO: 797028 - RNA, 19 nt, Artificial Sequence
  Description of Artificial Sequence: Synthetic oligonucleotide
  Sense strand starting at position 2540 of SEQ ID NO: 587502
cuguguucccuagguuaug

SEQ ID NO: 797029 - RNA, 19 nt, Artificial Sequence
  Description of Artificial Sequence: Synthetic oligonucleotide
  Antisense strand to SEQ ID NO: 797028
cauaaccuagggaacacag

SEQ ID NO: 797030 - RNA, 19 nt, Artificial Sequence
  Description of Artificial Sequence: Synthetic oligonucleotide
  Sense strand starting at position 2549 of SEQ ID NO: 587502
cuagguuauggcugcacaa

SEQ ID NO: 797031 - RNA, 19 nt, Artificial Sequence
  Description of Artificial Sequence: Synthetic oligonucleotide
  Antisense strand to SEQ ID NO: 797030
uugugcagccauaaccuag

SEQ ID NO: 797032 - RNA, 19 nt, Artificial Sequence
  Description of Artificial Sequence: Synthetic oligonucleotide
  Sense strand starting at position 2551 of SEQ ID NO: 587502
agguuauggcugcacaauc

SEQ ID NO: 797033 - RNA, 19 nt, Artificial Sequence
  Description of Artificial Sequence: Synthetic oligonucleotide
  Antisense strand to SEQ ID NO: 797032
gauugugcagccauaaccu

SEQ ID NO: 797034 - RNA, 19 nt, Artificial Sequence
  Description of Artificial Sequence: Synthetic oligonucleotide
  Sense strand starting at position 2562 of SEQ ID NO: 587502
gcacaauccugugccucau

SEQ ID NO: 797035 - RNA, 19 nt, Artificial Sequence
  Description of Artificial Sequence: Synthetic oligonucleotide
  Antisense strand to SEQ ID NO: 797034
augaggcacaggauugugc

SEQ ID NO: 797036 - RNA, 19 nt, Artificial Sequence
  Description of Artificial Sequence: Synthetic oligonucleotide
  Sense strand starting at position 2574 of SEQ ID NO: 587502
gccucaugaggcuaauacu

SEQ ID NO: 797037 - RNA, 19 nt, Artificial Sequence
  Description of Artificial Sequence: Synthetic oligonucleotide
  Antisense strand to SEQ ID NO: 797036
aguauuagccucaugaggc

SEQ ID NO: 797038 - RNA, 19 nt, Artificial Sequence
  Description of Artificial Sequence: Synthetic oligonucleotide
  Sense strand starting at position 2626 of SEQ ID NO: 587502
gucguucuuuccuacaagu

SEQ ID NO: 797039 - RNA, 19 nt, Artificial Sequence
  Description of Artificial Sequence: Synthetic oligonucleotide
  Antisense strand to SEQ ID NO: 797038
acuuguaggaaagaacgac

SEQ ID NO: 797040 - RNA, 19 nt, Artificial Sequence
  Description of Artificial Sequence: Synthetic oligonucleotide
  Sense strand starting at position 2628 of SEQ ID NO: 587502
cguucuuuccuacaagugu

SEQ ID NO: 797041 - RNA, 19 nt, Artificial Sequence
  Description of Artificial Sequence: Synthetic oligonucleotide
  Antisense strand to SEQ ID NO: 797040
acacuuguaggaaagaacg

SEQ ID NO: 797042 - RNA, 19 nt, Artificial Sequence
  Description of Artificial Sequence: Synthetic oligonucleotide
  Sense strand starting at position 2636 of SEQ ID NO: 587502
ccuacaaguguuuguuguu

SEQ ID NO: 797043 - RNA, 19 nt, Artificial Sequence
  Description of Artificial Sequence: Synthetic oligonucleotide
  Antisense strand to SEQ ID NO: 797042
aacaacaaacacuuguagg

SEQ ID NO: 797044 - RNA, 19 nt, Artificial Sequence
  Description of Artificial Sequence: Synthetic oligonucleotide
  Sense strand starting at position 2639 of SEQ ID NO: 587502
acaaguguuuguuguuguu

SEQ ID NO: 797045 - RNA, 19 nt, Artificial Sequence
  Description of Artificial Sequence: Synthetic oligonucleotide
  Antisense strand to SEQ ID NO: 797044
aacaacaacaaacacuugu

SEQ ID NO: 797046 - RNA, 19 nt, Artificial Sequence
  Description of Artificial Sequence: Synthetic oligonucleotide
  Sense strand starting at position 2747 of SEQ ID NO: 587502
gggcgauccucccgacuca

SEQ ID NO: 797047 - RNA, 19 nt, Artificial Sequence
  Description of Artificial Sequence: Synthetic oligonucleotide
  Antisense strand to SEQ ID NO: 797046
ugagucgggaggaucgccc

SEQ ID NO: 797048 - RNA, 19 nt, Artificial Sequence
  Description of Artificial Sequence: Synthetic oligonucleotide
  Sense strand starting at position 2835 of SEQ ID NO: 587502
ugccuauguugcucagguu

SEQ ID NO: 797049 - RNA, 19 nt, Artificial Sequence
  Description of Artificial Sequence: Synthetic oligonucleotide
  Antisense strand to SEQ ID NO: 797048
aaccugagcaacauaggca

SEQ ID NO: 797050 - RNA, 19 nt, Artificial Sequence
  Description of Artificial Sequence: Synthetic oligonucleotide
  Sense strand starting at position 2930 of SEQ ID NO: 587502
ccgggccuuucccauaauu

SEQ ID NO: 797051 - RNA, 19 nt, Artificial Sequence
  Description of Artificial Sequence: Synthetic oligonucleotide
  Antisense strand to SEQ ID NO: 797050
aauuaugggaaaggcccgg

SEQ ID NO: 797052 - RNA, 19 nt, Artificial Sequence
  Description of Artificial Sequence: Synthetic oligonucleotide
  Sense strand starting at position 3238 of SEQ ID NO: 587502
cccggucucccguaaguuu

SEQ ID NO: 797053 - RNA, 19 nt, Artificial Sequence
  Description of Artificial Sequence: Synthetic oligonucleotide
  Antisense strand to SEQ ID NO: 797052
aaacuuacgggagaccggg

SEQ ID NO: 797054 - RNA, 19 nt, Artificial Sequence
  Description of Artificial Sequence: Synthetic oligonucleotide
  Sense strand starting at position 3663 of SEQ ID NO: 587502
ggaaguguagcguugccau

SEQ ID NO: 797055 - RNA, 19 nt, Artificial Sequence
  Description of Artificial Sequence: Synthetic oligonucleotide
  Antisense strand to SEQ ID NO: 797054
auggcaacgcuacacuucc

SEQ ID NO: 797056 - RNA, 19 nt, Artificial Sequence
  Description of Artificial Sequence: Synthetic oligonucleotide
  Sense strand starting at position 184 of SEQ ID NO: 587503
gcauaaguagcacaguaua

SEQ ID NO: 797057 - RNA, 19 nt, Artificial Sequence
  Description of Artificial Sequence: Synthetic oligonucleotide
  Antisense strand to SEQ ID NO: 797056
uauacugugcuacuuaugc

SEQ ID NO: 797058 - RNA, 19 nt, Artificial Sequence
  Description of Artificial Sequence: Synthetic oligonucleotide
  Sense strand starting at position 256 of SEQ ID NO: 587503
uugucaucacagugaacau

SEQ ID NO: 797059 - RNA, 19 nt, Artificial Sequence
  Description of Artificial Sequence: Synthetic oligonucleotide
  Antisense strand to SEQ ID NO: 797058
auguucacugugaugacaa

SEQ ID NO: 797060 - RNA, 19 nt, Artificial Sequence
  Description of Artificial Sequence: Synthetic oligonucleotide
  Sense strand starting at position 319 of SEQ ID NO: 587503
cuggauucccacuggugau

SEQ ID NO: 797061 - RNA, 19 nt, Artificial Sequence
  Description of Artificial Sequence: Synthetic oligonucleotide
  Antisense strand to SEQ ID NO: 797060
aucaccagugggaauccag

SEQ ID NO: 797062 - RNA, 19 nt, Artificial Sequence
  Description of Artificial Sequence: Synthetic oligonucleotide
  Sense strand starting at position 320 of SEQ ID NO: 587503
uggauucccacuggugaua

SEQ ID NO: 797063 - RNA, 19 nt, Artificial Sequence
  Description of Artificial Sequence: Synthetic oligonucleotide
  Antisense strand to SEQ ID NO: 797062
uaucaccagugggaaucca

SEQ ID NO: 797064 - RNA, 19 nt, Artificial Sequence
  Description of Artificial Sequence: Synthetic oligonucleotide
  Sense strand starting at position 380 of SEQ ID NO: 587503
guaagaagcuaggcucaaa

SEQ ID NO: 797065 - RNA, 19 nt, Artificial Sequence
  Description of Artificial Sequence: Synthetic oligonucleotide
  Antisense strand to SEQ ID NO: 797064
uuugagccuagcuucuuac

SEQ ID NO: 797066 - RNA, 19 nt, Artificial Sequence
  Description of Artificial Sequence: Synthetic oligonucleotide
  Sense strand starting at position 546 of SEQ ID NO: 587503
uguaaagcuuuguuugaaa

SEQ ID NO: 797067 - RNA, 19 nt, Artificial Sequence
  Description of Artificial Sequence: Synthetic oligonucleotide
  Antisense strand to SEQ ID NO: 797066
uuucaaacaaagcuuuaca

SEQ ID NO: 797068 - RNA, 19 nt, Artificial Sequence
  Description of Artificial Sequence: Synthetic oligonucleotide
  Sense strand starting at position 559 of SEQ ID NO: 587503
uugaaaggcuccucaaacu

SEQ ID NO: 797069 - RNA, 19 nt, Artificial Sequence
  Description of Artificial Sequence: Synthetic oligonucleotide
  Antisense strand to SEQ ID NO: 797068
aguuugaggagccuuucaa

SEQ ID NO: 797070 - RNA, 19 nt, Artificial Sequence
  Description of Artificial Sequence: Synthetic oligonucleotide
  Sense strand starting at position 623 of SEQ ID NO: 587503
auaagaauguagcugccau

SEQ ID NO: 797071 - RNA, 19 nt, Artificial Sequence
  Description of Artificial Sequence: Synthetic oligonucleotide
  Antisense strand to SEQ ID NO: 797070
auggcagcuacauucuuau

SEQ ID NO: 797072 - RNA, 19 nt, Artificial Sequence
  Description of Artificial Sequence: Synthetic oligonucleotide
  Sense strand starting at position 666 of SEQ ID NO: 587503
aucugaauuaguggcaaga

SEQ ID NO: 797073 - RNA, 19 nt, Artificial Sequence
  Description of Artificial Sequence: Synthetic oligonucleotide
  Antisense strand to SEQ ID NO: 797072
ucuugccacuaauucagau

SEQ ID NO: 797074 - RNA, 19 nt, Artificial Sequence
  Description of Artificial Sequence: Synthetic oligonucleotide
  Sense strand starting at position 823 of SEQ ID NO: 587503
agagaaagcuuacucuuuc

SEQ ID NO: 797075 - RNA, 19 nt, Artificial Sequence
  Description of Artificial Sequence: Synthetic oligonucleotide
  Antisense strand to SEQ ID NO: 797074
gaaagaguaagcuuucucu

SEQ ID NO: 797076 - RNA, 19 nt, Artificial Sequence
  Description of Artificial Sequence: Synthetic oligonucleotide
  Sense strand starting at position 942 of SEQ ID NO: 587503
ggcauuaacucccuuuagu

SEQ ID NO: 797077 - RNA, 19 nt, Artificial Sequence
  Description of Artificial Sequence: Synthetic oligonucleotide
  Antisense strand to SEQ ID NO: 797076
acuaaagggaguuaaugcc

SEQ ID NO: 797078 - RNA, 19 nt, Artificial Sequence
  Description of Artificial Sequence: Synthetic oligonucleotide
  Sense strand starting at position 1085 of SEQ ID NO: 587503
aaguguagacaaugacaau

SEQ ID NO: 797079 - RNA, 19 nt, Artificial Sequence
  Description of Artificial Sequence: Synthetic oligonucleotide
  Antisense strand to SEQ ID NO: 797078
auugucauugucuacacuu

SEQ ID NO: 797080 - RNA, 19 nt, Artificial Sequence
  Description of Artificial Sequence: Synthetic oligonucleotide
  Sense strand starting at position 1254 of SEQ ID NO: 587503
aguuuaugaagugauguca

SEQ ID NO: 797081 - RNA, 19 nt, Artificial Sequence
  Description of Artificial Sequence: Synthetic oligonucleotide
  Antisense strand to SEQ ID NO: 797080
ugacaucacuucauaaacu

SEQ ID NO: 797082 - RNA, 19 nt, Artificial Sequence
  Description of Artificial Sequence: Synthetic oligonucleotide
  Sense strand starting at position 1448 of SEQ ID NO: 587503
ggaugcuuacuaugcauau

SEQ ID NO: 797083 - RNA, 19 nt, Artificial Sequence
  Description of Artificial Sequence: Synthetic oligonucleotide
  Antisense strand to SEQ ID NO: 797082
auaugcauaguaagcaucc

SEQ ID NO: 797084 - RNA, 19 nt, Artificial Sequence
  Description of Artificial Sequence: Synthetic oligonucleotide
  Sense strand starting at position 1608 of SEQ ID NO: 587503
uuucuugguuggcucagaa

SEQ ID NO: 797085 - RNA, 19 nt, Artificial Sequence
  Description of Artificial Sequence: Synthetic oligonucleotide
  Antisense strand to SEQ ID NO: 797084
uucugagccaaccaagaaa

SEQ ID NO: 797086 - RNA, 19 nt, Artificial Sequence
  Description of Artificial Sequence: Synthetic oligonucleotide
  Sense strand starting at position 1661 of SEQ ID NO: 587503
gcugcaauagcuccuguuu

SEQ ID NO: 797087 - RNA, 19 nt, Artificial Sequence
  Description of Artificial Sequence: Synthetic oligonucleotide
  Antisense strand to SEQ ID NO: 797086
aaacaggagcuauugcagc

SEQ ID NO: 797088 - RNA, 19 nt, Artificial Sequence
  Description of Artificial Sequence: Synthetic oligonucleotide
  Sense strand starting at position 1672 of SEQ ID NO: 587503
uccuguuuggcauauucuu

SEQ ID NO: 797089 - RNA, 19 nt, Artificial Sequence
  Description of Artificial Sequence: Synthetic oligonucleotide
  Antisense strand to SEQ ID NO: 797088
aagaauaugccaaacagga

SEQ ID NO: 797090 - RNA, 19 nt, Artificial Sequence
  Description of Artificial Sequence: Synthetic oligonucleotide
  Sense strand starting at position 1760 of SEQ ID NO: 587503
aguuaacugcuaugauauc

SEQ ID NO: 797091 - RNA, 19 nt, Artificial Sequence
  Description of Artificial Sequence: Synthetic oligonucleotide
  Antisense strand to SEQ ID NO: 797090
gauaucauagcaguuaacu

SEQ ID NO: 797092 - RNA, 19 nt, Artificial Sequence
  Description of Artificial Sequence: Synthetic oligonucleotide
  Sense strand starting at position 1804 of SEQ ID NO: 587503
acugaauguuuauuagugu

SEQ ID NO: 797093 - RNA, 19 nt, Artificial Sequence
  Description of Artificial Sequence: Synthetic oligonucleotide
  Antisense strand to SEQ ID NO: 797092
acacuaauaaacauucagu

SEQ ID NO: 797094 - RNA, 19 nt, Artificial Sequence
  Description of Artificial Sequence: Synthetic oligonucleotide
  Sense strand starting at position 2090 of SEQ ID NO: 587503
aggaaaucugcuuaagcca

SEQ ID NO: 797095 - RNA, 19 nt, Artificial Sequence
  Description of Artificial Sequence: Synthetic oligonucleotide
  Antisense strand to SEQ ID NO: 797094
uggcuuaagcagauuuccu

SEQ ID NO: 797096 - RNA, 19 nt, Artificial Sequence
  Description of Artificial Sequence: Synthetic oligonucleotide
  Sense strand starting at position 2249 of SEQ ID NO: 587503
cuaauuuagugagaauauc

SEQ ID NO: 797097 - RNA, 19 nt, Artificial Sequence
  Description of Artificial Sequence: Synthetic oligonucleotide
  Antisense strand to SEQ ID NO: 797096
gauauucucacuaaauuag

SEQ ID NO: 797098 - RNA, 19 nt, Artificial Sequence
  Description of Artificial Sequence: Synthetic oligonucleotide
  Sense strand starting at position 2393 of SEQ ID NO: 587503
augaguagugaauguagua

SEQ ID NO: 797099 - RNA, 19 nt, Artificial Sequence
  Description of Artificial Sequence: Synthetic oligonucleotide
  Antisense strand to SEQ ID NO: 797098
uacuacauucacuacucau

SEQ ID NO: 797100 - RNA, 19 nt, Artificial Sequence
  Description of Artificial Sequence: Synthetic oligonucleotide
  Sense strand starting at position 2688 of SEQ ID NO: 587503
ccguaauguaugugaauuu

SEQ ID NO: 797101 - RNA, 19 nt, Artificial Sequence
  Description of Artificial Sequence: Synthetic oligonucleotide
  Antisense strand to SEQ ID NO: 797100
aaauucacauacauuacgg

SEQ ID NO: 797102 - RNA, 19 nt, Artificial Sequence
  Description of Artificial Sequence: Synthetic oligonucleotide
  Sense strand starting at position 2759 of SEQ ID NO: 587503
auaaucacgccuuaagacu

SEQ ID NO: 797103 - RNA, 19 nt, Artificial Sequence
  Description of Artificial Sequence: Synthetic oligonucleotide
  Antisense strand to SEQ ID NO: 797102
agucuuaaggcgugauuau

SEQ ID NO: 797104 - RNA, 19 nt, Artificial Sequence
  Description of Artificial Sequence: Synthetic oligonucleotide
  Sense strand starting at position 2892 of SEQ ID NO: 587503
aguuucggugcuuagaaua

SEQ ID NO: 797105 - RNA, 19 nt, Artificial Sequence
  Description of Artificial Sequence: Synthetic oligonucleotide
  Antisense strand to SEQ ID NO: 797104
uauucuaagcaccgaaacu

SEQ ID NO: 797106 - RNA, 19 nt, Artificial Sequence
  Description of Artificial Sequence: Synthetic oligonucleotide
  Sense strand starting at position 3003 of SEQ ID NO: 587503
gggaauaaauuagaacaua

SEQ ID NO: 797107 - RNA, 19 nt, Artificial Sequence
  Description of Artificial Sequence: Synthetic oligonucleotide
  Antisense strand to SEQ ID NO: 797106
uauguucuaauuuauuccc

SEQ ID NO: 797108 - RNA, 19 nt, Artificial Sequence
  Description of Artificial Sequence: Synthetic oligonucleotide
  Sense strand starting at position 3053 of SEQ ID NO: 587503
acugaacaacugugauagu

SEQ ID NO: 797109 - RNA, 19 nt, Artificial Sequence
  Description of Artificial Sequence: Synthetic oligonucleotide
  Antisense strand to SEQ ID NO: 797108
acuaucacaguuguucagu

SEQ ID NO: 797110 - RNA, 19 nt, Artificial Sequence
  Description of Artificial Sequence: Synthetic oligonucleotide
  Sense strand starting at position 3062 of SEQ ID NO: 587503
cugugauaguuauuaagag

SEQ ID NO: 797111 - RNA, 19 nt, Artificial Sequence
  Description of Artificial Sequence: Synthetic oligonucleotide
  Antisense strand to SEQ ID NO: 797110
cucuuaauaacuaucacag

SEQ ID NO: 797112 - RNA, 19 nt, Artificial Sequence
  Description of Artificial Sequence: Synthetic oligonucleotide
  Sense strand starting at position 3068 of SEQ ID NO: 587503
uaguuauuaagagguagga

SEQ ID NO: 797113 - RNA, 19 nt, Artificial Sequence
  Description of Artificial Sequence: Synthetic oligonucleotide
  Antisense strand to SEQ ID NO: 797112
uccuaccucuuaauaacua

SEQ ID NO: 797114 - RNA, 19 nt, Artificial Sequence
  Description of Artificial Sequence: Synthetic oligonucleotide
  Sense strand starting at position 3100 of SEQ ID NO: 587503
uuuaauuacugaccacgua

SEQ ID NO: 797115 - RNA, 19 nt, Artificial Sequence
  Description of Artificial Sequence: Synthetic oligonucleotide
  Antisense strand to SEQ ID NO: 797114
uacguggucaguaauuaaa

SEQ ID NO: 797116 - RNA, 19 nt, Artificial Sequence
  Description of Artificial Sequence: Synthetic oligonucleotide
  Sense strand starting at position 3193 of SEQ ID NO: 587503
acuguaguuccacagaaau

SEQ ID NO: 797117 - RNA, 19 nt, Artificial Sequence
  Description of Artificial Sequence: Synthetic oligonucleotide
  Antisense strand to SEQ ID NO: 797116
auuucuguggaacuacagu

SEQ ID NO: 797118 - RNA, 19 nt, Artificial Sequence
  Description of Artificial Sequence: Synthetic oligonucleotide
  Sense strand starting at position 3338 of SEQ ID NO: 587503
gaaagauugcuggauguuc

SEQ ID NO: 797119 - RNA, 19 nt, Artificial Sequence
  Description of Artificial Sequence: Synthetic oligonucleotide
  Antisense strand to SEQ ID NO: 797118
gaacauccagcaaucuuuc

SEQ ID NO: 797120 - RNA, 19 nt, Artificial Sequence
  Description of Artificial Sequence: Synthetic oligonucleotide
  Sense strand starting at position 3340 of SEQ ID NO: 587503
aagauugcuggauguucua

SEQ ID NO: 797121 - RNA, 19 nt, Artificial Sequence
  Description of Artificial Sequence: Synthetic oligonucleotide
  Antisense strand to SEQ ID NO: 797120
uagaacauccagcaaucuu

SEQ ID NO: 797122 - RNA, 19 nt, Artificial Sequence
  Description of Artificial Sequence: Synthetic oligonucleotide
  Sense strand starting at position 3347 of SEQ ID NO: 587503
cuggauguucuacggaaug

SEQ ID NO: 797123 - RNA, 19 nt, Artificial Sequence
  Description of Artificial Sequence: Synthetic oligonucleotide
  Antisense strand to SEQ ID NO: 797122
cauuccguagaacauccag

SEQ ID NO: 797124 - RNA, 19 nt, Artificial Sequence
  Description of Artificial Sequence: Synthetic oligonucleotide
  Sense strand starting at position 3349 of SEQ ID NO: 587503
ggauguucuacggaaugcu

SEQ ID NO: 797125 - RNA, 19 nt, Artificial Sequence
  Description of Artificial Sequence: Synthetic oligonucleotide
  Antisense strand to SEQ ID NO: 797124
agcauuccguagaacaucc

SEQ ID NO: 797126 - RNA, 19 nt, Artificial Sequence
  Description of Artificial Sequence: Synthetic oligonucleotide
  Sense strand starting at position 3352 of SEQ ID NO: 587503
uguucuacggaaugcuaga

SEQ ID NO: 797127 - RNA, 19 nt, Artificial Sequence
  Description of Artificial Sequence: Synthetic oligonucleotide
  Antisense strand to SEQ ID NO: 797126
ucuagcauuccguagaaca

SEQ ID NO: 797128 - RNA, 19 nt, Artificial Sequence
  Description of Artificial Sequence: Synthetic oligonucleotide
  Sense strand starting at position 3380 of SEQ ID NO: 587503
guauacgcuacugaguaau

SEQ ID NO: 797129 - RNA, 19 nt, Artificial Sequence
  Description of Artificial Sequence: Synthetic oligonucleotide
  Antisense strand to SEQ ID NO: 797128
auuacucaguagcguauac

SEQ ID NO: 797130 - RNA, 19 nt, Artificial Sequence
  Description of Artificial Sequence: Synthetic oligonucleotide
  Sense strand starting at position 3459 of SEQ ID NO: 587503
uguagaaaucaguaaugca

SEQ ID NO: 797131 - RNA, 19 nt, Artificial Sequence
  Description of Artificial Sequence: Synthetic oligonucleotide
  Antisense strand to SEQ ID NO: 797130
ugcauuacugauuucuaca

SEQ ID NO: 797132 - RNA, 19 nt, Artificial Sequence
  Description of Artificial Sequence: Synthetic oligonucleotide
  Sense strand starting at position 3676 of SEQ ID NO: 587503
caggguauauacuuuagau

SEQ ID NO: 797133 - RNA, 19 nt, Artificial Sequence
  Description of Artificial Sequence: Synthetic oligonucleotide
  Antisense strand to SEQ ID NO: 797132
aucuaaaguauauacccug

SEQ ID NO: 797134 - RNA, 19 nt, Artificial Sequence
  Description of Artificial Sequence: Synthetic oligonucleotide
  Sense strand starting at position 3883 of SEQ ID NO: 587503
gggccuguaauccaacagu

SEQ ID NO: 797135 - RNA, 19 nt, Artificial Sequence
  Description of Artificial Sequence: Synthetic oligonucleotide
  Antisense strand to SEQ ID NO: 797134
acuguuggauuacaggccc

SEQ ID NO: 797136 - RNA, 19 nt, Artificial Sequence
  Description of Artificial Sequence: Synthetic oligonucleotide
  Sense strand starting at position 7 of SEQ ID NO: 587504
gaaugcugguaauugaauu

SEQ ID NO: 797137 - RNA, 19 nt, Artificial Sequence
  Description of Artificial Sequence: Synthetic oligonucleotide
  Antisense strand to SEQ ID NO: 797136
aauucaauuaccagcauuc

SEQ ID NO: 797138 - RNA, 19 nt, Artificial Sequence
  Description of Artificial Sequence: Synthetic oligonucleotide
  Sense strand starting at position 31 of SEQ ID NO: 587504
uugaauaucuacccgaaau

SEQ ID NO: 797139 - RNA, 19 nt, Artificial Sequence
  Description of Artificial Sequence: Synthetic oligonucleotide
  Antisense strand to SEQ ID NO: 797138
auuucggguagauauucaa

SEQ ID NO: 797140 - RNA, 19 nt, Artificial Sequence
  Description of Artificial Sequence: Synthetic oligonucleotide
  Sense strand starting at position 432 of SEQ ID NO: 587504
aaauauggguuggaaauau

SEQ ID NO: 797141 - RNA, 19 nt, Artificial Sequence
  Description of Artificial Sequence: Synthetic oligonucleotide
  Antisense strand to SEQ ID NO: 797140
auauuuccaacccauauuu

SEQ ID NO: 797142 - RNA, 19 nt, Artificial Sequence
  Description of Artificial Sequence: Synthetic oligonucleotide
  Sense strand starting at position 443 of SEQ ID NO: 587504
ggaaauaucugccuacuga

SEQ ID NO: 797143 - RNA, 19 nt, Artificial Sequence
  Description of Artificial Sequence: Synthetic oligonucleotide
  Antisense strand to SEQ ID NO: 797142
ucaguaggcagauauuucc

SEQ ID NO: 797144 - RNA, 19 nt, Artificial Sequence
  Description of Artificial Sequence: Synthetic oligonucleotide
  Sense strand starting at position 681 of SEQ ID NO: 587504
gcgagcaagaguuauuaca

SEQ ID NO: 797145 - RNA, 19 nt, Artificial Sequence
  Description of Artificial Sequence: Synthetic oligonucleotide
  Antisense strand to SEQ ID NO: 797144
uguaauaacucuugcucgc

SEQ ID NO: 797146 - RNA, 19 nt, Artificial Sequence
  Description of Artificial Sequence: Synthetic oligonucleotide
  Sense strand starting at position 755 of SEQ ID NO: 587504
ggcuucuccuuacucagaa

SEQ ID NO: 797147 - RNA, 19 nt, Artificial Sequence
  Description of Artificial Sequence: Synthetic oligonucleotide
  Antisense strand to SEQ ID NO: 797146
uucugaguaaggagaagcc

SEQ ID NO: 797148 - RNA, 19 nt, Artificial Sequence
  Description of Artificial Sequence: Synthetic oligonucleotide
  Sense strand starting at position 897 of SEQ ID NO: 587504
gagaaacccugcccuaguu

SEQ ID NO: 797149 - RNA, 19 nt, Artificial Sequence
  Description of Artificial Sequence: Synthetic oligonucleotide
  Antisense strand to SEQ ID NO: 797148
aacuagggcaggguuucuc

SEQ ID NO: 797150 - RNA, 19 nt, Artificial Sequence
  Description of Artificial Sequence: Synthetic oligonucleotide
  Sense strand starting at position 941 of SEQ ID NO: 587504
aagauuggucgugaguuuc

SEQ ID NO: 797151 - RNA, 19 nt, Artificial Sequence
  Description of Artificial Sequence: Synthetic oligonucleotide
  Antisense strand to SEQ ID NO: 797150
gaaacucacgaccaaucuu

SEQ ID NO: 797152 - RNA, 19 nt, Artificial Sequence
  Description of Artificial Sequence: Synthetic oligonucleotide
  Sense strand starting at position 960 of SEQ ID NO: 587504
cugggugucucauuggaaa

SEQ ID NO: 797153 - RNA, 19 nt, Artificial Sequence
  Description of Artificial Sequence: Synthetic oligonucleotide
  Antisense strand to SEQ ID NO: 797152
uuuccaaugagacacccag

SEQ ID NO: 797154 - RNA, 19 nt, Artificial Sequence
  Description of Artificial Sequence: Synthetic oligonucleotide
  Sense strand starting at position 962 of SEQ ID NO: 587504
gggugucucauuggaaaga

SEQ ID NO: 797155 - RNA, 19 nt, Artificial Sequence
  Description of Artificial Sequence: Synthetic oligonucleotide
  Antisense strand to SEQ ID NO: 797154
ucuuuccaaugagacaccc

SEQ ID NO: 797156 - RNA, 19 nt, Artificial Sequence
  Description of Artificial Sequence: Synthetic oligonucleotide
  Sense strand starting at position 1177 of SEQ ID NO: 587504
aagucauucugugugacau

SEQ ID NO: 797157 - RNA, 19 nt, Artificial Sequence
  Description of Artificial Sequence: Synthetic oligonucleotide
  Antisense strand to SEQ ID NO: 797156
augucacacagaaugacuu

SEQ ID NO: 797158 - RNA, 19 nt, Artificial Sequence
  Description of Artificial Sequence: Synthetic oligonucleotide
  Sense strand starting at position 1178 of SEQ ID NO: 587504
agucauucugugugacauu

SEQ ID NO: 797159 - RNA, 19 nt, Artificial Sequence
  Description of Artificial Sequence: Synthetic oligonucleotide
  Antisense strand to SEQ ID NO: 797158
aaugucacacagaaugacu

SEQ ID NO: 797160 - RNA, 19 nt, Artificial Sequence
  Description of Artificial Sequence: Synthetic oligonucleotide
  Sense strand starting at position 1284 of SEQ ID NO: 587504
cucuguucugaggguacua

SEQ ID NO: 797161 - RNA, 19 nt, Artificial Sequence
  Description of Artificial Sequence: Synthetic oligonucleotide
  Antisense strand to SEQ ID NO: 797160
uaguacccucagaacagag

SEQ ID NO: 797162 - RNA, 19 nt, Artificial Sequence
  Description of Artificial Sequence: Synthetic oligonucleotide
  Sense strand starting at position 1286 of SEQ ID NO: 587504
cuguucugaggguacuaau

SEQ ID NO: 797163 - RNA, 19 nt, Artificial Sequence
  Description of Artificial Sequence: Synthetic oligonucleotide
  Antisense strand to SEQ ID NO: 797162
auuaguacccucagaacag

SEQ ID NO: 797164 - RNA, 19 nt, Artificial Sequence
  Description of Artificial Sequence: Synthetic oligonucleotide
  Sense strand starting at position 1326 of SEQ ID NO: 587504
auggcuugcaaaugggaua

SEQ ID NO: 797165 - RNA, 19 nt, Artificial Sequence
  Description of Artificial Sequence: Synthetic oligonucleotide
  Antisense strand to SEQ ID NO: 797164
uaucccauuugcaagccau

SEQ ID NO: 797166 - RNA, 19 nt, Artificial Sequence
  Description of Artificial Sequence: Synthetic oligonucleotide
  Sense strand starting at position 1458 of SEQ ID NO: 587504
acaagugauucucugggaa

SEQ ID NO: 797167 - RNA, 19 nt, Artificial Sequence
  Description of Artificial Sequence: Synthetic oligonucleotide
  Antisense strand to SEQ ID NO: 797166
uucccagagaaucacuugu

SEQ ID NO: 797168 - RNA, 19 nt, Artificial Sequence
  Description of Artificial Sequence: Synthetic oligonucleotide
  Sense strand starting at position 1461 of SEQ ID NO: 587504
agugauucucugggaagac

SEQ ID NO: 797169 - RNA, 19 nt, Artificial Sequence
  Description of Artificial Sequence: Synthetic oligonucleotide
  Antisense strand to SEQ ID NO: 797168
gucuucccagagaaucacu

SEQ ID NO: 797170 - RNA, 19 nt, Artificial Sequence
  Description of Artificial Sequence: Synthetic oligonucleotide
  Sense strand starting at position 1772 of SEQ ID NO: 587504
gagggaguuuccuuaggcu

SEQ ID NO: 797171 - RNA, 19 nt, Artificial Sequence
  Description of Artificial Sequence: Synthetic oligonucleotide
  Antisense strand to SEQ ID NO: 797170
agccuaaggaaacucccuc

SEQ ID NO: 797172 - RNA, 19 nt, Artificial Sequence
  Description of Artificial Sequence: Synthetic oligonucleotide
  Sense strand starting at position 1928 of SEQ ID NO: 587504
gcaggguucgucccgcaga

SEQ ID NO: 797173 - RNA, 19 nt, Artificial Sequence
  Description of Artificial Sequence: Synthetic oligonucleotide
  Antisense strand to SEQ ID NO: 797172
ucugcgggacgaacccugc

SEQ ID NO: 797174 - RNA, 19 nt, Artificial Sequence
  Description of Artificial Sequence: Synthetic oligonucleotide
  Sense strand starting at position 2189 of SEQ ID NO: 587504
uauggaaaguucucgggaa

SEQ ID NO: 797175 - RNA, 19 nt, Artificial Sequence
  Description of Artificial Sequence: Synthetic oligonucleotide
  Antisense strand to SEQ ID NO: 797174
uucccgagaacuuuccaua

SEQ ID NO: 797176 - RNA, 19 nt, Artificial Sequence
  Description of Artificial Sequence: Synthetic oligonucleotide
  Sense strand starting at position 2193 of SEQ ID NO: 587504
gaaaguucucgggaaggcu

SEQ ID NO: 797177 - RNA, 19 nt, Artificial Sequence
  Description of Artificial Sequence: Synthetic oligonucleotide
  Antisense strand to SEQ ID NO: 797176
agccuucccgagaacuuuc

SEQ ID NO: 797178 - RNA, 19 nt, Artificial Sequence
  Description of Artificial Sequence: Synthetic oligonucleotide
  Sense strand starting at position 2217 of SEQ ID NO: 587504
ggcccucuucuuuaagaca

SEQ ID NO: 797179 - RNA, 19 nt, Artificial Sequence
  Description of Artificial Sequence: Synthetic oligonucleotide
  Antisense strand to SEQ ID NO: 797178
ugucuuaaagaagagggcc

SEQ ID NO: 797180 - RNA, 19 nt, Artificial Sequence
  Description of Artificial Sequence: Synthetic oligonucleotide
  Sense strand starting at position 2495 of SEQ ID NO: 587504
ucuugaguccaggagguaa

SEQ ID NO: 797181 - RNA, 19 nt, Artificial Sequence
  Description of Artificial Sequence: Synthetic oligonucleotide
  Antisense strand to SEQ ID NO: 797180
uuaccuccuggacucaaga

SEQ ID NO: 797182 - RNA, 19 nt, Artificial Sequence
  Description of Artificial Sequence: Synthetic oligonucleotide
  Sense strand starting at position 2519 of SEQ ID NO: 587504
gcaguuaaccgagaucaag

SEQ ID NO: 797183 - RNA, 19 nt, Artificial Sequence
  Description of Artificial Sequence: Synthetic oligonucleotide
  Antisense strand to SEQ ID NO: 797182
cuugaucucgguuaacugc

SEQ ID NO: 797184 - RNA, 19 nt, Artificial Sequence
  Description of Artificial Sequence: Synthetic oligonucleotide
  Sense strand starting at position 2688 of SEQ ID NO: 587504
ugaauuucgugccuuuaua

SEQ ID NO: 797185 - RNA, 19 nt, Artificial Sequence
  Description of Artificial Sequence: Synthetic oligonucleotide
  Antisense strand to SEQ ID NO: 797184
uauaaaggcacgaaauuca

SEQ ID NO: 797186 - RNA, 19 nt, Artificial Sequence
  Description of Artificial Sequence: Synthetic oligonucleotide
  Sense strand starting at position 2721 of SEQ ID NO: 587504
acaaauguacugugucuuu

SEQ ID NO: 797187 - RNA, 19 nt, Artificial Sequence
  Description of Artificial Sequence: Synthetic oligonucleotide
  Antisense strand to SEQ ID NO: 797186
aaagacacaguacauuugu

SEQ ID NO: 797188 - RNA, 19 nt, Artificial Sequence
  Description of Artificial Sequence: Synthetic oligonucleotide
  Sense strand starting at position 2726 of SEQ ID NO: 587504
uguacugugucuuuaugaa

SEQ ID NO: 797189 - RNA, 19 nt, Artificial Sequence
  Description of Artificial Sequence: Synthetic oligonucleotide
  Antisense strand to SEQ ID NO: 797188
uucauaaagacacaguaca

SEQ ID NO: 797190 - RNA, 19 nt, Artificial Sequence
  Description of Artificial Sequence: Synthetic oligonucleotide
  Sense strand starting at position 2779 of SEQ ID NO: 587504
cauagagggucucuuguau

SEQ ID NO: 797191 - RNA, 19 nt, Artificial Sequence
  Description of Artificial Sequence: Synthetic oligonucleotide
  Antisense strand to SEQ ID NO: 797190
auacaagagacccucuaug

SEQ ID NO: 797192 - RNA, 19 nt, Artificial Sequence
  Description of Artificial Sequence: Synthetic oligonucleotide
  Sense strand starting at position 2785 of SEQ ID NO: 587504
gggucucuuguaugaggca

SEQ ID NO: 797193 - RNA, 19 nt, Artificial Sequence
  Description of Artificial Sequence: Synthetic oligonucleotide
  Antisense strand to SEQ ID NO: 797192
ugccucauacaagagaccc

SEQ ID NO: 797194 - RNA, 19 nt, Artificial Sequence
  Description of Artificial Sequence: Synthetic oligonucleotide
  Sense strand starting at position 2806 of SEQ ID NO: 587504
gacgcuaacagaugaggaa

SEQ ID NO: 797195 - RNA, 19 nt, Artificial Sequence
  Description of Artificial Sequence: Synthetic oligonucleotide
  Antisense strand to SEQ ID NO: 797194
uuccucaucuguuagcguc

SEQ ID NO: 797196 - RNA, 19 nt, Artificial Sequence
  Description of Artificial Sequence: Synthetic oligonucleotide
  Sense strand starting at position 2905 of SEQ ID NO: 587504
aaacuaagguguguuguga

SEQ ID NO: 797197 - RNA, 19 nt, Artificial Sequence
  Description of Artificial Sequence: Synthetic oligonucleotide
  Antisense strand to SEQ ID NO: 797196
ucacaacacaccuuaguuu

SEQ ID NO: 797198 - RNA, 19 nt, Artificial Sequence
  Description of Artificial Sequence: Synthetic oligonucleotide
  Sense strand starting at position 2936 of SEQ ID NO: 587504
cggacuagacacugguaaa

SEQ ID NO: 797199 - RNA, 19 nt, Artificial Sequence
  Description of Artificial Sequence: Synthetic oligonucleotide
  Antisense strand to SEQ ID NO: 797198
uuuaccagugucuaguccg

SEQ ID NO: 797200 - RNA, 19 nt, Artificial Sequence
  Description of Artificial Sequence: Synthetic oligonucleotide
  Sense strand starting at position 3009 of SEQ ID NO: 587504
auuauugugcccuagucua

SEQ ID NO: 797201 - RNA, 19 nt, Artificial Sequence
  Description of Artificial Sequence: Synthetic oligonucleotide
  Antisense strand to SEQ ID NO: 797200
uagacuagggcacaauaau

SEQ ID NO: 797202 - RNA, 19 nt, Artificial Sequence
  Description of Artificial Sequence: Synthetic oligonucleotide
  Sense strand starting at position 3016 of SEQ ID NO: 587504
ugcccuagucuaggaggua

SEQ ID NO: 797203 - RNA, 19 nt, Artificial Sequence
  Description of Artificial Sequence: Synthetic oligonucleotide
  Antisense strand to SEQ ID NO: 797202
uaccuccuagacuagggca

SEQ ID NO: 797204 - RNA, 19 nt, Artificial Sequence
  Description of Artificial Sequence: Synthetic oligonucleotide
  Sense strand starting at position 3019 of SEQ ID NO: 587504
ccuagucuaggagguaaua

SEQ ID NO: 797205 - RNA, 19 nt, Artificial Sequence
  Description of Artificial Sequence: Synthetic oligonucleotide
  Antisense strand to SEQ ID NO: 797204
uauuaccuccuagacuagg

SEQ ID NO: 797206 - RNA, 19 nt, Artificial Sequence
  Description of Artificial Sequence: Synthetic oligonucleotide
  Sense strand starting at position 3167 of SEQ ID NO: 587504
cugagagcgauuugcuguu

SEQ ID NO: 797207 - RNA, 19 nt, Artificial Sequence
  Description of Artificial Sequence: Synthetic oligonucleotide
  Antisense strand to SEQ ID NO: 797206
aacagcaaaucgcucucag

SEQ ID NO: 797208 - RNA, 19 nt, Artificial Sequence
  Description of Artificial Sequence: Synthetic oligonucleotide
  Sense strand starting at position 3604 of SEQ ID NO: 587504
gugagucaggauuguguca

SEQ ID NO: 797209 - RNA, 19 nt, Artificial Sequence
  Description of Artificial Sequence: Synthetic oligonucleotide
  Antisense strand to SEQ ID NO: 797208
ugacacaauccugacucac

SEQ ID NO: 797210 - RNA, 19 nt, Artificial Sequence
  Description of Artificial Sequence: Synthetic oligonucleotide
  Sense strand starting at position 3647 of SEQ ID NO: 587504
auuagauccugucucaaga

SEQ ID NO: 797211 - RNA, 19 nt, Artificial Sequence
  Description of Artificial Sequence: Synthetic oligonucleotide
  Antisense strand to SEQ ID NO: 797210
ucuugagacaggaucuaau

SEQ ID NO: 797212 - RNA, 19 nt, Artificial Sequence
  Description of Artificial Sequence: Synthetic oligonucleotide
  Sense strand starting at position 3959 of SEQ ID NO: 587504
ccgugaagcacauagaacu

SEQ ID NO: 797213 - RNA, 19 nt, Artificial Sequence
  Description of Artificial Sequence: Synthetic oligonucleotide
  Antisense strand to SEQ ID NO: 797212
aguucuaugugcuucacgg

SEQ ID NO: 797214 - RNA, 19 nt, Artificial Sequence
  Description of Artificial Sequence: Synthetic oligonucleotide
  Sense strand starting at position 3975 of SEQ ID NO: 587504
acuguuaugcacuauuguu

SEQ ID NO: 797215 - RNA, 19 nt, Artificial Sequence
  Description of Artificial Sequence: Synthetic oligonucleotide
  Antisense strand to SEQ ID NO: 797214
aacaauagugcauaacagu

SEQ ID NO: 797216 - RNA, 19 nt, Artificial Sequence
  Description of Artificial Sequence: Synthetic oligonucleotide
  Sense strand starting at position 249 of SEQ ID NO: 587505
uuuaguaguggaugaggga

SEQ ID NO: 797217 - RNA, 19 nt, Artificial Sequence
  Description of Artificial Sequence: Synthetic oligonucleotide
  Antisense strand to SEQ ID NO: 797216
ucccucauccacuacuaaa

SEQ ID NO: 797218 - RNA, 19 nt, Artificial Sequence
  Description of Artificial Sequence: Synthetic oligonucleotide
  Sense strand starting at position 290 of SEQ ID NO: 587505
gguagaaugauaggcuuua

SEQ ID NO: 797219 - RNA, 19 nt, Artificial Sequence
  Description of Artificial Sequence: Synthetic oligonucleotide
  Antisense strand to SEQ ID NO: 797218
uaaagccuaucauucuacc

SEQ ID NO: 797220 - RNA, 19 nt, Artificial Sequence
  Description of Artificial Sequence: Synthetic oligonucleotide
  Sense strand starting at position 295 of SEQ ID NO: 587505
aaugauaggcuuuaccagu

SEQ ID NO: 797221 - RNA, 19 nt, Artificial Sequence
  Description of Artificial Sequence: Synthetic oligonucleotide
  Antisense strand to SEQ ID NO: 797220
acugguaaagccuaucauu

SEQ ID NO: 797222 - RNA, 19 nt, Artificial Sequence
  Description of Artificial Sequence: Synthetic oligonucleotide
  Sense strand starting at position 366 of SEQ ID NO: 587505
gaagaaaggcugcaucuua

SEQ ID NO: 797223 - RNA, 19 nt, Artificial Sequence
  Description of Artificial Sequence: Synthetic oligonucleotide
  Antisense strand to SEQ ID NO: 797222
uaagaugcagccuuucuuc

SEQ ID NO: 797224 - RNA, 19 nt, Artificial Sequence
  Description of Artificial Sequence: Synthetic oligonucleotide
  Sense strand starting at position 455 of SEQ ID NO: 587505
gcucuccgacucugaauuu

SEQ ID NO: 797225 - RNA, 19 nt, Artificial Sequence
  Description of Artificial Sequence: Synthetic oligonucleotide
  Antisense strand to SEQ ID NO: 797224
aaauucagagucggagagc

SEQ ID NO: 797226 - RNA, 19 nt, Artificial Sequence
  Description of Artificial Sequence: Synthetic oligonucleotide
  Sense strand starting at position 720 of SEQ ID NO: 587505
ucauauuggcuuuacaaag

SEQ ID NO: 797227 - RNA, 19 nt, Artificial Sequence
  Description of Artificial Sequence: Synthetic oligonucleotide
  Antisense strand to SEQ ID NO: 797226
cuuuguaaagccaauauga

SEQ ID NO: 797228 - RNA, 19 nt, Artificial Sequence
  Description of Artificial Sequence: Synthetic oligonucleotide
  Sense strand starting at position 756 of SEQ ID NO: 587505
auaagcauucccgaucaga

SEQ ID NO: 797229 - RNA, 19 nt, Artificial Sequence
  Description of Artificial Sequence: Synthetic oligonucleotide
  Antisense strand to SEQ ID NO: 797228
ucugaucgggaaugcuuau

SEQ ID NO: 797230 - RNA, 19 nt, Artificial Sequence
  Description of Artificial Sequence: Synthetic oligonucleotide
  Sense strand starting at position 759 of SEQ ID NO: 587505
agcauucccgaucagaacu

SEQ ID NO: 797231 - RNA, 19 nt, Artificial Sequence
  Description of Artificial Sequence: Synthetic oligonucleotide
  Antisense strand to SEQ ID NO: 797230
aguucugaucgggaaugcu

SEQ ID NO: 797232 - RNA, 19 nt, Artificial Sequence
  Description of Artificial Sequence: Synthetic oligonucleotide
  Sense strand starting at position 1081 of SEQ ID NO: 587505
cuaggaagauguuuacaug

SEQ ID NO: 797233 - RNA, 19 nt, Artificial Sequence
  Description of Artificial Sequence: Synthetic oligonucleotide
  Antisense strand to SEQ ID NO: 797232
cauguaaacaucuuccuag

SEQ ID NO: 797234 - RNA, 19 nt, Artificial Sequence
  Description of Artificial Sequence: Synthetic oligonucleotide
  Sense strand starting at position 1089 of SEQ ID NO: 587505
auguuuacaugucuugaaa

SEQ ID NO: 797235 - RNA, 19 nt, Artificial Sequence
  Description of Artificial Sequence: Synthetic oligonucleotide
  Antisense strand to SEQ ID NO: 797234
uuucaagacauguaaacau

SEQ ID NO: 797236 - RNA, 19 nt, Artificial Sequence
  Description of Artificial Sequence: Synthetic oligonucleotide
  Sense strand starting at position 1380 of SEQ ID NO: 587505
gagcauugucuuccgccua

SEQ ID NO: 797237 - RNA, 19 nt, Artificial Sequence
  Description of Artificial Sequence: Synthetic oligonucleotide
  Antisense strand to SEQ ID NO: 797236
uaggcggaagacaaugcuc

SEQ ID NO: 797238 - RNA, 19 nt, Artificial Sequence
  Description of Artificial Sequence: Synthetic oligonucleotide
  Sense strand starting at position 2286 of SEQ ID NO: 587505
accuacaccuggucugaga

SEQ ID NO: 797239 - RNA, 19 nt, Artificial Sequence
  Description of Artificial Sequence: Synthetic oligonucleotide
  Antisense strand to SEQ ID NO: 797238
ucucagaccagguguaggu

SEQ ID NO: 797240 - RNA, 19 nt, Artificial Sequence
  Description of Artificial Sequence: Synthetic oligonucleotide
  Sense strand starting at position 2571 of SEQ ID NO: 587505
cugcuuuagagcugaaaga

SEQ ID NO: 797241 - RNA, 19 nt, Artificial Sequence
  Description of Artificial Sequence: Synthetic oligonucleotide
  Antisense strand to SEQ ID NO: 797240
ucuuucagcucuaaagcag

SEQ ID NO: 797242 - RNA, 19 nt, Artificial Sequence
  Description of Artificial Sequence: Synthetic oligonucleotide
  Sense strand starting at position 2572 of SEQ ID NO: 587505
ugcuuuagagcugaaagaa

SEQ ID NO: 797243 - RNA, 19 nt, Artificial Sequence
  Description of Artificial Sequence: Synthetic oligonucleotide
  Antisense strand to SEQ ID NO: 797242
uucuuucagcucuaaagca

SEQ ID NO: 797244 - RNA, 19 nt, Artificial Sequence
  Description of Artificial Sequence: Synthetic oligonucleotide
  Sense strand starting at position 2839 of SEQ ID NO: 587505
gaaauugaacgaugugaau

SEQ ID NO: 797245 - RNA, 19 nt, Artificial Sequence
  Description of Artificial Sequence: Synthetic oligonucleotide
  Antisense strand to SEQ ID NO: 797244
auucacaucguucaauuuc

SEQ ID NO: 797246 - RNA, 19 nt, Artificial Sequence
  Description of Artificial Sequence: Synthetic oligonucleotide
  Sense strand starting at position 2845 of SEQ ID NO: 587505
gaacgaugugaauggacua

SEQ ID NO: 797247 - RNA, 19 nt, Artificial Sequence
  Description of Artificial Sequence: Synthetic oligonucleotide
  Antisense strand to SEQ ID NO: 797246
uaguccauucacaucguuc

SEQ ID NO: 797248 - RNA, 19 nt, Artificial Sequence
  Description of Artificial Sequence: Synthetic oligonucleotide
  Sense strand starting at position 2899 of SEQ ID NO: 587505
cauuuauguuauguguguu

SEQ ID NO: 797249 - RNA, 19 nt, Artificial Sequence
  Description of Artificial Sequence: Synthetic oligonucleotide
  Antisense strand to SEQ ID NO: 797248
aacacacauaacauaaaug

SEQ ID NO: 797250 - RNA, 19 nt, Artificial Sequence
  Description of Artificial Sequence: Synthetic oligonucleotide
  Sense strand starting at position 2953 of SEQ ID NO: 587505
uaaguaaauguugacgaau

SEQ ID NO: 797251 - RNA, 19 nt, Artificial Sequence
  Description of Artificial Sequence: Synthetic oligonucleotide
  Antisense strand to SEQ ID NO: 797250
auucgucaacauuuacuua

SEQ ID NO: 797252 - RNA, 19 nt, Artificial Sequence
  Description of Artificial Sequence: Synthetic oligonucleotide
  Sense strand starting at position 2956 of SEQ ID NO: 587505
guaaauguugacgaauguu

SEQ ID NO: 797253 - RNA, 19 nt, Artificial Sequence
  Description of Artificial Sequence: Synthetic oligonucleotide
  Antisense strand to SEQ ID NO: 797252
aacauucgucaacauuuac

SEQ ID NO: 797254 - RNA, 19 nt, Artificial Sequence
  Description of Artificial Sequence: Synthetic oligonucleotide
  Sense strand starting at position 2959 of SEQ ID NO: 587505
aauguugacgaauguugaa

SEQ ID NO: 797255 - RNA, 19 nt, Artificial Sequence
  Description of Artificial Sequence: Synthetic oligonucleotide
  Antisense strand to SEQ ID NO: 797254
uucaacauucgucaacauu

SEQ ID NO: 797256 - RNA, 19 nt, Artificial Sequence
  Description of Artificial Sequence: Synthetic oligonucleotide
  Sense strand starting at position 3001 of SEQ ID NO: 587505
gaaggugaacugugugaac

SEQ ID NO: 797257 - RNA, 19 nt, Artificial Sequence
  Description of Artificial Sequence: Synthetic oligonucleotide
  Antisense strand to SEQ ID NO: 797256
guucacacaguucaccuuc

SEQ ID NO: 797258 - RNA, 19 nt, Artificial Sequence
  Description of Artificial Sequence: Synthetic oligonucleotide
  Sense strand starting at position 3013 of SEQ ID NO: 587505
ugugaacaggccugauaaa

SEQ ID NO: 797259 - RNA, 19 nt, Artificial Sequence
  Description of Artificial Sequence: Synthetic oligonucleotide
  Antisense strand to SEQ ID NO: 797258
uuuaucaggccuguucaca

SEQ ID NO: 797260 - RNA, 19 nt, Artificial Sequence
  Description of Artificial Sequence: Synthetic oligonucleotide
  Sense strand starting at position 3020 of SEQ ID NO: 587505
aggccugauaaaugagauc

SEQ ID NO: 797261 - RNA, 19 nt, Artificial Sequence
  Description of Artificial Sequence: Synthetic oligonucleotide
  Antisense strand to SEQ ID NO: 797260
gaucucauuuaucaggccu

SEQ ID NO: 797262 - RNA, 19 nt, Artificial Sequence
  Description of Artificial Sequence: Synthetic oligonucleotide
  Sense strand starting at position 3048 of SEQ ID NO: 587505
aguuacaguuucucuaaua

SEQ ID NO: 797263 - RNA, 19 nt, Artificial Sequence
  Description of Artificial Sequence: Synthetic oligonucleotide
  Antisense strand to SEQ ID NO: 797262
uauuagagaaacuguaacu

SEQ ID NO: 797264 - RNA, 19 nt, Artificial Sequence
  Description of Artificial Sequence: Synthetic oligonucleotide
  Sense strand starting at position 3049 of SEQ ID NO: 587505
guuacaguuucucuaauaa

SEQ ID NO: 797265 - RNA, 19 nt, Artificial Sequence
  Description of Artificial Sequence: Synthetic oligonucleotide
  Antisense strand to SEQ ID NO: 797264
uuauuagagaaacuguaac

SEQ ID NO: 797266 - RNA, 19 nt, Artificial Sequence
  Description of Artificial Sequence: Synthetic oligonucleotide
  Sense strand starting at position 3072 of SEQ ID NO: 587505
auacuugugcaguaaacaa

SEQ ID NO: 797267 - RNA, 19 nt, Artificial Sequence
  Description of Artificial Sequence: Synthetic oligonucleotide
  Antisense strand to SEQ ID NO: 797266
uuguuuacugcacaaguau

SEQ ID NO: 797268 - RNA, 19 nt, Artificial Sequence
  Description of Artificial Sequence: Synthetic oligonucleotide
  Sense strand starting at position 3104 of SEQ ID NO: 587505
auugauucuuagguugauu

SEQ ID NO: 797269 - RNA, 19 nt, Artificial Sequence
  Description of Artificial Sequence: Synthetic oligonucleotide
  Antisense strand to SEQ ID NO: 797268
aaucaaccuaagaaucaau

SEQ ID NO: 797270 - RNA, 19 nt, Artificial Sequence
  Description of Artificial Sequence: Synthetic oligonucleotide
  Sense strand starting at position 3106 of SEQ ID NO: 587505
ugauucuuagguugauucu

SEQ ID NO: 797271 - RNA, 19 nt, Artificial Sequence
  Description of Artificial Sequence: Synthetic oligonucleotide
  Antisense strand to SEQ ID NO: 797270
agaaucaaccuaagaauca

SEQ ID NO: 797272 - RNA, 19 nt, Artificial Sequence
  Description of Artificial Sequence: Synthetic oligonucleotide
  Sense strand starting at position 3107 of SEQ ID NO: 587505
gauucuuagguugauucua

SEQ ID NO: 797273 - RNA, 19 nt, Artificial Sequence
  Description of Artificial Sequence: Synthetic oligonucleotide
  Antisense strand to SEQ ID NO: 797272
uagaaucaaccuaagaauc

SEQ ID NO: 797274 - RNA, 19 nt, Artificial Sequence
  Description of Artificial Sequence: Synthetic oligonucleotide
  Sense strand starting at position 3349 of SEQ ID NO: 587505
agaaaugaucgccacugua

SEQ ID NO: 797275 - RNA, 19 nt, Artificial Sequence
  Description of Artificial Sequence: Synthetic oligonucleotide
  Antisense strand to SEQ ID NO: 797274
uacaguggcgaucauuucu

SEQ ID NO: 797276 - RNA, 19 nt, Artificial Sequence
  Description of Artificial Sequence: Synthetic oligonucleotide
  Sense strand starting at position 3362 of SEQ ID NO: 587505
acuguaucagcaugacuaa

SEQ ID NO: 797277 - RNA, 19 nt, Artificial Sequence
  Description of Artificial Sequence: Synthetic oligonucleotide
  Antisense strand to SEQ ID NO: 797276
uuagucaugcugauacagu

SEQ ID NO: 797278 - RNA, 19 nt, Artificial Sequence
  Description of Artificial Sequence: Synthetic oligonucleotide
  Sense strand starting at position 3363 of SEQ ID NO: 587505
cuguaucagcaugacuaaa

SEQ ID NO: 797279 - RNA, 19 nt, Artificial Sequence
  Description of Artificial Sequence: Synthetic oligonucleotide
  Antisense strand to SEQ ID NO: 797278
uuuagucaugcugauacag

SEQ ID NO: 797280 - RNA, 19 nt, Artificial Sequence
  Description of Artificial Sequence: Synthetic oligonucleotide
  Sense strand starting at position 3365 of SEQ ID NO: 587505
guaucagcaugacuaaauu

SEQ ID NO: 797281 - RNA, 19 nt, Artificial Sequence
  Description of Artificial Sequence: Synthetic oligonucleotide
  Antisense strand to SEQ ID NO: 797280
aauuuagucaugcugauac

SEQ ID NO: 797282 - RNA, 19 nt, Artificial Sequence
  Description of Artificial Sequence: Synthetic oligonucleotide
  Sense strand starting at position 3424 of SEQ ID NO: 587505
caagauauguaagugauga

SEQ ID NO: 797283 - RNA, 19 nt, Artificial Sequence
  Description of Artificial Sequence: Synthetic oligonucleotide
  Antisense strand to SEQ ID NO: 797282
ucaucacuuacauaucuug

SEQ ID NO: 797284 - RNA, 19 nt, Artificial Sequence
  Description of Artificial Sequence: Synthetic oligonucleotide
  Sense strand starting at position 3479 of SEQ ID NO: 587505
aauguuuaugagggcaaac

SEQ ID NO: 797285 - RNA, 19 nt, Artificial Sequence
  Description of Artificial Sequence: Synthetic oligonucleotide
  Antisense strand to SEQ ID NO: 797284
guuugcccucauaaacauu

SEQ ID NO: 797286 - RNA, 19 nt, Artificial Sequence
  Description of Artificial Sequence: Synthetic oligonucleotide
  Sense strand starting at position 3489 of SEQ ID NO: 587505
agggcaaacguacauauaa

SEQ ID NO: 797287 - RNA, 19 nt, Artificial Sequence
  Description of Artificial Sequence: Synthetic oligonucleotide
  Antisense strand to SEQ ID NO: 797286
uuauauguacguuugcccu

SEQ ID NO: 797288 - RNA, 19 nt, Artificial Sequence
  Description of Artificial Sequence: Synthetic oligonucleotide
  Sense strand starting at position 3667 of SEQ ID NO: 587505
uggagaaucaaggguguuu

SEQ ID NO: 797289 - RNA, 19 nt, Artificial Sequence
  Description of Artificial Sequence: Synthetic oligonucleotide
  Antisense strand to SEQ ID NO: 797288
aaacacccuugauucucca

SEQ ID NO: 797290 - RNA, 19 nt, Artificial Sequence
  Description of Artificial Sequence: Synthetic oligonucleotide
  Sense strand starting at position 3669 of SEQ ID NO: 587505
gagaaucaaggguguuucu

SEQ ID NO: 797291 - RNA, 19 nt, Artificial Sequence
  Description of Artificial Sequence: Synthetic oligonucleotide
  Antisense strand to SEQ ID NO: 797290
agaaacacccuugauucuc

SEQ ID NO: 797292 - RNA, 19 nt, Artificial Sequence
  Description of Artificial Sequence: Synthetic oligonucleotide
  Sense strand starting at position 3672 of SEQ ID NO: 587505
aaucaaggguguuucuuau

SEQ ID NO: 797293 - RNA, 19 nt, Artificial Sequence
  Description of Artificial Sequence: Synthetic oligonucleotide
  Antisense strand to SEQ ID NO: 797292
auaagaaacacccuugauu

SEQ ID NO: 797294 - RNA, 19 nt, Artificial Sequence
  Description of Artificial Sequence: Synthetic oligonucleotide
  Sense strand starting at position 3687 of SEQ ID NO: 587505
uuaugaaaguguccaaauc

SEQ ID NO: 797295 - RNA, 19 nt, Artificial Sequence
  Description of Artificial Sequence: Synthetic oligonucleotide
  Antisense strand to SEQ ID NO: 797294
gauuuggacacuuucauaa

SEQ ID NO: 797296 - RNA, 19 nt, Artificial Sequence
  Description of Artificial Sequence: Synthetic oligonucleotide
  Sense strand starting at position 123 of SEQ ID NO: 587506
ucaauaaacguaugaagca

SEQ ID NO: 797297 - RNA, 19 nt, Artificial Sequence
  Description of Artificial Sequence: Synthetic oligonucleotide
  Antisense strand to SEQ ID NO: 797296
ugcuucauacguuuauuga

SEQ ID NO: 797298 - RNA, 19 nt, Artificial Sequence
  Description of Artificial Sequence: Synthetic oligonucleotide
  Sense strand starting at position 467 of SEQ ID NO: 587506
cugggucaauuacuguaaa

SEQ ID NO: 797299 - RNA, 19 nt, Artificial Sequence
  Description of Artificial Sequence: Synthetic oligonucleotide
  Antisense strand to SEQ ID NO: 797298
uuuacaguaauugacccag

SEQ ID NO: 797300 - RNA, 19 nt, Artificial Sequence
  Description of Artificial Sequence: Synthetic oligonucleotide
  Sense strand starting at position 494 of SEQ ID NO: 587506
gaggguguaucagcaacau

SEQ ID NO: 797301 - RNA, 19 nt, Artificial Sequence
  Description of Artificial Sequence: Synthetic oligonucleotide
  Antisense strand to SEQ ID NO: 797300
auguugcugauacacccuc

SEQ ID NO: 797302 - RNA, 19 nt, Artificial Sequence
  Description of Artificial Sequence: Synthetic oligonucleotide
  Sense strand starting at position 534 of SEQ ID NO: 587506
agucaaagugcagaguuaa

SEQ ID NO: 797303 - RNA, 19 nt, Artificial Sequence
  Description of Artificial Sequence: Synthetic oligonucleotide
  Antisense strand to SEQ ID NO: 797302
uuaacucugcacuuugacu

SEQ ID NO: 797304 - RNA, 19 nt, Artificial Sequence
  Description of Artificial Sequence: Synthetic oligonucleotide
  Sense strand starting at position 606 of SEQ ID NO: 587506
acgagauacucuuccaccu

SEQ ID NO: 797305 - RNA, 19 nt, Artificial Sequence
  Description of Artificial Sequence: Synthetic oligonucleotide
  Antisense strand to SEQ ID NO: 797304
agguggaagaguaucucgu

SEQ ID NO: 797306 - RNA, 19 nt, Artificial Sequence
  Description of Artificial Sequence: Synthetic oligonucleotide
  Sense strand starting at position 760 of SEQ ID NO: 587506
ggugauucggaguaaauua

SEQ ID NO: 797307 - RNA, 19 nt, Artificial Sequence
  Description of Artificial Sequence: Synthetic oligonucleotide
  Antisense strand to SEQ ID NO: 797306
uaauuuacuccgaaucacc

SEQ ID NO: 797308 - RNA, 19 nt, Artificial Sequence
  Description of Artificial Sequence: Synthetic oligonucleotide
  Sense strand starting at position 817 of SEQ ID NO: 587506
uuggaaagcuuauuaagua

SEQ ID NO: 797309 - RNA, 19 nt, Artificial Sequence
  Description of Artificial Sequence: Synthetic oligonucleotide
  Antisense strand to SEQ ID NO: 797308
uacuuaauaagcuuuccaa

SEQ ID NO: 797310 - RNA, 19 nt, Artificial Sequence
  Description of Artificial Sequence: Synthetic oligonucleotide
  Sense strand starting at position 842 of SEQ ID NO: 587506
aacuaaggcccugggaaau

SEQ ID NO: 797311 - RNA, 19 nt, Artificial Sequence
  Description of Artificial Sequence: Synthetic oligonucleotide
  Antisense strand to SEQ ID NO: 797310
auuucccagggccuuaguu

SEQ ID NO: 797312 - RNA, 19 nt, Artificial Sequence
  Description of Artificial Sequence: Synthetic oligonucleotide
  Sense strand starting at position 981 of SEQ ID NO: 587506
ggauuccuccaguggagga

SEQ ID NO: 797313 - RNA, 19 nt, Artificial Sequence
  Description of Artificial Sequence: Synthetic oligonucleotide
  Antisense strand to SEQ ID NO: 797312
uccuccacuggaggaaucc

SEQ ID NO: 797314 - RNA, 19 nt, Artificial Sequence
  Description of Artificial Sequence: Synthetic oligonucleotide
  Sense strand starting at position 1031 of SEQ ID NO: 587506
uguagugcugccgucgaaa

SEQ ID NO: 797315 - RNA, 19 nt, Artificial Sequence
  Description of Artificial Sequence: Synthetic oligonucleotide
  Antisense strand to SEQ ID NO: 797314
uuucgacggcagcacuaca

SEQ ID NO: 797316 - RNA, 19 nt, Artificial Sequence
  Description of Artificial Sequence: Synthetic oligonucleotide
  Sense strand starting at position 1032 of SEQ ID NO: 587506
guagugcugccgucgaaag

SEQ ID NO: 797317 - RNA, 19 nt, Artificial Sequence
  Description of Artificial Sequence: Synthetic oligonucleotide
  Antisense strand to SEQ ID NO: 797316
cuuucgacggcagcacuac

SEQ ID NO: 797318 - RNA, 19 nt, Artificial Sequence
  Description of Artificial Sequence: Synthetic oligonucleotide
  Sense strand starting at position 1246 of SEQ ID NO: 587506
cccggcaucgccuuucaga

SEQ ID NO: 797319 - RNA, 19 nt, Artificial Sequence
  Description of Artificial Sequence: Synthetic oligonucleotide
  Antisense strand to SEQ ID NO: 797318
ucugaaaggcgaugccggg

SEQ ID NO: 797320 - RNA, 19 nt, Artificial Sequence
  Description of Artificial Sequence: Synthetic oligonucleotide
  Sense strand starting at position 1988 of SEQ ID NO: 587506
uugaguucgaaaggagaua

SEQ ID NO: 797321 - RNA, 19 nt, Artificial Sequence
  Description of Artificial Sequence: Synthetic oligonucleotide
  Antisense strand to SEQ ID NO: 797320
uaucuccuuucgaacucaa

SEQ ID NO: 797322 - RNA, 19 nt, Artificial Sequence
  Description of Artificial Sequence: Synthetic oligonucleotide
  Sense strand starting at position 2149 of SEQ ID NO: 587506
guugaacugcuguagaaau

SEQ ID NO: 797323 - RNA, 19 nt, Artificial Sequence
  Description of Artificial Sequence: Synthetic oligonucleotide
  Antisense strand to SEQ ID NO: 797322
auuucuacagcaguucaac

SEQ ID NO: 797324 - RNA, 19 nt, Artificial Sequence
  Description of Artificial Sequence: Synthetic oligonucleotide
  Sense strand starting at position 2180 of SEQ ID NO: 587506
ggguaccaacucugucaua

SEQ ID NO: 797325 - RNA, 19 nt, Artificial Sequence
  Description of Artificial Sequence: Synthetic oligonucleotide
  Antisense strand to SEQ ID NO: 797324
uaugacagaguugguaccc

SEQ ID NO: 797326 - RNA, 19 nt, Artificial Sequence
  Description of Artificial Sequence: Synthetic oligonucleotide
  Sense strand starting at position 2253 of SEQ ID NO: 587506
gaaugacaauaguuguaau

SEQ ID NO: 797327 - RNA, 19 nt, Artificial Sequence
  Description of Artificial Sequence: Synthetic oligonucleotide
  Antisense strand to SEQ ID NO: 797326
auuacaacuauugucauuc

SEQ ID NO: 797328 - RNA, 19 nt, Artificial Sequence
  Description of Artificial Sequence: Synthetic oligonucleotide
  Sense strand starting at position 2263 of SEQ ID NO: 587506
aguuguaaugaugguuaac

SEQ ID NO: 797329 - RNA, 19 nt, Artificial Sequence
  Description of Artificial Sequence: Synthetic oligonucleotide
  Antisense strand to SEQ ID NO: 797328
guuaaccaucauuacaacu

SEQ ID NO: 797330 - RNA, 19 nt, Artificial Sequence
  Description of Artificial Sequence: Synthetic oligonucleotide
  Sense strand starting at position 2272 of SEQ ID NO: 587506
gaugguuaacguuaauuga

SEQ ID NO: 797331 - RNA, 19 nt, Artificial Sequence
  Description of Artificial Sequence: Synthetic oligonucleotide
  Antisense strand to SEQ ID NO: 797330
ucaauuaacguuaaccauc

SEQ ID NO: 797332 - RNA, 19 nt, Artificial Sequence
  Description of Artificial Sequence: Synthetic oligonucleotide
  Sense strand starting at position 2638 of SEQ ID NO: 587506
ucauuaagagcuggauagu

SEQ ID NO: 797333 - RNA, 19 nt, Artificial Sequence
  Description of Artificial Sequence: Synthetic oligonucleotide
  Antisense strand to SEQ ID NO: 797332
acuauccagcucuuaauga

SEQ ID NO: 797334 - RNA, 19 nt, Artificial Sequence
  Description of Artificial Sequence: Synthetic oligonucleotide
  Sense strand starting at position 2639 of SEQ ID NO: 587506
cauuaagagcuggauaguu

SEQ ID NO: 797335 - RNA, 19 nt, Artificial Sequence
  Description of Artificial Sequence: Synthetic oligonucleotide
  Antisense strand to SEQ ID NO: 797334
aacuauccagcucuuaaug

SEQ ID NO: 797336 - RNA, 19 nt, Artificial Sequence
  Description of Artificial Sequence: Synthetic oligonucleotide
  Sense strand starting at position 2675 of SEQ ID NO: 587506
auuucuauguaggaagaau

SEQ ID NO: 797337 - RNA, 19 nt, Artificial Sequence
  Description of Artificial Sequence: Synthetic oligonucleotide
  Antisense strand to SEQ ID NO: 797336
auucuuccuacauagaaau

SEQ ID NO: 797338 - RNA, 19 nt, Artificial Sequence
  Description of Artificial Sequence: Synthetic oligonucleotide
  Sense strand starting at position 2916 of SEQ ID NO: 587506
uuccauuauuuggaaggaa

SEQ ID NO: 797339 - RNA, 19 nt, Artificial Sequence
  Description of Artificial Sequence: Synthetic oligonucleotide
  Antisense strand to SEQ ID NO: 797338
uuccuuccaaauaauggaa

SEQ ID NO: 797340 - RNA, 19 nt, Artificial Sequence
  Description of Artificial Sequence: Synthetic oligonucleotide
  Sense strand starting at position 2998 of SEQ ID NO: 587506
auuauauagugagcaguga

SEQ ID NO: 797341 - RNA, 19 nt, Artificial Sequence
  Description of Artificial Sequence: Synthetic oligonucleotide
  Antisense strand to SEQ ID NO: 797340
ucacugcucacuauauaau

SEQ ID NO: 797342 - RNA, 19 nt, Artificial Sequence
  Description of Artificial Sequence: Synthetic oligonucleotide
  Sense strand starting at position 2999 of SEQ ID NO: 587506
uuauauagugagcagugau

SEQ ID NO: 797343 - RNA, 19 nt, Artificial Sequence
  Description of Artificial Sequence: Synthetic oligonucleotide
  Antisense strand to SEQ ID NO: 797342
aucacugcucacuauauaa

SEQ ID NO: 797344 - RNA, 19 nt, Artificial Sequence
  Description of Artificial Sequence: Synthetic oligonucleotide
  Sense strand starting at position 3002 of SEQ ID NO: 587506
uauagugagcagugaugaa

SEQ ID NO: 797345 - RNA, 19 nt, Artificial Sequence
  Description of Artificial Sequence: Synthetic oligonucleotide
  Antisense strand to SEQ ID NO: 797344
uucaucacugcucacuaua

SEQ ID NO: 797346 - RNA, 19 nt, Artificial Sequence
  Description of Artificial Sequence: Synthetic oligonucleotide
  Sense strand starting at position 3053 of SEQ ID NO: 587506
uggaauacuuaggcaauca

SEQ ID NO: 797347 - RNA, 19 nt, Artificial Sequence
  Description of Artificial Sequence: Synthetic oligonucleotide
  Antisense strand to SEQ ID NO: 797346
ugauugccuaaguauucca

SEQ ID NO: 797348 - RNA, 19 nt, Artificial Sequence
  Description of Artificial Sequence: Synthetic oligonucleotide
  Sense strand starting at position 3107 of SEQ ID NO: 587506
aucccaaugguacgagauu

SEQ ID NO: 797349 - RNA, 19 nt, Artificial Sequence
  Description of Artificial Sequence: Synthetic oligonucleotide
  Antisense strand to SEQ ID NO: 797348
aaucucguaccauugggau

SEQ ID NO: 797350 - RNA, 19 nt, Artificial Sequence
  Description of Artificial Sequence: Synthetic oligonucleotide
  Sense strand starting at position 3179 of SEQ ID NO: 587506
auuuacuugcugugugaac

SEQ ID NO: 797351 - RNA, 19 nt, Artificial Sequence
  Description of Artificial Sequence: Synthetic oligonucleotide
  Antisense strand to SEQ ID NO: 797350
guucacacagcaaguaaau

SEQ ID NO: 797352 - RNA, 19 nt, Artificial Sequence
  Description of Artificial Sequence: Synthetic oligonucleotide
  Sense strand starting at position 3379 of SEQ ID NO: 587506
acagaauuauagguuggua

SEQ ID NO: 797353 - RNA, 19 nt, Artificial Sequence
  Description of Artificial Sequence: Synthetic oligonucleotide
  Antisense strand to SEQ ID NO: 797352
uaccaaccuauaauucugu

SEQ ID NO: 797354 - RNA, 19 nt, Artificial Sequence
  Description of Artificial Sequence: Synthetic oligonucleotide
  Sense strand starting at position 3381 of SEQ ID NO: 587506
agaauuauagguugguagu

SEQ ID NO: 797355 - RNA, 19 nt, Artificial Sequence
  Description of Artificial Sequence: Synthetic oligonucleotide
  Antisense strand to SEQ ID NO: 797354
acuaccaaccuauaauucu

SEQ ID NO: 797356 - RNA, 19 nt, Artificial Sequence
  Description of Artificial Sequence: Synthetic oligonucleotide
  Sense strand starting at position 3451 of SEQ ID NO: 587506
ugagaaguuggaugucauu

SEQ ID NO: 797357 - RNA, 19 nt, Artificial Sequence
  Description of Artificial Sequence: Synthetic oligonucleotide
  Antisense strand to SEQ ID NO: 797356
aaugacauccaacuucuca

SEQ ID NO: 797358 - RNA, 19 nt, Artificial Sequence
  Description of Artificial Sequence: Synthetic oligonucleotide
  Sense strand starting at position 3490 of SEQ ID NO: 587506
agguaagcuccucaucauu

SEQ ID NO: 797359 - RNA, 19 nt, Artificial Sequence
  Description of Artificial Sequence: Synthetic oligonucleotide
  Antisense strand to SEQ ID NO: 797358
aaugaugaggagcuuaccu

SEQ ID NO: 797360 - RNA, 19 nt, Artificial Sequence
  Description of Artificial Sequence: Synthetic oligonucleotide
  Sense strand starting at position 3640 of SEQ ID NO: 587506
uauugauguggucauguga

SEQ ID NO: 797361 - RNA, 19 nt, Artificial Sequence
  Description of Artificial Sequence: Synthetic oligonucleotide
  Antisense strand to SEQ ID NO: 797360
ucacaugaccacaucaaua

SEQ ID NO: 797362 - RNA, 19 nt, Artificial Sequence
  Description of Artificial Sequence: Synthetic oligonucleotide
  Sense strand starting at position 3734 of SEQ ID NO: 587506
gggauaaaucuugguuaug

SEQ ID NO: 797363 - RNA, 19 nt, Artificial Sequence
  Description of Artificial Sequence: Synthetic oligonucleotide
  Antisense strand to SEQ ID NO: 797362
cauaaccaagauuuauccc

SEQ ID NO: 797364 - RNA, 19 nt, Artificial Sequence
  Description of Artificial Sequence: Synthetic oligonucleotide
  Sense strand starting at position 3735 of SEQ ID NO: 587506
ggauaaaucuugguuaugc

SEQ ID NO: 797365 - RNA, 19 nt, Artificial Sequence
  Description of Artificial Sequence: Synthetic oligonucleotide
  Antisense strand to SEQ ID NO: 797364
gcauaaccaagauuuaucc

SEQ ID NO: 797366 - RNA, 19 nt, Artificial Sequence
  Description of Artificial Sequence: Synthetic oligonucleotide
  Sense strand starting at position 3768 of SEQ ID NO: 587506
uaugcauugcuggauucua

SEQ ID NO: 797367 - RNA, 19 nt, Artificial Sequence
  Description of Artificial Sequence: Synthetic oligonucleotide
  Antisense strand to SEQ ID NO: 797366
uagaauccagcaaugcaua

SEQ ID NO: 797368 - RNA, 19 nt, Artificial Sequence
  Description of Artificial Sequence: Synthetic oligonucleotide
  Sense strand starting at position 3779 of SEQ ID NO: 587506
ggauucuacuagcuaauau

SEQ ID NO: 797369 - RNA, 19 nt, Artificial Sequence
  Description of Artificial Sequence: Synthetic oligonucleotide
  Antisense strand to SEQ ID NO: 797368
auauuagcuaguagaaucc

SEQ ID NO: 797370 - RNA, 19 nt, Artificial Sequence
  Description of Artificial Sequence: Synthetic oligonucleotide
  Sense strand starting at position 3938 of SEQ ID NO: 587506
uuuagagaguuggucuaac

SEQ ID NO: 797371 - RNA, 19 nt, Artificial Sequence
  Description of Artificial Sequence: Synthetic oligonucleotide
  Antisense strand to SEQ ID NO: 797370
guuagaccaacucucuaaa

SEQ ID NO: 797372 - RNA, 19 nt, Artificial Sequence
  Description of Artificial Sequence: Synthetic oligonucleotide
  Sense strand starting at position 3956 of SEQ ID NO: 587506
cauuguuggugacugacau

SEQ ID NO: 797373 - RNA, 19 nt, Artificial Sequence
  Description of Artificial Sequence: Synthetic oligonucleotide
  Antisense strand to SEQ ID NO: 797372
augucagucaccaacaaug

SEQ ID NO: 797374 - RNA, 19 nt, Artificial Sequence
  Description of Artificial Sequence: Synthetic oligonucleotide
  Sense strand starting at position 3957 of SEQ ID NO: 587506
auuguuggugacugacauu

SEQ ID NO: 797375 - RNA, 19 nt, Artificial Sequence
  Description of Artificial Sequence: Synthetic oligonucleotide
  Antisense strand to SEQ ID NO: 797374
aaugucagucaccaacaau

SEQ ID NO: 797376 - RNA, 19 nt, Artificial Sequence
  Description of Artificial Sequence: Synthetic oligonucleotide
  Sense strand starting at position 46 of SEQ ID NO: 587507
uuuagugacuuugugauag

SEQ ID NO: 797377 - RNA, 19 nt, Artificial Sequence
  Description of Artificial Sequence: Synthetic oligonucleotide
  Antisense strand to SEQ ID NO: 797376
cuaucacaaagucacuaaa

SEQ ID NO: 797378 - RNA, 19 nt, Artificial Sequence
  Description of Artificial Sequence: Synthetic oligonucleotide
  Sense strand starting at position 521 of SEQ ID NO: 587507
ucaauaaacguaugaagca

SEQ ID NO: 797379 - RNA, 19 nt, Artificial Sequence
  Description of Artificial Sequence: Synthetic oligonucleotide
  Antisense strand to SEQ ID NO: 797378
ugcuucauacguuuauuga

SEQ ID NO: 797380 - RNA, 19 nt, Artificial Sequence
  Description of Artificial Sequence: Synthetic oligonucleotide
  Sense strand starting at position 865 of SEQ ID NO: 587507
cugggucaauuacuguaaa

SEQ ID NO: 797381 - RNA, 19 nt, Artificial Sequence
  Description of Artificial Sequence: Synthetic oligonucleotide
  Antisense strand to SEQ ID NO: 797380
uuuacaguaauugacccag

SEQ ID NO: 797382 - RNA, 19 nt, Artificial Sequence
  Description of Artificial Sequence: Synthetic oligonucleotide
  Sense strand starting at position 892 of SEQ ID NO: 587507
gaggguguaucagcaacau

SEQ ID NO: 797383 - RNA, 19 nt, Artificial Sequence
  Description of Artificial Sequence: Synthetic oligonucleotide
  Antisense strand to SEQ ID NO: 797382
auguugcugauacacccuc

SEQ ID NO: 797384 - RNA, 19 nt, Artificial Sequence
  Description of Artificial Sequence: Synthetic oligonucleotide
  Sense strand starting at position 932 of SEQ ID NO: 587507
agucaaagugcagaguuaa

SEQ ID NO: 797385 - RNA, 19 nt, Artificial Sequence
  Description of Artificial Sequence: Synthetic oligonucleotide
  Antisense strand to SEQ ID NO: 797384
uuaacucugcacuuugacu

SEQ ID NO: 797386 - RNA, 19 nt, Artificial Sequence
  Description of Artificial Sequence: Synthetic oligonucleotide
  Sense strand starting at position 1004 of SEQ ID NO: 587507
acgagauacucuuccaccu

SEQ ID NO: 797387 - RNA, 19 nt, Artificial Sequence
  Description of Artificial Sequence: Synthetic oligonucleotide
  Antisense strand to SEQ ID NO: 797386
agguggaagaguaucucgu

SEQ ID NO: 797388 - RNA, 19 nt, Artificial Sequence
  Description of Artificial Sequence: Synthetic oligonucleotide
  Sense strand starting at position 1158 of SEQ ID NO: 587507
ggugauucggaguaaauua

SEQ ID NO: 797389 - RNA, 19 nt, Artificial Sequence
  Description of Artificial Sequence: Synthetic oligonucleotide
  Antisense strand to SEQ ID NO: 797388
uaauuuacuccgaaucacc

SEQ ID NO: 797390 - RNA, 19 nt, Artificial Sequence
  Description of Artificial Sequence: Synthetic oligonucleotide
  Sense strand starting at position 1215 of SEQ ID NO: 587507
uuggaaagcuuauuaagua

SEQ ID NO: 797391 - RNA, 19 nt, Artificial Sequence
  Description of Artificial Sequence: Synthetic oligonucleotide
  Antisense strand to SEQ ID NO: 797390
uacuuaauaagcuuuccaa

SEQ ID NO: 797392 - RNA, 19 nt, Artificial Sequence
  Description of Artificial Sequence: Synthetic oligonucleotide
  Sense strand starting at position 1240 of SEQ ID NO: 587507
aacuaaggcccugggaaau

SEQ ID NO: 797393 - RNA, 19 nt, Artificial Sequence
  Description of Artificial Sequence: Synthetic oligonucleotide
  Antisense strand to SEQ ID NO: 797392
auuucccagggccuuaguu

SEQ ID NO: 797394 - RNA, 19 nt, Artificial Sequence
  Description of Artificial Sequence: Synthetic oligonucleotide
  Sense strand starting at position 1379 of SEQ ID NO: 587507
ggauuccuccaguggagga

SEQ ID NO: 797395 - RNA, 19 nt, Artificial Sequence
  Description of Artificial Sequence: Synthetic oligonucleotide
  Antisense strand to SEQ ID NO: 797394
uccuccacuggaggaaucc

SEQ ID NO: 797396 - RNA, 19 nt, Artificial Sequence
  Description of Artificial Sequence: Synthetic oligonucleotide
  Sense strand starting at position 1429 of SEQ ID NO: 587507
uguagugcugccgucgaaa

SEQ ID NO: 797397 - RNA, 19 nt, Artificial Sequence
  Description of Artificial Sequence: Synthetic oligonucleotide
  Antisense strand to SEQ ID NO: 797396
uuucgacggcagcacuaca

SEQ ID NO: 797398 - RNA, 19 nt, Artificial Sequence
  Description of Artificial Sequence: Synthetic oligonucleotide
  Sense strand starting at position 1430 of SEQ ID NO: 587507
guagugcugccgucgaaag

SEQ ID NO: 797399 - RNA, 19 nt, Artificial Sequence
  Description of Artificial Sequence: Synthetic oligonucleotide
  Antisense strand to SEQ ID NO: 797398
cuuucgacggcagcacuac

SEQ ID NO: 797400 - RNA, 19 nt, Artificial Sequence
  Description of Artificial Sequence: Synthetic oligonucleotide
  Sense strand starting at position 1644 of SEQ ID NO: 587507
cccggcaucgccuuucaga

SEQ ID NO: 797401 - RNA, 19 nt, Artificial Sequence
  Description of Artificial Sequence: Synthetic oligonucleotide
  Antisense strand to SEQ ID NO: 797400
ucugaaaggcgaugccggg

SEQ ID NO: 797402 - RNA, 19 nt, Artificial Sequence
  Description of Artificial Sequence: Synthetic oligonucleotide
  Sense strand starting at position 2386 of SEQ ID NO: 587507
uugaguucgaaaggagaua

SEQ ID NO: 797403 - RNA, 19 nt, Artificial Sequence
  Description of Artificial Sequence: Synthetic oligonucleotide
  Antisense strand to SEQ ID NO: 797402
uaucuccuuucgaacucaa

SEQ ID NO: 797404 - RNA, 19 nt, Artificial Sequence
  Description of Artificial Sequence: Synthetic oligonucleotide
  Sense strand starting at position 2547 of SEQ ID NO: 587507
guugaacugcuguagaaau

SEQ ID NO: 797405 - RNA, 19 nt, Artificial Sequence
  Description of Artificial Sequence: Synthetic oligonucleotide
  Antisense strand to SEQ ID NO: 797404
auuucuacagcaguucaac

SEQ ID NO: 797406 - RNA, 19 nt, Artificial Sequence
  Description of Artificial Sequence: Synthetic oligonucleotide
  Sense strand starting at position 2578 of SEQ ID NO: 587507
ggguaccaacucugucaua

SEQ ID NO: 797407 - RNA, 19 nt, Artificial Sequence
  Description of Artificial Sequence: Synthetic oligonucleotide
  Antisense strand to SEQ ID NO: 797406
uaugacagaguugguaccc

SEQ ID NO: 797408 - RNA, 19 nt, Artificial Sequence
  Description of Artificial Sequence: Synthetic oligonucleotide
  Sense strand starting at position 2627 of SEQ ID NO: 587507
gggcauaguuuccucacaa

SEQ ID NO: 797409 - RNA, 19 nt, Artificial Sequence
  Description of Artificial Sequence: Synthetic oligonucleotide
  Antisense strand to SEQ ID NO: 797408
uugugaggaaacuaugccc

SEQ ID NO: 797410 - RNA, 19 nt, Artificial Sequence
  Description of Artificial Sequence: Synthetic oligonucleotide
  Sense strand starting at position 2628 of SEQ ID NO: 587507
ggcauaguuuccucacaau

SEQ ID NO: 797411 - RNA, 19 nt, Artificial Sequence
  Description of Artificial Sequence: Synthetic oligonucleotide
  Antisense strand to SEQ ID NO: 797410
auugugaggaaacuaugcc

SEQ ID NO: 797412 - RNA, 19 nt, Artificial Sequence
  Description of Artificial Sequence: Synthetic oligonucleotide
  Sense strand starting at position 2651 of SEQ ID NO: 587507
gaaugacaauaguuguaau

SEQ ID NO: 797413 - RNA, 19 nt, Artificial Sequence
  Description of Artificial Sequence: Synthetic oligonucleotide
  Antisense strand to SEQ ID NO: 797412
auuacaacuauugucauuc

SEQ ID NO: 797414 - RNA, 19 nt, Artificial Sequence
  Description of Artificial Sequence: Synthetic oligonucleotide
  Sense strand starting at position 2661 of SEQ ID NO: 587507
aguuguaaugaugguuaac

SEQ ID NO: 797415 - RNA, 19 nt, Artificial Sequence
  Description of Artificial Sequence: Synthetic oligonucleotide
  Antisense strand to SEQ ID NO: 797414
guuaaccaucauuacaacu

SEQ ID NO: 797416 - RNA, 19 nt, Artificial Sequence
  Description of Artificial Sequence: Synthetic oligonucleotide
  Sense strand starting at position 2664 of SEQ ID NO: 587507
uguaaugaugguuaacguu

SEQ ID NO: 797417 - RNA, 19 nt, Artificial Sequence
  Description of Artificial Sequence: Synthetic oligonucleotide
  Antisense strand to SEQ ID NO: 797416
aacguuaaccaucauuaca

SEQ ID NO: 797418 - RNA, 19 nt, Artificial Sequence
  Description of Artificial Sequence: Synthetic oligonucleotide
  Sense strand starting at position 2670 of SEQ ID NO: 587507
gaugguuaacguuaauuga

SEQ ID NO: 797419 - RNA, 19 nt, Artificial Sequence
  Description of Artificial Sequence: Synthetic oligonucleotide
  Antisense strand to SEQ ID NO: 797418
ucaauuaacguuaaccauc

SEQ ID NO: 797420 - RNA, 19 nt, Artificial Sequence
  Description of Artificial Sequence: Synthetic oligonucleotide
  Sense strand starting at position 2836 of SEQ ID NO: 587507
aggcuauucuugucagaua

SEQ ID NO: 797421 - RNA, 19 nt, Artificial Sequence
  Description of Artificial Sequence: Synthetic oligonucleotide
  Antisense strand to SEQ ID NO: 797420
uaucugacaagaauagccu

SEQ ID NO: 797422 - RNA, 19 nt, Artificial Sequence
  Description of Artificial Sequence: Synthetic oligonucleotide
  Sense strand starting at position 3036 of SEQ ID NO: 587507
ucauuaagagcuggauagu

SEQ ID NO: 797423 - RNA, 19 nt, Artificial Sequence
  Description of Artificial Sequence: Synthetic oligonucleotide
  Antisense strand to SEQ ID NO: 797422
acuauccagcucuuaauga

SEQ ID NO: 797424 - RNA, 19 nt, Artificial Sequence
  Description of Artificial Sequence: Synthetic oligonucleotide
  Sense strand starting at position 3037 of SEQ ID NO: 587507
cauuaagagcuggauaguu

SEQ ID NO: 797425 - RNA, 19 nt, Artificial Sequence
  Description of Artificial Sequence: Synthetic oligonucleotide
  Antisense strand to SEQ ID NO: 797424
aacuauccagcucuuaaug

SEQ ID NO: 797426 - RNA, 19 nt, Artificial Sequence
  Description of Artificial Sequence: Synthetic oligonucleotide
  Sense strand starting at position 3073 of SEQ ID NO: 587507
auuucuauguaggaagaau

SEQ ID NO: 797427 - RNA, 19 nt, Artificial Sequence
  Description of Artificial Sequence: Synthetic oligonucleotide
  Antisense strand to SEQ ID NO: 797426
auucuuccuacauagaaau

SEQ ID NO: 797428 - RNA, 19 nt, Artificial Sequence
  Description of Artificial Sequence: Synthetic oligonucleotide
  Sense strand starting at position 3302 of SEQ ID NO: 587507
agugaauacuuguuccauu

SEQ ID NO: 797429 - RNA, 19 nt, Artificial Sequence
  Description of Artificial Sequence: Synthetic oligonucleotide
  Antisense strand to SEQ ID NO: 797428
aauggaacaaguauucacu

SEQ ID NO: 797430 - RNA, 19 nt, Artificial Sequence
  Description of Artificial Sequence: Synthetic oligonucleotide
  Sense strand starting at position 3303 of SEQ ID NO: 587507
gugaauacuuguuccauua

SEQ ID NO: 797431 - RNA, 19 nt, Artificial Sequence
  Description of Artificial Sequence: Synthetic oligonucleotide
  Antisense strand to SEQ ID NO: 797430
uaauggaacaaguauucac

SEQ ID NO: 797432 - RNA, 19 nt, Artificial Sequence
  Description of Artificial Sequence: Synthetic oligonucleotide
  Sense strand starting at position 3314 of SEQ ID NO: 587507
uuccauuauuuggaaggaa

SEQ ID NO: 797433 - RNA, 19 nt, Artificial Sequence
  Description of Artificial Sequence: Synthetic oligonucleotide
  Antisense strand to SEQ ID NO: 797432
uuccuuccaaauaauggaa

SEQ ID NO: 797434 - RNA, 19 nt, Artificial Sequence
  Description of Artificial Sequence: Synthetic oligonucleotide
  Sense strand starting at position 3396 of SEQ ID NO: 587507
auuauauagugagcaguga

SEQ ID NO: 797435 - RNA, 19 nt, Artificial Sequence
  Description of Artificial Sequence: Synthetic oligonucleotide
  Antisense strand to SEQ ID NO: 797434
ucacugcucacuauauaau

SEQ ID NO: 797436 - RNA, 19 nt, Artificial Sequence
  Description of Artificial Sequence: Synthetic oligonucleotide
  Sense strand starting at position 3397 of SEQ ID NO: 587507
uuauauagugagcagugau

SEQ ID NO: 797437 - RNA, 19 nt, Artificial Sequence
  Description of Artificial Sequence: Synthetic oligonucleotide
  Antisense strand to SEQ ID NO: 797436
aucacugcucacuauauaa

SEQ ID NO: 797438 - RNA, 19 nt, Artificial Sequence
  Description of Artificial Sequence: Synthetic oligonucleotide
  Sense strand starting at position 3400 of SEQ ID NO: 587507
uauagugagcagugaugaa

SEQ ID NO: 797439 - RNA, 19 nt, Artificial Sequence
  Description of Artificial Sequence: Synthetic oligonucleotide
  Antisense strand to SEQ ID NO: 797438
uucaucacugcucacuaua

SEQ ID NO: 797440 - RNA, 19 nt, Artificial Sequence
  Description of Artificial Sequence: Synthetic oligonucleotide
  Sense strand starting at position 3451 of SEQ ID NO: 587507
uggaauacuuaggcaauca

SEQ ID NO: 797441 - RNA, 19 nt, Artificial Sequence
  Description of Artificial Sequence: Synthetic oligonucleotide
  Antisense strand to SEQ ID NO: 797440
ugauugccuaaguauucca

SEQ ID NO: 797442 - RNA, 19 nt, Artificial Sequence
  Description of Artificial Sequence: Synthetic oligonucleotide
  Sense strand starting at position 3505 of SEQ ID NO: 587507
aucccaaugguacgagauu

SEQ ID NO: 797443 - RNA, 19 nt, Artificial Sequence
  Description of Artificial Sequence: Synthetic oligonucleotide
  Antisense strand to SEQ ID NO: 797442
aaucucguaccauugggau

SEQ ID NO: 797444 - RNA, 19 nt, Artificial Sequence
  Description of Artificial Sequence: Synthetic oligonucleotide
  Sense strand starting at position 3577 of SEQ ID NO: 587507
auuuacuugcugugugaac

SEQ ID NO: 797445 - RNA, 19 nt, Artificial Sequence
  Description of Artificial Sequence: Synthetic oligonucleotide
  Antisense strand to SEQ ID NO: 797444
guucacacagcaaguaaau

SEQ ID NO: 797446 - RNA, 19 nt, Artificial Sequence
  Description of Artificial Sequence: Synthetic oligonucleotide
  Sense strand starting at position 3777 of SEQ ID NO: 587507
acagaauuauagguuggua

SEQ ID NO: 797447 - RNA, 19 nt, Artificial Sequence
  Description of Artificial Sequence: Synthetic oligonucleotide
  Antisense strand to SEQ ID NO: 797446
uaccaaccuauaauucugu

SEQ ID NO: 797448 - RNA, 19 nt, Artificial Sequence
  Description of Artificial Sequence: Synthetic oligonucleotide
  Sense strand starting at position 3779 of SEQ ID NO: 587507
agaauuauagguugguagu

SEQ ID NO: 797449 - RNA, 19 nt, Artificial Sequence
  Description of Artificial Sequence: Synthetic oligonucleotide
  Antisense strand to SEQ ID NO: 797448
acuaccaaccuauaauucu

SEQ ID NO: 797450 - RNA, 19 nt, Artificial Sequence
  Description of Artificial Sequence: Synthetic oligonucleotide
  Sense strand starting at position 3780 of SEQ ID NO: 587507
gaauuauagguugguaguu

SEQ ID NO: 797451 - RNA, 19 nt, Artificial Sequence
  Description of Artificial Sequence: Synthetic oligonucleotide
  Antisense strand to SEQ ID NO: 797450
aacuaccaaccuauaauuc

SEQ ID NO: 797452 - RNA, 19 nt, Artificial Sequence
  Description of Artificial Sequence: Synthetic oligonucleotide
  Sense strand starting at position 3849 of SEQ ID NO: 587507
ugagaaguuggaugucauu

SEQ ID NO: 797453 - RNA, 19 nt, Artificial Sequence
  Description of Artificial Sequence: Synthetic oligonucleotide
  Antisense strand to SEQ ID NO: 797452
aaugacauccaacuucuca

SEQ ID NO: 797454 - RNA, 19 nt, Artificial Sequence
  Description of Artificial Sequence: Synthetic oligonucleotide
  Sense strand starting at position 3888 of SEQ ID NO: 587507
agguaagcuccucaucauu

SEQ ID NO: 797455 - RNA, 19 nt, Artificial Sequence
  Description of Artificial Sequence: Synthetic oligonucleotide
  Antisense strand to SEQ ID NO: 797454
aaugaugaggagcuuaccu

SEQ ID NO: 797456 - RNA, 19 nt, Artificial Sequence
  Description of Artificial Sequence: Synthetic oligonucleotide
  Sense strand starting at position 46 of SEQ ID NO: 587508
ugcaauaacuuauugguuu

SEQ ID NO: 797457 - RNA, 19 nt, Artificial Sequence
  Description of Artificial Sequence: Synthetic oligonucleotide
  Antisense strand to SEQ ID NO: 797456
aaaccaauaaguuauugca

SEQ ID NO: 797458 - RNA, 19 nt, Artificial Sequence
  Description of Artificial Sequence: Synthetic oligonucleotide
  Sense strand starting at position 52 of SEQ ID NO: 587508
aacuuauugguuuggcaaa

SEQ ID NO: 797459 - RNA, 19 nt, Artificial Sequence
  Description of Artificial Sequence: Synthetic oligonucleotide
  Antisense strand to SEQ ID NO: 797458
uuugccaaaccaauaaguu

SEQ ID NO: 797460 - RNA, 19 nt, Artificial Sequence
  Description of Artificial Sequence: Synthetic oligonucleotide
  Sense strand starting at position 53 of SEQ ID NO: 587508
acuuauugguuuggcaaau

SEQ ID NO: 797461 - RNA, 19 nt, Artificial Sequence
  Description of Artificial Sequence: Synthetic oligonucleotide
  Antisense strand to SEQ ID NO: 797460
auuugccaaaccaauaagu

SEQ ID NO: 797462 - RNA, 19 nt, Artificial Sequence
  Description of Artificial Sequence: Synthetic oligonucleotide
  Sense strand starting at position 54 of SEQ ID NO: 587508
cuuauugguuuggcaaaua

SEQ ID NO: 797463 - RNA, 19 nt, Artificial Sequence
  Description of Artificial Sequence: Synthetic oligonucleotide
  Antisense strand to SEQ ID NO: 797462
uauuugccaaaccaauaag

SEQ ID NO: 797464 - RNA, 19 nt, Artificial Sequence
  Description of Artificial Sequence: Synthetic oligonucleotide
  Sense strand starting at position 79 of SEQ ID NO: 587508
uccagcaaguuugguuaga

SEQ ID NO: 797465 - RNA, 19 nt, Artificial Sequence
  Description of Artificial Sequence: Synthetic oligonucleotide
  Antisense strand to SEQ ID NO: 797464
ucuaaccaaacuugcugga

SEQ ID NO: 797466 - RNA, 19 nt, Artificial Sequence
  Description of Artificial Sequence: Synthetic oligonucleotide
  Sense strand starting at position 81 of SEQ ID NO: 587508
cagcaaguuugguuagaga

SEQ ID NO: 797467 - RNA, 19 nt, Artificial Sequence
  Description of Artificial Sequence: Synthetic oligonucleotide
  Antisense strand to SEQ ID NO: 797466
ucucuaaccaaacuugcug

SEQ ID NO: 797468 - RNA, 19 nt, Artificial Sequence
  Description of Artificial Sequence: Synthetic oligonucleotide
  Sense strand starting at position 84 of SEQ ID NO: 587508
caaguuugguuagagaaua

SEQ ID NO: 797469 - RNA, 19 nt, Artificial Sequence
  Description of Artificial Sequence: Synthetic oligonucleotide
  Antisense strand to SEQ ID NO: 797468
uauucucuaaccaaacuug

SEQ ID NO: 797470 - RNA, 19 nt, Artificial Sequence
  Description of Artificial Sequence: Synthetic oligonucleotide
  Sense strand starting at position 120 of SEQ ID NO: 587508
accugaggucaccaacuuu

SEQ ID NO: 797471 - RNA, 19 nt, Artificial Sequence
  Description of Artificial Sequence: Synthetic oligonucleotide
  Antisense strand to SEQ ID NO: 797470
aaaguuggugaccucaggu

SEQ ID NO: 797472 - RNA, 19 nt, Artificial Sequence
  Description of Artificial Sequence: Synthetic oligonucleotide
  Sense strand starting at position 155 of SEQ ID NO: 587508
guuaaagaauuauggguuu

SEQ ID NO: 797473 - RNA, 19 nt, Artificial Sequence
  Description of Artificial Sequence: Synthetic oligonucleotide
  Antisense strand to SEQ ID NO: 797472
aaacccauaauucuuuaac

SEQ ID NO: 797474 - RNA, 19 nt, Artificial Sequence
  Description of Artificial Sequence: Synthetic oligonucleotide
  Sense strand starting at position 352 of SEQ ID NO: 587508
gguaguaacuugcagacuu

SEQ ID NO: 797475 - RNA, 19 nt, Artificial Sequence
  Description of Artificial Sequence: Synthetic oligonucleotide
  Antisense strand to SEQ ID NO: 797474
aagucugcaaguuacuacc

SEQ ID NO: 797476 - RNA, 19 nt, Artificial Sequence
  Description of Artificial Sequence: Synthetic oligonucleotide
  Sense strand starting at position 442 of SEQ ID NO: 587508
cugauauagugccugaguu

SEQ ID NO: 797477 - RNA, 19 nt, Artificial Sequence
  Description of Artificial Sequence: Synthetic oligonucleotide
  Antisense strand to SEQ ID NO: 797476
aacucaggcacuauaucag

SEQ ID NO: 797478 - RNA, 19 nt, Artificial Sequence
  Description of Artificial Sequence: Synthetic oligonucleotide
  Sense strand starting at position 443 of SEQ ID NO: 587508
ugauauagugccugaguug

SEQ ID NO: 797479 - RNA, 19 nt, Artificial Sequence
  Description of Artificial Sequence: Synthetic oligonucleotide
  Antisense strand to SEQ ID NO: 797478
caacucaggcacuauauca

SEQ ID NO: 797480 - RNA, 19 nt, Artificial Sequence
  Description of Artificial Sequence: Synthetic oligonucleotide
  Sense strand starting at position 448 of SEQ ID NO: 587508
uagugccugaguuggauua

SEQ ID NO: 797481 - RNA, 19 nt, Artificial Sequence
  Description of Artificial Sequence: Synthetic oligonucleotide
  Antisense strand to SEQ ID NO: 797480
uaauccaacucaggcacua

SEQ ID NO: 797482 - RNA, 19 nt, Artificial Sequence
  Description of Artificial Sequence: Synthetic oligonucleotide
  Sense strand starting at position 450 of SEQ ID NO: 587508
gugccugaguuggauuacu

SEQ ID NO: 797483 - RNA, 19 nt, Artificial Sequence
  Description of Artificial Sequence: Synthetic oligonucleotide
  Antisense strand to SEQ ID NO: 797482
aguaauccaacucaggcac

SEQ ID NO: 797484 - RNA, 19 nt, Artificial Sequence
  Description of Artificial Sequence: Synthetic oligonucleotide
  Sense strand starting at position 455 of SEQ ID NO: 587508
ugaguuggauuacuagaac

SEQ ID NO: 797485 - RNA, 19 nt, Artificial Sequence
  Description of Artificial Sequence: Synthetic oligonucleotide
  Antisense strand to SEQ ID NO: 797484
guucuaguaauccaacuca

SEQ ID NO: 797486 - RNA, 19 nt, Artificial Sequence
  Description of Artificial Sequence: Synthetic oligonucleotide
  Sense strand starting at position 521 of SEQ ID NO: 587508
ggaauuagcugcucuugga

SEQ ID NO: 797487 - RNA, 19 nt, Artificial Sequence
  Description of Artificial Sequence: Synthetic oligonucleotide
  Antisense strand to SEQ ID NO: 797486
uccaagagcagcuaauucc

SEQ ID NO: 797488 - RNA, 19 nt, Artificial Sequence
  Description of Artificial Sequence: Synthetic oligonucleotide
  Sense strand starting at position 547 of SEQ ID NO: 587508
ucuggcugguuguugaaau

SEQ ID NO: 797489 - RNA, 19 nt, Artificial Sequence
  Description of Artificial Sequence: Synthetic oligonucleotide
  Antisense strand to SEQ ID NO: 797488
auuucaacaaccagccaga

SEQ ID NO: 797490 - RNA, 19 nt, Artificial Sequence
  Description of Artificial Sequence: Synthetic oligonucleotide
  Sense strand starting at position 561 of SEQ ID NO: 587508
gaaauugagccuggauccu

SEQ ID NO: 797491 - RNA, 19 nt, Artificial Sequence
  Description of Artificial Sequence: Synthetic oligonucleotide
  Antisense strand to SEQ ID NO: 797490
aggauccaggcucaauuuc

SEQ ID NO: 797492 - RNA, 19 nt, Artificial Sequence
  Description of Artificial Sequence: Synthetic oligonucleotide
  Sense strand starting at position 1254 of SEQ ID NO: 587508
uggccaguuucagguagaa

SEQ ID NO: 797493 - RNA, 19 nt, Artificial Sequence
  Description of Artificial Sequence: Synthetic oligonucleotide
  Antisense strand to SEQ ID NO: 797492
uucuaccugaaacuggcca

SEQ ID NO: 797494 - RNA, 19 nt, Artificial Sequence
  Description of Artificial Sequence: Synthetic oligonucleotide
  Sense strand starting at position 1539 of SEQ ID NO: 587508
ccgucagucccgguaacuu

SEQ ID NO: 797495 - RNA, 19 nt, Artificial Sequence
  Description of Artificial Sequence: Synthetic oligonucleotide
  Antisense strand to SEQ ID NO: 797494
aaguuaccgggacugacgg

SEQ ID NO: 797496 - RNA, 19 nt, Artificial Sequence
  Description of Artificial Sequence: Synthetic oligonucleotide
  Sense strand starting at position 1707 of SEQ ID NO: 587508
gucuuacuuugacuuaaag

SEQ ID NO: 797497 - RNA, 19 nt, Artificial Sequence
  Description of Artificial Sequence: Synthetic oligonucleotide
  Antisense strand to SEQ ID NO: 797496
cuuuaagucaaaguaagac

SEQ ID NO: 797498 - RNA, 19 nt, Artificial Sequence
  Description of Artificial Sequence: Synthetic oligonucleotide
  Sense strand starting at position 1762 of SEQ ID NO: 587508
ugggcaauuucggugaagu

SEQ ID NO: 797499 - RNA, 19 nt, Artificial Sequence
  Description of Artificial Sequence: Synthetic oligonucleotide
  Antisense strand to SEQ ID NO: 797498
acuucaccgaaauugccca

SEQ ID NO: 797500 - RNA, 19 nt, Artificial Sequence
  Description of Artificial Sequence: Synthetic oligonucleotide
  Sense strand starting at position 1763 of SEQ ID NO: 587508
gggcaauuucggugaagug

SEQ ID NO: 797501 - RNA, 19 nt, Artificial Sequence
  Description of Artificial Sequence: Synthetic oligonucleotide
  Antisense strand to SEQ ID NO: 797500
cacuucaccgaaauugccc

SEQ ID NO: 797502 - RNA, 19 nt, Artificial Sequence
  Description of Artificial Sequence: Synthetic oligonucleotide
  Sense strand starting at position 2271 of SEQ ID NO: 587508
cagggucagcuuuauuaau

SEQ ID NO: 797503 - RNA, 19 nt, Artificial Sequence
  Description of Artificial Sequence: Synthetic oligonucleotide
  Antisense strand to SEQ ID NO: 797502
auuaauaaagcugacccug

SEQ ID NO: 797504 - RNA, 19 nt, Artificial Sequence
  Description of Artificial Sequence: Synthetic oligonucleotide
  Sense strand starting at position 2273 of SEQ ID NO: 587508
gggucagcuuuauuaauga

SEQ ID NO: 797505 - RNA, 19 nt, Artificial Sequence
  Description of Artificial Sequence: Synthetic oligonucleotide
  Antisense strand to SEQ ID NO: 797504
ucauuaauaaagcugaccc

SEQ ID NO: 797506 - RNA, 19 nt, Artificial Sequence
  Description of Artificial Sequence: Synthetic oligonucleotide
  Sense strand starting at position 2386 of SEQ ID NO: 587508
gggcucaacucucgaucuu

SEQ ID NO: 797507 - RNA, 19 nt, Artificial Sequence
  Description of Artificial Sequence: Synthetic oligonucleotide
  Antisense strand to SEQ ID NO: 797506
aagaucgagaguugagccc

SEQ ID NO: 797508 - RNA, 19 nt, Artificial Sequence
  Description of Artificial Sequence: Synthetic oligonucleotide
  Sense strand starting at position 2481 of SEQ ID NO: 587508
cccggauuccuuggagguu

SEQ ID NO: 797509 - RNA, 19 nt, Artificial Sequence
  Description of Artificial Sequence: Synthetic oligonucleotide
  Antisense strand to SEQ ID NO: 797508
aaccuccaaggaauccggg

SEQ ID NO: 797510 - RNA, 19 nt, Artificial Sequence
  Description of Artificial Sequence: Synthetic oligonucleotide
  Sense strand starting at position 2808 of SEQ ID NO: 587508
gggaaugugucaggccuga

SEQ ID NO: 797511 - RNA, 19 nt, Artificial Sequence
  Description of Artificial Sequence: Synthetic oligonucleotide
  Antisense strand to SEQ ID NO: 797510
ucaggccugacacauuccc

SEQ ID NO: 797512 - RNA, 19 nt, Artificial Sequence
  Description of Artificial Sequence: Synthetic oligonucleotide
  Sense strand starting at position 2925 of SEQ ID NO: 587508
ggcccuauuaccgcguaaa

SEQ ID NO: 797513 - RNA, 19 nt, Artificial Sequence
  Description of Artificial Sequence: Synthetic oligonucleotide
  Antisense strand to SEQ ID NO: 797512
uuuacgcgguaauagggcc

SEQ ID NO: 797514 - RNA, 19 nt, Artificial Sequence
  Description of Artificial Sequence: Synthetic oligonucleotide
  Sense strand starting at position 3001 of SEQ ID NO: 587508
cacgcuuucgguuaaacuu

SEQ ID NO: 797515 - RNA, 19 nt, Artificial Sequence
  Description of Artificial Sequence: Synthetic oligonucleotide
  Antisense strand to SEQ ID NO: 797514
aaguuuaaccgaaagcgug

SEQ ID NO: 797516 - RNA, 19 nt, Artificial Sequence
  Description of Artificial Sequence: Synthetic oligonucleotide
  Sense strand starting at position 3060 of SEQ ID NO: 587508
cuucucaagccagauuaga

SEQ ID NO: 797517 - RNA, 19 nt, Artificial Sequence
  Description of Artificial Sequence: Synthetic oligonucleotide
  Antisense strand to SEQ ID NO: 797516
ucuaaucuggcuugagaag

SEQ ID NO: 797518 - RNA, 19 nt, Artificial Sequence
  Description of Artificial Sequence: Synthetic oligonucleotide
  Sense strand starting at position 3153 of SEQ ID NO: 587508
ccgcuuccguaguaggaaa

SEQ ID NO: 797519 - RNA, 19 nt, Artificial Sequence
  Description of Artificial Sequence: Synthetic oligonucleotide
  Antisense strand to SEQ ID NO: 797518
uuuccuacuacggaagcgg

SEQ ID NO: 797520 - RNA, 19 nt, Artificial Sequence
  Description of Artificial Sequence: Synthetic oligonucleotide
  Sense strand starting at position 3167 of SEQ ID NO: 587508
ggaaaucaaucguggauuc

SEQ ID NO: 797521 - RNA, 19 nt, Artificial Sequence
  Description of Artificial Sequence: Synthetic oligonucleotide
  Antisense strand to SEQ ID NO: 797520
gaauccacgauugauuucc

SEQ ID NO: 797522 - RNA, 19 nt, Artificial Sequence
  Description of Artificial Sequence: Synthetic oligonucleotide
  Sense strand starting at position 3329 of SEQ ID NO: 587508
ggaauucucuucccugaau

SEQ ID NO: 797523 - RNA, 19 nt, Artificial Sequence
  Description of Artificial Sequence: Synthetic oligonucleotide
  Antisense strand to SEQ ID NO: 797522
auucagggaagagaauucc

SEQ ID NO: 797524 - RNA, 19 nt, Artificial Sequence
  Description of Artificial Sequence: Synthetic oligonucleotide
  Sense strand starting at position 3506 of SEQ ID NO: 587508
uaggguuucuucuccgacu

SEQ ID NO: 797525 - RNA, 19 nt, Artificial Sequence
  Description of Artificial Sequence: Synthetic oligonucleotide
  Antisense strand to SEQ ID NO: 797524
agucggagaagaaacccua

SEQ ID NO: 797526 - RNA, 19 nt, Artificial Sequence
  Description of Artificial Sequence: Synthetic oligonucleotide
  Sense strand starting at position 3507 of SEQ ID NO: 587508
aggguuucuucuccgacuu

SEQ ID NO: 797527 - RNA, 19 nt, Artificial Sequence
  Description of Artificial Sequence: Synthetic oligonucleotide
  Antisense strand to SEQ ID NO: 797526
aagucggagaagaaacccu

SEQ ID NO: 797528 - RNA, 19 nt, Artificial Sequence
  Description of Artificial Sequence: Synthetic oligonucleotide
  Sense strand starting at position 3539 of SEQ ID NO: 587508
gccugcuacuuagcagaau

SEQ ID NO: 797529 - RNA, 19 nt, Artificial Sequence
  Description of Artificial Sequence: Synthetic oligonucleotide
  Antisense strand to SEQ ID NO: 797528
auucugcuaaguagcaggc

SEQ ID NO: 797530 - RNA, 19 nt, Artificial Sequence
  Description of Artificial Sequence: Synthetic oligonucleotide
  Sense strand starting at position 3540 of SEQ ID NO: 587508
ccugcuacuuagcagaauu

SEQ ID NO: 797531 - RNA, 19 nt, Artificial Sequence
  Description of Artificial Sequence: Synthetic oligonucleotide
  Antisense strand to SEQ ID NO: 797530
aauucugcuaaguagcagg

SEQ ID NO: 797532 - RNA, 19 nt, Artificial Sequence
  Description of Artificial Sequence: Synthetic oligonucleotide
  Sense strand starting at position 3570 of SEQ ID NO: 587508
cccgaaacgugggaacuua

SEQ ID NO: 797533 - RNA, 19 nt, Artificial Sequence
  Description of Artificial Sequence: Synthetic oligonucleotide
  Antisense strand to SEQ ID NO: 797532
uaaguucccacguuucggg

SEQ ID NO: 797534 - RNA, 19 nt, Artificial Sequence
  Description of Artificial Sequence: Synthetic oligonucleotide
  Sense strand starting at position 3708 of SEQ ID NO: 587508
guuugaaaccggcaaucau

SEQ ID NO: 797535 - RNA, 19 nt, Artificial Sequence
  Description of Artificial Sequence: Synthetic oligonucleotide
  Antisense strand to SEQ ID NO: 797534
augauugccgguuucaaac

SEQ ID NO: 797536 - RNA, 19 nt, Artificial Sequence
  Description of Artificial Sequence: Synthetic oligonucleotide
  Sense strand starting at position 72 of SEQ ID NO: 587509
aucaauguccauugugauc

SEQ ID NO: 797537 - RNA, 19 nt, Artificial Sequence
  Description of Artificial Sequence: Synthetic oligonucleotide
  Antisense strand to SEQ ID NO: 797536
gaucacaauggacauugau

SEQ ID NO: 797538 - RNA, 19 nt, Artificial Sequence
  Description of Artificial Sequence: Synthetic oligonucleotide
  Sense strand starting at position 154 of SEQ ID NO: 587509
caagcaagacaauguguaa

SEQ ID NO: 797539 - RNA, 19 nt, Artificial Sequence
  Description of Artificial Sequence: Synthetic oligonucleotide
  Antisense strand to SEQ ID NO: 797538
uuacacauugucuugcuug

SEQ ID NO: 797540 - RNA, 19 nt, Artificial Sequence
  Description of Artificial Sequence: Synthetic oligonucleotide
  Sense strand starting at position 188 of SEQ ID NO: 587509
ggagacagucaguguagua

SEQ ID NO: 797541 - RNA, 19 nt, Artificial Sequence
  Description of Artificial Sequence: Synthetic oligonucleotide
  Antisense strand to SEQ ID NO: 797540
uacuacacugacugucucc

SEQ ID NO: 797542 - RNA, 19 nt, Artificial Sequence
  Description of Artificial Sequence: Synthetic oligonucleotide
  Sense strand starting at position 204 of SEQ ID NO: 587509
guaugaaggcuuuggagac

SEQ ID NO: 797543 - RNA, 19 nt, Artificial Sequence
  Description of Artificial Sequence: Synthetic oligonucleotide
  Antisense strand to SEQ ID NO: 797542
gucuccaaagccuucauac

SEQ ID NO: 797544 - RNA, 19 nt, Artificial Sequence
  Description of Artificial Sequence: Synthetic oligonucleotide
  Sense strand starting at position 267 of SEQ ID NO: 587509
guugcuuucuccucauuua

SEQ ID NO: 797545 - RNA, 19 nt, Artificial Sequence
  Description of Artificial Sequence: Synthetic oligonucleotide
  Antisense strand to SEQ ID NO: 797544
uaaaugaggagaaagcaac

SEQ ID NO: 797546 - RNA, 19 nt, Artificial Sequence
  Description of Artificial Sequence: Synthetic oligonucleotide
  Sense strand starting at position 279 of SEQ ID NO: 587509
ucauuuacauaaugggaau

SEQ ID NO: 797547 - RNA, 19 nt, Artificial Sequence
  Description of Artificial Sequence: Synthetic oligonucleotide
  Antisense strand to SEQ ID NO: 797546
auucccauuauguaaauga

SEQ ID NO: 797548 - RNA, 19 nt, Artificial Sequence
  Description of Artificial Sequence: Synthetic oligonucleotide
  Sense strand starting at position 292 of SEQ ID NO: 587509
gggaauaacuugucuacca

SEQ ID NO: 797549 - RNA, 19 nt, Artificial Sequence
  Description of Artificial Sequence: Synthetic oligonucleotide
  Antisense strand to SEQ ID NO: 797548
ugguagacaaguuauuccc

SEQ ID NO: 797550 - RNA, 19 nt, Artificial Sequence
  Description of Artificial Sequence: Synthetic oligonucleotide
  Sense strand starting at position 293 of SEQ ID NO: 587509
ggaauaacuugucuaccau

SEQ ID NO: 797551 - RNA, 19 nt, Artificial Sequence
  Description of Artificial Sequence: Synthetic oligonucleotide
  Antisense strand to SEQ ID NO: 797550
augguagacaaguuauucc

SEQ ID NO: 797552 - RNA, 19 nt, Artificial Sequence
  Description of Artificial Sequence: Synthetic oligonucleotide
  Sense strand starting at position 571 of SEQ ID NO: 587509
agaugaaaucgucacagug

SEQ ID NO: 797553 - RNA, 19 nt, Artificial Sequence
  Description of Artificial Sequence: Synthetic oligonucleotide
  Antisense strand to SEQ ID NO: 797552
cacugugacgauuucaucu

SEQ ID NO: 797554 - RNA, 19 nt, Artificial Sequence
  Description of Artificial Sequence: Synthetic oligonucleotide
  Sense strand starting at position 759 of SEQ ID NO: 587509
uuugauauuugugugcuua

SEQ ID NO: 797555 - RNA, 19 nt, Artificial Sequence
  Description of Artificial Sequence: Synthetic oligonucleotide
  Antisense strand to SEQ ID NO: 797554
uaagcacacaaauaucaaa

SEQ ID NO: 797556 - RNA, 19 nt, Artificial Sequence
  Description of Artificial Sequence: Synthetic oligonucleotide
  Sense strand starting at position 760 of SEQ ID NO: 587509
uugauauuugugugcuuau

SEQ ID NO: 797557 - RNA, 19 nt, Artificial Sequence
  Description of Artificial Sequence: Synthetic oligonucleotide
  Antisense strand to SEQ ID NO: 797556
auaagcacacaaauaucaa

SEQ ID NO: 797558 - RNA, 19 nt, Artificial Sequence
  Description of Artificial Sequence: Synthetic oligonucleotide
  Sense strand starting at position 761 of SEQ ID NO: 587509
ugauauuugugugcuuaug

SEQ ID NO: 797559 - RNA, 19 nt, Artificial Sequence
  Description of Artificial Sequence: Synthetic oligonucleotide
  Antisense strand to SEQ ID NO: 797558
cauaagcacacaaauauca

SEQ ID NO: 797560 - RNA, 19 nt, Artificial Sequence
  Description of Artificial Sequence: Synthetic oligonucleotide
  Sense strand starting at position 763 of SEQ ID NO: 587509
auauuugugugcuuaugga

SEQ ID NO: 797561 - RNA, 19 nt, Artificial Sequence
  Description of Artificial Sequence: Synthetic oligonucleotide
  Antisense strand to SEQ ID NO: 797560
uccauaagcacacaaauau

SEQ ID NO: 797562 - RNA, 19 nt, Artificial Sequence
  Description of Artificial Sequence: Synthetic oligonucleotide
  Sense strand starting at position 863 of SEQ ID NO: 587509
acacauaguuguguugaaa

SEQ ID NO: 797563 - RNA, 19 nt, Artificial Sequence
  Description of Artificial Sequence: Synthetic oligonucleotide
  Antisense strand to SEQ ID NO: 797562
uuucaacacaacuaugugu

SEQ ID NO: 797564 - RNA, 19 nt, Artificial Sequence
  Description of Artificial Sequence: Synthetic oligonucleotide
  Sense strand starting at position 866 of SEQ ID NO: 587509
cauaguuguguugaaagua

SEQ ID NO: 797565 - RNA, 19 nt, Artificial Sequence
  Description of Artificial Sequence: Synthetic oligonucleotide
  Antisense strand to SEQ ID NO: 797564
uacuuucaacacaacuaug

SEQ ID NO: 797566 - RNA, 19 nt, Artificial Sequence
  Description of Artificial Sequence: Synthetic oligonucleotide
  Sense strand starting at position 1278 of SEQ ID NO: 587509
ucaacaaauuaagagaaga

SEQ ID NO: 797567 - RNA, 19 nt, Artificial Sequence
  Description of Artificial Sequence: Synthetic oligonucleotide
  Antisense strand to SEQ ID NO: 797566
ucuucucuuaauuuguuga

SEQ ID NO: 797568 - RNA, 19 nt, Artificial Sequence
  Description of Artificial Sequence: Synthetic oligonucleotide
  Sense strand starting at position 1373 of SEQ ID NO: 587509
uguccuaaaccugauuaug

SEQ ID NO: 797569 - RNA, 19 nt, Artificial Sequence
  Description of Artificial Sequence: Synthetic oligonucleotide
  Antisense strand to SEQ ID NO: 797568
cauaaucagguuuaggaca

SEQ ID NO: 797570 - RNA, 19 nt, Artificial Sequence
  Description of Artificial Sequence: Synthetic oligonucleotide
  Sense strand starting at position 1428 of SEQ ID NO: 587509
ucagcucuugcugaagaca

SEQ ID NO: 797571 - RNA, 19 nt, Artificial Sequence
  Description of Artificial Sequence: Synthetic oligonucleotide
  Antisense strand to SEQ ID NO: 797570
ugucuucagcaagagcuga

SEQ ID NO: 797572 - RNA, 19 nt, Artificial Sequence
  Description of Artificial Sequence: Synthetic oligonucleotide
  Sense strand starting at position 2196 of SEQ ID NO: 587509
auaugagacccugguuaug

SEQ ID NO: 797573 - RNA, 19 nt, Artificial Sequence
  Description of Artificial Sequence: Synthetic oligonucleotide
  Antisense strand to SEQ ID NO: 797572
cauaaccagggucucauau

SEQ ID NO: 797574 - RNA, 19 nt, Artificial Sequence
  Description of Artificial Sequence: Synthetic oligonucleotide
  Sense strand starting at position 2198 of SEQ ID NO: 587509
augagacccugguuaugaa

SEQ ID NO: 797575 - RNA, 19 nt, Artificial Sequence
  Description of Artificial Sequence: Synthetic oligonucleotide
  Antisense strand to SEQ ID NO: 797574
uucauaaccagggucucau

SEQ ID NO: 797576 - RNA, 19 nt, Artificial Sequence
  Description of Artificial Sequence: Synthetic oligonucleotide
  Sense strand starting at position 2206 of SEQ ID NO: 587509
cugguuaugaagggcagua

SEQ ID NO: 797577 - RNA, 19 nt, Artificial Sequence
  Description of Artificial Sequence: Synthetic oligonucleotide
  Antisense strand to SEQ ID NO: 797576
uacugcccuucauaaccag

SEQ ID NO: 797578 - RNA, 19 nt, Artificial Sequence
  Description of Artificial Sequence: Synthetic oligonucleotide
  Sense strand starting at position 2435 of SEQ ID NO: 587509
gacuaacugcuguagauua

SEQ ID NO: 797579 - RNA, 19 nt, Artificial Sequence
  Description of Artificial Sequence: Synthetic oligonucleotide
  Antisense strand to SEQ ID NO: 797578
uaaucuacagcaguuaguc

SEQ ID NO: 797580 - RNA, 19 nt, Artificial Sequence
  Description of Artificial Sequence: Synthetic oligonucleotide
  Sense strand starting at position 2437 of SEQ ID NO: 587509
cuaacugcuguagauuaga

SEQ ID NO: 797581 - RNA, 19 nt, Artificial Sequence
  Description of Artificial Sequence: Synthetic oligonucleotide
  Antisense strand to SEQ ID NO: 797580
ucuaaucuacagcaguuag

SEQ ID NO: 797582 - RNA, 19 nt, Artificial Sequence
  Description of Artificial Sequence: Synthetic oligonucleotide
  Sense strand starting at position 2450 of SEQ ID NO: 587509
auuagagaauagucuugua

SEQ ID NO: 797583 - RNA, 19 nt, Artificial Sequence
  Description of Artificial Sequence: Synthetic oligonucleotide
  Antisense strand to SEQ ID NO: 797582
uacaagacuauucucuaau

SEQ ID NO: 797584 - RNA, 19 nt, Artificial Sequence
  Description of Artificial Sequence: Synthetic oligonucleotide
  Sense strand starting at position 2805 of SEQ ID NO: 587509
cuguuauaaccauagucag

SEQ ID NO: 797585 - RNA, 19 nt, Artificial Sequence
  Description of Artificial Sequence: Synthetic oligonucleotide
  Antisense strand to SEQ ID NO: 797584
cugacuaugguuauaacag

SEQ ID NO: 797586 - RNA, 19 nt, Artificial Sequence
  Description of Artificial Sequence: Synthetic oligonucleotide
  Sense strand starting at position 3011 of SEQ ID NO: 587509
ugguaauauaaagaugugu

SEQ ID NO: 797587 - RNA, 19 nt, Artificial Sequence
  Description of Artificial Sequence: Synthetic oligonucleotide
  Antisense strand to SEQ ID NO: 797586
acacaucuuuauauuacca

SEQ ID NO: 797588 - RNA, 19 nt, Artificial Sequence
  Description of Artificial Sequence: Synthetic oligonucleotide
  Sense strand starting at position 3013 of SEQ ID NO: 587509
guaauauaaagauguguga

SEQ ID NO: 797589 - RNA, 19 nt, Artificial Sequence
  Description of Artificial Sequence: Synthetic oligonucleotide
  Antisense strand to SEQ ID NO: 797588
ucacacaucuuuauauuac

SEQ ID NO: 797590 - RNA, 19 nt, Artificial Sequence
  Description of Artificial Sequence: Synthetic oligonucleotide
  Sense strand starting at position 3017 of SEQ ID NO: 587509
uauaaagaugugugaaauc

SEQ ID NO: 797591 - RNA, 19 nt, Artificial Sequence
  Description of Artificial Sequence: Synthetic oligonucleotide
  Antisense strand to SEQ ID NO: 797590
gauuucacacaucuuuaua

SEQ ID NO: 797592 - RNA, 19 nt, Artificial Sequence
  Description of Artificial Sequence: Synthetic oligonucleotide
  Sense strand starting at position 3111 of SEQ ID NO: 587509
cugucuuagggugaacaca

SEQ ID NO: 797593 - RNA, 19 nt, Artificial Sequence
  Description of Artificial Sequence: Synthetic oligonucleotide
  Antisense strand to SEQ ID NO: 797592
uguguucacccuaagacag

SEQ ID NO: 797594 - RNA, 19 nt, Artificial Sequence
  Description of Artificial Sequence: Synthetic oligonucleotide
  Sense strand starting at position 3236 of SEQ ID NO: 587509
uguuacucucuguaauucu

SEQ ID NO: 797595 - RNA, 19 nt, Artificial Sequence
  Description of Artificial Sequence: Synthetic oligonucleotide
  Antisense strand to SEQ ID NO: 797594
agaauuacagagaguaaca

SEQ ID NO: 797596 - RNA, 19 nt, Artificial Sequence
  Description of Artificial Sequence: Synthetic oligonucleotide
  Sense strand starting at position 3499 of SEQ ID NO: 587509
cccagauggcugugggaau

SEQ ID NO: 797597 - RNA, 19 nt, Artificial Sequence
  Description of Artificial Sequence: Synthetic oligonucleotide
  Antisense strand to SEQ ID NO: 797596
auucccacagccaucuggg

SEQ ID NO: 797598 - RNA, 19 nt, Artificial Sequence
  Description of Artificial Sequence: Synthetic oligonucleotide
  Sense strand starting at position 3544 of SEQ ID NO: 587509
uaggguauugccuggaaug

SEQ ID NO: 797599 - RNA, 19 nt, Artificial Sequence
  Description of Artificial Sequence: Synthetic oligonucleotide
  Antisense strand to SEQ ID NO: 797598
cauuccaggcaauacccua

SEQ ID NO: 797600 - RNA, 19 nt, Artificial Sequence
  Description of Artificial Sequence: Synthetic oligonucleotide
  Sense strand starting at position 3546 of SEQ ID NO: 587509
ggguauugccuggaaugua

SEQ ID NO: 797601 - RNA, 19 nt, Artificial Sequence
  Description of Artificial Sequence: Synthetic oligonucleotide
  Antisense strand to SEQ ID NO: 797600
uacauuccaggcaauaccc

SEQ ID NO: 797602 - RNA, 19 nt, Artificial Sequence
  Description of Artificial Sequence: Synthetic oligonucleotide
  Sense strand starting at position 3554 of SEQ ID NO: 587509
ccuggaauguagccauuga

SEQ ID NO: 797603 - RNA, 19 nt, Artificial Sequence
  Description of Artificial Sequence: Synthetic oligonucleotide
  Antisense strand to SEQ ID NO: 797602
ucaauggcuacauuccagg

SEQ ID NO: 797604 - RNA, 19 nt, Artificial Sequence
  Description of Artificial Sequence: Synthetic oligonucleotide
  Sense strand starting at position 3555 of SEQ ID NO: 587509
cuggaauguagccauugau

SEQ ID NO: 797605 - RNA, 19 nt, Artificial Sequence
  Description of Artificial Sequence: Synthetic oligonucleotide
  Antisense strand to SEQ ID NO: 797604
aucaauggcuacauuccag

SEQ ID NO: 797606 - RNA, 19 nt, Artificial Sequence
  Description of Artificial Sequence: Synthetic oligonucleotide
  Sense strand starting at position 3558 of SEQ ID NO: 587509
gaauguagccauugauaaa

SEQ ID NO: 797607 - RNA, 19 nt, Artificial Sequence
  Description of Artificial Sequence: Synthetic oligonucleotide
  Antisense strand to SEQ ID NO: 797606
uuuaucaauggcuacauuc

SEQ ID NO: 797608 - RNA, 19 nt, Artificial Sequence
  Description of Artificial Sequence: Synthetic oligonucleotide
  Sense strand starting at position 3602 of SEQ ID NO: 587509
ugacauuaggagggcauua

SEQ ID NO: 797609 - RNA, 19 nt, Artificial Sequence
  Description of Artificial Sequence: Synthetic oligonucleotide
  Antisense strand to SEQ ID NO: 797608
uaaugcccuccuaauguca

SEQ ID NO: 797610 - RNA, 19 nt, Artificial Sequence
  Description of Artificial Sequence: Synthetic oligonucleotide
  Sense strand starting at position 3612 of SEQ ID NO: 587509
agggcauuauauuacauuu

SEQ ID NO: 797611 - RNA, 19 nt, Artificial Sequence
  Description of Artificial Sequence: Synthetic oligonucleotide
  Antisense strand to SEQ ID NO: 797610
aaauguaauauaaugcccu

SEQ ID NO: 797612 - RNA, 19 nt, Artificial Sequence
  Description of Artificial Sequence: Synthetic oligonucleotide
  Sense strand starting at position 3965 of SEQ ID NO: 587509
uuacuugguguuuaguaca

SEQ ID NO: 797613 - RNA, 19 nt, Artificial Sequence
  Description of Artificial Sequence: Synthetic oligonucleotide
  Antisense strand to SEQ ID NO: 797612
uguacuaaacaccaaguaa

SEQ ID NO: 797614 - RNA, 19 nt, Artificial Sequence
  Description of Artificial Sequence: Synthetic oligonucleotide
  Sense strand starting at position 3970 of SEQ ID NO: 587509
ugguguuuaguacaaagca

SEQ ID NO: 797615 - RNA, 19 nt, Artificial Sequence
  Description of Artificial Sequence: Synthetic oligonucleotide
  Antisense strand to SEQ ID NO: 797614
ugcuuuguacuaaacacca

SEQ ID NO: 797616 - RNA, 19 nt, Artificial Sequence
  Description of Artificial Sequence: Synthetic oligonucleotide
  Sense strand starting at position 6 of SEQ ID NO: 587510
agccacaugucuuugcaaa

SEQ ID NO: 797617 - RNA, 19 nt, Artificial Sequence
  Description of Artificial Sequence: Synthetic oligonucleotide
  Antisense strand to SEQ ID NO: 797616
uuugcaaagacauguggcu

SEQ ID NO: 797618 - RNA, 19 nt, Artificial Sequence
  Description of Artificial Sequence: Synthetic oligonucleotide
  Sense strand starting at position 13 of SEQ ID NO: 587510
ugucuuugcaaaggugacu

SEQ ID NO: 797619 - RNA, 19 nt, Artificial Sequence
  Description of Artificial Sequence: Synthetic oligonucleotide
  Antisense strand to SEQ ID NO: 797618
agucaccuuugcaaagaca

SEQ ID NO: 797620 - RNA, 19 nt, Artificial Sequence
  Description of Artificial Sequence: Synthetic oligonucleotide
  Sense strand starting at position 27 of SEQ ID NO: 587510
ugacuuuaguagcccuaaa

SEQ ID NO: 797621 - RNA, 19 nt, Artificial Sequence
  Description of Artificial Sequence: Synthetic oligonucleotide
  Antisense strand to SEQ ID NO: 797620
uuuagggcuacuaaaguca

SEQ ID NO: 797622 - RNA, 19 nt, Artificial Sequence
  Description of Artificial Sequence: Synthetic oligonucleotide
  Sense strand starting at position 210 of SEQ ID NO: 587510
ggccguuagccugcucuaa

SEQ ID NO: 797623 - RNA, 19 nt, Artificial Sequence
  Description of Artificial Sequence: Synthetic oligonucleotide
  Antisense strand to SEQ ID NO: 797622
uuagagcaggcuaacggcc

SEQ ID NO: 797624 - RNA, 19 nt, Artificial Sequence
  Description of Artificial Sequence: Synthetic oligonucleotide
  Sense strand starting at position 211 of SEQ ID NO: 587510
gccguuagccugcucuaaa

SEQ ID NO: 797625 - RNA, 19 nt, Artificial Sequence
  Description of Artificial Sequence: Synthetic oligonucleotide
  Antisense strand to SEQ ID NO: 797624
uuuagagcaggcuaacggc

SEQ ID NO: 797626 - RNA, 19 nt, Artificial Sequence
  Description of Artificial Sequence: Synthetic oligonucleotide
  Sense strand starting at position 230 of SEQ ID NO: 587510
aagcuuaagagaugugcga

SEQ ID NO: 797627 - RNA, 19 nt, Artificial Sequence
  Description of Artificial Sequence: Synthetic oligonucleotide
  Antisense strand to SEQ ID NO: 797626
ucgcacaucucuuaagcuu

SEQ ID NO: 797628 - RNA, 19 nt, Artificial Sequence
  Description of Artificial Sequence: Synthetic oligonucleotide
  Sense strand starting at position 338 of SEQ ID NO: 587510
ggucaaagucauggagcua

SEQ ID NO: 797629 - RNA, 19 nt, Artificial Sequence
  Description of Artificial Sequence: Synthetic oligonucleotide
  Antisense strand to SEQ ID NO: 797628
uagcuccaugacuuugacc

SEQ ID NO: 797630 - RNA, 19 nt, Artificial Sequence
  Description of Artificial Sequence: Synthetic oligonucleotide
  Sense strand starting at position 339 of SEQ ID NO: 587510
gucaaagucauggagcuaa

SEQ ID NO: 797631 - RNA, 19 nt, Artificial Sequence
  Description of Artificial Sequence: Synthetic oligonucleotide
  Antisense strand to SEQ ID NO: 797630
uuagcuccaugacuuugac

SEQ ID NO: 797632 - RNA, 19 nt, Artificial Sequence
  Description of Artificial Sequence: Synthetic oligonucleotide
  Sense strand starting at position 351 of SEQ ID NO: 587510
gagcuaagucuagggagga

SEQ ID NO: 797633 - RNA, 19 nt, Artificial Sequence
  Description of Artificial Sequence: Synthetic oligonucleotide
  Antisense strand to SEQ ID NO: 797632
uccucccuagacuuagcuc

SEQ ID NO: 797634 - RNA, 19 nt, Artificial Sequence
  Description of Artificial Sequence: Synthetic oligonucleotide
  Sense strand starting at position 377 of SEQ ID NO: 587510
guggauaucugccuaaauc

SEQ ID NO: 797635 - RNA, 19 nt, Artificial Sequence
  Description of Artificial Sequence: Synthetic oligonucleotide
  Antisense strand to SEQ ID NO: 797634
gauuuaggcagauauccac

SEQ ID NO: 797636 - RNA, 19 nt, Artificial Sequence
  Description of Artificial Sequence: Synthetic oligonucleotide
  Sense strand starting at position 378 of SEQ ID NO: 587510
uggauaucugccuaaaucg

SEQ ID NO: 797637 - RNA, 19 nt, Artificial Sequence
  Description of Artificial Sequence: Synthetic oligonucleotide
  Antisense strand to SEQ ID NO: 797636
cgauuuaggcagauaucca

SEQ ID NO: 797638 - RNA, 19 nt, Artificial Sequence
  Description of Artificial Sequence: Synthetic oligonucleotide
  Sense strand starting at position 529 of SEQ ID NO: 587510
ccugauuucugggaccaga

SEQ ID NO: 797639 - RNA, 19 nt, Artificial Sequence
  Description of Artificial Sequence: Synthetic oligonucleotide
  Antisense strand to SEQ ID NO: 797638
ucuggucccagaaaucagg

SEQ ID NO: 797640 - RNA, 19 nt, Artificial Sequence
  Description of Artificial Sequence: Synthetic oligonucleotide
  Sense strand starting at position 753 of SEQ ID NO: 587510
auguaccuuuguguauuaa

SEQ ID NO: 797641 - RNA, 19 nt, Artificial Sequence
  Description of Artificial Sequence: Synthetic oligonucleotide
  Antisense strand to SEQ ID NO: 797640
uuaauacacaaagguacau

SEQ ID NO: 797642 - RNA, 19 nt, Artificial Sequence
  Description of Artificial Sequence: Synthetic oligonucleotide
  Sense strand starting at position 754 of SEQ ID NO: 587510
uguaccuuuguguauuaag

SEQ ID NO: 797643 - RNA, 19 nt, Artificial Sequence
  Description of Artificial Sequence: Synthetic oligonucleotide
  Antisense strand to SEQ ID NO: 797642
cuuaauacacaaagguaca

SEQ ID NO: 797644 - RNA, 19 nt, Artificial Sequence
  Description of Artificial Sequence: Synthetic oligonucleotide
  Sense strand starting at position 1001 of SEQ ID NO: 587510
cggacuaguuccucagacu

SEQ ID NO: 797645 - RNA, 19 nt, Artificial Sequence
  Description of Artificial Sequence: Synthetic oligonucleotide
  Antisense strand to SEQ ID NO: 797644
agucugaggaacuaguccg

SEQ ID NO: 797646 - RNA, 19 nt, Artificial Sequence
  Description of Artificial Sequence: Synthetic oligonucleotide
  Sense strand starting at position 1063 of SEQ ID NO: 587510
ugucucaugcccuagaucu

SEQ ID NO: 797647 - RNA, 19 nt, Artificial Sequence
  Description of Artificial Sequence: Synthetic oligonucleotide
  Antisense strand to SEQ ID NO: 797646
agaucuagggcaugagaca

SEQ ID NO: 797648 - RNA, 19 nt, Artificial Sequence
  Description of Artificial Sequence: Synthetic oligonucleotide
  Sense strand starting at position 1336 of SEQ ID NO: 587510
ucagaaacuuacucgagcu

SEQ ID NO: 797649 - RNA, 19 nt, Artificial Sequence
  Description of Artificial Sequence: Synthetic oligonucleotide
  Antisense strand to SEQ ID NO: 797648
agcucgaguaaguuucuga

SEQ ID NO: 797650 - RNA, 19 nt, Artificial Sequence
  Description of Artificial Sequence: Synthetic oligonucleotide
  Sense strand starting at position 1343 of SEQ ID NO: 587510
cuuacucgagcuugagaaa

SEQ ID NO: 797651 - RNA, 19 nt, Artificial Sequence
  Description of Artificial Sequence: Synthetic oligonucleotide
  Antisense strand to SEQ ID NO: 797650
uuucucaagcucgaguaag

SEQ ID NO: 797652 - RNA, 19 nt, Artificial Sequence
  Description of Artificial Sequence: Synthetic oligonucleotide
  Sense strand starting at position 1511 of SEQ ID NO: 587510
aaagcuggugaucguauua

SEQ ID NO: 797653 - RNA, 19 nt, Artificial Sequence
  Description of Artificial Sequence: Synthetic oligonucleotide
  Antisense strand to SEQ ID NO: 797652
uaauacgaucaccagcuuu

SEQ ID NO: 797654 - RNA, 19 nt, Artificial Sequence
  Description of Artificial Sequence: Synthetic oligonucleotide
  Sense strand starting at position 1571 of SEQ ID NO: 587510
cuucucagcgauggaguaa

SEQ ID NO: 797655 - RNA, 19 nt, Artificial Sequence
  Description of Artificial Sequence: Synthetic oligonucleotide
  Antisense strand to SEQ ID NO: 797654
uuacuccaucgcugagaag

SEQ ID NO: 797656 - RNA, 19 nt, Artificial Sequence
  Description of Artificial Sequence: Synthetic oligonucleotide
  Sense strand starting at position 1584 of SEQ ID NO: 587510
gaguaaguccuguagauug

SEQ ID NO: 797657 - RNA, 19 nt, Artificial Sequence
  Description of Artificial Sequence: Synthetic oligonucleotide
  Antisense strand to SEQ ID NO: 797656
caaucuacaggacuuacuc

SEQ ID NO: 797658 - RNA, 19 nt, Artificial Sequence
  Description of Artificial Sequence: Synthetic oligonucleotide
  Sense strand starting at position 2641 of SEQ ID NO: 587510
ggguaucgcucuccacaaa

SEQ ID NO: 797659 - RNA, 19 nt, Artificial Sequence
  Description of Artificial Sequence: Synthetic oligonucleotide
  Antisense strand to SEQ ID NO: 797658
uuuguggagagcgauaccc

SEQ ID NO: 797660 - RNA, 19 nt, Artificial Sequence
  Description of Artificial Sequence: Synthetic oligonucleotide
  Sense strand starting at position 2710 of SEQ ID NO: 587510
uagaguuuggaucgaugcu

SEQ ID NO: 797661 - RNA, 19 nt, Artificial Sequence
  Description of Artificial Sequence: Synthetic oligonucleotide
  Antisense strand to SEQ ID NO: 797660
agcaucgauccaaacucua

SEQ ID NO: 797662 - RNA, 19 nt, Artificial Sequence
  Description of Artificial Sequence: Synthetic oligonucleotide
  Sense strand starting at position 2711 of SEQ ID NO: 587510
agaguuuggaucgaugcua

SEQ ID NO: 797663 - RNA, 19 nt, Artificial Sequence
  Description of Artificial Sequence: Synthetic oligonucleotide
  Antisense strand to SEQ ID NO: 797662
uagcaucgauccaaacucu

SEQ ID NO: 797664 - RNA, 19 nt, Artificial Sequence
  Description of Artificial Sequence: Synthetic oligonucleotide
  Sense strand starting at position 2784 of SEQ ID NO: 587510
ucuucugacgcagacuuua

SEQ ID NO: 797665 - RNA, 19 nt, Artificial Sequence
  Description of Artificial Sequence: Synthetic oligonucleotide
  Antisense strand to SEQ ID NO: 797664
uaaagucugcgucagaaga

SEQ ID NO: 797666 - RNA, 19 nt, Artificial Sequence
  Description of Artificial Sequence: Synthetic oligonucleotide
  Sense strand starting at position 3103 of SEQ ID NO: 587510
ucacgaguuuccuuuaucu

SEQ ID NO: 797667 - RNA, 19 nt, Artificial Sequence
  Description of Artificial Sequence: Synthetic oligonucleotide
  Antisense strand to SEQ ID NO: 797666
agauaaaggaaacucguga

SEQ ID NO: 797668 - RNA, 19 nt, Artificial Sequence
  Description of Artificial Sequence: Synthetic oligonucleotide
  Sense strand starting at position 3105 of SEQ ID NO: 587510
acgaguuuccuuuaucugu

SEQ ID NO: 797669 - RNA, 19 nt, Artificial Sequence
  Description of Artificial Sequence: Synthetic oligonucleotide
  Antisense strand to SEQ ID NO: 797668
acagauaaaggaaacucgu

SEQ ID NO: 797670 - RNA, 19 nt, Artificial Sequence
  Description of Artificial Sequence: Synthetic oligonucleotide
  Sense strand starting at position 3239 of SEQ ID NO: 587510
gacugcuaugggcagaaga

SEQ ID NO: 797671 - RNA, 19 nt, Artificial Sequence
  Description of Artificial Sequence: Synthetic oligonucleotide
  Antisense strand to SEQ ID NO: 797670
ucuucugcccauagcaguc

SEQ ID NO: 797672 - RNA, 19 nt, Artificial Sequence
  Description of Artificial Sequence: Synthetic oligonucleotide
  Sense strand starting at position 3241 of SEQ ID NO: 587510
cugcuaugggcagaagagu

SEQ ID NO: 797673 - RNA, 19 nt, Artificial Sequence
  Description of Artificial Sequence: Synthetic oligonucleotide
  Antisense strand to SEQ ID NO: 797672
acucuucugcccauagcag

SEQ ID NO: 797674 - RNA, 19 nt, Artificial Sequence
  Description of Artificial Sequence: Synthetic oligonucleotide
  Sense strand starting at position 3252 of SEQ ID NO: 587510
agaagaguuucccucagua

SEQ ID NO: 797675 - RNA, 19 nt, Artificial Sequence
  Description of Artificial Sequence: Synthetic oligonucleotide
  Antisense strand to SEQ ID NO: 797674
uacugagggaaacucuucu

SEQ ID NO: 797676 - RNA, 19 nt, Artificial Sequence
  Description of Artificial Sequence: Synthetic oligonucleotide
  Sense strand starting at position 3256 of SEQ ID NO: 587510
gaguuucccucaguacuga

SEQ ID NO: 797677 - RNA, 19 nt, Artificial Sequence
  Description of Artificial Sequence: Synthetic oligonucleotide
  Antisense strand to SEQ ID NO: 797676
ucaguacugagggaaacuc

SEQ ID NO: 797678 - RNA, 19 nt, Artificial Sequence
  Description of Artificial Sequence: Synthetic oligonucleotide
  Sense strand starting at position 3333 of SEQ ID NO: 587510
gagguuggcguugacuauu

SEQ ID NO: 797679 - RNA, 19 nt, Artificial Sequence
  Description of Artificial Sequence: Synthetic oligonucleotide
  Antisense strand to SEQ ID NO: 797678
aauagucaacgccaaccuc

SEQ ID NO: 797680 - RNA, 19 nt, Artificial Sequence
  Description of Artificial Sequence: Synthetic oligonucleotide
  Sense strand starting at position 3410 of SEQ ID NO: 587510
ccacucugccaagagguua

SEQ ID NO: 797681 - RNA, 19 nt, Artificial Sequence
  Description of Artificial Sequence: Synthetic oligonucleotide
  Antisense strand to SEQ ID NO: 797680
uaaccucuuggcagagugg

SEQ ID NO: 797682 - RNA, 19 nt, Artificial Sequence
  Description of Artificial Sequence: Synthetic oligonucleotide
  Sense strand starting at position 3492 of SEQ ID NO: 587510
acagucauuccuggcccaa

SEQ ID NO: 797683 - RNA, 19 nt, Artificial Sequence
  Description of Artificial Sequence: Synthetic oligonucleotide
  Antisense strand to SEQ ID NO: 797682
uugggccaggaaugacugu

SEQ ID NO: 797684 - RNA, 19 nt, Artificial Sequence
  Description of Artificial Sequence: Synthetic oligonucleotide
  Sense strand starting at position 3494 of SEQ ID NO: 587510
agucauuccuggcccaacu

SEQ ID NO: 797685 - RNA, 19 nt, Artificial Sequence
  Description of Artificial Sequence: Synthetic oligonucleotide
  Antisense strand to SEQ ID NO: 797684
aguugggccaggaaugacu

SEQ ID NO: 797686 - RNA, 19 nt, Artificial Sequence
  Description of Artificial Sequence: Synthetic oligonucleotide
  Sense strand starting at position 3752 of SEQ ID NO: 587510
uuccuuaaggucugggaua

SEQ ID NO: 797687 - RNA, 19 nt, Artificial Sequence
  Description of Artificial Sequence: Synthetic oligonucleotide
  Antisense strand to SEQ ID NO: 797686
uaucccagaccuuaaggaa

SEQ ID NO: 797688 - RNA, 19 nt, Artificial Sequence
  Description of Artificial Sequence: Synthetic oligonucleotide
  Sense strand starting at position 3754 of SEQ ID NO: 587510
ccuuaaggucugggauaug

SEQ ID NO: 797689 - RNA, 19 nt, Artificial Sequence
  Description of Artificial Sequence: Synthetic oligonucleotide
  Antisense strand to SEQ ID NO: 797688
cauaucccagaccuuaagg

SEQ ID NO: 797690 - RNA, 19 nt, Artificial Sequence
  Description of Artificial Sequence: Synthetic oligonucleotide
  Sense strand starting at position 3821 of SEQ ID NO: 587510
agagaacuugugugucagu

SEQ ID NO: 797691 - RNA, 19 nt, Artificial Sequence
  Description of Artificial Sequence: Synthetic oligonucleotide
  Antisense strand to SEQ ID NO: 797690
acugacacacaaguucucu

SEQ ID NO: 797692 - RNA, 19 nt, Artificial Sequence
  Description of Artificial Sequence: Synthetic oligonucleotide
  Sense strand starting at position 3969 of SEQ ID NO: 587510
gcucuuaaucacugggcua

SEQ ID NO: 797693 - RNA, 19 nt, Artificial Sequence
  Description of Artificial Sequence: Synthetic oligonucleotide
  Antisense strand to SEQ ID NO: 797692
uagcccagugauuaagagc

SEQ ID NO: 797694 - RNA, 19 nt, Artificial Sequence
  Description of Artificial Sequence: Synthetic oligonucleotide
  Sense strand starting at position 3971 of SEQ ID NO: 587510
ucuuaaucacugggcuauu

SEQ ID NO: 797695 - RNA, 19 nt, Artificial Sequence
  Description of Artificial Sequence: Synthetic oligonucleotide
  Antisense strand to SEQ ID NO: 797694
aauagcccagugauuaaga

SEQ ID NO: 797696 - RNA, 19 nt, Artificial Sequence
  Description of Artificial Sequence: Synthetic oligonucleotide
  Sense strand starting at position 210 of SEQ ID NO: 587511
ccaagauggcagcauuagu

SEQ ID NO: 797697 - RNA, 19 nt, Artificial Sequence
  Description of Artificial Sequence: Synthetic oligonucleotide
  Antisense strand to SEQ ID NO: 797696
acuaaugcugccaucuugg

SEQ ID NO: 797698 - RNA, 19 nt, Artificial Sequence
  Description of Artificial Sequence: Synthetic oligonucleotide
  Sense strand starting at position 220 of SEQ ID NO: 587511
agcauuaguaagcaugagu

SEQ ID NO: 797699 - RNA, 19 nt, Artificial Sequence
  Description of Artificial Sequence: Synthetic oligonucleotide
  Antisense strand to SEQ ID NO: 797698
acucaugcuuacuaaugcu

SEQ ID NO: 797700 - RNA, 19 nt, Artificial Sequence
  Description of Artificial Sequence: Synthetic oligonucleotide
  Sense strand starting at position 239 of SEQ ID NO: 587511
gagagcuccgcucaaauac

SEQ ID NO: 797701 - RNA, 19 nt, Artificial Sequence
  Description of Artificial Sequence: Synthetic oligonucleotide
  Antisense strand to SEQ ID NO: 797700
guauuugagcggagcucuc

SEQ ID NO: 797702 - RNA, 19 nt, Artificial Sequence
  Description of Artificial Sequence: Synthetic oligonucleotide
  Sense strand starting at position 248 of SEQ ID NO: 587511
gcucaaauacauggucagu

SEQ ID NO: 797703 - RNA, 19 nt, Artificial Sequence
  Description of Artificial Sequence: Synthetic oligonucleotide
  Antisense strand to SEQ ID NO: 797702
acugaccauguauuugagc

SEQ ID NO: 797704 - RNA, 19 nt, Artificial Sequence
  Description of Artificial Sequence: Synthetic oligonucleotide
  Sense strand starting at position 250 of SEQ ID NO: 587511
ucaaauacauggucaguca

SEQ ID NO: 797705 - RNA, 19 nt, Artificial Sequence
  Description of Artificial Sequence: Synthetic oligonucleotide
  Antisense strand to SEQ ID NO: 797704
ugacugaccauguauuuga

SEQ ID NO: 797706 - RNA, 19 nt, Artificial Sequence
  Description of Artificial Sequence: Synthetic oligonucleotide
  Sense strand starting at position 257 of SEQ ID NO: 587511
cauggucagucaucaguaa

SEQ ID NO: 797707 - RNA, 19 nt, Artificial Sequence
  Description of Artificial Sequence: Synthetic oligonucleotide
  Antisense strand to SEQ ID NO: 797706
uuacugaugacugaccaug

SEQ ID NO: 797708 - RNA, 19 nt, Artificial Sequence
  Description of Artificial Sequence: Synthetic oligonucleotide
  Sense strand starting at position 258 of SEQ ID NO: 587511
auggucagucaucaguaau

SEQ ID NO: 797709 - RNA, 19 nt, Artificial Sequence
  Description of Artificial Sequence: Synthetic oligonucleotide
  Antisense strand to SEQ ID NO: 797708
auuacugaugacugaccau

SEQ ID NO: 797710 - RNA, 19 nt, Artificial Sequence
  Description of Artificial Sequence: Synthetic oligonucleotide
  Sense strand starting at position 261 of SEQ ID NO: 587511
gucagucaucaguaauauu

SEQ ID NO: 797711 - RNA, 19 nt, Artificial Sequence
  Description of Artificial Sequence: Synthetic oligonucleotide
  Antisense strand to SEQ ID NO: 797710
aauauuacugaugacugac

SEQ ID NO: 797712 - RNA, 19 nt, Artificial Sequence
  Description of Artificial Sequence: Synthetic oligonucleotide
  Sense strand starting at position 416 of SEQ ID NO: 587511
gacuaucauuugcauggga

SEQ ID NO: 797713 - RNA, 19 nt, Artificial Sequence
  Description of Artificial Sequence: Synthetic oligonucleotide
  Antisense strand to SEQ ID NO: 797712
ucccaugcaaaugauaguc

SEQ ID NO: 797714 - RNA, 19 nt, Artificial Sequence
  Description of Artificial Sequence: Synthetic oligonucleotide
  Sense strand starting at position 555 of SEQ ID NO: 587511
cuccaaagauggcuugaaa

SEQ ID NO: 797715 - RNA, 19 nt, Artificial Sequence
  Description of Artificial Sequence: Synthetic oligonucleotide
  Antisense strand to SEQ ID NO: 797714
uuucaagccaucuuuggag

SEQ ID NO: 797716 - RNA, 19 nt, Artificial Sequence
  Description of Artificial Sequence: Synthetic oligonucleotide
  Sense strand starting at position 623 of SEQ ID NO: 587511
ugucuaaacuuggcucuua

SEQ ID NO: 797717 - RNA, 19 nt, Artificial Sequence
  Description of Artificial Sequence: Synthetic oligonucleotide
  Antisense strand to SEQ ID NO: 797716
uaagagccaaguuuagaca

SEQ ID NO: 797718 - RNA, 19 nt, Artificial Sequence
  Description of Artificial Sequence: Synthetic oligonucleotide
  Sense strand starting at position 624 of SEQ ID NO: 587511
gucuaaacuuggcucuuaa

SEQ ID NO: 797719 - RNA, 19 nt, Artificial Sequence
  Description of Artificial Sequence: Synthetic oligonucleotide
  Antisense strand to SEQ ID NO: 797718
uuaagagccaaguuuagac

SEQ ID NO: 797720 - RNA, 19 nt, Artificial Sequence
  Description of Artificial Sequence: Synthetic oligonucleotide
  Sense strand starting at position 675 of SEQ ID NO: 587511
gugggaaacacguggcaau

SEQ ID NO: 797721 - RNA, 19 nt, Artificial Sequence
  Description of Artificial Sequence: Synthetic oligonucleotide
  Antisense strand to SEQ ID NO: 797720
auugccacguguuucccac

SEQ ID NO: 797722 - RNA, 19 nt, Artificial Sequence
  Description of Artificial Sequence: Synthetic oligonucleotide
  Sense strand starting at position 752 of SEQ ID NO: 587511
uuggaacuuccauguuuag

SEQ ID NO: 797723 - RNA, 19 nt, Artificial Sequence
  Description of Artificial Sequence: Synthetic oligonucleotide
  Antisense strand to SEQ ID NO: 797722
cuaaacauggaaguuccaa

SEQ ID NO: 797724 - RNA, 19 nt, Artificial Sequence
  Description of Artificial Sequence: Synthetic oligonucleotide
  Sense strand starting at position 758 of SEQ ID NO: 587511
cuuccauguuuaguaaagu

SEQ ID NO: 797725 - RNA, 19 nt, Artificial Sequence
  Description of Artificial Sequence: Synthetic oligonucleotide
  Antisense strand to SEQ ID NO: 797724
acuuuacuaaacauggaag

SEQ ID NO: 797726 - RNA, 19 nt, Artificial Sequence
  Description of Artificial Sequence: Synthetic oligonucleotide
  Sense strand starting at position 767 of SEQ ID NO: 587511
uuaguaaaguugccuugau

SEQ ID NO: 797727 - RNA, 19 nt, Artificial Sequence
  Description of Artificial Sequence: Synthetic oligonucleotide
  Antisense strand to SEQ ID NO: 797726
aucaaggcaacuuuacuaa

SEQ ID NO: 797728 - RNA, 19 nt, Artificial Sequence
  Description of Artificial Sequence: Synthetic oligonucleotide
  Sense strand starting at position 768 of SEQ ID NO: 587511
uaguaaaguugccuugaug

SEQ ID NO: 797729 - RNA, 19 nt, Artificial Sequence
  Description of Artificial Sequence: Synthetic oligonucleotide
  Antisense strand to SEQ ID NO: 797728
caucaaggcaacuuuacua

SEQ ID NO: 797730 - RNA, 19 nt, Artificial Sequence
  Description of Artificial Sequence: Synthetic oligonucleotide
  Sense strand starting at position 959 of SEQ ID NO: 587511
cuaugaaauuugcagagaa

SEQ ID NO: 797731 - RNA, 19 nt, Artificial Sequence
  Description of Artificial Sequence: Synthetic oligonucleotide
  Antisense strand to SEQ ID NO: 797730
uucucugcaaauuucauag

SEQ ID NO: 797732 - RNA, 19 nt, Artificial Sequence
  Description of Artificial Sequence: Synthetic oligonucleotide
  Sense strand starting at position 2132 of SEQ ID NO: 587511
caguuacucgcagucaugu

SEQ ID NO: 797733 - RNA, 19 nt, Artificial Sequence
  Description of Artificial Sequence: Synthetic oligonucleotide
  Antisense strand to SEQ ID NO: 797732
acaugacugcgaguaacug

SEQ ID NO: 797734 - RNA, 19 nt, Artificial Sequence
  Description of Artificial Sequence: Synthetic oligonucleotide
  Sense strand starting at position 2297 of SEQ ID NO: 587511
gcgagcugucgggauaaag

SEQ ID NO: 797735 - RNA, 19 nt, Artificial Sequence
  Description of Artificial Sequence: Synthetic oligonucleotide
  Antisense strand to SEQ ID NO: 797734
cuuuaucccgacagcucgc

SEQ ID NO: 797736 - RNA, 19 nt, Artificial Sequence
  Description of Artificial Sequence: Synthetic oligonucleotide
  Sense strand starting at position 2330 of SEQ ID NO: 587511
gcagguuugaguugagaac

SEQ ID NO: 797737 - RNA, 19 nt, Artificial Sequence
  Description of Artificial Sequence: Synthetic oligonucleotide
  Antisense strand to SEQ ID NO: 797736
guucucaacucaaaccugc

SEQ ID NO: 797738 - RNA, 19 nt, Artificial Sequence
  Description of Artificial Sequence: Synthetic oligonucleotide
  Sense strand starting at position 2331 of SEQ ID NO: 587511
cagguuugaguugagaacu

SEQ ID NO: 797739 - RNA, 19 nt, Artificial Sequence
  Description of Artificial Sequence: Synthetic oligonucleotide
  Antisense strand to SEQ ID NO: 797738
aguucucaacucaaaccug

SEQ ID NO: 797740 - RNA, 19 nt, Artificial Sequence
  Description of Artificial Sequence: Synthetic oligonucleotide
  Sense strand starting at position 2378 of SEQ ID NO: 587511
cuggaaugcgcagagacuu

SEQ ID NO: 797741 - RNA, 19 nt, Artificial Sequence
  Description of Artificial Sequence: Synthetic oligonucleotide
  Antisense strand to SEQ ID NO: 797740
aagucucugcgcauuccag

SEQ ID NO: 797742 - RNA, 19 nt, Artificial Sequence
  Description of Artificial Sequence: Synthetic oligonucleotide
  Sense strand starting at position 2449 of SEQ ID NO: 587511
ccacaucuucugcaacgaa

SEQ ID NO: 797743 - RNA, 19 nt, Artificial Sequence
  Description of Artificial Sequence: Synthetic oligonucleotide
  Antisense strand to SEQ ID NO: 797742
uucguugcagaagaugugg

SEQ ID NO: 797744 - RNA, 19 nt, Artificial Sequence
  Description of Artificial Sequence: Synthetic oligonucleotide
  Sense strand starting at position 2633 of SEQ ID NO: 587511
caagcagauugugcuaaau

SEQ ID NO: 797745 - RNA, 19 nt, Artificial Sequence
  Description of Artificial Sequence: Synthetic oligonucleotide
  Antisense strand to SEQ ID NO: 797744
auuuagcacaaucugcuug

SEQ ID NO: 797746 - RNA, 19 nt, Artificial Sequence
  Description of Artificial Sequence: Synthetic oligonucleotide
  Sense strand starting at position 2681 of SEQ ID NO: 587511
ugcugaggcuccucaauca

SEQ ID NO: 797747 - RNA, 19 nt, Artificial Sequence
  Description of Artificial Sequence: Synthetic oligonucleotide
  Antisense strand to SEQ ID NO: 797746
ugauugaggagccucagca

SEQ ID NO: 797748 - RNA, 19 nt, Artificial Sequence
  Description of Artificial Sequence: Synthetic oligonucleotide
  Sense strand starting at position 3141 of SEQ ID NO: 587511
agaugcuguguuuagagau

SEQ ID NO: 797749 - RNA, 19 nt, Artificial Sequence
  Description of Artificial Sequence: Synthetic oligonucleotide
  Antisense strand to SEQ ID NO: 797748
aucucuaaacacagcaucu

SEQ ID NO: 797750 - RNA, 19 nt, Artificial Sequence
  Description of Artificial Sequence: Synthetic oligonucleotide
  Sense strand starting at position 3147 of SEQ ID NO: 587511
uguguuuagagaugaugcu

SEQ ID NO: 797751 - RNA, 19 nt, Artificial Sequence
  Description of Artificial Sequence: Synthetic oligonucleotide
  Antisense strand to SEQ ID NO: 797750
agcaucaucucuaaacaca

SEQ ID NO: 797752 - RNA, 19 nt, Artificial Sequence
  Description of Artificial Sequence: Synthetic oligonucleotide
  Sense strand starting at position 3264 of SEQ ID NO: 587511
uggacucugcugugauuag

SEQ ID NO: 797753 - RNA, 19 nt, Artificial Sequence
  Description of Artificial Sequence: Synthetic oligonucleotide
  Antisense strand to SEQ ID NO: 797752
cuaaucacagcagagucca

SEQ ID NO: 797754 - RNA, 19 nt, Artificial Sequence
  Description of Artificial Sequence: Synthetic oligonucleotide
  Sense strand starting at position 3292 of SEQ ID NO: 587511
acaguuauccugcaggcau

SEQ ID NO: 797755 - RNA, 19 nt, Artificial Sequence
  Description of Artificial Sequence: Synthetic oligonucleotide
  Antisense strand to SEQ ID NO: 797754
augccugcaggauaacugu

SEQ ID NO: 797756 - RNA, 19 nt, Artificial Sequence
  Description of Artificial Sequence: Synthetic oligonucleotide
  Sense strand starting at position 3303 of SEQ ID NO: 587511
gcaggcauuuaucugcuuu

SEQ ID NO: 797757 - RNA, 19 nt, Artificial Sequence
  Description of Artificial Sequence: Synthetic oligonucleotide
  Antisense strand to SEQ ID NO: 797756
aaagcagauaaaugccugc

SEQ ID NO: 797758 - RNA, 19 nt, Artificial Sequence
  Description of Artificial Sequence: Synthetic oligonucleotide
  Sense strand starting at position 3305 of SEQ ID NO: 587511
aggcauuuaucugcuuuga

SEQ ID NO: 797759 - RNA, 19 nt, Artificial Sequence
  Description of Artificial Sequence: Synthetic oligonucleotide
  Antisense strand to SEQ ID NO: 797758
ucaaagcagauaaaugccu

SEQ ID NO: 797760 - RNA, 19 nt, Artificial Sequence
  Description of Artificial Sequence: Synthetic oligonucleotide
  Sense strand starting at position 3307 of SEQ ID NO: 587511
gcauuuaucugcuuugaga

SEQ ID NO: 797761 - RNA, 19 nt, Artificial Sequence
  Description of Artificial Sequence: Synthetic oligonucleotide
  Antisense strand to SEQ ID NO: 797760
ucucaaagcagauaaaugc

SEQ ID NO: 797762 - RNA, 19 nt, Artificial Sequence
  Description of Artificial Sequence: Synthetic oligonucleotide
  Sense strand starting at position 3318 of SEQ ID NO: 587511
cuuugagaauuagcuacau

SEQ ID NO: 797763 - RNA, 19 nt, Artificial Sequence
  Description of Artificial Sequence: Synthetic oligonucleotide
  Antisense strand to SEQ ID NO: 797762
auguagcuaauucucaaag

SEQ ID NO: 797764 - RNA, 19 nt, Artificial Sequence
  Description of Artificial Sequence: Synthetic oligonucleotide
  Sense strand starting at position 3488 of SEQ ID NO: 587511
ccgcuuaggacaugacaga

SEQ ID NO: 797765 - RNA, 19 nt, Artificial Sequence
  Description of Artificial Sequence: Synthetic oligonucleotide
  Antisense strand to SEQ ID NO: 797764
ucugucauguccuaagcgg

SEQ ID NO: 797766 - RNA, 19 nt, Artificial Sequence
  Description of Artificial Sequence: Synthetic oligonucleotide
  Sense strand starting at position 3525 of SEQ ID NO: 587511
ggaucauaauucucuggau

SEQ ID NO: 797767 - RNA, 19 nt, Artificial Sequence
  Description of Artificial Sequence: Synthetic oligonucleotide
  Antisense strand to SEQ ID NO: 797766
auccagagaauuaugaucc

SEQ ID NO: 797768 - RNA, 19 nt, Artificial Sequence
  Description of Artificial Sequence: Synthetic oligonucleotide
  Sense strand starting at position 3571 of SEQ ID NO: 587511
cuggguuucgcugacagga

SEQ ID NO: 797769 - RNA, 19 nt, Artificial Sequence
  Description of Artificial Sequence: Synthetic oligonucleotide
  Antisense strand to SEQ ID NO: 797768
uccugucagcgaaacccag

SEQ ID NO: 797770 - RNA, 19 nt, Artificial Sequence
  Description of Artificial Sequence: Synthetic oligonucleotide
  Sense strand starting at position 3656 of SEQ ID NO: 587511
guauaucacugacuccauu

SEQ ID NO: 797771 - RNA, 19 nt, Artificial Sequence
  Description of Artificial Sequence: Synthetic oligonucleotide
  Antisense strand to SEQ ID NO: 797770
aauggagucagugauauac

SEQ ID NO: 797772 - RNA, 19 nt, Artificial Sequence
  Description of Artificial Sequence: Synthetic oligonucleotide
  Sense strand starting at position 3815 of SEQ ID NO: 587511
augauauaguuccucaguu

SEQ ID NO: 797773 - RNA, 19 nt, Artificial Sequence
  Description of Artificial Sequence: Synthetic oligonucleotide
  Antisense strand to SEQ ID NO: 797772
aacugaggaacuauaucau

SEQ ID NO: 797774 - RNA, 19 nt, Artificial Sequence
  Description of Artificial Sequence: Synthetic oligonucleotide
  Sense strand starting at position 3816 of SEQ ID NO: 587511
ugauauaguuccucaguuc

SEQ ID NO: 797775 - RNA, 19 nt, Artificial Sequence
  Description of Artificial Sequence: Synthetic oligonucleotide
  Antisense strand to SEQ ID NO: 797774
gaacugaggaacuauauca

SEQ ID NO: 797776 - RNA, 19 nt, Artificial Sequence
  Description of Artificial Sequence: Synthetic oligonucleotide
  Sense strand starting at position 132 of SEQ ID NO: 587512
agcagacgugugcuccuua

SEQ ID NO: 797777 - RNA, 19 nt, Artificial Sequence
  Description of Artificial Sequence: Synthetic oligonucleotide
  Antisense strand to SEQ ID NO: 797776
uaaggagcacacgucugcu

SEQ ID NO: 797778 - RNA, 19 nt, Artificial Sequence
  Description of Artificial Sequence: Synthetic oligonucleotide
  Sense strand starting at position 137 of SEQ ID NO: 587512
acgugugcuccuuacaaac

SEQ ID NO: 797779 - RNA, 19 nt, Artificial Sequence
  Description of Artificial Sequence: Synthetic oligonucleotide
  Antisense strand to SEQ ID NO: 797778
guuuguaaggagcacacgu

SEQ ID NO: 797780 - RNA, 19 nt, Artificial Sequence
  Description of Artificial Sequence: Synthetic oligonucleotide
  Sense strand starting at position 351 of SEQ ID NO: 587512
cugggaauucuguguggaa

SEQ ID NO: 797781 - RNA, 19 nt, Artificial Sequence
  Description of Artificial Sequence: Synthetic oligonucleotide
  Antisense strand to SEQ ID NO: 797780
uuccacacagaauucccag

SEQ ID NO: 797782 - RNA, 19 nt, Artificial Sequence
  Description of Artificial Sequence: Synthetic oligonucleotide
  Sense strand starting at position 352 of SEQ ID NO: 587512
ugggaauucuguguggaaa

SEQ ID NO: 797783 - RNA, 19 nt, Artificial Sequence
  Description of Artificial Sequence: Synthetic oligonucleotide
  Antisense strand to SEQ ID NO: 797782
uuuccacacagaauuccca

SEQ ID NO: 797784 - RNA, 19 nt, Artificial Sequence
  Description of Artificial Sequence: Synthetic oligonucleotide
  Sense strand starting at position 919 of SEQ ID NO: 587512
gaucaagaguuggauauuu

SEQ ID NO: 797785 - RNA, 19 nt, Artificial Sequence
  Description of Artificial Sequence: Synthetic oligonucleotide
  Antisense strand to SEQ ID NO: 797784
aaauauccaacucuugauc

SEQ ID NO: 797786 - RNA, 19 nt, Artificial Sequence
  Description of Artificial Sequence: Synthetic oligonucleotide
  Sense strand starting at position 942 of SEQ ID NO: 587512
uucuuaaguugccgcaauu

SEQ ID NO: 797787 - RNA, 19 nt, Artificial Sequence
  Description of Artificial Sequence: Synthetic oligonucleotide
  Antisense strand to SEQ ID NO: 797786
aauugcggcaacuuaagaa

SEQ ID NO: 797788 - RNA, 19 nt, Artificial Sequence
  Description of Artificial Sequence: Synthetic oligonucleotide
  Sense strand starting at position 987 of SEQ ID NO: 587512
gcgcuauacuggcguguga

SEQ ID NO: 797789 - RNA, 19 nt, Artificial Sequence
  Description of Artificial Sequence: Synthetic oligonucleotide
  Antisense strand to SEQ ID NO: 797788
ucacacgccaguauagcgc

SEQ ID NO: 797790 - RNA, 19 nt, Artificial Sequence
  Description of Artificial Sequence: Synthetic oligonucleotide
  Sense strand starting at position 1302 of SEQ ID NO: 587512
gcagaagacguuugccaag

SEQ ID NO: 797791 - RNA, 19 nt, Artificial Sequence
  Description of Artificial Sequence: Synthetic oligonucleotide
  Antisense strand to SEQ ID NO: 797790
cuuggcaaacgucuucugc

SEQ ID NO: 797792 - RNA, 19 nt, Artificial Sequence
  Description of Artificial Sequence: Synthetic oligonucleotide
  Sense strand starting at position 1305 of SEQ ID NO: 587512
gaagacguuugccaagauc

SEQ ID NO: 797793 - RNA, 19 nt, Artificial Sequence
  Description of Artificial Sequence: Synthetic oligonucleotide
  Antisense strand to SEQ ID NO: 797792
gaucuuggcaaacgucuuc

SEQ ID NO: 797794 - RNA, 19 nt, Artificial Sequence
  Description of Artificial Sequence: Synthetic oligonucleotide
  Sense strand starting at position 1308 of SEQ ID NO: 587512
gacguuugccaagaucaug

SEQ ID NO: 797795 - RNA, 19 nt, Artificial Sequence
  Description of Artificial Sequence: Synthetic oligonucleotide
  Antisense strand to SEQ ID NO: 797794
caugaucuuggcaaacguc

SEQ ID NO: 797796 - RNA, 19 nt, Artificial Sequence
  Description of Artificial Sequence: Synthetic oligonucleotide
  Sense strand starting at position 1311 of SEQ ID NO: 587512
guuugccaagaucauguua

SEQ ID NO: 797797 - RNA, 19 nt, Artificial Sequence
  Description of Artificial Sequence: Synthetic oligonucleotide
  Antisense strand to SEQ ID NO: 797796
uaacaugaucuuggcaaac

SEQ ID NO: 797798 - RNA, 19 nt, Artificial Sequence
  Description of Artificial Sequence: Synthetic oligonucleotide
  Sense strand starting at position 1313 of SEQ ID NO: 587512
uugccaagaucauguuaaa

SEQ ID NO: 797799 - RNA, 19 nt, Artificial Sequence
  Description of Artificial Sequence: Synthetic oligonucleotide
  Antisense strand to SEQ ID NO: 797798
uuuaacaugaucuuggcaa

SEQ ID NO: 797800 - RNA, 19 nt, Artificial Sequence
  Description of Artificial Sequence: Synthetic oligonucleotide
  Sense strand starting at position 1351 of SEQ ID NO: 587512
gucuuucucccuuggguaa

SEQ ID NO: 797801 - RNA, 19 nt, Artificial Sequence
  Description of Artificial Sequence: Synthetic oligonucleotide
  Antisense strand to SEQ ID NO: 797800
uuacccaagggagaaagac

SEQ ID NO: 797802 - RNA, 19 nt, Artificial Sequence
  Description of Artificial Sequence: Synthetic oligonucleotide
  Sense strand starting at position 1352 of SEQ ID NO: 587512
ucuuucucccuuggguaaa

SEQ ID NO: 797803 - RNA, 19 nt, Artificial Sequence
  Description of Artificial Sequence: Synthetic oligonucleotide
  Antisense strand to SEQ ID NO: 797802
uuuacccaagggagaaaga

SEQ ID NO: 797804 - RNA, 19 nt, Artificial Sequence
  Description of Artificial Sequence: Synthetic oligonucleotide
  Sense strand starting at position 1452 of SEQ ID NO: 587512
uaguccacccgaugaagau

SEQ ID NO: 797805 - RNA, 19 nt, Artificial Sequence
  Description of Artificial Sequence: Synthetic oligonucleotide
  Antisense strand to SEQ ID NO: 797804
aucuucaucggguggacua

SEQ ID NO: 797806 - RNA, 19 nt, Artificial Sequence
  Description of Artificial Sequence: Synthetic oligonucleotide
  Sense strand starting at position 1462 of SEQ ID NO: 587512
gaugaagaucccgaguccu

SEQ ID NO: 797807 - RNA, 19 nt, Artificial Sequence
  Description of Artificial Sequence: Synthetic oligonucleotide
  Antisense strand to SEQ ID NO: 797806
aggacucgggaucuucauc

SEQ ID NO: 797808 - RNA, 19 nt, Artificial Sequence
  Description of Artificial Sequence: Synthetic oligonucleotide
  Sense strand starting at position 1468 of SEQ ID NO: 587512
gaucccgaguccugcgauu

SEQ ID NO: 797809 - RNA, 19 nt, Artificial Sequence
  Description of Artificial Sequence: Synthetic oligonucleotide
  Antisense strand to SEQ ID NO: 797808
aaucgcaggacucgggauc

SEQ ID NO: 797810 - RNA, 19 nt, Artificial Sequence
  Description of Artificial Sequence: Synthetic oligonucleotide
  Sense strand starting at position 1470 of SEQ ID NO: 587512
ucccgaguccugcgauucu

SEQ ID NO: 797811 - RNA, 19 nt, Artificial Sequence
  Description of Artificial Sequence: Synthetic oligonucleotide
  Antisense strand to SEQ ID NO: 797810
agaaucgcaggacucggga

SEQ ID NO: 797812 - RNA, 19 nt, Artificial Sequence
  Description of Artificial Sequence: Synthetic oligonucleotide
  Sense strand starting at position 1567 of SEQ ID NO: 587512
caaauauacgcguaucugu

SEQ ID NO: 797813 - RNA, 19 nt, Artificial Sequence
  Description of Artificial Sequence: Synthetic oligonucleotide
  Antisense strand to SEQ ID NO: 797812
acagauacgcguauauuug

SEQ ID NO: 797814 - RNA, 19 nt, Artificial Sequence
  Description of Artificial Sequence: Synthetic oligonucleotide
  Sense strand starting at position 1935 of SEQ ID NO: 587512
auggaauuccagugaccgu

SEQ ID NO: 797815 - RNA, 19 nt, Artificial Sequence
  Description of Artificial Sequence: Synthetic oligonucleotide
  Antisense strand to SEQ ID NO: 797814
acggucacuggaauuccau

SEQ ID NO: 797816 - RNA, 19 nt, Artificial Sequence
  Description of Artificial Sequence: Synthetic oligonucleotide
  Sense strand starting at position 3200 of SEQ ID NO: 587512
gggcgauugauccaucugu

SEQ ID NO: 797817 - RNA, 19 nt, Artificial Sequence
  Description of Artificial Sequence: Synthetic oligonucleotide
  Antisense strand to SEQ ID NO: 797816
acagauggaucaaucgccc

SEQ ID NO: 797818 - RNA, 19 nt, Artificial Sequence
  Description of Artificial Sequence: Synthetic oligonucleotide
  Sense strand starting at position 3204 of SEQ ID NO: 587512
gauugauccaucugucggu

SEQ ID NO: 797819 - RNA, 19 nt, Artificial Sequence
  Description of Artificial Sequence: Synthetic oligonucleotide
  Antisense strand to SEQ ID NO: 797818
accgacagauggaucaauc

SEQ ID NO: 797820 - RNA, 19 nt, Artificial Sequence
  Description of Artificial Sequence: Synthetic oligonucleotide
  Sense strand starting at position 3536 of SEQ ID NO: 587512
auuugauaguaccguuuaa

SEQ ID NO: 797821 - RNA, 19 nt, Artificial Sequence
  Description of Artificial Sequence: Synthetic oligonucleotide
  Antisense strand to SEQ ID NO: 797820
uuaaacgguacuaucaaau

SEQ ID NO: 797822 - RNA, 19 nt, Artificial Sequence
  Description of Artificial Sequence: Synthetic oligonucleotide
  Sense strand starting at position 3540 of SEQ ID NO: 587512
gauaguaccguuuaagaug

SEQ ID NO: 797823 - RNA, 19 nt, Artificial Sequence
  Description of Artificial Sequence: Synthetic oligonucleotide
  Antisense strand to SEQ ID NO: 797822
caucuuaaacgguacuauc

SEQ ID NO: 797824 - RNA, 19 nt, Artificial Sequence
  Description of Artificial Sequence: Synthetic oligonucleotide
  Sense strand starting at position 3585 of SEQ ID NO: 587512
uccaguaaaugcuagaaau

SEQ ID NO: 797825 - RNA, 19 nt, Artificial Sequence
  Description of Artificial Sequence: Synthetic oligonucleotide
  Antisense strand to SEQ ID NO: 797824
auuucuagcauuuacugga

SEQ ID NO: 797826 - RNA, 19 nt, Artificial Sequence
  Description of Artificial Sequence: Synthetic oligonucleotide
  Sense strand starting at position 3597 of SEQ ID NO: 587512
uagaaaucgacuuggacga

SEQ ID NO: 797827 - RNA, 19 nt, Artificial Sequence
  Description of Artificial Sequence: Synthetic oligonucleotide
  Antisense strand to SEQ ID NO: 797826
ucguccaagucgauuucua

SEQ ID NO: 797828 - RNA, 19 nt, Artificial Sequence
  Description of Artificial Sequence: Synthetic oligonucleotide
  Sense strand starting at position 3644 of SEQ ID NO: 587512
agccuuagcuauugggaaa

SEQ ID NO: 797829 - RNA, 19 nt, Artificial Sequence
  Description of Artificial Sequence: Synthetic oligonucleotide
  Antisense strand to SEQ ID NO: 797828
uuucccaauagcuaaggcu

SEQ ID NO: 797830 - RNA, 19 nt, Artificial Sequence
  Description of Artificial Sequence: Synthetic oligonucleotide
  Sense strand starting at position 3645 of SEQ ID NO: 587512
gccuuagcuauugggaaag

SEQ ID NO: 797831 - RNA, 19 nt, Artificial Sequence
  Description of Artificial Sequence: Synthetic oligonucleotide
  Antisense strand to SEQ ID NO: 797830
cuuucccaauagcuaaggc

SEQ ID NO: 797832 - RNA, 19 nt, Artificial Sequence
  Description of Artificial Sequence: Synthetic oligonucleotide
  Sense strand starting at position 3677 of SEQ ID NO: 587512
cuuccaucuugaggauuua

SEQ ID NO: 797833 - RNA, 19 nt, Artificial Sequence
  Description of Artificial Sequence: Synthetic oligonucleotide
  Antisense strand to SEQ ID NO: 797832
uaaauccucaagauggaag

SEQ ID NO: 797834 - RNA, 19 nt, Artificial Sequence
  Description of Artificial Sequence: Synthetic oligonucleotide
  Sense strand starting at position 3734 of SEQ ID NO: 587512
gagcgagucuccugugaac

SEQ ID NO: 797835 - RNA, 19 nt, Artificial Sequence
  Description of Artificial Sequence: Synthetic oligonucleotide
  Antisense strand to SEQ ID NO: 797834
guucacaggagacucgcuc

SEQ ID NO: 797836 - RNA, 19 nt, Artificial Sequence
  Description of Artificial Sequence: Synthetic oligonucleotide
  Sense strand starting at position 3856 of SEQ ID NO: 587512
gugacgagucugggacaga

SEQ ID NO: 797837 - RNA, 19 nt, Artificial Sequence
  Description of Artificial Sequence: Synthetic oligonucleotide
  Antisense strand to SEQ ID NO: 797836
ucugucccagacucgucac

SEQ ID NO: 797838 - RNA, 19 nt, Artificial Sequence
  Description of Artificial Sequence: Synthetic oligonucleotide
  Sense strand starting at position 3875 of SEQ ID NO: 587512
gggcuuagggauuggaguu

SEQ ID NO: 797839 - RNA, 19 nt, Artificial Sequence
  Description of Artificial Sequence: Synthetic oligonucleotide
  Antisense strand to SEQ ID NO: 797838
aacuccaaucccuaagccc

SEQ ID NO: 797840 - RNA, 19 nt, Artificial Sequence
  Description of Artificial Sequence: Synthetic oligonucleotide
  Sense strand starting at position 3958 of SEQ ID NO: 587512
ugacuucgcaucugacaag

SEQ ID NO: 797841 - RNA, 19 nt, Artificial Sequence
  Description of Artificial Sequence: Synthetic oligonucleotide
  Antisense strand to SEQ ID NO: 797840
cuugucagaugcgaaguca

SEQ ID NO: 797842 - RNA, 19 nt, Artificial Sequence
  Description of Artificial Sequence: Synthetic oligonucleotide
  Sense strand starting at position 163 of SEQ ID NO: 587513
ccuuacugguagguaagau

SEQ ID NO: 797843 - RNA, 19 nt, Artificial Sequence
  Description of Artificial Sequence: Synthetic oligonucleotide
  Antisense strand to SEQ ID NO: 797842
aucuuaccuaccaguaagg

SEQ ID NO: 797844 - RNA, 19 nt, Artificial Sequence
  Description of Artificial Sequence: Synthetic oligonucleotide
  Sense strand starting at position 221 of SEQ ID NO: 587513
aagaacuaggagugucaua

SEQ ID NO: 797845 - RNA, 19 nt, Artificial Sequence
  Description of Artificial Sequence: Synthetic oligonucleotide
  Antisense strand to SEQ ID NO: 797844
uaugacacuccuaguucuu

SEQ ID NO: 797846 - RNA, 19 nt, Artificial Sequence
  Description of Artificial Sequence: Synthetic oligonucleotide
  Sense strand starting at position 228 of SEQ ID NO: 587513
aggagugucauaggaaaug

SEQ ID NO: 797847 - RNA, 19 nt, Artificial Sequence
  Description of Artificial Sequence: Synthetic oligonucleotide
  Antisense strand to SEQ ID NO: 797846
cauuuccuaugacacuccu

SEQ ID NO: 797848 - RNA, 19 nt, Artificial Sequence
  Description of Artificial Sequence: Synthetic oligonucleotide
  Sense strand starting at position 238 of SEQ ID NO: 587513
uaggaaauggagugguaca

SEQ ID NO: 797849 - RNA, 19 nt, Artificial Sequence
  Description of Artificial Sequence: Synthetic oligonucleotide
  Antisense strand to SEQ ID NO: 797848
uguaccacuccauuuccua

SEQ ID NO: 797850 - RNA, 19 nt, Artificial Sequence
  Description of Artificial Sequence: Synthetic oligonucleotide
  Sense strand starting at position 711 of SEQ ID NO: 587513
aguuaauucguggagaauc

SEQ ID NO: 797851 - RNA, 19 nt, Artificial Sequence
  Description of Artificial Sequence: Synthetic oligonucleotide
  Antisense strand to SEQ ID NO: 797850
gauucuccacgaauuaacu

SEQ ID NO: 797852 - RNA, 19 nt, Artificial Sequence
  Description of Artificial Sequence: Synthetic oligonucleotide
  Sense strand starting at position 740 of SEQ ID NO: 587513
guuaaacagcuaugaaaua

SEQ ID NO: 797853 - RNA, 19 nt, Artificial Sequence
  Description of Artificial Sequence: Synthetic oligonucleotide
  Antisense strand to SEQ ID NO: 797852
uauuucauagcuguuuaac

SEQ ID NO: 797854 - RNA, 19 nt, Artificial Sequence
  Description of Artificial Sequence: Synthetic oligonucleotide
  Sense strand starting at position 876 of SEQ ID NO: 587513
guaugaaaggcauaauccu

SEQ ID NO: 797855 - RNA, 19 nt, Artificial Sequence
  Description of Artificial Sequence: Synthetic oligonucleotide
  Antisense strand to SEQ ID NO: 797854
aggauuaugccuuucauac

SEQ ID NO: 797856 - RNA, 19 nt, Artificial Sequence
  Description of Artificial Sequence: Synthetic oligonucleotide
  Sense strand starting at position 884 of SEQ ID NO: 587513
ggcauaauccuacagccaa

SEQ ID NO: 797857 - RNA, 19 nt, Artificial Sequence
  Description of Artificial Sequence: Synthetic oligonucleotide
  Antisense strand to SEQ ID NO: 797856
uuggcuguaggauuaugcc

SEQ ID NO: 797858 - RNA, 19 nt, Artificial Sequence
  Description of Artificial Sequence: Synthetic oligonucleotide
  Sense strand starting at position 962 of SEQ ID NO: 587513
ugauuucuccuagguagcu

SEQ ID NO: 797859 - RNA, 19 nt, Artificial Sequence
  Description of Artificial Sequence: Synthetic oligonucleotide
  Antisense strand to SEQ ID NO: 797858
agcuaccuaggagaaauca

SEQ ID NO: 797860 - RNA, 19 nt, Artificial Sequence
  Description of Artificial Sequence: Synthetic oligonucleotide
  Sense strand starting at position 963 of SEQ ID NO: 587513
gauuucuccuagguagcuu

SEQ ID NO: 797861 - RNA, 19 nt, Artificial Sequence
  Description of Artificial Sequence: Synthetic oligonucleotide
  Antisense strand to SEQ ID NO: 797860
aagcuaccuaggagaaauc

SEQ ID NO: 797862 - RNA, 19 nt, Artificial Sequence
  Description of Artificial Sequence: Synthetic oligonucleotide
  Sense strand starting at position 1251 of SEQ ID NO: 587513
uguagauguaaaugaguaa

SEQ ID NO: 797863 - RNA, 19 nt, Artificial Sequence
  Description of Artificial Sequence: Synthetic oligonucleotide
  Antisense strand to SEQ ID NO: 797862
uuacucauuuacaucuaca

SEQ ID NO: 797864 - RNA, 19 nt, Artificial Sequence
  Description of Artificial Sequence: Synthetic oligonucleotide
  Sense strand starting at position 1388 of SEQ ID NO: 587513
agagucauaugagucuaaa

SEQ ID NO: 797865 - RNA, 19 nt, Artificial Sequence
  Description of Artificial Sequence: Synthetic oligonucleotide
  Antisense strand to SEQ ID NO: 797864
uuuagacucauaugacucu

SEQ ID NO: 797866 - RNA, 19 nt, Artificial Sequence
  Description of Artificial Sequence: Synthetic oligonucleotide
  Sense strand starting at position 2049 of SEQ ID NO: 587513
acuguuacgucgaugugga

SEQ ID NO: 797867 - RNA, 19 nt, Artificial Sequence
  Description of Artificial Sequence: Synthetic oligonucleotide
  Antisense strand to SEQ ID NO: 797866
uccacaucgacguaacagu

SEQ ID NO: 797868 - RNA, 19 nt, Artificial Sequence
  Description of Artificial Sequence: Synthetic oligonucleotide
  Sense strand starting at position 2234 of SEQ ID NO: 587513
cccuaucuccgggaauggu

SEQ ID NO: 797869 - RNA, 19 nt, Artificial Sequence
  Description of Artificial Sequence: Synthetic oligonucleotide
  Antisense strand to SEQ ID NO: 797868
accauucccggagauaggg

SEQ ID NO: 797870 - RNA, 19 nt, Artificial Sequence
  Description of Artificial Sequence: Synthetic oligonucleotide
  Sense strand starting at position 2287 of SEQ ID NO: 587513
gaaugugaauguccacacu

SEQ ID NO: 797871 - RNA, 19 nt, Artificial Sequence
  Description of Artificial Sequence: Synthetic oligonucleotide
  Antisense strand to SEQ ID NO: 797870
aguguggacauucacauuc

SEQ ID NO: 797872 - RNA, 19 nt, Artificial Sequence
  Description of Artificial Sequence: Synthetic oligonucleotide
  Sense strand starting at position 2525 of SEQ ID NO: 587513
aaagaugacugguuccuau

SEQ ID NO: 797873 - RNA, 19 nt, Artificial Sequence
  Description of Artificial Sequence: Synthetic oligonucleotide
  Antisense strand to SEQ ID NO: 797872
auaggaaccagucaucuuu

SEQ ID NO: 797874 - RNA, 19 nt, Artificial Sequence
  Description of Artificial Sequence: Synthetic oligonucleotide
  Sense strand starting at position 2586 of SEQ ID NO: 587513
cuuguacucagugaaaguu

SEQ ID NO: 797875 - RNA, 19 nt, Artificial Sequence
  Description of Artificial Sequence: Synthetic oligonucleotide
  Antisense strand to SEQ ID NO: 797874
aacuuucacugaguacaag

SEQ ID NO: 797876 - RNA, 19 nt, Artificial Sequence
  Description of Artificial Sequence: Synthetic oligonucleotide
  Sense strand starting at position 2665 of SEQ ID NO: 587513
aucaaugcucaguauuaag

SEQ ID NO: 797877 - RNA, 19 nt, Artificial Sequence
  Description of Artificial Sequence: Synthetic oligonucleotide
  Antisense strand to SEQ ID NO: 797876
cuuaauacugagcauugau

SEQ ID NO: 797878 - RNA, 19 nt, Artificial Sequence
  Description of Artificial Sequence: Synthetic oligonucleotide
  Sense strand starting at position 2691 of SEQ ID NO: 587513
acguaaauuggacagucuu

SEQ ID NO: 797879 - RNA, 19 nt, Artificial Sequence
  Description of Artificial Sequence: Synthetic oligonucleotide
  Antisense strand to SEQ ID NO: 797878
aagacuguccaauuuacgu

SEQ ID NO: 797880 - RNA, 19 nt, Artificial Sequence
  Description of Artificial Sequence: Synthetic oligonucleotide
  Sense strand starting at position 2799 of SEQ ID NO: 587513
gaguaaaugcagugaauag

SEQ ID NO: 797881 - RNA, 19 nt, Artificial Sequence
  Description of Artificial Sequence: Synthetic oligonucleotide
  Antisense strand to SEQ ID NO: 797880
cuauucacugcauuuacuc

SEQ ID NO: 797882 - RNA, 19 nt, Artificial Sequence
  Description of Artificial Sequence: Synthetic oligonucleotide
  Sense strand starting at position 2800 of SEQ ID NO: 587513
aguaaaugcagugaauagu

SEQ ID NO: 797883 - RNA, 19 nt, Artificial Sequence
  Description of Artificial Sequence: Synthetic oligonucleotide
  Antisense strand to SEQ ID NO: 797882
acuauucacugcauuuacu

SEQ ID NO: 797884 - RNA, 19 nt, Artificial Sequence
  Description of Artificial Sequence: Synthetic oligonucleotide
  Sense strand starting at position 2811 of SEQ ID NO: 587513
ugaauagucugguuuaaca

SEQ ID NO: 797885 - RNA, 19 nt, Artificial Sequence
  Description of Artificial Sequence: Synthetic oligonucleotide
  Antisense strand to SEQ ID NO: 797884
uguuaaaccagacuauuca

SEQ ID NO: 797886 - RNA, 19 nt, Artificial Sequence
  Description of Artificial Sequence: Synthetic oligonucleotide
  Sense strand starting at position 2961 of SEQ ID NO: 587513
gugccagaauaauugacua

SEQ ID NO: 797887 - RNA, 19 nt, Artificial Sequence
  Description of Artificial Sequence: Synthetic oligonucleotide
  Antisense strand to SEQ ID NO: 797886
uagucaauuauucuggcac

SEQ ID NO: 797888 - RNA, 19 nt, Artificial Sequence
  Description of Artificial Sequence: Synthetic oligonucleotide
  Sense strand starting at position 3030 of SEQ ID NO: 587513
aggugaagugcauauguaa

SEQ ID NO: 797889 - RNA, 19 nt, Artificial Sequence
  Description of Artificial Sequence: Synthetic oligonucleotide
  Antisense strand to SEQ ID NO: 797888
uuacauaugcacuucaccu

SEQ ID NO: 797890 - RNA, 19 nt, Artificial Sequence
  Description of Artificial Sequence: Synthetic oligonucleotide
  Sense strand starting at position 3300 of SEQ ID NO: 587513
ccaaacuuucuguagucau

SEQ ID NO: 797891 - RNA, 19 nt, Artificial Sequence
  Description of Artificial Sequence: Synthetic oligonucleotide
  Antisense strand to SEQ ID NO: 797890
augacuacagaaaguuugg

SEQ ID NO: 797892 - RNA, 19 nt, Artificial Sequence
  Description of Artificial Sequence: Synthetic oligonucleotide
  Sense strand starting at position 3328 of SEQ ID NO: 587513
gcaagauaauaugucacau

SEQ ID NO: 797893 - RNA, 19 nt, Artificial Sequence
  Description of Artificial Sequence: Synthetic oligonucleotide
  Antisense strand to SEQ ID NO: 797892
augugacauauuaucuugc

SEQ ID NO: 797894 - RNA, 19 nt, Artificial Sequence
  Description of Artificial Sequence: Synthetic oligonucleotide
  Sense strand starting at position 3346 of SEQ ID NO: 587513
uccauuagacuguguagaa

SEQ ID NO: 797895 - RNA, 19 nt, Artificial Sequence
  Description of Artificial Sequence: Synthetic oligonucleotide
  Antisense strand to SEQ ID NO: 797894
uucuacacagucuaaugga

SEQ ID NO: 797896 - RNA, 19 nt, Artificial Sequence
  Description of Artificial Sequence: Synthetic oligonucleotide
  Sense strand starting at position 3347 of SEQ ID NO: 587513
ccauuagacuguguagaaa

SEQ ID NO: 797897 - RNA, 19 nt, Artificial Sequence
  Description of Artificial Sequence: Synthetic oligonucleotide
  Antisense strand to SEQ ID NO: 797896
uuucuacacagucuaaugg

SEQ ID NO: 797898 - RNA, 19 nt, Artificial Sequence
  Description of Artificial Sequence: Synthetic oligonucleotide
  Sense strand starting at position 3418 of SEQ ID NO: 587513
gggacugauguuugaccca

SEQ ID NO: 797899 - RNA, 19 nt, Artificial Sequence
  Description of Artificial Sequence: Synthetic oligonucleotide
  Antisense strand to SEQ ID NO: 797898
ugggucaaacaucaguccc

SEQ ID NO: 797900 - RNA, 19 nt, Artificial Sequence
  Description of Artificial Sequence: Synthetic oligonucleotide
  Sense strand starting at position 3425 of SEQ ID NO: 587513
auguuugacccacagcaua

SEQ ID NO: 797901 - RNA, 19 nt, Artificial Sequence
  Description of Artificial Sequence: Synthetic oligonucleotide
  Antisense strand to SEQ ID NO: 797900
uaugcugugggucaaacau

SEQ ID NO: 797902 - RNA, 19 nt, Artificial Sequence
  Description of Artificial Sequence: Synthetic oligonucleotide
  Sense strand starting at position 3593 of SEQ ID NO: 587513
gcauacuuucuggagggca

SEQ ID NO: 797903 - RNA, 19 nt, Artificial Sequence
  Description of Artificial Sequence: Synthetic oligonucleotide
  Antisense strand to SEQ ID NO: 797902
ugcccuccagaaaguaugc

SEQ ID NO: 797904 - RNA, 19 nt, Artificial Sequence
  Description of Artificial Sequence: Synthetic oligonucleotide
  Sense strand starting at position 3657 of SEQ ID NO: 587513
gagaaauucgauuggucag

SEQ ID NO: 797905 - RNA, 19 nt, Artificial Sequence
  Description of Artificial Sequence: Synthetic oligonucleotide
  Antisense strand to SEQ ID NO: 797904
cugaccaaucgaauuucuc

SEQ ID NO: 797906 - RNA, 19 nt, Artificial Sequence
  Description of Artificial Sequence: Synthetic oligonucleotide
  Sense strand starting at position 3748 of SEQ ID NO: 587513
auaauaagucaaggaugua

SEQ ID NO: 797907 - RNA, 19 nt, Artificial Sequence
  Description of Artificial Sequence: Synthetic oligonucleotide
  Antisense strand to SEQ ID NO: 797906
uacauccuugacuuauuau

SEQ ID NO: 797908 - RNA, 19 nt, Artificial Sequence
  Description of Artificial Sequence: Synthetic oligonucleotide
  Sense strand starting at position 3751 of SEQ ID NO: 587513
auaagucaaggauguagua

SEQ ID NO: 797909 - RNA, 19 nt, Artificial Sequence
  Description of Artificial Sequence: Synthetic oligonucleotide
  Antisense strand to SEQ ID NO: 797908
uacuacauccuugacuuau

SEQ ID NO: 797910 - RNA, 19 nt, Artificial Sequence
  Description of Artificial Sequence: Synthetic oligonucleotide
  Sense strand starting at position 3772 of SEQ ID NO: 587513
augacaguucucugcauuu

SEQ ID NO: 797911 - RNA, 19 nt, Artificial Sequence
  Description of Artificial Sequence: Synthetic oligonucleotide
  Antisense strand to SEQ ID NO: 797910
aaaugcagagaacugucau

SEQ ID NO: 797912 - RNA, 19 nt, Artificial Sequence
  Description of Artificial Sequence: Synthetic oligonucleotide
  Sense strand starting at position 3855 of SEQ ID NO: 587513
agaucuaaauguucuguaa

SEQ ID NO: 797913 - RNA, 19 nt, Artificial Sequence
  Description of Artificial Sequence: Synthetic oligonucleotide
  Antisense strand to SEQ ID NO: 797912
uuacagaacauuuagaucu

SEQ ID NO: 797914 - RNA, 19 nt, Artificial Sequence
  Description of Artificial Sequence: Synthetic oligonucleotide
  Sense strand starting at position 3859 of SEQ ID NO: 587513
cuaaauguucuguaaccca

SEQ ID NO: 797915 - RNA, 19 nt, Artificial Sequence
  Description of Artificial Sequence: Synthetic oligonucleotide
  Antisense strand to SEQ ID NO: 797914
uggguuacagaacauuuag

SEQ ID NO: 797916 - RNA, 19 nt, Artificial Sequence
  Description of Artificial Sequence: Synthetic oligonucleotide
  Sense strand starting at position 3878 of SEQ ID NO: 587513
guacauucuggauauaagu

SEQ ID NO: 797917 - RNA, 19 nt, Artificial Sequence
  Description of Artificial Sequence: Synthetic oligonucleotide
  Antisense strand to SEQ ID NO: 797916
acuuauauccagaauguac

SEQ ID NO: 797918 - RNA, 19 nt, Artificial Sequence
  Description of Artificial Sequence: Synthetic oligonucleotide
  Sense strand starting at position 3888 of SEQ ID NO: 587513
gauauaaguguguaccuag

SEQ ID NO: 797919 - RNA, 19 nt, Artificial Sequence
  Description of Artificial Sequence: Synthetic oligonucleotide
  Antisense strand to SEQ ID NO: 797918
cuagguacacacuuauauc

SEQ ID NO: 797920 - RNA, 19 nt, Artificial Sequence
  Description of Artificial Sequence: Synthetic oligonucleotide
  Sense strand starting at position 3906 of SEQ ID NO: 587513
gauuaaugcgugcucaugu

SEQ ID NO: 797921 - RNA, 19 nt, Artificial Sequence
  Description of Artificial Sequence: Synthetic oligonucleotide
  Antisense strand to SEQ ID NO: 797920
acaugagcacgcauuaauc

SEQ ID NO: 797922 - RNA, 19 nt, Artificial Sequence
  Description of Artificial Sequence: Synthetic oligonucleotide
  Sense strand starting at position 373 of SEQ ID NO: 587514
guuacuggcacaugggaaa

SEQ ID NO: 797923 - RNA, 19 nt, Artificial Sequence
  Description of Artificial Sequence: Synthetic oligonucleotide
  Antisense strand to SEQ ID NO: 797922
uuucccaugugccaguaac

SEQ ID NO: 797924 - RNA, 19 nt, Artificial Sequence
  Description of Artificial Sequence: Synthetic oligonucleotide
  Sense strand starting at position 387 of SEQ ID NO: 587514
ggaaauaugcaguaaguca

SEQ ID NO: 797925 - RNA, 19 nt, Artificial Sequence
  Description of Artificial Sequence: Synthetic oligonucleotide
  Antisense strand to SEQ ID NO: 797924
ugacuuacugcauauuucc

SEQ ID NO: 797926 - RNA, 19 nt, Artificial Sequence
  Description of Artificial Sequence: Synthetic oligonucleotide
  Sense strand starting at position 447 of SEQ ID NO: 587514
uuagauaagcaguggacau

SEQ ID NO: 797927 - RNA, 19 nt, Artificial Sequence
  Description of Artificial Sequence: Synthetic oligonucleotide
  Antisense strand to SEQ ID NO: 797926
auguccacugcuuaucuaa

SEQ ID NO: 797928 - RNA, 19 nt, Artificial Sequence
  Description of Artificial Sequence: Synthetic oligonucleotide
  Sense strand starting at position 560 of SEQ ID NO: 587514
aggcauucuccagggaaac

SEQ ID NO: 797929 - RNA, 19 nt, Artificial Sequence
  Description of Artificial Sequence: Synthetic oligonucleotide
  Antisense strand to SEQ ID NO: 797928
guuucccuggagaaugccu

SEQ ID NO: 797930 - RNA, 19 nt, Artificial Sequence
  Description of Artificial Sequence: Synthetic oligonucleotide
  Sense strand starting at position 561 of SEQ ID NO: 587514
ggcauucuccagggaaaca

SEQ ID NO: 797931 - RNA, 19 nt, Artificial Sequence
  Description of Artificial Sequence: Synthetic oligonucleotide
  Antisense strand to SEQ ID NO: 797930
uguuucccuggagaaugcc

SEQ ID NO: 797932 - RNA, 19 nt, Artificial Sequence
  Description of Artificial Sequence: Synthetic oligonucleotide
  Sense strand starting at position 580 of SEQ ID NO: 587514
gcagauguucaagggacua

SEQ ID NO: 797933 - RNA, 19 nt, Artificial Sequence
  Description of Artificial Sequence: Synthetic oligonucleotide
  Antisense strand to SEQ ID NO: 797932
uagucccuugaacaucugc

SEQ ID NO: 797934 - RNA, 19 nt, Artificial Sequence
  Description of Artificial Sequence: Synthetic oligonucleotide
  Sense strand starting at position 645 of SEQ ID NO: 587514
ggauccuugcucugugaac

SEQ ID NO: 797935 - RNA, 19 nt, Artificial Sequence
  Description of Artificial Sequence: Synthetic oligonucleotide
  Antisense strand to SEQ ID NO: 797934
guucacagagcaaggaucc

SEQ ID NO: 797936 - RNA, 19 nt, Artificial Sequence
  Description of Artificial Sequence: Synthetic oligonucleotide
  Sense strand starting at position 646 of SEQ ID NO: 587514
gauccuugcucugugaacu

SEQ ID NO: 797937 - RNA, 19 nt, Artificial Sequence
  Description of Artificial Sequence: Synthetic oligonucleotide
  Antisense strand to SEQ ID NO: 797936
aguucacagagcaaggauc

SEQ ID NO: 797938 - RNA, 19 nt, Artificial Sequence
  Description of Artificial Sequence: Synthetic oligonucleotide
  Sense strand starting at position 669 of SEQ ID NO: 587514
acugaaugugcccaaagcu

SEQ ID NO: 797939 - RNA, 19 nt, Artificial Sequence
  Description of Artificial Sequence: Synthetic oligonucleotide
  Antisense strand to SEQ ID NO: 797938
agcuuugggcacauucagu

SEQ ID NO: 797940 - RNA, 19 nt, Artificial Sequence
  Description of Artificial Sequence: Synthetic oligonucleotide
  Sense strand starting at position 710 of SEQ ID NO: 587514
ggaugcuguguuugauaug

SEQ ID NO: 797941 - RNA, 19 nt, Artificial Sequence
  Description of Artificial Sequence: Synthetic oligonucleotide
  Antisense strand to SEQ ID NO: 797940
cauaucaaacacagcaucc

SEQ ID NO: 797942 - RNA, 19 nt, Artificial Sequence
  Description of Artificial Sequence: Synthetic oligonucleotide
  Sense strand starting at position 715 of SEQ ID NO: 587514
cuguguuugauaugaugag

SEQ ID NO: 797943 - RNA, 19 nt, Artificial Sequence
  Description of Artificial Sequence: Synthetic oligonucleotide
  Antisense strand to SEQ ID NO: 797942
cucaucauaucaaacacag

SEQ ID NO: 797944 - RNA, 19 nt, Artificial Sequence
  Description of Artificial Sequence: Synthetic oligonucleotide
  Sense strand starting at position 719 of SEQ ID NO: 587514
guuugauaugaugaggucu

SEQ ID NO: 797945 - RNA, 19 nt, Artificial Sequence
  Description of Artificial Sequence: Synthetic oligonucleotide
  Antisense strand to SEQ ID NO: 797944
agaccucaucauaucaaac

SEQ ID NO: 797946 - RNA, 19 nt, Artificial Sequence
  Description of Artificial Sequence: Synthetic oligonucleotide
  Sense strand starting at position 784 of SEQ ID NO: 587514
agauccagucccuguucua

SEQ ID NO: 797947 - RNA, 19 nt, Artificial Sequence
  Description of Artificial Sequence: Synthetic oligonucleotide
  Antisense strand to SEQ ID NO: 797946
uagaacagggacuggaucu

SEQ ID NO: 797948 - RNA, 19 nt, Artificial Sequence
  Description of Artificial Sequence: Synthetic oligonucleotide
  Sense strand starting at position 830 of SEQ ID NO: 587514
ucuugugaucccugauauu

SEQ ID NO: 797949 - RNA, 19 nt, Artificial Sequence
  Description of Artificial Sequence: Synthetic oligonucleotide
  Antisense strand to SEQ ID NO: 797948
aauaucagggaucacaaga

SEQ ID NO: 797950 - RNA, 19 nt, Artificial Sequence
  Description of Artificial Sequence: Synthetic oligonucleotide
  Sense strand starting at position 885 of SEQ ID NO: 587514
agggauucgaucugggaug

SEQ ID NO: 797951 - RNA, 19 nt, Artificial Sequence
  Description of Artificial Sequence: Synthetic oligonucleotide
  Antisense strand to SEQ ID NO: 797950
caucccagaucgaaucccu

SEQ ID NO: 797952 - RNA, 19 nt, Artificial Sequence
  Description of Artificial Sequence: Synthetic oligonucleotide
  Sense strand starting at position 1212 of SEQ ID NO: 587514
gguauccguuucucaaaca

SEQ ID NO: 797953 - RNA, 19 nt, Artificial Sequence
  Description of Artificial Sequence: Synthetic oligonucleotide
  Antisense strand to SEQ ID NO: 797952
uguuugagaaacggauacc

SEQ ID NO: 797954 - RNA, 19 nt, Artificial Sequence
  Description of Artificial Sequence: Synthetic oligonucleotide
  Sense strand starting at position 1300 of SEQ ID NO: 587514
uugacuucccaguagaggu

SEQ ID NO: 797955 - RNA, 19 nt, Artificial Sequence
  Description of Artificial Sequence: Synthetic oligonucleotide
  Antisense strand to SEQ ID NO: 797954
accucuacugggaagucaa

SEQ ID NO: 797956 - RNA, 19 nt, Artificial Sequence
  Description of Artificial Sequence: Synthetic oligonucleotide
  Sense strand starting at position 1315 of SEQ ID NO: 587514
aggucuuguuccucaggga

SEQ ID NO: 797957 - RNA, 19 nt, Artificial Sequence
  Description of Artificial Sequence: Synthetic oligonucleotide
  Antisense strand to SEQ ID NO: 797956
ucccugaggaacaagaccu

SEQ ID NO: 797958 - RNA, 19 nt, Artificial Sequence
  Description of Artificial Sequence: Synthetic oligonucleotide
  Sense strand starting at position 2293 of SEQ ID NO: 587514
aaguaugcuguugaaagca

SEQ ID NO: 797959 - RNA, 19 nt, Artificial Sequence
  Description of Artificial Sequence: Synthetic oligonucleotide
  Antisense strand to SEQ ID NO: 797958
ugcuuucaacagcauacuu

SEQ ID NO: 797960 - RNA, 19 nt, Artificial Sequence
  Description of Artificial Sequence: Synthetic oligonucleotide
  Sense strand starting at position 2649 of SEQ ID NO: 587514
ggagguucucccuaugaug

SEQ ID NO: 797961 - RNA, 19 nt, Artificial Sequence
  Description of Artificial Sequence: Synthetic oligonucleotide
  Antisense strand to SEQ ID NO: 797960
caucauagggagaaccucc

SEQ ID NO: 797962 - RNA, 19 nt, Artificial Sequence
  Description of Artificial Sequence: Synthetic oligonucleotide
  Sense strand starting at position 2765 of SEQ ID NO: 587514
agaagcaucgccugggaau

SEQ ID NO: 797963 - RNA, 19 nt, Artificial Sequence
  Description of Artificial Sequence: Synthetic oligonucleotide
  Antisense strand to SEQ ID NO: 797962
auucccaggcgaugcuucu

SEQ ID NO: 797964 - RNA, 19 nt, Artificial Sequence
  Description of Artificial Sequence: Synthetic oligonucleotide
  Sense strand starting at position 2766 of SEQ ID NO: 587514
gaagcaucgccugggaauc

SEQ ID NO: 797965 - RNA, 19 nt, Artificial Sequence
  Description of Artificial Sequence: Synthetic oligonucleotide
  Antisense strand to SEQ ID NO: 797964
gauucccaggcgaugcuuc

SEQ ID NO: 797966 - RNA, 19 nt, Artificial Sequence
  Description of Artificial Sequence: Synthetic oligonucleotide
  Sense strand starting at position 3308 of SEQ ID NO: 587514
uccaucuuugugugaucca

SEQ ID NO: 797967 - RNA, 19 nt, Artificial Sequence
  Description of Artificial Sequence: Synthetic oligonucleotide
  Antisense strand to SEQ ID NO: 797966
uggaucacacaaagaugga

SEQ ID NO: 797968 - RNA, 19 nt, Artificial Sequence
  Description of Artificial Sequence: Synthetic oligonucleotide
  Sense strand starting at position 3311 of SEQ ID NO: 587514
aucuuugugugauccaguu

SEQ ID NO: 797969 - RNA, 19 nt, Artificial Sequence
  Description of Artificial Sequence: Synthetic oligonucleotide
  Antisense strand to SEQ ID NO: 797968
aacuggaucacacaaagau

SEQ ID NO: 797970 - RNA, 19 nt, Artificial Sequence
  Description of Artificial Sequence: Synthetic oligonucleotide
  Sense strand starting at position 3336 of SEQ ID NO: 587514
cucugaguugcugauucuu

SEQ ID NO: 797971 - RNA, 19 nt, Artificial Sequence
  Description of Artificial Sequence: Synthetic oligonucleotide
  Antisense strand to SEQ ID NO: 797970
aagaaucagcaacucagag

SEQ ID NO: 797972 - RNA, 19 nt, Artificial Sequence
  Description of Artificial Sequence: Synthetic oligonucleotide
  Sense strand starting at position 3459 of SEQ ID NO: 587514
augucauauugauugacua

SEQ ID NO: 797973 - RNA, 19 nt, Artificial Sequence
  Description of Artificial Sequence: Synthetic oligonucleotide
  Antisense strand to SEQ ID NO: 797972
uagucaaucaauaugacau

SEQ ID NO: 797974 - RNA, 19 nt, Artificial Sequence
  Description of Artificial Sequence: Synthetic oligonucleotide
  Sense strand starting at position 3460 of SEQ ID NO: 587514
ugucauauugauugacuag

SEQ ID NO: 797975 - RNA, 19 nt, Artificial Sequence
  Description of Artificial Sequence: Synthetic oligonucleotide
  Antisense strand to SEQ ID NO: 797974
cuagucaaucaauaugaca

SEQ ID NO: 797976 - RNA, 19 nt, Artificial Sequence
  Description of Artificial Sequence: Synthetic oligonucleotide
  Sense strand starting at position 3503 of SEQ ID NO: 587514
gaucguaccugccugauua

SEQ ID NO: 797977 - RNA, 19 nt, Artificial Sequence
  Description of Artificial Sequence: Synthetic oligonucleotide
  Antisense strand to SEQ ID NO: 797976
uaaucaggcagguacgauc

SEQ ID NO: 797978 - RNA, 19 nt, Artificial Sequence
  Description of Artificial Sequence: Synthetic oligonucleotide
  Sense strand starting at position 3505 of SEQ ID NO: 587514
ucguaccugccugauuaca

SEQ ID NO: 797979 - RNA, 19 nt, Artificial Sequence
  Description of Artificial Sequence: Synthetic oligonucleotide
  Antisense strand to SEQ ID NO: 797978
uguaaucaggcagguacga

SEQ ID NO: 797980 - RNA, 19 nt, Artificial Sequence
  Description of Artificial Sequence: Synthetic oligonucleotide
  Sense strand starting at position 3507 of SEQ ID NO: 587514
guaccugccugauuacaau

SEQ ID NO: 797981 - RNA, 19 nt, Artificial Sequence
  Description of Artificial Sequence: Synthetic oligonucleotide
  Antisense strand to SEQ ID NO: 797980
auuguaaucaggcagguac

SEQ ID NO: 797982 - RNA, 19 nt, Artificial Sequence
  Description of Artificial Sequence: Synthetic oligonucleotide
  Sense strand starting at position 3547 of SEQ ID NO: 587514
gaauaagccgagugagaga

SEQ ID NO: 797983 - RNA, 19 nt, Artificial Sequence
  Description of Artificial Sequence: Synthetic oligonucleotide
  Antisense strand to SEQ ID NO: 797982
ucucucacucggcuuauuc

SEQ ID NO: 797984 - RNA, 19 nt, Artificial Sequence
  Description of Artificial Sequence: Synthetic oligonucleotide
  Sense strand starting at position 3558 of SEQ ID NO: 587514
gugagagaguaggcaucuu

SEQ ID NO: 797985 - RNA, 19 nt, Artificial Sequence
  Description of Artificial Sequence: Synthetic oligonucleotide
  Antisense strand to SEQ ID NO: 797984
aagaugccuacucucucac

SEQ ID NO: 797986 - RNA, 19 nt, Artificial Sequence
  Description of Artificial Sequence: Synthetic oligonucleotide
  Sense strand starting at position 3599 of SEQ ID NO: 587514
ggcauaucagcacgggauu

SEQ ID NO: 797987 - RNA, 19 nt, Artificial Sequence
  Description of Artificial Sequence: Synthetic oligonucleotide
  Antisense strand to SEQ ID NO: 797986
aaucccgugcugauaugcc

SEQ ID NO: 797988 - RNA, 19 nt, Artificial Sequence
  Description of Artificial Sequence: Synthetic oligonucleotide
  Sense strand starting at position 3630 of SEQ ID NO: 587514
ggacauuugagcugugucu

SEQ ID NO: 797989 - RNA, 19 nt, Artificial Sequence
  Description of Artificial Sequence: Synthetic oligonucleotide
  Antisense strand to SEQ ID NO: 797988
agacacagcucaaaugucc

SEQ ID NO: 797990 - RNA, 19 nt, Artificial Sequence
  Description of Artificial Sequence: Synthetic oligonucleotide
  Sense strand starting at position 3632 of SEQ ID NO: 587514
acauuugagcugugucuua

SEQ ID NO: 797991 - RNA, 19 nt, Artificial Sequence
  Description of Artificial Sequence: Synthetic oligonucleotide
  Antisense strand to SEQ ID NO: 797990
uaagacacagcucaaaugu

SEQ ID NO: 797992 - RNA, 19 nt, Artificial Sequence
  Description of Artificial Sequence: Synthetic oligonucleotide
  Sense strand starting at position 3668 of SEQ ID NO: 587514
guggcaaauaggugguuau

SEQ ID NO: 797993 - RNA, 19 nt, Artificial Sequence
  Description of Artificial Sequence: Synthetic oligonucleotide
  Antisense strand to SEQ ID NO: 797992
auaaccaccuauuugccac

SEQ ID NO: 797994 - RNA, 19 nt, Artificial Sequence
  Description of Artificial Sequence: Synthetic oligonucleotide
  Sense strand starting at position 3669 of SEQ ID NO: 587514
uggcaaauaggugguuauu

SEQ ID NO: 797995 - RNA, 19 nt, Artificial Sequence
  Description of Artificial Sequence: Synthetic oligonucleotide
  Antisense strand to SEQ ID NO: 797994
aauaaccaccuauuugcca

SEQ ID NO: 797996 - RNA, 19 nt, Artificial Sequence
  Description of Artificial Sequence: Synthetic oligonucleotide
  Sense strand starting at position 3736 of SEQ ID NO: 587514
cagaguguguuucccaaac

SEQ ID NO: 797997 - RNA, 19 nt, Artificial Sequence
  Description of Artificial Sequence: Synthetic oligonucleotide
  Antisense strand to SEQ ID NO: 797996
guuugggaaacacacucug

SEQ ID NO: 797998 - RNA, 19 nt, Artificial Sequence
  Description of Artificial Sequence: Synthetic oligonucleotide
  Sense strand starting at position 3788 of SEQ ID NO: 587514
cccuucuuaccaugugaca

SEQ ID NO: 797999 - RNA, 19 nt, Artificial Sequence
  Description of Artificial Sequence: Synthetic oligonucleotide
  Antisense strand to SEQ ID NO: 797998
ugucacaugguaagaaggg

SEQ ID NO: 798000 - RNA, 19 nt, Artificial Sequence
  Description of Artificial Sequence: Synthetic oligonucleotide
  Sense strand starting at position 3831 of SEQ ID NO: 587514
gggucuauguucucaccuu

SEQ ID NO: 798001 - RNA, 19 nt, Artificial Sequence
  Description of Artificial Sequence: Synthetic oligonucleotide
  Antisense strand to SEQ ID NO: 798000
aaggugagaacauagaccc

SEQ ID NO: 798002 - RNA, 19 nt, Artificial Sequence
  Description of Artificial Sequence: Synthetic oligonucleotide
  Sense strand starting at position 840 of SEQ ID NO: 587515
aggaaaucuuaauaagguu

SEQ ID NO: 798003 - RNA, 19 nt, Artificial Sequence
  Description of Artificial Sequence: Synthetic oligonucleotide
  Antisense strand to SEQ ID NO: 798002
aaccuuauuaagauuuccu

SEQ ID NO: 798004 - RNA, 19 nt, Artificial Sequence
  Description of Artificial Sequence: Synthetic oligonucleotide
  Sense strand starting at position 995 of SEQ ID NO: 587515
agacacuucuuaguuuacu

SEQ ID NO: 798005 - RNA, 19 nt, Artificial Sequence
  Description of Artificial Sequence: Synthetic oligonucleotide
  Antisense strand to SEQ ID NO: 798004
aguaaacuaagaagugucu

SEQ ID NO: 798006 - RNA, 19 nt, Artificial Sequence
  Description of Artificial Sequence: Synthetic oligonucleotide
  Sense strand starting at position 1025 of SEQ ID NO: 587515
gcuugaguccaaugugaaa

SEQ ID NO: 798007 - RNA, 19 nt, Artificial Sequence
  Description of Artificial Sequence: Synthetic oligonucleotide
  Antisense strand to SEQ ID NO: 798006
uuucacauuggacucaagc

SEQ ID NO: 798008 - RNA, 19 nt, Artificial Sequence
  Description of Artificial Sequence: Synthetic oligonucleotide
  Sense strand starting at position 1164 of SEQ ID NO: 587515
gugccugcuucgaggaagu

SEQ ID NO: 798009 - RNA, 19 nt, Artificial Sequence
  Description of Artificial Sequence: Synthetic oligonucleotide
  Antisense strand to SEQ ID NO: 798008
acuuccucgaagcaggcac

SEQ ID NO: 798010 - RNA, 19 nt, Artificial Sequence
  Description of Artificial Sequence: Synthetic oligonucleotide
  Sense strand starting at position 1315 of SEQ ID NO: 587515
aucucaaguuacuuaguua

SEQ ID NO: 798011 - RNA, 19 nt, Artificial Sequence
  Description of Artificial Sequence: Synthetic oligonucleotide
  Antisense strand to SEQ ID NO: 798010
uaacuaaguaacuugagau

SEQ ID NO: 798012 - RNA, 19 nt, Artificial Sequence
  Description of Artificial Sequence: Synthetic oligonucleotide
  Sense strand starting at position 1318 of SEQ ID NO: 587515
ucaaguuacuuaguuaacu

SEQ ID NO: 798013 - RNA, 19 nt, Artificial Sequence
  Description of Artificial Sequence: Synthetic oligonucleotide
  Antisense strand to SEQ ID NO: 798012
aguuaacuaaguaacuuga

SEQ ID NO: 798014 - RNA, 19 nt, Artificial Sequence
  Description of Artificial Sequence: Synthetic oligonucleotide
  Sense strand starting at position 1456 of SEQ ID NO: 587515
cucugagcuccagacugaa

SEQ ID NO: 798015 - RNA, 19 nt, Artificial Sequence
  Description of Artificial Sequence: Synthetic oligonucleotide
  Antisense strand to SEQ ID NO: 798014
uucagucuggagcucagag

SEQ ID NO: 798016 - RNA, 19 nt, Artificial Sequence
  Description of Artificial Sequence: Synthetic oligonucleotide
  Sense strand starting at position 2439 of SEQ ID NO: 587515
gggauguguccgcagcgau

SEQ ID NO: 798017 - RNA, 19 nt, Artificial Sequence
  Description of Artificial Sequence: Synthetic oligonucleotide
  Antisense strand to SEQ ID NO: 798016
aucgcugcggacacauccc

SEQ ID NO: 798018 - RNA, 19 nt, Artificial Sequence
  Description of Artificial Sequence: Synthetic oligonucleotide
  Sense strand starting at position 2440 of SEQ ID NO: 587515
ggauguguccgcagcgaug

SEQ ID NO: 798019 - RNA, 19 nt, Artificial Sequence
  Description of Artificial Sequence: Synthetic oligonucleotide
  Antisense strand to SEQ ID NO: 798018
caucgcugcggacacaucc

SEQ ID NO: 798020 - RNA, 19 nt, Artificial Sequence
  Description of Artificial Sequence: Synthetic oligonucleotide
  Sense strand starting at position 2643 of SEQ ID NO: 587515
ucccucaguucugugcuua

SEQ ID NO: 798021 - RNA, 19 nt, Artificial Sequence
  Description of Artificial Sequence: Synthetic oligonucleotide
  Antisense strand to SEQ ID NO: 798020
uaagcacagaacugaggga

SEQ ID NO: 798022 - RNA, 19 nt, Artificial Sequence
  Description of Artificial Sequence: Synthetic oligonucleotide
  Sense strand starting at position 2678 of SEQ ID NO: 587515
aauugucacuuucugggaa

SEQ ID NO: 798023 - RNA, 19 nt, Artificial Sequence
  Description of Artificial Sequence: Synthetic oligonucleotide
  Antisense strand to SEQ ID NO: 798022
uucccagaaagugacaauu

SEQ ID NO: 798024 - RNA, 19 nt, Artificial Sequence
  Description of Artificial Sequence: Synthetic oligonucleotide
  Sense strand starting at position 2679 of SEQ ID NO: 587515
auugucacuuucugggaaa

SEQ ID NO: 798025 - RNA, 19 nt, Artificial Sequence
  Description of Artificial Sequence: Synthetic oligonucleotide
  Antisense strand to SEQ ID NO: 798024
uuucccagaaagugacaau

SEQ ID NO: 798026 - RNA, 19 nt, Artificial Sequence
  Description of Artificial Sequence: Synthetic oligonucleotide
  Sense strand starting at position 2710 of SEQ ID NO: 587515
gggaggguucuuugaccgu

SEQ ID NO: 798027 - RNA, 19 nt, Artificial Sequence
  Description of Artificial Sequence: Synthetic oligonucleotide
  Antisense strand to SEQ ID NO: 798026
acggucaaagaacccuccc

SEQ ID NO: 798028 - RNA, 19 nt, Artificial Sequence
  Description of Artificial Sequence: Synthetic oligonucleotide
  Sense strand starting at position 2865 of SEQ ID NO: 587515
ccaggcugauaauauguaa

SEQ ID NO: 798029 - RNA, 19 nt, Artificial Sequence
  Description of Artificial Sequence: Synthetic oligonucleotide
  Antisense strand to SEQ ID NO: 798028
uuacauauuaucagccugg

SEQ ID NO: 798030 - RNA, 19 nt, Artificial Sequence
  Description of Artificial Sequence: Synthetic oligonucleotide
  Sense strand starting at position 2889 of SEQ ID NO: 587515
ucuaaacucuaccgcaaga

SEQ ID NO: 798031 - RNA, 19 nt, Artificial Sequence
  Description of Artificial Sequence: Synthetic oligonucleotide
  Antisense strand to SEQ ID NO: 798030
ucuugcgguagaguuuaga

SEQ ID NO: 798032 - RNA, 19 nt, Artificial Sequence
  Description of Artificial Sequence: Synthetic oligonucleotide
  Sense strand starting at position 3115 of SEQ ID NO: 587515
ggacaucgccagugguaag

SEQ ID NO: 798033 - RNA, 19 nt, Artificial Sequence
  Description of Artificial Sequence: Synthetic oligonucleotide
  Antisense strand to SEQ ID NO: 798032
cuuaccacuggcgaugucc

SEQ ID NO: 798034 - RNA, 19 nt, Artificial Sequence
  Description of Artificial Sequence: Synthetic oligonucleotide
  Sense strand starting at position 3144 of SEQ ID NO: 587515
gcugccauucuagaaauug

SEQ ID NO: 798035 - RNA, 19 nt, Artificial Sequence
  Description of Artificial Sequence: Synthetic oligonucleotide
  Antisense strand to SEQ ID NO: 798034
caauuucuagaauggcagc

SEQ ID NO: 798036 - RNA, 19 nt, Artificial Sequence
  Description of Artificial Sequence: Synthetic oligonucleotide
  Sense strand starting at position 3152 of SEQ ID NO: 587515
ucuagaaauuggcuuggua

SEQ ID NO: 798037 - RNA, 19 nt, Artificial Sequence
  Description of Artificial Sequence: Synthetic oligonucleotide
  Antisense strand to SEQ ID NO: 798036
uaccaagccaauuucuaga

SEQ ID NO: 798038 - RNA, 19 nt, Artificial Sequence
  Description of Artificial Sequence: Synthetic oligonucleotide
  Sense strand starting at position 3154 of SEQ ID NO: 587515
uagaaauuggcuugguagu

SEQ ID NO: 798039 - RNA, 19 nt, Artificial Sequence
  Description of Artificial Sequence: Synthetic oligonucleotide
  Antisense strand to SEQ ID NO: 798038
acuaccaagccaauuucua

SEQ ID NO: 798040 - RNA, 19 nt, Artificial Sequence
  Description of Artificial Sequence: Synthetic oligonucleotide
  Sense strand starting at position 3155 of SEQ ID NO: 587515
agaaauuggcuugguaguu

SEQ ID NO: 798041 - RNA, 19 nt, Artificial Sequence
  Description of Artificial Sequence: Synthetic oligonucleotide
  Antisense strand to SEQ ID NO: 798040
aacuaccaagccaauuucu

SEQ ID NO: 798042 - RNA, 19 nt, Artificial Sequence
  Description of Artificial Sequence: Synthetic oligonucleotide
  Sense strand starting at position 3156 of SEQ ID NO: 587515
gaaauuggcuugguaguuu

SEQ ID NO: 798043 - RNA, 19 nt, Artificial Sequence
  Description of Artificial Sequence: Synthetic oligonucleotide
  Antisense strand to SEQ ID NO: 798042
aaacuaccaagccaauuuc

SEQ ID NO: 798044 - RNA, 19 nt, Artificial Sequence
  Description of Artificial Sequence: Synthetic oligonucleotide
  Sense strand starting at position 3511 of SEQ ID NO: 587515
aucugauacuguuuggaag

SEQ ID NO: 798045 - RNA, 19 nt, Artificial Sequence
  Description of Artificial Sequence: Synthetic oligonucleotide
  Antisense strand to SEQ ID NO: 798044
cuuccaaacaguaucagau

SEQ ID NO: 798046 - RNA, 19 nt, Artificial Sequence
  Description of Artificial Sequence: Synthetic oligonucleotide
  Sense strand starting at position 3512 of SEQ ID NO: 587515
ucugauacuguuuggaagu

SEQ ID NO: 798047 - RNA, 19 nt, Artificial Sequence
  Description of Artificial Sequence: Synthetic oligonucleotide
  Antisense strand to SEQ ID NO: 798046
acuuccaaacaguaucaga

SEQ ID NO: 798048 - RNA, 19 nt, Artificial Sequence
  Description of Artificial Sequence: Synthetic oligonucleotide
  Sense strand starting at position 3514 of SEQ ID NO: 587515
ugauacuguuuggaaguga

SEQ ID NO: 798049 - RNA, 19 nt, Artificial Sequence
  Description of Artificial Sequence: Synthetic oligonucleotide
  Antisense strand to SEQ ID NO: 798048
ucacuuccaaacaguauca

SEQ ID NO: 798050 - RNA, 19 nt, Artificial Sequence
  Description of Artificial Sequence: Synthetic oligonucleotide
  Sense strand starting at position 3538 of SEQ ID NO: 587515
cugcacaucucauggaaau

SEQ ID NO: 798051 - RNA, 19 nt, Artificial Sequence
  Description of Artificial Sequence: Synthetic oligonucleotide
  Antisense strand to SEQ ID NO: 798050
auuuccaugagaugugcag

SEQ ID NO: 798052 - RNA, 19 nt, Artificial Sequence
  Description of Artificial Sequence: Synthetic oligonucleotide
  Sense strand starting at position 3539 of SEQ ID NO: 587515
ugcacaucucauggaaaug

SEQ ID NO: 798053 - RNA, 19 nt, Artificial Sequence
  Description of Artificial Sequence: Synthetic oligonucleotide
  Antisense strand to SEQ ID NO: 798052
cauuuccaugagaugugca

SEQ ID NO: 798054 - RNA, 19 nt, Artificial Sequence
  Description of Artificial Sequence: Synthetic oligonucleotide
  Sense strand starting at position 3594 of SEQ ID NO: 587515
cuauuugggucaugaguag

SEQ ID NO: 798055 - RNA, 19 nt, Artificial Sequence
  Description of Artificial Sequence: Synthetic oligonucleotide
  Antisense strand to SEQ ID NO: 798054
cuacucaugacccaaauag

SEQ ID NO: 798056 - RNA, 19 nt, Artificial Sequence
  Description of Artificial Sequence: Synthetic oligonucleotide
  Sense strand starting at position 3691 of SEQ ID NO: 587515
gcucuuaccaagugacgga

SEQ ID NO: 798057 - RNA, 19 nt, Artificial Sequence
  Description of Artificial Sequence: Synthetic oligonucleotide
  Antisense strand to SEQ ID NO: 798056
uccgucacuugguaagagc

SEQ ID NO: 798058 - RNA, 19 nt, Artificial Sequence
  Description of Artificial Sequence: Synthetic oligonucleotide
  Sense strand starting at position 3764 of SEQ ID NO: 587515
ccagaagccucuucuugua

SEQ ID NO: 798059 - RNA, 19 nt, Artificial Sequence
  Description of Artificial Sequence: Synthetic oligonucleotide
  Antisense strand to SEQ ID NO: 798058
uacaagaagaggcuucugg

SEQ ID NO: 798060 - RNA, 19 nt, Artificial Sequence
  Description of Artificial Sequence: Synthetic oligonucleotide
  Sense strand starting at position 3769 of SEQ ID NO: 587515
agccucuucuuguacagua

SEQ ID NO: 798061 - RNA, 19 nt, Artificial Sequence
  Description of Artificial Sequence: Synthetic oligonucleotide
  Antisense strand to SEQ ID NO: 798060
uacuguacaagaagaggcu

SEQ ID NO: 798062 - RNA, 19 nt, Artificial Sequence
  Description of Artificial Sequence: Synthetic oligonucleotide
  Sense strand starting at position 3823 of SEQ ID NO: 587515
ugaacugugagccaagcaa

SEQ ID NO: 798063 - RNA, 19 nt, Artificial Sequence
  Description of Artificial Sequence: Synthetic oligonucleotide
  Antisense strand to SEQ ID NO: 798062
uugcuuggcucacaguuca

SEQ ID NO: 798064 - RNA, 19 nt, Artificial Sequence
  Description of Artificial Sequence: Synthetic oligonucleotide
  Sense strand starting at position 3872 of SEQ ID NO: 587515
uggaguugccgcucuuguu

SEQ ID NO: 798065 - RNA, 19 nt, Artificial Sequence
  Description of Artificial Sequence: Synthetic oligonucleotide
  Antisense strand to SEQ ID NO: 798064
aacaagagcggcaacucca

SEQ ID NO: 798066 - RNA, 19 nt, Artificial Sequence
  Description of Artificial Sequence: Synthetic oligonucleotide
  Sense strand starting at position 198 of SEQ ID NO: 587516
caggauauguaagaauuag

SEQ ID NO: 798067 - RNA, 19 nt, Artificial Sequence
  Description of Artificial Sequence: Synthetic oligonucleotide
  Antisense strand to SEQ ID NO: 798066
cuaauucuuacauauccug

SEQ ID NO: 798068 - RNA, 19 nt, Artificial Sequence
  Description of Artificial Sequence: Synthetic oligonucleotide
  Sense strand starting at position 278 of SEQ ID NO: 587516
uugacauuagcauacaagu

SEQ ID NO: 798069 - RNA, 19 nt, Artificial Sequence
  Description of Artificial Sequence: Synthetic oligonucleotide
  Antisense strand to SEQ ID NO: 798068
acuuguaugcuaaugucaa

SEQ ID NO: 798070 - RNA, 19 nt, Artificial Sequence
  Description of Artificial Sequence: Synthetic oligonucleotide
  Sense strand starting at position 381 of SEQ ID NO: 587516
ggauguguaagaggcagaa

SEQ ID NO: 798071 - RNA, 19 nt, Artificial Sequence
  Description of Artificial Sequence: Synthetic oligonucleotide
  Antisense strand to SEQ ID NO: 798070
uucugccucuuacacaucc

SEQ ID NO: 798072 - RNA, 19 nt, Artificial Sequence
  Description of Artificial Sequence: Synthetic oligonucleotide
  Sense strand starting at position 402 of SEQ ID NO: 587516
aagggacuauaguaugaau

SEQ ID NO: 798073 - RNA, 19 nt, Artificial Sequence
  Description of Artificial Sequence: Synthetic oligonucleotide
  Antisense strand to SEQ ID NO: 798072
auucauacuauagucccuu

SEQ ID NO: 798074 - RNA, 19 nt, Artificial Sequence
  Description of Artificial Sequence: Synthetic oligonucleotide
  Sense strand starting at position 405 of SEQ ID NO: 587516
ggacuauaguaugaauuau

SEQ ID NO: 798075 - RNA, 19 nt, Artificial Sequence
  Description of Artificial Sequence: Synthetic oligonucleotide
  Antisense strand to SEQ ID NO: 798074
auaauucauacuauagucc

SEQ ID NO: 798076 - RNA, 19 nt, Artificial Sequence
  Description of Artificial Sequence: Synthetic oligonucleotide
  Sense strand starting at position 444 of SEQ ID NO: 587516
gacccuaaauaugugaguu

SEQ ID NO: 798077 - RNA, 19 nt, Artificial Sequence
  Description of Artificial Sequence: Synthetic oligonucleotide
  Antisense strand to SEQ ID NO: 798076
aacucacauauuuaggguc

SEQ ID NO: 798078 - RNA, 19 nt, Artificial Sequence
  Description of Artificial Sequence: Synthetic oligonucleotide
  Sense strand starting at position 624 of SEQ ID NO: 587516
acuucugacugcccaguua

SEQ ID NO: 798079 - RNA, 19 nt, Artificial Sequence
  Description of Artificial Sequence: Synthetic oligonucleotide
  Antisense strand to SEQ ID NO: 798078
uaacugggcagucagaagu

SEQ ID NO: 798080 - RNA, 19 nt, Artificial Sequence
  Description of Artificial Sequence: Synthetic oligonucleotide
  Sense strand starting at position 639 of SEQ ID NO: 587516
guuauaaaucaaggguuuc

SEQ ID NO: 798081 - RNA, 19 nt, Artificial Sequence
  Description of Artificial Sequence: Synthetic oligonucleotide
  Antisense strand to SEQ ID NO: 798080
gaaacccuugauuuauaac

SEQ ID NO: 798082 - RNA, 19 nt, Artificial Sequence
  Description of Artificial Sequence: Synthetic oligonucleotide
  Sense strand starting at position 827 of SEQ ID NO: 587516
guaggaauaucuuauuauc

SEQ ID NO: 798083 - RNA, 19 nt, Artificial Sequence
  Description of Artificial Sequence: Synthetic oligonucleotide
  Antisense strand to SEQ ID NO: 798082
gauaauaagauauuccuac

SEQ ID NO: 798084 - RNA, 19 nt, Artificial Sequence
  Description of Artificial Sequence: Synthetic oligonucleotide
  Sense strand starting at position 830 of SEQ ID NO: 587516
ggaauaucuuauuaucagc

SEQ ID NO: 798085 - RNA, 19 nt, Artificial Sequence
  Description of Artificial Sequence: Synthetic oligonucleotide
  Antisense strand to SEQ ID NO: 798084
gcugauaauaagauauucc

SEQ ID NO: 798086 - RNA, 19 nt, Artificial Sequence
  Description of Artificial Sequence: Synthetic oligonucleotide
  Sense strand starting at position 940 of SEQ ID NO: 587516
ggcagaaacaguuacguca

SEQ ID NO: 798087 - RNA, 19 nt, Artificial Sequence
  Description of Artificial Sequence: Synthetic oligonucleotide
  Antisense strand to SEQ ID NO: 798086
ugacguaacuguuucugcc

SEQ ID NO: 798088 - RNA, 19 nt, Artificial Sequence
  Description of Artificial Sequence: Synthetic oligonucleotide
  Sense strand starting at position 1071 of SEQ ID NO: 587516
ggcauuaagcaauaaguca

SEQ ID NO: 798089 - RNA, 19 nt, Artificial Sequence
  Description of Artificial Sequence: Synthetic oligonucleotide
  Antisense strand to SEQ ID NO: 798088
ugacuuauugcuuaaugcc

SEQ ID NO: 798090 - RNA, 19 nt, Artificial Sequence
  Description of Artificial Sequence: Synthetic oligonucleotide
  Sense strand starting at position 1113 of SEQ ID NO: 587516
uccucaucuguuuggaacu

SEQ ID NO: 798091 - RNA, 19 nt, Artificial Sequence
  Description of Artificial Sequence: Synthetic oligonucleotide
  Antisense strand to SEQ ID NO: 798090
aguuccaaacagaugagga

SEQ ID NO: 798092 - RNA, 19 nt, Artificial Sequence
  Description of Artificial Sequence: Synthetic oligonucleotide
  Sense strand starting at position 1197 of SEQ ID NO: 587516
ugggcaaagucauaauaaa

SEQ ID NO: 798093 - RNA, 19 nt, Artificial Sequence
  Description of Artificial Sequence: Synthetic oligonucleotide
  Antisense strand to SEQ ID NO: 798092
uuuauuaugacuuugccca

SEQ ID NO: 798094 - RNA, 19 nt, Artificial Sequence
  Description of Artificial Sequence: Synthetic oligonucleotide
  Sense strand starting at position 1225 of SEQ ID NO: 587516
auagaaaccuggcagaagu

SEQ ID NO: 798095 - RNA, 19 nt, Artificial Sequence
  Description of Artificial Sequence: Synthetic oligonucleotide
  Antisense strand to SEQ ID NO: 798094
acuucugccagguuucuau

SEQ ID NO: 798096 - RNA, 19 nt, Artificial Sequence
  Description of Artificial Sequence: Synthetic oligonucleotide
  Sense strand starting at position 1480 of SEQ ID NO: 587516
cagacucucgagggaaguu

SEQ ID NO: 798097 - RNA, 19 nt, Artificial Sequence
  Description of Artificial Sequence: Synthetic oligonucleotide
  Antisense strand to SEQ ID NO: 798096
aacuucccucgagagucug

SEQ ID NO: 798098 - RNA, 19 nt, Artificial Sequence
  Description of Artificial Sequence: Synthetic oligonucleotide
  Sense strand starting at position 1489 of SEQ ID NO: 587516
gagggaaguugagcuguaa

SEQ ID NO: 798099 - RNA, 19 nt, Artificial Sequence
  Description of Artificial Sequence: Synthetic oligonucleotide
  Antisense strand to SEQ ID NO: 798098
uuacagcucaacuucccuc

SEQ ID NO: 798100 - RNA, 19 nt, Artificial Sequence
  Description of Artificial Sequence: Synthetic oligonucleotide
  Sense strand starting at position 2197 of SEQ ID NO: 587516
ccacgcucccuuuaggaaa

SEQ ID NO: 798101 - RNA, 19 nt, Artificial Sequence
  Description of Artificial Sequence: Synthetic oligonucleotide
  Antisense strand to SEQ ID NO: 798100
uuuccuaaagggagcgugg

SEQ ID NO: 798102 - RNA, 19 nt, Artificial Sequence
  Description of Artificial Sequence: Synthetic oligonucleotide
  Sense strand starting at position 2662 of SEQ ID NO: 587516
aggugaauuucugaaauug

SEQ ID NO: 798103 - RNA, 19 nt, Artificial Sequence
  Description of Artificial Sequence: Synthetic oligonucleotide
  Antisense strand to SEQ ID NO: 798102
caauuucagaaauucaccu

SEQ ID NO: 798104 - RNA, 19 nt, Artificial Sequence
  Description of Artificial Sequence: Synthetic oligonucleotide
  Sense strand starting at position 2774 of SEQ ID NO: 587516
uuuaaauucgcgguggcuu

SEQ ID NO: 798105 - RNA, 19 nt, Artificial Sequence
  Description of Artificial Sequence: Synthetic oligonucleotide
  Antisense strand to SEQ ID NO: 798104
aagccaccgcgaauuuaaa

SEQ ID NO: 798106 - RNA, 19 nt, Artificial Sequence
  Description of Artificial Sequence: Synthetic oligonucleotide
  Sense strand starting at position 2863 of SEQ ID NO: 587516
agugaucaacauggugaaa

SEQ ID NO: 798107 - RNA, 19 nt, Artificial Sequence
  Description of Artificial Sequence: Synthetic oligonucleotide
  Antisense strand to SEQ ID NO: 798106
uuucaccauguugaucacu

SEQ ID NO: 798108 - RNA, 19 nt, Artificial Sequence
  Description of Artificial Sequence: Synthetic oligonucleotide
  Sense strand starting at position 3103 of SEQ ID NO: 587516
acauauugcugucugaguu

SEQ ID NO: 798109 - RNA, 19 nt, Artificial Sequence
  Description of Artificial Sequence: Synthetic oligonucleotide
  Antisense strand to SEQ ID NO: 798108
aacucagacagcaauaugu

SEQ ID NO: 798110 - RNA, 19 nt, Artificial Sequence
  Description of Artificial Sequence: Synthetic oligonucleotide
  Sense strand starting at position 3160 of SEQ ID NO: 587516
cugguugaugagugaauca

SEQ ID NO: 798111 - RNA, 19 nt, Artificial Sequence
  Description of Artificial Sequence: Synthetic oligonucleotide
  Antisense strand to SEQ ID NO: 798110
ugauucacucaucaaccag

SEQ ID NO: 798112 - RNA, 19 nt, Artificial Sequence
  Description of Artificial Sequence: Synthetic oligonucleotide
  Sense strand starting at position 3169 of SEQ ID NO: 587516
gagugaaucagugacggca

SEQ ID NO: 798113 - RNA, 19 nt, Artificial Sequence
  Description of Artificial Sequence: Synthetic oligonucleotide
  Antisense strand to SEQ ID NO: 798112
ugccgucacugauucacuc

SEQ ID NO: 798114 - RNA, 19 nt, Artificial Sequence
  Description of Artificial Sequence: Synthetic oligonucleotide
  Sense strand starting at position 3221 of SEQ ID NO: 587516
ggucucaguagccaucaga

SEQ ID NO: 798115 - RNA, 19 nt, Artificial Sequence
  Description of Artificial Sequence: Synthetic oligonucleotide
  Antisense strand to SEQ ID NO: 798114
ucugauggcuacugagacc

SEQ ID NO: 798116 - RNA, 19 nt, Artificial Sequence
  Description of Artificial Sequence: Synthetic oligonucleotide
  Sense strand starting at position 3224 of SEQ ID NO: 587516
cucaguagccaucagauaa

SEQ ID NO: 798117 - RNA, 19 nt, Artificial Sequence
  Description of Artificial Sequence: Synthetic oligonucleotide
  Antisense strand to SEQ ID NO: 798116
uuaucugauggcuacugag

SEQ ID NO: 798118 - RNA, 19 nt, Artificial Sequence
  Description of Artificial Sequence: Synthetic oligonucleotide
  Sense strand starting at position 3274 of SEQ ID NO: 587516
gcagucaggccucagagaa

SEQ ID NO: 798119 - RNA, 19 nt, Artificial Sequence
  Description of Artificial Sequence: Synthetic oligonucleotide
  Antisense strand to SEQ ID NO: 798118
uucucugaggccugacugc

SEQ ID NO: 798120 - RNA, 19 nt, Artificial Sequence
  Description of Artificial Sequence: Synthetic oligonucleotide
  Sense strand starting at position 3313 of SEQ ID NO: 587516
uuucuauccugagugcuga

SEQ ID NO: 798121 - RNA, 19 nt, Artificial Sequence
  Description of Artificial Sequence: Synthetic oligonucleotide
  Antisense strand to SEQ ID NO: 798120
ucagcacucaggauagaaa

SEQ ID NO: 798122 - RNA, 19 nt, Artificial Sequence
  Description of Artificial Sequence: Synthetic oligonucleotide
  Sense strand starting at position 3314 of SEQ ID NO: 587516
uucuauccugagugcugaa

SEQ ID NO: 798123 - RNA, 19 nt, Artificial Sequence
  Description of Artificial Sequence: Synthetic oligonucleotide
  Antisense strand to SEQ ID NO: 798122
uucagcacucaggauagaa

SEQ ID NO: 798124 - RNA, 19 nt, Artificial Sequence
  Description of Artificial Sequence: Synthetic oligonucleotide
  Sense strand starting at position 3355 of SEQ ID NO: 587516
gccuuaguugggugugaca

SEQ ID NO: 798125 - RNA, 19 nt, Artificial Sequence
  Description of Artificial Sequence: Synthetic oligonucleotide
  Antisense strand to SEQ ID NO: 798124
ugucacacccaacuaaggc

SEQ ID NO: 798126 - RNA, 19 nt, Artificial Sequence
  Description of Artificial Sequence: Synthetic oligonucleotide
  Sense strand starting at position 3503 of SEQ ID NO: 587516
gauggagaccagugguaug

SEQ ID NO: 798127 - RNA, 19 nt, Artificial Sequence
  Description of Artificial Sequence: Synthetic oligonucleotide
  Antisense strand to SEQ ID NO: 798126
cauaccacuggucuccauc

SEQ ID NO: 798128 - RNA, 19 nt, Artificial Sequence
  Description of Artificial Sequence: Synthetic oligonucleotide
  Sense strand starting at position 3506 of SEQ ID NO: 587516
ggagaccagugguaugacu

SEQ ID NO: 798129 - RNA, 19 nt, Artificial Sequence
  Description of Artificial Sequence: Synthetic oligonucleotide
  Antisense strand to SEQ ID NO: 798128
agucauaccacuggucucc

SEQ ID NO: 798130 - RNA, 19 nt, Artificial Sequence
  Description of Artificial Sequence: Synthetic oligonucleotide
  Sense strand starting at position 3633 of SEQ ID NO: 587516
gaggcucuuccaugggaaa

SEQ ID NO: 798131 - RNA, 19 nt, Artificial Sequence
  Description of Artificial Sequence: Synthetic oligonucleotide
  Antisense strand to SEQ ID NO: 798130
uuucccauggaagagccuc

SEQ ID NO: 798132 - RNA, 19 nt, Artificial Sequence
  Description of Artificial Sequence: Synthetic oligonucleotide
  Sense strand starting at position 3653 of SEQ ID NO: 587516
cugucuugaucuuuaggua

SEQ ID NO: 798133 - RNA, 19 nt, Artificial Sequence
  Description of Artificial Sequence: Synthetic oligonucleotide
  Antisense strand to SEQ ID NO: 798132
uaccuaaagaucaagacag

SEQ ID NO: 798134 - RNA, 19 nt, Artificial Sequence
  Description of Artificial Sequence: Synthetic oligonucleotide
  Sense strand starting at position 3654 of SEQ ID NO: 587516
ugucuugaucuuuagguac

SEQ ID NO: 798135 - RNA, 19 nt, Artificial Sequence
  Description of Artificial Sequence: Synthetic oligonucleotide
  Antisense strand to SEQ ID NO: 798134
guaccuaaagaucaagaca

SEQ ID NO: 798136 - RNA, 19 nt, Artificial Sequence
  Description of Artificial Sequence: Synthetic oligonucleotide
  Sense strand starting at position 3674 of SEQ ID NO: 587516
uggagauucugggccacuu

SEQ ID NO: 798137 - RNA, 19 nt, Artificial Sequence
  Description of Artificial Sequence: Synthetic oligonucleotide
  Antisense strand to SEQ ID NO: 798136
aaguggcccagaaucucca

SEQ ID NO: 798138 - RNA, 19 nt, Artificial Sequence
  Description of Artificial Sequence: Synthetic oligonucleotide
  Sense strand starting at position 3787 of SEQ ID NO: 587516
acaaauguaucugcaauga

SEQ ID NO: 798139 - RNA, 19 nt, Artificial Sequence
  Description of Artificial Sequence: Synthetic oligonucleotide
  Antisense strand to SEQ ID NO: 798138
ucauugcagauacauuugu

SEQ ID NO: 798140 - RNA, 19 nt, Artificial Sequence
  Description of Artificial Sequence: Synthetic oligonucleotide
  Sense strand starting at position 3791 of SEQ ID NO: 587516
auguaucugcaaugacaaa

SEQ ID NO: 798141 - RNA, 19 nt, Artificial Sequence
  Description of Artificial Sequence: Synthetic oligonucleotide
  Antisense strand to SEQ ID NO: 798140
uuugucauugcagauacau

SEQ ID NO: 798142 - RNA, 19 nt, Artificial Sequence
  Description of Artificial Sequence: Synthetic oligonucleotide
  Sense strand starting at position 3903 of SEQ ID NO: 587516
uuuaacucuguggauugau

SEQ ID NO: 798143 - RNA, 19 nt, Artificial Sequence
  Description of Artificial Sequence: Synthetic oligonucleotide
  Antisense strand to SEQ ID NO: 798142
aucaauccacagaguuaaa

SEQ ID NO: 798144 - RNA, 19 nt, Artificial Sequence
  Description of Artificial Sequence: Synthetic oligonucleotide
  Sense strand starting at position 3915 of SEQ ID NO: 587516
gauugauuugcccgguugu

SEQ ID NO: 798145 - RNA, 19 nt, Artificial Sequence
  Description of Artificial Sequence: Synthetic oligonucleotide
  Antisense strand to SEQ ID NO: 798144
acaaccgggcaaaucaauc

SEQ ID NO: 798146 - RNA, 19 nt, Artificial Sequence
  Description of Artificial Sequence: Synthetic oligonucleotide
  Sense strand starting at position 240 of SEQ ID NO: 587517
gcaccaagucaguagaaua

SEQ ID NO: 798147 - RNA, 19 nt, Artificial Sequence
  Description of Artificial Sequence: Synthetic oligonucleotide
  Antisense strand to SEQ ID NO: 798146
uauucuacugacuuggugc

SEQ ID NO: 798148 - RNA, 19 nt, Artificial Sequence
  Description of Artificial Sequence: Synthetic oligonucleotide
  Sense strand starting at position 323 of SEQ ID NO: 587517
uccagacaagguugaguau

SEQ ID NO: 798149 - RNA, 19 nt, Artificial Sequence
  Description of Artificial Sequence: Synthetic oligonucleotide
  Antisense strand to SEQ ID NO: 798148
auacucaaccuugucugga

SEQ ID NO: 798150 - RNA, 19 nt, Artificial Sequence
  Description of Artificial Sequence: Synthetic oligonucleotide
  Sense strand starting at position 452 of SEQ ID NO: 587517
gcuggcuugccuuuaguuu

SEQ ID NO: 798151 - RNA, 19 nt, Artificial Sequence
  Description of Artificial Sequence: Synthetic oligonucleotide
  Antisense strand to SEQ ID NO: 798150
aaacuaaaggcaagccagc

SEQ ID NO: 798152 - RNA, 19 nt, Artificial Sequence
  Description of Artificial Sequence: Synthetic oligonucleotide
  Sense strand starting at position 490 of SEQ ID NO: 587517
augaguacuuaagcucaca

SEQ ID NO: 798153 - RNA, 19 nt, Artificial Sequence
  Description of Artificial Sequence: Synthetic oligonucleotide
  Antisense strand to SEQ ID NO: 798152
ugugagcuuaaguacucau

SEQ ID NO: 798154 - RNA, 19 nt, Artificial Sequence
  Description of Artificial Sequence: Synthetic oligonucleotide
  Sense strand starting at position 666 of SEQ ID NO: 587517
agaacugagucaucuguua

SEQ ID NO: 798155 - RNA, 19 nt, Artificial Sequence
  Description of Artificial Sequence: Synthetic oligonucleotide
  Antisense strand to SEQ ID NO: 798154
uaacagaugacucaguucu

SEQ ID NO: 798156 - RNA, 19 nt, Artificial Sequence
  Description of Artificial Sequence: Synthetic oligonucleotide
  Sense strand starting at position 703 of SEQ ID NO: 587517
aggaaucucuggcuaauau

SEQ ID NO: 798157 - RNA, 19 nt, Artificial Sequence
  Description of Artificial Sequence: Synthetic oligonucleotide
  Antisense strand to SEQ ID NO: 798156
auauuagccagagauuccu

SEQ ID NO: 798158 - RNA, 19 nt, Artificial Sequence
  Description of Artificial Sequence: Synthetic oligonucleotide
  Sense strand starting at position 848 of SEQ ID NO: 587517
uaguuagucccagaccaga

SEQ ID NO: 798159 - RNA, 19 nt, Artificial Sequence
  Description of Artificial Sequence: Synthetic oligonucleotide
  Antisense strand to SEQ ID NO: 798158
ucuggucugggacuaacua

SEQ ID NO: 798160 - RNA, 19 nt, Artificial Sequence
  Description of Artificial Sequence: Synthetic oligonucleotide
  Sense strand starting at position 900 of SEQ ID NO: 587517
aaugaaaugugucuccaag

SEQ ID NO: 798161 - RNA, 19 nt, Artificial Sequence
  Description of Artificial Sequence: Synthetic oligonucleotide
  Antisense strand to SEQ ID NO: 798160
cuuggagacacauuucauu

SEQ ID NO: 798162 - RNA, 19 nt, Artificial Sequence
  Description of Artificial Sequence: Synthetic oligonucleotide
  Sense strand starting at position 956 of SEQ ID NO: 587517
aucaaacacuggucgauaa

SEQ ID NO: 798163 - RNA, 19 nt, Artificial Sequence
  Description of Artificial Sequence: Synthetic oligonucleotide
  Antisense strand to SEQ ID NO: 798162
uuaucgaccaguguuugau

SEQ ID NO: 798164 - RNA, 19 nt, Artificial Sequence
  Description of Artificial Sequence: Synthetic oligonucleotide
  Sense strand starting at position 1082 of SEQ ID NO: 587517
ucaaaugcccuguagacau

SEQ ID NO: 798165 - RNA, 19 nt, Artificial Sequence
  Description of Artificial Sequence: Synthetic oligonucleotide
  Antisense strand to SEQ ID NO: 798164
augucuacagggcauuuga

SEQ ID NO: 798166 - RNA, 19 nt, Artificial Sequence
  Description of Artificial Sequence: Synthetic oligonucleotide
  Sense strand starting at position 1361 of SEQ ID NO: 587517
ccuuuaaugguguauguaa

SEQ ID NO: 798167 - RNA, 19 nt, Artificial Sequence
  Description of Artificial Sequence: Synthetic oligonucleotide
  Antisense strand to SEQ ID NO: 798166
uuacauacaccauuaaagg

SEQ ID NO: 798168 - RNA, 19 nt, Artificial Sequence
  Description of Artificial Sequence: Synthetic oligonucleotide
  Sense strand starting at position 1889 of SEQ ID NO: 587517
agaccauauugagcagacu

SEQ ID NO: 798169 - RNA, 19 nt, Artificial Sequence
  Description of Artificial Sequence: Synthetic oligonucleotide
  Antisense strand to SEQ ID NO: 798168
agucugcucaauauggucu

SEQ ID NO: 798170 - RNA, 19 nt, Artificial Sequence
  Description of Artificial Sequence: Synthetic oligonucleotide
  Sense strand starting at position 1945 of SEQ ID NO: 587517
ugaguuaaauaugcaaauc

SEQ ID NO: 798171 - RNA, 19 nt, Artificial Sequence
  Description of Artificial Sequence: Synthetic oligonucleotide
  Antisense strand to SEQ ID NO: 798170
gauuugcauauuuaacuca

SEQ ID NO: 798172 - RNA, 19 nt, Artificial Sequence
  Description of Artificial Sequence: Synthetic oligonucleotide
  Sense strand starting at position 1983 of SEQ ID NO: 587517
acagaaagaugagaaauua

SEQ ID NO: 798173 - RNA, 19 nt, Artificial Sequence
  Description of Artificial Sequence: Synthetic oligonucleotide
  Antisense strand to SEQ ID NO: 798172
uaauuucucaucuuucugu

SEQ ID NO: 798174 - RNA, 19 nt, Artificial Sequence
  Description of Artificial Sequence: Synthetic oligonucleotide
  Sense strand starting at position 2051 of SEQ ID NO: 587517
augcaaaguggguaucauu

SEQ ID NO: 798175 - RNA, 19 nt, Artificial Sequence
  Description of Artificial Sequence: Synthetic oligonucleotide
  Antisense strand to SEQ ID NO: 798174
aaugauacccacuuugcau

SEQ ID NO: 798176 - RNA, 19 nt, Artificial Sequence
  Description of Artificial Sequence: Synthetic oligonucleotide
  Sense strand starting at position 2059 of SEQ ID NO: 587517
uggguaucauuaucuaaau

SEQ ID NO: 798177 - RNA, 19 nt, Artificial Sequence
  Description of Artificial Sequence: Synthetic oligonucleotide
  Antisense strand to SEQ ID NO: 798176
auuuagauaaugauaccca

SEQ ID NO: 798178 - RNA, 19 nt, Artificial Sequence
  Description of Artificial Sequence: Synthetic oligonucleotide
  Sense strand starting at position 2060 of SEQ ID NO: 587517
ggguaucauuaucuaaauu

SEQ ID NO: 798179 - RNA, 19 nt, Artificial Sequence
  Description of Artificial Sequence: Synthetic oligonucleotide
  Antisense strand to SEQ ID NO: 798178
aauuuagauaaugauaccc

SEQ ID NO: 798180 - RNA, 19 nt, Artificial Sequence
  Description of Artificial Sequence: Synthetic oligonucleotide
  Sense strand starting at position 2215 of SEQ ID NO: 587517
ggcugaaaccuguaauagu

SEQ ID NO: 798181 - RNA, 19 nt, Artificial Sequence
  Description of Artificial Sequence: Synthetic oligonucleotide
  Antisense strand to SEQ ID NO: 798180
acuauuacagguuucagcc

SEQ ID NO: 798182 - RNA, 19 nt, Artificial Sequence
  Description of Artificial Sequence: Synthetic oligonucleotide
  Sense strand starting at position 2273 of SEQ ID NO: 587517
ccggcauuuagugagcauu

SEQ ID NO: 798183 - RNA, 19 nt, Artificial Sequence
  Description of Artificial Sequence: Synthetic oligonucleotide
  Antisense strand to SEQ ID NO: 798182
aaugcucacuaaaugccgg

SEQ ID NO: 798184 - RNA, 19 nt, Artificial Sequence
  Description of Artificial Sequence: Synthetic oligonucleotide
  Sense strand starting at position 2292 of SEQ ID NO: 587517
caguaaguauagguuugaa

SEQ ID NO: 798185 - RNA, 19 nt, Artificial Sequence
  Description of Artificial Sequence: Synthetic oligonucleotide
  Antisense strand to SEQ ID NO: 798184
uucaaaccuauacuuacug

SEQ ID NO: 798186 - RNA, 19 nt, Artificial Sequence
  Description of Artificial Sequence: Synthetic oligonucleotide
  Sense strand starting at position 2295 of SEQ ID NO: 587517
uaaguauagguuugaauga

SEQ ID NO: 798187 - RNA, 19 nt, Artificial Sequence
  Description of Artificial Sequence: Synthetic oligonucleotide
  Antisense strand to SEQ ID NO: 798186
ucauucaaaccuauacuua

SEQ ID NO: 798188 - RNA, 19 nt, Artificial Sequence
  Description of Artificial Sequence: Synthetic oligonucleotide
  Sense strand starting at position 2394 of SEQ ID NO: 587517
agauaugcuuuaucugaca

SEQ ID NO: 798189 - RNA, 19 nt, Artificial Sequence
  Description of Artificial Sequence: Synthetic oligonucleotide
  Antisense strand to SEQ ID NO: 798188
ugucagauaaagcauaucu

SEQ ID NO: 798190 - RNA, 19 nt, Artificial Sequence
  Description of Artificial Sequence: Synthetic oligonucleotide
  Sense strand starting at position 2457 of SEQ ID NO: 587517
uuagcuaagcuguaagaug

SEQ ID NO: 798191 - RNA, 19 nt, Artificial Sequence
  Description of Artificial Sequence: Synthetic oligonucleotide
  Antisense strand to SEQ ID NO: 798190
caucuuacagcuuagcuaa

SEQ ID NO: 798192 - RNA, 19 nt, Artificial Sequence
  Description of Artificial Sequence: Synthetic oligonucleotide
  Sense strand starting at position 2670 of SEQ ID NO: 587517
cuguccaguccucaugaua

SEQ ID NO: 798193 - RNA, 19 nt, Artificial Sequence
  Description of Artificial Sequence: Synthetic oligonucleotide
  Antisense strand to SEQ ID NO: 798192
uaucaugaggacuggacag

SEQ ID NO: 798194 - RNA, 19 nt, Artificial Sequence
  Description of Artificial Sequence: Synthetic oligonucleotide
  Sense strand starting at position 2677 of SEQ ID NO: 587517
guccucaugauaggauaga

SEQ ID NO: 798195 - RNA, 19 nt, Artificial Sequence
  Description of Artificial Sequence: Synthetic oligonucleotide
  Antisense strand to SEQ ID NO: 798194
ucuauccuaucaugaggac

SEQ ID NO: 798196 - RNA, 19 nt, Artificial Sequence
  Description of Artificial Sequence: Synthetic oligonucleotide
  Sense strand starting at position 2813 of SEQ ID NO: 587517
gccauucugacaugaagag

SEQ ID NO: 798197 - RNA, 19 nt, Artificial Sequence
  Description of Artificial Sequence: Synthetic oligonucleotide
  Antisense strand to SEQ ID NO: 798196
cucuucaugucagaauggc

SEQ ID NO: 798198 - RNA, 19 nt, Artificial Sequence
  Description of Artificial Sequence: Synthetic oligonucleotide
  Sense strand starting at position 2910 of SEQ ID NO: 587517
aguuuaaauuguccaauug

SEQ ID NO: 798199 - RNA, 19 nt, Artificial Sequence
  Description of Artificial Sequence: Synthetic oligonucleotide
  Antisense strand to SEQ ID NO: 798198
caauuggacaauuuaaacu

SEQ ID NO: 798200 - RNA, 19 nt, Artificial Sequence
  Description of Artificial Sequence: Synthetic oligonucleotide
  Sense strand starting at position 2933 of SEQ ID NO: 587517
guguuugcugagagaugug

SEQ ID NO: 798201 - RNA, 19 nt, Artificial Sequence
  Description of Artificial Sequence: Synthetic oligonucleotide
  Antisense strand to SEQ ID NO: 798200
cacaucucucagcaaacac

SEQ ID NO: 798202 - RNA, 19 nt, Artificial Sequence
  Description of Artificial Sequence: Synthetic oligonucleotide
  Sense strand starting at position 2955 of SEQ ID NO: 587517
cuaaguauugcuuaaguag

SEQ ID NO: 798203 - RNA, 19 nt, Artificial Sequence
  Description of Artificial Sequence: Synthetic oligonucleotide
  Antisense strand to SEQ ID NO: 798202
cuacuuaagcaauacuuag

SEQ ID NO: 798204 - RNA, 19 nt, Artificial Sequence
  Description of Artificial Sequence: Synthetic oligonucleotide
  Sense strand starting at position 2958 of SEQ ID NO: 587517
aguauugcuuaaguagaaa

SEQ ID NO: 798205 - RNA, 19 nt, Artificial Sequence
  Description of Artificial Sequence: Synthetic oligonucleotide
  Antisense strand to SEQ ID NO: 798204
uuucuacuuaagcaauacu

SEQ ID NO: 798206 - RNA, 19 nt, Artificial Sequence
  Description of Artificial Sequence: Synthetic oligonucleotide
  Sense strand starting at position 2975 of SEQ ID NO: 587517
aaauguggucucuggauag

SEQ ID NO: 798207 - RNA, 19 nt, Artificial Sequence
  Description of Artificial Sequence: Synthetic oligonucleotide
  Antisense strand to SEQ ID NO: 798206
cuauccagagaccacauuu

SEQ ID NO: 798208 - RNA, 19 nt, Artificial Sequence
  Description of Artificial Sequence: Synthetic oligonucleotide
  Sense strand starting at position 2979 of SEQ ID NO: 587517
guggucucuggauaggacu

SEQ ID NO: 798209 - RNA, 19 nt, Artificial Sequence
  Description of Artificial Sequence: Synthetic oligonucleotide
  Antisense strand to SEQ ID NO: 798208
aguccuauccagagaccac

SEQ ID NO: 798210 - RNA, 19 nt, Artificial Sequence
  Description of Artificial Sequence: Synthetic oligonucleotide
  Sense strand starting at position 2981 of SEQ ID NO: 587517
ggucucuggauaggacuaa

SEQ ID NO: 798211 - RNA, 19 nt, Artificial Sequence
  Description of Artificial Sequence: Synthetic oligonucleotide
  Antisense strand to SEQ ID NO: 798210
uuaguccuauccagagacc

SEQ ID NO: 798212 - RNA, 19 nt, Artificial Sequence
  Description of Artificial Sequence: Synthetic oligonucleotide
  Sense strand starting at position 3007 of SEQ ID NO: 587517
agaguuaagacuugugaug

SEQ ID NO: 798213 - RNA, 19 nt, Artificial Sequence
  Description of Artificial Sequence: Synthetic oligonucleotide
  Antisense strand to SEQ ID NO: 798212
caucacaagucuuaacucu

SEQ ID NO: 798214 - RNA, 19 nt, Artificial Sequence
  Description of Artificial Sequence: Synthetic oligonucleotide
  Sense strand starting at position 3014 of SEQ ID NO: 587517
agacuugugaugcauauug

SEQ ID NO: 798215 - RNA, 19 nt, Artificial Sequence
  Description of Artificial Sequence: Synthetic oligonucleotide
  Antisense strand to SEQ ID NO: 798214
caauaugcaucacaagucu

SEQ ID NO: 798216 - RNA, 19 nt, Artificial Sequence
  Description of Artificial Sequence: Synthetic oligonucleotide
  Sense strand starting at position 3033 of SEQ ID NO: 587517
ucaggugaaucacuuaucu

SEQ ID NO: 798217 - RNA, 19 nt, Artificial Sequence
  Description of Artificial Sequence: Synthetic oligonucleotide
  Antisense strand to SEQ ID NO: 798216
agauaagugauucaccuga

SEQ ID NO: 798218 - RNA, 19 nt, Artificial Sequence
  Description of Artificial Sequence: Synthetic oligonucleotide
  Sense strand starting at position 3089 of SEQ ID NO: 587517
uuucuaacaguugggauua

SEQ ID NO: 798219 - RNA, 19 nt, Artificial Sequence
  Description of Artificial Sequence: Synthetic oligonucleotide
  Antisense strand to SEQ ID NO: 798218
uaaucccaacuguuagaaa

SEQ ID NO: 798220 - RNA, 19 nt, Artificial Sequence
  Description of Artificial Sequence: Synthetic oligonucleotide
  Sense strand starting at position 3524 of SEQ ID NO: 587517
uggcgacaccuuuauagac

SEQ ID NO: 798221 - RNA, 19 nt, Artificial Sequence
  Description of Artificial Sequence: Synthetic oligonucleotide
  Antisense strand to SEQ ID NO: 798220
gucuauaaaggugucgcca

SEQ ID NO: 798222 - RNA, 19 nt, Artificial Sequence
  Description of Artificial Sequence: Synthetic oligonucleotide
  Sense strand starting at position 3848 of SEQ ID NO: 587517
ggguuuaaauaauuggauu

SEQ ID NO: 798223 - RNA, 19 nt, Artificial Sequence
  Description of Artificial Sequence: Synthetic oligonucleotide
  Antisense strand to SEQ ID NO: 798222
aauccaauuauuuaaaccc

SEQ ID NO: 798224 - RNA, 19 nt, Artificial Sequence
  Description of Artificial Sequence: Synthetic oligonucleotide
  Sense strand starting at position 3894 of SEQ ID NO: 587517
uugaaagaauggcuuuaga

SEQ ID NO: 798225 - RNA, 19 nt, Artificial Sequence
  Description of Artificial Sequence: Synthetic oligonucleotide
  Antisense strand to SEQ ID NO: 798224
ucuaaagccauucuuucaa

SEQ ID NO: 798226 - RNA, 19 nt, Artificial Sequence
  Description of Artificial Sequence: Synthetic oligonucleotide
  Sense strand starting at position 412 of SEQ ID NO: 587518
uauugucacgcucaguuaa

SEQ ID NO: 798227 - RNA, 19 nt, Artificial Sequence
  Description of Artificial Sequence: Synthetic oligonucleotide
  Antisense strand to SEQ ID NO: 798226
uuaacugagcgugacaaua

SEQ ID NO: 798228 - RNA, 19 nt, Artificial Sequence
  Description of Artificial Sequence: Synthetic oligonucleotide
  Sense strand starting at position 419 of SEQ ID NO: 587518
acgcucaguuaacucauaa

SEQ ID NO: 798229 - RNA, 19 nt, Artificial Sequence
  Description of Artificial Sequence: Synthetic oligonucleotide
  Antisense strand to SEQ ID NO: 798228
uuaugaguuaacugagcgu

SEQ ID NO: 798230 - RNA, 19 nt, Artificial Sequence
  Description of Artificial Sequence: Synthetic oligonucleotide
  Sense strand starting at position 586 of SEQ ID NO: 587518
uauaauggaucauuguuga

SEQ ID NO: 798231 - RNA, 19 nt, Artificial Sequence
  Description of Artificial Sequence: Synthetic oligonucleotide
  Antisense strand to SEQ ID NO: 798230
ucaacaaugauccauuaua

SEQ ID NO: 798232 - RNA, 19 nt, Artificial Sequence
  Description of Artificial Sequence: Synthetic oligonucleotide
  Sense strand starting at position 644 of SEQ ID NO: 587518
cugcaaacugacuguaaau

SEQ ID NO: 798233 - RNA, 19 nt, Artificial Sequence
  Description of Artificial Sequence: Synthetic oligonucleotide
  Antisense strand to SEQ ID NO: 798232
auuuacagucaguuugcag

SEQ ID NO: 798234 - RNA, 19 nt, Artificial Sequence
  Description of Artificial Sequence: Synthetic oligonucleotide
  Sense strand starting at position 820 of SEQ ID NO: 587518
gaaauugaucccugaacgg

SEQ ID NO: 798235 - RNA, 19 nt, Artificial Sequence
  Description of Artificial Sequence: Synthetic oligonucleotide
  Antisense strand to SEQ ID NO: 798234
ccguucagggaucaauuuc

SEQ ID NO: 798236 - RNA, 19 nt, Artificial Sequence
  Description of Artificial Sequence: Synthetic oligonucleotide
  Sense strand starting at position 874 of SEQ ID NO: 587518
agaaucuuugguugaaugu

SEQ ID NO: 798237 - RNA, 19 nt, Artificial Sequence
  Description of Artificial Sequence: Synthetic oligonucleotide
  Antisense strand to SEQ ID NO: 798236
acauucaaccaaagauucu

SEQ ID NO: 798238 - RNA, 19 nt, Artificial Sequence
  Description of Artificial Sequence: Synthetic oligonucleotide
  Sense strand starting at position 875 of SEQ ID NO: 587518
gaaucuuugguugaaugua

SEQ ID NO: 798239 - RNA, 19 nt, Artificial Sequence
  Description of Artificial Sequence: Synthetic oligonucleotide
  Antisense strand to SEQ ID NO: 798238
uacauucaaccaaagauuc

SEQ ID NO: 798240 - RNA, 19 nt, Artificial Sequence
  Description of Artificial Sequence: Synthetic oligonucleotide
  Sense strand starting at position 1032 of SEQ ID NO: 587518
ugcaauguugcccaaagga

SEQ ID NO: 798241 - RNA, 19 nt, Artificial Sequence
  Description of Artificial Sequence: Synthetic oligonucleotide
  Antisense strand to SEQ ID NO: 798240
uccuuugggcaacauugca

SEQ ID NO: 798242 - RNA, 19 nt, Artificial Sequence
  Description of Artificial Sequence: Synthetic oligonucleotide
  Sense strand starting at position 1091 of SEQ ID NO: 587518
gguggcucccagugaaugu

SEQ ID NO: 798243 - RNA, 19 nt, Artificial Sequence
  Description of Artificial Sequence: Synthetic oligonucleotide
  Antisense strand to SEQ ID NO: 798242
acauucacugggagccacc

SEQ ID NO: 798244 - RNA, 19 nt, Artificial Sequence
  Description of Artificial Sequence: Synthetic oligonucleotide
  Sense strand starting at position 1162 of SEQ ID NO: 587518
gcccgacgucuuuaagguu

SEQ ID NO: 798245 - RNA, 19 nt, Artificial Sequence
  Description of Artificial Sequence: Synthetic oligonucleotide
  Antisense strand to SEQ ID NO: 798244
aaccuuaaagacgucgggc

SEQ ID NO: 798246 - RNA, 19 nt, Artificial Sequence
  Description of Artificial Sequence: Synthetic oligonucleotide
  Sense strand starting at position 1268 of SEQ ID NO: 587518
cagucacgagaaugaugau

SEQ ID NO: 798247 - RNA, 19 nt, Artificial Sequence
  Description of Artificial Sequence: Synthetic oligonucleotide
  Antisense strand to SEQ ID NO: 798246
aucaucauucucgugacug

SEQ ID NO: 798248 - RNA, 19 nt, Artificial Sequence
  Description of Artificial Sequence: Synthetic oligonucleotide
  Sense strand starting at position 1274 of SEQ ID NO: 587518
cgagaaugaugaugauuua

SEQ ID NO: 798249 - RNA, 19 nt, Artificial Sequence
  Description of Artificial Sequence: Synthetic oligonucleotide
  Antisense strand to SEQ ID NO: 798248
uaaaucaucaucauucucg

SEQ ID NO: 798250 - RNA, 19 nt, Artificial Sequence
  Description of Artificial Sequence: Synthetic oligonucleotide
  Sense strand starting at position 1287 of SEQ ID NO: 587518
gauuuaucuugcgcggaga

SEQ ID NO: 798251 - RNA, 19 nt, Artificial Sequence
  Description of Artificial Sequence: Synthetic oligonucleotide
  Antisense strand to SEQ ID NO: 798250
ucuccgcgcaagauaaauc

SEQ ID NO: 798252 - RNA, 19 nt, Artificial Sequence
  Description of Artificial Sequence: Synthetic oligonucleotide
  Sense strand starting at position 1482 of SEQ ID NO: 587518
cggcgaucggccuauauua

SEQ ID NO: 798253 - RNA, 19 nt, Artificial Sequence
  Description of Artificial Sequence: Synthetic oligonucleotide
  Antisense strand to SEQ ID NO: 798252
uaauauaggccgaucgccg

SEQ ID NO: 798254 - RNA, 19 nt, Artificial Sequence
  Description of Artificial Sequence: Synthetic oligonucleotide
  Sense strand starting at position 1484 of SEQ ID NO: 587518
gcgaucggccuauauuauu

SEQ ID NO: 798255 - RNA, 19 nt, Artificial Sequence
  Description of Artificial Sequence: Synthetic oligonucleotide
  Antisense strand to SEQ ID NO: 798254
aauaauauaggccgaucgc

SEQ ID NO: 798256 - RNA, 19 nt, Artificial Sequence
  Description of Artificial Sequence: Synthetic oligonucleotide
  Sense strand starting at position 1528 of SEQ ID NO: 587518
cuuaguggcucucuucuua

SEQ ID NO: 798257 - RNA, 19 nt, Artificial Sequence
  Description of Artificial Sequence: Synthetic oligonucleotide
  Antisense strand to SEQ ID NO: 798256
uaagaagagagccacuaag

SEQ ID NO: 798258 - RNA, 19 nt, Artificial Sequence
  Description of Artificial Sequence: Synthetic oligonucleotide
  Sense strand starting at position 2368 of SEQ ID NO: 587518
cggaguuucccggcugugu

SEQ ID NO: 798259 - RNA, 19 nt, Artificial Sequence
  Description of Artificial Sequence: Synthetic oligonucleotide
  Antisense strand to SEQ ID NO: 798258
acacagccgggaaacuccg

SEQ ID NO: 798260 - RNA, 19 nt, Artificial Sequence
  Description of Artificial Sequence: Synthetic oligonucleotide
  Sense strand starting at position 2382 of SEQ ID NO: 587518
ugugucacuucccuaguga

SEQ ID NO: 798261 - RNA, 19 nt, Artificial Sequence
  Description of Artificial Sequence: Synthetic oligonucleotide
  Antisense strand to SEQ ID NO: 798260
ucacuagggaagugacaca

SEQ ID NO: 798262 - RNA, 19 nt, Artificial Sequence
  Description of Artificial Sequence: Synthetic oligonucleotide
  Sense strand starting at position 2383 of SEQ ID NO: 587518
gugucacuucccuagugau

SEQ ID NO: 798263 - RNA, 19 nt, Artificial Sequence
  Description of Artificial Sequence: Synthetic oligonucleotide
  Antisense strand to SEQ ID NO: 798262
aucacuagggaagugacac

SEQ ID NO: 798264 - RNA, 19 nt, Artificial Sequence
  Description of Artificial Sequence: Synthetic oligonucleotide
  Sense strand starting at position 2410 of SEQ ID NO: 587518
gugguucccgaucacugau

SEQ ID NO: 798265 - RNA, 19 nt, Artificial Sequence
  Description of Artificial Sequence: Synthetic oligonucleotide
  Antisense strand to SEQ ID NO: 798264
aucagugaucgggaaccac

SEQ ID NO: 798266 - RNA, 19 nt, Artificial Sequence
  Description of Artificial Sequence: Synthetic oligonucleotide
  Sense strand starting at position 2976 of SEQ ID NO: 587518
ucgagauauaaauggcaua

SEQ ID NO: 798267 - RNA, 19 nt, Artificial Sequence
  Description of Artificial Sequence: Synthetic oligonucleotide
  Antisense strand to SEQ ID NO: 798266
uaugccauuuauaucucga

SEQ ID NO: 798268 - RNA, 19 nt, Artificial Sequence
  Description of Artificial Sequence: Synthetic oligonucleotide
  Sense strand starting at position 2979 of SEQ ID NO: 587518
agauauaaauggcauacaa

SEQ ID NO: 798269 - RNA, 19 nt, Artificial Sequence
  Description of Artificial Sequence: Synthetic oligonucleotide
  Antisense strand to SEQ ID NO: 798268
uuguaugccauuuauaucu

SEQ ID NO: 798270 - RNA, 19 nt, Artificial Sequence
  Description of Artificial Sequence: Synthetic oligonucleotide
  Sense strand starting at position 3014 of SEQ ID NO: 587518
agcaguggauuugauaacu

SEQ ID NO: 798271 - RNA, 19 nt, Artificial Sequence
  Description of Artificial Sequence: Synthetic oligonucleotide
  Antisense strand to SEQ ID NO: 798270
aguuaucaaauccacugcu

SEQ ID NO: 798272 - RNA, 19 nt, Artificial Sequence
  Description of Artificial Sequence: Synthetic oligonucleotide
  Sense strand starting at position 3024 of SEQ ID NO: 587518
uugauaacuuuggacauau

SEQ ID NO: 798273 - RNA, 19 nt, Artificial Sequence
  Description of Artificial Sequence: Synthetic oligonucleotide
  Antisense strand to SEQ ID NO: 798272
auauguccaaaguuaucaa

SEQ ID NO: 798274 - RNA, 19 nt, Artificial Sequence
  Description of Artificial Sequence: Synthetic oligonucleotide
  Sense strand starting at position 3116 of SEQ ID NO: 587518
uguguaaucucucccuccu

SEQ ID NO: 798275 - RNA, 19 nt, Artificial Sequence
  Description of Artificial Sequence: Synthetic oligonucleotide
  Antisense strand to SEQ ID NO: 798274
aggagggagagauuacaca

SEQ ID NO: 798276 - RNA, 19 nt, Artificial Sequence
  Description of Artificial Sequence: Synthetic oligonucleotide
  Sense strand starting at position 3288 of SEQ ID NO: 587518
guuguuguguuaucaauaa

SEQ ID NO: 798277 - RNA, 19 nt, Artificial Sequence
  Description of Artificial Sequence: Synthetic oligonucleotide
  Antisense strand to SEQ ID NO: 798276
uuauugauaacacaacaac

SEQ ID NO: 798278 - RNA, 19 nt, Artificial Sequence
  Description of Artificial Sequence: Synthetic oligonucleotide
  Sense strand starting at position 3442 of SEQ ID NO: 587518
auuugcaagucuuugcaua

SEQ ID NO: 798279 - RNA, 19 nt, Artificial Sequence
  Description of Artificial Sequence: Synthetic oligonucleotide
  Antisense strand to SEQ ID NO: 798278
uaugcaaagacuugcaaau

SEQ ID NO: 798280 - RNA, 19 nt, Artificial Sequence
  Description of Artificial Sequence: Synthetic oligonucleotide
  Sense strand starting at position 3462 of SEQ ID NO: 587518
guguguagaccuuaaugcu

SEQ ID NO: 798281 - RNA, 19 nt, Artificial Sequence
  Description of Artificial Sequence: Synthetic oligonucleotide
  Antisense strand to SEQ ID NO: 798280
agcauuaaggucuacacac

SEQ ID NO: 798282 - RNA, 19 nt, Artificial Sequence
  Description of Artificial Sequence: Synthetic oligonucleotide
  Sense strand starting at position 3506 of SEQ ID NO: 587518
ggaguagaauggcuagauu

SEQ ID NO: 798283 - RNA, 19 nt, Artificial Sequence
  Description of Artificial Sequence: Synthetic oligonucleotide
  Antisense strand to SEQ ID NO: 798282
aaucuagccauucuacucc

SEQ ID NO: 798284 - RNA, 19 nt, Artificial Sequence
  Description of Artificial Sequence: Synthetic oligonucleotide
  Sense strand starting at position 3509 of SEQ ID NO: 587518
guagaauggcuagauugua

SEQ ID NO: 798285 - RNA, 19 nt, Artificial Sequence
  Description of Artificial Sequence: Synthetic oligonucleotide
  Antisense strand to SEQ ID NO: 798284
uacaaucuagccauucuac

SEQ ID NO: 798286 - RNA, 19 nt, Artificial Sequence
  Description of Artificial Sequence: Synthetic oligonucleotide
  Sense strand starting at position 3642 of SEQ ID NO: 587518
guaguaauaucuucugcag

SEQ ID NO: 798287 - RNA, 19 nt, Artificial Sequence
  Description of Artificial Sequence: Synthetic oligonucleotide
  Antisense strand to SEQ ID NO: 798286
cugcagaagauauuacuac

SEQ ID NO: 798288 - RNA, 19 nt, Artificial Sequence
  Description of Artificial Sequence: Synthetic oligonucleotide
  Sense strand starting at position 3645 of SEQ ID NO: 587518
guaauaucuucugcagcua

SEQ ID NO: 798289 - RNA, 19 nt, Artificial Sequence
  Description of Artificial Sequence: Synthetic oligonucleotide
  Antisense strand to SEQ ID NO: 798288
uagcugcagaagauauuac

SEQ ID NO: 798290 - RNA, 19 nt, Artificial Sequence
  Description of Artificial Sequence: Synthetic oligonucleotide
  Sense strand starting at position 3726 of SEQ ID NO: 587518
auguaucuucucuggugaa

SEQ ID NO: 798291 - RNA, 19 nt, Artificial Sequence
  Description of Artificial Sequence: Synthetic oligonucleotide
  Antisense strand to SEQ ID NO: 798290
uucaccagagaagauacau

SEQ ID NO: 798292 - RNA, 19 nt, Artificial Sequence
  Description of Artificial Sequence: Synthetic oligonucleotide
  Sense strand starting at position 3836 of SEQ ID NO: 587518
ucuuuauuggcugggcuua

SEQ ID NO: 798293 - RNA, 19 nt, Artificial Sequence
  Description of Artificial Sequence: Synthetic oligonucleotide
  Antisense strand to SEQ ID NO: 798292
uaagcccagccaauaaaga

SEQ ID NO: 798294 - RNA, 19 nt, Artificial Sequence
  Description of Artificial Sequence: Synthetic oligonucleotide
  Sense strand starting at position 3837 of SEQ ID NO: 587518
cuuuauuggcugggcuuaa

SEQ ID NO: 798295 - RNA, 19 nt, Artificial Sequence
  Description of Artificial Sequence: Synthetic oligonucleotide
  Antisense strand to SEQ ID NO: 798294
uuaagcccagccaauaaag

SEQ ID NO: 798296 - RNA, 19 nt, Artificial Sequence
  Description of Artificial Sequence: Synthetic oligonucleotide
  Sense strand starting at position 3877 of SEQ ID NO: 587518
gcacuuuaauucuuggauu

SEQ ID NO: 798297 - RNA, 19 nt, Artificial Sequence
  Description of Artificial Sequence: Synthetic oligonucleotide
  Antisense strand to SEQ ID NO: 798296
aauccaagaauuaaagugc

SEQ ID NO: 798298 - RNA, 19 nt, Artificial Sequence
  Description of Artificial Sequence: Synthetic oligonucleotide
  Sense strand starting at position 3917 of SEQ ID NO: 587518
uccugaggccuuuauacuu

SEQ ID NO: 798299 - RNA, 19 nt, Artificial Sequence
  Description of Artificial Sequence: Synthetic oligonucleotide
  Antisense strand to SEQ ID NO: 798298
aaguauaaaggccucagga

SEQ ID NO: 798300 - RNA, 19 nt, Artificial Sequence
  Description of Artificial Sequence: Synthetic oligonucleotide
  Sense strand starting at position 3926 of SEQ ID NO: 587518
cuuuauacuugcgugagaa

SEQ ID NO: 798301 - RNA, 19 nt, Artificial Sequence
  Description of Artificial Sequence: Synthetic oligonucleotide
  Antisense strand to SEQ ID NO: 798300
uucucacgcaaguauaaag

SEQ ID NO: 798302 - RNA, 19 nt, Artificial Sequence
  Description of Artificial Sequence: Synthetic oligonucleotide
  Sense strand starting at position 3927 of SEQ ID NO: 587518
uuuauacuugcgugagaac

SEQ ID NO: 798303 - RNA, 19 nt, Artificial Sequence
  Description of Artificial Sequence: Synthetic oligonucleotide
  Antisense strand to SEQ ID NO: 798302
guucucacgcaaguauaaa

SEQ ID NO: 798304 - RNA, 19 nt, Artificial Sequence
  Description of Artificial Sequence: Synthetic oligonucleotide
  Sense strand starting at position 3928 of SEQ ID NO: 587518
uuauacuugcgugagaacu

SEQ ID NO: 798305 - RNA, 19 nt, Artificial Sequence
  Description of Artificial Sequence: Synthetic oligonucleotide
  Antisense strand to SEQ ID NO: 798304
aguucucacgcaaguauaa

SEQ ID NO: 798306 - RNA, 19 nt, Artificial Sequence
  Description of Artificial Sequence: Synthetic oligonucleotide
  Sense strand starting at position 320 of SEQ ID NO: 587519
uauugucacgcucaguuaa

SEQ ID NO: 798307 - RNA, 19 nt, Artificial Sequence
  Description of Artificial Sequence: Synthetic oligonucleotide
  Antisense strand to SEQ ID NO: 798306
uuaacugagcgugacaaua

SEQ ID NO: 798308 - RNA, 19 nt, Artificial Sequence
  Description of Artificial Sequence: Synthetic oligonucleotide
  Sense strand starting at position 327 of SEQ ID NO: 587519
acgcucaguuaacucauaa

SEQ ID NO: 798309 - RNA, 19 nt, Artificial Sequence
  Description of Artificial Sequence: Synthetic oligonucleotide
  Antisense strand to SEQ ID NO: 798308
uuaugaguuaacugagcgu

SEQ ID NO: 798310 - RNA, 19 nt, Artificial Sequence
  Description of Artificial Sequence: Synthetic oligonucleotide
  Sense strand starting at position 494 of SEQ ID NO: 587519
uauaauggaucauuguuga

SEQ ID NO: 798311 - RNA, 19 nt, Artificial Sequence
  Description of Artificial Sequence: Synthetic oligonucleotide
  Antisense strand to SEQ ID NO: 798310
ucaacaaugauccauuaua

SEQ ID NO: 798312 - RNA, 19 nt, Artificial Sequence
  Description of Artificial Sequence: Synthetic oligonucleotide
  Sense strand starting at position 552 of SEQ ID NO: 587519
cugcaaacugacuguaaau

SEQ ID NO: 798313 - RNA, 19 nt, Artificial Sequence
  Description of Artificial Sequence: Synthetic oligonucleotide
  Antisense strand to SEQ ID NO: 798312
auuuacagucaguuugcag

SEQ ID NO: 798314 - RNA, 19 nt, Artificial Sequence
  Description of Artificial Sequence: Synthetic oligonucleotide
  Sense strand starting at position 728 of SEQ ID NO: 587519
gaaauugaucccugaacgg

SEQ ID NO: 798315 - RNA, 19 nt, Artificial Sequence
  Description of Artificial Sequence: Synthetic oligonucleotide
  Antisense strand to SEQ ID NO: 798314
ccguucagggaucaauuuc

SEQ ID NO: 798316 - RNA, 19 nt, Artificial Sequence
  Description of Artificial Sequence: Synthetic oligonucleotide
  Sense strand starting at position 782 of SEQ ID NO: 587519
agaaucuuugguugaaugu

SEQ ID NO: 798317 - RNA, 19 nt, Artificial Sequence
  Description of Artificial Sequence: Synthetic oligonucleotide
  Antisense strand to SEQ ID NO: 798316
acauucaaccaaagauucu

SEQ ID NO: 798318 - RNA, 19 nt, Artificial Sequence
  Description of Artificial Sequence: Synthetic oligonucleotide
  Sense strand starting at position 783 of SEQ ID NO: 587519
gaaucuuugguugaaugua

SEQ ID NO: 798319 - RNA, 19 nt, Artificial Sequence
  Description of Artificial Sequence: Synthetic oligonucleotide
  Antisense strand to SEQ ID NO: 798318
uacauucaaccaaagauuc

SEQ ID NO: 798320 - RNA, 19 nt, Artificial Sequence
  Description of Artificial Sequence: Synthetic oligonucleotide
  Sense strand starting at position 940 of SEQ ID NO: 587519
ugcaauguugcccaaagga

SEQ ID NO: 798321 - RNA, 19 nt, Artificial Sequence
  Description of Artificial Sequence: Synthetic oligonucleotide
  Antisense strand to SEQ ID NO: 798320
uccuuugggcaacauugca

SEQ ID NO: 798322 - RNA, 19 nt, Artificial Sequence
  Description of Artificial Sequence: Synthetic oligonucleotide
  Sense strand starting at position 999 of SEQ ID NO: 587519
gguggcucccagugaaugu

SEQ ID NO: 798323 - RNA, 19 nt, Artificial Sequence
  Description of Artificial Sequence: Synthetic oligonucleotide
  Antisense strand to SEQ ID NO: 798322
acauucacugggagccacc

SEQ ID NO: 798324 - RNA, 19 nt, Artificial Sequence
  Description of Artificial Sequence: Synthetic oligonucleotide
  Sense strand starting at position 1070 of SEQ ID NO: 587519
gcccgacgucuuuaagguu

SEQ ID NO: 798325 - RNA, 19 nt, Artificial Sequence
  Description of Artificial Sequence: Synthetic oligonucleotide
  Antisense strand to SEQ ID NO: 798324
aaccuuaaagacgucgggc

SEQ ID NO: 798326 - RNA, 19 nt, Artificial Sequence
  Description of Artificial Sequence: Synthetic oligonucleotide
  Sense strand starting at position 1176 of SEQ ID NO: 587519
cagucacgagaaugaugau

SEQ ID NO: 798327 - RNA, 19 nt, Artificial Sequence
  Description of Artificial Sequence: Synthetic oligonucleotide
  Antisense strand to SEQ ID NO: 798326
aucaucauucucgugacug

SEQ ID NO: 798328 - RNA, 19 nt, Artificial Sequence
  Description of Artificial Sequence: Synthetic oligonucleotide
  Sense strand starting at position 1182 of SEQ ID NO: 587519
cgagaaugaugaugauuua

SEQ ID NO: 798329 - RNA, 19 nt, Artificial Sequence
  Description of Artificial Sequence: Synthetic oligonucleotide
  Antisense strand to SEQ ID NO: 798328
uaaaucaucaucauucucg

SEQ ID NO: 798330 - RNA, 19 nt, Artificial Sequence
  Description of Artificial Sequence: Synthetic oligonucleotide
  Sense strand starting at position 1195 of SEQ ID NO: 587519
gauuuaucuugcgcggaga

SEQ ID NO: 798331 - RNA, 19 nt, Artificial Sequence
  Description of Artificial Sequence: Synthetic oligonucleotide
  Antisense strand to SEQ ID NO: 798330
ucuccgcgcaagauaaauc

SEQ ID NO: 798332 - RNA, 19 nt, Artificial Sequence
  Description of Artificial Sequence: Synthetic oligonucleotide
  Sense strand starting at position 1390 of SEQ ID NO: 587519
cggcgaucggccuauauua

SEQ ID NO: 798333 - RNA, 19 nt, Artificial Sequence
  Description of Artificial Sequence: Synthetic oligonucleotide
  Antisense strand to SEQ ID NO: 798332
uaauauaggccgaucgccg

SEQ ID NO: 798334 - RNA, 19 nt, Artificial Sequence
  Description of Artificial Sequence: Synthetic oligonucleotide
  Sense strand starting at position 1392 of SEQ ID NO: 587519
gcgaucggccuauauuauu

SEQ ID NO: 798335 - RNA, 19 nt, Artificial Sequence
  Description of Artificial Sequence: Synthetic oligonucleotide
  Antisense strand to SEQ ID NO: 798334
aauaauauaggccgaucgc

SEQ ID NO: 798336 - RNA, 19 nt, Artificial Sequence
  Description of Artificial Sequence: Synthetic oligonucleotide
  Sense strand starting at position 1436 of SEQ ID NO: 587519
cuuaguggcucucuucuua

SEQ ID NO: 798337 - RNA, 19 nt, Artificial Sequence
  Description of Artificial Sequence: Synthetic oligonucleotide
  Antisense strand to SEQ ID NO: 798336
uaagaagagagccacuaag

SEQ ID NO: 798338 - RNA, 19 nt, Artificial Sequence
  Description of Artificial Sequence: Synthetic oligonucleotide
  Sense strand starting at position 2276 of SEQ ID NO: 587519
cggaguuucccggcugugu

SEQ ID NO: 798339 - RNA, 19 nt, Artificial Sequence
  Description of Artificial Sequence: Synthetic oligonucleotide
  Antisense strand to SEQ ID NO: 798338
acacagccgggaaacuccg

SEQ ID NO: 798340 - RNA, 19 nt, Artificial Sequence
  Description of Artificial Sequence: Synthetic oligonucleotide
  Sense strand starting at position 2290 of SEQ ID NO: 587519
ugugucacuucccuaguga

SEQ ID NO: 798341 - RNA, 19 nt, Artificial Sequence
  Description of Artificial Sequence: Synthetic oligonucleotide
  Antisense strand to SEQ ID NO: 798340
ucacuagggaagugacaca

SEQ ID NO: 798342 - RNA, 19 nt, Artificial Sequence
  Description of Artificial Sequence: Synthetic oligonucleotide
  Sense strand starting at position 2291 of SEQ ID NO: 587519
gugucacuucccuagugau

SEQ ID NO: 798343 - RNA, 19 nt, Artificial Sequence
  Description of Artificial Sequence: Synthetic oligonucleotide
  Antisense strand to SEQ ID NO: 798342
aucacuagggaagugacac

SEQ ID NO: 798344 - RNA, 19 nt, Artificial Sequence
  Description of Artificial Sequence: Synthetic oligonucleotide
  Sense strand starting at position 2318 of SEQ ID NO: 587519
gugguucccgaucacugau

SEQ ID NO: 798345 - RNA, 19 nt, Artificial Sequence
  Description of Artificial Sequence: Synthetic oligonucleotide
  Antisense strand to SEQ ID NO: 798344
aucagugaucgggaaccac

SEQ ID NO: 798346 - RNA, 19 nt, Artificial Sequence
  Description of Artificial Sequence: Synthetic oligonucleotide
  Sense strand starting at position 2884 of SEQ ID NO: 587519
ucgagauauaaauggcaua

SEQ ID NO: 798347 - RNA, 19 nt, Artificial Sequence
  Description of Artificial Sequence: Synthetic oligonucleotide
  Antisense strand to SEQ ID NO: 798346
uaugccauuuauaucucga

SEQ ID NO: 798348 - RNA, 19 nt, Artificial Sequence
  Description of Artificial Sequence: Synthetic oligonucleotide
  Sense strand starting at position 2887 of SEQ ID NO: 587519
agauauaaauggcauacaa

SEQ ID NO: 798349 - RNA, 19 nt, Artificial Sequence
  Description of Artificial Sequence: Synthetic oligonucleotide
  Antisense strand to SEQ ID NO: 798348
uuguaugccauuuauaucu

SEQ ID NO: 798350 - RNA, 19 nt, Artificial Sequence
  Description of Artificial Sequence: Synthetic oligonucleotide
  Sense strand starting at position 2922 of SEQ ID NO: 587519
agcaguggauuugauaacu

SEQ ID NO: 798351 - RNA, 19 nt, Artificial Sequence
  Description of Artificial Sequence: Synthetic oligonucleotide
  Antisense strand to SEQ ID NO: 798350
aguuaucaaauccacugcu

SEQ ID NO: 798352 - RNA, 19 nt, Artificial Sequence
  Description of Artificial Sequence: Synthetic oligonucleotide
  Sense strand starting at position 2932 of SEQ ID NO: 587519
uugauaacuuuggacauau

SEQ ID NO: 798353 - RNA, 19 nt, Artificial Sequence
  Description of Artificial Sequence: Synthetic oligonucleotide
  Antisense strand to SEQ ID NO: 798352
auauguccaaaguuaucaa

SEQ ID NO: 798354 - RNA, 19 nt, Artificial Sequence
  Description of Artificial Sequence: Synthetic oligonucleotide
  Sense strand starting at position 3024 of SEQ ID NO: 587519
uguguaaucucucccuccu

SEQ ID NO: 798355 - RNA, 19 nt, Artificial Sequence
  Description of Artificial Sequence: Synthetic oligonucleotide
  Antisense strand to SEQ ID NO: 798354
aggagggagagauuacaca

SEQ ID NO: 798356 - RNA, 19 nt, Artificial Sequence
  Description of Artificial Sequence: Synthetic oligonucleotide
  Sense strand starting at position 3196 of SEQ ID NO: 587519
guuguuguguuaucaauaa

SEQ ID NO: 798357 - RNA, 19 nt, Artificial Sequence
  Description of Artificial Sequence: Synthetic oligonucleotide
  Antisense strand to SEQ ID NO: 798356
uuauugauaacacaacaac

SEQ ID NO: 798358 - RNA, 19 nt, Artificial Sequence
  Description of Artificial Sequence: Synthetic oligonucleotide
  Sense strand starting at position 3350 of SEQ ID NO: 587519
auuugcaagucuuugcaua

SEQ ID NO: 798359 - RNA, 19 nt, Artificial Sequence
  Description of Artificial Sequence: Synthetic oligonucleotide
  Antisense strand to SEQ ID NO: 798358
uaugcaaagacuugcaaau

SEQ ID NO: 798360 - RNA, 19 nt, Artificial Sequence
  Description of Artificial Sequence: Synthetic oligonucleotide
  Sense strand starting at position 3370 of SEQ ID NO: 587519
guguguagaccuuaaugcu

SEQ ID NO: 798361 - RNA, 19 nt, Artificial Sequence
  Description of Artificial Sequence: Synthetic oligonucleotide
  Antisense strand to SEQ ID NO: 798360
agcauuaaggucuacacac

SEQ ID NO: 798362 - RNA, 19 nt, Artificial Sequence
  Description of Artificial Sequence: Synthetic oligonucleotide
  Sense strand starting at position 3414 of SEQ ID NO: 587519
ggaguagaauggcuagauu

SEQ ID NO: 798363 - RNA, 19 nt, Artificial Sequence
  Description of Artificial Sequence: Synthetic oligonucleotide
  Antisense strand to SEQ ID NO: 798362
aaucuagccauucuacucc

SEQ ID NO: 798364 - RNA, 19 nt, Artificial Sequence
  Description of Artificial Sequence: Synthetic oligonucleotide
  Sense strand starting at position 3417 of SEQ ID NO: 587519
guagaauggcuagauugua

SEQ ID NO: 798365 - RNA, 19 nt, Artificial Sequence
  Description of Artificial Sequence: Synthetic oligonucleotide
  Antisense strand to SEQ ID NO: 798364
uacaaucuagccauucuac

SEQ ID NO: 798366 - RNA, 19 nt, Artificial Sequence
  Description of Artificial Sequence: Synthetic oligonucleotide
  Sense strand starting at position 3550 of SEQ ID NO: 587519
guaguaauaucuucugcag

SEQ ID NO: 798367 - RNA, 19 nt, Artificial Sequence
  Description of Artificial Sequence: Synthetic oligonucleotide
  Antisense strand to SEQ ID NO: 798366
cugcagaagauauuacuac

SEQ ID NO: 798368 - RNA, 19 nt, Artificial Sequence
  Description of Artificial Sequence: Synthetic oligonucleotide
  Sense strand starting at position 3553 of SEQ ID NO: 587519
guaauaucuucugcagcua

SEQ ID NO: 798369 - RNA, 19 nt, Artificial Sequence
  Description of Artificial Sequence: Synthetic oligonucleotide
  Antisense strand to SEQ ID NO: 798368
uagcugcagaagauauuac

SEQ ID NO: 798370 - RNA, 19 nt, Artificial Sequence
  Description of Artificial Sequence: Synthetic oligonucleotide
  Sense strand starting at position 3634 of SEQ ID NO: 587519
auguaucuucucuggugaa

SEQ ID NO: 798371 - RNA, 19 nt, Artificial Sequence
  Description of Artificial Sequence: Synthetic oligonucleotide
  Antisense strand to SEQ ID NO: 798370
uucaccagagaagauacau

SEQ ID NO: 798372 - RNA, 19 nt, Artificial Sequence
  Description of Artificial Sequence: Synthetic oligonucleotide
  Sense strand starting at position 3744 of SEQ ID NO: 587519
ucuuuauuggcugggcuua

SEQ ID NO: 798373 - RNA, 19 nt, Artificial Sequence
  Description of Artificial Sequence: Synthetic oligonucleotide
  Antisense strand to SEQ ID NO: 798372
uaagcccagccaauaaaga

SEQ ID NO: 798374 - RNA, 19 nt, Artificial Sequence
  Description of Artificial Sequence: Synthetic oligonucleotide
  Sense strand starting at position 3745 of SEQ ID NO: 587519
cuuuauuggcugggcuuaa

SEQ ID NO: 798375 - RNA, 19 nt, Artificial Sequence
  Description of Artificial Sequence: Synthetic oligonucleotide
  Antisense strand to SEQ ID NO: 798374
uuaagcccagccaauaaag

SEQ ID NO: 798376 - RNA, 19 nt, Artificial Sequence
  Description of Artificial Sequence: Synthetic oligonucleotide
  Sense strand starting at position 3785 of SEQ ID NO: 587519
gcacuuuaauucuuggauu

SEQ ID NO: 798377 - RNA, 19 nt, Artificial Sequence
  Description of Artificial Sequence: Synthetic oligonucleotide
  Antisense strand to SEQ ID NO: 798376
aauccaagaauuaaagugc

SEQ ID NO: 798378 - RNA, 19 nt, Artificial Sequence
  Description of Artificial Sequence: Synthetic oligonucleotide
  Sense strand starting at position 3825 of SEQ ID NO: 587519
uccugaggccuuuauacuu

SEQ ID NO: 798379 - RNA, 19 nt, Artificial Sequence
  Description of Artificial Sequence: Synthetic oligonucleotide
  Antisense strand to SEQ ID NO: 798378
aaguauaaaggccucagga

SEQ ID NO: 798380 - RNA, 19 nt, Artificial Sequence
  Description of Artificial Sequence: Synthetic oligonucleotide
  Sense strand starting at position 3834 of SEQ ID NO: 587519
cuuuauacuugcgugagaa

SEQ ID NO: 798381 - RNA, 19 nt, Artificial Sequence
  Description of Artificial Sequence: Synthetic oligonucleotide
  Antisense strand to SEQ ID NO: 798380
uucucacgcaaguauaaag

SEQ ID NO: 798382 - RNA, 19 nt, Artificial Sequence
  Description of Artificial Sequence: Synthetic oligonucleotide
  Sense strand starting at position 3835 of SEQ ID NO: 587519
uuuauacuugcgugagaac

SEQ ID NO: 798383 - RNA, 19 nt, Artificial Sequence
  Description of Artificial Sequence: Synthetic oligonucleotide
  Antisense strand to SEQ ID NO: 798382
guucucacgcaaguauaaa

SEQ ID NO: 798384 - RNA, 19 nt, Artificial Sequence
  Description of Artificial Sequence: Synthetic oligonucleotide
  Sense strand starting at position 3836 of SEQ ID NO: 587519
uuauacuugcgugagaacu

SEQ ID NO: 798385 - RNA, 19 nt, Artificial Sequence
  Description of Artificial Sequence: Synthetic oligonucleotide
  Antisense strand to SEQ ID NO: 798384
aguucucacgcaaguauaa

SEQ ID NO: 798386 - RNA, 19 nt, Artificial Sequence
  Description of Artificial Sequence: Synthetic oligonucleotide
  Sense strand starting at position 527 of SEQ ID NO: 587520
acucucugugucuaaauga

SEQ ID NO: 798387 - RNA, 19 nt, Artificial Sequence
  Description of Artificial Sequence: Synthetic oligonucleotide
  Antisense strand to SEQ ID NO: 798386
ucauuuagacacagagagu

SEQ ID NO: 798388 - RNA, 19 nt, Artificial Sequence
  Description of Artificial Sequence: Synthetic oligonucleotide
  Sense strand starting at position 595 of SEQ ID NO: 587520
gugcuuuccaaagaggagu

SEQ ID NO: 798389 - RNA, 19 nt, Artificial Sequence
  Description of Artificial Sequence: Synthetic oligonucleotide
  Antisense strand to SEQ ID NO: 798388
acuccucuuuggaaagcac

SEQ ID NO: 798390 - RNA, 19 nt, Artificial Sequence
  Description of Artificial Sequence: Synthetic oligonucleotide
  Sense strand starting at position 614 of SEQ ID NO: 587520
gcuagagaggccuggauga

SEQ ID NO: 798391 - RNA, 19 nt, Artificial Sequence
  Description of Artificial Sequence: Synthetic oligonucleotide
  Antisense strand to SEQ ID NO: 798390
ucauccaggccucucuagc

SEQ ID NO: 798392 - RNA, 19 nt, Artificial Sequence
  Description of Artificial Sequence: Synthetic oligonucleotide
  Sense strand starting at position 650 of SEQ ID NO: 587520
gugggcaaguacucauaau

SEQ ID NO: 798393 - RNA, 19 nt, Artificial Sequence
  Description of Artificial Sequence: Synthetic oligonucleotide
  Antisense strand to SEQ ID NO: 798392
auuaugaguacuugcccac

SEQ ID NO: 798394 - RNA, 19 nt, Artificial Sequence
  Description of Artificial Sequence: Synthetic oligonucleotide
  Sense strand starting at position 682 of SEQ ID NO: 587520
cugugaaaucuguagucga

SEQ ID NO: 798395 - RNA, 19 nt, Artificial Sequence
  Description of Artificial Sequence: Synthetic oligonucleotide
  Antisense strand to SEQ ID NO: 798394
ucgacuacagauuucacag

SEQ ID NO: 798396 - RNA, 19 nt, Artificial Sequence
  Description of Artificial Sequence: Synthetic oligonucleotide
  Sense strand starting at position 700 of SEQ ID NO: 587520
agucuucugcaccacgaga

SEQ ID NO: 798397 - RNA, 19 nt, Artificial Sequence
  Description of Artificial Sequence: Synthetic oligonucleotide
  Antisense strand to SEQ ID NO: 798396
ucucguggugcagaagacu

SEQ ID NO: 798398 - RNA, 19 nt, Artificial Sequence
  Description of Artificial Sequence: Synthetic oligonucleotide
  Sense strand starting at position 859 of SEQ ID NO: 587520
ugggaaggugccugugaaa

SEQ ID NO: 798399 - RNA, 19 nt, Artificial Sequence
  Description of Artificial Sequence: Synthetic oligonucleotide
  Antisense strand to SEQ ID NO: 798398
uuucacaggcaccuuccca

SEQ ID NO: 798400 - RNA, 19 nt, Artificial Sequence
  Description of Artificial Sequence: Synthetic oligonucleotide
  Sense strand starting at position 1350 of SEQ ID NO: 587520
augagaguuauagguagau

SEQ ID NO: 798401 - RNA, 19 nt, Artificial Sequence
  Description of Artificial Sequence: Synthetic oligonucleotide
  Antisense strand to SEQ ID NO: 798400
aucuaccuauaacucucau

SEQ ID NO: 798402 - RNA, 19 nt, Artificial Sequence
  Description of Artificial Sequence: Synthetic oligonucleotide
  Sense strand starting at position 1492 of SEQ ID NO: 587520
agguaagaaucugaagaag

SEQ ID NO: 798403 - RNA, 19 nt, Artificial Sequence
  Description of Artificial Sequence: Synthetic oligonucleotide
  Antisense strand to SEQ ID NO: 798402
cuucuucagauucuuaccu

SEQ ID NO: 798404 - RNA, 19 nt, Artificial Sequence
  Description of Artificial Sequence: Synthetic oligonucleotide
  Sense strand starting at position 1643 of SEQ ID NO: 587520
cuggguaauucuguuaaca

SEQ ID NO: 798405 - RNA, 19 nt, Artificial Sequence
  Description of Artificial Sequence: Synthetic oligonucleotide
  Antisense strand to SEQ ID NO: 798404
uguuaacagaauuacccag

SEQ ID NO: 798406 - RNA, 19 nt, Artificial Sequence
  Description of Artificial Sequence: Synthetic oligonucleotide
  Sense strand starting at position 1717 of SEQ ID NO: 587520
ggaacacuguccuccuaga

SEQ ID NO: 798407 - RNA, 19 nt, Artificial Sequence
  Description of Artificial Sequence: Synthetic oligonucleotide
  Antisense strand to SEQ ID NO: 798406
ucuaggaggacaguguucc

SEQ ID NO: 798408 - RNA, 19 nt, Artificial Sequence
  Description of Artificial Sequence: Synthetic oligonucleotide
  Sense strand starting at position 1736 of SEQ ID NO: 587520
ggcaguuaccaucacuuaa

SEQ ID NO: 798409 - RNA, 19 nt, Artificial Sequence
  Description of Artificial Sequence: Synthetic oligonucleotide
  Antisense strand to SEQ ID NO: 798408
uuaagugaugguaacugcc

SEQ ID NO: 798410 - RNA, 19 nt, Artificial Sequence
  Description of Artificial Sequence: Synthetic oligonucleotide
  Sense strand starting at position 1797 of SEQ ID NO: 587520
aagaauaucuuguucgggu

SEQ ID NO: 798411 - RNA, 19 nt, Artificial Sequence
  Description of Artificial Sequence: Synthetic oligonucleotide
  Antisense strand to SEQ ID NO: 798410
acccgaacaagauauucuu

SEQ ID NO: 798412 - RNA, 19 nt, Artificial Sequence
  Description of Artificial Sequence: Synthetic oligonucleotide
  Sense strand starting at position 1798 of SEQ ID NO: 587520
agaauaucuuguucgggua

SEQ ID NO: 798413 - RNA, 19 nt, Artificial Sequence
  Description of Artificial Sequence: Synthetic oligonucleotide
  Antisense strand to SEQ ID NO: 798412
uacccgaacaagauauucu

SEQ ID NO: 798414 - RNA, 19 nt, Artificial Sequence
  Description of Artificial Sequence: Synthetic oligonucleotide
  Sense strand starting at position 1799 of SEQ ID NO: 587520
gaauaucuuguucggguaa

SEQ ID NO: 798415 - RNA, 19 nt, Artificial Sequence
  Description of Artificial Sequence: Synthetic oligonucleotide
  Antisense strand to SEQ ID NO: 798414
uuacccgaacaagauauuc

SEQ ID NO: 798416 - RNA, 19 nt, Artificial Sequence
  Description of Artificial Sequence: Synthetic oligonucleotide
  Sense strand starting at position 1814 of SEQ ID NO: 587520
guaaucaucuuguuuguag

SEQ ID NO: 798417 - RNA, 19 nt, Artificial Sequence
  Description of Artificial Sequence: Synthetic oligonucleotide
  Antisense strand to SEQ ID NO: 798416
cuacaaacaagaugauuac

SEQ ID NO: 798418 - RNA, 19 nt, Artificial Sequence
  Description of Artificial Sequence: Synthetic oligonucleotide
  Sense strand starting at position 1825 of SEQ ID NO: 587520
guuuguaggucuuuaacaa

SEQ ID NO: 798419 - RNA, 19 nt, Artificial Sequence
  Description of Artificial Sequence: Synthetic oligonucleotide
  Antisense strand to SEQ ID NO: 798418
uuguuaaagaccuacaaac

SEQ ID NO: 798420 - RNA, 19 nt, Artificial Sequence
  Description of Artificial Sequence: Synthetic oligonucleotide
  Sense strand starting at position 1826 of SEQ ID NO: 587520
uuuguaggucuuuaacaag

SEQ ID NO: 798421 - RNA, 19 nt, Artificial Sequence
  Description of Artificial Sequence: Synthetic oligonucleotide
  Antisense strand to SEQ ID NO: 798420
cuuguuaaagaccuacaaa

SEQ ID NO: 798422 - RNA, 19 nt, Artificial Sequence
  Description of Artificial Sequence: Synthetic oligonucleotide
  Sense strand starting at position 2102 of SEQ ID NO: 587520
ggaacauuccaggguacuu

SEQ ID NO: 798423 - RNA, 19 nt, Artificial Sequence
  Description of Artificial Sequence: Synthetic oligonucleotide
  Antisense strand to SEQ ID NO: 798422
aaguacccuggaauguucc

SEQ ID NO: 798424 - RNA, 19 nt, Artificial Sequence
  Description of Artificial Sequence: Synthetic oligonucleotide
  Sense strand starting at position 2153 of SEQ ID NO: 587520
ggauaacaaucuccggaau

SEQ ID NO: 798425 - RNA, 19 nt, Artificial Sequence
  Description of Artificial Sequence: Synthetic oligonucleotide
  Antisense strand to SEQ ID NO: 798424
auuccggagauuguuaucc

SEQ ID NO: 798426 - RNA, 19 nt, Artificial Sequence
  Description of Artificial Sequence: Synthetic oligonucleotide
  Sense strand starting at position 2219 of SEQ ID NO: 587520
gguggcucaguccaaagua

SEQ ID NO: 798427 - RNA, 19 nt, Artificial Sequence
  Description of Artificial Sequence: Synthetic oligonucleotide
  Antisense strand to SEQ ID NO: 798426
uacuuuggacugagccacc

SEQ ID NO: 798428 - RNA, 19 nt, Artificial Sequence
  Description of Artificial Sequence: Synthetic oligonucleotide
  Sense strand starting at position 2264 of SEQ ID NO: 587520
caaggauaaugggagauua

SEQ ID NO: 798429 - RNA, 19 nt, Artificial Sequence
  Description of Artificial Sequence: Synthetic oligonucleotide
  Antisense strand to SEQ ID NO: 798428
uaaucucccauuauccuug

SEQ ID NO: 798430 - RNA, 19 nt, Artificial Sequence
  Description of Artificial Sequence: Synthetic oligonucleotide
  Sense strand starting at position 2346 of SEQ ID NO: 587520
augcgauguaugcaucuaa

SEQ ID NO: 798431 - RNA, 19 nt, Artificial Sequence
  Description of Artificial Sequence: Synthetic oligonucleotide
  Antisense strand to SEQ ID NO: 798430
uuagaugcauacaucgcau

SEQ ID NO: 798432 - RNA, 19 nt, Artificial Sequence
  Description of Artificial Sequence: Synthetic oligonucleotide
  Sense strand starting at position 2639 of SEQ ID NO: 587520
aguccuauuucucucaguu

SEQ ID NO: 798433 - RNA, 19 nt, Artificial Sequence
  Description of Artificial Sequence: Synthetic oligonucleotide
  Antisense strand to SEQ ID NO: 798432
aacugagagaaauaggacu

SEQ ID NO: 798434 - RNA, 19 nt, Artificial Sequence
  Description of Artificial Sequence: Synthetic oligonucleotide
  Sense strand starting at position 2651 of SEQ ID NO: 587520
cucaguuaucuagagccaa

SEQ ID NO: 798435 - RNA, 19 nt, Artificial Sequence
  Description of Artificial Sequence: Synthetic oligonucleotide
  Antisense strand to SEQ ID NO: 798434
uuggcucuagauaacugag

SEQ ID NO: 798436 - RNA, 19 nt, Artificial Sequence
  Description of Artificial Sequence: Synthetic oligonucleotide
  Sense strand starting at position 2674 of SEQ ID NO: 587520
ucuacauauguuuguuaag

SEQ ID NO: 798437 - RNA, 19 nt, Artificial Sequence
  Description of Artificial Sequence: Synthetic oligonucleotide
  Antisense strand to SEQ ID NO: 798436
cuuaacaaacauauguaga

SEQ ID NO: 798438 - RNA, 19 nt, Artificial Sequence
  Description of Artificial Sequence: Synthetic oligonucleotide
  Sense strand starting at position 2675 of SEQ ID NO: 587520
cuacauauguuuguuaagu

SEQ ID NO: 798439 - RNA, 19 nt, Artificial Sequence
  Description of Artificial Sequence: Synthetic oligonucleotide
  Antisense strand to SEQ ID NO: 798438
acuuaacaaacauauguag

SEQ ID NO: 798440 - RNA, 19 nt, Artificial Sequence
  Description of Artificial Sequence: Synthetic oligonucleotide
  Sense strand starting at position 2861 of SEQ ID NO: 587520
gccaacuaguaaguauaga

SEQ ID NO: 798441 - RNA, 19 nt, Artificial Sequence
  Description of Artificial Sequence: Synthetic oligonucleotide
  Antisense strand to SEQ ID NO: 798440
ucuauacuuacuaguuggc

SEQ ID NO: 798442 - RNA, 19 nt, Artificial Sequence
  Description of Artificial Sequence: Synthetic oligonucleotide
  Sense strand starting at position 2916 of SEQ ID NO: 587520
uagagucagucugcauauu

SEQ ID NO: 798443 - RNA, 19 nt, Artificial Sequence
  Description of Artificial Sequence: Synthetic oligonucleotide
  Antisense strand to SEQ ID NO: 798442
aauaugcagacugacucua

SEQ ID NO: 798444 - RNA, 19 nt, Artificial Sequence
  Description of Artificial Sequence: Synthetic oligonucleotide
  Sense strand starting at position 3427 of SEQ ID NO: 587520
ucuuuaaaugauuguugca

SEQ ID NO: 798445 - RNA, 19 nt, Artificial Sequence
  Description of Artificial Sequence: Synthetic oligonucleotide
  Antisense strand to SEQ ID NO: 798444
ugcaacaaucauuuaaaga

SEQ ID NO: 798446 - RNA, 19 nt, Artificial Sequence
  Description of Artificial Sequence: Synthetic oligonucleotide
  Sense strand starting at position 3452 of SEQ ID NO: 587520
guugaugucucacccagaa

SEQ ID NO: 798447 - RNA, 19 nt, Artificial Sequence
  Description of Artificial Sequence: Synthetic oligonucleotide
  Antisense strand to SEQ ID NO: 798446
uucugggugagacaucaac

SEQ ID NO: 798448 - RNA, 19 nt, Artificial Sequence
  Description of Artificial Sequence: Synthetic oligonucleotide
  Sense strand starting at position 3524 of SEQ ID NO: 587520
gcuuauaugccuguguucu

SEQ ID NO: 798449 - RNA, 19 nt, Artificial Sequence
  Description of Artificial Sequence: Synthetic oligonucleotide
  Antisense strand to SEQ ID NO: 798448
agaacacaggcauauaagc

SEQ ID NO: 798450 - RNA, 19 nt, Artificial Sequence
  Description of Artificial Sequence: Synthetic oligonucleotide
  Sense strand starting at position 3534 of SEQ ID NO: 587520
cuguguucucuggagaauu

SEQ ID NO: 798451 - RNA, 19 nt, Artificial Sequence
  Description of Artificial Sequence: Synthetic oligonucleotide
  Antisense strand to SEQ ID NO: 798450
aauucuccagagaacacag

SEQ ID NO: 798452 - RNA, 19 nt, Artificial Sequence
  Description of Artificial Sequence: Synthetic oligonucleotide
  Sense strand starting at position 3536 of SEQ ID NO: 587520
guguucucuggagaauugu

SEQ ID NO: 798453 - RNA, 19 nt, Artificial Sequence
  Description of Artificial Sequence: Synthetic oligonucleotide
  Antisense strand to SEQ ID NO: 798452
acaauucuccagagaacac

SEQ ID NO: 798454 - RNA, 19 nt, Artificial Sequence
  Description of Artificial Sequence: Synthetic oligonucleotide
  Sense strand starting at position 3545 of SEQ ID NO: 587520
ggagaauugugcuuggcug

SEQ ID NO: 798455 - RNA, 19 nt, Artificial Sequence
  Description of Artificial Sequence: Synthetic oligonucleotide
  Antisense strand to SEQ ID NO: 798454
cagccaagcacaauucucc

SEQ ID NO: 798456 - RNA, 19 nt, Artificial Sequence
  Description of Artificial Sequence: Synthetic oligonucleotide
  Sense strand starting at position 3564 of SEQ ID NO: 587520
gcaggagucagcuagccua

SEQ ID NO: 798457 - RNA, 19 nt, Artificial Sequence
  Description of Artificial Sequence: Synthetic oligonucleotide
  Antisense strand to SEQ ID NO: 798456
uaggcuagcugacuccugc

SEQ ID NO: 798458 - RNA, 19 nt, Artificial Sequence
  Description of Artificial Sequence: Synthetic oligonucleotide
  Sense strand starting at position 3567 of SEQ ID NO: 587520
ggagucagcuagccuagaa

SEQ ID NO: 798459 - RNA, 19 nt, Artificial Sequence
  Description of Artificial Sequence: Synthetic oligonucleotide
  Antisense strand to SEQ ID NO: 798458
uucuaggcuagcugacucc

SEQ ID NO: 798460 - RNA, 19 nt, Artificial Sequence
  Description of Artificial Sequence: Synthetic oligonucleotide
  Sense strand starting at position 3621 of SEQ ID NO: 587520
gccaaugacugccugauuu

SEQ ID NO: 798461 - RNA, 19 nt, Artificial Sequence
  Description of Artificial Sequence: Synthetic oligonucleotide
  Antisense strand to SEQ ID NO: 798460
aaaucaggcagucauuggc

SEQ ID NO: 798462 - RNA, 19 nt, Artificial Sequence
  Description of Artificial Sequence: Synthetic oligonucleotide
  Sense strand starting at position 3816 of SEQ ID NO: 587520
ugguauugcagugagcuau

SEQ ID NO: 798463 - RNA, 19 nt, Artificial Sequence
  Description of Artificial Sequence: Synthetic oligonucleotide
  Antisense strand to SEQ ID NO: 798462
auagcucacugcaauacca

SEQ ID NO: 798464 - RNA, 19 nt, Artificial Sequence
  Description of Artificial Sequence: Synthetic oligonucleotide
  Sense strand starting at position 3966 of SEQ ID NO: 587520
acaggagauugagaccaua

SEQ ID NO: 798465 - RNA, 19 nt, Artificial Sequence
  Description of Artificial Sequence: Synthetic oligonucleotide
  Antisense strand to SEQ ID NO: 798464
uauggucucaaucuccugu

SEQ ID NO: 798466 - RNA, 19 nt, Artificial Sequence
  Description of Artificial Sequence: Synthetic oligonucleotide
  Sense strand starting at position 497 of SEQ ID NO: 587521
gcaagugaaugagugcuaa

SEQ ID NO: 798467 - RNA, 19 nt, Artificial Sequence
  Description of Artificial Sequence: Synthetic oligonucleotide
  Antisense strand to SEQ ID NO: 798466
uuagcacucauucacuugc

SEQ ID NO: 798468 - RNA, 19 nt, Artificial Sequence
  Description of Artificial Sequence: Synthetic oligonucleotide
  Sense strand starting at position 501 of SEQ ID NO: 587521
gugaaugagugcuaaugga

SEQ ID NO: 798469 - RNA, 19 nt, Artificial Sequence
  Description of Artificial Sequence: Synthetic oligonucleotide
  Antisense strand to SEQ ID NO: 798468
uccauuagcacucauucac

SEQ ID NO: 798470 - RNA, 19 nt, Artificial Sequence
  Description of Artificial Sequence: Synthetic oligonucleotide
  Sense strand starting at position 573 of SEQ ID NO: 587521
agaaccuaccagugacauu

SEQ ID NO: 798471 - RNA, 19 nt, Artificial Sequence
  Description of Artificial Sequence: Synthetic oligonucleotide
  Antisense strand to SEQ ID NO: 798470
aaugucacugguagguucu

SEQ ID NO: 798472 - RNA, 19 nt, Artificial Sequence
  Description of Artificial Sequence: Synthetic oligonucleotide
  Sense strand starting at position 930 of SEQ ID NO: 587521
ggagccucaguguaacuuu

SEQ ID NO: 798473 - RNA, 19 nt, Artificial Sequence
  Description of Artificial Sequence: Synthetic oligonucleotide
  Antisense strand to SEQ ID NO: 798472
aaaguuacacugaggcucc

SEQ ID NO: 798474 - RNA, 19 nt, Artificial Sequence
  Description of Artificial Sequence: Synthetic oligonucleotide
  Sense strand starting at position 1653 of SEQ ID NO: 587521
gccugauacccucagugcu

SEQ ID NO: 798475 - RNA, 19 nt, Artificial Sequence
  Description of Artificial Sequence: Synthetic oligonucleotide
  Antisense strand to SEQ ID NO: 798474
agcacugaggguaucaggc

SEQ ID NO: 798476 - RNA, 19 nt, Artificial Sequence
  Description of Artificial Sequence: Synthetic oligonucleotide
  Sense strand starting at position 2500 of SEQ ID NO: 587521
gggugugugcauuauaaag

SEQ ID NO: 798477 - RNA, 19 nt, Artificial Sequence
  Description of Artificial Sequence: Synthetic oligonucleotide
  Antisense strand to SEQ ID NO: 798476
cuuuauaaugcacacaccc

SEQ ID NO: 798478 - RNA, 19 nt, Artificial Sequence
  Description of Artificial Sequence: Synthetic oligonucleotide
  Sense strand starting at position 2546 of SEQ ID NO: 587521
ccaggagauccguggaaua

SEQ ID NO: 798479 - RNA, 19 nt, Artificial Sequence
  Description of Artificial Sequence: Synthetic oligonucleotide
  Antisense strand to SEQ ID NO: 798478
uauuccacggaucuccugg

SEQ ID NO: 798480 - RNA, 19 nt, Artificial Sequence
  Description of Artificial Sequence: Synthetic oligonucleotide
  Sense strand starting at position 2643 of SEQ ID NO: 587521
ggaguuugcucaagagggu

SEQ ID NO: 798481 - RNA, 19 nt, Artificial Sequence
  Description of Artificial Sequence: Synthetic oligonucleotide
  Antisense strand to SEQ ID NO: 798480
acccucuugagcaaacucc

SEQ ID NO: 798482 - RNA, 19 nt, Artificial Sequence
  Description of Artificial Sequence: Synthetic oligonucleotide
  Sense strand starting at position 2680 of SEQ ID NO: 587521
guggguggauccuuugaga

SEQ ID NO: 798483 - RNA, 19 nt, Artificial Sequence
  Description of Artificial Sequence: Synthetic oligonucleotide
  Antisense strand to SEQ ID NO: 798482
ucucaaaggauccacccac

SEQ ID NO: 798484 - RNA, 19 nt, Artificial Sequence
  Description of Artificial Sequence: Synthetic oligonucleotide
  Sense strand starting at position 2751 of SEQ ID NO: 587521
uuaaauuagccaggugagu

SEQ ID NO: 798485 - RNA, 19 nt, Artificial Sequence
  Description of Artificial Sequence: Synthetic oligonucleotide
  Antisense strand to SEQ ID NO: 798484
acucaccuggcuaauuuaa

SEQ ID NO: 798486 - RNA, 19 nt, Artificial Sequence
  Description of Artificial Sequence: Synthetic oligonucleotide
  Sense strand starting at position 3191 of SEQ ID NO: 587521
ucaagugauccaugagaac

SEQ ID NO: 798487 - RNA, 19 nt, Artificial Sequence
  Description of Artificial Sequence: Synthetic oligonucleotide
  Antisense strand to SEQ ID NO: 798486
guucucauggaucacuuga

SEQ ID NO: 798488 - RNA, 19 nt, Artificial Sequence
  Description of Artificial Sequence: Synthetic oligonucleotide
  Sense strand starting at position 3630 of SEQ ID NO: 587521
ccagcugaguucuuccuca

SEQ ID NO: 798489 - RNA, 19 nt, Artificial Sequence
  Description of Artificial Sequence: Synthetic oligonucleotide
  Antisense strand to SEQ ID NO: 798488
ugaggaagaacucagcugg

SEQ ID NO: 798490 - RNA, 19 nt, Artificial Sequence
  Description of Artificial Sequence: Synthetic oligonucleotide
  Sense strand starting at position 3686 of SEQ ID NO: 587521
guaacagauuccucagucu

SEQ ID NO: 798491 - RNA, 19 nt, Artificial Sequence
  Description of Artificial Sequence: Synthetic oligonucleotide
  Antisense strand to SEQ ID NO: 798490
agacugaggaaucuguuac

SEQ ID NO: 798492 - RNA, 19 nt, Artificial Sequence
  Description of Artificial Sequence: Synthetic oligonucleotide
  Sense strand starting at position 3700 of SEQ ID NO: 587521
agucuaauggccuggcuca

SEQ ID NO: 798493 - RNA, 19 nt, Artificial Sequence
  Description of Artificial Sequence: Synthetic oligonucleotide
  Antisense strand to SEQ ID NO: 798492
ugagccaggccauuagacu

SEQ ID NO: 798494 - RNA, 19 nt, Artificial Sequence
  Description of Artificial Sequence: Synthetic oligonucleotide
  Sense strand starting at position 3701 of SEQ ID NO: 587521
gucuaauggccuggcucau

SEQ ID NO: 798495 - RNA, 19 nt, Artificial Sequence
  Description of Artificial Sequence: Synthetic oligonucleotide
  Antisense strand to SEQ ID NO: 798494
augagccaggccauuagac

SEQ ID NO: 798496 - RNA, 19 nt, Artificial Sequence
  Description of Artificial Sequence: Synthetic oligonucleotide
  Sense strand starting at position 3751 of SEQ ID NO: 587521
uugaguccuuacugggaca

SEQ ID NO: 798497 - RNA, 19 nt, Artificial Sequence
  Description of Artificial Sequence: Synthetic oligonucleotide
  Antisense strand to SEQ ID NO: 798496
ugucccaguaaggacucaa

SEQ ID NO: 798498 - RNA, 19 nt, Artificial Sequence
  Description of Artificial Sequence: Synthetic oligonucleotide
  Sense strand starting at position 3752 of SEQ ID NO: 587521
ugaguccuuacugggacau

SEQ ID NO: 798499 - RNA, 19 nt, Artificial Sequence
  Description of Artificial Sequence: Synthetic oligonucleotide
  Antisense strand to SEQ ID NO: 798498
augucccaguaaggacuca

SEQ ID NO: 798500 - RNA, 19 nt, Artificial Sequence
  Description of Artificial Sequence: Synthetic oligonucleotide
  Sense strand starting at position 3830 of SEQ ID NO: 587521
ggguuugaaucaggcuaca

SEQ ID NO: 798501 - RNA, 19 nt, Artificial Sequence
  Description of Artificial Sequence: Synthetic oligonucleotide
  Antisense strand to SEQ ID NO: 798500
uguagccugauucaaaccc

SEQ ID NO: 798502 - RNA, 19 nt, Artificial Sequence
  Description of Artificial Sequence: Synthetic oligonucleotide
  Sense strand starting at position 3871 of SEQ ID NO: 587521
gggcgagggucccuaauca

SEQ ID NO: 798503 - RNA, 19 nt, Artificial Sequence
  Description of Artificial Sequence: Synthetic oligonucleotide
  Antisense strand to SEQ ID NO: 798502
ugauuagggacccucgccc

SEQ ID NO: 798504 - RNA, 19 nt, Artificial Sequence
  Description of Artificial Sequence: Synthetic oligonucleotide
  Sense strand starting at position 3941 of SEQ ID NO: 587521
aagugcuguuaggugauaa

SEQ ID NO: 798505 - RNA, 19 nt, Artificial Sequence
  Description of Artificial Sequence: Synthetic oligonucleotide
  Antisense strand to SEQ ID NO: 798504
uuaucaccuaacagcacuu

SEQ ID NO: 798506 - RNA, 19 nt, Artificial Sequence
  Description of Artificial Sequence: Synthetic oligonucleotide
  Sense strand starting at position 3942 of SEQ ID NO: 587521
agugcuguuaggugauaac

SEQ ID NO: 798507 - RNA, 19 nt, Artificial Sequence
  Description of Artificial Sequence: Synthetic oligonucleotide
  Antisense strand to SEQ ID NO: 798506
guuaucaccuaacagcacu

SEQ ID NO: 798508 - RNA, 19 nt, Artificial Sequence
  Description of Artificial Sequence: Synthetic oligonucleotide
  Sense strand starting at position 3945 of SEQ ID NO: 587521
gcuguuaggugauaacgua

SEQ ID NO: 798509 - RNA, 19 nt, Artificial Sequence
  Description of Artificial Sequence: Synthetic oligonucleotide
  Antisense strand to SEQ ID NO: 798508
uacguuaucaccuaacagc

SEQ ID NO: 798510 - RNA, 19 nt, Artificial Sequence
  Description of Artificial Sequence: Synthetic oligonucleotide
  Sense strand starting at position 355 of SEQ ID NO: 587522
gcgugagccuguguguuua

SEQ ID NO: 798511 - RNA, 19 nt, Artificial Sequence
  Description of Artificial Sequence: Synthetic oligonucleotide
  Antisense strand to SEQ ID NO: 798510
uaaacacacaggcucacgc

SEQ ID NO: 798512 - RNA, 19 nt, Artificial Sequence
  Description of Artificial Sequence: Synthetic oligonucleotide
  Sense strand starting at position 400 of SEQ ID NO: 587522
gggcgaacuucccaucauc

SEQ ID NO: 798513 - RNA, 19 nt, Artificial Sequence
  Description of Artificial Sequence: Synthetic oligonucleotide
  Antisense strand to SEQ ID NO: 798512
gaugaugggaaguucgccc

SEQ ID NO: 798514 - RNA, 19 nt, Artificial Sequence
  Description of Artificial Sequence: Synthetic oligonucleotide
  Sense strand starting at position 419 of SEQ ID NO: 587522
acucacguccugcgacaau

SEQ ID NO: 798515 - RNA, 19 nt, Artificial Sequence
  Description of Artificial Sequence: Synthetic oligonucleotide
  Antisense strand to SEQ ID NO: 798514
auugucgcaggacgugagu

SEQ ID NO: 798516 - RNA, 19 nt, Artificial Sequence
  Description of Artificial Sequence: Synthetic oligonucleotide
  Sense strand starting at position 1077 of SEQ ID NO: 587522
aacugagugucauggugag

SEQ ID NO: 798517 - RNA, 19 nt, Artificial Sequence
  Description of Artificial Sequence: Synthetic oligonucleotide
  Antisense strand to SEQ ID NO: 798516
cucaccaugacacucaguu

SEQ ID NO: 798518 - RNA, 19 nt, Artificial Sequence
  Description of Artificial Sequence: Synthetic oligonucleotide
  Sense strand starting at position 1190 of SEQ ID NO: 587522
cagaaugcuccaggcagau

SEQ ID NO: 798519 - RNA, 19 nt, Artificial Sequence
  Description of Artificial Sequence: Synthetic oligonucleotide
  Antisense strand to SEQ ID NO: 798518
aucugccuggagcauucug

SEQ ID NO: 798520 - RNA, 19 nt, Artificial Sequence
  Description of Artificial Sequence: Synthetic oligonucleotide
  Sense strand starting at position 1382 of SEQ ID NO: 587522
cagggaugcuuguaagccu

SEQ ID NO: 798521 - RNA, 19 nt, Artificial Sequence
  Description of Artificial Sequence: Synthetic oligonucleotide
  Antisense strand to SEQ ID NO: 798520
aggcuuacaagcaucccug

SEQ ID NO: 798522 - RNA, 19 nt, Artificial Sequence
  Description of Artificial Sequence: Synthetic oligonucleotide
  Sense strand starting at position 1604 of SEQ ID NO: 587522
ccgagugugcccuggcauu

SEQ ID NO: 798523 - RNA, 19 nt, Artificial Sequence
  Description of Artificial Sequence: Synthetic oligonucleotide
  Antisense strand to SEQ ID NO: 798522
aaugccagggcacacucgg

SEQ ID NO: 798524 - RNA, 19 nt, Artificial Sequence
  Description of Artificial Sequence: Synthetic oligonucleotide
  Sense strand starting at position 2097 of SEQ ID NO: 587522
guuguuucccuccaggaca

SEQ ID NO: 798525 - RNA, 19 nt, Artificial Sequence
  Description of Artificial Sequence: Synthetic oligonucleotide
  Antisense strand to SEQ ID NO: 798524
uguccuggagggaaacaac

SEQ ID NO: 798526 - RNA, 19 nt, Artificial Sequence
  Description of Artificial Sequence: Synthetic oligonucleotide
  Sense strand starting at position 2133 of SEQ ID NO: 587522
aggagaagucauugugguu

SEQ ID NO: 798527 - RNA, 19 nt, Artificial Sequence
  Description of Artificial Sequence: Synthetic oligonucleotide
  Antisense strand to SEQ ID NO: 798526
aaccacaaugacuucuccu

SEQ ID NO: 798528 - RNA, 19 nt, Artificial Sequence
  Description of Artificial Sequence: Synthetic oligonucleotide
  Sense strand starting at position 2340 of SEQ ID NO: 587522
ccucuauuugcuggucacu

SEQ ID NO: 798529 - RNA, 19 nt, Artificial Sequence
  Description of Artificial Sequence: Synthetic oligonucleotide
  Antisense strand to SEQ ID NO: 798528
agugaccagcaaauagagg

SEQ ID NO: 798530 - RNA, 19 nt, Artificial Sequence
  Description of Artificial Sequence: Synthetic oligonucleotide
  Sense strand starting at position 2362 of SEQ ID NO: 587522
caagcaucgucauccuaga

SEQ ID NO: 798531 - RNA, 19 nt, Artificial Sequence
  Description of Artificial Sequence: Synthetic oligonucleotide
  Antisense strand to SEQ ID NO: 798530
ucuaggaugacgaugcuug

SEQ ID NO: 798532 - RNA, 19 nt, Artificial Sequence
  Description of Artificial Sequence: Synthetic oligonucleotide
  Sense strand starting at position 2428 of SEQ ID NO: 587522
agucaaugcccucaagcua

SEQ ID NO: 798533 - RNA, 19 nt, Artificial Sequence
  Description of Artificial Sequence: Synthetic oligonucleotide
  Antisense strand to SEQ ID NO: 798532
uagcuugagggcauugacu

SEQ ID NO: 798534 - RNA, 19 nt, Artificial Sequence
  Description of Artificial Sequence: Synthetic oligonucleotide
  Sense strand starting at position 2620 of SEQ ID NO: 587522
cucggucucuugcugggaa

SEQ ID NO: 798535 - RNA, 19 nt, Artificial Sequence
  Description of Artificial Sequence: Synthetic oligonucleotide
  Antisense strand to SEQ ID NO: 798534
uucccagcaagagaccgag

SEQ ID NO: 798536 - RNA, 19 nt, Artificial Sequence
  Description of Artificial Sequence: Synthetic oligonucleotide
  Sense strand starting at position 2621 of SEQ ID NO: 587522
ucggucucuugcugggaaa

SEQ ID NO: 798537 - RNA, 19 nt, Artificial Sequence
  Description of Artificial Sequence: Synthetic oligonucleotide
  Antisense strand to SEQ ID NO: 798536
uuucccagcaagagaccga

SEQ ID NO: 798538 - RNA, 19 nt, Artificial Sequence
  Description of Artificial Sequence: Synthetic oligonucleotide
  Sense strand starting at position 2622 of SEQ ID NO: 587522
cggucucuugcugggaaag

SEQ ID NO: 798539 - RNA, 19 nt, Artificial Sequence
  Description of Artificial Sequence: Synthetic oligonucleotide
  Antisense strand to SEQ ID NO: 798538
cuuucccagcaagagaccg

SEQ ID NO: 798540 - RNA, 19 nt, Artificial Sequence
  Description of Artificial Sequence: Synthetic oligonucleotide
  Sense strand starting at position 2657 of SEQ ID NO: 587522
gccuucuggccuuguguga

SEQ ID NO: 798541 - RNA, 19 nt, Artificial Sequence
  Description of Artificial Sequence: Synthetic oligonucleotide
  Antisense strand to SEQ ID NO: 798540
ucacacaaggccagaaggc

SEQ ID NO: 798542 - RNA, 19 nt, Artificial Sequence
  Description of Artificial Sequence: Synthetic oligonucleotide
  Sense strand starting at position 2993 of SEQ ID NO: 587522
ugaguugguucuggaguga

SEQ ID NO: 798543 - RNA, 19 nt, Artificial Sequence
  Description of Artificial Sequence: Synthetic oligonucleotide
  Antisense strand to SEQ ID NO: 798542
ucacuccagaaccaacuca

SEQ ID NO: 798544 - RNA, 19 nt, Artificial Sequence
  Description of Artificial Sequence: Synthetic oligonucleotide
  Sense strand starting at position 2997 of SEQ ID NO: 587522
uugguucuggagugagcua

SEQ ID NO: 798545 - RNA, 19 nt, Artificial Sequence
  Description of Artificial Sequence: Synthetic oligonucleotide
  Antisense strand to SEQ ID NO: 798544
uagcucacuccagaaccaa

SEQ ID NO: 798546 - RNA, 19 nt, Artificial Sequence
  Description of Artificial Sequence: Synthetic oligonucleotide
  Sense strand starting at position 3006 of SEQ ID NO: 587522
gagugagcuaccuggguuu

SEQ ID NO: 798547 - RNA, 19 nt, Artificial Sequence
  Description of Artificial Sequence: Synthetic oligonucleotide
  Antisense strand to SEQ ID NO: 798546
aaacccagguagcucacuc

SEQ ID NO: 798548 - RNA, 19 nt, Artificial Sequence
  Description of Artificial Sequence: Synthetic oligonucleotide
  Sense strand starting at position 3008 of SEQ ID NO: 587522
gugagcuaccuggguuuaa

SEQ ID NO: 798549 - RNA, 19 nt, Artificial Sequence
  Description of Artificial Sequence: Synthetic oligonucleotide
  Antisense strand to SEQ ID NO: 798548
uuaaacccagguagcucac

SEQ ID NO: 798550 - RNA, 19 nt, Artificial Sequence
  Description of Artificial Sequence: Synthetic oligonucleotide
  Sense strand starting at position 3048 of SEQ ID NO: 587522
ggcuguggguucuggacua

SEQ ID NO: 798551 - RNA, 19 nt, Artificial Sequence
  Description of Artificial Sequence: Synthetic oligonucleotide
  Antisense strand to SEQ ID NO: 798550
uaguccagaacccacagcc

SEQ ID NO: 798552 - RNA, 19 nt, Artificial Sequence
  Description of Artificial Sequence: Synthetic oligonucleotide
  Sense strand starting at position 3147 of SEQ ID NO: 587522
gcgccugaggcugggaaua

SEQ ID NO: 798553 - RNA, 19 nt, Artificial Sequence
  Description of Artificial Sequence: Synthetic oligonucleotide
  Antisense strand to SEQ ID NO: 798552
uauucccagccucaggcgc

SEQ ID NO: 798554 - RNA, 19 nt, Artificial Sequence
  Description of Artificial Sequence: Synthetic oligonucleotide
  Sense strand starting at position 3159 of SEQ ID NO: 587522
gggaauaccugucucuaau

SEQ ID NO: 798555 - RNA, 19 nt, Artificial Sequence
  Description of Artificial Sequence: Synthetic oligonucleotide
  Antisense strand to SEQ ID NO: 798554
auuagagacagguauuccc

SEQ ID NO: 798556 - RNA, 19 nt, Artificial Sequence
  Description of Artificial Sequence: Synthetic oligonucleotide
  Sense strand starting at position 3964 of SEQ ID NO: 587522
ccuugaaucuagugcugca

SEQ ID NO: 798557 - RNA, 19 nt, Artificial Sequence
  Description of Artificial Sequence: Synthetic oligonucleotide
  Antisense strand to SEQ ID NO: 798556
ugcagcacuagauucaagg

SEQ ID NO: 798558 - RNA, 19 nt, Artificial Sequence
  Description of Artificial Sequence: Synthetic oligonucleotide
  Sense strand starting at position 161 of SEQ ID NO: 587523
uguauuguucuggacacaa

SEQ ID NO: 798559 - RNA, 19 nt, Artificial Sequence
  Description of Artificial Sequence: Synthetic oligonucleotide
  Antisense strand to SEQ ID NO: 798558
uuguguccagaacaauaca

SEQ ID NO: 798560 - RNA, 19 nt, Artificial Sequence
  Description of Artificial Sequence: Synthetic oligonucleotide
  Sense strand starting at position 357 of SEQ ID NO: 587523
cguggucggcgcaggaaau

SEQ ID NO: 798561 - RNA, 19 nt, Artificial Sequence
  Description of Artificial Sequence: Synthetic oligonucleotide
  Antisense strand to SEQ ID NO: 798560
auuuccugcgccgaccacg

SEQ ID NO: 798562 - RNA, 19 nt, Artificial Sequence
  Description of Artificial Sequence: Synthetic oligonucleotide
  Sense strand starting at position 576 of SEQ ID NO: 587523
guuucuuucuucgcaaucu

SEQ ID NO: 798563 - RNA, 19 nt, Artificial Sequence
  Description of Artificial Sequence: Synthetic oligonucleotide
  Antisense strand to SEQ ID NO: 798562
agauugcgaagaaagaaac

SEQ ID NO: 798564 - RNA, 19 nt, Artificial Sequence
  Description of Artificial Sequence: Synthetic oligonucleotide
  Sense strand starting at position 588 of SEQ ID NO: 587523
gcaaucuuugcgcgaaguc

SEQ ID NO: 798565 - RNA, 19 nt, Artificial Sequence
  Description of Artificial Sequence: Synthetic oligonucleotide
  Antisense strand to SEQ ID NO: 798564
gacuucgcgcaaagauugc

SEQ ID NO: 798566 - RNA, 19 nt, Artificial Sequence
  Description of Artificial Sequence: Synthetic oligonucleotide
  Sense strand starting at position 589 of SEQ ID NO: 587523
caaucuuugcgcgaaguca

SEQ ID NO: 798567 - RNA, 19 nt, Artificial Sequence
  Description of Artificial Sequence: Synthetic oligonucleotide
  Antisense strand to SEQ ID NO: 798566
ugacuucgcgcaaagauug

SEQ ID NO: 798568 - RNA, 19 nt, Artificial Sequence
  Description of Artificial Sequence: Synthetic oligonucleotide
  Sense strand starting at position 597 of SEQ ID NO: 587523
gcgcgaagucaauggagaa

SEQ ID NO: 798569 - RNA, 19 nt, Artificial Sequence
  Description of Artificial Sequence: Synthetic oligonucleotide
  Antisense strand to SEQ ID NO: 798568
uucuccauugacuucgcgc

SEQ ID NO: 798570 - RNA, 19 nt, Artificial Sequence
  Description of Artificial Sequence: Synthetic oligonucleotide
  Sense strand starting at position 598 of SEQ ID NO: 587523
cgcgaagucaauggagaaa

SEQ ID NO: 798571 - RNA, 19 nt, Artificial Sequence
  Description of Artificial Sequence: Synthetic oligonucleotide
  Antisense strand to SEQ ID NO: 798570
uuucuccauugacuucgcg

SEQ ID NO: 798572 - RNA, 19 nt, Artificial Sequence
  Description of Artificial Sequence: Synthetic oligonucleotide
  Sense strand starting at position 616 of SEQ ID NO: 587523
acagccaaagcucgaguua

SEQ ID NO: 798573 - RNA, 19 nt, Artificial Sequence
  Description of Artificial Sequence: Synthetic oligonucleotide
  Antisense strand to SEQ ID NO: 798572
uaacucgagcuuuggcugu

SEQ ID NO: 798574 - RNA, 19 nt, Artificial Sequence
  Description of Artificial Sequence: Synthetic oligonucleotide
  Sense strand starting at position 627 of SEQ ID NO: 587523
ucgaguuacuuccaggaga

SEQ ID NO: 798575 - RNA, 19 nt, Artificial Sequence
  Description of Artificial Sequence: Synthetic oligonucleotide
  Antisense strand to SEQ ID NO: 798574
ucuccuggaaguaacucga

SEQ ID NO: 798576 - RNA, 19 nt, Artificial Sequence
  Description of Artificial Sequence: Synthetic oligonucleotide
  Sense strand starting at position 629 of SEQ ID NO: 587523
gaguuacuuccaggagagg

SEQ ID NO: 798577 - RNA, 19 nt, Artificial Sequence
  Description of Artificial Sequence: Synthetic oligonucleotide
  Antisense strand to SEQ ID NO: 798576
ccucuccuggaaguaacuc

SEQ ID NO: 798578 - RNA, 19 nt, Artificial Sequence
  Description of Artificial Sequence: Synthetic oligonucleotide
  Sense strand starting at position 887 of SEQ ID NO: 587523
ccagguaaauccggagacu

SEQ ID NO: 798579 - RNA, 19 nt, Artificial Sequence
  Description of Artificial Sequence: Synthetic oligonucleotide
  Antisense strand to SEQ ID NO: 798578
agucuccggauuuaccugg

SEQ ID NO: 798580 - RNA, 19 nt, Artificial Sequence
  Description of Artificial Sequence: Synthetic oligonucleotide
  Sense strand starting at position 970 of SEQ ID NO: 587523
cgucgaucuuuccugagca

SEQ ID NO: 798581 - RNA, 19 nt, Artificial Sequence
  Description of Artificial Sequence: Synthetic oligonucleotide
  Antisense strand to SEQ ID NO: 798580
ugcucaggaaagaucgacg

SEQ ID NO: 798582 - RNA, 19 nt, Artificial Sequence
  Description of Artificial Sequence: Synthetic oligonucleotide
  Sense strand starting at position 972 of SEQ ID NO: 587523
ucgaucuuuccugagcauu

SEQ ID NO: 798583 - RNA, 19 nt, Artificial Sequence
  Description of Artificial Sequence: Synthetic oligonucleotide
  Antisense strand to SEQ ID NO: 798582
aaugcucaggaaagaucga

SEQ ID NO: 798584 - RNA, 19 nt, Artificial Sequence
  Description of Artificial Sequence: Synthetic oligonucleotide
  Sense strand starting at position 1030 of SEQ ID NO: 587523
ccuaguccaggcuggaaau

SEQ ID NO: 798585 - RNA, 19 nt, Artificial Sequence
  Description of Artificial Sequence: Synthetic oligonucleotide
  Antisense strand to SEQ ID NO: 798584
auuuccagccuggacuagg

SEQ ID NO: 798586 - RNA, 19 nt, Artificial Sequence
  Description of Artificial Sequence: Synthetic oligonucleotide
  Sense strand starting at position 1225 of SEQ ID NO: 587523
caggccuguccagaaaucu

SEQ ID NO: 798587 - RNA, 19 nt, Artificial Sequence
  Description of Artificial Sequence: Synthetic oligonucleotide
  Antisense strand to SEQ ID NO: 798586
agauuucuggacaggccug

SEQ ID NO: 798588 - RNA, 19 nt, Artificial Sequence
  Description of Artificial Sequence: Synthetic oligonucleotide
  Sense strand starting at position 1233 of SEQ ID NO: 587523
uccagaaaucucugaagug

SEQ ID NO: 798589 - RNA, 19 nt, Artificial Sequence
  Description of Artificial Sequence: Synthetic oligonucleotide
  Antisense strand to SEQ ID NO: 798588
cacuucagagauuucugga

SEQ ID NO: 798590 - RNA, 19 nt, Artificial Sequence
  Description of Artificial Sequence: Synthetic oligonucleotide
  Sense strand starting at position 2374 of SEQ ID NO: 587523
gguggaaggcuccgagguu

SEQ ID NO: 798591 - RNA, 19 nt, Artificial Sequence
  Description of Artificial Sequence: Synthetic oligonucleotide
  Antisense strand to SEQ ID NO: 798590
aaccucggagccuuccacc

SEQ ID NO: 798592 - RNA, 19 nt, Artificial Sequence
  Description of Artificial Sequence: Synthetic oligonucleotide
  Sense strand starting at position 2410 of SEQ ID NO: 587523
cgaugaucagucuggaagu

SEQ ID NO: 798593 - RNA, 19 nt, Artificial Sequence
  Description of Artificial Sequence: Synthetic oligonucleotide
  Antisense strand to SEQ ID NO: 798592
acuuccagacugaucaucg

SEQ ID NO: 798594 - RNA, 19 nt, Artificial Sequence
  Description of Artificial Sequence: Synthetic oligonucleotide
  Sense strand starting at position 2411 of SEQ ID NO: 587523
gaugaucagucuggaaguc

SEQ ID NO: 798595 - RNA, 19 nt, Artificial Sequence
  Description of Artificial Sequence: Synthetic oligonucleotide
  Antisense strand to SEQ ID NO: 798594
gacuuccagacugaucauc

SEQ ID NO: 798596 - RNA, 19 nt, Artificial Sequence
  Description of Artificial Sequence: Synthetic oligonucleotide
  Sense strand starting at position 2538 of SEQ ID NO: 587523
gugcaugucauucggccaa

SEQ ID NO: 798597 - RNA, 19 nt, Artificial Sequence
  Description of Artificial Sequence: Synthetic oligonucleotide
  Antisense strand to SEQ ID NO: 798596
uuggccgaaugacaugcac

SEQ ID NO: 798598 - RNA, 19 nt, Artificial Sequence
  Description of Artificial Sequence: Synthetic oligonucleotide
  Sense strand starting at position 2780 of SEQ ID NO: 587523
cucauuacugucugaccuu

SEQ ID NO: 798599 - RNA, 19 nt, Artificial Sequence
  Description of Artificial Sequence: Synthetic oligonucleotide
  Antisense strand to SEQ ID NO: 798598
aaggucagacaguaaugag

SEQ ID NO: 798600 - RNA, 19 nt, Artificial Sequence
  Description of Artificial Sequence: Synthetic oligonucleotide
  Sense strand starting at position 2865 of SEQ ID NO: 587523
caguuuauagaguggcauu

SEQ ID NO: 798601 - RNA, 19 nt, Artificial Sequence
  Description of Artificial Sequence: Synthetic oligonucleotide
  Antisense strand to SEQ ID NO: 798600
aaugccacucuauaaacug

SEQ ID NO: 798602 - RNA, 19 nt, Artificial Sequence
  Description of Artificial Sequence: Synthetic oligonucleotide
  Sense strand starting at position 2866 of SEQ ID NO: 587523
aguuuauagaguggcauua

SEQ ID NO: 798603 - RNA, 19 nt, Artificial Sequence
  Description of Artificial Sequence: Synthetic oligonucleotide
  Antisense strand to SEQ ID NO: 798602
uaaugccacucuauaaacu

SEQ ID NO: 798604 - RNA, 19 nt, Artificial Sequence
  Description of Artificial Sequence: Synthetic oligonucleotide
  Sense strand starting at position 2868 of SEQ ID NO: 587523
uuuauagaguggcauuaga

SEQ ID NO: 798605 - RNA, 19 nt, Artificial Sequence
  Description of Artificial Sequence: Synthetic oligonucleotide
  Antisense strand to SEQ ID NO: 798604
ucuaaugccacucuauaaa

SEQ ID NO: 798606 - RNA, 19 nt, Artificial Sequence
  Description of Artificial Sequence: Synthetic oligonucleotide
  Sense strand starting at position 2878 of SEQ ID NO: 587523
ggcauuagaugcccaguaa

SEQ ID NO: 798607 - RNA, 19 nt, Artificial Sequence
  Description of Artificial Sequence: Synthetic oligonucleotide
  Antisense strand to SEQ ID NO: 798606
uuacugggcaucuaaugcc

SEQ ID NO: 798608 - RNA, 19 nt, Artificial Sequence
  Description of Artificial Sequence: Synthetic oligonucleotide
  Sense strand starting at position 2879 of SEQ ID NO: 587523
gcauuagaugcccaguaaa

SEQ ID NO: 798609 - RNA, 19 nt, Artificial Sequence
  Description of Artificial Sequence: Synthetic oligonucleotide
  Antisense strand to SEQ ID NO: 798608
uuuacugggcaucuaaugc

SEQ ID NO: 798610 - RNA, 19 nt, Artificial Sequence
  Description of Artificial Sequence: Synthetic oligonucleotide
  Sense strand starting at position 2890 of SEQ ID NO: 587523
ccaguaaaucguggcauua

SEQ ID NO: 798611 - RNA, 19 nt, Artificial Sequence
  Description of Artificial Sequence: Synthetic oligonucleotide
  Antisense strand to SEQ ID NO: 798610
uaaugccacgauuuacugg

SEQ ID NO: 798612 - RNA, 19 nt, Artificial Sequence
  Description of Artificial Sequence: Synthetic oligonucleotide
  Sense strand starting at position 2986 of SEQ ID NO: 587523
acaacuagugguggguaua

SEQ ID NO: 798613 - RNA, 19 nt, Artificial Sequence
  Description of Artificial Sequence: Synthetic oligonucleotide
  Antisense strand to SEQ ID NO: 798612
uauacccaccacuaguugu

SEQ ID NO: 798614 - RNA, 19 nt, Artificial Sequence
  Description of Artificial Sequence: Synthetic oligonucleotide
  Sense strand starting at position 2987 of SEQ ID NO: 587523
caacuagugguggguauaa

SEQ ID NO: 798615 - RNA, 19 nt, Artificial Sequence
  Description of Artificial Sequence: Synthetic oligonucleotide
  Antisense strand to SEQ ID NO: 798614
uuauacccaccacuaguug

SEQ ID NO: 798616 - RNA, 19 nt, Artificial Sequence
  Description of Artificial Sequence: Synthetic oligonucleotide
  Sense strand starting at position 3087 of SEQ ID NO: 587523
ugaggaguuugagauccac

SEQ ID NO: 798617 - RNA, 19 nt, Artificial Sequence
  Description of Artificial Sequence: Synthetic oligonucleotide
  Antisense strand to SEQ ID NO: 798616
guggaucucaaacuccuca

SEQ ID NO: 798618 - RNA, 19 nt, Artificial Sequence
  Description of Artificial Sequence: Synthetic oligonucleotide
  Sense strand starting at position 3420 of SEQ ID NO: 587523
cuuucuguugcuuaauaga

SEQ ID NO: 798619 - RNA, 19 nt, Artificial Sequence
  Description of Artificial Sequence: Synthetic oligonucleotide
  Antisense strand to SEQ ID NO: 798618
ucuauuaagcaacagaaag

SEQ ID NO: 798620 - RNA, 19 nt, Artificial Sequence
  Description of Artificial Sequence: Synthetic oligonucleotide
  Sense strand starting at position 3502 of SEQ ID NO: 587523
aggugaaugccacauucuu

SEQ ID NO: 798621 - RNA, 19 nt, Artificial Sequence
  Description of Artificial Sequence: Synthetic oligonucleotide
  Antisense strand to SEQ ID NO: 798620
aagaauguggcauucaccu

SEQ ID NO: 798622 - RNA, 19 nt, Artificial Sequence
  Description of Artificial Sequence: Synthetic oligonucleotide
  Sense strand starting at position 3508 of SEQ ID NO: 587523
augccacauucuuuaguga

SEQ ID NO: 798623 - RNA, 19 nt, Artificial Sequence
  Description of Artificial Sequence: Synthetic oligonucleotide
  Antisense strand to SEQ ID NO: 798622
ucacuaaagaauguggcau

SEQ ID NO: 798624 - RNA, 19 nt, Artificial Sequence
  Description of Artificial Sequence: Synthetic oligonucleotide
  Sense strand starting at position 3524 of SEQ ID NO: 587523
ugagcuuagcccugcugau

SEQ ID NO: 798625 - RNA, 19 nt, Artificial Sequence
  Description of Artificial Sequence: Synthetic oligonucleotide
  Antisense strand to SEQ ID NO: 798624
aucagcagggcuaagcuca

SEQ ID NO: 798626 - RNA, 19 nt, Artificial Sequence
  Description of Artificial Sequence: Synthetic oligonucleotide
  Sense strand starting at position 3748 of SEQ ID NO: 587523
agugauugcaaauggagga

SEQ ID NO: 798627 - RNA, 19 nt, Artificial Sequence
  Description of Artificial Sequence: Synthetic oligonucleotide
  Antisense strand to SEQ ID NO: 798626
uccuccauuugcaaucacu

SEQ ID NO: 798628 - RNA, 19 nt, Artificial Sequence
  Description of Artificial Sequence: Synthetic oligonucleotide
  Sense strand starting at position 3820 of SEQ ID NO: 587523
ggcugcauuccucaggaaa

SEQ ID NO: 798629 - RNA, 19 nt, Artificial Sequence
  Description of Artificial Sequence: Synthetic oligonucleotide
  Antisense strand to SEQ ID NO: 798628
uuuccugaggaaugcagcc

SEQ ID NO: 798630 - RNA, 19 nt, Artificial Sequence
  Description of Artificial Sequence: Synthetic oligonucleotide
  Sense strand starting at position 3822 of SEQ ID NO: 587523
cugcauuccucaggaaaga

SEQ ID NO: 798631 - RNA, 19 nt, Artificial Sequence
  Description of Artificial Sequence: Synthetic oligonucleotide
  Antisense strand to SEQ ID NO: 798630
ucuuuccugaggaaugcag

SEQ ID NO: 798632 - RNA, 19 nt, Artificial Sequence
  Description of Artificial Sequence: Synthetic oligonucleotide
  Sense strand starting at position 3900 of SEQ ID NO: 587523
ggaagacucugagaucucu

SEQ ID NO: 798633 - RNA, 19 nt, Artificial Sequence
  Description of Artificial Sequence: Synthetic oligonucleotide
  Antisense strand to SEQ ID NO: 798632
agagaucucagagucuucc

SEQ ID NO: 798634 - RNA, 19 nt, Artificial Sequence
  Description of Artificial Sequence: Synthetic oligonucleotide
  Sense strand starting at position 3913 of SEQ ID NO: 587523
aucucuggccugggucaua

SEQ ID NO: 798635 - RNA, 19 nt, Artificial Sequence
  Description of Artificial Sequence: Synthetic oligonucleotide
  Antisense strand to SEQ ID NO: 798634
uaugacccaggccagagau

SEQ ID NO: 798636 - RNA, 19 nt, Artificial Sequence
  Description of Artificial Sequence: Synthetic oligonucleotide
  Sense strand starting at position 3942 of SEQ ID NO: 587523
gugauuuccuuuggcuaaa

SEQ ID NO: 798637 - RNA, 19 nt, Artificial Sequence
  Description of Artificial Sequence: Synthetic oligonucleotide
  Antisense strand to SEQ ID NO: 798636
uuuagccaaaggaaaucac

SEQ ID NO: 798638 - RNA, 19 nt, Artificial Sequence
  Description of Artificial Sequence: Synthetic oligonucleotide
  Sense strand starting at position 241 of SEQ ID NO: 587524
ggugucagaccaggacuua

SEQ ID NO: 798639 - RNA, 19 nt, Artificial Sequence
  Description of Artificial Sequence: Synthetic oligonucleotide
  Antisense strand to SEQ ID NO: 798638
uaaguccuggucugacacc

SEQ ID NO: 798640 - RNA, 19 nt, Artificial Sequence
  Description of Artificial Sequence: Synthetic oligonucleotide
  Sense strand starting at position 440 of SEQ ID NO: 587524
gaaggagagucuguguuca

SEQ ID NO: 798641 - RNA, 19 nt, Artificial Sequence
  Description of Artificial Sequence: Synthetic oligonucleotide
  Antisense strand to SEQ ID NO: 798640
ugaacacagacucuccuuc

SEQ ID NO: 798642 - RNA, 19 nt, Artificial Sequence
  Description of Artificial Sequence: Synthetic oligonucleotide
  Sense strand starting at position 453 of SEQ ID NO: 587524
uguucagggcucugugaga

SEQ ID NO: 798643 - RNA, 19 nt, Artificial Sequence
  Description of Artificial Sequence: Synthetic oligonucleotide
  Antisense strand to SEQ ID NO: 798642
ucucacagagcccugaaca

SEQ ID NO: 798644 - RNA, 19 nt, Artificial Sequence
  Description of Artificial Sequence: Synthetic oligonucleotide
  Sense strand starting at position 655 of SEQ ID NO: 587524
cugugcuucccucacugaa

SEQ ID NO: 798645 - RNA, 19 nt, Artificial Sequence
  Description of Artificial Sequence: Synthetic oligonucleotide
  Antisense strand to SEQ ID NO: 798644
uucagugagggaagcacag

SEQ ID NO: 798646 - RNA, 19 nt, Artificial Sequence
  Description of Artificial Sequence: Synthetic oligonucleotide
  Sense strand starting at position 720 of SEQ ID NO: 587524
cugagucacugcugaguga

SEQ ID NO: 798647 - RNA, 19 nt, Artificial Sequence
  Description of Artificial Sequence: Synthetic oligonucleotide
  Antisense strand to SEQ ID NO: 798646
ucacucagcagugacucag

SEQ ID NO: 798648 - RNA, 19 nt, Artificial Sequence
  Description of Artificial Sequence: Synthetic oligonucleotide
  Sense strand starting at position 721 of SEQ ID NO: 587524
ugagucacugcugagugau

SEQ ID NO: 798649 - RNA, 19 nt, Artificial Sequence
  Description of Artificial Sequence: Synthetic oligonucleotide
  Antisense strand to SEQ ID NO: 798648
aucacucagcagugacuca

SEQ ID NO: 798650 - RNA, 19 nt, Artificial Sequence
  Description of Artificial Sequence: Synthetic oligonucleotide
  Sense strand starting at position 724 of SEQ ID NO: 587524
gucacugcugagugaugga

SEQ ID NO: 798651 - RNA, 19 nt, Artificial Sequence
  Description of Artificial Sequence: Synthetic oligonucleotide
  Antisense strand to SEQ ID NO: 798650
uccaucacucagcagugac

SEQ ID NO: 798652 - RNA, 19 nt, Artificial Sequence
  Description of Artificial Sequence: Synthetic oligonucleotide
  Sense strand starting at position 732 of SEQ ID NO: 587524
ugagugauggaguggauga

SEQ ID NO: 798653 - RNA, 19 nt, Artificial Sequence
  Description of Artificial Sequence: Synthetic oligonucleotide
  Antisense strand to SEQ ID NO: 798652
ucauccacuccaucacuca

SEQ ID NO: 798654 - RNA, 19 nt, Artificial Sequence
  Description of Artificial Sequence: Synthetic oligonucleotide
  Sense strand starting at position 733 of SEQ ID NO: 587524
gagugauggaguggaugau

SEQ ID NO: 798655 - RNA, 19 nt, Artificial Sequence
  Description of Artificial Sequence: Synthetic oligonucleotide
  Antisense strand to SEQ ID NO: 798654
aucauccacuccaucacuc

SEQ ID NO: 798656 - RNA, 19 nt, Artificial Sequence
  Description of Artificial Sequence: Synthetic oligonucleotide
  Sense strand starting at position 764 of SEQ ID NO: 587524
cucugaucuccuugagccu

SEQ ID NO: 798657 - RNA, 19 nt, Artificial Sequence
  Description of Artificial Sequence: Synthetic oligonucleotide
  Antisense strand to SEQ ID NO: 798656
aggcucaaggagaucagag

SEQ ID NO: 798658 - RNA, 19 nt, Artificial Sequence
  Description of Artificial Sequence: Synthetic oligonucleotide
  Sense strand starting at position 855 of SEQ ID NO: 587524
ccaggagcugcucagaaau

SEQ ID NO: 798659 - RNA, 19 nt, Artificial Sequence
  Description of Artificial Sequence: Synthetic oligonucleotide
  Antisense strand to SEQ ID NO: 798658
auuucugagcagcuccugg

SEQ ID NO: 798660 - RNA, 19 nt, Artificial Sequence
  Description of Artificial Sequence: Synthetic oligonucleotide
  Sense strand starting at position 1595 of SEQ ID NO: 587524
gcagaugcucggugagugu

SEQ ID NO: 798661 - RNA, 19 nt, Artificial Sequence
  Description of Artificial Sequence: Synthetic oligonucleotide
  Antisense strand to SEQ ID NO: 798660
acacucaccgagcaucugc

SEQ ID NO: 798662 - RNA, 19 nt, Artificial Sequence
  Description of Artificial Sequence: Synthetic oligonucleotide
  Sense strand starting at position 1599 of SEQ ID NO: 587524
augcucggugaguguugaa

SEQ ID NO: 798663 - RNA, 19 nt, Artificial Sequence
  Description of Artificial Sequence: Synthetic oligonucleotide
  Antisense strand to SEQ ID NO: 798662
uucaacacucaccgagcau

SEQ ID NO: 798664 - RNA, 19 nt, Artificial Sequence
  Description of Artificial Sequence: Synthetic oligonucleotide
  Sense strand starting at position 1608 of SEQ ID NO: 587524
gaguguugaacggagggau

SEQ ID NO: 798665 - RNA, 19 nt, Artificial Sequence
  Description of Artificial Sequence: Synthetic oligonucleotide
  Antisense strand to SEQ ID NO: 798664
aucccuccguucaacacuc

SEQ ID NO: 798666 - RNA, 19 nt, Artificial Sequence
  Description of Artificial Sequence: Synthetic oligonucleotide
  Sense strand starting at position 2783 of SEQ ID NO: 587524
uugcauguguccuggguuu

SEQ ID NO: 798667 - RNA, 19 nt, Artificial Sequence
  Description of Artificial Sequence: Synthetic oligonucleotide
  Antisense strand to SEQ ID NO: 798666
aaacccaggacacaugcaa

SEQ ID NO: 798668 - RNA, 19 nt, Artificial Sequence
  Description of Artificial Sequence: Synthetic oligonucleotide
  Sense strand starting at position 2894 of SEQ ID NO: 587524
gggucaggugugugggaaa

SEQ ID NO: 798669 - RNA, 19 nt, Artificial Sequence
  Description of Artificial Sequence: Synthetic oligonucleotide
  Antisense strand to SEQ ID NO: 798668
uuucccacacaccugaccc

SEQ ID NO: 798670 - RNA, 19 nt, Artificial Sequence
  Description of Artificial Sequence: Synthetic oligonucleotide
  Sense strand starting at position 2896 of SEQ ID NO: 587524
gucaggugugugggaaaga

SEQ ID NO: 798671 - RNA, 19 nt, Artificial Sequence
  Description of Artificial Sequence: Synthetic oligonucleotide
  Antisense strand to SEQ ID NO: 798670
ucuuucccacacaccugac

SEQ ID NO: 798672 - RNA, 19 nt, Artificial Sequence
  Description of Artificial Sequence: Synthetic oligonucleotide
  Sense strand starting at position 2962 of SEQ ID NO: 587524
gaccucagugcuggaggaa

SEQ ID NO: 798673 - RNA, 19 nt, Artificial Sequence
  Description of Artificial Sequence: Synthetic oligonucleotide
  Antisense strand to SEQ ID NO: 798672
uuccuccagcacugagguc

SEQ ID NO: 798674 - RNA, 19 nt, Artificial Sequence
  Description of Artificial Sequence: Synthetic oligonucleotide
  Sense strand starting at position 3163 of SEQ ID NO: 587524
ccgugugcuucugcugaua

SEQ ID NO: 798675 - RNA, 19 nt, Artificial Sequence
  Description of Artificial Sequence: Synthetic oligonucleotide
  Antisense strand to SEQ ID NO: 798674
uaucagcagaagcacacgg

SEQ ID NO: 798676 - RNA, 19 nt, Artificial Sequence
  Description of Artificial Sequence: Synthetic oligonucleotide
  Sense strand starting at position 3165 of SEQ ID NO: 587524
gugugcuucugcugauacu

SEQ ID NO: 798677 - RNA, 19 nt, Artificial Sequence
  Description of Artificial Sequence: Synthetic oligonucleotide
  Antisense strand to SEQ ID NO: 798676
aguaucagcagaagcacac

SEQ ID NO: 798678 - RNA, 19 nt, Artificial Sequence
  Description of Artificial Sequence: Synthetic oligonucleotide
  Sense strand starting at position 3292 of SEQ ID NO: 587524
agcucaggcugguuguaau

SEQ ID NO: 798679 - RNA, 19 nt, Artificial Sequence
  Description of Artificial Sequence: Synthetic oligonucleotide
  Antisense strand to SEQ ID NO: 798678
auuacaaccagccugagcu

SEQ ID NO: 798680 - RNA, 19 nt, Artificial Sequence
  Description of Artificial Sequence: Synthetic oligonucleotide
  Sense strand starting at position 3498 of SEQ ID NO: 587524
ggacuucuacacugagucu

SEQ ID NO: 798681 - RNA, 19 nt, Artificial Sequence
  Description of Artificial Sequence: Synthetic oligonucleotide
  Antisense strand to SEQ ID NO: 798680
agacucaguguagaagucc

SEQ ID NO: 798682 - RNA, 19 nt, Artificial Sequence
  Description of Artificial Sequence: Synthetic oligonucleotide
  Sense strand starting at position 3532 of SEQ ID NO: 587524
guaccagagugcugcaaca

SEQ ID NO: 798683 - RNA, 19 nt, Artificial Sequence
  Description of Artificial Sequence: Synthetic oligonucleotide
  Antisense strand to SEQ ID NO: 798682
uguugcagcacucugguac

SEQ ID NO: 798684 - RNA, 19 nt, Artificial Sequence
  Description of Artificial Sequence: Synthetic oligonucleotide
  Sense strand starting at position 3557 of SEQ ID NO: 587524
cauugaaaguucugggaga

SEQ ID NO: 798685 - RNA, 19 nt, Artificial Sequence
  Description of Artificial Sequence: Synthetic oligonucleotide
  Antisense strand to SEQ ID NO: 798684
ucucccagaacuuucaaug

SEQ ID NO: 798686 - RNA, 19 nt, Artificial Sequence
  Description of Artificial Sequence: Synthetic oligonucleotide
  Sense strand starting at position 3558 of SEQ ID NO: 587524
auugaaaguucugggagag

SEQ ID NO: 798687 - RNA, 19 nt, Artificial Sequence
  Description of Artificial Sequence: Synthetic oligonucleotide
  Antisense strand to SEQ ID NO: 798686
cucucccagaacuuucaau

SEQ ID NO: 798688 - RNA, 19 nt, Artificial Sequence
  Description of Artificial Sequence: Synthetic oligonucleotide
  Sense strand starting at position 3963 of SEQ ID NO: 587524
ucaggcuuguucucagaga

SEQ ID NO: 798689 - RNA, 19 nt, Artificial Sequence
  Description of Artificial Sequence: Synthetic oligonucleotide
  Antisense strand to SEQ ID NO: 798688
ucucugagaacaagccuga

SEQ ID NO: 798690 - RNA, 19 nt, Artificial Sequence
  Description of Artificial Sequence: Synthetic oligonucleotide
  Sense strand starting at position 1505 of SEQ ID NO: 587525
gagacugugcccuaccuaa

SEQ ID NO: 798691 - RNA, 19 nt, Artificial Sequence
  Description of Artificial Sequence: Synthetic oligonucleotide
  Antisense strand to SEQ ID NO: 798690
uuagguagggcacagucuc

SEQ ID NO: 798692 - RNA, 19 nt, Artificial Sequence
  Description of Artificial Sequence: Synthetic oligonucleotide
  Sense strand starting at position 2358 of SEQ ID NO: 587525
gcggaccugucuccuauua

SEQ ID NO: 798693 - RNA, 19 nt, Artificial Sequence
  Description of Artificial Sequence: Synthetic oligonucleotide
  Antisense strand to SEQ ID NO: 798692
uaauaggagacagguccgc

SEQ ID NO: 798694 - RNA, 19 nt, Artificial Sequence
  Description of Artificial Sequence: Synthetic oligonucleotide
  Sense strand starting at position 2360 of SEQ ID NO: 587525
ggaccugucuccuauuaac

SEQ ID NO: 798695 - RNA, 19 nt, Artificial Sequence
  Description of Artificial Sequence: Synthetic oligonucleotide
  Antisense strand to SEQ ID NO: 798694
guuaauaggagacaggucc

SEQ ID NO: 798696 - RNA, 19 nt, Artificial Sequence
  Description of Artificial Sequence: Synthetic oligonucleotide
  Sense strand starting at position 2483 of SEQ ID NO: 587525
cugcaagagcucuguagcu

SEQ ID NO: 798697 - RNA, 19 nt, Artificial Sequence
  Description of Artificial Sequence: Synthetic oligonucleotide
  Antisense strand to SEQ ID NO: 798696
agcuacagagcucuugcag

SEQ ID NO: 798698 - RNA, 19 nt, Artificial Sequence
  Description of Artificial Sequence: Synthetic oligonucleotide
  Sense strand starting at position 2502 of SEQ ID NO: 587525
ggaccuuggucccugauga

SEQ ID NO: 798699 - RNA, 19 nt, Artificial Sequence
  Description of Artificial Sequence: Synthetic oligonucleotide
  Antisense strand to SEQ ID NO: 798698
ucaucagggaccaaggucc

SEQ ID NO: 798700 - RNA, 19 nt, Artificial Sequence
  Description of Artificial Sequence: Synthetic oligonucleotide
  Sense strand starting at position 2681 of SEQ ID NO: 587525
ccucuuguucccgauugga

SEQ ID NO: 798701 - RNA, 19 nt, Artificial Sequence
  Description of Artificial Sequence: Synthetic oligonucleotide
  Antisense strand to SEQ ID NO: 798700
uccaaucgggaacaagagg

SEQ ID NO: 798702 - RNA, 19 nt, Artificial Sequence
  Description of Artificial Sequence: Synthetic oligonucleotide
  Sense strand starting at position 3583 of SEQ ID NO: 587525
acacaagagucuuguggaa

SEQ ID NO: 798703 - RNA, 19 nt, Artificial Sequence
  Description of Artificial Sequence: Synthetic oligonucleotide
  Antisense strand to SEQ ID NO: 798702
uuccacaagacucuugugu

SEQ ID NO: 798704 - RNA, 19 nt, Artificial Sequence
  Description of Artificial Sequence: Synthetic oligonucleotide
  Sense strand starting at position 75 of SEQ ID NO: 587526
gguacaacuaucuggcagu

SEQ ID NO: 798705 - RNA, 19 nt, Artificial Sequence
  Description of Artificial Sequence: Synthetic oligonucleotide
  Antisense strand to SEQ ID NO: 798704
acugccagauaguuguacc

SEQ ID NO: 798706 - RNA, 19 nt, Artificial Sequence
  Description of Artificial Sequence: Synthetic oligonucleotide
  Sense strand starting at position 105 of SEQ ID NO: 587526
uaaguaugacagcgcauuu

SEQ ID NO: 798707 - RNA, 19 nt, Artificial Sequence
  Description of Artificial Sequence: Synthetic oligonucleotide
  Antisense strand to SEQ ID NO: 798706
aaaugcgcugucauacuua

SEQ ID NO: 798708 - RNA, 19 nt, Artificial Sequence
  Description of Artificial Sequence: Synthetic oligonucleotide
  Sense strand starting at position 246 of SEQ ID NO: 587526
ccgccacuucuccaugaca

SEQ ID NO: 798709 - RNA, 19 nt, Artificial Sequence
  Description of Artificial Sequence: Synthetic oligonucleotide
  Antisense strand to SEQ ID NO: 798708
ugucauggagaaguggcgg

SEQ ID NO: 798710 - RNA, 19 nt, Artificial Sequence
  Description of Artificial Sequence: Synthetic oligonucleotide
  Sense strand starting at position 848 of SEQ ID NO: 587526
ggugaaucgcucaguggca

SEQ ID NO: 798711 - RNA, 19 nt, Artificial Sequence
  Description of Artificial Sequence: Synthetic oligonucleotide
  Antisense strand to SEQ ID NO: 798710
ugccacugagcgauucacc

SEQ ID NO: 798712 - RNA, 19 nt, Artificial Sequence
  Description of Artificial Sequence: Synthetic oligonucleotide
  Sense strand starting at position 1153 of SEQ ID NO: 587526
gccguuucugccucauaua

SEQ ID NO: 798713 - RNA, 19 nt, Artificial Sequence
  Description of Artificial Sequence: Synthetic oligonucleotide
  Antisense strand to SEQ ID NO: 798712
uauaugaggcagaaacggc

SEQ ID NO: 798714 - RNA, 19 nt, Artificial Sequence
  Description of Artificial Sequence: Synthetic oligonucleotide
  Sense strand starting at position 1154 of SEQ ID NO: 587526
ccguuucugccucauauaa

SEQ ID NO: 798715 - RNA, 19 nt, Artificial Sequence
  Description of Artificial Sequence: Synthetic oligonucleotide
  Antisense strand to SEQ ID NO: 798714
uuauaugaggcagaaacgg

SEQ ID NO: 798716 - RNA, 19 nt, Artificial Sequence
  Description of Artificial Sequence: Synthetic oligonucleotide
  Sense strand starting at position 1178 of SEQ ID NO: 587526
cuuuguugcggucacacaa

SEQ ID NO: 798717 - RNA, 19 nt, Artificial Sequence
  Description of Artificial Sequence: Synthetic oligonucleotide
  Antisense strand to SEQ ID NO: 798716
uugugugaccgcaacaaag

SEQ ID NO: 798718 - RNA, 19 nt, Artificial Sequence
  Description of Artificial Sequence: Synthetic oligonucleotide
  Sense strand starting at position 1382 of SEQ ID NO: 587526
ugagaccauuccuaaggga

SEQ ID NO: 798719 - RNA, 19 nt, Artificial Sequence
  Description of Artificial Sequence: Synthetic oligonucleotide
  Antisense strand to SEQ ID NO: 798718
ucccuuaggaauggucuca

SEQ ID NO: 798720 - RNA, 19 nt, Artificial Sequence
  Description of Artificial Sequence: Synthetic oligonucleotide
  Sense strand starting at position 1637 of SEQ ID NO: 587526
gugugauccacuuacuugu

SEQ ID NO: 798721 - RNA, 19 nt, Artificial Sequence
  Description of Artificial Sequence: Synthetic oligonucleotide
  Antisense strand to SEQ ID NO: 798720
acaaguaaguggaucacac

SEQ ID NO: 798722 - RNA, 19 nt, Artificial Sequence
  Description of Artificial Sequence: Synthetic oligonucleotide
  Sense strand starting at position 1988 of SEQ ID NO: 587526
acagguaacuuucucgcaa

SEQ ID NO: 798723 - RNA, 19 nt, Artificial Sequence
  Description of Artificial Sequence: Synthetic oligonucleotide
  Antisense strand to SEQ ID NO: 798722
uugcgagaaaguuaccugu

SEQ ID NO: 798724 - RNA, 19 nt, Artificial Sequence
  Description of Artificial Sequence: Synthetic oligonucleotide
  Sense strand starting at position 2132 of SEQ ID NO: 587526
gcagguaacucacuccgaa

SEQ ID NO: 798725 - RNA, 19 nt, Artificial Sequence
  Description of Artificial Sequence: Synthetic oligonucleotide
  Antisense strand to SEQ ID NO: 798724
uucggagugaguuaccugc

SEQ ID NO: 798726 - RNA, 19 nt, Artificial Sequence
  Description of Artificial Sequence: Synthetic oligonucleotide
  Sense strand starting at position 2135 of SEQ ID NO: 587526
gguaacucacuccgaaguu

SEQ ID NO: 798727 - RNA, 19 nt, Artificial Sequence
  Description of Artificial Sequence: Synthetic oligonucleotide
  Antisense strand to SEQ ID NO: 798726
aacuucggagugaguuacc

SEQ ID NO: 798728 - RNA, 19 nt, Artificial Sequence
  Description of Artificial Sequence: Synthetic oligonucleotide
  Sense strand starting at position 2147 of SEQ ID NO: 587526
cgaaguuuacccgagugga

SEQ ID NO: 798729 - RNA, 19 nt, Artificial Sequence
  Description of Artificial Sequence: Synthetic oligonucleotide
  Antisense strand to SEQ ID NO: 798728
uccacucggguaaacuucg

SEQ ID NO: 798730 - RNA, 19 nt, Artificial Sequence
  Description of Artificial Sequence: Synthetic oligonucleotide
  Sense strand starting at position 2213 of SEQ ID NO: 587526
caguucuucgaguagaucu

SEQ ID NO: 798731 - RNA, 19 nt, Artificial Sequence
  Description of Artificial Sequence: Synthetic oligonucleotide
  Antisense strand to SEQ ID NO: 798730
agaucuacucgaagaacug

SEQ ID NO: 798732 - RNA, 19 nt, Artificial Sequence
  Description of Artificial Sequence: Synthetic oligonucleotide
  Sense strand starting at position 2275 of SEQ ID NO: 587526
ggaggcuacugguugaaga

SEQ ID NO: 798733 - RNA, 19 nt, Artificial Sequence
  Description of Artificial Sequence: Synthetic oligonucleotide
  Antisense strand to SEQ ID NO: 798732
ucuucaaccaguagccucc

SEQ ID NO: 798734 - RNA, 19 nt, Artificial Sequence
  Description of Artificial Sequence: Synthetic oligonucleotide
  Sense strand starting at position 2420 of SEQ ID NO: 587526
ggcauuuaaugcccacagu

SEQ ID NO: 798735 - RNA, 19 nt, Artificial Sequence
  Description of Artificial Sequence: Synthetic oligonucleotide
  Antisense strand to SEQ ID NO: 798734
acugugggcauuaaaugcc

SEQ ID NO: 798736 - RNA, 19 nt, Artificial Sequence
  Description of Artificial Sequence: Synthetic oligonucleotide
  Sense strand starting at position 2446 of SEQ ID NO: 587526
cuguuugacaguggcagaa

SEQ ID NO: 798737 - RNA, 19 nt, Artificial Sequence
  Description of Artificial Sequence: Synthetic oligonucleotide
  Antisense strand to SEQ ID NO: 798736
uucugccacugucaaacag

SEQ ID NO: 798738 - RNA, 19 nt, Artificial Sequence
  Description of Artificial Sequence: Synthetic oligonucleotide
  Sense strand starting at position 2476 of SEQ ID NO: 587526
uaaaguuacuuugugcuga

SEQ ID NO: 798739 - RNA, 19 nt, Artificial Sequence
  Description of Artificial Sequence: Synthetic oligonucleotide
  Antisense strand to SEQ ID NO: 798738
ucagcacaaaguaacuuua

SEQ ID NO: 798740 - RNA, 19 nt, Artificial Sequence
  Description of Artificial Sequence: Synthetic oligonucleotide
  Sense strand starting at position 2478 of SEQ ID NO: 587526
aaguuacuuugugcugaga

SEQ ID NO: 798741 - RNA, 19 nt, Artificial Sequence
  Description of Artificial Sequence: Synthetic oligonucleotide
  Antisense strand to SEQ ID NO: 798740
ucucagcacaaaguaacuu

SEQ ID NO: 798742 - RNA, 19 nt, Artificial Sequence
  Description of Artificial Sequence: Synthetic oligonucleotide
  Sense strand starting at position 2513 of SEQ ID NO: 587526
aaguuuggucuguugcgua

SEQ ID NO: 798743 - RNA, 19 nt, Artificial Sequence
  Description of Artificial Sequence: Synthetic oligonucleotide
  Antisense strand to SEQ ID NO: 798742
uacgcaacagaccaaacuu

SEQ ID NO: 798744 - RNA, 19 nt, Artificial Sequence
  Description of Artificial Sequence: Synthetic oligonucleotide
  Sense strand starting at position 2569 of SEQ ID NO: 587526
uuucguguccugcugugua

SEQ ID NO: 798745 - RNA, 19 nt, Artificial Sequence
  Description of Artificial Sequence: Synthetic oligonucleotide
  Antisense strand to SEQ ID NO: 798744
uacacagcaggacacgaaa

SEQ ID NO: 798746 - RNA, 19 nt, Artificial Sequence
  Description of Artificial Sequence: Synthetic oligonucleotide
  Sense strand starting at position 2571 of SEQ ID NO: 587526
ucguguccugcuguguaaa

SEQ ID NO: 798747 - RNA, 19 nt, Artificial Sequence
  Description of Artificial Sequence: Synthetic oligonucleotide
  Antisense strand to SEQ ID NO: 798746
uuuacacagcaggacacga

SEQ ID NO: 798748 - RNA, 19 nt, Artificial Sequence
  Description of Artificial Sequence: Synthetic oligonucleotide
  Sense strand starting at position 2771 of SEQ ID NO: 587526
gaauucguucuguaaaccu

SEQ ID NO: 798749 - RNA, 19 nt, Artificial Sequence
  Description of Artificial Sequence: Synthetic oligonucleotide
  Antisense strand to SEQ ID NO: 798748
agguuuacagaacgaauuc

SEQ ID NO: 798750 - RNA, 19 nt, Artificial Sequence
  Description of Artificial Sequence: Synthetic oligonucleotide
  Sense strand starting at position 2787 of SEQ ID NO: 587526
ccuguugucauuugacguu

SEQ ID NO: 798751 - RNA, 19 nt, Artificial Sequence
  Description of Artificial Sequence: Synthetic oligonucleotide
  Antisense strand to SEQ ID NO: 798750
aacgucaaaugacaacagg

SEQ ID NO: 798752 - RNA, 19 nt, Artificial Sequence
  Description of Artificial Sequence: Synthetic oligonucleotide
  Sense strand starting at position 2904 of SEQ ID NO: 587526
gcaggaugaaacugacuuu

SEQ ID NO: 798753 - RNA, 19 nt, Artificial Sequence
  Description of Artificial Sequence: Synthetic oligonucleotide
  Antisense strand to SEQ ID NO: 798752
aaagucaguuucauccugc

SEQ ID NO: 798754 - RNA, 19 nt, Artificial Sequence
  Description of Artificial Sequence: Synthetic oligonucleotide
  Sense strand starting at position 2934 of SEQ ID NO: 587526
uguuucuccugguugggaa

SEQ ID NO: 798755 - RNA, 19 nt, Artificial Sequence
  Description of Artificial Sequence: Synthetic oligonucleotide
  Antisense strand to SEQ ID NO: 798754
uucccaaccaggagaaaca

SEQ ID NO: 798756 - RNA, 19 nt, Artificial Sequence
  Description of Artificial Sequence: Synthetic oligonucleotide
  Sense strand starting at position 2986 of SEQ ID NO: 587526
gcugcuaccaaagagugaa

SEQ ID NO: 798757 - RNA, 19 nt, Artificial Sequence
  Description of Artificial Sequence: Synthetic oligonucleotide
  Antisense strand to SEQ ID NO: 798756
uucacucuuugguagcagc

SEQ ID NO: 798758 - RNA, 19 nt, Artificial Sequence
  Description of Artificial Sequence: Synthetic oligonucleotide
  Sense strand starting at position 2989 of SEQ ID NO: 587526
gcuaccaaagagugaagua

SEQ ID NO: 798759 - RNA, 19 nt, Artificial Sequence
  Description of Artificial Sequence: Synthetic oligonucleotide
  Antisense strand to SEQ ID NO: 798758
uacuucacucuuugguagc

SEQ ID NO: 798760 - RNA, 19 nt, Artificial Sequence
  Description of Artificial Sequence: Synthetic oligonucleotide
  Sense strand starting at position 3013 of SEQ ID NO: 587526
ggaaguucugacuggaauc

SEQ ID NO: 798761 - RNA, 19 nt, Artificial Sequence
  Description of Artificial Sequence: Synthetic oligonucleotide
  Antisense strand to SEQ ID NO: 798760
gauuccagucagaacuucc

SEQ ID NO: 798762 - RNA, 19 nt, Artificial Sequence
  Description of Artificial Sequence: Synthetic oligonucleotide
  Sense strand starting at position 3025 of SEQ ID NO: 587526
uggaaucuagcucguacau

SEQ ID NO: 798763 - RNA, 19 nt, Artificial Sequence
  Description of Artificial Sequence: Synthetic oligonucleotide
  Antisense strand to SEQ ID NO: 798762
auguacgagcuagauucca

SEQ ID NO: 798764 - RNA, 19 nt, Artificial Sequence
  Description of Artificial Sequence: Synthetic oligonucleotide
  Sense strand starting at position 3038 of SEQ ID NO: 587526
guacauauggauuguggaa

SEQ ID NO: 798765 - RNA, 19 nt, Artificial Sequence
  Description of Artificial Sequence: Synthetic oligonucleotide
  Antisense strand to SEQ ID NO: 798764
uuccacaauccauauguac

SEQ ID NO: 798766 - RNA, 19 nt, Artificial Sequence
  Description of Artificial Sequence: Synthetic oligonucleotide
  Sense strand starting at position 3069 of SEQ ID NO: 587526
guggaaagcuugccauauu

SEQ ID NO: 798767 - RNA, 19 nt, Artificial Sequence
  Description of Artificial Sequence: Synthetic oligonucleotide
  Antisense strand to SEQ ID NO: 798766
aauauggcaagcuuuccac

SEQ ID NO: 798768 - RNA, 19 nt, Artificial Sequence
  Description of Artificial Sequence: Synthetic oligonucleotide
  Sense strand starting at position 3425 of SEQ ID NO: 587526
gccaucucuugauuugcca

SEQ ID NO: 798769 - RNA, 19 nt, Artificial Sequence
  Description of Artificial Sequence: Synthetic oligonucleotide
  Antisense strand to SEQ ID NO: 798768
uggcaaaucaagagauggc

SEQ ID NO: 798770 - RNA, 19 nt, Artificial Sequence
  Description of Artificial Sequence: Synthetic oligonucleotide
  Sense strand starting at position 3443 of SEQ ID NO: 587526
aauagauguugugcucuga

SEQ ID NO: 798771 - RNA, 19 nt, Artificial Sequence
  Description of Artificial Sequence: Synthetic oligonucleotide
  Antisense strand to SEQ ID NO: 798770
ucagagcacaacaucuauu

SEQ ID NO: 798772 - RNA, 19 nt, Artificial Sequence
  Description of Artificial Sequence: Synthetic oligonucleotide
  Sense strand starting at position 3549 of SEQ ID NO: 587526
guaagugacuaugccaaua

SEQ ID NO: 798773 - RNA, 19 nt, Artificial Sequence
  Description of Artificial Sequence: Synthetic oligonucleotide
  Antisense strand to SEQ ID NO: 798772
uauuggcauagucacuuac

SEQ ID NO: 798774 - RNA, 19 nt, Artificial Sequence
  Description of Artificial Sequence: Synthetic oligonucleotide
  Sense strand starting at position 3554 of SEQ ID NO: 587526
ugacuaugccaauagcaau

SEQ ID NO: 798775 - RNA, 19 nt, Artificial Sequence
  Description of Artificial Sequence: Synthetic oligonucleotide
  Antisense strand to SEQ ID NO: 798774
auugcuauuggcauaguca

SEQ ID NO: 798776 - RNA, 19 nt, Artificial Sequence
  Description of Artificial Sequence: Synthetic oligonucleotide
  Sense strand starting at position 3771 of SEQ ID NO: 587526
acuguuucaguggagauga

SEQ ID NO: 798777 - RNA, 19 nt, Artificial Sequence
  Description of Artificial Sequence: Synthetic oligonucleotide
  Antisense strand to SEQ ID NO: 798776
ucaucuccacugaaacagu

SEQ ID NO: 798778 - RNA, 19 nt, Artificial Sequence
  Description of Artificial Sequence: Synthetic oligonucleotide
  Sense strand starting at position 3773 of SEQ ID NO: 587526
uguuucaguggagaugagu

SEQ ID NO: 798779 - RNA, 19 nt, Artificial Sequence
  Description of Artificial Sequence: Synthetic oligonucleotide
  Antisense strand to SEQ ID NO: 798778
acucaucuccacugaaaca

SEQ ID NO: 798780 - RNA, 19 nt, Artificial Sequence
  Description of Artificial Sequence: Synthetic oligonucleotide
  Sense strand starting at position 3782 of SEQ ID NO: 587526
ggagaugaguugcucuaug

SEQ ID NO: 798781 - RNA, 19 nt, Artificial Sequence
  Description of Artificial Sequence: Synthetic oligonucleotide
  Antisense strand to SEQ ID NO: 798780
cauagagcaacucaucucc

SEQ ID NO: 798782 - RNA, 19 nt, Artificial Sequence
  Description of Artificial Sequence: Synthetic oligonucleotide
  Sense strand starting at position 3814 of SEQ ID NO: 587526
agugucauccugggacacu

SEQ ID NO: 798783 - RNA, 19 nt, Artificial Sequence
  Description of Artificial Sequence: Synthetic oligonucleotide
  Antisense strand to SEQ ID NO: 798782
agugucccaggaugacacu

SEQ ID NO: 798784 - RNA, 19 nt, Artificial Sequence
  Description of Artificial Sequence: Synthetic oligonucleotide
  Sense strand starting at position 887 of SEQ ID NO: 587527
aacaguuggcuugacgaca

SEQ ID NO: 798785 - RNA, 19 nt, Artificial Sequence
  Description of Artificial Sequence: Synthetic oligonucleotide
  Antisense strand to SEQ ID NO: 798784
ugucgucaagccaacuguu

SEQ ID NO: 798786 - RNA, 19 nt, Artificial Sequence
  Description of Artificial Sequence: Synthetic oligonucleotide
  Sense strand starting at position 1132 of SEQ ID NO: 587527
gggcuugggucguuucuca

SEQ ID NO: 798787 - RNA, 19 nt, Artificial Sequence
  Description of Artificial Sequence: Synthetic oligonucleotide
  Antisense strand to SEQ ID NO: 798786
ugagaaacgacccaagccc

SEQ ID NO: 798788 - RNA, 19 nt, Artificial Sequence
  Description of Artificial Sequence: Synthetic oligonucleotide
  Sense strand starting at position 1139 of SEQ ID NO: 587527
ggucguuucucacaagcaa

SEQ ID NO: 798789 - RNA, 19 nt, Artificial Sequence
  Description of Artificial Sequence: Synthetic oligonucleotide
  Antisense strand to SEQ ID NO: 798788
uugcuugugagaaacgacc

SEQ ID NO: 798790 - RNA, 19 nt, Artificial Sequence
  Description of Artificial Sequence: Synthetic oligonucleotide
  Sense strand starting at position 1328 of SEQ ID NO: 587527
ggccaucugugaccaacaa

SEQ ID NO: 798791 - RNA, 19 nt, Artificial Sequence
  Description of Artificial Sequence: Synthetic oligonucleotide
  Antisense strand to SEQ ID NO: 798790
uuguuggucacagauggcc

SEQ ID NO: 798792 - RNA, 19 nt, Artificial Sequence
  Description of Artificial Sequence: Synthetic oligonucleotide
  Sense strand starting at position 1329 of SEQ ID NO: 587527
gccaucugugaccaacaaa

SEQ ID NO: 798793 - RNA, 19 nt, Artificial Sequence
  Description of Artificial Sequence: Synthetic oligonucleotide
  Antisense strand to SEQ ID NO: 798792
uuuguuggucacagauggc

SEQ ID NO: 798794 - RNA, 19 nt, Artificial Sequence
  Description of Artificial Sequence: Synthetic oligonucleotide
  Sense strand starting at position 2189 of SEQ ID NO: 587527
agaagucuggucuggccaa

SEQ ID NO: 798795 - RNA, 19 nt, Artificial Sequence
  Description of Artificial Sequence: Synthetic oligonucleotide
  Antisense strand to SEQ ID NO: 798794
uuggccagaccagacuucu

SEQ ID NO: 798796 - RNA, 19 nt, Artificial Sequence
  Description of Artificial Sequence: Synthetic oligonucleotide
  Sense strand starting at position 2190 of SEQ ID NO: 587527
gaagucuggucuggccaau

SEQ ID NO: 798797 - RNA, 19 nt, Artificial Sequence
  Description of Artificial Sequence: Synthetic oligonucleotide
  Antisense strand to SEQ ID NO: 798796
auuggccagaccagacuuc

SEQ ID NO: 798798 - RNA, 19 nt, Artificial Sequence
  Description of Artificial Sequence: Synthetic oligonucleotide
  Sense strand starting at position 2213 of SEQ ID NO: 587527
cuggccguucgguaguuaa

SEQ ID NO: 798799 - RNA, 19 nt, Artificial Sequence
  Description of Artificial Sequence: Synthetic oligonucleotide
  Antisense strand to SEQ ID NO: 798798
uuaacuaccgaacggccag

SEQ ID NO: 798800 - RNA, 19 nt, Artificial Sequence
  Description of Artificial Sequence: Synthetic oligonucleotide
  Sense strand starting at position 2215 of SEQ ID NO: 587527
ggccguucgguaguuaaga

SEQ ID NO: 798801 - RNA, 19 nt, Artificial Sequence
  Description of Artificial Sequence: Synthetic oligonucleotide
  Antisense strand to SEQ ID NO: 798800
ucuuaacuaccgaacggcc

SEQ ID NO: 798802 - RNA, 19 nt, Artificial Sequence
  Description of Artificial Sequence: Synthetic oligonucleotide
  Sense strand starting at position 2216 of SEQ ID NO: 587527
gccguucgguaguuaagaa

SEQ ID NO: 798803 - RNA, 19 nt, Artificial Sequence
  Description of Artificial Sequence: Synthetic oligonucleotide
  Antisense strand to SEQ ID NO: 798802
uucuuaacuaccgaacggc

SEQ ID NO: 798804 - RNA, 19 nt, Artificial Sequence
  Description of Artificial Sequence: Synthetic oligonucleotide
  Sense strand starting at position 2217 of SEQ ID NO: 587527
ccguucgguaguuaagaaa

SEQ ID NO: 798805 - RNA, 19 nt, Artificial Sequence
  Description of Artificial Sequence: Synthetic oligonucleotide
  Antisense strand to SEQ ID NO: 798804
uuucuuaacuaccgaacgg

SEQ ID NO: 798806 - RNA, 19 nt, Artificial Sequence
  Description of Artificial Sequence: Synthetic oligonucleotide
  Sense strand starting at position 2220 of SEQ ID NO: 587527
uucgguaguuaagaaauuu

SEQ ID NO: 798807 - RNA, 19 nt, Artificial Sequence
  Description of Artificial Sequence: Synthetic oligonucleotide
  Antisense strand to SEQ ID NO: 798806
aaauuucuuaacuaccgaa

SEQ ID NO: 798808 - RNA, 19 nt, Artificial Sequence
  Description of Artificial Sequence: Synthetic oligonucleotide
  Sense strand starting at position 2249 of SEQ ID NO: 587527
gcgggauuugcugaagcug

SEQ ID NO: 798809 - RNA, 19 nt, Artificial Sequence
  Description of Artificial Sequence: Synthetic oligonucleotide
  Antisense strand to SEQ ID NO: 798808
cagcuucagcaaaucccgc

SEQ ID NO: 798810 - RNA, 19 nt, Artificial Sequence
  Description of Artificial Sequence: Synthetic oligonucleotide
  Sense strand starting at position 2281 of SEQ ID NO: 587527
guccguucucggccuuaaa

SEQ ID NO: 798811 - RNA, 19 nt, Artificial Sequence
  Description of Artificial Sequence: Synthetic oligonucleotide
  Antisense strand to SEQ ID NO: 798810
uuuaaggccgagaacggac

SEQ ID NO: 798812 - RNA, 19 nt, Artificial Sequence
  Description of Artificial Sequence: Synthetic oligonucleotide
  Sense strand starting at position 2370 of SEQ ID NO: 587527
gaggccucgugguuuaauu

SEQ ID NO: 798813 - RNA, 19 nt, Artificial Sequence
  Description of Artificial Sequence: Synthetic oligonucleotide
  Antisense strand to SEQ ID NO: 798812
aauuaaaccacgaggccuc

SEQ ID NO: 798814 - RNA, 19 nt, Artificial Sequence
  Description of Artificial Sequence: Synthetic oligonucleotide
  Sense strand starting at position 2395 of SEQ ID NO: 587527
uuugcucugucagcccaaa

SEQ ID NO: 798815 - RNA, 19 nt, Artificial Sequence
  Description of Artificial Sequence: Synthetic oligonucleotide
  Antisense strand to SEQ ID NO: 798814
uuugggcugacagagcaaa

SEQ ID NO: 798816 - RNA, 19 nt, Artificial Sequence
  Description of Artificial Sequence: Synthetic oligonucleotide
  Sense strand starting at position 2452 of SEQ ID NO: 587527
uuuaauucuuguggauaca

SEQ ID NO: 798817 - RNA, 19 nt, Artificial Sequence
  Description of Artificial Sequence: Synthetic oligonucleotide
  Antisense strand to SEQ ID NO: 798816
uguauccacaagaauuaaa

SEQ ID NO: 798818 - RNA, 19 nt, Artificial Sequence
  Description of Artificial Sequence: Synthetic oligonucleotide
  Sense strand starting at position 2453 of SEQ ID NO: 587527
uuaauucuuguggauacau

SEQ ID NO: 798819 - RNA, 19 nt, Artificial Sequence
  Description of Artificial Sequence: Synthetic oligonucleotide
  Antisense strand to SEQ ID NO: 798818
auguauccacaagaauuaa

SEQ ID NO: 798820 - RNA, 19 nt, Artificial Sequence
  Description of Artificial Sequence: Synthetic oligonucleotide
  Sense strand starting at position 2476 of SEQ ID NO: 587527
gguguauauuuacgggcua

SEQ ID NO: 798821 - RNA, 19 nt, Artificial Sequence
  Description of Artificial Sequence: Synthetic oligonucleotide
  Antisense strand to SEQ ID NO: 798820
uagcccguaaauauacacc

SEQ ID NO: 798822 - RNA, 19 nt, Artificial Sequence
  Description of Artificial Sequence: Synthetic oligonucleotide
  Sense strand starting at position 2478 of SEQ ID NO: 587527
uguauauuuacgggcuaca

SEQ ID NO: 798823 - RNA, 19 nt, Artificial Sequence
  Description of Artificial Sequence: Synthetic oligonucleotide
  Antisense strand to SEQ ID NO: 798822
uguagcccguaaauauaca

SEQ ID NO: 798824 - RNA, 19 nt, Artificial Sequence
  Description of Artificial Sequence: Synthetic oligonucleotide
  Sense strand starting at position 2511 of SEQ ID NO: 587527
acaggcaugccauggauaa

SEQ ID NO: 798825 - RNA, 19 nt, Artificial Sequence
  Description of Artificial Sequence: Synthetic oligonucleotide
  Antisense strand to SEQ ID NO: 798824
uuauccauggcaugccugu

SEQ ID NO: 798826 - RNA, 19 nt, Artificial Sequence
  Description of Artificial Sequence: Synthetic oligonucleotide
  Sense strand starting at position 2512 of SEQ ID NO: 587527
caggcaugccauggauaau

SEQ ID NO: 798827 - RNA, 19 nt, Artificial Sequence
  Description of Artificial Sequence: Synthetic oligonucleotide
  Antisense strand to SEQ ID NO: 798826
auuauccauggcaugccug

SEQ ID NO: 798828 - RNA, 19 nt, Artificial Sequence
  Description of Artificial Sequence: Synthetic oligonucleotide
  Sense strand starting at position 2513 of SEQ ID NO: 587527
aggcaugccauggauaaua

SEQ ID NO: 798829 - RNA, 19 nt, Artificial Sequence
  Description of Artificial Sequence: Synthetic oligonucleotide
  Antisense strand to SEQ ID NO: 798828
uauuauccauggcaugccu

SEQ ID NO: 798830 - RNA, 19 nt, Artificial Sequence
  Description of Artificial Sequence: Synthetic oligonucleotide
  Sense strand starting at position 2515 of SEQ ID NO: 587527
gcaugccauggauaauaau

SEQ ID NO: 798831 - RNA, 19 nt, Artificial Sequence
  Description of Artificial Sequence: Synthetic oligonucleotide
  Antisense strand to SEQ ID NO: 798830
auuauuauccauggcaugc

SEQ ID NO: 798832 - RNA, 19 nt, Artificial Sequence
  Description of Artificial Sequence: Synthetic oligonucleotide
  Sense strand starting at position 2524 of SEQ ID NO: 587527
ggauaauaaucacaucaag

SEQ ID NO: 798833 - RNA, 19 nt, Artificial Sequence
  Description of Artificial Sequence: Synthetic oligonucleotide
  Antisense strand to SEQ ID NO: 798832
cuugaugugauuauuaucc

SEQ ID NO: 798834 - RNA, 19 nt, Artificial Sequence
  Description of Artificial Sequence: Synthetic oligonucleotide
  Sense strand starting at position 2574 of SEQ ID NO: 587527
uguccuucguguuacaaac

SEQ ID NO: 798835 - RNA, 19 nt, Artificial Sequence
  Description of Artificial Sequence: Synthetic oligonucleotide
  Antisense strand to SEQ ID NO: 798834
guuuguaacacgaaggaca

SEQ ID NO: 798836 - RNA, 19 nt, Artificial Sequence
  Description of Artificial Sequence: Synthetic oligonucleotide
  Sense strand starting at position 2597 of SEQ ID NO: 587527
caguuauacucuuggaguu

SEQ ID NO: 798837 - RNA, 19 nt, Artificial Sequence
  Description of Artificial Sequence: Synthetic oligonucleotide
  Antisense strand to SEQ ID NO: 798836
aacuccaagaguauaacug

SEQ ID NO: 798838 - RNA, 19 nt, Artificial Sequence
  Description of Artificial Sequence: Synthetic oligonucleotide
  Sense strand starting at position 2599 of SEQ ID NO: 587527
guuauacucuuggaguugu

SEQ ID NO: 798839 - RNA, 19 nt, Artificial Sequence
  Description of Artificial Sequence: Synthetic oligonucleotide
  Antisense strand to SEQ ID NO: 798838
acaacuccaagaguauaac

SEQ ID NO: 798840 - RNA, 19 nt, Artificial Sequence
  Description of Artificial Sequence: Synthetic oligonucleotide
  Sense strand starting at position 2644 of SEQ ID NO: 587527
acagucacccuuuguacua

SEQ ID NO: 798841 - RNA, 19 nt, Artificial Sequence
  Description of Artificial Sequence: Synthetic oligonucleotide
  Antisense strand to SEQ ID NO: 798840
uaguacaaagggugacugu

SEQ ID NO: 798842 - RNA, 19 nt, Artificial Sequence
  Description of Artificial Sequence: Synthetic oligonucleotide
  Sense strand starting at position 2664 of SEQ ID NO: 587527
caaauacgaugucuuguuu

SEQ ID NO: 798843 - RNA, 19 nt, Artificial Sequence
  Description of Artificial Sequence: Synthetic oligonucleotide
  Antisense strand to SEQ ID NO: 798842
aaacaagacaucguauuug

SEQ ID NO: 798844 - RNA, 19 nt, Artificial Sequence
  Description of Artificial Sequence: Synthetic oligonucleotide
  Sense strand starting at position 2921 of SEQ ID NO: 587527
cucugaguccugcaccuau

SEQ ID NO: 798845 - RNA, 19 nt, Artificial Sequence
  Description of Artificial Sequence: Synthetic oligonucleotide
  Antisense strand to SEQ ID NO: 798844
auaggugcaggacucagag

SEQ ID NO: 798846 - RNA, 19 nt, Artificial Sequence
  Description of Artificial Sequence: Synthetic oligonucleotide
  Sense strand starting at position 3095 of SEQ ID NO: 587527
gucugcuuguggugugagu

SEQ ID NO: 798847 - RNA, 19 nt, Artificial Sequence
  Description of Artificial Sequence: Synthetic oligonucleotide
  Antisense strand to SEQ ID NO: 798846
acucacaccacaagcagac

SEQ ID NO: 798848 - RNA, 19 nt, Artificial Sequence
  Description of Artificial Sequence: Synthetic oligonucleotide
  Sense strand starting at position 3108 of SEQ ID NO: 587527
gugaguggugccuguggca

SEQ ID NO: 798849 - RNA, 19 nt, Artificial Sequence
  Description of Artificial Sequence: Synthetic oligonucleotide
  Antisense strand to SEQ ID NO: 798848
ugccacaggcaccacucac

SEQ ID NO: 798850 - RNA, 19 nt, Artificial Sequence
  Description of Artificial Sequence: Synthetic oligonucleotide
  Sense strand starting at position 3154 of SEQ ID NO: 587527
uggauaaccugugaugagu

SEQ ID NO: 798851 - RNA, 19 nt, Artificial Sequence
  Description of Artificial Sequence: Synthetic oligonucleotide
  Antisense strand to SEQ ID NO: 798850
acucaucacagguuaucca

SEQ ID NO: 798852 - RNA, 19 nt, Artificial Sequence
  Description of Artificial Sequence: Synthetic oligonucleotide
  Sense strand starting at position 3163 of SEQ ID NO: 587527
ugugaugaguuccauuaga

SEQ ID NO: 798853 - RNA, 19 nt, Artificial Sequence
  Description of Artificial Sequence: Synthetic oligonucleotide
  Antisense strand to SEQ ID NO: 798852
ucuaauggaacucaucaca

SEQ ID NO: 798854 - RNA, 19 nt, Artificial Sequence
  Description of Artificial Sequence: Synthetic oligonucleotide
  Sense strand starting at position 3223 of SEQ ID NO: 587527
gguaacuucuaccuuugua

SEQ ID NO: 798855 - RNA, 19 nt, Artificial Sequence
  Description of Artificial Sequence: Synthetic oligonucleotide
  Antisense strand to SEQ ID NO: 798854
uacaaagguagaaguuacc

SEQ ID NO: 798856 - RNA, 19 nt, Artificial Sequence
  Description of Artificial Sequence: Synthetic oligonucleotide
  Sense strand starting at position 532 of SEQ ID NO: 587528
gaugguaaaugagcacaaa

SEQ ID NO: 798857 - RNA, 19 nt, Artificial Sequence
  Description of Artificial Sequence: Synthetic oligonucleotide
  Antisense strand to SEQ ID NO: 798856
uuugugcucauuuaccauc

SEQ ID NO: 798858 - RNA, 19 nt, Artificial Sequence
  Description of Artificial Sequence: Synthetic oligonucleotide
  Sense strand starting at position 574 of SEQ ID NO: 587528
ucuaguauuucugaauaag

SEQ ID NO: 798859 - RNA, 19 nt, Artificial Sequence
  Description of Artificial Sequence: Synthetic oligonucleotide
  Antisense strand to SEQ ID NO: 798858
cuuauucagaaauacuaga

SEQ ID NO: 798860 - RNA, 19 nt, Artificial Sequence
  Description of Artificial Sequence: Synthetic oligonucleotide
  Sense strand starting at position 840 of SEQ ID NO: 587528
ucugauaugggccauguaa

SEQ ID NO: 798861 - RNA, 19 nt, Artificial Sequence
  Description of Artificial Sequence: Synthetic oligonucleotide
  Antisense strand to SEQ ID NO: 798860
uuacauggcccauaucaga

SEQ ID NO: 798862 - RNA, 19 nt, Artificial Sequence
  Description of Artificial Sequence: Synthetic oligonucleotide
  Sense strand starting at position 842 of SEQ ID NO: 587528
ugauaugggccauguaaga

SEQ ID NO: 798863 - RNA, 19 nt, Artificial Sequence
  Description of Artificial Sequence: Synthetic oligonucleotide
  Antisense strand to SEQ ID NO: 798862
ucuuacauggcccauauca

SEQ ID NO: 798864 - RNA, 19 nt, Artificial Sequence
  Description of Artificial Sequence: Synthetic oligonucleotide
  Sense strand starting at position 855 of SEQ ID NO: 587528
guaagaggucacuggacaa

SEQ ID NO: 798865 - RNA, 19 nt, Artificial Sequence
  Description of Artificial Sequence: Synthetic oligonucleotide
  Antisense strand to SEQ ID NO: 798864
uuguccagugaccucuuac

SEQ ID NO: 798866 - RNA, 19 nt, Artificial Sequence
  Description of Artificial Sequence: Synthetic oligonucleotide
  Sense strand starting at position 892 of SEQ ID NO: 587528
auaagaugcuucuuuaaga

SEQ ID NO: 798867 - RNA, 19 nt, Artificial Sequence
  Description of Artificial Sequence: Synthetic oligonucleotide
  Antisense strand to SEQ ID NO: 798866
ucuuaaagaagcaucuuau

SEQ ID NO: 798868 - RNA, 19 nt, Artificial Sequence
  Description of Artificial Sequence: Synthetic oligonucleotide
  Sense strand starting at position 910 of SEQ ID NO: 587528
acuggaccugugcaauaau

SEQ ID NO: 798869 - RNA, 19 nt, Artificial Sequence
  Description of Artificial Sequence: Synthetic oligonucleotide
  Antisense strand to SEQ ID NO: 798868
auuauugcacagguccagu

SEQ ID NO: 798870 - RNA, 19 nt, Artificial Sequence
  Description of Artificial Sequence: Synthetic oligonucleotide
  Sense strand starting at position 913 of SEQ ID NO: 587528
ggaccugugcaauaaugua

SEQ ID NO: 798871 - RNA, 19 nt, Artificial Sequence
  Description of Artificial Sequence: Synthetic oligonucleotide
  Antisense strand to SEQ ID NO: 798870
uacauuauugcacaggucc

SEQ ID NO: 798872 - RNA, 19 nt, Artificial Sequence
  Description of Artificial Sequence: Synthetic oligonucleotide
  Sense strand starting at position 918 of SEQ ID NO: 587528
ugugcaauaauguaucgaa

SEQ ID NO: 798873 - RNA, 19 nt, Artificial Sequence
  Description of Artificial Sequence: Synthetic oligonucleotide
  Antisense strand to SEQ ID NO: 798872
uucgauacauuauugcaca

SEQ ID NO: 798874 - RNA, 19 nt, Artificial Sequence
  Description of Artificial Sequence: Synthetic oligonucleotide
  Sense strand starting at position 955 of SEQ ID NO: 587528
acaugcuaucaggaauucu

SEQ ID NO: 798875 - RNA, 19 nt, Artificial Sequence
  Description of Artificial Sequence: Synthetic oligonucleotide
  Antisense strand to SEQ ID NO: 798874
agaauuccugauagcaugu

SEQ ID NO: 798876 - RNA, 19 nt, Artificial Sequence
  Description of Artificial Sequence: Synthetic oligonucleotide
  Sense strand starting at position 1004 of SEQ ID NO: 587528
cagucaaauucuguaggaa

SEQ ID NO: 798877 - RNA, 19 nt, Artificial Sequence
  Description of Artificial Sequence: Synthetic oligonucleotide
  Antisense strand to SEQ ID NO: 798876
uuccuacagaauuugacug

SEQ ID NO: 798878 - RNA, 19 nt, Artificial Sequence
  Description of Artificial Sequence: Synthetic oligonucleotide
  Sense strand starting at position 1135 of SEQ ID NO: 587528
cccuuuguccuguagagaa

SEQ ID NO: 798879 - RNA, 19 nt, Artificial Sequence
  Description of Artificial Sequence: Synthetic oligonucleotide
  Antisense strand to SEQ ID NO: 798878
uucucuacaggacaaaggg

SEQ ID NO: 798880 - RNA, 19 nt, Artificial Sequence
  Description of Artificial Sequence: Synthetic oligonucleotide
  Sense strand starting at position 1137 of SEQ ID NO: 587528
cuuuguccuguagagaaau

SEQ ID NO: 798881 - RNA, 19 nt, Artificial Sequence
  Description of Artificial Sequence: Synthetic oligonucleotide
  Antisense strand to SEQ ID NO: 798880
auuucucuacaggacaaag

SEQ ID NO: 798882 - RNA, 19 nt, Artificial Sequence
  Description of Artificial Sequence: Synthetic oligonucleotide
  Sense strand starting at position 1532 of SEQ ID NO: 587528
ggaccagaucaaugugauu

SEQ ID NO: 798883 - RNA, 19 nt, Artificial Sequence
  Description of Artificial Sequence: Synthetic oligonucleotide
  Antisense strand to SEQ ID NO: 798882
aaucacauugaucuggucc

SEQ ID NO: 798884 - RNA, 19 nt, Artificial Sequence
  Description of Artificial Sequence: Synthetic oligonucleotide
  Sense strand starting at position 1537 of SEQ ID NO: 587528
agaucaaugugauucuguu

SEQ ID NO: 798885 - RNA, 19 nt, Artificial Sequence
  Description of Artificial Sequence: Synthetic oligonucleotide
  Antisense strand to SEQ ID NO: 798884
aacagaaucacauugaucu

SEQ ID NO: 798886 - RNA, 19 nt, Artificial Sequence
  Description of Artificial Sequence: Synthetic oligonucleotide
  Sense strand starting at position 1575 of SEQ ID NO: 587528
augggucccugacucaauu

SEQ ID NO: 798887 - RNA, 19 nt, Artificial Sequence
  Description of Artificial Sequence: Synthetic oligonucleotide
  Antisense strand to SEQ ID NO: 798886
aauugagucagggacccau

SEQ ID NO: 798888 - RNA, 19 nt, Artificial Sequence
  Description of Artificial Sequence: Synthetic oligonucleotide
  Sense strand starting at position 1843 of SEQ ID NO: 587528
gcaacucuagcuggaacaa

SEQ ID NO: 798889 - RNA, 19 nt, Artificial Sequence
  Description of Artificial Sequence: Synthetic oligonucleotide
  Antisense strand to SEQ ID NO: 798888
uuguuccagcuagaguugc

SEQ ID NO: 798890 - RNA, 19 nt, Artificial Sequence
  Description of Artificial Sequence: Synthetic oligonucleotide
  Sense strand starting at position 1870 of SEQ ID NO: 587528
gcucguauuccucugguau

SEQ ID NO: 798891 - RNA, 19 nt, Artificial Sequence
  Description of Artificial Sequence: Synthetic oligonucleotide
  Antisense strand to SEQ ID NO: 798890
auaccagaggaauacgagc

SEQ ID NO: 798892 - RNA, 19 nt, Artificial Sequence
  Description of Artificial Sequence: Synthetic oligonucleotide
  Sense strand starting at position 2001 of SEQ ID NO: 587528
ggcucuguacaacaggaau

SEQ ID NO: 798893 - RNA, 19 nt, Artificial Sequence
  Description of Artificial Sequence: Synthetic oligonucleotide
  Antisense strand to SEQ ID NO: 798892
auuccuguuguacagagcc

SEQ ID NO: 798894 - RNA, 19 nt, Artificial Sequence
  Description of Artificial Sequence: Synthetic oligonucleotide
  Sense strand starting at position 2013 of SEQ ID NO: 587528
caggaauuacugugcuuaa

SEQ ID NO: 798895 - RNA, 19 nt, Artificial Sequence
  Description of Artificial Sequence: Synthetic oligonucleotide
  Antisense strand to SEQ ID NO: 798894
uuaagcacaguaauuccug

SEQ ID NO: 798896 - RNA, 19 nt, Artificial Sequence
  Description of Artificial Sequence: Synthetic oligonucleotide
  Sense strand starting at position 2014 of SEQ ID NO: 587528
aggaauuacugugcuuaau

SEQ ID NO: 798897 - RNA, 19 nt, Artificial Sequence
  Description of Artificial Sequence: Synthetic oligonucleotide
  Antisense strand to SEQ ID NO: 798896
auuaagcacaguaauuccu

SEQ ID NO: 798898 - RNA, 19 nt, Artificial Sequence
  Description of Artificial Sequence: Synthetic oligonucleotide
  Sense strand starting at position 2033 of SEQ ID NO: 587528
gccuccucuguguuaagca

SEQ ID NO: 798899 - RNA, 19 nt, Artificial Sequence
  Description of Artificial Sequence: Synthetic oligonucleotide
  Antisense strand to SEQ ID NO: 798898
ugcuuaacacagaggaggc

SEQ ID NO: 798900 - RNA, 19 nt, Artificial Sequence
  Description of Artificial Sequence: Synthetic oligonucleotide
  Sense strand starting at position 2161 of SEQ ID NO: 587528
ccaauuacucccuaugggu

SEQ ID NO: 798901 - RNA, 19 nt, Artificial Sequence
  Description of Artificial Sequence: Synthetic oligonucleotide
  Antisense strand to SEQ ID NO: 798900
acccauagggaguaauugg

SEQ ID NO: 798902 - RNA, 19 nt, Artificial Sequence
  Description of Artificial Sequence: Synthetic oligonucleotide
  Sense strand starting at position 2189 of SEQ ID NO: 587528
aaguaaagugccuauagga

SEQ ID NO: 798903 - RNA, 19 nt, Artificial Sequence
  Description of Artificial Sequence: Synthetic oligonucleotide
  Antisense strand to SEQ ID NO: 798902
uccuauaggcacuuuacuu

SEQ ID NO: 798904 - RNA, 19 nt, Artificial Sequence
  Description of Artificial Sequence: Synthetic oligonucleotide
  Sense strand starting at position 2204 of SEQ ID NO: 587528
aggagcagaaacuguauaa

SEQ ID NO: 798905 - RNA, 19 nt, Artificial Sequence
  Description of Artificial Sequence: Synthetic oligonucleotide
  Antisense strand to SEQ ID NO: 798904
uuauacaguuucugcuccu

SEQ ID NO: 798906 - RNA, 19 nt, Artificial Sequence
  Description of Artificial Sequence: Synthetic oligonucleotide
  Sense strand starting at position 2223 of SEQ ID NO: 587528
acaggauugcuacaccuuu

SEQ ID NO: 798907 - RNA, 19 nt, Artificial Sequence
  Description of Artificial Sequence: Synthetic oligonucleotide
  Antisense strand to SEQ ID NO: 798906
aaagguguagcaauccugu

SEQ ID NO: 798908 - RNA, 19 nt, Artificial Sequence
  Description of Artificial Sequence: Synthetic oligonucleotide
  Sense strand starting at position 2247 of SEQ ID NO: 587528
uugaguaacuuccuggaac

SEQ ID NO: 798909 - RNA, 19 nt, Artificial Sequence
  Description of Artificial Sequence: Synthetic oligonucleotide
  Antisense strand to SEQ ID NO: 798908
guuccaggaaguuacucaa

SEQ ID NO: 798910 - RNA, 19 nt, Artificial Sequence
  Description of Artificial Sequence: Synthetic oligonucleotide
  Sense strand starting at position 2441 of SEQ ID NO: 587528
cagacacgauguuccaaau

SEQ ID NO: 798911 - RNA, 19 nt, Artificial Sequence
  Description of Artificial Sequence: Synthetic oligonucleotide
  Antisense strand to SEQ ID NO: 798910
auuuggaacaucgugucug

SEQ ID NO: 798912 - RNA, 19 nt, Artificial Sequence
  Description of Artificial Sequence: Synthetic oligonucleotide
  Sense strand starting at position 2569 of SEQ ID NO: 587528
gcuauuggguauuccagaa

SEQ ID NO: 798913 - RNA, 19 nt, Artificial Sequence
  Description of Artificial Sequence: Synthetic oligonucleotide
  Antisense strand to SEQ ID NO: 798912
uucuggaauacccaauagc

SEQ ID NO: 798914 - RNA, 19 nt, Artificial Sequence
  Description of Artificial Sequence: Synthetic oligonucleotide
  Sense strand starting at position 2579 of SEQ ID NO: 587528
auuccagaagucggagaaa

SEQ ID NO: 798915 - RNA, 19 nt, Artificial Sequence
  Description of Artificial Sequence: Synthetic oligonucleotide
  Antisense strand to SEQ ID NO: 798914
uuucuccgacuucuggaau

SEQ ID NO: 798916 - RNA, 19 nt, Artificial Sequence
  Description of Artificial Sequence: Synthetic oligonucleotide
  Sense strand starting at position 2600 of SEQ ID NO: 587528
uaacuuagcuguuugggaa

SEQ ID NO: 798917 - RNA, 19 nt, Artificial Sequence
  Description of Artificial Sequence: Synthetic oligonucleotide
  Antisense strand to SEQ ID NO: 798916
uucccaaacagcuaaguua

SEQ ID NO: 798918 - RNA, 19 nt, Artificial Sequence
  Description of Artificial Sequence: Synthetic oligonucleotide
  Sense strand starting at position 2607 of SEQ ID NO: 587528
gcuguuugggaacaguuau

SEQ ID NO: 798919 - RNA, 19 nt, Artificial Sequence
  Description of Artificial Sequence: Synthetic oligonucleotide
  Antisense strand to SEQ ID NO: 798918
auaacuguucccaaacagc

SEQ ID NO: 798920 - RNA, 19 nt, Artificial Sequence
  Description of Artificial Sequence: Synthetic oligonucleotide
  Sense strand starting at position 2615 of SEQ ID NO: 587528
ggaacaguuaugugaguca

SEQ ID NO: 798921 - RNA, 19 nt, Artificial Sequence
  Description of Artificial Sequence: Synthetic oligonucleotide
  Antisense strand to SEQ ID NO: 798920
ugacucacauaacuguucc

SEQ ID NO: 798922 - RNA, 19 nt, Artificial Sequence
  Description of Artificial Sequence: Synthetic oligonucleotide
  Sense strand starting at position 2690 of SEQ ID NO: 587528
aagaaugagcauugcaaug

SEQ ID NO: 798923 - RNA, 19 nt, Artificial Sequence
  Description of Artificial Sequence: Synthetic oligonucleotide
  Antisense strand to SEQ ID NO: 798922
cauugcaaugcucauucuu

SEQ ID NO: 798924 - RNA, 19 nt, Artificial Sequence
  Description of Artificial Sequence: Synthetic oligonucleotide
  Sense strand starting at position 2878 of SEQ ID NO: 587528
gacagauguccuggcagaa

SEQ ID NO: 798925 - RNA, 19 nt, Artificial Sequence
  Description of Artificial Sequence: Synthetic oligonucleotide
  Antisense strand to SEQ ID NO: 798924
uucugccaggacaucuguc

SEQ ID NO: 798926 - RNA, 19 nt, Artificial Sequence
  Description of Artificial Sequence: Synthetic oligonucleotide
  Sense strand starting at position 3062 of SEQ ID NO: 587528
agguaucuaucaucucaga

SEQ ID NO: 798927 - RNA, 19 nt, Artificial Sequence
  Description of Artificial Sequence: Synthetic oligonucleotide
  Antisense strand to SEQ ID NO: 798926
ucugagaugauagauaccu

SEQ ID NO: 798928 - RNA, 19 nt, Artificial Sequence
  Description of Artificial Sequence: Synthetic oligonucleotide
  Sense strand starting at position 3172 of SEQ ID NO: 587528
gcuaucagacauuagaucu

SEQ ID NO: 798929 - RNA, 19 nt, Artificial Sequence
  Description of Artificial Sequence: Synthetic oligonucleotide
  Antisense strand to SEQ ID NO: 798928
agaucuaaugucugauagc

SEQ ID NO: 798930 - RNA, 19 nt, Artificial Sequence
  Description of Artificial Sequence: Synthetic oligonucleotide
  Sense strand starting at position 3507 of SEQ ID NO: 587528
acacuuggauugcuucuaa

SEQ ID NO: 798931 - RNA, 19 nt, Artificial Sequence
  Description of Artificial Sequence: Synthetic oligonucleotide
  Antisense strand to SEQ ID NO: 798930
uuagaagcaauccaagugu

SEQ ID NO: 798932 - RNA, 19 nt, Artificial Sequence
  Description of Artificial Sequence: Synthetic oligonucleotide
  Sense strand starting at position 3828 of SEQ ID NO: 587528
aaugguguuucucugauga

SEQ ID NO: 798933 - RNA, 19 nt, Artificial Sequence
  Description of Artificial Sequence: Synthetic oligonucleotide
  Antisense strand to SEQ ID NO: 798932
ucaucagagaaacaccauu

SEQ ID NO: 798934 - RNA, 19 nt, Artificial Sequence
  Description of Artificial Sequence: Synthetic oligonucleotide
  Sense strand starting at position 3846 of SEQ ID NO: 587528
aucaauaaugucgagcaca

SEQ ID NO: 798935 - RNA, 19 nt, Artificial Sequence
  Description of Artificial Sequence: Synthetic oligonucleotide
  Antisense strand to SEQ ID NO: 798934
ugugcucgacauuauugau

SEQ ID NO: 798936 - RNA, 19 nt, Artificial Sequence
  Description of Artificial Sequence: Synthetic oligonucleotide
  Sense strand starting at position 358 of SEQ ID NO: 587529
acauuaucuuguguaauca

SEQ ID NO: 798937 - RNA, 19 nt, Artificial Sequence
  Description of Artificial Sequence: Synthetic oligonucleotide
  Antisense strand to SEQ ID NO: 798936
ugauuacacaagauaaugu

SEQ ID NO: 798938 - RNA, 19 nt, Artificial Sequence
  Description of Artificial Sequence: Synthetic oligonucleotide
  Sense strand starting at position 423 of SEQ ID NO: 587529
gagagcuuuggcuggugau

SEQ ID NO: 798939 - RNA, 19 nt, Artificial Sequence
  Description of Artificial Sequence: Synthetic oligonucleotide
  Antisense strand to SEQ ID NO: 798938
aucaccagccaaagcucuc

SEQ ID NO: 798940 - RNA, 19 nt, Artificial Sequence
  Description of Artificial Sequence: Synthetic oligonucleotide
  Sense strand starting at position 523 of SEQ ID NO: 587529
ggcccagaauccuugcuua

SEQ ID NO: 798941 - RNA, 19 nt, Artificial Sequence
  Description of Artificial Sequence: Synthetic oligonucleotide
  Antisense strand to SEQ ID NO: 798940
uaagcaaggauucugggcc

SEQ ID NO: 798942 - RNA, 19 nt, Artificial Sequence
  Description of Artificial Sequence: Synthetic oligonucleotide
  Sense strand starting at position 528 of SEQ ID NO: 587529
agaauccuugcuuauggua

SEQ ID NO: 798943 - RNA, 19 nt, Artificial Sequence
  Description of Artificial Sequence: Synthetic oligonucleotide
  Antisense strand to SEQ ID NO: 798942
uaccauaagcaaggauucu

SEQ ID NO: 798944 - RNA, 19 nt, Artificial Sequence
  Description of Artificial Sequence: Synthetic oligonucleotide
  Sense strand starting at position 581 of SEQ ID NO: 587529
gcguuugugcgcgugugua

SEQ ID NO: 798945 - RNA, 19 nt, Artificial Sequence
  Description of Artificial Sequence: Synthetic oligonucleotide
  Antisense strand to SEQ ID NO: 798944
uacacacgcgcacaaacgc

SEQ ID NO: 798946 - RNA, 19 nt, Artificial Sequence
  Description of Artificial Sequence: Synthetic oligonucleotide
  Sense strand starting at position 582 of SEQ ID NO: 587529
cguuugugcgcguguguau

SEQ ID NO: 798947 - RNA, 19 nt, Artificial Sequence
  Description of Artificial Sequence: Synthetic oligonucleotide
  Antisense strand to SEQ ID NO: 798946
auacacacgcgcacaaacg

SEQ ID NO: 798948 - RNA, 19 nt, Artificial Sequence
  Description of Artificial Sequence: Synthetic oligonucleotide
  Sense strand starting at position 661 of SEQ ID NO: 587529
ggguguugugugccuguuu

SEQ ID NO: 798949 - RNA, 19 nt, Artificial Sequence
  Description of Artificial Sequence: Synthetic oligonucleotide
  Antisense strand to SEQ ID NO: 798948
aaacaggcacacaacaccc

SEQ ID NO: 798950 - RNA, 19 nt, Artificial Sequence
  Description of Artificial Sequence: Synthetic oligonucleotide
  Sense strand starting at position 700 of SEQ ID NO: 587529
gcguguugagcguguuugu

SEQ ID NO: 798951 - RNA, 19 nt, Artificial Sequence
  Description of Artificial Sequence: Synthetic oligonucleotide
  Antisense strand to SEQ ID NO: 798950
acaaacacgcucaacacgc

SEQ ID NO: 798952 - RNA, 19 nt, Artificial Sequence
  Description of Artificial Sequence: Synthetic oligonucleotide
  Sense strand starting at position 744 of SEQ ID NO: 587529
gugcguuugcgcgcguuua

SEQ ID NO: 798953 - RNA, 19 nt, Artificial Sequence
  Description of Artificial Sequence: Synthetic oligonucleotide
  Antisense strand to SEQ ID NO: 798952
uaaacgcgcgcaaacgcac

SEQ ID NO: 798954 - RNA, 19 nt, Artificial Sequence
  Description of Artificial Sequence: Synthetic oligonucleotide
  Sense strand starting at position 745 of SEQ ID NO: 587529
ugcguuugcgcgcguuuau

SEQ ID NO: 798955 - RNA, 19 nt, Artificial Sequence
  Description of Artificial Sequence: Synthetic oligonucleotide
  Antisense strand to SEQ ID NO: 798954
auaaacgcgcgcaaacgca

SEQ ID NO: 798956 - RNA, 19 nt, Artificial Sequence
  Description of Artificial Sequence: Synthetic oligonucleotide
  Sense strand starting at position 755 of SEQ ID NO: 587529
cgcguuuaugcaccugagu

SEQ ID NO: 798957 - RNA, 19 nt, Artificial Sequence
  Description of Artificial Sequence: Synthetic oligonucleotide
  Antisense strand to SEQ ID NO: 798956
acucaggugcauaaacgcg

SEQ ID NO: 798958 - RNA, 19 nt, Artificial Sequence
  Description of Artificial Sequence: Synthetic oligonucleotide
  Sense strand starting at position 757 of SEQ ID NO: 587529
cguuuaugcaccugagugu

SEQ ID NO: 798959 - RNA, 19 nt, Artificial Sequence
  Description of Artificial Sequence: Synthetic oligonucleotide
  Antisense strand to SEQ ID NO: 798958
acacucaggugcauaaacg

SEQ ID NO: 798960 - RNA, 19 nt, Artificial Sequence
  Description of Artificial Sequence: Synthetic oligonucleotide
  Sense strand starting at position 758 of SEQ ID NO: 587529
guuuaugcaccugaguguu

SEQ ID NO: 798961 - RNA, 19 nt, Artificial Sequence
  Description of Artificial Sequence: Synthetic oligonucleotide
  Antisense strand to SEQ ID NO: 798960
aacacucaggugcauaaac

SEQ ID NO: 798962 - RNA, 19 nt, Artificial Sequence
  Description of Artificial Sequence: Synthetic oligonucleotide
  Sense strand starting at position 781 of SEQ ID NO: 587529
gcgcguugugcgcguguau

SEQ ID NO: 798963 - RNA, 19 nt, Artificial Sequence
  Description of Artificial Sequence: Synthetic oligonucleotide
  Antisense strand to SEQ ID NO: 798962
auacacgcgcacaacgcgc

SEQ ID NO: 798964 - RNA, 19 nt, Artificial Sequence
  Description of Artificial Sequence: Synthetic oligonucleotide
  Sense strand starting at position 876 of SEQ ID NO: 587529
gugcguauugugcguaugu

SEQ ID NO: 798965 - RNA, 19 nt, Artificial Sequence
  Description of Artificial Sequence: Synthetic oligonucleotide
  Antisense strand to SEQ ID NO: 798964
acauacgcacaauacgcac

SEQ ID NO: 798966 - RNA, 19 nt, Artificial Sequence
  Description of Artificial Sequence: Synthetic oligonucleotide
  Sense strand starting at position 878 of SEQ ID NO: 587529
gcguauugugcguaugugu

SEQ ID NO: 798967 - RNA, 19 nt, Artificial Sequence
  Description of Artificial Sequence: Synthetic oligonucleotide
  Antisense strand to SEQ ID NO: 798966
acacauacgcacaauacgc

SEQ ID NO: 798968 - RNA, 19 nt, Artificial Sequence
  Description of Artificial Sequence: Synthetic oligonucleotide
  Sense strand starting at position 901 of SEQ ID NO: 587529
acgugcguguuguguacau

SEQ ID NO: 798969 - RNA, 19 nt, Artificial Sequence
  Description of Artificial Sequence: Synthetic oligonucleotide
  Antisense strand to SEQ ID NO: 798968
auguacacaacacgcacgu

SEQ ID NO: 798970 - RNA, 19 nt, Artificial Sequence
  Description of Artificial Sequence: Synthetic oligonucleotide
  Sense strand starting at position 903 of SEQ ID NO: 587529
gugcguguuguguacaugu

SEQ ID NO: 798971 - RNA, 19 nt, Artificial Sequence
  Description of Artificial Sequence: Synthetic oligonucleotide
  Antisense strand to SEQ ID NO: 798970
acauguacacaacacgcac

SEQ ID NO: 798972 - RNA, 19 nt, Artificial Sequence
  Description of Artificial Sequence: Synthetic oligonucleotide
  Sense strand starting at position 1026 of SEQ ID NO: 587529
cguguuguguccacggguu

SEQ ID NO: 798973 - RNA, 19 nt, Artificial Sequence
  Description of Artificial Sequence: Synthetic oligonucleotide
  Antisense strand to SEQ ID NO: 798972
aacccguggacacaacacg

SEQ ID NO: 798974 - RNA, 19 nt, Artificial Sequence
  Description of Artificial Sequence: Synthetic oligonucleotide
  Sense strand starting at position 1027 of SEQ ID NO: 587529
guguuguguccacggguuu

SEQ ID NO: 798975 - RNA, 19 nt, Artificial Sequence
  Description of Artificial Sequence: Synthetic oligonucleotide
  Antisense strand to SEQ ID NO: 798974
aaacccguggacacaacac

SEQ ID NO: 798976 - RNA, 19 nt, Artificial Sequence
  Description of Artificial Sequence: Synthetic oligonucleotide
  Sense strand starting at position 1038 of SEQ ID NO: 587529
acggguuuguguucacgua

SEQ ID NO: 798977 - RNA, 19 nt, Artificial Sequence
  Description of Artificial Sequence: Synthetic oligonucleotide
  Antisense strand to SEQ ID NO: 798976
uacgugaacacaaacccgu

SEQ ID NO: 798978 - RNA, 19 nt, Artificial Sequence
  Description of Artificial Sequence: Synthetic oligonucleotide
  Sense strand starting at position 2708 of SEQ ID NO: 587529
gcagaagagcccugcuaag

SEQ ID NO: 798979 - RNA, 19 nt, Artificial Sequence
  Description of Artificial Sequence: Synthetic oligonucleotide
  Antisense strand to SEQ ID NO: 798978
cuuagcagggcucuucugc

SEQ ID NO: 798980 - RNA, 19 nt, Artificial Sequence
  Description of Artificial Sequence: Synthetic oligonucleotide
  Sense strand starting at position 2944 of SEQ ID NO: 587529
gaguguugcucccugggca

SEQ ID NO: 798981 - RNA, 19 nt, Artificial Sequence
  Description of Artificial Sequence: Synthetic oligonucleotide
  Antisense strand to SEQ ID NO: 798980
ugcccagggagcaacacuc

SEQ ID NO: 798982 - RNA, 19 nt, Artificial Sequence
  Description of Artificial Sequence: Synthetic oligonucleotide
  Sense strand starting at position 3069 of SEQ ID NO: 587529
ccaggauccgggcauuacu

SEQ ID NO: 798983 - RNA, 19 nt, Artificial Sequence
  Description of Artificial Sequence: Synthetic oligonucleotide
  Antisense strand to SEQ ID NO: 798982
aguaaugcccggauccugg

SEQ ID NO: 798984 - RNA, 19 nt, Artificial Sequence
  Description of Artificial Sequence: Synthetic oligonucleotide
  Sense strand starting at position 3130 of SEQ ID NO: 587529
cacuuuggccaguguuuaa

SEQ ID NO: 798985 - RNA, 19 nt, Artificial Sequence
  Description of Artificial Sequence: Synthetic oligonucleotide
  Antisense strand to SEQ ID NO: 798984
uuaaacacuggccaaagug

SEQ ID NO: 798986 - RNA, 19 nt, Artificial Sequence
  Description of Artificial Sequence: Synthetic oligonucleotide
  Sense strand starting at position 3141 of SEQ ID NO: 587529
guguuuaaugcccguggaa

SEQ ID NO: 798987 - RNA, 19 nt, Artificial Sequence
  Description of Artificial Sequence: Synthetic oligonucleotide
  Antisense strand to SEQ ID NO: 798986
uuccacgggcauuaaacac

SEQ ID NO: 798988 - RNA, 19 nt, Artificial Sequence
  Description of Artificial Sequence: Synthetic oligonucleotide
  Sense strand starting at position 3202 of SEQ ID NO: 587529
cggagagccugauggcaau

SEQ ID NO: 798989 - RNA, 19 nt, Artificial Sequence
  Description of Artificial Sequence: Synthetic oligonucleotide
  Antisense strand to SEQ ID NO: 798988
auugccaucaggcucuccg

SEQ ID NO: 798990 - RNA, 19 nt, Artificial Sequence
  Description of Artificial Sequence: Synthetic oligonucleotide
  Sense strand starting at position 3408 of SEQ ID NO: 587529
ggugguaugcgccuacuca

SEQ ID NO: 798991 - RNA, 19 nt, Artificial Sequence
  Description of Artificial Sequence: Synthetic oligonucleotide
  Antisense strand to SEQ ID NO: 798990
ugaguaggcgcauaccacc

SEQ ID NO: 798992 - RNA, 19 nt, Artificial Sequence
  Description of Artificial Sequence: Synthetic oligonucleotide
  Sense strand starting at position 3762 of SEQ ID NO: 587529
cugagugaugcaggacuuu

SEQ ID NO: 798993 - RNA, 19 nt, Artificial Sequence
  Description of Artificial Sequence: Synthetic oligonucleotide
  Antisense strand to SEQ ID NO: 798992
aaaguccugcaucacucag

SEQ ID NO: 798994 - RNA, 19 nt, Artificial Sequence
  Description of Artificial Sequence: Synthetic oligonucleotide
  Sense strand starting at position 3771 of SEQ ID NO: 587529
gcaggacuuuccucaauca

SEQ ID NO: 798995 - RNA, 19 nt, Artificial Sequence
  Description of Artificial Sequence: Synthetic oligonucleotide
  Antisense strand to SEQ ID NO: 798994
ugauugaggaaaguccugc

SEQ ID NO: 798996 - RNA, 19 nt, Artificial Sequence
  Description of Artificial Sequence: Synthetic oligonucleotide
  Sense strand starting at position 3865 of SEQ ID NO: 587529
cgccauuucugucauggag

SEQ ID NO: 798997 - RNA, 19 nt, Artificial Sequence
  Description of Artificial Sequence: Synthetic oligonucleotide
  Antisense strand to SEQ ID NO: 798996
cuccaugacagaaauggcg

SEQ ID NO: 798998 - RNA, 19 nt, Artificial Sequence
  Description of Artificial Sequence: Synthetic oligonucleotide
  Sense strand starting at position 3965 of SEQ ID NO: 587529
aggauauguugacaaucag

SEQ ID NO: 798999 - RNA, 19 nt, Artificial Sequence
  Description of Artificial Sequence: Synthetic oligonucleotide
  Antisense strand to SEQ ID NO: 798998
cugauugucaacauauccu

SEQ ID NO: 799000 - RNA, 19 nt, Artificial Sequence
  Description of Artificial Sequence: Synthetic oligonucleotide
  Sense strand starting at position 1110 of SEQ ID NO: 587530
ggaugcucccacuagcaga

SEQ ID NO: 799001 - RNA, 19 nt, Artificial Sequence
  Description of Artificial Sequence: Synthetic oligonucleotide
  Antisense strand to SEQ ID NO: 799000
ucugcuagugggagcaucc

SEQ ID NO: 799002 - RNA, 19 nt, Artificial Sequence
  Description of Artificial Sequence: Synthetic oligonucleotide
  Sense strand starting at position 1167 of SEQ ID NO: 587530
guguucucccuguugucua

SEQ ID NO: 799003 - RNA, 19 nt, Artificial Sequence
  Description of Artificial Sequence: Synthetic oligonucleotide
  Antisense strand to SEQ ID NO: 799002
uagacaacagggagaacac

SEQ ID NO: 799004 - RNA, 19 nt, Artificial Sequence
  Description of Artificial Sequence: Synthetic oligonucleotide
  Sense strand starting at position 1249 of SEQ ID NO: 587530
gagggcucuguccacuaga

SEQ ID NO: 799005 - RNA, 19 nt, Artificial Sequence
  Description of Artificial Sequence: Synthetic oligonucleotide
  Antisense strand to SEQ ID NO: 799004
ucuaguggacagagcccuc

SEQ ID NO: 799006 - RNA, 19 nt, Artificial Sequence
  Description of Artificial Sequence: Synthetic oligonucleotide
  Sense strand starting at position 1252 of SEQ ID NO: 587530
ggcucuguccacuagaaug

SEQ ID NO: 799007 - RNA, 19 nt, Artificial Sequence
  Description of Artificial Sequence: Synthetic oligonucleotide
  Antisense strand to SEQ ID NO: 799006
cauucuaguggacagagcc

SEQ ID NO: 799008 - RNA, 19 nt, Artificial Sequence
  Description of Artificial Sequence: Synthetic oligonucleotide
  Sense strand starting at position 1552 of SEQ ID NO: 587530
gagugcugggucugcugaa

SEQ ID NO: 799009 - RNA, 19 nt, Artificial Sequence
  Description of Artificial Sequence: Synthetic oligonucleotide
  Antisense strand to SEQ ID NO: 799008
uucagcagacccagcacuc

SEQ ID NO: 799010 - RNA, 19 nt, Artificial Sequence
  Description of Artificial Sequence: Synthetic oligonucleotide
  Sense strand starting at position 1553 of SEQ ID NO: 587530
agugcugggucugcugaaa

SEQ ID NO: 799011 - RNA, 19 nt, Artificial Sequence
  Description of Artificial Sequence: Synthetic oligonucleotide
  Antisense strand to SEQ ID NO: 799010
uuucagcagacccagcacu

SEQ ID NO: 799012 - RNA, 19 nt, Artificial Sequence
  Description of Artificial Sequence: Synthetic oligonucleotide
  Sense strand starting at position 2471 of SEQ ID NO: 587530
uguagaaauugcccucaag

SEQ ID NO: 799013 - RNA, 19 nt, Artificial Sequence
  Description of Artificial Sequence: Synthetic oligonucleotide
  Antisense strand to SEQ ID NO: 799012
cuugagggcaauuucuaca

SEQ ID NO: 799014 - RNA, 19 nt, Artificial Sequence
  Description of Artificial Sequence: Synthetic oligonucleotide
  Sense strand starting at position 2474 of SEQ ID NO: 587530
agaaauugcccucaagcaa

SEQ ID NO: 799015 - RNA, 19 nt, Artificial Sequence
  Description of Artificial Sequence: Synthetic oligonucleotide
  Antisense strand to SEQ ID NO: 799014
uugcuugagggcaauuucu

SEQ ID NO: 799016 - RNA, 19 nt, Artificial Sequence
  Description of Artificial Sequence: Synthetic oligonucleotide
  Sense strand starting at position 2513 of SEQ ID NO: 587530
cuuagucaucaaggaaaug

SEQ ID NO: 799017 - RNA, 19 nt, Artificial Sequence
  Description of Artificial Sequence: Synthetic oligonucleotide
  Antisense strand to SEQ ID NO: 799016
cauuuccuugaugacuaag

SEQ ID NO: 799018 - RNA, 19 nt, Artificial Sequence
  Description of Artificial Sequence: Synthetic oligonucleotide
  Sense strand starting at position 2563 of SEQ ID NO: 587530
ugacaaagauggucguauu

SEQ ID NO: 799019 - RNA, 19 nt, Artificial Sequence
  Description of Artificial Sequence: Synthetic oligonucleotide
  Antisense strand to SEQ ID NO: 799018
aauacgaccaucuuuguca

SEQ ID NO: 799020 - RNA, 19 nt, Artificial Sequence
  Description of Artificial Sequence: Synthetic oligonucleotide
  Sense strand starting at position 2564 of SEQ ID NO: 587530
gacaaagauggucguauua

SEQ ID NO: 799021 - RNA, 19 nt, Artificial Sequence
  Description of Artificial Sequence: Synthetic oligonucleotide
  Antisense strand to SEQ ID NO: 799020
uaauacgaccaucuuuguc

SEQ ID NO: 799022 - RNA, 19 nt, Artificial Sequence
  Description of Artificial Sequence: Synthetic oligonucleotide
  Sense strand starting at position 2566 of SEQ ID NO: 587530
caaagauggucguauuacu

SEQ ID NO: 799023 - RNA, 19 nt, Artificial Sequence
  Description of Artificial Sequence: Synthetic oligonucleotide
  Antisense strand to SEQ ID NO: 799022
aguaauacgaccaucuuug

SEQ ID NO: 799024 - RNA, 19 nt, Artificial Sequence
  Description of Artificial Sequence: Synthetic oligonucleotide
  Sense strand starting at position 2576 of SEQ ID NO: 587530
cguauuacuaaaggugaau

SEQ ID NO: 799025 - RNA, 19 nt, Artificial Sequence
  Description of Artificial Sequence: Synthetic oligonucleotide
  Antisense strand to SEQ ID NO: 799024
auucaccuuuaguaauacg

SEQ ID NO: 799026 - RNA, 19 nt, Artificial Sequence
  Description of Artificial Sequence: Synthetic oligonucleotide
  Sense strand starting at position 2612 of SEQ ID NO: 587530
cguggagucacuggaacau

SEQ ID NO: 799027 - RNA, 19 nt, Artificial Sequence
  Description of Artificial Sequence: Synthetic oligonucleotide
  Antisense strand to SEQ ID NO: 799026
auguuccagugacuccacg

SEQ ID NO: 799028 - RNA, 19 nt, Artificial Sequence
  Description of Artificial Sequence: Synthetic oligonucleotide
  Sense strand starting at position 2622 of SEQ ID NO: 587530
cuggaacauuugugcaaug

SEQ ID NO: 799029 - RNA, 19 nt, Artificial Sequence
  Description of Artificial Sequence: Synthetic oligonucleotide
  Antisense strand to SEQ ID NO: 799028
cauugcacaaauguuccag

SEQ ID NO: 799030 - RNA, 19 nt, Artificial Sequence
  Description of Artificial Sequence: Synthetic oligonucleotide
  Sense strand starting at position 2790 of SEQ ID NO: 587530
ggcagcauccuucgccaua

SEQ ID NO: 799031 - RNA, 19 nt, Artificial Sequence
  Description of Artificial Sequence: Synthetic oligonucleotide
  Antisense strand to SEQ ID NO: 799030
uauggcgaaggaugcugcc

SEQ ID NO: 799032 - RNA, 19 nt, Artificial Sequence
  Description of Artificial Sequence: Synthetic oligonucleotide
  Sense strand starting at position 2916 of SEQ ID NO: 587530
ggcaucauccuucgccaua

SEQ ID NO: 799033 - RNA, 19 nt, Artificial Sequence
  Description of Artificial Sequence: Synthetic oligonucleotide
  Antisense strand to SEQ ID NO: 799032
uauggcgaaggaugaugcc

SEQ ID NO: 799034 - RNA, 19 nt, Artificial Sequence
  Description of Artificial Sequence: Synthetic oligonucleotide
  Sense strand starting at position 2937 of SEQ ID NO: 587530
ggcagcauccuucgccaaa

SEQ ID NO: 799035 - RNA, 19 nt, Artificial Sequence
  Description of Artificial Sequence: Synthetic oligonucleotide
  Antisense strand to SEQ ID NO: 799034
uuuggcgaaggaugcugcc

SEQ ID NO: 799036 - RNA, 19 nt, Artificial Sequence
  Description of Artificial Sequence: Synthetic oligonucleotide
  Sense strand starting at position 3052 of SEQ ID NO: 587530
gcgugcauagacuaaacau

SEQ ID NO: 799037 - RNA, 19 nt, Artificial Sequence
  Description of Artificial Sequence: Synthetic oligonucleotide
  Antisense strand to SEQ ID NO: 799036
auguuuagucuaugcacgc

SEQ ID NO: 799038 - RNA, 19 nt, Artificial Sequence
  Description of Artificial Sequence: Synthetic oligonucleotide
  Sense strand starting at position 3161 of SEQ ID NO: 587530
gacacagacuuggagacau

SEQ ID NO: 799039 - RNA, 19 nt, Artificial Sequence
  Description of Artificial Sequence: Synthetic oligonucleotide
  Antisense strand to SEQ ID NO: 799038
augucuccaagucuguguc

SEQ ID NO: 799040 - RNA, 19 nt, Artificial Sequence
  Description of Artificial Sequence: Synthetic oligonucleotide
  Sense strand starting at position 3356 of SEQ ID NO: 587530
gauauuggccguuggugau

SEQ ID NO: 799041 - RNA, 19 nt, Artificial Sequence
  Description of Artificial Sequence: Synthetic oligonucleotide
  Antisense strand to SEQ ID NO: 799040
aucaccaacggccaauauc

SEQ ID NO: 799042 - RNA, 19 nt, Artificial Sequence
  Description of Artificial Sequence: Synthetic oligonucleotide
  Sense strand starting at position 3366 of SEQ ID NO: 587530
guuggugauguuugcauac

SEQ ID NO: 799043 - RNA, 19 nt, Artificial Sequence
  Description of Artificial Sequence: Synthetic oligonucleotide
  Antisense strand to SEQ ID NO: 799042
guaugcaaacaucaccaac

SEQ ID NO: 799044 - RNA, 19 nt, Artificial Sequence
  Description of Artificial Sequence: Synthetic oligonucleotide
  Sense strand starting at position 3368 of SEQ ID NO: 587530
uggugauguuugcauaccu

SEQ ID NO: 799045 - RNA, 19 nt, Artificial Sequence
  Description of Artificial Sequence: Synthetic oligonucleotide
  Antisense strand to SEQ ID NO: 799044
agguaugcaaacaucacca

SEQ ID NO: 799046 - RNA, 19 nt, Artificial Sequence
  Description of Artificial Sequence: Synthetic oligonucleotide
  Sense strand starting at position 3377 of SEQ ID NO: 587530
uugcauaccucugaauaug

SEQ ID NO: 799047 - RNA, 19 nt, Artificial Sequence
  Description of Artificial Sequence: Synthetic oligonucleotide
  Antisense strand to SEQ ID NO: 799046
cauauucagagguaugcaa

SEQ ID NO: 799048 - RNA, 19 nt, Artificial Sequence
  Description of Artificial Sequence: Synthetic oligonucleotide
  Sense strand starting at position 3429 of SEQ ID NO: 587530
ugaauuguaugguauggga

SEQ ID NO: 799049 - RNA, 19 nt, Artificial Sequence
  Description of Artificial Sequence: Synthetic oligonucleotide
  Antisense strand to SEQ ID NO: 799048
ucccauaccauacaauuca

SEQ ID NO: 799050 - RNA, 19 nt, Artificial Sequence
  Description of Artificial Sequence: Synthetic oligonucleotide
  Sense strand starting at position 32 of SEQ ID NO: 587531
gugagaagugaucaaguac

SEQ ID NO: 799051 - RNA, 19 nt, Artificial Sequence
  Description of Artificial Sequence: Synthetic oligonucleotide
  Antisense strand to SEQ ID NO: 799050
guacuugaucacuucucac

SEQ ID NO: 799052 - RNA, 19 nt, Artificial Sequence
  Description of Artificial Sequence: Synthetic oligonucleotide
  Sense strand starting at position 132 of SEQ ID NO: 587531
ggacuauggugucaaagug

SEQ ID NO: 799053 - RNA, 19 nt, Artificial Sequence
  Description of Artificial Sequence: Synthetic oligonucleotide
  Antisense strand to SEQ ID NO: 799052
cacuuugacaccauagucc

SEQ ID NO: 799054 - RNA, 19 nt, Artificial Sequence
  Description of Artificial Sequence: Synthetic oligonucleotide
  Sense strand starting at position 147 of SEQ ID NO: 587531
agugcaaguugauaauuaa

SEQ ID NO: 799055 - RNA, 19 nt, Artificial Sequence
  Description of Artificial Sequence: Synthetic oligonucleotide
  Antisense strand to SEQ ID NO: 799054
uuaauuaucaacuugcacu

SEQ ID NO: 799056 - RNA, 19 nt, Artificial Sequence
  Description of Artificial Sequence: Synthetic oligonucleotide
  Sense strand starting at position 154 of SEQ ID NO: 587531
guugauaauuaacagagau

SEQ ID NO: 799057 - RNA, 19 nt, Artificial Sequence
  Description of Artificial Sequence: Synthetic oligonucleotide
  Antisense strand to SEQ ID NO: 799056
aucucuguuaauuaucaac

SEQ ID NO: 799058 - RNA, 19 nt, Artificial Sequence
  Description of Artificial Sequence: Synthetic oligonucleotide
  Sense strand starting at position 271 of SEQ ID NO: 587531
gugcuuauugagcaaggga

SEQ ID NO: 799059 - RNA, 19 nt, Artificial Sequence
  Description of Artificial Sequence: Synthetic oligonucleotide
  Antisense strand to SEQ ID NO: 799058
ucccuugcucaauaagcac

SEQ ID NO: 799060 - RNA, 19 nt, Artificial Sequence
  Description of Artificial Sequence: Synthetic oligonucleotide
  Sense strand starting at position 409 of SEQ ID NO: 587531
cagguuccucuuggauaca

SEQ ID NO: 799061 - RNA, 19 nt, Artificial Sequence
  Description of Artificial Sequence: Synthetic oligonucleotide
  Antisense strand to SEQ ID NO: 799060
uguauccaagaggaaccug

SEQ ID NO: 799062 - RNA, 19 nt, Artificial Sequence
  Description of Artificial Sequence: Synthetic oligonucleotide
  Sense strand starting at position 445 of SEQ ID NO: 587531
acccaaaucuugugauaga

SEQ ID NO: 799063 - RNA, 19 nt, Artificial Sequence
  Description of Artificial Sequence: Synthetic oligonucleotide
  Antisense strand to SEQ ID NO: 799062
ucuaucacaagauuugggu

SEQ ID NO: 799064 - RNA, 19 nt, Artificial Sequence
  Description of Artificial Sequence: Synthetic oligonucleotide
  Sense strand starting at position 446 of SEQ ID NO: 587531
cccaaaucuugugauagaa

SEQ ID NO: 799065 - RNA, 19 nt, Artificial Sequence
  Description of Artificial Sequence: Synthetic oligonucleotide
  Antisense strand to SEQ ID NO: 799064
uucuaucacaagauuuggg

SEQ ID NO: 799066 - RNA, 19 nt, Artificial Sequence
  Description of Artificial Sequence: Synthetic oligonucleotide
  Sense strand starting at position 559 of SEQ ID NO: 587531
gcgggaagaucgguugagu

SEQ ID NO: 799067 - RNA, 19 nt, Artificial Sequence
  Description of Artificial Sequence: Synthetic oligonucleotide
  Antisense strand to SEQ ID NO: 799066
acucaaccgaucuucccgc

SEQ ID NO: 799068 - RNA, 19 nt, Artificial Sequence
  Description of Artificial Sequence: Synthetic oligonucleotide
  Sense strand starting at position 568 of SEQ ID NO: 587531
ucgguugaguccaagaggu

SEQ ID NO: 799069 - RNA, 19 nt, Artificial Sequence
  Description of Artificial Sequence: Synthetic oligonucleotide
  Antisense strand to SEQ ID NO: 799068
accucuuggacucaaccga

SEQ ID NO: 799070 - RNA, 19 nt, Artificial Sequence
  Description of Artificial Sequence: Synthetic oligonucleotide
  Sense strand starting at position 570 of SEQ ID NO: 587531
gguugaguccaagagguug

SEQ ID NO: 799071 - RNA, 19 nt, Artificial Sequence
  Description of Artificial Sequence: Synthetic oligonucleotide
  Antisense strand to SEQ ID NO: 799070
caaccucuuggacucaacc

SEQ ID NO: 799072 - RNA, 19 nt, Artificial Sequence
  Description of Artificial Sequence: Synthetic oligonucleotide
  Sense strand starting at position 575 of SEQ ID NO: 587531
aguccaagagguugaaauc

SEQ ID NO: 799073 - RNA, 19 nt, Artificial Sequence
  Description of Artificial Sequence: Synthetic oligonucleotide
  Antisense strand to SEQ ID NO: 799072
gauuucaaccucuuggacu

SEQ ID NO: 799074 - RNA, 19 nt, Artificial Sequence
  Description of Artificial Sequence: Synthetic oligonucleotide
  Sense strand starting at position 643 of SEQ ID NO: 587531
uuaacuaggcguggugauu

SEQ ID NO: 799075 - RNA, 19 nt, Artificial Sequence
  Description of Artificial Sequence: Synthetic oligonucleotide
  Antisense strand to SEQ ID NO: 799074
aaucaccacgccuaguuaa

SEQ ID NO: 799076 - RNA, 19 nt, Artificial Sequence
  Description of Artificial Sequence: Synthetic oligonucleotide
  Sense strand starting at position 838 of SEQ ID NO: 587531
uuguaaaucucaggauuua

SEQ ID NO: 799077 - RNA, 19 nt, Artificial Sequence
  Description of Artificial Sequence: Synthetic oligonucleotide
  Antisense strand to SEQ ID NO: 799076
uaaauccugagauuuacaa

SEQ ID NO: 799078 - RNA, 19 nt, Artificial Sequence
  Description of Artificial Sequence: Synthetic oligonucleotide
  Sense strand starting at position 992 of SEQ ID NO: 587531
ccaauuaagucgggaaaca

SEQ ID NO: 799079 - RNA, 19 nt, Artificial Sequence
  Description of Artificial Sequence: Synthetic oligonucleotide
  Antisense strand to SEQ ID NO: 799078
uguuucccgacuuaauugg

SEQ ID NO: 799080 - RNA, 19 nt, Artificial Sequence
  Description of Artificial Sequence: Synthetic oligonucleotide
  Sense strand starting at position 1059 of SEQ ID NO: 587531
acccucaggugauucgaau

SEQ ID NO: 799081 - RNA, 19 nt, Artificial Sequence
  Description of Artificial Sequence: Synthetic oligonucleotide
  Antisense strand to SEQ ID NO: 799080
auucgaaucaccugagggu

SEQ ID NO: 799082 - RNA, 19 nt, Artificial Sequence
  Description of Artificial Sequence: Synthetic oligonucleotide
  Sense strand starting at position 1065 of SEQ ID NO: 587531
aggugauucgaauguguag

SEQ ID NO: 799083 - RNA, 19 nt, Artificial Sequence
  Description of Artificial Sequence: Synthetic oligonucleotide
  Antisense strand to SEQ ID NO: 799082
cuacacauucgaaucaccu

SEQ ID NO: 799084 - RNA, 19 nt, Artificial Sequence
  Description of Artificial Sequence: Synthetic oligonucleotide
  Sense strand starting at position 1202 of SEQ ID NO: 587531
ccagcaauguucccagaug

SEQ ID NO: 799085 - RNA, 19 nt, Artificial Sequence
  Description of Artificial Sequence: Synthetic oligonucleotide
  Antisense strand to SEQ ID NO: 799084
caucugggaacauugcugg

SEQ ID NO: 799086 - RNA, 19 nt, Artificial Sequence
  Description of Artificial Sequence: Synthetic oligonucleotide
  Sense strand starting at position 1228 of SEQ ID NO: 587531
guguuucacgcggucaaga

SEQ ID NO: 799087 - RNA, 19 nt, Artificial Sequence
  Description of Artificial Sequence: Synthetic oligonucleotide
  Antisense strand to SEQ ID NO: 799086
ucuugaccgcgugaaacac

SEQ ID NO: 799088 - RNA, 19 nt, Artificial Sequence
  Description of Artificial Sequence: Synthetic oligonucleotide
  Sense strand starting at position 2107 of SEQ ID NO: 587531
ccgcguguagccuucugaa

SEQ ID NO: 799089 - RNA, 19 nt, Artificial Sequence
  Description of Artificial Sequence: Synthetic oligonucleotide
  Antisense strand to SEQ ID NO: 799088
uucagaaggcuacacgcgg

SEQ ID NO: 799090 - RNA, 19 nt, Artificial Sequence
  Description of Artificial Sequence: Synthetic oligonucleotide
  Sense strand starting at position 2109 of SEQ ID NO: 587531
gcguguagccuucugaagu

SEQ ID NO: 799091 - RNA, 19 nt, Artificial Sequence
  Description of Artificial Sequence: Synthetic oligonucleotide
  Antisense strand to SEQ ID NO: 799090
acuucagaaggcuacacgc

SEQ ID NO: 799092 - RNA, 19 nt, Artificial Sequence
  Description of Artificial Sequence: Synthetic oligonucleotide
  Sense strand starting at position 2149 of SEQ ID NO: 587531
cggugaacguccucucguu

SEQ ID NO: 799093 - RNA, 19 nt, Artificial Sequence
  Description of Artificial Sequence: Synthetic oligonucleotide
  Antisense strand to SEQ ID NO: 799092
aacgagaggacguucaccg

SEQ ID NO: 799094 - RNA, 19 nt, Artificial Sequence
  Description of Artificial Sequence: Synthetic oligonucleotide
  Sense strand starting at position 2150 of SEQ ID NO: 587531
ggugaacguccucucguuu

SEQ ID NO: 799095 - RNA, 19 nt, Artificial Sequence
  Description of Artificial Sequence: Synthetic oligonucleotide
  Antisense strand to SEQ ID NO: 799094
aaacgagaggacguucacc

SEQ ID NO: 799096 - RNA, 19 nt, Artificial Sequence
  Description of Artificial Sequence: Synthetic oligonucleotide
  Sense strand starting at position 2215 of SEQ ID NO: 587531
cggcuucuccaggaagaga

SEQ ID NO: 799097 - RNA, 19 nt, Artificial Sequence
  Description of Artificial Sequence: Synthetic oligonucleotide
  Antisense strand to SEQ ID NO: 799096
ucucuuccuggagaagccg

SEQ ID NO: 799098 - RNA, 19 nt, Artificial Sequence
  Description of Artificial Sequence: Synthetic oligonucleotide
  Sense strand starting at position 2240 of SEQ ID NO: 587531
ccucuauucgaaggguugu

SEQ ID NO: 799099 - RNA, 19 nt, Artificial Sequence
  Description of Artificial Sequence: Synthetic oligonucleotide
  Antisense strand to SEQ ID NO: 799098
acaacccuucgaauagagg

SEQ ID NO: 799100 - RNA, 19 nt, Artificial Sequence
  Description of Artificial Sequence: Synthetic oligonucleotide
  Sense strand starting at position 2251 of SEQ ID NO: 587531
aggguuguuuguccagguu

SEQ ID NO: 799101 - RNA, 19 nt, Artificial Sequence
  Description of Artificial Sequence: Synthetic oligonucleotide
  Antisense strand to SEQ ID NO: 799100
aaccuggacaaacaacccu

SEQ ID NO: 799102 - RNA, 19 nt, Artificial Sequence
  Description of Artificial Sequence: Synthetic oligonucleotide
  Sense strand starting at position 2253 of SEQ ID NO: 587531
gguuguuuguccagguuug

SEQ ID NO: 799103 - RNA, 19 nt, Artificial Sequence
  Description of Artificial Sequence: Synthetic oligonucleotide
  Antisense strand to SEQ ID NO: 799102
caaaccuggacaaacaacc

SEQ ID NO: 799104 - RNA, 19 nt, Artificial Sequence
  Description of Artificial Sequence: Synthetic oligonucleotide
  Sense strand starting at position 2254 of SEQ ID NO: 587531
guuguuuguccagguuugu

SEQ ID NO: 799105 - RNA, 19 nt, Artificial Sequence
  Description of Artificial Sequence: Synthetic oligonucleotide
  Antisense strand to SEQ ID NO: 799104
acaaaccuggacaaacaac

SEQ ID NO: 799106 - RNA, 19 nt, Artificial Sequence
  Description of Artificial Sequence: Synthetic oligonucleotide
  Sense strand starting at position 2260 of SEQ ID NO: 587531
uguccagguuuguuccaga

SEQ ID NO: 799107 - RNA, 19 nt, Artificial Sequence
  Description of Artificial Sequence: Synthetic oligonucleotide
  Antisense strand to SEQ ID NO: 799106
ucuggaacaaaccuggaca

SEQ ID NO: 799108 - RNA, 19 nt, Artificial Sequence
  Description of Artificial Sequence: Synthetic oligonucleotide
  Sense strand starting at position 2263 of SEQ ID NO: 587531
ccagguuuguuccagagac

SEQ ID NO: 799109 - RNA, 19 nt, Artificial Sequence
  Description of Artificial Sequence: Synthetic oligonucleotide
  Antisense strand to SEQ ID NO: 799108
gucucuggaacaaaccugg

SEQ ID NO: 799110 - RNA, 19 nt, Artificial Sequence
  Description of Artificial Sequence: Synthetic oligonucleotide
  Sense strand starting at position 2265 of SEQ ID NO: 587531
agguuuguuccagagacca

SEQ ID NO: 799111 - RNA, 19 nt, Artificial Sequence
  Description of Artificial Sequence: Synthetic oligonucleotide
  Antisense strand to SEQ ID NO: 799110
uggucucuggaacaaaccu

SEQ ID NO: 799112 - RNA, 19 nt, Artificial Sequence
  Description of Artificial Sequence: Synthetic oligonucleotide
  Sense strand starting at position 2534 of SEQ ID NO: 587531
ucacuauguuaccaggacu

SEQ ID NO: 799113 - RNA, 19 nt, Artificial Sequence
  Description of Artificial Sequence: Synthetic oligonucleotide
  Antisense strand to SEQ ID NO: 799112
aguccugguaacauaguga

SEQ ID NO: 799114 - RNA, 19 nt, Artificial Sequence
  Description of Artificial Sequence: Synthetic oligonucleotide
  Sense strand starting at position 2556 of SEQ ID NO: 587531
agggaacucuuggccucaa

SEQ ID NO: 799115 - RNA, 19 nt, Artificial Sequence
  Description of Artificial Sequence: Synthetic oligonucleotide
  Antisense strand to SEQ ID NO: 799114
uugaggccaagaguucccu

SEQ ID NO: 799116 - RNA, 19 nt, Artificial Sequence
  Description of Artificial Sequence: Synthetic oligonucleotide
  Sense strand starting at position 2608 of SEQ ID NO: 587531
ggauuaugguaugagguca

SEQ ID NO: 799117 - RNA, 19 nt, Artificial Sequence
  Description of Artificial Sequence: Synthetic oligonucleotide
  Antisense strand to SEQ ID NO: 799116
ugaccucauaccauaaucc

SEQ ID NO: 799118 - RNA, 19 nt, Artificial Sequence
  Description of Artificial Sequence: Synthetic oligonucleotide
  Sense strand starting at position 3136 of SEQ ID NO: 587531
gagguaauugacggacagu

SEQ ID NO: 799119 - RNA, 19 nt, Artificial Sequence
  Description of Artificial Sequence: Synthetic oligonucleotide
  Antisense strand to SEQ ID NO: 799118
acuguccgucaauuaccuc

SEQ ID NO: 799120 - RNA, 19 nt, Artificial Sequence
  Description of Artificial Sequence: Synthetic oligonucleotide
  Sense strand starting at position 3480 of SEQ ID NO: 587531
acuugaauugcuugacacu

SEQ ID NO: 799121 - RNA, 19 nt, Artificial Sequence
  Description of Artificial Sequence: Synthetic oligonucleotide
  Antisense strand to SEQ ID NO: 799120
agugucaagcaauucaagu

SEQ ID NO: 799122 - RNA, 19 nt, Artificial Sequence
  Description of Artificial Sequence: Synthetic oligonucleotide
  Sense strand starting at position 3481 of SEQ ID NO: 587531
cuugaauugcuugacacuu

SEQ ID NO: 799123 - RNA, 19 nt, Artificial Sequence
  Description of Artificial Sequence: Synthetic oligonucleotide
  Antisense strand to SEQ ID NO: 799122
aagugucaagcaauucaag

SEQ ID NO: 799124 - RNA, 19 nt, Artificial Sequence
  Description of Artificial Sequence: Synthetic oligonucleotide
  Sense strand starting at position 3516 of SEQ ID NO: 587531
uggcuuggauuacuggaua

SEQ ID NO: 799125 - RNA, 19 nt, Artificial Sequence
  Description of Artificial Sequence: Synthetic oligonucleotide
  Antisense strand to SEQ ID NO: 799124
uauccaguaauccaagcca

SEQ ID NO: 799126 - RNA, 19 nt, Artificial Sequence
  Description of Artificial Sequence: Synthetic oligonucleotide
  Sense strand starting at position 3524 of SEQ ID NO: 587531
auuacuggauacucugauu

SEQ ID NO: 799127 - RNA, 19 nt, Artificial Sequence
  Description of Artificial Sequence: Synthetic oligonucleotide
  Antisense strand to SEQ ID NO: 799126
aaucagaguauccaguaau

SEQ ID NO: 799128 - RNA, 19 nt, Artificial Sequence
  Description of Artificial Sequence: Synthetic oligonucleotide
  Sense strand starting at position 3717 of SEQ ID NO: 587531
gggauuuaauggcgacuau

SEQ ID NO: 799129 - RNA, 19 nt, Artificial Sequence
  Description of Artificial Sequence: Synthetic oligonucleotide
  Antisense strand to SEQ ID NO: 799128
auagucgccauuaaauccc

SEQ ID NO: 799130 - RNA, 19 nt, Artificial Sequence
  Description of Artificial Sequence: Synthetic oligonucleotide
  Sense strand starting at position 608 of SEQ ID NO: 587532
uaaauaaagccguacaguu

SEQ ID NO: 799131 - RNA, 19 nt, Artificial Sequence
  Description of Artificial Sequence: Synthetic oligonucleotide
  Antisense strand to SEQ ID NO: 799130
aacuguacggcuuuauuua

SEQ ID NO: 799132 - RNA, 19 nt, Artificial Sequence
  Description of Artificial Sequence: Synthetic oligonucleotide
  Sense strand starting at position 649 of SEQ ID NO: 587532
guauuugacccucgcaacu

SEQ ID NO: 799133 - RNA, 19 nt, Artificial Sequence
  Description of Artificial Sequence: Synthetic oligonucleotide
  Antisense strand to SEQ ID NO: 799132
aguugcgagggucaaauac

SEQ ID NO: 799134 - RNA, 19 nt, Artificial Sequence
  Description of Artificial Sequence: Synthetic oligonucleotide
  Sense strand starting at position 671 of SEQ ID NO: 587532
ggagcaaacagguauuagu

SEQ ID NO: 799135 - RNA, 19 nt, Artificial Sequence
  Description of Artificial Sequence: Synthetic oligonucleotide
  Antisense strand to SEQ ID NO: 799134
acuaauaccuguuugcucc

SEQ ID NO: 799136 - RNA, 19 nt, Artificial Sequence
  Description of Artificial Sequence: Synthetic oligonucleotide
  Sense strand starting at position 682 of SEQ ID NO: 587532
guauuaguguuauuccuau

SEQ ID NO: 799137 - RNA, 19 nt, Artificial Sequence
  Description of Artificial Sequence: Synthetic oligonucleotide
  Antisense strand to SEQ ID NO: 799136
auaggaauaacacuaauac

SEQ ID NO: 799138 - RNA, 19 nt, Artificial Sequence
  Description of Artificial Sequence: Synthetic oligonucleotide
  Sense strand starting at position 705 of SEQ ID NO: 587532
auacgugaaaucugaagug

SEQ ID NO: 799139 - RNA, 19 nt, Artificial Sequence
  Description of Artificial Sequence: Synthetic oligonucleotide
  Antisense strand to SEQ ID NO: 799138
cacuucagauuucacguau

SEQ ID NO: 799140 - RNA, 19 nt, Artificial Sequence
  Description of Artificial Sequence: Synthetic oligonucleotide
  Sense strand starting at position 710 of SEQ ID NO: 587532
ugaaaucugaagugaagcu

SEQ ID NO: 799141 - RNA, 19 nt, Artificial Sequence
  Description of Artificial Sequence: Synthetic oligonucleotide
  Antisense strand to SEQ ID NO: 799140
agcuucacuucagauuuca

SEQ ID NO: 799142 - RNA, 19 nt, Artificial Sequence
  Description of Artificial Sequence: Synthetic oligonucleotide
  Sense strand starting at position 719 of SEQ ID NO: 587532
aagugaagcugucugguua

SEQ ID NO: 799143 - RNA, 19 nt, Artificial Sequence
  Description of Artificial Sequence: Synthetic oligonucleotide
  Antisense strand to SEQ ID NO: 799142
uaaccagacagcuucacuu

SEQ ID NO: 799144 - RNA, 19 nt, Artificial Sequence
  Description of Artificial Sequence: Synthetic oligonucleotide
  Sense strand starting at position 720 of SEQ ID NO: 587532
agugaagcugucugguuaa

SEQ ID NO: 799145 - RNA, 19 nt, Artificial Sequence
  Description of Artificial Sequence: Synthetic oligonucleotide
  Antisense strand to SEQ ID NO: 799144
uuaaccagacagcuucacu

SEQ ID NO: 799146 - RNA, 19 nt, Artificial Sequence
  Description of Artificial Sequence: Synthetic oligonucleotide
  Sense strand starting at position 723 of SEQ ID NO: 587532
gaagcugucugguuaaggu

SEQ ID NO: 799147 - RNA, 19 nt, Artificial Sequence
  Description of Artificial Sequence: Synthetic oligonucleotide
  Antisense strand to SEQ ID NO: 799146
accuuaaccagacagcuuc

SEQ ID NO: 799148 - RNA, 19 nt, Artificial Sequence
  Description of Artificial Sequence: Synthetic oligonucleotide
  Sense strand starting at position 957 of SEQ ID NO: 587532
acccaauauguguacuaag

SEQ ID NO: 799149 - RNA, 19 nt, Artificial Sequence
  Description of Artificial Sequence: Synthetic oligonucleotide
  Antisense strand to SEQ ID NO: 799148
cuuaguacacauauugggu

SEQ ID NO: 799150 - RNA, 19 nt, Artificial Sequence
  Description of Artificial Sequence: Synthetic oligonucleotide
  Sense strand starting at position 1107 of SEQ ID NO: 587532
acugaaaucugccuccaag

SEQ ID NO: 799151 - RNA, 19 nt, Artificial Sequence
  Description of Artificial Sequence: Synthetic oligonucleotide
  Antisense strand to SEQ ID NO: 799150
cuuggaggcagauuucagu

SEQ ID NO: 799152 - RNA, 19 nt, Artificial Sequence
  Description of Artificial Sequence: Synthetic oligonucleotide
  Sense strand starting at position 1127 of SEQ ID NO: 587532
ccacgauucuugccaccau

SEQ ID NO: 799153 - RNA, 19 nt, Artificial Sequence
  Description of Artificial Sequence: Synthetic oligonucleotide
  Antisense strand to SEQ ID NO: 799152
augguggcaagaaucgugg

SEQ ID NO: 799154 - RNA, 19 nt, Artificial Sequence
  Description of Artificial Sequence: Synthetic oligonucleotide
  Sense strand starting at position 1131 of SEQ ID NO: 587532
gauucuugccaccauucga

SEQ ID NO: 799155 - RNA, 19 nt, Artificial Sequence
  Description of Artificial Sequence: Synthetic oligonucleotide
  Antisense strand to SEQ ID NO: 799154
ucgaaugguggcaagaauc

SEQ ID NO: 799156 - RNA, 19 nt, Artificial Sequence
  Description of Artificial Sequence: Synthetic oligonucleotide
  Sense strand starting at position 1217 of SEQ ID NO: 587532
ucaggacccggcuaugaaa

SEQ ID NO: 799157 - RNA, 19 nt, Artificial Sequence
  Description of Artificial Sequence: Synthetic oligonucleotide
  Antisense strand to SEQ ID NO: 799156
uuucauagccggguccuga

SEQ ID NO: 799158 - RNA, 19 nt, Artificial Sequence
  Description of Artificial Sequence: Synthetic oligonucleotide
  Sense strand starting at position 1240 of SEQ ID NO: 587532
ggcugcuucgcccuuaaau

SEQ ID NO: 799159 - RNA, 19 nt, Artificial Sequence
  Description of Artificial Sequence: Synthetic oligonucleotide
  Antisense strand to SEQ ID NO: 799158
auuuaagggcgaagcagcc

SEQ ID NO: 799160 - RNA, 19 nt, Artificial Sequence
  Description of Artificial Sequence: Synthetic oligonucleotide
  Sense strand starting at position 1241 of SEQ ID NO: 587532
gcugcuucgcccuuaaaug

SEQ ID NO: 799161 - RNA, 19 nt, Artificial Sequence
  Description of Artificial Sequence: Synthetic oligonucleotide
  Antisense strand to SEQ ID NO: 799160
cauuuaagggcgaagcagc

SEQ ID NO: 799162 - RNA, 19 nt, Artificial Sequence
  Description of Artificial Sequence: Synthetic oligonucleotide
  Sense strand starting at position 1242 of SEQ ID NO: 587532
cugcuucgcccuuaaauga

SEQ ID NO: 799163 - RNA, 19 nt, Artificial Sequence
  Description of Artificial Sequence: Synthetic oligonucleotide
  Antisense strand to SEQ ID NO: 799162
ucauuuaagggcgaagcag

SEQ ID NO: 799164 - RNA, 19 nt, Artificial Sequence
  Description of Artificial Sequence: Synthetic oligonucleotide
  Sense strand starting at position 1298 of SEQ ID NO: 587532
uuguuuagacugcagaaau

SEQ ID NO: 799165 - RNA, 19 nt, Artificial Sequence
  Description of Artificial Sequence: Synthetic oligonucleotide
  Antisense strand to SEQ ID NO: 799164
auuucugcagucuaaacaa

SEQ ID NO: 799166 - RNA, 19 nt, Artificial Sequence
  Description of Artificial Sequence: Synthetic oligonucleotide
  Sense strand starting at position 1325 of SEQ ID NO: 587532
aucguuaaaguuuagggau

SEQ ID NO: 799167 - RNA, 19 nt, Artificial Sequence
  Description of Artificial Sequence: Synthetic oligonucleotide
  Antisense strand to SEQ ID NO: 799166
aucccuaaacuuuaacgau

SEQ ID NO: 799168 - RNA, 19 nt, Artificial Sequence
  Description of Artificial Sequence: Synthetic oligonucleotide
  Sense strand starting at position 1606 of SEQ ID NO: 587532
uggguguuucgcuucgaga

SEQ ID NO: 799169 - RNA, 19 nt, Artificial Sequence
  Description of Artificial Sequence: Synthetic oligonucleotide
  Antisense strand to SEQ ID NO: 799168
ucucgaagcgaaacaccca

SEQ ID NO: 799170 - RNA, 19 nt, Artificial Sequence
  Description of Artificial Sequence: Synthetic oligonucleotide
  Sense strand starting at position 2202 of SEQ ID NO: 587532
ggcagcuuucuuuauagac

SEQ ID NO: 799171 - RNA, 19 nt, Artificial Sequence
  Description of Artificial Sequence: Synthetic oligonucleotide
  Antisense strand to SEQ ID NO: 799170
gucuauaaagaaagcugcc

SEQ ID NO: 799172 - RNA, 19 nt, Artificial Sequence
  Description of Artificial Sequence: Synthetic oligonucleotide
  Sense strand starting at position 2322 of SEQ ID NO: 587532
uuucuuauuagagacguga

SEQ ID NO: 799173 - RNA, 19 nt, Artificial Sequence
  Description of Artificial Sequence: Synthetic oligonucleotide
  Antisense strand to SEQ ID NO: 799172
ucacgucucuaauaagaaa

SEQ ID NO: 799174 - RNA, 19 nt, Artificial Sequence
  Description of Artificial Sequence: Synthetic oligonucleotide
  Sense strand starting at position 2324 of SEQ ID NO: 587532
ucuuauuagagacgugauc

SEQ ID NO: 799175 - RNA, 19 nt, Artificial Sequence
  Description of Artificial Sequence: Synthetic oligonucleotide
  Antisense strand to SEQ ID NO: 799174
gaucacgucucuaauaaga

SEQ ID NO: 799176 - RNA, 19 nt, Artificial Sequence
  Description of Artificial Sequence: Synthetic oligonucleotide
  Sense strand starting at position 2326 of SEQ ID NO: 587532
uuauuagagacgugaucuc

SEQ ID NO: 799177 - RNA, 19 nt, Artificial Sequence
  Description of Artificial Sequence: Synthetic oligonucleotide
  Antisense strand to SEQ ID NO: 799176
gagaucacgucucuaauaa

SEQ ID NO: 799178 - RNA, 19 nt, Artificial Sequence
  Description of Artificial Sequence: Synthetic oligonucleotide
  Sense strand starting at position 2852 of SEQ ID NO: 587532
gccagauaaauggguggaa

SEQ ID NO: 799179 - RNA, 19 nt, Artificial Sequence
  Description of Artificial Sequence: Synthetic oligonucleotide
  Antisense strand to SEQ ID NO: 799178
uuccacccauuuaucuggc

SEQ ID NO: 799180 - RNA, 19 nt, Artificial Sequence
  Description of Artificial Sequence: Synthetic oligonucleotide
  Sense strand starting at position 2986 of SEQ ID NO: 587532
cguugaauuacugguuacu

SEQ ID NO: 799181 - RNA, 19 nt, Artificial Sequence
  Description of Artificial Sequence: Synthetic oligonucleotide
  Antisense strand to SEQ ID NO: 799180
aguaaccaguaauucaacg

SEQ ID NO: 799182 - RNA, 19 nt, Artificial Sequence
  Description of Artificial Sequence: Synthetic oligonucleotide
  Sense strand starting at position 2988 of SEQ ID NO: 587532
uugaauuacugguuacucu

SEQ ID NO: 799183 - RNA, 19 nt, Artificial Sequence
  Description of Artificial Sequence: Synthetic oligonucleotide
  Antisense strand to SEQ ID NO: 799182
agaguaaccaguaauucaa

SEQ ID NO: 799184 - RNA, 19 nt, Artificial Sequence
  Description of Artificial Sequence: Synthetic oligonucleotide
  Sense strand starting at position 2989 of SEQ ID NO: 587532
ugaauuacugguuacucuu

SEQ ID NO: 799185 - RNA, 19 nt, Artificial Sequence
  Description of Artificial Sequence: Synthetic oligonucleotide
  Antisense strand to SEQ ID NO: 799184
aagaguaaccaguaauuca

SEQ ID NO: 799186 - RNA, 19 nt, Artificial Sequence
  Description of Artificial Sequence: Synthetic oligonucleotide
  Sense strand starting at position 3063 of SEQ ID NO: 587532
guacuacuacaaugaguua

SEQ ID NO: 799187 - RNA, 19 nt, Artificial Sequence
  Description of Artificial Sequence: Synthetic oligonucleotide
  Antisense strand to SEQ ID NO: 799186
uaacucauuguaguaguac

SEQ ID NO: 799188 - RNA, 19 nt, Artificial Sequence
  Description of Artificial Sequence: Synthetic oligonucleotide
  Sense strand starting at position 3084 of SEQ ID NO: 587532
ugcauuggacuguggugaa

SEQ ID NO: 799189 - RNA, 19 nt, Artificial Sequence
  Description of Artificial Sequence: Synthetic oligonucleotide
  Antisense strand to SEQ ID NO: 799188
uucaccacaguccaaugca

SEQ ID NO: 799190 - RNA, 19 nt, Artificial Sequence
  Description of Artificial Sequence: Synthetic oligonucleotide
  Sense strand starting at position 3199 of SEQ ID NO: 587532
uuguaauaagccuacuuga

SEQ ID NO: 799191 - RNA, 19 nt, Artificial Sequence
  Description of Artificial Sequence: Synthetic oligonucleotide
  Antisense strand to SEQ ID NO: 799190
ucaaguaggcuuauuacaa

SEQ ID NO: 799192 - RNA, 19 nt, Artificial Sequence
  Description of Artificial Sequence: Synthetic oligonucleotide
  Sense strand starting at position 3302 of SEQ ID NO: 587532
caucaauugguaggaaacu

SEQ ID NO: 799193 - RNA, 19 nt, Artificial Sequence
  Description of Artificial Sequence: Synthetic oligonucleotide
  Antisense strand to SEQ ID NO: 799192
aguuuccuaccaauugaug

SEQ ID NO: 799194 - RNA, 19 nt, Artificial Sequence
  Description of Artificial Sequence: Synthetic oligonucleotide
  Sense strand starting at position 3348 of SEQ ID NO: 587532
gggaauucaguguguauau

SEQ ID NO: 799195 - RNA, 19 nt, Artificial Sequence
  Description of Artificial Sequence: Synthetic oligonucleotide
  Antisense strand to SEQ ID NO: 799194
auauacacacugaauuccc

SEQ ID NO: 799196 - RNA, 19 nt, Artificial Sequence
  Description of Artificial Sequence: Synthetic oligonucleotide
  Sense strand starting at position 3465 of SEQ ID NO: 587532
uguaucaacugagcaguuu

SEQ ID NO: 799197 - RNA, 19 nt, Artificial Sequence
  Description of Artificial Sequence: Synthetic oligonucleotide
  Antisense strand to SEQ ID NO: 799196
aaacugcucaguugauaca

SEQ ID NO: 799198 - RNA, 19 nt, Artificial Sequence
  Description of Artificial Sequence: Synthetic oligonucleotide
  Sense strand starting at position 3561 of SEQ ID NO: 587532
cuggcucccuuauuaauga

SEQ ID NO: 799199 - RNA, 19 nt, Artificial Sequence
  Description of Artificial Sequence: Synthetic oligonucleotide
  Antisense strand to SEQ ID NO: 799198
ucauuaauaagggagccag

SEQ ID NO: 799200 - RNA, 19 nt, Artificial Sequence
  Description of Artificial Sequence: Synthetic oligonucleotide
  Sense strand starting at position 3568 of SEQ ID NO: 587532
ccuuauuaaugagugagag

SEQ ID NO: 799201 - RNA, 19 nt, Artificial Sequence
  Description of Artificial Sequence: Synthetic oligonucleotide
  Antisense strand to SEQ ID NO: 799200
cucucacucauuaauaagg

SEQ ID NO: 799202 - RNA, 19 nt, Artificial Sequence
  Description of Artificial Sequence: Synthetic oligonucleotide
  Sense strand starting at position 3606 of SEQ ID NO: 587532
ggcuaaaccgcauaugaua

SEQ ID NO: 799203 - RNA, 19 nt, Artificial Sequence
  Description of Artificial Sequence: Synthetic oligonucleotide
  Antisense strand to SEQ ID NO: 799202
uaucauaugcgguuuagcc

SEQ ID NO: 799204 - RNA, 19 nt, Artificial Sequence
  Description of Artificial Sequence: Synthetic oligonucleotide
  Sense strand starting at position 3724 of SEQ ID NO: 587532
accucucuguccucagaca

SEQ ID NO: 799205 - RNA, 19 nt, Artificial Sequence
  Description of Artificial Sequence: Synthetic oligonucleotide
  Antisense strand to SEQ ID NO: 799204
ugucugaggacagagaggu

SEQ ID NO: 799206 - RNA, 19 nt, Artificial Sequence
  Description of Artificial Sequence: Synthetic oligonucleotide
  Sense strand starting at position 3965 of SEQ ID NO: 587532
ucugaauagucucuguucu

SEQ ID NO: 799207 - RNA, 19 nt, Artificial Sequence
  Description of Artificial Sequence: Synthetic oligonucleotide
  Antisense strand to SEQ ID NO: 799206
agaacagagacuauucaga

SEQ ID NO: 799208 - RNA, 19 nt, Artificial Sequence
  Description of Artificial Sequence: Synthetic oligonucleotide
  Sense strand starting at position 3967 of SEQ ID NO: 587532
ugaauagucucuguucuca

SEQ ID NO: 799209 - RNA, 19 nt, Artificial Sequence
  Description of Artificial Sequence: Synthetic oligonucleotide
  Antisense strand to SEQ ID NO: 799208
ugagaacagagacuauuca

SEQ ID NO: 799210 - RNA, 19 nt, Artificial Sequence
  Description of Artificial Sequence: Synthetic oligonucleotide
  Sense strand starting at position 791 of SEQ ID NO: 587533
ugacgagccugacacuuua

SEQ ID NO: 799211 - RNA, 19 nt, Artificial Sequence
  Description of Artificial Sequence: Synthetic oligonucleotide
  Antisense strand to SEQ ID NO: 799210
uaaagugucaggcucguca

SEQ ID NO: 799212 - RNA, 19 nt, Artificial Sequence
  Description of Artificial Sequence: Synthetic oligonucleotide
  Sense strand starting at position 956 of SEQ ID NO: 587533
uugcauucccagcaagaag

SEQ ID NO: 799213 - RNA, 19 nt, Artificial Sequence
  Description of Artificial Sequence: Synthetic oligonucleotide
  Antisense strand to SEQ ID NO: 799212
cuucuugcugggaaugcaa

SEQ ID NO: 799214 - RNA, 19 nt, Artificial Sequence
  Description of Artificial Sequence: Synthetic oligonucleotide
  Sense strand starting at position 1111 of SEQ ID NO: 587533
ugggaauucuuguuuccua

SEQ ID NO: 799215 - RNA, 19 nt, Artificial Sequence
  Description of Artificial Sequence: Synthetic oligonucleotide
  Antisense strand to SEQ ID NO: 799214
uaggaaacaagaauuccca

SEQ ID NO: 799216 - RNA, 19 nt, Artificial Sequence
  Description of Artificial Sequence: Synthetic oligonucleotide
  Sense strand starting at position 1112 of SEQ ID NO: 587533
gggaauucuuguuuccuaa

SEQ ID NO: 799217 - RNA, 19 nt, Artificial Sequence
  Description of Artificial Sequence: Synthetic oligonucleotide
  Antisense strand to SEQ ID NO: 799216
uuaggaaacaagaauuccc

SEQ ID NO: 799218 - RNA, 19 nt, Artificial Sequence
  Description of Artificial Sequence: Synthetic oligonucleotide
  Sense strand starting at position 1236 of SEQ ID NO: 587533
gcggauuucuggcgagagc

SEQ ID NO: 799219 - RNA, 19 nt, Artificial Sequence
  Description of Artificial Sequence: Synthetic oligonucleotide
  Antisense strand to SEQ ID NO: 799218
gcucucgccagaaauccgc

SEQ ID NO: 799220 - RNA, 19 nt, Artificial Sequence
  Description of Artificial Sequence: Synthetic oligonucleotide
  Sense strand starting at position 1245 of SEQ ID NO: 587533
uggcgagagccgcagaaau

SEQ ID NO: 799221 - RNA, 19 nt, Artificial Sequence
  Description of Artificial Sequence: Synthetic oligonucleotide
  Antisense strand to SEQ ID NO: 799220
auuucugcggcucucgcca

SEQ ID NO: 799222 - RNA, 19 nt, Artificial Sequence
  Description of Artificial Sequence: Synthetic oligonucleotide
  Sense strand starting at position 1273 of SEQ ID NO: 587533
gggcuauguugcuaagccu

SEQ ID NO: 799223 - RNA, 19 nt, Artificial Sequence
  Description of Artificial Sequence: Synthetic oligonucleotide
  Antisense strand to SEQ ID NO: 799222
aggcuuagcaacauagccc

SEQ ID NO: 799224 - RNA, 19 nt, Artificial Sequence
  Description of Artificial Sequence: Synthetic oligonucleotide
  Sense strand starting at position 1279 of SEQ ID NO: 587533
uguugcuaagccugacagu

SEQ ID NO: 799225 - RNA, 19 nt, Artificial Sequence
  Description of Artificial Sequence: Synthetic oligonucleotide
  Antisense strand to SEQ ID NO: 799224
acugucaggcuuagcaaca

SEQ ID NO: 799226 - RNA, 19 nt, Artificial Sequence
  Description of Artificial Sequence: Synthetic oligonucleotide
  Sense strand starting at position 1288 of SEQ ID NO: 587533
gccugacagugaccugaaa

SEQ ID NO: 799227 - RNA, 19 nt, Artificial Sequence
  Description of Artificial Sequence: Synthetic oligonucleotide
  Antisense strand to SEQ ID NO: 799226
uuucaggucacugucaggc

SEQ ID NO: 799228 - RNA, 19 nt, Artificial Sequence
  Description of Artificial Sequence: Synthetic oligonucleotide
  Sense strand starting at position 1470 of SEQ ID NO: 587533
agcucuuggucauaaaguc

SEQ ID NO: 799229 - RNA, 19 nt, Artificial Sequence
  Description of Artificial Sequence: Synthetic oligonucleotide
  Antisense strand to SEQ ID NO: 799228
gacuuuaugaccaagagcu

SEQ ID NO: 799230 - RNA, 19 nt, Artificial Sequence
  Description of Artificial Sequence: Synthetic oligonucleotide
  Sense strand starting at position 1626 of SEQ ID NO: 587533
gggagucuuaaauguuuga

SEQ ID NO: 799231 - RNA, 19 nt, Artificial Sequence
  Description of Artificial Sequence: Synthetic oligonucleotide
  Antisense strand to SEQ ID NO: 799230
ucaaacauuuaagacuccc

SEQ ID NO: 799232 - RNA, 19 nt, Artificial Sequence
  Description of Artificial Sequence: Synthetic oligonucleotide
  Sense strand starting at position 1630 of SEQ ID NO: 587533
gucuuaaauguuugauucu

SEQ ID NO: 799233 - RNA, 19 nt, Artificial Sequence
  Description of Artificial Sequence: Synthetic oligonucleotide
  Antisense strand to SEQ ID NO: 799232
agaaucaaacauuuaagac

SEQ ID NO: 799234 - RNA, 19 nt, Artificial Sequence
  Description of Artificial Sequence: Synthetic oligonucleotide
  Sense strand starting at position 1685 of SEQ ID NO: 587533
uuauguuuccguugcacuu

SEQ ID NO: 799235 - RNA, 19 nt, Artificial Sequence
  Description of Artificial Sequence: Synthetic oligonucleotide
  Antisense strand to SEQ ID NO: 799234
aagugcaacggaaacauaa

SEQ ID NO: 799236 - RNA, 19 nt, Artificial Sequence
  Description of Artificial Sequence: Synthetic oligonucleotide
  Sense strand starting at position 2383 of SEQ ID NO: 587533
ccugaacucccgcguuaca

SEQ ID NO: 799237 - RNA, 19 nt, Artificial Sequence
  Description of Artificial Sequence: Synthetic oligonucleotide
  Antisense strand to SEQ ID NO: 799236
uguaacgcgggaguucagg

SEQ ID NO: 799238 - RNA, 19 nt, Artificial Sequence
  Description of Artificial Sequence: Synthetic oligonucleotide
  Sense strand starting at position 2399 of SEQ ID NO: 587533
acaaguucccuccaagcga

SEQ ID NO: 799239 - RNA, 19 nt, Artificial Sequence
  Description of Artificial Sequence: Synthetic oligonucleotide
  Antisense strand to SEQ ID NO: 799238
ucgcuuggagggaacuugu

SEQ ID NO: 799240 - RNA, 19 nt, Artificial Sequence
  Description of Artificial Sequence: Synthetic oligonucleotide
  Sense strand starting at position 2654 of SEQ ID NO: 587533
gcugacgucaagugucaaa

SEQ ID NO: 799241 - RNA, 19 nt, Artificial Sequence
  Description of Artificial Sequence: Synthetic oligonucleotide
  Antisense strand to SEQ ID NO: 799240
uuugacacuugacgucagc

SEQ ID NO: 799242 - RNA, 19 nt, Artificial Sequence
  Description of Artificial Sequence: Synthetic oligonucleotide
  Sense strand starting at position 2833 of SEQ ID NO: 587533
agccaucuugaaggaaaug

SEQ ID NO: 799243 - RNA, 19 nt, Artificial Sequence
  Description of Artificial Sequence: Synthetic oligonucleotide
  Antisense strand to SEQ ID NO: 799242
cauuuccuucaagauggcu

SEQ ID NO: 799244 - RNA, 19 nt, Artificial Sequence
  Description of Artificial Sequence: Synthetic oligonucleotide
  Sense strand starting at position 2872 of SEQ ID NO: 587533
uugcaagccuucugcaaag

SEQ ID NO: 799245 - RNA, 19 nt, Artificial Sequence
  Description of Artificial Sequence: Synthetic oligonucleotide
  Antisense strand to SEQ ID NO: 799244
cuuugcagaaggcuugcaa

SEQ ID NO: 799246 - RNA, 19 nt, Artificial Sequence
  Description of Artificial Sequence: Synthetic oligonucleotide
  Sense strand starting at position 2874 of SEQ ID NO: 587533
gcaagccuucugcaaaguu

SEQ ID NO: 799247 - RNA, 19 nt, Artificial Sequence
  Description of Artificial Sequence: Synthetic oligonucleotide
  Antisense strand to SEQ ID NO: 799246
aacuuugcagaaggcuugc

SEQ ID NO: 799248 - RNA, 19 nt, Artificial Sequence
  Description of Artificial Sequence: Synthetic oligonucleotide
  Sense strand starting at position 2898 of SEQ ID NO: 587533
ggacaaauaugucuugcuu

SEQ ID NO: 799249 - RNA, 19 nt, Artificial Sequence
  Description of Artificial Sequence: Synthetic oligonucleotide
  Antisense strand to SEQ ID NO: 799248
aagcaagacauauuugucc

SEQ ID NO: 799250 - RNA, 19 nt, Artificial Sequence
  Description of Artificial Sequence: Synthetic oligonucleotide
  Sense strand starting at position 3062 of SEQ ID NO: 587533
gguggcacuguugaggaaa

SEQ ID NO: 799251 - RNA, 19 nt, Artificial Sequence
  Description of Artificial Sequence: Synthetic oligonucleotide
  Antisense strand to SEQ ID NO: 799250
uuuccucaacagugccacc

SEQ ID NO: 799252 - RNA, 19 nt, Artificial Sequence
  Description of Artificial Sequence: Synthetic oligonucleotide
  Sense strand starting at position 3106 of SEQ ID NO: 587533
ccaacuuggucuugggaga

SEQ ID NO: 799253 - RNA, 19 nt, Artificial Sequence
  Description of Artificial Sequence: Synthetic oligonucleotide
  Antisense strand to SEQ ID NO: 799252
ucucccaagaccaaguugg

SEQ ID NO: 799254 - RNA, 19 nt, Artificial Sequence
  Description of Artificial Sequence: Synthetic oligonucleotide
  Sense strand starting at position 3107 of SEQ ID NO: 587533
caacuuggucuugggagau

SEQ ID NO: 799255 - RNA, 19 nt, Artificial Sequence
  Description of Artificial Sequence: Synthetic oligonucleotide
  Antisense strand to SEQ ID NO: 799254
aucucccaagaccaaguug

SEQ ID NO: 799256 - RNA, 19 nt, Artificial Sequence
  Description of Artificial Sequence: Synthetic oligonucleotide
  Sense strand starting at position 3117 of SEQ ID NO: 587533
uugggagauugcgcugaaa

SEQ ID NO: 799257 - RNA, 19 nt, Artificial Sequence
  Description of Artificial Sequence: Synthetic oligonucleotide
  Antisense strand to SEQ ID NO: 799256
uuucagcgcaaucucccaa

SEQ ID NO: 799258 - RNA, 19 nt, Artificial Sequence
  Description of Artificial Sequence: Synthetic oligonucleotide
  Sense strand starting at position 3119 of SEQ ID NO: 587533
gggagauugcgcugaaauu

SEQ ID NO: 799259 - RNA, 19 nt, Artificial Sequence
  Description of Artificial Sequence: Synthetic oligonucleotide
  Antisense strand to SEQ ID NO: 799258
aauuucagcgcaaucuccc

SEQ ID NO: 799260 - RNA, 19 nt, Artificial Sequence
  Description of Artificial Sequence: Synthetic oligonucleotide
  Sense strand starting at position 3120 of SEQ ID NO: 587533
ggagauugcgcugaaauug

SEQ ID NO: 799261 - RNA, 19 nt, Artificial Sequence
  Description of Artificial Sequence: Synthetic oligonucleotide
  Antisense strand to SEQ ID NO: 799260
caauuucagcgcaaucucc

SEQ ID NO: 799262 - RNA, 19 nt, Artificial Sequence
  Description of Artificial Sequence: Synthetic oligonucleotide
  Sense strand starting at position 3125 of SEQ ID NO: 587533
uugcgcugaaauuguuaua

SEQ ID NO: 799263 - RNA, 19 nt, Artificial Sequence
  Description of Artificial Sequence: Synthetic oligonucleotide
  Antisense strand to SEQ ID NO: 799262
uauaacaauuucagcgcaa

SEQ ID NO: 799264 - RNA, 19 nt, Artificial Sequence
  Description of Artificial Sequence: Synthetic oligonucleotide
  Sense strand starting at position 3130 of SEQ ID NO: 587533
cugaaauuguuauagggua

SEQ ID NO: 799265 - RNA, 19 nt, Artificial Sequence
  Description of Artificial Sequence: Synthetic oligonucleotide
  Antisense strand to SEQ ID NO: 799264
uacccuauaacaauuucag

SEQ ID NO: 799266 - RNA, 19 nt, Artificial Sequence
  Description of Artificial Sequence: Synthetic oligonucleotide
  Sense strand starting at position 3494 of SEQ ID NO: 587533
cgguuacaccucugggaag

SEQ ID NO: 799267 - RNA, 19 nt, Artificial Sequence
  Description of Artificial Sequence: Synthetic oligonucleotide
  Antisense strand to SEQ ID NO: 799266
cuucccagagguguaaccg

SEQ ID NO: 799268 - RNA, 19 nt, Artificial Sequence
  Description of Artificial Sequence: Synthetic oligonucleotide
  Sense strand starting at position 3511 of SEQ ID NO: 587533
agcauuaccuuggccugau

SEQ ID NO: 799269 - RNA, 19 nt, Artificial Sequence
  Description of Artificial Sequence: Synthetic oligonucleotide
  Antisense strand to SEQ ID NO: 799268
aucaggccaagguaaugcu

SEQ ID NO: 799270 - RNA, 19 nt, Artificial Sequence
  Description of Artificial Sequence: Synthetic oligonucleotide
  Sense strand starting at position 3515 of SEQ ID NO: 587533
uuaccuuggccugaugacu

SEQ ID NO: 799271 - RNA, 19 nt, Artificial Sequence
  Description of Artificial Sequence: Synthetic oligonucleotide
  Antisense strand to SEQ ID NO: 799270
agucaucaggccaagguaa

SEQ ID NO: 799272 - RNA, 19 nt, Artificial Sequence
  Description of Artificial Sequence: Synthetic oligonucleotide
  Sense strand starting at position 3613 of SEQ ID NO: 587533
gguucaacucuuggagaga

SEQ ID NO: 799273 - RNA, 19 nt, Artificial Sequence
  Description of Artificial Sequence: Synthetic oligonucleotide
  Antisense strand to SEQ ID NO: 799272
ucucuccaagaguugaacc

SEQ ID NO: 799274 - RNA, 19 nt, Artificial Sequence
  Description of Artificial Sequence: Synthetic oligonucleotide
  Sense strand starting at position 3624 of SEQ ID NO: 587533
uggagagacuggcuuaaau

SEQ ID NO: 799275 - RNA, 19 nt, Artificial Sequence
  Description of Artificial Sequence: Synthetic oligonucleotide
  Antisense strand to SEQ ID NO: 799274
auuuaagccagucucucca

SEQ ID NO: 799276 - RNA, 19 nt, Artificial Sequence
  Description of Artificial Sequence: Synthetic oligonucleotide
  Sense strand starting at position 3744 of SEQ ID NO: 587533
acuucuguacucugacaua

SEQ ID NO: 799277 - RNA, 19 nt, Artificial Sequence
  Description of Artificial Sequence: Synthetic oligonucleotide
  Antisense strand to SEQ ID NO: 799276
uaugucagaguacagaagu

SEQ ID NO: 799278 - RNA, 19 nt, Artificial Sequence
  Description of Artificial Sequence: Synthetic oligonucleotide
  Sense strand starting at position 3756 of SEQ ID NO: 587533
ugacauauaacguggauua

SEQ ID NO: 799279 - RNA, 19 nt, Artificial Sequence
  Description of Artificial Sequence: Synthetic oligonucleotide
  Antisense strand to SEQ ID NO: 799278
uaauccacguuauauguca

SEQ ID NO: 799280 - RNA, 19 nt, Artificial Sequence
  Description of Artificial Sequence: Synthetic oligonucleotide
  Sense strand starting at position 3757 of SEQ ID NO: 587533
gacauauaacguggauuaa

SEQ ID NO: 799281 - RNA, 19 nt, Artificial Sequence
  Description of Artificial Sequence: Synthetic oligonucleotide
  Antisense strand to SEQ ID NO: 799280
uuaauccacguuauauguc

SEQ ID NO: 799282 - RNA, 19 nt, Artificial Sequence
  Description of Artificial Sequence: Synthetic oligonucleotide
  Sense strand starting at position 3866 of SEQ ID NO: 587533
ucaugaauaugacacguaa

SEQ ID NO: 799283 - RNA, 19 nt, Artificial Sequence
  Description of Artificial Sequence: Synthetic oligonucleotide
  Antisense strand to SEQ ID NO: 799282
uuacgugucauauucauga

SEQ ID NO: 799284 - RNA, 19 nt, Artificial Sequence
  Description of Artificial Sequence: Synthetic oligonucleotide
  Sense strand starting at position 3868 of SEQ ID NO: 587533
augaauaugacacguaaug

SEQ ID NO: 799285 - RNA, 19 nt, Artificial Sequence
  Description of Artificial Sequence: Synthetic oligonucleotide
  Antisense strand to SEQ ID NO: 799284
cauuacgugucauauucau

SEQ ID NO: 799286 - RNA, 19 nt, Artificial Sequence
  Description of Artificial Sequence: Synthetic oligonucleotide
  Sense strand starting at position 3914 of SEQ ID NO: 587533
auuuaacugugcugugcua

SEQ ID NO: 799287 - RNA, 19 nt, Artificial Sequence
  Description of Artificial Sequence: Synthetic oligonucleotide
  Antisense strand to SEQ ID NO: 799286
uagcacagcacaguuaaau

SEQ ID NO: 799288 - RNA, 19 nt, Artificial Sequence
  Description of Artificial Sequence: Synthetic oligonucleotide
  Sense strand starting at position 3916 of SEQ ID NO: 587533
uuaacugugcugugcuaau

SEQ ID NO: 799289 - RNA, 19 nt, Artificial Sequence
  Description of Artificial Sequence: Synthetic oligonucleotide
  Antisense strand to SEQ ID NO: 799288
auuagcacagcacaguuaa

SEQ ID NO: 799290 - RNA, 19 nt, Artificial Sequence
  Description of Artificial Sequence: Synthetic oligonucleotide
  Sense strand starting at position 30 of SEQ ID NO: 587534
uuccgaaagucuuuggaau

SEQ ID NO: 799291 - RNA, 19 nt, Artificial Sequence
  Description of Artificial Sequence: Synthetic oligonucleotide
  Antisense strand to SEQ ID NO: 799290
auuccaaagacuuucggaa

SEQ ID NO: 799292 - RNA, 19 nt, Artificial Sequence
  Description of Artificial Sequence: Synthetic oligonucleotide
  Sense strand starting at position 31 of SEQ ID NO: 587534
uccgaaagucuuuggaauc

SEQ ID NO: 799293 - RNA, 19 nt, Artificial Sequence
  Description of Artificial Sequence: Synthetic oligonucleotide
  Antisense strand to SEQ ID NO: 799292
gauuccaaagacuuucgga

SEQ ID NO: 799294 - RNA, 19 nt, Artificial Sequence
  Description of Artificial Sequence: Synthetic oligonucleotide
  Sense strand starting at position 73 of SEQ ID NO: 587534
acauaagcagaauguguuu

SEQ ID NO: 799295 - RNA, 19 nt, Artificial Sequence
  Description of Artificial Sequence: Synthetic oligonucleotide
  Antisense strand to SEQ ID NO: 799294
aaacacauucugcuuaugu

SEQ ID NO: 799296 - RNA, 19 nt, Artificial Sequence
  Description of Artificial Sequence: Synthetic oligonucleotide
  Sense strand starting at position 78 of SEQ ID NO: 587534
agcagaauguguuugcuaa

SEQ ID NO: 799297 - RNA, 19 nt, Artificial Sequence
  Description of Artificial Sequence: Synthetic oligonucleotide
  Antisense strand to SEQ ID NO: 799296
uuagcaaacacauucugcu

SEQ ID NO: 799298 - RNA, 19 nt, Artificial Sequence
  Description of Artificial Sequence: Synthetic oligonucleotide
  Sense strand starting at position 80 of SEQ ID NO: 587534
cagaauguguuugcuaaug

SEQ ID NO: 799299 - RNA, 19 nt, Artificial Sequence
  Description of Artificial Sequence: Synthetic oligonucleotide
  Antisense strand to SEQ ID NO: 799298
cauuagcaaacacauucug

SEQ ID NO: 799300 - RNA, 19 nt, Artificial Sequence
  Description of Artificial Sequence: Synthetic oligonucleotide
  Sense strand starting at position 86 of SEQ ID NO: 587534
guguuugcuaaugcaaguu

SEQ ID NO: 799301 - RNA, 19 nt, Artificial Sequence
  Description of Artificial Sequence: Synthetic oligonucleotide
  Antisense strand to SEQ ID NO: 799300
aacuugcauuagcaaacac

SEQ ID NO: 799302 - RNA, 19 nt, Artificial Sequence
  Description of Artificial Sequence: Synthetic oligonucleotide
  Sense strand starting at position 227 of SEQ ID NO: 587534
accacagagcagugaaauu

SEQ ID NO: 799303 - RNA, 19 nt, Artificial Sequence
  Description of Artificial Sequence: Synthetic oligonucleotide
  Antisense strand to SEQ ID NO: 799302
aauuucacugcucuguggu

SEQ ID NO: 799304 - RNA, 19 nt, Artificial Sequence
  Description of Artificial Sequence: Synthetic oligonucleotide
  Sense strand starting at position 288 of SEQ ID NO: 587534
gcacuuggaccucaguaaa

SEQ ID NO: 799305 - RNA, 19 nt, Artificial Sequence
  Description of Artificial Sequence: Synthetic oligonucleotide
  Antisense strand to SEQ ID NO: 799304
uuuacugagguccaagugc

SEQ ID NO: 799306 - RNA, 19 nt, Artificial Sequence
  Description of Artificial Sequence: Synthetic oligonucleotide
  Sense strand starting at position 492 of SEQ ID NO: 587534
ugugaaagcuaccugaucu

SEQ ID NO: 799307 - RNA, 19 nt, Artificial Sequence
  Description of Artificial Sequence: Synthetic oligonucleotide
  Antisense strand to SEQ ID NO: 799306
agaucagguagcuuucaca

SEQ ID NO: 799308 - RNA, 19 nt, Artificial Sequence
  Description of Artificial Sequence: Synthetic oligonucleotide
  Sense strand starting at position 493 of SEQ ID NO: 587534
gugaaagcuaccugaucug

SEQ ID NO: 799309 - RNA, 19 nt, Artificial Sequence
  Description of Artificial Sequence: Synthetic oligonucleotide
  Antisense strand to SEQ ID NO: 799308
cagaucagguagcuuucac

SEQ ID NO: 799310 - RNA, 19 nt, Artificial Sequence
  Description of Artificial Sequence: Synthetic oligonucleotide
  Sense strand starting at position 509 of SEQ ID NO: 587534
cugaaucagggcugucaca

SEQ ID NO: 799311 - RNA, 19 nt, Artificial Sequence
  Description of Artificial Sequence: Synthetic oligonucleotide
  Antisense strand to SEQ ID NO: 799310
ugugacagcccugauucag

SEQ ID NO: 799312 - RNA, 19 nt, Artificial Sequence
  Description of Artificial Sequence: Synthetic oligonucleotide
  Sense strand starting at position 615 of SEQ ID NO: 587534
agaagauucuaugugcauu

SEQ ID NO: 799313 - RNA, 19 nt, Artificial Sequence
  Description of Artificial Sequence: Synthetic oligonucleotide
  Antisense strand to SEQ ID NO: 799312
aaugcacauagaaucuucu

SEQ ID NO: 799314 - RNA, 19 nt, Artificial Sequence
  Description of Artificial Sequence: Synthetic oligonucleotide
  Sense strand starting at position 766 of SEQ ID NO: 587534
ccacuaggucuaggagaug

SEQ ID NO: 799315 - RNA, 19 nt, Artificial Sequence
  Description of Artificial Sequence: Synthetic oligonucleotide
  Antisense strand to SEQ ID NO: 799314
caucuccuagaccuagugg

SEQ ID NO: 799316 - RNA, 19 nt, Artificial Sequence
  Description of Artificial Sequence: Synthetic oligonucleotide
  Sense strand starting at position 815 of SEQ ID NO: 587534
ucaggugauccacggucau

SEQ ID NO: 799317 - RNA, 19 nt, Artificial Sequence
  Description of Artificial Sequence: Synthetic oligonucleotide
  Antisense strand to SEQ ID NO: 799316
augaccguggaucaccuga

SEQ ID NO: 799318 - RNA, 19 nt, Artificial Sequence
  Description of Artificial Sequence: Synthetic oligonucleotide
  Sense strand starting at position 858 of SEQ ID NO: 587534
cuuagcagaucccuaaaga

SEQ ID NO: 799319 - RNA, 19 nt, Artificial Sequence
  Description of Artificial Sequence: Synthetic oligonucleotide
  Antisense strand to SEQ ID NO: 799318
ucuuuagggaucugcuaag

SEQ ID NO: 799320 - RNA, 19 nt, Artificial Sequence
  Description of Artificial Sequence: Synthetic oligonucleotide
  Sense strand starting at position 950 of SEQ ID NO: 587534
agauacaugcuuuguaaau

SEQ ID NO: 799321 - RNA, 19 nt, Artificial Sequence
  Description of Artificial Sequence: Synthetic oligonucleotide
  Antisense strand to SEQ ID NO: 799320
auuuacaaagcauguaucu

SEQ ID NO: 799322 - RNA, 19 nt, Artificial Sequence
  Description of Artificial Sequence: Synthetic oligonucleotide
  Sense strand starting at position 957 of SEQ ID NO: 587534
ugcuuuguaaaucguaaag

SEQ ID NO: 799323 - RNA, 19 nt, Artificial Sequence
  Description of Artificial Sequence: Synthetic oligonucleotide
  Antisense strand to SEQ ID NO: 799322
cuuuacgauuuacaaagca

SEQ ID NO: 799324 - RNA, 19 nt, Artificial Sequence
  Description of Artificial Sequence: Synthetic oligonucleotide
  Sense strand starting at position 966 of SEQ ID NO: 587534
aaucguaaagcauggacua

SEQ ID NO: 799325 - RNA, 19 nt, Artificial Sequence
  Description of Artificial Sequence: Synthetic oligonucleotide
  Antisense strand to SEQ ID NO: 799324
uaguccaugcuuuacgauu

SEQ ID NO: 799326 - RNA, 19 nt, Artificial Sequence
  Description of Artificial Sequence: Synthetic oligonucleotide
  Sense strand starting at position 967 of SEQ ID NO: 587534
aucguaaagcauggacuaa

SEQ ID NO: 799327 - RNA, 19 nt, Artificial Sequence
  Description of Artificial Sequence: Synthetic oligonucleotide
  Antisense strand to SEQ ID NO: 799326
uuaguccaugcuuuacgau

SEQ ID NO: 799328 - RNA, 19 nt, Artificial Sequence
  Description of Artificial Sequence: Synthetic oligonucleotide
  Sense strand starting at position 968 of SEQ ID NO: 587534
ucguaaagcauggacuaaa

SEQ ID NO: 799329 - RNA, 19 nt, Artificial Sequence
  Description of Artificial Sequence: Synthetic oligonucleotide
  Antisense strand to SEQ ID NO: 799328
uuuaguccaugcuuuacga

SEQ ID NO: 799330 - RNA, 19 nt, Artificial Sequence
  Description of Artificial Sequence: Synthetic oligonucleotide
  Sense strand starting at position 1015 of SEQ ID NO: 587534
cugguaucuguguacgaau

SEQ ID NO: 799331 - RNA, 19 nt, Artificial Sequence
  Description of Artificial Sequence: Synthetic oligonucleotide
  Antisense strand to SEQ ID NO: 799330
auucguacacagauaccag

SEQ ID NO: 799332 - RNA, 19 nt, Artificial Sequence
  Description of Artificial Sequence: Synthetic oligonucleotide
  Sense strand starting at position 1017 of SEQ ID NO: 587534
gguaucuguguacgaauuc

SEQ ID NO: 799333 - RNA, 19 nt, Artificial Sequence
  Description of Artificial Sequence: Synthetic oligonucleotide
  Antisense strand to SEQ ID NO: 799332
gaauucguacacagauacc

SEQ ID NO: 799334 - RNA, 19 nt, Artificial Sequence
  Description of Artificial Sequence: Synthetic oligonucleotide
  Sense strand starting at position 1062 of SEQ ID NO: 587534
uuccaaggcggaugagauu

SEQ ID NO: 799335 - RNA, 19 nt, Artificial Sequence
  Description of Artificial Sequence: Synthetic oligonucleotide
  Antisense strand to SEQ ID NO: 799334
aaucucauccgccuuggaa

SEQ ID NO: 799336 - RNA, 19 nt, Artificial Sequence
  Description of Artificial Sequence: Synthetic oligonucleotide
  Sense strand starting at position 1104 of SEQ ID NO: 587534
gcagauagcuaugcugaga

SEQ ID NO: 799337 - RNA, 19 nt, Artificial Sequence
  Description of Artificial Sequence: Synthetic oligonucleotide
  Antisense strand to SEQ ID NO: 799336
ucucagcauagcuaucugc

SEQ ID NO: 799338 - RNA, 19 nt, Artificial Sequence
  Description of Artificial Sequence: Synthetic oligonucleotide
  Sense strand starting at position 1115 of SEQ ID NO: 587534
ugcugagagcuuuaccuac

SEQ ID NO: 799339 - RNA, 19 nt, Artificial Sequence
  Description of Artificial Sequence: Synthetic oligonucleotide
  Antisense strand to SEQ ID NO: 799338
guagguaaagcucucagca

SEQ ID NO: 799340 - RNA, 19 nt, Artificial Sequence
  Description of Artificial Sequence: Synthetic oligonucleotide
  Sense strand starting at position 1169 of SEQ ID NO: 587534
ccagccuucucagcucaga

SEQ ID NO: 799341 - RNA, 19 nt, Artificial Sequence
  Description of Artificial Sequence: Synthetic oligonucleotide
  Antisense strand to SEQ ID NO: 799340
ucugagcugagaaggcugg

SEQ ID NO: 799342 - RNA, 19 nt, Artificial Sequence
  Description of Artificial Sequence: Synthetic oligonucleotide
  Sense strand starting at position 1194 of SEQ ID NO: 587534
guuauugauccggucucgu

SEQ ID NO: 799343 - RNA, 19 nt, Artificial Sequence
  Description of Artificial Sequence: Synthetic oligonucleotide
  Antisense strand to SEQ ID NO: 799342
acgagaccggaucaauaac

SEQ ID NO: 799344 - RNA, 19 nt, Artificial Sequence
  Description of Artificial Sequence: Synthetic oligonucleotide
  Sense strand starting at position 1220 of SEQ ID NO: 587534
ucucaauuaucugcagaag

SEQ ID NO: 799345 - RNA, 19 nt, Artificial Sequence
  Description of Artificial Sequence: Synthetic oligonucleotide
  Antisense strand to SEQ ID NO: 799344
cuucugcagauaauugaga

SEQ ID NO: 799346 - RNA, 19 nt, Artificial Sequence
  Description of Artificial Sequence: Synthetic oligonucleotide
  Sense strand starting at position 1256 of SEQ ID NO: 587534
aggcauuaccauuacgacu

SEQ ID NO: 799347 - RNA, 19 nt, Artificial Sequence
  Description of Artificial Sequence: Synthetic oligonucleotide
  Antisense strand to SEQ ID NO: 799346
agucguaaugguaaugccu

SEQ ID NO: 799348 - RNA, 19 nt, Artificial Sequence
  Description of Artificial Sequence: Synthetic oligonucleotide
  Sense strand starting at position 1300 of SEQ ID NO: 587534
gugguuauuuccguuaauc

SEQ ID NO: 799349 - RNA, 19 nt, Artificial Sequence
  Description of Artificial Sequence: Synthetic oligonucleotide
  Antisense strand to SEQ ID NO: 799348
gauuaacggaaauaaccac

SEQ ID NO: 799350 - RNA, 19 nt, Artificial Sequence
  Description of Artificial Sequence: Synthetic oligonucleotide
  Sense strand starting at position 1458 of SEQ ID NO: 587534
aacugaaaucgccguuaaa

SEQ ID NO: 799351 - RNA, 19 nt, Artificial Sequence
  Description of Artificial Sequence: Synthetic oligonucleotide
  Antisense strand to SEQ ID NO: 799350
uuuaacggcgauuucaguu

SEQ ID NO: 799352 - RNA, 19 nt, Artificial Sequence
  Description of Artificial Sequence: Synthetic oligonucleotide
  Sense strand starting at position 1461 of SEQ ID NO: 587534
ugaaaucgccguuaaacga

SEQ ID NO: 799353 - RNA, 19 nt, Artificial Sequence
  Description of Artificial Sequence: Synthetic oligonucleotide
  Antisense strand to SEQ ID NO: 799352
ucguuuaacggcgauuuca

SEQ ID NO: 799354 - RNA, 19 nt, Artificial Sequence
  Description of Artificial Sequence: Synthetic oligonucleotide
  Sense strand starting at position 1914 of SEQ ID NO: 587534
cacgcuuugccucugguua

SEQ ID NO: 799355 - RNA, 19 nt, Artificial Sequence
  Description of Artificial Sequence: Synthetic oligonucleotide
  Antisense strand to SEQ ID NO: 799354
uaaccagaggcaaagcgug

SEQ ID NO: 799356 - RNA, 19 nt, Artificial Sequence
  Description of Artificial Sequence: Synthetic oligonucleotide
  Sense strand starting at position 3003 of SEQ ID NO: 587534
ugggaauaaucauuaugcu

SEQ ID NO: 799357 - RNA, 19 nt, Artificial Sequence
  Description of Artificial Sequence: Synthetic oligonucleotide
  Antisense strand to SEQ ID NO: 799356
agcauaaugauuauuccca

SEQ ID NO: 799358 - RNA, 19 nt, Artificial Sequence
  Description of Artificial Sequence: Synthetic oligonucleotide
  Sense strand starting at position 3267 of SEQ ID NO: 587534
guuguaaaucucgaaacug

SEQ ID NO: 799359 - RNA, 19 nt, Artificial Sequence
  Description of Artificial Sequence: Synthetic oligonucleotide
  Antisense strand to SEQ ID NO: 799358
caguuucgagauuuacaac

SEQ ID NO: 799360 - RNA, 19 nt, Artificial Sequence
  Description of Artificial Sequence: Synthetic oligonucleotide
  Sense strand starting at position 3332 of SEQ ID NO: 587534
ggucuucugucccuuacaa

SEQ ID NO: 799361 - RNA, 19 nt, Artificial Sequence
  Description of Artificial Sequence: Synthetic oligonucleotide
  Antisense strand to SEQ ID NO: 799360
uuguaagggacagaagacc

SEQ ID NO: 799362 - RNA, 19 nt, Artificial Sequence
  Description of Artificial Sequence: Synthetic oligonucleotide
  Sense strand starting at position 3397 of SEQ ID NO: 587534
uaguccugucugugaggga

SEQ ID NO: 799363 - RNA, 19 nt, Artificial Sequence
  Description of Artificial Sequence: Synthetic oligonucleotide
  Antisense strand to SEQ ID NO: 799362
ucccucacagacaggacua

SEQ ID NO: 799364 - RNA, 19 nt, Artificial Sequence
  Description of Artificial Sequence: Synthetic oligonucleotide
  Sense strand starting at position 3420 of SEQ ID NO: 587534
uuaauauccaucggugaga

SEQ ID NO: 799365 - RNA, 19 nt, Artificial Sequence
  Description of Artificial Sequence: Synthetic oligonucleotide
  Antisense strand to SEQ ID NO: 799364
ucucaccgauggauauuaa

SEQ ID NO: 799366 - RNA, 19 nt, Artificial Sequence
  Description of Artificial Sequence: Synthetic oligonucleotide
  Sense strand starting at position 3421 of SEQ ID NO: 587534
uaauauccaucggugagaa

SEQ ID NO: 799367 - RNA, 19 nt, Artificial Sequence
  Description of Artificial Sequence: Synthetic oligonucleotide
  Antisense strand to SEQ ID NO: 799366
uucucaccgauggauauua

SEQ ID NO: 799368 - RNA, 19 nt, Artificial Sequence
  Description of Artificial Sequence: Synthetic oligonucleotide
  Sense strand starting at position 3422 of SEQ ID NO: 587534
aauauccaucggugagaau

SEQ ID NO: 799369 - RNA, 19 nt, Artificial Sequence
  Description of Artificial Sequence: Synthetic oligonucleotide
  Antisense strand to SEQ ID NO: 799368
auucucaccgauggauauu

SEQ ID NO: 799370 - RNA, 19 nt, Artificial Sequence
  Description of Artificial Sequence: Synthetic oligonucleotide
  Sense strand starting at position 129 of SEQ ID NO: 587535
cuagucuucuuucuuggau

SEQ ID NO: 799371 - RNA, 19 nt, Artificial Sequence
  Description of Artificial Sequence: Synthetic oligonucleotide
  Antisense strand to SEQ ID NO: 799370
auccaagaaagaagacuag

SEQ ID NO: 799372 - RNA, 19 nt, Artificial Sequence
  Description of Artificial Sequence: Synthetic oligonucleotide
  Sense strand starting at position 132 of SEQ ID NO: 587535
gucuucuuucuuggauaaa

SEQ ID NO: 799373 - RNA, 19 nt, Artificial Sequence
  Description of Artificial Sequence: Synthetic oligonucleotide
  Antisense strand to SEQ ID NO: 799372
uuuauccaagaaagaagac

SEQ ID NO: 799374 - RNA, 19 nt, Artificial Sequence
  Description of Artificial Sequence: Synthetic oligonucleotide
  Sense strand starting at position 135 of SEQ ID NO: 587535
uucuuucuuggauaaagcu

SEQ ID NO: 799375 - RNA, 19 nt, Artificial Sequence
  Description of Artificial Sequence: Synthetic oligonucleotide
  Antisense strand to SEQ ID NO: 799374
agcuuuauccaagaaagaa

SEQ ID NO: 799376 - RNA, 19 nt, Artificial Sequence
  Description of Artificial Sequence: Synthetic oligonucleotide
  Sense strand starting at position 144 of SEQ ID NO: 587535
ggauaaagcugaucaucug

SEQ ID NO: 799377 - RNA, 19 nt, Artificial Sequence
  Description of Artificial Sequence: Synthetic oligonucleotide
  Antisense strand to SEQ ID NO: 799376
cagaugaucagcuuuaucc

SEQ ID NO: 799378 - RNA, 19 nt, Artificial Sequence
  Description of Artificial Sequence: Synthetic oligonucleotide
  Sense strand starting at position 283 of SEQ ID NO: 587535
uaagcauagugguuuggaa

SEQ ID NO: 799379 - RNA, 19 nt, Artificial Sequence
  Description of Artificial Sequence: Synthetic oligonucleotide
  Antisense strand to SEQ ID NO: 799378
uuccaaaccacuaugcuua

SEQ ID NO: 799380 - RNA, 19 nt, Artificial Sequence
  Description of Artificial Sequence: Synthetic oligonucleotide
  Sense strand starting at position 415 of SEQ ID NO: 587535
guaaauuaggcacaguaca

SEQ ID NO: 799381 - RNA, 19 nt, Artificial Sequence
  Description of Artificial Sequence: Synthetic oligonucleotide
  Antisense strand to SEQ ID NO: 799380
uguacugugccuaauuuac

SEQ ID NO: 799382 - RNA, 19 nt, Artificial Sequence
  Description of Artificial Sequence: Synthetic oligonucleotide
  Sense strand starting at position 441 of SEQ ID NO: 587535
cacaaaguguuggcuuaua

SEQ ID NO: 799383 - RNA, 19 nt, Artificial Sequence
  Description of Artificial Sequence: Synthetic oligonucleotide
  Antisense strand to SEQ ID NO: 799382
uauaagccaacacuuugug

SEQ ID NO: 799384 - RNA, 19 nt, Artificial Sequence
  Description of Artificial Sequence: Synthetic oligonucleotide
  Sense strand starting at position 449 of SEQ ID NO: 587535
guuggcuuauacucacuau

SEQ ID NO: 799385 - RNA, 19 nt, Artificial Sequence
  Description of Artificial Sequence: Synthetic oligonucleotide
  Antisense strand to SEQ ID NO: 799384
auagugaguauaagccaac

SEQ ID NO: 799386 - RNA, 19 nt, Artificial Sequence
  Description of Artificial Sequence: Synthetic oligonucleotide
  Sense strand starting at position 633 of SEQ ID NO: 587535
acgacuuuaaggugauguu

SEQ ID NO: 799387 - RNA, 19 nt, Artificial Sequence
  Description of Artificial Sequence: Synthetic oligonucleotide
  Antisense strand to SEQ ID NO: 799386
aacaucaccuuaaagucgu

SEQ ID NO: 799388 - RNA, 19 nt, Artificial Sequence
  Description of Artificial Sequence: Synthetic oligonucleotide
  Sense strand starting at position 787 of SEQ ID NO: 587535
ggcucagugcauugggaga

SEQ ID NO: 799389 - RNA, 19 nt, Artificial Sequence
  Description of Artificial Sequence: Synthetic oligonucleotide
  Antisense strand to SEQ ID NO: 799388
ucucccaaugcacugagcc

SEQ ID NO: 799390 - RNA, 19 nt, Artificial Sequence
  Description of Artificial Sequence: Synthetic oligonucleotide
  Sense strand starting at position 1066 of SEQ ID NO: 587535
ggugauguccgaagacggu

SEQ ID NO: 799391 - RNA, 19 nt, Artificial Sequence
  Description of Artificial Sequence: Synthetic oligonucleotide
  Antisense strand to SEQ ID NO: 799390
accgucuucggacaucacc

SEQ ID NO: 799392 - RNA, 19 nt, Artificial Sequence
  Description of Artificial Sequence: Synthetic oligonucleotide
  Sense strand starting at position 1335 of SEQ ID NO: 587535
ccguuucccucauuucuua

SEQ ID NO: 799393 - RNA, 19 nt, Artificial Sequence
  Description of Artificial Sequence: Synthetic oligonucleotide
  Antisense strand to SEQ ID NO: 799392
uaagaaaugagggaaacgg

SEQ ID NO: 799394 - RNA, 19 nt, Artificial Sequence
  Description of Artificial Sequence: Synthetic oligonucleotide
  Sense strand starting at position 1418 of SEQ ID NO: 587535
uuccgaaagucuuuggaau

SEQ ID NO: 799395 - RNA, 19 nt, Artificial Sequence
  Description of Artificial Sequence: Synthetic oligonucleotide
  Antisense strand to SEQ ID NO: 799394
auuccaaagacuuucggaa

SEQ ID NO: 799396 - RNA, 19 nt, Artificial Sequence
  Description of Artificial Sequence: Synthetic oligonucleotide
  Sense strand starting at position 1419 of SEQ ID NO: 587535
uccgaaagucuuuggaauc

SEQ ID NO: 799397 - RNA, 19 nt, Artificial Sequence
  Description of Artificial Sequence: Synthetic oligonucleotide
  Antisense strand to SEQ ID NO: 799396
gauuccaaagacuuucgga

SEQ ID NO: 799398 - RNA, 19 nt, Artificial Sequence
  Description of Artificial Sequence: Synthetic oligonucleotide
  Sense strand starting at position 1461 of SEQ ID NO: 587535
acauaagcagaauguguuu

SEQ ID NO: 799399 - RNA, 19 nt, Artificial Sequence
  Description of Artificial Sequence: Synthetic oligonucleotide
  Antisense strand to SEQ ID NO: 799398
aaacacauucugcuuaugu

SEQ ID NO: 799400 - RNA, 19 nt, Artificial Sequence
  Description of Artificial Sequence: Synthetic oligonucleotide
  Sense strand starting at position 1468 of SEQ ID NO: 587535
cagaauguguuugcuaaug

SEQ ID NO: 799401 - RNA, 19 nt, Artificial Sequence
  Description of Artificial Sequence: Synthetic oligonucleotide
  Antisense strand to SEQ ID NO: 799400
cauuagcaaacacauucug

SEQ ID NO: 799402 - RNA, 19 nt, Artificial Sequence
  Description of Artificial Sequence: Synthetic oligonucleotide
  Sense strand starting at position 1474 of SEQ ID NO: 587535
guguuugcuaaugcaaguu

SEQ ID NO: 799403 - RNA, 19 nt, Artificial Sequence
  Description of Artificial Sequence: Synthetic oligonucleotide
  Antisense strand to SEQ ID NO: 799402
aacuugcauuagcaaacac

SEQ ID NO: 799404 - RNA, 19 nt, Artificial Sequence
  Description of Artificial Sequence: Synthetic oligonucleotide
  Sense strand starting at position 1615 of SEQ ID NO: 587535
accacagagcagugaaauu

SEQ ID NO: 799405 - RNA, 19 nt, Artificial Sequence
  Description of Artificial Sequence: Synthetic oligonucleotide
  Antisense strand to SEQ ID NO: 799404
aauuucacugcucuguggu

SEQ ID NO: 799406 - RNA, 19 nt, Artificial Sequence
  Description of Artificial Sequence: Synthetic oligonucleotide
  Sense strand starting at position 1676 of SEQ ID NO: 587535
gcacuuggaccucaguaaa

SEQ ID NO: 799407 - RNA, 19 nt, Artificial Sequence
  Description of Artificial Sequence: Synthetic oligonucleotide
  Antisense strand to SEQ ID NO: 799406
uuuacugagguccaagugc

SEQ ID NO: 799408 - RNA, 19 nt, Artificial Sequence
  Description of Artificial Sequence: Synthetic oligonucleotide
  Sense strand starting at position 1880 of SEQ ID NO: 587535
ugugaaagcuaccugaucu

SEQ ID NO: 799409 - RNA, 19 nt, Artificial Sequence
  Description of Artificial Sequence: Synthetic oligonucleotide
  Antisense strand to SEQ ID NO: 799408
agaucagguagcuuucaca

SEQ ID NO: 799410 - RNA, 19 nt, Artificial Sequence
  Description of Artificial Sequence: Synthetic oligonucleotide
  Sense strand starting at position 1881 of SEQ ID NO: 587535
gugaaagcuaccugaucug

SEQ ID NO: 799411 - RNA, 19 nt, Artificial Sequence
  Description of Artificial Sequence: Synthetic oligonucleotide
  Antisense strand to SEQ ID NO: 799410
cagaucagguagcuuucac

SEQ ID NO: 799412 - RNA, 19 nt, Artificial Sequence
  Description of Artificial Sequence: Synthetic oligonucleotide
  Sense strand starting at position 1897 of SEQ ID NO: 587535
cugaaucagggcugucaca

SEQ ID NO: 799413 - RNA, 19 nt, Artificial Sequence
  Description of Artificial Sequence: Synthetic oligonucleotide
  Antisense strand to SEQ ID NO: 799412
ugugacagcccugauucag

SEQ ID NO: 799414 - RNA, 19 nt, Artificial Sequence
  Description of Artificial Sequence: Synthetic oligonucleotide
  Sense strand starting at position 2003 of SEQ ID NO: 587535
agaagauucuaugugcauu

SEQ ID NO: 799415 - RNA, 19 nt, Artificial Sequence
  Description of Artificial Sequence: Synthetic oligonucleotide
  Antisense strand to SEQ ID NO: 799414
aaugcacauagaaucuucu

SEQ ID NO: 799416 - RNA, 19 nt, Artificial Sequence
  Description of Artificial Sequence: Synthetic oligonucleotide
  Sense strand starting at position 2154 of SEQ ID NO: 587535
ccacuaggucuaggagaug

SEQ ID NO: 799417 - RNA, 19 nt, Artificial Sequence
  Description of Artificial Sequence: Synthetic oligonucleotide
  Antisense strand to SEQ ID NO: 799416
caucuccuagaccuagugg

SEQ ID NO: 799418 - RNA, 19 nt, Artificial Sequence
  Description of Artificial Sequence: Synthetic oligonucleotide
  Sense strand starting at position 2203 of SEQ ID NO: 587535
ucaggugauccacggucau

SEQ ID NO: 799419 - RNA, 19 nt, Artificial Sequence
  Description of Artificial Sequence: Synthetic oligonucleotide
  Antisense strand to SEQ ID NO: 799418
augaccguggaucaccuga

SEQ ID NO: 799420 - RNA, 19 nt, Artificial Sequence
  Description of Artificial Sequence: Synthetic oligonucleotide
  Sense strand starting at position 2246 of SEQ ID NO: 587535
cuuagcagaucccuaaaga

SEQ ID NO: 799421 - RNA, 19 nt, Artificial Sequence
  Description of Artificial Sequence: Synthetic oligonucleotide
  Antisense strand to SEQ ID NO: 799420
ucuuuagggaucugcuaag

SEQ ID NO: 799422 - RNA, 19 nt, Artificial Sequence
  Description of Artificial Sequence: Synthetic oligonucleotide
  Sense strand starting at position 2338 of SEQ ID NO: 587535
agauacaugcuuuguaaau

SEQ ID NO: 799423 - RNA, 19 nt, Artificial Sequence
  Description of Artificial Sequence: Synthetic oligonucleotide
  Antisense strand to SEQ ID NO: 799422
auuuacaaagcauguaucu

SEQ ID NO: 799424 - RNA, 19 nt, Artificial Sequence
  Description of Artificial Sequence: Synthetic oligonucleotide
  Sense strand starting at position 2354 of SEQ ID NO: 587535
aaucguaaagcauggacua

SEQ ID NO: 799425 - RNA, 19 nt, Artificial Sequence
  Description of Artificial Sequence: Synthetic oligonucleotide
  Antisense strand to SEQ ID NO: 799424
uaguccaugcuuuacgauu

SEQ ID NO: 799426 - RNA, 19 nt, Artificial Sequence
  Description of Artificial Sequence: Synthetic oligonucleotide
  Sense strand starting at position 2355 of SEQ ID NO: 587535
aucguaaagcauggacuaa

SEQ ID NO: 799427 - RNA, 19 nt, Artificial Sequence
  Description of Artificial Sequence: Synthetic oligonucleotide
  Antisense strand to SEQ ID NO: 799426
uuaguccaugcuuuacgau

SEQ ID NO: 799428 - RNA, 19 nt, Artificial Sequence
  Description of Artificial Sequence: Synthetic oligonucleotide
  Sense strand starting at position 2356 of SEQ ID NO: 587535
ucguaaagcauggacuaaa

SEQ ID NO: 799429 - RNA, 19 nt, Artificial Sequence
  Description of Artificial Sequence: Synthetic oligonucleotide
  Antisense strand to SEQ ID NO: 799428
uuuaguccaugcuuuacga

SEQ ID NO: 799430 - RNA, 19 nt, Artificial Sequence
  Description of Artificial Sequence: Synthetic oligonucleotide
  Sense strand starting at position 2403 of SEQ ID NO: 587535
cugguaucuguguacgaau

SEQ ID NO: 799431 - RNA, 19 nt, Artificial Sequence
  Description of Artificial Sequence: Synthetic oligonucleotide
  Antisense strand to SEQ ID NO: 799430
auucguacacagauaccag

SEQ ID NO: 799432 - RNA, 19 nt, Artificial Sequence
  Description of Artificial Sequence: Synthetic oligonucleotide
  Sense strand starting at position 2450 of SEQ ID NO: 587535
uuccaaggcggaugagauu

SEQ ID NO: 799433 - RNA, 19 nt, Artificial Sequence
  Description of Artificial Sequence: Synthetic oligonucleotide
  Antisense strand to SEQ ID NO: 799432
aaucucauccgccuuggaa

SEQ ID NO: 799434 - RNA, 19 nt, Artificial Sequence
  Description of Artificial Sequence: Synthetic oligonucleotide
  Sense strand starting at position 2492 of SEQ ID NO: 587535
gcagauagcuaugcugaga

SEQ ID NO: 799435 - RNA, 19 nt, Artificial Sequence
  Description of Artificial Sequence: Synthetic oligonucleotide
  Antisense strand to SEQ ID NO: 799434
ucucagcauagcuaucugc

SEQ ID NO: 799436 - RNA, 19 nt, Artificial Sequence
  Description of Artificial Sequence: Synthetic oligonucleotide
  Sense strand starting at position 2503 of SEQ ID NO: 587535
ugcugagagcuuuaccuac

SEQ ID NO: 799437 - RNA, 19 nt, Artificial Sequence
  Description of Artificial Sequence: Synthetic oligonucleotide
  Antisense strand to SEQ ID NO: 799436
guagguaaagcucucagca

SEQ ID NO: 799438 - RNA, 19 nt, Artificial Sequence
  Description of Artificial Sequence: Synthetic oligonucleotide
  Sense strand starting at position 2582 of SEQ ID NO: 587535
guuauugauccggucucgu

SEQ ID NO: 799439 - RNA, 19 nt, Artificial Sequence
  Description of Artificial Sequence: Synthetic oligonucleotide
  Antisense strand to SEQ ID NO: 799438
acgagaccggaucaauaac

SEQ ID NO: 799440 - RNA, 19 nt, Artificial Sequence
  Description of Artificial Sequence: Synthetic oligonucleotide
  Sense strand starting at position 2608 of SEQ ID NO: 587535
ucucaauuaucugcagaag

SEQ ID NO: 799441 - RNA, 19 nt, Artificial Sequence
  Description of Artificial Sequence: Synthetic oligonucleotide
  Antisense strand to SEQ ID NO: 799440
cuucugcagauaauugaga

SEQ ID NO: 799442 - RNA, 19 nt, Artificial Sequence
  Description of Artificial Sequence: Synthetic oligonucleotide
  Sense strand starting at position 2644 of SEQ ID NO: 587535
aggcauuaccauuacgacu

SEQ ID NO: 799443 - RNA, 19 nt, Artificial Sequence
  Description of Artificial Sequence: Synthetic oligonucleotide
  Antisense strand to SEQ ID NO: 799442
agucguaaugguaaugccu

SEQ ID NO: 799444 - RNA, 19 nt, Artificial Sequence
  Description of Artificial Sequence: Synthetic oligonucleotide
  Sense strand starting at position 2688 of SEQ ID NO: 587535
gugguuauuuccguuaauc

SEQ ID NO: 799445 - RNA, 19 nt, Artificial Sequence
  Description of Artificial Sequence: Synthetic oligonucleotide
  Antisense strand to SEQ ID NO: 799444
gauuaacggaaauaaccac

SEQ ID NO: 799446 - RNA, 19 nt, Artificial Sequence
  Description of Artificial Sequence: Synthetic oligonucleotide
  Sense strand starting at position 2849 of SEQ ID NO: 587535
ugaaaucgccguuaaacga

SEQ ID NO: 799447 - RNA, 19 nt, Artificial Sequence
  Description of Artificial Sequence: Synthetic oligonucleotide
  Antisense strand to SEQ ID NO: 799446
ucguuuaacggcgauuuca

SEQ ID NO: 799448 - RNA, 19 nt, Artificial Sequence
  Description of Artificial Sequence: Synthetic oligonucleotide
  Sense strand starting at position 3302 of SEQ ID NO: 587535
cacgcuuugccucugguua

SEQ ID NO: 799449 - RNA, 19 nt, Artificial Sequence
  Description of Artificial Sequence: Synthetic oligonucleotide
  Antisense strand to SEQ ID NO: 799448
uaaccagaggcaaagcgug

SEQ ID NO: 799450 - RNA, 19 nt, Artificial Sequence
  Description of Artificial Sequence: Synthetic oligonucleotide
  Sense strand starting at position 812 of SEQ ID NO: 587536
ccaggcucugccuguguaa

SEQ ID NO: 799451 - RNA, 19 nt, Artificial Sequence
  Description of Artificial Sequence: Synthetic oligonucleotide
  Antisense strand to SEQ ID NO: 799450
uuacacaggcagagccugg

SEQ ID NO: 799452 - RNA, 19 nt, Artificial Sequence
  Description of Artificial Sequence: Synthetic oligonucleotide
  Sense strand starting at position 814 of SEQ ID NO: 587536
aggcucugccuguguaagu

SEQ ID NO: 799453 - RNA, 19 nt, Artificial Sequence
  Description of Artificial Sequence: Synthetic oligonucleotide
  Antisense strand to SEQ ID NO: 799452
acuuacacaggcagagccu

SEQ ID NO: 799454 - RNA, 19 nt, Artificial Sequence
  Description of Artificial Sequence: Synthetic oligonucleotide
  Sense strand starting at position 1046 of SEQ ID NO: 587536
ucgugauguccugagggau

SEQ ID NO: 799455 - RNA, 19 nt, Artificial Sequence
  Description of Artificial Sequence: Synthetic oligonucleotide
  Antisense strand to SEQ ID NO: 799454
aucccucaggacaucacga

SEQ ID NO: 799456 - RNA, 19 nt, Artificial Sequence
  Description of Artificial Sequence: Synthetic oligonucleotide
  Sense strand starting at position 2113 of SEQ ID NO: 587536
gaguuaugggucucggcgu

SEQ ID NO: 799457 - RNA, 19 nt, Artificial Sequence
  Description of Artificial Sequence: Synthetic oligonucleotide
  Antisense strand to SEQ ID NO: 799456
acgccgagacccauaacuc

SEQ ID NO: 799458 - RNA, 19 nt, Artificial Sequence
  Description of Artificial Sequence: Synthetic oligonucleotide
  Sense strand starting at position 2157 of SEQ ID NO: 587536
gacugagcgcugugauguc

SEQ ID NO: 799459 - RNA, 19 nt, Artificial Sequence
  Description of Artificial Sequence: Synthetic oligonucleotide
  Antisense strand to SEQ ID NO: 799458
gacaucacagcgcucaguc

SEQ ID NO: 799460 - RNA, 19 nt, Artificial Sequence
  Description of Artificial Sequence: Synthetic oligonucleotide
  Sense strand starting at position 2166 of SEQ ID NO: 587536
cugugaugucccgagccau

SEQ ID NO: 799461 - RNA, 19 nt, Artificial Sequence
  Description of Artificial Sequence: Synthetic oligonucleotide
  Antisense strand to SEQ ID NO: 799460
auggcucgggacaucacag

SEQ ID NO: 799462 - RNA, 19 nt, Artificial Sequence
  Description of Artificial Sequence: Synthetic oligonucleotide
  Sense strand starting at position 2368 of SEQ ID NO: 587536
aggcugucgggucagagaa

SEQ ID NO: 799463 - RNA, 19 nt, Artificial Sequence
  Description of Artificial Sequence: Synthetic oligonucleotide
  Antisense strand to SEQ ID NO: 799462
uucucugacccgacagccu

SEQ ID NO: 799464 - RNA, 19 nt, Artificial Sequence
  Description of Artificial Sequence: Synthetic oligonucleotide
  Sense strand starting at position 2563 of SEQ ID NO: 587536
gggcauuugucaggacguc

SEQ ID NO: 799465 - RNA, 19 nt, Artificial Sequence
  Description of Artificial Sequence: Synthetic oligonucleotide
  Antisense strand to SEQ ID NO: 799464
gacguccugacaaaugccc

SEQ ID NO: 799466 - RNA, 19 nt, Artificial Sequence
  Description of Artificial Sequence: Synthetic oligonucleotide
  Sense strand starting at position 2564 of SEQ ID NO: 587536
ggcauuugucaggacgucu

SEQ ID NO: 799467 - RNA, 19 nt, Artificial Sequence
  Description of Artificial Sequence: Synthetic oligonucleotide
  Antisense strand to SEQ ID NO: 799466
agacguccugacaaaugcc

SEQ ID NO: 799468 - RNA, 19 nt, Artificial Sequence
  Description of Artificial Sequence: Synthetic oligonucleotide
  Sense strand starting at position 2578 of SEQ ID NO: 587536
cgucuucagucgcaaguga

SEQ ID NO: 799469 - RNA, 19 nt, Artificial Sequence
  Description of Artificial Sequence: Synthetic oligonucleotide
  Antisense strand to SEQ ID NO: 799468
ucacuugcgacugaagacg

SEQ ID NO: 799470 - RNA, 19 nt, Artificial Sequence
  Description of Artificial Sequence: Synthetic oligonucleotide
  Sense strand starting at position 2671 of SEQ ID NO: 587536
cugcuuuauccaggagcuc

SEQ ID NO: 799471 - RNA, 19 nt, Artificial Sequence
  Description of Artificial Sequence: Synthetic oligonucleotide
  Antisense strand to SEQ ID NO: 799470
gagcuccuggauaaagcag

SEQ ID NO: 799472 - RNA, 19 nt, Artificial Sequence
  Description of Artificial Sequence: Synthetic oligonucleotide
  Sense strand starting at position 2672 of SEQ ID NO: 587536
ugcuuuauccaggagcucu

SEQ ID NO: 799473 - RNA, 19 nt, Artificial Sequence
  Description of Artificial Sequence: Synthetic oligonucleotide
  Antisense strand to SEQ ID NO: 799472
agagcuccuggauaaagca

SEQ ID NO: 799474 - RNA, 19 nt, Artificial Sequence
  Description of Artificial Sequence: Synthetic oligonucleotide
  Sense strand starting at position 2829 of SEQ ID NO: 587536
uuccauggucguggcagaa

SEQ ID NO: 799475 - RNA, 19 nt, Artificial Sequence
  Description of Artificial Sequence: Synthetic oligonucleotide
  Antisense strand to SEQ ID NO: 799474
uucugccacgaccauggaa

SEQ ID NO: 799476 - RNA, 19 nt, Artificial Sequence
  Description of Artificial Sequence: Synthetic oligonucleotide
  Sense strand starting at position 2842 of SEQ ID NO: 587536
gcagaagaguuucucuguc

SEQ ID NO: 799477 - RNA, 19 nt, Artificial Sequence
  Description of Artificial Sequence: Synthetic oligonucleotide
  Antisense strand to SEQ ID NO: 799476
gacagagaaacucuucugc

SEQ ID NO: 799478 - RNA, 19 nt, Artificial Sequence
  Description of Artificial Sequence: Synthetic oligonucleotide
  Sense strand starting at position 2848 of SEQ ID NO: 587536
gaguuucucugucccagua

SEQ ID NO: 799479 - RNA, 19 nt, Artificial Sequence
  Description of Artificial Sequence: Synthetic oligonucleotide
  Antisense strand to SEQ ID NO: 799478
uacugggacagagaaacuc

SEQ ID NO: 799480 - RNA, 19 nt, Artificial Sequence
  Description of Artificial Sequence: Synthetic oligonucleotide
  Sense strand starting at position 2850 of SEQ ID NO: 587536
guuucucugucccaguauu

SEQ ID NO: 799481 - RNA, 19 nt, Artificial Sequence
  Description of Artificial Sequence: Synthetic oligonucleotide
  Antisense strand to SEQ ID NO: 799480
aauacugggacagagaaac

SEQ ID NO: 799482 - RNA, 19 nt, Artificial Sequence
  Description of Artificial Sequence: Synthetic oligonucleotide
  Sense strand starting at position 3135 of SEQ ID NO: 587536
gcuggcaacuucuaauuau

SEQ ID NO: 799483 - RNA, 19 nt, Artificial Sequence
  Description of Artificial Sequence: Synthetic oligonucleotide
  Antisense strand to SEQ ID NO: 799482
auaauuagaaguugccagc

SEQ ID NO: 799484 - RNA, 19 nt, Artificial Sequence
  Description of Artificial Sequence: Synthetic oligonucleotide
  Sense strand starting at position 3146 of SEQ ID NO: 587536
cuaauuauuugucagagcu

SEQ ID NO: 799485 - RNA, 19 nt, Artificial Sequence
  Description of Artificial Sequence: Synthetic oligonucleotide
  Antisense strand to SEQ ID NO: 799484
agcucugacaaauaauuag

SEQ ID NO: 799486 - RNA, 19 nt, Artificial Sequence
  Description of Artificial Sequence: Synthetic oligonucleotide
  Sense strand starting at position 3160 of SEQ ID NO: 587536
gagcuaucuucccugggca

SEQ ID NO: 799487 - RNA, 19 nt, Artificial Sequence
  Description of Artificial Sequence: Synthetic oligonucleotide
  Antisense strand to SEQ ID NO: 799486
ugcccagggaagauagcuc

SEQ ID NO: 799488 - RNA, 19 nt, Artificial Sequence
  Description of Artificial Sequence: Synthetic oligonucleotide
  Sense strand starting at position 3161 of SEQ ID NO: 587536
agcuaucuucccugggcaa

SEQ ID NO: 799489 - RNA, 19 nt, Artificial Sequence
  Description of Artificial Sequence: Synthetic oligonucleotide
  Antisense strand to SEQ ID NO: 799488
uugcccagggaagauagcu

SEQ ID NO: 799490 - RNA, 19 nt, Artificial Sequence
  Description of Artificial Sequence: Synthetic oligonucleotide
  Sense strand starting at position 3924 of SEQ ID NO: 587536
uuccaaagcuucccugaga

SEQ ID NO: 799491 - RNA, 19 nt, Artificial Sequence
  Description of Artificial Sequence: Synthetic oligonucleotide
  Antisense strand to SEQ ID NO: 799490
ucucagggaagcuuuggaa

SEQ ID NO: 799492 - RNA, 19 nt, Artificial Sequence
  Description of Artificial Sequence: Synthetic oligonucleotide
  Sense strand starting at position 53 of SEQ ID NO: 587537
ccucgaaacugagcuugau

SEQ ID NO: 799493 - RNA, 19 nt, Artificial Sequence
  Description of Artificial Sequence: Synthetic oligonucleotide
  Antisense strand to SEQ ID NO: 799492
aucaagcucaguuucgagg

SEQ ID NO: 799494 - RNA, 19 nt, Artificial Sequence
  Description of Artificial Sequence: Synthetic oligonucleotide
  Sense strand starting at position 56 of SEQ ID NO: 587537
cgaaacugagcuugauguu

SEQ ID NO: 799495 - RNA, 19 nt, Artificial Sequence
  Description of Artificial Sequence: Synthetic oligonucleotide
  Antisense strand to SEQ ID NO: 799494
aacaucaagcucaguuucg

SEQ ID NO: 799496 - RNA, 19 nt, Artificial Sequence
  Description of Artificial Sequence: Synthetic oligonucleotide
  Sense strand starting at position 198 of SEQ ID NO: 587537
cgucuuggugggcaaauua

SEQ ID NO: 799497 - RNA, 19 nt, Artificial Sequence
  Description of Artificial Sequence: Synthetic oligonucleotide
  Antisense strand to SEQ ID NO: 799496
uaauuugcccaccaagacg

SEQ ID NO: 799498 - RNA, 19 nt, Artificial Sequence
  Description of Artificial Sequence: Synthetic oligonucleotide
  Sense strand starting at position 205 of SEQ ID NO: 587537
gugggcaaauuaccaaaua

SEQ ID NO: 799499 - RNA, 19 nt, Artificial Sequence
  Description of Artificial Sequence: Synthetic oligonucleotide
  Antisense strand to SEQ ID NO: 799498
uauuugguaauuugcccac

SEQ ID NO: 799500 - RNA, 19 nt, Artificial Sequence
  Description of Artificial Sequence: Synthetic oligonucleotide
  Sense strand starting at position 206 of SEQ ID NO: 587537
ugggcaaauuaccaaauaa

SEQ ID NO: 799501 - RNA, 19 nt, Artificial Sequence
  Description of Artificial Sequence: Synthetic oligonucleotide
  Antisense strand to SEQ ID NO: 799500
uuauuugguaauuugccca

SEQ ID NO: 799502 - RNA, 19 nt, Artificial Sequence
  Description of Artificial Sequence: Synthetic oligonucleotide
  Sense strand starting at position 294 of SEQ ID NO: 587537
uuuaauuucuggucuagcu

SEQ ID NO: 799503 - RNA, 19 nt, Artificial Sequence
  Description of Artificial Sequence: Synthetic oligonucleotide
  Antisense strand to SEQ ID NO: 799502
agcuagaccagaaauuaaa

SEQ ID NO: 799504 - RNA, 19 nt, Artificial Sequence
  Description of Artificial Sequence: Synthetic oligonucleotide
  Sense strand starting at position 309 of SEQ ID NO: 587537
agcucucugcucgugaguu

SEQ ID NO: 799505 - RNA, 19 nt, Artificial Sequence
  Description of Artificial Sequence: Synthetic oligonucleotide
  Antisense strand to SEQ ID NO: 799504
aacucacgagcagagagcu

SEQ ID NO: 799506 - RNA, 19 nt, Artificial Sequence
  Description of Artificial Sequence: Synthetic oligonucleotide
  Sense strand starting at position 314 of SEQ ID NO: 587537
ucugcucgugaguuaucuu

SEQ ID NO: 799507 - RNA, 19 nt, Artificial Sequence
  Description of Artificial Sequence: Synthetic oligonucleotide
  Antisense strand to SEQ ID NO: 799506
aagauaacucacgagcaga

SEQ ID NO: 799508 - RNA, 19 nt, Artificial Sequence
  Description of Artificial Sequence: Synthetic oligonucleotide
  Sense strand starting at position 323 of SEQ ID NO: 587537
gaguuaucuuugcugggca

SEQ ID NO: 799509 - RNA, 19 nt, Artificial Sequence
  Description of Artificial Sequence: Synthetic oligonucleotide
  Antisense strand to SEQ ID NO: 799508
ugcccagcaaagauaacuc

SEQ ID NO: 799510 - RNA, 19 nt, Artificial Sequence
  Description of Artificial Sequence: Synthetic oligonucleotide
  Sense strand starting at position 325 of SEQ ID NO: 587537
guuaucuuugcugggcaua

SEQ ID NO: 799511 - RNA, 19 nt, Artificial Sequence
  Description of Artificial Sequence: Synthetic oligonucleotide
  Antisense strand to SEQ ID NO: 799510
uaugcccagcaaagauaac

SEQ ID NO: 799512 - RNA, 19 nt, Artificial Sequence
  Description of Artificial Sequence: Synthetic oligonucleotide
  Sense strand starting at position 326 of SEQ ID NO: 587537
uuaucuuugcugggcauau

SEQ ID NO: 799513 - RNA, 19 nt, Artificial Sequence
  Description of Artificial Sequence: Synthetic oligonucleotide
  Antisense strand to SEQ ID NO: 799512
auaugcccagcaaagauaa

SEQ ID NO: 799514 - RNA, 19 nt, Artificial Sequence
  Description of Artificial Sequence: Synthetic oligonucleotide
  Sense strand starting at position 327 of SEQ ID NO: 587537
uaucuuugcugggcauauu

SEQ ID NO: 799515 - RNA, 19 nt, Artificial Sequence
  Description of Artificial Sequence: Synthetic oligonucleotide
  Antisense strand to SEQ ID NO: 799514
aauaugcccagcaaagaua

SEQ ID NO: 799516 - RNA, 19 nt, Artificial Sequence
  Description of Artificial Sequence: Synthetic oligonucleotide
  Sense strand starting at position 500 of SEQ ID NO: 587537
cacuacgugugauuacuau

SEQ ID NO: 799517 - RNA, 19 nt, Artificial Sequence
  Description of Artificial Sequence: Synthetic oligonucleotide
  Antisense strand to SEQ ID NO: 799516
auaguaaucacacguagug

SEQ ID NO: 799518 - RNA, 19 nt, Artificial Sequence
  Description of Artificial Sequence: Synthetic oligonucleotide
  Sense strand starting at position 504 of SEQ ID NO: 587537
acgugugauuacuauuuac

SEQ ID NO: 799519 - RNA, 19 nt, Artificial Sequence
  Description of Artificial Sequence: Synthetic oligonucleotide
  Antisense strand to SEQ ID NO: 799518
guaaauaguaaucacacgu

SEQ ID NO: 799520 - RNA, 19 nt, Artificial Sequence
  Description of Artificial Sequence: Synthetic oligonucleotide
  Sense strand starting at position 542 of SEQ ID NO: 587537
guaagugcccuuugauaag

SEQ ID NO: 799521 - RNA, 19 nt, Artificial Sequence
  Description of Artificial Sequence: Synthetic oligonucleotide
  Antisense strand to SEQ ID NO: 799520
cuuaucaaagggcacuuac

SEQ ID NO: 799522 - RNA, 19 nt, Artificial Sequence
  Description of Artificial Sequence: Synthetic oligonucleotide
  Sense strand starting at position 548 of SEQ ID NO: 587537
gcccuuugauaagcuaaua

SEQ ID NO: 799523 - RNA, 19 nt, Artificial Sequence
  Description of Artificial Sequence: Synthetic oligonucleotide
  Antisense strand to SEQ ID NO: 799522
uauuagcuuaucaaagggc

SEQ ID NO: 799524 - RNA, 19 nt, Artificial Sequence
  Description of Artificial Sequence: Synthetic oligonucleotide
  Sense strand starting at position 595 of SEQ ID NO: 587537
cgggaucagucccugacaa

SEQ ID NO: 799525 - RNA, 19 nt, Artificial Sequence
  Description of Artificial Sequence: Synthetic oligonucleotide
  Antisense strand to SEQ ID NO: 799524
uugucagggacugaucccg

SEQ ID NO: 799526 - RNA, 19 nt, Artificial Sequence
  Description of Artificial Sequence: Synthetic oligonucleotide
  Sense strand starting at position 596 of SEQ ID NO: 587537
gggaucagucccugacaaa

SEQ ID NO: 799527 - RNA, 19 nt, Artificial Sequence
  Description of Artificial Sequence: Synthetic oligonucleotide
  Antisense strand to SEQ ID NO: 799526
uuugucagggacugauccc

SEQ ID NO: 799528 - RNA, 19 nt, Artificial Sequence
  Description of Artificial Sequence: Synthetic oligonucleotide
  Sense strand starting at position 609 of SEQ ID NO: 587537
gacaaauugugaucaggca

SEQ ID NO: 799529 - RNA, 19 nt, Artificial Sequence
  Description of Artificial Sequence: Synthetic oligonucleotide
  Antisense strand to SEQ ID NO: 799528
ugccugaucacaauuuguc

SEQ ID NO: 799530 - RNA, 19 nt, Artificial Sequence
  Description of Artificial Sequence: Synthetic oligonucleotide
  Sense strand starting at position 616 of SEQ ID NO: 587537
ugugaucaggcagauuaca

SEQ ID NO: 799531 - RNA, 19 nt, Artificial Sequence
  Description of Artificial Sequence: Synthetic oligonucleotide
  Antisense strand to SEQ ID NO: 799530
uguaaucugccugaucaca

SEQ ID NO: 799532 - RNA, 19 nt, Artificial Sequence
  Description of Artificial Sequence: Synthetic oligonucleotide
  Sense strand starting at position 818 of SEQ ID NO: 587537
uucguauucugaccaagaa

SEQ ID NO: 799533 - RNA, 19 nt, Artificial Sequence
  Description of Artificial Sequence: Synthetic oligonucleotide
  Antisense strand to SEQ ID NO: 799532
uucuuggucagaauacgaa

SEQ ID NO: 799534 - RNA, 19 nt, Artificial Sequence
  Description of Artificial Sequence: Synthetic oligonucleotide
  Sense strand starting at position 819 of SEQ ID NO: 587537
ucguauucugaccaagaaa

SEQ ID NO: 799535 - RNA, 19 nt, Artificial Sequence
  Description of Artificial Sequence: Synthetic oligonucleotide
  Antisense strand to SEQ ID NO: 799534
uuucuuggucagaauacga

SEQ ID NO: 799536 - RNA, 19 nt, Artificial Sequence
  Description of Artificial Sequence: Synthetic oligonucleotide
  Sense strand starting at position 1035 of SEQ ID NO: 587537
uugugcaaucacgguauga

SEQ ID NO: 799537 - RNA, 19 nt, Artificial Sequence
  Description of Artificial Sequence: Synthetic oligonucleotide
  Antisense strand to SEQ ID NO: 799536
ucauaccgugauugcacaa

SEQ ID NO: 799538 - RNA, 19 nt, Artificial Sequence
  Description of Artificial Sequence: Synthetic oligonucleotide
  Sense strand starting at position 2199 of SEQ ID NO: 587537
gaguguuugucuucgggag

SEQ ID NO: 799539 - RNA, 19 nt, Artificial Sequence
  Description of Artificial Sequence: Synthetic oligonucleotide
  Antisense strand to SEQ ID NO: 799538
cucccgaagacaaacacuc

SEQ ID NO: 799540 - RNA, 19 nt, Artificial Sequence
  Description of Artificial Sequence: Synthetic oligonucleotide
  Sense strand starting at position 2203 of SEQ ID NO: 587537
guuugucuucgggaggaaa

SEQ ID NO: 799541 - RNA, 19 nt, Artificial Sequence
  Description of Artificial Sequence: Synthetic oligonucleotide
  Antisense strand to SEQ ID NO: 799540
uuuccucccgaagacaaac

SEQ ID NO: 799542 - RNA, 19 nt, Artificial Sequence
  Description of Artificial Sequence: Synthetic oligonucleotide
  Sense strand starting at position 2527 of SEQ ID NO: 587537
ggcuguaugccgggagaca

SEQ ID NO: 799543 - RNA, 19 nt, Artificial Sequence
  Description of Artificial Sequence: Synthetic oligonucleotide
  Antisense strand to SEQ ID NO: 799542
ugucucccggcauacagcc

SEQ ID NO: 799544 - RNA, 19 nt, Artificial Sequence
  Description of Artificial Sequence: Synthetic oligonucleotide
  Sense strand starting at position 2542 of SEQ ID NO: 587537
gacacuaucgcagguauaa

SEQ ID NO: 799545 - RNA, 19 nt, Artificial Sequence
  Description of Artificial Sequence: Synthetic oligonucleotide
  Antisense strand to SEQ ID NO: 799544
uuauaccugcgauaguguc

SEQ ID NO: 799546 - RNA, 19 nt, Artificial Sequence
  Description of Artificial Sequence: Synthetic oligonucleotide
  Sense strand starting at position 2584 of SEQ ID NO: 587537
agcagaggugcuuguaauu

SEQ ID NO: 799547 - RNA, 19 nt, Artificial Sequence
  Description of Artificial Sequence: Synthetic oligonucleotide
  Antisense strand to SEQ ID NO: 799546
aauuacaagcaccucugcu

SEQ ID NO: 799548 - RNA, 19 nt, Artificial Sequence
  Description of Artificial Sequence: Synthetic oligonucleotide
  Sense strand starting at position 2589 of SEQ ID NO: 587537
aggugcuuguaauugcaaa

SEQ ID NO: 799549 - RNA, 19 nt, Artificial Sequence
  Description of Artificial Sequence: Synthetic oligonucleotide
  Antisense strand to SEQ ID NO: 799548
uuugcaauuacaagcaccu

SEQ ID NO: 799550 - RNA, 19 nt, Artificial Sequence
  Description of Artificial Sequence: Synthetic oligonucleotide
  Sense strand starting at position 2621 of SEQ ID NO: 587537
gcugaauguccgccagcga

SEQ ID NO: 799551 - RNA, 19 nt, Artificial Sequence
  Description of Artificial Sequence: Synthetic oligonucleotide
  Antisense strand to SEQ ID NO: 799550
ucgcuggcggacauucagc

SEQ ID NO: 799552 - RNA, 19 nt, Artificial Sequence
  Description of Artificial Sequence: Synthetic oligonucleotide
  Sense strand starting at position 2683 of SEQ ID NO: 587537
ccgcauccacauggauaaa

SEQ ID NO: 799553 - RNA, 19 nt, Artificial Sequence
  Description of Artificial Sequence: Synthetic oligonucleotide
  Antisense strand to SEQ ID NO: 799552
uuuauccauguggaugcgg

SEQ ID NO: 799554 - RNA, 19 nt, Artificial Sequence
  Description of Artificial Sequence: Synthetic oligonucleotide
  Sense strand starting at position 2770 of SEQ ID NO: 587537
aauguauguuguuuaggga

SEQ ID NO: 799555 - RNA, 19 nt, Artificial Sequence
  Description of Artificial Sequence: Synthetic oligonucleotide
  Antisense strand to SEQ ID NO: 799554
ucccuaaacaacauacauu

SEQ ID NO: 799556 - RNA, 19 nt, Artificial Sequence
  Description of Artificial Sequence: Synthetic oligonucleotide
  Sense strand starting at position 2777 of SEQ ID NO: 587537
guuguuuagggacauccau

SEQ ID NO: 799557 - RNA, 19 nt, Artificial Sequence
  Description of Artificial Sequence: Synthetic oligonucleotide
  Antisense strand to SEQ ID NO: 799556
auggaugucccuaaacaac

SEQ ID NO: 799558 - RNA, 19 nt, Artificial Sequence
  Description of Artificial Sequence: Synthetic oligonucleotide
  Sense strand starting at position 2864 of SEQ ID NO: 587537
gguggagguccuugucaca

SEQ ID NO: 799559 - RNA, 19 nt, Artificial Sequence
  Description of Artificial Sequence: Synthetic oligonucleotide
  Antisense strand to SEQ ID NO: 799558
ugugacaaggaccuccacc

SEQ ID NO: 799560 - RNA, 19 nt, Artificial Sequence
  Description of Artificial Sequence: Synthetic oligonucleotide
  Sense strand starting at position 2975 of SEQ ID NO: 587537
gagccagaguucuccuagu

SEQ ID NO: 799561 - RNA, 19 nt, Artificial Sequence
  Description of Artificial Sequence: Synthetic oligonucleotide
  Antisense strand to SEQ ID NO: 799560
acuaggagaacucuggcuc

SEQ ID NO: 799562 - RNA, 19 nt, Artificial Sequence
  Description of Artificial Sequence: Synthetic oligonucleotide
  Sense strand starting at position 3023 of SEQ ID NO: 587537
ccagguucucccgaggaag

SEQ ID NO: 799563 - RNA, 19 nt, Artificial Sequence
  Description of Artificial Sequence: Synthetic oligonucleotide
  Antisense strand to SEQ ID NO: 799562
cuuccucgggagaaccugg

SEQ ID NO: 799564 - RNA, 19 nt, Artificial Sequence
  Description of Artificial Sequence: Synthetic oligonucleotide
  Sense strand starting at position 3179 of SEQ ID NO: 587537
ucuaacugccacuaggaua

SEQ ID NO: 799565 - RNA, 19 nt, Artificial Sequence
  Description of Artificial Sequence: Synthetic oligonucleotide
  Antisense strand to SEQ ID NO: 799564
uauccuaguggcaguuaga

SEQ ID NO: 799566 - RNA, 19 nt, Artificial Sequence
  Description of Artificial Sequence: Synthetic oligonucleotide
  Sense strand starting at position 3193 of SEQ ID NO: 587537
ggauaagaauagggacaaa

SEQ ID NO: 799567 - RNA, 19 nt, Artificial Sequence
  Description of Artificial Sequence: Synthetic oligonucleotide
  Antisense strand to SEQ ID NO: 799566
uuugucccuauucuuaucc

SEQ ID NO: 799568 - RNA, 19 nt, Artificial Sequence
  Description of Artificial Sequence: Synthetic oligonucleotide
  Sense strand starting at position 3339 of SEQ ID NO: 587537
accguuugauguccugaag

SEQ ID NO: 799569 - RNA, 19 nt, Artificial Sequence
  Description of Artificial Sequence: Synthetic oligonucleotide
  Antisense strand to SEQ ID NO: 799568
cuucaggacaucaaacggu

SEQ ID NO: 799570 - RNA, 19 nt, Artificial Sequence
  Description of Artificial Sequence: Synthetic oligonucleotide
  Sense strand starting at position 3778 of SEQ ID NO: 587537
aaucguuugaacggagguu

SEQ ID NO: 799571 - RNA, 19 nt, Artificial Sequence
  Description of Artificial Sequence: Synthetic oligonucleotide
  Antisense strand to SEQ ID NO: 799570
aaccuccguucaaacgauu

SEQ ID NO: 799572 - RNA, 19 nt, Artificial Sequence
  Description of Artificial Sequence: Synthetic oligonucleotide
  Sense strand starting at position 24 of SEQ ID NO: 587538
gaacuaugugaauguacua

SEQ ID NO: 799573 - RNA, 19 nt, Artificial Sequence
  Description of Artificial Sequence: Synthetic oligonucleotide
  Antisense strand to SEQ ID NO: 799572
uaguacauucacauaguuc

SEQ ID NO: 799574 - RNA, 19 nt, Artificial Sequence
  Description of Artificial Sequence: Synthetic oligonucleotide
  Sense strand starting at position 458 of SEQ ID NO: 587538
uuagaaaccuguucccaga

SEQ ID NO: 799575 - RNA, 19 nt, Artificial Sequence
  Description of Artificial Sequence: Synthetic oligonucleotide
  Antisense strand to SEQ ID NO: 799574
ucugggaacagguuucuaa

SEQ ID NO: 799576 - RNA, 19 nt, Artificial Sequence
  Description of Artificial Sequence: Synthetic oligonucleotide
  Sense strand starting at position 618 of SEQ ID NO: 587538
uucuaucaccaauggaaug

SEQ ID NO: 799577 - RNA, 19 nt, Artificial Sequence
  Description of Artificial Sequence: Synthetic oligonucleotide
  Antisense strand to SEQ ID NO: 799576
cauuccauuggugauagaa

SEQ ID NO: 799578 - RNA, 19 nt, Artificial Sequence
  Description of Artificial Sequence: Synthetic oligonucleotide
  Sense strand starting at position 623 of SEQ ID NO: 587538
ucaccaauggaauguuaca

SEQ ID NO: 799579 - RNA, 19 nt, Artificial Sequence
  Description of Artificial Sequence: Synthetic oligonucleotide
  Antisense strand to SEQ ID NO: 799578
uguaacauuccauugguga

SEQ ID NO: 799580 - RNA, 19 nt, Artificial Sequence
  Description of Artificial Sequence: Synthetic oligonucleotide
  Sense strand starting at position 649 of SEQ ID NO: 587538
uggauuuauuaagaucaca

SEQ ID NO: 799581 - RNA, 19 nt, Artificial Sequence
  Description of Artificial Sequence: Synthetic oligonucleotide
  Antisense strand to SEQ ID NO: 799580
ugugaucuuaauaaaucca

SEQ ID NO: 799582 - RNA, 19 nt, Artificial Sequence
  Description of Artificial Sequence: Synthetic oligonucleotide
  Sense strand starting at position 710 of SEQ ID NO: 587538
cauuguugugacuauuaga

SEQ ID NO: 799583 - RNA, 19 nt, Artificial Sequence
  Description of Artificial Sequence: Synthetic oligonucleotide
  Antisense strand to SEQ ID NO: 799582
ucuaauagucacaacaaug

SEQ ID NO: 799584 - RNA, 19 nt, Artificial Sequence
  Description of Artificial Sequence: Synthetic oligonucleotide
  Sense strand starting at position 718 of SEQ ID NO: 587538
ugacuauuagaguguuaga

SEQ ID NO: 799585 - RNA, 19 nt, Artificial Sequence
  Description of Artificial Sequence: Synthetic oligonucleotide
  Antisense strand to SEQ ID NO: 799584
ucuaacacucuaauaguca

SEQ ID NO: 799586 - RNA, 19 nt, Artificial Sequence
  Description of Artificial Sequence: Synthetic oligonucleotide
  Sense strand starting at position 731 of SEQ ID NO: 587538
guuagaugcggauauaauc

SEQ ID NO: 799587 - RNA, 19 nt, Artificial Sequence
  Description of Artificial Sequence: Synthetic oligonucleotide
  Antisense strand to SEQ ID NO: 799586
gauuauauccgcaucuaac

SEQ ID NO: 799588 - RNA, 19 nt, Artificial Sequence
  Description of Artificial Sequence: Synthetic oligonucleotide
  Sense strand starting at position 751 of SEQ ID NO: 587538
cugucuuaucaguagagaa

SEQ ID NO: 799589 - RNA, 19 nt, Artificial Sequence
  Description of Artificial Sequence: Synthetic oligonucleotide
  Antisense strand to SEQ ID NO: 799588
uucucuacugauaagacag

SEQ ID NO: 799590 - RNA, 19 nt, Artificial Sequence
  Description of Artificial Sequence: Synthetic oligonucleotide
  Sense strand starting at position 801 of SEQ ID NO: 587538
caagaacagugagcugaaa

SEQ ID NO: 799591 - RNA, 19 nt, Artificial Sequence
  Description of Artificial Sequence: Synthetic oligonucleotide
  Antisense strand to SEQ ID NO: 799590
uuucagcucacuguucuug

SEQ ID NO: 799592 - RNA, 19 nt, Artificial Sequence
  Description of Artificial Sequence: Synthetic oligonucleotide
  Sense strand starting at position 1102 of SEQ ID NO: 587538
gugcuauugagugccgagu

SEQ ID NO: 799593 - RNA, 19 nt, Artificial Sequence
  Description of Artificial Sequence: Synthetic oligonucleotide
  Antisense strand to SEQ ID NO: 799592
acucggcacucaauagcac

SEQ ID NO: 799594 - RNA, 19 nt, Artificial Sequence
  Description of Artificial Sequence: Synthetic oligonucleotide
  Sense strand starting at position 1285 of SEQ ID NO: 587538
gcauuugaguaggauuuau

SEQ ID NO: 799595 - RNA, 19 nt, Artificial Sequence
  Description of Artificial Sequence: Synthetic oligonucleotide
  Antisense strand to SEQ ID NO: 799594
auaaauccuacucaaaugc

SEQ ID NO: 799596 - RNA, 19 nt, Artificial Sequence
  Description of Artificial Sequence: Synthetic oligonucleotide
  Sense strand starting at position 1353 of SEQ ID NO: 587538
ugagguaggcaugaguauu

SEQ ID NO: 799597 - RNA, 19 nt, Artificial Sequence
  Description of Artificial Sequence: Synthetic oligonucleotide
  Antisense strand to SEQ ID NO: 799596
aauacucaugccuaccuca

SEQ ID NO: 799598 - RNA, 19 nt, Artificial Sequence
  Description of Artificial Sequence: Synthetic oligonucleotide
  Sense strand starting at position 1511 of SEQ ID NO: 587538
guaggaacuccgcaaauaa

SEQ ID NO: 799599 - RNA, 19 nt, Artificial Sequence
  Description of Artificial Sequence: Synthetic oligonucleotide
  Antisense strand to SEQ ID NO: 799598
uuauuugcggaguuccuac

SEQ ID NO: 799600 - RNA, 19 nt, Artificial Sequence
  Description of Artificial Sequence: Synthetic oligonucleotide
  Sense strand starting at position 1639 of SEQ ID NO: 587538
aggagaagcugguuuggaa

SEQ ID NO: 799601 - RNA, 19 nt, Artificial Sequence
  Description of Artificial Sequence: Synthetic oligonucleotide
  Antisense strand to SEQ ID NO: 799600
uuccaaaccagcuucuccu

SEQ ID NO: 799602 - RNA, 19 nt, Artificial Sequence
  Description of Artificial Sequence: Synthetic oligonucleotide
  Sense strand starting at position 1733 of SEQ ID NO: 587538
uuugcauagaugggacuua

SEQ ID NO: 799603 - RNA, 19 nt, Artificial Sequence
  Description of Artificial Sequence: Synthetic oligonucleotide
  Antisense strand to SEQ ID NO: 799602
uaagucccaucuaugcaaa

SEQ ID NO: 799604 - RNA, 19 nt, Artificial Sequence
  Description of Artificial Sequence: Synthetic oligonucleotide
  Sense strand starting at position 1819 of SEQ ID NO: 587538
ggauucugggcagaaaugu

SEQ ID NO: 799605 - RNA, 19 nt, Artificial Sequence
  Description of Artificial Sequence: Synthetic oligonucleotide
  Antisense strand to SEQ ID NO: 799604
acauuucugcccagaaucc

SEQ ID NO: 799606 - RNA, 19 nt, Artificial Sequence
  Description of Artificial Sequence: Synthetic oligonucleotide
  Sense strand starting at position 1922 of SEQ ID NO: 587538
cuguguuccaaagggacaa

SEQ ID NO: 799607 - RNA, 19 nt, Artificial Sequence
  Description of Artificial Sequence: Synthetic oligonucleotide
  Antisense strand to SEQ ID NO: 799606
uugucccuuuggaacacag

SEQ ID NO: 799608 - RNA, 19 nt, Artificial Sequence
  Description of Artificial Sequence: Synthetic oligonucleotide
  Sense strand starting at position 2081 of SEQ ID NO: 587538
agaacagugcgugaggaau

SEQ ID NO: 799609 - RNA, 19 nt, Artificial Sequence
  Description of Artificial Sequence: Synthetic oligonucleotide
  Antisense strand to SEQ ID NO: 799608
auuccucacgcacuguucu

SEQ ID NO: 799610 - RNA, 19 nt, Artificial Sequence
  Description of Artificial Sequence: Synthetic oligonucleotide
  Sense strand starting at position 2202 of SEQ ID NO: 587538
guugauuucuuguuugcag

SEQ ID NO: 799611 - RNA, 19 nt, Artificial Sequence
  Description of Artificial Sequence: Synthetic oligonucleotide
  Antisense strand to SEQ ID NO: 799610
cugcaaacaagaaaucaac

SEQ ID NO: 799612 - RNA, 19 nt, Artificial Sequence
  Description of Artificial Sequence: Synthetic oligonucleotide
  Sense strand starting at position 2203 of SEQ ID NO: 587538
uugauuucuuguuugcagu

SEQ ID NO: 799613 - RNA, 19 nt, Artificial Sequence
  Description of Artificial Sequence: Synthetic oligonucleotide
  Antisense strand to SEQ ID NO: 799612
acugcaaacaagaaaucaa

SEQ ID NO: 799614 - RNA, 19 nt, Artificial Sequence
  Description of Artificial Sequence: Synthetic oligonucleotide
  Sense strand starting at position 2204 of SEQ ID NO: 587538
ugauuucuuguuugcagua

SEQ ID NO: 799615 - RNA, 19 nt, Artificial Sequence
  Description of Artificial Sequence: Synthetic oligonucleotide
  Antisense strand to SEQ ID NO: 799614
uacugcaaacaagaaauca

SEQ ID NO: 799616 - RNA, 19 nt, Artificial Sequence
  Description of Artificial Sequence: Synthetic oligonucleotide
  Sense strand starting at position 2205 of SEQ ID NO: 587538
gauuucuuguuugcaguau

SEQ ID NO: 799617 - RNA, 19 nt, Artificial Sequence
  Description of Artificial Sequence: Synthetic oligonucleotide
  Antisense strand to SEQ ID NO: 799616
auacugcaaacaagaaauc

SEQ ID NO: 799618 - RNA, 19 nt, Artificial Sequence
  Description of Artificial Sequence: Synthetic oligonucleotide
  Sense strand starting at position 2361 of SEQ ID NO: 587538
gggagagagcugugggauu

SEQ ID NO: 799619 - RNA, 19 nt, Artificial Sequence
  Description of Artificial Sequence: Synthetic oligonucleotide
  Antisense strand to SEQ ID NO: 799618
aaucccacagcucucuccc

SEQ ID NO: 799620 - RNA, 19 nt, Artificial Sequence
  Description of Artificial Sequence: Synthetic oligonucleotide
  Sense strand starting at position 2363 of SEQ ID NO: 587538
gagagagcugugggauuau

SEQ ID NO: 799621 - RNA, 19 nt, Artificial Sequence
  Description of Artificial Sequence: Synthetic oligonucleotide
  Antisense strand to SEQ ID NO: 799620
auaaucccacagcucucuc

SEQ ID NO: 799622 - RNA, 19 nt, Artificial Sequence
  Description of Artificial Sequence: Synthetic oligonucleotide
  Sense strand starting at position 2374 of SEQ ID NO: 587538
gggauuaugcaccaacucu

SEQ ID NO: 799623 - RNA, 19 nt, Artificial Sequence
  Description of Artificial Sequence: Synthetic oligonucleotide
  Antisense strand to SEQ ID NO: 799622
agaguuggugcauaauccc

SEQ ID NO: 799624 - RNA, 19 nt, Artificial Sequence
  Description of Artificial Sequence: Synthetic oligonucleotide
  Sense strand starting at position 2546 of SEQ ID NO: 587538
ggcuguugagaugggaaau

SEQ ID NO: 799625 - RNA, 19 nt, Artificial Sequence
  Description of Artificial Sequence: Synthetic oligonucleotide
  Antisense strand to SEQ ID NO: 799624
auuucccaucucaacagcc

SEQ ID NO: 799626 - RNA, 19 nt, Artificial Sequence
  Description of Artificial Sequence: Synthetic oligonucleotide
  Sense strand starting at position 2547 of SEQ ID NO: 587538
gcuguugagaugggaaaua

SEQ ID NO: 799627 - RNA, 19 nt, Artificial Sequence
  Description of Artificial Sequence: Synthetic oligonucleotide
  Antisense strand to SEQ ID NO: 799626
uauuucccaucucaacagc

SEQ ID NO: 799628 - RNA, 19 nt, Artificial Sequence
  Description of Artificial Sequence: Synthetic oligonucleotide
  Sense strand starting at position 2736 of SEQ ID NO: 587538
auugaauaauggcuaacau

SEQ ID NO: 799629 - RNA, 19 nt, Artificial Sequence
  Description of Artificial Sequence: Synthetic oligonucleotide
  Antisense strand to SEQ ID NO: 799628
auguuagccauuauucaau

SEQ ID NO: 799630 - RNA, 19 nt, Artificial Sequence
  Description of Artificial Sequence: Synthetic oligonucleotide
  Sense strand starting at position 2795 of SEQ ID NO: 587538
cuaucugaugcauacuuga

SEQ ID NO: 799631 - RNA, 19 nt, Artificial Sequence
  Description of Artificial Sequence: Synthetic oligonucleotide
  Antisense strand to SEQ ID NO: 799630
ucaaguaugcaucagauag

SEQ ID NO: 799632 - RNA, 19 nt, Artificial Sequence
  Description of Artificial Sequence: Synthetic oligonucleotide
  Sense strand starting at position 2798 of SEQ ID NO: 587538
ucugaugcauacuugauaa

SEQ ID NO: 799633 - RNA, 19 nt, Artificial Sequence
  Description of Artificial Sequence: Synthetic oligonucleotide
  Antisense strand to SEQ ID NO: 799632
uuaucaaguaugcaucaga

SEQ ID NO: 799634 - RNA, 19 nt, Artificial Sequence
  Description of Artificial Sequence: Synthetic oligonucleotide
  Sense strand starting at position 2800 of SEQ ID NO: 587538
ugaugcauacuugauaacu

SEQ ID NO: 799635 - RNA, 19 nt, Artificial Sequence
  Description of Artificial Sequence: Synthetic oligonucleotide
  Antisense strand to SEQ ID NO: 799634
aguuaucaaguaugcauca

SEQ ID NO: 799636 - RNA, 19 nt, Artificial Sequence
  Description of Artificial Sequence: Synthetic oligonucleotide
  Sense strand starting at position 2892 of SEQ ID NO: 587538
ggagaaauuuaccauuggu

SEQ ID NO: 799637 - RNA, 19 nt, Artificial Sequence
  Description of Artificial Sequence: Synthetic oligonucleotide
  Antisense strand to SEQ ID NO: 799636
accaaugguaaauuucucc

SEQ ID NO: 799638 - RNA, 19 nt, Artificial Sequence
  Description of Artificial Sequence: Synthetic oligonucleotide
  Sense strand starting at position 2933 of SEQ ID NO: 587538
ggugaauugggcgggaaga

SEQ ID NO: 799639 - RNA, 19 nt, Artificial Sequence
  Description of Artificial Sequence: Synthetic oligonucleotide
  Antisense strand to SEQ ID NO: 799638
ucuucccgcccaauucacc

SEQ ID NO: 799640 - RNA, 19 nt, Artificial Sequence
  Description of Artificial Sequence: Synthetic oligonucleotide
  Sense strand starting at position 2934 of SEQ ID NO: 587538
gugaauugggcgggaagaa

SEQ ID NO: 799641 - RNA, 19 nt, Artificial Sequence
  Description of Artificial Sequence: Synthetic oligonucleotide
  Antisense strand to SEQ ID NO: 799640
uucuucccgcccaauucac

SEQ ID NO: 799642 - RNA, 19 nt, Artificial Sequence
  Description of Artificial Sequence: Synthetic oligonucleotide
  Sense strand starting at position 3120 of SEQ ID NO: 587538
agcuaugugacuggcauuu

SEQ ID NO: 799643 - RNA, 19 nt, Artificial Sequence
  Description of Artificial Sequence: Synthetic oligonucleotide
  Antisense strand to SEQ ID NO: 799642
aaaugccagucacauagcu

SEQ ID NO: 799644 - RNA, 19 nt, Artificial Sequence
  Description of Artificial Sequence: Synthetic oligonucleotide
  Sense strand starting at position 3126 of SEQ ID NO: 587538
gugacuggcauuuguucua

SEQ ID NO: 799645 - RNA, 19 nt, Artificial Sequence
  Description of Artificial Sequence: Synthetic oligonucleotide
  Antisense strand to SEQ ID NO: 799644
uagaacaaaugccagucac

SEQ ID NO: 799646 - RNA, 19 nt, Artificial Sequence
  Description of Artificial Sequence: Synthetic oligonucleotide
  Sense strand starting at position 3694 of SEQ ID NO: 587538
agucauaacuacuuugaag

SEQ ID NO: 799647 - RNA, 19 nt, Artificial Sequence
  Description of Artificial Sequence: Synthetic oligonucleotide
  Antisense strand to SEQ ID NO: 799646
cuucaaaguaguuaugacu

SEQ ID NO: 799648 - RNA, 19 nt, Artificial Sequence
  Description of Artificial Sequence: Synthetic oligonucleotide
  Sense strand starting at position 3741 of SEQ ID NO: 587538
aaauauggugcuuaguaca

SEQ ID NO: 799649 - RNA, 19 nt, Artificial Sequence
  Description of Artificial Sequence: Synthetic oligonucleotide
  Antisense strand to SEQ ID NO: 799648
uguacuaagcaccauauuu

SEQ ID NO: 799650 - RNA, 19 nt, Artificial Sequence
  Description of Artificial Sequence: Synthetic oligonucleotide
  Sense strand starting at position 3752 of SEQ ID NO: 587538
uuaguacaaucucuggaau

SEQ ID NO: 799651 - RNA, 19 nt, Artificial Sequence
  Description of Artificial Sequence: Synthetic oligonucleotide
  Antisense strand to SEQ ID NO: 799650
auuccagagauuguacuaa

SEQ ID NO: 799652 - RNA, 19 nt, Artificial Sequence
  Description of Artificial Sequence: Synthetic oligonucleotide
  Sense strand starting at position 3 of SEQ ID NO: 587539
ccuaguguguuauuaaaua

SEQ ID NO: 799653 - RNA, 19 nt, Artificial Sequence
  Description of Artificial Sequence: Synthetic oligonucleotide
  Antisense strand to SEQ ID NO: 799652
uauuuaauaacacacuagg

SEQ ID NO: 799654 - RNA, 19 nt, Artificial Sequence
  Description of Artificial Sequence: Synthetic oligonucleotide
  Sense strand starting at position 34 of SEQ ID NO: 587539
agaaauaagagauguugca

SEQ ID NO: 799655 - RNA, 19 nt, Artificial Sequence
  Description of Artificial Sequence: Synthetic oligonucleotide
  Antisense strand to SEQ ID NO: 799654
ugcaacaucucuuauuucu

SEQ ID NO: 799656 - RNA, 19 nt, Artificial Sequence
  Description of Artificial Sequence: Synthetic oligonucleotide
  Sense strand starting at position 188 of SEQ ID NO: 587539
cacugcaauccugauguga

SEQ ID NO: 799657 - RNA, 19 nt, Artificial Sequence
  Description of Artificial Sequence: Synthetic oligonucleotide
  Antisense strand to SEQ ID NO: 799656
ucacaucaggauugcagug

SEQ ID NO: 799658 - RNA, 19 nt, Artificial Sequence
  Description of Artificial Sequence: Synthetic oligonucleotide
  Sense strand starting at position 318 of SEQ ID NO: 587539
cgguauuauguccaacaga

SEQ ID NO: 799659 - RNA, 19 nt, Artificial Sequence
  Description of Artificial Sequence: Synthetic oligonucleotide
  Antisense strand to SEQ ID NO: 799658
ucuguuggacauaauaccg

SEQ ID NO: 799660 - RNA, 19 nt, Artificial Sequence
  Description of Artificial Sequence: Synthetic oligonucleotide
  Sense strand starting at position 483 of SEQ ID NO: 587539
uuauaugauacauggguga

SEQ ID NO: 799661 - RNA, 19 nt, Artificial Sequence
  Description of Artificial Sequence: Synthetic oligonucleotide
  Antisense strand to SEQ ID NO: 799660
ucacccauguaucauauaa

SEQ ID NO: 799662 - RNA, 19 nt, Artificial Sequence
  Description of Artificial Sequence: Synthetic oligonucleotide
  Sense strand starting at position 485 of SEQ ID NO: 587539
auaugauacaugggugauu

SEQ ID NO: 799663 - RNA, 19 nt, Artificial Sequence
  Description of Artificial Sequence: Synthetic oligonucleotide
  Antisense strand to SEQ ID NO: 799662
aaucacccauguaucauau

SEQ ID NO: 799664 - RNA, 19 nt, Artificial Sequence
  Description of Artificial Sequence: Synthetic oligonucleotide
  Sense strand starting at position 1259 of SEQ ID NO: 587539
cgaggacucgcgcugucua

SEQ ID NO: 799665 - RNA, 19 nt, Artificial Sequence
  Description of Artificial Sequence: Synthetic oligonucleotide
  Antisense strand to SEQ ID NO: 799664
uagacagcgcgaguccucg

SEQ ID NO: 799666 - RNA, 19 nt, Artificial Sequence
  Description of Artificial Sequence: Synthetic oligonucleotide
  Sense strand starting at position 2027 of SEQ ID NO: 587539
ggcgucccugggaguugua

SEQ ID NO: 799667 - RNA, 19 nt, Artificial Sequence
  Description of Artificial Sequence: Synthetic oligonucleotide
  Antisense strand to SEQ ID NO: 799666
uacaacucccagggacgcc

SEQ ID NO: 799668 - RNA, 19 nt, Artificial Sequence
  Description of Artificial Sequence: Synthetic oligonucleotide
  Sense strand starting at position 2290 of SEQ ID NO: 587539
gaggcguucggagaggaaa

SEQ ID NO: 799669 - RNA, 19 nt, Artificial Sequence
  Description of Artificial Sequence: Synthetic oligonucleotide
  Antisense strand to SEQ ID NO: 799668
uuuccucuccgaacgccuc

SEQ ID NO: 799670 - RNA, 19 nt, Artificial Sequence
  Description of Artificial Sequence: Synthetic oligonucleotide
  Sense strand starting at position 2439 of SEQ ID NO: 587539
cggagauugcaccggaaga

SEQ ID NO: 799671 - RNA, 19 nt, Artificial Sequence
  Description of Artificial Sequence: Synthetic oligonucleotide
  Antisense strand to SEQ ID NO: 799670
ucuuccggugcaaucuccg

SEQ ID NO: 799672 - RNA, 19 nt, Artificial Sequence
  Description of Artificial Sequence: Synthetic oligonucleotide
  Sense strand starting at position 2440 of SEQ ID NO: 587539
ggagauugcaccggaagac

SEQ ID NO: 799673 - RNA, 19 nt, Artificial Sequence
  Description of Artificial Sequence: Synthetic oligonucleotide
  Antisense strand to SEQ ID NO: 799672
gucuuccggugcaaucucc

SEQ ID NO: 799674 - RNA, 19 nt, Artificial Sequence
  Description of Artificial Sequence: Synthetic oligonucleotide
  Sense strand starting at position 2474 of SEQ ID NO: 587539
ggaguucagugacugcuau

SEQ ID NO: 799675 - RNA, 19 nt, Artificial Sequence
  Description of Artificial Sequence: Synthetic oligonucleotide
  Antisense strand to SEQ ID NO: 799674
auagcagucacugaacucc

SEQ ID NO: 799676 - RNA, 19 nt, Artificial Sequence
  Description of Artificial Sequence: Synthetic oligonucleotide
  Sense strand starting at position 2622 of SEQ ID NO: 587539
agcaauuauugagcuggaa

SEQ ID NO: 799677 - RNA, 19 nt, Artificial Sequence
  Description of Artificial Sequence: Synthetic oligonucleotide
  Antisense strand to SEQ ID NO: 799676
uuccagcucaauaauugcu

SEQ ID NO: 799678 - RNA, 19 nt, Artificial Sequence
  Description of Artificial Sequence: Synthetic oligonucleotide
  Sense strand starting at position 2625 of SEQ ID NO: 587539
aauuauugagcuggaaagu

SEQ ID NO: 799679 - RNA, 19 nt, Artificial Sequence
  Description of Artificial Sequence: Synthetic oligonucleotide
  Antisense strand to SEQ ID NO: 799678
acuuuccagcucaauaauu

SEQ ID NO: 799680 - RNA, 19 nt, Artificial Sequence
  Description of Artificial Sequence: Synthetic oligonucleotide
  Sense strand starting at position 2670 of SEQ ID NO: 587539
uguuguugagaagguuuga

SEQ ID NO: 799681 - RNA, 19 nt, Artificial Sequence
  Description of Artificial Sequence: Synthetic oligonucleotide
  Antisense strand to SEQ ID NO: 799680
ucaaaccuucucaacaaca

SEQ ID NO: 799682 - RNA, 19 nt, Artificial Sequence
  Description of Artificial Sequence: Synthetic oligonucleotide
  Sense strand starting at position 2834 of SEQ ID NO: 587539
ccacgugaggguuauaaua

SEQ ID NO: 799683 - RNA, 19 nt, Artificial Sequence
  Description of Artificial Sequence: Synthetic oligonucleotide
  Antisense strand to SEQ ID NO: 799682
uauuauaacccucacgugg

SEQ ID NO: 799684 - RNA, 19 nt, Artificial Sequence
  Description of Artificial Sequence: Synthetic oligonucleotide
  Sense strand starting at position 2842 of SEQ ID NO: 587539
ggguuauaauaggcuguua

SEQ ID NO: 799685 - RNA, 19 nt, Artificial Sequence
  Description of Artificial Sequence: Synthetic oligonucleotide
  Antisense strand to SEQ ID NO: 799684
uaacagccuauuauaaccc

SEQ ID NO: 799686 - RNA, 19 nt, Artificial Sequence
  Description of Artificial Sequence: Synthetic oligonucleotide
  Sense strand starting at position 2844 of SEQ ID NO: 587539
guuauaauaggcuguuaac

SEQ ID NO: 799687 - RNA, 19 nt, Artificial Sequence
  Description of Artificial Sequence: Synthetic oligonucleotide
  Antisense strand to SEQ ID NO: 799686
guuaacagccuauuauaac

SEQ ID NO: 799688 - RNA, 19 nt, Artificial Sequence
  Description of Artificial Sequence: Synthetic oligonucleotide
  Sense strand starting at position 2874 of SEQ ID NO: 587539
auucgauuggcgcuugagu

SEQ ID NO: 799689 - RNA, 19 nt, Artificial Sequence
  Description of Artificial Sequence: Synthetic oligonucleotide
  Antisense strand to SEQ ID NO: 799688
acucaagcgccaaucgaau

SEQ ID NO: 799690 - RNA, 19 nt, Artificial Sequence
  Description of Artificial Sequence: Synthetic oligonucleotide
  Sense strand starting at position 2875 of SEQ ID NO: 587539
uucgauuggcgcuugagua

SEQ ID NO: 799691 - RNA, 19 nt, Artificial Sequence
  Description of Artificial Sequence: Synthetic oligonucleotide
  Antisense strand to SEQ ID NO: 799690
uacucaagcgccaaucgaa

SEQ ID NO: 799692 - RNA, 19 nt, Artificial Sequence
  Description of Artificial Sequence: Synthetic oligonucleotide
  Sense strand starting at position 2909 of SEQ ID NO: 587539
guuguugagacuggcuaga

SEQ ID NO: 799693 - RNA, 19 nt, Artificial Sequence
  Description of Artificial Sequence: Synthetic oligonucleotide
  Antisense strand to SEQ ID NO: 799692
ucuagccagucucaacaac

SEQ ID NO: 799694 - RNA, 19 nt, Artificial Sequence
  Description of Artificial Sequence: Synthetic oligonucleotide
  Sense strand starting at position 2911 of SEQ ID NO: 587539
uguugagacuggcuagauu

SEQ ID NO: 799695 - RNA, 19 nt, Artificial Sequence
  Description of Artificial Sequence: Synthetic oligonucleotide
  Antisense strand to SEQ ID NO: 799694
aaucuagccagucucaaca

SEQ ID NO: 799696 - RNA, 19 nt, Artificial Sequence
  Description of Artificial Sequence: Synthetic oligonucleotide
  Sense strand starting at position 2953 of SEQ ID NO: 587539
agcagaacguaaucacuua

SEQ ID NO: 799697 - RNA, 19 nt, Artificial Sequence
  Description of Artificial Sequence: Synthetic oligonucleotide
  Antisense strand to SEQ ID NO: 799696
uaagugauuacguucugcu

SEQ ID NO: 799698 - RNA, 19 nt, Artificial Sequence
  Description of Artificial Sequence: Synthetic oligonucleotide
  Sense strand starting at position 2995 of SEQ ID NO: 587539
ccucacugcccuuggaauu

SEQ ID NO: 799699 - RNA, 19 nt, Artificial Sequence
  Description of Artificial Sequence: Synthetic oligonucleotide
  Antisense strand to SEQ ID NO: 799698
aauuccaagggcagugagg

SEQ ID NO: 799700 - RNA, 19 nt, Artificial Sequence
  Description of Artificial Sequence: Synthetic oligonucleotide
  Sense strand starting at position 3032 of SEQ ID NO: 587539
uggagaaguugagucuuaa

SEQ ID NO: 799701 - RNA, 19 nt, Artificial Sequence
  Description of Artificial Sequence: Synthetic oligonucleotide
  Antisense strand to SEQ ID NO: 799700
uuaagacucaacuucucca

SEQ ID NO: 799702 - RNA, 19 nt, Artificial Sequence
  Description of Artificial Sequence: Synthetic oligonucleotide
  Sense strand starting at position 3070 of SEQ ID NO: 587539
ugggcagagaaguguuaua

SEQ ID NO: 799703 - RNA, 19 nt, Artificial Sequence
  Description of Artificial Sequence: Synthetic oligonucleotide
  Antisense strand to SEQ ID NO: 799702
uauaacacuucucugccca

SEQ ID NO: 799704 - RNA, 19 nt, Artificial Sequence
  Description of Artificial Sequence: Synthetic oligonucleotide
  Sense strand starting at position 3077 of SEQ ID NO: 587539
agaaguguuauaugguauu

SEQ ID NO: 799705 - RNA, 19 nt, Artificial Sequence
  Description of Artificial Sequence: Synthetic oligonucleotide
  Antisense strand to SEQ ID NO: 799704
aauaccauauaacacuucu

SEQ ID NO: 799706 - RNA, 19 nt, Artificial Sequence
  Description of Artificial Sequence: Synthetic oligonucleotide
  Sense strand starting at position 3083 of SEQ ID NO: 587539
guuauaugguauuccauuc

SEQ ID NO: 799707 - RNA, 19 nt, Artificial Sequence
  Description of Artificial Sequence: Synthetic oligonucleotide
  Antisense strand to SEQ ID NO: 799706
gaauggaauaccauauaac

SEQ ID NO: 799708 - RNA, 19 nt, Artificial Sequence
  Description of Artificial Sequence: Synthetic oligonucleotide
  Sense strand starting at position 3145 of SEQ ID NO: 587539
cucgguauaccugaagucu

SEQ ID NO: 799709 - RNA, 19 nt, Artificial Sequence
  Description of Artificial Sequence: Synthetic oligonucleotide
  Antisense strand to SEQ ID NO: 799708
agacuucagguauaccgag

SEQ ID NO: 799710 - RNA, 19 nt, Artificial Sequence
  Description of Artificial Sequence: Synthetic oligonucleotide
  Sense strand starting at position 3207 of SEQ ID NO: 587539
gaccuuugauuugagccau

SEQ ID NO: 799711 - RNA, 19 nt, Artificial Sequence
  Description of Artificial Sequence: Synthetic oligonucleotide
  Antisense strand to SEQ ID NO: 799710
auggcucaaaucaaagguc

SEQ ID NO: 799712 - RNA, 19 nt, Artificial Sequence
  Description of Artificial Sequence: Synthetic oligonucleotide
  Sense strand starting at position 3222 of SEQ ID NO: 587539
ccauuugacucauugugca

SEQ ID NO: 799713 - RNA, 19 nt, Artificial Sequence
  Description of Artificial Sequence: Synthetic oligonucleotide
  Antisense strand to SEQ ID NO: 799712
ugcacaaugagucaaaugg

SEQ ID NO: 799714 - RNA, 19 nt, Artificial Sequence
  Description of Artificial Sequence: Synthetic oligonucleotide
  Sense strand starting at position 3227 of SEQ ID NO: 587539
ugacucauugugcacacaa

SEQ ID NO: 799715 - RNA, 19 nt, Artificial Sequence
  Description of Artificial Sequence: Synthetic oligonucleotide
  Antisense strand to SEQ ID NO: 799714
uugugugcacaaugaguca

SEQ ID NO: 799716 - RNA, 19 nt, Artificial Sequence
  Description of Artificial Sequence: Synthetic oligonucleotide
  Sense strand starting at position 3229 of SEQ ID NO: 587539
acucauugugcacacaagu

SEQ ID NO: 799717 - RNA, 19 nt, Artificial Sequence
  Description of Artificial Sequence: Synthetic oligonucleotide
  Antisense strand to SEQ ID NO: 799716
acuugugugcacaaugagu

SEQ ID NO: 799718 - RNA, 19 nt, Artificial Sequence
  Description of Artificial Sequence: Synthetic oligonucleotide
  Sense strand starting at position 3294 of SEQ ID NO: 587539
uagaaaggcaggugugaaa

SEQ ID NO: 799719 - RNA, 19 nt, Artificial Sequence
  Description of Artificial Sequence: Synthetic oligonucleotide
  Antisense strand to SEQ ID NO: 799718
uuucacaccugccuuucua

SEQ ID NO: 799720 - RNA, 19 nt, Artificial Sequence
  Description of Artificial Sequence: Synthetic oligonucleotide
  Sense strand starting at position 3514 of SEQ ID NO: 587539
cugaacaugcuuugccaaa

SEQ ID NO: 799721 - RNA, 19 nt, Artificial Sequence
  Description of Artificial Sequence: Synthetic oligonucleotide
  Antisense strand to SEQ ID NO: 799720
uuuggcaaagcauguucag

SEQ ID NO: 799722 - RNA, 19 nt, Artificial Sequence
  Description of Artificial Sequence: Synthetic oligonucleotide
  Sense strand starting at position 3556 of SEQ ID NO: 587539
cuugauaaucauugugcua

SEQ ID NO: 799723 - RNA, 19 nt, Artificial Sequence
  Description of Artificial Sequence: Synthetic oligonucleotide
  Antisense strand to SEQ ID NO: 799722
uagcacaaugauuaucaag

SEQ ID NO: 799724 - RNA, 19 nt, Artificial Sequence
  Description of Artificial Sequence: Synthetic oligonucleotide
  Sense strand starting at position 3607 of SEQ ID NO: 587539
ugcgaagucagagaaagua

SEQ ID NO: 799725 - RNA, 19 nt, Artificial Sequence
  Description of Artificial Sequence: Synthetic oligonucleotide
  Antisense strand to SEQ ID NO: 799724
uacuuucucugacuucgca

SEQ ID NO: 799726 - RNA, 19 nt, Artificial Sequence
  Description of Artificial Sequence: Synthetic oligonucleotide
  Sense strand starting at position 3656 of SEQ ID NO: 587539
ccguauaaaucuguuuaua

SEQ ID NO: 799727 - RNA, 19 nt, Artificial Sequence
  Description of Artificial Sequence: Synthetic oligonucleotide
  Antisense strand to SEQ ID NO: 799726
uauaaacagauuuauacgg

SEQ ID NO: 799728 - RNA, 19 nt, Artificial Sequence
  Description of Artificial Sequence: Synthetic oligonucleotide
  Sense strand starting at position 3682 of SEQ ID NO: 587539
aaggaugcgggucacuaaa

SEQ ID NO: 799729 - RNA, 19 nt, Artificial Sequence
  Description of Artificial Sequence: Synthetic oligonucleotide
  Antisense strand to SEQ ID NO: 799728
uuuagugacccgcauccuu

SEQ ID NO: 799730 - RNA, 19 nt, Artificial Sequence
  Description of Artificial Sequence: Synthetic oligonucleotide
  Sense strand starting at position 3692 of SEQ ID NO: 587539
gucacuaaaccuugagaau

SEQ ID NO: 799731 - RNA, 19 nt, Artificial Sequence
  Description of Artificial Sequence: Synthetic oligonucleotide
  Antisense strand to SEQ ID NO: 799730
auucucaagguuuagugac

SEQ ID NO: 799732 - RNA, 19 nt, Artificial Sequence
  Description of Artificial Sequence: Synthetic oligonucleotide
  Sense strand starting at position 18 of SEQ ID NO: 587540
cccuuaucugugugaauga

SEQ ID NO: 799733 - RNA, 19 nt, Artificial Sequence
  Description of Artificial Sequence: Synthetic oligonucleotide
  Antisense strand to SEQ ID NO: 799732
ucauucacacagauaaggg

SEQ ID NO: 799734 - RNA, 19 nt, Artificial Sequence
  Description of Artificial Sequence: Synthetic oligonucleotide
  Sense strand starting at position 88 of SEQ ID NO: 587540
acacucuaucaaugugguu

SEQ ID NO: 799735 - RNA, 19 nt, Artificial Sequence
  Description of Artificial Sequence: Synthetic oligonucleotide
  Antisense strand to SEQ ID NO: 799734
aaccacauugauagagugu

SEQ ID NO: 799736 - RNA, 19 nt, Artificial Sequence
  Description of Artificial Sequence: Synthetic oligonucleotide
  Sense strand starting at position 274 of SEQ ID NO: 587540
ugaagaacuuaauaaggaa

SEQ ID NO: 799737 - RNA, 19 nt, Artificial Sequence
  Description of Artificial Sequence: Synthetic oligonucleotide
  Antisense strand to SEQ ID NO: 799736
uuccuuauuaaguucuuca

SEQ ID NO: 799738 - RNA, 19 nt, Artificial Sequence
  Description of Artificial Sequence: Synthetic oligonucleotide
  Sense strand starting at position 317 of SEQ ID NO: 587540
ccuaguguguuauuaaaua

SEQ ID NO: 799739 - RNA, 19 nt, Artificial Sequence
  Description of Artificial Sequence: Synthetic oligonucleotide
  Antisense strand to SEQ ID NO: 799738
uauuuaauaacacacuagg

SEQ ID NO: 799740 - RNA, 19 nt, Artificial Sequence
  Description of Artificial Sequence: Synthetic oligonucleotide
  Sense strand starting at position 348 of SEQ ID NO: 587540
agaaauaagagauguugca

SEQ ID NO: 799741 - RNA, 19 nt, Artificial Sequence
  Description of Artificial Sequence: Synthetic oligonucleotide
  Antisense strand to SEQ ID NO: 799740
ugcaacaucucuuauuucu

SEQ ID NO: 799742 - RNA, 19 nt, Artificial Sequence
  Description of Artificial Sequence: Synthetic oligonucleotide
  Sense strand starting at position 502 of SEQ ID NO: 587540
cacugcaauccugauguga

SEQ ID NO: 799743 - RNA, 19 nt, Artificial Sequence
  Description of Artificial Sequence: Synthetic oligonucleotide
  Antisense strand to SEQ ID NO: 799742
ucacaucaggauugcagug

SEQ ID NO: 799744 - RNA, 19 nt, Artificial Sequence
  Description of Artificial Sequence: Synthetic oligonucleotide
  Sense strand starting at position 632 of SEQ ID NO: 587540
cgguauuauguccaacaga

SEQ ID NO: 799745 - RNA, 19 nt, Artificial Sequence
  Description of Artificial Sequence: Synthetic oligonucleotide
  Antisense strand to SEQ ID NO: 799744
ucuguuggacauaauaccg

SEQ ID NO: 799746 - RNA, 19 nt, Artificial Sequence
  Description of Artificial Sequence: Synthetic oligonucleotide
  Sense strand starting at position 797 of SEQ ID NO: 587540
uuauaugauacauggguga

SEQ ID NO: 799747 - RNA, 19 nt, Artificial Sequence
  Description of Artificial Sequence: Synthetic oligonucleotide
  Antisense strand to SEQ ID NO: 799746
ucacccauguaucauauaa

SEQ ID NO: 799748 - RNA, 19 nt, Artificial Sequence
  Description of Artificial Sequence: Synthetic oligonucleotide
  Sense strand starting at position 799 of SEQ ID NO: 587540
auaugauacaugggugauu

SEQ ID NO: 799749 - RNA, 19 nt, Artificial Sequence
  Description of Artificial Sequence: Synthetic oligonucleotide
  Antisense strand to SEQ ID NO: 799748
aaucacccauguaucauau

SEQ ID NO: 799750 - RNA, 19 nt, Artificial Sequence
  Description of Artificial Sequence: Synthetic oligonucleotide
  Sense strand starting at position 1573 of SEQ ID NO: 587540
cgaggacucgcgcugucua

SEQ ID NO: 799751 - RNA, 19 nt, Artificial Sequence
  Description of Artificial Sequence: Synthetic oligonucleotide
  Antisense strand to SEQ ID NO: 799750
uagacagcgcgaguccucg

SEQ ID NO: 799752 - RNA, 19 nt, Artificial Sequence
  Description of Artificial Sequence: Synthetic oligonucleotide
  Sense strand starting at position 2341 of SEQ ID NO: 587540
ggcgucccugggaguugua

SEQ ID NO: 799753 - RNA, 19 nt, Artificial Sequence
  Description of Artificial Sequence: Synthetic oligonucleotide
  Antisense strand to SEQ ID NO: 799752
uacaacucccagggacgcc

SEQ ID NO: 799754 - RNA, 19 nt, Artificial Sequence
  Description of Artificial Sequence: Synthetic oligonucleotide
  Sense strand starting at position 2604 of SEQ ID NO: 587540
gaggcguucggagaggaaa

SEQ ID NO: 799755 - RNA, 19 nt, Artificial Sequence
  Description of Artificial Sequence: Synthetic oligonucleotide
  Antisense strand to SEQ ID NO: 799754
uuuccucuccgaacgccuc

SEQ ID NO: 799756 - RNA, 19 nt, Artificial Sequence
  Description of Artificial Sequence: Synthetic oligonucleotide
  Sense strand starting at position 2753 of SEQ ID NO: 587540
cggagauugcaccggaaga

SEQ ID NO: 799757 - RNA, 19 nt, Artificial Sequence
  Description of Artificial Sequence: Synthetic oligonucleotide
  Antisense strand to SEQ ID NO: 799756
ucuuccggugcaaucuccg

SEQ ID NO: 799758 - RNA, 19 nt, Artificial Sequence
  Description of Artificial Sequence: Synthetic oligonucleotide
  Sense strand starting at position 2754 of SEQ ID NO: 587540
ggagauugcaccggaagac

SEQ ID NO: 799759 - RNA, 19 nt, Artificial Sequence
  Description of Artificial Sequence: Synthetic oligonucleotide
  Antisense strand to SEQ ID NO: 799758
gucuuccggugcaaucucc

SEQ ID NO: 799760 - RNA, 19 nt, Artificial Sequence
  Description of Artificial Sequence: Synthetic oligonucleotide
  Sense strand starting at position 2936 of SEQ ID NO: 587540
agcaauuauugagcuggaa

SEQ ID NO: 799761 - RNA, 19 nt, Artificial Sequence
  Description of Artificial Sequence: Synthetic oligonucleotide
  Antisense strand to SEQ ID NO: 799760
uuccagcucaauaauugcu

SEQ ID NO: 799762 - RNA, 19 nt, Artificial Sequence
  Description of Artificial Sequence: Synthetic oligonucleotide
  Sense strand starting at position 2939 of SEQ ID NO: 587540
aauuauugagcuggaaagu

SEQ ID NO: 799763 - RNA, 19 nt, Artificial Sequence
  Description of Artificial Sequence: Synthetic oligonucleotide
  Antisense strand to SEQ ID NO: 799762
acuuuccagcucaauaauu

SEQ ID NO: 799764 - RNA, 19 nt, Artificial Sequence
  Description of Artificial Sequence: Synthetic oligonucleotide
  Sense strand starting at position 2984 of SEQ ID NO: 587540
uguuguugagaagguuuga

SEQ ID NO: 799765 - RNA, 19 nt, Artificial Sequence
  Description of Artificial Sequence: Synthetic oligonucleotide
  Antisense strand to SEQ ID NO: 799764
ucaaaccuucucaacaaca

SEQ ID NO: 799766 - RNA, 19 nt, Artificial Sequence
  Description of Artificial Sequence: Synthetic oligonucleotide
  Sense strand starting at position 3148 of SEQ ID NO: 587540
ccacgugaggguuauaaua

SEQ ID NO: 799767 - RNA, 19 nt, Artificial Sequence
  Description of Artificial Sequence: Synthetic oligonucleotide
  Antisense strand to SEQ ID NO: 799766
uauuauaacccucacgugg

SEQ ID NO: 799768 - RNA, 19 nt, Artificial Sequence
  Description of Artificial Sequence: Synthetic oligonucleotide
  Sense strand starting at position 3156 of SEQ ID NO: 587540
ggguuauaauaggcuguua

SEQ ID NO: 799769 - RNA, 19 nt, Artificial Sequence
  Description of Artificial Sequence: Synthetic oligonucleotide
  Antisense strand to SEQ ID NO: 799768
uaacagccuauuauaaccc

SEQ ID NO: 799770 - RNA, 19 nt, Artificial Sequence
  Description of Artificial Sequence: Synthetic oligonucleotide
  Sense strand starting at position 3158 of SEQ ID NO: 587540
guuauaauaggcuguuaac

SEQ ID NO: 799771 - RNA, 19 nt, Artificial Sequence
  Description of Artificial Sequence: Synthetic oligonucleotide
  Antisense strand to SEQ ID NO: 799770
guuaacagccuauuauaac

SEQ ID NO: 799772 - RNA, 19 nt, Artificial Sequence
  Description of Artificial Sequence: Synthetic oligonucleotide
  Sense strand starting at position 3188 of SEQ ID NO: 587540
auucgauuggcgcuugagu

SEQ ID NO: 799773 - RNA, 19 nt, Artificial Sequence
  Description of Artificial Sequence: Synthetic oligonucleotide
  Antisense strand to SEQ ID NO: 799772
acucaagcgccaaucgaau

SEQ ID NO: 799774 - RNA, 19 nt, Artificial Sequence
  Description of Artificial Sequence: Synthetic oligonucleotide
  Sense strand starting at position 3189 of SEQ ID NO: 587540
uucgauuggcgcuugagua

SEQ ID NO: 799775 - RNA, 19 nt, Artificial Sequence
  Description of Artificial Sequence: Synthetic oligonucleotide
  Antisense strand to SEQ ID NO: 799774
uacucaagcgccaaucgaa

SEQ ID NO: 799776 - RNA, 19 nt, Artificial Sequence
  Description of Artificial Sequence: Synthetic oligonucleotide
  Sense strand starting at position 3223 of SEQ ID NO: 587540
guuguugagacuggcuaga

SEQ ID NO: 799777 - RNA, 19 nt, Artificial Sequence
  Description of Artificial Sequence: Synthetic oligonucleotide
  Antisense strand to SEQ ID NO: 799776
ucuagccagucucaacaac

SEQ ID NO: 799778 - RNA, 19 nt, Artificial Sequence
  Description of Artificial Sequence: Synthetic oligonucleotide
  Sense strand starting at position 3225 of SEQ ID NO: 587540
uguugagacuggcuagauu

SEQ ID NO: 799779 - RNA, 19 nt, Artificial Sequence
  Description of Artificial Sequence: Synthetic oligonucleotide
  Antisense strand to SEQ ID NO: 799778
aaucuagccagucucaaca

SEQ ID NO: 799780 - RNA, 19 nt, Artificial Sequence
  Description of Artificial Sequence: Synthetic oligonucleotide
  Sense strand starting at position 3267 of SEQ ID NO: 587540
agcagaacguaaucacuua

SEQ ID NO: 799781 - RNA, 19 nt, Artificial Sequence
  Description of Artificial Sequence: Synthetic oligonucleotide
  Antisense strand to SEQ ID NO: 799780
uaagugauuacguucugcu

SEQ ID NO: 799782 - RNA, 19 nt, Artificial Sequence
  Description of Artificial Sequence: Synthetic oligonucleotide
  Sense strand starting at position 3309 of SEQ ID NO: 587540
ccucacugcccuuggaauu

SEQ ID NO: 799783 - RNA, 19 nt, Artificial Sequence
  Description of Artificial Sequence: Synthetic oligonucleotide
  Antisense strand to SEQ ID NO: 799782
aauuccaagggcagugagg

SEQ ID NO: 799784 - RNA, 19 nt, Artificial Sequence
  Description of Artificial Sequence: Synthetic oligonucleotide
  Sense strand starting at position 3346 of SEQ ID NO: 587540
uggagaaguugagucuuaa

SEQ ID NO: 799785 - RNA, 19 nt, Artificial Sequence
  Description of Artificial Sequence: Synthetic oligonucleotide
  Antisense strand to SEQ ID NO: 799784
uuaagacucaacuucucca

SEQ ID NO: 799786 - RNA, 19 nt, Artificial Sequence
  Description of Artificial Sequence: Synthetic oligonucleotide
  Sense strand starting at position 3384 of SEQ ID NO: 587540
ugggcagagaaguguuaua

SEQ ID NO: 799787 - RNA, 19 nt, Artificial Sequence
  Description of Artificial Sequence: Synthetic oligonucleotide
  Antisense strand to SEQ ID NO: 799786
uauaacacuucucugccca

SEQ ID NO: 799788 - RNA, 19 nt, Artificial Sequence
  Description of Artificial Sequence: Synthetic oligonucleotide
  Sense strand starting at position 3391 of SEQ ID NO: 587540
agaaguguuauaugguauu

SEQ ID NO: 799789 - RNA, 19 nt, Artificial Sequence
  Description of Artificial Sequence: Synthetic oligonucleotide
  Antisense strand to SEQ ID NO: 799788
aauaccauauaacacuucu

SEQ ID NO: 799790 - RNA, 19 nt, Artificial Sequence
  Description of Artificial Sequence: Synthetic oligonucleotide
  Sense strand starting at position 3397 of SEQ ID NO: 587540
guuauaugguauuccauuc

SEQ ID NO: 799791 - RNA, 19 nt, Artificial Sequence
  Description of Artificial Sequence: Synthetic oligonucleotide
  Antisense strand to SEQ ID NO: 799790
gaauggaauaccauauaac

SEQ ID NO: 799792 - RNA, 19 nt, Artificial Sequence
  Description of Artificial Sequence: Synthetic oligonucleotide
  Sense strand starting at position 3459 of SEQ ID NO: 587540
cucgguauaccugaagucu

SEQ ID NO: 799793 - RNA, 19 nt, Artificial Sequence
  Description of Artificial Sequence: Synthetic oligonucleotide
  Antisense strand to SEQ ID NO: 799792
agacuucagguauaccgag

SEQ ID NO: 799794 - RNA, 19 nt, Artificial Sequence
  Description of Artificial Sequence: Synthetic oligonucleotide
  Sense strand starting at position 3521 of SEQ ID NO: 587540
gaccuuugauuugagccau

SEQ ID NO: 799795 - RNA, 19 nt, Artificial Sequence
  Description of Artificial Sequence: Synthetic oligonucleotide
  Antisense strand to SEQ ID NO: 799794
auggcucaaaucaaagguc

SEQ ID NO: 799796 - RNA, 19 nt, Artificial Sequence
  Description of Artificial Sequence: Synthetic oligonucleotide
  Sense strand starting at position 3536 of SEQ ID NO: 587540
ccauuugacucauugugca

SEQ ID NO: 799797 - RNA, 19 nt, Artificial Sequence
  Description of Artificial Sequence: Synthetic oligonucleotide
  Antisense strand to SEQ ID NO: 799796
ugcacaaugagucaaaugg

SEQ ID NO: 799798 - RNA, 19 nt, Artificial Sequence
  Description of Artificial Sequence: Synthetic oligonucleotide
  Sense strand starting at position 3541 of SEQ ID NO: 587540
ugacucauugugcacacaa

SEQ ID NO: 799799 - RNA, 19 nt, Artificial Sequence
  Description of Artificial Sequence: Synthetic oligonucleotide
  Antisense strand to SEQ ID NO: 799798
uugugugcacaaugaguca

SEQ ID NO: 799800 - RNA, 19 nt, Artificial Sequence
  Description of Artificial Sequence: Synthetic oligonucleotide
  Sense strand starting at position 3543 of SEQ ID NO: 587540
acucauugugcacacaagu

SEQ ID NO: 799801 - RNA, 19 nt, Artificial Sequence
  Description of Artificial Sequence: Synthetic oligonucleotide
  Antisense strand to SEQ ID NO: 799800
acuugugugcacaaugagu

SEQ ID NO: 799802 - RNA, 19 nt, Artificial Sequence
  Description of Artificial Sequence: Synthetic oligonucleotide
  Sense strand starting at position 3608 of SEQ ID NO: 587540
uagaaaggcaggugugaaa

SEQ ID NO: 799803 - RNA, 19 nt, Artificial Sequence
  Description of Artificial Sequence: Synthetic oligonucleotide
  Antisense strand to SEQ ID NO: 799802
uuucacaccugccuuucua

SEQ ID NO: 799804 - RNA, 19 nt, Artificial Sequence
  Description of Artificial Sequence: Synthetic oligonucleotide
  Sense strand starting at position 3828 of SEQ ID NO: 587540
cugaacaugcuuugccaaa

SEQ ID NO: 799805 - RNA, 19 nt, Artificial Sequence
  Description of Artificial Sequence: Synthetic oligonucleotide
  Antisense strand to SEQ ID NO: 799804
uuuggcaaagcauguucag

SEQ ID NO: 799806 - RNA, 19 nt, Artificial Sequence
  Description of Artificial Sequence: Synthetic oligonucleotide
  Sense strand starting at position 3870 of SEQ ID NO: 587540
cuugauaaucauugugcua

SEQ ID NO: 799807 - RNA, 19 nt, Artificial Sequence
  Description of Artificial Sequence: Synthetic oligonucleotide
  Antisense strand to SEQ ID NO: 799806
uagcacaaugauuaucaag

SEQ ID NO: 799808 - RNA, 19 nt, Artificial Sequence
  Description of Artificial Sequence: Synthetic oligonucleotide
  Sense strand starting at position 3921 of SEQ ID NO: 587540
ugcgaagucagagaaagua

SEQ ID NO: 799809 - RNA, 19 nt, Artificial Sequence
  Description of Artificial Sequence: Synthetic oligonucleotide
  Antisense strand to SEQ ID NO: 799808
uacuuucucugacuucgca

SEQ ID NO: 799810 - RNA, 19 nt, Artificial Sequence
  Description of Artificial Sequence: Synthetic oligonucleotide
  Sense strand starting at position 3970 of SEQ ID NO: 587540
ccguauaaaucuguuuaua

SEQ ID NO: 799811 - RNA, 19 nt, Artificial Sequence
  Description of Artificial Sequence: Synthetic oligonucleotide
  Antisense strand to SEQ ID NO: 799810
uauaaacagauuuauacgg

SEQ ID NO: 799812 - RNA, 19 nt, Artificial Sequence
  Description of Artificial Sequence: Synthetic oligonucleotide
  Sense strand starting at position 12 of SEQ ID NO: 587541
uuggucugcucauuuauua

SEQ ID NO: 799813 - RNA, 19 nt, Artificial Sequence
  Description of Artificial Sequence: Synthetic oligonucleotide
  Antisense strand to SEQ ID NO: 799812
uaauaaaugagcagaccaa

SEQ ID NO: 799814 - RNA, 19 nt, Artificial Sequence
  Description of Artificial Sequence: Synthetic oligonucleotide
  Sense strand starting at position 83 of SEQ ID NO: 587541
cuuauuuaguccucuguuu

SEQ ID NO: 799815 - RNA, 19 nt, Artificial Sequence
  Description of Artificial Sequence: Synthetic oligonucleotide
  Antisense strand to SEQ ID NO: 799814
aaacagaggacuaaauaag

SEQ ID NO: 799816 - RNA, 19 nt, Artificial Sequence
  Description of Artificial Sequence: Synthetic oligonucleotide
  Sense strand starting at position 110 of SEQ ID NO: 587541
uuaggauuaugcccaggau

SEQ ID NO: 799817 - RNA, 19 nt, Artificial Sequence
  Description of Artificial Sequence: Synthetic oligonucleotide
  Antisense strand to SEQ ID NO: 799816
auccugggcauaauccuaa

SEQ ID NO: 799818 - RNA, 19 nt, Artificial Sequence
  Description of Artificial Sequence: Synthetic oligonucleotide
  Sense strand starting at position 113 of SEQ ID NO: 587541
ggauuaugcccaggauaca

SEQ ID NO: 799819 - RNA, 19 nt, Artificial Sequence
  Description of Artificial Sequence: Synthetic oligonucleotide
  Antisense strand to SEQ ID NO: 799818
uguauccugggcauaaucc

SEQ ID NO: 799820 - RNA, 19 nt, Artificial Sequence
  Description of Artificial Sequence: Synthetic oligonucleotide
  Sense strand starting at position 128 of SEQ ID NO: 587541
uacagugggucaucuaaua

SEQ ID NO: 799821 - RNA, 19 nt, Artificial Sequence
  Description of Artificial Sequence: Synthetic oligonucleotide
  Antisense strand to SEQ ID NO: 799820
uauuagaugacccacugua

SEQ ID NO: 799822 - RNA, 19 nt, Artificial Sequence
  Description of Artificial Sequence: Synthetic oligonucleotide
  Sense strand starting at position 216 of SEQ ID NO: 587541
guuaauauuguggauuaca

SEQ ID NO: 799823 - RNA, 19 nt, Artificial Sequence
  Description of Artificial Sequence: Synthetic oligonucleotide
  Antisense strand to SEQ ID NO: 799822
uguaauccacaauauuaac

SEQ ID NO: 799824 - RNA, 19 nt, Artificial Sequence
  Description of Artificial Sequence: Synthetic oligonucleotide
  Sense strand starting at position 312 of SEQ ID NO: 587541
cugauuauuguauagcuaa

SEQ ID NO: 799825 - RNA, 19 nt, Artificial Sequence
  Description of Artificial Sequence: Synthetic oligonucleotide
  Antisense strand to SEQ ID NO: 799824
uuagcuauacaauaaucag

SEQ ID NO: 799826 - RNA, 19 nt, Artificial Sequence
  Description of Artificial Sequence: Synthetic oligonucleotide
  Sense strand starting at position 351 of SEQ ID NO: 587541
uugucauguccugauuaua

SEQ ID NO: 799827 - RNA, 19 nt, Artificial Sequence
  Description of Artificial Sequence: Synthetic oligonucleotide
  Antisense strand to SEQ ID NO: 799826
uauaaucaggacaugacaa

SEQ ID NO: 799828 - RNA, 19 nt, Artificial Sequence
  Description of Artificial Sequence: Synthetic oligonucleotide
  Sense strand starting at position 396 of SEQ ID NO: 587541
acuaauauuucugaguaga

SEQ ID NO: 799829 - RNA, 19 nt, Artificial Sequence
  Description of Artificial Sequence: Synthetic oligonucleotide
  Antisense strand to SEQ ID NO: 799828
ucuacucagaaauauuagu

SEQ ID NO: 799830 - RNA, 19 nt, Artificial Sequence
  Description of Artificial Sequence: Synthetic oligonucleotide
  Sense strand starting at position 459 of SEQ ID NO: 587541
augagaauaugcuuagggu

SEQ ID NO: 799831 - RNA, 19 nt, Artificial Sequence
  Description of Artificial Sequence: Synthetic oligonucleotide
  Antisense strand to SEQ ID NO: 799830
acccuaagcauauucucau

SEQ ID NO: 799832 - RNA, 19 nt, Artificial Sequence
  Description of Artificial Sequence: Synthetic oligonucleotide
  Sense strand starting at position 460 of SEQ ID NO: 587541
ugagaauaugcuuaggguu

SEQ ID NO: 799833 - RNA, 19 nt, Artificial Sequence
  Description of Artificial Sequence: Synthetic oligonucleotide
  Antisense strand to SEQ ID NO: 799832
aacccuaagcauauucuca

SEQ ID NO: 799834 - RNA, 19 nt, Artificial Sequence
  Description of Artificial Sequence: Synthetic oligonucleotide
  Sense strand starting at position 557 of SEQ ID NO: 587541
guuagaacuguuuggaauu

SEQ ID NO: 799835 - RNA, 19 nt, Artificial Sequence
  Description of Artificial Sequence: Synthetic oligonucleotide
  Antisense strand to SEQ ID NO: 799834
aauuccaaacaguucuaac

SEQ ID NO: 799836 - RNA, 19 nt, Artificial Sequence
  Description of Artificial Sequence: Synthetic oligonucleotide
  Sense strand starting at position 564 of SEQ ID NO: 587541
cuguuuggaauugauugua

SEQ ID NO: 799837 - RNA, 19 nt, Artificial Sequence
  Description of Artificial Sequence: Synthetic oligonucleotide
  Antisense strand to SEQ ID NO: 799836
uacaaucaauuccaaacag

SEQ ID NO: 799838 - RNA, 19 nt, Artificial Sequence
  Description of Artificial Sequence: Synthetic oligonucleotide
  Sense strand starting at position 567 of SEQ ID NO: 587541
uuuggaauugauuguauuc

SEQ ID NO: 799839 - RNA, 19 nt, Artificial Sequence
  Description of Artificial Sequence: Synthetic oligonucleotide
  Antisense strand to SEQ ID NO: 799838
gaauacaaucaauuccaaa

SEQ ID NO: 799840 - RNA, 19 nt, Artificial Sequence
  Description of Artificial Sequence: Synthetic oligonucleotide
  Sense strand starting at position 572 of SEQ ID NO: 587541
aauugauuguauucugaga

SEQ ID NO: 799841 - RNA, 19 nt, Artificial Sequence
  Description of Artificial Sequence: Synthetic oligonucleotide
  Antisense strand to SEQ ID NO: 799840
ucucagaauacaaucaauu

SEQ ID NO: 799842 - RNA, 19 nt, Artificial Sequence
  Description of Artificial Sequence: Synthetic oligonucleotide
  Sense strand starting at position 752 of SEQ ID NO: 587541
aaguguuaugauuauggca

SEQ ID NO: 799843 - RNA, 19 nt, Artificial Sequence
  Description of Artificial Sequence: Synthetic oligonucleotide
  Antisense strand to SEQ ID NO: 799842
ugccauaaucauaacacuu

SEQ ID NO: 799844 - RNA, 19 nt, Artificial Sequence
  Description of Artificial Sequence: Synthetic oligonucleotide
  Sense strand starting at position 786 of SEQ ID NO: 587541
uuucuuaaucaugaguguu

SEQ ID NO: 799845 - RNA, 19 nt, Artificial Sequence
  Description of Artificial Sequence: Synthetic oligonucleotide
  Antisense strand to SEQ ID NO: 799844
aacacucaugauuaagaaa

SEQ ID NO: 799846 - RNA, 19 nt, Artificial Sequence
  Description of Artificial Sequence: Synthetic oligonucleotide
  Sense strand starting at position 846 of SEQ ID NO: 587541
ucuagucaagucuaaacau

SEQ ID NO: 799847 - RNA, 19 nt, Artificial Sequence
  Description of Artificial Sequence: Synthetic oligonucleotide
  Antisense strand to SEQ ID NO: 799846
auguuuagacuugacuaga

SEQ ID NO: 799848 - RNA, 19 nt, Artificial Sequence
  Description of Artificial Sequence: Synthetic oligonucleotide
  Sense strand starting at position 1040 of SEQ ID NO: 587541
auaguaagauauccucagu

SEQ ID NO: 799849 - RNA, 19 nt, Artificial Sequence
  Description of Artificial Sequence: Synthetic oligonucleotide
  Antisense strand to SEQ ID NO: 799848
acugaggauaucuuacuau

SEQ ID NO: 799850 - RNA, 19 nt, Artificial Sequence
  Description of Artificial Sequence: Synthetic oligonucleotide
  Sense strand starting at position 1043 of SEQ ID NO: 587541
guaagauauccucaguaca

SEQ ID NO: 799851 - RNA, 19 nt, Artificial Sequence
  Description of Artificial Sequence: Synthetic oligonucleotide
  Antisense strand to SEQ ID NO: 799850
uguacugaggauaucuuac

SEQ ID NO: 799852 - RNA, 19 nt, Artificial Sequence
  Description of Artificial Sequence: Synthetic oligonucleotide
  Sense strand starting at position 1202 of SEQ ID NO: 587541
ggguauuaagucuaaauuc

SEQ ID NO: 799853 - RNA, 19 nt, Artificial Sequence
  Description of Artificial Sequence: Synthetic oligonucleotide
  Antisense strand to SEQ ID NO: 799852
gaauuuagacuuaauaccc

SEQ ID NO: 799854 - RNA, 19 nt, Artificial Sequence
  Description of Artificial Sequence: Synthetic oligonucleotide
  Sense strand starting at position 1314 of SEQ ID NO: 587541
cagcuuugugcggcuaaac

SEQ ID NO: 799855 - RNA, 19 nt, Artificial Sequence
  Description of Artificial Sequence: Synthetic oligonucleotide
  Antisense strand to SEQ ID NO: 799854
guuuagccgcacaaagcug

SEQ ID NO: 799856 - RNA, 19 nt, Artificial Sequence
  Description of Artificial Sequence: Synthetic oligonucleotide
  Sense strand starting at position 1315 of SEQ ID NO: 587541
agcuuugugcggcuaaaca

SEQ ID NO: 799857 - RNA, 19 nt, Artificial Sequence
  Description of Artificial Sequence: Synthetic oligonucleotide
  Antisense strand to SEQ ID NO: 799856
uguuuagccgcacaaagcu

SEQ ID NO: 799858 - RNA, 19 nt, Artificial Sequence
  Description of Artificial Sequence: Synthetic oligonucleotide
  Sense strand starting at position 1466 of SEQ ID NO: 587541
gguagacaaucagugaaac

SEQ ID NO: 799859 - RNA, 19 nt, Artificial Sequence
  Description of Artificial Sequence: Synthetic oligonucleotide
  Antisense strand to SEQ ID NO: 799858
guuucacugauugucuacc

SEQ ID NO: 799860 - RNA, 19 nt, Artificial Sequence
  Description of Artificial Sequence: Synthetic oligonucleotide
  Sense strand starting at position 1467 of SEQ ID NO: 587541
guagacaaucagugaaacu

SEQ ID NO: 799861 - RNA, 19 nt, Artificial Sequence
  Description of Artificial Sequence: Synthetic oligonucleotide
  Antisense strand to SEQ ID NO: 799860
aguuucacugauugucuac

SEQ ID NO: 799862 - RNA, 19 nt, Artificial Sequence
  Description of Artificial Sequence: Synthetic oligonucleotide
  Sense strand starting at position 1477 of SEQ ID NO: 587541
agugaaacucccuaauguu

SEQ ID NO: 799863 - RNA, 19 nt, Artificial Sequence
  Description of Artificial Sequence: Synthetic oligonucleotide
  Antisense strand to SEQ ID NO: 799862
aacauuagggaguuucacu

SEQ ID NO: 799864 - RNA, 19 nt, Artificial Sequence
  Description of Artificial Sequence: Synthetic oligonucleotide
  Sense strand starting at position 1487 of SEQ ID NO: 587541
ccuaauguucuauggaaac

SEQ ID NO: 799865 - RNA, 19 nt, Artificial Sequence
  Description of Artificial Sequence: Synthetic oligonucleotide
  Antisense strand to SEQ ID NO: 799864
guuuccauagaacauuagg

SEQ ID NO: 799866 - RNA, 19 nt, Artificial Sequence
  Description of Artificial Sequence: Synthetic oligonucleotide
  Sense strand starting at position 1498 of SEQ ID NO: 587541
auggaaacuuuguuccaua

SEQ ID NO: 799867 - RNA, 19 nt, Artificial Sequence
  Description of Artificial Sequence: Synthetic oligonucleotide
  Antisense strand to SEQ ID NO: 799866
uauggaacaaaguuuccau

SEQ ID NO: 799868 - RNA, 19 nt, Artificial Sequence
  Description of Artificial Sequence: Synthetic oligonucleotide
  Sense strand starting at position 1499 of SEQ ID NO: 587541
uggaaacuuuguuccauaa

SEQ ID NO: 799869 - RNA, 19 nt, Artificial Sequence
  Description of Artificial Sequence: Synthetic oligonucleotide
  Antisense strand to SEQ ID NO: 799868
uuauggaacaaaguuucca

SEQ ID NO: 799870 - RNA, 19 nt, Artificial Sequence
  Description of Artificial Sequence: Synthetic oligonucleotide
  Sense strand starting at position 2108 of SEQ ID NO: 587541
acuguaacugagugacuua

SEQ ID NO: 799871 - RNA, 19 nt, Artificial Sequence
  Description of Artificial Sequence: Synthetic oligonucleotide
  Antisense strand to SEQ ID NO: 799870
uaagucacucaguuacagu

SEQ ID NO: 799872 - RNA, 19 nt, Artificial Sequence
  Description of Artificial Sequence: Synthetic oligonucleotide
  Sense strand starting at position 2111 of SEQ ID NO: 587541
guaacugagugacuuaaga

SEQ ID NO: 799873 - RNA, 19 nt, Artificial Sequence
  Description of Artificial Sequence: Synthetic oligonucleotide
  Antisense strand to SEQ ID NO: 799872
ucuuaagucacucaguuac

SEQ ID NO: 799874 - RNA, 19 nt, Artificial Sequence
  Description of Artificial Sequence: Synthetic oligonucleotide
  Sense strand starting at position 2245 of SEQ ID NO: 587541
ggaauagccuuaucugaag

SEQ ID NO: 799875 - RNA, 19 nt, Artificial Sequence
  Description of Artificial Sequence: Synthetic oligonucleotide
  Antisense strand to SEQ ID NO: 799874
cuucagauaaggcuauucc

SEQ ID NO: 799876 - RNA, 19 nt, Artificial Sequence
  Description of Artificial Sequence: Synthetic oligonucleotide
  Sense strand starting at position 2256 of SEQ ID NO: 587541
aucugaagugcuuagugga

SEQ ID NO: 799877 - RNA, 19 nt, Artificial Sequence
  Description of Artificial Sequence: Synthetic oligonucleotide
  Antisense strand to SEQ ID NO: 799876
uccacuaagcacuucagau

SEQ ID NO: 799878 - RNA, 19 nt, Artificial Sequence
  Description of Artificial Sequence: Synthetic oligonucleotide
  Sense strand starting at position 2372 of SEQ ID NO: 587541
guaauaauaaugugaggua

SEQ ID NO: 799879 - RNA, 19 nt, Artificial Sequence
  Description of Artificial Sequence: Synthetic oligonucleotide
  Antisense strand to SEQ ID NO: 799878
uaccucacauuauuauuac

SEQ ID NO: 799880 - RNA, 19 nt, Artificial Sequence
  Description of Artificial Sequence: Synthetic oligonucleotide
  Sense strand starting at position 2780 of SEQ ID NO: 587541
uucugaugucauuaaacug

SEQ ID NO: 799881 - RNA, 19 nt, Artificial Sequence
  Description of Artificial Sequence: Synthetic oligonucleotide
  Antisense strand to SEQ ID NO: 799880
caguuuaaugacaucagaa

SEQ ID NO: 799882 - RNA, 19 nt, Artificial Sequence
  Description of Artificial Sequence: Synthetic oligonucleotide
  Sense strand starting at position 2878 of SEQ ID NO: 587541
guguauauuugacaaggaa

SEQ ID NO: 799883 - RNA, 19 nt, Artificial Sequence
  Description of Artificial Sequence: Synthetic oligonucleotide
  Antisense strand to SEQ ID NO: 799882
uuccuugucaaauauacac

SEQ ID NO: 799884 - RNA, 19 nt, Artificial Sequence
  Description of Artificial Sequence: Synthetic oligonucleotide
  Sense strand starting at position 3036 of SEQ ID NO: 587541
uuuguuaaagauugcagaa

SEQ ID NO: 799885 - RNA, 19 nt, Artificial Sequence
  Description of Artificial Sequence: Synthetic oligonucleotide
  Antisense strand to SEQ ID NO: 799884
uucugcaaucuuuaacaaa

SEQ ID NO: 799886 - RNA, 19 nt, Artificial Sequence
  Description of Artificial Sequence: Synthetic oligonucleotide
  Sense strand starting at position 3085 of SEQ ID NO: 587541
ugaauacucugucuuagaa

SEQ ID NO: 799887 - RNA, 19 nt, Artificial Sequence
  Description of Artificial Sequence: Synthetic oligonucleotide
  Antisense strand to SEQ ID NO: 799886
uucuaagacagaguauuca

SEQ ID NO: 799888 - RNA, 19 nt, Artificial Sequence
  Description of Artificial Sequence: Synthetic oligonucleotide
  Sense strand starting at position 3256 of SEQ ID NO: 587541
guauacucuuaauugugaa

SEQ ID NO: 799889 - RNA, 19 nt, Artificial Sequence
  Description of Artificial Sequence: Synthetic oligonucleotide
  Antisense strand to SEQ ID NO: 799888
uucacaauuaagaguauac

SEQ ID NO: 799890 - RNA, 19 nt, Artificial Sequence
  Description of Artificial Sequence: Synthetic oligonucleotide
  Sense strand starting at position 3302 of SEQ ID NO: 587541
uuuggcuuucuuuaaugaa

SEQ ID NO: 799891 - RNA, 19 nt, Artificial Sequence
  Description of Artificial Sequence: Synthetic oligonucleotide
  Antisense strand to SEQ ID NO: 799890
uucauuaaagaaagccaaa

SEQ ID NO: 799892 - RNA, 19 nt, Artificial Sequence
  Description of Artificial Sequence: Synthetic oligonucleotide
  Sense strand starting at position 20 of SEQ ID NO: 587542
gcacguuuaagguagacca

SEQ ID NO: 799893 - RNA, 19 nt, Artificial Sequence
  Description of Artificial Sequence: Synthetic oligonucleotide
  Antisense strand to SEQ ID NO: 799892
uggucuaccuuaaacgugc

SEQ ID NO: 799894 - RNA, 19 nt, Artificial Sequence
  Description of Artificial Sequence: Synthetic oligonucleotide
  Sense strand starting at position 56 of SEQ ID NO: 587542
gacgguuaggcguaugaaa

SEQ ID NO: 799895 - RNA, 19 nt, Artificial Sequence
  Description of Artificial Sequence: Synthetic oligonucleotide
  Antisense strand to SEQ ID NO: 799894
uuucauacgccuaaccguc

SEQ ID NO: 799896 - RNA, 19 nt, Artificial Sequence
  Description of Artificial Sequence: Synthetic oligonucleotide
  Sense strand starting at position 63 of SEQ ID NO: 587542
aggcguaugaaaugcauuu

SEQ ID NO: 799897 - RNA, 19 nt, Artificial Sequence
  Description of Artificial Sequence: Synthetic oligonucleotide
  Antisense strand to SEQ ID NO: 799896
aaaugcauuucauacgccu

SEQ ID NO: 799898 - RNA, 19 nt, Artificial Sequence
  Description of Artificial Sequence: Synthetic oligonucleotide
  Sense strand starting at position 108 of SEQ ID NO: 587542
auggguuuaccgggaugua

SEQ ID NO: 799899 - RNA, 19 nt, Artificial Sequence
  Description of Artificial Sequence: Synthetic oligonucleotide
  Antisense strand to SEQ ID NO: 799898
uacaucccgguaaacccau

SEQ ID NO: 799900 - RNA, 19 nt, Artificial Sequence
  Description of Artificial Sequence: Synthetic oligonucleotide
  Sense strand starting at position 109 of SEQ ID NO: 587542
uggguuuaccgggauguaa

SEQ ID NO: 799901 - RNA, 19 nt, Artificial Sequence
  Description of Artificial Sequence: Synthetic oligonucleotide
  Antisense strand to SEQ ID NO: 799900
uuacaucccgguaaaccca

SEQ ID NO: 799902 - RNA, 19 nt, Artificial Sequence
  Description of Artificial Sequence: Synthetic oligonucleotide
  Sense strand starting at position 172 of SEQ ID NO: 587542
ugucuucuuucucccuaga

SEQ ID NO: 799903 - RNA, 19 nt, Artificial Sequence
  Description of Artificial Sequence: Synthetic oligonucleotide
  Antisense strand to SEQ ID NO: 799902
ucuagggagaaagaagaca

SEQ ID NO: 799904 - RNA, 19 nt, Artificial Sequence
  Description of Artificial Sequence: Synthetic oligonucleotide
  Sense strand starting at position 310 of SEQ ID NO: 587542
ucagcauucuguuuacaga

SEQ ID NO: 799905 - RNA, 19 nt, Artificial Sequence
  Description of Artificial Sequence: Synthetic oligonucleotide
  Antisense strand to SEQ ID NO: 799904
ucuguaaacagaaugcuga

SEQ ID NO: 799906 - RNA, 19 nt, Artificial Sequence
  Description of Artificial Sequence: Synthetic oligonucleotide
  Sense strand starting at position 329 of SEQ ID NO: 587542
uguacagauucugccaaau

SEQ ID NO: 799907 - RNA, 19 nt, Artificial Sequence
  Description of Artificial Sequence: Synthetic oligonucleotide
  Antisense strand to SEQ ID NO: 799906
auuuggcagaaucuguaca

SEQ ID NO: 799908 - RNA, 19 nt, Artificial Sequence
  Description of Artificial Sequence: Synthetic oligonucleotide
  Sense strand starting at position 558 of SEQ ID NO: 587542
cccuaaauggucugauaug

SEQ ID NO: 799909 - RNA, 19 nt, Artificial Sequence
  Description of Artificial Sequence: Synthetic oligonucleotide
  Antisense strand to SEQ ID NO: 799908
cauaucagaccauuuaggg

SEQ ID NO: 799910 - RNA, 19 nt, Artificial Sequence
  Description of Artificial Sequence: Synthetic oligonucleotide
  Sense strand starting at position 615 of SEQ ID NO: 587542
gacagaaauugauucguga

SEQ ID NO: 799911 - RNA, 19 nt, Artificial Sequence
  Description of Artificial Sequence: Synthetic oligonucleotide
  Antisense strand to SEQ ID NO: 799910
ucacgaaucaauuucuguc

SEQ ID NO: 799912 - RNA, 19 nt, Artificial Sequence
  Description of Artificial Sequence: Synthetic oligonucleotide
  Sense strand starting at position 618 of SEQ ID NO: 587542
agaaauugauucgugacgu

SEQ ID NO: 799913 - RNA, 19 nt, Artificial Sequence
  Description of Artificial Sequence: Synthetic oligonucleotide
  Antisense strand to SEQ ID NO: 799912
acgucacgaaucaauuucu

SEQ ID NO: 799914 - RNA, 19 nt, Artificial Sequence
  Description of Artificial Sequence: Synthetic oligonucleotide
  Sense strand starting at position 755 of SEQ ID NO: 587542
cagggauccugacucguaa

SEQ ID NO: 799915 - RNA, 19 nt, Artificial Sequence
  Description of Artificial Sequence: Synthetic oligonucleotide
  Antisense strand to SEQ ID NO: 799914
uuacgagucaggaucccug

SEQ ID NO: 799916 - RNA, 19 nt, Artificial Sequence
  Description of Artificial Sequence: Synthetic oligonucleotide
  Sense strand starting at position 1049 of SEQ ID NO: 587542
ugacgugagaggugaacau

SEQ ID NO: 799917 - RNA, 19 nt, Artificial Sequence
  Description of Artificial Sequence: Synthetic oligonucleotide
  Antisense strand to SEQ ID NO: 799916
auguucaccucucacguca

SEQ ID NO: 799918 - RNA, 19 nt, Artificial Sequence
  Description of Artificial Sequence: Synthetic oligonucleotide
  Sense strand starting at position 1053 of SEQ ID NO: 587542
gugagaggugaacauguau

SEQ ID NO: 799919 - RNA, 19 nt, Artificial Sequence
  Description of Artificial Sequence: Synthetic oligonucleotide
  Antisense strand to SEQ ID NO: 799918
auacauguucaccucucac

SEQ ID NO: 799920 - RNA, 19 nt, Artificial Sequence
  Description of Artificial Sequence: Synthetic oligonucleotide
  Sense strand starting at position 1178 of SEQ ID NO: 587542
uccagacuccuuuaaacgu

SEQ ID NO: 799921 - RNA, 19 nt, Artificial Sequence
  Description of Artificial Sequence: Synthetic oligonucleotide
  Antisense strand to SEQ ID NO: 799920
acguuuaaaggagucugga

SEQ ID NO: 799922 - RNA, 19 nt, Artificial Sequence
  Description of Artificial Sequence: Synthetic oligonucleotide
  Sense strand starting at position 1248 of SEQ ID NO: 587542
cggugccuugcauccgaaa

SEQ ID NO: 799923 - RNA, 19 nt, Artificial Sequence
  Description of Artificial Sequence: Synthetic oligonucleotide
  Antisense strand to SEQ ID NO: 799922
uuucggaugcaaggcaccg

SEQ ID NO: 799924 - RNA, 19 nt, Artificial Sequence
  Description of Artificial Sequence: Synthetic oligonucleotide
  Sense strand starting at position 2337 of SEQ ID NO: 587542
gggagcgguccuggaaaua

SEQ ID NO: 799925 - RNA, 19 nt, Artificial Sequence
  Description of Artificial Sequence: Synthetic oligonucleotide
  Antisense strand to SEQ ID NO: 799924
uauuuccaggaccgcuccc

SEQ ID NO: 799926 - RNA, 19 nt, Artificial Sequence
  Description of Artificial Sequence: Synthetic oligonucleotide
  Sense strand starting at position 2348 of SEQ ID NO: 587542
uggaaauaaucuguccucu

SEQ ID NO: 799927 - RNA, 19 nt, Artificial Sequence
  Description of Artificial Sequence: Synthetic oligonucleotide
  Antisense strand to SEQ ID NO: 799926
agaggacagauuauuucca

SEQ ID NO: 799928 - RNA, 19 nt, Artificial Sequence
  Description of Artificial Sequence: Synthetic oligonucleotide
  Sense strand starting at position 2687 of SEQ ID NO: 587542
gagcgugacccugagaacu

SEQ ID NO: 799929 - RNA, 19 nt, Artificial Sequence
  Description of Artificial Sequence: Synthetic oligonucleotide
  Antisense strand to SEQ ID NO: 799928
aguucucagggucacgcuc

SEQ ID NO: 799930 - RNA, 19 nt, Artificial Sequence
  Description of Artificial Sequence: Synthetic oligonucleotide
  Sense strand starting at position 2698 of SEQ ID NO: 587542
ugagaacucuccuuaaugc

SEQ ID NO: 799931 - RNA, 19 nt, Artificial Sequence
  Description of Artificial Sequence: Synthetic oligonucleotide
  Antisense strand to SEQ ID NO: 799930
gcauuaaggagaguucuca

SEQ ID NO: 799932 - RNA, 19 nt, Artificial Sequence
  Description of Artificial Sequence: Synthetic oligonucleotide
  Sense strand starting at position 2773 of SEQ ID NO: 587542
gcguuucucagcguucgga

SEQ ID NO: 799933 - RNA, 19 nt, Artificial Sequence
  Description of Artificial Sequence: Synthetic oligonucleotide
  Antisense strand to SEQ ID NO: 799932
uccgaacgcugagaaacgc

SEQ ID NO: 799934 - RNA, 19 nt, Artificial Sequence
  Description of Artificial Sequence: Synthetic oligonucleotide
  Sense strand starting at position 2775 of SEQ ID NO: 587542
guuucucagcguucggagu

SEQ ID NO: 799935 - RNA, 19 nt, Artificial Sequence
  Description of Artificial Sequence: Synthetic oligonucleotide
  Antisense strand to SEQ ID NO: 799934
acuccgaacgcugagaaac

SEQ ID NO: 799936 - RNA, 19 nt, Artificial Sequence
  Description of Artificial Sequence: Synthetic oligonucleotide
  Sense strand starting at position 2836 of SEQ ID NO: 587542
ccucuuuagaggcacgaau

SEQ ID NO: 799937 - RNA, 19 nt, Artificial Sequence
  Description of Artificial Sequence: Synthetic oligonucleotide
  Antisense strand to SEQ ID NO: 799936
auucgugccucuaaagagg

SEQ ID NO: 799938 - RNA, 19 nt, Artificial Sequence
  Description of Artificial Sequence: Synthetic oligonucleotide
  Sense strand starting at position 2886 of SEQ ID NO: 587542
agauauagcauacgcagaa

SEQ ID NO: 799939 - RNA, 19 nt, Artificial Sequence
  Description of Artificial Sequence: Synthetic oligonucleotide
  Antisense strand to SEQ ID NO: 799938
uucugcguaugcuauaucu

SEQ ID NO: 799940 - RNA, 19 nt, Artificial Sequence
  Description of Artificial Sequence: Synthetic oligonucleotide
  Sense strand starting at position 2887 of SEQ ID NO: 587542
gauauagcauacgcagaaa

SEQ ID NO: 799941 - RNA, 19 nt, Artificial Sequence
  Description of Artificial Sequence: Synthetic oligonucleotide
  Antisense strand to SEQ ID NO: 799940
uuucugcguaugcuauauc

SEQ ID NO: 799942 - RNA, 19 nt, Artificial Sequence
  Description of Artificial Sequence: Synthetic oligonucleotide
  Sense strand starting at position 3159 of SEQ ID NO: 587542
ucaguauuaaauuggugua

SEQ ID NO: 799943 - RNA, 19 nt, Artificial Sequence
  Description of Artificial Sequence: Synthetic oligonucleotide
  Antisense strand to SEQ ID NO: 799942
uacaccaauuuaauacuga

SEQ ID NO: 799944 - RNA, 19 nt, Artificial Sequence
  Description of Artificial Sequence: Synthetic oligonucleotide
  Sense strand starting at position 3161 of SEQ ID NO: 587542
aguauuaaauugguguacu

SEQ ID NO: 799945 - RNA, 19 nt, Artificial Sequence
  Description of Artificial Sequence: Synthetic oligonucleotide
  Antisense strand to SEQ ID NO: 799944
aguacaccaauuuaauacu

SEQ ID NO: 799946 - RNA, 19 nt, Artificial Sequence
  Description of Artificial Sequence: Synthetic oligonucleotide
  Sense strand starting at position 3180 of SEQ ID NO: 587542
guguauguauagguaauuu

SEQ ID NO: 799947 - RNA, 19 nt, Artificial Sequence
  Description of Artificial Sequence: Synthetic oligonucleotide
  Antisense strand to SEQ ID NO: 799946
aaauuaccuauacauacac

SEQ ID NO: 799948 - RNA, 19 nt, Artificial Sequence
  Description of Artificial Sequence: Synthetic oligonucleotide
  Sense strand starting at position 3198 of SEQ ID NO: 587542
uuaauuguugccuaguauu

SEQ ID NO: 799949 - RNA, 19 nt, Artificial Sequence
  Description of Artificial Sequence: Synthetic oligonucleotide
  Antisense strand to SEQ ID NO: 799948
aauacuaggcaacaauuaa

SEQ ID NO: 799950 - RNA, 19 nt, Artificial Sequence
  Description of Artificial Sequence: Synthetic oligonucleotide
  Sense strand starting at position 3209 of SEQ ID NO: 587542
cuaguauuccagugugaau

SEQ ID NO: 799951 - RNA, 19 nt, Artificial Sequence
  Description of Artificial Sequence: Synthetic oligonucleotide
  Antisense strand to SEQ ID NO: 799950
auucacacuggaauacuag

SEQ ID NO: 799952 - RNA, 19 nt, Artificial Sequence
  Description of Artificial Sequence: Synthetic oligonucleotide
  Sense strand starting at position 3211 of SEQ ID NO: 587542
aguauuccagugugaauag

SEQ ID NO: 799953 - RNA, 19 nt, Artificial Sequence
  Description of Artificial Sequence: Synthetic oligonucleotide
  Antisense strand to SEQ ID NO: 799952
cuauucacacuggaauacu

SEQ ID NO: 799954 - RNA, 19 nt, Artificial Sequence
  Description of Artificial Sequence: Synthetic oligonucleotide
  Sense strand starting at position 3281 of SEQ ID NO: 587542
cucagaacauggcuauaaa

SEQ ID NO: 799955 - RNA, 19 nt, Artificial Sequence
  Description of Artificial Sequence: Synthetic oligonucleotide
  Antisense strand to SEQ ID NO: 799954
uuuauagccauguucugag

SEQ ID NO: 799956 - RNA, 19 nt, Artificial Sequence
  Description of Artificial Sequence: Synthetic oligonucleotide
  Sense strand starting at position 3325 of SEQ ID NO: 587542
gcaaauauguuggaauuuc

SEQ ID NO: 799957 - RNA, 19 nt, Artificial Sequence
  Description of Artificial Sequence: Synthetic oligonucleotide
  Antisense strand to SEQ ID NO: 799956
gaaauuccaacauauuugc

SEQ ID NO: 799958 - RNA, 19 nt, Artificial Sequence
  Description of Artificial Sequence: Synthetic oligonucleotide
  Sense strand starting at position 3359 of SEQ ID NO: 587542
ggaguccuuagagaauugu

SEQ ID NO: 799959 - RNA, 19 nt, Artificial Sequence
  Description of Artificial Sequence: Synthetic oligonucleotide
  Antisense strand to SEQ ID NO: 799958
acaauucucuaaggacucc

SEQ ID NO: 799960 - RNA, 19 nt, Artificial Sequence
  Description of Artificial Sequence: Synthetic oligonucleotide
  Sense strand starting at position 3363 of SEQ ID NO: 587542
uccuuagagaauugucgau

SEQ ID NO: 799961 - RNA, 19 nt, Artificial Sequence
  Description of Artificial Sequence: Synthetic oligonucleotide
  Antisense strand to SEQ ID NO: 799960
aucgacaauucucuaagga

SEQ ID NO: 799962 - RNA, 19 nt, Artificial Sequence
  Description of Artificial Sequence: Synthetic oligonucleotide
  Sense strand starting at position 3367 of SEQ ID NO: 587542
uagagaauugucgaugcgu

SEQ ID NO: 799963 - RNA, 19 nt, Artificial Sequence
  Description of Artificial Sequence: Synthetic oligonucleotide
  Antisense strand to SEQ ID NO: 799962
acgcaucgacaauucucua

SEQ ID NO: 799964 - RNA, 19 nt, Artificial Sequence
  Description of Artificial Sequence: Synthetic oligonucleotide
  Sense strand starting at position 3368 of SEQ ID NO: 587542
agagaauugucgaugcgua

SEQ ID NO: 799965 - RNA, 19 nt, Artificial Sequence
  Description of Artificial Sequence: Synthetic oligonucleotide
  Antisense strand to SEQ ID NO: 799964
uacgcaucgacaauucucu

SEQ ID NO: 799966 - RNA, 19 nt, Artificial Sequence
  Description of Artificial Sequence: Synthetic oligonucleotide
  Sense strand starting at position 3499 of SEQ ID NO: 587542
uuccauuaagaguagguuu

SEQ ID NO: 799967 - RNA, 19 nt, Artificial Sequence
  Description of Artificial Sequence: Synthetic oligonucleotide
  Antisense strand to SEQ ID NO: 799966
aaaccuacucuuaauggaa

SEQ ID NO: 799968 - RNA, 19 nt, Artificial Sequence
  Description of Artificial Sequence: Synthetic oligonucleotide
  Sense strand starting at position 3516 of SEQ ID NO: 587542
uuucucauugagcacugaa

SEQ ID NO: 799969 - RNA, 19 nt, Artificial Sequence
  Description of Artificial Sequence: Synthetic oligonucleotide
  Antisense strand to SEQ ID NO: 799968
uucagugcucaaugagaaa

SEQ ID NO: 799970 - RNA, 19 nt, Artificial Sequence
  Description of Artificial Sequence: Synthetic oligonucleotide
  Sense strand starting at position 3888 of SEQ ID NO: 587542
agaguaccacuugauaguu

SEQ ID NO: 799971 - RNA, 19 nt, Artificial Sequence
  Description of Artificial Sequence: Synthetic oligonucleotide
  Antisense strand to SEQ ID NO: 799970
aacuaucaagugguacucu

SEQ ID NO: 799972 - RNA, 19 nt, Artificial Sequence
  Description of Artificial Sequence: Synthetic oligonucleotide
  Sense strand starting at position 104 of SEQ ID NO: 587543
gggcguacucuccaucacu

SEQ ID NO: 799973 - RNA, 19 nt, Artificial Sequence
  Description of Artificial Sequence: Synthetic oligonucleotide
  Antisense strand to SEQ ID NO: 799972
agugauggagaguacgccc

SEQ ID NO: 799974 - RNA, 19 nt, Artificial Sequence
  Description of Artificial Sequence: Synthetic oligonucleotide
  Sense strand starting at position 438 of SEQ ID NO: 587543
cuaggaaucugcucacgac

SEQ ID NO: 799975 - RNA, 19 nt, Artificial Sequence
  Description of Artificial Sequence: Synthetic oligonucleotide
  Antisense strand to SEQ ID NO: 799974
gucgugagcagauuccuag

SEQ ID NO: 799976 - RNA, 19 nt, Artificial Sequence
  Description of Artificial Sequence: Synthetic oligonucleotide
  Sense strand starting at position 512 of SEQ ID NO: 587543
gagccugacucuguccuau

SEQ ID NO: 799977 - RNA, 19 nt, Artificial Sequence
  Description of Artificial Sequence: Synthetic oligonucleotide
  Antisense strand to SEQ ID NO: 799976
auaggacagagucaggcuc

SEQ ID NO: 799978 - RNA, 19 nt, Artificial Sequence
  Description of Artificial Sequence: Synthetic oligonucleotide
  Sense strand starting at position 518 of SEQ ID NO: 587543
gacucuguccuaugcugua

SEQ ID NO: 799979 - RNA, 19 nt, Artificial Sequence
  Description of Artificial Sequence: Synthetic oligonucleotide
  Antisense strand to SEQ ID NO: 799978
uacagcauaggacagaguc

SEQ ID NO: 799980 - RNA, 19 nt, Artificial Sequence
  Description of Artificial Sequence: Synthetic oligonucleotide
  Sense strand starting at position 598 of SEQ ID NO: 587543
cucagaggauucuucccau

SEQ ID NO: 799981 - RNA, 19 nt, Artificial Sequence
  Description of Artificial Sequence: Synthetic oligonucleotide
  Antisense strand to SEQ ID NO: 799980
augggaagaauccucugag

SEQ ID NO: 799982 - RNA, 19 nt, Artificial Sequence
  Description of Artificial Sequence: Synthetic oligonucleotide
  Sense strand starting at position 601 of SEQ ID NO: 587543
agaggauucuucccauccu

SEQ ID NO: 799983 - RNA, 19 nt, Artificial Sequence
  Description of Artificial Sequence: Synthetic oligonucleotide
  Antisense strand to SEQ ID NO: 799982
aggaugggaagaauccucu

SEQ ID NO: 799984 - RNA, 19 nt, Artificial Sequence
  Description of Artificial Sequence: Synthetic oligonucleotide
  Sense strand starting at position 677 of SEQ ID NO: 587543
gcuuguagccgugggaagu

SEQ ID NO: 799985 - RNA, 19 nt, Artificial Sequence
  Description of Artificial Sequence: Synthetic oligonucleotide
  Antisense strand to SEQ ID NO: 799984
acuucccacggcuacaagc

SEQ ID NO: 799986 - RNA, 19 nt, Artificial Sequence
  Description of Artificial Sequence: Synthetic oligonucleotide
  Sense strand starting at position 779 of SEQ ID NO: 587543
gagucagccucuucccaga

SEQ ID NO: 799987 - RNA, 19 nt, Artificial Sequence
  Description of Artificial Sequence: Synthetic oligonucleotide
  Antisense strand to SEQ ID NO: 799986
ucugggaagaggcugacuc

SEQ ID NO: 799988 - RNA, 19 nt, Artificial Sequence
  Description of Artificial Sequence: Synthetic oligonucleotide
  Sense strand starting at position 803 of SEQ ID NO: 587543
gcaguuucucggcuucuca

SEQ ID NO: 799989 - RNA, 19 nt, Artificial Sequence
  Description of Artificial Sequence: Synthetic oligonucleotide
  Antisense strand to SEQ ID NO: 799988
ugagaagccgagaaacugc

SEQ ID NO: 799990 - RNA, 19 nt, Artificial Sequence
  Description of Artificial Sequence: Synthetic oligonucleotide
  Sense strand starting at position 1313 of SEQ ID NO: 587543
gcaggcucggcucagaaau

SEQ ID NO: 799991 - RNA, 19 nt, Artificial Sequence
  Description of Artificial Sequence: Synthetic oligonucleotide
  Antisense strand to SEQ ID NO: 799990
auuucugagccgagccugc

SEQ ID NO: 799992 - RNA, 19 nt, Artificial Sequence
  Description of Artificial Sequence: Synthetic oligonucleotide
  Sense strand starting at position 2007 of SEQ ID NO: 587543
gaaacaggagcccgugauu

SEQ ID NO: 799993 - RNA, 19 nt, Artificial Sequence
  Description of Artificial Sequence: Synthetic oligonucleotide
  Antisense strand to SEQ ID NO: 799992
aaucacgggcuccuguuuc

SEQ ID NO: 799994 - RNA, 19 nt, Artificial Sequence
  Description of Artificial Sequence: Synthetic oligonucleotide
  Sense strand starting at position 2389 of SEQ ID NO: 587543
cgaguucucacgggucagu

SEQ ID NO: 799995 - RNA, 19 nt, Artificial Sequence
  Description of Artificial Sequence: Synthetic oligonucleotide
  Antisense strand to SEQ ID NO: 799994
acugacccgugagaacucg

SEQ ID NO: 799996 - RNA, 19 nt, Artificial Sequence
  Description of Artificial Sequence: Synthetic oligonucleotide
  Sense strand starting at position 2392 of SEQ ID NO: 587543
guucucacgggucagugau

SEQ ID NO: 799997 - RNA, 19 nt, Artificial Sequence
  Description of Artificial Sequence: Synthetic oligonucleotide
  Antisense strand to SEQ ID NO: 799996
aucacugacccgugagaac

SEQ ID NO: 799998 - RNA, 19 nt, Artificial Sequence
  Description of Artificial Sequence: Synthetic oligonucleotide
  Sense strand starting at position 2638 of SEQ ID NO: 587543
gggucugucccuggucuaa

SEQ ID NO: 799999 - RNA, 19 nt, Artificial Sequence
  Description of Artificial Sequence: Synthetic oligonucleotide
  Antisense strand to SEQ ID NO: 799998
uuagaccagggacagaccc

SEQ ID NO: 800000 - RNA, 19 nt, Artificial Sequence
  Description of Artificial Sequence: Synthetic oligonucleotide
  Sense strand starting at position 2670 of SEQ ID NO: 587543
gccaaaugucuggagaggu

SEQ ID NO: 800001 - RNA, 19 nt, Artificial Sequence
  Description of Artificial Sequence: Synthetic oligonucleotide
  Antisense strand to SEQ ID NO: 800000
accucuccagacauuuggc

SEQ ID NO: 800002 - RNA, 19 nt, Artificial Sequence
  Description of Artificial Sequence: Synthetic oligonucleotide
  Sense strand starting at position 3114 of SEQ ID NO: 587543
cuagcuuggucccaaguca

SEQ ID NO: 800003 - RNA, 19 nt, Artificial Sequence
  Description of Artificial Sequence: Synthetic oligonucleotide
  Antisense strand to SEQ ID NO: 800002
ugacuugggaccaagcuag

SEQ ID NO: 800004 - RNA, 19 nt, Artificial Sequence
  Description of Artificial Sequence: Synthetic oligonucleotide
  Sense strand starting at position 3167 of SEQ ID NO: 587543
ccaggagccuuccuccuaa

SEQ ID NO: 800005 - RNA, 19 nt, Artificial Sequence
  Description of Artificial Sequence: Synthetic oligonucleotide
  Antisense strand to SEQ ID NO: 800004
uuaggaggaaggcuccugg

SEQ ID NO: 800006 - RNA, 19 nt, Artificial Sequence
  Description of Artificial Sequence: Synthetic oligonucleotide
  Sense strand starting at position 3171 of SEQ ID NO: 587543
gagccuuccuccuaaggga

SEQ ID NO: 800007 - RNA, 19 nt, Artificial Sequence
  Description of Artificial Sequence: Synthetic oligonucleotide
  Antisense strand to SEQ ID NO: 800006
ucccuuaggaggaaggcuc

SEQ ID NO: 800008 - RNA, 19 nt, Artificial Sequence
  Description of Artificial Sequence: Synthetic oligonucleotide
  Sense strand starting at position 3206 of SEQ ID NO: 587543
ccuucuaccgguugagaag

SEQ ID NO: 800009 - RNA, 19 nt, Artificial Sequence
  Description of Artificial Sequence: Synthetic oligonucleotide
  Antisense strand to SEQ ID NO: 800008
cuucucaaccgguagaagg

SEQ ID NO: 800010 - RNA, 19 nt, Artificial Sequence
  Description of Artificial Sequence: Synthetic oligonucleotide
  Sense strand starting at position 3207 of SEQ ID NO: 587543
cuucuaccgguugagaaga

SEQ ID NO: 800011 - RNA, 19 nt, Artificial Sequence
  Description of Artificial Sequence: Synthetic oligonucleotide
  Antisense strand to SEQ ID NO: 800010
ucuucucaaccgguagaag

SEQ ID NO: 800012 - RNA, 19 nt, Artificial Sequence
  Description of Artificial Sequence: Synthetic oligonucleotide
  Sense strand starting at position 3278 of SEQ ID NO: 587543
gggccauguuggcauccau

SEQ ID NO: 800013 - RNA, 19 nt, Artificial Sequence
  Description of Artificial Sequence: Synthetic oligonucleotide
  Antisense strand to SEQ ID NO: 800012
auggaugccaacauggccc

SEQ ID NO: 800014 - RNA, 19 nt, Artificial Sequence
  Description of Artificial Sequence: Synthetic oligonucleotide
  Sense strand starting at position 3357 of SEQ ID NO: 587543
uuguuuacaugacugaguu

SEQ ID NO: 800015 - RNA, 19 nt, Artificial Sequence
  Description of Artificial Sequence: Synthetic oligonucleotide
  Antisense strand to SEQ ID NO: 800014
aacucagucauguaaacaa

SEQ ID NO: 800016 - RNA, 19 nt, Artificial Sequence
  Description of Artificial Sequence: Synthetic oligonucleotide
  Sense strand starting at position 3358 of SEQ ID NO: 587543
uguuuacaugacugaguua

SEQ ID NO: 800017 - RNA, 19 nt, Artificial Sequence
  Description of Artificial Sequence: Synthetic oligonucleotide
  Antisense strand to SEQ ID NO: 800016
uaacucagucauguaaaca

SEQ ID NO: 800018 - RNA, 19 nt, Artificial Sequence
  Description of Artificial Sequence: Synthetic oligonucleotide
  Sense strand starting at position 3361 of SEQ ID NO: 587543
uuacaugacugaguuagua

SEQ ID NO: 800019 - RNA, 19 nt, Artificial Sequence
  Description of Artificial Sequence: Synthetic oligonucleotide
  Antisense strand to SEQ ID NO: 800018
uacuaacucagucauguaa

SEQ ID NO: 800020 - RNA, 19 nt, Artificial Sequence
  Description of Artificial Sequence: Synthetic oligonucleotide
  Sense strand starting at position 3608 of SEQ ID NO: 587543
gggagauuccugcggcuug

SEQ ID NO: 800021 - RNA, 19 nt, Artificial Sequence
  Description of Artificial Sequence: Synthetic oligonucleotide
  Antisense strand to SEQ ID NO: 800020
caagccgcaggaaucuccc

SEQ ID NO: 800022 - RNA, 19 nt, Artificial Sequence
  Description of Artificial Sequence: Synthetic oligonucleotide
  Sense strand starting at position 3673 of SEQ ID NO: 587543
gaggaccuaucgcugacau

SEQ ID NO: 800023 - RNA, 19 nt, Artificial Sequence
  Description of Artificial Sequence: Synthetic oligonucleotide
  Antisense strand to SEQ ID NO: 800022
augucagcgauagguccuc

SEQ ID NO: 800024 - RNA, 19 nt, Artificial Sequence
  Description of Artificial Sequence: Synthetic oligonucleotide
  Sense strand starting at position 3752 of SEQ ID NO: 587543
ugccaugucugcuuuguca

SEQ ID NO: 800025 - RNA, 19 nt, Artificial Sequence
  Description of Artificial Sequence: Synthetic oligonucleotide
  Antisense strand to SEQ ID NO: 800024
ugacaaagcagacauggca

SEQ ID NO: 800026 - RNA, 19 nt, Artificial Sequence
  Description of Artificial Sequence: Synthetic oligonucleotide
  Sense strand starting at position 3941 of SEQ ID NO: 587543
gcuguucugugccugaaga

SEQ ID NO: 800027 - RNA, 19 nt, Artificial Sequence
  Description of Artificial Sequence: Synthetic oligonucleotide
  Antisense strand to SEQ ID NO: 800026
ucuucaggcacagaacagc

SEQ ID NO: 800028 - RNA, 19 nt, Artificial Sequence
  Description of Artificial Sequence: Synthetic oligonucleotide
  Sense strand starting at position 3942 of SEQ ID NO: 587543
cuguucugugccugaagac

SEQ ID NO: 800029 - RNA, 19 nt, Artificial Sequence
  Description of Artificial Sequence: Synthetic oligonucleotide
  Antisense strand to SEQ ID NO: 800028
gucuucaggcacagaacag

SEQ ID NO: 800030 - RNA, 19 nt, Artificial Sequence
  Description of Artificial Sequence: Synthetic oligonucleotide
  Sense strand starting at position 245 of SEQ ID NO: 587544
cugaguaagcaucaguaaa

SEQ ID NO: 800031 - RNA, 19 nt, Artificial Sequence
  Description of Artificial Sequence: Synthetic oligonucleotide
  Antisense strand to SEQ ID NO: 800030
uuuacugaugcuuacucag

SEQ ID NO: 800032 - RNA, 19 nt, Artificial Sequence
  Description of Artificial Sequence: Synthetic oligonucleotide
  Sense strand starting at position 247 of SEQ ID NO: 587544
gaguaagcaucaguaaaug

SEQ ID NO: 800033 - RNA, 19 nt, Artificial Sequence
  Description of Artificial Sequence: Synthetic oligonucleotide
  Antisense strand to SEQ ID NO: 800032
cauuuacugaugcuuacuc

SEQ ID NO: 800034 - RNA, 19 nt, Artificial Sequence
  Description of Artificial Sequence: Synthetic oligonucleotide
  Sense strand starting at position 257 of SEQ ID NO: 587544
caguaaauguuagcaauga

SEQ ID NO: 800035 - RNA, 19 nt, Artificial Sequence
  Description of Artificial Sequence: Synthetic oligonucleotide
  Antisense strand to SEQ ID NO: 800034
ucauugcuaacauuuacug

SEQ ID NO: 800036 - RNA, 19 nt, Artificial Sequence
  Description of Artificial Sequence: Synthetic oligonucleotide
  Sense strand starting at position 261 of SEQ ID NO: 587544
aaauguuagcaaugaugac

SEQ ID NO: 800037 - RNA, 19 nt, Artificial Sequence
  Description of Artificial Sequence: Synthetic oligonucleotide
  Antisense strand to SEQ ID NO: 800036
gucaucauugcuaacauuu

SEQ ID NO: 800038 - RNA, 19 nt, Artificial Sequence
  Description of Artificial Sequence: Synthetic oligonucleotide
  Sense strand starting at position 265 of SEQ ID NO: 587544
guuagcaaugaugacucua

SEQ ID NO: 800039 - RNA, 19 nt, Artificial Sequence
  Description of Artificial Sequence: Synthetic oligonucleotide
  Antisense strand to SEQ ID NO: 800038
uagagucaucauugcuaac

SEQ ID NO: 800040 - RNA, 19 nt, Artificial Sequence
  Description of Artificial Sequence: Synthetic oligonucleotide
  Sense strand starting at position 488 of SEQ ID NO: 587544
acaguacccggcuaaagaa

SEQ ID NO: 800041 - RNA, 19 nt, Artificial Sequence
  Description of Artificial Sequence: Synthetic oligonucleotide
  Antisense strand to SEQ ID NO: 800040
uucuuuagccggguacugu

SEQ ID NO: 800042 - RNA, 19 nt, Artificial Sequence
  Description of Artificial Sequence: Synthetic oligonucleotide
  Sense strand starting at position 770 of SEQ ID NO: 587544
gaaguagcacuugaauuau

SEQ ID NO: 800043 - RNA, 19 nt, Artificial Sequence
  Description of Artificial Sequence: Synthetic oligonucleotide
  Antisense strand to SEQ ID NO: 800042
auaauucaagugcuacuuc

SEQ ID NO: 800044 - RNA, 19 nt, Artificial Sequence
  Description of Artificial Sequence: Synthetic oligonucleotide
  Sense strand starting at position 889 of SEQ ID NO: 587544
cucaaugacuuccuguuga

SEQ ID NO: 800045 - RNA, 19 nt, Artificial Sequence
  Description of Artificial Sequence: Synthetic oligonucleotide
  Antisense strand to SEQ ID NO: 800044
ucaacaggaagucauugag

SEQ ID NO: 800046 - RNA, 19 nt, Artificial Sequence
  Description of Artificial Sequence: Synthetic oligonucleotide
  Sense strand starting at position 1182 of SEQ ID NO: 587544
aaaggagggagcuguugau

SEQ ID NO: 800047 - RNA, 19 nt, Artificial Sequence
  Description of Artificial Sequence: Synthetic oligonucleotide
  Antisense strand to SEQ ID NO: 800046
aucaacagcucccuccuuu

SEQ ID NO: 800048 - RNA, 19 nt, Artificial Sequence
  Description of Artificial Sequence: Synthetic oligonucleotide
  Sense strand starting at position 1246 of SEQ ID NO: 587544
augaaagaaguuggucaua

SEQ ID NO: 800049 - RNA, 19 nt, Artificial Sequence
  Description of Artificial Sequence: Synthetic oligonucleotide
  Antisense strand to SEQ ID NO: 800048
uaugaccaacuucuuucau

SEQ ID NO: 800050 - RNA, 19 nt, Artificial Sequence
  Description of Artificial Sequence: Synthetic oligonucleotide
  Sense strand starting at position 1416 of SEQ ID NO: 587544
uucugaagaaaguggugau

SEQ ID NO: 800051 - RNA, 19 nt, Artificial Sequence
  Description of Artificial Sequence: Synthetic oligonucleotide
  Antisense strand to SEQ ID NO: 800050
aucaccacuuucuucagaa

SEQ ID NO: 800052 - RNA, 19 nt, Artificial Sequence
  Description of Artificial Sequence: Synthetic oligonucleotide
  Sense strand starting at position 1492 of SEQ ID NO: 587544
ugaaucuuacgguacguga

SEQ ID NO: 800053 - RNA, 19 nt, Artificial Sequence
  Description of Artificial Sequence: Synthetic oligonucleotide
  Antisense strand to SEQ ID NO: 800052
ucacguaccguaagauuca

SEQ ID NO: 800054 - RNA, 19 nt, Artificial Sequence
  Description of Artificial Sequence: Synthetic oligonucleotide
  Sense strand starting at position 1501 of SEQ ID NO: 587544
cgguacgugaauuauaucu

SEQ ID NO: 800055 - RNA, 19 nt, Artificial Sequence
  Description of Artificial Sequence: Synthetic oligonucleotide
  Antisense strand to SEQ ID NO: 800054
agauauaauucacguaccg

SEQ ID NO: 800056 - RNA, 19 nt, Artificial Sequence
  Description of Artificial Sequence: Synthetic oligonucleotide
  Sense strand starting at position 1882 of SEQ ID NO: 587544
ucacccuucugaucaagga

SEQ ID NO: 800057 - RNA, 19 nt, Artificial Sequence
  Description of Artificial Sequence: Synthetic oligonucleotide
  Antisense strand to SEQ ID NO: 800056
uccuugaucagaaggguga

SEQ ID NO: 800058 - RNA, 19 nt, Artificial Sequence
  Description of Artificial Sequence: Synthetic oligonucleotide
  Sense strand starting at position 1965 of SEQ ID NO: 587544
uggcuucuuacuggacuga

SEQ ID NO: 800059 - RNA, 19 nt, Artificial Sequence
  Description of Artificial Sequence: Synthetic oligonucleotide
  Antisense strand to SEQ ID NO: 800058
ucaguccaguaagaagcca

SEQ ID NO: 800060 - RNA, 19 nt, Artificial Sequence
  Description of Artificial Sequence: Synthetic oligonucleotide
  Sense strand starting at position 2591 of SEQ ID NO: 587544
caaggucacugucugaaca

SEQ ID NO: 800061 - RNA, 19 nt, Artificial Sequence
  Description of Artificial Sequence: Synthetic oligonucleotide
  Antisense strand to SEQ ID NO: 800060
uguucagacagugaccuug

SEQ ID NO: 800062 - RNA, 19 nt, Artificial Sequence
  Description of Artificial Sequence: Synthetic oligonucleotide
  Sense strand starting at position 2604 of SEQ ID NO: 587544
ugaacagagcccuagugau

SEQ ID NO: 800063 - RNA, 19 nt, Artificial Sequence
  Description of Artificial Sequence: Synthetic oligonucleotide
  Antisense strand to SEQ ID NO: 800062
aucacuagggcucuguuca

SEQ ID NO: 800064 - RNA, 19 nt, Artificial Sequence
  Description of Artificial Sequence: Synthetic oligonucleotide
  Sense strand starting at position 2610 of SEQ ID NO: 587544
gagcccuagugauugggau

SEQ ID NO: 800065 - RNA, 19 nt, Artificial Sequence
  Description of Artificial Sequence: Synthetic oligonucleotide
  Antisense strand to SEQ ID NO: 800064
aucccaaucacuagggcuc

SEQ ID NO: 800066 - RNA, 19 nt, Artificial Sequence
  Description of Artificial Sequence: Synthetic oligonucleotide
  Sense strand starting at position 2611 of SEQ ID NO: 587544
agcccuagugauugggaua

SEQ ID NO: 800067 - RNA, 19 nt, Artificial Sequence
  Description of Artificial Sequence: Synthetic oligonucleotide
  Antisense strand to SEQ ID NO: 800066
uaucccaaucacuagggcu

SEQ ID NO: 800068 - RNA, 19 nt, Artificial Sequence
  Description of Artificial Sequence: Synthetic oligonucleotide
  Sense strand starting at position 2612 of SEQ ID NO: 587544
gcccuagugauugggauau

SEQ ID NO: 800069 - RNA, 19 nt, Artificial Sequence
  Description of Artificial Sequence: Synthetic oligonucleotide
  Antisense strand to SEQ ID NO: 800068
auaucccaaucacuagggc

SEQ ID NO: 800070 - RNA, 19 nt, Artificial Sequence
  Description of Artificial Sequence: Synthetic oligonucleotide
  Sense strand starting at position 2661 of SEQ ID NO: 587544
uggcccagaucccuuguaa

SEQ ID NO: 800071 - RNA, 19 nt, Artificial Sequence
  Description of Artificial Sequence: Synthetic oligonucleotide
  Antisense strand to SEQ ID NO: 800070
uuacaagggaucugggcca

SEQ ID NO: 800072 - RNA, 19 nt, Artificial Sequence
  Description of Artificial Sequence: Synthetic oligonucleotide
  Sense strand starting at position 2676 of SEQ ID NO: 587544
guaaguauucugcuguguc

SEQ ID NO: 800073 - RNA, 19 nt, Artificial Sequence
  Description of Artificial Sequence: Synthetic oligonucleotide
  Antisense strand to SEQ ID NO: 800072
gacacagcagaauacuuac

SEQ ID NO: 800074 - RNA, 19 nt, Artificial Sequence
  Description of Artificial Sequence: Synthetic oligonucleotide
  Sense strand starting at position 2701 of SEQ ID NO: 587544
ggugguacuuggcuaaaua

SEQ ID NO: 800075 - RNA, 19 nt, Artificial Sequence
  Description of Artificial Sequence: Synthetic oligonucleotide
  Antisense strand to SEQ ID NO: 800074
uauuuagccaaguaccacc

SEQ ID NO: 800076 - RNA, 19 nt, Artificial Sequence
  Description of Artificial Sequence: Synthetic oligonucleotide
  Sense strand starting at position 2702 of SEQ ID NO: 587544
gugguacuuggcuaaauau

SEQ ID NO: 800077 - RNA, 19 nt, Artificial Sequence
  Description of Artificial Sequence: Synthetic oligonucleotide
  Antisense strand to SEQ ID NO: 800076
auauuuagccaaguaccac

SEQ ID NO: 800078 - RNA, 19 nt, Artificial Sequence
  Description of Artificial Sequence: Synthetic oligonucleotide
  Sense strand starting at position 2744 of SEQ ID NO: 587544
uuguaaguacgcuucguuu

SEQ ID NO: 800079 - RNA, 19 nt, Artificial Sequence
  Description of Artificial Sequence: Synthetic oligonucleotide
  Antisense strand to SEQ ID NO: 800078
aaacgaagcguacuuacaa

SEQ ID NO: 800080 - RNA, 19 nt, Artificial Sequence
  Description of Artificial Sequence: Synthetic oligonucleotide
  Sense strand starting at position 2774 of SEQ ID NO: 587544
cgggcacucauagauauau

SEQ ID NO: 800081 - RNA, 19 nt, Artificial Sequence
  Description of Artificial Sequence: Synthetic oligonucleotide
  Antisense strand to SEQ ID NO: 800080
auauaucuaugagugcccg

SEQ ID NO: 800082 - RNA, 19 nt, Artificial Sequence
  Description of Artificial Sequence: Synthetic oligonucleotide
  Sense strand starting at position 2783 of SEQ ID NO: 587544
auagauauaugagucccua

SEQ ID NO: 800083 - RNA, 19 nt, Artificial Sequence
  Description of Artificial Sequence: Synthetic oligonucleotide
  Antisense strand to SEQ ID NO: 800082
uagggacucauauaucuau

SEQ ID NO: 800084 - RNA, 19 nt, Artificial Sequence
  Description of Artificial Sequence: Synthetic oligonucleotide
  Sense strand starting at position 2787 of SEQ ID NO: 587544
auauaugagucccuacuuu

SEQ ID NO: 800085 - RNA, 19 nt, Artificial Sequence
  Description of Artificial Sequence: Synthetic oligonucleotide
  Antisense strand to SEQ ID NO: 800084
aaaguagggacucauauau

SEQ ID NO: 800086 - RNA, 19 nt, Artificial Sequence
  Description of Artificial Sequence: Synthetic oligonucleotide
  Sense strand starting at position 3077 of SEQ ID NO: 587544
ccacuagaguccuccugua

SEQ ID NO: 800087 - RNA, 19 nt, Artificial Sequence
  Description of Artificial Sequence: Synthetic oligonucleotide
  Antisense strand to SEQ ID NO: 800086
uacaggaggacucuagugg

SEQ ID NO: 800088 - RNA, 19 nt, Artificial Sequence
  Description of Artificial Sequence: Synthetic oligonucleotide
  Sense strand starting at position 3100 of SEQ ID NO: 587544
cacuguggauuccugaaua

SEQ ID NO: 800089 - RNA, 19 nt, Artificial Sequence
  Description of Artificial Sequence: Synthetic oligonucleotide
  Antisense strand to SEQ ID NO: 800088
uauucaggaauccacagug

SEQ ID NO: 800090 - RNA, 19 nt, Artificial Sequence
  Description of Artificial Sequence: Synthetic oligonucleotide
  Sense strand starting at position 3568 of SEQ ID NO: 587544
uugugcuguaccgcauaau

SEQ ID NO: 800091 - RNA, 19 nt, Artificial Sequence
  Description of Artificial Sequence: Synthetic oligonucleotide
  Antisense strand to SEQ ID NO: 800090
auuaugcgguacagcacaa

SEQ ID NO: 800092 - RNA, 19 nt, Artificial Sequence
  Description of Artificial Sequence: Synthetic oligonucleotide
  Sense strand starting at position 3571 of SEQ ID NO: 587544
ugcuguaccgcauaauuua

SEQ ID NO: 800093 - RNA, 19 nt, Artificial Sequence
  Description of Artificial Sequence: Synthetic oligonucleotide
  Antisense strand to SEQ ID NO: 800092
uaaauuaugcgguacagca

SEQ ID NO: 800094 - RNA, 19 nt, Artificial Sequence
  Description of Artificial Sequence: Synthetic oligonucleotide
  Sense strand starting at position 3705 of SEQ ID NO: 587544
guuugaaucucagcacaau

SEQ ID NO: 800095 - RNA, 19 nt, Artificial Sequence
  Description of Artificial Sequence: Synthetic oligonucleotide
  Antisense strand to SEQ ID NO: 800094
auugugcugagauucaaac

SEQ ID NO: 800096 - RNA, 19 nt, Artificial Sequence
  Description of Artificial Sequence: Synthetic oligonucleotide
  Sense strand starting at position 3734 of SEQ ID NO: 587544
guagccuuggacugguaua

SEQ ID NO: 800097 - RNA, 19 nt, Artificial Sequence
  Description of Artificial Sequence: Synthetic oligonucleotide
  Antisense strand to SEQ ID NO: 800096
uauaccaguccaaggcuac

SEQ ID NO: 800098 - RNA, 19 nt, Artificial Sequence
  Description of Artificial Sequence: Synthetic oligonucleotide
  Sense strand starting at position 3804 of SEQ ID NO: 587544
ugaccacagaguugugaga

SEQ ID NO: 800099 - RNA, 19 nt, Artificial Sequence
  Description of Artificial Sequence: Synthetic oligonucleotide
  Antisense strand to SEQ ID NO: 800098
ucucacaacucugugguca

SEQ ID NO: 800100 - RNA, 19 nt, Artificial Sequence
  Description of Artificial Sequence: Synthetic oligonucleotide
  Sense strand starting at position 3832 of SEQ ID NO: 587544
auaagucauguagaauagu

SEQ ID NO: 800101 - RNA, 19 nt, Artificial Sequence
  Description of Artificial Sequence: Synthetic oligonucleotide
  Antisense strand to SEQ ID NO: 800100
acuauucuacaugacuuau

SEQ ID NO: 800102 - RNA, 19 nt, Artificial Sequence
  Description of Artificial Sequence: Synthetic oligonucleotide
  Sense strand starting at position 3867 of SEQ ID NO: 587544
ucucaaugcugccuaagau

SEQ ID NO: 800103 - RNA, 19 nt, Artificial Sequence
  Description of Artificial Sequence: Synthetic oligonucleotide
  Antisense strand to SEQ ID NO: 800102
aucuuaggcagcauugaga

SEQ ID NO: 800104 - RNA, 19 nt, Artificial Sequence
  Description of Artificial Sequence: Synthetic oligonucleotide
  Sense strand starting at position 3868 of SEQ ID NO: 587544
cucaaugcugccuaagaug

SEQ ID NO: 800105 - RNA, 19 nt, Artificial Sequence
  Description of Artificial Sequence: Synthetic oligonucleotide
  Antisense strand to SEQ ID NO: 800104
caucuuaggcagcauugag

SEQ ID NO: 800106 - RNA, 19 nt, Artificial Sequence
  Description of Artificial Sequence: Synthetic oligonucleotide
  Sense strand starting at position 3924 of SEQ ID NO: 587544
ugaaacuauugggcacaua

SEQ ID NO: 800107 - RNA, 19 nt, Artificial Sequence
  Description of Artificial Sequence: Synthetic oligonucleotide
  Antisense strand to SEQ ID NO: 800106
uaugugcccaauaguuuca

SEQ ID NO: 800108 - RNA, 19 nt, Artificial Sequence
  Description of Artificial Sequence: Synthetic oligonucleotide
  Sense strand starting at position 3927 of SEQ ID NO: 587544
aacuauugggcacauagua

SEQ ID NO: 800109 - RNA, 19 nt, Artificial Sequence
  Description of Artificial Sequence: Synthetic oligonucleotide
  Antisense strand to SEQ ID NO: 800108
uacuaugugcccaauaguu

SEQ ID NO: 800110 - RNA, 19 nt, Artificial Sequence
  Description of Artificial Sequence: Synthetic oligonucleotide
  Sense strand starting at position 172 of SEQ ID NO: 587545
acagaaacaugggaguauu

SEQ ID NO: 800111 - RNA, 19 nt, Artificial Sequence
  Description of Artificial Sequence: Synthetic oligonucleotide
  Antisense strand to SEQ ID NO: 800110
aauacucccauguuucugu

SEQ ID NO: 800112 - RNA, 19 nt, Artificial Sequence
  Description of Artificial Sequence: Synthetic oligonucleotide
  Sense strand starting at position 186 of SEQ ID NO: 587545
guauuuccuuugcacaaga

SEQ ID NO: 800113 - RNA, 19 nt, Artificial Sequence
  Description of Artificial Sequence: Synthetic oligonucleotide
  Antisense strand to SEQ ID NO: 800112
ucuugugcaaaggaaauac

SEQ ID NO: 800114 - RNA, 19 nt, Artificial Sequence
  Description of Artificial Sequence: Synthetic oligonucleotide
  Sense strand starting at position 300 of SEQ ID NO: 587545
agaggugucagcgggacaa

SEQ ID NO: 800115 - RNA, 19 nt, Artificial Sequence
  Description of Artificial Sequence: Synthetic oligonucleotide
  Antisense strand to SEQ ID NO: 800114
uugucccgcugacaccucu

SEQ ID NO: 800116 - RNA, 19 nt, Artificial Sequence
  Description of Artificial Sequence: Synthetic oligonucleotide
  Sense strand starting at position 324 of SEQ ID NO: 587545
aaguguuucuaacaagagc

SEQ ID NO: 800117 - RNA, 19 nt, Artificial Sequence
  Description of Artificial Sequence: Synthetic oligonucleotide
  Antisense strand to SEQ ID NO: 800116
gcucuuguuagaaacacuu

SEQ ID NO: 800118 - RNA, 19 nt, Artificial Sequence
  Description of Artificial Sequence: Synthetic oligonucleotide
  Sense strand starting at position 327 of SEQ ID NO: 587545
uguuucuaacaagagcaaa

SEQ ID NO: 800119 - RNA, 19 nt, Artificial Sequence
  Description of Artificial Sequence: Synthetic oligonucleotide
  Antisense strand to SEQ ID NO: 800118
uuugcucuuguuagaaaca

SEQ ID NO: 800120 - RNA, 19 nt, Artificial Sequence
  Description of Artificial Sequence: Synthetic oligonucleotide
  Sense strand starting at position 340 of SEQ ID NO: 587545
agcaaagauuuccagucuu

SEQ ID NO: 800121 - RNA, 19 nt, Artificial Sequence
  Description of Artificial Sequence: Synthetic oligonucleotide
  Antisense strand to SEQ ID NO: 800120
aagacuggaaaucuuugcu

SEQ ID NO: 800122 - RNA, 19 nt, Artificial Sequence
  Description of Artificial Sequence: Synthetic oligonucleotide
  Sense strand starting at position 369 of SEQ ID NO: 587545
ccaaacacucuguagguaa

SEQ ID NO: 800123 - RNA, 19 nt, Artificial Sequence
  Description of Artificial Sequence: Synthetic oligonucleotide
  Antisense strand to SEQ ID NO: 800122
uuaccuacagaguguuugg

SEQ ID NO: 800124 - RNA, 19 nt, Artificial Sequence
  Description of Artificial Sequence: Synthetic oligonucleotide
  Sense strand starting at position 386 of SEQ ID NO: 587545
aaagcagagccucaguaaa

SEQ ID NO: 800125 - RNA, 19 nt, Artificial Sequence
  Description of Artificial Sequence: Synthetic oligonucleotide
  Antisense strand to SEQ ID NO: 800124
uuuacugaggcucugcuuu

SEQ ID NO: 800126 - RNA, 19 nt, Artificial Sequence
  Description of Artificial Sequence: Synthetic oligonucleotide
  Sense strand starting at position 669 of SEQ ID NO: 587545
gcgggaucuugguucagug

SEQ ID NO: 800127 - RNA, 19 nt, Artificial Sequence
  Description of Artificial Sequence: Synthetic oligonucleotide
  Antisense strand to SEQ ID NO: 800126
cacugaaccaagaucccgc

SEQ ID NO: 800128 - RNA, 19 nt, Artificial Sequence
  Description of Artificial Sequence: Synthetic oligonucleotide
  Sense strand starting at position 1000 of SEQ ID NO: 587545
agcagauucugaucuccaa

SEQ ID NO: 800129 - RNA, 19 nt, Artificial Sequence
  Description of Artificial Sequence: Synthetic oligonucleotide
  Antisense strand to SEQ ID NO: 800128
uuggagaucagaaucugcu

SEQ ID NO: 800130 - RNA, 19 nt, Artificial Sequence
  Description of Artificial Sequence: Synthetic oligonucleotide
  Sense strand starting at position 1052 of SEQ ID NO: 587545
ggagcuguccggucuugca

SEQ ID NO: 800131 - RNA, 19 nt, Artificial Sequence
  Description of Artificial Sequence: Synthetic oligonucleotide
  Antisense strand to SEQ ID NO: 800130
ugcaagaccggacagcucc

SEQ ID NO: 800132 - RNA, 19 nt, Artificial Sequence
  Description of Artificial Sequence: Synthetic oligonucleotide
  Sense strand starting at position 1240 of SEQ ID NO: 587545
ugccuuuccuguuccacua

SEQ ID NO: 800133 - RNA, 19 nt, Artificial Sequence
  Description of Artificial Sequence: Synthetic oligonucleotide
  Antisense strand to SEQ ID NO: 800132
uaguggaacaggaaaggca

SEQ ID NO: 800134 - RNA, 19 nt, Artificial Sequence
  Description of Artificial Sequence: Synthetic oligonucleotide
  Sense strand starting at position 2572 of SEQ ID NO: 587545
agccguuccauuugugcau

SEQ ID NO: 800135 - RNA, 19 nt, Artificial Sequence
  Description of Artificial Sequence: Synthetic oligonucleotide
  Antisense strand to SEQ ID NO: 800134
augcacaaauggaacggcu

SEQ ID NO: 800136 - RNA, 19 nt, Artificial Sequence
  Description of Artificial Sequence: Synthetic oligonucleotide
  Sense strand starting at position 2581 of SEQ ID NO: 587545
auuugugcauccugccaau

SEQ ID NO: 800137 - RNA, 19 nt, Artificial Sequence
  Description of Artificial Sequence: Synthetic oligonucleotide
  Antisense strand to SEQ ID NO: 800136
auuggcaggaugcacaaau

SEQ ID NO: 800138 - RNA, 19 nt, Artificial Sequence
  Description of Artificial Sequence: Synthetic oligonucleotide
  Sense strand starting at position 2584 of SEQ ID NO: 587545
ugugcauccugccaauaaa

SEQ ID NO: 800139 - RNA, 19 nt, Artificial Sequence
  Description of Artificial Sequence: Synthetic oligonucleotide
  Antisense strand to SEQ ID NO: 800138
uuuauuggcaggaugcaca

SEQ ID NO: 800140 - RNA, 19 nt, Artificial Sequence
  Description of Artificial Sequence: Synthetic oligonucleotide
  Sense strand starting at position 2637 of SEQ ID NO: 587545
cuacguauacgcuaguuaa

SEQ ID NO: 800141 - RNA, 19 nt, Artificial Sequence
  Description of Artificial Sequence: Synthetic oligonucleotide
  Antisense strand to SEQ ID NO: 800140
uuaacuagcguauacguag

SEQ ID NO: 800142 - RNA, 19 nt, Artificial Sequence
  Description of Artificial Sequence: Synthetic oligonucleotide
  Sense strand starting at position 2640 of SEQ ID NO: 587545
cguauacgcuaguuaauug

SEQ ID NO: 800143 - RNA, 19 nt, Artificial Sequence
  Description of Artificial Sequence: Synthetic oligonucleotide
  Antisense strand to SEQ ID NO: 800142
caauuaacuagcguauacg

SEQ ID NO: 800144 - RNA, 19 nt, Artificial Sequence
  Description of Artificial Sequence: Synthetic oligonucleotide
  Sense strand starting at position 2847 of SEQ ID NO: 587545
ccgcgcuggguuguugaaa

SEQ ID NO: 800145 - RNA, 19 nt, Artificial Sequence
  Description of Artificial Sequence: Synthetic oligonucleotide
  Antisense strand to SEQ ID NO: 800144
uuucaacaacccagcgcgg

SEQ ID NO: 800146 - RNA, 19 nt, Artificial Sequence
  Description of Artificial Sequence: Synthetic oligonucleotide
  Sense strand starting at position 3027 of SEQ ID NO: 587545
uaguuauugugauugugua

SEQ ID NO: 800147 - RNA, 19 nt, Artificial Sequence
  Description of Artificial Sequence: Synthetic oligonucleotide
  Antisense strand to SEQ ID NO: 800146
uacacaaucacaauaacua

SEQ ID NO: 800148 - RNA, 19 nt, Artificial Sequence
  Description of Artificial Sequence: Synthetic oligonucleotide
  Sense strand starting at position 3028 of SEQ ID NO: 587545
aguuauugugauuguguag

SEQ ID NO: 800149 - RNA, 19 nt, Artificial Sequence
  Description of Artificial Sequence: Synthetic oligonucleotide
  Antisense strand to SEQ ID NO: 800148
cuacacaaucacaauaacu

SEQ ID NO: 800150 - RNA, 19 nt, Artificial Sequence
  Description of Artificial Sequence: Synthetic oligonucleotide
  Sense strand starting at position 3037 of SEQ ID NO: 587545
gauuguguagccgacugaa

SEQ ID NO: 800151 - RNA, 19 nt, Artificial Sequence
  Description of Artificial Sequence: Synthetic oligonucleotide
  Antisense strand to SEQ ID NO: 800150
uucagucggcuacacaauc

SEQ ID NO: 800152 - RNA, 19 nt, Artificial Sequence
  Description of Artificial Sequence: Synthetic oligonucleotide
  Sense strand starting at position 3065 of SEQ ID NO: 587545
acaucaugacucuguguga

SEQ ID NO: 800153 - RNA, 19 nt, Artificial Sequence
  Description of Artificial Sequence: Synthetic oligonucleotide
  Antisense strand to SEQ ID NO: 800152
ucacacagagucaugaugu

SEQ ID NO: 800154 - RNA, 19 nt, Artificial Sequence
  Description of Artificial Sequence: Synthetic oligonucleotide
  Sense strand starting at position 3068 of SEQ ID NO: 587545
ucaugacucugugugagag

SEQ ID NO: 800155 - RNA, 19 nt, Artificial Sequence
  Description of Artificial Sequence: Synthetic oligonucleotide
  Antisense strand to SEQ ID NO: 800154
cucucacacagagucauga

SEQ ID NO: 800156 - RNA, 19 nt, Artificial Sequence
  Description of Artificial Sequence: Synthetic oligonucleotide
  Sense strand starting at position 3069 of SEQ ID NO: 587545
caugacucugugugagaga

SEQ ID NO: 800157 - RNA, 19 nt, Artificial Sequence
  Description of Artificial Sequence: Synthetic oligonucleotide
  Antisense strand to SEQ ID NO: 800156
ucucucacacagagucaug

SEQ ID NO: 800158 - RNA, 19 nt, Artificial Sequence
  Description of Artificial Sequence: Synthetic oligonucleotide
  Sense strand starting at position 3086 of SEQ ID NO: 587545
gaggcauugugugaacacu

SEQ ID NO: 800159 - RNA, 19 nt, Artificial Sequence
  Description of Artificial Sequence: Synthetic oligonucleotide
  Antisense strand to SEQ ID NO: 800158
aguguucacacaaugccuc

SEQ ID NO: 800160 - RNA, 19 nt, Artificial Sequence
  Description of Artificial Sequence: Synthetic oligonucleotide
  Sense strand starting at position 3095 of SEQ ID NO: 587545
ugugaacacucgguaugca

SEQ ID NO: 800161 - RNA, 19 nt, Artificial Sequence
  Description of Artificial Sequence: Synthetic oligonucleotide
  Antisense strand to SEQ ID NO: 800160
ugcauaccgaguguucaca

SEQ ID NO: 800162 - RNA, 19 nt, Artificial Sequence
  Description of Artificial Sequence: Synthetic oligonucleotide
  Sense strand starting at position 3096 of SEQ ID NO: 587545
gugaacacucgguaugcaa

SEQ ID NO: 800163 - RNA, 19 nt, Artificial Sequence
  Description of Artificial Sequence: Synthetic oligonucleotide
  Antisense strand to SEQ ID NO: 800162
uugcauaccgaguguucac

SEQ ID NO: 800164 - RNA, 19 nt, Artificial Sequence
  Description of Artificial Sequence: Synthetic oligonucleotide
  Sense strand starting at position 3098 of SEQ ID NO: 587545
gaacacucgguaugcaaua

SEQ ID NO: 800165 - RNA, 19 nt, Artificial Sequence
  Description of Artificial Sequence: Synthetic oligonucleotide
  Antisense strand to SEQ ID NO: 800164
uauugcauaccgaguguuc

SEQ ID NO: 800166 - RNA, 19 nt, Artificial Sequence
  Description of Artificial Sequence: Synthetic oligonucleotide
  Sense strand starting at position 3103 of SEQ ID NO: 587545
cucgguaugcaauagcuaa

SEQ ID NO: 800167 - RNA, 19 nt, Artificial Sequence
  Description of Artificial Sequence: Synthetic oligonucleotide
  Antisense strand to SEQ ID NO: 800166
uuagcuauugcauaccgag

SEQ ID NO: 800168 - RNA, 19 nt, Artificial Sequence
  Description of Artificial Sequence: Synthetic oligonucleotide
  Sense strand starting at position 3141 of SEQ ID NO: 587545
aagugagacuuguaaacua

SEQ ID NO: 800169 - RNA, 19 nt, Artificial Sequence
  Description of Artificial Sequence: Synthetic oligonucleotide
  Antisense strand to SEQ ID NO: 800168
uaguuuacaagucucacuu

SEQ ID NO: 800170 - RNA, 19 nt, Artificial Sequence
  Description of Artificial Sequence: Synthetic oligonucleotide
  Sense strand starting at position 3149 of SEQ ID NO: 587545
cuuguaaacuauuaggaaa

SEQ ID NO: 800171 - RNA, 19 nt, Artificial Sequence
  Description of Artificial Sequence: Synthetic oligonucleotide
  Antisense strand to SEQ ID NO: 800170
uuuccuaauaguuuacaag

SEQ ID NO: 800172 - RNA, 19 nt, Artificial Sequence
  Description of Artificial Sequence: Synthetic oligonucleotide
  Sense strand starting at position 3664 of SEQ ID NO: 587545
gcgugguugcgguuagagu

SEQ ID NO: 800173 - RNA, 19 nt, Artificial Sequence
  Description of Artificial Sequence: Synthetic oligonucleotide
  Antisense strand to SEQ ID NO: 800172
acucuaaccgcaaccacgc

SEQ ID NO: 800174 - RNA, 19 nt, Artificial Sequence
  Description of Artificial Sequence: Synthetic oligonucleotide
  Sense strand starting at position 3673 of SEQ ID NO: 587545
cgguuagagucucuaucau

SEQ ID NO: 800175 - RNA, 19 nt, Artificial Sequence
  Description of Artificial Sequence: Synthetic oligonucleotide
  Antisense strand to SEQ ID NO: 800174
augauagagacucuaaccg

SEQ ID NO: 800176 - RNA, 19 nt, Artificial Sequence
  Description of Artificial Sequence: Synthetic oligonucleotide
  Sense strand starting at position 3685 of SEQ ID NO: 587545
cuaucauuccugugacucu

SEQ ID NO: 800177 - RNA, 19 nt, Artificial Sequence
  Description of Artificial Sequence: Synthetic oligonucleotide
  Antisense strand to SEQ ID NO: 800176
agagucacaggaaugauag

SEQ ID NO: 800178 - RNA, 19 nt, Artificial Sequence
  Description of Artificial Sequence: Synthetic oligonucleotide
  Sense strand starting at position 3726 of SEQ ID NO: 587545
ugaucaaucguugguccca

SEQ ID NO: 800179 - RNA, 19 nt, Artificial Sequence
  Description of Artificial Sequence: Synthetic oligonucleotide
  Antisense strand to SEQ ID NO: 800178
ugggaccaacgauugauca

SEQ ID NO: 800180 - RNA, 19 nt, Artificial Sequence
  Description of Artificial Sequence: Synthetic oligonucleotide
  Sense strand starting at position 3727 of SEQ ID NO: 587545
gaucaaucguuggucccaa

SEQ ID NO: 800181 - RNA, 19 nt, Artificial Sequence
  Description of Artificial Sequence: Synthetic oligonucleotide
  Antisense strand to SEQ ID NO: 800180
uugggaccaacgauugauc

SEQ ID NO: 800182 - RNA, 19 nt, Artificial Sequence
  Description of Artificial Sequence: Synthetic oligonucleotide
  Sense strand starting at position 3728 of SEQ ID NO: 587545
aucaaucguuggucccaau

SEQ ID NO: 800183 - RNA, 19 nt, Artificial Sequence
  Description of Artificial Sequence: Synthetic oligonucleotide
  Antisense strand to SEQ ID NO: 800182
auugggaccaacgauugau

SEQ ID NO: 800184 - RNA, 19 nt, Artificial Sequence
  Description of Artificial Sequence: Synthetic oligonucleotide
  Sense strand starting at position 3737 of SEQ ID NO: 587545
uggucccaaucugguuaaa

SEQ ID NO: 800185 - RNA, 19 nt, Artificial Sequence
  Description of Artificial Sequence: Synthetic oligonucleotide
  Antisense strand to SEQ ID NO: 800184
uuuaaccagauugggacca

SEQ ID NO: 800186 - RNA, 19 nt, Artificial Sequence
  Description of Artificial Sequence: Synthetic oligonucleotide
  Sense strand starting at position 3739 of SEQ ID NO: 587545
gucccaaucugguuaaaug

SEQ ID NO: 800187 - RNA, 19 nt, Artificial Sequence
  Description of Artificial Sequence: Synthetic oligonucleotide
  Antisense strand to SEQ ID NO: 800186
cauuuaaccagauugggac

SEQ ID NO: 800188 - RNA, 19 nt, Artificial Sequence
  Description of Artificial Sequence: Synthetic oligonucleotide
  Sense strand starting at position 3959 of SEQ ID NO: 587545
gguagagagcaguguuagu

SEQ ID NO: 800189 - RNA, 19 nt, Artificial Sequence
  Description of Artificial Sequence: Synthetic oligonucleotide
  Antisense strand to SEQ ID NO: 800188
acuaacacugcucucuacc

SEQ ID NO: 800190 - RNA, 19 nt, Artificial Sequence
  Description of Artificial Sequence: Synthetic oligonucleotide
  Sense strand starting at position 53 of SEQ ID NO: 587546
ccuggcuaugcguaaauuu

SEQ ID NO: 800191 - RNA, 19 nt, Artificial Sequence
  Description of Artificial Sequence: Synthetic oligonucleotide
  Antisense strand to SEQ ID NO: 800190
aaauuuacgcauagccagg

SEQ ID NO: 800192 - RNA, 19 nt, Artificial Sequence
  Description of Artificial Sequence: Synthetic oligonucleotide
  Sense strand starting at position 75 of SEQ ID NO: 587546
ccauguaucaguggacuug

SEQ ID NO: 800193 - RNA, 19 nt, Artificial Sequence
  Description of Artificial Sequence: Synthetic oligonucleotide
  Antisense strand to SEQ ID NO: 800192
caaguccacugauacaugg

SEQ ID NO: 800194 - RNA, 19 nt, Artificial Sequence
  Description of Artificial Sequence: Synthetic oligonucleotide
  Sense strand starting at position 110 of SEQ ID NO: 587546
agccaucucuugugagcau

SEQ ID NO: 800195 - RNA, 19 nt, Artificial Sequence
  Description of Artificial Sequence: Synthetic oligonucleotide
  Antisense strand to SEQ ID NO: 800194
augcucacaagagauggcu

SEQ ID NO: 800196 - RNA, 19 nt, Artificial Sequence
  Description of Artificial Sequence: Synthetic oligonucleotide
  Sense strand starting at position 174 of SEQ ID NO: 587546
uucagagcugguuagugua

SEQ ID NO: 800197 - RNA, 19 nt, Artificial Sequence
  Description of Artificial Sequence: Synthetic oligonucleotide
  Antisense strand to SEQ ID NO: 800196
uacacuaaccagcucugaa

SEQ ID NO: 800198 - RNA, 19 nt, Artificial Sequence
  Description of Artificial Sequence: Synthetic oligonucleotide
  Sense strand starting at position 201 of SEQ ID NO: 587546
uggguucucugcugcgaaa

SEQ ID NO: 800199 - RNA, 19 nt, Artificial Sequence
  Description of Artificial Sequence: Synthetic oligonucleotide
  Antisense strand to SEQ ID NO: 800198
uuucgcagcagagaaccca

SEQ ID NO: 800200 - RNA, 19 nt, Artificial Sequence
  Description of Artificial Sequence: Synthetic oligonucleotide
  Sense strand starting at position 301 of SEQ ID NO: 587546
gggcucugauucuggcuua

SEQ ID NO: 800201 - RNA, 19 nt, Artificial Sequence
  Description of Artificial Sequence: Synthetic oligonucleotide
  Antisense strand to SEQ ID NO: 800200
uaagccagaaucagagccc

SEQ ID NO: 800202 - RNA, 19 nt, Artificial Sequence
  Description of Artificial Sequence: Synthetic oligonucleotide
  Sense strand starting at position 304 of SEQ ID NO: 587546
cucugauucuggcuuaguu

SEQ ID NO: 800203 - RNA, 19 nt, Artificial Sequence
  Description of Artificial Sequence: Synthetic oligonucleotide
  Antisense strand to SEQ ID NO: 800202
aacuaagccagaaucagag

SEQ ID NO: 800204 - RNA, 19 nt, Artificial Sequence
  Description of Artificial Sequence: Synthetic oligonucleotide
  Sense strand starting at position 329 of SEQ ID NO: 587546
gccaacuggccucguaaca

SEQ ID NO: 800205 - RNA, 19 nt, Artificial Sequence
  Description of Artificial Sequence: Synthetic oligonucleotide
  Antisense strand to SEQ ID NO: 800204
uguuacgaggccaguuggc

SEQ ID NO: 800206 - RNA, 19 nt, Artificial Sequence
  Description of Artificial Sequence: Synthetic oligonucleotide
  Sense strand starting at position 339 of SEQ ID NO: 587546
cucguaacauaguaacaua

SEQ ID NO: 800207 - RNA, 19 nt, Artificial Sequence
  Description of Artificial Sequence: Synthetic oligonucleotide
  Antisense strand to SEQ ID NO: 800206
uauguuacuauguuacgag

SEQ ID NO: 800208 - RNA, 19 nt, Artificial Sequence
  Description of Artificial Sequence: Synthetic oligonucleotide
  Sense strand starting at position 347 of SEQ ID NO: 587546
auaguaacauaggacaaau

SEQ ID NO: 800209 - RNA, 19 nt, Artificial Sequence
  Description of Artificial Sequence: Synthetic oligonucleotide
  Antisense strand to SEQ ID NO: 800208
auuuguccuauguuacuau

SEQ ID NO: 800210 - RNA, 19 nt, Artificial Sequence
  Description of Artificial Sequence: Synthetic oligonucleotide
  Sense strand starting at position 385 of SEQ ID NO: 587546
uggauuuccuuguauccaa

SEQ ID NO: 800211 - RNA, 19 nt, Artificial Sequence
  Description of Artificial Sequence: Synthetic oligonucleotide
  Antisense strand to SEQ ID NO: 800210
uuggauacaaggaaaucca

SEQ ID NO: 800212 - RNA, 19 nt, Artificial Sequence
  Description of Artificial Sequence: Synthetic oligonucleotide
  Sense strand starting at position 671 of SEQ ID NO: 587546
cgugaucugucacugcauu

SEQ ID NO: 800213 - RNA, 19 nt, Artificial Sequence
  Description of Artificial Sequence: Synthetic oligonucleotide
  Antisense strand to SEQ ID NO: 800212
aaugcagugacagaucacg

SEQ ID NO: 800214 - RNA, 19 nt, Artificial Sequence
  Description of Artificial Sequence: Synthetic oligonucleotide
  Sense strand starting at position 672 of SEQ ID NO: 587546
gugaucugucacugcauuu

SEQ ID NO: 800215 - RNA, 19 nt, Artificial Sequence
  Description of Artificial Sequence: Synthetic oligonucleotide
  Antisense strand to SEQ ID NO: 800214
aaaugcagugacagaucac

SEQ ID NO: 800216 - RNA, 19 nt, Artificial Sequence
  Description of Artificial Sequence: Synthetic oligonucleotide
  Sense strand starting at position 831 of SEQ ID NO: 587546
uuuagaagucagcauccuu

SEQ ID NO: 800217 - RNA, 19 nt, Artificial Sequence
  Description of Artificial Sequence: Synthetic oligonucleotide
  Antisense strand to SEQ ID NO: 800216
aaggaugcugacuucuaaa

SEQ ID NO: 800218 - RNA, 19 nt, Artificial Sequence
  Description of Artificial Sequence: Synthetic oligonucleotide
  Sense strand starting at position 851 of SEQ ID NO: 587546
ugccucugcucuuugguua

SEQ ID NO: 800219 - RNA, 19 nt, Artificial Sequence
  Description of Artificial Sequence: Synthetic oligonucleotide
  Antisense strand to SEQ ID NO: 800218
uaaccaaagagcagaggca

SEQ ID NO: 800220 - RNA, 19 nt, Artificial Sequence
  Description of Artificial Sequence: Synthetic oligonucleotide
  Sense strand starting at position 852 of SEQ ID NO: 587546
gccucugcucuuugguuaa

SEQ ID NO: 800221 - RNA, 19 nt, Artificial Sequence
  Description of Artificial Sequence: Synthetic oligonucleotide
  Antisense strand to SEQ ID NO: 800220
uuaaccaaagagcagaggc

SEQ ID NO: 800222 - RNA, 19 nt, Artificial Sequence
  Description of Artificial Sequence: Synthetic oligonucleotide
  Sense strand starting at position 854 of SEQ ID NO: 587546
cucugcucuuugguuaaau

SEQ ID NO: 800223 - RNA, 19 nt, Artificial Sequence
  Description of Artificial Sequence: Synthetic oligonucleotide
  Antisense strand to SEQ ID NO: 800222
auuuaaccaaagagcagag

SEQ ID NO: 800224 - RNA, 19 nt, Artificial Sequence
  Description of Artificial Sequence: Synthetic oligonucleotide
  Sense strand starting at position 855 of SEQ ID NO: 587546
ucugcucuuugguuaaaug

SEQ ID NO: 800225 - RNA, 19 nt, Artificial Sequence
  Description of Artificial Sequence: Synthetic oligonucleotide
  Antisense strand to SEQ ID NO: 800224
cauuuaaccaaagagcaga

SEQ ID NO: 800226 - RNA, 19 nt, Artificial Sequence
  Description of Artificial Sequence: Synthetic oligonucleotide
  Sense strand starting at position 856 of SEQ ID NO: 587546
cugcucuuugguuaaauga

SEQ ID NO: 800227 - RNA, 19 nt, Artificial Sequence
  Description of Artificial Sequence: Synthetic oligonucleotide
  Antisense strand to SEQ ID NO: 800226
ucauuuaaccaaagagcag

SEQ ID NO: 800228 - RNA, 19 nt, Artificial Sequence
  Description of Artificial Sequence: Synthetic oligonucleotide
  Sense strand starting at position 866 of SEQ ID NO: 587546
guuaaaugaccuugaacag

SEQ ID NO: 800229 - RNA, 19 nt, Artificial Sequence
  Description of Artificial Sequence: Synthetic oligonucleotide
  Antisense strand to SEQ ID NO: 800228
cuguucaaggucauuuaac

SEQ ID NO: 800230 - RNA, 19 nt, Artificial Sequence
  Description of Artificial Sequence: Synthetic oligonucleotide
  Sense strand starting at position 932 of SEQ ID NO: 587546
uuaaaugacgcuugcgaag

SEQ ID NO: 800231 - RNA, 19 nt, Artificial Sequence
  Description of Artificial Sequence: Synthetic oligonucleotide
  Antisense strand to SEQ ID NO: 800230
cuucgcaagcgucauuuaa

SEQ ID NO: 800232 - RNA, 19 nt, Artificial Sequence
  Description of Artificial Sequence: Synthetic oligonucleotide
  Sense strand starting at position 976 of SEQ ID NO: 587546
aaccauuagcugggacagu

SEQ ID NO: 800233 - RNA, 19 nt, Artificial Sequence
  Description of Artificial Sequence: Synthetic oligonucleotide
  Antisense strand to SEQ ID NO: 800232
acugucccagcuaaugguu

SEQ ID NO: 800234 - RNA, 19 nt, Artificial Sequence
  Description of Artificial Sequence: Synthetic oligonucleotide
  Sense strand starting at position 1107 of SEQ ID NO: 587546
gcgcuucuggucccuauga

SEQ ID NO: 800235 - RNA, 19 nt, Artificial Sequence
  Description of Artificial Sequence: Synthetic oligonucleotide
  Antisense strand to SEQ ID NO: 800234
ucauagggaccagaagcgc

SEQ ID NO: 800236 - RNA, 19 nt, Artificial Sequence
  Description of Artificial Sequence: Synthetic oligonucleotide
  Sense strand starting at position 1108 of SEQ ID NO: 587546
cgcuucuggucccuaugaa

SEQ ID NO: 800237 - RNA, 19 nt, Artificial Sequence
  Description of Artificial Sequence: Synthetic oligonucleotide
  Antisense strand to SEQ ID NO: 800236
uucauagggaccagaagcg

SEQ ID NO: 800238 - RNA, 19 nt, Artificial Sequence
  Description of Artificial Sequence: Synthetic oligonucleotide
  Sense strand starting at position 1109 of SEQ ID NO: 587546
gcuucuggucccuaugaaa

SEQ ID NO: 800239 - RNA, 19 nt, Artificial Sequence
  Description of Artificial Sequence: Synthetic oligonucleotide
  Antisense strand to SEQ ID NO: 800238
uuucauagggaccagaagc

SEQ ID NO: 800240 - RNA, 19 nt, Artificial Sequence
  Description of Artificial Sequence: Synthetic oligonucleotide
  Sense strand starting at position 1140 of SEQ ID NO: 587546
aagaguacgccucgaggga

SEQ ID NO: 800241 - RNA, 19 nt, Artificial Sequence
  Description of Artificial Sequence: Synthetic oligonucleotide
  Antisense strand to SEQ ID NO: 800240
ucccucgaggcguacucuu

SEQ ID NO: 800242 - RNA, 19 nt, Artificial Sequence
  Description of Artificial Sequence: Synthetic oligonucleotide
  Sense strand starting at position 1166 of SEQ ID NO: 587546
cugcuauccuaguuggaaa

SEQ ID NO: 800243 - RNA, 19 nt, Artificial Sequence
  Description of Artificial Sequence: Synthetic oligonucleotide
  Antisense strand to SEQ ID NO: 800242
uuuccaacuaggauagcag

SEQ ID NO: 800244 - RNA, 19 nt, Artificial Sequence
  Description of Artificial Sequence: Synthetic oligonucleotide
  Sense strand starting at position 1293 of SEQ ID NO: 587546
ugucgaauccaggaggcaa

SEQ ID NO: 800245 - RNA, 19 nt, Artificial Sequence
  Description of Artificial Sequence: Synthetic oligonucleotide
  Antisense strand to SEQ ID NO: 800244
uugccuccuggauucgaca

SEQ ID NO: 800246 - RNA, 19 nt, Artificial Sequence
  Description of Artificial Sequence: Synthetic oligonucleotide
  Sense strand starting at position 1333 of SEQ ID NO: 587546
cgaacugugcggucucagu

SEQ ID NO: 800247 - RNA, 19 nt, Artificial Sequence
  Description of Artificial Sequence: Synthetic oligonucleotide
  Antisense strand to SEQ ID NO: 800246
acugagaccgcacaguucg

SEQ ID NO: 800248 - RNA, 19 nt, Artificial Sequence
  Description of Artificial Sequence: Synthetic oligonucleotide
  Sense strand starting at position 1341 of SEQ ID NO: 587546
gcggucucagugaggucuu

SEQ ID NO: 800249 - RNA, 19 nt, Artificial Sequence
  Description of Artificial Sequence: Synthetic oligonucleotide
  Antisense strand to SEQ ID NO: 800248
aagaccucacugagaccgc

SEQ ID NO: 800250 - RNA, 19 nt, Artificial Sequence
  Description of Artificial Sequence: Synthetic oligonucleotide
  Sense strand starting at position 2014 of SEQ ID NO: 587546
cuggcauaccucugcauau

SEQ ID NO: 800251 - RNA, 19 nt, Artificial Sequence
  Description of Artificial Sequence: Synthetic oligonucleotide
  Antisense strand to SEQ ID NO: 800250
auaugcagagguaugccag

SEQ ID NO: 800252 - RNA, 19 nt, Artificial Sequence
  Description of Artificial Sequence: Synthetic oligonucleotide
  Sense strand starting at position 2015 of SEQ ID NO: 587546
uggcauaccucugcauaua

SEQ ID NO: 800253 - RNA, 19 nt, Artificial Sequence
  Description of Artificial Sequence: Synthetic oligonucleotide
  Antisense strand to SEQ ID NO: 800252
uauaugcagagguaugcca

SEQ ID NO: 800254 - RNA, 19 nt, Artificial Sequence
  Description of Artificial Sequence: Synthetic oligonucleotide
  Sense strand starting at position 2168 of SEQ ID NO: 587546
agggcagacugauaagaaa

SEQ ID NO: 800255 - RNA, 19 nt, Artificial Sequence
  Description of Artificial Sequence: Synthetic oligonucleotide
  Antisense strand to SEQ ID NO: 800254
uuucuuaucagucugcccu

SEQ ID NO: 800256 - RNA, 19 nt, Artificial Sequence
  Description of Artificial Sequence: Synthetic oligonucleotide
  Sense strand starting at position 2206 of SEQ ID NO: 587546
gaaggucaguauuaggaaa

SEQ ID NO: 800257 - RNA, 19 nt, Artificial Sequence
  Description of Artificial Sequence: Synthetic oligonucleotide
  Antisense strand to SEQ ID NO: 800256
uuuccuaauacugaccuuc

SEQ ID NO: 800258 - RNA, 19 nt, Artificial Sequence
  Description of Artificial Sequence: Synthetic oligonucleotide
  Sense strand starting at position 303 of SEQ ID NO: 587547
gaaggagguagaugcuuua

SEQ ID NO: 800259 - RNA, 19 nt, Artificial Sequence
  Description of Artificial Sequence: Synthetic oligonucleotide
  Antisense strand to SEQ ID NO: 800258
uaaagcaucuaccuccuuc

SEQ ID NO: 800260 - RNA, 19 nt, Artificial Sequence
  Description of Artificial Sequence: Synthetic oligonucleotide
  Sense strand starting at position 315 of SEQ ID NO: 587547
ugcuuuaaauuugccagua

SEQ ID NO: 800261 - RNA, 19 nt, Artificial Sequence
  Description of Artificial Sequence: Synthetic oligonucleotide
  Antisense strand to SEQ ID NO: 800260
uacuggcaaauuuaaagca

SEQ ID NO: 800262 - RNA, 19 nt, Artificial Sequence
  Description of Artificial Sequence: Synthetic oligonucleotide
  Sense strand starting at position 316 of SEQ ID NO: 587547
gcuuuaaauuugccaguau

SEQ ID NO: 800263 - RNA, 19 nt, Artificial Sequence
  Description of Artificial Sequence: Synthetic oligonucleotide
  Antisense strand to SEQ ID NO: 800262
auacuggcaaauuuaaagc

SEQ ID NO: 800264 - RNA, 19 nt, Artificial Sequence
  Description of Artificial Sequence: Synthetic oligonucleotide
  Sense strand starting at position 364 of SEQ ID NO: 587547
aagcacaguuagguugaaa

SEQ ID NO: 800265 - RNA, 19 nt, Artificial Sequence
  Description of Artificial Sequence: Synthetic oligonucleotide
  Antisense strand to SEQ ID NO: 800264
uuucaaccuaacugugcuu

SEQ ID NO: 800266 - RNA, 19 nt, Artificial Sequence
  Description of Artificial Sequence: Synthetic oligonucleotide
  Sense strand starting at position 367 of SEQ ID NO: 587547
cacaguuagguugaaaucu

SEQ ID NO: 800267 - RNA, 19 nt, Artificial Sequence
  Description of Artificial Sequence: Synthetic oligonucleotide
  Antisense strand to SEQ ID NO: 800266
agauuucaaccuaacugug

SEQ ID NO: 800268 - RNA, 19 nt, Artificial Sequence
  Description of Artificial Sequence: Synthetic oligonucleotide
  Sense strand starting at position 375 of SEQ ID NO: 587547
gguugaaaucucugacuaa

SEQ ID NO: 800269 - RNA, 19 nt, Artificial Sequence
  Description of Artificial Sequence: Synthetic oligonucleotide
  Antisense strand to SEQ ID NO: 800268
uuagucagagauuucaacc

SEQ ID NO: 800270 - RNA, 19 nt, Artificial Sequence
  Description of Artificial Sequence: Synthetic oligonucleotide
  Sense strand starting at position 396 of SEQ ID NO: 587547
auuugcuguguuuaaaggu

SEQ ID NO: 800271 - RNA, 19 nt, Artificial Sequence
  Description of Artificial Sequence: Synthetic oligonucleotide
  Antisense strand to SEQ ID NO: 800270
accuuuaaacacagcaaau

SEQ ID NO: 800272 - RNA, 19 nt, Artificial Sequence
  Description of Artificial Sequence: Synthetic oligonucleotide
  Sense strand starting at position 409 of SEQ ID NO: 587547
aaaggugcucucuaguaug

SEQ ID NO: 800273 - RNA, 19 nt, Artificial Sequence
  Description of Artificial Sequence: Synthetic oligonucleotide
  Antisense strand to SEQ ID NO: 800272
cauacuagagagcaccuuu

SEQ ID NO: 800274 - RNA, 19 nt, Artificial Sequence
  Description of Artificial Sequence: Synthetic oligonucleotide
  Sense strand starting at position 438 of SEQ ID NO: 587547
cuguuugagcuacaaacaa

SEQ ID NO: 800275 - RNA, 19 nt, Artificial Sequence
  Description of Artificial Sequence: Synthetic oligonucleotide
  Antisense strand to SEQ ID NO: 800274
uuguuuguagcucaaacag

SEQ ID NO: 800276 - RNA, 19 nt, Artificial Sequence
  Description of Artificial Sequence: Synthetic oligonucleotide
  Sense strand starting at position 583 of SEQ ID NO: 587547
agaggcaguguggaauaau

SEQ ID NO: 800277 - RNA, 19 nt, Artificial Sequence
  Description of Artificial Sequence: Synthetic oligonucleotide
  Antisense strand to SEQ ID NO: 800276
auuauuccacacugccucu

SEQ ID NO: 800278 - RNA, 19 nt, Artificial Sequence
  Description of Artificial Sequence: Synthetic oligonucleotide
  Sense strand starting at position 666 of SEQ ID NO: 587547
agcuacauaguuugauaau

SEQ ID NO: 800279 - RNA, 19 nt, Artificial Sequence
  Description of Artificial Sequence: Synthetic oligonucleotide
  Antisense strand to SEQ ID NO: 800278
auuaucaaacuauguagcu

SEQ ID NO: 800280 - RNA, 19 nt, Artificial Sequence
  Description of Artificial Sequence: Synthetic oligonucleotide
  Sense strand starting at position 1069 of SEQ ID NO: 587547
uugggauggcuaugagaau

SEQ ID NO: 800281 - RNA, 19 nt, Artificial Sequence
  Description of Artificial Sequence: Synthetic oligonucleotide
  Antisense strand to SEQ ID NO: 800280
auucucauagccaucccaa

SEQ ID NO: 800282 - RNA, 19 nt, Artificial Sequence
  Description of Artificial Sequence: Synthetic oligonucleotide
  Sense strand starting at position 1163 of SEQ ID NO: 587547
cauagcauucguuagaaga

SEQ ID NO: 800283 - RNA, 19 nt, Artificial Sequence
  Description of Artificial Sequence: Synthetic oligonucleotide
  Antisense strand to SEQ ID NO: 800282
ucuucuaacgaaugcuaug

SEQ ID NO: 800284 - RNA, 19 nt, Artificial Sequence
  Description of Artificial Sequence: Synthetic oligonucleotide
  Sense strand starting at position 1286 of SEQ ID NO: 587547
gaaucuuacgcucaguaaa

SEQ ID NO: 800285 - RNA, 19 nt, Artificial Sequence
  Description of Artificial Sequence: Synthetic oligonucleotide
  Antisense strand to SEQ ID NO: 800284
uuuacugagcguaagauuc

SEQ ID NO: 800286 - RNA, 19 nt, Artificial Sequence
  Description of Artificial Sequence: Synthetic oligonucleotide
  Sense strand starting at position 1289 of SEQ ID NO: 587547
ucuuacgcucaguaaauaa

SEQ ID NO: 800287 - RNA, 19 nt, Artificial Sequence
  Description of Artificial Sequence: Synthetic oligonucleotide
  Antisense strand to SEQ ID NO: 800286
uuauuuacugagcguaaga

SEQ ID NO: 800288 - RNA, 19 nt, Artificial Sequence
  Description of Artificial Sequence: Synthetic oligonucleotide
  Sense strand starting at position 1485 of SEQ ID NO: 587547
cuguaauaaccucauuguu

SEQ ID NO: 800289 - RNA, 19 nt, Artificial Sequence
  Description of Artificial Sequence: Synthetic oligonucleotide
  Antisense strand to SEQ ID NO: 800288
aacaaugagguuauuacag

SEQ ID NO: 800290 - RNA, 19 nt, Artificial Sequence
  Description of Artificial Sequence: Synthetic oligonucleotide
  Sense strand starting at position 1534 of SEQ ID NO: 587547
cugauacacuuucuauagu

SEQ ID NO: 800291 - RNA, 19 nt, Artificial Sequence
  Description of Artificial Sequence: Synthetic oligonucleotide
  Antisense strand to SEQ ID NO: 800290
acuauagaaaguguaucag

SEQ ID NO: 800292 - RNA, 19 nt, Artificial Sequence
  Description of Artificial Sequence: Synthetic oligonucleotide
  Sense strand starting at position 1578 of SEQ ID NO: 587547
cauguuagguaaguaagaa

SEQ ID NO: 800293 - RNA, 19 nt, Artificial Sequence
  Description of Artificial Sequence: Synthetic oligonucleotide
  Antisense strand to SEQ ID NO: 800292
uucuuacuuaccuaacaug

SEQ ID NO: 800294 - RNA, 19 nt, Artificial Sequence
  Description of Artificial Sequence: Synthetic oligonucleotide
  Sense strand starting at position 1586 of SEQ ID NO: 587547
guaaguaagaaaugcauag

SEQ ID NO: 800295 - RNA, 19 nt, Artificial Sequence
  Description of Artificial Sequence: Synthetic oligonucleotide
  Antisense strand to SEQ ID NO: 800294
cuaugcauuucuuacuuac

SEQ ID NO: 800296 - RNA, 19 nt, Artificial Sequence
  Description of Artificial Sequence: Synthetic oligonucleotide
  Sense strand starting at position 1609 of SEQ ID NO: 587547
cuccauuucuagggagaaa

SEQ ID NO: 800297 - RNA, 19 nt, Artificial Sequence
  Description of Artificial Sequence: Synthetic oligonucleotide
  Antisense strand to SEQ ID NO: 800296
uuucucccuagaaauggag

SEQ ID NO: 800298 - RNA, 19 nt, Artificial Sequence
  Description of Artificial Sequence: Synthetic oligonucleotide
  Sense strand starting at position 1640 of SEQ ID NO: 587547
uuaagugagaugcaguuau

SEQ ID NO: 800299 - RNA, 19 nt, Artificial Sequence
  Description of Artificial Sequence: Synthetic oligonucleotide
  Antisense strand to SEQ ID NO: 800298
auaacugcaucucacuuaa

SEQ ID NO: 800300 - RNA, 19 nt, Artificial Sequence
  Description of Artificial Sequence: Synthetic oligonucleotide
  Sense strand starting at position 1644 of SEQ ID NO: 587547
gugagaugcaguuauuaca

SEQ ID NO: 800301 - RNA, 19 nt, Artificial Sequence
  Description of Artificial Sequence: Synthetic oligonucleotide
  Antisense strand to SEQ ID NO: 800300
uguaauaacugcaucucac

SEQ ID NO: 800302 - RNA, 19 nt, Artificial Sequence
  Description of Artificial Sequence: Synthetic oligonucleotide
  Sense strand starting at position 1680 of SEQ ID NO: 587547
cagcuuuauguguuuguuu

SEQ ID NO: 800303 - RNA, 19 nt, Artificial Sequence
  Description of Artificial Sequence: Synthetic oligonucleotide
  Antisense strand to SEQ ID NO: 800302
aaacaaacacauaaagcug

SEQ ID NO: 800304 - RNA, 19 nt, Artificial Sequence
  Description of Artificial Sequence: Synthetic oligonucleotide
  Sense strand starting at position 1691 of SEQ ID NO: 587547
guuuguuuacuagaaguua

SEQ ID NO: 800305 - RNA, 19 nt, Artificial Sequence
  Description of Artificial Sequence: Synthetic oligonucleotide
  Antisense strand to SEQ ID NO: 800304
uaacuucuaguaaacaaac

SEQ ID NO: 800306 - RNA, 19 nt, Artificial Sequence
  Description of Artificial Sequence: Synthetic oligonucleotide
  Sense strand starting at position 1717 of SEQ ID NO: 587547
acaguuguucaguagaagu

SEQ ID NO: 800307 - RNA, 19 nt, Artificial Sequence
  Description of Artificial Sequence: Synthetic oligonucleotide
  Antisense strand to SEQ ID NO: 800306
acuucuacugaacaacugu

SEQ ID NO: 800308 - RNA, 19 nt, Artificial Sequence
  Description of Artificial Sequence: Synthetic oligonucleotide
  Sense strand starting at position 1719 of SEQ ID NO: 587547
aguuguucaguagaaguua

SEQ ID NO: 800309 - RNA, 19 nt, Artificial Sequence
  Description of Artificial Sequence: Synthetic oligonucleotide
  Antisense strand to SEQ ID NO: 800308
uaacuucuacugaacaacu

SEQ ID NO: 800310 - RNA, 19 nt, Artificial Sequence
  Description of Artificial Sequence: Synthetic oligonucleotide
  Sense strand starting at position 1733 of SEQ ID NO: 587547
aguuaacuuggccagguaa

SEQ ID NO: 800311 - RNA, 19 nt, Artificial Sequence
  Description of Artificial Sequence: Synthetic oligonucleotide
  Antisense strand to SEQ ID NO: 800310
uuaccuggccaaguuaacu

SEQ ID NO: 800312 - RNA, 19 nt, Artificial Sequence
  Description of Artificial Sequence: Synthetic oligonucleotide
  Sense strand starting at position 1992 of SEQ ID NO: 587547
gugagaaauuacuuccacu

SEQ ID NO: 800313 - RNA, 19 nt, Artificial Sequence
  Description of Artificial Sequence: Synthetic oligonucleotide
  Antisense strand to SEQ ID NO: 800312
aguggaaguaauuucucac

SEQ ID NO: 800314 - RNA, 19 nt, Artificial Sequence
  Description of Artificial Sequence: Synthetic oligonucleotide
  Sense strand starting at position 2106 of SEQ ID NO: 587547
guucguauuccauaugaaa

SEQ ID NO: 800315 - RNA, 19 nt, Artificial Sequence
  Description of Artificial Sequence: Synthetic oligonucleotide
  Antisense strand to SEQ ID NO: 800314
uuucauauggaauacgaac

SEQ ID NO: 800316 - RNA, 19 nt, Artificial Sequence
  Description of Artificial Sequence: Synthetic oligonucleotide
  Sense strand starting at position 2149 of SEQ ID NO: 587547
uucuuacugccauauagga

SEQ ID NO: 800317 - RNA, 19 nt, Artificial Sequence
  Description of Artificial Sequence: Synthetic oligonucleotide
  Antisense strand to SEQ ID NO: 800316
uccuauauggcaguaagaa

SEQ ID NO: 800318 - RNA, 19 nt, Artificial Sequence
  Description of Artificial Sequence: Synthetic oligonucleotide
  Sense strand starting at position 2293 of SEQ ID NO: 587547
aguuauuucucauuggcuu

SEQ ID NO: 800319 - RNA, 19 nt, Artificial Sequence
  Description of Artificial Sequence: Synthetic oligonucleotide
  Antisense strand to SEQ ID NO: 800318
aagccaaugagaaauaacu

SEQ ID NO: 800320 - RNA, 19 nt, Artificial Sequence
  Description of Artificial Sequence: Synthetic oligonucleotide
  Sense strand starting at position 2294 of SEQ ID NO: 587547
guuauuucucauuggcuuc

SEQ ID NO: 800321 - RNA, 19 nt, Artificial Sequence
  Description of Artificial Sequence: Synthetic oligonucleotide
  Antisense strand to SEQ ID NO: 800320
gaagccaaugagaaauaac

SEQ ID NO: 800322 - RNA, 19 nt, Artificial Sequence
  Description of Artificial Sequence: Synthetic oligonucleotide
  Sense strand starting at position 2882 of SEQ ID NO: 587547
gcuuauuaguacuugaaau

SEQ ID NO: 800323 - RNA, 19 nt, Artificial Sequence
  Description of Artificial Sequence: Synthetic oligonucleotide
  Antisense strand to SEQ ID NO: 800322
auuucaaguacuaauaagc

SEQ ID NO: 800324 - RNA, 19 nt, Artificial Sequence
  Description of Artificial Sequence: Synthetic oligonucleotide
  Sense strand starting at position 2927 of SEQ ID NO: 587547
uucguuacagucuagaaua

SEQ ID NO: 800325 - RNA, 19 nt, Artificial Sequence
  Description of Artificial Sequence: Synthetic oligonucleotide
  Antisense strand to SEQ ID NO: 800324
uauucuagacuguaacgaa

SEQ ID NO: 800326 - RNA, 19 nt, Artificial Sequence
  Description of Artificial Sequence: Synthetic oligonucleotide
  Sense strand starting at position 3064 of SEQ ID NO: 587547
gaauacaaugacuguguuu

SEQ ID NO: 800327 - RNA, 19 nt, Artificial Sequence
  Description of Artificial Sequence: Synthetic oligonucleotide
  Antisense strand to SEQ ID NO: 800326
aaacacagucauuguauuc

SEQ ID NO: 800328 - RNA, 19 nt, Artificial Sequence
  Description of Artificial Sequence: Synthetic oligonucleotide
  Sense strand starting at position 3079 of SEQ ID NO: 587547
guuucuuaugacuacauga

SEQ ID NO: 800329 - RNA, 19 nt, Artificial Sequence
  Description of Artificial Sequence: Synthetic oligonucleotide
  Antisense strand to SEQ ID NO: 800328
ucauguagucauaagaaac

SEQ ID NO: 800330 - RNA, 19 nt, Artificial Sequence
  Description of Artificial Sequence: Synthetic oligonucleotide
  Sense strand starting at position 3230 of SEQ ID NO: 587547
uucuuuguacuugaaguuu

SEQ ID NO: 800331 - RNA, 19 nt, Artificial Sequence
  Description of Artificial Sequence: Synthetic oligonucleotide
  Antisense strand to SEQ ID NO: 800330
aaacuucaaguacaaagaa

SEQ ID NO: 800332 - RNA, 19 nt, Artificial Sequence
  Description of Artificial Sequence: Synthetic oligonucleotide
  Sense strand starting at position 3288 of SEQ ID NO: 587547
agaugauucugucccagga

SEQ ID NO: 800333 - RNA, 19 nt, Artificial Sequence
  Description of Artificial Sequence: Synthetic oligonucleotide
  Antisense strand to SEQ ID NO: 800332
uccugggacagaaucaucu

SEQ ID NO: 800334 - RNA, 19 nt, Artificial Sequence
  Description of Artificial Sequence: Synthetic oligonucleotide
  Sense strand starting at position 3292 of SEQ ID NO: 587547
gauucugucccaggauuaa

SEQ ID NO: 800335 - RNA, 19 nt, Artificial Sequence
  Description of Artificial Sequence: Synthetic oligonucleotide
  Antisense strand to SEQ ID NO: 800334
uuaauccugggacagaauc

SEQ ID NO: 800336 - RNA, 19 nt, Artificial Sequence
  Description of Artificial Sequence: Synthetic oligonucleotide
  Sense strand starting at position 3719 of SEQ ID NO: 587547
ugcuuuagugccucaaugu

SEQ ID NO: 800337 - RNA, 19 nt, Artificial Sequence
  Description of Artificial Sequence: Synthetic oligonucleotide
  Antisense strand to SEQ ID NO: 800336
acauugaggcacuaaagca

SEQ ID NO: 800338 - RNA, 19 nt, Artificial Sequence
  Description of Artificial Sequence: Synthetic oligonucleotide
  Sense strand starting at position 266 of SEQ ID NO: 587548
uaggaaugccucuaagguu

SEQ ID NO: 800339 - RNA, 19 nt, Artificial Sequence
  Description of Artificial Sequence: Synthetic oligonucleotide
  Antisense strand to SEQ ID NO: 800338
aaccuuagaggcauuccua

SEQ ID NO: 800340 - RNA, 19 nt, Artificial Sequence
  Description of Artificial Sequence: Synthetic oligonucleotide
  Sense strand starting at position 317 of SEQ ID NO: 587548
gccguaaauccugccguua

SEQ ID NO: 800341 - RNA, 19 nt, Artificial Sequence
  Description of Artificial Sequence: Synthetic oligonucleotide
  Antisense strand to SEQ ID NO: 800340
uaacggcaggauuuacggc

SEQ ID NO: 800342 - RNA, 19 nt, Artificial Sequence
  Description of Artificial Sequence: Synthetic oligonucleotide
  Sense strand starting at position 336 of SEQ ID NO: 587548
agcaaauuacugcaauugu

SEQ ID NO: 800343 - RNA, 19 nt, Artificial Sequence
  Description of Artificial Sequence: Synthetic oligonucleotide
  Antisense strand to SEQ ID NO: 800342
acaauugcaguaauuugcu

SEQ ID NO: 800344 - RNA, 19 nt, Artificial Sequence
  Description of Artificial Sequence: Synthetic oligonucleotide
  Sense strand starting at position 412 of SEQ ID NO: 587548
cucaucucagggcagauau

SEQ ID NO: 800345 - RNA, 19 nt, Artificial Sequence
  Description of Artificial Sequence: Synthetic oligonucleotide
  Antisense strand to SEQ ID NO: 800344
auaucugcccugagaugag

SEQ ID NO: 800346 - RNA, 19 nt, Artificial Sequence
  Description of Artificial Sequence: Synthetic oligonucleotide
  Sense strand starting at position 531 of SEQ ID NO: 587548
uggguuugcagagaauugu

SEQ ID NO: 800347 - RNA, 19 nt, Artificial Sequence
  Description of Artificial Sequence: Synthetic oligonucleotide
  Antisense strand to SEQ ID NO: 800346
acaauucucugcaaaccca

SEQ ID NO: 800348 - RNA, 19 nt, Artificial Sequence
  Description of Artificial Sequence: Synthetic oligonucleotide
  Sense strand starting at position 557 of SEQ ID NO: 587548
ggaacacauguuuaagcua

SEQ ID NO: 800349 - RNA, 19 nt, Artificial Sequence
  Description of Artificial Sequence: Synthetic oligonucleotide
  Antisense strand to SEQ ID NO: 800348
uagcuuaaacauguguucc

SEQ ID NO: 800350 - RNA, 19 nt, Artificial Sequence
  Description of Artificial Sequence: Synthetic oligonucleotide
  Sense strand starting at position 591 of SEQ ID NO: 587548
ccuuuccauguguaagauu

SEQ ID NO: 800351 - RNA, 19 nt, Artificial Sequence
  Description of Artificial Sequence: Synthetic oligonucleotide
  Antisense strand to SEQ ID NO: 800350
aaucuuacacauggaaagg

SEQ ID NO: 800352 - RNA, 19 nt, Artificial Sequence
  Description of Artificial Sequence: Synthetic oligonucleotide
  Sense strand starting at position 773 of SEQ ID NO: 587548
cagauccuuuagguagaau

SEQ ID NO: 800353 - RNA, 19 nt, Artificial Sequence
  Description of Artificial Sequence: Synthetic oligonucleotide
  Antisense strand to SEQ ID NO: 800352
auucuaccuaaaggaucug

SEQ ID NO: 800354 - RNA, 19 nt, Artificial Sequence
  Description of Artificial Sequence: Synthetic oligonucleotide
  Sense strand starting at position 838 of SEQ ID NO: 587548
uuguuaaaccuguacuuac

SEQ ID NO: 800355 - RNA, 19 nt, Artificial Sequence
  Description of Artificial Sequence: Synthetic oligonucleotide
  Antisense strand to SEQ ID NO: 800354
guaaguacagguuuaacaa

SEQ ID NO: 800356 - RNA, 19 nt, Artificial Sequence
  Description of Artificial Sequence: Synthetic oligonucleotide
  Sense strand starting at position 874 of SEQ ID NO: 587548
ugcauucuaucagcaagag

SEQ ID NO: 800357 - RNA, 19 nt, Artificial Sequence
  Description of Artificial Sequence: Synthetic oligonucleotide
  Antisense strand to SEQ ID NO: 800356
cucuugcugauagaaugca

SEQ ID NO: 800358 - RNA, 19 nt, Artificial Sequence
  Description of Artificial Sequence: Synthetic oligonucleotide
  Sense strand starting at position 875 of SEQ ID NO: 587548
gcauucuaucagcaagaga

SEQ ID NO: 800359 - RNA, 19 nt, Artificial Sequence
  Description of Artificial Sequence: Synthetic oligonucleotide
  Antisense strand to SEQ ID NO: 800358
ucucuugcugauagaaugc

SEQ ID NO: 800360 - RNA, 19 nt, Artificial Sequence
  Description of Artificial Sequence: Synthetic oligonucleotide
  Sense strand starting at position 977 of SEQ ID NO: 587548
accucuucuggaugaagua

SEQ ID NO: 800361 - RNA, 19 nt, Artificial Sequence
  Description of Artificial Sequence: Synthetic oligonucleotide
  Antisense strand to SEQ ID NO: 800360
uacuucauccagaagaggu

SEQ ID NO: 800362 - RNA, 19 nt, Artificial Sequence
  Description of Artificial Sequence: Synthetic oligonucleotide
  Sense strand starting at position 978 of SEQ ID NO: 587548
ccucuucuggaugaaguau

SEQ ID NO: 800363 - RNA, 19 nt, Artificial Sequence
  Description of Artificial Sequence: Synthetic oligonucleotide
  Antisense strand to SEQ ID NO: 800362
auacuucauccagaagagg

SEQ ID NO: 800364 - RNA, 19 nt, Artificial Sequence
  Description of Artificial Sequence: Synthetic oligonucleotide
  Sense strand starting at position 1039 of SEQ ID NO: 587548
acuugcacauaguuaaaga

SEQ ID NO: 800365 - RNA, 19 nt, Artificial Sequence
  Description of Artificial Sequence: Synthetic oligonucleotide
  Antisense strand to SEQ ID NO: 800364
ucuuuaacuaugugcaagu

SEQ ID NO: 800366 - RNA, 19 nt, Artificial Sequence
  Description of Artificial Sequence: Synthetic oligonucleotide
  Sense strand starting at position 1669 of SEQ ID NO: 587548
cccaaauugucagucuuga

SEQ ID NO: 800367 - RNA, 19 nt, Artificial Sequence
  Description of Artificial Sequence: Synthetic oligonucleotide
  Antisense strand to SEQ ID NO: 800366
ucaagacugacaauuuggg

SEQ ID NO: 800368 - RNA, 19 nt, Artificial Sequence
  Description of Artificial Sequence: Synthetic oligonucleotide
  Sense strand starting at position 1680 of SEQ ID NO: 587548
agucuugauguuuacauua

SEQ ID NO: 800369 - RNA, 19 nt, Artificial Sequence
  Description of Artificial Sequence: Synthetic oligonucleotide
  Antisense strand to SEQ ID NO: 800368
uaauguaaacaucaagacu

SEQ ID NO: 800370 - RNA, 19 nt, Artificial Sequence
  Description of Artificial Sequence: Synthetic oligonucleotide
  Sense strand starting at position 1685 of SEQ ID NO: 587548
ugauguuuacauuaugcau

SEQ ID NO: 800371 - RNA, 19 nt, Artificial Sequence
  Description of Artificial Sequence: Synthetic oligonucleotide
  Antisense strand to SEQ ID NO: 800370
augcauaauguaaacauca

SEQ ID NO: 800372 - RNA, 19 nt, Artificial Sequence
  Description of Artificial Sequence: Synthetic oligonucleotide
  Sense strand starting at position 1728 of SEQ ID NO: 587548
guguacuuaccauaauaau

SEQ ID NO: 800373 - RNA, 19 nt, Artificial Sequence
  Description of Artificial Sequence: Synthetic oligonucleotide
  Antisense strand to SEQ ID NO: 800372
auuauuaugguaaguacac

SEQ ID NO: 800374 - RNA, 19 nt, Artificial Sequence
  Description of Artificial Sequence: Synthetic oligonucleotide
  Sense strand starting at position 2025 of SEQ ID NO: 587548
ggacucaacuuugcagaca

SEQ ID NO: 800375 - RNA, 19 nt, Artificial Sequence
  Description of Artificial Sequence: Synthetic oligonucleotide
  Antisense strand to SEQ ID NO: 800374
ugucugcaaaguugagucc

SEQ ID NO: 800376 - RNA, 19 nt, Artificial Sequence
  Description of Artificial Sequence: Synthetic oligonucleotide
  Sense strand starting at position 2270 of SEQ ID NO: 587548
uccacauagcaguaaugaa

SEQ ID NO: 800377 - RNA, 19 nt, Artificial Sequence
  Description of Artificial Sequence: Synthetic oligonucleotide
  Antisense strand to SEQ ID NO: 800376
uucauuacugcuaugugga

SEQ ID NO: 800378 - RNA, 19 nt, Artificial Sequence
  Description of Artificial Sequence: Synthetic oligonucleotide
  Sense strand starting at position 2354 of SEQ ID NO: 587548
ucaugcaugaguugggaau

SEQ ID NO: 800379 - RNA, 19 nt, Artificial Sequence
  Description of Artificial Sequence: Synthetic oligonucleotide
  Antisense strand to SEQ ID NO: 800378
auucccaacucaugcauga

SEQ ID NO: 800380 - RNA, 19 nt, Artificial Sequence
  Description of Artificial Sequence: Synthetic oligonucleotide
  Sense strand starting at position 2355 of SEQ ID NO: 587548
caugcaugaguugggaauu

SEQ ID NO: 800381 - RNA, 19 nt, Artificial Sequence
  Description of Artificial Sequence: Synthetic oligonucleotide
  Antisense strand to SEQ ID NO: 800380
aauucccaacucaugcaug

SEQ ID NO: 800382 - RNA, 19 nt, Artificial Sequence
  Description of Artificial Sequence: Synthetic oligonucleotide
  Sense strand starting at position 2365 of SEQ ID NO: 587548
uugggaauuugaggagaga

SEQ ID NO: 800383 - RNA, 19 nt, Artificial Sequence
  Description of Artificial Sequence: Synthetic oligonucleotide
  Antisense strand to SEQ ID NO: 800382
ucucuccucaaauucccaa

SEQ ID NO: 800384 - RNA, 19 nt, Artificial Sequence
  Description of Artificial Sequence: Synthetic oligonucleotide
  Sense strand starting at position 2378 of SEQ ID NO: 587548
gagagacuugcgcagucaa

SEQ ID NO: 800385 - RNA, 19 nt, Artificial Sequence
  Description of Artificial Sequence: Synthetic oligonucleotide
  Antisense strand to SEQ ID NO: 800384
uugacugcgcaagucucuc

SEQ ID NO: 800386 - RNA, 19 nt, Artificial Sequence
  Description of Artificial Sequence: Synthetic oligonucleotide
  Sense strand starting at position 2477 of SEQ ID NO: 587548
uuguguagcgguuugaagu

SEQ ID NO: 800387 - RNA, 19 nt, Artificial Sequence
  Description of Artificial Sequence: Synthetic oligonucleotide
  Antisense strand to SEQ ID NO: 800386
acuucaaaccgcuacacaa

SEQ ID NO: 800388 - RNA, 19 nt, Artificial Sequence
  Description of Artificial Sequence: Synthetic oligonucleotide
  Sense strand starting at position 2490 of SEQ ID NO: 587548
ugaaguauucugcagucag

SEQ ID NO: 800389 - RNA, 19 nt, Artificial Sequence
  Description of Artificial Sequence: Synthetic oligonucleotide
  Antisense strand to SEQ ID NO: 800388
cugacugcagaauacuuca

SEQ ID NO: 800390 - RNA, 19 nt, Artificial Sequence
  Description of Artificial Sequence: Synthetic oligonucleotide
  Sense strand starting at position 2494 of SEQ ID NO: 587548
guauucugcagucagauug

SEQ ID NO: 800391 - RNA, 19 nt, Artificial Sequence
  Description of Artificial Sequence: Synthetic oligonucleotide
  Antisense strand to SEQ ID NO: 800390
caaucugacugcagaauac

SEQ ID NO: 800392 - RNA, 19 nt, Artificial Sequence
  Description of Artificial Sequence: Synthetic oligonucleotide
  Sense strand starting at position 2565 of SEQ ID NO: 587548
gaacuauauuggguaucaa

SEQ ID NO: 800393 - RNA, 19 nt, Artificial Sequence
  Description of Artificial Sequence: Synthetic oligonucleotide
  Antisense strand to SEQ ID NO: 800392
uugauacccaauauaguuc

SEQ ID NO: 800394 - RNA, 19 nt, Artificial Sequence
  Description of Artificial Sequence: Synthetic oligonucleotide
  Sense strand starting at position 2575 of SEQ ID NO: 587548
ggguaucaauucccauaua

SEQ ID NO: 800395 - RNA, 19 nt, Artificial Sequence
  Description of Artificial Sequence: Synthetic oligonucleotide
  Antisense strand to SEQ ID NO: 800394
uauaugggaauugauaccc

SEQ ID NO: 800396 - RNA, 19 nt, Artificial Sequence
  Description of Artificial Sequence: Synthetic oligonucleotide
  Sense strand starting at position 2640 of SEQ ID NO: 587548
uugaucaagugauuaaugu

SEQ ID NO: 800397 - RNA, 19 nt, Artificial Sequence
  Description of Artificial Sequence: Synthetic oligonucleotide
  Antisense strand to SEQ ID NO: 800396
acauuaaucacuugaucaa

SEQ ID NO: 800398 - RNA, 19 nt, Artificial Sequence
  Description of Artificial Sequence: Synthetic oligonucleotide
  Sense strand starting at position 2742 of SEQ ID NO: 587548
guagcucucccagaagauu

SEQ ID NO: 800399 - RNA, 19 nt, Artificial Sequence
  Description of Artificial Sequence: Synthetic oligonucleotide
  Antisense strand to SEQ ID NO: 800398
aaucuucugggagagcuac

SEQ ID NO: 800400 - RNA, 19 nt, Artificial Sequence
  Description of Artificial Sequence: Synthetic oligonucleotide
  Sense strand starting at position 3093 of SEQ ID NO: 587548
ucuguaugcuaauugagau

SEQ ID NO: 800401 - RNA, 19 nt, Artificial Sequence
  Description of Artificial Sequence: Synthetic oligonucleotide
  Antisense strand to SEQ ID NO: 800400
aucucaauuagcauacaga

SEQ ID NO: 800402 - RNA, 19 nt, Artificial Sequence
  Description of Artificial Sequence: Synthetic oligonucleotide
  Sense strand starting at position 3184 of SEQ ID NO: 587548
ggaguugagcuguauaugu

SEQ ID NO: 800403 - RNA, 19 nt, Artificial Sequence
  Description of Artificial Sequence: Synthetic oligonucleotide
  Antisense strand to SEQ ID NO: 800402
acauauacagcucaacucc

SEQ ID NO: 800404 - RNA, 19 nt, Artificial Sequence
  Description of Artificial Sequence: Synthetic oligonucleotide
  Sense strand starting at position 3225 of SEQ ID NO: 587548
gagguauucccacagaagc

SEQ ID NO: 800405 - RNA, 19 nt, Artificial Sequence
  Description of Artificial Sequence: Synthetic oligonucleotide
  Antisense strand to SEQ ID NO: 800404
gcuucugugggaauaccuc

SEQ ID NO: 800406 - RNA, 19 nt, Artificial Sequence
  Description of Artificial Sequence: Synthetic oligonucleotide
  Sense strand starting at position 3285 of SEQ ID NO: 587548
aucuuuagagccugacuau

SEQ ID NO: 800407 - RNA, 19 nt, Artificial Sequence
  Description of Artificial Sequence: Synthetic oligonucleotide
  Antisense strand to SEQ ID NO: 800406
auagucaggcucuaaagau

SEQ ID NO: 800408 - RNA, 19 nt, Artificial Sequence
  Description of Artificial Sequence: Synthetic oligonucleotide
  Sense strand starting at position 3291 of SEQ ID NO: 587548
agagccugacuaugcaaau

SEQ ID NO: 800409 - RNA, 19 nt, Artificial Sequence
  Description of Artificial Sequence: Synthetic oligonucleotide
  Antisense strand to SEQ ID NO: 800408
auuugcauagucaggcucu

SEQ ID NO: 800410 - RNA, 19 nt, Artificial Sequence
  Description of Artificial Sequence: Synthetic oligonucleotide
  Sense strand starting at position 3479 of SEQ ID NO: 587548
ugcuguuucccagaggauc

SEQ ID NO: 800411 - RNA, 19 nt, Artificial Sequence
  Description of Artificial Sequence: Synthetic oligonucleotide
  Antisense strand to SEQ ID NO: 800410
gauccucugggaaacagca

SEQ ID NO: 800412 - RNA, 19 nt, Artificial Sequence
  Description of Artificial Sequence: Synthetic oligonucleotide
  Sense strand starting at position 3533 of SEQ ID NO: 587548
ucucauauuuggcaagaau

SEQ ID NO: 800413 - RNA, 19 nt, Artificial Sequence
  Description of Artificial Sequence: Synthetic oligonucleotide
  Antisense strand to SEQ ID NO: 800412
auucuugccaaauaugaga

SEQ ID NO: 800414 - RNA, 19 nt, Artificial Sequence
  Description of Artificial Sequence: Synthetic oligonucleotide
  Sense strand starting at position 3552 of SEQ ID NO: 587548
cuuauaaaccauuaagugu

SEQ ID NO: 800415 - RNA, 19 nt, Artificial Sequence
  Description of Artificial Sequence: Synthetic oligonucleotide
  Antisense strand to SEQ ID NO: 800414
acacuuaaugguuuauaag

SEQ ID NO: 800416 - RNA, 19 nt, Artificial Sequence
  Description of Artificial Sequence: Synthetic oligonucleotide
  Sense strand starting at position 3710 of SEQ ID NO: 587548
guuuaaagggcaugagaag

SEQ ID NO: 800417 - RNA, 19 nt, Artificial Sequence
  Description of Artificial Sequence: Synthetic oligonucleotide
  Antisense strand to SEQ ID NO: 800416
cuucucaugcccuuuaaac

SEQ ID NO: 800418 - RNA, 19 nt, Artificial Sequence
  Description of Artificial Sequence: Synthetic oligonucleotide
  Sense strand starting at position 882 of SEQ ID NO: 587549
acuauuuauuuaggugaca

SEQ ID NO: 800419 - RNA, 19 nt, Artificial Sequence
  Description of Artificial Sequence: Synthetic oligonucleotide
  Antisense strand to SEQ ID NO: 800418
ugucaccuaaauaaauagu

SEQ ID NO: 800420 - RNA, 19 nt, Artificial Sequence
  Description of Artificial Sequence: Synthetic oligonucleotide
  Sense strand starting at position 1212 of SEQ ID NO: 587549
gugcuaacucuauaagcaa

SEQ ID NO: 800421 - RNA, 19 nt, Artificial Sequence
  Description of Artificial Sequence: Synthetic oligonucleotide
  Antisense strand to SEQ ID NO: 800420
uugcuuauagaguuagcac

SEQ ID NO: 800422 - RNA, 19 nt, Artificial Sequence
  Description of Artificial Sequence: Synthetic oligonucleotide
  Sense strand starting at position 1297 of SEQ ID NO: 587549
agauaccacugcucuugaa

SEQ ID NO: 800423 - RNA, 19 nt, Artificial Sequence
  Description of Artificial Sequence: Synthetic oligonucleotide
  Antisense strand to SEQ ID NO: 800422
uucaagagcagugguaucu

SEQ ID NO: 800424 - RNA, 19 nt, Artificial Sequence
  Description of Artificial Sequence: Synthetic oligonucleotide
  Sense strand starting at position 1304 of SEQ ID NO: 587549
acugcucuugaaugggaga

SEQ ID NO: 800425 - RNA, 19 nt, Artificial Sequence
  Description of Artificial Sequence: Synthetic oligonucleotide
  Antisense strand to SEQ ID NO: 800424
ucucccauucaagagcagu

SEQ ID NO: 800426 - RNA, 19 nt, Artificial Sequence
  Description of Artificial Sequence: Synthetic oligonucleotide
  Sense strand starting at position 1306 of SEQ ID NO: 587549
ugcucuugaaugggagaga

SEQ ID NO: 800427 - RNA, 19 nt, Artificial Sequence
  Description of Artificial Sequence: Synthetic oligonucleotide
  Antisense strand to SEQ ID NO: 800426
ucucucccauucaagagca

SEQ ID NO: 800428 - RNA, 19 nt, Artificial Sequence
  Description of Artificial Sequence: Synthetic oligonucleotide
  Sense strand starting at position 1307 of SEQ ID NO: 587549
gcucuugaaugggagagaa

SEQ ID NO: 800429 - RNA, 19 nt, Artificial Sequence
  Description of Artificial Sequence: Synthetic oligonucleotide
  Antisense strand to SEQ ID NO: 800428
uucucucccauucaagagc

SEQ ID NO: 800430 - RNA, 19 nt, Artificial Sequence
  Description of Artificial Sequence: Synthetic oligonucleotide
  Sense strand starting at position 1364 of SEQ ID NO: 587549
auguguuugguugguccaa

SEQ ID NO: 800431 - RNA, 19 nt, Artificial Sequence
  Description of Artificial Sequence: Synthetic oligonucleotide
  Antisense strand to SEQ ID NO: 800430
uuggaccaaccaaacacau

SEQ ID NO: 800432 - RNA, 19 nt, Artificial Sequence
  Description of Artificial Sequence: Synthetic oligonucleotide
  Sense strand starting at position 1365 of SEQ ID NO: 587549
uguguuugguugguccaaa

SEQ ID NO: 800433 - RNA, 19 nt, Artificial Sequence
  Description of Artificial Sequence: Synthetic oligonucleotide
  Antisense strand to SEQ ID NO: 800432
uuuggaccaaccaaacaca

SEQ ID NO: 800434 - RNA, 19 nt, Artificial Sequence
  Description of Artificial Sequence: Synthetic oligonucleotide
  Sense strand starting at position 1366 of SEQ ID NO: 587549
guguuugguugguccaaac

SEQ ID NO: 800435 - RNA, 19 nt, Artificial Sequence
  Description of Artificial Sequence: Synthetic oligonucleotide
  Antisense strand to SEQ ID NO: 800434
guuuggaccaaccaaacac

SEQ ID NO: 800436 - RNA, 19 nt, Artificial Sequence
  Description of Artificial Sequence: Synthetic oligonucleotide
  Sense strand starting at position 1376 of SEQ ID NO: 587549
gguccaaacuuuguggcaa

SEQ ID NO: 800437 - RNA, 19 nt, Artificial Sequence
  Description of Artificial Sequence: Synthetic oligonucleotide
  Antisense strand to SEQ ID NO: 800436
uugccacaaaguuuggacc

SEQ ID NO: 800438 - RNA, 19 nt, Artificial Sequence
  Description of Artificial Sequence: Synthetic oligonucleotide
  Sense strand starting at position 1583 of SEQ ID NO: 587549
cgaggucacguguuucuuu

SEQ ID NO: 800439 - RNA, 19 nt, Artificial Sequence
  Description of Artificial Sequence: Synthetic oligonucleotide
  Antisense strand to SEQ ID NO: 800438
aaagaaacacgugaccucg

SEQ ID NO: 800440 - RNA, 19 nt, Artificial Sequence
  Description of Artificial Sequence: Synthetic oligonucleotide
  Sense strand starting at position 1584 of SEQ ID NO: 587549
gaggucacguguuucuuua

SEQ ID NO: 800441 - RNA, 19 nt, Artificial Sequence
  Description of Artificial Sequence: Synthetic oligonucleotide
  Antisense strand to SEQ ID NO: 800440
uaaagaaacacgugaccuc

SEQ ID NO: 800442 - RNA, 19 nt, Artificial Sequence
  Description of Artificial Sequence: Synthetic oligonucleotide
  Sense strand starting at position 1586 of SEQ ID NO: 587549
ggucacguguuucuuuaca

SEQ ID NO: 800443 - RNA, 19 nt, Artificial Sequence
  Description of Artificial Sequence: Synthetic oligonucleotide
  Antisense strand to SEQ ID NO: 800442
uguaaagaaacacgugacc

SEQ ID NO: 800444 - RNA, 19 nt, Artificial Sequence
  Description of Artificial Sequence: Synthetic oligonucleotide
  Sense strand starting at position 1588 of SEQ ID NO: 587549
ucacguguuucuuuacaau

SEQ ID NO: 800445 - RNA, 19 nt, Artificial Sequence
  Description of Artificial Sequence: Synthetic oligonucleotide
  Antisense strand to SEQ ID NO: 800444
auuguaaagaaacacguga

SEQ ID NO: 800446 - RNA, 19 nt, Artificial Sequence
  Description of Artificial Sequence: Synthetic oligonucleotide
  Sense strand starting at position 2126 of SEQ ID NO: 587549
guggcguguggucucuaga

SEQ ID NO: 800447 - RNA, 19 nt, Artificial Sequence
  Description of Artificial Sequence: Synthetic oligonucleotide
  Antisense strand to SEQ ID NO: 800446
ucuagagaccacacgccac

SEQ ID NO: 800448 - RNA, 19 nt, Artificial Sequence
  Description of Artificial Sequence: Synthetic oligonucleotide
  Sense strand starting at position 2129 of SEQ ID NO: 587549
gcguguggucucuagacaa

SEQ ID NO: 800449 - RNA, 19 nt, Artificial Sequence
  Description of Artificial Sequence: Synthetic oligonucleotide
  Antisense strand to SEQ ID NO: 800448
uugucuagagaccacacgc

SEQ ID NO: 800450 - RNA, 19 nt, Artificial Sequence
  Description of Artificial Sequence: Synthetic oligonucleotide
  Sense strand starting at position 2133 of SEQ ID NO: 587549
guggucucuagacaacuga

SEQ ID NO: 800451 - RNA, 19 nt, Artificial Sequence
  Description of Artificial Sequence: Synthetic oligonucleotide
  Antisense strand to SEQ ID NO: 800450
ucaguugucuagagaccac

SEQ ID NO: 800452 - RNA, 19 nt, Artificial Sequence
  Description of Artificial Sequence: Synthetic oligonucleotide
  Sense strand starting at position 2165 of SEQ ID NO: 587549
gaccgugcucaccgauuua

SEQ ID NO: 800453 - RNA, 19 nt, Artificial Sequence
  Description of Artificial Sequence: Synthetic oligonucleotide
  Antisense strand to SEQ ID NO: 800452
uaaaucggugagcacgguc

SEQ ID NO: 800454 - RNA, 19 nt, Artificial Sequence
  Description of Artificial Sequence: Synthetic oligonucleotide
  Sense strand starting at position 2212 of SEQ ID NO: 587549
acacccuguucucuuuaga

SEQ ID NO: 800455 - RNA, 19 nt, Artificial Sequence
  Description of Artificial Sequence: Synthetic oligonucleotide
  Antisense strand to SEQ ID NO: 800454
ucuaaagagaacagggugu

SEQ ID NO: 800456 - RNA, 19 nt, Artificial Sequence
  Description of Artificial Sequence: Synthetic oligonucleotide
  Sense strand starting at position 2296 of SEQ ID NO: 587549
ggcuuucaccucgguggaa

SEQ ID NO: 800457 - RNA, 19 nt, Artificial Sequence
  Description of Artificial Sequence: Synthetic oligonucleotide
  Antisense strand to SEQ ID NO: 800456
uuccaccgaggugaaagcc

SEQ ID NO: 800458 - RNA, 19 nt, Artificial Sequence
  Description of Artificial Sequence: Synthetic oligonucleotide
  Sense strand starting at position 2297 of SEQ ID NO: 587549
gcuuucaccucgguggaau

SEQ ID NO: 800459 - RNA, 19 nt, Artificial Sequence
  Description of Artificial Sequence: Synthetic oligonucleotide
  Antisense strand to SEQ ID NO: 800458
auuccaccgaggugaaagc

SEQ ID NO: 800460 - RNA, 19 nt, Artificial Sequence
  Description of Artificial Sequence: Synthetic oligonucleotide
  Sense strand starting at position 2341 of SEQ ID NO: 587549
uagggacuguuggcuagaa

SEQ ID NO: 800461 - RNA, 19 nt, Artificial Sequence
  Description of Artificial Sequence: Synthetic oligonucleotide
  Antisense strand to SEQ ID NO: 800460
uucuagccaacagucccua

SEQ ID NO: 800462 - RNA, 19 nt, Artificial Sequence
  Description of Artificial Sequence: Synthetic oligonucleotide
  Sense strand starting at position 2343 of SEQ ID NO: 587549
gggacuguuggcuagaacu

SEQ ID NO: 800463 - RNA, 19 nt, Artificial Sequence
  Description of Artificial Sequence: Synthetic oligonucleotide
  Antisense strand to SEQ ID NO: 800462
aguucuagccaacaguccc

SEQ ID NO: 800464 - RNA, 19 nt, Artificial Sequence
  Description of Artificial Sequence: Synthetic oligonucleotide
  Sense strand starting at position 2574 of SEQ ID NO: 587549
ucuccuuccugcuuggaau

SEQ ID NO: 800465 - RNA, 19 nt, Artificial Sequence
  Description of Artificial Sequence: Synthetic oligonucleotide
  Antisense strand to SEQ ID NO: 800464
auuccaagcaggaaggaga

SEQ ID NO: 800466 - RNA, 19 nt, Artificial Sequence
  Description of Artificial Sequence: Synthetic oligonucleotide
  Sense strand starting at position 2706 of SEQ ID NO: 587549
accugaagaugauaauaau

SEQ ID NO: 800467 - RNA, 19 nt, Artificial Sequence
  Description of Artificial Sequence: Synthetic oligonucleotide
  Antisense strand to SEQ ID NO: 800466
auuauuaucaucuucaggu

SEQ ID NO: 800468 - RNA, 19 nt, Artificial Sequence
  Description of Artificial Sequence: Synthetic oligonucleotide
  Sense strand starting at position 2733 of SEQ ID NO: 587549
ucuauagagugcuuacaca

SEQ ID NO: 800469 - RNA, 19 nt, Artificial Sequence
  Description of Artificial Sequence: Synthetic oligonucleotide
  Antisense strand to SEQ ID NO: 800468
uguguaagcacucuauaga

SEQ ID NO: 800470 - RNA, 19 nt, Artificial Sequence
  Description of Artificial Sequence: Synthetic oligonucleotide
  Sense strand starting at position 2764 of SEQ ID NO: 587549
guucuaaaucucuguacuu

SEQ ID NO: 800471 - RNA, 19 nt, Artificial Sequence
  Description of Artificial Sequence: Synthetic oligonucleotide
  Antisense strand to SEQ ID NO: 800470
aaguacagagauuuagaac

SEQ ID NO: 800472 - RNA, 19 nt, Artificial Sequence
  Description of Artificial Sequence: Synthetic oligonucleotide
  Sense strand starting at position 3083 of SEQ ID NO: 587549
gcaccuggucugcauuauu

SEQ ID NO: 800473 - RNA, 19 nt, Artificial Sequence
  Description of Artificial Sequence: Synthetic oligonucleotide
  Antisense strand to SEQ ID NO: 800472
aauaaugcagaccaggugc

SEQ ID NO: 800474 - RNA, 19 nt, Artificial Sequence
  Description of Artificial Sequence: Synthetic oligonucleotide
  Sense strand starting at position 3086 of SEQ ID NO: 587549
ccuggucugcauuauuauu

SEQ ID NO: 800475 - RNA, 19 nt, Artificial Sequence
  Description of Artificial Sequence: Synthetic oligonucleotide
  Antisense strand to SEQ ID NO: 800474
aauaauaaugcagaccagg

SEQ ID NO: 800476 - RNA, 19 nt, Artificial Sequence
  Description of Artificial Sequence: Synthetic oligonucleotide
  Sense strand starting at position 3088 of SEQ ID NO: 587549
uggucugcauuauuauuau

SEQ ID NO: 800477 - RNA, 19 nt, Artificial Sequence
  Description of Artificial Sequence: Synthetic oligonucleotide
  Antisense strand to SEQ ID NO: 800476
auaauaauaaugcagacca

SEQ ID NO: 800478 - RNA, 19 nt, Artificial Sequence
  Description of Artificial Sequence: Synthetic oligonucleotide
  Sense strand starting at position 3125 of SEQ ID NO: 587549
cuacguagaugagcugaua

SEQ ID NO: 800479 - RNA, 19 nt, Artificial Sequence
  Description of Artificial Sequence: Synthetic oligonucleotide
  Antisense strand to SEQ ID NO: 800478
uaucagcucaucuacguag

SEQ ID NO: 800480 - RNA, 19 nt, Artificial Sequence
  Description of Artificial Sequence: Synthetic oligonucleotide
  Sense strand starting at position 3170 of SEQ ID NO: 587549
guucuuaauccguggcuaa

SEQ ID NO: 800481 - RNA, 19 nt, Artificial Sequence
  Description of Artificial Sequence: Synthetic oligonucleotide
  Antisense strand to SEQ ID NO: 800480
uuagccacggauuaagaac

SEQ ID NO: 800482 - RNA, 19 nt, Artificial Sequence
  Description of Artificial Sequence: Synthetic oligonucleotide
  Sense strand starting at position 3171 of SEQ ID NO: 587549
uucuuaauccguggcuaaa

SEQ ID NO: 800483 - RNA, 19 nt, Artificial Sequence
  Description of Artificial Sequence: Synthetic oligonucleotide
  Antisense strand to SEQ ID NO: 800482
uuuagccacggauuaagaa

SEQ ID NO: 800484 - RNA, 19 nt, Artificial Sequence
  Description of Artificial Sequence: Synthetic oligonucleotide
  Sense strand starting at position 3277 of SEQ ID NO: 587549
uuacuuaaacacugugaga

SEQ ID NO: 800485 - RNA, 19 nt, Artificial Sequence
  Description of Artificial Sequence: Synthetic oligonucleotide
  Antisense strand to SEQ ID NO: 800484
ucucacaguguuuaaguaa

SEQ ID NO: 800486 - RNA, 19 nt, Artificial Sequence
  Description of Artificial Sequence: Synthetic oligonucleotide
  Sense strand starting at position 3319 of SEQ ID NO: 587549
aggcaauauuagguugaau

SEQ ID NO: 800487 - RNA, 19 nt, Artificial Sequence
  Description of Artificial Sequence: Synthetic oligonucleotide
  Antisense strand to SEQ ID NO: 800486
auucaaccuaauauugccu

SEQ ID NO: 800488 - RNA, 19 nt, Artificial Sequence
  Description of Artificial Sequence: Synthetic oligonucleotide
  Sense strand starting at position 3321 of SEQ ID NO: 587549
gcaauauuagguugaauug

SEQ ID NO: 800489 - RNA, 19 nt, Artificial Sequence
  Description of Artificial Sequence: Synthetic oligonucleotide
  Antisense strand to SEQ ID NO: 800488
caauucaaccuaauauugc

SEQ ID NO: 800490 - RNA, 19 nt, Artificial Sequence
  Description of Artificial Sequence: Synthetic oligonucleotide
  Sense strand starting at position 3328 of SEQ ID NO: 587549
uagguugaauugcauuuaa

SEQ ID NO: 800491 - RNA, 19 nt, Artificial Sequence
  Description of Artificial Sequence: Synthetic oligonucleotide
  Antisense strand to SEQ ID NO: 800490
uuaaaugcaauucaaccua

SEQ ID NO: 800492 - RNA, 19 nt, Artificial Sequence
  Description of Artificial Sequence: Synthetic oligonucleotide
  Sense strand starting at position 3443 of SEQ ID NO: 587549
cauagaaagucauagaaag

SEQ ID NO: 800493 - RNA, 19 nt, Artificial Sequence
  Description of Artificial Sequence: Synthetic oligonucleotide
  Antisense strand to SEQ ID NO: 800492
cuuucuaugacuuucuaug

SEQ ID NO: 800494 - RNA, 19 nt, Artificial Sequence
  Description of Artificial Sequence: Synthetic oligonucleotide
  Sense strand starting at position 3475 of SEQ ID NO: 587549
aguuguugugagggacaaa

SEQ ID NO: 800495 - RNA, 19 nt, Artificial Sequence
  Description of Artificial Sequence: Synthetic oligonucleotide
  Antisense strand to SEQ ID NO: 800494
uuugucccucacaacaacu

SEQ ID NO: 800496 - RNA, 19 nt, Artificial Sequence
  Description of Artificial Sequence: Synthetic oligonucleotide
  Sense strand starting at position 3476 of SEQ ID NO: 587549
guuguugugagggacaaau

SEQ ID NO: 800497 - RNA, 19 nt, Artificial Sequence
  Description of Artificial Sequence: Synthetic oligonucleotide
  Antisense strand to SEQ ID NO: 800496
auuugucccucacaacaac

SEQ ID NO: 800498 - RNA, 19 nt, Artificial Sequence
  Description of Artificial Sequence: Synthetic oligonucleotide
  Sense strand starting at position 142 of SEQ ID NO: 587550
agguguugcaaggauuaga

SEQ ID NO: 800499 - RNA, 19 nt, Artificial Sequence
  Description of Artificial Sequence: Synthetic oligonucleotide
  Antisense strand to SEQ ID NO: 800498
ucuaauccuugcaacaccu

SEQ ID NO: 800500 - RNA, 19 nt, Artificial Sequence
  Description of Artificial Sequence: Synthetic oligonucleotide
  Sense strand starting at position 348 of SEQ ID NO: 587550
gugucaauucuugauucuu

SEQ ID NO: 800501 - RNA, 19 nt, Artificial Sequence
  Description of Artificial Sequence: Synthetic oligonucleotide
  Antisense strand to SEQ ID NO: 800500
aagaaucaagaauugacac

SEQ ID NO: 800502 - RNA, 19 nt, Artificial Sequence
  Description of Artificial Sequence: Synthetic oligonucleotide
  Sense strand starting at position 389 of SEQ ID NO: 587550
ucuugaucuaacggaguag

SEQ ID NO: 800503 - RNA, 19 nt, Artificial Sequence
  Description of Artificial Sequence: Synthetic oligonucleotide
  Antisense strand to SEQ ID NO: 800502
cuacuccguuagaucaaga

SEQ ID NO: 800504 - RNA, 19 nt, Artificial Sequence
  Description of Artificial Sequence: Synthetic oligonucleotide
  Sense strand starting at position 460 of SEQ ID NO: 587550
gucuucuugcuugaggaag

SEQ ID NO: 800505 - RNA, 19 nt, Artificial Sequence
  Description of Artificial Sequence: Synthetic oligonucleotide
  Antisense strand to SEQ ID NO: 800504
cuuccucaagcaagaagac

SEQ ID NO: 800506 - RNA, 19 nt, Artificial Sequence
  Description of Artificial Sequence: Synthetic oligonucleotide
  Sense strand starting at position 632 of SEQ ID NO: 587550
auucuaaauccguauucug

SEQ ID NO: 800507 - RNA, 19 nt, Artificial Sequence
  Description of Artificial Sequence: Synthetic oligonucleotide
  Antisense strand to SEQ ID NO: 800506
cagaauacggauuuagaau

SEQ ID NO: 800508 - RNA, 19 nt, Artificial Sequence
  Description of Artificial Sequence: Synthetic oligonucleotide
  Sense strand starting at position 641 of SEQ ID NO: 587550
ccguauucugcacaaauaa

SEQ ID NO: 800509 - RNA, 19 nt, Artificial Sequence
  Description of Artificial Sequence: Synthetic oligonucleotide
  Antisense strand to SEQ ID NO: 800508
uuauuugugcagaauacgg

SEQ ID NO: 800510 - RNA, 19 nt, Artificial Sequence
  Description of Artificial Sequence: Synthetic oligonucleotide
  Sense strand starting at position 671 of SEQ ID NO: 587550
ucucaauacuggucuggaa

SEQ ID NO: 800511 - RNA, 19 nt, Artificial Sequence
  Description of Artificial Sequence: Synthetic oligonucleotide
  Antisense strand to SEQ ID NO: 800510
uuccagaccaguauugaga

SEQ ID NO: 800512 - RNA, 19 nt, Artificial Sequence
  Description of Artificial Sequence: Synthetic oligonucleotide
  Sense strand starting at position 673 of SEQ ID NO: 587550
ucaauacuggucuggaagu

SEQ ID NO: 800513 - RNA, 19 nt, Artificial Sequence
  Description of Artificial Sequence: Synthetic oligonucleotide
  Antisense strand to SEQ ID NO: 800512
acuuccagaccaguauuga

SEQ ID NO: 800514 - RNA, 19 nt, Artificial Sequence
  Description of Artificial Sequence: Synthetic oligonucleotide
  Sense strand starting at position 810 of SEQ ID NO: 587550
aggacugguuucccagcaa

SEQ ID NO: 800515 - RNA, 19 nt, Artificial Sequence
  Description of Artificial Sequence: Synthetic oligonucleotide
  Antisense strand to SEQ ID NO: 800514
uugcugggaaaccaguccu

SEQ ID NO: 800516 - RNA, 19 nt, Artificial Sequence
  Description of Artificial Sequence: Synthetic oligonucleotide
  Sense strand starting at position 1625 of SEQ ID NO: 587550
ccauaacuuccguaggauc

SEQ ID NO: 800517 - RNA, 19 nt, Artificial Sequence
  Description of Artificial Sequence: Synthetic oligonucleotide
  Antisense strand to SEQ ID NO: 800516
gauccuacggaaguuaugg

SEQ ID NO: 800518 - RNA, 19 nt, Artificial Sequence
  Description of Artificial Sequence: Synthetic oligonucleotide
  Sense strand starting at position 1701 of SEQ ID NO: 587550
ggaucaucagcauggaauc

SEQ ID NO: 800519 - RNA, 19 nt, Artificial Sequence
  Description of Artificial Sequence: Synthetic oligonucleotide
  Antisense strand to SEQ ID NO: 800518
gauuccaugcugaugaucc

SEQ ID NO: 800520 - RNA, 19 nt, Artificial Sequence
  Description of Artificial Sequence: Synthetic oligonucleotide
  Sense strand starting at position 1791 of SEQ ID NO: 587550
uccgaaucaccgcaggaaa

SEQ ID NO: 800521 - RNA, 19 nt, Artificial Sequence
  Description of Artificial Sequence: Synthetic oligonucleotide
  Antisense strand to SEQ ID NO: 800520
uuuccugcggugauucgga

SEQ ID NO: 800522 - RNA, 19 nt, Artificial Sequence
  Description of Artificial Sequence: Synthetic oligonucleotide
  Sense strand starting at position 1894 of SEQ ID NO: 587550
gagcuagaaccaugaguug

SEQ ID NO: 800523 - RNA, 19 nt, Artificial Sequence
  Description of Artificial Sequence: Synthetic oligonucleotide
  Antisense strand to SEQ ID NO: 800522
caacucaugguucuagcuc

SEQ ID NO: 800524 - RNA, 19 nt, Artificial Sequence
  Description of Artificial Sequence: Synthetic oligonucleotide
  Sense strand starting at position 1897 of SEQ ID NO: 587550
cuagaaccaugaguuguua

SEQ ID NO: 800525 - RNA, 19 nt, Artificial Sequence
  Description of Artificial Sequence: Synthetic oligonucleotide
  Antisense strand to SEQ ID NO: 800524
uaacaacucaugguucuag

SEQ ID NO: 800526 - RNA, 19 nt, Artificial Sequence
  Description of Artificial Sequence: Synthetic oligonucleotide
  Sense strand starting at position 2255 of SEQ ID NO: 587550
cgugcacauuuaucugaau

SEQ ID NO: 800527 - RNA, 19 nt, Artificial Sequence
  Description of Artificial Sequence: Synthetic oligonucleotide
  Antisense strand to SEQ ID NO: 800526
auucagauaaaugugcacg

SEQ ID NO: 800528 - RNA, 19 nt, Artificial Sequence
  Description of Artificial Sequence: Synthetic oligonucleotide
  Sense strand starting at position 2264 of SEQ ID NO: 587550
uuaucugaauuggcuaaua

SEQ ID NO: 800529 - RNA, 19 nt, Artificial Sequence
  Description of Artificial Sequence: Synthetic oligonucleotide
  Antisense strand to SEQ ID NO: 800528
uauuagccaauucagauaa

SEQ ID NO: 800530 - RNA, 19 nt, Artificial Sequence
  Description of Artificial Sequence: Synthetic oligonucleotide
  Sense strand starting at position 2328 of SEQ ID NO: 587550
uuuccugggcuugaauuau

SEQ ID NO: 800531 - RNA, 19 nt, Artificial Sequence
  Description of Artificial Sequence: Synthetic oligonucleotide
  Antisense strand to SEQ ID NO: 800530
auaauucaagcccaggaaa

SEQ ID NO: 800532 - RNA, 19 nt, Artificial Sequence
  Description of Artificial Sequence: Synthetic oligonucleotide
  Sense strand starting at position 2347 of SEQ ID NO: 587550
guagcuuauuugcuacauu

SEQ ID NO: 800533 - RNA, 19 nt, Artificial Sequence
  Description of Artificial Sequence: Synthetic oligonucleotide
  Antisense strand to SEQ ID NO: 800532
aauguagcaaauaagcuac

SEQ ID NO: 800534 - RNA, 19 nt, Artificial Sequence
  Description of Artificial Sequence: Synthetic oligonucleotide
  Sense strand starting at position 2350 of SEQ ID NO: 587550
gcuuauuugcuacauuagu

SEQ ID NO: 800535 - RNA, 19 nt, Artificial Sequence
  Description of Artificial Sequence: Synthetic oligonucleotide
  Antisense strand to SEQ ID NO: 800534
acuaauguagcaaauaagc

SEQ ID NO: 800536 - RNA, 19 nt, Artificial Sequence
  Description of Artificial Sequence: Synthetic oligonucleotide
  Sense strand starting at position 2375 of SEQ ID NO: 587550
ucugcuauucugcagaaac

SEQ ID NO: 800537 - RNA, 19 nt, Artificial Sequence
  Description of Artificial Sequence: Synthetic oligonucleotide
  Antisense strand to SEQ ID NO: 800536
guuucugcagaauagcaga

SEQ ID NO: 800538 - RNA, 19 nt, Artificial Sequence
  Description of Artificial Sequence: Synthetic oligonucleotide
  Sense strand starting at position 2499 of SEQ ID NO: 587550
uuauguauaucaucucaug

SEQ ID NO: 800539 - RNA, 19 nt, Artificial Sequence
  Description of Artificial Sequence: Synthetic oligonucleotide
  Antisense strand to SEQ ID NO: 800538
caugagaugauauacauaa

SEQ ID NO: 800540 - RNA, 19 nt, Artificial Sequence
  Description of Artificial Sequence: Synthetic oligonucleotide
  Sense strand starting at position 2571 of SEQ ID NO: 587550
gacugagacuuccuuaagu

SEQ ID NO: 800541 - RNA, 19 nt, Artificial Sequence
  Description of Artificial Sequence: Synthetic oligonucleotide
  Antisense strand to SEQ ID NO: 800540
acuuaaggaagucucaguc

SEQ ID NO: 800542 - RNA, 19 nt, Artificial Sequence
  Description of Artificial Sequence: Synthetic oligonucleotide
  Sense strand starting at position 2636 of SEQ ID NO: 587550
cugcauuugggcuguagaa

SEQ ID NO: 800543 - RNA, 19 nt, Artificial Sequence
  Description of Artificial Sequence: Synthetic oligonucleotide
  Antisense strand to SEQ ID NO: 800542
uucuacagcccaaaugcag

SEQ ID NO: 800544 - RNA, 19 nt, Artificial Sequence
  Description of Artificial Sequence: Synthetic oligonucleotide
  Sense strand starting at position 2663 of SEQ ID NO: 587550
uuggaacuccugugaauaa

SEQ ID NO: 800545 - RNA, 19 nt, Artificial Sequence
  Description of Artificial Sequence: Synthetic oligonucleotide
  Antisense strand to SEQ ID NO: 800544
uuauucacaggaguuccaa

SEQ ID NO: 800546 - RNA, 19 nt, Artificial Sequence
  Description of Artificial Sequence: Synthetic oligonucleotide
  Sense strand starting at position 2755 of SEQ ID NO: 587550
caggaaaguuuccuggagu

SEQ ID NO: 800547 - RNA, 19 nt, Artificial Sequence
  Description of Artificial Sequence: Synthetic oligonucleotide
  Antisense strand to SEQ ID NO: 800546
acuccaggaaacuuuccug

SEQ ID NO: 800548 - RNA, 19 nt, Artificial Sequence
  Description of Artificial Sequence: Synthetic oligonucleotide
  Sense strand starting at position 2758 of SEQ ID NO: 587550
gaaaguuuccuggagucug

SEQ ID NO: 800549 - RNA, 19 nt, Artificial Sequence
  Description of Artificial Sequence: Synthetic oligonucleotide
  Antisense strand to SEQ ID NO: 800548
cagacuccaggaaacuuuc

SEQ ID NO: 800550 - RNA, 19 nt, Artificial Sequence
  Description of Artificial Sequence: Synthetic oligonucleotide
  Sense strand starting at position 2768 of SEQ ID NO: 587550
uggagucugugacuucuaa

SEQ ID NO: 800551 - RNA, 19 nt, Artificial Sequence
  Description of Artificial Sequence: Synthetic oligonucleotide
  Antisense strand to SEQ ID NO: 800550
uuagaagucacagacucca

SEQ ID NO: 800552 - RNA, 19 nt, Artificial Sequence
  Description of Artificial Sequence: Synthetic oligonucleotide
  Sense strand starting at position 2816 of SEQ ID NO: 587550
gcugguaaggaguauguca

SEQ ID NO: 800553 - RNA, 19 nt, Artificial Sequence
  Description of Artificial Sequence: Synthetic oligonucleotide
  Antisense strand to SEQ ID NO: 800552
ugacauacuccuuaccagc

SEQ ID NO: 800554 - RNA, 19 nt, Artificial Sequence
  Description of Artificial Sequence: Synthetic oligonucleotide
  Sense strand starting at position 2818 of SEQ ID NO: 587550
ugguaaggaguaugucaca

SEQ ID NO: 800555 - RNA, 19 nt, Artificial Sequence
  Description of Artificial Sequence: Synthetic oligonucleotide
  Antisense strand to SEQ ID NO: 800554
ugugacauacuccuuacca

SEQ ID NO: 800556 - RNA, 19 nt, Artificial Sequence
  Description of Artificial Sequence: Synthetic oligonucleotide
  Sense strand starting at position 2905 of SEQ ID NO: 587550
ggagaacagaguugcucaa

SEQ ID NO: 800557 - RNA, 19 nt, Artificial Sequence
  Description of Artificial Sequence: Synthetic oligonucleotide
  Antisense strand to SEQ ID NO: 800556
uugagcaacucuguucucc

SEQ ID NO: 800558 - RNA, 19 nt, Artificial Sequence
  Description of Artificial Sequence: Synthetic oligonucleotide
  Sense strand starting at position 2916 of SEQ ID NO: 587550
uugcucaagccugaaacuu

SEQ ID NO: 800559 - RNA, 19 nt, Artificial Sequence
  Description of Artificial Sequence: Synthetic oligonucleotide
  Antisense strand to SEQ ID NO: 800558
aaguuucaggcuugagcaa

SEQ ID NO: 800560 - RNA, 19 nt, Artificial Sequence
  Description of Artificial Sequence: Synthetic oligonucleotide
  Sense strand starting at position 3024 of SEQ ID NO: 587550
gacuauagagacugucuaa

SEQ ID NO: 800561 - RNA, 19 nt, Artificial Sequence
  Description of Artificial Sequence: Synthetic oligonucleotide
  Antisense strand to SEQ ID NO: 800560
uuagacagucucuauaguc

SEQ ID NO: 800562 - RNA, 19 nt, Artificial Sequence
  Description of Artificial Sequence: Synthetic oligonucleotide
  Sense strand starting at position 3337 of SEQ ID NO: 587550
gugggaaugcaucagugaa

SEQ ID NO: 800563 - RNA, 19 nt, Artificial Sequence
  Description of Artificial Sequence: Synthetic oligonucleotide
  Antisense strand to SEQ ID NO: 800562
uucacugaugcauucccac

SEQ ID NO: 800564 - RNA, 19 nt, Artificial Sequence
  Description of Artificial Sequence: Synthetic oligonucleotide
  Sense strand starting at position 3339 of SEQ ID NO: 587550
gggaaugcaucagugaaua

SEQ ID NO: 800565 - RNA, 19 nt, Artificial Sequence
  Description of Artificial Sequence: Synthetic oligonucleotide
  Antisense strand to SEQ ID NO: 800564
uauucacugaugcauuccc

SEQ ID NO: 800566 - RNA, 19 nt, Artificial Sequence
  Description of Artificial Sequence: Synthetic oligonucleotide
  Sense strand starting at position 3347 of SEQ ID NO: 587550
aucagugaauaugugugaa

SEQ ID NO: 800567 - RNA, 19 nt, Artificial Sequence
  Description of Artificial Sequence: Synthetic oligonucleotide
  Antisense strand to SEQ ID NO: 800566
uucacacauauucacugau

SEQ ID NO: 800568 - RNA, 19 nt, Artificial Sequence
  Description of Artificial Sequence: Synthetic oligonucleotide
  Sense strand starting at position 3349 of SEQ ID NO: 587550
cagugaauaugugugaaag

SEQ ID NO: 800569 - RNA, 19 nt, Artificial Sequence
  Description of Artificial Sequence: Synthetic oligonucleotide
  Antisense strand to SEQ ID NO: 800568
cuuucacacauauucacug

SEQ ID NO: 800570 - RNA, 19 nt, Artificial Sequence
  Description of Artificial Sequence: Synthetic oligonucleotide
  Sense strand starting at position 3350 of SEQ ID NO: 587550
agugaauaugugugaaaga

SEQ ID NO: 800571 - RNA, 19 nt, Artificial Sequence
  Description of Artificial Sequence: Synthetic oligonucleotide
  Antisense strand to SEQ ID NO: 800570
ucuuucacacauauucacu

SEQ ID NO: 800572 - RNA, 19 nt, Artificial Sequence
  Description of Artificial Sequence: Synthetic oligonucleotide
  Sense strand starting at position 3772 of SEQ ID NO: 587550
uagaauaaggguuguacau

SEQ ID NO: 800573 - RNA, 19 nt, Artificial Sequence
  Description of Artificial Sequence: Synthetic oligonucleotide
  Antisense strand to SEQ ID NO: 800572
auguacaacccuuauucua

SEQ ID NO: 800574 - RNA, 19 nt, Artificial Sequence
  Description of Artificial Sequence: Synthetic oligonucleotide
  Sense strand starting at position 3781 of SEQ ID NO: 587550
gguuguacauaucugaacu

SEQ ID NO: 800575 - RNA, 19 nt, Artificial Sequence
  Description of Artificial Sequence: Synthetic oligonucleotide
  Antisense strand to SEQ ID NO: 800574
aguucagauauguacaacc

SEQ ID NO: 800576 - RNA, 19 nt, Artificial Sequence
  Description of Artificial Sequence: Synthetic oligonucleotide
  Sense strand starting at position 3834 of SEQ ID NO: 587550
caggaaaggcaauguaaau

SEQ ID NO: 800577 - RNA, 19 nt, Artificial Sequence
  Description of Artificial Sequence: Synthetic oligonucleotide
  Antisense strand to SEQ ID NO: 800576
auuuacauugccuuuccug

SEQ ID NO: 800578 - RNA, 19 nt, Artificial Sequence
  Description of Artificial Sequence: Synthetic oligonucleotide
  Sense strand starting at position 114 of SEQ ID NO: 587551
acaguaucuuuagauacua

SEQ ID NO: 800579 - RNA, 19 nt, Artificial Sequence
  Description of Artificial Sequence: Synthetic oligonucleotide
  Antisense strand to SEQ ID NO: 800578
uaguaucuaaagauacugu

SEQ ID NO: 800580 - RNA, 19 nt, Artificial Sequence
  Description of Artificial Sequence: Synthetic oligonucleotide
  Sense strand starting at position 119 of SEQ ID NO: 587551
aucuuuagauacuacagua

SEQ ID NO: 800581 - RNA, 19 nt, Artificial Sequence
  Description of Artificial Sequence: Synthetic oligonucleotide
  Antisense strand to SEQ ID NO: 800580
uacuguaguaucuaaagau

SEQ ID NO: 800582 - RNA, 19 nt, Artificial Sequence
  Description of Artificial Sequence: Synthetic oligonucleotide
  Sense strand starting at position 155 of SEQ ID NO: 587551
uuuagauacuauguguagu

SEQ ID NO: 800583 - RNA, 19 nt, Artificial Sequence
  Description of Artificial Sequence: Synthetic oligonucleotide
  Antisense strand to SEQ ID NO: 800582
acuacacauaguaucuaaa

SEQ ID NO: 800584 - RNA, 19 nt, Artificial Sequence
  Description of Artificial Sequence: Synthetic oligonucleotide
  Sense strand starting at position 156 of SEQ ID NO: 587551
uuagauacuauguguagua

SEQ ID NO: 800585 - RNA, 19 nt, Artificial Sequence
  Description of Artificial Sequence: Synthetic oligonucleotide
  Antisense strand to SEQ ID NO: 800584
uacuacacauaguaucuaa

SEQ ID NO: 800586 - RNA, 19 nt, Artificial Sequence
  Description of Artificial Sequence: Synthetic oligonucleotide
  Sense strand starting at position 157 of SEQ ID NO: 587551
uagauacuauguguaguau

SEQ ID NO: 800587 - RNA, 19 nt, Artificial Sequence
  Description of Artificial Sequence: Synthetic oligonucleotide
  Antisense strand to SEQ ID NO: 800586
auacuacacauaguaucua

SEQ ID NO: 800588 - RNA, 19 nt, Artificial Sequence
  Description of Artificial Sequence: Synthetic oligonucleotide
  Sense strand starting at position 158 of SEQ ID NO: 587551
agauacuauguguaguaua

SEQ ID NO: 800589 - RNA, 19 nt, Artificial Sequence
  Description of Artificial Sequence: Synthetic oligonucleotide
  Antisense strand to SEQ ID NO: 800588
uauacuacacauaguaucu

SEQ ID NO: 800590 - RNA, 19 nt, Artificial Sequence
  Description of Artificial Sequence: Synthetic oligonucleotide
  Sense strand starting at position 199 of SEQ ID NO: 587551
agauacuaauguguaguau

SEQ ID NO: 800591 - RNA, 19 nt, Artificial Sequence
  Description of Artificial Sequence: Synthetic oligonucleotide
  Antisense strand to SEQ ID NO: 800590
auacuacacauuaguaucu

SEQ ID NO: 800592 - RNA, 19 nt, Artificial Sequence
  Description of Artificial Sequence: Synthetic oligonucleotide
  Sense strand starting at position 200 of SEQ ID NO: 587551
gauacuaauguguaguaua

SEQ ID NO: 800593 - RNA, 19 nt, Artificial Sequence
  Description of Artificial Sequence: Synthetic oligonucleotide
  Antisense strand to SEQ ID NO: 800592
uauacuacacauuaguauc

SEQ ID NO: 800594 - RNA, 19 nt, Artificial Sequence
  Description of Artificial Sequence: Synthetic oligonucleotide
  Sense strand starting at position 443 of SEQ ID NO: 587551
uuuagauacuauguggagu

SEQ ID NO: 800595 - RNA, 19 nt, Artificial Sequence
  Description of Artificial Sequence: Synthetic oligonucleotide
  Antisense strand to SEQ ID NO: 800594
acuccacauaguaucuaaa

SEQ ID NO: 800596 - RNA, 19 nt, Artificial Sequence
  Description of Artificial Sequence: Synthetic oligonucleotide
  Sense strand starting at position 444 of SEQ ID NO: 587551
uuagauacuauguggagua

SEQ ID NO: 800597 - RNA, 19 nt, Artificial Sequence
  Description of Artificial Sequence: Synthetic oligonucleotide
  Antisense strand to SEQ ID NO: 800596
uacuccacauaguaucuaa

SEQ ID NO: 800598 - RNA, 19 nt, Artificial Sequence
  Description of Artificial Sequence: Synthetic oligonucleotide
  Sense strand starting at position 445 of SEQ ID NO: 587551
uagauacuauguggaguau

SEQ ID NO: 800599 - RNA, 19 nt, Artificial Sequence
  Description of Artificial Sequence: Synthetic oligonucleotide
  Antisense strand to SEQ ID NO: 800598
auacuccacauaguaucua

SEQ ID NO: 800600 - RNA, 19 nt, Artificial Sequence
  Description of Artificial Sequence: Synthetic oligonucleotide
  Sense strand starting at position 449 of SEQ ID NO: 587551
uacuauguggaguauauau

SEQ ID NO: 800601 - RNA, 19 nt, Artificial Sequence
  Description of Artificial Sequence: Synthetic oligonucleotide
  Antisense strand to SEQ ID NO: 800600
auauauacuccacauagua

SEQ ID NO: 800602 - RNA, 19 nt, Artificial Sequence
  Description of Artificial Sequence: Synthetic oligonucleotide
  Sense strand starting at position 474 of SEQ ID NO: 587551
cauaguaucuauguguagu

SEQ ID NO: 800603 - RNA, 19 nt, Artificial Sequence
  Description of Artificial Sequence: Synthetic oligonucleotide
  Antisense strand to SEQ ID NO: 800602
acuacacauagauacuaug

SEQ ID NO: 800604 - RNA, 19 nt, Artificial Sequence
  Description of Artificial Sequence: Synthetic oligonucleotide
  Sense strand starting at position 475 of SEQ ID NO: 587551
auaguaucuauguguagua

SEQ ID NO: 800605 - RNA, 19 nt, Artificial Sequence
  Description of Artificial Sequence: Synthetic oligonucleotide
  Antisense strand to SEQ ID NO: 800604
uacuacacauagauacuau

SEQ ID NO: 800606 - RNA, 19 nt, Artificial Sequence
  Description of Artificial Sequence: Synthetic oligonucleotide
  Sense strand starting at position 476 of SEQ ID NO: 587551
uaguaucuauguguaguau

SEQ ID NO: 800607 - RNA, 19 nt, Artificial Sequence
  Description of Artificial Sequence: Synthetic oligonucleotide
  Antisense strand to SEQ ID NO: 800606
auacuacacauagauacua

SEQ ID NO: 800608 - RNA, 19 nt, Artificial Sequence
  Description of Artificial Sequence: Synthetic oligonucleotide
  Sense strand starting at position 477 of SEQ ID NO: 587551
aguaucuauguguaguaua

SEQ ID NO: 800609 - RNA, 19 nt, Artificial Sequence
  Description of Artificial Sequence: Synthetic oligonucleotide
  Antisense strand to SEQ ID NO: 800608
uauacuacacauagauacu

SEQ ID NO: 800610 - RNA, 19 nt, Artificial Sequence
  Description of Artificial Sequence: Synthetic oligonucleotide
  Sense strand starting at position 1151 of SEQ ID NO: 587551
acguaaguauauuucugua

SEQ ID NO: 800611 - RNA, 19 nt, Artificial Sequence
  Description of Artificial Sequence: Synthetic oligonucleotide
  Antisense strand to SEQ ID NO: 800610
uacagaaauauacuuacgu

SEQ ID NO: 800612 - RNA, 19 nt, Artificial Sequence
  Description of Artificial Sequence: Synthetic oligonucleotide
  Sense strand starting at position 1153 of SEQ ID NO: 587551
guaaguauauuucuguacu

SEQ ID NO: 800613 - RNA, 19 nt, Artificial Sequence
  Description of Artificial Sequence: Synthetic oligonucleotide
  Antisense strand to SEQ ID NO: 800612
aguacagaaauauacuuac

SEQ ID NO: 800614 - RNA, 19 nt, Artificial Sequence
  Description of Artificial Sequence: Synthetic oligonucleotide
  Sense strand starting at position 1385 of SEQ ID NO: 587551
gggcaggguccguaguuua

SEQ ID NO: 800615 - RNA, 19 nt, Artificial Sequence
  Description of Artificial Sequence: Synthetic oligonucleotide
  Antisense strand to SEQ ID NO: 800614
uaaacuacggacccugccc

SEQ ID NO: 800616 - RNA, 19 nt, Artificial Sequence
  Description of Artificial Sequence: Synthetic oligonucleotide
  Sense strand starting at position 1393 of SEQ ID NO: 587551
uccguaguuuacucacuuu

SEQ ID NO: 800617 - RNA, 19 nt, Artificial Sequence
  Description of Artificial Sequence: Synthetic oligonucleotide
  Antisense strand to SEQ ID NO: 800616
aaagugaguaaacuacgga

SEQ ID NO: 800618 - RNA, 19 nt, Artificial Sequence
  Description of Artificial Sequence: Synthetic oligonucleotide
  Sense strand starting at position 1636 of SEQ ID NO: 587551
gggcaauuauuccacagaa

SEQ ID NO: 800619 - RNA, 19 nt, Artificial Sequence
  Description of Artificial Sequence: Synthetic oligonucleotide
  Antisense strand to SEQ ID NO: 800618
uucuguggaauaauugccc

SEQ ID NO: 800620 - RNA, 19 nt, Artificial Sequence
  Description of Artificial Sequence: Synthetic oligonucleotide
  Sense strand starting at position 1638 of SEQ ID NO: 587551
gcaauuauuccacagaagc

SEQ ID NO: 800621 - RNA, 19 nt, Artificial Sequence
  Description of Artificial Sequence: Synthetic oligonucleotide
  Antisense strand to SEQ ID NO: 800620
gcuucuguggaauaauugc

SEQ ID NO: 800622 - RNA, 19 nt, Artificial Sequence
  Description of Artificial Sequence: Synthetic oligonucleotide
  Sense strand starting at position 1921 of SEQ ID NO: 587551
agcucugugaacgguguua

SEQ ID NO: 800623 - RNA, 19 nt, Artificial Sequence
  Description of Artificial Sequence: Synthetic oligonucleotide
  Antisense strand to SEQ ID NO: 800622
uaacaccguucacagagcu

SEQ ID NO: 800624 - RNA, 19 nt, Artificial Sequence
  Description of Artificial Sequence: Synthetic oligonucleotide
  Sense strand starting at position 1947 of SEQ ID NO: 587551
cgucucuuccggagguaga

SEQ ID NO: 800625 - RNA, 19 nt, Artificial Sequence
  Description of Artificial Sequence: Synthetic oligonucleotide
  Antisense strand to SEQ ID NO: 800624
ucuaccuccggaagagacg

SEQ ID NO: 800626 - RNA, 19 nt, Artificial Sequence
  Description of Artificial Sequence: Synthetic oligonucleotide
  Sense strand starting at position 2302 of SEQ ID NO: 587551
cagauaugauuccgauuau

SEQ ID NO: 800627 - RNA, 19 nt, Artificial Sequence
  Description of Artificial Sequence: Synthetic oligonucleotide
  Antisense strand to SEQ ID NO: 800626
auaaucggaaucauaucug

SEQ ID NO: 800628 - RNA, 19 nt, Artificial Sequence
  Description of Artificial Sequence: Synthetic oligonucleotide
  Sense strand starting at position 2303 of SEQ ID NO: 587551
agauaugauuccgauuaug

SEQ ID NO: 800629 - RNA, 19 nt, Artificial Sequence
  Description of Artificial Sequence: Synthetic oligonucleotide
  Antisense strand to SEQ ID NO: 800628
cauaaucggaaucauaucu

SEQ ID NO: 800630 - RNA, 19 nt, Artificial Sequence
  Description of Artificial Sequence: Synthetic oligonucleotide
  Sense strand starting at position 2822 of SEQ ID NO: 587551
uaugauuagcuuugucaga

SEQ ID NO: 800631 - RNA, 19 nt, Artificial Sequence
  Description of Artificial Sequence: Synthetic oligonucleotide
  Antisense strand to SEQ ID NO: 800630
ucugacaaagcuaaucaua

SEQ ID NO: 800632 - RNA, 19 nt, Artificial Sequence
  Description of Artificial Sequence: Synthetic oligonucleotide
  Sense strand starting at position 2823 of SEQ ID NO: 587551
augauuagcuuugucagac

SEQ ID NO: 800633 - RNA, 19 nt, Artificial Sequence
  Description of Artificial Sequence: Synthetic oligonucleotide
  Antisense strand to SEQ ID NO: 800632
gucugacaaagcuaaucau

SEQ ID NO: 800634 - RNA, 19 nt, Artificial Sequence
  Description of Artificial Sequence: Synthetic oligonucleotide
  Sense strand starting at position 2824 of SEQ ID NO: 587551
ugauuagcuuugucagaca

SEQ ID NO: 800635 - RNA, 19 nt, Artificial Sequence
  Description of Artificial Sequence: Synthetic oligonucleotide
  Antisense strand to SEQ ID NO: 800634
ugucugacaaagcuaauca

SEQ ID NO: 800636 - RNA, 19 nt, Artificial Sequence
  Description of Artificial Sequence: Synthetic oligonucleotide
  Sense strand starting at position 2827 of SEQ ID NO: 587551
uuagcuuugucagacagau

SEQ ID NO: 800637 - RNA, 19 nt, Artificial Sequence
  Description of Artificial Sequence: Synthetic oligonucleotide
  Antisense strand to SEQ ID NO: 800636
aucugucugacaaagcuaa

SEQ ID NO: 800638 - RNA, 19 nt, Artificial Sequence
  Description of Artificial Sequence: Synthetic oligonucleotide
  Sense strand starting at position 2829 of SEQ ID NO: 587551
agcuuugucagacagauga

SEQ ID NO: 800639 - RNA, 19 nt, Artificial Sequence
  Description of Artificial Sequence: Synthetic oligonucleotide
  Antisense strand to SEQ ID NO: 800638
ucaucugucugacaaagcu

SEQ ID NO: 800640 - RNA, 19 nt, Artificial Sequence
  Description of Artificial Sequence: Synthetic oligonucleotide
  Sense strand starting at position 2872 of SEQ ID NO: 587551
agugauuuguccucagguc

SEQ ID NO: 800641 - RNA, 19 nt, Artificial Sequence
  Description of Artificial Sequence: Synthetic oligonucleotide
  Antisense strand to SEQ ID NO: 800640
gaccugaggacaaaucacu

SEQ ID NO: 800642 - RNA, 19 nt, Artificial Sequence
  Description of Artificial Sequence: Synthetic oligonucleotide
  Sense strand starting at position 3523 of SEQ ID NO: 587551
cuagcauucucccuguguu

SEQ ID NO: 800643 - RNA, 19 nt, Artificial Sequence
  Description of Artificial Sequence: Synthetic oligonucleotide
  Antisense strand to SEQ ID NO: 800642
aacacagggagaaugcuag

SEQ ID NO: 800644 - RNA, 19 nt, Artificial Sequence
  Description of Artificial Sequence: Synthetic oligonucleotide
  Sense strand starting at position 3531 of SEQ ID NO: 587551
cucccuguguuucuaugua

SEQ ID NO: 800645 - RNA, 19 nt, Artificial Sequence
  Description of Artificial Sequence: Synthetic oligonucleotide
  Antisense strand to SEQ ID NO: 800644
uacauagaaacacagggag

SEQ ID NO: 800646 - RNA, 19 nt, Artificial Sequence
  Description of Artificial Sequence: Synthetic oligonucleotide
  Sense strand starting at position 3585 of SEQ ID NO: 587551
gucugaguuuaggucauaa

SEQ ID NO: 800647 - RNA, 19 nt, Artificial Sequence
  Description of Artificial Sequence: Synthetic oligonucleotide
  Antisense strand to SEQ ID NO: 800646
uuaugaccuaaacucagac

SEQ ID NO: 800648 - RNA, 19 nt, Artificial Sequence
  Description of Artificial Sequence: Synthetic oligonucleotide
  Sense strand starting at position 3589 of SEQ ID NO: 587551
gaguuuaggucauaagacc

SEQ ID NO: 800649 - RNA, 19 nt, Artificial Sequence
  Description of Artificial Sequence: Synthetic oligonucleotide
  Antisense strand to SEQ ID NO: 800648
ggucuuaugaccuaaacuc

SEQ ID NO: 800650 - RNA, 19 nt, Artificial Sequence
  Description of Artificial Sequence: Synthetic oligonucleotide
  Sense strand starting at position 3681 of SEQ ID NO: 587551
gucuaauagcauuagguua

SEQ ID NO: 800651 - RNA, 19 nt, Artificial Sequence
  Description of Artificial Sequence: Synthetic oligonucleotide
  Antisense strand to SEQ ID NO: 800650
uaaccuaaugcuauuagac

SEQ ID NO: 800652 - RNA, 19 nt, Artificial Sequence
  Description of Artificial Sequence: Synthetic oligonucleotide
  Sense strand starting at position 3735 of SEQ ID NO: 587551
ccauaugcuguugaaacua

SEQ ID NO: 800653 - RNA, 19 nt, Artificial Sequence
  Description of Artificial Sequence: Synthetic oligonucleotide
  Antisense strand to SEQ ID NO: 800652
uaguuucaacagcauaugg

SEQ ID NO: 800654 - RNA, 19 nt, Artificial Sequence
  Description of Artificial Sequence: Synthetic oligonucleotide
  Sense strand starting at position 3937 of SEQ ID NO: 587551
cugagaauauauggcacaa

SEQ ID NO: 800655 - RNA, 19 nt, Artificial Sequence
  Description of Artificial Sequence: Synthetic oligonucleotide
  Antisense strand to SEQ ID NO: 800654
uugugccauauauucucag

SEQ ID NO: 800656 - RNA, 19 nt, Artificial Sequence
  Description of Artificial Sequence: Synthetic oligonucleotide
  Sense strand starting at position 3939 of SEQ ID NO: 587551
gagaauauauggcacaaug

SEQ ID NO: 800657 - RNA, 19 nt, Artificial Sequence
  Description of Artificial Sequence: Synthetic oligonucleotide
  Antisense strand to SEQ ID NO: 800656
cauugugccauauauucuc

SEQ ID NO: 800658 - RNA, 19 nt, Artificial Sequence
  Description of Artificial Sequence: Synthetic oligonucleotide
  Sense strand starting at position 122 of SEQ ID NO: 587552
ucugguauccaguagcuca

SEQ ID NO: 800659 - RNA, 19 nt, Artificial Sequence
  Description of Artificial Sequence: Synthetic oligonucleotide
  Antisense strand to SEQ ID NO: 800658
ugagcuacuggauaccaga

SEQ ID NO: 800660 - RNA, 19 nt, Artificial Sequence
  Description of Artificial Sequence: Synthetic oligonucleotide
  Sense strand starting at position 354 of SEQ ID NO: 587552
gcacaucacuguuuaucua

SEQ ID NO: 800661 - RNA, 19 nt, Artificial Sequence
  Description of Artificial Sequence: Synthetic oligonucleotide
  Antisense strand to SEQ ID NO: 800660
uagauaaacagugaugugc

SEQ ID NO: 800662 - RNA, 19 nt, Artificial Sequence
  Description of Artificial Sequence: Synthetic oligonucleotide
  Sense strand starting at position 415 of SEQ ID NO: 587552
acuacaguuaggugaguua

SEQ ID NO: 800663 - RNA, 19 nt, Artificial Sequence
  Description of Artificial Sequence: Synthetic oligonucleotide
  Antisense strand to SEQ ID NO: 800662
uaacucaccuaacuguagu

SEQ ID NO: 800664 - RNA, 19 nt, Artificial Sequence
  Description of Artificial Sequence: Synthetic oligonucleotide
  Sense strand starting at position 418 of SEQ ID NO: 587552
acaguuaggugaguuaaga

SEQ ID NO: 800665 - RNA, 19 nt, Artificial Sequence
  Description of Artificial Sequence: Synthetic oligonucleotide
  Antisense strand to SEQ ID NO: 800664
ucuuaacucaccuaacugu

SEQ ID NO: 800666 - RNA, 19 nt, Artificial Sequence
  Description of Artificial Sequence: Synthetic oligonucleotide
  Sense strand starting at position 427 of SEQ ID NO: 587552
ugaguuaagauauacguua

SEQ ID NO: 800667 - RNA, 19 nt, Artificial Sequence
  Description of Artificial Sequence: Synthetic oligonucleotide
  Antisense strand to SEQ ID NO: 800666
uaacguauaucuuaacuca

SEQ ID NO: 800668 - RNA, 19 nt, Artificial Sequence
  Description of Artificial Sequence: Synthetic oligonucleotide
  Sense strand starting at position 538 of SEQ ID NO: 587552
agcagcuccagugaaauga

SEQ ID NO: 800669 - RNA, 19 nt, Artificial Sequence
  Description of Artificial Sequence: Synthetic oligonucleotide
  Antisense strand to SEQ ID NO: 800668
ucauuucacuggagcugcu

SEQ ID NO: 800670 - RNA, 19 nt, Artificial Sequence
  Description of Artificial Sequence: Synthetic oligonucleotide
  Sense strand starting at position 542 of SEQ ID NO: 587552
gcuccagugaaaugaugaa

SEQ ID NO: 800671 - RNA, 19 nt, Artificial Sequence
  Description of Artificial Sequence: Synthetic oligonucleotide
  Antisense strand to SEQ ID NO: 800670
uucaucauuucacuggagc

SEQ ID NO: 800672 - RNA, 19 nt, Artificial Sequence
  Description of Artificial Sequence: Synthetic oligonucleotide
  Sense strand starting at position 665 of SEQ ID NO: 587552
ucuuauucucuggaguaaa

SEQ ID NO: 800673 - RNA, 19 nt, Artificial Sequence
  Description of Artificial Sequence: Synthetic oligonucleotide
  Antisense strand to SEQ ID NO: 800672
uuuacuccagagaauaaga

SEQ ID NO: 800674 - RNA, 19 nt, Artificial Sequence
  Description of Artificial Sequence: Synthetic oligonucleotide
  Sense strand starting at position 711 of SEQ ID NO: 587552
ggaccaacagcugguauau

SEQ ID NO: 800675 - RNA, 19 nt, Artificial Sequence
  Description of Artificial Sequence: Synthetic oligonucleotide
  Antisense strand to SEQ ID NO: 800674
auauaccagcuguuggucc

SEQ ID NO: 800676 - RNA, 19 nt, Artificial Sequence
  Description of Artificial Sequence: Synthetic oligonucleotide
  Sense strand starting at position 720 of SEQ ID NO: 587552
gcugguauauuucuaagua

SEQ ID NO: 800677 - RNA, 19 nt, Artificial Sequence
  Description of Artificial Sequence: Synthetic oligonucleotide
  Antisense strand to SEQ ID NO: 800676
uacuuagaaauauaccagc

SEQ ID NO: 800678 - RNA, 19 nt, Artificial Sequence
  Description of Artificial Sequence: Synthetic oligonucleotide
  Sense strand starting at position 793 of SEQ ID NO: 587552
gcgaaaugagcauacucau

SEQ ID NO: 800679 - RNA, 19 nt, Artificial Sequence
  Description of Artificial Sequence: Synthetic oligonucleotide
  Antisense strand to SEQ ID NO: 800678
augaguaugcucauuucgc

SEQ ID NO: 800680 - RNA, 19 nt, Artificial Sequence
  Description of Artificial Sequence: Synthetic oligonucleotide
  Sense strand starting at position 951 of SEQ ID NO: 587552
cccuucuagggaugaaauc

SEQ ID NO: 800681 - RNA, 19 nt, Artificial Sequence
  Description of Artificial Sequence: Synthetic oligonucleotide
  Antisense strand to SEQ ID NO: 800680
gauuucaucccuagaaggg

SEQ ID NO: 800682 - RNA, 19 nt, Artificial Sequence
  Description of Artificial Sequence: Synthetic oligonucleotide
  Sense strand starting at position 979 of SEQ ID NO: 587552
uagagagucuugguggauu

SEQ ID NO: 800683 - RNA, 19 nt, Artificial Sequence
  Description of Artificial Sequence: Synthetic oligonucleotide
  Antisense strand to SEQ ID NO: 800682
aauccaccaagacucucua

SEQ ID NO: 800684 - RNA, 19 nt, Artificial Sequence
  Description of Artificial Sequence: Synthetic oligonucleotide
  Sense strand starting at position 1876 of SEQ ID NO: 587552
ccgaguugcgccgcgaaga

SEQ ID NO: 800685 - RNA, 19 nt, Artificial Sequence
  Description of Artificial Sequence: Synthetic oligonucleotide
  Antisense strand to SEQ ID NO: 800684
ucuucgcggcgcaacucgg

SEQ ID NO: 800686 - RNA, 19 nt, Artificial Sequence
  Description of Artificial Sequence: Synthetic oligonucleotide
  Sense strand starting at position 2143 of SEQ ID NO: 587552
gugggaagguauuccugga

SEQ ID NO: 800687 - RNA, 19 nt, Artificial Sequence
  Description of Artificial Sequence: Synthetic oligonucleotide
  Antisense strand to SEQ ID NO: 800686
uccaggaauaccuucccac

SEQ ID NO: 800688 - RNA, 19 nt, Artificial Sequence
  Description of Artificial Sequence: Synthetic oligonucleotide
  Sense strand starting at position 2147 of SEQ ID NO: 587552
gaagguauuccuggaagug

SEQ ID NO: 800689 - RNA, 19 nt, Artificial Sequence
  Description of Artificial Sequence: Synthetic oligonucleotide
  Antisense strand to SEQ ID NO: 800688
cacuuccaggaauaccuuc

SEQ ID NO: 800690 - RNA, 19 nt, Artificial Sequence
  Description of Artificial Sequence: Synthetic oligonucleotide
  Sense strand starting at position 2245 of SEQ ID NO: 587552
uauggcuggcuguaauaaa

SEQ ID NO: 800691 - RNA, 19 nt, Artificial Sequence
  Description of Artificial Sequence: Synthetic oligonucleotide
  Antisense strand to SEQ ID NO: 800690
uuuauuacagccagccaua

SEQ ID NO: 800692 - RNA, 19 nt, Artificial Sequence
  Description of Artificial Sequence: Synthetic oligonucleotide
  Sense strand starting at position 2267 of SEQ ID NO: 587552
acaguaacagucuagucuu

SEQ ID NO: 800693 - RNA, 19 nt, Artificial Sequence
  Description of Artificial Sequence: Synthetic oligonucleotide
  Antisense strand to SEQ ID NO: 800692
aagacuagacuguuacugu

SEQ ID NO: 800694 - RNA, 19 nt, Artificial Sequence
  Description of Artificial Sequence: Synthetic oligonucleotide
  Sense strand starting at position 2447 of SEQ ID NO: 587552
gaagaauuguacuuggcuc

SEQ ID NO: 800695 - RNA, 19 nt, Artificial Sequence
  Description of Artificial Sequence: Synthetic oligonucleotide
  Antisense strand to SEQ ID NO: 800694
gagccaaguacaauucuuc

SEQ ID NO: 800696 - RNA, 19 nt, Artificial Sequence
  Description of Artificial Sequence: Synthetic oligonucleotide
  Sense strand starting at position 2499 of SEQ ID NO: 587552
ugcuuauguguguauagag

SEQ ID NO: 800697 - RNA, 19 nt, Artificial Sequence
  Description of Artificial Sequence: Synthetic oligonucleotide
  Antisense strand to SEQ ID NO: 800696
cucuauacacacauaagca

SEQ ID NO: 800698 - RNA, 19 nt, Artificial Sequence
  Description of Artificial Sequence: Synthetic oligonucleotide
  Sense strand starting at position 2695 of SEQ ID NO: 587552
aauagagguuauccggaga

SEQ ID NO: 800699 - RNA, 19 nt, Artificial Sequence
  Description of Artificial Sequence: Synthetic oligonucleotide
  Antisense strand to SEQ ID NO: 800698
ucuccggauaaccucuauu

SEQ ID NO: 800700 - RNA, 19 nt, Artificial Sequence
  Description of Artificial Sequence: Synthetic oligonucleotide
  Sense strand starting at position 2706 of SEQ ID NO: 587552
uccggagauggucagucua

SEQ ID NO: 800701 - RNA, 19 nt, Artificial Sequence
  Description of Artificial Sequence: Synthetic oligonucleotide
  Antisense strand to SEQ ID NO: 800700
uagacugaccaucuccgga

SEQ ID NO: 800702 - RNA, 19 nt, Artificial Sequence
  Description of Artificial Sequence: Synthetic oligonucleotide
  Sense strand starting at position 2708 of SEQ ID NO: 587552
cggagauggucagucuaga

SEQ ID NO: 800703 - RNA, 19 nt, Artificial Sequence
  Description of Artificial Sequence: Synthetic oligonucleotide
  Antisense strand to SEQ ID NO: 800702
ucuagacugaccaucuccg

SEQ ID NO: 800704 - RNA, 19 nt, Artificial Sequence
  Description of Artificial Sequence: Synthetic oligonucleotide
  Sense strand starting at position 2716 of SEQ ID NO: 587552
gucagucuagaacauguaa

SEQ ID NO: 800705 - RNA, 19 nt, Artificial Sequence
  Description of Artificial Sequence: Synthetic oligonucleotide
  Antisense strand to SEQ ID NO: 800704
uuacauguucuagacugac

SEQ ID NO: 800706 - RNA, 19 nt, Artificial Sequence
  Description of Artificial Sequence: Synthetic oligonucleotide
  Sense strand starting at position 2727 of SEQ ID NO: 587552
acauguaaucuuugaguca

SEQ ID NO: 800707 - RNA, 19 nt, Artificial Sequence
  Description of Artificial Sequence: Synthetic oligonucleotide
  Antisense strand to SEQ ID NO: 800706
ugacucaaagauuacaugu

SEQ ID NO: 800708 - RNA, 19 nt, Artificial Sequence
  Description of Artificial Sequence: Synthetic oligonucleotide
  Sense strand starting at position 2796 of SEQ ID NO: 587552
accgaucuuagcuagaaug

SEQ ID NO: 800709 - RNA, 19 nt, Artificial Sequence
  Description of Artificial Sequence: Synthetic oligonucleotide
  Antisense strand to SEQ ID NO: 800708
cauucuagcuaagaucggu

SEQ ID NO: 800710 - RNA, 19 nt, Artificial Sequence
  Description of Artificial Sequence: Synthetic oligonucleotide
  Sense strand starting at position 2798 of SEQ ID NO: 587552
cgaucuuagcuagaaugau

SEQ ID NO: 800711 - RNA, 19 nt, Artificial Sequence
  Description of Artificial Sequence: Synthetic oligonucleotide
  Antisense strand to SEQ ID NO: 800710
aucauucuagcuaagaucg

SEQ ID NO: 800712 - RNA, 19 nt, Artificial Sequence
  Description of Artificial Sequence: Synthetic oligonucleotide
  Sense strand starting at position 3158 of SEQ ID NO: 587552
cugugauuucccugccaga

SEQ ID NO: 800713 - RNA, 19 nt, Artificial Sequence
  Description of Artificial Sequence: Synthetic oligonucleotide
  Antisense strand to SEQ ID NO: 800712
ucuggcagggaaaucacag

SEQ ID NO: 800714 - RNA, 19 nt, Artificial Sequence
  Description of Artificial Sequence: Synthetic oligonucleotide
  Sense strand starting at position 3285 of SEQ ID NO: 587552
gagaguaacuuugcaauga

SEQ ID NO: 800715 - RNA, 19 nt, Artificial Sequence
  Description of Artificial Sequence: Synthetic oligonucleotide
  Antisense strand to SEQ ID NO: 800714
ucauugcaaaguuacucuc

SEQ ID NO: 800716 - RNA, 19 nt, Artificial Sequence
  Description of Artificial Sequence: Synthetic oligonucleotide
  Sense strand starting at position 3289 of SEQ ID NO: 587552
guaacuuugcaaugaagca

SEQ ID NO: 800717 - RNA, 19 nt, Artificial Sequence
  Description of Artificial Sequence: Synthetic oligonucleotide
  Antisense strand to SEQ ID NO: 800716
ugcuucauugcaaaguuac

SEQ ID NO: 800718 - RNA, 19 nt, Artificial Sequence
  Description of Artificial Sequence: Synthetic oligonucleotide
  Sense strand starting at position 3331 of SEQ ID NO: 587552
gugaaugucacagaguaau

SEQ ID NO: 800719 - RNA, 19 nt, Artificial Sequence
  Description of Artificial Sequence: Synthetic oligonucleotide
  Antisense strand to SEQ ID NO: 800718
auuacucugugacauucac

SEQ ID NO: 800720 - RNA, 19 nt, Artificial Sequence
  Description of Artificial Sequence: Synthetic oligonucleotide
  Sense strand starting at position 3337 of SEQ ID NO: 587552
gucacagaguaauucucaa

SEQ ID NO: 800721 - RNA, 19 nt, Artificial Sequence
  Description of Artificial Sequence: Synthetic oligonucleotide
  Antisense strand to SEQ ID NO: 800720
uugagaauuacucugugac

SEQ ID NO: 800722 - RNA, 19 nt, Artificial Sequence
  Description of Artificial Sequence: Synthetic oligonucleotide
  Sense strand starting at position 3457 of SEQ ID NO: 587552
guuggauaguaaucauguc

SEQ ID NO: 800723 - RNA, 19 nt, Artificial Sequence
  Description of Artificial Sequence: Synthetic oligonucleotide
  Antisense strand to SEQ ID NO: 800722
gacaugauuacuauccaac

SEQ ID NO: 800724 - RNA, 19 nt, Artificial Sequence
  Description of Artificial Sequence: Synthetic oligonucleotide
  Sense strand starting at position 3493 of SEQ ID NO: 587552
ugggaagucugagauuucu

SEQ ID NO: 800725 - RNA, 19 nt, Artificial Sequence
  Description of Artificial Sequence: Synthetic oligonucleotide
  Antisense strand to SEQ ID NO: 800724
agaaaucucagacuuccca

SEQ ID NO: 800726 - RNA, 19 nt, Artificial Sequence
  Description of Artificial Sequence: Synthetic oligonucleotide
  Sense strand starting at position 3697 of SEQ ID NO: 587552
gaaagauuguagcuccaag

SEQ ID NO: 800727 - RNA, 19 nt, Artificial Sequence
  Description of Artificial Sequence: Synthetic oligonucleotide
  Antisense strand to SEQ ID NO: 800726
cuuggagcuacaaucuuuc

SEQ ID NO: 800728 - RNA, 19 nt, Artificial Sequence
  Description of Artificial Sequence: Synthetic oligonucleotide
  Sense strand starting at position 3717 of SEQ ID NO: 587552
ggcguucuagcacucaagu

SEQ ID NO: 800729 - RNA, 19 nt, Artificial Sequence
  Description of Artificial Sequence: Synthetic oligonucleotide
  Antisense strand to SEQ ID NO: 800728
acuugagugcuagaacgcc

SEQ ID NO: 800730 - RNA, 19 nt, Artificial Sequence
  Description of Artificial Sequence: Synthetic oligonucleotide
  Sense strand starting at position 3719 of SEQ ID NO: 587552
cguucuagcacucaaguga

SEQ ID NO: 800731 - RNA, 19 nt, Artificial Sequence
  Description of Artificial Sequence: Synthetic oligonucleotide
  Antisense strand to SEQ ID NO: 800730
ucacuugagugcuagaacg

SEQ ID NO: 800732 - RNA, 19 nt, Artificial Sequence
  Description of Artificial Sequence: Synthetic oligonucleotide
  Sense strand starting at position 3884 of SEQ ID NO: 587552
uuaguaucaaguugucaga

SEQ ID NO: 800733 - RNA, 19 nt, Artificial Sequence
  Description of Artificial Sequence: Synthetic oligonucleotide
  Antisense strand to SEQ ID NO: 800732
ucugacaacuugauacuaa

SEQ ID NO: 800734 - RNA, 19 nt, Artificial Sequence
  Description of Artificial Sequence: Synthetic oligonucleotide
  Sense strand starting at position 3886 of SEQ ID NO: 587552
aguaucaaguugucagaag

SEQ ID NO: 800735 - RNA, 19 nt, Artificial Sequence
  Description of Artificial Sequence: Synthetic oligonucleotide
  Antisense strand to SEQ ID NO: 800734
cuucugacaacuugauacu

SEQ ID NO: 800736 - RNA, 19 nt, Artificial Sequence
  Description of Artificial Sequence: Synthetic oligonucleotide
  Sense strand starting at position 3960 of SEQ ID NO: 587552
uggacagucuguuccuaaa

SEQ ID NO: 800737 - RNA, 19 nt, Artificial Sequence
  Description of Artificial Sequence: Synthetic oligonucleotide
  Antisense strand to SEQ ID NO: 800736
uuuaggaacagacugucca

SEQ ID NO: 800738 - RNA, 19 nt, Artificial Sequence
  Description of Artificial Sequence: Synthetic oligonucleotide
  Sense strand starting at position 12 of SEQ ID NO: 587553
guacucacauaagucuuua

SEQ ID NO: 800739 - RNA, 19 nt, Artificial Sequence
  Description of Artificial Sequence: Synthetic oligonucleotide
  Antisense strand to SEQ ID NO: 800738
uaaagacuuaugugaguac

SEQ ID NO: 800740 - RNA, 19 nt, Artificial Sequence
  Description of Artificial Sequence: Synthetic oligonucleotide
  Sense strand starting at position 183 of SEQ ID NO: 587553
ucuuauuaacaguaugagu

SEQ ID NO: 800741 - RNA, 19 nt, Artificial Sequence
  Description of Artificial Sequence: Synthetic oligonucleotide
  Antisense strand to SEQ ID NO: 800740
acucauacuguuaauaaga

SEQ ID NO: 800742 - RNA, 19 nt, Artificial Sequence
  Description of Artificial Sequence: Synthetic oligonucleotide
  Sense strand starting at position 185 of SEQ ID NO: 587553
uuauuaacaguaugaguag

SEQ ID NO: 800743 - RNA, 19 nt, Artificial Sequence
  Description of Artificial Sequence: Synthetic oligonucleotide
  Antisense strand to SEQ ID NO: 800742
cuacucauacuguuaauaa

SEQ ID NO: 800744 - RNA, 19 nt, Artificial Sequence
  Description of Artificial Sequence: Synthetic oligonucleotide
  Sense strand starting at position 240 of SEQ ID NO: 587553
cuccuaucacagugacaag

SEQ ID NO: 800745 - RNA, 19 nt, Artificial Sequence
  Description of Artificial Sequence: Synthetic oligonucleotide
  Antisense strand to SEQ ID NO: 800744
cuugucacugugauaggag

SEQ ID NO: 800746 - RNA, 19 nt, Artificial Sequence
  Description of Artificial Sequence: Synthetic oligonucleotide
  Sense strand starting at position 526 of SEQ ID NO: 587553
agaagagagugucuacgaa

SEQ ID NO: 800747 - RNA, 19 nt, Artificial Sequence
  Description of Artificial Sequence: Synthetic oligonucleotide
  Antisense strand to SEQ ID NO: 800746
uucguagacacucucuucu

SEQ ID NO: 800748 - RNA, 19 nt, Artificial Sequence
  Description of Artificial Sequence: Synthetic oligonucleotide
  Sense strand starting at position 569 of SEQ ID NO: 587553
ugaaguggaucucuacaua

SEQ ID NO: 800749 - RNA, 19 nt, Artificial Sequence
  Description of Artificial Sequence: Synthetic oligonucleotide
  Antisense strand to SEQ ID NO: 800748
uauguagagauccacuuca

SEQ ID NO: 800750 - RNA, 19 nt, Artificial Sequence
  Description of Artificial Sequence: Synthetic oligonucleotide
  Sense strand starting at position 602 of SEQ ID NO: 587553
gguccaugagagugaguaa

SEQ ID NO: 800751 - RNA, 19 nt, Artificial Sequence
  Description of Artificial Sequence: Synthetic oligonucleotide
  Antisense strand to SEQ ID NO: 800750
uuacucacucucauggacc

SEQ ID NO: 800752 - RNA, 19 nt, Artificial Sequence
  Description of Artificial Sequence: Synthetic oligonucleotide
  Sense strand starting at position 603 of SEQ ID NO: 587553
guccaugagagugaguaaa

SEQ ID NO: 800753 - RNA, 19 nt, Artificial Sequence
  Description of Artificial Sequence: Synthetic oligonucleotide
  Antisense strand to SEQ ID NO: 800752
uuuacucacucucauggac

SEQ ID NO: 800754 - RNA, 19 nt, Artificial Sequence
  Description of Artificial Sequence: Synthetic oligonucleotide
  Sense strand starting at position 694 of SEQ ID NO: 587553
auguauuaugcauacaugu

SEQ ID NO: 800755 - RNA, 19 nt, Artificial Sequence
  Description of Artificial Sequence: Synthetic oligonucleotide
  Antisense strand to SEQ ID NO: 800754
acauguaugcauaauacau

SEQ ID NO: 800756 - RNA, 19 nt, Artificial Sequence
  Description of Artificial Sequence: Synthetic oligonucleotide
  Sense strand starting at position 934 of SEQ ID NO: 587553
cuagguuugcuuuagguau

SEQ ID NO: 800757 - RNA, 19 nt, Artificial Sequence
  Description of Artificial Sequence: Synthetic oligonucleotide
  Antisense strand to SEQ ID NO: 800756
auaccuaaagcaaaccuag

SEQ ID NO: 800758 - RNA, 19 nt, Artificial Sequence
  Description of Artificial Sequence: Synthetic oligonucleotide
  Sense strand starting at position 942 of SEQ ID NO: 587553
gcuuuagguaucgaagaua

SEQ ID NO: 800759 - RNA, 19 nt, Artificial Sequence
  Description of Artificial Sequence: Synthetic oligonucleotide
  Antisense strand to SEQ ID NO: 800758
uaucuucgauaccuaaagc

SEQ ID NO: 800760 - RNA, 19 nt, Artificial Sequence
  Description of Artificial Sequence: Synthetic oligonucleotide
  Sense strand starting at position 1020 of SEQ ID NO: 587553
uggagagauucagugcagu

SEQ ID NO: 800761 - RNA, 19 nt, Artificial Sequence
  Description of Artificial Sequence: Synthetic oligonucleotide
  Antisense strand to SEQ ID NO: 800760
acugcacugaaucucucca

SEQ ID NO: 800762 - RNA, 19 nt, Artificial Sequence
  Description of Artificial Sequence: Synthetic oligonucleotide
  Sense strand starting at position 1346 of SEQ ID NO: 587553
ggauaauauuuccaaaguc

SEQ ID NO: 800763 - RNA, 19 nt, Artificial Sequence
  Description of Artificial Sequence: Synthetic oligonucleotide
  Antisense strand to SEQ ID NO: 800762
gacuuuggaaauauuaucc

SEQ ID NO: 800764 - RNA, 19 nt, Artificial Sequence
  Description of Artificial Sequence: Synthetic oligonucleotide
  Sense strand starting at position 1427 of SEQ ID NO: 587553
ggcgaucaugugcugucua

SEQ ID NO: 800765 - RNA, 19 nt, Artificial Sequence
  Description of Artificial Sequence: Synthetic oligonucleotide
  Antisense strand to SEQ ID NO: 800764
uagacagcacaugaucgcc

SEQ ID NO: 800766 - RNA, 19 nt, Artificial Sequence
  Description of Artificial Sequence: Synthetic oligonucleotide
  Sense strand starting at position 1735 of SEQ ID NO: 587553
accucaccuggauguuaaa

SEQ ID NO: 800767 - RNA, 19 nt, Artificial Sequence
  Description of Artificial Sequence: Synthetic oligonucleotide
  Antisense strand to SEQ ID NO: 800766
uuuaacauccaggugaggu

SEQ ID NO: 800768 - RNA, 19 nt, Artificial Sequence
  Description of Artificial Sequence: Synthetic oligonucleotide
  Sense strand starting at position 2010 of SEQ ID NO: 587553
ggcagaguggaucgggaaa

SEQ ID NO: 800769 - RNA, 19 nt, Artificial Sequence
  Description of Artificial Sequence: Synthetic oligonucleotide
  Antisense strand to SEQ ID NO: 800768
uuucccgauccacucugcc

SEQ ID NO: 800770 - RNA, 19 nt, Artificial Sequence
  Description of Artificial Sequence: Synthetic oligonucleotide
  Sense strand starting at position 2185 of SEQ ID NO: 587553
uggugaagucagggagcau

SEQ ID NO: 800771 - RNA, 19 nt, Artificial Sequence
  Description of Artificial Sequence: Synthetic oligonucleotide
  Antisense strand to SEQ ID NO: 800770
augcucccugacuucacca

SEQ ID NO: 800772 - RNA, 19 nt, Artificial Sequence
  Description of Artificial Sequence: Synthetic oligonucleotide
  Sense strand starting at position 2345 of SEQ ID NO: 587553
gcguggaagguugagaaga

SEQ ID NO: 800773 - RNA, 19 nt, Artificial Sequence
  Description of Artificial Sequence: Synthetic oligonucleotide
  Antisense strand to SEQ ID NO: 800772
ucuucucaaccuuccacgc

SEQ ID NO: 800774 - RNA, 19 nt, Artificial Sequence
  Description of Artificial Sequence: Synthetic oligonucleotide
  Sense strand starting at position 2346 of SEQ ID NO: 587553
cguggaagguugagaagaa

SEQ ID NO: 800775 - RNA, 19 nt, Artificial Sequence
  Description of Artificial Sequence: Synthetic oligonucleotide
  Antisense strand to SEQ ID NO: 800774
uucuucucaaccuuccacg

SEQ ID NO: 800776 - RNA, 19 nt, Artificial Sequence
  Description of Artificial Sequence: Synthetic oligonucleotide
  Sense strand starting at position 2359 of SEQ ID NO: 587553
gaagaaguuugagaggaac

SEQ ID NO: 800777 - RNA, 19 nt, Artificial Sequence
  Description of Artificial Sequence: Synthetic oligonucleotide
  Antisense strand to SEQ ID NO: 800776
guuccucucaaacuucuuc

SEQ ID NO: 800778 - RNA, 19 nt, Artificial Sequence
  Description of Artificial Sequence: Synthetic oligonucleotide
  Sense strand starting at position 2548 of SEQ ID NO: 587553
uccgaaauccguccacguu

SEQ ID NO: 800779 - RNA, 19 nt, Artificial Sequence
  Description of Artificial Sequence: Synthetic oligonucleotide
  Antisense strand to SEQ ID NO: 800778
aacguggacggauuucgga

SEQ ID NO: 800780 - RNA, 19 nt, Artificial Sequence
  Description of Artificial Sequence: Synthetic oligonucleotide
  Sense strand starting at position 2604 of SEQ ID NO: 587553
acguuuauugagcaacgaa

SEQ ID NO: 800781 - RNA, 19 nt, Artificial Sequence
  Description of Artificial Sequence: Synthetic oligonucleotide
  Antisense strand to SEQ ID NO: 800780
uucguugcucaauaaacgu

SEQ ID NO: 800782 - RNA, 19 nt, Artificial Sequence
  Description of Artificial Sequence: Synthetic oligonucleotide
  Sense strand starting at position 2607 of SEQ ID NO: 587553
uuuauugagcaacgaagua

SEQ ID NO: 800783 - RNA, 19 nt, Artificial Sequence
  Description of Artificial Sequence: Synthetic oligonucleotide
  Antisense strand to SEQ ID NO: 800782
uacuucguugcucaauaaa

SEQ ID NO: 800784 - RNA, 19 nt, Artificial Sequence
  Description of Artificial Sequence: Synthetic oligonucleotide
  Sense strand starting at position 2708 of SEQ ID NO: 587553
uuaaauguucuggacguga

SEQ ID NO: 800785 - RNA, 19 nt, Artificial Sequence
  Description of Artificial Sequence: Synthetic oligonucleotide
  Antisense strand to SEQ ID NO: 800784
ucacguccagaacauuuaa

SEQ ID NO: 800786 - RNA, 19 nt, Artificial Sequence
  Description of Artificial Sequence: Synthetic oligonucleotide
  Sense strand starting at position 2710 of SEQ ID NO: 587553
aaauguucuggacgugaaa

SEQ ID NO: 800787 - RNA, 19 nt, Artificial Sequence
  Description of Artificial Sequence: Synthetic oligonucleotide
  Antisense strand to SEQ ID NO: 800786
uuucacguccagaacauuu

SEQ ID NO: 800788 - RNA, 19 nt, Artificial Sequence
  Description of Artificial Sequence: Synthetic oligonucleotide
  Sense strand starting at position 2738 of SEQ ID NO: 587553
agauaacuacgcuauuauu

SEQ ID NO: 800789 - RNA, 19 nt, Artificial Sequence
  Description of Artificial Sequence: Synthetic oligonucleotide
  Antisense strand to SEQ ID NO: 800788
aauaauagcguaguuaucu

SEQ ID NO: 800790 - RNA, 19 nt, Artificial Sequence
  Description of Artificial Sequence: Synthetic oligonucleotide
  Sense strand starting at position 2838 of SEQ ID NO: 587553
cuaggagauucuccaucua

SEQ ID NO: 800791 - RNA, 19 nt, Artificial Sequence
  Description of Artificial Sequence: Synthetic oligonucleotide
  Antisense strand to SEQ ID NO: 800790
uagauggagaaucuccuag

SEQ ID NO: 800792 - RNA, 19 nt, Artificial Sequence
  Description of Artificial Sequence: Synthetic oligonucleotide
  Sense strand starting at position 2854 of SEQ ID NO: 587553
cuaagagauucucuugccu

SEQ ID NO: 800793 - RNA, 19 nt, Artificial Sequence
  Description of Artificial Sequence: Synthetic oligonucleotide
  Antisense strand to SEQ ID NO: 800792
aggcaagagaaucucuuag

SEQ ID NO: 800794 - RNA, 19 nt, Artificial Sequence
  Description of Artificial Sequence: Synthetic oligonucleotide
  Sense strand starting at position 3101 of SEQ ID NO: 587553
acagcauaacuguaugauu

SEQ ID NO: 800795 - RNA, 19 nt, Artificial Sequence
  Description of Artificial Sequence: Synthetic oligonucleotide
  Antisense strand to SEQ ID NO: 800794
aaucauacaguuaugcugu

SEQ ID NO: 800796 - RNA, 19 nt, Artificial Sequence
  Description of Artificial Sequence: Synthetic oligonucleotide
  Sense strand starting at position 3103 of SEQ ID NO: 587553
agcauaacuguaugauuac

SEQ ID NO: 800797 - RNA, 19 nt, Artificial Sequence
  Description of Artificial Sequence: Synthetic oligonucleotide
  Antisense strand to SEQ ID NO: 800796
guaaucauacaguuaugcu

SEQ ID NO: 800798 - RNA, 19 nt, Artificial Sequence
  Description of Artificial Sequence: Synthetic oligonucleotide
  Sense strand starting at position 3119 of SEQ ID NO: 587553
uacuuuaugggccaggauu

SEQ ID NO: 800799 - RNA, 19 nt, Artificial Sequence
  Description of Artificial Sequence: Synthetic oligonucleotide
  Antisense strand to SEQ ID NO: 800798
aauccuggcccauaaagua

SEQ ID NO: 800800 - RNA, 19 nt, Artificial Sequence
  Description of Artificial Sequence: Synthetic oligonucleotide
  Sense strand starting at position 3131 of SEQ ID NO: 587553
caggauuacucagugauac

SEQ ID NO: 800801 - RNA, 19 nt, Artificial Sequence
  Description of Artificial Sequence: Synthetic oligonucleotide
  Antisense strand to SEQ ID NO: 800800
guaucacugaguaauccug

SEQ ID NO: 800802 - RNA, 19 nt, Artificial Sequence
  Description of Artificial Sequence: Synthetic oligonucleotide
  Sense strand starting at position 3132 of SEQ ID NO: 587553
aggauuacucagugauaca

SEQ ID NO: 800803 - RNA, 19 nt, Artificial Sequence
  Description of Artificial Sequence: Synthetic oligonucleotide
  Antisense strand to SEQ ID NO: 800802
uguaucacugaguaauccu

SEQ ID NO: 800804 - RNA, 19 nt, Artificial Sequence
  Description of Artificial Sequence: Synthetic oligonucleotide
  Sense strand starting at position 3245 of SEQ ID NO: 587553
gauugcuagcuugaauugu

SEQ ID NO: 800805 - RNA, 19 nt, Artificial Sequence
  Description of Artificial Sequence: Synthetic oligonucleotide
  Antisense strand to SEQ ID NO: 800804
acaauucaagcuagcaauc

SEQ ID NO: 800806 - RNA, 19 nt, Artificial Sequence
  Description of Artificial Sequence: Synthetic oligonucleotide
  Sense strand starting at position 3383 of SEQ ID NO: 587553
acacuuguuccugagccua

SEQ ID NO: 800807 - RNA, 19 nt, Artificial Sequence
  Description of Artificial Sequence: Synthetic oligonucleotide
  Antisense strand to SEQ ID NO: 800806
uaggcucaggaacaagugu

SEQ ID NO: 800808 - RNA, 19 nt, Artificial Sequence
  Description of Artificial Sequence: Synthetic oligonucleotide
  Sense strand starting at position 3400 of SEQ ID NO: 587553
uaguguucuguggaauaac

SEQ ID NO: 800809 - RNA, 19 nt, Artificial Sequence
  Description of Artificial Sequence: Synthetic oligonucleotide
  Antisense strand to SEQ ID NO: 800808
guuauuccacagaacacua

SEQ ID NO: 800810 - RNA, 19 nt, Artificial Sequence
  Description of Artificial Sequence: Synthetic oligonucleotide
  Sense strand starting at position 3403 of SEQ ID NO: 587553
uguucuguggaauaacaau

SEQ ID NO: 800811 - RNA, 19 nt, Artificial Sequence
  Description of Artificial Sequence: Synthetic oligonucleotide
  Antisense strand to SEQ ID NO: 800810
auuguuauuccacagaaca

SEQ ID NO: 800812 - RNA, 19 nt, Artificial Sequence
  Description of Artificial Sequence: Synthetic oligonucleotide
  Sense strand starting at position 3492 of SEQ ID NO: 587553
gacacagucuugcucugaa

SEQ ID NO: 800813 - RNA, 19 nt, Artificial Sequence
  Description of Artificial Sequence: Synthetic oligonucleotide
  Antisense strand to SEQ ID NO: 800812
uucagagcaagacuguguc

SEQ ID NO: 800814 - RNA, 19 nt, Artificial Sequence
  Description of Artificial Sequence: Synthetic oligonucleotide
  Sense strand starting at position 3495 of SEQ ID NO: 587553
acagucuugcucugaaauc

SEQ ID NO: 800815 - RNA, 19 nt, Artificial Sequence
  Description of Artificial Sequence: Synthetic oligonucleotide
  Antisense strand to SEQ ID NO: 800814
gauuucagagcaagacugu

SEQ ID NO: 800816 - RNA, 19 nt, Artificial Sequence
  Description of Artificial Sequence: Synthetic oligonucleotide
  Sense strand starting at position 3858 of SEQ ID NO: 587553
cuagucagcuucuugauuu

SEQ ID NO: 800817 - RNA, 19 nt, Artificial Sequence
  Description of Artificial Sequence: Synthetic oligonucleotide
  Antisense strand to SEQ ID NO: 800816
aaaucaagaagcugacuag

SEQ ID NO: 800818 - RNA, 19 nt, Artificial Sequence
  Description of Artificial Sequence: Synthetic oligonucleotide
  Sense strand starting at position 566 of SEQ ID NO: 587554
aaggaauacguauguaaga

SEQ ID NO: 800819 - RNA, 19 nt, Artificial Sequence
  Description of Artificial Sequence: Synthetic oligonucleotide
  Antisense strand to SEQ ID NO: 800818
ucuuacauacguauuccuu

SEQ ID NO: 800820 - RNA, 19 nt, Artificial Sequence
  Description of Artificial Sequence: Synthetic oligonucleotide
  Sense strand starting at position 567 of SEQ ID NO: 587554
aggaauacguauguaagaa

SEQ ID NO: 800821 - RNA, 19 nt, Artificial Sequence
  Description of Artificial Sequence: Synthetic oligonucleotide
  Antisense strand to SEQ ID NO: 800820
uucuuacauacguauuccu

SEQ ID NO: 800822 - RNA, 19 nt, Artificial Sequence
  Description of Artificial Sequence: Synthetic oligonucleotide
  Sense strand starting at position 626 of SEQ ID NO: 587554
gaggaaggguaacagauua

SEQ ID NO: 800823 - RNA, 19 nt, Artificial Sequence
  Description of Artificial Sequence: Synthetic oligonucleotide
  Antisense strand to SEQ ID NO: 800822
uaaucuguuacccuuccuc

SEQ ID NO: 800824 - RNA, 19 nt, Artificial Sequence
  Description of Artificial Sequence: Synthetic oligonucleotide
  Sense strand starting at position 678 of SEQ ID NO: 587554
ggaagaacauaacagucau

SEQ ID NO: 800825 - RNA, 19 nt, Artificial Sequence
  Description of Artificial Sequence: Synthetic oligonucleotide
  Antisense strand to SEQ ID NO: 800824
augacuguuauguucuucc

SEQ ID NO: 800826 - RNA, 19 nt, Artificial Sequence
  Description of Artificial Sequence: Synthetic oligonucleotide
  Sense strand starting at position 865 of SEQ ID NO: 587554
aacggaugugagcaauuaa

SEQ ID NO: 800827 - RNA, 19 nt, Artificial Sequence
  Description of Artificial Sequence: Synthetic oligonucleotide
  Antisense strand to SEQ ID NO: 800826
uuaauugcucacauccguu

SEQ ID NO: 800828 - RNA, 19 nt, Artificial Sequence
  Description of Artificial Sequence: Synthetic oligonucleotide
  Sense strand starting at position 990 of SEQ ID NO: 587554
cacaguggucucuaucagu

SEQ ID NO: 800829 - RNA, 19 nt, Artificial Sequence
  Description of Artificial Sequence: Synthetic oligonucleotide
  Antisense strand to SEQ ID NO: 800828
acugauagagaccacugug

SEQ ID NO: 800830 - RNA, 19 nt, Artificial Sequence
  Description of Artificial Sequence: Synthetic oligonucleotide
  Sense strand starting at position 1014 of SEQ ID NO: 587554
ccagucugagacugaacaa

SEQ ID NO: 800831 - RNA, 19 nt, Artificial Sequence
  Description of Artificial Sequence: Synthetic oligonucleotide
  Antisense strand to SEQ ID NO: 800830
uuguucagucucagacugg

SEQ ID NO: 800832 - RNA, 19 nt, Artificial Sequence
  Description of Artificial Sequence: Synthetic oligonucleotide
  Sense strand starting at position 1055 of SEQ ID NO: 587554
gagaaaugcuauccgagga

SEQ ID NO: 800833 - RNA, 19 nt, Artificial Sequence
  Description of Artificial Sequence: Synthetic oligonucleotide
  Antisense strand to SEQ ID NO: 800832
uccucggauagcauuucuc

SEQ ID NO: 800834 - RNA, 19 nt, Artificial Sequence
  Description of Artificial Sequence: Synthetic oligonucleotide
  Sense strand starting at position 1056 of SEQ ID NO: 587554
agaaaugcuauccgaggaa

SEQ ID NO: 800835 - RNA, 19 nt, Artificial Sequence
  Description of Artificial Sequence: Synthetic oligonucleotide
  Antisense strand to SEQ ID NO: 800834
uuccucggauagcauuucu

SEQ ID NO: 800836 - RNA, 19 nt, Artificial Sequence
  Description of Artificial Sequence: Synthetic oligonucleotide
  Sense strand starting at position 1059 of SEQ ID NO: 587554
aaugcuauccgaggaacuu

SEQ ID NO: 800837 - RNA, 19 nt, Artificial Sequence
  Description of Artificial Sequence: Synthetic oligonucleotide
  Antisense strand to SEQ ID NO: 800836
aaguuccucggauagcauu

SEQ ID NO: 800838 - RNA, 19 nt, Artificial Sequence
  Description of Artificial Sequence: Synthetic oligonucleotide
  Sense strand starting at position 1060 of SEQ ID NO: 587554
augcuauccgaggaacuua

SEQ ID NO: 800839 - RNA, 19 nt, Artificial Sequence
  Description of Artificial Sequence: Synthetic oligonucleotide
  Antisense strand to SEQ ID NO: 800838
uaaguuccucggauagcau

SEQ ID NO: 800840 - RNA, 19 nt, Artificial Sequence
  Description of Artificial Sequence: Synthetic oligonucleotide
  Sense strand starting at position 1101 of SEQ ID NO: 587554
uugagaaugccuggaguuu

SEQ ID NO: 800841 - RNA, 19 nt, Artificial Sequence
  Description of Artificial Sequence: Synthetic oligonucleotide
  Antisense strand to SEQ ID NO: 800840
aaacuccaggcauucucaa

SEQ ID NO: 800842 - RNA, 19 nt, Artificial Sequence
  Description of Artificial Sequence: Synthetic oligonucleotide
  Sense strand starting at position 1151 of SEQ ID NO: 587554
cugggcuauuaaucauuau

SEQ ID NO: 800843 - RNA, 19 nt, Artificial Sequence
  Description of Artificial Sequence: Synthetic oligonucleotide
  Antisense strand to SEQ ID NO: 800842
auaaugauuaauagcccag

SEQ ID NO: 800844 - RNA, 19 nt, Artificial Sequence
  Description of Artificial Sequence: Synthetic oligonucleotide
  Sense strand starting at position 1528 of SEQ ID NO: 587554
aggagagccuuuguuucga

SEQ ID NO: 800845 - RNA, 19 nt, Artificial Sequence
  Description of Artificial Sequence: Synthetic oligonucleotide
  Antisense strand to SEQ ID NO: 800844
ucgaaacaaaggcucuccu

SEQ ID NO: 800846 - RNA, 19 nt, Artificial Sequence
  Description of Artificial Sequence: Synthetic oligonucleotide
  Sense strand starting at position 1571 of SEQ ID NO: 587554
gcauguuuaagggaagcga

SEQ ID NO: 800847 - RNA, 19 nt, Artificial Sequence
  Description of Artificial Sequence: Synthetic oligonucleotide
  Antisense strand to SEQ ID NO: 800846
ucgcuucccuuaaacaugc

SEQ ID NO: 800848 - RNA, 19 nt, Artificial Sequence
  Description of Artificial Sequence: Synthetic oligonucleotide
  Sense strand starting at position 2101 of SEQ ID NO: 587554
gugacuaaccuucgaacca

SEQ ID NO: 800849 - RNA, 19 nt, Artificial Sequence
  Description of Artificial Sequence: Synthetic oligonucleotide
  Antisense strand to SEQ ID NO: 800848
ugguucgaagguuagucac

SEQ ID NO: 800850 - RNA, 19 nt, Artificial Sequence
  Description of Artificial Sequence: Synthetic oligonucleotide
  Sense strand starting at position 2193 of SEQ ID NO: 587554
acaguucuccagcgagaaa

SEQ ID NO: 800851 - RNA, 19 nt, Artificial Sequence
  Description of Artificial Sequence: Synthetic oligonucleotide
  Antisense strand to SEQ ID NO: 800850
uuucucgcuggagaacugu

SEQ ID NO: 800852 - RNA, 19 nt, Artificial Sequence
  Description of Artificial Sequence: Synthetic oligonucleotide
  Sense strand starting at position 2234 of SEQ ID NO: 587554
ugcaacgggccucaauauu

SEQ ID NO: 800853 - RNA, 19 nt, Artificial Sequence
  Description of Artificial Sequence: Synthetic oligonucleotide
  Antisense strand to SEQ ID NO: 800852
aauauugaggcccguugca

SEQ ID NO: 800854 - RNA, 19 nt, Artificial Sequence
  Description of Artificial Sequence: Synthetic oligonucleotide
  Sense strand starting at position 2335 of SEQ ID NO: 587554
cugagauuuccucgcaccu

SEQ ID NO: 800855 - RNA, 19 nt, Artificial Sequence
  Description of Artificial Sequence: Synthetic oligonucleotide
  Antisense strand to SEQ ID NO: 800854
aggugcgaggaaaucucag

SEQ ID NO: 800856 - RNA, 19 nt, Artificial Sequence
  Description of Artificial Sequence: Synthetic oligonucleotide
  Sense strand starting at position 2449 of SEQ ID NO: 587554
cugcuagcucccgauacuu

SEQ ID NO: 800857 - RNA, 19 nt, Artificial Sequence
  Description of Artificial Sequence: Synthetic oligonucleotide
  Antisense strand to SEQ ID NO: 800856
aaguaucgggagcuagcag

SEQ ID NO: 800858 - RNA, 19 nt, Artificial Sequence
  Description of Artificial Sequence: Synthetic oligonucleotide
  Sense strand starting at position 2462 of SEQ ID NO: 587554
auacuuagagccuaguuga

SEQ ID NO: 800859 - RNA, 19 nt, Artificial Sequence
  Description of Artificial Sequence: Synthetic oligonucleotide
  Antisense strand to SEQ ID NO: 800858
ucaacuaggcucuaaguau

SEQ ID NO: 800860 - RNA, 19 nt, Artificial Sequence
  Description of Artificial Sequence: Synthetic oligonucleotide
  Sense strand starting at position 2472 of SEQ ID NO: 587554
ccuaguugauccuuucgau

SEQ ID NO: 800861 - RNA, 19 nt, Artificial Sequence
  Description of Artificial Sequence: Synthetic oligonucleotide
  Antisense strand to SEQ ID NO: 800860
aucgaaaggaucaacuagg

SEQ ID NO: 800862 - RNA, 19 nt, Artificial Sequence
  Description of Artificial Sequence: Synthetic oligonucleotide
  Sense strand starting at position 2505 of SEQ ID NO: 587554
cgcuguuaacccuauacau

SEQ ID NO: 800863 - RNA, 19 nt, Artificial Sequence
  Description of Artificial Sequence: Synthetic oligonucleotide
  Antisense strand to SEQ ID NO: 800862
auguauaggguuaacagcg

SEQ ID NO: 800864 - RNA, 19 nt, Artificial Sequence
  Description of Artificial Sequence: Synthetic oligonucleotide
  Sense strand starting at position 2894 of SEQ ID NO: 587554
agccuaagagauugagguu

SEQ ID NO: 800865 - RNA, 19 nt, Artificial Sequence
  Description of Artificial Sequence: Synthetic oligonucleotide
  Antisense strand to SEQ ID NO: 800864
aaccucaaucucuuaggcu

SEQ ID NO: 800866 - RNA, 19 nt, Artificial Sequence
  Description of Artificial Sequence: Synthetic oligonucleotide
  Sense strand starting at position 2923 of SEQ ID NO: 587554
gugauugugccgcuacacu

SEQ ID NO: 800867 - RNA, 19 nt, Artificial Sequence
  Description of Artificial Sequence: Synthetic oligonucleotide
  Antisense strand to SEQ ID NO: 800866
aguguagcggcacaaucac

SEQ ID NO: 800868 - RNA, 19 nt, Artificial Sequence
  Description of Artificial Sequence: Synthetic oligonucleotide
  Sense strand starting at position 2966 of SEQ ID NO: 587554
ccugucucacaacgagaaa

SEQ ID NO: 800869 - RNA, 19 nt, Artificial Sequence
  Description of Artificial Sequence: Synthetic oligonucleotide
  Antisense strand to SEQ ID NO: 800868
uuucucguugugagacagg

SEQ ID NO: 800870 - RNA, 19 nt, Artificial Sequence
  Description of Artificial Sequence: Synthetic oligonucleotide
  Sense strand starting at position 3202 of SEQ ID NO: 587554
cagaguggguaauugaaua

SEQ ID NO: 800871 - RNA, 19 nt, Artificial Sequence
  Description of Artificial Sequence: Synthetic oligonucleotide
  Antisense strand to SEQ ID NO: 800870
uauucaauuacccacucug

SEQ ID NO: 800872 - RNA, 19 nt, Artificial Sequence
  Description of Artificial Sequence: Synthetic oligonucleotide
  Sense strand starting at position 3340 of SEQ ID NO: 587554
ggacucuugucccucuaau

SEQ ID NO: 800873 - RNA, 19 nt, Artificial Sequence
  Description of Artificial Sequence: Synthetic oligonucleotide
  Antisense strand to SEQ ID NO: 800872
auuagagggacaagagucc

SEQ ID NO: 800874 - RNA, 19 nt, Artificial Sequence
  Description of Artificial Sequence: Synthetic oligonucleotide
  Sense strand starting at position 3391 of SEQ ID NO: 587554
cccagagaguucuuugcuu

SEQ ID NO: 800875 - RNA, 19 nt, Artificial Sequence
  Description of Artificial Sequence: Synthetic oligonucleotide
  Antisense strand to SEQ ID NO: 800874
aagcaaagaacucucuggg

SEQ ID NO: 800876 - RNA, 19 nt, Artificial Sequence
  Description of Artificial Sequence: Synthetic oligonucleotide
  Sense strand starting at position 3393 of SEQ ID NO: 587554
cagagaguucuuugcuuug

SEQ ID NO: 800877 - RNA, 19 nt, Artificial Sequence
  Description of Artificial Sequence: Synthetic oligonucleotide
  Antisense strand to SEQ ID NO: 800876
caaagcaaagaacucucug

SEQ ID NO: 800878 - RNA, 19 nt, Artificial Sequence
  Description of Artificial Sequence: Synthetic oligonucleotide
  Sense strand starting at position 3402 of SEQ ID NO: 587554
cuuugcuuuguccaggaaa

SEQ ID NO: 800879 - RNA, 19 nt, Artificial Sequence
  Description of Artificial Sequence: Synthetic oligonucleotide
  Antisense strand to SEQ ID NO: 800878
uuuccuggacaaagcaaag

SEQ ID NO: 800880 - RNA, 19 nt, Artificial Sequence
  Description of Artificial Sequence: Synthetic oligonucleotide
  Sense strand starting at position 3404 of SEQ ID NO: 587554
uugcuuuguccaggaaaga

SEQ ID NO: 800881 - RNA, 19 nt, Artificial Sequence
  Description of Artificial Sequence: Synthetic oligonucleotide
  Antisense strand to SEQ ID NO: 800880
ucuuuccuggacaaagcaa

SEQ ID NO: 800882 - RNA, 19 nt, Artificial Sequence
  Description of Artificial Sequence: Synthetic oligonucleotide
  Sense strand starting at position 3405 of SEQ ID NO: 587554
ugcuuuguccaggaaagaa

SEQ ID NO: 800883 - RNA, 19 nt, Artificial Sequence
  Description of Artificial Sequence: Synthetic oligonucleotide
  Antisense strand to SEQ ID NO: 800882
uucuuuccuggacaaagca

SEQ ID NO: 800884 - RNA, 19 nt, Artificial Sequence
  Description of Artificial Sequence: Synthetic oligonucleotide
  Sense strand starting at position 3545 of SEQ ID NO: 587554
ggagguucugcaggcauau

SEQ ID NO: 800885 - RNA, 19 nt, Artificial Sequence
  Description of Artificial Sequence: Synthetic oligonucleotide
  Antisense strand to SEQ ID NO: 800884
auaugccugcagaaccucc

SEQ ID NO: 800886 - RNA, 19 nt, Artificial Sequence
  Description of Artificial Sequence: Synthetic oligonucleotide
  Sense strand starting at position 3642 of SEQ ID NO: 587554
gucaucgggucauuaccau

SEQ ID NO: 800887 - RNA, 19 nt, Artificial Sequence
  Description of Artificial Sequence: Synthetic oligonucleotide
  Antisense strand to SEQ ID NO: 800886
augguaaugacccgaugac

SEQ ID NO: 800888 - RNA, 19 nt, Artificial Sequence
  Description of Artificial Sequence: Synthetic oligonucleotide
  Sense strand starting at position 3813 of SEQ ID NO: 587554
ccucacuucugagcaguau

SEQ ID NO: 800889 - RNA, 19 nt, Artificial Sequence
  Description of Artificial Sequence: Synthetic oligonucleotide
  Antisense strand to SEQ ID NO: 800888
auacugcucagaagugagg

SEQ ID NO: 800890 - RNA, 19 nt, Artificial Sequence
  Description of Artificial Sequence: Synthetic oligonucleotide
  Sense strand starting at position 3817 of SEQ ID NO: 587554
acuucugagcaguauguuu

SEQ ID NO: 800891 - RNA, 19 nt, Artificial Sequence
  Description of Artificial Sequence: Synthetic oligonucleotide
  Antisense strand to SEQ ID NO: 800890
aaacauacugcucagaagu

SEQ ID NO: 800892 - RNA, 19 nt, Artificial Sequence
  Description of Artificial Sequence: Synthetic oligonucleotide
  Sense strand starting at position 3950 of SEQ ID NO: 587554
cccugucagugugugacaa

SEQ ID NO: 800893 - RNA, 19 nt, Artificial Sequence
  Description of Artificial Sequence: Synthetic oligonucleotide
  Antisense strand to SEQ ID NO: 800892
uugucacacacugacaggg

SEQ ID NO: 800894 - RNA, 19 nt, Artificial Sequence
  Description of Artificial Sequence: Synthetic oligonucleotide
  Sense strand starting at position 3977 of SEQ ID NO: 587554
uggguucaguguucuugaa

SEQ ID NO: 800895 - RNA, 19 nt, Artificial Sequence
  Description of Artificial Sequence: Synthetic oligonucleotide
  Antisense strand to SEQ ID NO: 800894
uucaagaacacugaaccca

SEQ ID NO: 800896 - RNA, 19 nt, Artificial Sequence
  Description of Artificial Sequence: Synthetic oligonucleotide
  Sense strand starting at position 3979 of SEQ ID NO: 587554
gguucaguguucuugaaag

SEQ ID NO: 800897 - RNA, 19 nt, Artificial Sequence
  Description of Artificial Sequence: Synthetic oligonucleotide
  Antisense strand to SEQ ID NO: 800896
cuuucaagaacacugaacc

SEQ ID NO: 800898 - RNA, 19 nt, Artificial Sequence
  Description of Artificial Sequence: Synthetic oligonucleotide
  Sense strand starting at position 558 of SEQ ID NO: 587555
gggacaauuucggaauuga

SEQ ID NO: 800899 - RNA, 19 nt, Artificial Sequence
  Description of Artificial Sequence: Synthetic oligonucleotide
  Antisense strand to SEQ ID NO: 800898
ucaauuccgaaauuguccc

SEQ ID NO: 800900 - RNA, 19 nt, Artificial Sequence
  Description of Artificial Sequence: Synthetic oligonucleotide
  Sense strand starting at position 639 of SEQ ID NO: 587555
guagcacaaugauuaucaa

SEQ ID NO: 800901 - RNA, 19 nt, Artificial Sequence
  Description of Artificial Sequence: Synthetic oligonucleotide
  Antisense strand to SEQ ID NO: 800900
uugauaaucauugugcuac

SEQ ID NO: 800902 - RNA, 19 nt, Artificial Sequence
  Description of Artificial Sequence: Synthetic oligonucleotide
  Sense strand starting at position 642 of SEQ ID NO: 587555
gcacaaugauuaucaagau

SEQ ID NO: 800903 - RNA, 19 nt, Artificial Sequence
  Description of Artificial Sequence: Synthetic oligonucleotide
  Antisense strand to SEQ ID NO: 800902
aucuugauaaucauugugc

SEQ ID NO: 800904 - RNA, 19 nt, Artificial Sequence
  Description of Artificial Sequence: Synthetic oligonucleotide
  Sense strand starting at position 671 of SEQ ID NO: 587555
guguugugugguuuggcaa

SEQ ID NO: 800905 - RNA, 19 nt, Artificial Sequence
  Description of Artificial Sequence: Synthetic oligonucleotide
  Antisense strand to SEQ ID NO: 800904
uugccaaaccacacaacac

SEQ ID NO: 800906 - RNA, 19 nt, Artificial Sequence
  Description of Artificial Sequence: Synthetic oligonucleotide
  Sense strand starting at position 838 of SEQ ID NO: 587555
ucaaguaaagcuugacaau

SEQ ID NO: 800907 - RNA, 19 nt, Artificial Sequence
  Description of Artificial Sequence: Synthetic oligonucleotide
  Antisense strand to SEQ ID NO: 800906
auugucaagcuuuacuuga

SEQ ID NO: 800908 - RNA, 19 nt, Artificial Sequence
  Description of Artificial Sequence: Synthetic oligonucleotide
  Sense strand starting at position 855 of SEQ ID NO: 587555
auaacuuggcugcacaaau

SEQ ID NO: 800909 - RNA, 19 nt, Artificial Sequence
  Description of Artificial Sequence: Synthetic oligonucleotide
  Antisense strand to SEQ ID NO: 800908
auuugugcagccaaguuau

SEQ ID NO: 800910 - RNA, 19 nt, Artificial Sequence
  Description of Artificial Sequence: Synthetic oligonucleotide
  Sense strand starting at position 938 of SEQ ID NO: 587555
auugaaucgaguuggaaua

SEQ ID NO: 800911 - RNA, 19 nt, Artificial Sequence
  Description of Artificial Sequence: Synthetic oligonucleotide
  Antisense strand to SEQ ID NO: 800910
uauuccaacucgauucaau

SEQ ID NO: 800912 - RNA, 19 nt, Artificial Sequence
  Description of Artificial Sequence: Synthetic oligonucleotide
  Sense strand starting at position 939 of SEQ ID NO: 587555
uugaaucgaguuggaauaa

SEQ ID NO: 800913 - RNA, 19 nt, Artificial Sequence
  Description of Artificial Sequence: Synthetic oligonucleotide
  Antisense strand to SEQ ID NO: 800912
uuauuccaacucgauucaa

SEQ ID NO: 800914 - RNA, 19 nt, Artificial Sequence
  Description of Artificial Sequence: Synthetic oligonucleotide
  Sense strand starting at position 981 of SEQ ID NO: 587555
ugagucaaauggcucaaau

SEQ ID NO: 800915 - RNA, 19 nt, Artificial Sequence
  Description of Artificial Sequence: Synthetic oligonucleotide
  Antisense strand to SEQ ID NO: 800914
auuugagccauuugacuca

SEQ ID NO: 800916 - RNA, 19 nt, Artificial Sequence
  Description of Artificial Sequence: Synthetic oligonucleotide
  Sense strand starting at position 983 of SEQ ID NO: 587555
agucaaauggcucaaauca

SEQ ID NO: 800917 - RNA, 19 nt, Artificial Sequence
  Description of Artificial Sequence: Synthetic oligonucleotide
  Antisense strand to SEQ ID NO: 800916
ugauuugagccauuugacu

SEQ ID NO: 800918 - RNA, 19 nt, Artificial Sequence
  Description of Artificial Sequence: Synthetic oligonucleotide
  Sense strand starting at position 1028 of SEQ ID NO: 587555
ggugcuugagcugugugau

SEQ ID NO: 800919 - RNA, 19 nt, Artificial Sequence
  Description of Artificial Sequence: Synthetic oligonucleotide
  Antisense strand to SEQ ID NO: 800918
aucacacagcucaagcacc

SEQ ID NO: 800920 - RNA, 19 nt, Artificial Sequence
  Description of Artificial Sequence: Synthetic oligonucleotide
  Sense strand starting at position 1231 of SEQ ID NO: 587555
caggauauuuaauaaguga

SEQ ID NO: 800921 - RNA, 19 nt, Artificial Sequence
  Description of Artificial Sequence: Synthetic oligonucleotide
  Antisense strand to SEQ ID NO: 800920
ucacuuauuaaauauccug

SEQ ID NO: 800922 - RNA, 19 nt, Artificial Sequence
  Description of Artificial Sequence: Synthetic oligonucleotide
  Sense strand starting at position 1339 of SEQ ID NO: 587555
auggaaacggauuguuaac

SEQ ID NO: 800923 - RNA, 19 nt, Artificial Sequence
  Description of Artificial Sequence: Synthetic oligonucleotide
  Antisense strand to SEQ ID NO: 800922
guuaacaauccguuuccau

SEQ ID NO: 800924 - RNA, 19 nt, Artificial Sequence
  Description of Artificial Sequence: Synthetic oligonucleotide
  Sense strand starting at position 1391 of SEQ ID NO: 587555
guccaaaccugguuaacag

SEQ ID NO: 800925 - RNA, 19 nt, Artificial Sequence
  Description of Artificial Sequence: Synthetic oligonucleotide
  Antisense strand to SEQ ID NO: 800924
cuguuaaccagguuuggac

SEQ ID NO: 800926 - RNA, 19 nt, Artificial Sequence
  Description of Artificial Sequence: Synthetic oligonucleotide
  Sense strand starting at position 1417 of SEQ ID NO: 587555
agaguucaugggcgaagga

SEQ ID NO: 800927 - RNA, 19 nt, Artificial Sequence
  Description of Artificial Sequence: Synthetic oligonucleotide
  Antisense strand to SEQ ID NO: 800926
uccuucgcccaugaacucu

SEQ ID NO: 800928 - RNA, 19 nt, Artificial Sequence
  Description of Artificial Sequence: Synthetic oligonucleotide
  Sense strand starting at position 1646 of SEQ ID NO: 587555
agguuauagcaucaccuuu

SEQ ID NO: 800929 - RNA, 19 nt, Artificial Sequence
  Description of Artificial Sequence: Synthetic oligonucleotide
  Antisense strand to SEQ ID NO: 800928
aaaggugaugcuauaaccu

SEQ ID NO: 800930 - RNA, 19 nt, Artificial Sequence
  Description of Artificial Sequence: Synthetic oligonucleotide
  Sense strand starting at position 1752 of SEQ ID NO: 587555
aagcgucuuccggugcaau

SEQ ID NO: 800931 - RNA, 19 nt, Artificial Sequence
  Description of Artificial Sequence: Synthetic oligonucleotide
  Antisense strand to SEQ ID NO: 800930
auugcaccggaagacgcuu

SEQ ID NO: 800932 - RNA, 19 nt, Artificial Sequence
  Description of Artificial Sequence: Synthetic oligonucleotide
  Sense strand starting at position 2093 of SEQ ID NO: 587555
gggcuugccggaaguugua

SEQ ID NO: 800933 - RNA, 19 nt, Artificial Sequence
  Description of Artificial Sequence: Synthetic oligonucleotide
  Antisense strand to SEQ ID NO: 800932
uacaacuuccggcaagccc

SEQ ID NO: 800934 - RNA, 19 nt, Artificial Sequence
  Description of Artificial Sequence: Synthetic oligonucleotide
  Sense strand starting at position 3151 of SEQ ID NO: 587555
gugugauguggagauggau

SEQ ID NO: 800935 - RNA, 19 nt, Artificial Sequence
  Description of Artificial Sequence: Synthetic oligonucleotide
  Antisense strand to SEQ ID NO: 800934
auccaucuccacaucacac

SEQ ID NO: 800936 - RNA, 19 nt, Artificial Sequence
  Description of Artificial Sequence: Synthetic oligonucleotide
  Sense strand starting at position 3186 of SEQ ID NO: 587555
ucgguagauaggugggaaa

SEQ ID NO: 800937 - RNA, 19 nt, Artificial Sequence
  Description of Artificial Sequence: Synthetic oligonucleotide
  Antisense strand to SEQ ID NO: 800936
uuucccaccuaucuaccga

SEQ ID NO: 800938 - RNA, 19 nt, Artificial Sequence
  Description of Artificial Sequence: Synthetic oligonucleotide
  Sense strand starting at position 3323 of SEQ ID NO: 587555
cuucgugugaauuagauga

SEQ ID NO: 800939 - RNA, 19 nt, Artificial Sequence
  Description of Artificial Sequence: Synthetic oligonucleotide
  Antisense strand to SEQ ID NO: 800938
ucaucuaauucacacgaag

SEQ ID NO: 800940 - RNA, 19 nt, Artificial Sequence
  Description of Artificial Sequence: Synthetic oligonucleotide
  Sense strand starting at position 3327 of SEQ ID NO: 587555
gugugaauuagaugaauaa

SEQ ID NO: 800941 - RNA, 19 nt, Artificial Sequence
  Description of Artificial Sequence: Synthetic oligonucleotide
  Antisense strand to SEQ ID NO: 800940
uuauucaucuaauucacac

SEQ ID NO: 800942 - RNA, 19 nt, Artificial Sequence
  Description of Artificial Sequence: Synthetic oligonucleotide
  Sense strand starting at position 3446 of SEQ ID NO: 587555
uggagauagggcgacuuau

SEQ ID NO: 800943 - RNA, 19 nt, Artificial Sequence
  Description of Artificial Sequence: Synthetic oligonucleotide
  Antisense strand to SEQ ID NO: 800942
auaagucgcccuaucucca

SEQ ID NO: 800944 - RNA, 19 nt, Artificial Sequence
  Description of Artificial Sequence: Synthetic oligonucleotide
  Sense strand starting at position 3550 of SEQ ID NO: 587555
cccuguucugucuugcauu

SEQ ID NO: 800945 - RNA, 19 nt, Artificial Sequence
  Description of Artificial Sequence: Synthetic oligonucleotide
  Antisense strand to SEQ ID NO: 800944
aaugcaagacagaacaggg

SEQ ID NO: 800946 - RNA, 19 nt, Artificial Sequence
  Description of Artificial Sequence: Synthetic oligonucleotide
  Sense strand starting at position 3561 of SEQ ID NO: 587555
cuugcauuugccugaaagc

SEQ ID NO: 800947 - RNA, 19 nt, Artificial Sequence
  Description of Artificial Sequence: Synthetic oligonucleotide
  Antisense strand to SEQ ID NO: 800946
gcuuucaggcaaaugcaag

SEQ ID NO: 800948 - RNA, 19 nt, Artificial Sequence
  Description of Artificial Sequence: Synthetic oligonucleotide
  Sense strand starting at position 3562 of SEQ ID NO: 587555
uugcauuugccugaaagcu

SEQ ID NO: 800949 - RNA, 19 nt, Artificial Sequence
  Description of Artificial Sequence: Synthetic oligonucleotide
  Antisense strand to SEQ ID NO: 800948
agcuuucaggcaaaugcaa

SEQ ID NO: 800950 - RNA, 19 nt, Artificial Sequence
  Description of Artificial Sequence: Synthetic oligonucleotide
  Sense strand starting at position 3599 of SEQ ID NO: 587555
agaagcauugggugaguaa

SEQ ID NO: 800951 - RNA, 19 nt, Artificial Sequence
  Description of Artificial Sequence: Synthetic oligonucleotide
  Antisense strand to SEQ ID NO: 800950
uuacucacccaaugcuucu

SEQ ID NO: 800952 - RNA, 19 nt, Artificial Sequence
  Description of Artificial Sequence: Synthetic oligonucleotide
  Sense strand starting at position 3600 of SEQ ID NO: 587555
gaagcauugggugaguaaa

SEQ ID NO: 800953 - RNA, 19 nt, Artificial Sequence
  Description of Artificial Sequence: Synthetic oligonucleotide
  Antisense strand to SEQ ID NO: 800952
uuuacucacccaaugcuuc

SEQ ID NO: 800954 - RNA, 19 nt, Artificial Sequence
  Description of Artificial Sequence: Synthetic oligonucleotide
  Sense strand starting at position 3627 of SEQ ID NO: 587555
ugcaguuggcauuaaagau

SEQ ID NO: 800955 - RNA, 19 nt, Artificial Sequence
  Description of Artificial Sequence: Synthetic oligonucleotide
  Antisense strand to SEQ ID NO: 800954
aucuuuaaugccaacugca

SEQ ID NO: 800956 - RNA, 19 nt, Artificial Sequence
  Description of Artificial Sequence: Synthetic oligonucleotide
  Sense strand starting at position 3642 of SEQ ID NO: 587555
agauaacacuauguaaagu

SEQ ID NO: 800957 - RNA, 19 nt, Artificial Sequence
  Description of Artificial Sequence: Synthetic oligonucleotide
  Antisense strand to SEQ ID NO: 800956
acuuuacauaguguuaucu

SEQ ID NO: 800958 - RNA, 19 nt, Artificial Sequence
  Description of Artificial Sequence: Synthetic oligonucleotide
  Sense strand starting at position 3653 of SEQ ID NO: 587555
uguaaaguugaaugguaua

SEQ ID NO: 800959 - RNA, 19 nt, Artificial Sequence
  Description of Artificial Sequence: Synthetic oligonucleotide
  Antisense strand to SEQ ID NO: 800958
uauaccauucaacuuuaca

SEQ ID NO: 800960 - RNA, 19 nt, Artificial Sequence
  Description of Artificial Sequence: Synthetic oligonucleotide
  Sense strand starting at position 3658 of SEQ ID NO: 587555
aguugaaugguauaaagug

SEQ ID NO: 800961 - RNA, 19 nt, Artificial Sequence
  Description of Artificial Sequence: Synthetic oligonucleotide
  Antisense strand to SEQ ID NO: 800960
cacuuuauaccauucaacu

SEQ ID NO: 800962 - RNA, 19 nt, Artificial Sequence
  Description of Artificial Sequence: Synthetic oligonucleotide
  Sense strand starting at position 3667 of SEQ ID NO: 587555
guauaaagugauuacuguu

SEQ ID NO: 800963 - RNA, 19 nt, Artificial Sequence
  Description of Artificial Sequence: Synthetic oligonucleotide
  Antisense strand to SEQ ID NO: 800962
aacaguaaucacuuuauac

SEQ ID NO: 800964 - RNA, 19 nt, Artificial Sequence
  Description of Artificial Sequence: Synthetic oligonucleotide
  Sense strand starting at position 3686 of SEQ ID NO: 587555
uuuauuuacgcugaagcuu

SEQ ID NO: 800965 - RNA, 19 nt, Artificial Sequence
  Description of Artificial Sequence: Synthetic oligonucleotide
  Antisense strand to SEQ ID NO: 800964
aagcuucagcguaaauaaa

SEQ ID NO: 800966 - RNA, 19 nt, Artificial Sequence
  Description of Artificial Sequence: Synthetic oligonucleotide
  Sense strand starting at position 3732 of SEQ ID NO: 587555
gguagagugaugugacuag

SEQ ID NO: 800967 - RNA, 19 nt, Artificial Sequence
  Description of Artificial Sequence: Synthetic oligonucleotide
  Antisense strand to SEQ ID NO: 800966
cuagucacaucacucuacc

SEQ ID NO: 800968 - RNA, 19 nt, Artificial Sequence
  Description of Artificial Sequence: Synthetic oligonucleotide
  Sense strand starting at position 3736 of SEQ ID NO: 587555
gagugaugugacuagcuca

SEQ ID NO: 800969 - RNA, 19 nt, Artificial Sequence
  Description of Artificial Sequence: Synthetic oligonucleotide
  Antisense strand to SEQ ID NO: 800968
ugagcuagucacaucacuc

SEQ ID NO: 800970 - RNA, 19 nt, Artificial Sequence
  Description of Artificial Sequence: Synthetic oligonucleotide
  Sense strand starting at position 3743 of SEQ ID NO: 587555
gugacuagcucauuucucu

SEQ ID NO: 800971 - RNA, 19 nt, Artificial Sequence
  Description of Artificial Sequence: Synthetic oligonucleotide
  Antisense strand to SEQ ID NO: 800970
agagaaaugagcuagucac

SEQ ID NO: 800972 - RNA, 19 nt, Artificial Sequence
  Description of Artificial Sequence: Synthetic oligonucleotide
  Sense strand starting at position 3747 of SEQ ID NO: 587555
cuagcucauuucucuggua

SEQ ID NO: 800973 - RNA, 19 nt, Artificial Sequence
  Description of Artificial Sequence: Synthetic oligonucleotide
  Antisense strand to SEQ ID NO: 800972
uaccagagaaaugagcuag

SEQ ID NO: 800974 - RNA, 19 nt, Artificial Sequence
  Description of Artificial Sequence: Synthetic oligonucleotide
  Sense strand starting at position 3749 of SEQ ID NO: 587555
agcucauuucucugguauc

SEQ ID NO: 800975 - RNA, 19 nt, Artificial Sequence
  Description of Artificial Sequence: Synthetic oligonucleotide
  Antisense strand to SEQ ID NO: 800974
gauaccagagaaaugagcu

SEQ ID NO: 800976 - RNA, 19 nt, Artificial Sequence
  Description of Artificial Sequence: Synthetic oligonucleotide
  Sense strand starting at position 3875 of SEQ ID NO: 587555
cuuucuguuggacauaaua

SEQ ID NO: 800977 - RNA, 19 nt, Artificial Sequence
  Description of Artificial Sequence: Synthetic oligonucleotide
  Antisense strand to SEQ ID NO: 800976
uauuauguccaacagaaag

SEQ ID NO: 800978 - RNA, 19 nt, Artificial Sequence
  Description of Artificial Sequence: Synthetic oligonucleotide
  Sense strand starting at position 151 of SEQ ID NO: 587556
ugcuuuagccaauaaggua

SEQ ID NO: 800979 - RNA, 19 nt, Artificial Sequence
  Description of Artificial Sequence: Synthetic oligonucleotide
  Antisense strand to SEQ ID NO: 800978
uaccuuauuggcuaaagca

SEQ ID NO: 800980 - RNA, 19 nt, Artificial Sequence
  Description of Artificial Sequence: Synthetic oligonucleotide
  Sense strand starting at position 241 of SEQ ID NO: 587556
agagucacguuuccaggaa

SEQ ID NO: 800981 - RNA, 19 nt, Artificial Sequence
  Description of Artificial Sequence: Synthetic oligonucleotide
  Antisense strand to SEQ ID NO: 800980
uuccuggaaacgugacucu

SEQ ID NO: 800982 - RNA, 19 nt, Artificial Sequence
  Description of Artificial Sequence: Synthetic oligonucleotide
  Sense strand starting at position 824 of SEQ ID NO: 587556
gggacaauuucggaauuga

SEQ ID NO: 800983 - RNA, 19 nt, Artificial Sequence
  Description of Artificial Sequence: Synthetic oligonucleotide
  Antisense strand to SEQ ID NO: 800982
ucaauuccgaaauuguccc

SEQ ID NO: 800984 - RNA, 19 nt, Artificial Sequence
  Description of Artificial Sequence: Synthetic oligonucleotide
  Sense strand starting at position 905 of SEQ ID NO: 587556
guagcacaaugauuaucaa

SEQ ID NO: 800985 - RNA, 19 nt, Artificial Sequence
  Description of Artificial Sequence: Synthetic oligonucleotide
  Antisense strand to SEQ ID NO: 800984
uugauaaucauugugcuac

SEQ ID NO: 800986 - RNA, 19 nt, Artificial Sequence
  Description of Artificial Sequence: Synthetic oligonucleotide
  Sense strand starting at position 908 of SEQ ID NO: 587556
gcacaaugauuaucaagau

SEQ ID NO: 800987 - RNA, 19 nt, Artificial Sequence
  Description of Artificial Sequence: Synthetic oligonucleotide
  Antisense strand to SEQ ID NO: 800986
aucuugauaaucauugugc

SEQ ID NO: 800988 - RNA, 19 nt, Artificial Sequence
  Description of Artificial Sequence: Synthetic oligonucleotide
  Sense strand starting at position 937 of SEQ ID NO: 587556
guguugugugguuuggcaa

SEQ ID NO: 800989 - RNA, 19 nt, Artificial Sequence
  Description of Artificial Sequence: Synthetic oligonucleotide
  Antisense strand to SEQ ID NO: 800988
uugccaaaccacacaacac

SEQ ID NO: 800990 - RNA, 19 nt, Artificial Sequence
  Description of Artificial Sequence: Synthetic oligonucleotide
  Sense strand starting at position 1104 of SEQ ID NO: 587556
ucaaguaaagcuugacaau

SEQ ID NO: 800991 - RNA, 19 nt, Artificial Sequence
  Description of Artificial Sequence: Synthetic oligonucleotide
  Antisense strand to SEQ ID NO: 800990
auugucaagcuuuacuuga

SEQ ID NO: 800992 - RNA, 19 nt, Artificial Sequence
  Description of Artificial Sequence: Synthetic oligonucleotide
  Sense strand starting at position 1121 of SEQ ID NO: 587556
auaacuuggcugcacaaau

SEQ ID NO: 800993 - RNA, 19 nt, Artificial Sequence
  Description of Artificial Sequence: Synthetic oligonucleotide
  Antisense strand to SEQ ID NO: 800992
auuugugcagccaaguuau

SEQ ID NO: 800994 - RNA, 19 nt, Artificial Sequence
  Description of Artificial Sequence: Synthetic oligonucleotide
  Sense strand starting at position 1204 of SEQ ID NO: 587556
auugaaucgaguuggaaua

SEQ ID NO: 800995 - RNA, 19 nt, Artificial Sequence
  Description of Artificial Sequence: Synthetic oligonucleotide
  Antisense strand to SEQ ID NO: 800994
uauuccaacucgauucaau

SEQ ID NO: 800996 - RNA, 19 nt, Artificial Sequence
  Description of Artificial Sequence: Synthetic oligonucleotide
  Sense strand starting at position 1205 of SEQ ID NO: 587556
uugaaucgaguuggaauaa

SEQ ID NO: 800997 - RNA, 19 nt, Artificial Sequence
  Description of Artificial Sequence: Synthetic oligonucleotide
  Antisense strand to SEQ ID NO: 800996
uuauuccaacucgauucaa

SEQ ID NO: 800998 - RNA, 19 nt, Artificial Sequence
  Description of Artificial Sequence: Synthetic oligonucleotide
  Sense strand starting at position 1247 of SEQ ID NO: 587556
ugagucaaauggcucaaau

SEQ ID NO: 800999 - RNA, 19 nt, Artificial Sequence
  Description of Artificial Sequence: Synthetic oligonucleotide
  Antisense strand to SEQ ID NO: 800998
auuugagccauuugacuca

SEQ ID NO: 801000 - RNA, 19 nt, Artificial Sequence
  Description of Artificial Sequence: Synthetic oligonucleotide
  Sense strand starting at position 1249 of SEQ ID NO: 587556
agucaaauggcucaaauca

SEQ ID NO: 801001 - RNA, 19 nt, Artificial Sequence
  Description of Artificial Sequence: Synthetic oligonucleotide
  Antisense strand to SEQ ID NO: 801000
ugauuugagccauuugacu

SEQ ID NO: 801002 - RNA, 19 nt, Artificial Sequence
  Description of Artificial Sequence: Synthetic oligonucleotide
  Sense strand starting at position 1294 of SEQ ID NO: 587556
ggugcuugagcugugugau

SEQ ID NO: 801003 - RNA, 19 nt, Artificial Sequence
  Description of Artificial Sequence: Synthetic oligonucleotide
  Antisense strand to SEQ ID NO: 801002
aucacacagcucaagcacc

SEQ ID NO: 801004 - RNA, 19 nt, Artificial Sequence
  Description of Artificial Sequence: Synthetic oligonucleotide
  Sense strand starting at position 1497 of SEQ ID NO: 587556
caggauauuuaauaaguga

SEQ ID NO: 801005 - RNA, 19 nt, Artificial Sequence
  Description of Artificial Sequence: Synthetic oligonucleotide
  Antisense strand to SEQ ID NO: 801004
ucacuuauuaaauauccug

SEQ ID NO: 801006 - RNA, 19 nt, Artificial Sequence
  Description of Artificial Sequence: Synthetic oligonucleotide
  Sense strand starting at position 1605 of SEQ ID NO: 587556
auggaaacggauuguuaac

SEQ ID NO: 801007 - RNA, 19 nt, Artificial Sequence
  Description of Artificial Sequence: Synthetic oligonucleotide
  Antisense strand to SEQ ID NO: 801006
guuaacaauccguuuccau

SEQ ID NO: 801008 - RNA, 19 nt, Artificial Sequence
  Description of Artificial Sequence: Synthetic oligonucleotide
  Sense strand starting at position 1657 of SEQ ID NO: 587556
guccaaaccugguuaacag

SEQ ID NO: 801009 - RNA, 19 nt, Artificial Sequence
  Description of Artificial Sequence: Synthetic oligonucleotide
  Antisense strand to SEQ ID NO: 801008
cuguuaaccagguuuggac

SEQ ID NO: 801010 - RNA, 19 nt, Artificial Sequence
  Description of Artificial Sequence: Synthetic oligonucleotide
  Sense strand starting at position 1683 of SEQ ID NO: 587556
agaguucaugggcgaagga

SEQ ID NO: 801011 - RNA, 19 nt, Artificial Sequence
  Description of Artificial Sequence: Synthetic oligonucleotide
  Antisense strand to SEQ ID NO: 801010
uccuucgcccaugaacucu

SEQ ID NO: 801012 - RNA, 19 nt, Artificial Sequence
  Description of Artificial Sequence: Synthetic oligonucleotide
  Sense strand starting at position 1912 of SEQ ID NO: 587556
agguuauagcaucaccuuu

SEQ ID NO: 801013 - RNA, 19 nt, Artificial Sequence
  Description of Artificial Sequence: Synthetic oligonucleotide
  Antisense strand to SEQ ID NO: 801012
aaaggugaugcuauaaccu

SEQ ID NO: 801014 - RNA, 19 nt, Artificial Sequence
  Description of Artificial Sequence: Synthetic oligonucleotide
  Sense strand starting at position 2018 of SEQ ID NO: 587556
aagcgucuuccggugcaau

SEQ ID NO: 801015 - RNA, 19 nt, Artificial Sequence
  Description of Artificial Sequence: Synthetic oligonucleotide
  Antisense strand to SEQ ID NO: 801014
auugcaccggaagacgcuu

SEQ ID NO: 801016 - RNA, 19 nt, Artificial Sequence
  Description of Artificial Sequence: Synthetic oligonucleotide
  Sense strand starting at position 2359 of SEQ ID NO: 587556
gggcuugccggaaguugua

SEQ ID NO: 801017 - RNA, 19 nt, Artificial Sequence
  Description of Artificial Sequence: Synthetic oligonucleotide
  Antisense strand to SEQ ID NO: 801016
uacaacuuccggcaagccc

SEQ ID NO: 801018 - RNA, 19 nt, Artificial Sequence
  Description of Artificial Sequence: Synthetic oligonucleotide
  Sense strand starting at position 3092 of SEQ ID NO: 587556
aggugauuugcaggugugu

SEQ ID NO: 801019 - RNA, 19 nt, Artificial Sequence
  Description of Artificial Sequence: Synthetic oligonucleotide
  Antisense strand to SEQ ID NO: 801018
acacaccugcaaaucaccu

SEQ ID NO: 801020 - RNA, 19 nt, Artificial Sequence
  Description of Artificial Sequence: Synthetic oligonucleotide
  Sense strand starting at position 3413 of SEQ ID NO: 587556
gauggugugauguggagau

SEQ ID NO: 801021 - RNA, 19 nt, Artificial Sequence
  Description of Artificial Sequence: Synthetic oligonucleotide
  Antisense strand to SEQ ID NO: 801020
aucuccacaucacaccauc

SEQ ID NO: 801022 - RNA, 19 nt, Artificial Sequence
  Description of Artificial Sequence: Synthetic oligonucleotide
  Sense strand starting at position 3417 of SEQ ID NO: 587556
gugugauguggagauggau

SEQ ID NO: 801023 - RNA, 19 nt, Artificial Sequence
  Description of Artificial Sequence: Synthetic oligonucleotide
  Antisense strand to SEQ ID NO: 801022
auccaucuccacaucacac

SEQ ID NO: 801024 - RNA, 19 nt, Artificial Sequence
  Description of Artificial Sequence: Synthetic oligonucleotide
  Sense strand starting at position 3452 of SEQ ID NO: 587556
ucgguagauaggugggaaa

SEQ ID NO: 801025 - RNA, 19 nt, Artificial Sequence
  Description of Artificial Sequence: Synthetic oligonucleotide
  Antisense strand to SEQ ID NO: 801024
uuucccaccuaucuaccga

SEQ ID NO: 801026 - RNA, 19 nt, Artificial Sequence
  Description of Artificial Sequence: Synthetic oligonucleotide
  Sense strand starting at position 3589 of SEQ ID NO: 587556
cuucgugugaauuagauga

SEQ ID NO: 801027 - RNA, 19 nt, Artificial Sequence
  Description of Artificial Sequence: Synthetic oligonucleotide
  Antisense strand to SEQ ID NO: 801026
ucaucuaauucacacgaag

SEQ ID NO: 801028 - RNA, 19 nt, Artificial Sequence
  Description of Artificial Sequence: Synthetic oligonucleotide
  Sense strand starting at position 3593 of SEQ ID NO: 587556
gugugaauuagaugaauaa

SEQ ID NO: 801029 - RNA, 19 nt, Artificial Sequence
  Description of Artificial Sequence: Synthetic oligonucleotide
  Antisense strand to SEQ ID NO: 801028
uuauucaucuaauucacac

SEQ ID NO: 801030 - RNA, 19 nt, Artificial Sequence
  Description of Artificial Sequence: Synthetic oligonucleotide
  Sense strand starting at position 3699 of SEQ ID NO: 587556
ucuguuauguaucuggaga

SEQ ID NO: 801031 - RNA, 19 nt, Artificial Sequence
  Description of Artificial Sequence: Synthetic oligonucleotide
  Antisense strand to SEQ ID NO: 801030
ucuccagauacauaacaga

SEQ ID NO: 801032 - RNA, 19 nt, Artificial Sequence
  Description of Artificial Sequence: Synthetic oligonucleotide
  Sense strand starting at position 3712 of SEQ ID NO: 587556
uggagauagggcgacuuau

SEQ ID NO: 801033 - RNA, 19 nt, Artificial Sequence
  Description of Artificial Sequence: Synthetic oligonucleotide
  Antisense strand to SEQ ID NO: 801032
auaagucgcccuaucucca

SEQ ID NO: 801034 - RNA, 19 nt, Artificial Sequence
  Description of Artificial Sequence: Synthetic oligonucleotide
  Sense strand starting at position 3816 of SEQ ID NO: 587556
cccuguucugucuugcauu

SEQ ID NO: 801035 - RNA, 19 nt, Artificial Sequence
  Description of Artificial Sequence: Synthetic oligonucleotide
  Antisense strand to SEQ ID NO: 801034
aaugcaagacagaacaggg

SEQ ID NO: 801036 - RNA, 19 nt, Artificial Sequence
  Description of Artificial Sequence: Synthetic oligonucleotide
  Sense strand starting at position 3827 of SEQ ID NO: 587556
cuugcauuugccugaaagc

SEQ ID NO: 801037 - RNA, 19 nt, Artificial Sequence
  Description of Artificial Sequence: Synthetic oligonucleotide
  Antisense strand to SEQ ID NO: 801036
gcuuucaggcaaaugcaag

SEQ ID NO: 801038 - RNA, 19 nt, Artificial Sequence
  Description of Artificial Sequence: Synthetic oligonucleotide
  Sense strand starting at position 3828 of SEQ ID NO: 587556
uugcauuugccugaaagcu

SEQ ID NO: 801039 - RNA, 19 nt, Artificial Sequence
  Description of Artificial Sequence: Synthetic oligonucleotide
  Antisense strand to SEQ ID NO: 801038
agcuuucaggcaaaugcaa

SEQ ID NO: 801040 - RNA, 19 nt, Artificial Sequence
  Description of Artificial Sequence: Synthetic oligonucleotide
  Sense strand starting at position 3865 of SEQ ID NO: 587556
agaagcauugggugaguaa

SEQ ID NO: 801041 - RNA, 19 nt, Artificial Sequence
  Description of Artificial Sequence: Synthetic oligonucleotide
  Antisense strand to SEQ ID NO: 801040
uuacucacccaaugcuucu

SEQ ID NO: 801042 - RNA, 19 nt, Artificial Sequence
  Description of Artificial Sequence: Synthetic oligonucleotide
  Sense strand starting at position 3866 of SEQ ID NO: 587556
gaagcauugggugaguaaa

SEQ ID NO: 801043 - RNA, 19 nt, Artificial Sequence
  Description of Artificial Sequence: Synthetic oligonucleotide
  Antisense strand to SEQ ID NO: 801042
uuuacucacccaaugcuuc

SEQ ID NO: 801044 - RNA, 19 nt, Artificial Sequence
  Description of Artificial Sequence: Synthetic oligonucleotide
  Sense strand starting at position 3893 of SEQ ID NO: 587556
ugcaguuggcauuaaagau

SEQ ID NO: 801045 - RNA, 19 nt, Artificial Sequence
  Description of Artificial Sequence: Synthetic oligonucleotide
  Antisense strand to SEQ ID NO: 801044
aucuuuaaugccaacugca

SEQ ID NO: 801046 - RNA, 19 nt, Artificial Sequence
  Description of Artificial Sequence: Synthetic oligonucleotide
  Sense strand starting at position 3908 of SEQ ID NO: 587556
agauaacacuauguaaagu

SEQ ID NO: 801047 - RNA, 19 nt, Artificial Sequence
  Description of Artificial Sequence: Synthetic oligonucleotide
  Antisense strand to SEQ ID NO: 801046
acuuuacauaguguuaucu

SEQ ID NO: 801048 - RNA, 19 nt, Artificial Sequence
  Description of Artificial Sequence: Synthetic oligonucleotide
  Sense strand starting at position 3919 of SEQ ID NO: 587556
uguaaaguugaaugguaua

SEQ ID NO: 801049 - RNA, 19 nt, Artificial Sequence
  Description of Artificial Sequence: Synthetic oligonucleotide
  Antisense strand to SEQ ID NO: 801048
uauaccauucaacuuuaca

SEQ ID NO: 801050 - RNA, 19 nt, Artificial Sequence
  Description of Artificial Sequence: Synthetic oligonucleotide
  Sense strand starting at position 3924 of SEQ ID NO: 587556
aguugaaugguauaaagug

SEQ ID NO: 801051 - RNA, 19 nt, Artificial Sequence
  Description of Artificial Sequence: Synthetic oligonucleotide
  Antisense strand to SEQ ID NO: 801050
cacuuuauaccauucaacu

SEQ ID NO: 801052 - RNA, 19 nt, Artificial Sequence
  Description of Artificial Sequence: Synthetic oligonucleotide
  Sense strand starting at position 3932 of SEQ ID NO: 587556
gguauaaagugauuacugu

SEQ ID NO: 801053 - RNA, 19 nt, Artificial Sequence
  Description of Artificial Sequence: Synthetic oligonucleotide
  Antisense strand to SEQ ID NO: 801052
acaguaaucacuuuauacc

SEQ ID NO: 801054 - RNA, 19 nt, Artificial Sequence
  Description of Artificial Sequence: Synthetic oligonucleotide
  Sense strand starting at position 3933 of SEQ ID NO: 587556
guauaaagugauuacuguu

SEQ ID NO: 801055 - RNA, 19 nt, Artificial Sequence
  Description of Artificial Sequence: Synthetic oligonucleotide
  Antisense strand to SEQ ID NO: 801054
aacaguaaucacuuuauac

SEQ ID NO: 801056 - RNA, 19 nt, Artificial Sequence
  Description of Artificial Sequence: Synthetic oligonucleotide
  Sense strand starting at position 3952 of SEQ ID NO: 587556
uuuauuuacgcugaagcuu

SEQ ID NO: 801057 - RNA, 19 nt, Artificial Sequence
  Description of Artificial Sequence: Synthetic oligonucleotide
  Antisense strand to SEQ ID NO: 801056
aagcuucagcguaaauaaa

SEQ ID NO: 801058 - RNA, 19 nt, Artificial Sequence
  Description of Artificial Sequence: Synthetic oligonucleotide
  Sense strand starting at position 81 of SEQ ID NO: 587557
uauuuacagcgcugucaac

SEQ ID NO: 801059 - RNA, 19 nt, Artificial Sequence
  Description of Artificial Sequence: Synthetic oligonucleotide
  Antisense strand to SEQ ID NO: 801058
guugacagcgcuguaaaua

SEQ ID NO: 801060 - RNA, 19 nt, Artificial Sequence
  Description of Artificial Sequence: Synthetic oligonucleotide
  Sense strand starting at position 125 of SEQ ID NO: 587557
auuuaagggucccaauuaa

SEQ ID NO: 801061 - RNA, 19 nt, Artificial Sequence
  Description of Artificial Sequence: Synthetic oligonucleotide
  Antisense strand to SEQ ID NO: 801060
uuaauugggacccuuaaau

SEQ ID NO: 801062 - RNA, 19 nt, Artificial Sequence
  Description of Artificial Sequence: Synthetic oligonucleotide
  Sense strand starting at position 207 of SEQ ID NO: 587557
ccaugagaaccauaugcuu

SEQ ID NO: 801063 - RNA, 19 nt, Artificial Sequence
  Description of Artificial Sequence: Synthetic oligonucleotide
  Antisense strand to SEQ ID NO: 801062
aagcauaugguucucaugg

SEQ ID NO: 801064 - RNA, 19 nt, Artificial Sequence
  Description of Artificial Sequence: Synthetic oligonucleotide
  Sense strand starting at position 210 of SEQ ID NO: 587557
ugagaaccauaugcuuaau

SEQ ID NO: 801065 - RNA, 19 nt, Artificial Sequence
  Description of Artificial Sequence: Synthetic oligonucleotide
  Antisense strand to SEQ ID NO: 801064
auuaagcauaugguucuca

SEQ ID NO: 801066 - RNA, 19 nt, Artificial Sequence
  Description of Artificial Sequence: Synthetic oligonucleotide
  Sense strand starting at position 304 of SEQ ID NO: 587557
aaguguucugacuaaguga

SEQ ID NO: 801067 - RNA, 19 nt, Artificial Sequence
  Description of Artificial Sequence: Synthetic oligonucleotide
  Antisense strand to SEQ ID NO: 801066
ucacuuagucagaacacuu

SEQ ID NO: 801068 - RNA, 19 nt, Artificial Sequence
  Description of Artificial Sequence: Synthetic oligonucleotide
  Sense strand starting at position 315 of SEQ ID NO: 587557
cuaagugaaguguacaaau

SEQ ID NO: 801069 - RNA, 19 nt, Artificial Sequence
  Description of Artificial Sequence: Synthetic oligonucleotide
  Antisense strand to SEQ ID NO: 801068
auuuguacacuucacuuag

SEQ ID NO: 801070 - RNA, 19 nt, Artificial Sequence
  Description of Artificial Sequence: Synthetic oligonucleotide
  Sense strand starting at position 481 of SEQ ID NO: 587557
ugauuauguuuaucaggaa

SEQ ID NO: 801071 - RNA, 19 nt, Artificial Sequence
  Description of Artificial Sequence: Synthetic oligonucleotide
  Antisense strand to SEQ ID NO: 801070
uuccugauaaacauaauca

SEQ ID NO: 801072 - RNA, 19 nt, Artificial Sequence
  Description of Artificial Sequence: Synthetic oligonucleotide
  Sense strand starting at position 496 of SEQ ID NO: 587557
ggaaaugcacuuugcuaaa

SEQ ID NO: 801073 - RNA, 19 nt, Artificial Sequence
  Description of Artificial Sequence: Synthetic oligonucleotide
  Antisense strand to SEQ ID NO: 801072
uuuagcaaagugcauuucc

SEQ ID NO: 801074 - RNA, 19 nt, Artificial Sequence
  Description of Artificial Sequence: Synthetic oligonucleotide
  Sense strand starting at position 545 of SEQ ID NO: 587557
cguauuacacaaggaaauu

SEQ ID NO: 801075 - RNA, 19 nt, Artificial Sequence
  Description of Artificial Sequence: Synthetic oligonucleotide
  Antisense strand to SEQ ID NO: 801074
aauuuccuuguguaauacg

SEQ ID NO: 801076 - RNA, 19 nt, Artificial Sequence
  Description of Artificial Sequence: Synthetic oligonucleotide
  Sense strand starting at position 695 of SEQ ID NO: 587557
caggaauacuggcuuaggu

SEQ ID NO: 801077 - RNA, 19 nt, Artificial Sequence
  Description of Artificial Sequence: Synthetic oligonucleotide
  Antisense strand to SEQ ID NO: 801076
accuaagccaguauuccug

SEQ ID NO: 801078 - RNA, 19 nt, Artificial Sequence
  Description of Artificial Sequence: Synthetic oligonucleotide
  Sense strand starting at position 697 of SEQ ID NO: 587557
ggaauacuggcuuagguca

SEQ ID NO: 801079 - RNA, 19 nt, Artificial Sequence
  Description of Artificial Sequence: Synthetic oligonucleotide
  Antisense strand to SEQ ID NO: 801078
ugaccuaagccaguauucc

SEQ ID NO: 801080 - RNA, 19 nt, Artificial Sequence
  Description of Artificial Sequence: Synthetic oligonucleotide
  Sense strand starting at position 2470 of SEQ ID NO: 587557
gagaaucccugccuggaga

SEQ ID NO: 801081 - RNA, 19 nt, Artificial Sequence
  Description of Artificial Sequence: Synthetic oligonucleotide
  Antisense strand to SEQ ID NO: 801080
ucuccaggcagggauucuc

SEQ ID NO: 801082 - RNA, 19 nt, Artificial Sequence
  Description of Artificial Sequence: Synthetic oligonucleotide
  Sense strand starting at position 2712 of SEQ ID NO: 587557
auuaauaucgccuagauau

SEQ ID NO: 801083 - RNA, 19 nt, Artificial Sequence
  Description of Artificial Sequence: Synthetic oligonucleotide
  Antisense strand to SEQ ID NO: 801082
auaucuaggcgauauuaau

SEQ ID NO: 801084 - RNA, 19 nt, Artificial Sequence
  Description of Artificial Sequence: Synthetic oligonucleotide
  Sense strand starting at position 2764 of SEQ ID NO: 587557
agauauaauugugcagagu

SEQ ID NO: 801085 - RNA, 19 nt, Artificial Sequence
  Description of Artificial Sequence: Synthetic oligonucleotide
  Antisense strand to SEQ ID NO: 801084
acucugcacaauuauaucu

SEQ ID NO: 801086 - RNA, 19 nt, Artificial Sequence
  Description of Artificial Sequence: Synthetic oligonucleotide
  Sense strand starting at position 2765 of SEQ ID NO: 587557
gauauaauugugcagagug

SEQ ID NO: 801087 - RNA, 19 nt, Artificial Sequence
  Description of Artificial Sequence: Synthetic oligonucleotide
  Antisense strand to SEQ ID NO: 801086
cacucugcacaauuauauc

SEQ ID NO: 801088 - RNA, 19 nt, Artificial Sequence
  Description of Artificial Sequence: Synthetic oligonucleotide
  Sense strand starting at position 2821 of SEQ ID NO: 587557
gcauuuauuuaaugaagac

SEQ ID NO: 801089 - RNA, 19 nt, Artificial Sequence
  Description of Artificial Sequence: Synthetic oligonucleotide
  Antisense strand to SEQ ID NO: 801088
gucuucauuaaauaaaugc

SEQ ID NO: 801090 - RNA, 19 nt, Artificial Sequence
  Description of Artificial Sequence: Synthetic oligonucleotide
  Sense strand starting at position 2872 of SEQ ID NO: 587557
cagaauauauugguuaguu

SEQ ID NO: 801091 - RNA, 19 nt, Artificial Sequence
  Description of Artificial Sequence: Synthetic oligonucleotide
  Antisense strand to SEQ ID NO: 801090
aacuaaccaauauauucug

SEQ ID NO: 801092 - RNA, 19 nt, Artificial Sequence
  Description of Artificial Sequence: Synthetic oligonucleotide
  Sense strand starting at position 2900 of SEQ ID NO: 587557
uagugaugaagaggauguu

SEQ ID NO: 801093 - RNA, 19 nt, Artificial Sequence
  Description of Artificial Sequence: Synthetic oligonucleotide
  Antisense strand to SEQ ID NO: 801092
aacauccucuucaucacua

SEQ ID NO: 801094 - RNA, 19 nt, Artificial Sequence
  Description of Artificial Sequence: Synthetic oligonucleotide
  Sense strand starting at position 2983 of SEQ ID NO: 587557
cucguuugugcuucuuaac

SEQ ID NO: 801095 - RNA, 19 nt, Artificial Sequence
  Description of Artificial Sequence: Synthetic oligonucleotide
  Antisense strand to SEQ ID NO: 801094
guuaagaagcacaaacgag

SEQ ID NO: 801096 - RNA, 19 nt, Artificial Sequence
  Description of Artificial Sequence: Synthetic oligonucleotide
  Sense strand starting at position 2995 of SEQ ID NO: 587557
ucuuaacagccuuagagau

SEQ ID NO: 801097 - RNA, 19 nt, Artificial Sequence
  Description of Artificial Sequence: Synthetic oligonucleotide
  Antisense strand to SEQ ID NO: 801096
aucucuaaggcuguuaaga

SEQ ID NO: 801098 - RNA, 19 nt, Artificial Sequence
  Description of Artificial Sequence: Synthetic oligonucleotide
  Sense strand starting at position 3008 of SEQ ID NO: 587557
agagauucuugagccugga

SEQ ID NO: 801099 - RNA, 19 nt, Artificial Sequence
  Description of Artificial Sequence: Synthetic oligonucleotide
  Antisense strand to SEQ ID NO: 801098
uccaggcucaagaaucucu

SEQ ID NO: 801100 - RNA, 19 nt, Artificial Sequence
  Description of Artificial Sequence: Synthetic oligonucleotide
  Sense strand starting at position 3100 of SEQ ID NO: 587557
gguauccacuguuuaagaa

SEQ ID NO: 801101 - RNA, 19 nt, Artificial Sequence
  Description of Artificial Sequence: Synthetic oligonucleotide
  Antisense strand to SEQ ID NO: 801100
uucuuaaacaguggauacc

SEQ ID NO: 801102 - RNA, 19 nt, Artificial Sequence
  Description of Artificial Sequence: Synthetic oligonucleotide
  Sense strand starting at position 3101 of SEQ ID NO: 587557
guauccacuguuuaagaaa

SEQ ID NO: 801103 - RNA, 19 nt, Artificial Sequence
  Description of Artificial Sequence: Synthetic oligonucleotide
  Antisense strand to SEQ ID NO: 801102
uuucuuaaacaguggauac

SEQ ID NO: 801104 - RNA, 19 nt, Artificial Sequence
  Description of Artificial Sequence: Synthetic oligonucleotide
  Sense strand starting at position 3126 of SEQ ID NO: 587557
agagguuugcaaggaggaa

SEQ ID NO: 801105 - RNA, 19 nt, Artificial Sequence
  Description of Artificial Sequence: Synthetic oligonucleotide
  Antisense strand to SEQ ID NO: 801104
uuccuccuugcaaaccucu

SEQ ID NO: 801106 - RNA, 19 nt, Artificial Sequence
  Description of Artificial Sequence: Synthetic oligonucleotide
  Sense strand starting at position 3295 of SEQ ID NO: 587557
ccaucuucugaaugggacu

SEQ ID NO: 801107 - RNA, 19 nt, Artificial Sequence
  Description of Artificial Sequence: Synthetic oligonucleotide
  Antisense strand to SEQ ID NO: 801106
agucccauucagaagaugg

SEQ ID NO: 801108 - RNA, 19 nt, Artificial Sequence
  Description of Artificial Sequence: Synthetic oligonucleotide
  Sense strand starting at position 3334 of SEQ ID NO: 587557
uucuauauucgguaauaac

SEQ ID NO: 801109 - RNA, 19 nt, Artificial Sequence
  Description of Artificial Sequence: Synthetic oligonucleotide
  Antisense strand to SEQ ID NO: 801108
guuauuaccgaauauagaa

SEQ ID NO: 801110 - RNA, 19 nt, Artificial Sequence
  Description of Artificial Sequence: Synthetic oligonucleotide
  Sense strand starting at position 3342 of SEQ ID NO: 587557
ucgguaauaacugaguaua

SEQ ID NO: 801111 - RNA, 19 nt, Artificial Sequence
  Description of Artificial Sequence: Synthetic oligonucleotide
  Antisense strand to SEQ ID NO: 801110
uauacucaguuauuaccga

SEQ ID NO: 801112 - RNA, 19 nt, Artificial Sequence
  Description of Artificial Sequence: Synthetic oligonucleotide
  Sense strand starting at position 3344 of SEQ ID NO: 587557
gguaauaacugaguauauu

SEQ ID NO: 801113 - RNA, 19 nt, Artificial Sequence
  Description of Artificial Sequence: Synthetic oligonucleotide
  Antisense strand to SEQ ID NO: 801112
aauauacucaguuauuacc

SEQ ID NO: 801114 - RNA, 19 nt, Artificial Sequence
  Description of Artificial Sequence: Synthetic oligonucleotide
  Sense strand starting at position 3390 of SEQ ID NO: 587557
gagauuugguaauaggcaa

SEQ ID NO: 801115 - RNA, 19 nt, Artificial Sequence
  Description of Artificial Sequence: Synthetic oligonucleotide
  Antisense strand to SEQ ID NO: 801114
uugccuauuaccaaaucuc

SEQ ID NO: 801116 - RNA, 19 nt, Artificial Sequence
  Description of Artificial Sequence: Synthetic oligonucleotide
  Sense strand starting at position 3474 of SEQ ID NO: 587557
gggagaaacuucucccacu

SEQ ID NO: 801117 - RNA, 19 nt, Artificial Sequence
  Description of Artificial Sequence: Synthetic oligonucleotide
  Antisense strand to SEQ ID NO: 801116
agugggagaaguuucuccc

SEQ ID NO: 801118 - RNA, 19 nt, Artificial Sequence
  Description of Artificial Sequence: Synthetic oligonucleotide
  Sense strand starting at position 3475 of SEQ ID NO: 587557
ggagaaacuucucccacuu

SEQ ID NO: 801119 - RNA, 19 nt, Artificial Sequence
  Description of Artificial Sequence: Synthetic oligonucleotide
  Antisense strand to SEQ ID NO: 801118
aagugggagaaguuucucc

SEQ ID NO: 801120 - RNA, 19 nt, Artificial Sequence
  Description of Artificial Sequence: Synthetic oligonucleotide
  Sense strand starting at position 3580 of SEQ ID NO: 587557
ugacuaugcgagcaucaga

SEQ ID NO: 801121 - RNA, 19 nt, Artificial Sequence
  Description of Artificial Sequence: Synthetic oligonucleotide
  Antisense strand to SEQ ID NO: 801120
ucugaugcucgcauaguca

SEQ ID NO: 801122 - RNA, 19 nt, Artificial Sequence
  Description of Artificial Sequence: Synthetic oligonucleotide
  Sense strand starting at position 3608 of SEQ ID NO: 587557
agguucucucacuaaguau

SEQ ID NO: 801123 - RNA, 19 nt, Artificial Sequence
  Description of Artificial Sequence: Synthetic oligonucleotide
  Antisense strand to SEQ ID NO: 801122
auacuuagugagagaaccu

SEQ ID NO: 801124 - RNA, 19 nt, Artificial Sequence
  Description of Artificial Sequence: Synthetic oligonucleotide
  Sense strand starting at position 3619 of SEQ ID NO: 587557
cuaaguauuugauaaucag

SEQ ID NO: 801125 - RNA, 19 nt, Artificial Sequence
  Description of Artificial Sequence: Synthetic oligonucleotide
  Antisense strand to SEQ ID NO: 801124
cugauuaucaaauacuuag

SEQ ID NO: 801126 - RNA, 19 nt, Artificial Sequence
  Description of Artificial Sequence: Synthetic oligonucleotide
  Sense strand starting at position 3643 of SEQ ID NO: 587557
gauauaaggacagguguca

SEQ ID NO: 801127 - RNA, 19 nt, Artificial Sequence
  Description of Artificial Sequence: Synthetic oligonucleotide
  Antisense strand to SEQ ID NO: 801126
ugacaccuguccuuauauc

SEQ ID NO: 801128 - RNA, 19 nt, Artificial Sequence
  Description of Artificial Sequence: Synthetic oligonucleotide
  Sense strand starting at position 3757 of SEQ ID NO: 587557
cuacuuaucuggcugaaag

SEQ ID NO: 801129 - RNA, 19 nt, Artificial Sequence
  Description of Artificial Sequence: Synthetic oligonucleotide
  Antisense strand to SEQ ID NO: 801128
cuuucagccagauaaguag

SEQ ID NO: 801130 - RNA, 19 nt, Artificial Sequence
  Description of Artificial Sequence: Synthetic oligonucleotide
  Sense strand starting at position 3791 of SEQ ID NO: 587557
ucaguuuaugcagaaccaa

SEQ ID NO: 801131 - RNA, 19 nt, Artificial Sequence
  Description of Artificial Sequence: Synthetic oligonucleotide
  Antisense strand to SEQ ID NO: 801130
uugguucugcauaaacuga

SEQ ID NO: 801132 - RNA, 19 nt, Artificial Sequence
  Description of Artificial Sequence: Synthetic oligonucleotide
  Sense strand starting at position 3853 of SEQ ID NO: 587557
cagaguugccaggaauagu

SEQ ID NO: 801133 - RNA, 19 nt, Artificial Sequence
  Description of Artificial Sequence: Synthetic oligonucleotide
  Antisense strand to SEQ ID NO: 801132
acuauuccuggcaacucug

SEQ ID NO: 801134 - RNA, 19 nt, Artificial Sequence
  Description of Artificial Sequence: Synthetic oligonucleotide
  Sense strand starting at position 3863 of SEQ ID NO: 587557
aggaauagugcuuacccua

SEQ ID NO: 801135 - RNA, 19 nt, Artificial Sequence
  Description of Artificial Sequence: Synthetic oligonucleotide
  Antisense strand to SEQ ID NO: 801134
uaggguaagcacuauuccu

SEQ ID NO: 801136 - RNA, 19 nt, Artificial Sequence
  Description of Artificial Sequence: Synthetic oligonucleotide
  Sense strand starting at position 3876 of SEQ ID NO: 587557
acccuaguggccugaaaua

SEQ ID NO: 801137 - RNA, 19 nt, Artificial Sequence
  Description of Artificial Sequence: Synthetic oligonucleotide
  Antisense strand to SEQ ID NO: 801136
uauuucaggccacuagggu

SEQ ID NO: 801138 - RNA, 19 nt, Artificial Sequence
  Description of Artificial Sequence: Synthetic oligonucleotide
  Sense strand starting at position 112 of SEQ ID NO: 587558
gccagcaguacuugaggau

SEQ ID NO: 801139 - RNA, 19 nt, Artificial Sequence
  Description of Artificial Sequence: Synthetic oligonucleotide
  Antisense strand to SEQ ID NO: 801138
auccucaaguacugcuggc

SEQ ID NO: 801140 - RNA, 19 nt, Artificial Sequence
  Description of Artificial Sequence: Synthetic oligonucleotide
  Sense strand starting at position 457 of SEQ ID NO: 587558
cacagugagcuaugugcau

SEQ ID NO: 801141 - RNA, 19 nt, Artificial Sequence
  Description of Artificial Sequence: Synthetic oligonucleotide
  Antisense strand to SEQ ID NO: 801140
augcacauagcucacugug

SEQ ID NO: 801142 - RNA, 19 nt, Artificial Sequence
  Description of Artificial Sequence: Synthetic oligonucleotide
  Sense strand starting at position 461 of SEQ ID NO: 587558
gugagcuaugugcaucuca

SEQ ID NO: 801143 - RNA, 19 nt, Artificial Sequence
  Description of Artificial Sequence: Synthetic oligonucleotide
  Antisense strand to SEQ ID NO: 801142
ugagaugcacauagcucac

SEQ ID NO: 801144 - RNA, 19 nt, Artificial Sequence
  Description of Artificial Sequence: Synthetic oligonucleotide
  Sense strand starting at position 532 of SEQ ID NO: 587558
auaugaacccgcuguagaa

SEQ ID NO: 801145 - RNA, 19 nt, Artificial Sequence
  Description of Artificial Sequence: Synthetic oligonucleotide
  Antisense strand to SEQ ID NO: 801144
uucuacagcggguucauau

SEQ ID NO: 801146 - RNA, 19 nt, Artificial Sequence
  Description of Artificial Sequence: Synthetic oligonucleotide
  Sense strand starting at position 578 of SEQ ID NO: 587558
guagcuuaugagggacuaa

SEQ ID NO: 801147 - RNA, 19 nt, Artificial Sequence
  Description of Artificial Sequence: Synthetic oligonucleotide
  Antisense strand to SEQ ID NO: 801146
uuagucccucauaagcuac

SEQ ID NO: 801148 - RNA, 19 nt, Artificial Sequence
  Description of Artificial Sequence: Synthetic oligonucleotide
  Sense strand starting at position 763 of SEQ ID NO: 587558
uggucuugcaagugggaca

SEQ ID NO: 801149 - RNA, 19 nt, Artificial Sequence
  Description of Artificial Sequence: Synthetic oligonucleotide
  Antisense strand to SEQ ID NO: 801148
ugucccacuugcaagacca

SEQ ID NO: 801150 - RNA, 19 nt, Artificial Sequence
  Description of Artificial Sequence: Synthetic oligonucleotide
  Sense strand starting at position 783 of SEQ ID NO: 587558
caguguguucugccaguuu

SEQ ID NO: 801151 - RNA, 19 nt, Artificial Sequence
  Description of Artificial Sequence: Synthetic oligonucleotide
  Antisense strand to SEQ ID NO: 801150
aaacuggcagaacacacug

SEQ ID NO: 801152 - RNA, 19 nt, Artificial Sequence
  Description of Artificial Sequence: Synthetic oligonucleotide
  Sense strand starting at position 787 of SEQ ID NO: 587558
guguucugccaguuugugu

SEQ ID NO: 801153 - RNA, 19 nt, Artificial Sequence
  Description of Artificial Sequence: Synthetic oligonucleotide
  Antisense strand to SEQ ID NO: 801152
acacaaacuggcagaacac

SEQ ID NO: 801154 - RNA, 19 nt, Artificial Sequence
  Description of Artificial Sequence: Synthetic oligonucleotide
  Sense strand starting at position 1017 of SEQ ID NO: 587558
cgggaugaaacgugcaauu

SEQ ID NO: 801155 - RNA, 19 nt, Artificial Sequence
  Description of Artificial Sequence: Synthetic oligonucleotide
  Antisense strand to SEQ ID NO: 801154
aauugcacguuucaucccg

SEQ ID NO: 801156 - RNA, 19 nt, Artificial Sequence
  Description of Artificial Sequence: Synthetic oligonucleotide
  Sense strand starting at position 1019 of SEQ ID NO: 587558
ggaugaaacgugcaauucu

SEQ ID NO: 801157 - RNA, 19 nt, Artificial Sequence
  Description of Artificial Sequence: Synthetic oligonucleotide
  Antisense strand to SEQ ID NO: 801156
agaauugcacguuucaucc

SEQ ID NO: 801158 - RNA, 19 nt, Artificial Sequence
  Description of Artificial Sequence: Synthetic oligonucleotide
  Sense strand starting at position 1483 of SEQ ID NO: 587558
cccguuuguggguagaaau

SEQ ID NO: 801159 - RNA, 19 nt, Artificial Sequence
  Description of Artificial Sequence: Synthetic oligonucleotide
  Antisense strand to SEQ ID NO: 801158
auuucuacccacaaacggg

SEQ ID NO: 801160 - RNA, 19 nt, Artificial Sequence
  Description of Artificial Sequence: Synthetic oligonucleotide
  Sense strand starting at position 2564 of SEQ ID NO: 587558
gugcgacuuaagugaguau

SEQ ID NO: 801161 - RNA, 19 nt, Artificial Sequence
  Description of Artificial Sequence: Synthetic oligonucleotide
  Antisense strand to SEQ ID NO: 801160
auacucacuuaagucgcac

SEQ ID NO: 801162 - RNA, 19 nt, Artificial Sequence
  Description of Artificial Sequence: Synthetic oligonucleotide
  Sense strand starting at position 2567 of SEQ ID NO: 587558
cgacuuaagugaguaugga

SEQ ID NO: 801163 - RNA, 19 nt, Artificial Sequence
  Description of Artificial Sequence: Synthetic oligonucleotide
  Antisense strand to SEQ ID NO: 801162
uccauacucacuuaagucg

SEQ ID NO: 801164 - RNA, 19 nt, Artificial Sequence
  Description of Artificial Sequence: Synthetic oligonucleotide
  Sense strand starting at position 2576 of SEQ ID NO: 587558
ugaguauggaccugaguug

SEQ ID NO: 801165 - RNA, 19 nt, Artificial Sequence
  Description of Artificial Sequence: Synthetic oligonucleotide
  Antisense strand to SEQ ID NO: 801164
caacucagguccauacuca

SEQ ID NO: 801166 - RNA, 19 nt, Artificial Sequence
  Description of Artificial Sequence: Synthetic oligonucleotide
  Sense strand starting at position 2597 of SEQ ID NO: 587558
gcuguaaugaguugaggcu

SEQ ID NO: 801167 - RNA, 19 nt, Artificial Sequence
  Description of Artificial Sequence: Synthetic oligonucleotide
  Antisense strand to SEQ ID NO: 801166
agccucaacucauuacagc

SEQ ID NO: 801168 - RNA, 19 nt, Artificial Sequence
  Description of Artificial Sequence: Synthetic oligonucleotide
  Sense strand starting at position 2648 of SEQ ID NO: 587558
gcccaugggaccuaugcaa

SEQ ID NO: 801169 - RNA, 19 nt, Artificial Sequence
  Description of Artificial Sequence: Synthetic oligonucleotide
  Antisense strand to SEQ ID NO: 801168
uugcauaggucccaugggc

SEQ ID NO: 801170 - RNA, 19 nt, Artificial Sequence
  Description of Artificial Sequence: Synthetic oligonucleotide
  Sense strand starting at position 2740 of SEQ ID NO: 587558
aggucuugugaauacauua

SEQ ID NO: 801171 - RNA, 19 nt, Artificial Sequence
  Description of Artificial Sequence: Synthetic oligonucleotide
  Antisense strand to SEQ ID NO: 801170
uaauguauucacaagaccu

SEQ ID NO: 801172 - RNA, 19 nt, Artificial Sequence
  Description of Artificial Sequence: Synthetic oligonucleotide
  Sense strand starting at position 2777 of SEQ ID NO: 587558
cugcaaaugcaaugaaguu

SEQ ID NO: 801173 - RNA, 19 nt, Artificial Sequence
  Description of Artificial Sequence: Synthetic oligonucleotide
  Antisense strand to SEQ ID NO: 801172
aacuucauugcauuugcag

SEQ ID NO: 801174 - RNA, 19 nt, Artificial Sequence
  Description of Artificial Sequence: Synthetic oligonucleotide
  Sense strand starting at position 2791 of SEQ ID NO: 587558
aaguuaagauucuuuaggu

SEQ ID NO: 801175 - RNA, 19 nt, Artificial Sequence
  Description of Artificial Sequence: Synthetic oligonucleotide
  Antisense strand to SEQ ID NO: 801174
accuaaagaaucuuaacuu

SEQ ID NO: 801176 - RNA, 19 nt, Artificial Sequence
  Description of Artificial Sequence: Synthetic oligonucleotide
  Sense strand starting at position 2792 of SEQ ID NO: 587558
aguuaagauucuuuaggug

SEQ ID NO: 801177 - RNA, 19 nt, Artificial Sequence
  Description of Artificial Sequence: Synthetic oligonucleotide
  Antisense strand to SEQ ID NO: 801176
caccuaaagaaucuuaacu

SEQ ID NO: 801178 - RNA, 19 nt, Artificial Sequence
  Description of Artificial Sequence: Synthetic oligonucleotide
  Sense strand starting at position 2797 of SEQ ID NO: 587558
agauucuuuagguggagag

SEQ ID NO: 801179 - RNA, 19 nt, Artificial Sequence
  Description of Artificial Sequence: Synthetic oligonucleotide
  Antisense strand to SEQ ID NO: 801178
cucuccaccuaaagaaucu

SEQ ID NO: 801180 - RNA, 19 nt, Artificial Sequence
  Description of Artificial Sequence: Synthetic oligonucleotide
  Sense strand starting at position 2798 of SEQ ID NO: 587558
gauucuuuagguggagaga

SEQ ID NO: 801181 - RNA, 19 nt, Artificial Sequence
  Description of Artificial Sequence: Synthetic oligonucleotide
  Antisense strand to SEQ ID NO: 801180
ucucuccaccuaaagaauc

SEQ ID NO: 801182 - RNA, 19 nt, Artificial Sequence
  Description of Artificial Sequence: Synthetic oligonucleotide
  Sense strand starting at position 2817 of SEQ ID NO: 587558
uucuuauguuuaucagggu

SEQ ID NO: 801183 - RNA, 19 nt, Artificial Sequence
  Description of Artificial Sequence: Synthetic oligonucleotide
  Antisense strand to SEQ ID NO: 801182
acccugauaaacauaagaa

SEQ ID NO: 801184 - RNA, 19 nt, Artificial Sequence
  Description of Artificial Sequence: Synthetic oligonucleotide
  Sense strand starting at position 2886 of SEQ ID NO: 587558
acuucucaaggaugcuaaa

SEQ ID NO: 801185 - RNA, 19 nt, Artificial Sequence
  Description of Artificial Sequence: Synthetic oligonucleotide
  Antisense strand to SEQ ID NO: 801184
uuuagcauccuugagaagu

SEQ ID NO: 801186 - RNA, 19 nt, Artificial Sequence
  Description of Artificial Sequence: Synthetic oligonucleotide
  Sense strand starting at position 2959 of SEQ ID NO: 587558
acacacaucuucccguaua

SEQ ID NO: 801187 - RNA, 19 nt, Artificial Sequence
  Description of Artificial Sequence: Synthetic oligonucleotide
  Antisense strand to SEQ ID NO: 801186
uauacgggaagaugugugu

SEQ ID NO: 801188 - RNA, 19 nt, Artificial Sequence
  Description of Artificial Sequence: Synthetic oligonucleotide
  Sense strand starting at position 2962 of SEQ ID NO: 587558
cacaucuucccguauacgu

SEQ ID NO: 801189 - RNA, 19 nt, Artificial Sequence
  Description of Artificial Sequence: Synthetic oligonucleotide
  Antisense strand to SEQ ID NO: 801188
acguauacgggaagaugug

SEQ ID NO: 801190 - RNA, 19 nt, Artificial Sequence
  Description of Artificial Sequence: Synthetic oligonucleotide
  Sense strand starting at position 2964 of SEQ ID NO: 587558
caucuucccguauacguua

SEQ ID NO: 801191 - RNA, 19 nt, Artificial Sequence
  Description of Artificial Sequence: Synthetic oligonucleotide
  Antisense strand to SEQ ID NO: 801190
uaacguauacgggaagaug

SEQ ID NO: 801192 - RNA, 19 nt, Artificial Sequence
  Description of Artificial Sequence: Synthetic oligonucleotide
  Sense strand starting at position 2969 of SEQ ID NO: 587558
ucccguauacguuaaguca

SEQ ID NO: 801193 - RNA, 19 nt, Artificial Sequence
  Description of Artificial Sequence: Synthetic oligonucleotide
  Antisense strand to SEQ ID NO: 801192
ugacuuaacguauacggga

SEQ ID NO: 801194 - RNA, 19 nt, Artificial Sequence
  Description of Artificial Sequence: Synthetic oligonucleotide
  Sense strand starting at position 3029 of SEQ ID NO: 587558
uguagauaguuguuauaca

SEQ ID NO: 801195 - RNA, 19 nt, Artificial Sequence
  Description of Artificial Sequence: Synthetic oligonucleotide
  Antisense strand to SEQ ID NO: 801194
uguauaacaacuaucuaca

SEQ ID NO: 801196 - RNA, 19 nt, Artificial Sequence
  Description of Artificial Sequence: Synthetic oligonucleotide
  Sense strand starting at position 3057 of SEQ ID NO: 587558
agggaauagugacaagaga

SEQ ID NO: 801197 - RNA, 19 nt, Artificial Sequence
  Description of Artificial Sequence: Synthetic oligonucleotide
  Antisense strand to SEQ ID NO: 801196
ucucuugucacuauucccu

SEQ ID NO: 801198 - RNA, 19 nt, Artificial Sequence
  Description of Artificial Sequence: Synthetic oligonucleotide
  Sense strand starting at position 3113 of SEQ ID NO: 587558
uccgaauuguuuguauccu

SEQ ID NO: 801199 - RNA, 19 nt, Artificial Sequence
  Description of Artificial Sequence: Synthetic oligonucleotide
  Antisense strand to SEQ ID NO: 801198
aggauacaaacaauucgga

SEQ ID NO: 801200 - RNA, 19 nt, Artificial Sequence
  Description of Artificial Sequence: Synthetic oligonucleotide
  Sense strand starting at position 3337 of SEQ ID NO: 587558
gcuucuaguggcugggaga

SEQ ID NO: 801201 - RNA, 19 nt, Artificial Sequence
  Description of Artificial Sequence: Synthetic oligonucleotide
  Antisense strand to SEQ ID NO: 801200
ucucccagccacuagaagc

SEQ ID NO: 801202 - RNA, 19 nt, Artificial Sequence
  Description of Artificial Sequence: Synthetic oligonucleotide
  Sense strand starting at position 3411 of SEQ ID NO: 587558
ccuugaucuuagcccauga

SEQ ID NO: 801203 - RNA, 19 nt, Artificial Sequence
  Description of Artificial Sequence: Synthetic oligonucleotide
  Antisense strand to SEQ ID NO: 801202
ucaugggcuaagaucaagg

SEQ ID NO: 801204 - RNA, 19 nt, Artificial Sequence
  Description of Artificial Sequence: Synthetic oligonucleotide
  Sense strand starting at position 3413 of SEQ ID NO: 587558
uugaucuuagcccaugaca

SEQ ID NO: 801205 - RNA, 19 nt, Artificial Sequence
  Description of Artificial Sequence: Synthetic oligonucleotide
  Antisense strand to SEQ ID NO: 801204
ugucaugggcuaagaucaa

SEQ ID NO: 801206 - RNA, 19 nt, Artificial Sequence
  Description of Artificial Sequence: Synthetic oligonucleotide
  Sense strand starting at position 3488 of SEQ ID NO: 587558
uuuggaucaccacguuuau

SEQ ID NO: 801207 - RNA, 19 nt, Artificial Sequence
  Description of Artificial Sequence: Synthetic oligonucleotide
  Antisense strand to SEQ ID NO: 801206
auaaacguggugauccaaa

SEQ ID NO: 801208 - RNA, 19 nt, Artificial Sequence
  Description of Artificial Sequence: Synthetic oligonucleotide
  Sense strand starting at position 3505 of SEQ ID NO: 587558
augguaauuuguuaggaca

SEQ ID NO: 801209 - RNA, 19 nt, Artificial Sequence
  Description of Artificial Sequence: Synthetic oligonucleotide
  Antisense strand to SEQ ID NO: 801208
uguccuaacaaauuaccau

SEQ ID NO: 801210 - RNA, 19 nt, Artificial Sequence
  Description of Artificial Sequence: Synthetic oligonucleotide
  Sense strand starting at position 3508 of SEQ ID NO: 587558
guaauuuguuaggacagca

SEQ ID NO: 801211 - RNA, 19 nt, Artificial Sequence
  Description of Artificial Sequence: Synthetic oligonucleotide
  Antisense strand to SEQ ID NO: 801210
ugcuguccuaacaaauuac

SEQ ID NO: 801212 - RNA, 19 nt, Artificial Sequence
  Description of Artificial Sequence: Synthetic oligonucleotide
  Sense strand starting at position 3513 of SEQ ID NO: 587558
uuguuaggacagcaauaau

SEQ ID NO: 801213 - RNA, 19 nt, Artificial Sequence
  Description of Artificial Sequence: Synthetic oligonucleotide
  Antisense strand to SEQ ID NO: 801212
auuauugcuguccuaacaa

SEQ ID NO: 801214 - RNA, 19 nt, Artificial Sequence
  Description of Artificial Sequence: Synthetic oligonucleotide
  Sense strand starting at position 3776 of SEQ ID NO: 587558
gcucguggacucaagcgau

SEQ ID NO: 801215 - RNA, 19 nt, Artificial Sequence
  Description of Artificial Sequence: Synthetic oligonucleotide
  Antisense strand to SEQ ID NO: 801214
aucgcuugaguccacgagc

SEQ ID NO: 801216 - RNA, 19 nt, Artificial Sequence
  Description of Artificial Sequence: Synthetic oligonucleotide
  Sense strand starting at position 3842 of SEQ ID NO: 587558
auccuuagguccguuguua

SEQ ID NO: 801217 - RNA, 19 nt, Artificial Sequence
  Description of Artificial Sequence: Synthetic oligonucleotide
  Antisense strand to SEQ ID NO: 801216
uaacaacggaccuaaggau

SEQ ID NO: 801218 - RNA, 19 nt, Artificial Sequence
  Description of Artificial Sequence: Synthetic oligonucleotide
  Sense strand starting at position 59 of SEQ ID NO: 587559
ucaaacugcguguaaguaa

SEQ ID NO: 801219 - RNA, 19 nt, Artificial Sequence
  Description of Artificial Sequence: Synthetic oligonucleotide
  Antisense strand to SEQ ID NO: 801218
uuacuuacacgcaguuuga

SEQ ID NO: 801220 - RNA, 19 nt, Artificial Sequence
  Description of Artificial Sequence: Synthetic oligonucleotide
  Sense strand starting at position 174 of SEQ ID NO: 587559
uggcuacuuguaggacuaa

SEQ ID NO: 801221 - RNA, 19 nt, Artificial Sequence
  Description of Artificial Sequence: Synthetic oligonucleotide
  Antisense strand to SEQ ID NO: 801220
uuaguccuacaaguagcca

SEQ ID NO: 801222 - RNA, 19 nt, Artificial Sequence
  Description of Artificial Sequence: Synthetic oligonucleotide
  Sense strand starting at position 223 of SEQ ID NO: 587559
caagauugcuguccugaaa

SEQ ID NO: 801223 - RNA, 19 nt, Artificial Sequence
  Description of Artificial Sequence: Synthetic oligonucleotide
  Antisense strand to SEQ ID NO: 801222
uuucaggacagcaaucuug

SEQ ID NO: 801224 - RNA, 19 nt, Artificial Sequence
  Description of Artificial Sequence: Synthetic oligonucleotide
  Sense strand starting at position 226 of SEQ ID NO: 587559
gauugcuguccugaaacga

SEQ ID NO: 801225 - RNA, 19 nt, Artificial Sequence
  Description of Artificial Sequence: Synthetic oligonucleotide
  Antisense strand to SEQ ID NO: 801224
ucguuucaggacagcaauc

SEQ ID NO: 801226 - RNA, 19 nt, Artificial Sequence
  Description of Artificial Sequence: Synthetic oligonucleotide
  Sense strand starting at position 269 of SEQ ID NO: 587559
uguacugucucucugaauc

SEQ ID NO: 801227 - RNA, 19 nt, Artificial Sequence
  Description of Artificial Sequence: Synthetic oligonucleotide
  Antisense strand to SEQ ID NO: 801226
gauucagagagacaguaca

SEQ ID NO: 801228 - RNA, 19 nt, Artificial Sequence
  Description of Artificial Sequence: Synthetic oligonucleotide
  Sense strand starting at position 327 of SEQ ID NO: 587559
cuuguuuaaucacuaaagu

SEQ ID NO: 801229 - RNA, 19 nt, Artificial Sequence
  Description of Artificial Sequence: Synthetic oligonucleotide
  Antisense strand to SEQ ID NO: 801228
acuuuagugauuaaacaag

SEQ ID NO: 801230 - RNA, 19 nt, Artificial Sequence
  Description of Artificial Sequence: Synthetic oligonucleotide
  Sense strand starting at position 414 of SEQ ID NO: 587559
gcucucauucuggagauca

SEQ ID NO: 801231 - RNA, 19 nt, Artificial Sequence
  Description of Artificial Sequence: Synthetic oligonucleotide
  Antisense strand to SEQ ID NO: 801230
ugaucuccagaaugagagc

SEQ ID NO: 801232 - RNA, 19 nt, Artificial Sequence
  Description of Artificial Sequence: Synthetic oligonucleotide
  Sense strand starting at position 425 of SEQ ID NO: 587559
ggagaucauuugcauuaca

SEQ ID NO: 801233 - RNA, 19 nt, Artificial Sequence
  Description of Artificial Sequence: Synthetic oligonucleotide
  Antisense strand to SEQ ID NO: 801232
uguaaugcaaaugaucucc

SEQ ID NO: 801234 - RNA, 19 nt, Artificial Sequence
  Description of Artificial Sequence: Synthetic oligonucleotide
  Sense strand starting at position 477 of SEQ ID NO: 587559
caacuauucuugguaguga

SEQ ID NO: 801235 - RNA, 19 nt, Artificial Sequence
  Description of Artificial Sequence: Synthetic oligonucleotide
  Antisense strand to SEQ ID NO: 801234
ucacuaccaagaauaguug

SEQ ID NO: 801236 - RNA, 19 nt, Artificial Sequence
  Description of Artificial Sequence: Synthetic oligonucleotide
  Sense strand starting at position 542 of SEQ ID NO: 587559
acuauuaacucugauagga

SEQ ID NO: 801237 - RNA, 19 nt, Artificial Sequence
  Description of Artificial Sequence: Synthetic oligonucleotide
  Antisense strand to SEQ ID NO: 801236
uccuaucagaguuaauagu

SEQ ID NO: 801238 - RNA, 19 nt, Artificial Sequence
  Description of Artificial Sequence: Synthetic oligonucleotide
  Sense strand starting at position 685 of SEQ ID NO: 587559
agaguaucauuacuccaag

SEQ ID NO: 801239 - RNA, 19 nt, Artificial Sequence
  Description of Artificial Sequence: Synthetic oligonucleotide
  Antisense strand to SEQ ID NO: 801238
cuuggaguaaugauacucu

SEQ ID NO: 801240 - RNA, 19 nt, Artificial Sequence
  Description of Artificial Sequence: Synthetic oligonucleotide
  Sense strand starting at position 688 of SEQ ID NO: 587559
guaucauuacuccaaguaa

SEQ ID NO: 801241 - RNA, 19 nt, Artificial Sequence
  Description of Artificial Sequence: Synthetic oligonucleotide
  Antisense strand to SEQ ID NO: 801240
uuacuuggaguaaugauac

SEQ ID NO: 801242 - RNA, 19 nt, Artificial Sequence
  Description of Artificial Sequence: Synthetic oligonucleotide
  Sense strand starting at position 745 of SEQ ID NO: 587559
gcuacauccugaguuuaac

SEQ ID NO: 801243 - RNA, 19 nt, Artificial Sequence
  Description of Artificial Sequence: Synthetic oligonucleotide
  Antisense strand to SEQ ID NO: 801242
guuaaacucaggauguagc

SEQ ID NO: 801244 - RNA, 19 nt, Artificial Sequence
  Description of Artificial Sequence: Synthetic oligonucleotide
  Sense strand starting at position 779 of SEQ ID NO: 587559
guccuaauugacuaagcuu

SEQ ID NO: 801245 - RNA, 19 nt, Artificial Sequence
  Description of Artificial Sequence: Synthetic oligonucleotide
  Antisense strand to SEQ ID NO: 801244
aagcuuagucaauuaggac

SEQ ID NO: 801246 - RNA, 19 nt, Artificial Sequence
  Description of Artificial Sequence: Synthetic oligonucleotide
  Sense strand starting at position 841 of SEQ ID NO: 587559
ucgggauugucaucagucu

SEQ ID NO: 801247 - RNA, 19 nt, Artificial Sequence
  Description of Artificial Sequence: Synthetic oligonucleotide
  Antisense strand to SEQ ID NO: 801246
agacugaugacaaucccga

SEQ ID NO: 801248 - RNA, 19 nt, Artificial Sequence
  Description of Artificial Sequence: Synthetic oligonucleotide
  Sense strand starting at position 856 of SEQ ID NO: 587559
gucuccaggucuucggaaa

SEQ ID NO: 801249 - RNA, 19 nt, Artificial Sequence
  Description of Artificial Sequence: Synthetic oligonucleotide
  Antisense strand to SEQ ID NO: 801248
uuuccgaagaccuggagac

SEQ ID NO: 801250 - RNA, 19 nt, Artificial Sequence
  Description of Artificial Sequence: Synthetic oligonucleotide
  Sense strand starting at position 896 of SEQ ID NO: 587559
aucuuaacucccggaaagu

SEQ ID NO: 801251 - RNA, 19 nt, Artificial Sequence
  Description of Artificial Sequence: Synthetic oligonucleotide
  Antisense strand to SEQ ID NO: 801250
acuuuccgggaguuaagau

SEQ ID NO: 801252 - RNA, 19 nt, Artificial Sequence
  Description of Artificial Sequence: Synthetic oligonucleotide
  Sense strand starting at position 897 of SEQ ID NO: 587559
ucuuaacucccggaaagua

SEQ ID NO: 801253 - RNA, 19 nt, Artificial Sequence
  Description of Artificial Sequence: Synthetic oligonucleotide
  Antisense strand to SEQ ID NO: 801252
uacuuuccgggaguuaaga

SEQ ID NO: 801254 - RNA, 19 nt, Artificial Sequence
  Description of Artificial Sequence: Synthetic oligonucleotide
  Sense strand starting at position 1904 of SEQ ID NO: 587559
ggcuacuuaccgggaggaa

SEQ ID NO: 801255 - RNA, 19 nt, Artificial Sequence
  Description of Artificial Sequence: Synthetic oligonucleotide
  Antisense strand to SEQ ID NO: 801254
uuccucccgguaaguagcc

SEQ ID NO: 801256 - RNA, 19 nt, Artificial Sequence
  Description of Artificial Sequence: Synthetic oligonucleotide
  Sense strand starting at position 2324 of SEQ ID NO: 587559
ccgucucacgcguuuaagu

SEQ ID NO: 801257 - RNA, 19 nt, Artificial Sequence
  Description of Artificial Sequence: Synthetic oligonucleotide
  Antisense strand to SEQ ID NO: 801256
acuuaaacgcgugagacgg

SEQ ID NO: 801258 - RNA, 19 nt, Artificial Sequence
  Description of Artificial Sequence: Synthetic oligonucleotide
  Sense strand starting at position 2427 of SEQ ID NO: 587559
uucaguguggcacggaaau

SEQ ID NO: 801259 - RNA, 19 nt, Artificial Sequence
  Description of Artificial Sequence: Synthetic oligonucleotide
  Antisense strand to SEQ ID NO: 801258
auuuccgugccacacugaa

SEQ ID NO: 801260 - RNA, 19 nt, Artificial Sequence
  Description of Artificial Sequence: Synthetic oligonucleotide
  Sense strand starting at position 2476 of SEQ ID NO: 587559
cggcgucuguuuacaguua

SEQ ID NO: 801261 - RNA, 19 nt, Artificial Sequence
  Description of Artificial Sequence: Synthetic oligonucleotide
  Antisense strand to SEQ ID NO: 801260
uaacuguaaacagacgccg

SEQ ID NO: 801262 - RNA, 19 nt, Artificial Sequence
  Description of Artificial Sequence: Synthetic oligonucleotide
  Sense strand starting at position 2625 of SEQ ID NO: 587559
uccugugucggugggaaga

SEQ ID NO: 801263 - RNA, 19 nt, Artificial Sequence
  Description of Artificial Sequence: Synthetic oligonucleotide
  Antisense strand to SEQ ID NO: 801262
ucuucccaccgacacagga

SEQ ID NO: 801264 - RNA, 19 nt, Artificial Sequence
  Description of Artificial Sequence: Synthetic oligonucleotide
  Sense strand starting at position 2730 of SEQ ID NO: 587559
guucuuggagcucacuaga

SEQ ID NO: 801265 - RNA, 19 nt, Artificial Sequence
  Description of Artificial Sequence: Synthetic oligonucleotide
  Antisense strand to SEQ ID NO: 801264
ucuagugagcuccaagaac

SEQ ID NO: 801266 - RNA, 19 nt, Artificial Sequence
  Description of Artificial Sequence: Synthetic oligonucleotide
  Sense strand starting at position 2778 of SEQ ID NO: 587559
ggucgugugacuuggacaa

SEQ ID NO: 801267 - RNA, 19 nt, Artificial Sequence
  Description of Artificial Sequence: Synthetic oligonucleotide
  Antisense strand to SEQ ID NO: 801266
uuguccaagucacacgacc

SEQ ID NO: 801268 - RNA, 19 nt, Artificial Sequence
  Description of Artificial Sequence: Synthetic oligonucleotide
  Sense strand starting at position 2826 of SEQ ID NO: 587559
ugagccugggacugagauu

SEQ ID NO: 801269 - RNA, 19 nt, Artificial Sequence
  Description of Artificial Sequence: Synthetic oligonucleotide
  Antisense strand to SEQ ID NO: 801268
aaucucagucccaggcuca

SEQ ID NO: 801270 - RNA, 19 nt, Artificial Sequence
  Description of Artificial Sequence: Synthetic oligonucleotide
  Sense strand starting at position 2838 of SEQ ID NO: 587559
ugagauuugucuuauucca

SEQ ID NO: 801271 - RNA, 19 nt, Artificial Sequence
  Description of Artificial Sequence: Synthetic oligonucleotide
  Antisense strand to SEQ ID NO: 801270
uggaauaagacaaaucuca

SEQ ID NO: 801272 - RNA, 19 nt, Artificial Sequence
  Description of Artificial Sequence: Synthetic oligonucleotide
  Sense strand starting at position 2883 of SEQ ID NO: 587559
gcggaacucuuguccauac

SEQ ID NO: 801273 - RNA, 19 nt, Artificial Sequence
  Description of Artificial Sequence: Synthetic oligonucleotide
  Antisense strand to SEQ ID NO: 801272
guauggacaagaguuccgc

SEQ ID NO: 801274 - RNA, 19 nt, Artificial Sequence
  Description of Artificial Sequence: Synthetic oligonucleotide
  Sense strand starting at position 2884 of SEQ ID NO: 587559
cggaacucuuguccauacu

SEQ ID NO: 801275 - RNA, 19 nt, Artificial Sequence
  Description of Artificial Sequence: Synthetic oligonucleotide
  Antisense strand to SEQ ID NO: 801274
aguauggacaagaguuccg

SEQ ID NO: 801276 - RNA, 19 nt, Artificial Sequence
  Description of Artificial Sequence: Synthetic oligonucleotide
  Sense strand starting at position 2885 of SEQ ID NO: 587559
ggaacucuuguccauacuu

SEQ ID NO: 801277 - RNA, 19 nt, Artificial Sequence
  Description of Artificial Sequence: Synthetic oligonucleotide
  Antisense strand to SEQ ID NO: 801276
aaguauggacaagaguucc

SEQ ID NO: 801278 - RNA, 19 nt, Artificial Sequence
  Description of Artificial Sequence: Synthetic oligonucleotide
  Sense strand starting at position 3385 of SEQ ID NO: 587559
acacuaaauguuuaaucgu

SEQ ID NO: 801279 - RNA, 19 nt, Artificial Sequence
  Description of Artificial Sequence: Synthetic oligonucleotide
  Antisense strand to SEQ ID NO: 801278
acgauuaaacauuuagugu

SEQ ID NO: 801280 - RNA, 19 nt, Artificial Sequence
  Description of Artificial Sequence: Synthetic oligonucleotide
  Sense strand starting at position 3388 of SEQ ID NO: 587559
cuaaauguuuaaucguuga

SEQ ID NO: 801281 - RNA, 19 nt, Artificial Sequence
  Description of Artificial Sequence: Synthetic oligonucleotide
  Antisense strand to SEQ ID NO: 801280
ucaacgauuaaacauuuag

SEQ ID NO: 801282 - RNA, 19 nt, Artificial Sequence
  Description of Artificial Sequence: Synthetic oligonucleotide
  Sense strand starting at position 3391 of SEQ ID NO: 587559
aauguuuaaucguugacau

SEQ ID NO: 801283 - RNA, 19 nt, Artificial Sequence
  Description of Artificial Sequence: Synthetic oligonucleotide
  Antisense strand to SEQ ID NO: 801282
augucaacgauuaaacauu

SEQ ID NO: 801284 - RNA, 19 nt, Artificial Sequence
  Description of Artificial Sequence: Synthetic oligonucleotide
  Sense strand starting at position 3392 of SEQ ID NO: 587559
auguuuaaucguugacaug

SEQ ID NO: 801285 - RNA, 19 nt, Artificial Sequence
  Description of Artificial Sequence: Synthetic oligonucleotide
  Antisense strand to SEQ ID NO: 801284
caugucaacgauuaaacau

SEQ ID NO: 801286 - RNA, 19 nt, Artificial Sequence
  Description of Artificial Sequence: Synthetic oligonucleotide
  Sense strand starting at position 3570 of SEQ ID NO: 587559
ucugaacuucuguaguagu

SEQ ID NO: 801287 - RNA, 19 nt, Artificial Sequence
  Description of Artificial Sequence: Synthetic oligonucleotide
  Antisense strand to SEQ ID NO: 801286
acuacuacagaaguucaga

SEQ ID NO: 801288 - RNA, 19 nt, Artificial Sequence
  Description of Artificial Sequence: Synthetic oligonucleotide
  Sense strand starting at position 3660 of SEQ ID NO: 587559
acugguaaaugcucuccua

SEQ ID NO: 801289 - RNA, 19 nt, Artificial Sequence
  Description of Artificial Sequence: Synthetic oligonucleotide
  Antisense strand to SEQ ID NO: 801288
uaggagagcauuuaccagu

SEQ ID NO: 801290 - RNA, 19 nt, Artificial Sequence
  Description of Artificial Sequence: Synthetic oligonucleotide
  Sense strand starting at position 3663 of SEQ ID NO: 587559
gguaaaugcucuccuauaa

SEQ ID NO: 801291 - RNA, 19 nt, Artificial Sequence
  Description of Artificial Sequence: Synthetic oligonucleotide
  Antisense strand to SEQ ID NO: 801290
uuauaggagagcauuuacc

SEQ ID NO: 801292 - RNA, 19 nt, Artificial Sequence
  Description of Artificial Sequence: Synthetic oligonucleotide
  Sense strand starting at position 3750 of SEQ ID NO: 587559
aauguugcucgugaaugaa

SEQ ID NO: 801293 - RNA, 19 nt, Artificial Sequence
  Description of Artificial Sequence: Synthetic oligonucleotide
  Antisense strand to SEQ ID NO: 801292
uucauucacgagcaacauu

SEQ ID NO: 801294 - RNA, 19 nt, Artificial Sequence
  Description of Artificial Sequence: Synthetic oligonucleotide
  Sense strand starting at position 3753 of SEQ ID NO: 587559
guugcucgugaaugaacaa

SEQ ID NO: 801295 - RNA, 19 nt, Artificial Sequence
  Description of Artificial Sequence: Synthetic oligonucleotide
  Antisense strand to SEQ ID NO: 801294
uuguucauucacgagcaac

SEQ ID NO: 801296 - RNA, 19 nt, Artificial Sequence
  Description of Artificial Sequence: Synthetic oligonucleotide
  Sense strand starting at position 3754 of SEQ ID NO: 587559
uugcucgugaaugaacaau

SEQ ID NO: 801297 - RNA, 19 nt, Artificial Sequence
  Description of Artificial Sequence: Synthetic oligonucleotide
  Antisense strand to SEQ ID NO: 801296
auuguucauucacgagcaa

SEQ ID NO: 801298 - RNA, 19 nt, Artificial Sequence
  Description of Artificial Sequence: Synthetic oligonucleotide
  Sense strand starting at position 19 of SEQ ID NO: 587560
uguauuggaguuuacaaau

SEQ ID NO: 801299 - RNA, 19 nt, Artificial Sequence
  Description of Artificial Sequence: Synthetic oligonucleotide
  Antisense strand to SEQ ID NO: 801298
auuuguaaacuccaauaca

SEQ ID NO: 801300 - RNA, 19 nt, Artificial Sequence
  Description of Artificial Sequence: Synthetic oligonucleotide
  Sense strand starting at position 40 of SEQ ID NO: 587560
ugcgauaagcuccaaacca

SEQ ID NO: 801301 - RNA, 19 nt, Artificial Sequence
  Description of Artificial Sequence: Synthetic oligonucleotide
  Antisense strand to SEQ ID NO: 801300
ugguuuggagcuuaucgca

SEQ ID NO: 801302 - RNA, 19 nt, Artificial Sequence
  Description of Artificial Sequence: Synthetic oligonucleotide
  Sense strand starting at position 104 of SEQ ID NO: 587560
ucaaguuaggcccagacau

SEQ ID NO: 801303 - RNA, 19 nt, Artificial Sequence
  Description of Artificial Sequence: Synthetic oligonucleotide
  Antisense strand to SEQ ID NO: 801302
augucugggccuaacuuga

SEQ ID NO: 801304 - RNA, 19 nt, Artificial Sequence
  Description of Artificial Sequence: Synthetic oligonucleotide
  Sense strand starting at position 134 of SEQ ID NO: 587560
gaguccugcucccugggaa

SEQ ID NO: 801305 - RNA, 19 nt, Artificial Sequence
  Description of Artificial Sequence: Synthetic oligonucleotide
  Antisense strand to SEQ ID NO: 801304
uucccagggagcaggacuc

SEQ ID NO: 801306 - RNA, 19 nt, Artificial Sequence
  Description of Artificial Sequence: Synthetic oligonucleotide
  Sense strand starting at position 135 of SEQ ID NO: 587560
aguccugcucccugggaau

SEQ ID NO: 801307 - RNA, 19 nt, Artificial Sequence
  Description of Artificial Sequence: Synthetic oligonucleotide
  Antisense strand to SEQ ID NO: 801306
auucccagggagcaggacu

SEQ ID NO: 801308 - RNA, 19 nt, Artificial Sequence
  Description of Artificial Sequence: Synthetic oligonucleotide
  Sense strand starting at position 161 of SEQ ID NO: 587560
gucucagagccacaacauu

SEQ ID NO: 801309 - RNA, 19 nt, Artificial Sequence
  Description of Artificial Sequence: Synthetic oligonucleotide
  Antisense strand to SEQ ID NO: 801308
aauguuguggcucugagac

SEQ ID NO: 801310 - RNA, 19 nt, Artificial Sequence
  Description of Artificial Sequence: Synthetic oligonucleotide
  Sense strand starting at position 224 of SEQ ID NO: 587560
agucacgaaugguucagau

SEQ ID NO: 801311 - RNA, 19 nt, Artificial Sequence
  Description of Artificial Sequence: Synthetic oligonucleotide
  Antisense strand to SEQ ID NO: 801310
aucugaaccauucgugacu

SEQ ID NO: 801312 - RNA, 19 nt, Artificial Sequence
  Description of Artificial Sequence: Synthetic oligonucleotide
  Sense strand starting at position 250 of SEQ ID NO: 587560
gguucugagaaaugauagu

SEQ ID NO: 801313 - RNA, 19 nt, Artificial Sequence
  Description of Artificial Sequence: Synthetic oligonucleotide
  Antisense strand to SEQ ID NO: 801312
acuaucauuucucagaacc

SEQ ID NO: 801314 - RNA, 19 nt, Artificial Sequence
  Description of Artificial Sequence: Synthetic oligonucleotide
  Sense strand starting at position 503 of SEQ ID NO: 587560
cuuggcggucuguaauuga

SEQ ID NO: 801315 - RNA, 19 nt, Artificial Sequence
  Description of Artificial Sequence: Synthetic oligonucleotide
  Antisense strand to SEQ ID NO: 801314
ucaauuacagaccgccaag

SEQ ID NO: 801316 - RNA, 19 nt, Artificial Sequence
  Description of Artificial Sequence: Synthetic oligonucleotide
  Sense strand starting at position 510 of SEQ ID NO: 587560
gucuguaauugauccgaac

SEQ ID NO: 801317 - RNA, 19 nt, Artificial Sequence
  Description of Artificial Sequence: Synthetic oligonucleotide
  Antisense strand to SEQ ID NO: 801316
guucggaucaauuacagac

SEQ ID NO: 801318 - RNA, 19 nt, Artificial Sequence
  Description of Artificial Sequence: Synthetic oligonucleotide
  Sense strand starting at position 534 of SEQ ID NO: 587560
ugugcuacacaucacuaua

SEQ ID NO: 801319 - RNA, 19 nt, Artificial Sequence
  Description of Artificial Sequence: Synthetic oligonucleotide
  Antisense strand to SEQ ID NO: 801318
uauagugauguguagcaca

SEQ ID NO: 801320 - RNA, 19 nt, Artificial Sequence
  Description of Artificial Sequence: Synthetic oligonucleotide
  Sense strand starting at position 668 of SEQ ID NO: 587560
uaguuaugcccugauggga

SEQ ID NO: 801321 - RNA, 19 nt, Artificial Sequence
  Description of Artificial Sequence: Synthetic oligonucleotide
  Antisense strand to SEQ ID NO: 801320
ucccaucagggcauaacua

SEQ ID NO: 801322 - RNA, 19 nt, Artificial Sequence
  Description of Artificial Sequence: Synthetic oligonucleotide
  Sense strand starting at position 786 of SEQ ID NO: 587560
ggaggauuauucuaauaau

SEQ ID NO: 801323 - RNA, 19 nt, Artificial Sequence
  Description of Artificial Sequence: Synthetic oligonucleotide
  Antisense strand to SEQ ID NO: 801322
auuauuagaauaauccucc

SEQ ID NO: 801324 - RNA, 19 nt, Artificial Sequence
  Description of Artificial Sequence: Synthetic oligonucleotide
  Sense strand starting at position 865 of SEQ ID NO: 587560
cuaauuggagccugaguaa

SEQ ID NO: 801325 - RNA, 19 nt, Artificial Sequence
  Description of Artificial Sequence: Synthetic oligonucleotide
  Antisense strand to SEQ ID NO: 801324
uuacucaggcuccaauuag

SEQ ID NO: 801326 - RNA, 19 nt, Artificial Sequence
  Description of Artificial Sequence: Synthetic oligonucleotide
  Sense strand starting at position 884 of SEQ ID NO: 587560
cugcuccuuagugggaaau

SEQ ID NO: 801327 - RNA, 19 nt, Artificial Sequence
  Description of Artificial Sequence: Synthetic oligonucleotide
  Antisense strand to SEQ ID NO: 801326
auuucccacuaaggagcag

SEQ ID NO: 801328 - RNA, 19 nt, Artificial Sequence
  Description of Artificial Sequence: Synthetic oligonucleotide
  Sense strand starting at position 986 of SEQ ID NO: 587560
gccuuucgugggcugagua

SEQ ID NO: 801329 - RNA, 19 nt, Artificial Sequence
  Description of Artificial Sequence: Synthetic oligonucleotide
  Antisense strand to SEQ ID NO: 801328
uacucagcccacgaaaggc

SEQ ID NO: 801330 - RNA, 19 nt, Artificial Sequence
  Description of Artificial Sequence: Synthetic oligonucleotide
  Sense strand starting at position 993 of SEQ ID NO: 587560
gugggcugaguagaauaaa

SEQ ID NO: 801331 - RNA, 19 nt, Artificial Sequence
  Description of Artificial Sequence: Synthetic oligonucleotide
  Antisense strand to SEQ ID NO: 801330
uuuauucuacucagcccac

SEQ ID NO: 801332 - RNA, 19 nt, Artificial Sequence
  Description of Artificial Sequence: Synthetic oligonucleotide
  Sense strand starting at position 996 of SEQ ID NO: 587560
ggcugaguagaauaaagcu

SEQ ID NO: 801333 - RNA, 19 nt, Artificial Sequence
  Description of Artificial Sequence: Synthetic oligonucleotide
  Antisense strand to SEQ ID NO: 801332
agcuuuauucuacucagcc

SEQ ID NO: 801334 - RNA, 19 nt, Artificial Sequence
  Description of Artificial Sequence: Synthetic oligonucleotide
  Sense strand starting at position 2440 of SEQ ID NO: 587560
gcggaguuucgugcgccua

SEQ ID NO: 801335 - RNA, 19 nt, Artificial Sequence
  Description of Artificial Sequence: Synthetic oligonucleotide
  Antisense strand to SEQ ID NO: 801334
uaggcgcacgaaacuccgc

SEQ ID NO: 801336 - RNA, 19 nt, Artificial Sequence
  Description of Artificial Sequence: Synthetic oligonucleotide
  Sense strand starting at position 2476 of SEQ ID NO: 587560
aggcgaugcguuguugaca

SEQ ID NO: 801337 - RNA, 19 nt, Artificial Sequence
  Description of Artificial Sequence: Synthetic oligonucleotide
  Antisense strand to SEQ ID NO: 801336
ugucaacaacgcaucgccu

SEQ ID NO: 801338 - RNA, 19 nt, Artificial Sequence
  Description of Artificial Sequence: Synthetic oligonucleotide
  Sense strand starting at position 2569 of SEQ ID NO: 587560
ggacgaaaugucggagcuu

SEQ ID NO: 801339 - RNA, 19 nt, Artificial Sequence
  Description of Artificial Sequence: Synthetic oligonucleotide
  Antisense strand to SEQ ID NO: 801338
aagcuccgacauuucgucc

SEQ ID NO: 801340 - RNA, 19 nt, Artificial Sequence
  Description of Artificial Sequence: Synthetic oligonucleotide
  Sense strand starting at position 2589 of SEQ ID NO: 587560
ugcucauauccagaaaugu

SEQ ID NO: 801341 - RNA, 19 nt, Artificial Sequence
  Description of Artificial Sequence: Synthetic oligonucleotide
  Antisense strand to SEQ ID NO: 801340
acauuucuggauaugagca

SEQ ID NO: 801342 - RNA, 19 nt, Artificial Sequence
  Description of Artificial Sequence: Synthetic oligonucleotide
  Sense strand starting at position 2744 of SEQ ID NO: 587560
uuuaauggcuuugugcaaa

SEQ ID NO: 801343 - RNA, 19 nt, Artificial Sequence
  Description of Artificial Sequence: Synthetic oligonucleotide
  Antisense strand to SEQ ID NO: 801342
uuugcacaaagccauuaaa

SEQ ID NO: 801344 - RNA, 19 nt, Artificial Sequence
  Description of Artificial Sequence: Synthetic oligonucleotide
  Sense strand starting at position 2747 of SEQ ID NO: 587560
aauggcuuugugcaaauua

SEQ ID NO: 801345 - RNA, 19 nt, Artificial Sequence
  Description of Artificial Sequence: Synthetic oligonucleotide
  Antisense strand to SEQ ID NO: 801344
uaauuugcacaaagccauu

SEQ ID NO: 801346 - RNA, 19 nt, Artificial Sequence
  Description of Artificial Sequence: Synthetic oligonucleotide
  Sense strand starting at position 2770 of SEQ ID NO: 587560
cgaugagauuuccauaagu

SEQ ID NO: 801347 - RNA, 19 nt, Artificial Sequence
  Description of Artificial Sequence: Synthetic oligonucleotide
  Antisense strand to SEQ ID NO: 801346
acuuauggaaaucucaucg

SEQ ID NO: 801348 - RNA, 19 nt, Artificial Sequence
  Description of Artificial Sequence: Synthetic oligonucleotide
  Sense strand starting at position 2936 of SEQ ID NO: 587560
cucuguugccaagaagagu

SEQ ID NO: 801349 - RNA, 19 nt, Artificial Sequence
  Description of Artificial Sequence: Synthetic oligonucleotide
  Antisense strand to SEQ ID NO: 801348
acucuucuuggcaacagag

SEQ ID NO: 801350 - RNA, 19 nt, Artificial Sequence
  Description of Artificial Sequence: Synthetic oligonucleotide
  Sense strand starting at position 2958 of SEQ ID NO: 587560
accugcugucaguacuuga

SEQ ID NO: 801351 - RNA, 19 nt, Artificial Sequence
  Description of Artificial Sequence: Synthetic oligonucleotide
  Antisense strand to SEQ ID NO: 801350
ucaaguacugacagcaggu

SEQ ID NO: 801352 - RNA, 19 nt, Artificial Sequence
  Description of Artificial Sequence: Synthetic oligonucleotide
  Sense strand starting at position 2961 of SEQ ID NO: 587560
ugcugucaguacuugaauu

SEQ ID NO: 801353 - RNA, 19 nt, Artificial Sequence
  Description of Artificial Sequence: Synthetic oligonucleotide
  Antisense strand to SEQ ID NO: 801352
aauucaaguacugacagca

SEQ ID NO: 801354 - RNA, 19 nt, Artificial Sequence
  Description of Artificial Sequence: Synthetic oligonucleotide
  Sense strand starting at position 2963 of SEQ ID NO: 587560
cugucaguacuugaauuac

SEQ ID NO: 801355 - RNA, 19 nt, Artificial Sequence
  Description of Artificial Sequence: Synthetic oligonucleotide
  Antisense strand to SEQ ID NO: 801354
guaauucaaguacugacag

SEQ ID NO: 801356 - RNA, 19 nt, Artificial Sequence
  Description of Artificial Sequence: Synthetic oligonucleotide
  Sense strand starting at position 3031 of SEQ ID NO: 587560
uuccguuaacuauagcaga

SEQ ID NO: 801357 - RNA, 19 nt, Artificial Sequence
  Description of Artificial Sequence: Synthetic oligonucleotide
  Antisense strand to SEQ ID NO: 801356
ucugcuauaguuaacggaa

SEQ ID NO: 801358 - RNA, 19 nt, Artificial Sequence
  Description of Artificial Sequence: Synthetic oligonucleotide
  Sense strand starting at position 3133 of SEQ ID NO: 587560
acucuacugugaucuucuu

SEQ ID NO: 801359 - RNA, 19 nt, Artificial Sequence
  Description of Artificial Sequence: Synthetic oligonucleotide
  Antisense strand to SEQ ID NO: 801358
aagaagaucacaguagagu

SEQ ID NO: 801360 - RNA, 19 nt, Artificial Sequence
  Description of Artificial Sequence: Synthetic oligonucleotide
  Sense strand starting at position 3166 of SEQ ID NO: 587560
uccuuucggcugcagaaua

SEQ ID NO: 801361 - RNA, 19 nt, Artificial Sequence
  Description of Artificial Sequence: Synthetic oligonucleotide
  Antisense strand to SEQ ID NO: 801360
uauucugcagccgaaagga

SEQ ID NO: 801362 - RNA, 19 nt, Artificial Sequence
  Description of Artificial Sequence: Synthetic oligonucleotide
  Sense strand starting at position 3612 of SEQ ID NO: 587560
cgguguucugaacaugcaa

SEQ ID NO: 801363 - RNA, 19 nt, Artificial Sequence
  Description of Artificial Sequence: Synthetic oligonucleotide
  Antisense strand to SEQ ID NO: 801362
uugcauguucagaacaccg

SEQ ID NO: 801364 - RNA, 19 nt, Artificial Sequence
  Description of Artificial Sequence: Synthetic oligonucleotide
  Sense strand starting at position 3706 of SEQ ID NO: 587560
acaagcuuggcauacauua

SEQ ID NO: 801365 - RNA, 19 nt, Artificial Sequence
  Description of Artificial Sequence: Synthetic oligonucleotide
  Antisense strand to SEQ ID NO: 801364
uaauguaugccaagcuugu

SEQ ID NO: 801366 - RNA, 19 nt, Artificial Sequence
  Description of Artificial Sequence: Synthetic oligonucleotide
  Sense strand starting at position 3793 of SEQ ID NO: 587560
caccaucugguagauaagu

SEQ ID NO: 801367 - RNA, 19 nt, Artificial Sequence
  Description of Artificial Sequence: Synthetic oligonucleotide
  Antisense strand to SEQ ID NO: 801366
acuuaucuaccagauggug

SEQ ID NO: 801368 - RNA, 19 nt, Artificial Sequence
  Description of Artificial Sequence: Synthetic oligonucleotide
  Sense strand starting at position 3871 of SEQ ID NO: 587560
ggcccaauauggucaauga

SEQ ID NO: 801369 - RNA, 19 nt, Artificial Sequence
  Description of Artificial Sequence: Synthetic oligonucleotide
  Antisense strand to SEQ ID NO: 801368
ucauugaccauauugggcc

SEQ ID NO: 801370 - RNA, 19 nt, Artificial Sequence
  Description of Artificial Sequence: Synthetic oligonucleotide
  Sense strand starting at position 3872 of SEQ ID NO: 587560
gcccaauauggucaaugaa

SEQ ID NO: 801371 - RNA, 19 nt, Artificial Sequence
  Description of Artificial Sequence: Synthetic oligonucleotide
  Antisense strand to SEQ ID NO: 801370
uucauugaccauauugggc

SEQ ID NO: 801372 - RNA, 19 nt, Artificial Sequence
  Description of Artificial Sequence: Synthetic oligonucleotide
  Sense strand starting at position 3943 of SEQ ID NO: 587560
ccucuagaguuccugaaau

SEQ ID NO: 801373 - RNA, 19 nt, Artificial Sequence
  Description of Artificial Sequence: Synthetic oligonucleotide
  Antisense strand to SEQ ID NO: 801372
auuucaggaacucuagagg

SEQ ID NO: 801374 - RNA, 19 nt, Artificial Sequence
  Description of Artificial Sequence: Synthetic oligonucleotide
  Sense strand starting at position 3957 of SEQ ID NO: 587560
gaaauugaacuggguugua

SEQ ID NO: 801375 - RNA, 19 nt, Artificial Sequence
  Description of Artificial Sequence: Synthetic oligonucleotide
  Antisense strand to SEQ ID NO: 801374
uacaacccaguucaauuuc

SEQ ID NO: 801376 - RNA, 19 nt, Artificial Sequence
  Description of Artificial Sequence: Synthetic oligonucleotide
  Sense strand starting at position 3960 of SEQ ID NO: 587560
auugaacuggguuguaaua

SEQ ID NO: 801377 - RNA, 19 nt, Artificial Sequence
  Description of Artificial Sequence: Synthetic oligonucleotide
  Antisense strand to SEQ ID NO: 801376
uauuacaacccaguucaau

SEQ ID NO: 801378 - RNA, 19 nt, Artificial Sequence
  Description of Artificial Sequence: Synthetic oligonucleotide
  Sense strand starting at position 6 of SEQ ID NO: 587561
uuaacucuucuaggugaua

SEQ ID NO: 801379 - RNA, 19 nt, Artificial Sequence
  Description of Artificial Sequence: Synthetic oligonucleotide
  Antisense strand to SEQ ID NO: 801378
uaucaccuagaagaguuaa

SEQ ID NO: 801380 - RNA, 19 nt, Artificial Sequence
  Description of Artificial Sequence: Synthetic oligonucleotide
  Sense strand starting at position 53 of SEQ ID NO: 587561
aguuauuucuacguuggac

SEQ ID NO: 801381 - RNA, 19 nt, Artificial Sequence
  Description of Artificial Sequence: Synthetic oligonucleotide
  Antisense strand to SEQ ID NO: 801380
guccaacguagaaauaacu

SEQ ID NO: 801382 - RNA, 19 nt, Artificial Sequence
  Description of Artificial Sequence: Synthetic oligonucleotide
  Sense strand starting at position 153 of SEQ ID NO: 587561
gcaauuaaaugcgcauaca

SEQ ID NO: 801383 - RNA, 19 nt, Artificial Sequence
  Description of Artificial Sequence: Synthetic oligonucleotide
  Antisense strand to SEQ ID NO: 801382
uguaugcgcauuuaauugc

SEQ ID NO: 801384 - RNA, 19 nt, Artificial Sequence
  Description of Artificial Sequence: Synthetic oligonucleotide
  Sense strand starting at position 156 of SEQ ID NO: 587561
auuaaaugcgcauacacau

SEQ ID NO: 801385 - RNA, 19 nt, Artificial Sequence
  Description of Artificial Sequence: Synthetic oligonucleotide
  Antisense strand to SEQ ID NO: 801384
auguguaugcgcauuuaau

SEQ ID NO: 801386 - RNA, 19 nt, Artificial Sequence
  Description of Artificial Sequence: Synthetic oligonucleotide
  Sense strand starting at position 164 of SEQ ID NO: 587561
cgcauacacauguguaaug

SEQ ID NO: 801387 - RNA, 19 nt, Artificial Sequence
  Description of Artificial Sequence: Synthetic oligonucleotide
  Antisense strand to SEQ ID NO: 801386
cauuacacauguguaugcg

SEQ ID NO: 801388 - RNA, 19 nt, Artificial Sequence
  Description of Artificial Sequence: Synthetic oligonucleotide
  Sense strand starting at position 190 of SEQ ID NO: 587561
uuacuaaacuguuugaguu

SEQ ID NO: 801389 - RNA, 19 nt, Artificial Sequence
  Description of Artificial Sequence: Synthetic oligonucleotide
  Antisense strand to SEQ ID NO: 801388
aacucaaacaguuuaguaa

SEQ ID NO: 801390 - RNA, 19 nt, Artificial Sequence
  Description of Artificial Sequence: Synthetic oligonucleotide
  Sense strand starting at position 222 of SEQ ID NO: 587561
agaacucucuagccuagau

SEQ ID NO: 801391 - RNA, 19 nt, Artificial Sequence
  Description of Artificial Sequence: Synthetic oligonucleotide
  Antisense strand to SEQ ID NO: 801390
aucuaggcuagagaguucu

SEQ ID NO: 801392 - RNA, 19 nt, Artificial Sequence
  Description of Artificial Sequence: Synthetic oligonucleotide
  Sense strand starting at position 232 of SEQ ID NO: 587561
agccuagaugucuagucua

SEQ ID NO: 801393 - RNA, 19 nt, Artificial Sequence
  Description of Artificial Sequence: Synthetic oligonucleotide
  Antisense strand to SEQ ID NO: 801392
uagacuagacaucuaggcu

SEQ ID NO: 801394 - RNA, 19 nt, Artificial Sequence
  Description of Artificial Sequence: Synthetic oligonucleotide
  Sense strand starting at position 235 of SEQ ID NO: 587561
cuagaugucuagucuagau

SEQ ID NO: 801395 - RNA, 19 nt, Artificial Sequence
  Description of Artificial Sequence: Synthetic oligonucleotide
  Antisense strand to SEQ ID NO: 801394
aucuagacuagacaucuag

SEQ ID NO: 801396 - RNA, 19 nt, Artificial Sequence
  Description of Artificial Sequence: Synthetic oligonucleotide
  Sense strand starting at position 264 of SEQ ID NO: 587561
cauguauuacguuaagcuu

SEQ ID NO: 801397 - RNA, 19 nt, Artificial Sequence
  Description of Artificial Sequence: Synthetic oligonucleotide
  Antisense strand to SEQ ID NO: 801396
aagcuuaacguaauacaug

SEQ ID NO: 801398 - RNA, 19 nt, Artificial Sequence
  Description of Artificial Sequence: Synthetic oligonucleotide
  Sense strand starting at position 271 of SEQ ID NO: 587561
uacguuaagcuuuggacaa

SEQ ID NO: 801399 - RNA, 19 nt, Artificial Sequence
  Description of Artificial Sequence: Synthetic oligonucleotide
  Antisense strand to SEQ ID NO: 801398
uuguccaaagcuuaacgua

SEQ ID NO: 801400 - RNA, 19 nt, Artificial Sequence
  Description of Artificial Sequence: Synthetic oligonucleotide
  Sense strand starting at position 360 of SEQ ID NO: 587561
cuugauauguaacuuuaga

SEQ ID NO: 801401 - RNA, 19 nt, Artificial Sequence
  Description of Artificial Sequence: Synthetic oligonucleotide
  Antisense strand to SEQ ID NO: 801400
ucuaaaguuacauaucaag

SEQ ID NO: 801402 - RNA, 19 nt, Artificial Sequence
  Description of Artificial Sequence: Synthetic oligonucleotide
  Sense strand starting at position 462 of SEQ ID NO: 587561
ucgcuuguccuaugaaaug

SEQ ID NO: 801403 - RNA, 19 nt, Artificial Sequence
  Description of Artificial Sequence: Synthetic oligonucleotide
  Antisense strand to SEQ ID NO: 801402
cauuucauaggacaagcga

SEQ ID NO: 801404 - RNA, 19 nt, Artificial Sequence
  Description of Artificial Sequence: Synthetic oligonucleotide
  Sense strand starting at position 480 of SEQ ID NO: 587561
guaauauauugauugcugu

SEQ ID NO: 801405 - RNA, 19 nt, Artificial Sequence
  Description of Artificial Sequence: Synthetic oligonucleotide
  Antisense strand to SEQ ID NO: 801404
acagcaaucaauauauuac

SEQ ID NO: 801406 - RNA, 19 nt, Artificial Sequence
  Description of Artificial Sequence: Synthetic oligonucleotide
  Sense strand starting at position 490 of SEQ ID NO: 587561
gauugcuguuuauugguaa

SEQ ID NO: 801407 - RNA, 19 nt, Artificial Sequence
  Description of Artificial Sequence: Synthetic oligonucleotide
  Antisense strand to SEQ ID NO: 801406
uuaccaauaaacagcaauc

SEQ ID NO: 801408 - RNA, 19 nt, Artificial Sequence
  Description of Artificial Sequence: Synthetic oligonucleotide
  Sense strand starting at position 493 of SEQ ID NO: 587561
ugcuguuuauugguaaaua

SEQ ID NO: 801409 - RNA, 19 nt, Artificial Sequence
  Description of Artificial Sequence: Synthetic oligonucleotide
  Antisense strand to SEQ ID NO: 801408
uauuuaccaauaaacagca

SEQ ID NO: 801410 - RNA, 19 nt, Artificial Sequence
  Description of Artificial Sequence: Synthetic oligonucleotide
  Sense strand starting at position 680 of SEQ ID NO: 587561
acaacuugauuagaaggaa

SEQ ID NO: 801411 - RNA, 19 nt, Artificial Sequence
  Description of Artificial Sequence: Synthetic oligonucleotide
  Antisense strand to SEQ ID NO: 801410
uuccuucuaaucaaguugu

SEQ ID NO: 801412 - RNA, 19 nt, Artificial Sequence
  Description of Artificial Sequence: Synthetic oligonucleotide
  Sense strand starting at position 702 of SEQ ID NO: 587561
ugaaccugcgcggaauuaa

SEQ ID NO: 801413 - RNA, 19 nt, Artificial Sequence
  Description of Artificial Sequence: Synthetic oligonucleotide
  Antisense strand to SEQ ID NO: 801412
uuaauuccgcgcagguuca

SEQ ID NO: 801414 - RNA, 19 nt, Artificial Sequence
  Description of Artificial Sequence: Synthetic oligonucleotide
  Sense strand starting at position 711 of SEQ ID NO: 587561
gcggaauuaacccagugua

SEQ ID NO: 801415 - RNA, 19 nt, Artificial Sequence
  Description of Artificial Sequence: Synthetic oligonucleotide
  Antisense strand to SEQ ID NO: 801414
uacacuggguuaauuccgc

SEQ ID NO: 801416 - RNA, 19 nt, Artificial Sequence
  Description of Artificial Sequence: Synthetic oligonucleotide
  Sense strand starting at position 714 of SEQ ID NO: 587561
gaauuaacccaguguaugu

SEQ ID NO: 801417 - RNA, 19 nt, Artificial Sequence
  Description of Artificial Sequence: Synthetic oligonucleotide
  Antisense strand to SEQ ID NO: 801416
acauacacuggguuaauuc

SEQ ID NO: 801418 - RNA, 19 nt, Artificial Sequence
  Description of Artificial Sequence: Synthetic oligonucleotide
  Sense strand starting at position 724 of SEQ ID NO: 587561
aguguaugugcauacuaaa

SEQ ID NO: 801419 - RNA, 19 nt, Artificial Sequence
  Description of Artificial Sequence: Synthetic oligonucleotide
  Antisense strand to SEQ ID NO: 801418
uuuaguaugcacauacacu

SEQ ID NO: 801420 - RNA, 19 nt, Artificial Sequence
  Description of Artificial Sequence: Synthetic oligonucleotide
  Sense strand starting at position 754 of SEQ ID NO: 587561
guaaucuuguaugcauuau

SEQ ID NO: 801421 - RNA, 19 nt, Artificial Sequence
  Description of Artificial Sequence: Synthetic oligonucleotide
  Antisense strand to SEQ ID NO: 801420
auaaugcauacaagauuac

SEQ ID NO: 801422 - RNA, 19 nt, Artificial Sequence
  Description of Artificial Sequence: Synthetic oligonucleotide
  Sense strand starting at position 758 of SEQ ID NO: 587561
ucuuguaugcauuauuacu

SEQ ID NO: 801423 - RNA, 19 nt, Artificial Sequence
  Description of Artificial Sequence: Synthetic oligonucleotide
  Antisense strand to SEQ ID NO: 801422
aguaauaaugcauacaaga

SEQ ID NO: 801424 - RNA, 19 nt, Artificial Sequence
  Description of Artificial Sequence: Synthetic oligonucleotide
  Sense strand starting at position 820 of SEQ ID NO: 587561
cauguuugugcauauugca

SEQ ID NO: 801425 - RNA, 19 nt, Artificial Sequence
  Description of Artificial Sequence: Synthetic oligonucleotide
  Antisense strand to SEQ ID NO: 801424
ugcaauaugcacaaacaug

SEQ ID NO: 801426 - RNA, 19 nt, Artificial Sequence
  Description of Artificial Sequence: Synthetic oligonucleotide
  Sense strand starting at position 853 of SEQ ID NO: 587561
augaaugaauacgcauaaa

SEQ ID NO: 801427 - RNA, 19 nt, Artificial Sequence
  Description of Artificial Sequence: Synthetic oligonucleotide
  Antisense strand to SEQ ID NO: 801426
uuuaugcguauucauucau

SEQ ID NO: 801428 - RNA, 19 nt, Artificial Sequence
  Description of Artificial Sequence: Synthetic oligonucleotide
  Sense strand starting at position 864 of SEQ ID NO: 587561
cgcauaaaugcucacaacu

SEQ ID NO: 801429 - RNA, 19 nt, Artificial Sequence
  Description of Artificial Sequence: Synthetic oligonucleotide
  Antisense strand to SEQ ID NO: 801428
aguugugagcauuuaugcg

SEQ ID NO: 801430 - RNA, 19 nt, Artificial Sequence
  Description of Artificial Sequence: Synthetic oligonucleotide
  Sense strand starting at position 1124 of SEQ ID NO: 587561
cuguguucugaggaucguu

SEQ ID NO: 801431 - RNA, 19 nt, Artificial Sequence
  Description of Artificial Sequence: Synthetic oligonucleotide
  Antisense strand to SEQ ID NO: 801430
aacgauccucagaacacag

SEQ ID NO: 801432 - RNA, 19 nt, Artificial Sequence
  Description of Artificial Sequence: Synthetic oligonucleotide
  Sense strand starting at position 1127 of SEQ ID NO: 587561
uguucugaggaucguucau

SEQ ID NO: 801433 - RNA, 19 nt, Artificial Sequence
  Description of Artificial Sequence: Synthetic oligonucleotide
  Antisense strand to SEQ ID NO: 801432
augaacgauccucagaaca

SEQ ID NO: 801434 - RNA, 19 nt, Artificial Sequence
  Description of Artificial Sequence: Synthetic oligonucleotide
  Sense strand starting at position 1200 of SEQ ID NO: 587561
uguggcauuuaccaacaaa

SEQ ID NO: 801435 - RNA, 19 nt, Artificial Sequence
  Description of Artificial Sequence: Synthetic oligonucleotide
  Antisense strand to SEQ ID NO: 801434
uuuguugguaaaugccaca

SEQ ID NO: 801436 - RNA, 19 nt, Artificial Sequence
  Description of Artificial Sequence: Synthetic oligonucleotide
  Sense strand starting at position 1327 of SEQ ID NO: 587561
cgggaaggagccugacauu

SEQ ID NO: 801437 - RNA, 19 nt, Artificial Sequence
  Description of Artificial Sequence: Synthetic oligonucleotide
  Antisense strand to SEQ ID NO: 801436
aaugucaggcuccuucccg

SEQ ID NO: 801438 - RNA, 19 nt, Artificial Sequence
  Description of Artificial Sequence: Synthetic oligonucleotide
  Sense strand starting at position 1330 of SEQ ID NO: 587561
gaaggagccugacauuaaa

SEQ ID NO: 801439 - RNA, 19 nt, Artificial Sequence
  Description of Artificial Sequence: Synthetic oligonucleotide
  Antisense strand to SEQ ID NO: 801438
uuuaaugucaggcuccuuc

SEQ ID NO: 801440 - RNA, 19 nt, Artificial Sequence
  Description of Artificial Sequence: Synthetic oligonucleotide
  Sense strand starting at position 1360 of SEQ ID NO: 587561
ggcuaagucagcuuugugu

SEQ ID NO: 801441 - RNA, 19 nt, Artificial Sequence
  Description of Artificial Sequence: Synthetic oligonucleotide
  Antisense strand to SEQ ID NO: 801440
acacaaagcugacuuagcc

SEQ ID NO: 801442 - RNA, 19 nt, Artificial Sequence
  Description of Artificial Sequence: Synthetic oligonucleotide
  Sense strand starting at position 2798 of SEQ ID NO: 587561
gaaagagcugcggagauaa

SEQ ID NO: 801443 - RNA, 19 nt, Artificial Sequence
  Description of Artificial Sequence: Synthetic oligonucleotide
  Antisense strand to SEQ ID NO: 801442
uuaucuccgcagcucuuuc

SEQ ID NO: 801444 - RNA, 19 nt, Artificial Sequence
  Description of Artificial Sequence: Synthetic oligonucleotide
  Sense strand starting at position 3087 of SEQ ID NO: 587561
cgguaaagacaaugaacuu

SEQ ID NO: 801445 - RNA, 19 nt, Artificial Sequence
  Description of Artificial Sequence: Synthetic oligonucleotide
  Antisense strand to SEQ ID NO: 801444
aaguucauugucuuuaccg

SEQ ID NO: 801446 - RNA, 19 nt, Artificial Sequence
  Description of Artificial Sequence: Synthetic oligonucleotide
  Sense strand starting at position 3264 of SEQ ID NO: 587561
ugggacuccugaguuucua

SEQ ID NO: 801447 - RNA, 19 nt, Artificial Sequence
  Description of Artificial Sequence: Synthetic oligonucleotide
  Antisense strand to SEQ ID NO: 801446
uagaaacucaggaguccca

SEQ ID NO: 801448 - RNA, 19 nt, Artificial Sequence
  Description of Artificial Sequence: Synthetic oligonucleotide
  Sense strand starting at position 3268 of SEQ ID NO: 587561
acuccugaguuucuauaga

SEQ ID NO: 801449 - RNA, 19 nt, Artificial Sequence
  Description of Artificial Sequence: Synthetic oligonucleotide
  Antisense strand to SEQ ID NO: 801448
ucuauagaaacucaggagu

SEQ ID NO: 801450 - RNA, 19 nt, Artificial Sequence
  Description of Artificial Sequence: Synthetic oligonucleotide
  Sense strand starting at position 3370 of SEQ ID NO: 587561
uguaucuucuguuuauuga

SEQ ID NO: 801451 - RNA, 19 nt, Artificial Sequence
  Description of Artificial Sequence: Synthetic oligonucleotide
  Antisense strand to SEQ ID NO: 801450
ucaauaaacagaagauaca

SEQ ID NO: 801452 - RNA, 19 nt, Artificial Sequence
  Description of Artificial Sequence: Synthetic oligonucleotide
  Sense strand starting at position 3780 of SEQ ID NO: 587561
agucuaucauuguuggaac

SEQ ID NO: 801453 - RNA, 19 nt, Artificial Sequence
  Description of Artificial Sequence: Synthetic oligonucleotide
  Antisense strand to SEQ ID NO: 801452
guuccaacaaugauagacu

SEQ ID NO: 801454 - RNA, 19 nt, Artificial Sequence
  Description of Artificial Sequence: Synthetic oligonucleotide
  Sense strand starting at position 3850 of SEQ ID NO: 587561
ccugauaugcccuggaaug

SEQ ID NO: 801455 - RNA, 19 nt, Artificial Sequence
  Description of Artificial Sequence: Synthetic oligonucleotide
  Antisense strand to SEQ ID NO: 801454
cauuccagggcauaucagg

SEQ ID NO: 801456 - RNA, 19 nt, Artificial Sequence
  Description of Artificial Sequence: Synthetic oligonucleotide
  Sense strand starting at position 3927 of SEQ ID NO: 587561
uuacuuuguacugaggguu

SEQ ID NO: 801457 - RNA, 19 nt, Artificial Sequence
  Description of Artificial Sequence: Synthetic oligonucleotide
  Antisense strand to SEQ ID NO: 801456
aacccucaguacaaaguaa

SEQ ID NO: 801458 - RNA, 19 nt, Artificial Sequence
  Description of Artificial Sequence: Synthetic oligonucleotide
  Sense strand starting at position 52 of SEQ ID NO: 587562
gaaucacugcccugugcau

SEQ ID NO: 801459 - RNA, 19 nt, Artificial Sequence
  Description of Artificial Sequence: Synthetic oligonucleotide
  Antisense strand to SEQ ID NO: 801458
augcacagggcagugauuc

SEQ ID NO: 801460 - RNA, 19 nt, Artificial Sequence
  Description of Artificial Sequence: Synthetic oligonucleotide
  Sense strand starting at position 205 of SEQ ID NO: 587562
gagccaagcugauuaugua

SEQ ID NO: 801461 - RNA, 19 nt, Artificial Sequence
  Description of Artificial Sequence: Synthetic oligonucleotide
  Antisense strand to SEQ ID NO: 801460
uacauaaucagcuuggcuc

SEQ ID NO: 801462 - RNA, 19 nt, Artificial Sequence
  Description of Artificial Sequence: Synthetic oligonucleotide
  Sense strand starting at position 208 of SEQ ID NO: 587562
ccaagcugauuauguagau

SEQ ID NO: 801463 - RNA, 19 nt, Artificial Sequence
  Description of Artificial Sequence: Synthetic oligonucleotide
  Antisense strand to SEQ ID NO: 801462
aucuacauaaucagcuugg

SEQ ID NO: 801464 - RNA, 19 nt, Artificial Sequence
  Description of Artificial Sequence: Synthetic oligonucleotide
  Sense strand starting at position 212 of SEQ ID NO: 587562
gcugauuauguagauaaca

SEQ ID NO: 801465 - RNA, 19 nt, Artificial Sequence
  Description of Artificial Sequence: Synthetic oligonucleotide
  Antisense strand to SEQ ID NO: 801464
uguuaucuacauaaucagc

SEQ ID NO: 801466 - RNA, 19 nt, Artificial Sequence
  Description of Artificial Sequence: Synthetic oligonucleotide
  Sense strand starting at position 347 of SEQ ID NO: 587562
uggcgcuuccuguugcaua

SEQ ID NO: 801467 - RNA, 19 nt, Artificial Sequence
  Description of Artificial Sequence: Synthetic oligonucleotide
  Antisense strand to SEQ ID NO: 801466
uaugcaacaggaagcgcca

SEQ ID NO: 801468 - RNA, 19 nt, Artificial Sequence
  Description of Artificial Sequence: Synthetic oligonucleotide
  Sense strand starting at position 348 of SEQ ID NO: 587562
ggcgcuuccuguugcauau

SEQ ID NO: 801469 - RNA, 19 nt, Artificial Sequence
  Description of Artificial Sequence: Synthetic oligonucleotide
  Antisense strand to SEQ ID NO: 801468
auaugcaacaggaagcgcc

SEQ ID NO: 801470 - RNA, 19 nt, Artificial Sequence
  Description of Artificial Sequence: Synthetic oligonucleotide
  Sense strand starting at position 361 of SEQ ID NO: 587562
gcauauggcacugagaaau

SEQ ID NO: 801471 - RNA, 19 nt, Artificial Sequence
  Description of Artificial Sequence: Synthetic oligonucleotide
  Antisense strand to SEQ ID NO: 801470
auuucucagugccauaugc

SEQ ID NO: 801472 - RNA, 19 nt, Artificial Sequence
  Description of Artificial Sequence: Synthetic oligonucleotide
  Sense strand starting at position 396 of SEQ ID NO: 587562
ugcagagauuuccagacaa

SEQ ID NO: 801473 - RNA, 19 nt, Artificial Sequence
  Description of Artificial Sequence: Synthetic oligonucleotide
  Antisense strand to SEQ ID NO: 801472
uugucuggaaaucucugca

SEQ ID NO: 801474 - RNA, 19 nt, Artificial Sequence
  Description of Artificial Sequence: Synthetic oligonucleotide
  Sense strand starting at position 712 of SEQ ID NO: 587562
cccacaggucuccaaguau

SEQ ID NO: 801475 - RNA, 19 nt, Artificial Sequence
  Description of Artificial Sequence: Synthetic oligonucleotide
  Antisense strand to SEQ ID NO: 801474
auacuuggagaccuguggg

SEQ ID NO: 801476 - RNA, 19 nt, Artificial Sequence
  Description of Artificial Sequence: Synthetic oligonucleotide
  Sense strand starting at position 725 of SEQ ID NO: 587562
aaguauaacguccgggagu

SEQ ID NO: 801477 - RNA, 19 nt, Artificial Sequence
  Description of Artificial Sequence: Synthetic oligonucleotide
  Antisense strand to SEQ ID NO: 801476
acucccggacguuauacuu

SEQ ID NO: 801478 - RNA, 19 nt, Artificial Sequence
  Description of Artificial Sequence: Synthetic oligonucleotide
  Sense strand starting at position 792 of SEQ ID NO: 587562
gagacccugcucugugaau

SEQ ID NO: 801479 - RNA, 19 nt, Artificial Sequence
  Description of Artificial Sequence: Synthetic oligonucleotide
  Antisense strand to SEQ ID NO: 801478
auucacagagcagggucuc

SEQ ID NO: 801480 - RNA, 19 nt, Artificial Sequence
  Description of Artificial Sequence: Synthetic oligonucleotide
  Sense strand starting at position 793 of SEQ ID NO: 587562
agacccugcucugugaaua

SEQ ID NO: 801481 - RNA, 19 nt, Artificial Sequence
  Description of Artificial Sequence: Synthetic oligonucleotide
  Antisense strand to SEQ ID NO: 801480
uauucacagagcagggucu

SEQ ID NO: 801482 - RNA, 19 nt, Artificial Sequence
  Description of Artificial Sequence: Synthetic oligonucleotide
  Sense strand starting at position 794 of SEQ ID NO: 587562
gacccugcucugugaauag

SEQ ID NO: 801483 - RNA, 19 nt, Artificial Sequence
  Description of Artificial Sequence: Synthetic oligonucleotide
  Antisense strand to SEQ ID NO: 801482
cuauucacagagcaggguc

SEQ ID NO: 801484 - RNA, 19 nt, Artificial Sequence
  Description of Artificial Sequence: Synthetic oligonucleotide
  Sense strand starting at position 834 of SEQ ID NO: 587562
cgggcaucccugcaguuua

SEQ ID NO: 801485 - RNA, 19 nt, Artificial Sequence
  Description of Artificial Sequence: Synthetic oligonucleotide
  Antisense strand to SEQ ID NO: 801484
uaaacugcagggaugcccg

SEQ ID NO: 801486 - RNA, 19 nt, Artificial Sequence
  Description of Artificial Sequence: Synthetic oligonucleotide
  Sense strand starting at position 890 of SEQ ID NO: 587562
ccugguuucugggcaaugu

SEQ ID NO: 801487 - RNA, 19 nt, Artificial Sequence
  Description of Artificial Sequence: Synthetic oligonucleotide
  Antisense strand to SEQ ID NO: 801486
acauugcccagaaaccagg

SEQ ID NO: 801488 - RNA, 19 nt, Artificial Sequence
  Description of Artificial Sequence: Synthetic oligonucleotide
  Sense strand starting at position 916 of SEQ ID NO: 587562
ggccuuucccagugucaca

SEQ ID NO: 801489 - RNA, 19 nt, Artificial Sequence
  Description of Artificial Sequence: Synthetic oligonucleotide
  Antisense strand to SEQ ID NO: 801488
ugugacacugggaaaggcc

SEQ ID NO: 801490 - RNA, 19 nt, Artificial Sequence
  Description of Artificial Sequence: Synthetic oligonucleotide
  Sense strand starting at position 1115 of SEQ ID NO: 587562
gaugaaaucugagcucaga

SEQ ID NO: 801491 - RNA, 19 nt, Artificial Sequence
  Description of Artificial Sequence: Synthetic oligonucleotide
  Antisense strand to SEQ ID NO: 801490
ucugagcucagauuucauc

SEQ ID NO: 801492 - RNA, 19 nt, Artificial Sequence
  Description of Artificial Sequence: Synthetic oligonucleotide
  Sense strand starting at position 1321 of SEQ ID NO: 587562
gugggugucugcuauggga

SEQ ID NO: 801493 - RNA, 19 nt, Artificial Sequence
  Description of Artificial Sequence: Synthetic oligonucleotide
  Antisense strand to SEQ ID NO: 801492
ucccauagcagacacccac

SEQ ID NO: 801494 - RNA, 19 nt, Artificial Sequence
  Description of Artificial Sequence: Synthetic oligonucleotide
  Sense strand starting at position 1323 of SEQ ID NO: 587562
gggugucugcuaugggauu

SEQ ID NO: 801495 - RNA, 19 nt, Artificial Sequence
  Description of Artificial Sequence: Synthetic oligonucleotide
  Antisense strand to SEQ ID NO: 801494
aaucccauagcagacaccc

SEQ ID NO: 801496 - RNA, 19 nt, Artificial Sequence
  Description of Artificial Sequence: Synthetic oligonucleotide
  Sense strand starting at position 1324 of SEQ ID NO: 587562
ggugucugcuaugggauua

SEQ ID NO: 801497 - RNA, 19 nt, Artificial Sequence
  Description of Artificial Sequence: Synthetic oligonucleotide
  Antisense strand to SEQ ID NO: 801496
uaaucccauagcagacacc

SEQ ID NO: 801498 - RNA, 19 nt, Artificial Sequence
  Description of Artificial Sequence: Synthetic oligonucleotide
  Sense strand starting at position 1325 of SEQ ID NO: 587562
gugucugcuaugggauuau

SEQ ID NO: 801499 - RNA, 19 nt, Artificial Sequence
  Description of Artificial Sequence: Synthetic oligonucleotide
  Antisense strand to SEQ ID NO: 801498
auaaucccauagcagacac

SEQ ID NO: 801500 - RNA, 19 nt, Artificial Sequence
  Description of Artificial Sequence: Synthetic oligonucleotide
  Sense strand starting at position 1329 of SEQ ID NO: 587562
cugcuaugggauuauucuu

SEQ ID NO: 801501 - RNA, 19 nt, Artificial Sequence
  Description of Artificial Sequence: Synthetic oligonucleotide
  Antisense strand to SEQ ID NO: 801500
aagaauaaucccauagcag

SEQ ID NO: 801502 - RNA, 19 nt, Artificial Sequence
  Description of Artificial Sequence: Synthetic oligonucleotide
  Sense strand starting at position 1335 of SEQ ID NO: 587562
ugggauuauucuuagcgcu

SEQ ID NO: 801503 - RNA, 19 nt, Artificial Sequence
  Description of Artificial Sequence: Synthetic oligonucleotide
  Antisense strand to SEQ ID NO: 801502
agcgcuaagaauaauccca

SEQ ID NO: 801504 - RNA, 19 nt, Artificial Sequence
  Description of Artificial Sequence: Synthetic oligonucleotide
  Sense strand starting at position 1338 of SEQ ID NO: 587562
gauuauucuuagcgcucca

SEQ ID NO: 801505 - RNA, 19 nt, Artificial Sequence
  Description of Artificial Sequence: Synthetic oligonucleotide
  Antisense strand to SEQ ID NO: 801504
uggagcgcuaagaauaauc

SEQ ID NO: 801506 - RNA, 19 nt, Artificial Sequence
  Description of Artificial Sequence: Synthetic oligonucleotide
  Sense strand starting at position 1351 of SEQ ID NO: 587562
gcuccacucucuucgcaaa

SEQ ID NO: 801507 - RNA, 19 nt, Artificial Sequence
  Description of Artificial Sequence: Synthetic oligonucleotide
  Antisense strand to SEQ ID NO: 801506
uuugcgaagagaguggagc

SEQ ID NO: 801508 - RNA, 19 nt, Artificial Sequence
  Description of Artificial Sequence: Synthetic oligonucleotide
  Sense strand starting at position 1661 of SEQ ID NO: 587562
ggugaugaccgugaucgca

SEQ ID NO: 801509 - RNA, 19 nt, Artificial Sequence
  Description of Artificial Sequence: Synthetic oligonucleotide
  Antisense strand to SEQ ID NO: 801508
ugcgaucacggucaucacc

SEQ ID NO: 801510 - RNA, 19 nt, Artificial Sequence
  Description of Artificial Sequence: Synthetic oligonucleotide
  Sense strand starting at position 1663 of SEQ ID NO: 587562
ugaugaccgugaucgcaaa

SEQ ID NO: 801511 - RNA, 19 nt, Artificial Sequence
  Description of Artificial Sequence: Synthetic oligonucleotide
  Antisense strand to SEQ ID NO: 801510
uuugcgaucacggucauca

SEQ ID NO: 801512 - RNA, 19 nt, Artificial Sequence
  Description of Artificial Sequence: Synthetic oligonucleotide
  Sense strand starting at position 1759 of SEQ ID NO: 587562
gguaguccucgcugcugau

SEQ ID NO: 801513 - RNA, 19 nt, Artificial Sequence
  Description of Artificial Sequence: Synthetic oligonucleotide
  Antisense strand to SEQ ID NO: 801512
aucagcagcgaggacuacc

SEQ ID NO: 801514 - RNA, 19 nt, Artificial Sequence
  Description of Artificial Sequence: Synthetic oligonucleotide
  Sense strand starting at position 2731 of SEQ ID NO: 587562
cgaaguuugcucggcucaa

SEQ ID NO: 801515 - RNA, 19 nt, Artificial Sequence
  Description of Artificial Sequence: Synthetic oligonucleotide
  Antisense strand to SEQ ID NO: 801514
uugagccgagcaaacuucg

SEQ ID NO: 801516 - RNA, 19 nt, Artificial Sequence
  Description of Artificial Sequence: Synthetic oligonucleotide
  Sense strand starting at position 2732 of SEQ ID NO: 587562
gaaguuugcucggcucaac

SEQ ID NO: 801517 - RNA, 19 nt, Artificial Sequence
  Description of Artificial Sequence: Synthetic oligonucleotide
  Antisense strand to SEQ ID NO: 801516
guugagccgagcaaacuuc

SEQ ID NO: 801518 - RNA, 19 nt, Artificial Sequence
  Description of Artificial Sequence: Synthetic oligonucleotide
  Sense strand starting at position 3626 of SEQ ID NO: 587562
gcgugucauuggccaggga

SEQ ID NO: 801519 - RNA, 19 nt, Artificial Sequence
  Description of Artificial Sequence: Synthetic oligonucleotide
  Antisense strand to SEQ ID NO: 801518
ucccuggccaaugacacgc

SEQ ID NO: 801520 - RNA, 19 nt, Artificial Sequence
  Description of Artificial Sequence: Synthetic oligonucleotide
  Sense strand starting at position 3629 of SEQ ID NO: 587562
ugucauuggccagggacau

SEQ ID NO: 801521 - RNA, 19 nt, Artificial Sequence
  Description of Artificial Sequence: Synthetic oligonucleotide
  Antisense strand to SEQ ID NO: 801520
augucccuggccaaugaca

SEQ ID NO: 801522 - RNA, 19 nt, Artificial Sequence
  Description of Artificial Sequence: Synthetic oligonucleotide
  Sense strand starting at position 3736 of SEQ ID NO: 587562
cgagucguuucccuggaga

SEQ ID NO: 801523 - RNA, 19 nt, Artificial Sequence
  Description of Artificial Sequence: Synthetic oligonucleotide
  Antisense strand to SEQ ID NO: 801522
ucuccagggaaacgacucg

SEQ ID NO: 801524 - RNA, 19 nt, Artificial Sequence
  Description of Artificial Sequence: Synthetic oligonucleotide
  Sense strand starting at position 3838 of SEQ ID NO: 587562
uguugcuuuacugaaggaa

SEQ ID NO: 801525 - RNA, 19 nt, Artificial Sequence
  Description of Artificial Sequence: Synthetic oligonucleotide
  Antisense strand to SEQ ID NO: 801524
uuccuucaguaaagcaaca

SEQ ID NO: 801526 - RNA, 19 nt, Artificial Sequence
  Description of Artificial Sequence: Synthetic oligonucleotide
  Sense strand starting at position 308 of SEQ ID NO: 587563
gcaguaaagccaugaagac

SEQ ID NO: 801527 - RNA, 19 nt, Artificial Sequence
  Description of Artificial Sequence: Synthetic oligonucleotide
  Antisense strand to SEQ ID NO: 801526
gucuucauggcuuuacugc

SEQ ID NO: 801528 - RNA, 19 nt, Artificial Sequence
  Description of Artificial Sequence: Synthetic oligonucleotide
  Sense strand starting at position 556 of SEQ ID NO: 587563
agaacugggcuaggucaua

SEQ ID NO: 801529 - RNA, 19 nt, Artificial Sequence
  Description of Artificial Sequence: Synthetic oligonucleotide
  Antisense strand to SEQ ID NO: 801528
uaugaccuagcccaguucu

SEQ ID NO: 801530 - RNA, 19 nt, Artificial Sequence
  Description of Artificial Sequence: Synthetic oligonucleotide
  Sense strand starting at position 567 of SEQ ID NO: 587563
aggucauacgguuaguaaa

SEQ ID NO: 801531 - RNA, 19 nt, Artificial Sequence
  Description of Artificial Sequence: Synthetic oligonucleotide
  Antisense strand to SEQ ID NO: 801530
uuuacuaaccguaugaccu

SEQ ID NO: 801532 - RNA, 19 nt, Artificial Sequence
  Description of Artificial Sequence: Synthetic oligonucleotide
  Sense strand starting at position 578 of SEQ ID NO: 587563
uuaguaaacccuugguuuc

SEQ ID NO: 801533 - RNA, 19 nt, Artificial Sequence
  Description of Artificial Sequence: Synthetic oligonucleotide
  Antisense strand to SEQ ID NO: 801532
gaaaccaaggguuuacuaa

SEQ ID NO: 801534 - RNA, 19 nt, Artificial Sequence
  Description of Artificial Sequence: Synthetic oligonucleotide
  Sense strand starting at position 609 of SEQ ID NO: 587563
uguuucugaggcuagaacu

SEQ ID NO: 801535 - RNA, 19 nt, Artificial Sequence
  Description of Artificial Sequence: Synthetic oligonucleotide
  Antisense strand to SEQ ID NO: 801534
aguucuagccucagaaaca

SEQ ID NO: 801536 - RNA, 19 nt, Artificial Sequence
  Description of Artificial Sequence: Synthetic oligonucleotide
  Sense strand starting at position 780 of SEQ ID NO: 587563
uguauuuaaucaucugugu

SEQ ID NO: 801537 - RNA, 19 nt, Artificial Sequence
  Description of Artificial Sequence: Synthetic oligonucleotide
  Antisense strand to SEQ ID NO: 801536
acacagaugauuaaauaca

SEQ ID NO: 801538 - RNA, 19 nt, Artificial Sequence
  Description of Artificial Sequence: Synthetic oligonucleotide
  Sense strand starting at position 839 of SEQ ID NO: 587563
agggauaagcuggguuacu

SEQ ID NO: 801539 - RNA, 19 nt, Artificial Sequence
  Description of Artificial Sequence: Synthetic oligonucleotide
  Antisense strand to SEQ ID NO: 801538
aguaacccagcuuaucccu

SEQ ID NO: 801540 - RNA, 19 nt, Artificial Sequence
  Description of Artificial Sequence: Synthetic oligonucleotide
  Sense strand starting at position 886 of SEQ ID NO: 587563
agaugaccuccugguacau

SEQ ID NO: 801541 - RNA, 19 nt, Artificial Sequence
  Description of Artificial Sequence: Synthetic oligonucleotide
  Antisense strand to SEQ ID NO: 801540
auguaccaggaggucaucu

SEQ ID NO: 801542 - RNA, 19 nt, Artificial Sequence
  Description of Artificial Sequence: Synthetic oligonucleotide
  Sense strand starting at position 992 of SEQ ID NO: 587563
cgugguggccaacaagauu

SEQ ID NO: 801543 - RNA, 19 nt, Artificial Sequence
  Description of Artificial Sequence: Synthetic oligonucleotide
  Antisense strand to SEQ ID NO: 801542
aaucuuguuggccaccacg

SEQ ID NO: 801544 - RNA, 19 nt, Artificial Sequence
  Description of Artificial Sequence: Synthetic oligonucleotide
  Sense strand starting at position 1078 of SEQ ID NO: 587563
acauuagcuugaccugaga

SEQ ID NO: 801545 - RNA, 19 nt, Artificial Sequence
  Description of Artificial Sequence: Synthetic oligonucleotide
  Antisense strand to SEQ ID NO: 801544
ucucaggucaagcuaaugu

SEQ ID NO: 801546 - RNA, 19 nt, Artificial Sequence
  Description of Artificial Sequence: Synthetic oligonucleotide
  Sense strand starting at position 1266 of SEQ ID NO: 587563
agaccucuuccagguccaa

SEQ ID NO: 801547 - RNA, 19 nt, Artificial Sequence
  Description of Artificial Sequence: Synthetic oligonucleotide
  Antisense strand to SEQ ID NO: 801546
uuggaccuggaagaggucu

SEQ ID NO: 801548 - RNA, 19 nt, Artificial Sequence
  Description of Artificial Sequence: Synthetic oligonucleotide
  Sense strand starting at position 1286 of SEQ ID NO: 587563
auucuagagcuccgggaua

SEQ ID NO: 801549 - RNA, 19 nt, Artificial Sequence
  Description of Artificial Sequence: Synthetic oligonucleotide
  Antisense strand to SEQ ID NO: 801548
uaucccggagcucuagaau

SEQ ID NO: 801550 - RNA, 19 nt, Artificial Sequence
  Description of Artificial Sequence: Synthetic oligonucleotide
  Sense strand starting at position 1288 of SEQ ID NO: 587563
ucuagagcuccgggauaca

SEQ ID NO: 801551 - RNA, 19 nt, Artificial Sequence
  Description of Artificial Sequence: Synthetic oligonucleotide
  Antisense strand to SEQ ID NO: 801550
uguaucccggagcucuaga

SEQ ID NO: 801552 - RNA, 19 nt, Artificial Sequence
  Description of Artificial Sequence: Synthetic oligonucleotide
  Sense strand starting at position 1291 of SEQ ID NO: 587563
agagcuccgggauacaauu

SEQ ID NO: 801553 - RNA, 19 nt, Artificial Sequence
  Description of Artificial Sequence: Synthetic oligonucleotide
  Antisense strand to SEQ ID NO: 801552
aauuguaucccggagcucu

SEQ ID NO: 801554 - RNA, 19 nt, Artificial Sequence
  Description of Artificial Sequence: Synthetic oligonucleotide
  Sense strand starting at position 1327 of SEQ ID NO: 587563
ccaggaugagucuaugugu

SEQ ID NO: 801555 - RNA, 19 nt, Artificial Sequence
  Description of Artificial Sequence: Synthetic oligonucleotide
  Antisense strand to SEQ ID NO: 801554
acacauagacucauccugg

SEQ ID NO: 801556 - RNA, 19 nt, Artificial Sequence
  Description of Artificial Sequence: Synthetic oligonucleotide
  Sense strand starting at position 1330 of SEQ ID NO: 587563
ggaugagucuaugugucag

SEQ ID NO: 801557 - RNA, 19 nt, Artificial Sequence
  Description of Artificial Sequence: Synthetic oligonucleotide
  Antisense strand to SEQ ID NO: 801556
cugacacauagacucaucc

SEQ ID NO: 801558 - RNA, 19 nt, Artificial Sequence
  Description of Artificial Sequence: Synthetic oligonucleotide
  Sense strand starting at position 1403 of SEQ ID NO: 587563
ccagguaauuuccagagga

SEQ ID NO: 801559 - RNA, 19 nt, Artificial Sequence
  Description of Artificial Sequence: Synthetic oligonucleotide
  Antisense strand to SEQ ID NO: 801558
uccucuggaaauuaccugg

SEQ ID NO: 801560 - RNA, 19 nt, Artificial Sequence
  Description of Artificial Sequence: Synthetic oligonucleotide
  Sense strand starting at position 1679 of SEQ ID NO: 587563
guaugugaauggccucaga

SEQ ID NO: 801561 - RNA, 19 nt, Artificial Sequence
  Description of Artificial Sequence: Synthetic oligonucleotide
  Antisense strand to SEQ ID NO: 801560
ucugaggccauucacauac

SEQ ID NO: 801562 - RNA, 19 nt, Artificial Sequence
  Description of Artificial Sequence: Synthetic oligonucleotide
  Sense strand starting at position 1714 of SEQ ID NO: 587563
gucagagaggaauguccaa

SEQ ID NO: 801563 - RNA, 19 nt, Artificial Sequence
  Description of Artificial Sequence: Synthetic oligonucleotide
  Antisense strand to SEQ ID NO: 801562
uuggacauuccucucugac

SEQ ID NO: 801564 - RNA, 19 nt, Artificial Sequence
  Description of Artificial Sequence: Synthetic oligonucleotide
  Sense strand starting at position 1737 of SEQ ID NO: 587563
ucucauuaccauuagggua

SEQ ID NO: 801565 - RNA, 19 nt, Artificial Sequence
  Description of Artificial Sequence: Synthetic oligonucleotide
  Antisense strand to SEQ ID NO: 801564
uacccuaaugguaaugaga

SEQ ID NO: 801566 - RNA, 19 nt, Artificial Sequence
  Description of Artificial Sequence: Synthetic oligonucleotide
  Sense strand starting at position 1874 of SEQ ID NO: 587563
ggacucugaguccaucuua

SEQ ID NO: 801567 - RNA, 19 nt, Artificial Sequence
  Description of Artificial Sequence: Synthetic oligonucleotide
  Antisense strand to SEQ ID NO: 801566
uaagauggacucagagucc

SEQ ID NO: 801568 - RNA, 19 nt, Artificial Sequence
  Description of Artificial Sequence: Synthetic oligonucleotide
  Sense strand starting at position 1946 of SEQ ID NO: 587563
cguguucugcaggcuucau

SEQ ID NO: 801569 - RNA, 19 nt, Artificial Sequence
  Description of Artificial Sequence: Synthetic oligonucleotide
  Antisense strand to SEQ ID NO: 801568
augaagccugcagaacacg

SEQ ID NO: 801570 - RNA, 19 nt, Artificial Sequence
  Description of Artificial Sequence: Synthetic oligonucleotide
  Sense strand starting at position 1964 of SEQ ID NO: 587563
uaagguaaugaaugcaaga

SEQ ID NO: 801571 - RNA, 19 nt, Artificial Sequence
  Description of Artificial Sequence: Synthetic oligonucleotide
  Antisense strand to SEQ ID NO: 801570
ucuugcauucauuaccuua

SEQ ID NO: 801572 - RNA, 19 nt, Artificial Sequence
  Description of Artificial Sequence: Synthetic oligonucleotide
  Sense strand starting at position 2059 of SEQ ID NO: 587563
agauaaagguaccagagaa

SEQ ID NO: 801573 - RNA, 19 nt, Artificial Sequence
  Description of Artificial Sequence: Synthetic oligonucleotide
  Antisense strand to SEQ ID NO: 801572
uucucugguaccuuuaucu

SEQ ID NO: 801574 - RNA, 19 nt, Artificial Sequence
  Description of Artificial Sequence: Synthetic oligonucleotide
  Sense strand starting at position 2366 of SEQ ID NO: 587563
aauagaagugccuaaaguu

SEQ ID NO: 801575 - RNA, 19 nt, Artificial Sequence
  Description of Artificial Sequence: Synthetic oligonucleotide
  Antisense strand to SEQ ID NO: 801574
aacuuuaggcacuucuauu

SEQ ID NO: 801576 - RNA, 19 nt, Artificial Sequence
  Description of Artificial Sequence: Synthetic oligonucleotide
  Sense strand starting at position 2527 of SEQ ID NO: 587563
ugggcuugaauauauguau

SEQ ID NO: 801577 - RNA, 19 nt, Artificial Sequence
  Description of Artificial Sequence: Synthetic oligonucleotide
  Antisense strand to SEQ ID NO: 801576
auacauauauucaagccca

SEQ ID NO: 801578 - RNA, 19 nt, Artificial Sequence
  Description of Artificial Sequence: Synthetic oligonucleotide
  Sense strand starting at position 2540 of SEQ ID NO: 587563
auguauguauuccucugau

SEQ ID NO: 801579 - RNA, 19 nt, Artificial Sequence
  Description of Artificial Sequence: Synthetic oligonucleotide
  Antisense strand to SEQ ID NO: 801578
aucagaggaauacauacau

SEQ ID NO: 801580 - RNA, 19 nt, Artificial Sequence
  Description of Artificial Sequence: Synthetic oligonucleotide
  Sense strand starting at position 2746 of SEQ ID NO: 587563
uguugugaggauugaaaga

SEQ ID NO: 801581 - RNA, 19 nt, Artificial Sequence
  Description of Artificial Sequence: Synthetic oligonucleotide
  Antisense strand to SEQ ID NO: 801580
ucuuucaauccucacaaca

SEQ ID NO: 801582 - RNA, 19 nt, Artificial Sequence
  Description of Artificial Sequence: Synthetic oligonucleotide
  Sense strand starting at position 2779 of SEQ ID NO: 587563
cuacaaaugugccuggaaa

SEQ ID NO: 801583 - RNA, 19 nt, Artificial Sequence
  Description of Artificial Sequence: Synthetic oligonucleotide
  Antisense strand to SEQ ID NO: 801582
uuuccaggcacauuuguag

SEQ ID NO: 801584 - RNA, 19 nt, Artificial Sequence
  Description of Artificial Sequence: Synthetic oligonucleotide
  Sense strand starting at position 2800 of SEQ ID NO: 587563
gcaaaugcucaauaaacgu

SEQ ID NO: 801585 - RNA, 19 nt, Artificial Sequence
  Description of Artificial Sequence: Synthetic oligonucleotide
  Antisense strand to SEQ ID NO: 801584
acguuuauugagcauuugc

SEQ ID NO: 801586 - RNA, 19 nt, Artificial Sequence
  Description of Artificial Sequence: Synthetic oligonucleotide
  Sense strand starting at position 3135 of SEQ ID NO: 587563
gaaagugucaagggaguuc

SEQ ID NO: 801587 - RNA, 19 nt, Artificial Sequence
  Description of Artificial Sequence: Synthetic oligonucleotide
  Antisense strand to SEQ ID NO: 801586
gaacucccuugacacuuuc

SEQ ID NO: 801588 - RNA, 19 nt, Artificial Sequence
  Description of Artificial Sequence: Synthetic oligonucleotide
  Sense strand starting at position 3201 of SEQ ID NO: 587563
acaagaagcugagcucuaa

SEQ ID NO: 801589 - RNA, 19 nt, Artificial Sequence
  Description of Artificial Sequence: Synthetic oligonucleotide
  Antisense strand to SEQ ID NO: 801588
uuagagcucagcuucuugu

SEQ ID NO: 801590 - RNA, 19 nt, Artificial Sequence
  Description of Artificial Sequence: Synthetic oligonucleotide
  Sense strand starting at position 3402 of SEQ ID NO: 587563
acuauuauuugcguuucua

SEQ ID NO: 801591 - RNA, 19 nt, Artificial Sequence
  Description of Artificial Sequence: Synthetic oligonucleotide
  Antisense strand to SEQ ID NO: 801590
uagaaacgcaaauaauagu

SEQ ID NO: 801592 - RNA, 19 nt, Artificial Sequence
  Description of Artificial Sequence: Synthetic oligonucleotide
  Sense strand starting at position 3749 of SEQ ID NO: 587563
agacuauucugguugcauc

SEQ ID NO: 801593 - RNA, 19 nt, Artificial Sequence
  Description of Artificial Sequence: Synthetic oligonucleotide
  Antisense strand to SEQ ID NO: 801592
gaugcaaccagaauagucu

SEQ ID NO: 801594 - RNA, 19 nt, Artificial Sequence
  Description of Artificial Sequence: Synthetic oligonucleotide
  Sense strand starting at position 3792 of SEQ ID NO: 587563
auuggaccucucugagcau

SEQ ID NO: 801595 - RNA, 19 nt, Artificial Sequence
  Description of Artificial Sequence: Synthetic oligonucleotide
  Antisense strand to SEQ ID NO: 801594
augcucagagagguccaau

SEQ ID NO: 801596 - RNA, 19 nt, Artificial Sequence
  Description of Artificial Sequence: Synthetic oligonucleotide
  Sense strand starting at position 3862 of SEQ ID NO: 587563
agccauucaguggguuaga

SEQ ID NO: 801597 - RNA, 19 nt, Artificial Sequence
  Description of Artificial Sequence: Synthetic oligonucleotide
  Antisense strand to SEQ ID NO: 801596
ucuaacccacugaauggcu

SEQ ID NO: 801598 - RNA, 19 nt, Artificial Sequence
  Description of Artificial Sequence: Synthetic oligonucleotide
  Sense strand starting at position 3904 of SEQ ID NO: 587563
aaggcaggagcuuaguaaa

SEQ ID NO: 801599 - RNA, 19 nt, Artificial Sequence
  Description of Artificial Sequence: Synthetic oligonucleotide
  Antisense strand to SEQ ID NO: 801598
uuuacuaagcuccugccuu

SEQ ID NO: 801600 - RNA, 19 nt, Artificial Sequence
  Description of Artificial Sequence: Synthetic oligonucleotide
  Sense strand starting at position 3942 of SEQ ID NO: 587563
aggugucaucuugaaaugu

SEQ ID NO: 801601 - RNA, 19 nt, Artificial Sequence
  Description of Artificial Sequence: Synthetic oligonucleotide
  Antisense strand to SEQ ID NO: 801600
acauuucaagaugacaccu

SEQ ID NO: 801602 - RNA, 19 nt, Artificial Sequence
  Description of Artificial Sequence: Synthetic oligonucleotide
  Sense strand starting at position 3951 of SEQ ID NO: 587563
cuugaaaugugucuuguaa

SEQ ID NO: 801603 - RNA, 19 nt, Artificial Sequence
  Description of Artificial Sequence: Synthetic oligonucleotide
  Antisense strand to SEQ ID NO: 801602
uuacaagacacauuucaag

SEQ ID NO: 801604 - RNA, 19 nt, Artificial Sequence
  Description of Artificial Sequence: Synthetic oligonucleotide
  Sense strand starting at position 3964 of SEQ ID NO: 587563
uuguaaagaccauguguau

SEQ ID NO: 801605 - RNA, 19 nt, Artificial Sequence
  Description of Artificial Sequence: Synthetic oligonucleotide
  Antisense strand to SEQ ID NO: 801604
auacacauggucuuuacaa

SEQ ID NO: 801606 - RNA, 19 nt, Artificial Sequence
  Description of Artificial Sequence: Synthetic oligonucleotide
  Sense strand starting at position 3 of SEQ ID NO: 587564
uugguaaccuccuugaaga

SEQ ID NO: 801607 - RNA, 19 nt, Artificial Sequence
  Description of Artificial Sequence: Synthetic oligonucleotide
  Antisense strand to SEQ ID NO: 801606
ucuucaaggagguuaccaa

SEQ ID NO: 801608 - RNA, 19 nt, Artificial Sequence
  Description of Artificial Sequence: Synthetic oligonucleotide
  Sense strand starting at position 4 of SEQ ID NO: 587564
ugguaaccuccuugaagaa

SEQ ID NO: 801609 - RNA, 19 nt, Artificial Sequence
  Description of Artificial Sequence: Synthetic oligonucleotide
  Antisense strand to SEQ ID NO: 801608
uucuucaaggagguuacca

SEQ ID NO: 801610 - RNA, 19 nt, Artificial Sequence
  Description of Artificial Sequence: Synthetic oligonucleotide
  Sense strand starting at position 150 of SEQ ID NO: 587564
cacaucagucaugggugaa

SEQ ID NO: 801611 - RNA, 19 nt, Artificial Sequence
  Description of Artificial Sequence: Synthetic oligonucleotide
  Antisense strand to SEQ ID NO: 801610
uucacccaugacugaugug

SEQ ID NO: 801612 - RNA, 19 nt, Artificial Sequence
  Description of Artificial Sequence: Synthetic oligonucleotide
  Sense strand starting at position 151 of SEQ ID NO: 587564
acaucagucaugggugaau

SEQ ID NO: 801613 - RNA, 19 nt, Artificial Sequence
  Description of Artificial Sequence: Synthetic oligonucleotide
  Antisense strand to SEQ ID NO: 801612
auucacccaugacugaugu

SEQ ID NO: 801614 - RNA, 19 nt, Artificial Sequence
  Description of Artificial Sequence: Synthetic oligonucleotide
  Sense strand starting at position 153 of SEQ ID NO: 587564
aucagucaugggugaauug

SEQ ID NO: 801615 - RNA, 19 nt, Artificial Sequence
  Description of Artificial Sequence: Synthetic oligonucleotide
  Antisense strand to SEQ ID NO: 801614
caauucacccaugacugau

SEQ ID NO: 801616 - RNA, 19 nt, Artificial Sequence
  Description of Artificial Sequence: Synthetic oligonucleotide
  Sense strand starting at position 519 of SEQ ID NO: 587564
ggagauucuuucuaggaga

SEQ ID NO: 801617 - RNA, 19 nt, Artificial Sequence
  Description of Artificial Sequence: Synthetic oligonucleotide
  Antisense strand to SEQ ID NO: 801616
ucuccuagaaagaaucucc

SEQ ID NO: 801618 - RNA, 19 nt, Artificial Sequence
  Description of Artificial Sequence: Synthetic oligonucleotide
  Sense strand starting at position 630 of SEQ ID NO: 587564
gagggaauaucggauccca

SEQ ID NO: 801619 - RNA, 19 nt, Artificial Sequence
  Description of Artificial Sequence: Synthetic oligonucleotide
  Antisense strand to SEQ ID NO: 801618
ugggauccgauauucccuc

SEQ ID NO: 801620 - RNA, 19 nt, Artificial Sequence
  Description of Artificial Sequence: Synthetic oligonucleotide
  Sense strand starting at position 717 of SEQ ID NO: 587564
cccucagucuaggcuuaga

SEQ ID NO: 801621 - RNA, 19 nt, Artificial Sequence
  Description of Artificial Sequence: Synthetic oligonucleotide
  Antisense strand to SEQ ID NO: 801620
ucuaagccuagacugaggg

SEQ ID NO: 801622 - RNA, 19 nt, Artificial Sequence
  Description of Artificial Sequence: Synthetic oligonucleotide
  Sense strand starting at position 820 of SEQ ID NO: 587564
gguucuucucuguaccagu

SEQ ID NO: 801623 - RNA, 19 nt, Artificial Sequence
  Description of Artificial Sequence: Synthetic oligonucleotide
  Antisense strand to SEQ ID NO: 801622
acugguacagagaagaacc

SEQ ID NO: 801624 - RNA, 19 nt, Artificial Sequence
  Description of Artificial Sequence: Synthetic oligonucleotide
  Sense strand starting at position 1282 of SEQ ID NO: 587564
gaaagcauccaugggucuu

SEQ ID NO: 801625 - RNA, 19 nt, Artificial Sequence
  Description of Artificial Sequence: Synthetic oligonucleotide
  Antisense strand to SEQ ID NO: 801624
aagacccauggaugcuuuc

SEQ ID NO: 801626 - RNA, 19 nt, Artificial Sequence
  Description of Artificial Sequence: Synthetic oligonucleotide
  Sense strand starting at position 1431 of SEQ ID NO: 587564
cagggcgucguagaucaaa

SEQ ID NO: 801627 - RNA, 19 nt, Artificial Sequence
  Description of Artificial Sequence: Synthetic oligonucleotide
  Antisense strand to SEQ ID NO: 801626
uuugaucuacgacgcccug

SEQ ID NO: 801628 - RNA, 19 nt, Artificial Sequence
  Description of Artificial Sequence: Synthetic oligonucleotide
  Sense strand starting at position 1434 of SEQ ID NO: 587564
ggcgucguagaucaaaguu

SEQ ID NO: 801629 - RNA, 19 nt, Artificial Sequence
  Description of Artificial Sequence: Synthetic oligonucleotide
  Antisense strand to SEQ ID NO: 801628
aacuuugaucuacgacgcc

SEQ ID NO: 801630 - RNA, 19 nt, Artificial Sequence
  Description of Artificial Sequence: Synthetic oligonucleotide
  Sense strand starting at position 1810 of SEQ ID NO: 587564
gcugcugcucugggaagaa

SEQ ID NO: 801631 - RNA, 19 nt, Artificial Sequence
  Description of Artificial Sequence: Synthetic oligonucleotide
  Antisense strand to SEQ ID NO: 801630
uucuucccagagcagcagc

SEQ ID NO: 801632 - RNA, 19 nt, Artificial Sequence
  Description of Artificial Sequence: Synthetic oligonucleotide
  Sense strand starting at position 2637 of SEQ ID NO: 587564
aaacauuggcucugugguu

SEQ ID NO: 801633 - RNA, 19 nt, Artificial Sequence
  Description of Artificial Sequence: Synthetic oligonucleotide
  Antisense strand to SEQ ID NO: 801632
aaccacagagccaauguuu

SEQ ID NO: 801634 - RNA, 19 nt, Artificial Sequence
  Description of Artificial Sequence: Synthetic oligonucleotide
  Sense strand starting at position 2652 of SEQ ID NO: 587564
gguugcagcuuugugaauu

SEQ ID NO: 801635 - RNA, 19 nt, Artificial Sequence
  Description of Artificial Sequence: Synthetic oligonucleotide
  Antisense strand to SEQ ID NO: 801634
aauucacaaagcugcaacc

SEQ ID NO: 801636 - RNA, 19 nt, Artificial Sequence
  Description of Artificial Sequence: Synthetic oligonucleotide
  Sense strand starting at position 3018 of SEQ ID NO: 587564
gugagcuucccuggcaaag

SEQ ID NO: 801637 - RNA, 19 nt, Artificial Sequence
  Description of Artificial Sequence: Synthetic oligonucleotide
  Antisense strand to SEQ ID NO: 801636
cuuugccagggaagcucac

SEQ ID NO: 801638 - RNA, 19 nt, Artificial Sequence
  Description of Artificial Sequence: Synthetic oligonucleotide
  Sense strand starting at position 3037 of SEQ ID NO: 587564
gguagugaucucuguccug

SEQ ID NO: 801639 - RNA, 19 nt, Artificial Sequence
  Description of Artificial Sequence: Synthetic oligonucleotide
  Antisense strand to SEQ ID NO: 801638
caggacagagaucacuacc

SEQ ID NO: 801640 - RNA, 19 nt, Artificial Sequence
  Description of Artificial Sequence: Synthetic oligonucleotide
  Sense strand starting at position 3040 of SEQ ID NO: 587564
agugaucucuguccugaag

SEQ ID NO: 801641 - RNA, 19 nt, Artificial Sequence
  Description of Artificial Sequence: Synthetic oligonucleotide
  Antisense strand to SEQ ID NO: 801640
cuucaggacagagaucacu

SEQ ID NO: 801642 - RNA, 19 nt, Artificial Sequence
  Description of Artificial Sequence: Synthetic oligonucleotide
  Sense strand starting at position 3088 of SEQ ID NO: 587564
cguccuagccgguggaaga

SEQ ID NO: 801643 - RNA, 19 nt, Artificial Sequence
  Description of Artificial Sequence: Synthetic oligonucleotide
  Antisense strand to SEQ ID NO: 801642
ucuuccaccggcuaggacg

SEQ ID NO: 801644 - RNA, 19 nt, Artificial Sequence
  Description of Artificial Sequence: Synthetic oligonucleotide
  Sense strand starting at position 3129 of SEQ ID NO: 587564
aguagaauuuccgauauug

SEQ ID NO: 801645 - RNA, 19 nt, Artificial Sequence
  Description of Artificial Sequence: Synthetic oligonucleotide
  Antisense strand to SEQ ID NO: 801644
caauaucggaaauucuacu

SEQ ID NO: 801646 - RNA, 19 nt, Artificial Sequence
  Description of Artificial Sequence: Synthetic oligonucleotide
  Sense strand starting at position 3134 of SEQ ID NO: 587564
aauuuccgauauugguaaa

SEQ ID NO: 801647 - RNA, 19 nt, Artificial Sequence
  Description of Artificial Sequence: Synthetic oligonucleotide
  Antisense strand to SEQ ID NO: 801646
uuuaccaauaucggaaauu

SEQ ID NO: 801648 - RNA, 19 nt, Artificial Sequence
  Description of Artificial Sequence: Synthetic oligonucleotide
  Sense strand starting at position 3146 of SEQ ID NO: 587564
ugguaaauaguauguggua

SEQ ID NO: 801649 - RNA, 19 nt, Artificial Sequence
  Description of Artificial Sequence: Synthetic oligonucleotide
  Antisense strand to SEQ ID NO: 801648
uaccacauacuauuuacca

SEQ ID NO: 801650 - RNA, 19 nt, Artificial Sequence
  Description of Artificial Sequence: Synthetic oligonucleotide
  Sense strand starting at position 3147 of SEQ ID NO: 587564
gguaaauaguaugugguaa

SEQ ID NO: 801651 - RNA, 19 nt, Artificial Sequence
  Description of Artificial Sequence: Synthetic oligonucleotide
  Antisense strand to SEQ ID NO: 801650
uuaccacauacuauuuacc

SEQ ID NO: 801652 - RNA, 19 nt, Artificial Sequence
  Description of Artificial Sequence: Synthetic oligonucleotide
  Sense strand starting at position 3148 of SEQ ID NO: 587564
guaaauaguaugugguaac

SEQ ID NO: 801653 - RNA, 19 nt, Artificial Sequence
  Description of Artificial Sequence: Synthetic oligonucleotide
  Antisense strand to SEQ ID NO: 801652
guuaccacauacuauuuac

SEQ ID NO: 801654 - RNA, 19 nt, Artificial Sequence
  Description of Artificial Sequence: Synthetic oligonucleotide
  Sense strand starting at position 3171 of SEQ ID NO: 587564
uagagugcugcgcuauagu

SEQ ID NO: 801655 - RNA, 19 nt, Artificial Sequence
  Description of Artificial Sequence: Synthetic oligonucleotide
  Antisense strand to SEQ ID NO: 801654
acuauagcgcagcacucua

SEQ ID NO: 801656 - RNA, 19 nt, Artificial Sequence
  Description of Artificial Sequence: Synthetic oligonucleotide
  Sense strand starting at position 3227 of SEQ ID NO: 587564
ggccuuauuguggagguga

SEQ ID NO: 801657 - RNA, 19 nt, Artificial Sequence
  Description of Artificial Sequence: Synthetic oligonucleotide
  Antisense strand to SEQ ID NO: 801656
ucaccuccacaauaaggcc

SEQ ID NO: 801658 - RNA, 19 nt, Artificial Sequence
  Description of Artificial Sequence: Synthetic oligonucleotide
  Sense strand starting at position 3242 of SEQ ID NO: 587564
gugaugcuucgaggugaga

SEQ ID NO: 801659 - RNA, 19 nt, Artificial Sequence
  Description of Artificial Sequence: Synthetic oligonucleotide
  Antisense strand to SEQ ID NO: 801658
ucucaccucgaagcaucac

SEQ ID NO: 801660 - RNA, 19 nt, Artificial Sequence
  Description of Artificial Sequence: Synthetic oligonucleotide
  Sense strand starting at position 3277 of SEQ ID NO: 587564
ggagcaacuauguaaaugu

SEQ ID NO: 801661 - RNA, 19 nt, Artificial Sequence
  Description of Artificial Sequence: Synthetic oligonucleotide
  Antisense strand to SEQ ID NO: 801660
acauuuacauaguugcucc

SEQ ID NO: 801662 - RNA, 19 nt, Artificial Sequence
  Description of Artificial Sequence: Synthetic oligonucleotide
  Sense strand starting at position 3284 of SEQ ID NO: 587564
cuauguaaauguccagaga

SEQ ID NO: 801663 - RNA, 19 nt, Artificial Sequence
  Description of Artificial Sequence: Synthetic oligonucleotide
  Antisense strand to SEQ ID NO: 801662
ucucuggacauuuacauag

SEQ ID NO: 801664 - RNA, 19 nt, Artificial Sequence
  Description of Artificial Sequence: Synthetic oligonucleotide
  Sense strand starting at position 3342 of SEQ ID NO: 587564
guggcuugagcuuaaugag

SEQ ID NO: 801665 - RNA, 19 nt, Artificial Sequence
  Description of Artificial Sequence: Synthetic oligonucleotide
  Antisense strand to SEQ ID NO: 801664
cucauuaagcucaagccac

SEQ ID NO: 801666 - RNA, 19 nt, Artificial Sequence
  Description of Artificial Sequence: Synthetic oligonucleotide
  Sense strand starting at position 3570 of SEQ ID NO: 587564
gaggaucuaucccuagugu

SEQ ID NO: 801667 - RNA, 19 nt, Artificial Sequence
  Description of Artificial Sequence: Synthetic oligonucleotide
  Antisense strand to SEQ ID NO: 801666
acacuagggauagauccuc

SEQ ID NO: 801668 - RNA, 19 nt, Artificial Sequence
  Description of Artificial Sequence: Synthetic oligonucleotide
  Sense strand starting at position 3571 of SEQ ID NO: 587564
aggaucuaucccuagugua

SEQ ID NO: 801669 - RNA, 19 nt, Artificial Sequence
  Description of Artificial Sequence: Synthetic oligonucleotide
  Antisense strand to SEQ ID NO: 801668
uacacuagggauagauccu

SEQ ID NO: 801670 - RNA, 19 nt, Artificial Sequence
  Description of Artificial Sequence: Synthetic oligonucleotide
  Sense strand starting at position 3576 of SEQ ID NO: 587564
cuaucccuaguguauaaga

SEQ ID NO: 801671 - RNA, 19 nt, Artificial Sequence
  Description of Artificial Sequence: Synthetic oligonucleotide
  Antisense strand to SEQ ID NO: 801670
ucuuauacacuagggauag

SEQ ID NO: 801672 - RNA, 19 nt, Artificial Sequence
  Description of Artificial Sequence: Synthetic oligonucleotide
  Sense strand starting at position 3800 of SEQ ID NO: 587564
ggaggaguuuccagaggaa

SEQ ID NO: 801673 - RNA, 19 nt, Artificial Sequence
  Description of Artificial Sequence: Synthetic oligonucleotide
  Antisense strand to SEQ ID NO: 801672
uuccucuggaaacuccucc

SEQ ID NO: 801674 - RNA, 19 nt, Artificial Sequence
  Description of Artificial Sequence: Synthetic oligonucleotide
  Sense strand starting at position 3803 of SEQ ID NO: 587564
ggaguuuccagaggaaguu

SEQ ID NO: 801675 - RNA, 19 nt, Artificial Sequence
  Description of Artificial Sequence: Synthetic oligonucleotide
  Antisense strand to SEQ ID NO: 801674
aacuuccucuggaaacucc

SEQ ID NO: 801676 - RNA, 19 nt, Artificial Sequence
  Description of Artificial Sequence: Synthetic oligonucleotide
  Sense strand starting at position 3819 of SEQ ID NO: 587564
guuaaacuguaagacugaa

SEQ ID NO: 801677 - RNA, 19 nt, Artificial Sequence
  Description of Artificial Sequence: Synthetic oligonucleotide
  Antisense strand to SEQ ID NO: 801676
uucagucuuacaguuuaac

SEQ ID NO: 801678 - RNA, 19 nt, Artificial Sequence
  Description of Artificial Sequence: Synthetic oligonucleotide
  Sense strand starting at position 3848 of SEQ ID NO: 587564
cagugugggaucgguacaa

SEQ ID NO: 801679 - RNA, 19 nt, Artificial Sequence
  Description of Artificial Sequence: Synthetic oligonucleotide
  Antisense strand to SEQ ID NO: 801678
uuguaccgaucccacacug

SEQ ID NO: 801680 - RNA, 19 nt, Artificial Sequence
  Description of Artificial Sequence: Synthetic oligonucleotide
  Sense strand starting at position 3874 of SEQ ID NO: 587564
cucucagugcaacagaauu

SEQ ID NO: 801681 - RNA, 19 nt, Artificial Sequence
  Description of Artificial Sequence: Synthetic oligonucleotide
  Antisense strand to SEQ ID NO: 801680
aauucuguugcacugagag

SEQ ID NO: 801682 - RNA, 19 nt, Artificial Sequence
  Description of Artificial Sequence: Synthetic oligonucleotide
  Sense strand starting at position 3885 of SEQ ID NO: 587564
acagaauucuuuguccaga

SEQ ID NO: 801683 - RNA, 19 nt, Artificial Sequence
  Description of Artificial Sequence: Synthetic oligonucleotide
  Antisense strand to SEQ ID NO: 801682
ucuggacaaagaauucugu

SEQ ID NO: 801684 - RNA, 19 nt, Artificial Sequence
  Description of Artificial Sequence: Synthetic oligonucleotide
  Sense strand starting at position 3887 of SEQ ID NO: 587564
agaauucuuuguccagaaa

SEQ ID NO: 801685 - RNA, 19 nt, Artificial Sequence
  Description of Artificial Sequence: Synthetic oligonucleotide
  Antisense strand to SEQ ID NO: 801684
uuucuggacaaagaauucu

SEQ ID NO: 801686 - RNA, 19 nt, Artificial Sequence
  Description of Artificial Sequence: Synthetic oligonucleotide
  Sense strand starting at position 1254 of SEQ ID NO: 587565
guggguauguuucuauuag

SEQ ID NO: 801687 - RNA, 19 nt, Artificial Sequence
  Description of Artificial Sequence: Synthetic oligonucleotide
  Antisense strand to SEQ ID NO: 801686
cuaauagaaacauacccac

SEQ ID NO: 801688 - RNA, 19 nt, Artificial Sequence
  Description of Artificial Sequence: Synthetic oligonucleotide
  Sense strand starting at position 1258 of SEQ ID NO: 587565
guauguuucuauuagcaca

SEQ ID NO: 801689 - RNA, 19 nt, Artificial Sequence
  Description of Artificial Sequence: Synthetic oligonucleotide
  Antisense strand to SEQ ID NO: 801688
ugugcuaauagaaacauac

SEQ ID NO: 801690 - RNA, 19 nt, Artificial Sequence
  Description of Artificial Sequence: Synthetic oligonucleotide
  Sense strand starting at position 2227 of SEQ ID NO: 587565
cccggugacagcuguuauu

SEQ ID NO: 801691 - RNA, 19 nt, Artificial Sequence
  Description of Artificial Sequence: Synthetic oligonucleotide
  Antisense strand to SEQ ID NO: 801690
aauaacagcugucaccggg

SEQ ID NO: 801692 - RNA, 19 nt, Artificial Sequence
  Description of Artificial Sequence: Synthetic oligonucleotide
  Sense strand starting at position 2230 of SEQ ID NO: 587565
ggugacagcuguuauuauc

SEQ ID NO: 801693 - RNA, 19 nt, Artificial Sequence
  Description of Artificial Sequence: Synthetic oligonucleotide
  Antisense strand to SEQ ID NO: 801692
gauaauaacagcugucacc

SEQ ID NO: 801694 - RNA, 19 nt, Artificial Sequence
  Description of Artificial Sequence: Synthetic oligonucleotide
  Sense strand starting at position 2310 of SEQ ID NO: 587565
ggagcugggcugggaaaua

SEQ ID NO: 801695 - RNA, 19 nt, Artificial Sequence
  Description of Artificial Sequence: Synthetic oligonucleotide
  Antisense strand to SEQ ID NO: 801694
uauuucccagcccagcucc

SEQ ID NO: 801696 - RNA, 19 nt, Artificial Sequence
  Description of Artificial Sequence: Synthetic oligonucleotide
  Sense strand starting at position 2535 of SEQ ID NO: 587565
gcgggagucgcugaguucu

SEQ ID NO: 801697 - RNA, 19 nt, Artificial Sequence
  Description of Artificial Sequence: Synthetic oligonucleotide
  Antisense strand to SEQ ID NO: 801696
agaacucagcgacucccgc

SEQ ID NO: 801698 - RNA, 19 nt, Artificial Sequence
  Description of Artificial Sequence: Synthetic oligonucleotide
  Sense strand starting at position 2671 of SEQ ID NO: 587565
cuguguguaccgcguucau

SEQ ID NO: 801699 - RNA, 19 nt, Artificial Sequence
  Description of Artificial Sequence: Synthetic oligonucleotide
  Antisense strand to SEQ ID NO: 801698
augaacgcgguacacacag

SEQ ID NO: 801700 - RNA, 19 nt, Artificial Sequence
  Description of Artificial Sequence: Synthetic oligonucleotide
  Sense strand starting at position 2673 of SEQ ID NO: 587565
guguguaccgcguucauua

SEQ ID NO: 801701 - RNA, 19 nt, Artificial Sequence
  Description of Artificial Sequence: Synthetic oligonucleotide
  Antisense strand to SEQ ID NO: 801700
uaaugaacgcgguacacac

SEQ ID NO: 801702 - RNA, 19 nt, Artificial Sequence
  Description of Artificial Sequence: Synthetic oligonucleotide
  Sense strand starting at position 2674 of SEQ ID NO: 587565
uguguaccgcguucauuaa

SEQ ID NO: 801703 - RNA, 19 nt, Artificial Sequence
  Description of Artificial Sequence: Synthetic oligonucleotide
  Antisense strand to SEQ ID NO: 801702
uuaaugaacgcgguacaca

SEQ ID NO: 801704 - RNA, 19 nt, Artificial Sequence
  Description of Artificial Sequence: Synthetic oligonucleotide
  Sense strand starting at position 2675 of SEQ ID NO: 587565
guguaccgcguucauuaaa

SEQ ID NO: 801705 - RNA, 19 nt, Artificial Sequence
  Description of Artificial Sequence: Synthetic oligonucleotide
  Antisense strand to SEQ ID NO: 801704
uuuaaugaacgcgguacac

SEQ ID NO: 801706 - RNA, 19 nt, Artificial Sequence
  Description of Artificial Sequence: Synthetic oligonucleotide
  Sense strand starting at position 2776 of SEQ ID NO: 587565
ccgugugcuguguguacau

SEQ ID NO: 801707 - RNA, 19 nt, Artificial Sequence
  Description of Artificial Sequence: Synthetic oligonucleotide
  Antisense strand to SEQ ID NO: 801706
auguacacacagcacacgg

SEQ ID NO: 801708 - RNA, 19 nt, Artificial Sequence
  Description of Artificial Sequence: Synthetic oligonucleotide
  Sense strand starting at position 2796 of SEQ ID NO: 587565
ugcuguguacaguguagua

SEQ ID NO: 801709 - RNA, 19 nt, Artificial Sequence
  Description of Artificial Sequence: Synthetic oligonucleotide
  Antisense strand to SEQ ID NO: 801708
uacuacacuguacacagca

SEQ ID NO: 801710 - RNA, 19 nt, Artificial Sequence
  Description of Artificial Sequence: Synthetic oligonucleotide
  Sense strand starting at position 2809 of SEQ ID NO: 587565
guaguacucuugggacugu

SEQ ID NO: 801711 - RNA, 19 nt, Artificial Sequence
  Description of Artificial Sequence: Synthetic oligonucleotide
  Antisense strand to SEQ ID NO: 801710
acagucccaagaguacuac

SEQ ID NO: 801712 - RNA, 19 nt, Artificial Sequence
  Description of Artificial Sequence: Synthetic oligonucleotide
  Sense strand starting at position 2845 of SEQ ID NO: 587565
ggaauauguugagagcggu

SEQ ID NO: 801713 - RNA, 19 nt, Artificial Sequence
  Description of Artificial Sequence: Synthetic oligonucleotide
  Antisense strand to SEQ ID NO: 801712
accgcucucaacauauucc

SEQ ID NO: 801714 - RNA, 19 nt, Artificial Sequence
  Description of Artificial Sequence: Synthetic oligonucleotide
  Sense strand starting at position 2851 of SEQ ID NO: 587565
uguugagagcggugugcuu

SEQ ID NO: 801715 - RNA, 19 nt, Artificial Sequence
  Description of Artificial Sequence: Synthetic oligonucleotide
  Antisense strand to SEQ ID NO: 801714
aagcacaccgcucucaaca

SEQ ID NO: 801716 - RNA, 19 nt, Artificial Sequence
  Description of Artificial Sequence: Synthetic oligonucleotide
  Sense strand starting at position 2912 of SEQ ID NO: 587565
gguagaugugcucaggauc

SEQ ID NO: 801717 - RNA, 19 nt, Artificial Sequence
  Description of Artificial Sequence: Synthetic oligonucleotide
  Antisense strand to SEQ ID NO: 801716
gauccugagcacaucuacc

SEQ ID NO: 801718 - RNA, 19 nt, Artificial Sequence
  Description of Artificial Sequence: Synthetic oligonucleotide
  Sense strand starting at position 2924 of SEQ ID NO: 587565
caggaucugugucccuauu

SEQ ID NO: 801719 - RNA, 19 nt, Artificial Sequence
  Description of Artificial Sequence: Synthetic oligonucleotide
  Antisense strand to SEQ ID NO: 801718
aauagggacacagauccug

SEQ ID NO: 801720 - RNA, 19 nt, Artificial Sequence
  Description of Artificial Sequence: Synthetic oligonucleotide
  Sense strand starting at position 2932 of SEQ ID NO: 587565
gugucccuauuccuaagaa

SEQ ID NO: 801721 - RNA, 19 nt, Artificial Sequence
  Description of Artificial Sequence: Synthetic oligonucleotide
  Antisense strand to SEQ ID NO: 801720
uucuuaggaauagggacac

SEQ ID NO: 801722 - RNA, 19 nt, Artificial Sequence
  Description of Artificial Sequence: Synthetic oligonucleotide
  Sense strand starting at position 2933 of SEQ ID NO: 587565
ugucccuauuccuaagaag

SEQ ID NO: 801723 - RNA, 19 nt, Artificial Sequence
  Description of Artificial Sequence: Synthetic oligonucleotide
  Antisense strand to SEQ ID NO: 801722
cuucuuaggaauagggaca

SEQ ID NO: 801724 - RNA, 19 nt, Artificial Sequence
  Description of Artificial Sequence: Synthetic oligonucleotide
  Sense strand starting at position 3010 of SEQ ID NO: 587565
cugggcugagcugagaaau

SEQ ID NO: 801725 - RNA, 19 nt, Artificial Sequence
  Description of Artificial Sequence: Synthetic oligonucleotide
  Antisense strand to SEQ ID NO: 801724
auuucucagcucagcccag

SEQ ID NO: 801726 - RNA, 19 nt, Artificial Sequence
  Description of Artificial Sequence: Synthetic oligonucleotide
  Sense strand starting at position 3122 of SEQ ID NO: 587565
ggagcuagcgucuacaugu

SEQ ID NO: 801727 - RNA, 19 nt, Artificial Sequence
  Description of Artificial Sequence: Synthetic oligonucleotide
  Antisense strand to SEQ ID NO: 801726
acauguagacgcuagcucc

SEQ ID NO: 801728 - RNA, 19 nt, Artificial Sequence
  Description of Artificial Sequence: Synthetic oligonucleotide
  Sense strand starting at position 3132 of SEQ ID NO: 587565
ucuacaugucucggucaga

SEQ ID NO: 801729 - RNA, 19 nt, Artificial Sequence
  Description of Artificial Sequence: Synthetic oligonucleotide
  Antisense strand to SEQ ID NO: 801728
ucugaccgagacauguaga

SEQ ID NO: 801730 - RNA, 19 nt, Artificial Sequence
  Description of Artificial Sequence: Synthetic oligonucleotide
  Sense strand starting at position 3133 of SEQ ID NO: 587565
cuacaugucucggucagaa

SEQ ID NO: 801731 - RNA, 19 nt, Artificial Sequence
  Description of Artificial Sequence: Synthetic oligonucleotide
  Antisense strand to SEQ ID NO: 801730
uucugaccgagacauguag

SEQ ID NO: 801732 - RNA, 19 nt, Artificial Sequence
  Description of Artificial Sequence: Synthetic oligonucleotide
  Sense strand starting at position 3135 of SEQ ID NO: 587565
acaugucucggucagaagu

SEQ ID NO: 801733 - RNA, 19 nt, Artificial Sequence
  Description of Artificial Sequence: Synthetic oligonucleotide
  Antisense strand to SEQ ID NO: 801732
acuucugaccgagacaugu

SEQ ID NO: 801734 - RNA, 19 nt, Artificial Sequence
  Description of Artificial Sequence: Synthetic oligonucleotide
  Sense strand starting at position 3145 of SEQ ID NO: 587565
gucagaaguccugggaaug

SEQ ID NO: 801735 - RNA, 19 nt, Artificial Sequence
  Description of Artificial Sequence: Synthetic oligonucleotide
  Antisense strand to SEQ ID NO: 801734
cauucccaggacuucugac

SEQ ID NO: 801736 - RNA, 19 nt, Artificial Sequence
  Description of Artificial Sequence: Synthetic oligonucleotide
  Sense strand starting at position 3214 of SEQ ID NO: 587565
ggaaguacauucuuucuuu

SEQ ID NO: 801737 - RNA, 19 nt, Artificial Sequence
  Description of Artificial Sequence: Synthetic oligonucleotide
  Antisense strand to SEQ ID NO: 801736
aaagaaagaauguacuucc

SEQ ID NO: 801738 - RNA, 19 nt, Artificial Sequence
  Description of Artificial Sequence: Synthetic oligonucleotide
  Sense strand starting at position 3310 of SEQ ID NO: 587565
ccuguagaggaccguuaau

SEQ ID NO: 801739 - RNA, 19 nt, Artificial Sequence
  Description of Artificial Sequence: Synthetic oligonucleotide
  Antisense strand to SEQ ID NO: 801738
auuaacgguccucuacagg

SEQ ID NO: 801740 - RNA, 19 nt, Artificial Sequence
  Description of Artificial Sequence: Synthetic oligonucleotide
  Sense strand starting at position 3321 of SEQ ID NO: 587565
ccguuaaucuggcuucgaa

SEQ ID NO: 801741 - RNA, 19 nt, Artificial Sequence
  Description of Artificial Sequence: Synthetic oligonucleotide
  Antisense strand to SEQ ID NO: 801740
uucgaagccagauuaacgg

SEQ ID NO: 801742 - RNA, 19 nt, Artificial Sequence
  Description of Artificial Sequence: Synthetic oligonucleotide
  Sense strand starting at position 3418 of SEQ ID NO: 587565
uguguuuccugcugagagg

SEQ ID NO: 801743 - RNA, 19 nt, Artificial Sequence
  Description of Artificial Sequence: Synthetic oligonucleotide
  Antisense strand to SEQ ID NO: 801742
ccucucagcaggaaacaca

SEQ ID NO: 801744 - RNA, 19 nt, Artificial Sequence
  Description of Artificial Sequence: Synthetic oligonucleotide
  Sense strand starting at position 3453 of SEQ ID NO: 587565
ccugcaggccucugcaaau

SEQ ID NO: 801745 - RNA, 19 nt, Artificial Sequence
  Description of Artificial Sequence: Synthetic oligonucleotide
  Antisense strand to SEQ ID NO: 801744
auuugcagaggccugcagg

SEQ ID NO: 801746 - RNA, 19 nt, Artificial Sequence
  Description of Artificial Sequence: Synthetic oligonucleotide
  Sense strand starting at position 3466 of SEQ ID NO: 587565
gcaaaugugguggauucca

SEQ ID NO: 801747 - RNA, 19 nt, Artificial Sequence
  Description of Artificial Sequence: Synthetic oligonucleotide
  Antisense strand to SEQ ID NO: 801746
uggaauccaccacauuugc

SEQ ID NO: 801748 - RNA, 19 nt, Artificial Sequence
  Description of Artificial Sequence: Synthetic oligonucleotide
  Sense strand starting at position 3536 of SEQ ID NO: 587565
cuuccucuuucuuguguau

SEQ ID NO: 801749 - RNA, 19 nt, Artificial Sequence
  Description of Artificial Sequence: Synthetic oligonucleotide
  Antisense strand to SEQ ID NO: 801748
auacacaagaaagaggaag

SEQ ID NO: 801750 - RNA, 19 nt, Artificial Sequence
  Description of Artificial Sequence: Synthetic oligonucleotide
  Sense strand starting at position 3538 of SEQ ID NO: 587565
uccucuuucuuguguauga

SEQ ID NO: 801751 - RNA, 19 nt, Artificial Sequence
  Description of Artificial Sequence: Synthetic oligonucleotide
  Antisense strand to SEQ ID NO: 801750
ucauacacaagaaagagga

SEQ ID NO: 801752 - RNA, 19 nt, Artificial Sequence
  Description of Artificial Sequence: Synthetic oligonucleotide
  Sense strand starting at position 3652 of SEQ ID NO: 587565
uuuauuucccaguguguuu

SEQ ID NO: 801753 - RNA, 19 nt, Artificial Sequence
  Description of Artificial Sequence: Synthetic oligonucleotide
  Antisense strand to SEQ ID NO: 801752
aaacacacugggaaauaaa

SEQ ID NO: 801754 - RNA, 19 nt, Artificial Sequence
  Description of Artificial Sequence: Synthetic oligonucleotide
  Sense strand starting at position 3718 of SEQ ID NO: 587565
aucugaucuugguuauccu

SEQ ID NO: 801755 - RNA, 19 nt, Artificial Sequence
  Description of Artificial Sequence: Synthetic oligonucleotide
  Antisense strand to SEQ ID NO: 801754
aggauaaccaagaucagau

SEQ ID NO: 801756 - RNA, 19 nt, Artificial Sequence
  Description of Artificial Sequence: Synthetic oligonucleotide
  Sense strand starting at position 3792 of SEQ ID NO: 587565
gucugcuggguccaucauu

SEQ ID NO: 801757 - RNA, 19 nt, Artificial Sequence
  Description of Artificial Sequence: Synthetic oligonucleotide
  Antisense strand to SEQ ID NO: 801756
aaugauggacccagcagac

SEQ ID NO: 801758 - RNA, 19 nt, Artificial Sequence
  Description of Artificial Sequence: Synthetic oligonucleotide
  Sense strand starting at position 3914 of SEQ ID NO: 587565
gugugugcuucagugcauu

SEQ ID NO: 801759 - RNA, 19 nt, Artificial Sequence
  Description of Artificial Sequence: Synthetic oligonucleotide
  Antisense strand to SEQ ID NO: 801758
aaugcacugaagcacacac

SEQ ID NO: 801760 - RNA, 19 nt, Artificial Sequence
  Description of Artificial Sequence: Synthetic oligonucleotide
  Sense strand starting at position 3932 of SEQ ID NO: 587565
uuauaaucccugugucagu

SEQ ID NO: 801761 - RNA, 19 nt, Artificial Sequence
  Description of Artificial Sequence: Synthetic oligonucleotide
  Antisense strand to SEQ ID NO: 801760
acugacacagggauuauaa

SEQ ID NO: 801762 - RNA, 19 nt, Artificial Sequence
  Description of Artificial Sequence: Synthetic oligonucleotide
  Sense strand starting at position 331 of SEQ ID NO: 587566
agcagaaugguacagcauu

SEQ ID NO: 801763 - RNA, 19 nt, Artificial Sequence
  Description of Artificial Sequence: Synthetic oligonucleotide
  Antisense strand to SEQ ID NO: 801762
aaugcuguaccauucugcu

SEQ ID NO: 801764 - RNA, 19 nt, Artificial Sequence
  Description of Artificial Sequence: Synthetic oligonucleotide
  Sense strand starting at position 408 of SEQ ID NO: 587566
aaggguauaccuggaucga

SEQ ID NO: 801765 - RNA, 19 nt, Artificial Sequence
  Description of Artificial Sequence: Synthetic oligonucleotide
  Antisense strand to SEQ ID NO: 801764
ucgauccagguauacccuu

SEQ ID NO: 801766 - RNA, 19 nt, Artificial Sequence
  Description of Artificial Sequence: Synthetic oligonucleotide
  Sense strand starting at position 534 of SEQ ID NO: 587566
gaacauugccuggagcaga

SEQ ID NO: 801767 - RNA, 19 nt, Artificial Sequence
  Description of Artificial Sequence: Synthetic oligonucleotide
  Antisense strand to SEQ ID NO: 801766
ucugcuccaggcaauguuc

SEQ ID NO: 801768 - RNA, 19 nt, Artificial Sequence
  Description of Artificial Sequence: Synthetic oligonucleotide
  Sense strand starting at position 649 of SEQ ID NO: 587566
cccauaugucaguauccca

SEQ ID NO: 801769 - RNA, 19 nt, Artificial Sequence
  Description of Artificial Sequence: Synthetic oligonucleotide
  Antisense strand to SEQ ID NO: 801768
ugggauacugacauauggg

SEQ ID NO: 801770 - RNA, 19 nt, Artificial Sequence
  Description of Artificial Sequence: Synthetic oligonucleotide
  Sense strand starting at position 652 of SEQ ID NO: 587566
auaugucaguaucccagaa

SEQ ID NO: 801771 - RNA, 19 nt, Artificial Sequence
  Description of Artificial Sequence: Synthetic oligonucleotide
  Antisense strand to SEQ ID NO: 801770
uucugggauacugacauau

SEQ ID NO: 801772 - RNA, 19 nt, Artificial Sequence
  Description of Artificial Sequence: Synthetic oligonucleotide
  Sense strand starting at position 656 of SEQ ID NO: 587566
gucaguaucccagaauucu

SEQ ID NO: 801773 - RNA, 19 nt, Artificial Sequence
  Description of Artificial Sequence: Synthetic oligonucleotide
  Antisense strand to SEQ ID NO: 801772
agaauucugggauacugac

SEQ ID NO: 801774 - RNA, 19 nt, Artificial Sequence
  Description of Artificial Sequence: Synthetic oligonucleotide
  Sense strand starting at position 896 of SEQ ID NO: 587566
uuaugaugcacaggugaaa

SEQ ID NO: 801775 - RNA, 19 nt, Artificial Sequence
  Description of Artificial Sequence: Synthetic oligonucleotide
  Antisense strand to SEQ ID NO: 801774
uuucaccugugcaucauaa

SEQ ID NO: 801776 - RNA, 19 nt, Artificial Sequence
  Description of Artificial Sequence: Synthetic oligonucleotide
  Sense strand starting at position 917 of SEQ ID NO: 587566
uguuguguuauggaaauug

SEQ ID NO: 801777 - RNA, 19 nt, Artificial Sequence
  Description of Artificial Sequence: Synthetic oligonucleotide
  Antisense strand to SEQ ID NO: 801776
caauuuccauaacacaaca

SEQ ID NO: 801778 - RNA, 19 nt, Artificial Sequence
  Description of Artificial Sequence: Synthetic oligonucleotide
  Sense strand starting at position 1169 of SEQ ID NO: 587566
ggguauaagaaauguccuu

SEQ ID NO: 801779 - RNA, 19 nt, Artificial Sequence
  Description of Artificial Sequence: Synthetic oligonucleotide
  Antisense strand to SEQ ID NO: 801778
aaggacauuucuuauaccc

SEQ ID NO: 801780 - RNA, 19 nt, Artificial Sequence
  Description of Artificial Sequence: Synthetic oligonucleotide
  Sense strand starting at position 1299 of SEQ ID NO: 587566
augcauuaugcaugaacaa

SEQ ID NO: 801781 - RNA, 19 nt, Artificial Sequence
  Description of Artificial Sequence: Synthetic oligonucleotide
  Antisense strand to SEQ ID NO: 801780
uuguucaugcauaaugcau

SEQ ID NO: 801782 - RNA, 19 nt, Artificial Sequence
  Description of Artificial Sequence: Synthetic oligonucleotide
  Sense strand starting at position 1300 of SEQ ID NO: 587566
ugcauuaugcaugaacaau

SEQ ID NO: 801783 - RNA, 19 nt, Artificial Sequence
  Description of Artificial Sequence: Synthetic oligonucleotide
  Antisense strand to SEQ ID NO: 801782
auuguucaugcauaaugca

SEQ ID NO: 801784 - RNA, 19 nt, Artificial Sequence
  Description of Artificial Sequence: Synthetic oligonucleotide
  Sense strand starting at position 1311 of SEQ ID NO: 587566
ugaacaauuuaugaaagca

SEQ ID NO: 801785 - RNA, 19 nt, Artificial Sequence
  Description of Artificial Sequence: Synthetic oligonucleotide
  Antisense strand to SEQ ID NO: 801784
ugcuuucauaaauuguuca

SEQ ID NO: 801786 - RNA, 19 nt, Artificial Sequence
  Description of Artificial Sequence: Synthetic oligonucleotide
  Sense strand starting at position 1319 of SEQ ID NO: 587566
uuaugaaagcaagguugau

SEQ ID NO: 801787 - RNA, 19 nt, Artificial Sequence
  Description of Artificial Sequence: Synthetic oligonucleotide
  Antisense strand to SEQ ID NO: 801786
aucaaccuugcuuucauaa

SEQ ID NO: 801788 - RNA, 19 nt, Artificial Sequence
  Description of Artificial Sequence: Synthetic oligonucleotide
  Sense strand starting at position 1413 of SEQ ID NO: 587566
uggacauaauguuuaugaa

SEQ ID NO: 801789 - RNA, 19 nt, Artificial Sequence
  Description of Artificial Sequence: Synthetic oligonucleotide
  Antisense strand to SEQ ID NO: 801788
uucauaaacauuaugucca

SEQ ID NO: 801790 - RNA, 19 nt, Artificial Sequence
  Description of Artificial Sequence: Synthetic oligonucleotide
  Sense strand starting at position 1501 of SEQ ID NO: 587566
uuuccagugaugggagaga

SEQ ID NO: 801791 - RNA, 19 nt, Artificial Sequence
  Description of Artificial Sequence: Synthetic oligonucleotide
  Antisense strand to SEQ ID NO: 801790
ucucucccaucacuggaaa

SEQ ID NO: 801792 - RNA, 19 nt, Artificial Sequence
  Description of Artificial Sequence: Synthetic oligonucleotide
  Sense strand starting at position 2024 of SEQ ID NO: 587566
cgugauaaccagugagaag

SEQ ID NO: 801793 - RNA, 19 nt, Artificial Sequence
  Description of Artificial Sequence: Synthetic oligonucleotide
  Antisense strand to SEQ ID NO: 801792
cuucucacugguuaucacg

SEQ ID NO: 801794 - RNA, 19 nt, Artificial Sequence
  Description of Artificial Sequence: Synthetic oligonucleotide
  Sense strand starting at position 2025 of SEQ ID NO: 587566
gugauaaccagugagaagu

SEQ ID NO: 801795 - RNA, 19 nt, Artificial Sequence
  Description of Artificial Sequence: Synthetic oligonucleotide
  Antisense strand to SEQ ID NO: 801794
acuucucacugguuaucac

SEQ ID NO: 801796 - RNA, 19 nt, Artificial Sequence
  Description of Artificial Sequence: Synthetic oligonucleotide
  Sense strand starting at position 2048 of SEQ ID NO: 587566
ggaacaagggucugccaau

SEQ ID NO: 801797 - RNA, 19 nt, Artificial Sequence
  Description of Artificial Sequence: Synthetic oligonucleotide
  Antisense strand to SEQ ID NO: 801796
auuggcagacccuuguucc

SEQ ID NO: 801798 - RNA, 19 nt, Artificial Sequence
  Description of Artificial Sequence: Synthetic oligonucleotide
  Sense strand starting at position 2083 of SEQ ID NO: 587566
auggguugugaaugaauac

SEQ ID NO: 801799 - RNA, 19 nt, Artificial Sequence
  Description of Artificial Sequence: Synthetic oligonucleotide
  Antisense strand to SEQ ID NO: 801798
guauucauucacaacccau

SEQ ID NO: 801800 - RNA, 19 nt, Artificial Sequence
  Description of Artificial Sequence: Synthetic oligonucleotide
  Sense strand starting at position 2264 of SEQ ID NO: 587566
acucuuucggagugaaaca

SEQ ID NO: 801801 - RNA, 19 nt, Artificial Sequence
  Description of Artificial Sequence: Synthetic oligonucleotide
  Antisense strand to SEQ ID NO: 801800
uguuucacuccgaaagagu

SEQ ID NO: 801802 - RNA, 19 nt, Artificial Sequence
  Description of Artificial Sequence: Synthetic oligonucleotide
  Sense strand starting at position 2265 of SEQ ID NO: 587566
cucuuucggagugaaacaa

SEQ ID NO: 801803 - RNA, 19 nt, Artificial Sequence
  Description of Artificial Sequence: Synthetic oligonucleotide
  Antisense strand to SEQ ID NO: 801802
uuguuucacuccgaaagag

SEQ ID NO: 801804 - RNA, 19 nt, Artificial Sequence
  Description of Artificial Sequence: Synthetic oligonucleotide
  Sense strand starting at position 2311 of SEQ ID NO: 587566
guucucuaucugggaggau

SEQ ID NO: 801805 - RNA, 19 nt, Artificial Sequence
  Description of Artificial Sequence: Synthetic oligonucleotide
  Antisense strand to SEQ ID NO: 801804
auccucccagauagagaac

SEQ ID NO: 801806 - RNA, 19 nt, Artificial Sequence
  Description of Artificial Sequence: Synthetic oligonucleotide
  Sense strand starting at position 2338 of SEQ ID NO: 587566
cuuaguaggcuuggaagga

SEQ ID NO: 801807 - RNA, 19 nt, Artificial Sequence
  Description of Artificial Sequence: Synthetic oligonucleotide
  Antisense strand to SEQ ID NO: 801806
uccuuccaagccuacuaag

SEQ ID NO: 801808 - RNA, 19 nt, Artificial Sequence
  Description of Artificial Sequence: Synthetic oligonucleotide
  Sense strand starting at position 2432 of SEQ ID NO: 587566
gaagaucuagugugcagaa

SEQ ID NO: 801809 - RNA, 19 nt, Artificial Sequence
  Description of Artificial Sequence: Synthetic oligonucleotide
  Antisense strand to SEQ ID NO: 801808
uucugcacacuagaucuuc

SEQ ID NO: 801810 - RNA, 19 nt, Artificial Sequence
  Description of Artificial Sequence: Synthetic oligonucleotide
  Sense strand starting at position 2434 of SEQ ID NO: 587566
agaucuagugugcagaaca

SEQ ID NO: 801811 - RNA, 19 nt, Artificial Sequence
  Description of Artificial Sequence: Synthetic oligonucleotide
  Antisense strand to SEQ ID NO: 801810
uguucugcacacuagaucu

SEQ ID NO: 801812 - RNA, 19 nt, Artificial Sequence
  Description of Artificial Sequence: Synthetic oligonucleotide
  Sense strand starting at position 2538 of SEQ ID NO: 587566
gaugauuaacucugugaga

SEQ ID NO: 801813 - RNA, 19 nt, Artificial Sequence
  Description of Artificial Sequence: Synthetic oligonucleotide
  Antisense strand to SEQ ID NO: 801812
ucucacagaguuaaucauc

SEQ ID NO: 801814 - RNA, 19 nt, Artificial Sequence
  Description of Artificial Sequence: Synthetic oligonucleotide
  Sense strand starting at position 2569 of SEQ ID NO: 587566
gaauuugcuugacuguagu

SEQ ID NO: 801815 - RNA, 19 nt, Artificial Sequence
  Description of Artificial Sequence: Synthetic oligonucleotide
  Antisense strand to SEQ ID NO: 801814
acuacagucaagcaaauuc

SEQ ID NO: 801816 - RNA, 19 nt, Artificial Sequence
  Description of Artificial Sequence: Synthetic oligonucleotide
  Sense strand starting at position 2793 of SEQ ID NO: 587566
uguucuauagaucagugaa

SEQ ID NO: 801817 - RNA, 19 nt, Artificial Sequence
  Description of Artificial Sequence: Synthetic oligonucleotide
  Antisense strand to SEQ ID NO: 801816
uucacugaucuauagaaca

SEQ ID NO: 801818 - RNA, 19 nt, Artificial Sequence
  Description of Artificial Sequence: Synthetic oligonucleotide
  Sense strand starting at position 2795 of SEQ ID NO: 587566
uucuauagaucagugaagu

SEQ ID NO: 801819 - RNA, 19 nt, Artificial Sequence
  Description of Artificial Sequence: Synthetic oligonucleotide
  Antisense strand to SEQ ID NO: 801818
acuucacugaucuauagaa

SEQ ID NO: 801820 - RNA, 19 nt, Artificial Sequence
  Description of Artificial Sequence: Synthetic oligonucleotide
  Sense strand starting at position 2796 of SEQ ID NO: 587566
ucuauagaucagugaagug

SEQ ID NO: 801821 - RNA, 19 nt, Artificial Sequence
  Description of Artificial Sequence: Synthetic oligonucleotide
  Antisense strand to SEQ ID NO: 801820
cacuucacugaucuauaga

SEQ ID NO: 801822 - RNA, 19 nt, Artificial Sequence
  Description of Artificial Sequence: Synthetic oligonucleotide
  Sense strand starting at position 2805 of SEQ ID NO: 587566
cagugaagugacuauagcu

SEQ ID NO: 801823 - RNA, 19 nt, Artificial Sequence
  Description of Artificial Sequence: Synthetic oligonucleotide
  Antisense strand to SEQ ID NO: 801822
agcuauagucacuucacug

SEQ ID NO: 801824 - RNA, 19 nt, Artificial Sequence
  Description of Artificial Sequence: Synthetic oligonucleotide
  Sense strand starting at position 2812 of SEQ ID NO: 587566
gugacuauagcuuaugaua

SEQ ID NO: 801825 - RNA, 19 nt, Artificial Sequence
  Description of Artificial Sequence: Synthetic oligonucleotide
  Antisense strand to SEQ ID NO: 801824
uaucauaagcuauagucac

SEQ ID NO: 801826 - RNA, 19 nt, Artificial Sequence
  Description of Artificial Sequence: Synthetic oligonucleotide
  Sense strand starting at position 2901 of SEQ ID NO: 587566
auguaaguugauugauauc

SEQ ID NO: 801827 - RNA, 19 nt, Artificial Sequence
  Description of Artificial Sequence: Synthetic oligonucleotide
  Antisense strand to SEQ ID NO: 801826
gauaucaaucaacuuacau

SEQ ID NO: 801828 - RNA, 19 nt, Artificial Sequence
  Description of Artificial Sequence: Synthetic oligonucleotide
  Sense strand starting at position 2948 of SEQ ID NO: 587566
aaauuaucacgugacuuga

SEQ ID NO: 801829 - RNA, 19 nt, Artificial Sequence
  Description of Artificial Sequence: Synthetic oligonucleotide
  Antisense strand to SEQ ID NO: 801828
ucaagucacgugauaauuu

SEQ ID NO: 801830 - RNA, 19 nt, Artificial Sequence
  Description of Artificial Sequence: Synthetic oligonucleotide
  Sense strand starting at position 2950 of SEQ ID NO: 587566
auuaucacgugacuugaaa

SEQ ID NO: 801831 - RNA, 19 nt, Artificial Sequence
  Description of Artificial Sequence: Synthetic oligonucleotide
  Antisense strand to SEQ ID NO: 801830
uuucaagucacgugauaau

SEQ ID NO: 801832 - RNA, 19 nt, Artificial Sequence
  Description of Artificial Sequence: Synthetic oligonucleotide
  Sense strand starting at position 3311 of SEQ ID NO: 587566
agguguaagaaaugucaug

SEQ ID NO: 801833 - RNA, 19 nt, Artificial Sequence
  Description of Artificial Sequence: Synthetic oligonucleotide
  Antisense strand to SEQ ID NO: 801832
caugacauuucuuacaccu

SEQ ID NO: 801834 - RNA, 19 nt, Artificial Sequence
  Description of Artificial Sequence: Synthetic oligonucleotide
  Sense strand starting at position 3601 of SEQ ID NO: 587566
aacaaagggcgauguuuaa

SEQ ID NO: 801835 - RNA, 19 nt, Artificial Sequence
  Description of Artificial Sequence: Synthetic oligonucleotide
  Antisense strand to SEQ ID NO: 801834
uuaaacaucgcccuuuguu

SEQ ID NO: 801836 - RNA, 19 nt, Artificial Sequence
  Description of Artificial Sequence: Synthetic oligonucleotide
  Sense strand starting at position 3623 of SEQ ID NO: 587566
aacacuggucuaggaguua

SEQ ID NO: 801837 - RNA, 19 nt, Artificial Sequence
  Description of Artificial Sequence: Synthetic oligonucleotide
  Antisense strand to SEQ ID NO: 801836
uaacuccuagaccaguguu

SEQ ID NO: 801838 - RNA, 19 nt, Artificial Sequence
  Description of Artificial Sequence: Synthetic oligonucleotide
  Sense strand starting at position 3676 of SEQ ID NO: 587566
guuacugugugauuucuaa

SEQ ID NO: 801839 - RNA, 19 nt, Artificial Sequence
  Description of Artificial Sequence: Synthetic oligonucleotide
  Antisense strand to SEQ ID NO: 801838
uuagaaaucacacaguaac

SEQ ID NO: 801840 - RNA, 19 nt, Artificial Sequence
  Description of Artificial Sequence: Synthetic oligonucleotide
  Sense strand starting at position 3816 of SEQ ID NO: 587566
auaagaugccauuagccau

SEQ ID NO: 801841 - RNA, 19 nt, Artificial Sequence
  Description of Artificial Sequence: Synthetic oligonucleotide
  Antisense strand to SEQ ID NO: 801840
auggcuaauggcaucuuau

SEQ ID NO: 801842 - RNA, 19 nt, Artificial Sequence
  Description of Artificial Sequence: Synthetic oligonucleotide
  Sense strand starting at position 74 of SEQ ID NO: 587567
uuuggugauuagucuaacu

SEQ ID NO: 801843 - RNA, 19 nt, Artificial Sequence
  Description of Artificial Sequence: Synthetic oligonucleotide
  Antisense strand to SEQ ID NO: 801842
aguuagacuaaucaccaaa

SEQ ID NO: 801844 - RNA, 19 nt, Artificial Sequence
  Description of Artificial Sequence: Synthetic oligonucleotide
  Sense strand starting at position 196 of SEQ ID NO: 587567
gugucuuacccacaguauu

SEQ ID NO: 801845 - RNA, 19 nt, Artificial Sequence
  Description of Artificial Sequence: Synthetic oligonucleotide
  Antisense strand to SEQ ID NO: 801844
aauacuguggguaagacac

SEQ ID NO: 801846 - RNA, 19 nt, Artificial Sequence
  Description of Artificial Sequence: Synthetic oligonucleotide
  Sense strand starting at position 572 of SEQ ID NO: 587567
gacacuuucuuaguagaag

SEQ ID NO: 801847 - RNA, 19 nt, Artificial Sequence
  Description of Artificial Sequence: Synthetic oligonucleotide
  Antisense strand to SEQ ID NO: 801846
cuucuacuaagaaaguguc

SEQ ID NO: 801848 - RNA, 19 nt, Artificial Sequence
  Description of Artificial Sequence: Synthetic oligonucleotide
  Sense strand starting at position 599 of SEQ ID NO: 587567
uaguaaagcuacuuuggau

SEQ ID NO: 801849 - RNA, 19 nt, Artificial Sequence
  Description of Artificial Sequence: Synthetic oligonucleotide
  Antisense strand to SEQ ID NO: 801848
auccaaaguagcuuuacua

SEQ ID NO: 801850 - RNA, 19 nt, Artificial Sequence
  Description of Artificial Sequence: Synthetic oligonucleotide
  Sense strand starting at position 606 of SEQ ID NO: 587567
gcuacuuuggauuaauaca

SEQ ID NO: 801851 - RNA, 19 nt, Artificial Sequence
  Description of Artificial Sequence: Synthetic oligonucleotide
  Antisense strand to SEQ ID NO: 801850
uguauuaauccaaaguagc

SEQ ID NO: 801852 - RNA, 19 nt, Artificial Sequence
  Description of Artificial Sequence: Synthetic oligonucleotide
  Sense strand starting at position 652 of SEQ ID NO: 587567
agauguuuggcagguggaa

SEQ ID NO: 801853 - RNA, 19 nt, Artificial Sequence
  Description of Artificial Sequence: Synthetic oligonucleotide
  Antisense strand to SEQ ID NO: 801852
uuccaccugccaaacaucu

SEQ ID NO: 801854 - RNA, 19 nt, Artificial Sequence
  Description of Artificial Sequence: Synthetic oligonucleotide
  Sense strand starting at position 684 of SEQ ID NO: 587567
guguaaaggaaauguauuc

SEQ ID NO: 801855 - RNA, 19 nt, Artificial Sequence
  Description of Artificial Sequence: Synthetic oligonucleotide
  Antisense strand to SEQ ID NO: 801854
gaauacauuuccuuuacac

SEQ ID NO: 801856 - RNA, 19 nt, Artificial Sequence
  Description of Artificial Sequence: Synthetic oligonucleotide
  Sense strand starting at position 820 of SEQ ID NO: 587567
guguucuagguuugauaaa

SEQ ID NO: 801857 - RNA, 19 nt, Artificial Sequence
  Description of Artificial Sequence: Synthetic oligonucleotide
  Antisense strand to SEQ ID NO: 801856
uuuaucaaaccuagaacac

SEQ ID NO: 801858 - RNA, 19 nt, Artificial Sequence
  Description of Artificial Sequence: Synthetic oligonucleotide
  Sense strand starting at position 939 of SEQ ID NO: 587567
ugaagucccuugccuuaua

SEQ ID NO: 801859 - RNA, 19 nt, Artificial Sequence
  Description of Artificial Sequence: Synthetic oligonucleotide
  Antisense strand to SEQ ID NO: 801858
uauaaggcaagggacuuca

SEQ ID NO: 801860 - RNA, 19 nt, Artificial Sequence
  Description of Artificial Sequence: Synthetic oligonucleotide
  Sense strand starting at position 949 of SEQ ID NO: 587567
ugccuuauacguuaaauua

SEQ ID NO: 801861 - RNA, 19 nt, Artificial Sequence
  Description of Artificial Sequence: Synthetic oligonucleotide
  Antisense strand to SEQ ID NO: 801860
uaauuuaacguauaaggca

SEQ ID NO: 801862 - RNA, 19 nt, Artificial Sequence
  Description of Artificial Sequence: Synthetic oligonucleotide
  Sense strand starting at position 1019 of SEQ ID NO: 587567
ggcguugaugcuuuccagu

SEQ ID NO: 801863 - RNA, 19 nt, Artificial Sequence
  Description of Artificial Sequence: Synthetic oligonucleotide
  Antisense strand to SEQ ID NO: 801862
acuggaaagcaucaacgcc

SEQ ID NO: 801864 - RNA, 19 nt, Artificial Sequence
  Description of Artificial Sequence: Synthetic oligonucleotide
  Sense strand starting at position 1110 of SEQ ID NO: 587567
uguguaaagccucaaaucu

SEQ ID NO: 801865 - RNA, 19 nt, Artificial Sequence
  Description of Artificial Sequence: Synthetic oligonucleotide
  Antisense strand to SEQ ID NO: 801864
agauuugaggcuuuacaca

SEQ ID NO: 801866 - RNA, 19 nt, Artificial Sequence
  Description of Artificial Sequence: Synthetic oligonucleotide
  Sense strand starting at position 1307 of SEQ ID NO: 587567
gguaguagugcaggacaua

SEQ ID NO: 801867 - RNA, 19 nt, Artificial Sequence
  Description of Artificial Sequence: Synthetic oligonucleotide
  Antisense strand to SEQ ID NO: 801866
uauguccugcacuacuacc

SEQ ID NO: 801868 - RNA, 19 nt, Artificial Sequence
  Description of Artificial Sequence: Synthetic oligonucleotide
  Sense strand starting at position 1308 of SEQ ID NO: 587567
guaguagugcaggacauau

SEQ ID NO: 801869 - RNA, 19 nt, Artificial Sequence
  Description of Artificial Sequence: Synthetic oligonucleotide
  Antisense strand to SEQ ID NO: 801868
auauguccugcacuacuac

SEQ ID NO: 801870 - RNA, 19 nt, Artificial Sequence
  Description of Artificial Sequence: Synthetic oligonucleotide
  Sense strand starting at position 2039 of SEQ ID NO: 587567
agguguacagauugaauga

SEQ ID NO: 801871 - RNA, 19 nt, Artificial Sequence
  Description of Artificial Sequence: Synthetic oligonucleotide
  Antisense strand to SEQ ID NO: 801870
ucauucaaucuguacaccu

SEQ ID NO: 801872 - RNA, 19 nt, Artificial Sequence
  Description of Artificial Sequence: Synthetic oligonucleotide
  Sense strand starting at position 2137 of SEQ ID NO: 587567
agaugacucuuagcugaac

SEQ ID NO: 801873 - RNA, 19 nt, Artificial Sequence
  Description of Artificial Sequence: Synthetic oligonucleotide
  Antisense strand to SEQ ID NO: 801872
guucagcuaagagucaucu

SEQ ID NO: 801874 - RNA, 19 nt, Artificial Sequence
  Description of Artificial Sequence: Synthetic oligonucleotide
  Sense strand starting at position 2348 of SEQ ID NO: 587567
gggaggguucucuggguga

SEQ ID NO: 801875 - RNA, 19 nt, Artificial Sequence
  Description of Artificial Sequence: Synthetic oligonucleotide
  Antisense strand to SEQ ID NO: 801874
ucacccagagaacccuccc

SEQ ID NO: 801876 - RNA, 19 nt, Artificial Sequence
  Description of Artificial Sequence: Synthetic oligonucleotide
  Sense strand starting at position 2395 of SEQ ID NO: 587567
cucucauucuagucugaug

SEQ ID NO: 801877 - RNA, 19 nt, Artificial Sequence
  Description of Artificial Sequence: Synthetic oligonucleotide
  Antisense strand to SEQ ID NO: 801876
caucagacuagaaugagag

SEQ ID NO: 801878 - RNA, 19 nt, Artificial Sequence
  Description of Artificial Sequence: Synthetic oligonucleotide
  Sense strand starting at position 2397 of SEQ ID NO: 587567
cucauucuagucugaugau

SEQ ID NO: 801879 - RNA, 19 nt, Artificial Sequence
  Description of Artificial Sequence: Synthetic oligonucleotide
  Antisense strand to SEQ ID NO: 801878
aucaucagacuagaaugag

SEQ ID NO: 801880 - RNA, 19 nt, Artificial Sequence
  Description of Artificial Sequence: Synthetic oligonucleotide
  Sense strand starting at position 2403 of SEQ ID NO: 587567
cuagucugaugaucacuga

SEQ ID NO: 801881 - RNA, 19 nt, Artificial Sequence
  Description of Artificial Sequence: Synthetic oligonucleotide
  Antisense strand to SEQ ID NO: 801880
ucagugaucaucagacuag

SEQ ID NO: 801882 - RNA, 19 nt, Artificial Sequence
  Description of Artificial Sequence: Synthetic oligonucleotide
  Sense strand starting at position 2455 of SEQ ID NO: 587567
cugaccuccugguugagaa

SEQ ID NO: 801883 - RNA, 19 nt, Artificial Sequence
  Description of Artificial Sequence: Synthetic oligonucleotide
  Antisense strand to SEQ ID NO: 801882
uucucaaccaggaggucag

SEQ ID NO: 801884 - RNA, 19 nt, Artificial Sequence
  Description of Artificial Sequence: Synthetic oligonucleotide
  Sense strand starting at position 2456 of SEQ ID NO: 587567
ugaccuccugguugagaaa

SEQ ID NO: 801885 - RNA, 19 nt, Artificial Sequence
  Description of Artificial Sequence: Synthetic oligonucleotide
  Antisense strand to SEQ ID NO: 801884
uuucucaaccaggagguca

SEQ ID NO: 801886 - RNA, 19 nt, Artificial Sequence
  Description of Artificial Sequence: Synthetic oligonucleotide
  Sense strand starting at position 2508 of SEQ ID NO: 587567
cccagugggucacuaagaa

SEQ ID NO: 801887 - RNA, 19 nt, Artificial Sequence
  Description of Artificial Sequence: Synthetic oligonucleotide
  Antisense strand to SEQ ID NO: 801886
uucuuagugacccacuggg

SEQ ID NO: 801888 - RNA, 19 nt, Artificial Sequence
  Description of Artificial Sequence: Synthetic oligonucleotide
  Sense strand starting at position 2620 of SEQ ID NO: 587567
ccuacaaguuucccggaga

SEQ ID NO: 801889 - RNA, 19 nt, Artificial Sequence
  Description of Artificial Sequence: Synthetic oligonucleotide
  Antisense strand to SEQ ID NO: 801888
ucuccgggaaacuuguagg

SEQ ID NO: 801890 - RNA, 19 nt, Artificial Sequence
  Description of Artificial Sequence: Synthetic oligonucleotide
  Sense strand starting at position 2623 of SEQ ID NO: 587567
acaaguuucccggagagca

SEQ ID NO: 801891 - RNA, 19 nt, Artificial Sequence
  Description of Artificial Sequence: Synthetic oligonucleotide
  Antisense strand to SEQ ID NO: 801890
ugcucuccgggaaacuugu

SEQ ID NO: 801892 - RNA, 19 nt, Artificial Sequence
  Description of Artificial Sequence: Synthetic oligonucleotide
  Sense strand starting at position 2955 of SEQ ID NO: 587567
ccucuuagucuacacguga

SEQ ID NO: 801893 - RNA, 19 nt, Artificial Sequence
  Description of Artificial Sequence: Synthetic oligonucleotide
  Antisense strand to SEQ ID NO: 801892
ucacguguagacuaagagg

SEQ ID NO: 801894 - RNA, 19 nt, Artificial Sequence
  Description of Artificial Sequence: Synthetic oligonucleotide
  Sense strand starting at position 2997 of SEQ ID NO: 587567
gggaaacuguguuccagcu

SEQ ID NO: 801895 - RNA, 19 nt, Artificial Sequence
  Description of Artificial Sequence: Synthetic oligonucleotide
  Antisense strand to SEQ ID NO: 801894
agcuggaacacaguuuccc

SEQ ID NO: 801896 - RNA, 19 nt, Artificial Sequence
  Description of Artificial Sequence: Synthetic oligonucleotide
  Sense strand starting at position 3109 of SEQ ID NO: 587567
gcccgcucuagcucugaga

SEQ ID NO: 801897 - RNA, 19 nt, Artificial Sequence
  Description of Artificial Sequence: Synthetic oligonucleotide
  Antisense strand to SEQ ID NO: 801896
ucucagagcuagagcgggc

SEQ ID NO: 801898 - RNA, 19 nt, Artificial Sequence
  Description of Artificial Sequence: Synthetic oligonucleotide
  Sense strand starting at position 3310 of SEQ ID NO: 587567
uuguaaaugcuccagagca

SEQ ID NO: 801899 - RNA, 19 nt, Artificial Sequence
  Description of Artificial Sequence: Synthetic oligonucleotide
  Antisense strand to SEQ ID NO: 801898
ugcucuggagcauuuacaa

SEQ ID NO: 801900 - RNA, 19 nt, Artificial Sequence
  Description of Artificial Sequence: Synthetic oligonucleotide
  Sense strand starting at position 3312 of SEQ ID NO: 587567
guaaaugcuccagagcaaa

SEQ ID NO: 801901 - RNA, 19 nt, Artificial Sequence
  Description of Artificial Sequence: Synthetic oligonucleotide
  Antisense strand to SEQ ID NO: 801900
uuugcucuggagcauuuac

SEQ ID NO: 801902 - RNA, 19 nt, Artificial Sequence
  Description of Artificial Sequence: Synthetic oligonucleotide
  Sense strand starting at position 3338 of SEQ ID NO: 587567
acuggaucagugugcuaaa

SEQ ID NO: 801903 - RNA, 19 nt, Artificial Sequence
  Description of Artificial Sequence: Synthetic oligonucleotide
  Antisense strand to SEQ ID NO: 801902
uuuagcacacugauccagu

SEQ ID NO: 801904 - RNA, 19 nt, Artificial Sequence
  Description of Artificial Sequence: Synthetic oligonucleotide
  Sense strand starting at position 3339 of SEQ ID NO: 587567
cuggaucagugugcuaaac

SEQ ID NO: 801905 - RNA, 19 nt, Artificial Sequence
  Description of Artificial Sequence: Synthetic oligonucleotide
  Antisense strand to SEQ ID NO: 801904
guuuagcacacugauccag

SEQ ID NO: 801906 - RNA, 19 nt, Artificial Sequence
  Description of Artificial Sequence: Synthetic oligonucleotide
  Sense strand starting at position 3348 of SEQ ID NO: 587567
ugugcuaaacuugagguua

SEQ ID NO: 801907 - RNA, 19 nt, Artificial Sequence
  Description of Artificial Sequence: Synthetic oligonucleotide
  Antisense strand to SEQ ID NO: 801906
uaaccucaaguuuagcaca

SEQ ID NO: 801908 - RNA, 19 nt, Artificial Sequence
  Description of Artificial Sequence: Synthetic oligonucleotide
  Sense strand starting at position 3583 of SEQ ID NO: 587567
acacguauuagguaguaua

SEQ ID NO: 801909 - RNA, 19 nt, Artificial Sequence
  Description of Artificial Sequence: Synthetic oligonucleotide
  Antisense strand to SEQ ID NO: 801908
uauacuaccuaauacgugu

SEQ ID NO: 801910 - RNA, 19 nt, Artificial Sequence
  Description of Artificial Sequence: Synthetic oligonucleotide
  Sense strand starting at position 3626 of SEQ ID NO: 587567
gauguaguagaauaagcuu

SEQ ID NO: 801911 - RNA, 19 nt, Artificial Sequence
  Description of Artificial Sequence: Synthetic oligonucleotide
  Antisense strand to SEQ ID NO: 801910
aagcuuauucuacuacauc

SEQ ID NO: 801912 - RNA, 19 nt, Artificial Sequence
  Description of Artificial Sequence: Synthetic oligonucleotide
  Sense strand starting at position 3658 of SEQ ID NO: 587567
acagaaacgugacuguuua

SEQ ID NO: 801913 - RNA, 19 nt, Artificial Sequence
  Description of Artificial Sequence: Synthetic oligonucleotide
  Antisense strand to SEQ ID NO: 801912
uaaacagucacguuucugu

SEQ ID NO: 801914 - RNA, 19 nt, Artificial Sequence
  Description of Artificial Sequence: Synthetic oligonucleotide
  Sense strand starting at position 3700 of SEQ ID NO: 587567
ugggacgucuagcuaucau

SEQ ID NO: 801915 - RNA, 19 nt, Artificial Sequence
  Description of Artificial Sequence: Synthetic oligonucleotide
  Antisense strand to SEQ ID NO: 801914
augauagcuagacguccca

SEQ ID NO: 801916 - RNA, 19 nt, Artificial Sequence
  Description of Artificial Sequence: Synthetic oligonucleotide
  Sense strand starting at position 3734 of SEQ ID NO: 587567
cagugccuuccucagugaa

SEQ ID NO: 801917 - RNA, 19 nt, Artificial Sequence
  Description of Artificial Sequence: Synthetic oligonucleotide
  Antisense strand to SEQ ID NO: 801916
uucacugaggaaggcacug

SEQ ID NO: 801918 - RNA, 19 nt, Artificial Sequence
  Description of Artificial Sequence: Synthetic oligonucleotide
  Sense strand starting at position 3737 of SEQ ID NO: 587567
ugccuuccucagugaaauu

SEQ ID NO: 801919 - RNA, 19 nt, Artificial Sequence
  Description of Artificial Sequence: Synthetic oligonucleotide
  Antisense strand to SEQ ID NO: 801918
aauuucacugaggaaggca

SEQ ID NO: 801920 - RNA, 19 nt, Artificial Sequence
  Description of Artificial Sequence: Synthetic oligonucleotide
  Sense strand starting at position 3788 of SEQ ID NO: 587567
gggugcuuacuuuaugcca

SEQ ID NO: 801921 - RNA, 19 nt, Artificial Sequence
  Description of Artificial Sequence: Synthetic oligonucleotide
  Antisense strand to SEQ ID NO: 801920
uggcauaaaguaagcaccc

SEQ ID NO: 801922 - RNA, 19 nt, Artificial Sequence
  Description of Artificial Sequence: Synthetic oligonucleotide
  Sense strand starting at position 27 of SEQ ID NO: 587568
ucagcugagcagugaagau

SEQ ID NO: 801923 - RNA, 19 nt, Artificial Sequence
  Description of Artificial Sequence: Synthetic oligonucleotide
  Antisense strand to SEQ ID NO: 801922
aucuucacugcucagcuga

SEQ ID NO: 801924 - RNA, 19 nt, Artificial Sequence
  Description of Artificial Sequence: Synthetic oligonucleotide
  Sense strand starting at position 286 of SEQ ID NO: 587568
caaccaaauugaguggauu

SEQ ID NO: 801925 - RNA, 19 nt, Artificial Sequence
  Description of Artificial Sequence: Synthetic oligonucleotide
  Antisense strand to SEQ ID NO: 801924
aauccacucaauuugguug

SEQ ID NO: 801926 - RNA, 19 nt, Artificial Sequence
  Description of Artificial Sequence: Synthetic oligonucleotide
  Sense strand starting at position 306 of SEQ ID NO: 587568
gggagagauuuagagcaaa

SEQ ID NO: 801927 - RNA, 19 nt, Artificial Sequence
  Description of Artificial Sequence: Synthetic oligonucleotide
  Antisense strand to SEQ ID NO: 801926
uuugcucuaaaucucuccc

SEQ ID NO: 801928 - RNA, 19 nt, Artificial Sequence
  Description of Artificial Sequence: Synthetic oligonucleotide
  Sense strand starting at position 349 of SEQ ID NO: 587568
uuugucuuccaugaguaac

SEQ ID NO: 801929 - RNA, 19 nt, Artificial Sequence
  Description of Artificial Sequence: Synthetic oligonucleotide
  Antisense strand to SEQ ID NO: 801928
guuacucauggaagacaaa

SEQ ID NO: 801930 - RNA, 19 nt, Artificial Sequence
  Description of Artificial Sequence: Synthetic oligonucleotide
  Sense strand starting at position 351 of SEQ ID NO: 587568
ugucuuccaugaguaacau

SEQ ID NO: 801931 - RNA, 19 nt, Artificial Sequence
  Description of Artificial Sequence: Synthetic oligonucleotide
  Antisense strand to SEQ ID NO: 801930
auguuacucauggaagaca

SEQ ID NO: 801932 - RNA, 19 nt, Artificial Sequence
  Description of Artificial Sequence: Synthetic oligonucleotide
  Sense strand starting at position 352 of SEQ ID NO: 587568
gucuuccaugaguaacaua

SEQ ID NO: 801933 - RNA, 19 nt, Artificial Sequence
  Description of Artificial Sequence: Synthetic oligonucleotide
  Antisense strand to SEQ ID NO: 801932
uauguuacucauggaagac

SEQ ID NO: 801934 - RNA, 19 nt, Artificial Sequence
  Description of Artificial Sequence: Synthetic oligonucleotide
  Sense strand starting at position 481 of SEQ ID NO: 587568
gguaguagcuaaguacaga

SEQ ID NO: 801935 - RNA, 19 nt, Artificial Sequence
  Description of Artificial Sequence: Synthetic oligonucleotide
  Antisense strand to SEQ ID NO: 801934
ucuguacuuagcuacuacc

SEQ ID NO: 801936 - RNA, 19 nt, Artificial Sequence
  Description of Artificial Sequence: Synthetic oligonucleotide
  Sense strand starting at position 530 of SEQ ID NO: 587568
aaauguaaacuucgugaac

SEQ ID NO: 801937 - RNA, 19 nt, Artificial Sequence
  Description of Artificial Sequence: Synthetic oligonucleotide
  Antisense strand to SEQ ID NO: 801936
guucacgaaguuuacauuu

SEQ ID NO: 801938 - RNA, 19 nt, Artificial Sequence
  Description of Artificial Sequence: Synthetic oligonucleotide
  Sense strand starting at position 531 of SEQ ID NO: 587568
aauguaaacuucgugaaca

SEQ ID NO: 801939 - RNA, 19 nt, Artificial Sequence
  Description of Artificial Sequence: Synthetic oligonucleotide
  Antisense strand to SEQ ID NO: 801938
uguucacgaaguuuacauu

SEQ ID NO: 801940 - RNA, 19 nt, Artificial Sequence
  Description of Artificial Sequence: Synthetic oligonucleotide
  Sense strand starting at position 533 of SEQ ID NO: 587568
uguaaacuucgugaacaua

SEQ ID NO: 801941 - RNA, 19 nt, Artificial Sequence
  Description of Artificial Sequence: Synthetic oligonucleotide
  Antisense strand to SEQ ID NO: 801940
uauguucacgaaguuuaca

SEQ ID NO: 801942 - RNA, 19 nt, Artificial Sequence
  Description of Artificial Sequence: Synthetic oligonucleotide
  Sense strand starting at position 662 of SEQ ID NO: 587568
accacacucugguucgaau

SEQ ID NO: 801943 - RNA, 19 nt, Artificial Sequence
  Description of Artificial Sequence: Synthetic oligonucleotide
  Antisense strand to SEQ ID NO: 801942
auucgaaccagaguguggu

SEQ ID NO: 801944 - RNA, 19 nt, Artificial Sequence
  Description of Artificial Sequence: Synthetic oligonucleotide
  Sense strand starting at position 685 of SEQ ID NO: 587568
ggagcauguuuacucuaca

SEQ ID NO: 801945 - RNA, 19 nt, Artificial Sequence
  Description of Artificial Sequence: Synthetic oligonucleotide
  Antisense strand to SEQ ID NO: 801944
uguagaguaaacaugcucc

SEQ ID NO: 801946 - RNA, 19 nt, Artificial Sequence
  Description of Artificial Sequence: Synthetic oligonucleotide
  Sense strand starting at position 688 of SEQ ID NO: 587568
gcauguuuacucuacacug

SEQ ID NO: 801947 - RNA, 19 nt, Artificial Sequence
  Description of Artificial Sequence: Synthetic oligonucleotide
  Antisense strand to SEQ ID NO: 801946
caguguagaguaaacaugc

SEQ ID NO: 801948 - RNA, 19 nt, Artificial Sequence
  Description of Artificial Sequence: Synthetic oligonucleotide
  Sense strand starting at position 851 of SEQ ID NO: 587568
gaguuacuucuagguauca

SEQ ID NO: 801949 - RNA, 19 nt, Artificial Sequence
  Description of Artificial Sequence: Synthetic oligonucleotide
  Antisense strand to SEQ ID NO: 801948
ugauaccuagaaguaacuc

SEQ ID NO: 801950 - RNA, 19 nt, Artificial Sequence
  Description of Artificial Sequence: Synthetic oligonucleotide
  Sense strand starting at position 852 of SEQ ID NO: 587568
aguuacuucuagguaucau

SEQ ID NO: 801951 - RNA, 19 nt, Artificial Sequence
  Description of Artificial Sequence: Synthetic oligonucleotide
  Antisense strand to SEQ ID NO: 801950
augauaccuagaaguaacu

SEQ ID NO: 801952 - RNA, 19 nt, Artificial Sequence
  Description of Artificial Sequence: Synthetic oligonucleotide
  Sense strand starting at position 1074 of SEQ ID NO: 587568
guacccguccucuagggaa

SEQ ID NO: 801953 - RNA, 19 nt, Artificial Sequence
  Description of Artificial Sequence: Synthetic oligonucleotide
  Antisense strand to SEQ ID NO: 801952
uucccuagaggacggguac

SEQ ID NO: 801954 - RNA, 19 nt, Artificial Sequence
  Description of Artificial Sequence: Synthetic oligonucleotide
  Sense strand starting at position 1078 of SEQ ID NO: 587568
ccguccucuagggaaucaa

SEQ ID NO: 801955 - RNA, 19 nt, Artificial Sequence
  Description of Artificial Sequence: Synthetic oligonucleotide
  Antisense strand to SEQ ID NO: 801954
uugauucccuagaggacgg

SEQ ID NO: 801956 - RNA, 19 nt, Artificial Sequence
  Description of Artificial Sequence: Synthetic oligonucleotide
  Sense strand starting at position 1308 of SEQ ID NO: 587568
ccacuuuccgagcagauca

SEQ ID NO: 801957 - RNA, 19 nt, Artificial Sequence
  Description of Artificial Sequence: Synthetic oligonucleotide
  Antisense strand to SEQ ID NO: 801956
ugaucugcucggaaagugg

SEQ ID NO: 801958 - RNA, 19 nt, Artificial Sequence
  Description of Artificial Sequence: Synthetic oligonucleotide
  Sense strand starting at position 1315 of SEQ ID NO: 587568
ccgagcagaucauuacuca

SEQ ID NO: 801959 - RNA, 19 nt, Artificial Sequence
  Description of Artificial Sequence: Synthetic oligonucleotide
  Antisense strand to SEQ ID NO: 801958
ugaguaaugaucugcucgg

SEQ ID NO: 801960 - RNA, 19 nt, Artificial Sequence
  Description of Artificial Sequence: Synthetic oligonucleotide
  Sense strand starting at position 2202 of SEQ ID NO: 587568
cggcuuccagcguuacuga

SEQ ID NO: 801961 - RNA, 19 nt, Artificial Sequence
  Description of Artificial Sequence: Synthetic oligonucleotide
  Antisense strand to SEQ ID NO: 801960
ucaguaacgcuggaagccg

SEQ ID NO: 801962 - RNA, 19 nt, Artificial Sequence
  Description of Artificial Sequence: Synthetic oligonucleotide
  Sense strand starting at position 2413 of SEQ ID NO: 587568
cucuguuaggauugguuga

SEQ ID NO: 801963 - RNA, 19 nt, Artificial Sequence
  Description of Artificial Sequence: Synthetic oligonucleotide
  Antisense strand to SEQ ID NO: 801962
ucaaccaauccuaacagag

SEQ ID NO: 801964 - RNA, 19 nt, Artificial Sequence
  Description of Artificial Sequence: Synthetic oligonucleotide
  Sense strand starting at position 2414 of SEQ ID NO: 587568
ucuguuaggauugguugaa

SEQ ID NO: 801965 - RNA, 19 nt, Artificial Sequence
  Description of Artificial Sequence: Synthetic oligonucleotide
  Antisense strand to SEQ ID NO: 801964
uucaaccaauccuaacaga

SEQ ID NO: 801966 - RNA, 19 nt, Artificial Sequence
  Description of Artificial Sequence: Synthetic oligonucleotide
  Sense strand starting at position 2415 of SEQ ID NO: 587568
cuguuaggauugguugaau

SEQ ID NO: 801967 - RNA, 19 nt, Artificial Sequence
  Description of Artificial Sequence: Synthetic oligonucleotide
  Antisense strand to SEQ ID NO: 801966
auucaaccaauccuaacag

SEQ ID NO: 801968 - RNA, 19 nt, Artificial Sequence
  Description of Artificial Sequence: Synthetic oligonucleotide
  Sense strand starting at position 2479 of SEQ ID NO: 587568
gaguuaaagcgcuaagaga

SEQ ID NO: 801969 - RNA, 19 nt, Artificial Sequence
  Description of Artificial Sequence: Synthetic oligonucleotide
  Antisense strand to SEQ ID NO: 801968
ucucuuagcgcuuuaacuc

SEQ ID NO: 801970 - RNA, 19 nt, Artificial Sequence
  Description of Artificial Sequence: Synthetic oligonucleotide
  Sense strand starting at position 2995 of SEQ ID NO: 587568
cggcgugagagguaggauu

SEQ ID NO: 801971 - RNA, 19 nt, Artificial Sequence
  Description of Artificial Sequence: Synthetic oligonucleotide
  Antisense strand to SEQ ID NO: 801970
aauccuaccucucacgccg

SEQ ID NO: 801972 - RNA, 19 nt, Artificial Sequence
  Description of Artificial Sequence: Synthetic oligonucleotide
  Sense strand starting at position 3045 of SEQ ID NO: 587568
gggcauuucuaggcacuuu

SEQ ID NO: 801973 - RNA, 19 nt, Artificial Sequence
  Description of Artificial Sequence: Synthetic oligonucleotide
  Antisense strand to SEQ ID NO: 801972
aaagugccuagaaaugccc

SEQ ID NO: 801974 - RNA, 19 nt, Artificial Sequence
  Description of Artificial Sequence: Synthetic oligonucleotide
  Sense strand starting at position 3132 of SEQ ID NO: 587568
uccggaccuguugagagaa

SEQ ID NO: 801975 - RNA, 19 nt, Artificial Sequence
  Description of Artificial Sequence: Synthetic oligonucleotide
  Antisense strand to SEQ ID NO: 801974
uucucucaacagguccgga

SEQ ID NO: 801976 - RNA, 19 nt, Artificial Sequence
  Description of Artificial Sequence: Synthetic oligonucleotide
  Sense strand starting at position 3144 of SEQ ID NO: 587568
gagagaauuucuggaaaug

SEQ ID NO: 801977 - RNA, 19 nt, Artificial Sequence
  Description of Artificial Sequence: Synthetic oligonucleotide
  Antisense strand to SEQ ID NO: 801976
cauuuccagaaauucucuc

SEQ ID NO: 801978 - RNA, 19 nt, Artificial Sequence
  Description of Artificial Sequence: Synthetic oligonucleotide
  Sense strand starting at position 3284 of SEQ ID NO: 587568
cuguuuaauuuggcuuuaa

SEQ ID NO: 801979 - RNA, 19 nt, Artificial Sequence
  Description of Artificial Sequence: Synthetic oligonucleotide
  Antisense strand to SEQ ID NO: 801978
uuaaagccaaauuaaacag

SEQ ID NO: 801980 - RNA, 19 nt, Artificial Sequence
  Description of Artificial Sequence: Synthetic oligonucleotide
  Sense strand starting at position 3441 of SEQ ID NO: 587568
ggcgguccauaauuuaauu

SEQ ID NO: 801981 - RNA, 19 nt, Artificial Sequence
  Description of Artificial Sequence: Synthetic oligonucleotide
  Antisense strand to SEQ ID NO: 801980
aauuaaauuauggaccgcc

SEQ ID NO: 801982 - RNA, 19 nt, Artificial Sequence
  Description of Artificial Sequence: Synthetic oligonucleotide
  Sense strand starting at position 3474 of SEQ ID NO: 587568
aacgaaguauaauuggauu

SEQ ID NO: 801983 - RNA, 19 nt, Artificial Sequence
  Description of Artificial Sequence: Synthetic oligonucleotide
  Antisense strand to SEQ ID NO: 801982
aauccaauuauacuucguu

SEQ ID NO: 801984 - RNA, 19 nt, Artificial Sequence
  Description of Artificial Sequence: Synthetic oligonucleotide
  Sense strand starting at position 3476 of SEQ ID NO: 587568
cgaaguauaauuggauugu

SEQ ID NO: 801985 - RNA, 19 nt, Artificial Sequence
  Description of Artificial Sequence: Synthetic oligonucleotide
  Antisense strand to SEQ ID NO: 801984
acaauccaauuauacuucg

SEQ ID NO: 801986 - RNA, 19 nt, Artificial Sequence
  Description of Artificial Sequence: Synthetic oligonucleotide
  Sense strand starting at position 3648 of SEQ ID NO: 587568
cugugacguguguuucuau

SEQ ID NO: 801987 - RNA, 19 nt, Artificial Sequence
  Description of Artificial Sequence: Synthetic oligonucleotide
  Antisense strand to SEQ ID NO: 801986
auagaaacacacgucacag

SEQ ID NO: 801988 - RNA, 19 nt, Artificial Sequence
  Description of Artificial Sequence: Synthetic oligonucleotide
  Sense strand starting at position 3669 of SEQ ID NO: 587568
caguauggacuguauuaca

SEQ ID NO: 801989 - RNA, 19 nt, Artificial Sequence
  Description of Artificial Sequence: Synthetic oligonucleotide
  Antisense strand to SEQ ID NO: 801988
uguaauacaguccauacug

SEQ ID NO: 801990 - RNA, 19 nt, Artificial Sequence
  Description of Artificial Sequence: Synthetic oligonucleotide
  Sense strand starting at position 3698 of SEQ ID NO: 587568
gaauaagguacgugaucga

SEQ ID NO: 801991 - RNA, 19 nt, Artificial Sequence
  Description of Artificial Sequence: Synthetic oligonucleotide
  Antisense strand to SEQ ID NO: 801990
ucgaucacguaccuuauuc

SEQ ID NO: 801992 - RNA, 19 nt, Artificial Sequence
  Description of Artificial Sequence: Synthetic oligonucleotide
  Sense strand starting at position 3702 of SEQ ID NO: 587568
aagguacgugaucgaauca

SEQ ID NO: 801993 - RNA, 19 nt, Artificial Sequence
  Description of Artificial Sequence: Synthetic oligonucleotide
  Antisense strand to SEQ ID NO: 801992
ugauucgaucacguaccuu

SEQ ID NO: 801994 - RNA, 19 nt, Artificial Sequence
  Description of Artificial Sequence: Synthetic oligonucleotide
  Sense strand starting at position 3765 of SEQ ID NO: 587568
cucuuagauggaugccaau

SEQ ID NO: 801995 - RNA, 19 nt, Artificial Sequence
  Description of Artificial Sequence: Synthetic oligonucleotide
  Antisense strand to SEQ ID NO: 801994
auuggcauccaucuaagag

SEQ ID NO: 801996 - RNA, 19 nt, Artificial Sequence
  Description of Artificial Sequence: Synthetic oligonucleotide
  Sense strand starting at position 3820 of SEQ ID NO: 587568
augaauaaugcugguaugu

SEQ ID NO: 801997 - RNA, 19 nt, Artificial Sequence
  Description of Artificial Sequence: Synthetic oligonucleotide
  Antisense strand to SEQ ID NO: 801996
acauaccagcauuauucau

SEQ ID NO: 801998 - RNA, 19 nt, Artificial Sequence
  Description of Artificial Sequence: Synthetic oligonucleotide
  Sense strand starting at position 3826 of SEQ ID NO: 587568
aaugcugguaugugaugau

SEQ ID NO: 801999 - RNA, 19 nt, Artificial Sequence
  Description of Artificial Sequence: Synthetic oligonucleotide
  Antisense strand to SEQ ID NO: 801998
aucaucacauaccagcauu

SEQ ID NO: 802000 - RNA, 19 nt, Artificial Sequence
  Description of Artificial Sequence: Synthetic oligonucleotide
  Sense strand starting at position 3866 of SEQ ID NO: 587568
gguuuagacagagaguugu

SEQ ID NO: 802001 - RNA, 19 nt, Artificial Sequence
  Description of Artificial Sequence: Synthetic oligonucleotide
  Antisense strand to SEQ ID NO: 802000
acaacucucugucuaaacc

SEQ ID NO: 802002 - RNA, 19 nt, Artificial Sequence
  Description of Artificial Sequence: Synthetic oligonucleotide
  Sense strand starting at position 124 of SEQ ID NO: 587569
gagggagcuccauaagucu

SEQ ID NO: 802003 - RNA, 19 nt, Artificial Sequence
  Description of Artificial Sequence: Synthetic oligonucleotide
  Antisense strand to SEQ ID NO: 802002
agacuuauggagcucccuc

SEQ ID NO: 802004 - RNA, 19 nt, Artificial Sequence
  Description of Artificial Sequence: Synthetic oligonucleotide
  Sense strand starting at position 127 of SEQ ID NO: 587569
ggagcuccauaagucuauu

SEQ ID NO: 802005 - RNA, 19 nt, Artificial Sequence
  Description of Artificial Sequence: Synthetic oligonucleotide
  Antisense strand to SEQ ID NO: 802004
aauagacuuauggagcucc

SEQ ID NO: 802006 - RNA, 19 nt, Artificial Sequence
  Description of Artificial Sequence: Synthetic oligonucleotide
  Sense strand starting at position 166 of SEQ ID NO: 587569
uucuuaaauucuuggagac

SEQ ID NO: 802007 - RNA, 19 nt, Artificial Sequence
  Description of Artificial Sequence: Synthetic oligonucleotide
  Antisense strand to SEQ ID NO: 802006
gucuccaagaauuuaagaa

SEQ ID NO: 802008 - RNA, 19 nt, Artificial Sequence
  Description of Artificial Sequence: Synthetic oligonucleotide
  Sense strand starting at position 167 of SEQ ID NO: 587569
ucuuaaauucuuggagaca

SEQ ID NO: 802009 - RNA, 19 nt, Artificial Sequence
  Description of Artificial Sequence: Synthetic oligonucleotide
  Antisense strand to SEQ ID NO: 802008
ugucuccaagaauuuaaga

SEQ ID NO: 802010 - RNA, 19 nt, Artificial Sequence
  Description of Artificial Sequence: Synthetic oligonucleotide
  Sense strand starting at position 168 of SEQ ID NO: 587569
cuuaaauucuuggagacag

SEQ ID NO: 802011 - RNA, 19 nt, Artificial Sequence
  Description of Artificial Sequence: Synthetic oligonucleotide
  Antisense strand to SEQ ID NO: 802010
cugucuccaagaauuuaag

SEQ ID NO: 802012 - RNA, 19 nt, Artificial Sequence
  Description of Artificial Sequence: Synthetic oligonucleotide
  Sense strand starting at position 232 of SEQ ID NO: 587569
cucugaagaacugguugaa

SEQ ID NO: 802013 - RNA, 19 nt, Artificial Sequence
  Description of Artificial Sequence: Synthetic oligonucleotide
  Antisense strand to SEQ ID NO: 802012
uucaaccaguucuucagag

SEQ ID NO: 802014 - RNA, 19 nt, Artificial Sequence
  Description of Artificial Sequence: Synthetic oligonucleotide
  Sense strand starting at position 302 of SEQ ID NO: 587569
auagaauaugucugccuca

SEQ ID NO: 802015 - RNA, 19 nt, Artificial Sequence
  Description of Artificial Sequence: Synthetic oligonucleotide
  Antisense strand to SEQ ID NO: 802014
ugaggcagacauauucuau

SEQ ID NO: 802016 - RNA, 19 nt, Artificial Sequence
  Description of Artificial Sequence: Synthetic oligonucleotide
  Sense strand starting at position 307 of SEQ ID NO: 587569
auaugucugccucaucuuu

SEQ ID NO: 802017 - RNA, 19 nt, Artificial Sequence
  Description of Artificial Sequence: Synthetic oligonucleotide
  Antisense strand to SEQ ID NO: 802016
aaagaugaggcagacauau

SEQ ID NO: 802018 - RNA, 19 nt, Artificial Sequence
  Description of Artificial Sequence: Synthetic oligonucleotide
  Sense strand starting at position 425 of SEQ ID NO: 587569
gguaacagaucugaccaga

SEQ ID NO: 802019 - RNA, 19 nt, Artificial Sequence
  Description of Artificial Sequence: Synthetic oligonucleotide
  Antisense strand to SEQ ID NO: 802018
ucuggucagaucuguuacc

SEQ ID NO: 802020 - RNA, 19 nt, Artificial Sequence
  Description of Artificial Sequence: Synthetic oligonucleotide
  Sense strand starting at position 552 of SEQ ID NO: 587569
ggcuuaauuuaccgugcau

SEQ ID NO: 802021 - RNA, 19 nt, Artificial Sequence
  Description of Artificial Sequence: Synthetic oligonucleotide
  Antisense strand to SEQ ID NO: 802020
augcacgguaaauuaagcc

SEQ ID NO: 802022 - RNA, 19 nt, Artificial Sequence
  Description of Artificial Sequence: Synthetic oligonucleotide
  Sense strand starting at position 1077 of SEQ ID NO: 587569
gcauuugagucccucaagu

SEQ ID NO: 802023 - RNA, 19 nt, Artificial Sequence
  Description of Artificial Sequence: Synthetic oligonucleotide
  Antisense strand to SEQ ID NO: 802022
acuugagggacucaaaugc

SEQ ID NO: 802024 - RNA, 19 nt, Artificial Sequence
  Description of Artificial Sequence: Synthetic oligonucleotide
  Sense strand starting at position 2367 of SEQ ID NO: 587569
gcgagugauccugggaaga

SEQ ID NO: 802025 - RNA, 19 nt, Artificial Sequence
  Description of Artificial Sequence: Synthetic oligonucleotide
  Antisense strand to SEQ ID NO: 802024
ucuucccaggaucacucgc

SEQ ID NO: 802026 - RNA, 19 nt, Artificial Sequence
  Description of Artificial Sequence: Synthetic oligonucleotide
  Sense strand starting at position 2369 of SEQ ID NO: 587569
gagugauccugggaagagg

SEQ ID NO: 802027 - RNA, 19 nt, Artificial Sequence
  Description of Artificial Sequence: Synthetic oligonucleotide
  Antisense strand to SEQ ID NO: 802026
ccucuucccaggaucacuc

SEQ ID NO: 802028 - RNA, 19 nt, Artificial Sequence
  Description of Artificial Sequence: Synthetic oligonucleotide
  Sense strand starting at position 2434 of SEQ ID NO: 587569
agucgcgcucugaggaaua

SEQ ID NO: 802029 - RNA, 19 nt, Artificial Sequence
  Description of Artificial Sequence: Synthetic oligonucleotide
  Antisense strand to SEQ ID NO: 802028
uauuccucagagcgcgacu

SEQ ID NO: 802030 - RNA, 19 nt, Artificial Sequence
  Description of Artificial Sequence: Synthetic oligonucleotide
  Sense strand starting at position 2472 of SEQ ID NO: 587569
cucuaaagcuuccuggacu

SEQ ID NO: 802031 - RNA, 19 nt, Artificial Sequence
  Description of Artificial Sequence: Synthetic oligonucleotide
  Antisense strand to SEQ ID NO: 802030
aguccaggaagcuuuagag

SEQ ID NO: 802032 - RNA, 19 nt, Artificial Sequence
  Description of Artificial Sequence: Synthetic oligonucleotide
  Sense strand starting at position 2473 of SEQ ID NO: 587569
ucuaaagcuuccuggacuu

SEQ ID NO: 802033 - RNA, 19 nt, Artificial Sequence
  Description of Artificial Sequence: Synthetic oligonucleotide
  Antisense strand to SEQ ID NO: 802032
aaguccaggaagcuuuaga

SEQ ID NO: 802034 - RNA, 19 nt, Artificial Sequence
  Description of Artificial Sequence: Synthetic oligonucleotide
  Sense strand starting at position 2483 of SEQ ID NO: 587569
ccuggacuucucuaaguua

SEQ ID NO: 802035 - RNA, 19 nt, Artificial Sequence
  Description of Artificial Sequence: Synthetic oligonucleotide
  Antisense strand to SEQ ID NO: 802034
uaacuuagagaaguccagg

SEQ ID NO: 802036 - RNA, 19 nt, Artificial Sequence
  Description of Artificial Sequence: Synthetic oligonucleotide
  Sense strand starting at position 2486 of SEQ ID NO: 587569
ggacuucucuaaguuaugu

SEQ ID NO: 802037 - RNA, 19 nt, Artificial Sequence
  Description of Artificial Sequence: Synthetic oligonucleotide
  Antisense strand to SEQ ID NO: 802036
acauaacuuagagaagucc

SEQ ID NO: 802038 - RNA, 19 nt, Artificial Sequence
  Description of Artificial Sequence: Synthetic oligonucleotide
  Sense strand starting at position 2492 of SEQ ID NO: 587569
cucuaaguuaugucgcguu

SEQ ID NO: 802039 - RNA, 19 nt, Artificial Sequence
  Description of Artificial Sequence: Synthetic oligonucleotide
  Antisense strand to SEQ ID NO: 802038
aacgcgacauaacuuagag

SEQ ID NO: 802040 - RNA, 19 nt, Artificial Sequence
  Description of Artificial Sequence: Synthetic oligonucleotide
  Sense strand starting at position 2520 of SEQ ID NO: 587569
ucguacuuauaagagagua

SEQ ID NO: 802041 - RNA, 19 nt, Artificial Sequence
  Description of Artificial Sequence: Synthetic oligonucleotide
  Antisense strand to SEQ ID NO: 802040
uacucucuuauaaguacga

SEQ ID NO: 802042 - RNA, 19 nt, Artificial Sequence
  Description of Artificial Sequence: Synthetic oligonucleotide
  Sense strand starting at position 2642 of SEQ ID NO: 587569
cgucuuugucaucccgacu

SEQ ID NO: 802043 - RNA, 19 nt, Artificial Sequence
  Description of Artificial Sequence: Synthetic oligonucleotide
  Antisense strand to SEQ ID NO: 802042
agucgggaugacaaagacg

SEQ ID NO: 802044 - RNA, 19 nt, Artificial Sequence
  Description of Artificial Sequence: Synthetic oligonucleotide
  Sense strand starting at position 2669 of SEQ ID NO: 587569
gguugucauucucuuaggu

SEQ ID NO: 802045 - RNA, 19 nt, Artificial Sequence
  Description of Artificial Sequence: Synthetic oligonucleotide
  Antisense strand to SEQ ID NO: 802044
accuaagagaaugacaacc

SEQ ID NO: 802046 - RNA, 19 nt, Artificial Sequence
  Description of Artificial Sequence: Synthetic oligonucleotide
  Sense strand starting at position 2671 of SEQ ID NO: 587569
uugucauucucuuagguca

SEQ ID NO: 802047 - RNA, 19 nt, Artificial Sequence
  Description of Artificial Sequence: Synthetic oligonucleotide
  Antisense strand to SEQ ID NO: 802046
ugaccuaagagaaugacaa

SEQ ID NO: 802048 - RNA, 19 nt, Artificial Sequence
  Description of Artificial Sequence: Synthetic oligonucleotide
  Sense strand starting at position 2844 of SEQ ID NO: 587569
cagauuucccgaggcaugu

SEQ ID NO: 802049 - RNA, 19 nt, Artificial Sequence
  Description of Artificial Sequence: Synthetic oligonucleotide
  Antisense strand to SEQ ID NO: 802048
acaugccucgggaaaucug

SEQ ID NO: 802050 - RNA, 19 nt, Artificial Sequence
  Description of Artificial Sequence: Synthetic oligonucleotide
  Sense strand starting at position 2850 of SEQ ID NO: 587569
ucccgaggcauguggaaua

SEQ ID NO: 802051 - RNA, 19 nt, Artificial Sequence
  Description of Artificial Sequence: Synthetic oligonucleotide
  Antisense strand to SEQ ID NO: 802050
uauuccacaugccucggga

SEQ ID NO: 802052 - RNA, 19 nt, Artificial Sequence
  Description of Artificial Sequence: Synthetic oligonucleotide
  Sense strand starting at position 3165 of SEQ ID NO: 587569
cuggaaaugucucuuggag

SEQ ID NO: 802053 - RNA, 19 nt, Artificial Sequence
  Description of Artificial Sequence: Synthetic oligonucleotide
  Antisense strand to SEQ ID NO: 802052
cuccaagagacauuuccag

SEQ ID NO: 802054 - RNA, 19 nt, Artificial Sequence
  Description of Artificial Sequence: Synthetic oligonucleotide
  Sense strand starting at position 3167 of SEQ ID NO: 587569
ggaaaugucucuuggagga

SEQ ID NO: 802055 - RNA, 19 nt, Artificial Sequence
  Description of Artificial Sequence: Synthetic oligonucleotide
  Antisense strand to SEQ ID NO: 802054
uccuccaagagacauuucc

SEQ ID NO: 802056 - RNA, 19 nt, Artificial Sequence
  Description of Artificial Sequence: Synthetic oligonucleotide
  Sense strand starting at position 3169 of SEQ ID NO: 587569
aaaugucucuuggaggaau

SEQ ID NO: 802057 - RNA, 19 nt, Artificial Sequence
  Description of Artificial Sequence: Synthetic oligonucleotide
  Antisense strand to SEQ ID NO: 802056
auuccuccaagagacauuu

SEQ ID NO: 802058 - RNA, 19 nt, Artificial Sequence
  Description of Artificial Sequence: Synthetic oligonucleotide
  Sense strand starting at position 3171 of SEQ ID NO: 587569
augucucuuggaggaauaa

SEQ ID NO: 802059 - RNA, 19 nt, Artificial Sequence
  Description of Artificial Sequence: Synthetic oligonucleotide
  Antisense strand to SEQ ID NO: 802058
uuauuccuccaagagacau

SEQ ID NO: 802060 - RNA, 19 nt, Artificial Sequence
  Description of Artificial Sequence: Synthetic oligonucleotide
  Sense strand starting at position 3182 of SEQ ID NO: 587569
aggaauaagucaguggcau

SEQ ID NO: 802061 - RNA, 19 nt, Artificial Sequence
  Description of Artificial Sequence: Synthetic oligonucleotide
  Antisense strand to SEQ ID NO: 802060
augccacugacuuauuccu

SEQ ID NO: 802062 - RNA, 19 nt, Artificial Sequence
  Description of Artificial Sequence: Synthetic oligonucleotide
  Sense strand starting at position 3183 of SEQ ID NO: 587569
ggaauaagucaguggcaua

SEQ ID NO: 802063 - RNA, 19 nt, Artificial Sequence
  Description of Artificial Sequence: Synthetic oligonucleotide
  Antisense strand to SEQ ID NO: 802062
uaugccacugacuuauucc

SEQ ID NO: 802064 - RNA, 19 nt, Artificial Sequence
  Description of Artificial Sequence: Synthetic oligonucleotide
  Sense strand starting at position 3212 of SEQ ID NO: 587569
ccaauagccugaggacaau

SEQ ID NO: 802065 - RNA, 19 nt, Artificial Sequence
  Description of Artificial Sequence: Synthetic oligonucleotide
  Antisense strand to SEQ ID NO: 802064
auuguccucaggcuauugg

SEQ ID NO: 802066 - RNA, 19 nt, Artificial Sequence
  Description of Artificial Sequence: Synthetic oligonucleotide
  Sense strand starting at position 3301 of SEQ ID NO: 587569
agugggaggugguagaaau

SEQ ID NO: 802067 - RNA, 19 nt, Artificial Sequence
  Description of Artificial Sequence: Synthetic oligonucleotide
  Antisense strand to SEQ ID NO: 802066
auuucuaccaccucccacu

SEQ ID NO: 802068 - RNA, 19 nt, Artificial Sequence
  Description of Artificial Sequence: Synthetic oligonucleotide
  Sense strand starting at position 3311 of SEQ ID NO: 587569
gguagaaaucuuggaagcu

SEQ ID NO: 802069 - RNA, 19 nt, Artificial Sequence
  Description of Artificial Sequence: Synthetic oligonucleotide
  Antisense strand to SEQ ID NO: 802068
agcuuccaagauuucuacc

SEQ ID NO: 802070 - RNA, 19 nt, Artificial Sequence
  Description of Artificial Sequence: Synthetic oligonucleotide
  Sense strand starting at position 3312 of SEQ ID NO: 587569
guagaaaucuuggaagcuc

SEQ ID NO: 802071 - RNA, 19 nt, Artificial Sequence
  Description of Artificial Sequence: Synthetic oligonucleotide
  Antisense strand to SEQ ID NO: 802070
gagcuuccaagauuucuac

SEQ ID NO: 802072 - RNA, 19 nt, Artificial Sequence
  Description of Artificial Sequence: Synthetic oligonucleotide
  Sense strand starting at position 3387 of SEQ ID NO: 587569
cggcuaaggugucauuuca

SEQ ID NO: 802073 - RNA, 19 nt, Artificial Sequence
  Description of Artificial Sequence: Synthetic oligonucleotide
  Antisense strand to SEQ ID NO: 802072
ugaaaugacaccuuagccg

SEQ ID NO: 802074 - RNA, 19 nt, Artificial Sequence
  Description of Artificial Sequence: Synthetic oligonucleotide
  Sense strand starting at position 3577 of SEQ ID NO: 587569
ucauccgucaaguggagau

SEQ ID NO: 802075 - RNA, 19 nt, Artificial Sequence
  Description of Artificial Sequence: Synthetic oligonucleotide
  Antisense strand to SEQ ID NO: 802074
aucuccacuugacggauga

SEQ ID NO: 802076 - RNA, 19 nt, Artificial Sequence
  Description of Artificial Sequence: Synthetic oligonucleotide
  Sense strand starting at position 3680 of SEQ ID NO: 587569
cggaaaugcugagcugauc

SEQ ID NO: 802077 - RNA, 19 nt, Artificial Sequence
  Description of Artificial Sequence: Synthetic oligonucleotide
  Antisense strand to SEQ ID NO: 802076
gaucagcucagcauuuccg

SEQ ID NO: 802078 - RNA, 19 nt, Artificial Sequence
  Description of Artificial Sequence: Synthetic oligonucleotide
  Sense strand starting at position 3854 of SEQ ID NO: 587569
gagugaaggaccugugacu

SEQ ID NO: 802079 - RNA, 19 nt, Artificial Sequence
  Description of Artificial Sequence: Synthetic oligonucleotide
  Antisense strand to SEQ ID NO: 802078
agucacagguccuucacuc

SEQ ID NO: 802080 - RNA, 19 nt, Artificial Sequence
  Description of Artificial Sequence: Synthetic oligonucleotide
  Sense strand starting at position 3923 of SEQ ID NO: 587569
uguggcugcucuucucaau

SEQ ID NO: 802081 - RNA, 19 nt, Artificial Sequence
  Description of Artificial Sequence: Synthetic oligonucleotide
  Antisense strand to SEQ ID NO: 802080
auugagaagagcagccaca

SEQ ID NO: 802082 - RNA, 19 nt, Artificial Sequence
  Description of Artificial Sequence: Synthetic oligonucleotide
  Sense strand starting at position 297 of SEQ ID NO: 587570
ggaaaucacuuaguuacau

SEQ ID NO: 802083 - RNA, 19 nt, Artificial Sequence
  Description of Artificial Sequence: Synthetic oligonucleotide
  Antisense strand to SEQ ID NO: 802082
auguaacuaagugauuucc

SEQ ID NO: 802084 - RNA, 19 nt, Artificial Sequence
  Description of Artificial Sequence: Synthetic oligonucleotide
  Sense strand starting at position 403 of SEQ ID NO: 587570
uagaguauuugguaaauag

SEQ ID NO: 802085 - RNA, 19 nt, Artificial Sequence
  Description of Artificial Sequence: Synthetic oligonucleotide
  Antisense strand to SEQ ID NO: 802084
cuauuuaccaaauacucua

SEQ ID NO: 802086 - RNA, 19 nt, Artificial Sequence
  Description of Artificial Sequence: Synthetic oligonucleotide
  Sense strand starting at position 510 of SEQ ID NO: 587570
gguggauggcuuuacaaag

SEQ ID NO: 802087 - RNA, 19 nt, Artificial Sequence
  Description of Artificial Sequence: Synthetic oligonucleotide
  Antisense strand to SEQ ID NO: 802086
cuuuguaaagccauccacc

SEQ ID NO: 802088 - RNA, 19 nt, Artificial Sequence
  Description of Artificial Sequence: Synthetic oligonucleotide
  Sense strand starting at position 534 of SEQ ID NO: 587570
agacucagcuaagucuuaa

SEQ ID NO: 802089 - RNA, 19 nt, Artificial Sequence
  Description of Artificial Sequence: Synthetic oligonucleotide
  Antisense strand to SEQ ID NO: 802088
uuaagacuuagcugagucu

SEQ ID NO: 802090 - RNA, 19 nt, Artificial Sequence
  Description of Artificial Sequence: Synthetic oligonucleotide
  Sense strand starting at position 586 of SEQ ID NO: 587570
uguagaagaagcuauguua

SEQ ID NO: 802091 - RNA, 19 nt, Artificial Sequence
  Description of Artificial Sequence: Synthetic oligonucleotide
  Antisense strand to SEQ ID NO: 802090
uaacauagcuucuucuaca

SEQ ID NO: 802092 - RNA, 19 nt, Artificial Sequence
  Description of Artificial Sequence: Synthetic oligonucleotide
  Sense strand starting at position 589 of SEQ ID NO: 587570
agaagaagcuauguuaaau

SEQ ID NO: 802093 - RNA, 19 nt, Artificial Sequence
  Description of Artificial Sequence: Synthetic oligonucleotide
  Antisense strand to SEQ ID NO: 802092
auuuaacauagcuucuucu

SEQ ID NO: 802094 - RNA, 19 nt, Artificial Sequence
  Description of Artificial Sequence: Synthetic oligonucleotide
  Sense strand starting at position 681 of SEQ ID NO: 587570
uuauuauuggcaugaaauc

SEQ ID NO: 802095 - RNA, 19 nt, Artificial Sequence
  Description of Artificial Sequence: Synthetic oligonucleotide
  Antisense strand to SEQ ID NO: 802094
gauuucaugccaauaauaa

SEQ ID NO: 802096 - RNA, 19 nt, Artificial Sequence
  Description of Artificial Sequence: Synthetic oligonucleotide
  Sense strand starting at position 887 of SEQ ID NO: 587570
cgaauugucguggacaaac

SEQ ID NO: 802097 - RNA, 19 nt, Artificial Sequence
  Description of Artificial Sequence: Synthetic oligonucleotide
  Antisense strand to SEQ ID NO: 802096
guuuguccacgacaauucg

SEQ ID NO: 802098 - RNA, 19 nt, Artificial Sequence
  Description of Artificial Sequence: Synthetic oligonucleotide
  Sense strand starting at position 981 of SEQ ID NO: 587570
agcacuggucuccacaaau

SEQ ID NO: 802099 - RNA, 19 nt, Artificial Sequence
  Description of Artificial Sequence: Synthetic oligonucleotide
  Antisense strand to SEQ ID NO: 802098
auuuguggagaccagugcu

SEQ ID NO: 802100 - RNA, 19 nt, Artificial Sequence
  Description of Artificial Sequence: Synthetic oligonucleotide
  Sense strand starting at position 1022 of SEQ ID NO: 587570
acgguugcugaucaagaua

SEQ ID NO: 802101 - RNA, 19 nt, Artificial Sequence
  Description of Artificial Sequence: Synthetic oligonucleotide
  Antisense strand to SEQ ID NO: 802100
uaucuugaucagcaaccgu

SEQ ID NO: 802102 - RNA, 19 nt, Artificial Sequence
  Description of Artificial Sequence: Synthetic oligonucleotide
  Sense strand starting at position 1025 of SEQ ID NO: 587570
guugcugaucaagauaaau

SEQ ID NO: 802103 - RNA, 19 nt, Artificial Sequence
  Description of Artificial Sequence: Synthetic oligonucleotide
  Antisense strand to SEQ ID NO: 802102
auuuaucuugaucagcaac

SEQ ID NO: 802104 - RNA, 19 nt, Artificial Sequence
  Description of Artificial Sequence: Synthetic oligonucleotide
  Sense strand starting at position 1267 of SEQ ID NO: 587570
ucauaauccugauuccgau

SEQ ID NO: 802105 - RNA, 19 nt, Artificial Sequence
  Description of Artificial Sequence: Synthetic oligonucleotide
  Antisense strand to SEQ ID NO: 802104
aucggaaucaggauuauga

SEQ ID NO: 802106 - RNA, 19 nt, Artificial Sequence
  Description of Artificial Sequence: Synthetic oligonucleotide
  Sense strand starting at position 1340 of SEQ ID NO: 587570
uugacaucaguaugucaca

SEQ ID NO: 802107 - RNA, 19 nt, Artificial Sequence
  Description of Artificial Sequence: Synthetic oligonucleotide
  Antisense strand to SEQ ID NO: 802106
ugugacauacugaugucaa

SEQ ID NO: 802108 - RNA, 19 nt, Artificial Sequence
  Description of Artificial Sequence: Synthetic oligonucleotide
  Sense strand starting at position 1347 of SEQ ID NO: 587570
caguaugucacaggugaag

SEQ ID NO: 802109 - RNA, 19 nt, Artificial Sequence
  Description of Artificial Sequence: Synthetic oligonucleotide
  Antisense strand to SEQ ID NO: 802108
cuucaccugugacauacug

SEQ ID NO: 802110 - RNA, 19 nt, Artificial Sequence
  Description of Artificial Sequence: Synthetic oligonucleotide
  Sense strand starting at position 1416 of SEQ ID NO: 587570
gcauaacuagaaugcaaau

SEQ ID NO: 802111 - RNA, 19 nt, Artificial Sequence
  Description of Artificial Sequence: Synthetic oligonucleotide
  Antisense strand to SEQ ID NO: 802110
auuugcauucuaguuaugc

SEQ ID NO: 802112 - RNA, 19 nt, Artificial Sequence
  Description of Artificial Sequence: Synthetic oligonucleotide
  Sense strand starting at position 1495 of SEQ ID NO: 587570
gagaaauaacgacgacauc

SEQ ID NO: 802113 - RNA, 19 nt, Artificial Sequence
  Description of Artificial Sequence: Synthetic oligonucleotide
  Antisense strand to SEQ ID NO: 802112
gaugucgucguuauuucuc

SEQ ID NO: 802114 - RNA, 19 nt, Artificial Sequence
  Description of Artificial Sequence: Synthetic oligonucleotide
  Sense strand starting at position 2273 of SEQ ID NO: 587570
gugagucugggacaguuua

SEQ ID NO: 802115 - RNA, 19 nt, Artificial Sequence
  Description of Artificial Sequence: Synthetic oligonucleotide
  Antisense strand to SEQ ID NO: 802114
uaaacugucccagacucac

SEQ ID NO: 802116 - RNA, 19 nt, Artificial Sequence
  Description of Artificial Sequence: Synthetic oligonucleotide
  Sense strand starting at position 2458 of SEQ ID NO: 587570
guagauugcagugagaauu

SEQ ID NO: 802117 - RNA, 19 nt, Artificial Sequence
  Description of Artificial Sequence: Synthetic oligonucleotide
  Antisense strand to SEQ ID NO: 802116
aauucucacugcaaucuac

SEQ ID NO: 802118 - RNA, 19 nt, Artificial Sequence
  Description of Artificial Sequence: Synthetic oligonucleotide
  Sense strand starting at position 2466 of SEQ ID NO: 587570
cagugagaauuagcgauaa

SEQ ID NO: 802119 - RNA, 19 nt, Artificial Sequence
  Description of Artificial Sequence: Synthetic oligonucleotide
  Antisense strand to SEQ ID NO: 802118
uuaucgcuaauucucacug

SEQ ID NO: 802120 - RNA, 19 nt, Artificial Sequence
  Description of Artificial Sequence: Synthetic oligonucleotide
  Sense strand starting at position 2468 of SEQ ID NO: 587570
gugagaauuagcgauaagg

SEQ ID NO: 802121 - RNA, 19 nt, Artificial Sequence
  Description of Artificial Sequence: Synthetic oligonucleotide
  Antisense strand to SEQ ID NO: 802120
ccuuaucgcuaauucucac

SEQ ID NO: 802122 - RNA, 19 nt, Artificial Sequence
  Description of Artificial Sequence: Synthetic oligonucleotide
  Sense strand starting at position 2512 of SEQ ID NO: 587570
uauggcauucuguagguga

SEQ ID NO: 802123 - RNA, 19 nt, Artificial Sequence
  Description of Artificial Sequence: Synthetic oligonucleotide
  Antisense strand to SEQ ID NO: 802122
ucaccuacagaaugccaua

SEQ ID NO: 802124 - RNA, 19 nt, Artificial Sequence
  Description of Artificial Sequence: Synthetic oligonucleotide
  Sense strand starting at position 2520 of SEQ ID NO: 587570
ucuguaggugaccgagaaa

SEQ ID NO: 802125 - RNA, 19 nt, Artificial Sequence
  Description of Artificial Sequence: Synthetic oligonucleotide
  Antisense strand to SEQ ID NO: 802124
uuucucggucaccuacaga

SEQ ID NO: 802126 - RNA, 19 nt, Artificial Sequence
  Description of Artificial Sequence: Synthetic oligonucleotide
  Sense strand starting at position 2559 of SEQ ID NO: 587570
uuuguaacuggccaaaucu

SEQ ID NO: 802127 - RNA, 19 nt, Artificial Sequence
  Description of Artificial Sequence: Synthetic oligonucleotide
  Antisense strand to SEQ ID NO: 802126
agauuuggccaguuacaaa

SEQ ID NO: 802128 - RNA, 19 nt, Artificial Sequence
  Description of Artificial Sequence: Synthetic oligonucleotide
  Sense strand starting at position 2567 of SEQ ID NO: 587570
uggccaaaucuuuauuggu

SEQ ID NO: 802129 - RNA, 19 nt, Artificial Sequence
  Description of Artificial Sequence: Synthetic oligonucleotide
  Antisense strand to SEQ ID NO: 802128
accaauaaagauuuggcca

SEQ ID NO: 802130 - RNA, 19 nt, Artificial Sequence
  Description of Artificial Sequence: Synthetic oligonucleotide
  Sense strand starting at position 2600 of SEQ ID NO: 587570
gaggaauugcuuuauaugc

SEQ ID NO: 802131 - RNA, 19 nt, Artificial Sequence
  Description of Artificial Sequence: Synthetic oligonucleotide
  Antisense strand to SEQ ID NO: 802130
gcauauaaagcaauuccuc

SEQ ID NO: 802132 - RNA, 19 nt, Artificial Sequence
  Description of Artificial Sequence: Synthetic oligonucleotide
  Sense strand starting at position 2622 of SEQ ID NO: 587570
agaauaugucaggguucua

SEQ ID NO: 802133 - RNA, 19 nt, Artificial Sequence
  Description of Artificial Sequence: Synthetic oligonucleotide
  Antisense strand to SEQ ID NO: 802132
uagaacccugacauauucu

SEQ ID NO: 802134 - RNA, 19 nt, Artificial Sequence
  Description of Artificial Sequence: Synthetic oligonucleotide
  Sense strand starting at position 2670 of SEQ ID NO: 587570
gcagacaugugagcaaaua

SEQ ID NO: 802135 - RNA, 19 nt, Artificial Sequence
  Description of Artificial Sequence: Synthetic oligonucleotide
  Antisense strand to SEQ ID NO: 802134
uauuugcucacaugucugc

SEQ ID NO: 802136 - RNA, 19 nt, Artificial Sequence
  Description of Artificial Sequence: Synthetic oligonucleotide
  Sense strand starting at position 2728 of SEQ ID NO: 587570
gugcaugugauagggauaa

SEQ ID NO: 802137 - RNA, 19 nt, Artificial Sequence
  Description of Artificial Sequence: Synthetic oligonucleotide
  Antisense strand to SEQ ID NO: 802136
uuaucccuaucacaugcac

SEQ ID NO: 802138 - RNA, 19 nt, Artificial Sequence
  Description of Artificial Sequence: Synthetic oligonucleotide
  Sense strand starting at position 2766 of SEQ ID NO: 587570
aaagcaauuguaugagaag

SEQ ID NO: 802139 - RNA, 19 nt, Artificial Sequence
  Description of Artificial Sequence: Synthetic oligonucleotide
  Antisense strand to SEQ ID NO: 802138
cuucucauacaauugcuuu

SEQ ID NO: 802140 - RNA, 19 nt, Artificial Sequence
  Description of Artificial Sequence: Synthetic oligonucleotide
  Sense strand starting at position 2796 of SEQ ID NO: 587570
aagggauuauccuugcaug

SEQ ID NO: 802141 - RNA, 19 nt, Artificial Sequence
  Description of Artificial Sequence: Synthetic oligonucleotide
  Antisense strand to SEQ ID NO: 802140
caugcaaggauaaucccuu

SEQ ID NO: 802142 - RNA, 19 nt, Artificial Sequence
  Description of Artificial Sequence: Synthetic oligonucleotide
  Sense strand starting at position 2874 of SEQ ID NO: 587570
gucaacauauugucuauaa

SEQ ID NO: 802143 - RNA, 19 nt, Artificial Sequence
  Description of Artificial Sequence: Synthetic oligonucleotide
  Antisense strand to SEQ ID NO: 802142
uuauagacaauauguugac

SEQ ID NO: 802144 - RNA, 19 nt, Artificial Sequence
  Description of Artificial Sequence: Synthetic oligonucleotide
  Sense strand starting at position 2932 of SEQ ID NO: 587570
uucuaaacuuucuuggaga

SEQ ID NO: 802145 - RNA, 19 nt, Artificial Sequence
  Description of Artificial Sequence: Synthetic oligonucleotide
  Antisense strand to SEQ ID NO: 802144
ucuccaagaaaguuuagaa

SEQ ID NO: 802146 - RNA, 19 nt, Artificial Sequence
  Description of Artificial Sequence: Synthetic oligonucleotide
  Sense strand starting at position 2934 of SEQ ID NO: 587570
cuaaacuuucuuggagauc

SEQ ID NO: 802147 - RNA, 19 nt, Artificial Sequence
  Description of Artificial Sequence: Synthetic oligonucleotide
  Antisense strand to SEQ ID NO: 802146
gaucuccaagaaaguuuag

SEQ ID NO: 802148 - RNA, 19 nt, Artificial Sequence
  Description of Artificial Sequence: Synthetic oligonucleotide
  Sense strand starting at position 3200 of SEQ ID NO: 587570
aaauccuucuugguugaga

SEQ ID NO: 802149 - RNA, 19 nt, Artificial Sequence
  Description of Artificial Sequence: Synthetic oligonucleotide
  Antisense strand to SEQ ID NO: 802148
ucucaaccaagaaggauuu

SEQ ID NO: 802150 - RNA, 19 nt, Artificial Sequence
  Description of Artificial Sequence: Synthetic oligonucleotide
  Sense strand starting at position 3201 of SEQ ID NO: 587570
aauccuucuugguugagaa

SEQ ID NO: 802151 - RNA, 19 nt, Artificial Sequence
  Description of Artificial Sequence: Synthetic oligonucleotide
  Antisense strand to SEQ ID NO: 802150
uucucaaccaagaaggauu

SEQ ID NO: 802152 - RNA, 19 nt, Artificial Sequence
  Description of Artificial Sequence: Synthetic oligonucleotide
  Sense strand starting at position 3202 of SEQ ID NO: 587570
auccuucuugguugagaac

SEQ ID NO: 802153 - RNA, 19 nt, Artificial Sequence
  Description of Artificial Sequence: Synthetic oligonucleotide
  Antisense strand to SEQ ID NO: 802152
guucucaaccaagaaggau

SEQ ID NO: 802154 - RNA, 19 nt, Artificial Sequence
  Description of Artificial Sequence: Synthetic oligonucleotide
  Sense strand starting at position 3238 of SEQ ID NO: 587570
gaaagaugguaucuuaguc

SEQ ID NO: 802155 - RNA, 19 nt, Artificial Sequence
  Description of Artificial Sequence: Synthetic oligonucleotide
  Antisense strand to SEQ ID NO: 802154
gacuaagauaccaucuuuc

SEQ ID NO: 802156 - RNA, 19 nt, Artificial Sequence
  Description of Artificial Sequence: Synthetic oligonucleotide
  Sense strand starting at position 3543 of SEQ ID NO: 587570
uuuagcauauggguaagau

SEQ ID NO: 802157 - RNA, 19 nt, Artificial Sequence
  Description of Artificial Sequence: Synthetic oligonucleotide
  Antisense strand to SEQ ID NO: 802156
aucuuacccauaugcuaaa

SEQ ID NO: 802158 - RNA, 19 nt, Artificial Sequence
  Description of Artificial Sequence: Synthetic oligonucleotide
  Sense strand starting at position 3553 of SEQ ID NO: 587570
ggguaagaugugggcagau

SEQ ID NO: 802159 - RNA, 19 nt, Artificial Sequence
  Description of Artificial Sequence: Synthetic oligonucleotide
  Antisense strand to SEQ ID NO: 802158
aucugcccacaucuuaccc

SEQ ID NO: 802160 - RNA, 19 nt, Artificial Sequence
  Description of Artificial Sequence: Synthetic oligonucleotide
  Sense strand starting at position 3555 of SEQ ID NO: 587570
guaagaugugggcagauag

SEQ ID NO: 802161 - RNA, 19 nt, Artificial Sequence
  Description of Artificial Sequence: Synthetic oligonucleotide
  Antisense strand to SEQ ID NO: 802160
cuaucugcccacaucuuac

SEQ ID NO: 802162 - RNA, 19 nt, Artificial Sequence
  Description of Artificial Sequence: Synthetic oligonucleotide
  Sense strand starting at position 3 of SEQ ID NO: 587571
ugauuuaaaugugaucucu

SEQ ID NO: 802163 - RNA, 19 nt, Artificial Sequence
  Description of Artificial Sequence: Synthetic oligonucleotide
  Antisense strand to SEQ ID NO: 802162
agagaucacauuuaaauca

SEQ ID NO: 802164 - RNA, 19 nt, Artificial Sequence
  Description of Artificial Sequence: Synthetic oligonucleotide
  Sense strand starting at position 9 of SEQ ID NO: 587571
aaaugugaucucugcuaag

SEQ ID NO: 802165 - RNA, 19 nt, Artificial Sequence
  Description of Artificial Sequence: Synthetic oligonucleotide
  Antisense strand to SEQ ID NO: 802164
cuuagcagagaucacauuu

SEQ ID NO: 802166 - RNA, 19 nt, Artificial Sequence
  Description of Artificial Sequence: Synthetic oligonucleotide
  Sense strand starting at position 535 of SEQ ID NO: 587571
accauaaguuuguucugau

SEQ ID NO: 802167 - RNA, 19 nt, Artificial Sequence
  Description of Artificial Sequence: Synthetic oligonucleotide
  Antisense strand to SEQ ID NO: 802166
aucagaacaaacuuauggu

SEQ ID NO: 802168 - RNA, 19 nt, Artificial Sequence
  Description of Artificial Sequence: Synthetic oligonucleotide
  Sense strand starting at position 536 of SEQ ID NO: 587571
ccauaaguuuguucugauc

SEQ ID NO: 802169 - RNA, 19 nt, Artificial Sequence
  Description of Artificial Sequence: Synthetic oligonucleotide
  Antisense strand to SEQ ID NO: 802168
gaucagaacaaacuuaugg

SEQ ID NO: 802170 - RNA, 19 nt, Artificial Sequence
  Description of Artificial Sequence: Synthetic oligonucleotide
  Sense strand starting at position 578 of SEQ ID NO: 587571
uuucuaaaucucggcuaga

SEQ ID NO: 802171 - RNA, 19 nt, Artificial Sequence
  Description of Artificial Sequence: Synthetic oligonucleotide
  Antisense strand to SEQ ID NO: 802170
ucuagccgagauuuagaaa

SEQ ID NO: 802172 - RNA, 19 nt, Artificial Sequence
  Description of Artificial Sequence: Synthetic oligonucleotide
  Sense strand starting at position 579 of SEQ ID NO: 587571
uucuaaaucucggcuagaa

SEQ ID NO: 802173 - RNA, 19 nt, Artificial Sequence
  Description of Artificial Sequence: Synthetic oligonucleotide
  Antisense strand to SEQ ID NO: 802172
uucuagccgagauuuagaa

SEQ ID NO: 802174 - RNA, 19 nt, Artificial Sequence
  Description of Artificial Sequence: Synthetic oligonucleotide
  Sense strand starting at position 581 of SEQ ID NO: 587571
cuaaaucucggcuagaaug

SEQ ID NO: 802175 - RNA, 19 nt, Artificial Sequence
  Description of Artificial Sequence: Synthetic oligonucleotide
  Antisense strand to SEQ ID NO: 802174
cauucuagccgagauuuag

SEQ ID NO: 802176 - RNA, 19 nt, Artificial Sequence
  Description of Artificial Sequence: Synthetic oligonucleotide
  Sense strand starting at position 583 of SEQ ID NO: 587571
aaaucucggcuagaauguu

SEQ ID NO: 802177 - RNA, 19 nt, Artificial Sequence
  Description of Artificial Sequence: Synthetic oligonucleotide
  Antisense strand to SEQ ID NO: 802176
aacauucuagccgagauuu

SEQ ID NO: 802178 - RNA, 19 nt, Artificial Sequence
  Description of Artificial Sequence: Synthetic oligonucleotide
  Sense strand starting at position 1109 of SEQ ID NO: 587571
aggaaucuuuaguuaacca

SEQ ID NO: 802179 - RNA, 19 nt, Artificial Sequence
  Description of Artificial Sequence: Synthetic oligonucleotide
  Antisense strand to SEQ ID NO: 802178
ugguuaacuaaagauuccu

SEQ ID NO: 802180 - RNA, 19 nt, Artificial Sequence
  Description of Artificial Sequence: Synthetic oligonucleotide
  Sense strand starting at position 1120 of SEQ ID NO: 587571
guuaaccagcuauguuuaa

SEQ ID NO: 802181 - RNA, 19 nt, Artificial Sequence
  Description of Artificial Sequence: Synthetic oligonucleotide
  Antisense strand to SEQ ID NO: 802180
uuaaacauagcugguuaac

SEQ ID NO: 802182 - RNA, 19 nt, Artificial Sequence
  Description of Artificial Sequence: Synthetic oligonucleotide
  Sense strand starting at position 1229 of SEQ ID NO: 587571
aaaggagaugucugcugau

SEQ ID NO: 802183 - RNA, 19 nt, Artificial Sequence
  Description of Artificial Sequence: Synthetic oligonucleotide
  Antisense strand to SEQ ID NO: 802182
aucagcagacaucuccuuu

SEQ ID NO: 802184 - RNA, 19 nt, Artificial Sequence
  Description of Artificial Sequence: Synthetic oligonucleotide
  Sense strand starting at position 1236 of SEQ ID NO: 587571
augucugcugaugaguuua

SEQ ID NO: 802185 - RNA, 19 nt, Artificial Sequence
  Description of Artificial Sequence: Synthetic oligonucleotide
  Antisense strand to SEQ ID NO: 802184
uaaacucaucagcagacau

SEQ ID NO: 802186 - RNA, 19 nt, Artificial Sequence
  Description of Artificial Sequence: Synthetic oligonucleotide
  Sense strand starting at position 1241 of SEQ ID NO: 587571
ugcugaugaguuuaacuau

SEQ ID NO: 802187 - RNA, 19 nt, Artificial Sequence
  Description of Artificial Sequence: Synthetic oligonucleotide
  Antisense strand to SEQ ID NO: 802186
auaguuaaacucaucagca

SEQ ID NO: 802188 - RNA, 19 nt, Artificial Sequence
  Description of Artificial Sequence: Synthetic oligonucleotide
  Sense strand starting at position 1285 of SEQ ID NO: 587571
caaguauucuccgugaaug

SEQ ID NO: 802189 - RNA, 19 nt, Artificial Sequence
  Description of Artificial Sequence: Synthetic oligonucleotide
  Antisense strand to SEQ ID NO: 802188
cauucacggagaauacuug

SEQ ID NO: 802190 - RNA, 19 nt, Artificial Sequence
  Description of Artificial Sequence: Synthetic oligonucleotide
  Sense strand starting at position 1287 of SEQ ID NO: 587571
aguauucuccgugaaugca

SEQ ID NO: 802191 - RNA, 19 nt, Artificial Sequence
  Description of Artificial Sequence: Synthetic oligonucleotide
  Antisense strand to SEQ ID NO: 802190
ugcauucacggagaauacu

SEQ ID NO: 802192 - RNA, 19 nt, Artificial Sequence
  Description of Artificial Sequence: Synthetic oligonucleotide
  Sense strand starting at position 1310 of SEQ ID NO: 587571
auuccuaaugugugaaauc

SEQ ID NO: 802193 - RNA, 19 nt, Artificial Sequence
  Description of Artificial Sequence: Synthetic oligonucleotide
  Antisense strand to SEQ ID NO: 802192
gauuucacacauuaggaau

SEQ ID NO: 802194 - RNA, 19 nt, Artificial Sequence
  Description of Artificial Sequence: Synthetic oligonucleotide
  Sense strand starting at position 1320 of SEQ ID NO: 587571
ugugaaaucucuccgagag

SEQ ID NO: 802195 - RNA, 19 nt, Artificial Sequence
  Description of Artificial Sequence: Synthetic oligonucleotide
  Antisense strand to SEQ ID NO: 802194
cucucggagagauuucaca

SEQ ID NO: 802196 - RNA, 19 nt, Artificial Sequence
  Description of Artificial Sequence: Synthetic oligonucleotide
  Sense strand starting at position 1321 of SEQ ID NO: 587571
gugaaaucucuccgagaga

SEQ ID NO: 802197 - RNA, 19 nt, Artificial Sequence
  Description of Artificial Sequence: Synthetic oligonucleotide
  Antisense strand to SEQ ID NO: 802196
ucucucggagagauuucac

SEQ ID NO: 802198 - RNA, 19 nt, Artificial Sequence
  Description of Artificial Sequence: Synthetic oligonucleotide
  Sense strand starting at position 1368 of SEQ ID NO: 587571
agagcaccguaauccuaaa

SEQ ID NO: 802199 - RNA, 19 nt, Artificial Sequence
  Description of Artificial Sequence: Synthetic oligonucleotide
  Antisense strand to SEQ ID NO: 802198
uuuaggauuacggugcucu

SEQ ID NO: 802200 - RNA, 19 nt, Artificial Sequence
  Description of Artificial Sequence: Synthetic oligonucleotide
  Sense strand starting at position 1453 of SEQ ID NO: 587571
gaaacaucgugauucggaa

SEQ ID NO: 802201 - RNA, 19 nt, Artificial Sequence
  Description of Artificial Sequence: Synthetic oligonucleotide
  Antisense strand to SEQ ID NO: 802200
uuccgaaucacgauguuuc

SEQ ID NO: 802202 - RNA, 19 nt, Artificial Sequence
  Description of Artificial Sequence: Synthetic oligonucleotide
  Sense strand starting at position 1483 of SEQ ID NO: 587571
aacguaaacugcucagacu

SEQ ID NO: 802203 - RNA, 19 nt, Artificial Sequence
  Description of Artificial Sequence: Synthetic oligonucleotide
  Antisense strand to SEQ ID NO: 802202
agucugagcaguuuacguu

SEQ ID NO: 802204 - RNA, 19 nt, Artificial Sequence
  Description of Artificial Sequence: Synthetic oligonucleotide
  Sense strand starting at position 1745 of SEQ ID NO: 587571
cuguguguaagcgagaaau

SEQ ID NO: 802205 - RNA, 19 nt, Artificial Sequence
  Description of Artificial Sequence: Synthetic oligonucleotide
  Antisense strand to SEQ ID NO: 802204
auuucucgcuuacacacag

SEQ ID NO: 802206 - RNA, 19 nt, Artificial Sequence
  Description of Artificial Sequence: Synthetic oligonucleotide
  Sense strand starting at position 1747 of SEQ ID NO: 587571
guguguaagcgagaaauua

SEQ ID NO: 802207 - RNA, 19 nt, Artificial Sequence
  Description of Artificial Sequence: Synthetic oligonucleotide
  Antisense strand to SEQ ID NO: 802206
uaauuucucgcuuacacac

SEQ ID NO: 802208 - RNA, 19 nt, Artificial Sequence
  Description of Artificial Sequence: Synthetic oligonucleotide
  Sense strand starting at position 1869 of SEQ ID NO: 587571
cagcgcucggguguuuaaa

SEQ ID NO: 802209 - RNA, 19 nt, Artificial Sequence
  Description of Artificial Sequence: Synthetic oligonucleotide
  Antisense strand to SEQ ID NO: 802208
uuuaaacacccgagcgcug

SEQ ID NO: 802210 - RNA, 19 nt, Artificial Sequence
  Description of Artificial Sequence: Synthetic oligonucleotide
  Sense strand starting at position 2017 of SEQ ID NO: 587571
gggacuuccggugaccaga

SEQ ID NO: 802211 - RNA, 19 nt, Artificial Sequence
  Description of Artificial Sequence: Synthetic oligonucleotide
  Antisense strand to SEQ ID NO: 802210
ucuggucaccggaaguccc

SEQ ID NO: 802212 - RNA, 19 nt, Artificial Sequence
  Description of Artificial Sequence: Synthetic oligonucleotide
  Sense strand starting at position 2197 of SEQ ID NO: 587571
cguuccuccgcguuacaga

SEQ ID NO: 802213 - RNA, 19 nt, Artificial Sequence
  Description of Artificial Sequence: Synthetic oligonucleotide
  Antisense strand to SEQ ID NO: 802212
ucuguaacgcggaggaacg

SEQ ID NO: 802214 - RNA, 19 nt, Artificial Sequence
  Description of Artificial Sequence: Synthetic oligonucleotide
  Sense strand starting at position 2493 of SEQ ID NO: 587571
ggugauugugaggaguaau

SEQ ID NO: 802215 - RNA, 19 nt, Artificial Sequence
  Description of Artificial Sequence: Synthetic oligonucleotide
  Antisense strand to SEQ ID NO: 802214
auuacuccucacaaucacc

SEQ ID NO: 802216 - RNA, 19 nt, Artificial Sequence
  Description of Artificial Sequence: Synthetic oligonucleotide
  Sense strand starting at position 2524 of SEQ ID NO: 587571
cgaggaauuguguaacgug

SEQ ID NO: 802217 - RNA, 19 nt, Artificial Sequence
  Description of Artificial Sequence: Synthetic oligonucleotide
  Antisense strand to SEQ ID NO: 802216
cacguuacacaauuccucg

SEQ ID NO: 802218 - RNA, 19 nt, Artificial Sequence
  Description of Artificial Sequence: Synthetic oligonucleotide
  Sense strand starting at position 2529 of SEQ ID NO: 587571
aauuguguaacgugaagua

SEQ ID NO: 802219 - RNA, 19 nt, Artificial Sequence
  Description of Artificial Sequence: Synthetic oligonucleotide
  Antisense strand to SEQ ID NO: 802218
uacuucacguuacacaauu

SEQ ID NO: 802220 - RNA, 19 nt, Artificial Sequence
  Description of Artificial Sequence: Synthetic oligonucleotide
  Sense strand starting at position 2539 of SEQ ID NO: 587571
cgugaaguaccaugaacaa

SEQ ID NO: 802221 - RNA, 19 nt, Artificial Sequence
  Description of Artificial Sequence: Synthetic oligonucleotide
  Antisense strand to SEQ ID NO: 802220
uuguucaugguacuucacg

SEQ ID NO: 802222 - RNA, 19 nt, Artificial Sequence
  Description of Artificial Sequence: Synthetic oligonucleotide
  Sense strand starting at position 2600 of SEQ ID NO: 587571
guugaugagcuuuggagca

SEQ ID NO: 802223 - RNA, 19 nt, Artificial Sequence
  Description of Artificial Sequence: Synthetic oligonucleotide
  Antisense strand to SEQ ID NO: 802222
ugcuccaaagcucaucaac

SEQ ID NO: 802224 - RNA, 19 nt, Artificial Sequence
  Description of Artificial Sequence: Synthetic oligonucleotide
  Sense strand starting at position 2621 of SEQ ID NO: 587571
gagauaaacucagcggguu

SEQ ID NO: 802225 - RNA, 19 nt, Artificial Sequence
  Description of Artificial Sequence: Synthetic oligonucleotide
  Antisense strand to SEQ ID NO: 802224
aacccgcugaguuuaucuc

SEQ ID NO: 802226 - RNA, 19 nt, Artificial Sequence
  Description of Artificial Sequence: Synthetic oligonucleotide
  Sense strand starting at position 2622 of SEQ ID NO: 587571
agauaaacucagcggguuu

SEQ ID NO: 802227 - RNA, 19 nt, Artificial Sequence
  Description of Artificial Sequence: Synthetic oligonucleotide
  Antisense strand to SEQ ID NO: 802226
aaacccgcugaguuuaucu

SEQ ID NO: 802228 - RNA, 19 nt, Artificial Sequence
  Description of Artificial Sequence: Synthetic oligonucleotide
  Sense strand starting at position 2653 of SEQ ID NO: 587571
ggcacaaacccuuagcaga

SEQ ID NO: 802229 - RNA, 19 nt, Artificial Sequence
  Description of Artificial Sequence: Synthetic oligonucleotide
  Antisense strand to SEQ ID NO: 802228
ucugcuaaggguuugugcc

SEQ ID NO: 802230 - RNA, 19 nt, Artificial Sequence
  Description of Artificial Sequence: Synthetic oligonucleotide
  Sense strand starting at position 2801 of SEQ ID NO: 587571
gugccauugacagaaguaa

SEQ ID NO: 802231 - RNA, 19 nt, Artificial Sequence
  Description of Artificial Sequence: Synthetic oligonucleotide
  Antisense strand to SEQ ID NO: 802230
uuacuucugucaauggcac

SEQ ID NO: 802232 - RNA, 19 nt, Artificial Sequence
  Description of Artificial Sequence: Synthetic oligonucleotide
  Sense strand starting at position 2871 of SEQ ID NO: 587571
gaaccagugcuauguuuac

SEQ ID NO: 802233 - RNA, 19 nt, Artificial Sequence
  Description of Artificial Sequence: Synthetic oligonucleotide
  Antisense strand to SEQ ID NO: 802232
guaaacauagcacugguuc

SEQ ID NO: 802234 - RNA, 19 nt, Artificial Sequence
  Description of Artificial Sequence: Synthetic oligonucleotide
  Sense strand starting at position 2995 of SEQ ID NO: 587571
ggagaacugccugggcaau

SEQ ID NO: 802235 - RNA, 19 nt, Artificial Sequence
  Description of Artificial Sequence: Synthetic oligonucleotide
  Antisense strand to SEQ ID NO: 802234
auugcccaggcaguucucc

SEQ ID NO: 802236 - RNA, 19 nt, Artificial Sequence
  Description of Artificial Sequence: Synthetic oligonucleotide
  Sense strand starting at position 3278 of SEQ ID NO: 587571
gaguguacauaugucauga

SEQ ID NO: 802237 - RNA, 19 nt, Artificial Sequence
  Description of Artificial Sequence: Synthetic oligonucleotide
  Antisense strand to SEQ ID NO: 802236
ucaugacauauguacacuc

SEQ ID NO: 802238 - RNA, 19 nt, Artificial Sequence
  Description of Artificial Sequence: Synthetic oligonucleotide
  Sense strand starting at position 3339 of SEQ ID NO: 587571
gugguaaacuggaaggaga

SEQ ID NO: 802239 - RNA, 19 nt, Artificial Sequence
  Description of Artificial Sequence: Synthetic oligonucleotide
  Antisense strand to SEQ ID NO: 802238
ucuccuuccaguuuaccac

SEQ ID NO: 802240 - RNA, 19 nt, Artificial Sequence
  Description of Artificial Sequence: Synthetic oligonucleotide
  Sense strand starting at position 3547 of SEQ ID NO: 587571
auuagcuagcuauaguuua

SEQ ID NO: 802241 - RNA, 19 nt, Artificial Sequence
  Description of Artificial Sequence: Synthetic oligonucleotide
  Antisense strand to SEQ ID NO: 802240
uaaacuauagcuagcuaau

SEQ ID NO: 802242 - RNA, 19 nt, Artificial Sequence
  Description of Artificial Sequence: Synthetic oligonucleotide
  Sense strand starting at position 160 of SEQ ID NO: 587572
ccaccuaauguuggauaaa

SEQ ID NO: 802243 - RNA, 19 nt, Artificial Sequence
  Description of Artificial Sequence: Synthetic oligonucleotide
  Antisense strand to SEQ ID NO: 802242
uuuauccaacauuaggugg

SEQ ID NO: 802244 - RNA, 19 nt, Artificial Sequence
  Description of Artificial Sequence: Synthetic oligonucleotide
  Sense strand starting at position 257 of SEQ ID NO: 587572
agaucaucuuucuuggaua

SEQ ID NO: 802245 - RNA, 19 nt, Artificial Sequence
  Description of Artificial Sequence: Synthetic oligonucleotide
  Antisense strand to SEQ ID NO: 802244
uauccaagaaagaugaucu

SEQ ID NO: 802246 - RNA, 19 nt, Artificial Sequence
  Description of Artificial Sequence: Synthetic oligonucleotide
  Sense strand starting at position 614 of SEQ ID NO: 587572
aguguauugggacaaguaa

SEQ ID NO: 802247 - RNA, 19 nt, Artificial Sequence
  Description of Artificial Sequence: Synthetic oligonucleotide
  Antisense strand to SEQ ID NO: 802246
uuacuugucccaauacacu

SEQ ID NO: 802248 - RNA, 19 nt, Artificial Sequence
  Description of Artificial Sequence: Synthetic oligonucleotide
  Sense strand starting at position 625 of SEQ ID NO: 587572
acaaguaauuugccuugca

SEQ ID NO: 802249 - RNA, 19 nt, Artificial Sequence
  Description of Artificial Sequence: Synthetic oligonucleotide
  Antisense strand to SEQ ID NO: 802248
ugcaaggcaaauuacuugu

SEQ ID NO: 802250 - RNA, 19 nt, Artificial Sequence
  Description of Artificial Sequence: Synthetic oligonucleotide
  Sense strand starting at position 725 of SEQ ID NO: 587572
uuaaauauggcagauguca

SEQ ID NO: 802251 - RNA, 19 nt, Artificial Sequence
  Description of Artificial Sequence: Synthetic oligonucleotide
  Antisense strand to SEQ ID NO: 802250
ugacaucugccauauuuaa

SEQ ID NO: 802252 - RNA, 19 nt, Artificial Sequence
  Description of Artificial Sequence: Synthetic oligonucleotide
  Sense strand starting at position 749 of SEQ ID NO: 587572
uccuuaccugcauguauuu

SEQ ID NO: 802253 - RNA, 19 nt, Artificial Sequence
  Description of Artificial Sequence: Synthetic oligonucleotide
  Antisense strand to SEQ ID NO: 802252
aaauacaugcagguaagga

SEQ ID NO: 802254 - RNA, 19 nt, Artificial Sequence
  Description of Artificial Sequence: Synthetic oligonucleotide
  Sense strand starting at position 864 of SEQ ID NO: 587572
gaucucuggcagcaaauga

SEQ ID NO: 802255 - RNA, 19 nt, Artificial Sequence
  Description of Artificial Sequence: Synthetic oligonucleotide
  Antisense strand to SEQ ID NO: 802254
ucauuugcugccagagauc

SEQ ID NO: 802256 - RNA, 19 nt, Artificial Sequence
  Description of Artificial Sequence: Synthetic oligonucleotide
  Sense strand starting at position 962 of SEQ ID NO: 587572
ggcagauugguccagguga

SEQ ID NO: 802257 - RNA, 19 nt, Artificial Sequence
  Description of Artificial Sequence: Synthetic oligonucleotide
  Antisense strand to SEQ ID NO: 802256
ucaccuggaccaaucugcc

SEQ ID NO: 802258 - RNA, 19 nt, Artificial Sequence
  Description of Artificial Sequence: Synthetic oligonucleotide
  Sense strand starting at position 964 of SEQ ID NO: 587572
cagauugguccaggugaca

SEQ ID NO: 802259 - RNA, 19 nt, Artificial Sequence
  Description of Artificial Sequence: Synthetic oligonucleotide
  Antisense strand to SEQ ID NO: 802258
ugucaccuggaccaaucug

SEQ ID NO: 802260 - RNA, 19 nt, Artificial Sequence
  Description of Artificial Sequence: Synthetic oligonucleotide
  Sense strand starting at position 975 of SEQ ID NO: 587572
aggugacauuugguuuguu

SEQ ID NO: 802261 - RNA, 19 nt, Artificial Sequence
  Description of Artificial Sequence: Synthetic oligonucleotide
  Antisense strand to SEQ ID NO: 802260
aacaaaccaaaugucaccu

SEQ ID NO: 802262 - RNA, 19 nt, Artificial Sequence
  Description of Artificial Sequence: Synthetic oligonucleotide
  Sense strand starting at position 976 of SEQ ID NO: 587572
ggugacauuugguuuguua

SEQ ID NO: 802263 - RNA, 19 nt, Artificial Sequence
  Description of Artificial Sequence: Synthetic oligonucleotide
  Antisense strand to SEQ ID NO: 802262
uaacaaaccaaaugucacc

SEQ ID NO: 802264 - RNA, 19 nt, Artificial Sequence
  Description of Artificial Sequence: Synthetic oligonucleotide
  Sense strand starting at position 989 of SEQ ID NO: 587572
uuguuagcccuagaauucu

SEQ ID NO: 802265 - RNA, 19 nt, Artificial Sequence
  Description of Artificial Sequence: Synthetic oligonucleotide
  Antisense strand to SEQ ID NO: 802264
agaauucuagggcuaacaa

SEQ ID NO: 802266 - RNA, 19 nt, Artificial Sequence
  Description of Artificial Sequence: Synthetic oligonucleotide
  Sense strand starting at position 1121 of SEQ ID NO: 587572
ugaguaagauuccucuaau

SEQ ID NO: 802267 - RNA, 19 nt, Artificial Sequence
  Description of Artificial Sequence: Synthetic oligonucleotide
  Antisense strand to SEQ ID NO: 802266
auuagaggaaucuuacuca

SEQ ID NO: 802268 - RNA, 19 nt, Artificial Sequence
  Description of Artificial Sequence: Synthetic oligonucleotide
  Sense strand starting at position 1324 of SEQ ID NO: 587572
aacggauguugagucauga

SEQ ID NO: 802269 - RNA, 19 nt, Artificial Sequence
  Description of Artificial Sequence: Synthetic oligonucleotide
  Antisense strand to SEQ ID NO: 802268
ucaugacucaacauccguu

SEQ ID NO: 802270 - RNA, 19 nt, Artificial Sequence
  Description of Artificial Sequence: Synthetic oligonucleotide
  Sense strand starting at position 1334 of SEQ ID NO: 587572
gagucaugagaacggacua

SEQ ID NO: 802271 - RNA, 19 nt, Artificial Sequence
  Description of Artificial Sequence: Synthetic oligonucleotide
  Antisense strand to SEQ ID NO: 802270
uaguccguucucaugacuc

SEQ ID NO: 802272 - RNA, 19 nt, Artificial Sequence
  Description of Artificial Sequence: Synthetic oligonucleotide
  Sense strand starting at position 1335 of SEQ ID NO: 587572
agucaugagaacggacuaa

SEQ ID NO: 802273 - RNA, 19 nt, Artificial Sequence
  Description of Artificial Sequence: Synthetic oligonucleotide
  Antisense strand to SEQ ID NO: 802272
uuaguccguucucaugacu

SEQ ID NO: 802274 - RNA, 19 nt, Artificial Sequence
  Description of Artificial Sequence: Synthetic oligonucleotide
  Sense strand starting at position 1346 of SEQ ID NO: 587572
cggacuaaaccgggucaau

SEQ ID NO: 802275 - RNA, 19 nt, Artificial Sequence
  Description of Artificial Sequence: Synthetic oligonucleotide
  Antisense strand to SEQ ID NO: 802274
auugacccgguuuaguccg

SEQ ID NO: 802276 - RNA, 19 nt, Artificial Sequence
  Description of Artificial Sequence: Synthetic oligonucleotide
  Sense strand starting at position 1349 of SEQ ID NO: 587572
acuaaaccgggucaauuau

SEQ ID NO: 802277 - RNA, 19 nt, Artificial Sequence
  Description of Artificial Sequence: Synthetic oligonucleotide
  Antisense strand to SEQ ID NO: 802276
auaauugacccgguuuagu

SEQ ID NO: 802278 - RNA, 19 nt, Artificial Sequence
  Description of Artificial Sequence: Synthetic oligonucleotide
  Sense strand starting at position 1402 of SEQ ID NO: 587572
ccuuaccuccuauggagau

SEQ ID NO: 802279 - RNA, 19 nt, Artificial Sequence
  Description of Artificial Sequence: Synthetic oligonucleotide
  Antisense strand to SEQ ID NO: 802278
aucuccauaggagguaagg

SEQ ID NO: 802280 - RNA, 19 nt, Artificial Sequence
  Description of Artificial Sequence: Synthetic oligonucleotide
  Sense strand starting at position 2188 of SEQ ID NO: 587572
caagaaagauaguucuagu

SEQ ID NO: 802281 - RNA, 19 nt, Artificial Sequence
  Description of Artificial Sequence: Synthetic oligonucleotide
  Antisense strand to SEQ ID NO: 802280
acuagaacuaucuuucuug

SEQ ID NO: 802282 - RNA, 19 nt, Artificial Sequence
  Description of Artificial Sequence: Synthetic oligonucleotide
  Sense strand starting at position 2198 of SEQ ID NO: 587572
aguucuaguauccgagaga

SEQ ID NO: 802283 - RNA, 19 nt, Artificial Sequence
  Description of Artificial Sequence: Synthetic oligonucleotide
  Antisense strand to SEQ ID NO: 802282
ucucucggauacuagaacu

SEQ ID NO: 802284 - RNA, 19 nt, Artificial Sequence
  Description of Artificial Sequence: Synthetic oligonucleotide
  Sense strand starting at position 2201 of SEQ ID NO: 587572
ucuaguauccgagagacca

SEQ ID NO: 802285 - RNA, 19 nt, Artificial Sequence
  Description of Artificial Sequence: Synthetic oligonucleotide
  Antisense strand to SEQ ID NO: 802284
uggucucucggauacuaga

SEQ ID NO: 802286 - RNA, 19 nt, Artificial Sequence
  Description of Artificial Sequence: Synthetic oligonucleotide
  Sense strand starting at position 2467 of SEQ ID NO: 587572
ucucuauggguccaguaua

SEQ ID NO: 802287 - RNA, 19 nt, Artificial Sequence
  Description of Artificial Sequence: Synthetic oligonucleotide
  Antisense strand to SEQ ID NO: 802286
uauacuggacccauagaga

SEQ ID NO: 802288 - RNA, 19 nt, Artificial Sequence
  Description of Artificial Sequence: Synthetic oligonucleotide
  Sense strand starting at position 2548 of SEQ ID NO: 587572
guagcagagaccuaaguaa

SEQ ID NO: 802289 - RNA, 19 nt, Artificial Sequence
  Description of Artificial Sequence: Synthetic oligonucleotide
  Antisense strand to SEQ ID NO: 802288
uuacuuaggucucugcuac

SEQ ID NO: 802290 - RNA, 19 nt, Artificial Sequence
  Description of Artificial Sequence: Synthetic oligonucleotide
  Sense strand starting at position 2601 of SEQ ID NO: 587572
ugaggucuuacugauguua

SEQ ID NO: 802291 - RNA, 19 nt, Artificial Sequence
  Description of Artificial Sequence: Synthetic oligonucleotide
  Antisense strand to SEQ ID NO: 802290
uaacaucaguaagaccuca

SEQ ID NO: 802292 - RNA, 19 nt, Artificial Sequence
  Description of Artificial Sequence: Synthetic oligonucleotide
  Sense strand starting at position 2612 of SEQ ID NO: 587572
ugauguuaugauugaggua

SEQ ID NO: 802293 - RNA, 19 nt, Artificial Sequence
  Description of Artificial Sequence: Synthetic oligonucleotide
  Antisense strand to SEQ ID NO: 802292
uaccucaaucauaacauca

SEQ ID NO: 802294 - RNA, 19 nt, Artificial Sequence
  Description of Artificial Sequence: Synthetic oligonucleotide
  Sense strand starting at position 2619 of SEQ ID NO: 587572
augauugagguagguagua

SEQ ID NO: 802295 - RNA, 19 nt, Artificial Sequence
  Description of Artificial Sequence: Synthetic oligonucleotide
  Antisense strand to SEQ ID NO: 802294
uacuaccuaccucaaucau

SEQ ID NO: 802296 - RNA, 19 nt, Artificial Sequence
  Description of Artificial Sequence: Synthetic oligonucleotide
  Sense strand starting at position 2675 of SEQ ID NO: 587572
acagucuaauacuuaguau

SEQ ID NO: 802297 - RNA, 19 nt, Artificial Sequence
  Description of Artificial Sequence: Synthetic oligonucleotide
  Antisense strand to SEQ ID NO: 802296
auacuaaguauuagacugu

SEQ ID NO: 802298 - RNA, 19 nt, Artificial Sequence
  Description of Artificial Sequence: Synthetic oligonucleotide
  Sense strand starting at position 2768 of SEQ ID NO: 587572
acuuauuggcauuacugau

SEQ ID NO: 802299 - RNA, 19 nt, Artificial Sequence
  Description of Artificial Sequence: Synthetic oligonucleotide
  Antisense strand to SEQ ID NO: 802298
aucaguaaugccaauaagu

SEQ ID NO: 802300 - RNA, 19 nt, Artificial Sequence
  Description of Artificial Sequence: Synthetic oligonucleotide
  Sense strand starting at position 2937 of SEQ ID NO: 587572
agcugagacaguggagaau

SEQ ID NO: 802301 - RNA, 19 nt, Artificial Sequence
  Description of Artificial Sequence: Synthetic oligonucleotide
  Antisense strand to SEQ ID NO: 802300
auucuccacugucucagcu

SEQ ID NO: 802302 - RNA, 19 nt, Artificial Sequence
  Description of Artificial Sequence: Synthetic oligonucleotide
  Sense strand starting at position 3306 of SEQ ID NO: 587572
cguaaaugugaccauauua

SEQ ID NO: 802303 - RNA, 19 nt, Artificial Sequence
  Description of Artificial Sequence: Synthetic oligonucleotide
  Antisense strand to SEQ ID NO: 802302
uaauauggucacauuuacg

SEQ ID NO: 802304 - RNA, 19 nt, Artificial Sequence
  Description of Artificial Sequence: Synthetic oligonucleotide
  Sense strand starting at position 3336 of SEQ ID NO: 587572
uuauuucuuugaucucgua

SEQ ID NO: 802305 - RNA, 19 nt, Artificial Sequence
  Description of Artificial Sequence: Synthetic oligonucleotide
  Antisense strand to SEQ ID NO: 802304
uacgagaucaaagaaauaa

SEQ ID NO: 802306 - RNA, 19 nt, Artificial Sequence
  Description of Artificial Sequence: Synthetic oligonucleotide
  Sense strand starting at position 3516 of SEQ ID NO: 587572
uuucauuggcucgagggau

SEQ ID NO: 802307 - RNA, 19 nt, Artificial Sequence
  Description of Artificial Sequence: Synthetic oligonucleotide
  Antisense strand to SEQ ID NO: 802306
aucccucgagccaaugaaa

SEQ ID NO: 802308 - RNA, 19 nt, Artificial Sequence
  Description of Artificial Sequence: Synthetic oligonucleotide
  Sense strand starting at position 3522 of SEQ ID NO: 587572
uggcucgagggauacuuua

SEQ ID NO: 802309 - RNA, 19 nt, Artificial Sequence
  Description of Artificial Sequence: Synthetic oligonucleotide
  Antisense strand to SEQ ID NO: 802308
uaaaguaucccucgagcca

SEQ ID NO: 802310 - RNA, 19 nt, Artificial Sequence
  Description of Artificial Sequence: Synthetic oligonucleotide
  Sense strand starting at position 3671 of SEQ ID NO: 587572
cuuccagugcccuagaacu

SEQ ID NO: 802311 - RNA, 19 nt, Artificial Sequence
  Description of Artificial Sequence: Synthetic oligonucleotide
  Antisense strand to SEQ ID NO: 802310
aguucuagggcacuggaag

SEQ ID NO: 802312 - RNA, 19 nt, Artificial Sequence
  Description of Artificial Sequence: Synthetic oligonucleotide
  Sense strand starting at position 3725 of SEQ ID NO: 587572
uguuuaaaucuugaaugug

SEQ ID NO: 802313 - RNA, 19 nt, Artificial Sequence
  Description of Artificial Sequence: Synthetic oligonucleotide
  Antisense strand to SEQ ID NO: 802312
cacauucaagauuuaaaca

SEQ ID NO: 802314 - RNA, 19 nt, Artificial Sequence
  Description of Artificial Sequence: Synthetic oligonucleotide
  Sense strand starting at position 3728 of SEQ ID NO: 587572
uuaaaucuugaaugugaac

SEQ ID NO: 802315 - RNA, 19 nt, Artificial Sequence
  Description of Artificial Sequence: Synthetic oligonucleotide
  Antisense strand to SEQ ID NO: 802314
guucacauucaagauuuaa

SEQ ID NO: 802316 - RNA, 19 nt, Artificial Sequence
  Description of Artificial Sequence: Synthetic oligonucleotide
  Sense strand starting at position 3800 of SEQ ID NO: 587572
agcugaugacuuuagcuaa

SEQ ID NO: 802317 - RNA, 19 nt, Artificial Sequence
  Description of Artificial Sequence: Synthetic oligonucleotide
  Antisense strand to SEQ ID NO: 802316
uuagcuaaagucaucagcu

SEQ ID NO: 802318 - RNA, 19 nt, Artificial Sequence
  Description of Artificial Sequence: Synthetic oligonucleotide
  Sense strand starting at position 3807 of SEQ ID NO: 587572
gacuuuagcuaaguggaaa

SEQ ID NO: 802319 - RNA, 19 nt, Artificial Sequence
  Description of Artificial Sequence: Synthetic oligonucleotide
  Antisense strand to SEQ ID NO: 802318
uuuccacuuagcuaaaguc

SEQ ID NO: 802320 - RNA, 19 nt, Artificial Sequence
  Description of Artificial Sequence: Synthetic oligonucleotide
  Sense strand starting at position 3842 of SEQ ID NO: 587572
ccauuuccuuuagaggaca

SEQ ID NO: 802321 - RNA, 19 nt, Artificial Sequence
  Description of Artificial Sequence: Synthetic oligonucleotide
  Antisense strand to SEQ ID NO: 802320
uguccucuaaaggaaaugg

SEQ ID NO: 802322 - RNA, 19 nt, Artificial Sequence
  Description of Artificial Sequence: Synthetic oligonucleotide
  Sense strand starting at position 211 of SEQ ID NO: 587573
cuauuauuagcuuaaugga

SEQ ID NO: 802323 - RNA, 19 nt, Artificial Sequence
  Description of Artificial Sequence: Synthetic oligonucleotide
  Antisense strand to SEQ ID NO: 802322
uccauuaagcuaauaauag

SEQ ID NO: 802324 - RNA, 19 nt, Artificial Sequence
  Description of Artificial Sequence: Synthetic oligonucleotide
  Sense strand starting at position 311 of SEQ ID NO: 587573
cuaguuuagcaugauaaca

SEQ ID NO: 802325 - RNA, 19 nt, Artificial Sequence
  Description of Artificial Sequence: Synthetic oligonucleotide
  Antisense strand to SEQ ID NO: 802324
uguuaucaugcuaaacuag

SEQ ID NO: 802326 - RNA, 19 nt, Artificial Sequence
  Description of Artificial Sequence: Synthetic oligonucleotide
  Sense strand starting at position 322 of SEQ ID NO: 587573
ugauaacaucuugaugcau

SEQ ID NO: 802327 - RNA, 19 nt, Artificial Sequence
  Description of Artificial Sequence: Synthetic oligonucleotide
  Antisense strand to SEQ ID NO: 802326
augcaucaagauguuauca

SEQ ID NO: 802328 - RNA, 19 nt, Artificial Sequence
  Description of Artificial Sequence: Synthetic oligonucleotide
  Sense strand starting at position 379 of SEQ ID NO: 587573
gggugagcuuaacuucaga

SEQ ID NO: 802329 - RNA, 19 nt, Artificial Sequence
  Description of Artificial Sequence: Synthetic oligonucleotide
  Antisense strand to SEQ ID NO: 802328
ucugaaguuaagcucaccc

SEQ ID NO: 802330 - RNA, 19 nt, Artificial Sequence
  Description of Artificial Sequence: Synthetic oligonucleotide
  Sense strand starting at position 427 of SEQ ID NO: 587573
agucucucagacugaucuu

SEQ ID NO: 802331 - RNA, 19 nt, Artificial Sequence
  Description of Artificial Sequence: Synthetic oligonucleotide
  Antisense strand to SEQ ID NO: 802330
aagaucagucugagagacu

SEQ ID NO: 802332 - RNA, 19 nt, Artificial Sequence
  Description of Artificial Sequence: Synthetic oligonucleotide
  Sense strand starting at position 430 of SEQ ID NO: 587573
cucucagacugaucuuuag

SEQ ID NO: 802333 - RNA, 19 nt, Artificial Sequence
  Description of Artificial Sequence: Synthetic oligonucleotide
  Antisense strand to SEQ ID NO: 802332
cuaaagaucagucugagag

SEQ ID NO: 802334 - RNA, 19 nt, Artificial Sequence
  Description of Artificial Sequence: Synthetic oligonucleotide
  Sense strand starting at position 732 of SEQ ID NO: 587573
gccuuuauccaaggaacug

SEQ ID NO: 802335 - RNA, 19 nt, Artificial Sequence
  Description of Artificial Sequence: Synthetic oligonucleotide
  Antisense strand to SEQ ID NO: 802334
caguuccuuggauaaaggc

SEQ ID NO: 802336 - RNA, 19 nt, Artificial Sequence
  Description of Artificial Sequence: Synthetic oligonucleotide
  Sense strand starting at position 778 of SEQ ID NO: 587573
agaccuucucaagguacau

SEQ ID NO: 802337 - RNA, 19 nt, Artificial Sequence
  Description of Artificial Sequence: Synthetic oligonucleotide
  Antisense strand to SEQ ID NO: 802336
auguaccuugagaaggucu

SEQ ID NO: 802338 - RNA, 19 nt, Artificial Sequence
  Description of Artificial Sequence: Synthetic oligonucleotide
  Sense strand starting at position 824 of SEQ ID NO: 587573
augguuucuucucuuauag

SEQ ID NO: 802339 - RNA, 19 nt, Artificial Sequence
  Description of Artificial Sequence: Synthetic oligonucleotide
  Antisense strand to SEQ ID NO: 802338
cuauaagagaagaaaccau

SEQ ID NO: 802340 - RNA, 19 nt, Artificial Sequence
  Description of Artificial Sequence: Synthetic oligonucleotide
  Sense strand starting at position 1442 of SEQ ID NO: 587573
agcuauugucuagauuaau

SEQ ID NO: 802341 - RNA, 19 nt, Artificial Sequence
  Description of Artificial Sequence: Synthetic oligonucleotide
  Antisense strand to SEQ ID NO: 802340
auuaaucuagacaauagcu

SEQ ID NO: 802342 - RNA, 19 nt, Artificial Sequence
  Description of Artificial Sequence: Synthetic oligonucleotide
  Sense strand starting at position 1465 of SEQ ID NO: 587573
cuguccuaagaauguauca

SEQ ID NO: 802343 - RNA, 19 nt, Artificial Sequence
  Description of Artificial Sequence: Synthetic oligonucleotide
  Antisense strand to SEQ ID NO: 802342
ugauacauucuuaggacag

SEQ ID NO: 802344 - RNA, 19 nt, Artificial Sequence
  Description of Artificial Sequence: Synthetic oligonucleotide
  Sense strand starting at position 1478 of SEQ ID NO: 587573
guaucaguucuugaucuag

SEQ ID NO: 802345 - RNA, 19 nt, Artificial Sequence
  Description of Artificial Sequence: Synthetic oligonucleotide
  Antisense strand to SEQ ID NO: 802344
cuagaucaagaacugauac

SEQ ID NO: 802346 - RNA, 19 nt, Artificial Sequence
  Description of Artificial Sequence: Synthetic oligonucleotide
  Sense strand starting at position 1480 of SEQ ID NO: 587573
aucaguucuugaucuagau

SEQ ID NO: 802347 - RNA, 19 nt, Artificial Sequence
  Description of Artificial Sequence: Synthetic oligonucleotide
  Antisense strand to SEQ ID NO: 802346
aucuagaucaagaacugau

SEQ ID NO: 802348 - RNA, 19 nt, Artificial Sequence
  Description of Artificial Sequence: Synthetic oligonucleotide
  Sense strand starting at position 1484 of SEQ ID NO: 587573
guucuugaucuagaugcuu

SEQ ID NO: 802349 - RNA, 19 nt, Artificial Sequence
  Description of Artificial Sequence: Synthetic oligonucleotide
  Antisense strand to SEQ ID NO: 802348
aagcaucuagaucaagaac

SEQ ID NO: 802350 - RNA, 19 nt, Artificial Sequence
  Description of Artificial Sequence: Synthetic oligonucleotide
  Sense strand starting at position 1561 of SEQ ID NO: 587573
cugagcagucugugagaaa

SEQ ID NO: 802351 - RNA, 19 nt, Artificial Sequence
  Description of Artificial Sequence: Synthetic oligonucleotide
  Antisense strand to SEQ ID NO: 802350
uuucucacagacugcucag

SEQ ID NO: 802352 - RNA, 19 nt, Artificial Sequence
  Description of Artificial Sequence: Synthetic oligonucleotide
  Sense strand starting at position 1628 of SEQ ID NO: 587573
agucucgugggaugacaaa

SEQ ID NO: 802353 - RNA, 19 nt, Artificial Sequence
  Description of Artificial Sequence: Synthetic oligonucleotide
  Antisense strand to SEQ ID NO: 802352
uuugucaucccacgagacu

SEQ ID NO: 802354 - RNA, 19 nt, Artificial Sequence
  Description of Artificial Sequence: Synthetic oligonucleotide
  Sense strand starting at position 2012 of SEQ ID NO: 587573
accggauguucccucaaau

SEQ ID NO: 802355 - RNA, 19 nt, Artificial Sequence
  Description of Artificial Sequence: Synthetic oligonucleotide
  Antisense strand to SEQ ID NO: 802354
auuugagggaacauccggu

SEQ ID NO: 802356 - RNA, 19 nt, Artificial Sequence
  Description of Artificial Sequence: Synthetic oligonucleotide
  Sense strand starting at position 2049 of SEQ ID NO: 587573
ccacguuagcuguuugcuu

SEQ ID NO: 802357 - RNA, 19 nt, Artificial Sequence
  Description of Artificial Sequence: Synthetic oligonucleotide
  Antisense strand to SEQ ID NO: 802356
aagcaaacagcuaacgugg

SEQ ID NO: 802358 - RNA, 19 nt, Artificial Sequence
  Description of Artificial Sequence: Synthetic oligonucleotide
  Sense strand starting at position 2121 of SEQ ID NO: 587573
uuucuuugccagcaugaca

SEQ ID NO: 802359 - RNA, 19 nt, Artificial Sequence
  Description of Artificial Sequence: Synthetic oligonucleotide
  Antisense strand to SEQ ID NO: 802358
ugucaugcuggcaaagaaa

SEQ ID NO: 802360 - RNA, 19 nt, Artificial Sequence
  Description of Artificial Sequence: Synthetic oligonucleotide
  Sense strand starting at position 2143 of SEQ ID NO: 587573
uguagaaacuuguuauccu

SEQ ID NO: 802361 - RNA, 19 nt, Artificial Sequence
  Description of Artificial Sequence: Synthetic oligonucleotide
  Antisense strand to SEQ ID NO: 802360
aggauaacaaguuucuaca

SEQ ID NO: 802362 - RNA, 19 nt, Artificial Sequence
  Description of Artificial Sequence: Synthetic oligonucleotide
  Sense strand starting at position 2147 of SEQ ID NO: 587573
gaaacuuguuauccuggua

SEQ ID NO: 802363 - RNA, 19 nt, Artificial Sequence
  Description of Artificial Sequence: Synthetic oligonucleotide
  Antisense strand to SEQ ID NO: 802362
uaccaggauaacaaguuuc

SEQ ID NO: 802364 - RNA, 19 nt, Artificial Sequence
  Description of Artificial Sequence: Synthetic oligonucleotide
  Sense strand starting at position 2160 of SEQ ID NO: 587573
cugguagcauuaccaagaa

SEQ ID NO: 802365 - RNA, 19 nt, Artificial Sequence
  Description of Artificial Sequence: Synthetic oligonucleotide
  Antisense strand to SEQ ID NO: 802364
uucuugguaaugcuaccag

SEQ ID NO: 802366 - RNA, 19 nt, Artificial Sequence
  Description of Artificial Sequence: Synthetic oligonucleotide
  Sense strand starting at position 2176 of SEQ ID NO: 587573
gaauaauuguugcuuuaug

SEQ ID NO: 802367 - RNA, 19 nt, Artificial Sequence
  Description of Artificial Sequence: Synthetic oligonucleotide
  Antisense strand to SEQ ID NO: 802366
cauaaagcaacaauuauuc

SEQ ID NO: 802368 - RNA, 19 nt, Artificial Sequence
  Description of Artificial Sequence: Synthetic oligonucleotide
  Sense strand starting at position 2185 of SEQ ID NO: 587573
uugcuuuauggugaaaguu

SEQ ID NO: 802369 - RNA, 19 nt, Artificial Sequence
  Description of Artificial Sequence: Synthetic oligonucleotide
  Antisense strand to SEQ ID NO: 802368
aacuuucaccauaaagcaa

SEQ ID NO: 802370 - RNA, 19 nt, Artificial Sequence
  Description of Artificial Sequence: Synthetic oligonucleotide
  Sense strand starting at position 2205 of SEQ ID NO: 587573
uuaggcaugcuuuaauacu

SEQ ID NO: 802371 - RNA, 19 nt, Artificial Sequence
  Description of Artificial Sequence: Synthetic oligonucleotide
  Antisense strand to SEQ ID NO: 802370
aguauuaaagcaugccuaa

SEQ ID NO: 802372 - RNA, 19 nt, Artificial Sequence
  Description of Artificial Sequence: Synthetic oligonucleotide
  Sense strand starting at position 2275 of SEQ ID NO: 587573
auguuugcugaagauguca

SEQ ID NO: 802373 - RNA, 19 nt, Artificial Sequence
  Description of Artificial Sequence: Synthetic oligonucleotide
  Antisense strand to SEQ ID NO: 802372
ugacaucuucagcaaacau

SEQ ID NO: 802374 - RNA, 19 nt, Artificial Sequence
  Description of Artificial Sequence: Synthetic oligonucleotide
  Sense strand starting at position 2448 of SEQ ID NO: 587573
ugcuauuaugaucacguaa

SEQ ID NO: 802375 - RNA, 19 nt, Artificial Sequence
  Description of Artificial Sequence: Synthetic oligonucleotide
  Antisense strand to SEQ ID NO: 802374
uuacgugaucauaauagca

SEQ ID NO: 802376 - RNA, 19 nt, Artificial Sequence
  Description of Artificial Sequence: Synthetic oligonucleotide
  Sense strand starting at position 2628 of SEQ ID NO: 587573
uccagcuuugaaugaacaa

SEQ ID NO: 802377 - RNA, 19 nt, Artificial Sequence
  Description of Artificial Sequence: Synthetic oligonucleotide
  Antisense strand to SEQ ID NO: 802376
uuguucauucaaagcugga

SEQ ID NO: 802378 - RNA, 19 nt, Artificial Sequence
  Description of Artificial Sequence: Synthetic oligonucleotide
  Sense strand starting at position 2660 of SEQ ID NO: 587573
ugagcuuauuugucauggu

SEQ ID NO: 802379 - RNA, 19 nt, Artificial Sequence
  Description of Artificial Sequence: Synthetic oligonucleotide
  Antisense strand to SEQ ID NO: 802378
accaugacaaauaagcuca

SEQ ID NO: 802380 - RNA, 19 nt, Artificial Sequence
  Description of Artificial Sequence: Synthetic oligonucleotide
  Sense strand starting at position 2719 of SEQ ID NO: 587573
aacagagaauguguuauau

SEQ ID NO: 802381 - RNA, 19 nt, Artificial Sequence
  Description of Artificial Sequence: Synthetic oligonucleotide
  Antisense strand to SEQ ID NO: 802380
auauaacacauucucuguu

SEQ ID NO: 802382 - RNA, 19 nt, Artificial Sequence
  Description of Artificial Sequence: Synthetic oligonucleotide
  Sense strand starting at position 2806 of SEQ ID NO: 587573
gauacaaugcaguguuaaa

SEQ ID NO: 802383 - RNA, 19 nt, Artificial Sequence
  Description of Artificial Sequence: Synthetic oligonucleotide
  Antisense strand to SEQ ID NO: 802382
uuuaacacugcauuguauc

SEQ ID NO: 802384 - RNA, 19 nt, Artificial Sequence
  Description of Artificial Sequence: Synthetic oligonucleotide
  Sense strand starting at position 3400 of SEQ ID NO: 587573
gaaauaugugaggagcagu

SEQ ID NO: 802385 - RNA, 19 nt, Artificial Sequence
  Description of Artificial Sequence: Synthetic oligonucleotide
  Antisense strand to SEQ ID NO: 802384
acugcuccucacauauuuc

SEQ ID NO: 802386 - RNA, 19 nt, Artificial Sequence
  Description of Artificial Sequence: Synthetic oligonucleotide
  Sense strand starting at position 3492 of SEQ ID NO: 587573
uuguuucaaguguagaagu

SEQ ID NO: 802387 - RNA, 19 nt, Artificial Sequence
  Description of Artificial Sequence: Synthetic oligonucleotide
  Antisense strand to SEQ ID NO: 802386
acuucuacacuugaaacaa

SEQ ID NO: 802388 - RNA, 19 nt, Artificial Sequence
  Description of Artificial Sequence: Synthetic oligonucleotide
  Sense strand starting at position 3494 of SEQ ID NO: 587573
guuucaaguguagaaguca

SEQ ID NO: 802389 - RNA, 19 nt, Artificial Sequence
  Description of Artificial Sequence: Synthetic oligonucleotide
  Antisense strand to SEQ ID NO: 802388
ugacuucuacacuugaaac

SEQ ID NO: 802390 - RNA, 19 nt, Artificial Sequence
  Description of Artificial Sequence: Synthetic oligonucleotide
  Sense strand starting at position 3628 of SEQ ID NO: 587573
aagugucuugaugagaucu

SEQ ID NO: 802391 - RNA, 19 nt, Artificial Sequence
  Description of Artificial Sequence: Synthetic oligonucleotide
  Antisense strand to SEQ ID NO: 802390
agaucucaucaagacacuu

SEQ ID NO: 802392 - RNA, 19 nt, Artificial Sequence
  Description of Artificial Sequence: Synthetic oligonucleotide
  Sense strand starting at position 3662 of SEQ ID NO: 587573
uaaucuuggguuuguauga

SEQ ID NO: 802393 - RNA, 19 nt, Artificial Sequence
  Description of Artificial Sequence: Synthetic oligonucleotide
  Antisense strand to SEQ ID NO: 802392
ucauacaaacccaagauua

SEQ ID NO: 802394 - RNA, 19 nt, Artificial Sequence
  Description of Artificial Sequence: Synthetic oligonucleotide
  Sense strand starting at position 3767 of SEQ ID NO: 587573
ucaccugugcucgugucau

SEQ ID NO: 802395 - RNA, 19 nt, Artificial Sequence
  Description of Artificial Sequence: Synthetic oligonucleotide
  Antisense strand to SEQ ID NO: 802394
augacacgagcacagguga

SEQ ID NO: 802396 - RNA, 19 nt, Artificial Sequence
  Description of Artificial Sequence: Synthetic oligonucleotide
  Sense strand starting at position 3777 of SEQ ID NO: 587573
ucgugucaucccuagagau

SEQ ID NO: 802397 - RNA, 19 nt, Artificial Sequence
  Description of Artificial Sequence: Synthetic oligonucleotide
  Antisense strand to SEQ ID NO: 802396
aucucuagggaugacacga

SEQ ID NO: 802398 - RNA, 19 nt, Artificial Sequence
  Description of Artificial Sequence: Synthetic oligonucleotide
  Sense strand starting at position 3926 of SEQ ID NO: 587573
auccuaauguauguuacua

SEQ ID NO: 802399 - RNA, 19 nt, Artificial Sequence
  Description of Artificial Sequence: Synthetic oligonucleotide
  Antisense strand to SEQ ID NO: 802398
uaguaacauacauuaggau

SEQ ID NO: 802400 - RNA, 19 nt, Artificial Sequence
  Description of Artificial Sequence: Synthetic oligonucleotide
  Sense strand starting at position 3930 of SEQ ID NO: 587573
uaauguauguuacuagaag

SEQ ID NO: 802401 - RNA, 19 nt, Artificial Sequence
  Description of Artificial Sequence: Synthetic oligonucleotide
  Antisense strand to SEQ ID NO: 802400
cuucuaguaacauacauua

SEQ ID NO: 802402 - RNA, 19 nt, Artificial Sequence
  Description of Artificial Sequence: Synthetic oligonucleotide
  Sense strand starting at position 293 of SEQ ID NO: 587574
ggcucuaaauaucugagau

SEQ ID NO: 802403 - RNA, 19 nt, Artificial Sequence
  Description of Artificial Sequence: Synthetic oligonucleotide
  Antisense strand to SEQ ID NO: 802402
aucucagauauuuagagcc

SEQ ID NO: 802404 - RNA, 19 nt, Artificial Sequence
  Description of Artificial Sequence: Synthetic oligonucleotide
  Sense strand starting at position 458 of SEQ ID NO: 587574
aauuauugugaugguaaac

SEQ ID NO: 802405 - RNA, 19 nt, Artificial Sequence
  Description of Artificial Sequence: Synthetic oligonucleotide
  Antisense strand to SEQ ID NO: 802404
guuuaccaucacaauaauu

SEQ ID NO: 802406 - RNA, 19 nt, Artificial Sequence
  Description of Artificial Sequence: Synthetic oligonucleotide
  Sense strand starting at position 537 of SEQ ID NO: 587574
cagaauuguaucgacguuu

SEQ ID NO: 802407 - RNA, 19 nt, Artificial Sequence
  Description of Artificial Sequence: Synthetic oligonucleotide
  Antisense strand to SEQ ID NO: 802406
aaacgucgauacaauucug

SEQ ID NO: 802408 - RNA, 19 nt, Artificial Sequence
  Description of Artificial Sequence: Synthetic oligonucleotide
  Sense strand starting at position 559 of SEQ ID NO: 587574
guguguugucagagcacga

SEQ ID NO: 802409 - RNA, 19 nt, Artificial Sequence
  Description of Artificial Sequence: Synthetic oligonucleotide
  Antisense strand to SEQ ID NO: 802408
ucgugcucugacaacacac

SEQ ID NO: 802410 - RNA, 19 nt, Artificial Sequence
  Description of Artificial Sequence: Synthetic oligonucleotide
  Sense strand starting at position 564 of SEQ ID NO: 587574
uugucagagcacgagauua

SEQ ID NO: 802411 - RNA, 19 nt, Artificial Sequence
  Description of Artificial Sequence: Synthetic oligonucleotide
  Antisense strand to SEQ ID NO: 802410
uaaucucgugcucugacaa

SEQ ID NO: 802412 - RNA, 19 nt, Artificial Sequence
  Description of Artificial Sequence: Synthetic oligonucleotide
  Sense strand starting at position 566 of SEQ ID NO: 587574
gucagagcacgagauuagu

SEQ ID NO: 802413 - RNA, 19 nt, Artificial Sequence
  Description of Artificial Sequence: Synthetic oligonucleotide
  Antisense strand to SEQ ID NO: 802412
acuaaucucgugcucugac

SEQ ID NO: 802414 - RNA, 19 nt, Artificial Sequence
  Description of Artificial Sequence: Synthetic oligonucleotide
  Sense strand starting at position 577 of SEQ ID NO: 587574
agauuagugaagcaaagca

SEQ ID NO: 802415 - RNA, 19 nt, Artificial Sequence
  Description of Artificial Sequence: Synthetic oligonucleotide
  Antisense strand to SEQ ID NO: 802414
ugcuuugcuucacuaaucu

SEQ ID NO: 802416 - RNA, 19 nt, Artificial Sequence
  Description of Artificial Sequence: Synthetic oligonucleotide
  Sense strand starting at position 600 of SEQ ID NO: 587574
ucaaucuugcacuaguuga

SEQ ID NO: 802417 - RNA, 19 nt, Artificial Sequence
  Description of Artificial Sequence: Synthetic oligonucleotide
  Antisense strand to SEQ ID NO: 802416
ucaacuagugcaagauuga

SEQ ID NO: 802418 - RNA, 19 nt, Artificial Sequence
  Description of Artificial Sequence: Synthetic oligonucleotide
  Sense strand starting at position 628 of SEQ ID NO: 587574
guaauuaaguucuuaggga

SEQ ID NO: 802419 - RNA, 19 nt, Artificial Sequence
  Description of Artificial Sequence: Synthetic oligonucleotide
  Antisense strand to SEQ ID NO: 802418
ucccuaagaacuuaauuac

SEQ ID NO: 802420 - RNA, 19 nt, Artificial Sequence
  Description of Artificial Sequence: Synthetic oligonucleotide
  Sense strand starting at position 770 of SEQ ID NO: 587574
ucaacugguugaucuguau

SEQ ID NO: 802421 - RNA, 19 nt, Artificial Sequence
  Description of Artificial Sequence: Synthetic oligonucleotide
  Antisense strand to SEQ ID NO: 802420
auacagaucaaccaguuga

SEQ ID NO: 802422 - RNA, 19 nt, Artificial Sequence
  Description of Artificial Sequence: Synthetic oligonucleotide
  Sense strand starting at position 774 of SEQ ID NO: 587574
cugguugaucuguaugucu

SEQ ID NO: 802423 - RNA, 19 nt, Artificial Sequence
  Description of Artificial Sequence: Synthetic oligonucleotide
  Antisense strand to SEQ ID NO: 802422
agacauacagaucaaccag

SEQ ID NO: 802424 - RNA, 19 nt, Artificial Sequence
  Description of Artificial Sequence: Synthetic oligonucleotide
  Sense strand starting at position 779 of SEQ ID NO: 587574
ugaucuguaugucucaaua

SEQ ID NO: 802425 - RNA, 19 nt, Artificial Sequence
  Description of Artificial Sequence: Synthetic oligonucleotide
  Antisense strand to SEQ ID NO: 802424
uauugagacauacagauca

SEQ ID NO: 802426 - RNA, 19 nt, Artificial Sequence
  Description of Artificial Sequence: Synthetic oligonucleotide
  Sense strand starting at position 973 of SEQ ID NO: 587574
augacaggaccuuguauau

SEQ ID NO: 802427 - RNA, 19 nt, Artificial Sequence
  Description of Artificial Sequence: Synthetic oligonucleotide
  Antisense strand to SEQ ID NO: 802426
auauacaagguccugucau

SEQ ID NO: 802428 - RNA, 19 nt, Artificial Sequence
  Description of Artificial Sequence: Synthetic oligonucleotide
  Sense strand starting at position 1040 of SEQ ID NO: 587574
ugcugcuuugacuaucaaa

SEQ ID NO: 802429 - RNA, 19 nt, Artificial Sequence
  Description of Artificial Sequence: Synthetic oligonucleotide
  Antisense strand to SEQ ID NO: 802428
uuugauagucaaagcagca

SEQ ID NO: 802430 - RNA, 19 nt, Artificial Sequence
  Description of Artificial Sequence: Synthetic oligonucleotide
  Sense strand starting at position 1125 of SEQ ID NO: 587574
auuuaaauguacucgguuu

SEQ ID NO: 802431 - RNA, 19 nt, Artificial Sequence
  Description of Artificial Sequence: Synthetic oligonucleotide
  Antisense strand to SEQ ID NO: 802430
aaaccgaguacauuuaaau

SEQ ID NO: 802432 - RNA, 19 nt, Artificial Sequence
  Description of Artificial Sequence: Synthetic oligonucleotide
  Sense strand starting at position 1174 of SEQ ID NO: 587574
aagagaaugucagaaagau

SEQ ID NO: 802433 - RNA, 19 nt, Artificial Sequence
  Description of Artificial Sequence: Synthetic oligonucleotide
  Antisense strand to SEQ ID NO: 802432
aucuuucugacauucucuu

SEQ ID NO: 802434 - RNA, 19 nt, Artificial Sequence
  Description of Artificial Sequence: Synthetic oligonucleotide
  Sense strand starting at position 1210 of SEQ ID NO: 587574
uuggcacuuuagcuauuua

SEQ ID NO: 802435 - RNA, 19 nt, Artificial Sequence
  Description of Artificial Sequence: Synthetic oligonucleotide
  Antisense strand to SEQ ID NO: 802434
uaaauagcuaaagugccaa

SEQ ID NO: 802436 - RNA, 19 nt, Artificial Sequence
  Description of Artificial Sequence: Synthetic oligonucleotide
  Sense strand starting at position 1221 of SEQ ID NO: 587574
gcuauuuauugagagauga

SEQ ID NO: 802437 - RNA, 19 nt, Artificial Sequence
  Description of Artificial Sequence: Synthetic oligonucleotide
  Antisense strand to SEQ ID NO: 802436
ucaucucucaauaaauagc

SEQ ID NO: 802438 - RNA, 19 nt, Artificial Sequence
  Description of Artificial Sequence: Synthetic oligonucleotide
  Sense strand starting at position 2270 of SEQ ID NO: 587574
gcugauaccucuucugaaa

SEQ ID NO: 802439 - RNA, 19 nt, Artificial Sequence
  Description of Artificial Sequence: Synthetic oligonucleotide
  Antisense strand to SEQ ID NO: 802438
uuucagaagagguaucagc

SEQ ID NO: 802440 - RNA, 19 nt, Artificial Sequence
  Description of Artificial Sequence: Synthetic oligonucleotide
  Sense strand starting at position 2358 of SEQ ID NO: 587574
ugaucccuggcucaaguua

SEQ ID NO: 802441 - RNA, 19 nt, Artificial Sequence
  Description of Artificial Sequence: Synthetic oligonucleotide
  Antisense strand to SEQ ID NO: 802440
uaacuugagccagggauca

SEQ ID NO: 802442 - RNA, 19 nt, Artificial Sequence
  Description of Artificial Sequence: Synthetic oligonucleotide
  Sense strand starting at position 2599 of SEQ ID NO: 587574
ugggcuugucuuuaauaug

SEQ ID NO: 802443 - RNA, 19 nt, Artificial Sequence
  Description of Artificial Sequence: Synthetic oligonucleotide
  Antisense strand to SEQ ID NO: 802442
cauauuaaagacaagccca

SEQ ID NO: 802444 - RNA, 19 nt, Artificial Sequence
  Description of Artificial Sequence: Synthetic oligonucleotide
  Sense strand starting at position 2668 of SEQ ID NO: 587574
agauuaacauauguguaac

SEQ ID NO: 802445 - RNA, 19 nt, Artificial Sequence
  Description of Artificial Sequence: Synthetic oligonucleotide
  Antisense strand to SEQ ID NO: 802444
guuacacauauguuaaucu

SEQ ID NO: 802446 - RNA, 19 nt, Artificial Sequence
  Description of Artificial Sequence: Synthetic oligonucleotide
  Sense strand starting at position 2671 of SEQ ID NO: 587574
uuaacauauguguaaccua

SEQ ID NO: 802447 - RNA, 19 nt, Artificial Sequence
  Description of Artificial Sequence: Synthetic oligonucleotide
  Antisense strand to SEQ ID NO: 802446
uagguuacacauauguuaa

SEQ ID NO: 802448 - RNA, 19 nt, Artificial Sequence
  Description of Artificial Sequence: Synthetic oligonucleotide
  Sense strand starting at position 2834 of SEQ ID NO: 587574
aacaguguuggccaacaca

SEQ ID NO: 802449 - RNA, 19 nt, Artificial Sequence
  Description of Artificial Sequence: Synthetic oligonucleotide
  Antisense strand to SEQ ID NO: 802448
uguguuggccaacacuguu

SEQ ID NO: 802450 - RNA, 19 nt, Artificial Sequence
  Description of Artificial Sequence: Synthetic oligonucleotide
  Sense strand starting at position 2837 of SEQ ID NO: 587574
aguguuggccaacacauaa

SEQ ID NO: 802451 - RNA, 19 nt, Artificial Sequence
  Description of Artificial Sequence: Synthetic oligonucleotide
  Antisense strand to SEQ ID NO: 802450
uuauguguuggccaacacu

SEQ ID NO: 802452 - RNA, 19 nt, Artificial Sequence
  Description of Artificial Sequence: Synthetic oligonucleotide
  Sense strand starting at position 2959 of SEQ ID NO: 587574
uggguaacagagugugaaa

SEQ ID NO: 802453 - RNA, 19 nt, Artificial Sequence
  Description of Artificial Sequence: Synthetic oligonucleotide
  Antisense strand to SEQ ID NO: 802452
uuucacacucuguuaccca

SEQ ID NO: 802454 - RNA, 19 nt, Artificial Sequence
  Description of Artificial Sequence: Synthetic oligonucleotide
  Sense strand starting at position 2979 of SEQ ID NO: 587574
cagauuugugcaugcagua

SEQ ID NO: 802455 - RNA, 19 nt, Artificial Sequence
  Description of Artificial Sequence: Synthetic oligonucleotide
  Antisense strand to SEQ ID NO: 802454
uacugcaugcacaaaucug

SEQ ID NO: 802456 - RNA, 19 nt, Artificial Sequence
  Description of Artificial Sequence: Synthetic oligonucleotide
  Sense strand starting at position 2993 of SEQ ID NO: 587574
caguacugggccuacauua

SEQ ID NO: 802457 - RNA, 19 nt, Artificial Sequence
  Description of Artificial Sequence: Synthetic oligonucleotide
  Antisense strand to SEQ ID NO: 802456
uaauguaggcccaguacug

SEQ ID NO: 802458 - RNA, 19 nt, Artificial Sequence
  Description of Artificial Sequence: Synthetic oligonucleotide
  Sense strand starting at position 3045 of SEQ ID NO: 587574
agcagccaccuuuaucaga

SEQ ID NO: 802459 - RNA, 19 nt, Artificial Sequence
  Description of Artificial Sequence: Synthetic oligonucleotide
  Antisense strand to SEQ ID NO: 802458
ucugauaaagguggcugcu

SEQ ID NO: 802460 - RNA, 19 nt, Artificial Sequence
  Description of Artificial Sequence: Synthetic oligonucleotide
  Sense strand starting at position 3148 of SEQ ID NO: 587574
cuuagauguguuuaaauga

SEQ ID NO: 802461 - RNA, 19 nt, Artificial Sequence
  Description of Artificial Sequence: Synthetic oligonucleotide
  Antisense strand to SEQ ID NO: 802460
ucauuuaaacacaucuaag

SEQ ID NO: 802462 - RNA, 19 nt, Artificial Sequence
  Description of Artificial Sequence: Synthetic oligonucleotide
  Sense strand starting at position 3238 of SEQ ID NO: 587574
accauccuguuauugagua

SEQ ID NO: 802463 - RNA, 19 nt, Artificial Sequence
  Description of Artificial Sequence: Synthetic oligonucleotide
  Antisense strand to SEQ ID NO: 802462
uacucaauaacaggauggu

SEQ ID NO: 802464 - RNA, 19 nt, Artificial Sequence
  Description of Artificial Sequence: Synthetic oligonucleotide
  Sense strand starting at position 3243 of SEQ ID NO: 587574
ccuguuauugaguaucuuc

SEQ ID NO: 802465 - RNA, 19 nt, Artificial Sequence
  Description of Artificial Sequence: Synthetic oligonucleotide
  Antisense strand to SEQ ID NO: 802464
gaagauacucaauaacagg

SEQ ID NO: 802466 - RNA, 19 nt, Artificial Sequence
  Description of Artificial Sequence: Synthetic oligonucleotide
  Sense strand starting at position 3307 of SEQ ID NO: 587574
uugagauggaucuagcucu

SEQ ID NO: 802467 - RNA, 19 nt, Artificial Sequence
  Description of Artificial Sequence: Synthetic oligonucleotide
  Antisense strand to SEQ ID NO: 802466
agagcuagauccaucucaa

SEQ ID NO: 802468 - RNA, 19 nt, Artificial Sequence
  Description of Artificial Sequence: Synthetic oligonucleotide
  Sense strand starting at position 3716 of SEQ ID NO: 587574
augagauacacaugguagu

SEQ ID NO: 802469 - RNA, 19 nt, Artificial Sequence
  Description of Artificial Sequence: Synthetic oligonucleotide
  Antisense strand to SEQ ID NO: 802468
acuaccauguguaucucau

SEQ ID NO: 802470 - RNA, 19 nt, Artificial Sequence
  Description of Artificial Sequence: Synthetic oligonucleotide
  Sense strand starting at position 3802 of SEQ ID NO: 587574
aguauucaaugggugcaga

SEQ ID NO: 802471 - RNA, 19 nt, Artificial Sequence
  Description of Artificial Sequence: Synthetic oligonucleotide
  Antisense strand to SEQ ID NO: 802470
ucugcacccauugaauacu

SEQ ID NO: 802472 - RNA, 19 nt, Artificial Sequence
  Description of Artificial Sequence: Synthetic oligonucleotide
  Sense strand starting at position 3818 of SEQ ID NO: 587574
agagauucggcuugggaag

SEQ ID NO: 802473 - RNA, 19 nt, Artificial Sequence
  Description of Artificial Sequence: Synthetic oligonucleotide
  Antisense strand to SEQ ID NO: 802472
cuucccaagccgaaucucu

SEQ ID NO: 802474 - RNA, 19 nt, Artificial Sequence
  Description of Artificial Sequence: Synthetic oligonucleotide
  Sense strand starting at position 3819 of SEQ ID NO: 587574
gagauucggcuugggaaga

SEQ ID NO: 802475 - RNA, 19 nt, Artificial Sequence
  Description of Artificial Sequence: Synthetic oligonucleotide
  Antisense strand to SEQ ID NO: 802474
ucuucccaagccgaaucuc

SEQ ID NO: 802476 - RNA, 19 nt, Artificial Sequence
  Description of Artificial Sequence: Synthetic oligonucleotide
  Sense strand starting at position 3904 of SEQ ID NO: 587574
accacuuaagagugguuaa

SEQ ID NO: 802477 - RNA, 19 nt, Artificial Sequence
  Description of Artificial Sequence: Synthetic oligonucleotide
  Antisense strand to SEQ ID NO: 802476
uuaaccacucuuaaguggu

SEQ ID NO: 802478 - RNA, 19 nt, Artificial Sequence
  Description of Artificial Sequence: Synthetic oligonucleotide
  Sense strand starting at position 3905 of SEQ ID NO: 587574
ccacuuaagagugguuaag

SEQ ID NO: 802479 - RNA, 19 nt, Artificial Sequence
  Description of Artificial Sequence: Synthetic oligonucleotide
  Antisense strand to SEQ ID NO: 802478
cuuaaccacucuuaagugg

SEQ ID NO: 802480 - RNA, 19 nt, Artificial Sequence
  Description of Artificial Sequence: Synthetic oligonucleotide
  Sense strand starting at position 3916 of SEQ ID NO: 587574
ugguuaaggcaguaagguu

SEQ ID NO: 802481 - RNA, 19 nt, Artificial Sequence
  Description of Artificial Sequence: Synthetic oligonucleotide
  Antisense strand to SEQ ID NO: 802480
aaccuuacugccuuaacca

SEQ ID NO: 802482 - RNA, 19 nt, Artificial Sequence
  Description of Artificial Sequence: Synthetic oligonucleotide
  Sense strand starting at position 65 of SEQ ID NO: 587575
gacggucugugguaccauu

SEQ ID NO: 802483 - RNA, 19 nt, Artificial Sequence
  Description of Artificial Sequence: Synthetic oligonucleotide
  Antisense strand to SEQ ID NO: 802482
aaugguaccacagaccguc

SEQ ID NO: 802484 - RNA, 19 nt, Artificial Sequence
  Description of Artificial Sequence: Synthetic oligonucleotide
  Sense strand starting at position 506 of SEQ ID NO: 587575
gaggaaaccucggcacuca

SEQ ID NO: 802485 - RNA, 19 nt, Artificial Sequence
  Description of Artificial Sequence: Synthetic oligonucleotide
  Antisense strand to SEQ ID NO: 802484
ugagugccgagguuuccuc

SEQ ID NO: 802486 - RNA, 19 nt, Artificial Sequence
  Description of Artificial Sequence: Synthetic oligonucleotide
  Sense strand starting at position 861 of SEQ ID NO: 587575
ggauguggauccuggagua

SEQ ID NO: 802487 - RNA, 19 nt, Artificial Sequence
  Description of Artificial Sequence: Synthetic oligonucleotide
  Antisense strand to SEQ ID NO: 802486
uacuccaggauccacaucc

SEQ ID NO: 802488 - RNA, 19 nt, Artificial Sequence
  Description of Artificial Sequence: Synthetic oligonucleotide
  Sense strand starting at position 899 of SEQ ID NO: 587575
ugaagaggucucuagucca

SEQ ID NO: 802489 - RNA, 19 nt, Artificial Sequence
  Description of Artificial Sequence: Synthetic oligonucleotide
  Antisense strand to SEQ ID NO: 802488
uggacuagagaccucuuca

SEQ ID NO: 802490 - RNA, 19 nt, Artificial Sequence
  Description of Artificial Sequence: Synthetic oligonucleotide
  Sense strand starting at position 902 of SEQ ID NO: 587575
agaggucucuaguccaaau

SEQ ID NO: 802491 - RNA, 19 nt, Artificial Sequence
  Description of Artificial Sequence: Synthetic oligonucleotide
  Antisense strand to SEQ ID NO: 802490
auuuggacuagagaccucu

SEQ ID NO: 802492 - RNA, 19 nt, Artificial Sequence
  Description of Artificial Sequence: Synthetic oligonucleotide
  Sense strand starting at position 913 of SEQ ID NO: 587575
guccaaaucuuccggaaca

SEQ ID NO: 802493 - RNA, 19 nt, Artificial Sequence
  Description of Artificial Sequence: Synthetic oligonucleotide
  Antisense strand to SEQ ID NO: 802492
uguuccggaagauuuggac

SEQ ID NO: 802494 - RNA, 19 nt, Artificial Sequence
  Description of Artificial Sequence: Synthetic oligonucleotide
  Sense strand starting at position 914 of SEQ ID NO: 587575
uccaaaucuuccggaacau

SEQ ID NO: 802495 - RNA, 19 nt, Artificial Sequence
  Description of Artificial Sequence: Synthetic oligonucleotide
  Antisense strand to SEQ ID NO: 802494
auguuccggaagauuugga

SEQ ID NO: 802496 - RNA, 19 nt, Artificial Sequence
  Description of Artificial Sequence: Synthetic oligonucleotide
  Sense strand starting at position 3222 of SEQ ID NO: 587575
cccguuucccggcugaauu

SEQ ID NO: 802497 - RNA, 19 nt, Artificial Sequence
  Description of Artificial Sequence: Synthetic oligonucleotide
  Antisense strand to SEQ ID NO: 802496
aauucagccgggaaacggg

SEQ ID NO: 802498 - RNA, 19 nt, Artificial Sequence
  Description of Artificial Sequence: Synthetic oligonucleotide
  Sense strand starting at position 3223 of SEQ ID NO: 587575
ccguuucccggcugaauua

SEQ ID NO: 802499 - RNA, 19 nt, Artificial Sequence
  Description of Artificial Sequence: Synthetic oligonucleotide
  Antisense strand to SEQ ID NO: 802498
uaauucagccgggaaacgg

SEQ ID NO: 802500 - RNA, 19 nt, Artificial Sequence
  Description of Artificial Sequence: Synthetic oligonucleotide
  Sense strand starting at position 3283 of SEQ ID NO: 587575
ccggaaagucuaggacuga

SEQ ID NO: 802501 - RNA, 19 nt, Artificial Sequence
  Description of Artificial Sequence: Synthetic oligonucleotide
  Antisense strand to SEQ ID NO: 802500
ucaguccuagacuuuccgg

SEQ ID NO: 802502 - RNA, 19 nt, Artificial Sequence
  Description of Artificial Sequence: Synthetic oligonucleotide
  Sense strand starting at position 3284 of SEQ ID NO: 587575
cggaaagucuaggacugaa

SEQ ID NO: 802503 - RNA, 19 nt, Artificial Sequence
  Description of Artificial Sequence: Synthetic oligonucleotide
  Antisense strand to SEQ ID NO: 802502
uucaguccuagacuuuccg

SEQ ID NO: 802504 - RNA, 19 nt, Artificial Sequence
  Description of Artificial Sequence: Synthetic oligonucleotide
  Sense strand starting at position 3385 of SEQ ID NO: 587575
gcgcuuccuuccucuccaa

SEQ ID NO: 802505 - RNA, 19 nt, Artificial Sequence
  Description of Artificial Sequence: Synthetic oligonucleotide
  Antisense strand to SEQ ID NO: 802504
uuggagaggaaggaagcgc

SEQ ID NO: 802506 - RNA, 19 nt, Artificial Sequence
  Description of Artificial Sequence: Synthetic oligonucleotide
  Sense strand starting at position 3404 of SEQ ID NO: 587575
aguugaguaucuccuaucu

SEQ ID NO: 802507 - RNA, 19 nt, Artificial Sequence
  Description of Artificial Sequence: Synthetic oligonucleotide
  Antisense strand to SEQ ID NO: 802506
agauaggagauacucaacu

SEQ ID NO: 802508 - RNA, 19 nt, Artificial Sequence
  Description of Artificial Sequence: Synthetic oligonucleotide
  Sense strand starting at position 3406 of SEQ ID NO: 587575
uugaguaucuccuaucugu

SEQ ID NO: 802509 - RNA, 19 nt, Artificial Sequence
  Description of Artificial Sequence: Synthetic oligonucleotide
  Antisense strand to SEQ ID NO: 802508
acagauaggagauacucaa

SEQ ID NO: 802510 - RNA, 19 nt, Artificial Sequence
  Description of Artificial Sequence: Synthetic oligonucleotide
  Sense strand starting at position 3417 of SEQ ID NO: 587575
cuaucuguguccucguaca

SEQ ID NO: 802511 - RNA, 19 nt, Artificial Sequence
  Description of Artificial Sequence: Synthetic oligonucleotide
  Antisense strand to SEQ ID NO: 802510
uguacgaggacacagauag

SEQ ID NO: 802512 - RNA, 19 nt, Artificial Sequence
  Description of Artificial Sequence: Synthetic oligonucleotide
  Sense strand starting at position 3600 of SEQ ID NO: 587575
aggaccuaguuuccugaau

SEQ ID NO: 802513 - RNA, 19 nt, Artificial Sequence
  Description of Artificial Sequence: Synthetic oligonucleotide
  Antisense strand to SEQ ID NO: 802512
auucaggaaacuagguccu

SEQ ID NO: 802514 - RNA, 19 nt, Artificial Sequence
  Description of Artificial Sequence: Synthetic oligonucleotide
  Sense strand starting at position 3601 of SEQ ID NO: 587575
ggaccuaguuuccugaauu

SEQ ID NO: 802515 - RNA, 19 nt, Artificial Sequence
  Description of Artificial Sequence: Synthetic oligonucleotide
  Antisense strand to SEQ ID NO: 802514
aauucaggaaacuaggucc

SEQ ID NO: 802516 - RNA, 19 nt, Artificial Sequence
  Description of Artificial Sequence: Synthetic oligonucleotide
  Sense strand starting at position 5 of SEQ ID NO: 587576
ugacuugaaguguacagua

SEQ ID NO: 802517 - RNA, 19 nt, Artificial Sequence
  Description of Artificial Sequence: Synthetic oligonucleotide
  Antisense strand to SEQ ID NO: 802516
uacuguacacuucaaguca

SEQ ID NO: 802518 - RNA, 19 nt, Artificial Sequence
  Description of Artificial Sequence: Synthetic oligonucleotide
  Sense strand starting at position 7 of SEQ ID NO: 587576
acuugaaguguacaguaga

SEQ ID NO: 802519 - RNA, 19 nt, Artificial Sequence
  Description of Artificial Sequence: Synthetic oligonucleotide
  Antisense strand to SEQ ID NO: 802518
ucuacuguacacuucaagu

SEQ ID NO: 802520 - RNA, 19 nt, Artificial Sequence
  Description of Artificial Sequence: Synthetic oligonucleotide
  Sense strand starting at position 36 of SEQ ID NO: 587576
gccaucagauuugacacuu

SEQ ID NO: 802521 - RNA, 19 nt, Artificial Sequence
  Description of Artificial Sequence: Synthetic oligonucleotide
  Antisense strand to SEQ ID NO: 802520
aagugucaaaucugauggc

SEQ ID NO: 802522 - RNA, 19 nt, Artificial Sequence
  Description of Artificial Sequence: Synthetic oligonucleotide
  Sense strand starting at position 109 of SEQ ID NO: 587576
ggaaauacauagcaugaga

SEQ ID NO: 802523 - RNA, 19 nt, Artificial Sequence
  Description of Artificial Sequence: Synthetic oligonucleotide
  Antisense strand to SEQ ID NO: 802522
ucucaugcuauguauuucc

SEQ ID NO: 802524 - RNA, 19 nt, Artificial Sequence
  Description of Artificial Sequence: Synthetic oligonucleotide
  Sense strand starting at position 196 of SEQ ID NO: 587576
uuacaaaugcugggauugu

SEQ ID NO: 802525 - RNA, 19 nt, Artificial Sequence
  Description of Artificial Sequence: Synthetic oligonucleotide
  Antisense strand to SEQ ID NO: 802524
acaaucccagcauuuguaa

SEQ ID NO: 802526 - RNA, 19 nt, Artificial Sequence
  Description of Artificial Sequence: Synthetic oligonucleotide
  Sense strand starting at position 200 of SEQ ID NO: 587576
aaaugcugggauuguauga

SEQ ID NO: 802527 - RNA, 19 nt, Artificial Sequence
  Description of Artificial Sequence: Synthetic oligonucleotide
  Antisense strand to SEQ ID NO: 802526
ucauacaaucccagcauuu

SEQ ID NO: 802528 - RNA, 19 nt, Artificial Sequence
  Description of Artificial Sequence: Synthetic oligonucleotide
  Sense strand starting at position 317 of SEQ ID NO: 587576
acugcagcucauugacaua

SEQ ID NO: 802529 - RNA, 19 nt, Artificial Sequence
  Description of Artificial Sequence: Synthetic oligonucleotide
  Antisense strand to SEQ ID NO: 802528
uaugucaaugagcugcagu

SEQ ID NO: 802530 - RNA, 19 nt, Artificial Sequence
  Description of Artificial Sequence: Synthetic oligonucleotide
  Sense strand starting at position 579 of SEQ ID NO: 587576
uuacuaugauacuaaggaa

SEQ ID NO: 802531 - RNA, 19 nt, Artificial Sequence
  Description of Artificial Sequence: Synthetic oligonucleotide
  Antisense strand to SEQ ID NO: 802530
uuccuuaguaucauaguaa

SEQ ID NO: 802532 - RNA, 19 nt, Artificial Sequence
  Description of Artificial Sequence: Synthetic oligonucleotide
  Sense strand starting at position 601 of SEQ ID NO: 587576
cagcuacacuuguuaggua

SEQ ID NO: 802533 - RNA, 19 nt, Artificial Sequence
  Description of Artificial Sequence: Synthetic oligonucleotide
  Antisense strand to SEQ ID NO: 802532
uaccuaacaaguguagcug

SEQ ID NO: 802534 - RNA, 19 nt, Artificial Sequence
  Description of Artificial Sequence: Synthetic oligonucleotide
  Sense strand starting at position 605 of SEQ ID NO: 587576
uacacuuguuagguaggua

SEQ ID NO: 802535 - RNA, 19 nt, Artificial Sequence
  Description of Artificial Sequence: Synthetic oligonucleotide
  Antisense strand to SEQ ID NO: 802534
uaccuaccuaacaagugua

SEQ ID NO: 802536 - RNA, 19 nt, Artificial Sequence
  Description of Artificial Sequence: Synthetic oligonucleotide
  Sense strand starting at position 606 of SEQ ID NO: 587576
acacuuguuagguagguaa

SEQ ID NO: 802537 - RNA, 19 nt, Artificial Sequence
  Description of Artificial Sequence: Synthetic oligonucleotide
  Antisense strand to SEQ ID NO: 802536
uuaccuaccuaacaagugu

SEQ ID NO: 802538 - RNA, 19 nt, Artificial Sequence
  Description of Artificial Sequence: Synthetic oligonucleotide
  Sense strand starting at position 691 of SEQ ID NO: 587576
cugauaaagcgauauccgu

SEQ ID NO: 802539 - RNA, 19 nt, Artificial Sequence
  Description of Artificial Sequence: Synthetic oligonucleotide
  Antisense strand to SEQ ID NO: 802538
acggauaucgcuuuaucag

SEQ ID NO: 802540 - RNA, 19 nt, Artificial Sequence
  Description of Artificial Sequence: Synthetic oligonucleotide
  Sense strand starting at position 699 of SEQ ID NO: 587576
gcgauauccguucauggga

SEQ ID NO: 802541 - RNA, 19 nt, Artificial Sequence
  Description of Artificial Sequence: Synthetic oligonucleotide
  Antisense strand to SEQ ID NO: 802540
ucccaugaacggauaucgc

SEQ ID NO: 802542 - RNA, 19 nt, Artificial Sequence
  Description of Artificial Sequence: Synthetic oligonucleotide
  Sense strand starting at position 784 of SEQ ID NO: 587576
ggagaaguauuuggcuaag

SEQ ID NO: 802543 - RNA, 19 nt, Artificial Sequence
  Description of Artificial Sequence: Synthetic oligonucleotide
  Antisense strand to SEQ ID NO: 802542
cuuagccaaauacuucucc

SEQ ID NO: 802544 - RNA, 19 nt, Artificial Sequence
  Description of Artificial Sequence: Synthetic oligonucleotide
  Sense strand starting at position 995 of SEQ ID NO: 587576
agcucuggccuguuguuau

SEQ ID NO: 802545 - RNA, 19 nt, Artificial Sequence
  Description of Artificial Sequence: Synthetic oligonucleotide
  Antisense strand to SEQ ID NO: 802544
auaacaacaggccagagcu

SEQ ID NO: 802546 - RNA, 19 nt, Artificial Sequence
  Description of Artificial Sequence: Synthetic oligonucleotide
  Sense strand starting at position 1003 of SEQ ID NO: 587576
ccuguuguuaugggucuga

SEQ ID NO: 802547 - RNA, 19 nt, Artificial Sequence
  Description of Artificial Sequence: Synthetic oligonucleotide
  Antisense strand to SEQ ID NO: 802546
ucagacccauaacaacagg

SEQ ID NO: 802548 - RNA, 19 nt, Artificial Sequence
  Description of Artificial Sequence: Synthetic oligonucleotide
  Sense strand starting at position 1007 of SEQ ID NO: 587576
uuguuaugggucugaccuu

SEQ ID NO: 802549 - RNA, 19 nt, Artificial Sequence
  Description of Artificial Sequence: Synthetic oligonucleotide
  Antisense strand to SEQ ID NO: 802548
aaggucagacccauaacaa

SEQ ID NO: 802550 - RNA, 19 nt, Artificial Sequence
  Description of Artificial Sequence: Synthetic oligonucleotide
  Sense strand starting at position 1014 of SEQ ID NO: 587576
gggucugaccuuuggaaag

SEQ ID NO: 802551 - RNA, 19 nt, Artificial Sequence
  Description of Artificial Sequence: Synthetic oligonucleotide
  Antisense strand to SEQ ID NO: 802550
cuuuccaaaggucagaccc

SEQ ID NO: 802552 - RNA, 19 nt, Artificial Sequence
  Description of Artificial Sequence: Synthetic oligonucleotide
  Sense strand starting at position 1024 of SEQ ID NO: 587576
uuuggaaagucacuuugca

SEQ ID NO: 802553 - RNA, 19 nt, Artificial Sequence
  Description of Artificial Sequence: Synthetic oligonucleotide
  Antisense strand to SEQ ID NO: 802552
ugcaaagugacuuuccaaa

SEQ ID NO: 802554 - RNA, 19 nt, Artificial Sequence
  Description of Artificial Sequence: Synthetic oligonucleotide
  Sense strand starting at position 1034 of SEQ ID NO: 587576
cacuuugcacuuugggaua

SEQ ID NO: 802555 - RNA, 19 nt, Artificial Sequence
  Description of Artificial Sequence: Synthetic oligonucleotide
  Antisense strand to SEQ ID NO: 802554
uaucccaaagugcaaagug

SEQ ID NO: 802556 - RNA, 19 nt, Artificial Sequence
  Description of Artificial Sequence: Synthetic oligonucleotide
  Sense strand starting at position 1207 of SEQ ID NO: 587576
ucauauuugugcucccuuu

SEQ ID NO: 802557 - RNA, 19 nt, Artificial Sequence
  Description of Artificial Sequence: Synthetic oligonucleotide
  Antisense strand to SEQ ID NO: 802556
aaagggagcacaaauauga

SEQ ID NO: 802558 - RNA, 19 nt, Artificial Sequence
  Description of Artificial Sequence: Synthetic oligonucleotide
  Sense strand starting at position 1240 of SEQ ID NO: 587576
gacacaaugguuugccaua

SEQ ID NO: 802559 - RNA, 19 nt, Artificial Sequence
  Description of Artificial Sequence: Synthetic oligonucleotide
  Antisense strand to SEQ ID NO: 802558
uauggcaaaccauuguguc

SEQ ID NO: 802560 - RNA, 19 nt, Artificial Sequence
  Description of Artificial Sequence: Synthetic oligonucleotide
  Sense strand starting at position 1428 of SEQ ID NO: 587576
ugcacuuauuuguagaacu

SEQ ID NO: 802561 - RNA, 19 nt, Artificial Sequence
  Description of Artificial Sequence: Synthetic oligonucleotide
  Antisense strand to SEQ ID NO: 802560
aguucuacaaauaagugca

SEQ ID NO: 802562 - RNA, 19 nt, Artificial Sequence
  Description of Artificial Sequence: Synthetic oligonucleotide
  Sense strand starting at position 1459 of SEQ ID NO: 587576
auaguaaaguucuuugaac

SEQ ID NO: 802563 - RNA, 19 nt, Artificial Sequence
  Description of Artificial Sequence: Synthetic oligonucleotide
  Antisense strand to SEQ ID NO: 802562
guucaaagaacuuuacuau

SEQ ID NO: 802564 - RNA, 19 nt, Artificial Sequence
  Description of Artificial Sequence: Synthetic oligonucleotide
  Sense strand starting at position 1461 of SEQ ID NO: 587576
aguaaaguucuuugaacua

SEQ ID NO: 802565 - RNA, 19 nt, Artificial Sequence
  Description of Artificial Sequence: Synthetic oligonucleotide
  Antisense strand to SEQ ID NO: 802564
uaguucaaagaacuuuacu

SEQ ID NO: 802566 - RNA, 19 nt, Artificial Sequence
  Description of Artificial Sequence: Synthetic oligonucleotide
  Sense strand starting at position 1468 of SEQ ID NO: 587576
uucuuugaacuacgcuaaa

SEQ ID NO: 802567 - RNA, 19 nt, Artificial Sequence
  Description of Artificial Sequence: Synthetic oligonucleotide
  Antisense strand to SEQ ID NO: 802566
uuuagcguaguucaaagaa

SEQ ID NO: 802568 - RNA, 19 nt, Artificial Sequence
  Description of Artificial Sequence: Synthetic oligonucleotide
  Sense strand starting at position 1538 of SEQ ID NO: 587576
uccagacucguuuggucaa

SEQ ID NO: 802569 - RNA, 19 nt, Artificial Sequence
  Description of Artificial Sequence: Synthetic oligonucleotide
  Antisense strand to SEQ ID NO: 802568
uugaccaaacgagucugga

SEQ ID NO: 802570 - RNA, 19 nt, Artificial Sequence
  Description of Artificial Sequence: Synthetic oligonucleotide
  Sense strand starting at position 1541 of SEQ ID NO: 587576
agacucguuuggucaaagu

SEQ ID NO: 802571 - RNA, 19 nt, Artificial Sequence
  Description of Artificial Sequence: Synthetic oligonucleotide
  Antisense strand to SEQ ID NO: 802570
acuuugaccaaacgagucu

SEQ ID NO: 802572 - RNA, 19 nt, Artificial Sequence
  Description of Artificial Sequence: Synthetic oligonucleotide
  Sense strand starting at position 1554 of SEQ ID NO: 587576
caaaguagagauuguguaa

SEQ ID NO: 802573 - RNA, 19 nt, Artificial Sequence
  Description of Artificial Sequence: Synthetic oligonucleotide
  Antisense strand to SEQ ID NO: 802572
uuacacaaucucuacuuug

SEQ ID NO: 802574 - RNA, 19 nt, Artificial Sequence
  Description of Artificial Sequence: Synthetic oligonucleotide
  Sense strand starting at position 1667 of SEQ ID NO: 587576
acgagccauugcucuugaa

SEQ ID NO: 802575 - RNA, 19 nt, Artificial Sequence
  Description of Artificial Sequence: Synthetic oligonucleotide
  Antisense strand to SEQ ID NO: 802574
uucaagagcaauggcucgu

SEQ ID NO: 802576 - RNA, 19 nt, Artificial Sequence
  Description of Artificial Sequence: Synthetic oligonucleotide
  Sense strand starting at position 1671 of SEQ ID NO: 587576
gccauugcucuugaaauau

SEQ ID NO: 802577 - RNA, 19 nt, Artificial Sequence
  Description of Artificial Sequence: Synthetic oligonucleotide
  Antisense strand to SEQ ID NO: 802576
auauuucaagagcaauggc

SEQ ID NO: 802578 - RNA, 19 nt, Artificial Sequence
  Description of Artificial Sequence: Synthetic oligonucleotide
  Sense strand starting at position 1680 of SEQ ID NO: 587576
cuugaaauaucgcuaacaa

SEQ ID NO: 802579 - RNA, 19 nt, Artificial Sequence
  Description of Artificial Sequence: Synthetic oligonucleotide
  Antisense strand to SEQ ID NO: 802578
uuguuagcgauauuucaag

SEQ ID NO: 802580 - RNA, 19 nt, Artificial Sequence
  Description of Artificial Sequence: Synthetic oligonucleotide
  Sense strand starting at position 1681 of SEQ ID NO: 587576
uugaaauaucgcuaacaau

SEQ ID NO: 802581 - RNA, 19 nt, Artificial Sequence
  Description of Artificial Sequence: Synthetic oligonucleotide
  Antisense strand to SEQ ID NO: 802580
auuguuagcgauauuucaa

SEQ ID NO: 802582 - RNA, 19 nt, Artificial Sequence
  Description of Artificial Sequence: Synthetic oligonucleotide
  Sense strand starting at position 1724 of SEQ ID NO: 587576
uuauguaagcugcaaugga

SEQ ID NO: 802583 - RNA, 19 nt, Artificial Sequence
  Description of Artificial Sequence: Synthetic oligonucleotide
  Antisense strand to SEQ ID NO: 802582
uccauugcagcuuacauaa

SEQ ID NO: 802584 - RNA, 19 nt, Artificial Sequence
  Description of Artificial Sequence: Synthetic oligonucleotide
  Sense strand starting at position 2010 of SEQ ID NO: 587576
gggugagucacugggaaca

SEQ ID NO: 802585 - RNA, 19 nt, Artificial Sequence
  Description of Artificial Sequence: Synthetic oligonucleotide
  Antisense strand to SEQ ID NO: 802584
uguucccagugacucaccc

SEQ ID NO: 802586 - RNA, 19 nt, Artificial Sequence
  Description of Artificial Sequence: Synthetic oligonucleotide
  Sense strand starting at position 2141 of SEQ ID NO: 587576
gggcgaggcaugugaacaa

SEQ ID NO: 802587 - RNA, 19 nt, Artificial Sequence
  Description of Artificial Sequence: Synthetic oligonucleotide
  Antisense strand to SEQ ID NO: 802586
uuguucacaugccucgccc

SEQ ID NO: 802588 - RNA, 19 nt, Artificial Sequence
  Description of Artificial Sequence: Synthetic oligonucleotide
  Sense strand starting at position 2191 of SEQ ID NO: 587576
ggaaacgugaacugggaau

SEQ ID NO: 802589 - RNA, 19 nt, Artificial Sequence
  Description of Artificial Sequence: Synthetic oligonucleotide
  Antisense strand to SEQ ID NO: 802588
auucccaguucacguuucc

SEQ ID NO: 802590 - RNA, 19 nt, Artificial Sequence
  Description of Artificial Sequence: Synthetic oligonucleotide
  Sense strand starting at position 2878 of SEQ ID NO: 587576
cuuccaaggagucgucaga

SEQ ID NO: 802591 - RNA, 19 nt, Artificial Sequence
  Description of Artificial Sequence: Synthetic oligonucleotide
  Antisense strand to SEQ ID NO: 802590
ucugacgacuccuuggaag

SEQ ID NO: 802592 - RNA, 19 nt, Artificial Sequence
  Description of Artificial Sequence: Synthetic oligonucleotide
  Sense strand starting at position 3373 of SEQ ID NO: 587576
cccugucccugucugaaga

SEQ ID NO: 802593 - RNA, 19 nt, Artificial Sequence
  Description of Artificial Sequence: Synthetic oligonucleotide
  Antisense strand to SEQ ID NO: 802592
ucuucagacagggacaggg

SEQ ID NO: 802594 - RNA, 19 nt, Artificial Sequence
  Description of Artificial Sequence: Synthetic oligonucleotide
  Sense strand starting at position 3374 of SEQ ID NO: 587576
ccugucccugucugaagau

SEQ ID NO: 802595 - RNA, 19 nt, Artificial Sequence
  Description of Artificial Sequence: Synthetic oligonucleotide
  Antisense strand to SEQ ID NO: 802594
aucuucagacagggacagg

SEQ ID NO: 802596 - RNA, 19 nt, Artificial Sequence
  Description of Artificial Sequence: Synthetic oligonucleotide
  Sense strand starting at position 72 of SEQ ID NO: 587577
gggugagucacugggaaca

SEQ ID NO: 802597 - RNA, 19 nt, Artificial Sequence
  Description of Artificial Sequence: Synthetic oligonucleotide
  Antisense strand to SEQ ID NO: 802596
uguucccagugacucaccc

SEQ ID NO: 802598 - RNA, 19 nt, Artificial Sequence
  Description of Artificial Sequence: Synthetic oligonucleotide
  Sense strand starting at position 74 of SEQ ID NO: 587577
gugagucacugggaacauu

SEQ ID NO: 802599 - RNA, 19 nt, Artificial Sequence
  Description of Artificial Sequence: Synthetic oligonucleotide
  Antisense strand to SEQ ID NO: 802598
aauguucccagugacucac

SEQ ID NO: 802600 - RNA, 19 nt, Artificial Sequence
  Description of Artificial Sequence: Synthetic oligonucleotide
  Sense strand starting at position 203 of SEQ ID NO: 587577
gggcgaggcaugugaacaa

SEQ ID NO: 802601 - RNA, 19 nt, Artificial Sequence
  Description of Artificial Sequence: Synthetic oligonucleotide
  Antisense strand to SEQ ID NO: 802600
uuguucacaugccucgccc

SEQ ID NO: 802602 - RNA, 19 nt, Artificial Sequence
  Description of Artificial Sequence: Synthetic oligonucleotide
  Sense strand starting at position 253 of SEQ ID NO: 587577
ggaaacgugaacugggaau

SEQ ID NO: 802603 - RNA, 19 nt, Artificial Sequence
  Description of Artificial Sequence: Synthetic oligonucleotide
  Antisense strand to SEQ ID NO: 802602
auucccaguucacguuucc

SEQ ID NO: 802604 - RNA, 19 nt, Artificial Sequence
  Description of Artificial Sequence: Synthetic oligonucleotide
  Sense strand starting at position 940 of SEQ ID NO: 587577
cuuccaaggagucgucaga

SEQ ID NO: 802605 - RNA, 19 nt, Artificial Sequence
  Description of Artificial Sequence: Synthetic oligonucleotide
  Antisense strand to SEQ ID NO: 802604
ucugacgacuccuuggaag

SEQ ID NO: 802606 - RNA, 19 nt, Artificial Sequence
  Description of Artificial Sequence: Synthetic oligonucleotide
  Sense strand starting at position 1089 of SEQ ID NO: 587577
cgagcuaucugcugagcag

SEQ ID NO: 802607 - RNA, 19 nt, Artificial Sequence
  Description of Artificial Sequence: Synthetic oligonucleotide
  Antisense strand to SEQ ID NO: 802606
cugcucagcagauagcucg

SEQ ID NO: 802608 - RNA, 19 nt, Artificial Sequence
  Description of Artificial Sequence: Synthetic oligonucleotide
  Sense strand starting at position 1435 of SEQ ID NO: 587577
cccugucccugucugaaga

SEQ ID NO: 802609 - RNA, 19 nt, Artificial Sequence
  Description of Artificial Sequence: Synthetic oligonucleotide
  Antisense strand to SEQ ID NO: 802608
ucuucagacagggacaggg

SEQ ID NO: 802610 - RNA, 19 nt, Artificial Sequence
  Description of Artificial Sequence: Synthetic oligonucleotide
  Sense strand starting at position 1436 of SEQ ID NO: 587577
ccugucccugucugaagau

SEQ ID NO: 802611 - RNA, 19 nt, Artificial Sequence
  Description of Artificial Sequence: Synthetic oligonucleotide
  Antisense strand to SEQ ID NO: 802610
aucuucagacagggacagg

SEQ ID NO: 802612 - RNA, 19 nt, Artificial Sequence
  Description of Artificial Sequence: Synthetic oligonucleotide
  Sense strand starting at position 1973 of SEQ ID NO: 587577
gcgugaagcuggugucagu

SEQ ID NO: 802613 - RNA, 19 nt, Artificial Sequence
  Description of Artificial Sequence: Synthetic oligonucleotide
  Antisense strand to SEQ ID NO: 802612
acugacaccagcuucacgc

SEQ ID NO: 802614 - RNA, 19 nt, Artificial Sequence
  Description of Artificial Sequence: Synthetic oligonucleotide
  Sense strand starting at position 2333 of SEQ ID NO: 587577
ccaagagauuugcauugga

SEQ ID NO: 802615 - RNA, 19 nt, Artificial Sequence
  Description of Artificial Sequence: Synthetic oligonucleotide
  Antisense strand to SEQ ID NO: 802614
uccaaugcaaaucucuugg

SEQ ID NO: 802616 - RNA, 19 nt, Artificial Sequence
  Description of Artificial Sequence: Synthetic oligonucleotide
  Sense strand starting at position 2364 of SEQ ID NO: 587577
uugcgcgucugaugaggaa

SEQ ID NO: 802617 - RNA, 19 nt, Artificial Sequence
  Description of Artificial Sequence: Synthetic oligonucleotide
  Antisense strand to SEQ ID NO: 802616
uuccucaucagacgcgcaa

SEQ ID NO: 802618 - RNA, 19 nt, Artificial Sequence
  Description of Artificial Sequence: Synthetic oligonucleotide
  Sense strand starting at position 2404 of SEQ ID NO: 587577
agcugcauuucugaagcau

SEQ ID NO: 802619 - RNA, 19 nt, Artificial Sequence
  Description of Artificial Sequence: Synthetic oligonucleotide
  Antisense strand to SEQ ID NO: 802618
augcuucagaaaugcagcu

SEQ ID NO: 802620 - RNA, 19 nt, Artificial Sequence
  Description of Artificial Sequence: Synthetic oligonucleotide
  Sense strand starting at position 2718 of SEQ ID NO: 587577
cgaguuugagcucggugua

SEQ ID NO: 802621 - RNA, 19 nt, Artificial Sequence
  Description of Artificial Sequence: Synthetic oligonucleotide
  Antisense strand to SEQ ID NO: 802620
uacaccgagcucaaacucg

SEQ ID NO: 802622 - RNA, 19 nt, Artificial Sequence
  Description of Artificial Sequence: Synthetic oligonucleotide
  Sense strand starting at position 3010 of SEQ ID NO: 587577
uaggccuucugaucaggaa

SEQ ID NO: 802623 - RNA, 19 nt, Artificial Sequence
  Description of Artificial Sequence: Synthetic oligonucleotide
  Antisense strand to SEQ ID NO: 802622
uuccugaucagaaggccua

SEQ ID NO: 802624 - RNA, 19 nt, Artificial Sequence
  Description of Artificial Sequence: Synthetic oligonucleotide
  Sense strand starting at position 3068 of SEQ ID NO: 587577
ggccguuugugcgugauca

SEQ ID NO: 802625 - RNA, 19 nt, Artificial Sequence
  Description of Artificial Sequence: Synthetic oligonucleotide
  Antisense strand to SEQ ID NO: 802624
ugaucacgcacaaacggcc

SEQ ID NO: 802626 - RNA, 19 nt, Artificial Sequence
  Description of Artificial Sequence: Synthetic oligonucleotide
  Sense strand starting at position 3069 of SEQ ID NO: 587577
gccguuugugcgugaucac

SEQ ID NO: 802627 - RNA, 19 nt, Artificial Sequence
  Description of Artificial Sequence: Synthetic oligonucleotide
  Antisense strand to SEQ ID NO: 802626
gugaucacgcacaaacggc

SEQ ID NO: 802628 - RNA, 19 nt, Artificial Sequence
  Description of Artificial Sequence: Synthetic oligonucleotide
  Sense strand starting at position 3070 of SEQ ID NO: 587577
ccguuugugcgugaucaca

SEQ ID NO: 802629 - RNA, 19 nt, Artificial Sequence
  Description of Artificial Sequence: Synthetic oligonucleotide
  Antisense strand to SEQ ID NO: 802628
ugugaucacgcacaaacgg

SEQ ID NO: 802630 - RNA, 19 nt, Artificial Sequence
  Description of Artificial Sequence: Synthetic oligonucleotide
  Sense strand starting at position 3091 of SEQ ID NO: 587577
agcuguuguuggagaggaa

SEQ ID NO: 802631 - RNA, 19 nt, Artificial Sequence
  Description of Artificial Sequence: Synthetic oligonucleotide
  Antisense strand to SEQ ID NO: 802630
uuccucuccaacaacagcu

SEQ ID NO: 802632 - RNA, 19 nt, Artificial Sequence
  Description of Artificial Sequence: Synthetic oligonucleotide
  Sense strand starting at position 3207 of SEQ ID NO: 587577
cgucucuguaacugaauga

SEQ ID NO: 802633 - RNA, 19 nt, Artificial Sequence
  Description of Artificial Sequence: Synthetic oligonucleotide
  Antisense strand to SEQ ID NO: 802632
ucauucaguuacagagacg

SEQ ID NO: 802634 - RNA, 19 nt, Artificial Sequence
  Description of Artificial Sequence: Synthetic oligonucleotide
  Sense strand starting at position 3220 of SEQ ID NO: 587577
gaaugaaaggcugguaaug

SEQ ID NO: 802635 - RNA, 19 nt, Artificial Sequence
  Description of Artificial Sequence: Synthetic oligonucleotide
  Antisense strand to SEQ ID NO: 802634
cauuaccagccuuucauuc

SEQ ID NO: 802636 - RNA, 19 nt, Artificial Sequence
  Description of Artificial Sequence: Synthetic oligonucleotide
  Sense strand starting at position 3304 of SEQ ID NO: 587577
cugccaaugcuaugcguau

SEQ ID NO: 802637 - RNA, 19 nt, Artificial Sequence
  Description of Artificial Sequence: Synthetic oligonucleotide
  Antisense strand to SEQ ID NO: 802636
auacgcauagcauuggcag

SEQ ID NO: 802638 - RNA, 19 nt, Artificial Sequence
  Description of Artificial Sequence: Synthetic oligonucleotide
  Sense strand starting at position 3316 of SEQ ID NO: 587577
ugcguaucuuccgaugguu

SEQ ID NO: 802639 - RNA, 19 nt, Artificial Sequence
  Description of Artificial Sequence: Synthetic oligonucleotide
  Antisense strand to SEQ ID NO: 802638
aaccaucggaagauacgca

SEQ ID NO: 802640 - RNA, 19 nt, Artificial Sequence
  Description of Artificial Sequence: Synthetic oligonucleotide
  Sense strand starting at position 3743 of SEQ ID NO: 587577
cugucccuuccucaggaau

SEQ ID NO: 802641 - RNA, 19 nt, Artificial Sequence
  Description of Artificial Sequence: Synthetic oligonucleotide
  Antisense strand to SEQ ID NO: 802640
auuccugaggaagggacag

SEQ ID NO: 802642 - RNA, 19 nt, Artificial Sequence
  Description of Artificial Sequence: Synthetic oligonucleotide
  Sense strand starting at position 3807 of SEQ ID NO: 587577
gcggucuugacuugugaga

SEQ ID NO: 802643 - RNA, 19 nt, Artificial Sequence
  Description of Artificial Sequence: Synthetic oligonucleotide
  Antisense strand to SEQ ID NO: 802642
ucucacaagucaagaccgc

SEQ ID NO: 802644 - RNA, 19 nt, Artificial Sequence
  Description of Artificial Sequence: Synthetic oligonucleotide
  Sense strand starting at position 3809 of SEQ ID NO: 587577
ggucuugacuugugagagu

SEQ ID NO: 802645 - RNA, 19 nt, Artificial Sequence
  Description of Artificial Sequence: Synthetic oligonucleotide
  Antisense strand to SEQ ID NO: 802644
acucucacaagucaagacc

SEQ ID NO: 802646 - RNA, 19 nt, Artificial Sequence
  Description of Artificial Sequence: Synthetic oligonucleotide
  Sense strand starting at position 3812 of SEQ ID NO: 587577
cuugacuugugagagugau

SEQ ID NO: 802647 - RNA, 19 nt, Artificial Sequence
  Description of Artificial Sequence: Synthetic oligonucleotide
  Antisense strand to SEQ ID NO: 802646
aucacucucacaagucaag

SEQ ID NO: 802648 - RNA, 19 nt, Artificial Sequence
  Description of Artificial Sequence: Synthetic oligonucleotide
  Sense strand starting at position 3879 of SEQ ID NO: 587577
guggcacaauuccuagaga

SEQ ID NO: 802649 - RNA, 19 nt, Artificial Sequence
  Description of Artificial Sequence: Synthetic oligonucleotide
  Antisense strand to SEQ ID NO: 802648
ucucuaggaauugugccac

SEQ ID NO: 802650 - RNA, 19 nt, Artificial Sequence
  Description of Artificial Sequence: Synthetic oligonucleotide
  Sense strand starting at position 3943 of SEQ ID NO: 587577
acuagaauugcugauucua

SEQ ID NO: 802651 - RNA, 19 nt, Artificial Sequence
  Description of Artificial Sequence: Synthetic oligonucleotide
  Antisense strand to SEQ ID NO: 802650
uagaaucagcaauucuagu

SEQ ID NO: 802652 - RNA, 19 nt, Artificial Sequence
  Description of Artificial Sequence: Synthetic oligonucleotide
  Sense strand starting at position 25 of SEQ ID NO: 587578
gcuguauaauaacuugaau

SEQ ID NO: 802653 - RNA, 19 nt, Artificial Sequence
  Description of Artificial Sequence: Synthetic oligonucleotide
  Antisense strand to SEQ ID NO: 802652
auucaaguuauuauacagc

SEQ ID NO: 802654 - RNA, 19 nt, Artificial Sequence
  Description of Artificial Sequence: Synthetic oligonucleotide
  Sense strand starting at position 72 of SEQ ID NO: 587578
gaagauaaacucugugcau

SEQ ID NO: 802655 - RNA, 19 nt, Artificial Sequence
  Description of Artificial Sequence: Synthetic oligonucleotide
  Antisense strand to SEQ ID NO: 802654
augcacagaguuuaucuuc

SEQ ID NO: 802656 - RNA, 19 nt, Artificial Sequence
  Description of Artificial Sequence: Synthetic oligonucleotide
  Sense strand starting at position 74 of SEQ ID NO: 587578
agauaaacucugugcauag

SEQ ID NO: 802657 - RNA, 19 nt, Artificial Sequence
  Description of Artificial Sequence: Synthetic oligonucleotide
  Antisense strand to SEQ ID NO: 802656
cuaugcacagaguuuaucu

SEQ ID NO: 802658 - RNA, 19 nt, Artificial Sequence
  Description of Artificial Sequence: Synthetic oligonucleotide
  Sense strand starting at position 78 of SEQ ID NO: 587578
aaacucugugcauagggau

SEQ ID NO: 802659 - RNA, 19 nt, Artificial Sequence
  Description of Artificial Sequence: Synthetic oligonucleotide
  Antisense strand to SEQ ID NO: 802658
aucccuaugcacagaguuu

SEQ ID NO: 802660 - RNA, 19 nt, Artificial Sequence
  Description of Artificial Sequence: Synthetic oligonucleotide
  Sense strand starting at position 304 of SEQ ID NO: 587578
caugcauguguagauauau

SEQ ID NO: 802661 - RNA, 19 nt, Artificial Sequence
  Description of Artificial Sequence: Synthetic oligonucleotide
  Antisense strand to SEQ ID NO: 802660
auauaucuacacaugcaug

SEQ ID NO: 802662 - RNA, 19 nt, Artificial Sequence
  Description of Artificial Sequence: Synthetic oligonucleotide
  Sense strand starting at position 595 of SEQ ID NO: 587578
caguuacgugaugggaaga

SEQ ID NO: 802663 - RNA, 19 nt, Artificial Sequence
  Description of Artificial Sequence: Synthetic oligonucleotide
  Antisense strand to SEQ ID NO: 802662
ucuucccaucacguaacug

SEQ ID NO: 802664 - RNA, 19 nt, Artificial Sequence
  Description of Artificial Sequence: Synthetic oligonucleotide
  Sense strand starting at position 672 of SEQ ID NO: 587578
gagauagagucuuuggucu

SEQ ID NO: 802665 - RNA, 19 nt, Artificial Sequence
  Description of Artificial Sequence: Synthetic oligonucleotide
  Antisense strand to SEQ ID NO: 802664
agaccaaagacucuaucuc

SEQ ID NO: 802666 - RNA, 19 nt, Artificial Sequence
  Description of Artificial Sequence: Synthetic oligonucleotide
  Sense strand starting at position 761 of SEQ ID NO: 587578
ugucauaccuuuccaugga

SEQ ID NO: 802667 - RNA, 19 nt, Artificial Sequence
  Description of Artificial Sequence: Synthetic oligonucleotide
  Antisense strand to SEQ ID NO: 802666
uccauggaaagguaugaca

SEQ ID NO: 802668 - RNA, 19 nt, Artificial Sequence
  Description of Artificial Sequence: Synthetic oligonucleotide
  Sense strand starting at position 911 of SEQ ID NO: 587578
agauguagacauugugacu

SEQ ID NO: 802669 - RNA, 19 nt, Artificial Sequence
  Description of Artificial Sequence: Synthetic oligonucleotide
  Antisense strand to SEQ ID NO: 802668
agucacaaugucuacaucu

SEQ ID NO: 802670 - RNA, 19 nt, Artificial Sequence
  Description of Artificial Sequence: Synthetic oligonucleotide
  Sense strand starting at position 1129 of SEQ ID NO: 587578
ugguaagaguuucuuggag

SEQ ID NO: 802671 - RNA, 19 nt, Artificial Sequence
  Description of Artificial Sequence: Synthetic oligonucleotide
  Antisense strand to SEQ ID NO: 802670
cuccaagaaacucuuacca

SEQ ID NO: 802672 - RNA, 19 nt, Artificial Sequence
  Description of Artificial Sequence: Synthetic oligonucleotide
  Sense strand starting at position 1135 of SEQ ID NO: 587578
gaguuucuuggagggacau

SEQ ID NO: 802673 - RNA, 19 nt, Artificial Sequence
  Description of Artificial Sequence: Synthetic oligonucleotide
  Antisense strand to SEQ ID NO: 802672
augucccuccaagaaacuc

SEQ ID NO: 802674 - RNA, 19 nt, Artificial Sequence
  Description of Artificial Sequence: Synthetic oligonucleotide
  Sense strand starting at position 1212 of SEQ ID NO: 587578
ggcggucuccaagaugauc

SEQ ID NO: 802675 - RNA, 19 nt, Artificial Sequence
  Description of Artificial Sequence: Synthetic oligonucleotide
  Antisense strand to SEQ ID NO: 802674
gaucaucuuggagaccgcc

SEQ ID NO: 802676 - RNA, 19 nt, Artificial Sequence
  Description of Artificial Sequence: Synthetic oligonucleotide
  Sense strand starting at position 1353 of SEQ ID NO: 587578
gaggucaugcuugauccaa

SEQ ID NO: 802677 - RNA, 19 nt, Artificial Sequence
  Description of Artificial Sequence: Synthetic oligonucleotide
  Antisense strand to SEQ ID NO: 802676
uuggaucaagcaugaccuc

SEQ ID NO: 802678 - RNA, 19 nt, Artificial Sequence
  Description of Artificial Sequence: Synthetic oligonucleotide
  Sense strand starting at position 1415 of SEQ ID NO: 587578
caucaucuccgagauaguc

SEQ ID NO: 802679 - RNA, 19 nt, Artificial Sequence
  Description of Artificial Sequence: Synthetic oligonucleotide
  Antisense strand to SEQ ID NO: 802678
gacuaucucggagaugaug

SEQ ID NO: 802680 - RNA, 19 nt, Artificial Sequence
  Description of Artificial Sequence: Synthetic oligonucleotide
  Sense strand starting at position 1539 of SEQ ID NO: 587578
uaagauuucugagagucug

SEQ ID NO: 802681 - RNA, 19 nt, Artificial Sequence
  Description of Artificial Sequence: Synthetic oligonucleotide
  Antisense strand to SEQ ID NO: 802680
cagacucucagaaaucuua

SEQ ID NO: 802682 - RNA, 19 nt, Artificial Sequence
  Description of Artificial Sequence: Synthetic oligonucleotide
  Sense strand starting at position 1547 of SEQ ID NO: 587578
cugagagucugaucauacc

SEQ ID NO: 802683 - RNA, 19 nt, Artificial Sequence
  Description of Artificial Sequence: Synthetic oligonucleotide
  Antisense strand to SEQ ID NO: 802682
gguaugaucagacucucag

SEQ ID NO: 802684 - RNA, 19 nt, Artificial Sequence
  Description of Artificial Sequence: Synthetic oligonucleotide
  Sense strand starting at position 1663 of SEQ ID NO: 587578
aggacauugucaguggcaa

SEQ ID NO: 802685 - RNA, 19 nt, Artificial Sequence
  Description of Artificial Sequence: Synthetic oligonucleotide
  Antisense strand to SEQ ID NO: 802684
uugccacugacaauguccu

SEQ ID NO: 802686 - RNA, 19 nt, Artificial Sequence
  Description of Artificial Sequence: Synthetic oligonucleotide
  Sense strand starting at position 1693 of SEQ ID NO: 587578
cccguauacacguaggaga

SEQ ID NO: 802687 - RNA, 19 nt, Artificial Sequence
  Description of Artificial Sequence: Synthetic oligonucleotide
  Antisense strand to SEQ ID NO: 802686
ucuccuacguguauacggg

SEQ ID NO: 802688 - RNA, 19 nt, Artificial Sequence
  Description of Artificial Sequence: Synthetic oligonucleotide
  Sense strand starting at position 1787 of SEQ ID NO: 587578
agaacauagcccugaagua

SEQ ID NO: 802689 - RNA, 19 nt, Artificial Sequence
  Description of Artificial Sequence: Synthetic oligonucleotide
  Antisense strand to SEQ ID NO: 802688
uacuucagggcuauguucu

SEQ ID NO: 802690 - RNA, 19 nt, Artificial Sequence
  Description of Artificial Sequence: Synthetic oligonucleotide
  Sense strand starting at position 2101 of SEQ ID NO: 587578
ugcggaugucaccauggau

SEQ ID NO: 802691 - RNA, 19 nt, Artificial Sequence
  Description of Artificial Sequence: Synthetic oligonucleotide
  Antisense strand to SEQ ID NO: 802690
auccauggugacauccgca

SEQ ID NO: 802692 - RNA, 19 nt, Artificial Sequence
  Description of Artificial Sequence: Synthetic oligonucleotide
  Sense strand starting at position 2113 of SEQ ID NO: 587578
cauggauauuguguaggga

SEQ ID NO: 802693 - RNA, 19 nt, Artificial Sequence
  Description of Artificial Sequence: Synthetic oligonucleotide
  Antisense strand to SEQ ID NO: 802692
ucccuacacaauauccaug

SEQ ID NO: 802694 - RNA, 19 nt, Artificial Sequence
  Description of Artificial Sequence: Synthetic oligonucleotide
  Sense strand starting at position 2116 of SEQ ID NO: 587578
ggauauuguguagggaaga

SEQ ID NO: 802695 - RNA, 19 nt, Artificial Sequence
  Description of Artificial Sequence: Synthetic oligonucleotide
  Antisense strand to SEQ ID NO: 802694
ucuucccuacacaauaucc

SEQ ID NO: 802696 - RNA, 19 nt, Artificial Sequence
  Description of Artificial Sequence: Synthetic oligonucleotide
  Sense strand starting at position 2264 of SEQ ID NO: 587578
ggaaguuacucuguuauca

SEQ ID NO: 802697 - RNA, 19 nt, Artificial Sequence
  Description of Artificial Sequence: Synthetic oligonucleotide
  Antisense strand to SEQ ID NO: 802696
ugauaacagaguaacuucc

SEQ ID NO: 802698 - RNA, 19 nt, Artificial Sequence
  Description of Artificial Sequence: Synthetic oligonucleotide
  Sense strand starting at position 2268 of SEQ ID NO: 587578
guuacucuguuaucagaag

SEQ ID NO: 802699 - RNA, 19 nt, Artificial Sequence
  Description of Artificial Sequence: Synthetic oligonucleotide
  Antisense strand to SEQ ID NO: 802698
cuucugauaacagaguaac

SEQ ID NO: 802700 - RNA, 19 nt, Artificial Sequence
  Description of Artificial Sequence: Synthetic oligonucleotide
  Sense strand starting at position 2287 of SEQ ID NO: 587578
cugaaauguuagucugaag

SEQ ID NO: 802701 - RNA, 19 nt, Artificial Sequence
  Description of Artificial Sequence: Synthetic oligonucleotide
  Antisense strand to SEQ ID NO: 802700
cuucagacuaacauuucag

SEQ ID NO: 802702 - RNA, 19 nt, Artificial Sequence
  Description of Artificial Sequence: Synthetic oligonucleotide
  Sense strand starting at position 2294 of SEQ ID NO: 587578
guuagucugaagcaagaua

SEQ ID NO: 802703 - RNA, 19 nt, Artificial Sequence
  Description of Artificial Sequence: Synthetic oligonucleotide
  Antisense strand to SEQ ID NO: 802702
uaucuugcuucagacuaac

SEQ ID NO: 802704 - RNA, 19 nt, Artificial Sequence
  Description of Artificial Sequence: Synthetic oligonucleotide
  Sense strand starting at position 2370 of SEQ ID NO: 587578
aucuguuauugaguaacag

SEQ ID NO: 802705 - RNA, 19 nt, Artificial Sequence
  Description of Artificial Sequence: Synthetic oligonucleotide
  Antisense strand to SEQ ID NO: 802704
cuguuacucaauaacagau

SEQ ID NO: 802706 - RNA, 19 nt, Artificial Sequence
  Description of Artificial Sequence: Synthetic oligonucleotide
  Sense strand starting at position 2371 of SEQ ID NO: 587578
ucuguuauugaguaacaga

SEQ ID NO: 802707 - RNA, 19 nt, Artificial Sequence
  Description of Artificial Sequence: Synthetic oligonucleotide
  Antisense strand to SEQ ID NO: 802706
ucuguuacucaauaacaga

SEQ ID NO: 802708 - RNA, 19 nt, Artificial Sequence
  Description of Artificial Sequence: Synthetic oligonucleotide
  Sense strand starting at position 2382 of SEQ ID NO: 587578
guaacagaugucuaaaccu

SEQ ID NO: 802709 - RNA, 19 nt, Artificial Sequence
  Description of Artificial Sequence: Synthetic oligonucleotide
  Antisense strand to SEQ ID NO: 802708
agguuuagacaucuguuac

SEQ ID NO: 802710 - RNA, 19 nt, Artificial Sequence
  Description of Artificial Sequence: Synthetic oligonucleotide
  Sense strand starting at position 2430 of SEQ ID NO: 587578
gaugauauucuggaggugu

SEQ ID NO: 802711 - RNA, 19 nt, Artificial Sequence
  Description of Artificial Sequence: Synthetic oligonucleotide
  Antisense strand to SEQ ID NO: 802710
acaccuccagaauaucauc

SEQ ID NO: 802712 - RNA, 19 nt, Artificial Sequence
  Description of Artificial Sequence: Synthetic oligonucleotide
  Sense strand starting at position 2848 of SEQ ID NO: 587578
guauacauuccagggcuaa

SEQ ID NO: 802713 - RNA, 19 nt, Artificial Sequence
  Description of Artificial Sequence: Synthetic oligonucleotide
  Antisense strand to SEQ ID NO: 802712
uuagcccuggaauguauac

SEQ ID NO: 802714 - RNA, 19 nt, Artificial Sequence
  Description of Artificial Sequence: Synthetic oligonucleotide
  Sense strand starting at position 2866 of SEQ ID NO: 587578
agaauaguugcauauguac

SEQ ID NO: 802715 - RNA, 19 nt, Artificial Sequence
  Description of Artificial Sequence: Synthetic oligonucleotide
  Antisense strand to SEQ ID NO: 802714
guacauaugcaacuauucu

SEQ ID NO: 802716 - RNA, 19 nt, Artificial Sequence
  Description of Artificial Sequence: Synthetic oligonucleotide
  Sense strand starting at position 3122 of SEQ ID NO: 587578
uguggagagucacugaaga

SEQ ID NO: 802717 - RNA, 19 nt, Artificial Sequence
  Description of Artificial Sequence: Synthetic oligonucleotide
  Antisense strand to SEQ ID NO: 802716
ucuucagugacucuccaca

SEQ ID NO: 802718 - RNA, 19 nt, Artificial Sequence
  Description of Artificial Sequence: Synthetic oligonucleotide
  Sense strand starting at position 3277 of SEQ ID NO: 587578
ccaggauccuaggugauga

SEQ ID NO: 802719 - RNA, 19 nt, Artificial Sequence
  Description of Artificial Sequence: Synthetic oligonucleotide
  Antisense strand to SEQ ID NO: 802718
ucaucaccuaggauccugg

SEQ ID NO: 802720 - RNA, 19 nt, Artificial Sequence
  Description of Artificial Sequence: Synthetic oligonucleotide
  Sense strand starting at position 3383 of SEQ ID NO: 587578
aggucuccuuacucaggaa

SEQ ID NO: 802721 - RNA, 19 nt, Artificial Sequence
  Description of Artificial Sequence: Synthetic oligonucleotide
  Antisense strand to SEQ ID NO: 802720
uuccugaguaaggagaccu

SEQ ID NO: 802722 - RNA, 19 nt, Artificial Sequence
  Description of Artificial Sequence: Synthetic oligonucleotide
  Sense strand starting at position 3398 of SEQ ID NO: 587578
ggaaccucugauugacagu

SEQ ID NO: 802723 - RNA, 19 nt, Artificial Sequence
  Description of Artificial Sequence: Synthetic oligonucleotide
  Antisense strand to SEQ ID NO: 802722
acugucaaucagagguucc

SEQ ID NO: 802724 - RNA, 19 nt, Artificial Sequence
  Description of Artificial Sequence: Synthetic oligonucleotide
  Sense strand starting at position 3404 of SEQ ID NO: 587578
ucugauugacagugguaag

SEQ ID NO: 802725 - RNA, 19 nt, Artificial Sequence
  Description of Artificial Sequence: Synthetic oligonucleotide
  Antisense strand to SEQ ID NO: 802724
cuuaccacugucaaucaga

SEQ ID NO: 802726 - RNA, 19 nt, Artificial Sequence
  Description of Artificial Sequence: Synthetic oligonucleotide
  Sense strand starting at position 3565 of SEQ ID NO: 587578
ggcauauugcuuuagggag

SEQ ID NO: 802727 - RNA, 19 nt, Artificial Sequence
  Description of Artificial Sequence: Synthetic oligonucleotide
  Antisense strand to SEQ ID NO: 802726
cucccuaaagcaauaugcc

SEQ ID NO: 802728 - RNA, 19 nt, Artificial Sequence
  Description of Artificial Sequence: Synthetic oligonucleotide
  Sense strand starting at position 3817 of SEQ ID NO: 587578
cagggagguccaugauugu

SEQ ID NO: 802729 - RNA, 19 nt, Artificial Sequence
  Description of Artificial Sequence: Synthetic oligonucleotide
  Antisense strand to SEQ ID NO: 802728
acaaucauggaccucccug

SEQ ID NO: 802730 - RNA, 19 nt, Artificial Sequence
  Description of Artificial Sequence: Synthetic oligonucleotide
  Sense strand starting at position 3828 of SEQ ID NO: 587578
augauugucuuagccacaa

SEQ ID NO: 802731 - RNA, 19 nt, Artificial Sequence
  Description of Artificial Sequence: Synthetic oligonucleotide
  Antisense strand to SEQ ID NO: 802730
uuguggcuaagacaaucau

SEQ ID NO: 802732 - RNA, 19 nt, Artificial Sequence
  Description of Artificial Sequence: Synthetic oligonucleotide
  Sense strand starting at position 313 of SEQ ID NO: 587579
auuaauuuaugugagcaac

SEQ ID NO: 802733 - RNA, 19 nt, Artificial Sequence
  Description of Artificial Sequence: Synthetic oligonucleotide
  Antisense strand to SEQ ID NO: 802732
guugcucacauaaauuaau

SEQ ID NO: 802734 - RNA, 19 nt, Artificial Sequence
  Description of Artificial Sequence: Synthetic oligonucleotide
  Sense strand starting at position 337 of SEQ ID NO: 587579
uaaguaauuuaagacgaga

SEQ ID NO: 802735 - RNA, 19 nt, Artificial Sequence
  Description of Artificial Sequence: Synthetic oligonucleotide
  Antisense strand to SEQ ID NO: 802734
ucucgucuuaaauuacuua

SEQ ID NO: 802736 - RNA, 19 nt, Artificial Sequence
  Description of Artificial Sequence: Synthetic oligonucleotide
  Sense strand starting at position 377 of SEQ ID NO: 587579
ucaguuagucuuuaagucu

SEQ ID NO: 802737 - RNA, 19 nt, Artificial Sequence
  Description of Artificial Sequence: Synthetic oligonucleotide
  Antisense strand to SEQ ID NO: 802736
agacuuaaagacuaacuga

SEQ ID NO: 802738 - RNA, 19 nt, Artificial Sequence
  Description of Artificial Sequence: Synthetic oligonucleotide
  Sense strand starting at position 435 of SEQ ID NO: 587579
aguguuuaaagauacagua

SEQ ID NO: 802739 - RNA, 19 nt, Artificial Sequence
  Description of Artificial Sequence: Synthetic oligonucleotide
  Antisense strand to SEQ ID NO: 802738
uacuguaucuuuaaacacu

SEQ ID NO: 802740 - RNA, 19 nt, Artificial Sequence
  Description of Artificial Sequence: Synthetic oligonucleotide
  Sense strand starting at position 588 of SEQ ID NO: 587579
ccaacaugguguucuucua

SEQ ID NO: 802741 - RNA, 19 nt, Artificial Sequence
  Description of Artificial Sequence: Synthetic oligonucleotide
  Antisense strand to SEQ ID NO: 802740
uagaagaacaccauguugg

SEQ ID NO: 802742 - RNA, 19 nt, Artificial Sequence
  Description of Artificial Sequence: Synthetic oligonucleotide
  Sense strand starting at position 604 of SEQ ID NO: 587579
cuaagagacuuuccagggu

SEQ ID NO: 802743 - RNA, 19 nt, Artificial Sequence
  Description of Artificial Sequence: Synthetic oligonucleotide
  Antisense strand to SEQ ID NO: 802742
acccuggaaagucucuuag

SEQ ID NO: 802744 - RNA, 19 nt, Artificial Sequence
  Description of Artificial Sequence: Synthetic oligonucleotide
  Sense strand starting at position 607 of SEQ ID NO: 587579
agagacuuuccaggguaau

SEQ ID NO: 802745 - RNA, 19 nt, Artificial Sequence
  Description of Artificial Sequence: Synthetic oligonucleotide
  Antisense strand to SEQ ID NO: 802744
auuacccuggaaagucucu

SEQ ID NO: 802746 - RNA, 19 nt, Artificial Sequence
  Description of Artificial Sequence: Synthetic oligonucleotide
  Sense strand starting at position 608 of SEQ ID NO: 587579
gagacuuuccaggguaauu

SEQ ID NO: 802747 - RNA, 19 nt, Artificial Sequence
  Description of Artificial Sequence: Synthetic oligonucleotide
  Antisense strand to SEQ ID NO: 802746
aauuacccuggaaagucuc

SEQ ID NO: 802748 - RNA, 19 nt, Artificial Sequence
  Description of Artificial Sequence: Synthetic oligonucleotide
  Sense strand starting at position 610 of SEQ ID NO: 587579
gacuuuccaggguaauucu

SEQ ID NO: 802749 - RNA, 19 nt, Artificial Sequence
  Description of Artificial Sequence: Synthetic oligonucleotide
  Antisense strand to SEQ ID NO: 802748
agaauuacccuggaaaguc

SEQ ID NO: 802750 - RNA, 19 nt, Artificial Sequence
  Description of Artificial Sequence: Synthetic oligonucleotide
  Sense strand starting at position 646 of SEQ ID NO: 587579
gucugagguauugacuagu

SEQ ID NO: 802751 - RNA, 19 nt, Artificial Sequence
  Description of Artificial Sequence: Synthetic oligonucleotide
  Antisense strand to SEQ ID NO: 802750
acuagucaauaccucagac

SEQ ID NO: 802752 - RNA, 19 nt, Artificial Sequence
  Description of Artificial Sequence: Synthetic oligonucleotide
  Sense strand starting at position 796 of SEQ ID NO: 587579
agccuaaaccuuugguaac

SEQ ID NO: 802753 - RNA, 19 nt, Artificial Sequence
  Description of Artificial Sequence: Synthetic oligonucleotide
  Antisense strand to SEQ ID NO: 802752
guuaccaaagguuuaggcu

SEQ ID NO: 802754 - RNA, 19 nt, Artificial Sequence
  Description of Artificial Sequence: Synthetic oligonucleotide
  Sense strand starting at position 867 of SEQ ID NO: 587579
gcaggucugcugcuucuaa

SEQ ID NO: 802755 - RNA, 19 nt, Artificial Sequence
  Description of Artificial Sequence: Synthetic oligonucleotide
  Antisense strand to SEQ ID NO: 802754
uuagaagcagcagaccugc

SEQ ID NO: 802756 - RNA, 19 nt, Artificial Sequence
  Description of Artificial Sequence: Synthetic oligonucleotide
  Sense strand starting at position 994 of SEQ ID NO: 587579
uuaugucuugacugcacaa

SEQ ID NO: 802757 - RNA, 19 nt, Artificial Sequence
  Description of Artificial Sequence: Synthetic oligonucleotide
  Antisense strand to SEQ ID NO: 802756
uugugcagucaagacauaa

SEQ ID NO: 802758 - RNA, 19 nt, Artificial Sequence
  Description of Artificial Sequence: Synthetic oligonucleotide
  Sense strand starting at position 996 of SEQ ID NO: 587579
augucuugacugcacaauu

SEQ ID NO: 802759 - RNA, 19 nt, Artificial Sequence
  Description of Artificial Sequence: Synthetic oligonucleotide
  Antisense strand to SEQ ID NO: 802758
aauugugcagucaagacau

SEQ ID NO: 802760 - RNA, 19 nt, Artificial Sequence
  Description of Artificial Sequence: Synthetic oligonucleotide
  Sense strand starting at position 1074 of SEQ ID NO: 587579
uugcuaaaugccuaagacu

SEQ ID NO: 802761 - RNA, 19 nt, Artificial Sequence
  Description of Artificial Sequence: Synthetic oligonucleotide
  Antisense strand to SEQ ID NO: 802760
agucuuaggcauuuagcaa

SEQ ID NO: 802762 - RNA, 19 nt, Artificial Sequence
  Description of Artificial Sequence: Synthetic oligonucleotide
  Sense strand starting at position 1083 of SEQ ID NO: 587579
gccuaagacuuacuaugca

SEQ ID NO: 802763 - RNA, 19 nt, Artificial Sequence
  Description of Artificial Sequence: Synthetic oligonucleotide
  Antisense strand to SEQ ID NO: 802762
ugcauaguaagucuuaggc

SEQ ID NO: 802764 - RNA, 19 nt, Artificial Sequence
  Description of Artificial Sequence: Synthetic oligonucleotide
  Sense strand starting at position 1174 of SEQ ID NO: 587579
cuuagaaauacaggugugu

SEQ ID NO: 802765 - RNA, 19 nt, Artificial Sequence
  Description of Artificial Sequence: Synthetic oligonucleotide
  Antisense strand to SEQ ID NO: 802764
acacaccuguauuucuaag

SEQ ID NO: 802766 - RNA, 19 nt, Artificial Sequence
  Description of Artificial Sequence: Synthetic oligonucleotide
  Sense strand starting at position 1188 of SEQ ID NO: 587579
uguguuacugugucugcaa

SEQ ID NO: 802767 - RNA, 19 nt, Artificial Sequence
  Description of Artificial Sequence: Synthetic oligonucleotide
  Antisense strand to SEQ ID NO: 802766
uugcagacacaguaacaca

SEQ ID NO: 802768 - RNA, 19 nt, Artificial Sequence
  Description of Artificial Sequence: Synthetic oligonucleotide
  Sense strand starting at position 1345 of SEQ ID NO: 587579
aggaaaucgccucaacaua

SEQ ID NO: 802769 - RNA, 19 nt, Artificial Sequence
  Description of Artificial Sequence: Synthetic oligonucleotide
  Antisense strand to SEQ ID NO: 802768
uauguugaggcgauuuccu

SEQ ID NO: 802770 - RNA, 19 nt, Artificial Sequence
  Description of Artificial Sequence: Synthetic oligonucleotide
  Sense strand starting at position 1384 of SEQ ID NO: 587579
gaaguuacacucugggcaa

SEQ ID NO: 802771 - RNA, 19 nt, Artificial Sequence
  Description of Artificial Sequence: Synthetic oligonucleotide
  Antisense strand to SEQ ID NO: 802770
uugcccagaguguaacuuc

SEQ ID NO: 802772 - RNA, 19 nt, Artificial Sequence
  Description of Artificial Sequence: Synthetic oligonucleotide
  Sense strand starting at position 1410 of SEQ ID NO: 587579
gugaaagucaagugagcaa

SEQ ID NO: 802773 - RNA, 19 nt, Artificial Sequence
  Description of Artificial Sequence: Synthetic oligonucleotide
  Antisense strand to SEQ ID NO: 802772
uugcucacuugacuuucac

SEQ ID NO: 802774 - RNA, 19 nt, Artificial Sequence
  Description of Artificial Sequence: Synthetic oligonucleotide
  Sense strand starting at position 1414 of SEQ ID NO: 587579
aagucaagugagcaaagua

SEQ ID NO: 802775 - RNA, 19 nt, Artificial Sequence
  Description of Artificial Sequence: Synthetic oligonucleotide
  Antisense strand to SEQ ID NO: 802774
uacuuugcucacuugacuu

SEQ ID NO: 802776 - RNA, 19 nt, Artificial Sequence
  Description of Artificial Sequence: Synthetic oligonucleotide
  Sense strand starting at position 1930 of SEQ ID NO: 587579
gcgugucgccuaucuggau

SEQ ID NO: 802777 - RNA, 19 nt, Artificial Sequence
  Description of Artificial Sequence: Synthetic oligonucleotide
  Antisense strand to SEQ ID NO: 802776
auccagauaggcgacacgc

SEQ ID NO: 802778 - RNA, 19 nt, Artificial Sequence
  Description of Artificial Sequence: Synthetic oligonucleotide
  Sense strand starting at position 2328 of SEQ ID NO: 587579
uuugguaaccguucguuau

SEQ ID NO: 802779 - RNA, 19 nt, Artificial Sequence
  Description of Artificial Sequence: Synthetic oligonucleotide
  Antisense strand to SEQ ID NO: 802778
auaacgaacgguuaccaaa

SEQ ID NO: 802780 - RNA, 19 nt, Artificial Sequence
  Description of Artificial Sequence: Synthetic oligonucleotide
  Sense strand starting at position 2361 of SEQ ID NO: 587579
caggaaggauugccagauu

SEQ ID NO: 802781 - RNA, 19 nt, Artificial Sequence
  Description of Artificial Sequence: Synthetic oligonucleotide
  Antisense strand to SEQ ID NO: 802780
aaucuggcaauccuuccug

SEQ ID NO: 802782 - RNA, 19 nt, Artificial Sequence
  Description of Artificial Sequence: Synthetic oligonucleotide
  Sense strand starting at position 2652 of SEQ ID NO: 587579
cauuguguuagccaggaag

SEQ ID NO: 802783 - RNA, 19 nt, Artificial Sequence
  Description of Artificial Sequence: Synthetic oligonucleotide
  Antisense strand to SEQ ID NO: 802782
cuuccuggcuaacacaaug

SEQ ID NO: 802784 - RNA, 19 nt, Artificial Sequence
  Description of Artificial Sequence: Synthetic oligonucleotide
  Sense strand starting at position 2847 of SEQ ID NO: 587579
cgcccuuaauccucagaac

SEQ ID NO: 802785 - RNA, 19 nt, Artificial Sequence
  Description of Artificial Sequence: Synthetic oligonucleotide
  Antisense strand to SEQ ID NO: 802784
guucugaggauuaagggcg

SEQ ID NO: 802786 - RNA, 19 nt, Artificial Sequence
  Description of Artificial Sequence: Synthetic oligonucleotide
  Sense strand starting at position 3130 of SEQ ID NO: 587579
aguauuaacuauccagugu

SEQ ID NO: 802787 - RNA, 19 nt, Artificial Sequence
  Description of Artificial Sequence: Synthetic oligonucleotide
  Antisense strand to SEQ ID NO: 802786
acacuggauaguuaauacu

SEQ ID NO: 802788 - RNA, 19 nt, Artificial Sequence
  Description of Artificial Sequence: Synthetic oligonucleotide
  Sense strand starting at position 3134 of SEQ ID NO: 587579
uuaacuauccaguguuaac

SEQ ID NO: 802789 - RNA, 19 nt, Artificial Sequence
  Description of Artificial Sequence: Synthetic oligonucleotide
  Antisense strand to SEQ ID NO: 802788
guuaacacuggauaguuaa

SEQ ID NO: 802790 - RNA, 19 nt, Artificial Sequence
  Description of Artificial Sequence: Synthetic oligonucleotide
  Sense strand starting at position 3220 of SEQ ID NO: 587579
guuccaucgaguuaugaca

SEQ ID NO: 802791 - RNA, 19 nt, Artificial Sequence
  Description of Artificial Sequence: Synthetic oligonucleotide
  Antisense strand to SEQ ID NO: 802790
ugucauaacucgauggaac

SEQ ID NO: 802792 - RNA, 19 nt, Artificial Sequence
  Description of Artificial Sequence: Synthetic oligonucleotide
  Sense strand starting at position 3233 of SEQ ID NO: 587579
augacaauuguauguaauc

SEQ ID NO: 802793 - RNA, 19 nt, Artificial Sequence
  Description of Artificial Sequence: Synthetic oligonucleotide
  Antisense strand to SEQ ID NO: 802792
gauuacauacaauugucau

SEQ ID NO: 802794 - RNA, 19 nt, Artificial Sequence
  Description of Artificial Sequence: Synthetic oligonucleotide
  Sense strand starting at position 3234 of SEQ ID NO: 587579
ugacaauuguauguaauca

SEQ ID NO: 802795 - RNA, 19 nt, Artificial Sequence
  Description of Artificial Sequence: Synthetic oligonucleotide
  Antisense strand to SEQ ID NO: 802794
ugauuacauacaauuguca

SEQ ID NO: 802796 - RNA, 19 nt, Artificial Sequence
  Description of Artificial Sequence: Synthetic oligonucleotide
  Sense strand starting at position 3358 of SEQ ID NO: 587579
uccagauauuucugaugaa

SEQ ID NO: 802797 - RNA, 19 nt, Artificial Sequence
  Description of Artificial Sequence: Synthetic oligonucleotide
  Antisense strand to SEQ ID NO: 802796
uucaucagaaauaucugga

SEQ ID NO: 802798 - RNA, 19 nt, Artificial Sequence
  Description of Artificial Sequence: Synthetic oligonucleotide
  Sense strand starting at position 3410 of SEQ ID NO: 587579
agcagcauaguguaucaga

SEQ ID NO: 802799 - RNA, 19 nt, Artificial Sequence
  Description of Artificial Sequence: Synthetic oligonucleotide
  Antisense strand to SEQ ID NO: 802798
ucugauacacuaugcugcu

SEQ ID NO: 802800 - RNA, 19 nt, Artificial Sequence
  Description of Artificial Sequence: Synthetic oligonucleotide
  Sense strand starting at position 3421 of SEQ ID NO: 587579
guaucagaguggcuaauga

SEQ ID NO: 802801 - RNA, 19 nt, Artificial Sequence
  Description of Artificial Sequence: Synthetic oligonucleotide
  Antisense strand to SEQ ID NO: 802800
ucauuagccacucugauac

SEQ ID NO: 802802 - RNA, 19 nt, Artificial Sequence
  Description of Artificial Sequence: Synthetic oligonucleotide
  Sense strand starting at position 3455 of SEQ ID NO: 587579
ugagaaaugucuuugccuu

SEQ ID NO: 802803 - RNA, 19 nt, Artificial Sequence
  Description of Artificial Sequence: Synthetic oligonucleotide
  Antisense strand to SEQ ID NO: 802802
aaggcaaagacauuucuca

SEQ ID NO: 802804 - RNA, 19 nt, Artificial Sequence
  Description of Artificial Sequence: Synthetic oligonucleotide
  Sense strand starting at position 3456 of SEQ ID NO: 587579
gagaaaugucuuugccuug

SEQ ID NO: 802805 - RNA, 19 nt, Artificial Sequence
  Description of Artificial Sequence: Synthetic oligonucleotide
  Antisense strand to SEQ ID NO: 802804
caaggcaaagacauuucuc

SEQ ID NO: 802806 - RNA, 19 nt, Artificial Sequence
  Description of Artificial Sequence: Synthetic oligonucleotide
  Sense strand starting at position 3622 of SEQ ID NO: 587579
ucaaucugucaauauguau

SEQ ID NO: 802807 - RNA, 19 nt, Artificial Sequence
  Description of Artificial Sequence: Synthetic oligonucleotide
  Antisense strand to SEQ ID NO: 802806
auacauauugacagauuga

SEQ ID NO: 802808 - RNA, 19 nt, Artificial Sequence
  Description of Artificial Sequence: Synthetic oligonucleotide
  Sense strand starting at position 3701 of SEQ ID NO: 587579
aagaacucugcuggaaagu

SEQ ID NO: 802809 - RNA, 19 nt, Artificial Sequence
  Description of Artificial Sequence: Synthetic oligonucleotide
  Antisense strand to SEQ ID NO: 802808
acuuuccagcagaguucuu

SEQ ID NO: 802810 - RNA, 19 nt, Artificial Sequence
  Description of Artificial Sequence: Synthetic oligonucleotide
  Sense strand starting at position 3718 of SEQ ID NO: 587579
gucagugaacccuggagaa

SEQ ID NO: 802811 - RNA, 19 nt, Artificial Sequence
  Description of Artificial Sequence: Synthetic oligonucleotide
  Antisense strand to SEQ ID NO: 802810
uucuccaggguucacugac

SEQ ID NO: 802812 - RNA, 19 nt, Artificial Sequence
  Description of Artificial Sequence: Synthetic oligonucleotide
  Sense strand starting at position 534 of SEQ ID NO: 587580
ggucuaacucuccaucaug

SEQ ID NO: 802813 - RNA, 19 nt, Artificial Sequence
  Description of Artificial Sequence: Synthetic oligonucleotide
  Antisense strand to SEQ ID NO: 802812
caugauggagaguuagacc

SEQ ID NO: 802814 - RNA, 19 nt, Artificial Sequence
  Description of Artificial Sequence: Synthetic oligonucleotide
  Sense strand starting at position 542 of SEQ ID NO: 587580
ucuccaucaugaugucaca

SEQ ID NO: 802815 - RNA, 19 nt, Artificial Sequence
  Description of Artificial Sequence: Synthetic oligonucleotide
  Antisense strand to SEQ ID NO: 802814
ugugacaucaugauggaga

SEQ ID NO: 802816 - RNA, 19 nt, Artificial Sequence
  Description of Artificial Sequence: Synthetic oligonucleotide
  Sense strand starting at position 639 of SEQ ID NO: 587580
gcaagacuccaucagguuu

SEQ ID NO: 802817 - RNA, 19 nt, Artificial Sequence
  Description of Artificial Sequence: Synthetic oligonucleotide
  Antisense strand to SEQ ID NO: 802816
aaaccugauggagucuugc

SEQ ID NO: 802818 - RNA, 19 nt, Artificial Sequence
  Description of Artificial Sequence: Synthetic oligonucleotide
  Sense strand starting at position 647 of SEQ ID NO: 587580
ccaucagguuuccucacua

SEQ ID NO: 802819 - RNA, 19 nt, Artificial Sequence
  Description of Artificial Sequence: Synthetic oligonucleotide
  Antisense strand to SEQ ID NO: 802818
uagugaggaaaccugaugg

SEQ ID NO: 802820 - RNA, 19 nt, Artificial Sequence
  Description of Artificial Sequence: Synthetic oligonucleotide
  Sense strand starting at position 740 of SEQ ID NO: 587580
cccgcugagucugucaaga

SEQ ID NO: 802821 - RNA, 19 nt, Artificial Sequence
  Description of Artificial Sequence: Synthetic oligonucleotide
  Antisense strand to SEQ ID NO: 802820
ucuugacagacucagcggg

SEQ ID NO: 802822 - RNA, 19 nt, Artificial Sequence
  Description of Artificial Sequence: Synthetic oligonucleotide
  Sense strand starting at position 742 of SEQ ID NO: 587580
cgcugagucugucaagaaa

SEQ ID NO: 802823 - RNA, 19 nt, Artificial Sequence
  Description of Artificial Sequence: Synthetic oligonucleotide
  Antisense strand to SEQ ID NO: 802822
uuucuugacagacucagcg

SEQ ID NO: 802824 - RNA, 19 nt, Artificial Sequence
  Description of Artificial Sequence: Synthetic oligonucleotide
  Sense strand starting at position 849 of SEQ ID NO: 587580
acaucccuuccuggaguaa

SEQ ID NO: 802825 - RNA, 19 nt, Artificial Sequence
  Description of Artificial Sequence: Synthetic oligonucleotide
  Antisense strand to SEQ ID NO: 802824
uuacuccaggaagggaugu

SEQ ID NO: 802826 - RNA, 19 nt, Artificial Sequence
  Description of Artificial Sequence: Synthetic oligonucleotide
  Sense strand starting at position 996 of SEQ ID NO: 587580
gagaacgagcauugacaaa

SEQ ID NO: 802827 - RNA, 19 nt, Artificial Sequence
  Description of Artificial Sequence: Synthetic oligonucleotide
  Antisense strand to SEQ ID NO: 802826
uuugucaaugcucguucuc

SEQ ID NO: 802828 - RNA, 19 nt, Artificial Sequence
  Description of Artificial Sequence: Synthetic oligonucleotide
  Sense strand starting at position 1121 of SEQ ID NO: 587580
acacgugcucggcagauaa

SEQ ID NO: 802829 - RNA, 19 nt, Artificial Sequence
  Description of Artificial Sequence: Synthetic oligonucleotide
  Antisense strand to SEQ ID NO: 802828
uuaucugccgagcacgugu

SEQ ID NO: 802830 - RNA, 19 nt, Artificial Sequence
  Description of Artificial Sequence: Synthetic oligonucleotide
  Sense strand starting at position 1331 of SEQ ID NO: 587580
cgcggcacccggagaauua

SEQ ID NO: 802831 - RNA, 19 nt, Artificial Sequence
  Description of Artificial Sequence: Synthetic oligonucleotide
  Antisense strand to SEQ ID NO: 802830
uaauucuccgggugccgcg

SEQ ID NO: 802832 - RNA, 19 nt, Artificial Sequence
  Description of Artificial Sequence: Synthetic oligonucleotide
  Sense strand starting at position 1332 of SEQ ID NO: 587580
gcggcacccggagaauuaa

SEQ ID NO: 802833 - RNA, 19 nt, Artificial Sequence
  Description of Artificial Sequence: Synthetic oligonucleotide
  Antisense strand to SEQ ID NO: 802832
uuaauucuccgggugccgc

SEQ ID NO: 802834 - RNA, 19 nt, Artificial Sequence
  Description of Artificial Sequence: Synthetic oligonucleotide
  Sense strand starting at position 2005 of SEQ ID NO: 587580
uagucuaguuccuugcgau

SEQ ID NO: 802835 - RNA, 19 nt, Artificial Sequence
  Description of Artificial Sequence: Synthetic oligonucleotide
  Antisense strand to SEQ ID NO: 802834
aucgcaaggaacuagacua

SEQ ID NO: 802836 - RNA, 19 nt, Artificial Sequence
  Description of Artificial Sequence: Synthetic oligonucleotide
  Sense strand starting at position 2006 of SEQ ID NO: 587580
agucuaguuccuugcgauu

SEQ ID NO: 802837 - RNA, 19 nt, Artificial Sequence
  Description of Artificial Sequence: Synthetic oligonucleotide
  Antisense strand to SEQ ID NO: 802836
aaucgcaaggaacuagacu

SEQ ID NO: 802838 - RNA, 19 nt, Artificial Sequence
  Description of Artificial Sequence: Synthetic oligonucleotide
  Sense strand starting at position 2263 of SEQ ID NO: 587580
acuccugacgucgaaugau

SEQ ID NO: 802839 - RNA, 19 nt, Artificial Sequence
  Description of Artificial Sequence: Synthetic oligonucleotide
  Antisense strand to SEQ ID NO: 802838
aucauucgacgucaggagu

SEQ ID NO: 802840 - RNA, 19 nt, Artificial Sequence
  Description of Artificial Sequence: Synthetic oligonucleotide
  Sense strand starting at position 2348 of SEQ ID NO: 587580
acuucuaucuugcagguaa

SEQ ID NO: 802841 - RNA, 19 nt, Artificial Sequence
  Description of Artificial Sequence: Synthetic oligonucleotide
  Antisense strand to SEQ ID NO: 802840
uuaccugcaagauagaagu

SEQ ID NO: 802842 - RNA, 19 nt, Artificial Sequence
  Description of Artificial Sequence: Synthetic oligonucleotide
  Sense strand starting at position 2350 of SEQ ID NO: 587580
uucuaucuugcagguaauc

SEQ ID NO: 802843 - RNA, 19 nt, Artificial Sequence
  Description of Artificial Sequence: Synthetic oligonucleotide
  Antisense strand to SEQ ID NO: 802842
gauuaccugcaagauagaa

SEQ ID NO: 802844 - RNA, 19 nt, Artificial Sequence
  Description of Artificial Sequence: Synthetic oligonucleotide
  Sense strand starting at position 2352 of SEQ ID NO: 587580
cuaucuugcagguaaucga

SEQ ID NO: 802845 - RNA, 19 nt, Artificial Sequence
  Description of Artificial Sequence: Synthetic oligonucleotide
  Antisense strand to SEQ ID NO: 802844
ucgauuaccugcaagauag

SEQ ID NO: 802846 - RNA, 19 nt, Artificial Sequence
  Description of Artificial Sequence: Synthetic oligonucleotide
  Sense strand starting at position 2359 of SEQ ID NO: 587580
gcagguaaucgauacagcu

SEQ ID NO: 802847 - RNA, 19 nt, Artificial Sequence
  Description of Artificial Sequence: Synthetic oligonucleotide
  Antisense strand to SEQ ID NO: 802846
agcuguaucgauuaccugc

SEQ ID NO: 802848 - RNA, 19 nt, Artificial Sequence
  Description of Artificial Sequence: Synthetic oligonucleotide
  Sense strand starting at position 2368 of SEQ ID NO: 587580
cgauacagcuccuaucacu

SEQ ID NO: 802849 - RNA, 19 nt, Artificial Sequence
  Description of Artificial Sequence: Synthetic oligonucleotide
  Antisense strand to SEQ ID NO: 802848
agugauaggagcuguaucg

SEQ ID NO: 802850 - RNA, 19 nt, Artificial Sequence
  Description of Artificial Sequence: Synthetic oligonucleotide
  Sense strand starting at position 2384 of SEQ ID NO: 587580
acucuuaucuugcacgaga

SEQ ID NO: 802851 - RNA, 19 nt, Artificial Sequence
  Description of Artificial Sequence: Synthetic oligonucleotide
  Antisense strand to SEQ ID NO: 802850
ucucgugcaagauaagagu

SEQ ID NO: 802852 - RNA, 19 nt, Artificial Sequence
  Description of Artificial Sequence: Synthetic oligonucleotide
  Sense strand starting at position 2387 of SEQ ID NO: 587580
cuuaucuugcacgagagga

SEQ ID NO: 802853 - RNA, 19 nt, Artificial Sequence
  Description of Artificial Sequence: Synthetic oligonucleotide
  Antisense strand to SEQ ID NO: 802852
uccucucgugcaagauaag

SEQ ID NO: 802854 - RNA, 19 nt, Artificial Sequence
  Description of Artificial Sequence: Synthetic oligonucleotide
  Sense strand starting at position 2482 of SEQ ID NO: 587580
cagcucaauuacuguggua

SEQ ID NO: 802855 - RNA, 19 nt, Artificial Sequence
  Description of Artificial Sequence: Synthetic oligonucleotide
  Antisense strand to SEQ ID NO: 802854
uaccacaguaauugagcug

SEQ ID NO: 802856 - RNA, 19 nt, Artificial Sequence
  Description of Artificial Sequence: Synthetic oligonucleotide
  Sense strand starting at position 2484 of SEQ ID NO: 587580
gcucaauuacugugguagu

SEQ ID NO: 802857 - RNA, 19 nt, Artificial Sequence
  Description of Artificial Sequence: Synthetic oligonucleotide
  Antisense strand to SEQ ID NO: 802856
acuaccacaguaauugagc

SEQ ID NO: 802858 - RNA, 19 nt, Artificial Sequence
  Description of Artificial Sequence: Synthetic oligonucleotide
  Sense strand starting at position 2485 of SEQ ID NO: 587580
cucaauuacugugguagua

SEQ ID NO: 802859 - RNA, 19 nt, Artificial Sequence
  Description of Artificial Sequence: Synthetic oligonucleotide
  Antisense strand to SEQ ID NO: 802858
uacuaccacaguaauugag

SEQ ID NO: 802860 - RNA, 19 nt, Artificial Sequence
  Description of Artificial Sequence: Synthetic oligonucleotide
  Sense strand starting at position 2487 of SEQ ID NO: 587580
caauuacugugguaguaau

SEQ ID NO: 802861 - RNA, 19 nt, Artificial Sequence
  Description of Artificial Sequence: Synthetic oligonucleotide
  Antisense strand to SEQ ID NO: 802860
auuacuaccacaguaauug

SEQ ID NO: 802862 - RNA, 19 nt, Artificial Sequence
  Description of Artificial Sequence: Synthetic oligonucleotide
  Sense strand starting at position 3515 of SEQ ID NO: 587580
ccggguugguccuaaucaa

SEQ ID NO: 802863 - RNA, 19 nt, Artificial Sequence
  Description of Artificial Sequence: Synthetic oligonucleotide
  Antisense strand to SEQ ID NO: 802862
uugauuaggaccaacccgg

SEQ ID NO: 802864 - RNA, 19 nt, Artificial Sequence
  Description of Artificial Sequence: Synthetic oligonucleotide
  Sense strand starting at position 3618 of SEQ ID NO: 587580
aggucccauuccuugaaau

SEQ ID NO: 802865 - RNA, 19 nt, Artificial Sequence
  Description of Artificial Sequence: Synthetic oligonucleotide
  Antisense strand to SEQ ID NO: 802864
auuucaaggaaugggaccu

SEQ ID NO: 802866 - RNA, 19 nt, Artificial Sequence
  Description of Artificial Sequence: Synthetic oligonucleotide
  Sense strand starting at position 3619 of SEQ ID NO: 587580
ggucccauuccuugaaauc

SEQ ID NO: 802867 - RNA, 19 nt, Artificial Sequence
  Description of Artificial Sequence: Synthetic oligonucleotide
  Antisense strand to SEQ ID NO: 802866
gauuucaaggaaugggacc

SEQ ID NO: 802868 - RNA, 19 nt, Artificial Sequence
  Description of Artificial Sequence: Synthetic oligonucleotide
  Sense strand starting at position 58 of SEQ ID NO: 587581
ugugacaucucaucuucca

SEQ ID NO: 802869 - RNA, 19 nt, Artificial Sequence
  Description of Artificial Sequence: Synthetic oligonucleotide
  Antisense strand to SEQ ID NO: 802868
uggaagaugagaugucaca

SEQ ID NO: 802870 - RNA, 19 nt, Artificial Sequence
  Description of Artificial Sequence: Synthetic oligonucleotide
  Sense strand starting at position 76 of SEQ ID NO: 587581
agucauaccgaauaaggua

SEQ ID NO: 802871 - RNA, 19 nt, Artificial Sequence
  Description of Artificial Sequence: Synthetic oligonucleotide
  Antisense strand to SEQ ID NO: 802870
uaccuuauucgguaugacu

SEQ ID NO: 802872 - RNA, 19 nt, Artificial Sequence
  Description of Artificial Sequence: Synthetic oligonucleotide
  Sense strand starting at position 84 of SEQ ID NO: 587581
cgaauaagguagccaauua

SEQ ID NO: 802873 - RNA, 19 nt, Artificial Sequence
  Description of Artificial Sequence: Synthetic oligonucleotide
  Antisense strand to SEQ ID NO: 802872
uaauuggcuaccuuauucg

SEQ ID NO: 802874 - RNA, 19 nt, Artificial Sequence
  Description of Artificial Sequence: Synthetic oligonucleotide
  Sense strand starting at position 207 of SEQ ID NO: 587581
auaagcuguuucuuaaaug

SEQ ID NO: 802875 - RNA, 19 nt, Artificial Sequence
  Description of Artificial Sequence: Synthetic oligonucleotide
  Antisense strand to SEQ ID NO: 802874
cauuuaagaaacagcuuau

SEQ ID NO: 802876 - RNA, 19 nt, Artificial Sequence
  Description of Artificial Sequence: Synthetic oligonucleotide
  Sense strand starting at position 251 of SEQ ID NO: 587581
acaguaauugagugaugca

SEQ ID NO: 802877 - RNA, 19 nt, Artificial Sequence
  Description of Artificial Sequence: Synthetic oligonucleotide
  Antisense strand to SEQ ID NO: 802876
ugcaucacucaauuacugu

SEQ ID NO: 802878 - RNA, 19 nt, Artificial Sequence
  Description of Artificial Sequence: Synthetic oligonucleotide
  Sense strand starting at position 279 of SEQ ID NO: 587581
agacaaagcuuagauaagu

SEQ ID NO: 802879 - RNA, 19 nt, Artificial Sequence
  Description of Artificial Sequence: Synthetic oligonucleotide
  Antisense strand to SEQ ID NO: 802878
acuuaucuaagcuuugucu

SEQ ID NO: 802880 - RNA, 19 nt, Artificial Sequence
  Description of Artificial Sequence: Synthetic oligonucleotide
  Sense strand starting at position 287 of SEQ ID NO: 587581
cuuagauaagucuggguuc

SEQ ID NO: 802881 - RNA, 19 nt, Artificial Sequence
  Description of Artificial Sequence: Synthetic oligonucleotide
  Antisense strand to SEQ ID NO: 802880
gaacccagacuuaucuaag

SEQ ID NO: 802882 - RNA, 19 nt, Artificial Sequence
  Description of Artificial Sequence: Synthetic oligonucleotide
  Sense strand starting at position 289 of SEQ ID NO: 587581
uagauaagucuggguucua

SEQ ID NO: 802883 - RNA, 19 nt, Artificial Sequence
  Description of Artificial Sequence: Synthetic oligonucleotide
  Antisense strand to SEQ ID NO: 802882
uagaacccagacuuaucua

SEQ ID NO: 802884 - RNA, 19 nt, Artificial Sequence
  Description of Artificial Sequence: Synthetic oligonucleotide
  Sense strand starting at position 290 of SEQ ID NO: 587581
agauaagucuggguucuac

SEQ ID NO: 802885 - RNA, 19 nt, Artificial Sequence
  Description of Artificial Sequence: Synthetic oligonucleotide
  Antisense strand to SEQ ID NO: 802884
guagaacccagacuuaucu

SEQ ID NO: 802886 - RNA, 19 nt, Artificial Sequence
  Description of Artificial Sequence: Synthetic oligonucleotide
  Sense strand starting at position 372 of SEQ ID NO: 587581
gaugcugauucugugauua

SEQ ID NO: 802887 - RNA, 19 nt, Artificial Sequence
  Description of Artificial Sequence: Synthetic oligonucleotide
  Antisense strand to SEQ ID NO: 802886
uaaucacagaaucagcauc

SEQ ID NO: 802888 - RNA, 19 nt, Artificial Sequence
  Description of Artificial Sequence: Synthetic oligonucleotide
  Sense strand starting at position 376 of SEQ ID NO: 587581
cugauucugugauuacaaa

SEQ ID NO: 802889 - RNA, 19 nt, Artificial Sequence
  Description of Artificial Sequence: Synthetic oligonucleotide
  Antisense strand to SEQ ID NO: 802888
uuuguaaucacagaaucag

SEQ ID NO: 802890 - RNA, 19 nt, Artificial Sequence
  Description of Artificial Sequence: Synthetic oligonucleotide
  Sense strand starting at position 421 of SEQ ID NO: 587581
uucucuaaccugggaguua

SEQ ID NO: 802891 - RNA, 19 nt, Artificial Sequence
  Description of Artificial Sequence: Synthetic oligonucleotide
  Antisense strand to SEQ ID NO: 802890
uaacucccagguuagagaa

SEQ ID NO: 802892 - RNA, 19 nt, Artificial Sequence
  Description of Artificial Sequence: Synthetic oligonucleotide
  Sense strand starting at position 489 of SEQ ID NO: 587581
gccuaauggucucuaauua

SEQ ID NO: 802893 - RNA, 19 nt, Artificial Sequence
  Description of Artificial Sequence: Synthetic oligonucleotide
  Antisense strand to SEQ ID NO: 802892
uaauuagagaccauuaggc

SEQ ID NO: 802894 - RNA, 19 nt, Artificial Sequence
  Description of Artificial Sequence: Synthetic oligonucleotide
  Sense strand starting at position 640 of SEQ ID NO: 587581
uuucccuaggucuggagaa

SEQ ID NO: 802895 - RNA, 19 nt, Artificial Sequence
  Description of Artificial Sequence: Synthetic oligonucleotide
  Antisense strand to SEQ ID NO: 802894
uucuccagaccuagggaaa

SEQ ID NO: 802896 - RNA, 19 nt, Artificial Sequence
  Description of Artificial Sequence: Synthetic oligonucleotide
  Sense strand starting at position 642 of SEQ ID NO: 587581
ucccuaggucuggagaagu

SEQ ID NO: 802897 - RNA, 19 nt, Artificial Sequence
  Description of Artificial Sequence: Synthetic oligonucleotide
  Antisense strand to SEQ ID NO: 802896
acuucuccagaccuaggga

SEQ ID NO: 802898 - RNA, 19 nt, Artificial Sequence
  Description of Artificial Sequence: Synthetic oligonucleotide
  Sense strand starting at position 784 of SEQ ID NO: 587581
ggguuuagagucuaucaua

SEQ ID NO: 802899 - RNA, 19 nt, Artificial Sequence
  Description of Artificial Sequence: Synthetic oligonucleotide
  Antisense strand to SEQ ID NO: 802898
uaugauagacucuaaaccc

SEQ ID NO: 802900 - RNA, 19 nt, Artificial Sequence
  Description of Artificial Sequence: Synthetic oligonucleotide
  Sense strand starting at position 823 of SEQ ID NO: 587581
guaucccaguugcuuaaau

SEQ ID NO: 802901 - RNA, 19 nt, Artificial Sequence
  Description of Artificial Sequence: Synthetic oligonucleotide
  Antisense strand to SEQ ID NO: 802900
auuuaagcaacugggauac

SEQ ID NO: 802902 - RNA, 19 nt, Artificial Sequence
  Description of Artificial Sequence: Synthetic oligonucleotide
  Sense strand starting at position 825 of SEQ ID NO: 587581
aucccaguugcuuaaauga

SEQ ID NO: 802903 - RNA, 19 nt, Artificial Sequence
  Description of Artificial Sequence: Synthetic oligonucleotide
  Antisense strand to SEQ ID NO: 802902
ucauuuaagcaacugggau

SEQ ID NO: 802904 - RNA, 19 nt, Artificial Sequence
  Description of Artificial Sequence: Synthetic oligonucleotide
  Sense strand starting at position 900 of SEQ ID NO: 587581
guaagacugugacccugaa

SEQ ID NO: 802905 - RNA, 19 nt, Artificial Sequence
  Description of Artificial Sequence: Synthetic oligonucleotide
  Antisense strand to SEQ ID NO: 802904
uucagggucacagucuuac

SEQ ID NO: 802906 - RNA, 19 nt, Artificial Sequence
  Description of Artificial Sequence: Synthetic oligonucleotide
  Sense strand starting at position 1016 of SEQ ID NO: 587581
gcggcaggucaagaaauca

SEQ ID NO: 802907 - RNA, 19 nt, Artificial Sequence
  Description of Artificial Sequence: Synthetic oligonucleotide
  Antisense strand to SEQ ID NO: 802906
ugauuucuugaccugccgc

SEQ ID NO: 802908 - RNA, 19 nt, Artificial Sequence
  Description of Artificial Sequence: Synthetic oligonucleotide
  Sense strand starting at position 1435 of SEQ ID NO: 587581
ugugccuuucggugggaaa

SEQ ID NO: 802909 - RNA, 19 nt, Artificial Sequence
  Description of Artificial Sequence: Synthetic oligonucleotide
  Antisense strand to SEQ ID NO: 802908
uuucccaccgaaaggcaca

SEQ ID NO: 802910 - RNA, 19 nt, Artificial Sequence
  Description of Artificial Sequence: Synthetic oligonucleotide
  Sense strand starting at position 1436 of SEQ ID NO: 587581
gugccuuucggugggaaau

SEQ ID NO: 802911 - RNA, 19 nt, Artificial Sequence
  Description of Artificial Sequence: Synthetic oligonucleotide
  Antisense strand to SEQ ID NO: 802910
auuucccaccgaaaggcac

SEQ ID NO: 802912 - RNA, 19 nt, Artificial Sequence
  Description of Artificial Sequence: Synthetic oligonucleotide
  Sense strand starting at position 1437 of SEQ ID NO: 587581
ugccuuucggugggaaaug

SEQ ID NO: 802913 - RNA, 19 nt, Artificial Sequence
  Description of Artificial Sequence: Synthetic oligonucleotide
  Antisense strand to SEQ ID NO: 802912
cauuucccaccgaaaggca

SEQ ID NO: 802914 - RNA, 19 nt, Artificial Sequence
  Description of Artificial Sequence: Synthetic oligonucleotide
  Sense strand starting at position 2276 of SEQ ID NO: 587581
uuuggaugcacgugugaug

SEQ ID NO: 802915 - RNA, 19 nt, Artificial Sequence
  Description of Artificial Sequence: Synthetic oligonucleotide
  Antisense strand to SEQ ID NO: 802914
caucacacgugcauccaaa

SEQ ID NO: 802916 - RNA, 19 nt, Artificial Sequence
  Description of Artificial Sequence: Synthetic oligonucleotide
  Sense strand starting at position 2360 of SEQ ID NO: 587581
gagugugaucacggcuacu

SEQ ID NO: 802917 - RNA, 19 nt, Artificial Sequence
  Description of Artificial Sequence: Synthetic oligonucleotide
  Antisense strand to SEQ ID NO: 802916
aguagccgugaucacacuc

SEQ ID NO: 802918 - RNA, 19 nt, Artificial Sequence
  Description of Artificial Sequence: Synthetic oligonucleotide
  Sense strand starting at position 2513 of SEQ ID NO: 587581
gugagacucucaucuuguu

SEQ ID NO: 802919 - RNA, 19 nt, Artificial Sequence
  Description of Artificial Sequence: Synthetic oligonucleotide
  Antisense strand to SEQ ID NO: 802918
aacaagaugagagucucac

SEQ ID NO: 802920 - RNA, 19 nt, Artificial Sequence
  Description of Artificial Sequence: Synthetic oligonucleotide
  Sense strand starting at position 2542 of SEQ ID NO: 587581
gucuccugagcucaaggau

SEQ ID NO: 802921 - RNA, 19 nt, Artificial Sequence
  Description of Artificial Sequence: Synthetic oligonucleotide
  Antisense strand to SEQ ID NO: 802920
auccuugagcucaggagac

SEQ ID NO: 802922 - RNA, 19 nt, Artificial Sequence
  Description of Artificial Sequence: Synthetic oligonucleotide
  Sense strand starting at position 2630 of SEQ ID NO: 587581
cucgcucuuagcugagaga

SEQ ID NO: 802923 - RNA, 19 nt, Artificial Sequence
  Description of Artificial Sequence: Synthetic oligonucleotide
  Antisense strand to SEQ ID NO: 802922
ucucucagcuaagagcgag

SEQ ID NO: 802924 - RNA, 19 nt, Artificial Sequence
  Description of Artificial Sequence: Synthetic oligonucleotide
  Sense strand starting at position 2740 of SEQ ID NO: 587581
ccaggaaugugcuuacuga

SEQ ID NO: 802925 - RNA, 19 nt, Artificial Sequence
  Description of Artificial Sequence: Synthetic oligonucleotide
  Antisense strand to SEQ ID NO: 802924
ucaguaagcacauuccugg

SEQ ID NO: 802926 - RNA, 19 nt, Artificial Sequence
  Description of Artificial Sequence: Synthetic oligonucleotide
  Sense strand starting at position 2741 of SEQ ID NO: 587581
caggaaugugcuuacugau

SEQ ID NO: 802927 - RNA, 19 nt, Artificial Sequence
  Description of Artificial Sequence: Synthetic oligonucleotide
  Antisense strand to SEQ ID NO: 802926
aucaguaagcacauuccug

SEQ ID NO: 802928 - RNA, 19 nt, Artificial Sequence
  Description of Artificial Sequence: Synthetic oligonucleotide
  Sense strand starting at position 2827 of SEQ ID NO: 587581
ugcguuuaucucuuuguga

SEQ ID NO: 802929 - RNA, 19 nt, Artificial Sequence
  Description of Artificial Sequence: Synthetic oligonucleotide
  Antisense strand to SEQ ID NO: 802928
ucacaaagagauaaacgca

SEQ ID NO: 802930 - RNA, 19 nt, Artificial Sequence
  Description of Artificial Sequence: Synthetic oligonucleotide
  Sense strand starting at position 2829 of SEQ ID NO: 587581
cguuuaucucuuugugaua

SEQ ID NO: 802931 - RNA, 19 nt, Artificial Sequence
  Description of Artificial Sequence: Synthetic oligonucleotide
  Antisense strand to SEQ ID NO: 802930
uaucacaaagagauaaacg

SEQ ID NO: 802932 - RNA, 19 nt, Artificial Sequence
  Description of Artificial Sequence: Synthetic oligonucleotide
  Sense strand starting at position 2830 of SEQ ID NO: 587581
guuuaucucuuugugauaa

SEQ ID NO: 802933 - RNA, 19 nt, Artificial Sequence
  Description of Artificial Sequence: Synthetic oligonucleotide
  Antisense strand to SEQ ID NO: 802932
uuaucacaaagagauaaac

SEQ ID NO: 802934 - RNA, 19 nt, Artificial Sequence
  Description of Artificial Sequence: Synthetic oligonucleotide
  Sense strand starting at position 2881 of SEQ ID NO: 587581
uccuguaacuguuucuaua

SEQ ID NO: 802935 - RNA, 19 nt, Artificial Sequence
  Description of Artificial Sequence: Synthetic oligonucleotide
  Antisense strand to SEQ ID NO: 802934
uauagaaacaguuacagga

SEQ ID NO: 802936 - RNA, 19 nt, Artificial Sequence
  Description of Artificial Sequence: Synthetic oligonucleotide
  Sense strand starting at position 2883 of SEQ ID NO: 587581
cuguaacuguuucuauaac

SEQ ID NO: 802937 - RNA, 19 nt, Artificial Sequence
  Description of Artificial Sequence: Synthetic oligonucleotide
  Antisense strand to SEQ ID NO: 802936
guuauagaaacaguuacag

SEQ ID NO: 802938 - RNA, 19 nt, Artificial Sequence
  Description of Artificial Sequence: Synthetic oligonucleotide
  Sense strand starting at position 3228 of SEQ ID NO: 587581
cuccuugguuuccuauaca

SEQ ID NO: 802939 - RNA, 19 nt, Artificial Sequence
  Description of Artificial Sequence: Synthetic oligonucleotide
  Antisense strand to SEQ ID NO: 802938
uguauaggaaaccaaggag

SEQ ID NO: 802940 - RNA, 19 nt, Artificial Sequence
  Description of Artificial Sequence: Synthetic oligonucleotide
  Sense strand starting at position 3231 of SEQ ID NO: 587581
cuugguuuccuauacagga

SEQ ID NO: 802941 - RNA, 19 nt, Artificial Sequence
  Description of Artificial Sequence: Synthetic oligonucleotide
  Antisense strand to SEQ ID NO: 802940
uccuguauaggaaaccaag

SEQ ID NO: 802942 - RNA, 19 nt, Artificial Sequence
  Description of Artificial Sequence: Synthetic oligonucleotide
  Sense strand starting at position 3452 of SEQ ID NO: 587581
ggguuagacgcugagaugu

SEQ ID NO: 802943 - RNA, 19 nt, Artificial Sequence
  Description of Artificial Sequence: Synthetic oligonucleotide
  Antisense strand to SEQ ID NO: 802942
acaucucagcgucuaaccc

SEQ ID NO: 802944 - RNA, 19 nt, Artificial Sequence
  Description of Artificial Sequence: Synthetic oligonucleotide
  Sense strand starting at position 3557 of SEQ ID NO: 587581
gggaucagaauaugucacu

SEQ ID NO: 802945 - RNA, 19 nt, Artificial Sequence
  Description of Artificial Sequence: Synthetic oligonucleotide
  Antisense strand to SEQ ID NO: 802944
agugacauauucugauccc

SEQ ID NO: 802946 - RNA, 19 nt, Artificial Sequence
  Description of Artificial Sequence: Synthetic oligonucleotide
  Sense strand starting at position 3606 of SEQ ID NO: 587581
gugacucaggcaugugauc

SEQ ID NO: 802947 - RNA, 19 nt, Artificial Sequence
  Description of Artificial Sequence: Synthetic oligonucleotide
  Antisense strand to SEQ ID NO: 802946
gaucacaugccugagucac

SEQ ID NO: 802948 - RNA, 19 nt, Artificial Sequence
  Description of Artificial Sequence: Synthetic oligonucleotide
  Sense strand starting at position 393 of SEQ ID NO: 587582
ggguaacuccaaugcuuac

SEQ ID NO: 802949 - RNA, 19 nt, Artificial Sequence
  Description of Artificial Sequence: Synthetic oligonucleotide
  Antisense strand to SEQ ID NO: 802948
guaagcauuggaguuaccc

SEQ ID NO: 802950 - RNA, 19 nt, Artificial Sequence
  Description of Artificial Sequence: Synthetic oligonucleotide
  Sense strand starting at position 658 of SEQ ID NO: 587582
uggacuugagaaugguacu

SEQ ID NO: 802951 - RNA, 19 nt, Artificial Sequence
  Description of Artificial Sequence: Synthetic oligonucleotide
  Antisense strand to SEQ ID NO: 802950
aguaccauucucaagucca

SEQ ID NO: 802952 - RNA, 19 nt, Artificial Sequence
  Description of Artificial Sequence: Synthetic oligonucleotide
  Sense strand starting at position 659 of SEQ ID NO: 587582
ggacuugagaaugguacuu

SEQ ID NO: 802953 - RNA, 19 nt, Artificial Sequence
  Description of Artificial Sequence: Synthetic oligonucleotide
  Antisense strand to SEQ ID NO: 802952
aaguaccauucucaagucc

SEQ ID NO: 802954 - RNA, 19 nt, Artificial Sequence
  Description of Artificial Sequence: Synthetic oligonucleotide
  Sense strand starting at position 693 of SEQ ID NO: 587582
cgguaaugaucucuaagau

SEQ ID NO: 802955 - RNA, 19 nt, Artificial Sequence
  Description of Artificial Sequence: Synthetic oligonucleotide
  Antisense strand to SEQ ID NO: 802954
aucuuagagaucauuaccg

SEQ ID NO: 802956 - RNA, 19 nt, Artificial Sequence
  Description of Artificial Sequence: Synthetic oligonucleotide
  Sense strand starting at position 708 of SEQ ID NO: 587582
agaugaugaugcucaugaa

SEQ ID NO: 802957 - RNA, 19 nt, Artificial Sequence
  Description of Artificial Sequence: Synthetic oligonucleotide
  Antisense strand to SEQ ID NO: 802956
uucaugagcaucaucaucu

SEQ ID NO: 802958 - RNA, 19 nt, Artificial Sequence
  Description of Artificial Sequence: Synthetic oligonucleotide
  Sense strand starting at position 760 of SEQ ID NO: 587582
ggucaauaguaucuaguaa

SEQ ID NO: 802959 - RNA, 19 nt, Artificial Sequence
  Description of Artificial Sequence: Synthetic oligonucleotide
  Antisense strand to SEQ ID NO: 802958
uuacuagauacuauugacc

SEQ ID NO: 802960 - RNA, 19 nt, Artificial Sequence
  Description of Artificial Sequence: Synthetic oligonucleotide
  Sense strand starting at position 855 of SEQ ID NO: 587582
agugaauauucugaauuuc

SEQ ID NO: 802961 - RNA, 19 nt, Artificial Sequence
  Description of Artificial Sequence: Synthetic oligonucleotide
  Antisense strand to SEQ ID NO: 802960
gaaauucagaauauucacu

SEQ ID NO: 802962 - RNA, 19 nt, Artificial Sequence
  Description of Artificial Sequence: Synthetic oligonucleotide
  Sense strand starting at position 898 of SEQ ID NO: 587582
uuaggcaaguugucccaaa

SEQ ID NO: 802963 - RNA, 19 nt, Artificial Sequence
  Description of Artificial Sequence: Synthetic oligonucleotide
  Antisense strand to SEQ ID NO: 802962
uuugggacaacuugccuaa

SEQ ID NO: 802964 - RNA, 19 nt, Artificial Sequence
  Description of Artificial Sequence: Synthetic oligonucleotide
  Sense strand starting at position 928 of SEQ ID NO: 587582
ggacguacccacuaaucua

SEQ ID NO: 802965 - RNA, 19 nt, Artificial Sequence
  Description of Artificial Sequence: Synthetic oligonucleotide
  Antisense strand to SEQ ID NO: 802964
uagauuaguggguacgucc

SEQ ID NO: 802966 - RNA, 19 nt, Artificial Sequence
  Description of Artificial Sequence: Synthetic oligonucleotide
  Sense strand starting at position 949 of SEQ ID NO: 587582
uuauguagcaguggaugaa

SEQ ID NO: 802967 - RNA, 19 nt, Artificial Sequence
  Description of Artificial Sequence: Synthetic oligonucleotide
  Antisense strand to SEQ ID NO: 802966
uucauccacugcuacauaa

SEQ ID NO: 802968 - RNA, 19 nt, Artificial Sequence
  Description of Artificial Sequence: Synthetic oligonucleotide
  Sense strand starting at position 1159 of SEQ ID NO: 587582
cucucuugugguugggaaa

SEQ ID NO: 802969 - RNA, 19 nt, Artificial Sequence
  Description of Artificial Sequence: Synthetic oligonucleotide
  Antisense strand to SEQ ID NO: 802968
uuucccaaccacaagagag

SEQ ID NO: 802970 - RNA, 19 nt, Artificial Sequence
  Description of Artificial Sequence: Synthetic oligonucleotide
  Sense strand starting at position 1751 of SEQ ID NO: 587582
gucagaagccuggaucaug

SEQ ID NO: 802971 - RNA, 19 nt, Artificial Sequence
  Description of Artificial Sequence: Synthetic oligonucleotide
  Antisense strand to SEQ ID NO: 802970
caugauccaggcuucugac

SEQ ID NO: 802972 - RNA, 19 nt, Artificial Sequence
  Description of Artificial Sequence: Synthetic oligonucleotide
  Sense strand starting at position 2079 of SEQ ID NO: 587582
ccgcaaagucgcguuuaca

SEQ ID NO: 802973 - RNA, 19 nt, Artificial Sequence
  Description of Artificial Sequence: Synthetic oligonucleotide
  Antisense strand to SEQ ID NO: 802972
uguaaacgcgacuuugcgg

SEQ ID NO: 802974 - RNA, 19 nt, Artificial Sequence
  Description of Artificial Sequence: Synthetic oligonucleotide
  Sense strand starting at position 2080 of SEQ ID NO: 587582
cgcaaagucgcguuuacau

SEQ ID NO: 802975 - RNA, 19 nt, Artificial Sequence
  Description of Artificial Sequence: Synthetic oligonucleotide
  Antisense strand to SEQ ID NO: 802974
auguaaacgcgacuuugcg

SEQ ID NO: 802976 - RNA, 19 nt, Artificial Sequence
  Description of Artificial Sequence: Synthetic oligonucleotide
  Sense strand starting at position 2207 of SEQ ID NO: 587582
cgaggaaacccgugauuga

SEQ ID NO: 802977 - RNA, 19 nt, Artificial Sequence
  Description of Artificial Sequence: Synthetic oligonucleotide
  Antisense strand to SEQ ID NO: 802976
ucaaucacggguuuccucg

SEQ ID NO: 802978 - RNA, 19 nt, Artificial Sequence
  Description of Artificial Sequence: Synthetic oligonucleotide
  Sense strand starting at position 2210 of SEQ ID NO: 587582
ggaaacccgugauugaaga

SEQ ID NO: 802979 - RNA, 19 nt, Artificial Sequence
  Description of Artificial Sequence: Synthetic oligonucleotide
  Antisense strand to SEQ ID NO: 802978
ucuucaaucacggguuucc

SEQ ID NO: 802980 - RNA, 19 nt, Artificial Sequence
  Description of Artificial Sequence: Synthetic oligonucleotide
  Sense strand starting at position 2256 of SEQ ID NO: 587582
agcuuaauaugucugauag

SEQ ID NO: 802981 - RNA, 19 nt, Artificial Sequence
  Description of Artificial Sequence: Synthetic oligonucleotide
  Antisense strand to SEQ ID NO: 802980
cuaucagacauauuaagcu

SEQ ID NO: 802982 - RNA, 19 nt, Artificial Sequence
  Description of Artificial Sequence: Synthetic oligonucleotide
  Sense strand starting at position 2293 of SEQ ID NO: 587582
cggagucaugaaugacauc

SEQ ID NO: 802983 - RNA, 19 nt, Artificial Sequence
  Description of Artificial Sequence: Synthetic oligonucleotide
  Antisense strand to SEQ ID NO: 802982
gaugucauucaugacuccg

SEQ ID NO: 802984 - RNA, 19 nt, Artificial Sequence
  Description of Artificial Sequence: Synthetic oligonucleotide
  Sense strand starting at position 2304 of SEQ ID NO: 587582
augacaucacuuugaugua

SEQ ID NO: 802985 - RNA, 19 nt, Artificial Sequence
  Description of Artificial Sequence: Synthetic oligonucleotide
  Antisense strand to SEQ ID NO: 802984
uacaucaaagugaugucau

SEQ ID NO: 802986 - RNA, 19 nt, Artificial Sequence
  Description of Artificial Sequence: Synthetic oligonucleotide
  Sense strand starting at position 2439 of SEQ ID NO: 587582
gcuggaauacugugaaauc

SEQ ID NO: 802987 - RNA, 19 nt, Artificial Sequence
  Description of Artificial Sequence: Synthetic oligonucleotide
  Antisense strand to SEQ ID NO: 802986
gauuucacaguauuccagc

SEQ ID NO: 802988 - RNA, 19 nt, Artificial Sequence
  Description of Artificial Sequence: Synthetic oligonucleotide
  Sense strand starting at position 2465 of SEQ ID NO: 587582
ggaaaucuguauucuacua

SEQ ID NO: 802989 - RNA, 19 nt, Artificial Sequence
  Description of Artificial Sequence: Synthetic oligonucleotide
  Antisense strand to SEQ ID NO: 802988
uaguagaauacagauuucc

SEQ ID NO: 802990 - RNA, 19 nt, Artificial Sequence
  Description of Artificial Sequence: Synthetic oligonucleotide
  Sense strand starting at position 2575 of SEQ ID NO: 587582
guagcugugaaaugacaga

SEQ ID NO: 802991 - RNA, 19 nt, Artificial Sequence
  Description of Artificial Sequence: Synthetic oligonucleotide
  Antisense strand to SEQ ID NO: 802990
ucugucauuucacagcuac

SEQ ID NO: 802992 - RNA, 19 nt, Artificial Sequence
  Description of Artificial Sequence: Synthetic oligonucleotide
  Sense strand starting at position 2703 of SEQ ID NO: 587582
uuuaucuggcuccagaaga

SEQ ID NO: 802993 - RNA, 19 nt, Artificial Sequence
  Description of Artificial Sequence: Synthetic oligonucleotide
  Antisense strand to SEQ ID NO: 802992
ucuucuggagccagauaaa

SEQ ID NO: 802994 - RNA, 19 nt, Artificial Sequence
  Description of Artificial Sequence: Synthetic oligonucleotide
  Sense strand starting at position 3058 of SEQ ID NO: 587582
gcucuacucgaccaccaua

SEQ ID NO: 802995 - RNA, 19 nt, Artificial Sequence
  Description of Artificial Sequence: Synthetic oligonucleotide
  Antisense strand to SEQ ID NO: 802994
uaugguggucgaguagagc

SEQ ID NO: 802996 - RNA, 19 nt, Artificial Sequence
  Description of Artificial Sequence: Synthetic oligonucleotide
  Sense strand starting at position 3088 of SEQ ID NO: 587582
cgcuuucucacggagaaua

SEQ ID NO: 802997 - RNA, 19 nt, Artificial Sequence
  Description of Artificial Sequence: Synthetic oligonucleotide
  Antisense strand to SEQ ID NO: 802996
uauucuccgugagaaagcg

SEQ ID NO: 802998 - RNA, 19 nt, Artificial Sequence
  Description of Artificial Sequence: Synthetic oligonucleotide
  Sense strand starting at position 3100 of SEQ ID NO: 587582
gagaauacgucuccugaca

SEQ ID NO: 802999 - RNA, 19 nt, Artificial Sequence
  Description of Artificial Sequence: Synthetic oligonucleotide
  Antisense strand to SEQ ID NO: 802998
ugucaggagacguauucuc

SEQ ID NO: 803000 - RNA, 19 nt, Artificial Sequence
  Description of Artificial Sequence: Synthetic oligonucleotide
  Sense strand starting at position 3167 of SEQ ID NO: 587582
auggaagauggcgguauua

SEQ ID NO: 803001 - RNA, 19 nt, Artificial Sequence
  Description of Artificial Sequence: Synthetic oligonucleotide
  Antisense strand to SEQ ID NO: 803000
uaauaccgccaucuuccau

SEQ ID NO: 803002 - RNA, 19 nt, Artificial Sequence
  Description of Artificial Sequence: Synthetic oligonucleotide
  Sense strand starting at position 3169 of SEQ ID NO: 587582
ggaagauggcgguauuaaa

SEQ ID NO: 803003 - RNA, 19 nt, Artificial Sequence
  Description of Artificial Sequence: Synthetic oligonucleotide
  Antisense strand to SEQ ID NO: 803002
uuuaauaccgccaucuucc

SEQ ID NO: 803004 - RNA, 19 nt, Artificial Sequence
  Description of Artificial Sequence: Synthetic oligonucleotide
  Sense strand starting at position 3179 of SEQ ID NO: 587582
gguauuaaacgucaguaaa

SEQ ID NO: 803005 - RNA, 19 nt, Artificial Sequence
  Description of Artificial Sequence: Synthetic oligonucleotide
  Antisense strand to SEQ ID NO: 803004
uuuacugacguuuaauacc

SEQ ID NO: 803006 - RNA, 19 nt, Artificial Sequence
  Description of Artificial Sequence: Synthetic oligonucleotide
  Sense strand starting at position 3350 of SEQ ID NO: 587582
ucuguuuaccaguauuaaa

SEQ ID NO: 803007 - RNA, 19 nt, Artificial Sequence
  Description of Artificial Sequence: Synthetic oligonucleotide
  Antisense strand to SEQ ID NO: 803006
uuuaauacugguaaacaga

SEQ ID NO: 803008 - RNA, 19 nt, Artificial Sequence
  Description of Artificial Sequence: Synthetic oligonucleotide
  Sense strand starting at position 3409 of SEQ ID NO: 587582
aauuccugguggucaaauu

SEQ ID NO: 803009 - RNA, 19 nt, Artificial Sequence
  Description of Artificial Sequence: Synthetic oligonucleotide
  Antisense strand to SEQ ID NO: 803008
aauuugaccaccaggaauu

SEQ ID NO: 803010 - RNA, 19 nt, Artificial Sequence
  Description of Artificial Sequence: Synthetic oligonucleotide
  Sense strand starting at position 3429 of SEQ ID NO: 587582
ugagcucuagaagguagau

SEQ ID NO: 803011 - RNA, 19 nt, Artificial Sequence
  Description of Artificial Sequence: Synthetic oligonucleotide
  Antisense strand to SEQ ID NO: 803010
aucuaccuucuagagcuca

SEQ ID NO: 803012 - RNA, 19 nt, Artificial Sequence
  Description of Artificial Sequence: Synthetic oligonucleotide
  Sense strand starting at position 3435 of SEQ ID NO: 587582
cuagaagguagauguaguu

SEQ ID NO: 803013 - RNA, 19 nt, Artificial Sequence
  Description of Artificial Sequence: Synthetic oligonucleotide
  Antisense strand to SEQ ID NO: 803012
aacuacaucuaccuucuag

SEQ ID NO: 803014 - RNA, 19 nt, Artificial Sequence
  Description of Artificial Sequence: Synthetic oligonucleotide
  Sense strand starting at position 3606 of SEQ ID NO: 587582
aggcacagugaauaucauu

SEQ ID NO: 803015 - RNA, 19 nt, Artificial Sequence
  Description of Artificial Sequence: Synthetic oligonucleotide
  Antisense strand to SEQ ID NO: 803014
aaugauauucacugugccu

SEQ ID NO: 803016 - RNA, 19 nt, Artificial Sequence
  Description of Artificial Sequence: Synthetic oligonucleotide
  Sense strand starting at position 3686 of SEQ ID NO: 587582
cuaccauggccauauguca

SEQ ID NO: 803017 - RNA, 19 nt, Artificial Sequence
  Description of Artificial Sequence: Synthetic oligonucleotide
  Antisense strand to SEQ ID NO: 803016
ugacauauggccaugguag

SEQ ID NO: 803018 - RNA, 19 nt, Artificial Sequence
  Description of Artificial Sequence: Synthetic oligonucleotide
  Sense strand starting at position 3694 of SEQ ID NO: 587582
gccauaugucagcaauccu

SEQ ID NO: 803019 - RNA, 19 nt, Artificial Sequence
  Description of Artificial Sequence: Synthetic oligonucleotide
  Antisense strand to SEQ ID NO: 803018
aggauugcugacauauggc

SEQ ID NO: 803020 - RNA, 19 nt, Artificial Sequence
  Description of Artificial Sequence: Synthetic oligonucleotide
  Sense strand starting at position 3783 of SEQ ID NO: 587582
aguuaugagacuuggcaau

SEQ ID NO: 803021 - RNA, 19 nt, Artificial Sequence
  Description of Artificial Sequence: Synthetic oligonucleotide
  Antisense strand to SEQ ID NO: 803020
auugccaagucucauaacu

SEQ ID NO: 803022 - RNA, 19 nt, Artificial Sequence
  Description of Artificial Sequence: Synthetic oligonucleotide
  Sense strand starting at position 3821 of SEQ ID NO: 587582
agagauuuaucauguaaga

SEQ ID NO: 803023 - RNA, 19 nt, Artificial Sequence
  Description of Artificial Sequence: Synthetic oligonucleotide
  Antisense strand to SEQ ID NO: 803022
ucuuacaugauaaaucucu

SEQ ID NO: 803024 - RNA, 19 nt, Artificial Sequence
  Description of Artificial Sequence: Synthetic oligonucleotide
  Sense strand starting at position 3832 of SEQ ID NO: 587582
auguaagauucuguaugua

SEQ ID NO: 803025 - RNA, 19 nt, Artificial Sequence
  Description of Artificial Sequence: Synthetic oligonucleotide
  Antisense strand to SEQ ID NO: 803024
uacauacagaaucuuacau

SEQ ID NO: 803026 - RNA, 19 nt, Artificial Sequence
  Description of Artificial Sequence: Synthetic oligonucleotide
  Sense strand starting at position 3971 of SEQ ID NO: 587582
ucgucuaaaccucagaaga

SEQ ID NO: 803027 - RNA, 19 nt, Artificial Sequence
  Description of Artificial Sequence: Synthetic oligonucleotide
  Antisense strand to SEQ ID NO: 803026
ucuucugagguuuagacga

SEQ ID NO: 803028 - RNA, 19 nt, Artificial Sequence
  Description of Artificial Sequence: Synthetic oligonucleotide
  Sense strand starting at position 334 of SEQ ID NO: 587583
gagugauaauccgucccaa

SEQ ID NO: 803029 - RNA, 19 nt, Artificial Sequence
  Description of Artificial Sequence: Synthetic oligonucleotide
  Antisense strand to SEQ ID NO: 803028
uugggacggauuaucacuc

SEQ ID NO: 803030 - RNA, 19 nt, Artificial Sequence
  Description of Artificial Sequence: Synthetic oligonucleotide
  Sense strand starting at position 1083 of SEQ ID NO: 587583
ggguaacuccaaugcuuac

SEQ ID NO: 803031 - RNA, 19 nt, Artificial Sequence
  Description of Artificial Sequence: Synthetic oligonucleotide
  Antisense strand to SEQ ID NO: 803030
guaagcauuggaguuaccc

SEQ ID NO: 803032 - RNA, 19 nt, Artificial Sequence
  Description of Artificial Sequence: Synthetic oligonucleotide
  Sense strand starting at position 1274 of SEQ ID NO: 587583
guagaacauuugcauaguu

SEQ ID NO: 803033 - RNA, 19 nt, Artificial Sequence
  Description of Artificial Sequence: Synthetic oligonucleotide
  Antisense strand to SEQ ID NO: 803032
aacuaugcaaauguucuac

SEQ ID NO: 803034 - RNA, 19 nt, Artificial Sequence
  Description of Artificial Sequence: Synthetic oligonucleotide
  Sense strand starting at position 1348 of SEQ ID NO: 587583
uggacuugagaaugguacu

SEQ ID NO: 803035 - RNA, 19 nt, Artificial Sequence
  Description of Artificial Sequence: Synthetic oligonucleotide
  Antisense strand to SEQ ID NO: 803034
aguaccauucucaagucca

SEQ ID NO: 803036 - RNA, 19 nt, Artificial Sequence
  Description of Artificial Sequence: Synthetic oligonucleotide
  Sense strand starting at position 1349 of SEQ ID NO: 587583
ggacuugagaaugguacuu

SEQ ID NO: 803037 - RNA, 19 nt, Artificial Sequence
  Description of Artificial Sequence: Synthetic oligonucleotide
  Antisense strand to SEQ ID NO: 803036
aaguaccauucucaagucc

SEQ ID NO: 803038 - RNA, 19 nt, Artificial Sequence
  Description of Artificial Sequence: Synthetic oligonucleotide
  Sense strand starting at position 1383 of SEQ ID NO: 587583
cgguaaugaucucuaagau

SEQ ID NO: 803039 - RNA, 19 nt, Artificial Sequence
  Description of Artificial Sequence: Synthetic oligonucleotide
  Antisense strand to SEQ ID NO: 803038
aucuuagagaucauuaccg

SEQ ID NO: 803040 - RNA, 19 nt, Artificial Sequence
  Description of Artificial Sequence: Synthetic oligonucleotide
  Sense strand starting at position 1398 of SEQ ID NO: 587583
agaugaugaugcucaugaa

SEQ ID NO: 803041 - RNA, 19 nt, Artificial Sequence
  Description of Artificial Sequence: Synthetic oligonucleotide
  Antisense strand to SEQ ID NO: 803040
uucaugagcaucaucaucu

SEQ ID NO: 803042 - RNA, 19 nt, Artificial Sequence
  Description of Artificial Sequence: Synthetic oligonucleotide
  Sense strand starting at position 1450 of SEQ ID NO: 587583
ggucaauaguaucuaguaa

SEQ ID NO: 803043 - RNA, 19 nt, Artificial Sequence
  Description of Artificial Sequence: Synthetic oligonucleotide
  Antisense strand to SEQ ID NO: 803042
uuacuagauacuauugacc

SEQ ID NO: 803044 - RNA, 19 nt, Artificial Sequence
  Description of Artificial Sequence: Synthetic oligonucleotide
  Sense strand starting at position 1545 of SEQ ID NO: 587583
agugaauauucugaauuuc

SEQ ID NO: 803045 - RNA, 19 nt, Artificial Sequence
  Description of Artificial Sequence: Synthetic oligonucleotide
  Antisense strand to SEQ ID NO: 803044
gaaauucagaauauucacu

SEQ ID NO: 803046 - RNA, 19 nt, Artificial Sequence
  Description of Artificial Sequence: Synthetic oligonucleotide
  Sense strand starting at position 1588 of SEQ ID NO: 587583
uuaggcaaguugucccaaa

SEQ ID NO: 803047 - RNA, 19 nt, Artificial Sequence
  Description of Artificial Sequence: Synthetic oligonucleotide
  Antisense strand to SEQ ID NO: 803046
uuugggacaacuugccuaa

SEQ ID NO: 803048 - RNA, 19 nt, Artificial Sequence
  Description of Artificial Sequence: Synthetic oligonucleotide
  Sense strand starting at position 1618 of SEQ ID NO: 587583
ggacguacccacuaaucua

SEQ ID NO: 803049 - RNA, 19 nt, Artificial Sequence
  Description of Artificial Sequence: Synthetic oligonucleotide
  Antisense strand to SEQ ID NO: 803048
uagauuaguggguacgucc

SEQ ID NO: 803050 - RNA, 19 nt, Artificial Sequence
  Description of Artificial Sequence: Synthetic oligonucleotide
  Sense strand starting at position 1635 of SEQ ID NO: 587583
uaauuuauguagcagugga

SEQ ID NO: 803051 - RNA, 19 nt, Artificial Sequence
  Description of Artificial Sequence: Synthetic oligonucleotide
  Antisense strand to SEQ ID NO: 803050
uccacugcuacauaaauua

SEQ ID NO: 803052 - RNA, 19 nt, Artificial Sequence
  Description of Artificial Sequence: Synthetic oligonucleotide
  Sense strand starting at position 1639 of SEQ ID NO: 587583
uuauguagcaguggaugaa

SEQ ID NO: 803053 - RNA, 19 nt, Artificial Sequence
  Description of Artificial Sequence: Synthetic oligonucleotide
  Antisense strand to SEQ ID NO: 803052
uucauccacugcuacauaa

SEQ ID NO: 803054 - RNA, 19 nt, Artificial Sequence
  Description of Artificial Sequence: Synthetic oligonucleotide
  Sense strand starting at position 1848 of SEQ ID NO: 587583
gcucucuugugguugggaa

SEQ ID NO: 803055 - RNA, 19 nt, Artificial Sequence
  Description of Artificial Sequence: Synthetic oligonucleotide
  Antisense strand to SEQ ID NO: 803054
uucccaaccacaagagagc

SEQ ID NO: 803056 - RNA, 19 nt, Artificial Sequence
  Description of Artificial Sequence: Synthetic oligonucleotide
  Sense strand starting at position 1849 of SEQ ID NO: 587583
cucucuugugguugggaaa

SEQ ID NO: 803057 - RNA, 19 nt, Artificial Sequence
  Description of Artificial Sequence: Synthetic oligonucleotide
  Antisense strand to SEQ ID NO: 803056
uuucccaaccacaagagag

SEQ ID NO: 803058 - RNA, 19 nt, Artificial Sequence
  Description of Artificial Sequence: Synthetic oligonucleotide
  Sense strand starting at position 2441 of SEQ ID NO: 587583
gucagaagccuggaucaug

SEQ ID NO: 803059 - RNA, 19 nt, Artificial Sequence
  Description of Artificial Sequence: Synthetic oligonucleotide
  Antisense strand to SEQ ID NO: 803058
caugauccaggcuucugac

SEQ ID NO: 803060 - RNA, 19 nt, Artificial Sequence
  Description of Artificial Sequence: Synthetic oligonucleotide
  Sense strand starting at position 2769 of SEQ ID NO: 587583
ccgcaaagucgcguuuaca

SEQ ID NO: 803061 - RNA, 19 nt, Artificial Sequence
  Description of Artificial Sequence: Synthetic oligonucleotide
  Antisense strand to SEQ ID NO: 803060
uguaaacgcgacuuugcgg

SEQ ID NO: 803062 - RNA, 19 nt, Artificial Sequence
  Description of Artificial Sequence: Synthetic oligonucleotide
  Sense strand starting at position 2770 of SEQ ID NO: 587583
cgcaaagucgcguuuacau

SEQ ID NO: 803063 - RNA, 19 nt, Artificial Sequence
  Description of Artificial Sequence: Synthetic oligonucleotide
  Antisense strand to SEQ ID NO: 803062
auguaaacgcgacuuugcg

SEQ ID NO: 803064 - RNA, 19 nt, Artificial Sequence
  Description of Artificial Sequence: Synthetic oligonucleotide
  Sense strand starting at position 2781 of SEQ ID NO: 587583
guuuacaucgccgaaguga

SEQ ID NO: 803065 - RNA, 19 nt, Artificial Sequence
  Description of Artificial Sequence: Synthetic oligonucleotide
  Antisense strand to SEQ ID NO: 803064
ucacuucggcgauguaaac

SEQ ID NO: 803066 - RNA, 19 nt, Artificial Sequence
  Description of Artificial Sequence: Synthetic oligonucleotide
  Sense strand starting at position 2897 of SEQ ID NO: 587583
cgaggaaacccgugauuga

SEQ ID NO: 803067 - RNA, 19 nt, Artificial Sequence
  Description of Artificial Sequence: Synthetic oligonucleotide
  Antisense strand to SEQ ID NO: 803066
ucaaucacggguuuccucg

SEQ ID NO: 803068 - RNA, 19 nt, Artificial Sequence
  Description of Artificial Sequence: Synthetic oligonucleotide
  Sense strand starting at position 2900 of SEQ ID NO: 587583
ggaaacccgugauugaaga

SEQ ID NO: 803069 - RNA, 19 nt, Artificial Sequence
  Description of Artificial Sequence: Synthetic oligonucleotide
  Antisense strand to SEQ ID NO: 803068
ucuucaaucacggguuucc

SEQ ID NO: 803070 - RNA, 19 nt, Artificial Sequence
  Description of Artificial Sequence: Synthetic oligonucleotide
  Sense strand starting at position 2946 of SEQ ID NO: 587583
agcuuaauaugucugauag

SEQ ID NO: 803071 - RNA, 19 nt, Artificial Sequence
  Description of Artificial Sequence: Synthetic oligonucleotide
  Antisense strand to SEQ ID NO: 803070
cuaucagacauauuaagcu

SEQ ID NO: 803072 - RNA, 19 nt, Artificial Sequence
  Description of Artificial Sequence: Synthetic oligonucleotide
  Sense strand starting at position 2947 of SEQ ID NO: 587583
gcuuaauaugucugauagu

SEQ ID NO: 803073 - RNA, 19 nt, Artificial Sequence
  Description of Artificial Sequence: Synthetic oligonucleotide
  Antisense strand to SEQ ID NO: 803072
acuaucagacauauuaagc

SEQ ID NO: 803074 - RNA, 19 nt, Artificial Sequence
  Description of Artificial Sequence: Synthetic oligonucleotide
  Sense strand starting at position 2957 of SEQ ID NO: 587583
ucugauagucgccauggua

SEQ ID NO: 803075 - RNA, 19 nt, Artificial Sequence
  Description of Artificial Sequence: Synthetic oligonucleotide
  Antisense strand to SEQ ID NO: 803074
uaccauggcgacuaucaga

SEQ ID NO: 803076 - RNA, 19 nt, Artificial Sequence
  Description of Artificial Sequence: Synthetic oligonucleotide
  Sense strand starting at position 2983 of SEQ ID NO: 587583
cggagucaugaaugacauc

SEQ ID NO: 803077 - RNA, 19 nt, Artificial Sequence
  Description of Artificial Sequence: Synthetic oligonucleotide
  Antisense strand to SEQ ID NO: 803076
gaugucauucaugacuccg

SEQ ID NO: 803078 - RNA, 19 nt, Artificial Sequence
  Description of Artificial Sequence: Synthetic oligonucleotide
  Sense strand starting at position 2994 of SEQ ID NO: 587583
augacaucacuuugaugua

SEQ ID NO: 803079 - RNA, 19 nt, Artificial Sequence
  Description of Artificial Sequence: Synthetic oligonucleotide
  Antisense strand to SEQ ID NO: 803078
uacaucaaagugaugucau

SEQ ID NO: 803080 - RNA, 19 nt, Artificial Sequence
  Description of Artificial Sequence: Synthetic oligonucleotide
  Sense strand starting at position 3007 of SEQ ID NO: 587583
gauguauucucccucggac

SEQ ID NO: 803081 - RNA, 19 nt, Artificial Sequence
  Description of Artificial Sequence: Synthetic oligonucleotide
  Antisense strand to SEQ ID NO: 803080
guccgagggagaauacauc

SEQ ID NO: 803082 - RNA, 19 nt, Artificial Sequence
  Description of Artificial Sequence: Synthetic oligonucleotide
  Sense strand starting at position 3129 of SEQ ID NO: 587583
gcuggaauacugugaaauc

SEQ ID NO: 803083 - RNA, 19 nt, Artificial Sequence
  Description of Artificial Sequence: Synthetic oligonucleotide
  Antisense strand to SEQ ID NO: 803082
gauuucacaguauuccagc

SEQ ID NO: 803084 - RNA, 19 nt, Artificial Sequence
  Description of Artificial Sequence: Synthetic oligonucleotide
  Sense strand starting at position 3155 of SEQ ID NO: 587583
ggaaaucuguauucuacua

SEQ ID NO: 803085 - RNA, 19 nt, Artificial Sequence
  Description of Artificial Sequence: Synthetic oligonucleotide
  Antisense strand to SEQ ID NO: 803084
uaguagaauacagauuucc

SEQ ID NO: 803086 - RNA, 19 nt, Artificial Sequence
  Description of Artificial Sequence: Synthetic oligonucleotide
  Sense strand starting at position 3257 of SEQ ID NO: 587583
auguuauaguagcugugaa

SEQ ID NO: 803087 - RNA, 19 nt, Artificial Sequence
  Description of Artificial Sequence: Synthetic oligonucleotide
  Antisense strand to SEQ ID NO: 803086
uucacagcuacuauaacau

SEQ ID NO: 803088 - RNA, 19 nt, Artificial Sequence
  Description of Artificial Sequence: Synthetic oligonucleotide
  Sense strand starting at position 3258 of SEQ ID NO: 587583
uguuauaguagcugugaaa

SEQ ID NO: 803089 - RNA, 19 nt, Artificial Sequence
  Description of Artificial Sequence: Synthetic oligonucleotide
  Antisense strand to SEQ ID NO: 803088
uuucacagcuacuauaaca

SEQ ID NO: 803090 - RNA, 19 nt, Artificial Sequence
  Description of Artificial Sequence: Synthetic oligonucleotide
  Sense strand starting at position 3265 of SEQ ID NO: 587583
guagcugugaaaugacaga

SEQ ID NO: 803091 - RNA, 19 nt, Artificial Sequence
  Description of Artificial Sequence: Synthetic oligonucleotide
  Antisense strand to SEQ ID NO: 803090
ucugucauuucacagcuac

SEQ ID NO: 803092 - RNA, 19 nt, Artificial Sequence
  Description of Artificial Sequence: Synthetic oligonucleotide
  Sense strand starting at position 3393 of SEQ ID NO: 587583
uuuaucuggcuccagaaga

SEQ ID NO: 803093 - RNA, 19 nt, Artificial Sequence
  Description of Artificial Sequence: Synthetic oligonucleotide
  Antisense strand to SEQ ID NO: 803092
ucuucuggagccagauaaa

SEQ ID NO: 803094 - RNA, 19 nt, Artificial Sequence
  Description of Artificial Sequence: Synthetic oligonucleotide
  Sense strand starting at position 3748 of SEQ ID NO: 587583
gcucuacucgaccaccaua

SEQ ID NO: 803095 - RNA, 19 nt, Artificial Sequence
  Description of Artificial Sequence: Synthetic oligonucleotide
  Antisense strand to SEQ ID NO: 803094
uaugguggucgaguagagc

SEQ ID NO: 803096 - RNA, 19 nt, Artificial Sequence
  Description of Artificial Sequence: Synthetic oligonucleotide
  Sense strand starting at position 3777 of SEQ ID NO: 587583
ucgcuuucucacggagaau

SEQ ID NO: 803097 - RNA, 19 nt, Artificial Sequence
  Description of Artificial Sequence: Synthetic oligonucleotide
  Antisense strand to SEQ ID NO: 803096
auucuccgugagaaagcga

SEQ ID NO: 803098 - RNA, 19 nt, Artificial Sequence
  Description of Artificial Sequence: Synthetic oligonucleotide
  Sense strand starting at position 3778 of SEQ ID NO: 587583
cgcuuucucacggagaaua

SEQ ID NO: 803099 - RNA, 19 nt, Artificial Sequence
  Description of Artificial Sequence: Synthetic oligonucleotide
  Antisense strand to SEQ ID NO: 803098
uauucuccgugagaaagcg

SEQ ID NO: 803100 - RNA, 19 nt, Artificial Sequence
  Description of Artificial Sequence: Synthetic oligonucleotide
  Sense strand starting at position 3790 of SEQ ID NO: 587583
gagaauacgucuccugaca

SEQ ID NO: 803101 - RNA, 19 nt, Artificial Sequence
  Description of Artificial Sequence: Synthetic oligonucleotide
  Antisense strand to SEQ ID NO: 803100
ugucaggagacguauucuc

SEQ ID NO: 803102 - RNA, 19 nt, Artificial Sequence
  Description of Artificial Sequence: Synthetic oligonucleotide
  Sense strand starting at position 3857 of SEQ ID NO: 587583
auggaagauggcgguauua

SEQ ID NO: 803103 - RNA, 19 nt, Artificial Sequence
  Description of Artificial Sequence: Synthetic oligonucleotide
  Antisense strand to SEQ ID NO: 803102
uaauaccgccaucuuccau

SEQ ID NO: 803104 - RNA, 19 nt, Artificial Sequence
  Description of Artificial Sequence: Synthetic oligonucleotide
  Sense strand starting at position 3859 of SEQ ID NO: 587583
ggaagauggcgguauuaaa

SEQ ID NO: 803105 - RNA, 19 nt, Artificial Sequence
  Description of Artificial Sequence: Synthetic oligonucleotide
  Antisense strand to SEQ ID NO: 803104
uuuaauaccgccaucuucc

SEQ ID NO: 803106 - RNA, 19 nt, Artificial Sequence
  Description of Artificial Sequence: Synthetic oligonucleotide
  Sense strand starting at position 3869 of SEQ ID NO: 587583
gguauuaaacgucaguaaa

SEQ ID NO: 803107 - RNA, 19 nt, Artificial Sequence
  Description of Artificial Sequence: Synthetic oligonucleotide
  Antisense strand to SEQ ID NO: 803106
uuuacugacguuuaauacc

SEQ ID NO: 803108 - RNA, 19 nt, Artificial Sequence
  Description of Artificial Sequence: Synthetic oligonucleotide
  Sense strand starting at position 146 of SEQ ID NO: 587584
ucuuguaggguuggagaca

SEQ ID NO: 803109 - RNA, 19 nt, Artificial Sequence
  Description of Artificial Sequence: Synthetic oligonucleotide
  Antisense strand to SEQ ID NO: 803108
ugucuccaacccuacaaga

SEQ ID NO: 803110 - RNA, 19 nt, Artificial Sequence
  Description of Artificial Sequence: Synthetic oligonucleotide
  Sense strand starting at position 208 of SEQ ID NO: 587584
cucugauuccugggaucac

SEQ ID NO: 803111 - RNA, 19 nt, Artificial Sequence
  Description of Artificial Sequence: Synthetic oligonucleotide
  Antisense strand to SEQ ID NO: 803110
gugaucccaggaaucagag

SEQ ID NO: 803112 - RNA, 19 nt, Artificial Sequence
  Description of Artificial Sequence: Synthetic oligonucleotide
  Sense strand starting at position 409 of SEQ ID NO: 587584
uuggguacauccuaucaga

SEQ ID NO: 803113 - RNA, 19 nt, Artificial Sequence
  Description of Artificial Sequence: Synthetic oligonucleotide
  Antisense strand to SEQ ID NO: 803112
ucugauaggauguacccaa

SEQ ID NO: 803114 - RNA, 19 nt, Artificial Sequence
  Description of Artificial Sequence: Synthetic oligonucleotide
  Sense strand starting at position 412 of SEQ ID NO: 587584
gguacauccuaucagaaca

SEQ ID NO: 803115 - RNA, 19 nt, Artificial Sequence
  Description of Artificial Sequence: Synthetic oligonucleotide
  Antisense strand to SEQ ID NO: 803114
uguucugauaggauguacc

SEQ ID NO: 803116 - RNA, 19 nt, Artificial Sequence
  Description of Artificial Sequence: Synthetic oligonucleotide
  Sense strand starting at position 445 of SEQ ID NO: 587584
cugcaucuucgucugcaga

SEQ ID NO: 803117 - RNA, 19 nt, Artificial Sequence
  Description of Artificial Sequence: Synthetic oligonucleotide
  Antisense strand to SEQ ID NO: 803116
ucugcagacgaagaugcag

SEQ ID NO: 803118 - RNA, 19 nt, Artificial Sequence
  Description of Artificial Sequence: Synthetic oligonucleotide
  Sense strand starting at position 721 of SEQ ID NO: 587584
acucacuugcccuggaaau

SEQ ID NO: 803119 - RNA, 19 nt, Artificial Sequence
  Description of Artificial Sequence: Synthetic oligonucleotide
  Antisense strand to SEQ ID NO: 803118
auuuccagggcaagugagu

SEQ ID NO: 803120 - RNA, 19 nt, Artificial Sequence
  Description of Artificial Sequence: Synthetic oligonucleotide
  Sense strand starting at position 722 of SEQ ID NO: 587584
cucacuugcccuggaaaug

SEQ ID NO: 803121 - RNA, 19 nt, Artificial Sequence
  Description of Artificial Sequence: Synthetic oligonucleotide
  Antisense strand to SEQ ID NO: 803120
cauuuccagggcaagugag

SEQ ID NO: 803122 - RNA, 19 nt, Artificial Sequence
  Description of Artificial Sequence: Synthetic oligonucleotide
  Sense strand starting at position 901 of SEQ ID NO: 587584
cguugucaucaucauccaa

SEQ ID NO: 803123 - RNA, 19 nt, Artificial Sequence
  Description of Artificial Sequence: Synthetic oligonucleotide
  Antisense strand to SEQ ID NO: 803122
uuggaugaugaugacaacg

SEQ ID NO: 803124 - RNA, 19 nt, Artificial Sequence
  Description of Artificial Sequence: Synthetic oligonucleotide
  Sense strand starting at position 1125 of SEQ ID NO: 587584
gggcauagcucauucucau

SEQ ID NO: 803125 - RNA, 19 nt, Artificial Sequence
  Description of Artificial Sequence: Synthetic oligonucleotide
  Antisense strand to SEQ ID NO: 803124
augagaaugagcuaugccc

SEQ ID NO: 803126 - RNA, 19 nt, Artificial Sequence
  Description of Artificial Sequence: Synthetic oligonucleotide
  Sense strand starting at position 1193 of SEQ ID NO: 587584
ggcccacaugcucguguaa

SEQ ID NO: 803127 - RNA, 19 nt, Artificial Sequence
  Description of Artificial Sequence: Synthetic oligonucleotide
  Antisense strand to SEQ ID NO: 803126
uuacacgagcaugugggcc

SEQ ID NO: 803128 - RNA, 19 nt, Artificial Sequence
  Description of Artificial Sequence: Synthetic oligonucleotide
  Sense strand starting at position 1196 of SEQ ID NO: 587584
ccacaugcucguguaagca

SEQ ID NO: 803129 - RNA, 19 nt, Artificial Sequence
  Description of Artificial Sequence: Synthetic oligonucleotide
  Antisense strand to SEQ ID NO: 803128
ugcuuacacgagcaugugg

SEQ ID NO: 803130 - RNA, 19 nt, Artificial Sequence
  Description of Artificial Sequence: Synthetic oligonucleotide
  Sense strand starting at position 1259 of SEQ ID NO: 587584
gcucguggugaugaugauu

SEQ ID NO: 803131 - RNA, 19 nt, Artificial Sequence
  Description of Artificial Sequence: Synthetic oligonucleotide
  Antisense strand to SEQ ID NO: 803130
aaucaucaucaccacgagc

SEQ ID NO: 803132 - RNA, 19 nt, Artificial Sequence
  Description of Artificial Sequence: Synthetic oligonucleotide
  Sense strand starting at position 1262 of SEQ ID NO: 587584
cguggugaugaugauucau

SEQ ID NO: 803133 - RNA, 19 nt, Artificial Sequence
  Description of Artificial Sequence: Synthetic oligonucleotide
  Antisense strand to SEQ ID NO: 803132
augaaucaucaucaccacg

SEQ ID NO: 803134 - RNA, 19 nt, Artificial Sequence
  Description of Artificial Sequence: Synthetic oligonucleotide
  Sense strand starting at position 2217 of SEQ ID NO: 587584
uagggaucccugugcuucu

SEQ ID NO: 803135 - RNA, 19 nt, Artificial Sequence
  Description of Artificial Sequence: Synthetic oligonucleotide
  Antisense strand to SEQ ID NO: 803134
agaagcacagggaucccua

SEQ ID NO: 803136 - RNA, 19 nt, Artificial Sequence
  Description of Artificial Sequence: Synthetic oligonucleotide
  Sense strand starting at position 2287 of SEQ ID NO: 587584
gggcaugucgugagugaca

SEQ ID NO: 803137 - RNA, 19 nt, Artificial Sequence
  Description of Artificial Sequence: Synthetic oligonucleotide
  Antisense strand to SEQ ID NO: 803136
ugucacucacgacaugccc

SEQ ID NO: 803138 - RNA, 19 nt, Artificial Sequence
  Description of Artificial Sequence: Synthetic oligonucleotide
  Sense strand starting at position 2289 of SEQ ID NO: 587584
gcaugucgugagugacaga

SEQ ID NO: 803139 - RNA, 19 nt, Artificial Sequence
  Description of Artificial Sequence: Synthetic oligonucleotide
  Antisense strand to SEQ ID NO: 803138
ucugucacucacgacaugc

SEQ ID NO: 803140 - RNA, 19 nt, Artificial Sequence
  Description of Artificial Sequence: Synthetic oligonucleotide
  Sense strand starting at position 2296 of SEQ ID NO: 587584
gugagugacagacgcauau

SEQ ID NO: 803141 - RNA, 19 nt, Artificial Sequence
  Description of Artificial Sequence: Synthetic oligonucleotide
  Antisense strand to SEQ ID NO: 803140
auaugcgucugucacucac

SEQ ID NO: 803142 - RNA, 19 nt, Artificial Sequence
  Description of Artificial Sequence: Synthetic oligonucleotide
  Sense strand starting at position 2300 of SEQ ID NO: 587584
gugacagacgcauaucuaa

SEQ ID NO: 803143 - RNA, 19 nt, Artificial Sequence
  Description of Artificial Sequence: Synthetic oligonucleotide
  Antisense strand to SEQ ID NO: 803142
uuagauaugcgucugucac

SEQ ID NO: 803144 - RNA, 19 nt, Artificial Sequence
  Description of Artificial Sequence: Synthetic oligonucleotide
  Sense strand starting at position 2307 of SEQ ID NO: 587584
acgcauaucuaaguuagca

SEQ ID NO: 803145 - RNA, 19 nt, Artificial Sequence
  Description of Artificial Sequence: Synthetic oligonucleotide
  Antisense strand to SEQ ID NO: 803144
ugcuaacuuagauaugcgu

SEQ ID NO: 803146 - RNA, 19 nt, Artificial Sequence
  Description of Artificial Sequence: Synthetic oligonucleotide
  Sense strand starting at position 2319 of SEQ ID NO: 587584
guuagcaugcaagauuaga

SEQ ID NO: 803147 - RNA, 19 nt, Artificial Sequence
  Description of Artificial Sequence: Synthetic oligonucleotide
  Antisense strand to SEQ ID NO: 803146
ucuaaucuugcaugcuaac

SEQ ID NO: 803148 - RNA, 19 nt, Artificial Sequence
  Description of Artificial Sequence: Synthetic oligonucleotide
  Sense strand starting at position 2360 of SEQ ID NO: 587584
gucugaagugcgcuucuaa

SEQ ID NO: 803149 - RNA, 19 nt, Artificial Sequence
  Description of Artificial Sequence: Synthetic oligonucleotide
  Antisense strand to SEQ ID NO: 803148
uuagaagcgcacuucagac

SEQ ID NO: 803150 - RNA, 19 nt, Artificial Sequence
  Description of Artificial Sequence: Synthetic oligonucleotide
  Sense strand starting at position 2426 of SEQ ID NO: 587584
gugucagcaugagcugaaa

SEQ ID NO: 803151 - RNA, 19 nt, Artificial Sequence
  Description of Artificial Sequence: Synthetic oligonucleotide
  Antisense strand to SEQ ID NO: 803150
uuucagcucaugcugacac

SEQ ID NO: 803152 - RNA, 19 nt, Artificial Sequence
  Description of Artificial Sequence: Synthetic oligonucleotide
  Sense strand starting at position 2516 of SEQ ID NO: 587584
gccuguuaaagcugggaag

SEQ ID NO: 803153 - RNA, 19 nt, Artificial Sequence
  Description of Artificial Sequence: Synthetic oligonucleotide
  Antisense strand to SEQ ID NO: 803152
cuucccagcuuuaacaggc

SEQ ID NO: 803154 - RNA, 19 nt, Artificial Sequence
  Description of Artificial Sequence: Synthetic oligonucleotide
  Sense strand starting at position 2528 of SEQ ID NO: 587584
ugggaagcgcuuuggauau

SEQ ID NO: 803155 - RNA, 19 nt, Artificial Sequence
  Description of Artificial Sequence: Synthetic oligonucleotide
  Antisense strand to SEQ ID NO: 803154
auauccaaagcgcuuccca

SEQ ID NO: 803156 - RNA, 19 nt, Artificial Sequence
  Description of Artificial Sequence: Synthetic oligonucleotide
  Sense strand starting at position 2530 of SEQ ID NO: 587584
ggaagcgcuuuggauauuu

SEQ ID NO: 803157 - RNA, 19 nt, Artificial Sequence
  Description of Artificial Sequence: Synthetic oligonucleotide
  Antisense strand to SEQ ID NO: 803156
aaauauccaaagcgcuucc

SEQ ID NO: 803158 - RNA, 19 nt, Artificial Sequence
  Description of Artificial Sequence: Synthetic oligonucleotide
  Sense strand starting at position 2552 of SEQ ID NO: 587584
aguccagcccuuugucuaa

SEQ ID NO: 803159 - RNA, 19 nt, Artificial Sequence
  Description of Artificial Sequence: Synthetic oligonucleotide
  Antisense strand to SEQ ID NO: 803158
uuagacaaagggcuggacu

SEQ ID NO: 803160 - RNA, 19 nt, Artificial Sequence
  Description of Artificial Sequence: Synthetic oligonucleotide
  Sense strand starting at position 2637 of SEQ ID NO: 587584
cucucaaucguuugaggca

SEQ ID NO: 803161 - RNA, 19 nt, Artificial Sequence
  Description of Artificial Sequence: Synthetic oligonucleotide
  Antisense strand to SEQ ID NO: 803160
ugccucaaacgauugagag

SEQ ID NO: 803162 - RNA, 19 nt, Artificial Sequence
  Description of Artificial Sequence: Synthetic oligonucleotide
  Sense strand starting at position 2644 of SEQ ID NO: 587584
ucguuugaggcaggugaua

SEQ ID NO: 803163 - RNA, 19 nt, Artificial Sequence
  Description of Artificial Sequence: Synthetic oligonucleotide
  Antisense strand to SEQ ID NO: 803162
uaucaccugccucaaacga

SEQ ID NO: 803164 - RNA, 19 nt, Artificial Sequence
  Description of Artificial Sequence: Synthetic oligonucleotide
  Sense strand starting at position 2646 of SEQ ID NO: 587584
guuugaggcaggugauagu

SEQ ID NO: 803165 - RNA, 19 nt, Artificial Sequence
  Description of Artificial Sequence: Synthetic oligonucleotide
  Antisense strand to SEQ ID NO: 803164
acuaucaccugccucaaac

SEQ ID NO: 803166 - RNA, 19 nt, Artificial Sequence
  Description of Artificial Sequence: Synthetic oligonucleotide
  Sense strand starting at position 2655 of SEQ ID NO: 587584
aggugauaguaauucccuu

SEQ ID NO: 803167 - RNA, 19 nt, Artificial Sequence
  Description of Artificial Sequence: Synthetic oligonucleotide
  Antisense strand to SEQ ID NO: 803166
aagggaauuacuaucaccu

SEQ ID NO: 803168 - RNA, 19 nt, Artificial Sequence
  Description of Artificial Sequence: Synthetic oligonucleotide
  Sense strand starting at position 2829 of SEQ ID NO: 587584
ucaggaagucucugaggua

SEQ ID NO: 803169 - RNA, 19 nt, Artificial Sequence
  Description of Artificial Sequence: Synthetic oligonucleotide
  Antisense strand to SEQ ID NO: 803168
uaccucagagacuuccuga

SEQ ID NO: 803170 - RNA, 19 nt, Artificial Sequence
  Description of Artificial Sequence: Synthetic oligonucleotide
  Sense strand starting at position 2830 of SEQ ID NO: 587584
caggaagucucugagguaa

SEQ ID NO: 803171 - RNA, 19 nt, Artificial Sequence
  Description of Artificial Sequence: Synthetic oligonucleotide
  Antisense strand to SEQ ID NO: 803170
uuaccucagagacuuccug

SEQ ID NO: 803172 - RNA, 19 nt, Artificial Sequence
  Description of Artificial Sequence: Synthetic oligonucleotide
  Sense strand starting at position 3031 of SEQ ID NO: 587584
cuauauuggguuuauuacu

SEQ ID NO: 803173 - RNA, 19 nt, Artificial Sequence
  Description of Artificial Sequence: Synthetic oligonucleotide
  Antisense strand to SEQ ID NO: 803172
aguaauaaacccaauauag

SEQ ID NO: 803174 - RNA, 19 nt, Artificial Sequence
  Description of Artificial Sequence: Synthetic oligonucleotide
  Sense strand starting at position 3036 of SEQ ID NO: 587584
uuggguuuauuacugauau

SEQ ID NO: 803175 - RNA, 19 nt, Artificial Sequence
  Description of Artificial Sequence: Synthetic oligonucleotide
  Antisense strand to SEQ ID NO: 803174
auaucaguaauaaacccaa

SEQ ID NO: 803176 - RNA, 19 nt, Artificial Sequence
  Description of Artificial Sequence: Synthetic oligonucleotide
  Sense strand starting at position 3228 of SEQ ID NO: 587584
ggaugacuguccuaagagc

SEQ ID NO: 803177 - RNA, 19 nt, Artificial Sequence
  Description of Artificial Sequence: Synthetic oligonucleotide
  Antisense strand to SEQ ID NO: 803176
gcucuuaggacagucaucc

SEQ ID NO: 803178 - RNA, 19 nt, Artificial Sequence
  Description of Artificial Sequence: Synthetic oligonucleotide
  Sense strand starting at position 3386 of SEQ ID NO: 587584
gauucucuggucugagcuu

SEQ ID NO: 803179 - RNA, 19 nt, Artificial Sequence
  Description of Artificial Sequence: Synthetic oligonucleotide
  Antisense strand to SEQ ID NO: 803178
aagcucagaccagagaauc

SEQ ID NO: 803180 - RNA, 19 nt, Artificial Sequence
  Description of Artificial Sequence: Synthetic oligonucleotide
  Sense strand starting at position 3739 of SEQ ID NO: 587584
cuguguucuuagcuaguga

SEQ ID NO: 803181 - RNA, 19 nt, Artificial Sequence
  Description of Artificial Sequence: Synthetic oligonucleotide
  Antisense strand to SEQ ID NO: 803180
ucacuagcuaagaacacag

SEQ ID NO: 803182 - RNA, 19 nt, Artificial Sequence
  Description of Artificial Sequence: Synthetic oligonucleotide
  Sense strand starting at position 3780 of SEQ ID NO: 587584
agaugaugcuaaugaggau

SEQ ID NO: 803183 - RNA, 19 nt, Artificial Sequence
  Description of Artificial Sequence: Synthetic oligonucleotide
  Antisense strand to SEQ ID NO: 803182
auccucauuagcaucaucu

SEQ ID NO: 803184 - RNA, 19 nt, Artificial Sequence
  Description of Artificial Sequence: Synthetic oligonucleotide
  Sense strand starting at position 3821 of SEQ ID NO: 587584
gcuauuagguccucauaau

SEQ ID NO: 803185 - RNA, 19 nt, Artificial Sequence
  Description of Artificial Sequence: Synthetic oligonucleotide
  Antisense strand to SEQ ID NO: 803184
auuaugaggaccuaauagc

SEQ ID NO: 803186 - RNA, 19 nt, Artificial Sequence
  Description of Artificial Sequence: Synthetic oligonucleotide
  Sense strand starting at position 3867 of SEQ ID NO: 587584
ugacccaucucacagauga

SEQ ID NO: 803187 - RNA, 19 nt, Artificial Sequence
  Description of Artificial Sequence: Synthetic oligonucleotide
  Antisense strand to SEQ ID NO: 803186
ucaucugugagauggguca

SEQ ID NO: 803188 - RNA, 19 nt, Artificial Sequence
  Description of Artificial Sequence: Synthetic oligonucleotide
  Sense strand starting at position 2172 of SEQ ID NO: 587585
uuaaccuaauuguaggaaa

SEQ ID NO: 803189 - RNA, 19 nt, Artificial Sequence
  Description of Artificial Sequence: Synthetic oligonucleotide
  Antisense strand to SEQ ID NO: 803188
uuuccuacaauuagguuaa

SEQ ID NO: 803190 - RNA, 19 nt, Artificial Sequence
  Description of Artificial Sequence: Synthetic oligonucleotide
  Sense strand starting at position 2175 of SEQ ID NO: 587585
accuaauuguaggaaacca

SEQ ID NO: 803191 - RNA, 19 nt, Artificial Sequence
  Description of Artificial Sequence: Synthetic oligonucleotide
  Antisense strand to SEQ ID NO: 803190
ugguuuccuacaauuaggu

SEQ ID NO: 803192 - RNA, 19 nt, Artificial Sequence
  Description of Artificial Sequence: Synthetic oligonucleotide
  Sense strand starting at position 2240 of SEQ ID NO: 587585
gugaauuaauaccuguagu

SEQ ID NO: 803193 - RNA, 19 nt, Artificial Sequence
  Description of Artificial Sequence: Synthetic oligonucleotide
  Antisense strand to SEQ ID NO: 803192
acuacagguauuaauucac

SEQ ID NO: 803194 - RNA, 19 nt, Artificial Sequence
  Description of Artificial Sequence: Synthetic oligonucleotide
  Sense strand starting at position 2425 of SEQ ID NO: 587585
ggacaagaguauucucuaa

SEQ ID NO: 803195 - RNA, 19 nt, Artificial Sequence
  Description of Artificial Sequence: Synthetic oligonucleotide
  Antisense strand to SEQ ID NO: 803194
uuagagaauacucuugucc

SEQ ID NO: 803196 - RNA, 19 nt, Artificial Sequence
  Description of Artificial Sequence: Synthetic oligonucleotide
  Sense strand starting at position 2427 of SEQ ID NO: 587585
acaagaguauucucuaagg

SEQ ID NO: 803197 - RNA, 19 nt, Artificial Sequence
  Description of Artificial Sequence: Synthetic oligonucleotide
  Antisense strand to SEQ ID NO: 803196
ccuuagagaauacucuugu

SEQ ID NO: 803198 - RNA, 19 nt, Artificial Sequence
  Description of Artificial Sequence: Synthetic oligonucleotide
  Sense strand starting at position 2429 of SEQ ID NO: 587585
aagaguauucucuaagguc

SEQ ID NO: 803199 - RNA, 19 nt, Artificial Sequence
  Description of Artificial Sequence: Synthetic oligonucleotide
  Antisense strand to SEQ ID NO: 803198
gaccuuagagaauacucuu

SEQ ID NO: 803200 - RNA, 19 nt, Artificial Sequence
  Description of Artificial Sequence: Synthetic oligonucleotide
  Sense strand starting at position 2432 of SEQ ID NO: 587585
aguauucucuaagguccau

SEQ ID NO: 803201 - RNA, 19 nt, Artificial Sequence
  Description of Artificial Sequence: Synthetic oligonucleotide
  Antisense strand to SEQ ID NO: 803200
auggaccuuagagaauacu

SEQ ID NO: 803202 - RNA, 19 nt, Artificial Sequence
  Description of Artificial Sequence: Synthetic oligonucleotide
  Sense strand starting at position 2947 of SEQ ID NO: 587585
caaguaagaucaggagagu

SEQ ID NO: 803203 - RNA, 19 nt, Artificial Sequence
  Description of Artificial Sequence: Synthetic oligonucleotide
  Antisense strand to SEQ ID NO: 803202
acucuccugaucuuacuug

SEQ ID NO: 803204 - RNA, 19 nt, Artificial Sequence
  Description of Artificial Sequence: Synthetic oligonucleotide
  Sense strand starting at position 2240 of SEQ ID NO: 587586
guuaauuaauaccuguagu

SEQ ID NO: 803205 - RNA, 19 nt, Artificial Sequence
  Description of Artificial Sequence: Synthetic oligonucleotide
  Antisense strand to SEQ ID NO: 803204
acuacagguauuaauuaac

SEQ ID NO: 803206 - RNA, 19 nt, Artificial Sequence
  Description of Artificial Sequence: Synthetic oligonucleotide
  Sense strand starting at position 2420 of SEQ ID NO: 587586
ggacaagaguauugucuaa

SEQ ID NO: 803207 - RNA, 19 nt, Artificial Sequence
  Description of Artificial Sequence: Synthetic oligonucleotide
  Antisense strand to SEQ ID NO: 803206
uuagacaauacucuugucc

SEQ ID NO: 803208 - RNA, 19 nt, Artificial Sequence
  Description of Artificial Sequence: Synthetic oligonucleotide
  Sense strand starting at position 2422 of SEQ ID NO: 587586
acaagaguauugucuaagg

SEQ ID NO: 803209 - RNA, 19 nt, Artificial Sequence
  Description of Artificial Sequence: Synthetic oligonucleotide
  Antisense strand to SEQ ID NO: 803208
ccuuagacaauacucuugu

SEQ ID NO: 803210 - RNA, 19 nt, Artificial Sequence
  Description of Artificial Sequence: Synthetic oligonucleotide
  Sense strand starting at position 2424 of SEQ ID NO: 587586
aagaguauugucuaaggug

SEQ ID NO: 803211 - RNA, 19 nt, Artificial Sequence
  Description of Artificial Sequence: Synthetic oligonucleotide
  Antisense strand to SEQ ID NO: 803210
caccuuagacaauacucuu

SEQ ID NO: 803212 - RNA, 19 nt, Artificial Sequence
  Description of Artificial Sequence: Synthetic oligonucleotide
  Sense strand starting at position 2427 of SEQ ID NO: 587586
aguauugucuaaggugcau

SEQ ID NO: 803213 - RNA, 19 nt, Artificial Sequence
  Description of Artificial Sequence: Synthetic oligonucleotide
  Antisense strand to SEQ ID NO: 803212
augcaccuuagacaauacu

SEQ ID NO: 803214 - RNA, 19 nt, Artificial Sequence
  Description of Artificial Sequence: Synthetic oligonucleotide
  Sense strand starting at position 3698 of SEQ ID NO: 587586
agguuuguuacacggauaa

SEQ ID NO: 803215 - RNA, 19 nt, Artificial Sequence
  Description of Artificial Sequence: Synthetic oligonucleotide
  Antisense strand to SEQ ID NO: 803214
uuauccguguaacaaaccu

SEQ ID NO: 803216 - RNA, 19 nt, Artificial Sequence
  Description of Artificial Sequence: Synthetic oligonucleotide
  Sense strand starting at position 3710 of SEQ ID NO: 587586
cggauaaauuguguguccu

SEQ ID NO: 803217 - RNA, 19 nt, Artificial Sequence
  Description of Artificial Sequence: Synthetic oligonucleotide
  Antisense strand to SEQ ID NO: 803216
aggacacacaauuuauccg

SEQ ID NO: 803218 - RNA, 19 nt, Artificial Sequence
  Description of Artificial Sequence: Synthetic oligonucleotide
  Sense strand starting at position 219 of SEQ ID NO: 587587
guaagagaagcuugaaacu

SEQ ID NO: 803219 - RNA, 19 nt, Artificial Sequence
  Description of Artificial Sequence: Synthetic oligonucleotide
  Antisense strand to SEQ ID NO: 803218
aguuucaagcuucucuuac

SEQ ID NO: 803220 - RNA, 19 nt, Artificial Sequence
  Description of Artificial Sequence: Synthetic oligonucleotide
  Sense strand starting at position 275 of SEQ ID NO: 587587
gugcuaaccuagguuagga

SEQ ID NO: 803221 - RNA, 19 nt, Artificial Sequence
  Description of Artificial Sequence: Synthetic oligonucleotide
  Antisense strand to SEQ ID NO: 803220
uccuaaccuagguuagcac

SEQ ID NO: 803222 - RNA, 19 nt, Artificial Sequence
  Description of Artificial Sequence: Synthetic oligonucleotide
  Sense strand starting at position 297 of SEQ ID NO: 587587
cgaggcugcuucuuggaga

SEQ ID NO: 803223 - RNA, 19 nt, Artificial Sequence
  Description of Artificial Sequence: Synthetic oligonucleotide
  Antisense strand to SEQ ID NO: 803222
ucuccaagaagcagccucg

SEQ ID NO: 803224 - RNA, 19 nt, Artificial Sequence
  Description of Artificial Sequence: Synthetic oligonucleotide
  Sense strand starting at position 356 of SEQ ID NO: 587587
gccugauccuaaguggaaa

SEQ ID NO: 803225 - RNA, 19 nt, Artificial Sequence
  Description of Artificial Sequence: Synthetic oligonucleotide
  Antisense strand to SEQ ID NO: 803224
uuuccacuuaggaucaggc

SEQ ID NO: 803226 - RNA, 19 nt, Artificial Sequence
  Description of Artificial Sequence: Synthetic oligonucleotide
  Sense strand starting at position 513 of SEQ ID NO: 587587
caggcauuuccagguagca

SEQ ID NO: 803227 - RNA, 19 nt, Artificial Sequence
  Description of Artificial Sequence: Synthetic oligonucleotide
  Antisense strand to SEQ ID NO: 803226
ugcuaccuggaaaugccug

SEQ ID NO: 803228 - RNA, 19 nt, Artificial Sequence
  Description of Artificial Sequence: Synthetic oligonucleotide
  Sense strand starting at position 632 of SEQ ID NO: 587587
gacgucacccguuacacaa

SEQ ID NO: 803229 - RNA, 19 nt, Artificial Sequence
  Description of Artificial Sequence: Synthetic oligonucleotide
  Antisense strand to SEQ ID NO: 803228
uuguguaacgggugacguc

SEQ ID NO: 803230 - RNA, 19 nt, Artificial Sequence
  Description of Artificial Sequence: Synthetic oligonucleotide
  Sense strand starting at position 694 of SEQ ID NO: 587587
cccaauugucccggugacu

SEQ ID NO: 803231 - RNA, 19 nt, Artificial Sequence
  Description of Artificial Sequence: Synthetic oligonucleotide
  Antisense strand to SEQ ID NO: 803230
agucaccgggacaauuggg

SEQ ID NO: 803232 - RNA, 19 nt, Artificial Sequence
  Description of Artificial Sequence: Synthetic oligonucleotide
  Sense strand starting at position 2216 of SEQ ID NO: 587587
ggaugauuccuccgucgga

SEQ ID NO: 803233 - RNA, 19 nt, Artificial Sequence
  Description of Artificial Sequence: Synthetic oligonucleotide
  Antisense strand to SEQ ID NO: 803232
uccgacggaggaaucaucc

SEQ ID NO: 803234 - RNA, 19 nt, Artificial Sequence
  Description of Artificial Sequence: Synthetic oligonucleotide
  Sense strand starting at position 2219 of SEQ ID NO: 587587
ugauuccuccgucggagau

SEQ ID NO: 803235 - RNA, 19 nt, Artificial Sequence
  Description of Artificial Sequence: Synthetic oligonucleotide
  Antisense strand to SEQ ID NO: 803234
aucuccgacggaggaauca

SEQ ID NO: 803236 - RNA, 19 nt, Artificial Sequence
  Description of Artificial Sequence: Synthetic oligonucleotide
  Sense strand starting at position 2238 of SEQ ID NO: 587587
cuaauuggcuucuccggaa

SEQ ID NO: 803237 - RNA, 19 nt, Artificial Sequence
  Description of Artificial Sequence: Synthetic oligonucleotide
  Antisense strand to SEQ ID NO: 803236
uuccggagaagccaauuag

SEQ ID NO: 803238 - RNA, 19 nt, Artificial Sequence
  Description of Artificial Sequence: Synthetic oligonucleotide
  Sense strand starting at position 2242 of SEQ ID NO: 587587
uuggcuucuccggaaagga

SEQ ID NO: 803239 - RNA, 19 nt, Artificial Sequence
  Description of Artificial Sequence: Synthetic oligonucleotide
  Antisense strand to SEQ ID NO: 803238
uccuuuccggagaagccaa

SEQ ID NO: 803240 - RNA, 19 nt, Artificial Sequence
  Description of Artificial Sequence: Synthetic oligonucleotide
  Sense strand starting at position 2562 of SEQ ID NO: 587587
gcaccuucggcagaugacu

SEQ ID NO: 803241 - RNA, 19 nt, Artificial Sequence
  Description of Artificial Sequence: Synthetic oligonucleotide
  Antisense strand to SEQ ID NO: 803240
agucaucugccgaaggugc

SEQ ID NO: 803242 - RNA, 19 nt, Artificial Sequence
  Description of Artificial Sequence: Synthetic oligonucleotide
  Sense strand starting at position 2588 of SEQ ID NO: 587587
uucgguucuagaggacuca

SEQ ID NO: 803243 - RNA, 19 nt, Artificial Sequence
  Description of Artificial Sequence: Synthetic oligonucleotide
  Antisense strand to SEQ ID NO: 803242
ugaguccucuagaaccgaa

SEQ ID NO: 803244 - RNA, 19 nt, Artificial Sequence
  Description of Artificial Sequence: Synthetic oligonucleotide
  Sense strand starting at position 2795 of SEQ ID NO: 587587
ggucuauauuuggcaguuu

SEQ ID NO: 803245 - RNA, 19 nt, Artificial Sequence
  Description of Artificial Sequence: Synthetic oligonucleotide
  Antisense strand to SEQ ID NO: 803244
aaacugccaaauauagacc

SEQ ID NO: 803246 - RNA, 19 nt, Artificial Sequence
  Description of Artificial Sequence: Synthetic oligonucleotide
  Sense strand starting at position 2902 of SEQ ID NO: 587587
aaaugaucggguugauaua

SEQ ID NO: 803247 - RNA, 19 nt, Artificial Sequence
  Description of Artificial Sequence: Synthetic oligonucleotide
  Antisense strand to SEQ ID NO: 803246
uauaucaacccgaucauuu

SEQ ID NO: 803248 - RNA, 19 nt, Artificial Sequence
  Description of Artificial Sequence: Synthetic oligonucleotide
  Sense strand starting at position 2914 of SEQ ID NO: 587587
ugauauauaaugggugcua

SEQ ID NO: 803249 - RNA, 19 nt, Artificial Sequence
  Description of Artificial Sequence: Synthetic oligonucleotide
  Antisense strand to SEQ ID NO: 803248
uagcacccauuauauauca

SEQ ID NO: 803250 - RNA, 19 nt, Artificial Sequence
  Description of Artificial Sequence: Synthetic oligonucleotide
  Sense strand starting at position 2915 of SEQ ID NO: 587587
gauauauaaugggugcuau

SEQ ID NO: 803251 - RNA, 19 nt, Artificial Sequence
  Description of Artificial Sequence: Synthetic oligonucleotide
  Antisense strand to SEQ ID NO: 803250
auagcacccauuauauauc

SEQ ID NO: 803252 - RNA, 19 nt, Artificial Sequence
  Description of Artificial Sequence: Synthetic oligonucleotide
  Sense strand starting at position 2916 of SEQ ID NO: 587587
auauauaaugggugcuauu

SEQ ID NO: 803253 - RNA, 19 nt, Artificial Sequence
  Description of Artificial Sequence: Synthetic oligonucleotide
  Antisense strand to SEQ ID NO: 803252
aauagcacccauuauauau

SEQ ID NO: 803254 - RNA, 19 nt, Artificial Sequence
  Description of Artificial Sequence: Synthetic oligonucleotide
  Sense strand starting at position 2926 of SEQ ID NO: 587587
ggugcuauuucccuuaaac

SEQ ID NO: 803255 - RNA, 19 nt, Artificial Sequence
  Description of Artificial Sequence: Synthetic oligonucleotide
  Antisense strand to SEQ ID NO: 803254
guuuaagggaaauagcacc

SEQ ID NO: 803256 - RNA, 19 nt, Artificial Sequence
  Description of Artificial Sequence: Synthetic oligonucleotide
  Sense strand starting at position 2982 of SEQ ID NO: 587587
cagauuugaugauagggua

SEQ ID NO: 803257 - RNA, 19 nt, Artificial Sequence
  Description of Artificial Sequence: Synthetic oligonucleotide
  Antisense strand to SEQ ID NO: 803256
uacccuaucaucaaaucug

SEQ ID NO: 803258 - RNA, 19 nt, Artificial Sequence
  Description of Artificial Sequence: Synthetic oligonucleotide
  Sense strand starting at position 2985 of SEQ ID NO: 587587
auuugaugauaggguauua

SEQ ID NO: 803259 - RNA, 19 nt, Artificial Sequence
  Description of Artificial Sequence: Synthetic oligonucleotide
  Antisense strand to SEQ ID NO: 803258
uaauacccuaucaucaaau

SEQ ID NO: 803260 - RNA, 19 nt, Artificial Sequence
  Description of Artificial Sequence: Synthetic oligonucleotide
  Sense strand starting at position 2995 of SEQ ID NO: 587587
aggguauuagaucgcuaau

SEQ ID NO: 803261 - RNA, 19 nt, Artificial Sequence
  Description of Artificial Sequence: Synthetic oligonucleotide
  Antisense strand to SEQ ID NO: 803260
auuagcgaucuaauacccu

SEQ ID NO: 803262 - RNA, 19 nt, Artificial Sequence
  Description of Artificial Sequence: Synthetic oligonucleotide
  Sense strand starting at position 2997 of SEQ ID NO: 587587
gguauuagaucgcuaaugu

SEQ ID NO: 803263 - RNA, 19 nt, Artificial Sequence
  Description of Artificial Sequence: Synthetic oligonucleotide
  Antisense strand to SEQ ID NO: 803262
acauuagcgaucuaauacc

SEQ ID NO: 803264 - RNA, 19 nt, Artificial Sequence
  Description of Artificial Sequence: Synthetic oligonucleotide
  Sense strand starting at position 2998 of SEQ ID NO: 587587
guauuagaucgcuaauguu

SEQ ID NO: 803265 - RNA, 19 nt, Artificial Sequence
  Description of Artificial Sequence: Synthetic oligonucleotide
  Antisense strand to SEQ ID NO: 803264
aacauuagcgaucuaauac

SEQ ID NO: 803266 - RNA, 19 nt, Artificial Sequence
  Description of Artificial Sequence: Synthetic oligonucleotide
  Sense strand starting at position 3115 of SEQ ID NO: 587587
cgucuauuccacuacuacu

SEQ ID NO: 803267 - RNA, 19 nt, Artificial Sequence
  Description of Artificial Sequence: Synthetic oligonucleotide
  Antisense strand to SEQ ID NO: 803266
aguaguaguggaauagacg

SEQ ID NO: 803268 - RNA, 19 nt, Artificial Sequence
  Description of Artificial Sequence: Synthetic oligonucleotide
  Sense strand starting at position 3123 of SEQ ID NO: 587587
ccacuacuacuacguuaga

SEQ ID NO: 803269 - RNA, 19 nt, Artificial Sequence
  Description of Artificial Sequence: Synthetic oligonucleotide
  Antisense strand to SEQ ID NO: 803268
ucuaacguaguaguagugg

SEQ ID NO: 803270 - RNA, 19 nt, Artificial Sequence
  Description of Artificial Sequence: Synthetic oligonucleotide
  Sense strand starting at position 3126 of SEQ ID NO: 587587
cuacuacuacguuagacua

SEQ ID NO: 803271 - RNA, 19 nt, Artificial Sequence
  Description of Artificial Sequence: Synthetic oligonucleotide
  Antisense strand to SEQ ID NO: 803270
uagucuaacguaguaguag

SEQ ID NO: 803272 - RNA, 19 nt, Artificial Sequence
  Description of Artificial Sequence: Synthetic oligonucleotide
  Sense strand starting at position 3207 of SEQ ID NO: 587587
agaaguugcuaauuggaaa

SEQ ID NO: 803273 - RNA, 19 nt, Artificial Sequence
  Description of Artificial Sequence: Synthetic oligonucleotide
  Antisense strand to SEQ ID NO: 803272
uuuccaauuagcaacuucu

SEQ ID NO: 803274 - RNA, 19 nt, Artificial Sequence
  Description of Artificial Sequence: Synthetic oligonucleotide
  Sense strand starting at position 3232 of SEQ ID NO: 587587
cugagcaugcuauguauga

SEQ ID NO: 803275 - RNA, 19 nt, Artificial Sequence
  Description of Artificial Sequence: Synthetic oligonucleotide
  Antisense strand to SEQ ID NO: 803274
ucauacauagcaugcucag

SEQ ID NO: 803276 - RNA, 19 nt, Artificial Sequence
  Description of Artificial Sequence: Synthetic oligonucleotide
  Sense strand starting at position 3233 of SEQ ID NO: 587587
ugagcaugcuauguaugaa

SEQ ID NO: 803277 - RNA, 19 nt, Artificial Sequence
  Description of Artificial Sequence: Synthetic oligonucleotide
  Antisense strand to SEQ ID NO: 803276
uucauacauagcaugcuca

SEQ ID NO: 803278 - RNA, 19 nt, Artificial Sequence
  Description of Artificial Sequence: Synthetic oligonucleotide
  Sense strand starting at position 3236 of SEQ ID NO: 587587
gcaugcuauguaugaaauu

SEQ ID NO: 803279 - RNA, 19 nt, Artificial Sequence
  Description of Artificial Sequence: Synthetic oligonucleotide
  Antisense strand to SEQ ID NO: 803278
aauuucauacauagcaugc

SEQ ID NO: 803280 - RNA, 19 nt, Artificial Sequence
  Description of Artificial Sequence: Synthetic oligonucleotide
  Sense strand starting at position 3532 of SEQ ID NO: 587587
augggaagcauugggauua

SEQ ID NO: 803281 - RNA, 19 nt, Artificial Sequence
  Description of Artificial Sequence: Synthetic oligonucleotide
  Antisense strand to SEQ ID NO: 803280
uaaucccaaugcuucccau

SEQ ID NO: 803282 - RNA, 19 nt, Artificial Sequence
  Description of Artificial Sequence: Synthetic oligonucleotide
  Sense strand starting at position 3603 of SEQ ID NO: 587587
caagcagaacagugacuuu

SEQ ID NO: 803283 - RNA, 19 nt, Artificial Sequence
  Description of Artificial Sequence: Synthetic oligonucleotide
  Antisense strand to SEQ ID NO: 803282
aaagucacuguucugcuug

SEQ ID NO: 803284 - RNA, 19 nt, Artificial Sequence
  Description of Artificial Sequence: Synthetic oligonucleotide
  Sense strand starting at position 3746 of SEQ ID NO: 587587
auauguaaucaauguguuc

SEQ ID NO: 803285 - RNA, 19 nt, Artificial Sequence
  Description of Artificial Sequence: Synthetic oligonucleotide
  Antisense strand to SEQ ID NO: 803284
gaacacauugauuacauau

SEQ ID NO: 803286 - RNA, 19 nt, Artificial Sequence
  Description of Artificial Sequence: Synthetic oligonucleotide
  Sense strand starting at position 3766 of SEQ ID NO: 587587
uguuuauuacaaggagcau

SEQ ID NO: 803287 - RNA, 19 nt, Artificial Sequence
  Description of Artificial Sequence: Synthetic oligonucleotide
  Antisense strand to SEQ ID NO: 803286
augcuccuuguaauaaaca

SEQ ID NO: 803288 - RNA, 19 nt, Artificial Sequence
  Description of Artificial Sequence: Synthetic oligonucleotide
  Sense strand starting at position 3830 of SEQ ID NO: 587587
agguucuauuaugggauuu

SEQ ID NO: 803289 - RNA, 19 nt, Artificial Sequence
  Description of Artificial Sequence: Synthetic oligonucleotide
  Antisense strand to SEQ ID NO: 803288
aaaucccauaauagaaccu

SEQ ID NO: 803290 - RNA, 19 nt, Artificial Sequence
  Description of Artificial Sequence: Synthetic oligonucleotide
  Sense strand starting at position 3832 of SEQ ID NO: 587587
guucuauuaugggauuucu

SEQ ID NO: 803291 - RNA, 19 nt, Artificial Sequence
  Description of Artificial Sequence: Synthetic oligonucleotide
  Antisense strand to SEQ ID NO: 803290
agaaaucccauaauagaac

SEQ ID NO: 803292 - RNA, 19 nt, Artificial Sequence
  Description of Artificial Sequence: Synthetic oligonucleotide
  Sense strand starting at position 3892 of SEQ ID NO: 587587
uuauuuguccuuuggaguu

SEQ ID NO: 803293 - RNA, 19 nt, Artificial Sequence
  Description of Artificial Sequence: Synthetic oligonucleotide
  Antisense strand to SEQ ID NO: 803292
aacuccaaaggacaaauaa

SEQ ID NO: 803294 - RNA, 19 nt, Artificial Sequence
  Description of Artificial Sequence: Synthetic oligonucleotide
  Sense strand starting at position 3971 of SEQ ID NO: 587587
uaugauaaugugcgggaga

SEQ ID NO: 803295 - RNA, 19 nt, Artificial Sequence
  Description of Artificial Sequence: Synthetic oligonucleotide
  Antisense strand to SEQ ID NO: 803294
ucucccgcacauuaucaua

SEQ ID NO: 803296 - RNA, 19 nt, Artificial Sequence
  Description of Artificial Sequence: Synthetic oligonucleotide
  Sense strand starting at position 3973 of SEQ ID NO: 587587
ugauaaugugcgggagaaa

SEQ ID NO: 803297 - RNA, 19 nt, Artificial Sequence
  Description of Artificial Sequence: Synthetic oligonucleotide
  Antisense strand to SEQ ID NO: 803296
uuucucccgcacauuauca

SEQ ID NO: 803298 - RNA, 19 nt, Artificial Sequence
  Description of Artificial Sequence: Synthetic oligonucleotide
  Sense strand starting at position 130 of SEQ ID NO: 587588
acagauuagugagacucaa

SEQ ID NO: 803299 - RNA, 19 nt, Artificial Sequence
  Description of Artificial Sequence: Synthetic oligonucleotide
  Antisense strand to SEQ ID NO: 803298
uugagucucacuaaucugu

SEQ ID NO: 803300 - RNA, 19 nt, Artificial Sequence
  Description of Artificial Sequence: Synthetic oligonucleotide
  Sense strand starting at position 306 of SEQ ID NO: 587588
gugagucagucacuuaucu

SEQ ID NO: 803301 - RNA, 19 nt, Artificial Sequence
  Description of Artificial Sequence: Synthetic oligonucleotide
  Antisense strand to SEQ ID NO: 803300
agauaagugacugacucac

SEQ ID NO: 803302 - RNA, 19 nt, Artificial Sequence
  Description of Artificial Sequence: Synthetic oligonucleotide
  Sense strand starting at position 310 of SEQ ID NO: 587588
gucagucacuuaucuggga

SEQ ID NO: 803303 - RNA, 19 nt, Artificial Sequence
  Description of Artificial Sequence: Synthetic oligonucleotide
  Antisense strand to SEQ ID NO: 803302
ucccagauaagugacugac

SEQ ID NO: 803304 - RNA, 19 nt, Artificial Sequence
  Description of Artificial Sequence: Synthetic oligonucleotide
  Sense strand starting at position 311 of SEQ ID NO: 587588
ucagucacuuaucugggaa

SEQ ID NO: 803305 - RNA, 19 nt, Artificial Sequence
  Description of Artificial Sequence: Synthetic oligonucleotide
  Antisense strand to SEQ ID NO: 803304
uucccagauaagugacuga

SEQ ID NO: 803306 - RNA, 19 nt, Artificial Sequence
  Description of Artificial Sequence: Synthetic oligonucleotide
  Sense strand starting at position 314 of SEQ ID NO: 587588
gucacuuaucugggaacug

SEQ ID NO: 803307 - RNA, 19 nt, Artificial Sequence
  Description of Artificial Sequence: Synthetic oligonucleotide
  Antisense strand to SEQ ID NO: 803306
caguucccagauaagugac

SEQ ID NO: 803308 - RNA, 19 nt, Artificial Sequence
  Description of Artificial Sequence: Synthetic oligonucleotide
  Sense strand starting at position 315 of SEQ ID NO: 587588
ucacuuaucugggaacuga

SEQ ID NO: 803309 - RNA, 19 nt, Artificial Sequence
  Description of Artificial Sequence: Synthetic oligonucleotide
  Antisense strand to SEQ ID NO: 803308
ucaguucccagauaaguga

SEQ ID NO: 803310 - RNA, 19 nt, Artificial Sequence
  Description of Artificial Sequence: Synthetic oligonucleotide
  Sense strand starting at position 492 of SEQ ID NO: 587588
gaguaagagguauggguuu

SEQ ID NO: 803311 - RNA, 19 nt, Artificial Sequence
  Description of Artificial Sequence: Synthetic oligonucleotide
  Antisense strand to SEQ ID NO: 803310
aaacccauaccucuuacuc

SEQ ID NO: 803312 - RNA, 19 nt, Artificial Sequence
  Description of Artificial Sequence: Synthetic oligonucleotide
  Sense strand starting at position 555 of SEQ ID NO: 587588
uuucuuccucugggagaaa

SEQ ID NO: 803313 - RNA, 19 nt, Artificial Sequence
  Description of Artificial Sequence: Synthetic oligonucleotide
  Antisense strand to SEQ ID NO: 803312
uuucucccagaggaagaaa

SEQ ID NO: 803314 - RNA, 19 nt, Artificial Sequence
  Description of Artificial Sequence: Synthetic oligonucleotide
  Sense strand starting at position 593 of SEQ ID NO: 587588
uugagaucucugcaguuuc

SEQ ID NO: 803315 - RNA, 19 nt, Artificial Sequence
  Description of Artificial Sequence: Synthetic oligonucleotide
  Antisense strand to SEQ ID NO: 803314
gaaacugcagagaucucaa

SEQ ID NO: 803316 - RNA, 19 nt, Artificial Sequence
  Description of Artificial Sequence: Synthetic oligonucleotide
  Sense strand starting at position 610 of SEQ ID NO: 587588
ucaagaucuuagggacgaa

SEQ ID NO: 803317 - RNA, 19 nt, Artificial Sequence
  Description of Artificial Sequence: Synthetic oligonucleotide
  Antisense strand to SEQ ID NO: 803316
uucgucccuaagaucuuga

SEQ ID NO: 803318 - RNA, 19 nt, Artificial Sequence
  Description of Artificial Sequence: Synthetic oligonucleotide
  Sense strand starting at position 636 of SEQ ID NO: 587588
uggagcauguuucugucau

SEQ ID NO: 803319 - RNA, 19 nt, Artificial Sequence
  Description of Artificial Sequence: Synthetic oligonucleotide
  Antisense strand to SEQ ID NO: 803318
augacagaaacaugcucca

SEQ ID NO: 803320 - RNA, 19 nt, Artificial Sequence
  Description of Artificial Sequence: Synthetic oligonucleotide
  Sense strand starting at position 844 of SEQ ID NO: 587588
ucucuauuccagcgcugau

SEQ ID NO: 803321 - RNA, 19 nt, Artificial Sequence
  Description of Artificial Sequence: Synthetic oligonucleotide
  Antisense strand to SEQ ID NO: 803320
aucagcgcuggaauagaga

SEQ ID NO: 803322 - RNA, 19 nt, Artificial Sequence
  Description of Artificial Sequence: Synthetic oligonucleotide
  Sense strand starting at position 978 of SEQ ID NO: 587588
ggaccaacggcucaagauu

SEQ ID NO: 803323 - RNA, 19 nt, Artificial Sequence
  Description of Artificial Sequence: Synthetic oligonucleotide
  Antisense strand to SEQ ID NO: 803322
aaucuugagccguuggucc

SEQ ID NO: 803324 - RNA, 19 nt, Artificial Sequence
  Description of Artificial Sequence: Synthetic oligonucleotide
  Sense strand starting at position 1046 of SEQ ID NO: 587588
agggcuucuaggugaugaa

SEQ ID NO: 803325 - RNA, 19 nt, Artificial Sequence
  Description of Artificial Sequence: Synthetic oligonucleotide
  Antisense strand to SEQ ID NO: 803324
uucaucaccuagaagcccu

SEQ ID NO: 803326 - RNA, 19 nt, Artificial Sequence
  Description of Artificial Sequence: Synthetic oligonucleotide
  Sense strand starting at position 1438 of SEQ ID NO: 587588
ggcucugucccgccugauu

SEQ ID NO: 803327 - RNA, 19 nt, Artificial Sequence
  Description of Artificial Sequence: Synthetic oligonucleotide
  Antisense strand to SEQ ID NO: 803326
aaucaggcgggacagagcc

SEQ ID NO: 803328 - RNA, 19 nt, Artificial Sequence
  Description of Artificial Sequence: Synthetic oligonucleotide
  Sense strand starting at position 1609 of SEQ ID NO: 587588
gcaagaagucuuugggaac

SEQ ID NO: 803329 - RNA, 19 nt, Artificial Sequence
  Description of Artificial Sequence: Synthetic oligonucleotide
  Antisense strand to SEQ ID NO: 803328
guucccaaagacuucuugc

SEQ ID NO: 803330 - RNA, 19 nt, Artificial Sequence
  Description of Artificial Sequence: Synthetic oligonucleotide
  Sense strand starting at position 1728 of SEQ ID NO: 587588
gcgggaagcgcucuuacuu

SEQ ID NO: 803331 - RNA, 19 nt, Artificial Sequence
  Description of Artificial Sequence: Synthetic oligonucleotide
  Antisense strand to SEQ ID NO: 803330
aaguaagagcgcuucccgc

SEQ ID NO: 803332 - RNA, 19 nt, Artificial Sequence
  Description of Artificial Sequence: Synthetic oligonucleotide
  Sense strand starting at position 2152 of SEQ ID NO: 587588
gggccuuuccucgggagau

SEQ ID NO: 803333 - RNA, 19 nt, Artificial Sequence
  Description of Artificial Sequence: Synthetic oligonucleotide
  Antisense strand to SEQ ID NO: 803332
aucucccgaggaaaggccc

SEQ ID NO: 803334 - RNA, 19 nt, Artificial Sequence
  Description of Artificial Sequence: Synthetic oligonucleotide
  Sense strand starting at position 2154 of SEQ ID NO: 587588
gccuuuccucgggagauuc

SEQ ID NO: 803335 - RNA, 19 nt, Artificial Sequence
  Description of Artificial Sequence: Synthetic oligonucleotide
  Antisense strand to SEQ ID NO: 803334
gaaucucccgaggaaaggc

SEQ ID NO: 803336 - RNA, 19 nt, Artificial Sequence
  Description of Artificial Sequence: Synthetic oligonucleotide
  Sense strand starting at position 2191 of SEQ ID NO: 587588
gcagccgucccagaauuua

SEQ ID NO: 803337 - RNA, 19 nt, Artificial Sequence
  Description of Artificial Sequence: Synthetic oligonucleotide
  Antisense strand to SEQ ID NO: 803336
uaaauucugggacggcugc

SEQ ID NO: 803338 - RNA, 19 nt, Artificial Sequence
  Description of Artificial Sequence: Synthetic oligonucleotide
  Sense strand starting at position 2307 of SEQ ID NO: 587588
auuaaagcugccgaaugaa

SEQ ID NO: 803339 - RNA, 19 nt, Artificial Sequence
  Description of Artificial Sequence: Synthetic oligonucleotide
  Antisense strand to SEQ ID NO: 803338
uucauucggcagcuuuaau

SEQ ID NO: 803340 - RNA, 19 nt, Artificial Sequence
  Description of Artificial Sequence: Synthetic oligonucleotide
  Sense strand starting at position 2310 of SEQ ID NO: 587588
aaagcugccgaaugaaagu

SEQ ID NO: 803341 - RNA, 19 nt, Artificial Sequence
  Description of Artificial Sequence: Synthetic oligonucleotide
  Antisense strand to SEQ ID NO: 803340
acuuucauucggcagcuuu

SEQ ID NO: 803342 - RNA, 19 nt, Artificial Sequence
  Description of Artificial Sequence: Synthetic oligonucleotide
  Sense strand starting at position 2520 of SEQ ID NO: 587588
ggguccuuccuggaauggu

SEQ ID NO: 803343 - RNA, 19 nt, Artificial Sequence
  Description of Artificial Sequence: Synthetic oligonucleotide
  Antisense strand to SEQ ID NO: 803342
accauuccaggaaggaccc

SEQ ID NO: 803344 - RNA, 19 nt, Artificial Sequence
  Description of Artificial Sequence: Synthetic oligonucleotide
  Sense strand starting at position 2533 of SEQ ID NO: 587588
aaugguagggcugggauua

SEQ ID NO: 803345 - RNA, 19 nt, Artificial Sequence
  Description of Artificial Sequence: Synthetic oligonucleotide
  Antisense strand to SEQ ID NO: 803344
uaaucccagcccuaccauu

SEQ ID NO: 803346 - RNA, 19 nt, Artificial Sequence
  Description of Artificial Sequence: Synthetic oligonucleotide
  Sense strand starting at position 2534 of SEQ ID NO: 587588
augguagggcugggauuaa

SEQ ID NO: 803347 - RNA, 19 nt, Artificial Sequence
  Description of Artificial Sequence: Synthetic oligonucleotide
  Antisense strand to SEQ ID NO: 803346
uuaaucccagcccuaccau

SEQ ID NO: 803348 - RNA, 19 nt, Artificial Sequence
  Description of Artificial Sequence: Synthetic oligonucleotide
  Sense strand starting at position 2759 of SEQ ID NO: 587588
aguagacugucaccugaaa

SEQ ID NO: 803349 - RNA, 19 nt, Artificial Sequence
  Description of Artificial Sequence: Synthetic oligonucleotide
  Antisense strand to SEQ ID NO: 803348
uuucaggugacagucuacu

SEQ ID NO: 803350 - RNA, 19 nt, Artificial Sequence
  Description of Artificial Sequence: Synthetic oligonucleotide
  Sense strand starting at position 2860 of SEQ ID NO: 587588
ucuccuaagccauggauau

SEQ ID NO: 803351 - RNA, 19 nt, Artificial Sequence
  Description of Artificial Sequence: Synthetic oligonucleotide
  Antisense strand to SEQ ID NO: 803350
auauccauggcuuaggaga

SEQ ID NO: 803352 - RNA, 19 nt, Artificial Sequence
  Description of Artificial Sequence: Synthetic oligonucleotide
  Sense strand starting at position 2861 of SEQ ID NO: 587588
cuccuaagccauggauauu

SEQ ID NO: 803353 - RNA, 19 nt, Artificial Sequence
  Description of Artificial Sequence: Synthetic oligonucleotide
  Antisense strand to SEQ ID NO: 803352
aauauccauggcuuaggag

SEQ ID NO: 803354 - RNA, 19 nt, Artificial Sequence
  Description of Artificial Sequence: Synthetic oligonucleotide
  Sense strand starting at position 2975 of SEQ ID NO: 587588
ccuugacuccugugagcuc

SEQ ID NO: 803355 - RNA, 19 nt, Artificial Sequence
  Description of Artificial Sequence: Synthetic oligonucleotide
  Antisense strand to SEQ ID NO: 803354
gagcucacaggagucaagg

SEQ ID NO: 803356 - RNA, 19 nt, Artificial Sequence
  Description of Artificial Sequence: Synthetic oligonucleotide
  Sense strand starting at position 2987 of SEQ ID NO: 587588
ugagcucucccaggcagau

SEQ ID NO: 803357 - RNA, 19 nt, Artificial Sequence
  Description of Artificial Sequence: Synthetic oligonucleotide
  Antisense strand to SEQ ID NO: 803356
aucugccugggagagcuca

SEQ ID NO: 803358 - RNA, 19 nt, Artificial Sequence
  Description of Artificial Sequence: Synthetic oligonucleotide
  Sense strand starting at position 3100 of SEQ ID NO: 587588
guaguuaucaaaggcagga

SEQ ID NO: 803359 - RNA, 19 nt, Artificial Sequence
  Description of Artificial Sequence: Synthetic oligonucleotide
  Antisense strand to SEQ ID NO: 803358
uccugccuuugauaacuac

SEQ ID NO: 803360 - RNA, 19 nt, Artificial Sequence
  Description of Artificial Sequence: Synthetic oligonucleotide
  Sense strand starting at position 3124 of SEQ ID NO: 587588
gaucuuuguggugguggaa

SEQ ID NO: 803361 - RNA, 19 nt, Artificial Sequence
  Description of Artificial Sequence: Synthetic oligonucleotide
  Antisense strand to SEQ ID NO: 803360
uuccaccaccacaaagauc

SEQ ID NO: 803362 - RNA, 19 nt, Artificial Sequence
  Description of Artificial Sequence: Synthetic oligonucleotide
  Sense strand starting at position 3732 of SEQ ID NO: 587588
uuggcuucucugcacagua

SEQ ID NO: 803363 - RNA, 19 nt, Artificial Sequence
  Description of Artificial Sequence: Synthetic oligonucleotide
  Antisense strand to SEQ ID NO: 803362
uacugugcagagaagccaa

SEQ ID NO: 803364 - RNA, 19 nt, Artificial Sequence
  Description of Artificial Sequence: Synthetic oligonucleotide
  Sense strand starting at position 3734 of SEQ ID NO: 587588
ggcuucucugcacaguaau

SEQ ID NO: 803365 - RNA, 19 nt, Artificial Sequence
  Description of Artificial Sequence: Synthetic oligonucleotide
  Antisense strand to SEQ ID NO: 803364
auuacugugcagagaagcc

SEQ ID NO: 803366 - RNA, 19 nt, Artificial Sequence
  Description of Artificial Sequence: Synthetic oligonucleotide
  Sense strand starting at position 3744 of SEQ ID NO: 587588
cacaguaaugccugguuau

SEQ ID NO: 803367 - RNA, 19 nt, Artificial Sequence
  Description of Artificial Sequence: Synthetic oligonucleotide
  Antisense strand to SEQ ID NO: 803366
auaaccaggcauuacugug

SEQ ID NO: 803368 - RNA, 19 nt, Artificial Sequence
  Description of Artificial Sequence: Synthetic oligonucleotide
  Sense strand starting at position 3745 of SEQ ID NO: 587588
acaguaaugccugguuauu

SEQ ID NO: 803369 - RNA, 19 nt, Artificial Sequence
  Description of Artificial Sequence: Synthetic oligonucleotide
  Antisense strand to SEQ ID NO: 803368
aauaaccaggcauuacugu

SEQ ID NO: 803370 - RNA, 19 nt, Artificial Sequence
  Description of Artificial Sequence: Synthetic oligonucleotide
  Sense strand starting at position 3747 of SEQ ID NO: 587588
aguaaugccugguuauuga

SEQ ID NO: 803371 - RNA, 19 nt, Artificial Sequence
  Description of Artificial Sequence: Synthetic oligonucleotide
  Antisense strand to SEQ ID NO: 803370
ucaauaaccaggcauuacu

SEQ ID NO: 803372 - RNA, 19 nt, Artificial Sequence
  Description of Artificial Sequence: Synthetic oligonucleotide
  Sense strand starting at position 3804 of SEQ ID NO: 587588
cguaccagaugcucaauaa

SEQ ID NO: 803373 - RNA, 19 nt, Artificial Sequence
  Description of Artificial Sequence: Synthetic oligonucleotide
  Antisense strand to SEQ ID NO: 803372
uuauugagcaucugguacg

SEQ ID NO: 803374 - RNA, 19 nt, Artificial Sequence
  Description of Artificial Sequence: Synthetic oligonucleotide
  Sense strand starting at position 3805 of SEQ ID NO: 587588
guaccagaugcucaauaaa

SEQ ID NO: 803375 - RNA, 19 nt, Artificial Sequence
  Description of Artificial Sequence: Synthetic oligonucleotide
  Antisense strand to SEQ ID NO: 803374
uuuauugagcaucugguac

SEQ ID NO: 803376 - RNA, 19 nt, Artificial Sequence
  Description of Artificial Sequence: Synthetic oligonucleotide
  Sense strand starting at position 3926 of SEQ ID NO: 587588
ggagaccaacuuuguaaau

SEQ ID NO: 803377 - RNA, 19 nt, Artificial Sequence
  Description of Artificial Sequence: Synthetic oligonucleotide
  Antisense strand to SEQ ID NO: 803376
auuuacaaaguuggucucc

SEQ ID NO: 803378 - RNA, 19 nt, Artificial Sequence
  Description of Artificial Sequence: Synthetic oligonucleotide
  Sense strand starting at position 420 of SEQ ID NO: 587589
uugcaauuccagcauggaa

SEQ ID NO: 803379 - RNA, 19 nt, Artificial Sequence
  Description of Artificial Sequence: Synthetic oligonucleotide
  Antisense strand to SEQ ID NO: 803378
uuccaugcuggaauugcaa

SEQ ID NO: 803380 - RNA, 19 nt, Artificial Sequence
  Description of Artificial Sequence: Synthetic oligonucleotide
  Sense strand starting at position 509 of SEQ ID NO: 587589
ugaaucgagguucgaauua

SEQ ID NO: 803381 - RNA, 19 nt, Artificial Sequence
  Description of Artificial Sequence: Synthetic oligonucleotide
  Antisense strand to SEQ ID NO: 803380
uaauucgaaccucgauuca

SEQ ID NO: 803382 - RNA, 19 nt, Artificial Sequence
  Description of Artificial Sequence: Synthetic oligonucleotide
  Sense strand starting at position 1346 of SEQ ID NO: 587589
ucacgaucgggaggagauu

SEQ ID NO: 803383 - RNA, 19 nt, Artificial Sequence
  Description of Artificial Sequence: Synthetic oligonucleotide
  Antisense strand to SEQ ID NO: 803382
aaucuccucccgaucguga

SEQ ID NO: 803384 - RNA, 19 nt, Artificial Sequence
  Description of Artificial Sequence: Synthetic oligonucleotide
  Sense strand starting at position 2129 of SEQ ID NO: 587589
agggaaaguuuagcuguua

SEQ ID NO: 803385 - RNA, 19 nt, Artificial Sequence
  Description of Artificial Sequence: Synthetic oligonucleotide
  Antisense strand to SEQ ID NO: 803384
uaacagcuaaacuuucccu

SEQ ID NO: 803386 - RNA, 19 nt, Artificial Sequence
  Description of Artificial Sequence: Synthetic oligonucleotide
  Sense strand starting at position 2130 of SEQ ID NO: 587589
gggaaaguuuagcuguuaa

SEQ ID NO: 803387 - RNA, 19 nt, Artificial Sequence
  Description of Artificial Sequence: Synthetic oligonucleotide
  Antisense strand to SEQ ID NO: 803386
uuaacagcuaaacuuuccc

SEQ ID NO: 803388 - RNA, 19 nt, Artificial Sequence
  Description of Artificial Sequence: Synthetic oligonucleotide
  Sense strand starting at position 2151 of SEQ ID NO: 587589
uacauuugaucggcacuuu

SEQ ID NO: 803389 - RNA, 19 nt, Artificial Sequence
  Description of Artificial Sequence: Synthetic oligonucleotide
  Antisense strand to SEQ ID NO: 803388
aaagugccgaucaaaugua

SEQ ID NO: 803390 - RNA, 19 nt, Artificial Sequence
  Description of Artificial Sequence: Synthetic oligonucleotide
  Sense strand starting at position 2328 of SEQ ID NO: 587589
gauggaucagcuuauguga

SEQ ID NO: 803391 - RNA, 19 nt, Artificial Sequence
  Description of Artificial Sequence: Synthetic oligonucleotide
  Antisense strand to SEQ ID NO: 803390
ucacauaagcugauccauc

SEQ ID NO: 803392 - RNA, 19 nt, Artificial Sequence
  Description of Artificial Sequence: Synthetic oligonucleotide
  Sense strand starting at position 2336 of SEQ ID NO: 587589
agcuuaugugauggagaaa

SEQ ID NO: 803393 - RNA, 19 nt, Artificial Sequence
  Description of Artificial Sequence: Synthetic oligonucleotide
  Antisense strand to SEQ ID NO: 803392
uuucuccaucacauaagcu

SEQ ID NO: 803394 - RNA, 19 nt, Artificial Sequence
  Description of Artificial Sequence: Synthetic oligonucleotide
  Sense strand starting at position 2456 of SEQ ID NO: 587589
gcagaacaucgaggucaaa

SEQ ID NO: 803395 - RNA, 19 nt, Artificial Sequence
  Description of Artificial Sequence: Synthetic oligonucleotide
  Antisense strand to SEQ ID NO: 803394
uuugaccucgauguucugc

SEQ ID NO: 803396 - RNA, 19 nt, Artificial Sequence
  Description of Artificial Sequence: Synthetic oligonucleotide
  Sense strand starting at position 2476 of SEQ ID NO: 587589
aaucuaaagccguauugag

SEQ ID NO: 803397 - RNA, 19 nt, Artificial Sequence
  Description of Artificial Sequence: Synthetic oligonucleotide
  Antisense strand to SEQ ID NO: 803396
cucaauacggcuuuagauu

SEQ ID NO: 803398 - RNA, 19 nt, Artificial Sequence
  Description of Artificial Sequence: Synthetic oligonucleotide
  Sense strand starting at position 2484 of SEQ ID NO: 587589
gccguauugaguuaugaua

SEQ ID NO: 803399 - RNA, 19 nt, Artificial Sequence
  Description of Artificial Sequence: Synthetic oligonucleotide
  Antisense strand to SEQ ID NO: 803398
uaucauaacucaauacggc

SEQ ID NO: 803400 - RNA, 19 nt, Artificial Sequence
  Description of Artificial Sequence: Synthetic oligonucleotide
  Sense strand starting at position 2506 of SEQ ID NO: 587589
gaaagaagauagucgcaaa

SEQ ID NO: 803401 - RNA, 19 nt, Artificial Sequence
  Description of Artificial Sequence: Synthetic oligonucleotide
  Antisense strand to SEQ ID NO: 803400
uuugcgacuaucuucuuuc

SEQ ID NO: 803402 - RNA, 19 nt, Artificial Sequence
  Description of Artificial Sequence: Synthetic oligonucleotide
  Sense strand starting at position 2653 of SEQ ID NO: 587589
aguugaugacaauguucua

SEQ ID NO: 803403 - RNA, 19 nt, Artificial Sequence
  Description of Artificial Sequence: Synthetic oligonucleotide
  Antisense strand to SEQ ID NO: 803402
uagaacauugucaucaacu

SEQ ID NO: 803404 - RNA, 19 nt, Artificial Sequence
  Description of Artificial Sequence: Synthetic oligonucleotide
  Sense strand starting at position 2656 of SEQ ID NO: 587589
ugaugacaauguucuagau

SEQ ID NO: 803405 - RNA, 19 nt, Artificial Sequence
  Description of Artificial Sequence: Synthetic oligonucleotide
  Antisense strand to SEQ ID NO: 803404
aucuagaacauugucauca

SEQ ID NO: 803406 - RNA, 19 nt, Artificial Sequence
  Description of Artificial Sequence: Synthetic oligonucleotide
  Sense strand starting at position 2757 of SEQ ID NO: 587589
guguaaauuauaggucagu

SEQ ID NO: 803407 - RNA, 19 nt, Artificial Sequence
  Description of Artificial Sequence: Synthetic oligonucleotide
  Antisense strand to SEQ ID NO: 803406
acugaccuauaauuuacac

SEQ ID NO: 803408 - RNA, 19 nt, Artificial Sequence
  Description of Artificial Sequence: Synthetic oligonucleotide
  Sense strand starting at position 2758 of SEQ ID NO: 587589
uguaaauuauaggucagua

SEQ ID NO: 803409 - RNA, 19 nt, Artificial Sequence
  Description of Artificial Sequence: Synthetic oligonucleotide
  Antisense strand to SEQ ID NO: 803408
uacugaccuauaauuuaca

SEQ ID NO: 803410 - RNA, 19 nt, Artificial Sequence
  Description of Artificial Sequence: Synthetic oligonucleotide
  Sense strand starting at position 2763 of SEQ ID NO: 587589
auuauaggucaguaaagcu

SEQ ID NO: 803411 - RNA, 19 nt, Artificial Sequence
  Description of Artificial Sequence: Synthetic oligonucleotide
  Antisense strand to SEQ ID NO: 803410
agcuuuacugaccuauaau

SEQ ID NO: 803412 - RNA, 19 nt, Artificial Sequence
  Description of Artificial Sequence: Synthetic oligonucleotide
  Sense strand starting at position 2792 of SEQ ID NO: 587589
ggauaagaggcaugcacau

SEQ ID NO: 803413 - RNA, 19 nt, Artificial Sequence
  Description of Artificial Sequence: Synthetic oligonucleotide
  Antisense strand to SEQ ID NO: 803412
augugcaugccucuuaucc

SEQ ID NO: 803414 - RNA, 19 nt, Artificial Sequence
  Description of Artificial Sequence: Synthetic oligonucleotide
  Sense strand starting at position 2898 of SEQ ID NO: 587589
uuacauuagccaggaagga

SEQ ID NO: 803415 - RNA, 19 nt, Artificial Sequence
  Description of Artificial Sequence: Synthetic oligonucleotide
  Antisense strand to SEQ ID NO: 803414
uccuuccuggcuaauguaa

SEQ ID NO: 803416 - RNA, 19 nt, Artificial Sequence
  Description of Artificial Sequence: Synthetic oligonucleotide
  Sense strand starting at position 2942 of SEQ ID NO: 587589
cucaguuuauggcugagaa

SEQ ID NO: 803417 - RNA, 19 nt, Artificial Sequence
  Description of Artificial Sequence: Synthetic oligonucleotide
  Antisense strand to SEQ ID NO: 803416
uucucagccauaaacugag

SEQ ID NO: 803418 - RNA, 19 nt, Artificial Sequence
  Description of Artificial Sequence: Synthetic oligonucleotide
  Sense strand starting at position 2943 of SEQ ID NO: 587589
ucaguuuauggcugagaaa

SEQ ID NO: 803419 - RNA, 19 nt, Artificial Sequence
  Description of Artificial Sequence: Synthetic oligonucleotide
  Antisense strand to SEQ ID NO: 803418
uuucucagccauaaacuga

SEQ ID NO: 803420 - RNA, 19 nt, Artificial Sequence
  Description of Artificial Sequence: Synthetic oligonucleotide
  Sense strand starting at position 2944 of SEQ ID NO: 587589
caguuuauggcugagaaac

SEQ ID NO: 803421 - RNA, 19 nt, Artificial Sequence
  Description of Artificial Sequence: Synthetic oligonucleotide
  Antisense strand to SEQ ID NO: 803420
guuucucagccauaaacug

SEQ ID NO: 803422 - RNA, 19 nt, Artificial Sequence
  Description of Artificial Sequence: Synthetic oligonucleotide
  Sense strand starting at position 3069 of SEQ ID NO: 587589
ugcacaauuguagguuaga

SEQ ID NO: 803423 - RNA, 19 nt, Artificial Sequence
  Description of Artificial Sequence: Synthetic oligonucleotide
  Antisense strand to SEQ ID NO: 803422
ucuaaccuacaauugugca

SEQ ID NO: 803424 - RNA, 19 nt, Artificial Sequence
  Description of Artificial Sequence: Synthetic oligonucleotide
  Sense strand starting at position 3070 of SEQ ID NO: 587589
gcacaauuguagguuagaa

SEQ ID NO: 803425 - RNA, 19 nt, Artificial Sequence
  Description of Artificial Sequence: Synthetic oligonucleotide
  Antisense strand to SEQ ID NO: 803424
uucuaaccuacaauugugc

SEQ ID NO: 803426 - RNA, 19 nt, Artificial Sequence
  Description of Artificial Sequence: Synthetic oligonucleotide
  Sense strand starting at position 3331 of SEQ ID NO: 587589
uuaaacuucgcagaacuuu

SEQ ID NO: 803427 - RNA, 19 nt, Artificial Sequence
  Description of Artificial Sequence: Synthetic oligonucleotide
  Antisense strand to SEQ ID NO: 803426
aaaguucugcgaaguuuaa

SEQ ID NO: 803428 - RNA, 19 nt, Artificial Sequence
  Description of Artificial Sequence: Synthetic oligonucleotide
  Sense strand starting at position 3337 of SEQ ID NO: 587589
uucgcagaacuuuagaagu

SEQ ID NO: 803429 - RNA, 19 nt, Artificial Sequence
  Description of Artificial Sequence: Synthetic oligonucleotide
  Antisense strand to SEQ ID NO: 803428
acuucuaaaguucugcgaa

SEQ ID NO: 803430 - RNA, 19 nt, Artificial Sequence
  Description of Artificial Sequence: Synthetic oligonucleotide
  Sense strand starting at position 3452 of SEQ ID NO: 587589
auacaauugcauuggaugu

SEQ ID NO: 803431 - RNA, 19 nt, Artificial Sequence
  Description of Artificial Sequence: Synthetic oligonucleotide
  Antisense strand to SEQ ID NO: 803430
acauccaaugcaauuguau

SEQ ID NO: 803432 - RNA, 19 nt, Artificial Sequence
  Description of Artificial Sequence: Synthetic oligonucleotide
  Sense strand starting at position 3474 of SEQ ID NO: 587589
cauggugugaauggcauau

SEQ ID NO: 803433 - RNA, 19 nt, Artificial Sequence
  Description of Artificial Sequence: Synthetic oligonucleotide
  Antisense strand to SEQ ID NO: 803432
auaugccauucacaccaug

SEQ ID NO: 803434 - RNA, 19 nt, Artificial Sequence
  Description of Artificial Sequence: Synthetic oligonucleotide
  Sense strand starting at position 3478 of SEQ ID NO: 587589
gugugaauggcauauaaac

SEQ ID NO: 803435 - RNA, 19 nt, Artificial Sequence
  Description of Artificial Sequence: Synthetic oligonucleotide
  Antisense strand to SEQ ID NO: 803434
guuuauaugccauucacac

SEQ ID NO: 803436 - RNA, 19 nt, Artificial Sequence
  Description of Artificial Sequence: Synthetic oligonucleotide
  Sense strand starting at position 3527 of SEQ ID NO: 587589
agaauacuccugcagccua

SEQ ID NO: 803437 - RNA, 19 nt, Artificial Sequence
  Description of Artificial Sequence: Synthetic oligonucleotide
  Antisense strand to SEQ ID NO: 803436
uaggcugcaggaguauucu

SEQ ID NO: 803438 - RNA, 19 nt, Artificial Sequence
  Description of Artificial Sequence: Synthetic oligonucleotide
  Sense strand starting at position 3551 of SEQ ID NO: 587589
augcauaaauguccuuuga

SEQ ID NO: 803439 - RNA, 19 nt, Artificial Sequence
  Description of Artificial Sequence: Synthetic oligonucleotide
  Antisense strand to SEQ ID NO: 803438
ucaaaggacauuuaugcau

SEQ ID NO: 803440 - RNA, 19 nt, Artificial Sequence
  Description of Artificial Sequence: Synthetic oligonucleotide
  Sense strand starting at position 3553 of SEQ ID NO: 587589
gcauaaauguccuuugaua

SEQ ID NO: 803441 - RNA, 19 nt, Artificial Sequence
  Description of Artificial Sequence: Synthetic oligonucleotide
  Antisense strand to SEQ ID NO: 803440
uaucaaaggacauuuaugc

SEQ ID NO: 803442 - RNA, 19 nt, Artificial Sequence
  Description of Artificial Sequence: Synthetic oligonucleotide
  Sense strand starting at position 3555 of SEQ ID NO: 587589
auaaauguccuuugauaag

SEQ ID NO: 803443 - RNA, 19 nt, Artificial Sequence
  Description of Artificial Sequence: Synthetic oligonucleotide
  Antisense strand to SEQ ID NO: 803442
cuuaucaaaggacauuuau

SEQ ID NO: 803444 - RNA, 19 nt, Artificial Sequence
  Description of Artificial Sequence: Synthetic oligonucleotide
  Sense strand starting at position 3630 of SEQ ID NO: 587589
auaauugcuaagggaaagu

SEQ ID NO: 803445 - RNA, 19 nt, Artificial Sequence
  Description of Artificial Sequence: Synthetic oligonucleotide
  Antisense strand to SEQ ID NO: 803444
acuuucccuuagcaauuau

SEQ ID NO: 803446 - RNA, 19 nt, Artificial Sequence
  Description of Artificial Sequence: Synthetic oligonucleotide
  Sense strand starting at position 3709 of SEQ ID NO: 587589
gcacucaagaguuggagga

SEQ ID NO: 803447 - RNA, 19 nt, Artificial Sequence
  Description of Artificial Sequence: Synthetic oligonucleotide
  Antisense strand to SEQ ID NO: 803446
uccuccaacucuugagugc

SEQ ID NO: 803448 - RNA, 19 nt, Artificial Sequence
  Description of Artificial Sequence: Synthetic oligonucleotide
  Sense strand starting at position 3719 of SEQ ID NO: 587589
guuggaggauauguaauau

SEQ ID NO: 803449 - RNA, 19 nt, Artificial Sequence
  Description of Artificial Sequence: Synthetic oligonucleotide
  Antisense strand to SEQ ID NO: 803448
auauuacauauccuccaac

SEQ ID NO: 803450 - RNA, 19 nt, Artificial Sequence
  Description of Artificial Sequence: Synthetic oligonucleotide
  Sense strand starting at position 3774 of SEQ ID NO: 587589
uagcacguccaauagaguu

SEQ ID NO: 803451 - RNA, 19 nt, Artificial Sequence
  Description of Artificial Sequence: Synthetic oligonucleotide
  Antisense strand to SEQ ID NO: 803450
aacucuauuggacgugcua

SEQ ID NO: 803452 - RNA, 19 nt, Artificial Sequence
  Description of Artificial Sequence: Synthetic oligonucleotide
  Sense strand starting at position 3782 of SEQ ID NO: 587589
ccaauagaguugcugagau

SEQ ID NO: 803453 - RNA, 19 nt, Artificial Sequence
  Description of Artificial Sequence: Synthetic oligonucleotide
  Antisense strand to SEQ ID NO: 803452
aucucagcaacucuauugg

SEQ ID NO: 803454 - RNA, 19 nt, Artificial Sequence
  Description of Artificial Sequence: Synthetic oligonucleotide
  Sense strand starting at position 3792 of SEQ ID NO: 587589
ugcugagauuuccaggaag

SEQ ID NO: 803455 - RNA, 19 nt, Artificial Sequence
  Description of Artificial Sequence: Synthetic oligonucleotide
  Antisense strand to SEQ ID NO: 803454
cuuccuggaaaucucagca

SEQ ID NO: 803456 - RNA, 19 nt, Artificial Sequence
  Description of Artificial Sequence: Synthetic oligonucleotide
  Sense strand starting at position 3972 of SEQ ID NO: 587589
ucacaugaucucuagguca

SEQ ID NO: 803457 - RNA, 19 nt, Artificial Sequence
  Description of Artificial Sequence: Synthetic oligonucleotide
  Antisense strand to SEQ ID NO: 803456
ugaccuagagaucauguga

SEQ ID NO: 803458 - RNA, 19 nt, Artificial Sequence
  Description of Artificial Sequence: Synthetic oligonucleotide
  Sense strand starting at position 3 of SEQ ID NO: 587590
agucacuuuguguacaagu

SEQ ID NO: 803459 - RNA, 19 nt, Artificial Sequence
  Description of Artificial Sequence: Synthetic oligonucleotide
  Antisense strand to SEQ ID NO: 803458
acuuguacacaaagugacu

SEQ ID NO: 803460 - RNA, 19 nt, Artificial Sequence
  Description of Artificial Sequence: Synthetic oligonucleotide
  Sense strand starting at position 61 of SEQ ID NO: 587590
cucuuaucccucgaggcaa

SEQ ID NO: 803461 - RNA, 19 nt, Artificial Sequence
  Description of Artificial Sequence: Synthetic oligonucleotide
  Antisense strand to SEQ ID NO: 803460
uugccucgagggauaagag

SEQ ID NO: 803462 - RNA, 19 nt, Artificial Sequence
  Description of Artificial Sequence: Synthetic oligonucleotide
  Sense strand starting at position 139 of SEQ ID NO: 587590
uaucuauucugaucggaca

SEQ ID NO: 803463 - RNA, 19 nt, Artificial Sequence
  Description of Artificial Sequence: Synthetic oligonucleotide
  Antisense strand to SEQ ID NO: 803462
uguccgaucagaauagaua

SEQ ID NO: 803464 - RNA, 19 nt, Artificial Sequence
  Description of Artificial Sequence: Synthetic oligonucleotide
  Sense strand starting at position 140 of SEQ ID NO: 587590
aucuauucugaucggacau

SEQ ID NO: 803465 - RNA, 19 nt, Artificial Sequence
  Description of Artificial Sequence: Synthetic oligonucleotide
  Antisense strand to SEQ ID NO: 803464
auguccgaucagaauagau

SEQ ID NO: 803466 - RNA, 19 nt, Artificial Sequence
  Description of Artificial Sequence: Synthetic oligonucleotide
  Sense strand starting at position 308 of SEQ ID NO: 587590
aacguaauagcuuauugau

SEQ ID NO: 803467 - RNA, 19 nt, Artificial Sequence
  Description of Artificial Sequence: Synthetic oligonucleotide
  Antisense strand to SEQ ID NO: 803466
aucaauaagcuauuacguu

SEQ ID NO: 803468 - RNA, 19 nt, Artificial Sequence
  Description of Artificial Sequence: Synthetic oligonucleotide
  Sense strand starting at position 318 of SEQ ID NO: 587590
cuuauugaucucuggugua

SEQ ID NO: 803469 - RNA, 19 nt, Artificial Sequence
  Description of Artificial Sequence: Synthetic oligonucleotide
  Antisense strand to SEQ ID NO: 803468
uacaccagagaucaauaag

SEQ ID NO: 803470 - RNA, 19 nt, Artificial Sequence
  Description of Artificial Sequence: Synthetic oligonucleotide
  Sense strand starting at position 551 of SEQ ID NO: 587590
gaauuucuuggcugucagu

SEQ ID NO: 803471 - RNA, 19 nt, Artificial Sequence
  Description of Artificial Sequence: Synthetic oligonucleotide
  Antisense strand to SEQ ID NO: 803470
acugacagccaagaaauuc

SEQ ID NO: 803472 - RNA, 19 nt, Artificial Sequence
  Description of Artificial Sequence: Synthetic oligonucleotide
  Sense strand starting at position 564 of SEQ ID NO: 587590
gucaguaaaugcccaauua

SEQ ID NO: 803473 - RNA, 19 nt, Artificial Sequence
  Description of Artificial Sequence: Synthetic oligonucleotide
  Antisense strand to SEQ ID NO: 803472
uaauugggcauuuacugac

SEQ ID NO: 803474 - RNA, 19 nt, Artificial Sequence
  Description of Artificial Sequence: Synthetic oligonucleotide
  Sense strand starting at position 669 of SEQ ID NO: 587590
agauaacacuugcugacaa

SEQ ID NO: 803475 - RNA, 19 nt, Artificial Sequence
  Description of Artificial Sequence: Synthetic oligonucleotide
  Antisense strand to SEQ ID NO: 803474
uugucagcaaguguuaucu

SEQ ID NO: 803476 - RNA, 19 nt, Artificial Sequence
  Description of Artificial Sequence: Synthetic oligonucleotide
  Sense strand starting at position 681 of SEQ ID NO: 587590
cugacaaauuggcuguuga

SEQ ID NO: 803477 - RNA, 19 nt, Artificial Sequence
  Description of Artificial Sequence: Synthetic oligonucleotide
  Antisense strand to SEQ ID NO: 803476
ucaacagccaauuugucag

SEQ ID NO: 803478 - RNA, 19 nt, Artificial Sequence
  Description of Artificial Sequence: Synthetic oligonucleotide
  Sense strand starting at position 682 of SEQ ID NO: 587590
ugacaaauuggcuguugac

SEQ ID NO: 803479 - RNA, 19 nt, Artificial Sequence
  Description of Artificial Sequence: Synthetic oligonucleotide
  Antisense strand to SEQ ID NO: 803478
gucaacagccaauuuguca

SEQ ID NO: 803480 - RNA, 19 nt, Artificial Sequence
  Description of Artificial Sequence: Synthetic oligonucleotide
  Sense strand starting at position 877 of SEQ ID NO: 587590
caguguguuuaacugauga

SEQ ID NO: 803481 - RNA, 19 nt, Artificial Sequence
  Description of Artificial Sequence: Synthetic oligonucleotide
  Antisense strand to SEQ ID NO: 803480
ucaucaguuaaacacacug

SEQ ID NO: 803482 - RNA, 19 nt, Artificial Sequence
  Description of Artificial Sequence: Synthetic oligonucleotide
  Sense strand starting at position 879 of SEQ ID NO: 587590
guguguuuaacugaugaac

SEQ ID NO: 803483 - RNA, 19 nt, Artificial Sequence
  Description of Artificial Sequence: Synthetic oligonucleotide
  Antisense strand to SEQ ID NO: 803482
guucaucaguuaaacacac

SEQ ID NO: 803484 - RNA, 19 nt, Artificial Sequence
  Description of Artificial Sequence: Synthetic oligonucleotide
  Sense strand starting at position 907 of SEQ ID NO: 587590
ugaagucagaaguguaacu

SEQ ID NO: 803485 - RNA, 19 nt, Artificial Sequence
  Description of Artificial Sequence: Synthetic oligonucleotide
  Antisense strand to SEQ ID NO: 803484
aguuacacuucugacuuca

SEQ ID NO: 803486 - RNA, 19 nt, Artificial Sequence
  Description of Artificial Sequence: Synthetic oligonucleotide
  Sense strand starting at position 909 of SEQ ID NO: 587590
aagucagaaguguaacuua

SEQ ID NO: 803487 - RNA, 19 nt, Artificial Sequence
  Description of Artificial Sequence: Synthetic oligonucleotide
  Antisense strand to SEQ ID NO: 803486
uaaguuacacuucugacuu

SEQ ID NO: 803488 - RNA, 19 nt, Artificial Sequence
  Description of Artificial Sequence: Synthetic oligonucleotide
  Sense strand starting at position 912 of SEQ ID NO: 587590
ucagaaguguaacuuaauu

SEQ ID NO: 803489 - RNA, 19 nt, Artificial Sequence
  Description of Artificial Sequence: Synthetic oligonucleotide
  Antisense strand to SEQ ID NO: 803488
aauuaaguuacacuucuga

SEQ ID NO: 803490 - RNA, 19 nt, Artificial Sequence
  Description of Artificial Sequence: Synthetic oligonucleotide
  Sense strand starting at position 940 of SEQ ID NO: 587590
gauagauguucuuugcaau

SEQ ID NO: 803491 - RNA, 19 nt, Artificial Sequence
  Description of Artificial Sequence: Synthetic oligonucleotide
  Antisense strand to SEQ ID NO: 803490
auugcaaagaacaucuauc

SEQ ID NO: 803492 - RNA, 19 nt, Artificial Sequence
  Description of Artificial Sequence: Synthetic oligonucleotide
  Sense strand starting at position 1020 of SEQ ID NO: 587590
gccuucucuuaacccgaaa

SEQ ID NO: 803493 - RNA, 19 nt, Artificial Sequence
  Description of Artificial Sequence: Synthetic oligonucleotide
  Antisense strand to SEQ ID NO: 803492
uuucggguuaagagaaggc

SEQ ID NO: 803494 - RNA, 19 nt, Artificial Sequence
  Description of Artificial Sequence: Synthetic oligonucleotide
  Sense strand starting at position 1032 of SEQ ID NO: 587590
cccgaaaggaguuaucucu

SEQ ID NO: 803495 - RNA, 19 nt, Artificial Sequence
  Description of Artificial Sequence: Synthetic oligonucleotide
  Antisense strand to SEQ ID NO: 803494
agagauaacuccuuucggg

SEQ ID NO: 803496 - RNA, 19 nt, Artificial Sequence
  Description of Artificial Sequence: Synthetic oligonucleotide
  Sense strand starting at position 1055 of SEQ ID NO: 587590
cgauccaucgacuggaaua

SEQ ID NO: 803497 - RNA, 19 nt, Artificial Sequence
  Description of Artificial Sequence: Synthetic oligonucleotide
  Antisense strand to SEQ ID NO: 803496
uauuccagucgauggaucg

SEQ ID NO: 803498 - RNA, 19 nt, Artificial Sequence
  Description of Artificial Sequence: Synthetic oligonucleotide
  Sense strand starting at position 1136 of SEQ ID NO: 587590
gacagauguguacacccua

SEQ ID NO: 803499 - RNA, 19 nt, Artificial Sequence
  Description of Artificial Sequence: Synthetic oligonucleotide
  Antisense strand to SEQ ID NO: 803498
uaggguguacacaucuguc

SEQ ID NO: 803500 - RNA, 19 nt, Artificial Sequence
  Description of Artificial Sequence: Synthetic oligonucleotide
  Sense strand starting at position 1412 of SEQ ID NO: 587590
gggcgagcuccucugcuuu

SEQ ID NO: 803501 - RNA, 19 nt, Artificial Sequence
  Description of Artificial Sequence: Synthetic oligonucleotide
  Antisense strand to SEQ ID NO: 803500
aaagcagaggagcucgccc

SEQ ID NO: 803502 - RNA, 19 nt, Artificial Sequence
  Description of Artificial Sequence: Synthetic oligonucleotide
  Sense strand starting at position 2564 of SEQ ID NO: 587590
gggaguuccuuccucuauc

SEQ ID NO: 803503 - RNA, 19 nt, Artificial Sequence
  Description of Artificial Sequence: Synthetic oligonucleotide
  Antisense strand to SEQ ID NO: 803502
gauagaggaaggaacuccc

SEQ ID NO: 803504 - RNA, 19 nt, Artificial Sequence
  Description of Artificial Sequence: Synthetic oligonucleotide
  Sense strand starting at position 2766 of SEQ ID NO: 587590
gaggucauuugacaucuca

SEQ ID NO: 803505 - RNA, 19 nt, Artificial Sequence
  Description of Artificial Sequence: Synthetic oligonucleotide
  Antisense strand to SEQ ID NO: 803504
ugagaugucaaaugaccuc

SEQ ID NO: 803506 - RNA, 19 nt, Artificial Sequence
  Description of Artificial Sequence: Synthetic oligonucleotide
  Sense strand starting at position 2832 of SEQ ID NO: 587590
cgacuuucaggguagauau

SEQ ID NO: 803507 - RNA, 19 nt, Artificial Sequence
  Description of Artificial Sequence: Synthetic oligonucleotide
  Antisense strand to SEQ ID NO: 803506
auaucuacccugaaagucg

SEQ ID NO: 803508 - RNA, 19 nt, Artificial Sequence
  Description of Artificial Sequence: Synthetic oligonucleotide
  Sense strand starting at position 2858 of SEQ ID NO: 587590
ggaggauucgcccaucacg

SEQ ID NO: 803509 - RNA, 19 nt, Artificial Sequence
  Description of Artificial Sequence: Synthetic oligonucleotide
  Antisense strand to SEQ ID NO: 803508
cgugaugggcgaauccucc

SEQ ID NO: 803510 - RNA, 19 nt, Artificial Sequence
  Description of Artificial Sequence: Synthetic oligonucleotide
  Sense strand starting at position 2920 of SEQ ID NO: 587590
aguccuccuuuacuuagau

SEQ ID NO: 803511 - RNA, 19 nt, Artificial Sequence
  Description of Artificial Sequence: Synthetic oligonucleotide
  Antisense strand to SEQ ID NO: 803510
aucuaaguaaaggaggacu

SEQ ID NO: 803512 - RNA, 19 nt, Artificial Sequence
  Description of Artificial Sequence: Synthetic oligonucleotide
  Sense strand starting at position 3059 of SEQ ID NO: 587590
gcaagcacucuccaugcua

SEQ ID NO: 803513 - RNA, 19 nt, Artificial Sequence
  Description of Artificial Sequence: Synthetic oligonucleotide
  Antisense strand to SEQ ID NO: 803512
uagcauggagagugcuugc

SEQ ID NO: 803514 - RNA, 19 nt, Artificial Sequence
  Description of Artificial Sequence: Synthetic oligonucleotide
  Sense strand starting at position 3107 of SEQ ID NO: 587590
guccuauugacauagguug

SEQ ID NO: 803515 - RNA, 19 nt, Artificial Sequence
  Description of Artificial Sequence: Synthetic oligonucleotide
  Antisense strand to SEQ ID NO: 803514
caaccuaugucaauaggac

SEQ ID NO: 803516 - RNA, 19 nt, Artificial Sequence
  Description of Artificial Sequence: Synthetic oligonucleotide
  Sense strand starting at position 3114 of SEQ ID NO: 587590
ugacauagguugucacuuu

SEQ ID NO: 803517 - RNA, 19 nt, Artificial Sequence
  Description of Artificial Sequence: Synthetic oligonucleotide
  Antisense strand to SEQ ID NO: 803516
aaagugacaaccuauguca

SEQ ID NO: 803518 - RNA, 19 nt, Artificial Sequence
  Description of Artificial Sequence: Synthetic oligonucleotide
  Sense strand starting at position 3138 of SEQ ID NO: 587590
cccaaacauccuugugaga

SEQ ID NO: 803519 - RNA, 19 nt, Artificial Sequence
  Description of Artificial Sequence: Synthetic oligonucleotide
  Antisense strand to SEQ ID NO: 803518
ucucacaaggauguuuggg

SEQ ID NO: 803520 - RNA, 19 nt, Artificial Sequence
  Description of Artificial Sequence: Synthetic oligonucleotide
  Sense strand starting at position 3206 of SEQ ID NO: 587590
gcaaguaaguuguuugaaa

SEQ ID NO: 803521 - RNA, 19 nt, Artificial Sequence
  Description of Artificial Sequence: Synthetic oligonucleotide
  Antisense strand to SEQ ID NO: 803520
uuucaaacaacuuacuugc

SEQ ID NO: 803522 - RNA, 19 nt, Artificial Sequence
  Description of Artificial Sequence: Synthetic oligonucleotide
  Sense strand starting at position 3207 of SEQ ID NO: 587590
caaguaaguuguuugaaac

SEQ ID NO: 803523 - RNA, 19 nt, Artificial Sequence
  Description of Artificial Sequence: Synthetic oligonucleotide
  Antisense strand to SEQ ID NO: 803522
guuucaaacaacuuacuug

SEQ ID NO: 803524 - RNA, 19 nt, Artificial Sequence
  Description of Artificial Sequence: Synthetic oligonucleotide
  Sense strand starting at position 3208 of SEQ ID NO: 587590
aaguaaguuguuugaaaca

SEQ ID NO: 803525 - RNA, 19 nt, Artificial Sequence
  Description of Artificial Sequence: Synthetic oligonucleotide
  Antisense strand to SEQ ID NO: 803524
uguuucaaacaacuuacuu

SEQ ID NO: 803526 - RNA, 19 nt, Artificial Sequence
  Description of Artificial Sequence: Synthetic oligonucleotide
  Sense strand starting at position 3285 of SEQ ID NO: 587590
caaugcuuagcgccuagua

SEQ ID NO: 803527 - RNA, 19 nt, Artificial Sequence
  Description of Artificial Sequence: Synthetic oligonucleotide
  Antisense strand to SEQ ID NO: 803526
uacuaggcgcuaagcauug

SEQ ID NO: 803528 - RNA, 19 nt, Artificial Sequence
  Description of Artificial Sequence: Synthetic oligonucleotide
  Sense strand starting at position 3434 of SEQ ID NO: 587590
guuuauugcgaagagcaaa

SEQ ID NO: 803529 - RNA, 19 nt, Artificial Sequence
  Description of Artificial Sequence: Synthetic oligonucleotide
  Antisense strand to SEQ ID NO: 803528
uuugcucuucgcaauaaac

SEQ ID NO: 803530 - RNA, 19 nt, Artificial Sequence
  Description of Artificial Sequence: Synthetic oligonucleotide
  Sense strand starting at position 3733 of SEQ ID NO: 587590
ccucaccucucaguaagua

SEQ ID NO: 803531 - RNA, 19 nt, Artificial Sequence
  Description of Artificial Sequence: Synthetic oligonucleotide
  Antisense strand to SEQ ID NO: 803530
uacuuacugagaggugagg

SEQ ID NO: 803532 - RNA, 19 nt, Artificial Sequence
  Description of Artificial Sequence: Synthetic oligonucleotide
  Sense strand starting at position 3734 of SEQ ID NO: 587590
cucaccucucaguaaguaa

SEQ ID NO: 803533 - RNA, 19 nt, Artificial Sequence
  Description of Artificial Sequence: Synthetic oligonucleotide
  Antisense strand to SEQ ID NO: 803532
uuacuuacugagaggugag

SEQ ID NO: 803534 - RNA, 19 nt, Artificial Sequence
  Description of Artificial Sequence: Synthetic oligonucleotide
  Sense strand starting at position 3966 of SEQ ID NO: 587590
uuuccauucuuguuggaaa

SEQ ID NO: 803535 - RNA, 19 nt, Artificial Sequence
  Description of Artificial Sequence: Synthetic oligonucleotide
  Antisense strand to SEQ ID NO: 803534
uuuccaacaagaauggaaa

SEQ ID NO: 803536 - RNA, 19 nt, Artificial Sequence
  Description of Artificial Sequence: Synthetic oligonucleotide
  Sense strand starting at position 3968 of SEQ ID NO: 587590
uccauucuuguuggaaaga

SEQ ID NO: 803537 - RNA, 19 nt, Artificial Sequence
  Description of Artificial Sequence: Synthetic oligonucleotide
  Antisense strand to SEQ ID NO: 803536
ucuuuccaacaagaaugga

SEQ ID NO: 803538 - RNA, 19 nt, Artificial Sequence
  Description of Artificial Sequence: Synthetic oligonucleotide
  Sense strand starting at position 341 of SEQ ID NO: 587591
cagcauagugccugaaaca

SEQ ID NO: 803539 - RNA, 19 nt, Artificial Sequence
  Description of Artificial Sequence: Synthetic oligonucleotide
  Antisense strand to SEQ ID NO: 803538
uguuucaggcacuaugcug

SEQ ID NO: 803540 - RNA, 19 nt, Artificial Sequence
  Description of Artificial Sequence: Synthetic oligonucleotide
  Sense strand starting at position 342 of SEQ ID NO: 587591
agcauagugccugaaacaa

SEQ ID NO: 803541 - RNA, 19 nt, Artificial Sequence
  Description of Artificial Sequence: Synthetic oligonucleotide
  Antisense strand to SEQ ID NO: 803540
uuguuucaggcacuaugcu

SEQ ID NO: 803542 - RNA, 19 nt, Artificial Sequence
  Description of Artificial Sequence: Synthetic oligonucleotide
  Sense strand starting at position 354 of SEQ ID NO: 587591
gaaacaaagucagcaguua

SEQ ID NO: 803543 - RNA, 19 nt, Artificial Sequence
  Description of Artificial Sequence: Synthetic oligonucleotide
  Antisense strand to SEQ ID NO: 803542
uaacugcugacuuuguuuc

SEQ ID NO: 803544 - RNA, 19 nt, Artificial Sequence
  Description of Artificial Sequence: Synthetic oligonucleotide
  Sense strand starting at position 474 of SEQ ID NO: 587591
ugcacaggaucucuuuaga

SEQ ID NO: 803545 - RNA, 19 nt, Artificial Sequence
  Description of Artificial Sequence: Synthetic oligonucleotide
  Antisense strand to SEQ ID NO: 803544
ucuaaagagauccugugca

SEQ ID NO: 803546 - RNA, 19 nt, Artificial Sequence
  Description of Artificial Sequence: Synthetic oligonucleotide
  Sense strand starting at position 479 of SEQ ID NO: 587591
aggaucucuuuagagaaac

SEQ ID NO: 803547 - RNA, 19 nt, Artificial Sequence
  Description of Artificial Sequence: Synthetic oligonucleotide
  Antisense strand to SEQ ID NO: 803546
guuucucuaaagagauccu

SEQ ID NO: 803548 - RNA, 19 nt, Artificial Sequence
  Description of Artificial Sequence: Synthetic oligonucleotide
  Sense strand starting at position 507 of SEQ ID NO: 587591
agcaguguggcaucgucaa

SEQ ID NO: 803549 - RNA, 19 nt, Artificial Sequence
  Description of Artificial Sequence: Synthetic oligonucleotide
  Antisense strand to SEQ ID NO: 803548
uugacgaugccacacugcu

SEQ ID NO: 803550 - RNA, 19 nt, Artificial Sequence
  Description of Artificial Sequence: Synthetic oligonucleotide
  Sense strand starting at position 682 of SEQ ID NO: 587591
uuaguauugacgggacacu

SEQ ID NO: 803551 - RNA, 19 nt, Artificial Sequence
  Description of Artificial Sequence: Synthetic oligonucleotide
  Antisense strand to SEQ ID NO: 803550
agugucccgucaauacuaa

SEQ ID NO: 803552 - RNA, 19 nt, Artificial Sequence
  Description of Artificial Sequence: Synthetic oligonucleotide
  Sense strand starting at position 1027 of SEQ ID NO: 587591
aagucuuaaguauguggga

SEQ ID NO: 803553 - RNA, 19 nt, Artificial Sequence
  Description of Artificial Sequence: Synthetic oligonucleotide
  Antisense strand to SEQ ID NO: 803552
ucccacauacuuaagacuu

SEQ ID NO: 803554 - RNA, 19 nt, Artificial Sequence
  Description of Artificial Sequence: Synthetic oligonucleotide
  Sense strand starting at position 1028 of SEQ ID NO: 587591
agucuuaaguaugugggau

SEQ ID NO: 803555 - RNA, 19 nt, Artificial Sequence
  Description of Artificial Sequence: Synthetic oligonucleotide
  Antisense strand to SEQ ID NO: 803554
aucccacauacuuaagacu

SEQ ID NO: 803556 - RNA, 19 nt, Artificial Sequence
  Description of Artificial Sequence: Synthetic oligonucleotide
  Sense strand starting at position 1029 of SEQ ID NO: 587591
gucuuaaguaugugggauu

SEQ ID NO: 803557 - RNA, 19 nt, Artificial Sequence
  Description of Artificial Sequence: Synthetic oligonucleotide
  Antisense strand to SEQ ID NO: 803556
aaucccacauacuuaagac

SEQ ID NO: 803558 - RNA, 19 nt, Artificial Sequence
  Description of Artificial Sequence: Synthetic oligonucleotide
  Sense strand starting at position 1061 of SEQ ID NO: 587591
gcuacagacugcucagaca

SEQ ID NO: 803559 - RNA, 19 nt, Artificial Sequence
  Description of Artificial Sequence: Synthetic oligonucleotide
  Antisense strand to SEQ ID NO: 803558
ugucugagcagucuguagc

SEQ ID NO: 803560 - RNA, 19 nt, Artificial Sequence
  Description of Artificial Sequence: Synthetic oligonucleotide
  Sense strand starting at position 1209 of SEQ ID NO: 587591
gccaucucccugugacaga

SEQ ID NO: 803561 - RNA, 19 nt, Artificial Sequence
  Description of Artificial Sequence: Synthetic oligonucleotide
  Antisense strand to SEQ ID NO: 803560
ucugucacagggagauggc

SEQ ID NO: 803562 - RNA, 19 nt, Artificial Sequence
  Description of Artificial Sequence: Synthetic oligonucleotide
  Sense strand starting at position 1210 of SEQ ID NO: 587591
ccaucucccugugacagau

SEQ ID NO: 803563 - RNA, 19 nt, Artificial Sequence
  Description of Artificial Sequence: Synthetic oligonucleotide
  Antisense strand to SEQ ID NO: 803562
aucugucacagggagaugg

SEQ ID NO: 803564 - RNA, 19 nt, Artificial Sequence
  Description of Artificial Sequence: Synthetic oligonucleotide
  Sense strand starting at position 1212 of SEQ ID NO: 587591
aucucccugugacagauua

SEQ ID NO: 803565 - RNA, 19 nt, Artificial Sequence
  Description of Artificial Sequence: Synthetic oligonucleotide
  Antisense strand to SEQ ID NO: 803564
uaaucugucacagggagau

SEQ ID NO: 803566 - RNA, 19 nt, Artificial Sequence
  Description of Artificial Sequence: Synthetic oligonucleotide
  Sense strand starting at position 1346 of SEQ ID NO: 587591
caaguaaguccuuaaggca

SEQ ID NO: 803567 - RNA, 19 nt, Artificial Sequence
  Description of Artificial Sequence: Synthetic oligonucleotide
  Antisense strand to SEQ ID NO: 803566
ugccuuaaggacuuacuug

SEQ ID NO: 803568 - RNA, 19 nt, Artificial Sequence
  Description of Artificial Sequence: Synthetic oligonucleotide
  Sense strand starting at position 1413 of SEQ ID NO: 587591
guggacagaucucaacgau

SEQ ID NO: 803569 - RNA, 19 nt, Artificial Sequence
  Description of Artificial Sequence: Synthetic oligonucleotide
  Antisense strand to SEQ ID NO: 803568
aucguugagaucuguccac

SEQ ID NO: 803570 - RNA, 19 nt, Artificial Sequence
  Description of Artificial Sequence: Synthetic oligonucleotide
  Sense strand starting at position 1461 of SEQ ID NO: 587591
gagcacuugucacgggaga

SEQ ID NO: 803571 - RNA, 19 nt, Artificial Sequence
  Description of Artificial Sequence: Synthetic oligonucleotide
  Antisense strand to SEQ ID NO: 803570
ucucccgugacaagugcuc

SEQ ID NO: 803572 - RNA, 19 nt, Artificial Sequence
  Description of Artificial Sequence: Synthetic oligonucleotide
  Sense strand starting at position 1462 of SEQ ID NO: 587591
agcacuugucacgggagaa

SEQ ID NO: 803573 - RNA, 19 nt, Artificial Sequence
  Description of Artificial Sequence: Synthetic oligonucleotide
  Antisense strand to SEQ ID NO: 803572
uucucccgugacaagugcu

SEQ ID NO: 803574 - RNA, 19 nt, Artificial Sequence
  Description of Artificial Sequence: Synthetic oligonucleotide
  Sense strand starting at position 1463 of SEQ ID NO: 587591
gcacuugucacgggagaac

SEQ ID NO: 803575 - RNA, 19 nt, Artificial Sequence
  Description of Artificial Sequence: Synthetic oligonucleotide
  Antisense strand to SEQ ID NO: 803574
guucucccgugacaagugc

SEQ ID NO: 803576 - RNA, 19 nt, Artificial Sequence
  Description of Artificial Sequence: Synthetic oligonucleotide
  Sense strand starting at position 2129 of SEQ ID NO: 587591
cgggagauucgcuggacga

SEQ ID NO: 803577 - RNA, 19 nt, Artificial Sequence
  Description of Artificial Sequence: Synthetic oligonucleotide
  Antisense strand to SEQ ID NO: 803576
ucguccagcgaaucucccg

SEQ ID NO: 803578 - RNA, 19 nt, Artificial Sequence
  Description of Artificial Sequence: Synthetic oligonucleotide
  Sense strand starting at position 2130 of SEQ ID NO: 587591
gggagauucgcuggacgau

SEQ ID NO: 803579 - RNA, 19 nt, Artificial Sequence
  Description of Artificial Sequence: Synthetic oligonucleotide
  Antisense strand to SEQ ID NO: 803578
aucguccagcgaaucuccc

SEQ ID NO: 803580 - RNA, 19 nt, Artificial Sequence
  Description of Artificial Sequence: Synthetic oligonucleotide
  Sense strand starting at position 2131 of SEQ ID NO: 587591
ggagauucgcuggacgauc

SEQ ID NO: 803581 - RNA, 19 nt, Artificial Sequence
  Description of Artificial Sequence: Synthetic oligonucleotide
  Antisense strand to SEQ ID NO: 803580
gaucguccagcgaaucucc

SEQ ID NO: 803582 - RNA, 19 nt, Artificial Sequence
  Description of Artificial Sequence: Synthetic oligonucleotide
  Sense strand starting at position 2314 of SEQ ID NO: 587591
acgcguucccuuuacagga

SEQ ID NO: 803583 - RNA, 19 nt, Artificial Sequence
  Description of Artificial Sequence: Synthetic oligonucleotide
  Antisense strand to SEQ ID NO: 803582
uccuguaaagggaacgcgu

SEQ ID NO: 803584 - RNA, 19 nt, Artificial Sequence
  Description of Artificial Sequence: Synthetic oligonucleotide
  Sense strand starting at position 2455 of SEQ ID NO: 587591
cagcgcucuaccgggaaua

SEQ ID NO: 803585 - RNA, 19 nt, Artificial Sequence
  Description of Artificial Sequence: Synthetic oligonucleotide
  Antisense strand to SEQ ID NO: 803584
uauucccgguagagcgcug

SEQ ID NO: 803586 - RNA, 19 nt, Artificial Sequence
  Description of Artificial Sequence: Synthetic oligonucleotide
  Sense strand starting at position 3032 of SEQ ID NO: 587591
acgagucuucagggagcuu

SEQ ID NO: 803587 - RNA, 19 nt, Artificial Sequence
  Description of Artificial Sequence: Synthetic oligonucleotide
  Antisense strand to SEQ ID NO: 803586
aagcucccugaagacucgu

SEQ ID NO: 803588 - RNA, 19 nt, Artificial Sequence
  Description of Artificial Sequence: Synthetic oligonucleotide
  Sense strand starting at position 3081 of SEQ ID NO: 587591
aguccagccuugugcuaau

SEQ ID NO: 803589 - RNA, 19 nt, Artificial Sequence
  Description of Artificial Sequence: Synthetic oligonucleotide
  Antisense strand to SEQ ID NO: 803588
auuagcacaaggcuggacu

SEQ ID NO: 803590 - RNA, 19 nt, Artificial Sequence
  Description of Artificial Sequence: Synthetic oligonucleotide
  Sense strand starting at position 3093 of SEQ ID NO: 587591
ugcuaauuagccugcucua

SEQ ID NO: 803591 - RNA, 19 nt, Artificial Sequence
  Description of Artificial Sequence: Synthetic oligonucleotide
  Antisense strand to SEQ ID NO: 803590
uagagcaggcuaauuagca

SEQ ID NO: 803592 - RNA, 19 nt, Artificial Sequence
  Description of Artificial Sequence: Synthetic oligonucleotide
  Sense strand starting at position 3238 of SEQ ID NO: 587591
ggaagagccucaucuaagg

SEQ ID NO: 803593 - RNA, 19 nt, Artificial Sequence
  Description of Artificial Sequence: Synthetic oligonucleotide
  Antisense strand to SEQ ID NO: 803592
ccuuagaugaggcucuucc

SEQ ID NO: 803594 - RNA, 19 nt, Artificial Sequence
  Description of Artificial Sequence: Synthetic oligonucleotide
  Sense strand starting at position 3402 of SEQ ID NO: 587591
ccuagauccuggcugguua

SEQ ID NO: 803595 - RNA, 19 nt, Artificial Sequence
  Description of Artificial Sequence: Synthetic oligonucleotide
  Antisense strand to SEQ ID NO: 803594
uaaccagccaggaucuagg

SEQ ID NO: 803596 - RNA, 19 nt, Artificial Sequence
  Description of Artificial Sequence: Synthetic oligonucleotide
  Sense strand starting at position 3413 of SEQ ID NO: 587591
gcugguuacagcgauguca

SEQ ID NO: 803597 - RNA, 19 nt, Artificial Sequence
  Description of Artificial Sequence: Synthetic oligonucleotide
  Antisense strand to SEQ ID NO: 803596
ugacaucgcuguaaccagc

SEQ ID NO: 803598 - RNA, 19 nt, Artificial Sequence
  Description of Artificial Sequence: Synthetic oligonucleotide
  Sense strand starting at position 3415 of SEQ ID NO: 587591
ugguuacagcgaugucaca

SEQ ID NO: 803599 - RNA, 19 nt, Artificial Sequence
  Description of Artificial Sequence: Synthetic oligonucleotide
  Antisense strand to SEQ ID NO: 803598
ugugacaucgcuguaacca

SEQ ID NO: 803600 - RNA, 19 nt, Artificial Sequence
  Description of Artificial Sequence: Synthetic oligonucleotide
  Sense strand starting at position 3478 of SEQ ID NO: 587591
gaucuaggcucagaggaau

SEQ ID NO: 803601 - RNA, 19 nt, Artificial Sequence
  Description of Artificial Sequence: Synthetic oligonucleotide
  Antisense strand to SEQ ID NO: 803600
auuccucugagccuagauc

SEQ ID NO: 803602 - RNA, 19 nt, Artificial Sequence
  Description of Artificial Sequence: Synthetic oligonucleotide
  Sense strand starting at position 3717 of SEQ ID NO: 587591
ggcuguagcaguugaggaa

SEQ ID NO: 803603 - RNA, 19 nt, Artificial Sequence
  Description of Artificial Sequence: Synthetic oligonucleotide
  Antisense strand to SEQ ID NO: 803602
uuccucaacugcuacagcc

SEQ ID NO: 803604 - RNA, 19 nt, Artificial Sequence
  Description of Artificial Sequence: Synthetic oligonucleotide
  Sense strand starting at position 3899 of SEQ ID NO: 587591
gcaauuacguacggcucaa

SEQ ID NO: 803605 - RNA, 19 nt, Artificial Sequence
  Description of Artificial Sequence: Synthetic oligonucleotide
  Antisense strand to SEQ ID NO: 803604
uugagccguacguaauugc

SEQ ID NO: 803606 - RNA, 19 nt, Artificial Sequence
  Description of Artificial Sequence: Synthetic oligonucleotide
  Sense strand starting at position 203 of SEQ ID NO: 587592
gugucuucacaggauguga

SEQ ID NO: 803607 - RNA, 19 nt, Artificial Sequence
  Description of Artificial Sequence: Synthetic oligonucleotide
  Antisense strand to SEQ ID NO: 803606
ucacauccugugaagacac

SEQ ID NO: 803608 - RNA, 19 nt, Artificial Sequence
  Description of Artificial Sequence: Synthetic oligonucleotide
  Sense strand starting at position 359 of SEQ ID NO: 587592
uugguucuagggugcaaga

SEQ ID NO: 803609 - RNA, 19 nt, Artificial Sequence
  Description of Artificial Sequence: Synthetic oligonucleotide
  Antisense strand to SEQ ID NO: 803608
ucuugcacccuagaaccaa

SEQ ID NO: 803610 - RNA, 19 nt, Artificial Sequence
  Description of Artificial Sequence: Synthetic oligonucleotide
  Sense strand starting at position 389 of SEQ ID NO: 587592
caggguauggcuugagaac

SEQ ID NO: 803611 - RNA, 19 nt, Artificial Sequence
  Description of Artificial Sequence: Synthetic oligonucleotide
  Antisense strand to SEQ ID NO: 803610
guucucaagccauacccug

SEQ ID NO: 803612 - RNA, 19 nt, Artificial Sequence
  Description of Artificial Sequence: Synthetic oligonucleotide
  Sense strand starting at position 390 of SEQ ID NO: 587592
aggguauggcuugagaacu

SEQ ID NO: 803613 - RNA, 19 nt, Artificial Sequence
  Description of Artificial Sequence: Synthetic oligonucleotide
  Antisense strand to SEQ ID NO: 803612
aguucucaagccauacccu

SEQ ID NO: 803614 - RNA, 19 nt, Artificial Sequence
  Description of Artificial Sequence: Synthetic oligonucleotide
  Sense strand starting at position 398 of SEQ ID NO: 587592
gcuugagaacuuugcuuag

SEQ ID NO: 803615 - RNA, 19 nt, Artificial Sequence
  Description of Artificial Sequence: Synthetic oligonucleotide
  Antisense strand to SEQ ID NO: 803614
cuaagcaaaguucucaagc

SEQ ID NO: 803616 - RNA, 19 nt, Artificial Sequence
  Description of Artificial Sequence: Synthetic oligonucleotide
  Sense strand starting at position 400 of SEQ ID NO: 587592
uugagaacuuugcuuaggu

SEQ ID NO: 803617 - RNA, 19 nt, Artificial Sequence
  Description of Artificial Sequence: Synthetic oligonucleotide
  Antisense strand to SEQ ID NO: 803616
accuaagcaaaguucucaa

SEQ ID NO: 803618 - RNA, 19 nt, Artificial Sequence
  Description of Artificial Sequence: Synthetic oligonucleotide
  Sense strand starting at position 401 of SEQ ID NO: 587592
ugagaacuuugcuuaggug

SEQ ID NO: 803619 - RNA, 19 nt, Artificial Sequence
  Description of Artificial Sequence: Synthetic oligonucleotide
  Antisense strand to SEQ ID NO: 803618
caccuaagcaaaguucuca

SEQ ID NO: 803620 - RNA, 19 nt, Artificial Sequence
  Description of Artificial Sequence: Synthetic oligonucleotide
  Sense strand starting at position 402 of SEQ ID NO: 587592
gagaacuuugcuuagguga

SEQ ID NO: 803621 - RNA, 19 nt, Artificial Sequence
  Description of Artificial Sequence: Synthetic oligonucleotide
  Antisense strand to SEQ ID NO: 803620
ucaccuaagcaaaguucuc

SEQ ID NO: 803622 - RNA, 19 nt, Artificial Sequence
  Description of Artificial Sequence: Synthetic oligonucleotide
  Sense strand starting at position 404 of SEQ ID NO: 587592
gaacuuugcuuaggugaca

SEQ ID NO: 803623 - RNA, 19 nt, Artificial Sequence
  Description of Artificial Sequence: Synthetic oligonucleotide
  Antisense strand to SEQ ID NO: 803622
ugucaccuaagcaaaguuc

SEQ ID NO: 803624 - RNA, 19 nt, Artificial Sequence
  Description of Artificial Sequence: Synthetic oligonucleotide
  Sense strand starting at position 405 of SEQ ID NO: 587592
aacuuugcuuaggugacaa

SEQ ID NO: 803625 - RNA, 19 nt, Artificial Sequence
  Description of Artificial Sequence: Synthetic oligonucleotide
  Antisense strand to SEQ ID NO: 803624
uugucaccuaagcaaaguu

SEQ ID NO: 803626 - RNA, 19 nt, Artificial Sequence
  Description of Artificial Sequence: Synthetic oligonucleotide
  Sense strand starting at position 599 of SEQ ID NO: 587592
ggaccagcuuaacuagaau

SEQ ID NO: 803627 - RNA, 19 nt, Artificial Sequence
  Description of Artificial Sequence: Synthetic oligonucleotide
  Antisense strand to SEQ ID NO: 803626
auucuaguuaagcuggucc

SEQ ID NO: 803628 - RNA, 19 nt, Artificial Sequence
  Description of Artificial Sequence: Synthetic oligonucleotide
  Sense strand starting at position 631 of SEQ ID NO: 587592
cagguaaccugucagagaa

SEQ ID NO: 803629 - RNA, 19 nt, Artificial Sequence
  Description of Artificial Sequence: Synthetic oligonucleotide
  Antisense strand to SEQ ID NO: 803628
uucucugacagguuaccug

SEQ ID NO: 803630 - RNA, 19 nt, Artificial Sequence
  Description of Artificial Sequence: Synthetic oligonucleotide
  Sense strand starting at position 633 of SEQ ID NO: 587592
gguaaccugucagagaauu

SEQ ID NO: 803631 - RNA, 19 nt, Artificial Sequence
  Description of Artificial Sequence: Synthetic oligonucleotide
  Antisense strand to SEQ ID NO: 803630
aauucucugacagguuacc

SEQ ID NO: 803632 - RNA, 19 nt, Artificial Sequence
  Description of Artificial Sequence: Synthetic oligonucleotide
  Sense strand starting at position 838 of SEQ ID NO: 587592
cagugugaccucugagauc

SEQ ID NO: 803633 - RNA, 19 nt, Artificial Sequence
  Description of Artificial Sequence: Synthetic oligonucleotide
  Antisense strand to SEQ ID NO: 803632
gaucucagaggucacacug

SEQ ID NO: 803634 - RNA, 19 nt, Artificial Sequence
  Description of Artificial Sequence: Synthetic oligonucleotide
  Sense strand starting at position 891 of SEQ ID NO: 587592
acauguacuugucguaaag

SEQ ID NO: 803635 - RNA, 19 nt, Artificial Sequence
  Description of Artificial Sequence: Synthetic oligonucleotide
  Antisense strand to SEQ ID NO: 803634
cuuuacgacaaguacaugu

SEQ ID NO: 803636 - RNA, 19 nt, Artificial Sequence
  Description of Artificial Sequence: Synthetic oligonucleotide
  Sense strand starting at position 893 of SEQ ID NO: 587592
auguacuugucguaaagaa

SEQ ID NO: 803637 - RNA, 19 nt, Artificial Sequence
  Description of Artificial Sequence: Synthetic oligonucleotide
  Antisense strand to SEQ ID NO: 803636
uucuuuacgacaaguacau

SEQ ID NO: 803638 - RNA, 19 nt, Artificial Sequence
  Description of Artificial Sequence: Synthetic oligonucleotide
  Sense strand starting at position 1079 of SEQ ID NO: 587592
cuuccuccuuucgagucau

SEQ ID NO: 803639 - RNA, 19 nt, Artificial Sequence
  Description of Artificial Sequence: Synthetic oligonucleotide
  Antisense strand to SEQ ID NO: 803638
augacucgaaaggaggaag

SEQ ID NO: 803640 - RNA, 19 nt, Artificial Sequence
  Description of Artificial Sequence: Synthetic oligonucleotide
  Sense strand starting at position 1085 of SEQ ID NO: 587592
ccuuucgagucauguggaa

SEQ ID NO: 803641 - RNA, 19 nt, Artificial Sequence
  Description of Artificial Sequence: Synthetic oligonucleotide
  Antisense strand to SEQ ID NO: 803640
uuccacaugacucgaaagg

SEQ ID NO: 803642 - RNA, 19 nt, Artificial Sequence
  Description of Artificial Sequence: Synthetic oligonucleotide
  Sense strand starting at position 1090 of SEQ ID NO: 587592
cgagucauguggaaaggga

SEQ ID NO: 803643 - RNA, 19 nt, Artificial Sequence
  Description of Artificial Sequence: Synthetic oligonucleotide
  Antisense strand to SEQ ID NO: 803642
ucccuuuccacaugacucg

SEQ ID NO: 803644 - RNA, 19 nt, Artificial Sequence
  Description of Artificial Sequence: Synthetic oligonucleotide
  Sense strand starting at position 1119 of SEQ ID NO: 587592
uggccuugguguuuaaauc

SEQ ID NO: 803645 - RNA, 19 nt, Artificial Sequence
  Description of Artificial Sequence: Synthetic oligonucleotide
  Antisense strand to SEQ ID NO: 803644
gauuuaaacaccaaggcca

SEQ ID NO: 803646 - RNA, 19 nt, Artificial Sequence
  Description of Artificial Sequence: Synthetic oligonucleotide
  Sense strand starting at position 1120 of SEQ ID NO: 587592
ggccuugguguuuaaaucu

SEQ ID NO: 803647 - RNA, 19 nt, Artificial Sequence
  Description of Artificial Sequence: Synthetic oligonucleotide
  Antisense strand to SEQ ID NO: 803646
agauuuaaacaccaaggcc

SEQ ID NO: 803648 - RNA, 19 nt, Artificial Sequence
  Description of Artificial Sequence: Synthetic oligonucleotide
  Sense strand starting at position 1127 of SEQ ID NO: 587592
guguuuaaaucuugcccua

SEQ ID NO: 803649 - RNA, 19 nt, Artificial Sequence
  Description of Artificial Sequence: Synthetic oligonucleotide
  Antisense strand to SEQ ID NO: 803648
uagggcaagauuuaaacac

SEQ ID NO: 803650 - RNA, 19 nt, Artificial Sequence
  Description of Artificial Sequence: Synthetic oligonucleotide
  Sense strand starting at position 1281 of SEQ ID NO: 587592
gggcguuaucugggcccuu

SEQ ID NO: 803651 - RNA, 19 nt, Artificial Sequence
  Description of Artificial Sequence: Synthetic oligonucleotide
  Antisense strand to SEQ ID NO: 803650
aagggcccagauaacgccc

SEQ ID NO: 803652 - RNA, 19 nt, Artificial Sequence
  Description of Artificial Sequence: Synthetic oligonucleotide
  Sense strand starting at position 1317 of SEQ ID NO: 587592
guauaaaguguugguacgu

SEQ ID NO: 803653 - RNA, 19 nt, Artificial Sequence
  Description of Artificial Sequence: Synthetic oligonucleotide
  Antisense strand to SEQ ID NO: 803652
acguaccaacacuuuauac

SEQ ID NO: 803654 - RNA, 19 nt, Artificial Sequence
  Description of Artificial Sequence: Synthetic oligonucleotide
  Sense strand starting at position 1387 of SEQ ID NO: 587592
gaagguucuuggccucaga

SEQ ID NO: 803655 - RNA, 19 nt, Artificial Sequence
  Description of Artificial Sequence: Synthetic oligonucleotide
  Antisense strand to SEQ ID NO: 803654
ucugaggccaagaaccuuc

SEQ ID NO: 803656 - RNA, 19 nt, Artificial Sequence
  Description of Artificial Sequence: Synthetic oligonucleotide
  Sense strand starting at position 1390 of SEQ ID NO: 587592
gguucuuggccucagaacu

SEQ ID NO: 803657 - RNA, 19 nt, Artificial Sequence
  Description of Artificial Sequence: Synthetic oligonucleotide
  Antisense strand to SEQ ID NO: 803656
aguucugaggccaagaacc

SEQ ID NO: 803658 - RNA, 19 nt, Artificial Sequence
  Description of Artificial Sequence: Synthetic oligonucleotide
  Sense strand starting at position 1442 of SEQ ID NO: 587592
gaugcagaucgguguagaa

SEQ ID NO: 803659 - RNA, 19 nt, Artificial Sequence
  Description of Artificial Sequence: Synthetic oligonucleotide
  Antisense strand to SEQ ID NO: 803658
uucuacaccgaucugcauc

SEQ ID NO: 803660 - RNA, 19 nt, Artificial Sequence
  Description of Artificial Sequence: Synthetic oligonucleotide
  Sense strand starting at position 1444 of SEQ ID NO: 587592
ugcagaucgguguagaaag

SEQ ID NO: 803661 - RNA, 19 nt, Artificial Sequence
  Description of Artificial Sequence: Synthetic oligonucleotide
  Antisense strand to SEQ ID NO: 803660
cuuucuacaccgaucugca

SEQ ID NO: 803662 - RNA, 19 nt, Artificial Sequence
  Description of Artificial Sequence: Synthetic oligonucleotide
  Sense strand starting at position 1493 of SEQ ID NO: 587592
cuggaagcagcccagaaau

SEQ ID NO: 803663 - RNA, 19 nt, Artificial Sequence
  Description of Artificial Sequence: Synthetic oligonucleotide
  Antisense strand to SEQ ID NO: 803662
auuucugggcugcuuccag

SEQ ID NO: 803664 - RNA, 19 nt, Artificial Sequence
  Description of Artificial Sequence: Synthetic oligonucleotide
  Sense strand starting at position 1566 of SEQ ID NO: 587592
gcaggauuccgcgacgacu

SEQ ID NO: 803665 - RNA, 19 nt, Artificial Sequence
  Description of Artificial Sequence: Synthetic oligonucleotide
  Antisense strand to SEQ ID NO: 803664
agucgucgcggaauccugc

SEQ ID NO: 803666 - RNA, 19 nt, Artificial Sequence
  Description of Artificial Sequence: Synthetic oligonucleotide
  Sense strand starting at position 2995 of SEQ ID NO: 587592
ugaagcaggugaugaaauu

SEQ ID NO: 803667 - RNA, 19 nt, Artificial Sequence
  Description of Artificial Sequence: Synthetic oligonucleotide
  Antisense strand to SEQ ID NO: 803666
aauuucaucaccugcuuca

SEQ ID NO: 803668 - RNA, 19 nt, Artificial Sequence
  Description of Artificial Sequence: Synthetic oligonucleotide
  Sense strand starting at position 3052 of SEQ ID NO: 587592
gggccaggccgugauaagu

SEQ ID NO: 803669 - RNA, 19 nt, Artificial Sequence
  Description of Artificial Sequence: Synthetic oligonucleotide
  Antisense strand to SEQ ID NO: 803668
acuuaucacggccuggccc

SEQ ID NO: 803670 - RNA, 19 nt, Artificial Sequence
  Description of Artificial Sequence: Synthetic oligonucleotide
  Sense strand starting at position 3060 of SEQ ID NO: 587592
ccgugauaagucccagcgu

SEQ ID NO: 803671 - RNA, 19 nt, Artificial Sequence
  Description of Artificial Sequence: Synthetic oligonucleotide
  Antisense strand to SEQ ID NO: 803670
acgcugggacuuaucacgg

SEQ ID NO: 803672 - RNA, 19 nt, Artificial Sequence
  Description of Artificial Sequence: Synthetic oligonucleotide
  Sense strand starting at position 3210 of SEQ ID NO: 587592
gccgacuuauccgcgucua

SEQ ID NO: 803673 - RNA, 19 nt, Artificial Sequence
  Description of Artificial Sequence: Synthetic oligonucleotide
  Antisense strand to SEQ ID NO: 803672
uagacgcggauaagucggc

SEQ ID NO: 803674 - RNA, 19 nt, Artificial Sequence
  Description of Artificial Sequence: Synthetic oligonucleotide
  Sense strand starting at position 3211 of SEQ ID NO: 587592
ccgacuuauccgcgucuau

SEQ ID NO: 803675 - RNA, 19 nt, Artificial Sequence
  Description of Artificial Sequence: Synthetic oligonucleotide
  Antisense strand to SEQ ID NO: 803674
auagacgcggauaagucgg

SEQ ID NO: 803676 - RNA, 19 nt, Artificial Sequence
  Description of Artificial Sequence: Synthetic oligonucleotide
  Sense strand starting at position 3212 of SEQ ID NO: 587592
cgacuuauccgcgucuaug

SEQ ID NO: 803677 - RNA, 19 nt, Artificial Sequence
  Description of Artificial Sequence: Synthetic oligonucleotide
  Antisense strand to SEQ ID NO: 803676
cauagacgcggauaagucg

SEQ ID NO: 803678 - RNA, 19 nt, Artificial Sequence
  Description of Artificial Sequence: Synthetic oligonucleotide
  Sense strand starting at position 3283 of SEQ ID NO: 587592
ucaaguuuguaaucaguug

SEQ ID NO: 803679 - RNA, 19 nt, Artificial Sequence
  Description of Artificial Sequence: Synthetic oligonucleotide
  Antisense strand to SEQ ID NO: 803678
caacugauuacaaacuuga

SEQ ID NO: 803680 - RNA, 19 nt, Artificial Sequence
  Description of Artificial Sequence: Synthetic oligonucleotide
  Sense strand starting at position 3737 of SEQ ID NO: 587592
ggugguccacguaguagaa

SEQ ID NO: 803681 - RNA, 19 nt, Artificial Sequence
  Description of Artificial Sequence: Synthetic oligonucleotide
  Antisense strand to SEQ ID NO: 803680
uucuacuacguggaccacc

SEQ ID NO: 803682 - RNA, 19 nt, Artificial Sequence
  Description of Artificial Sequence: Synthetic oligonucleotide
  Sense strand starting at position 3739 of SEQ ID NO: 587592
ugguccacguaguagaaau

SEQ ID NO: 803683 - RNA, 19 nt, Artificial Sequence
  Description of Artificial Sequence: Synthetic oligonucleotide
  Antisense strand to SEQ ID NO: 803682
auuucuacuacguggacca

SEQ ID NO: 803684 - RNA, 19 nt, Artificial Sequence
  Description of Artificial Sequence: Synthetic oligonucleotide
  Sense strand starting at position 66 of SEQ ID NO: 587593
ccuguuuccuuuccagaca

SEQ ID NO: 803685 - RNA, 19 nt, Artificial Sequence
  Description of Artificial Sequence: Synthetic oligonucleotide
  Antisense strand to SEQ ID NO: 803684
ugucuggaaaggaaacagg

SEQ ID NO: 803686 - RNA, 19 nt, Artificial Sequence
  Description of Artificial Sequence: Synthetic oligonucleotide
  Sense strand starting at position 84 of SEQ ID NO: 587593
agcacugcuuccucagaga

SEQ ID NO: 803687 - RNA, 19 nt, Artificial Sequence
  Description of Artificial Sequence: Synthetic oligonucleotide
  Antisense strand to SEQ ID NO: 803686
ucucugaggaagcagugcu

SEQ ID NO: 803688 - RNA, 19 nt, Artificial Sequence
  Description of Artificial Sequence: Synthetic oligonucleotide
  Sense strand starting at position 172 of SEQ ID NO: 587593
ggcuguaaccacuauacuu

SEQ ID NO: 803689 - RNA, 19 nt, Artificial Sequence
  Description of Artificial Sequence: Synthetic oligonucleotide
  Antisense strand to SEQ ID NO: 803688
aaguauagugguuacagcc

SEQ ID NO: 803690 - RNA, 19 nt, Artificial Sequence
  Description of Artificial Sequence: Synthetic oligonucleotide
  Sense strand starting at position 295 of SEQ ID NO: 587593
cugacaaguuaaugauuua

SEQ ID NO: 803691 - RNA, 19 nt, Artificial Sequence
  Description of Artificial Sequence: Synthetic oligonucleotide
  Antisense strand to SEQ ID NO: 803690
uaaaucauuaacuugucag

SEQ ID NO: 803692 - RNA, 19 nt, Artificial Sequence
  Description of Artificial Sequence: Synthetic oligonucleotide
  Sense strand starting at position 673 of SEQ ID NO: 587593
gaagaaauaucaguagcug

SEQ ID NO: 803693 - RNA, 19 nt, Artificial Sequence
  Description of Artificial Sequence: Synthetic oligonucleotide
  Antisense strand to SEQ ID NO: 803692
cagcuacugauauuucuuc

SEQ ID NO: 803694 - RNA, 19 nt, Artificial Sequence
  Description of Artificial Sequence: Synthetic oligonucleotide
  Sense strand starting at position 762 of SEQ ID NO: 587593
ucaggucuuccagggcaga

SEQ ID NO: 803695 - RNA, 19 nt, Artificial Sequence
  Description of Artificial Sequence: Synthetic oligonucleotide
  Antisense strand to SEQ ID NO: 803694
ucugcccuggaagaccuga

SEQ ID NO: 803696 - RNA, 19 nt, Artificial Sequence
  Description of Artificial Sequence: Synthetic oligonucleotide
  Sense strand starting at position 763 of SEQ ID NO: 587593
caggucuuccagggcagaa

SEQ ID NO: 803697 - RNA, 19 nt, Artificial Sequence
  Description of Artificial Sequence: Synthetic oligonucleotide
  Antisense strand to SEQ ID NO: 803696
uucugcccuggaagaccug

SEQ ID NO: 803698 - RNA, 19 nt, Artificial Sequence
  Description of Artificial Sequence: Synthetic oligonucleotide
  Sense strand starting at position 848 of SEQ ID NO: 587593
ugaucaauuagguagagcu

SEQ ID NO: 803699 - RNA, 19 nt, Artificial Sequence
  Description of Artificial Sequence: Synthetic oligonucleotide
  Antisense strand to SEQ ID NO: 803698
agcucuaccuaauugauca

SEQ ID NO: 803700 - RNA, 19 nt, Artificial Sequence
  Description of Artificial Sequence: Synthetic oligonucleotide
  Sense strand starting at position 895 of SEQ ID NO: 587593
aaacguugucgauaucaaa

SEQ ID NO: 803701 - RNA, 19 nt, Artificial Sequence
  Description of Artificial Sequence: Synthetic oligonucleotide
  Antisense strand to SEQ ID NO: 803700
uuugauaucgacaacguuu

SEQ ID NO: 803702 - RNA, 19 nt, Artificial Sequence
  Description of Artificial Sequence: Synthetic oligonucleotide
  Sense strand starting at position 1317 of SEQ ID NO: 587593
acaguaguaugauugccau

SEQ ID NO: 803703 - RNA, 19 nt, Artificial Sequence
  Description of Artificial Sequence: Synthetic oligonucleotide
  Antisense strand to SEQ ID NO: 803702
auggcaaucauacuacugu

SEQ ID NO: 803704 - RNA, 19 nt, Artificial Sequence
  Description of Artificial Sequence: Synthetic oligonucleotide
  Sense strand starting at position 1320 of SEQ ID NO: 587593
guaguaugauugccauuau

SEQ ID NO: 803705 - RNA, 19 nt, Artificial Sequence
  Description of Artificial Sequence: Synthetic oligonucleotide
  Antisense strand to SEQ ID NO: 803704
auaauggcaaucauacuac

SEQ ID NO: 803706 - RNA, 19 nt, Artificial Sequence
  Description of Artificial Sequence: Synthetic oligonucleotide
  Sense strand starting at position 1460 of SEQ ID NO: 587593
ccggaaugaguccgaagau

SEQ ID NO: 803707 - RNA, 19 nt, Artificial Sequence
  Description of Artificial Sequence: Synthetic oligonucleotide
  Antisense strand to SEQ ID NO: 803706
aucuucggacucauuccgg

SEQ ID NO: 803708 - RNA, 19 nt, Artificial Sequence
  Description of Artificial Sequence: Synthetic oligonucleotide
  Sense strand starting at position 1967 of SEQ ID NO: 587593
gucggaauucaggagccau

SEQ ID NO: 803709 - RNA, 19 nt, Artificial Sequence
  Description of Artificial Sequence: Synthetic oligonucleotide
  Antisense strand to SEQ ID NO: 803708
auggcuccugaauuccgac

SEQ ID NO: 803710 - RNA, 19 nt, Artificial Sequence
  Description of Artificial Sequence: Synthetic oligonucleotide
  Sense strand starting at position 2169 of SEQ ID NO: 587593
aaugguuuagagugaacaa

SEQ ID NO: 803711 - RNA, 19 nt, Artificial Sequence
  Description of Artificial Sequence: Synthetic oligonucleotide
  Antisense strand to SEQ ID NO: 803710
uuguucacucuaaaccauu

SEQ ID NO: 803712 - RNA, 19 nt, Artificial Sequence
  Description of Artificial Sequence: Synthetic oligonucleotide
  Sense strand starting at position 2349 of SEQ ID NO: 587593
uuugcacaucuguaagaug

SEQ ID NO: 803713 - RNA, 19 nt, Artificial Sequence
  Description of Artificial Sequence: Synthetic oligonucleotide
  Antisense strand to SEQ ID NO: 803712
caucuuacagaugugcaaa

SEQ ID NO: 803714 - RNA, 19 nt, Artificial Sequence
  Description of Artificial Sequence: Synthetic oligonucleotide
  Sense strand starting at position 2380 of SEQ ID NO: 587593
agaggaucacugugaagcu

SEQ ID NO: 803715 - RNA, 19 nt, Artificial Sequence
  Description of Artificial Sequence: Synthetic oligonucleotide
  Antisense strand to SEQ ID NO: 803714
agcuucacagugauccucu

SEQ ID NO: 803716 - RNA, 19 nt, Artificial Sequence
  Description of Artificial Sequence: Synthetic oligonucleotide
  Sense strand starting at position 2459 of SEQ ID NO: 587593
uucguugucguugucauau

SEQ ID NO: 803717 - RNA, 19 nt, Artificial Sequence
  Description of Artificial Sequence: Synthetic oligonucleotide
  Antisense strand to SEQ ID NO: 803716
auaugacaacgacaacgaa

SEQ ID NO: 803718 - RNA, 19 nt, Artificial Sequence
  Description of Artificial Sequence: Synthetic oligonucleotide
  Sense strand starting at position 2597 of SEQ ID NO: 587593
ggaaguauaucuccuacag

SEQ ID NO: 803719 - RNA, 19 nt, Artificial Sequence
  Description of Artificial Sequence: Synthetic oligonucleotide
  Antisense strand to SEQ ID NO: 803718
cuguaggagauauacuucc

SEQ ID NO: 803720 - RNA, 19 nt, Artificial Sequence
  Description of Artificial Sequence: Synthetic oligonucleotide
  Sense strand starting at position 2899 of SEQ ID NO: 587593
ucuugauguguguauuaug

SEQ ID NO: 803721 - RNA, 19 nt, Artificial Sequence
  Description of Artificial Sequence: Synthetic oligonucleotide
  Antisense strand to SEQ ID NO: 803720
cauaauacacacaucaaga

SEQ ID NO: 803722 - RNA, 19 nt, Artificial Sequence
  Description of Artificial Sequence: Synthetic oligonucleotide
  Sense strand starting at position 2908 of SEQ ID NO: 587593
guguauuauguuugcauuu

SEQ ID NO: 803723 - RNA, 19 nt, Artificial Sequence
  Description of Artificial Sequence: Synthetic oligonucleotide
  Antisense strand to SEQ ID NO: 803722
aaaugcaaacauaauacac

SEQ ID NO: 803724 - RNA, 19 nt, Artificial Sequence
  Description of Artificial Sequence: Synthetic oligonucleotide
  Sense strand starting at position 2946 of SEQ ID NO: 587593
caaugcugagugcaaagaa

SEQ ID NO: 803725 - RNA, 19 nt, Artificial Sequence
  Description of Artificial Sequence: Synthetic oligonucleotide
  Antisense strand to SEQ ID NO: 803724
uucuuugcacucagcauug

SEQ ID NO: 803726 - RNA, 19 nt, Artificial Sequence
  Description of Artificial Sequence: Synthetic oligonucleotide
  Sense strand starting at position 2993 of SEQ ID NO: 587593
gcauuuacagcuggcaauu

SEQ ID NO: 803727 - RNA, 19 nt, Artificial Sequence
  Description of Artificial Sequence: Synthetic oligonucleotide
  Antisense strand to SEQ ID NO: 803726
aauugccagcuguaaaugc

SEQ ID NO: 803728 - RNA, 19 nt, Artificial Sequence
  Description of Artificial Sequence: Synthetic oligonucleotide
  Sense strand starting at position 3014 of SEQ ID NO: 587593
uagaguuugccagguagag

SEQ ID NO: 803729 - RNA, 19 nt, Artificial Sequence
  Description of Artificial Sequence: Synthetic oligonucleotide
  Antisense strand to SEQ ID NO: 803728
cucuaccuggcaaacucua

SEQ ID NO: 803730 - RNA, 19 nt, Artificial Sequence
  Description of Artificial Sequence: Synthetic oligonucleotide
  Sense strand starting at position 3016 of SEQ ID NO: 587593
gaguuugccagguagagac

SEQ ID NO: 803731 - RNA, 19 nt, Artificial Sequence
  Description of Artificial Sequence: Synthetic oligonucleotide
  Antisense strand to SEQ ID NO: 803730
gucucuaccuggcaaacuc

SEQ ID NO: 803732 - RNA, 19 nt, Artificial Sequence
  Description of Artificial Sequence: Synthetic oligonucleotide
  Sense strand starting at position 3098 of SEQ ID NO: 587593
gaaacaucaguuuggcaau

SEQ ID NO: 803733 - RNA, 19 nt, Artificial Sequence
  Description of Artificial Sequence: Synthetic oligonucleotide
  Antisense strand to SEQ ID NO: 803732
auugccaaacugauguuuc

SEQ ID NO: 803734 - RNA, 19 nt, Artificial Sequence
  Description of Artificial Sequence: Synthetic oligonucleotide
  Sense strand starting at position 3124 of SEQ ID NO: 587593
gcuagauagaagggaucuu

SEQ ID NO: 803735 - RNA, 19 nt, Artificial Sequence
  Description of Artificial Sequence: Synthetic oligonucleotide
  Antisense strand to SEQ ID NO: 803734
aagaucccuucuaucuagc

SEQ ID NO: 803736 - RNA, 19 nt, Artificial Sequence
  Description of Artificial Sequence: Synthetic oligonucleotide
  Sense strand starting at position 3147 of SEQ ID NO: 587593
caguaagaaugagagauua

SEQ ID NO: 803737 - RNA, 19 nt, Artificial Sequence
  Description of Artificial Sequence: Synthetic oligonucleotide
  Antisense strand to SEQ ID NO: 803736
uaaucucucauucuuacug

SEQ ID NO: 803738 - RNA, 19 nt, Artificial Sequence
  Description of Artificial Sequence: Synthetic oligonucleotide
  Sense strand starting at position 3241 of SEQ ID NO: 587593
cccugaauauuuggauuuc

SEQ ID NO: 803739 - RNA, 19 nt, Artificial Sequence
  Description of Artificial Sequence: Synthetic oligonucleotide
  Antisense strand to SEQ ID NO: 803738
gaaauccaaauauucaggg

SEQ ID NO: 803740 - RNA, 19 nt, Artificial Sequence
  Description of Artificial Sequence: Synthetic oligonucleotide
  Sense strand starting at position 3388 of SEQ ID NO: 587593
gauuuauuacuguguggca

SEQ ID NO: 803741 - RNA, 19 nt, Artificial Sequence
  Description of Artificial Sequence: Synthetic oligonucleotide
  Antisense strand to SEQ ID NO: 803740
ugccacacaguaauaaauc

SEQ ID NO: 803742 - RNA, 19 nt, Artificial Sequence
  Description of Artificial Sequence: Synthetic oligonucleotide
  Sense strand starting at position 3389 of SEQ ID NO: 587593
auuuauuacuguguggcau

SEQ ID NO: 803743 - RNA, 19 nt, Artificial Sequence
  Description of Artificial Sequence: Synthetic oligonucleotide
  Antisense strand to SEQ ID NO: 803742
augccacacaguaauaaau

SEQ ID NO: 803744 - RNA, 19 nt, Artificial Sequence
  Description of Artificial Sequence: Synthetic oligonucleotide
  Sense strand starting at position 3524 of SEQ ID NO: 587593
gagcacugaugucugauua

SEQ ID NO: 803745 - RNA, 19 nt, Artificial Sequence
  Description of Artificial Sequence: Synthetic oligonucleotide
  Antisense strand to SEQ ID NO: 803744
uaaucagacaucagugcuc

SEQ ID NO: 803746 - RNA, 19 nt, Artificial Sequence
  Description of Artificial Sequence: Synthetic oligonucleotide
  Sense strand starting at position 3528 of SEQ ID NO: 587593
acugaugucugauuacuca

SEQ ID NO: 803747 - RNA, 19 nt, Artificial Sequence
  Description of Artificial Sequence: Synthetic oligonucleotide
  Antisense strand to SEQ ID NO: 803746
ugaguaaucagacaucagu

SEQ ID NO: 803748 - RNA, 19 nt, Artificial Sequence
  Description of Artificial Sequence: Synthetic oligonucleotide
  Sense strand starting at position 3573 of SEQ ID NO: 587593
caggcaaguuuagcaaauu

SEQ ID NO: 803749 - RNA, 19 nt, Artificial Sequence
  Description of Artificial Sequence: Synthetic oligonucleotide
  Antisense strand to SEQ ID NO: 803748
aauuugcuaaacuugccug

SEQ ID NO: 803750 - RNA, 19 nt, Artificial Sequence
  Description of Artificial Sequence: Synthetic oligonucleotide
  Sense strand starting at position 3678 of SEQ ID NO: 587593
gcagaaagauuaguuucua

SEQ ID NO: 803751 - RNA, 19 nt, Artificial Sequence
  Description of Artificial Sequence: Synthetic oligonucleotide
  Antisense strand to SEQ ID NO: 803750
uagaaacuaaucuuucugc

SEQ ID NO: 803752 - RNA, 19 nt, Artificial Sequence
  Description of Artificial Sequence: Synthetic oligonucleotide
  Sense strand starting at position 3686 of SEQ ID NO: 587593
auuaguuucuaagcugaca

SEQ ID NO: 803753 - RNA, 19 nt, Artificial Sequence
  Description of Artificial Sequence: Synthetic oligonucleotide
  Antisense strand to SEQ ID NO: 803752
ugucagcuuagaaacuaau

SEQ ID NO: 803754 - RNA, 19 nt, Artificial Sequence
  Description of Artificial Sequence: Synthetic oligonucleotide
  Sense strand starting at position 3711 of SEQ ID NO: 587593
ugaggucaggccuacuaua

SEQ ID NO: 803755 - RNA, 19 nt, Artificial Sequence
  Description of Artificial Sequence: Synthetic oligonucleotide
  Antisense strand to SEQ ID NO: 803754
uauaguaggccugaccuca

SEQ ID NO: 803756 - RNA, 19 nt, Artificial Sequence
  Description of Artificial Sequence: Synthetic oligonucleotide
  Sense strand starting at position 3741 of SEQ ID NO: 587593
cuugcagugaacuaggauu

SEQ ID NO: 803757 - RNA, 19 nt, Artificial Sequence
  Description of Artificial Sequence: Synthetic oligonucleotide
  Antisense strand to SEQ ID NO: 803756
aauccuaguucacugcaag

SEQ ID NO: 803758 - RNA, 19 nt, Artificial Sequence
  Description of Artificial Sequence: Synthetic oligonucleotide
  Sense strand starting at position 3879 of SEQ ID NO: 587593
cgcagaaaguucucaagag

SEQ ID NO: 803759 - RNA, 19 nt, Artificial Sequence
  Description of Artificial Sequence: Synthetic oligonucleotide
  Antisense strand to SEQ ID NO: 803758
cucuugagaacuuucugcg

SEQ ID NO: 803760 - RNA, 19 nt, Artificial Sequence
  Description of Artificial Sequence: Synthetic oligonucleotide
  Sense strand starting at position 3915 of SEQ ID NO: 587593
uuugacauguuggcucuaa

SEQ ID NO: 803761 - RNA, 19 nt, Artificial Sequence
  Description of Artificial Sequence: Synthetic oligonucleotide
  Antisense strand to SEQ ID NO: 803760
uuagagccaacaugucaaa

SEQ ID NO: 803762 - RNA, 19 nt, Artificial Sequence
  Description of Artificial Sequence: Synthetic oligonucleotide
  Sense strand starting at position 3919 of SEQ ID NO: 587593
acauguuggcucuaagcuu

SEQ ID NO: 803763 - RNA, 19 nt, Artificial Sequence
  Description of Artificial Sequence: Synthetic oligonucleotide
  Antisense strand to SEQ ID NO: 803762
aagcuuagagccaacaugu

SEQ ID NO: 803764 - RNA, 19 nt, Artificial Sequence
  Description of Artificial Sequence: Synthetic oligonucleotide
  Sense strand starting at position 108 of SEQ ID NO: 587594
aggaaagguuauuagaaac

SEQ ID NO: 803765 - RNA, 19 nt, Artificial Sequence
  Description of Artificial Sequence: Synthetic oligonucleotide
  Antisense strand to SEQ ID NO: 803764
guuucuaauaaccuuuccu

SEQ ID NO: 803766 - RNA, 19 nt, Artificial Sequence
  Description of Artificial Sequence: Synthetic oligonucleotide
  Sense strand starting at position 224 of SEQ ID NO: 587594
aguuuagaguuacccaaga

SEQ ID NO: 803767 - RNA, 19 nt, Artificial Sequence
  Description of Artificial Sequence: Synthetic oligonucleotide
  Antisense strand to SEQ ID NO: 803766
ucuuggguaacucuaaacu

SEQ ID NO: 803768 - RNA, 19 nt, Artificial Sequence
  Description of Artificial Sequence: Synthetic oligonucleotide
  Sense strand starting at position 404 of SEQ ID NO: 587594
agagacugcaguugaugaa

SEQ ID NO: 803769 - RNA, 19 nt, Artificial Sequence
  Description of Artificial Sequence: Synthetic oligonucleotide
  Antisense strand to SEQ ID NO: 803768
uucaucaacugcagucucu

SEQ ID NO: 803770 - RNA, 19 nt, Artificial Sequence
  Description of Artificial Sequence: Synthetic oligonucleotide
  Sense strand starting at position 479 of SEQ ID NO: 587594
ccugauuccagauguggau

SEQ ID NO: 803771 - RNA, 19 nt, Artificial Sequence
  Description of Artificial Sequence: Synthetic oligonucleotide
  Antisense strand to SEQ ID NO: 803770
auccacaucuggaaucagg

SEQ ID NO: 803772 - RNA, 19 nt, Artificial Sequence
  Description of Artificial Sequence: Synthetic oligonucleotide
  Sense strand starting at position 591 of SEQ ID NO: 587594
agugguuauauauggagau

SEQ ID NO: 803773 - RNA, 19 nt, Artificial Sequence
  Description of Artificial Sequence: Synthetic oligonucleotide
  Antisense strand to SEQ ID NO: 803772
aucuccauauauaaccacu

SEQ ID NO: 803774 - RNA, 19 nt, Artificial Sequence
  Description of Artificial Sequence: Synthetic oligonucleotide
  Sense strand starting at position 673 of SEQ ID NO: 587594
uuuaauucucgguaaccaa

SEQ ID NO: 803775 - RNA, 19 nt, Artificial Sequence
  Description of Artificial Sequence: Synthetic oligonucleotide
  Antisense strand to SEQ ID NO: 803774
uugguuaccgagaauuaaa

SEQ ID NO: 803776 - RNA, 19 nt, Artificial Sequence
  Description of Artificial Sequence: Synthetic oligonucleotide
  Sense strand starting at position 1038 of SEQ ID NO: 587594
uccugugcugaugacaauu

SEQ ID NO: 803777 - RNA, 19 nt, Artificial Sequence
  Description of Artificial Sequence: Synthetic oligonucleotide
  Antisense strand to SEQ ID NO: 803776
aauugucaucagcacagga

SEQ ID NO: 803778 - RNA, 19 nt, Artificial Sequence
  Description of Artificial Sequence: Synthetic oligonucleotide
  Sense strand starting at position 1136 of SEQ ID NO: 587594
ucacauuguuaggcagaaa

SEQ ID NO: 803779 - RNA, 19 nt, Artificial Sequence
  Description of Artificial Sequence: Synthetic oligonucleotide
  Antisense strand to SEQ ID NO: 803778
uuucugccuaacaauguga

SEQ ID NO: 803780 - RNA, 19 nt, Artificial Sequence
  Description of Artificial Sequence: Synthetic oligonucleotide
  Sense strand starting at position 1139 of SEQ ID NO: 587594
cauuguuaggcagaaaggu

SEQ ID NO: 803781 - RNA, 19 nt, Artificial Sequence
  Description of Artificial Sequence: Synthetic oligonucleotide
  Antisense strand to SEQ ID NO: 803780
accuuucugccuaacaaug

SEQ ID NO: 803782 - RNA, 19 nt, Artificial Sequence
  Description of Artificial Sequence: Synthetic oligonucleotide
  Sense strand starting at position 1671 of SEQ ID NO: 587594
ucuccauagaucgaagugu

SEQ ID NO: 803783 - RNA, 19 nt, Artificial Sequence
  Description of Artificial Sequence: Synthetic oligonucleotide
  Antisense strand to SEQ ID NO: 803782
acacuucgaucuauggaga

SEQ ID NO: 803784 - RNA, 19 nt, Artificial Sequence
  Description of Artificial Sequence: Synthetic oligonucleotide
  Sense strand starting at position 1990 of SEQ ID NO: 587594
ccauuagaguucuuuauua

SEQ ID NO: 803785 - RNA, 19 nt, Artificial Sequence
  Description of Artificial Sequence: Synthetic oligonucleotide
  Antisense strand to SEQ ID NO: 803784
uaauaaagaacucuaaugg

SEQ ID NO: 803786 - RNA, 19 nt, Artificial Sequence
  Description of Artificial Sequence: Synthetic oligonucleotide
  Sense strand starting at position 2031 of SEQ ID NO: 587594
acagaauuggugugucaua

SEQ ID NO: 803787 - RNA, 19 nt, Artificial Sequence
  Description of Artificial Sequence: Synthetic oligonucleotide
  Antisense strand to SEQ ID NO: 803786
uaugacacaccaauucugu

SEQ ID NO: 803788 - RNA, 19 nt, Artificial Sequence
  Description of Artificial Sequence: Synthetic oligonucleotide
  Sense strand starting at position 2032 of SEQ ID NO: 587594
cagaauuggugugucauag

SEQ ID NO: 803789 - RNA, 19 nt, Artificial Sequence
  Description of Artificial Sequence: Synthetic oligonucleotide
  Antisense strand to SEQ ID NO: 803788
cuaugacacaccaauucug

SEQ ID NO: 803790 - RNA, 19 nt, Artificial Sequence
  Description of Artificial Sequence: Synthetic oligonucleotide
  Sense strand starting at position 2038 of SEQ ID NO: 587594
uggugugucauagaaacaa

SEQ ID NO: 803791 - RNA, 19 nt, Artificial Sequence
  Description of Artificial Sequence: Synthetic oligonucleotide
  Antisense strand to SEQ ID NO: 803790
uuguuucuaugacacacca

SEQ ID NO: 803792 - RNA, 19 nt, Artificial Sequence
  Description of Artificial Sequence: Synthetic oligonucleotide
  Sense strand starting at position 2065 of SEQ ID NO: 587594
ugagauccaccauguugaa

SEQ ID NO: 803793 - RNA, 19 nt, Artificial Sequence
  Description of Artificial Sequence: Synthetic oligonucleotide
  Antisense strand to SEQ ID NO: 803792
uucaacaugguggaucuca

SEQ ID NO: 803794 - RNA, 19 nt, Artificial Sequence
  Description of Artificial Sequence: Synthetic oligonucleotide
  Sense strand starting at position 2152 of SEQ ID NO: 587594
gcaggaaauguauaaugua

SEQ ID NO: 803795 - RNA, 19 nt, Artificial Sequence
  Description of Artificial Sequence: Synthetic oligonucleotide
  Antisense strand to SEQ ID NO: 803794
uacauuauacauuuccugc

SEQ ID NO: 803796 - RNA, 19 nt, Artificial Sequence
  Description of Artificial Sequence: Synthetic oligonucleotide
  Sense strand starting at position 2160 of SEQ ID NO: 587594
uguauaauguaagccuaaa

SEQ ID NO: 803797 - RNA, 19 nt, Artificial Sequence
  Description of Artificial Sequence: Synthetic oligonucleotide
  Antisense strand to SEQ ID NO: 803796
uuuaggcuuacauuauaca

SEQ ID NO: 803798 - RNA, 19 nt, Artificial Sequence
  Description of Artificial Sequence: Synthetic oligonucleotide
  Sense strand starting at position 2184 of SEQ ID NO: 587594
uuaugccugcgauauuaaa

SEQ ID NO: 803799 - RNA, 19 nt, Artificial Sequence
  Description of Artificial Sequence: Synthetic oligonucleotide
  Antisense strand to SEQ ID NO: 803798
uuuaauaucgcaggcauaa

SEQ ID NO: 803800 - RNA, 19 nt, Artificial Sequence
  Description of Artificial Sequence: Synthetic oligonucleotide
  Sense strand starting at position 2246 of SEQ ID NO: 587594
cucccacuagucuaagaug

SEQ ID NO: 803801 - RNA, 19 nt, Artificial Sequence
  Description of Artificial Sequence: Synthetic oligonucleotide
  Antisense strand to SEQ ID NO: 803800
caucuuagacuagugggag

SEQ ID NO: 803802 - RNA, 19 nt, Artificial Sequence
  Description of Artificial Sequence: Synthetic oligonucleotide
  Sense strand starting at position 2364 of SEQ ID NO: 587594
auuacucacccugggaauu

SEQ ID NO: 803803 - RNA, 19 nt, Artificial Sequence
  Description of Artificial Sequence: Synthetic oligonucleotide
  Antisense strand to SEQ ID NO: 803802
aauucccagggugaguaau

SEQ ID NO: 803804 - RNA, 19 nt, Artificial Sequence
  Description of Artificial Sequence: Synthetic oligonucleotide
  Sense strand starting at position 2365 of SEQ ID NO: 587594
uuacucacccugggaauua

SEQ ID NO: 803805 - RNA, 19 nt, Artificial Sequence
  Description of Artificial Sequence: Synthetic oligonucleotide
  Antisense strand to SEQ ID NO: 803804
uaauucccagggugaguaa

SEQ ID NO: 803806 - RNA, 19 nt, Artificial Sequence
  Description of Artificial Sequence: Synthetic oligonucleotide
  Sense strand starting at position 2605 of SEQ ID NO: 587594
cugaaaguauuagaugaaa

SEQ ID NO: 803807 - RNA, 19 nt, Artificial Sequence
  Description of Artificial Sequence: Synthetic oligonucleotide
  Antisense strand to SEQ ID NO: 803806
uuucaucuaauacuuucag

SEQ ID NO: 803808 - RNA, 19 nt, Artificial Sequence
  Description of Artificial Sequence: Synthetic oligonucleotide
  Sense strand starting at position 2630 of SEQ ID NO: 587594
ugaggaacuuuauaaucaa

SEQ ID NO: 803809 - RNA, 19 nt, Artificial Sequence
  Description of Artificial Sequence: Synthetic oligonucleotide
  Antisense strand to SEQ ID NO: 803808
uugauuauaaaguuccuca

SEQ ID NO: 803810 - RNA, 19 nt, Artificial Sequence
  Description of Artificial Sequence: Synthetic oligonucleotide
  Sense strand starting at position 2633 of SEQ ID NO: 587594
ggaacuuuauaaucaagug

SEQ ID NO: 803811 - RNA, 19 nt, Artificial Sequence
  Description of Artificial Sequence: Synthetic oligonucleotide
  Antisense strand to SEQ ID NO: 803810
cacuugauuauaaaguucc

SEQ ID NO: 803812 - RNA, 19 nt, Artificial Sequence
  Description of Artificial Sequence: Synthetic oligonucleotide
  Sense strand starting at position 2641 of SEQ ID NO: 587594
auaaucaagugaucagguu

SEQ ID NO: 803813 - RNA, 19 nt, Artificial Sequence
  Description of Artificial Sequence: Synthetic oligonucleotide
  Antisense strand to SEQ ID NO: 803812
aaccugaucacuugauuau

SEQ ID NO: 803814 - RNA, 19 nt, Artificial Sequence
  Description of Artificial Sequence: Synthetic oligonucleotide
  Sense strand starting at position 2884 of SEQ ID NO: 587594
cauggaagauucuacagga

SEQ ID NO: 803815 - RNA, 19 nt, Artificial Sequence
  Description of Artificial Sequence: Synthetic oligonucleotide
  Antisense strand to SEQ ID NO: 803814
uccuguagaaucuuccaug

SEQ ID NO: 803816 - RNA, 19 nt, Artificial Sequence
  Description of Artificial Sequence: Synthetic oligonucleotide
  Sense strand starting at position 2970 of SEQ ID NO: 587594
acuguuacgauguaaguga

SEQ ID NO: 803817 - RNA, 19 nt, Artificial Sequence
  Description of Artificial Sequence: Synthetic oligonucleotide
  Antisense strand to SEQ ID NO: 803816
ucacuuacaucguaacagu

SEQ ID NO: 803818 - RNA, 19 nt, Artificial Sequence
  Description of Artificial Sequence: Synthetic oligonucleotide
  Sense strand starting at position 2974 of SEQ ID NO: 587594
uuacgauguaagugaaacu

SEQ ID NO: 803819 - RNA, 19 nt, Artificial Sequence
  Description of Artificial Sequence: Synthetic oligonucleotide
  Antisense strand to SEQ ID NO: 803818
aguuucacuuacaucguaa

SEQ ID NO: 803820 - RNA, 19 nt, Artificial Sequence
  Description of Artificial Sequence: Synthetic oligonucleotide
  Sense strand starting at position 3012 of SEQ ID NO: 587594
augcaaugucuggacugua

SEQ ID NO: 803821 - RNA, 19 nt, Artificial Sequence
  Description of Artificial Sequence: Synthetic oligonucleotide
  Antisense strand to SEQ ID NO: 803820
uacaguccagacauugcau

SEQ ID NO: 803822 - RNA, 19 nt, Artificial Sequence
  Description of Artificial Sequence: Synthetic oligonucleotide
  Sense strand starting at position 3031 of SEQ ID NO: 587594
uuugaauccucaguugaau

SEQ ID NO: 803823 - RNA, 19 nt, Artificial Sequence
  Description of Artificial Sequence: Synthetic oligonucleotide
  Antisense strand to SEQ ID NO: 803822
auucaacugaggauucaaa

SEQ ID NO: 803824 - RNA, 19 nt, Artificial Sequence
  Description of Artificial Sequence: Synthetic oligonucleotide
  Sense strand starting at position 3076 of SEQ ID NO: 587594
ucggcuauuagaugagaga

SEQ ID NO: 803825 - RNA, 19 nt, Artificial Sequence
  Description of Artificial Sequence: Synthetic oligonucleotide
  Antisense strand to SEQ ID NO: 803824
ucucucaucuaauagccga

SEQ ID NO: 803826 - RNA, 19 nt, Artificial Sequence
  Description of Artificial Sequence: Synthetic oligonucleotide
  Sense strand starting at position 3089 of SEQ ID NO: 587594
gagagaaauuaauucuguu

SEQ ID NO: 803827 - RNA, 19 nt, Artificial Sequence
  Description of Artificial Sequence: Synthetic oligonucleotide
  Antisense strand to SEQ ID NO: 803826
aacagaauuaauuucucuc

SEQ ID NO: 803828 - RNA, 19 nt, Artificial Sequence
  Description of Artificial Sequence: Synthetic oligonucleotide
  Sense strand starting at position 3282 of SEQ ID NO: 587594
uauuaaugcugaguaauag

SEQ ID NO: 803829 - RNA, 19 nt, Artificial Sequence
  Description of Artificial Sequence: Synthetic oligonucleotide
  Antisense strand to SEQ ID NO: 803828
cuauuacucagcauuaaua

SEQ ID NO: 803830 - RNA, 19 nt, Artificial Sequence
  Description of Artificial Sequence: Synthetic oligonucleotide
  Sense strand starting at position 3309 of SEQ ID NO: 587594
ggguuuguauuuguccauu

SEQ ID NO: 803831 - RNA, 19 nt, Artificial Sequence
  Description of Artificial Sequence: Synthetic oligonucleotide
  Antisense strand to SEQ ID NO: 803830
aauggacaaauacaaaccc

SEQ ID NO: 803832 - RNA, 19 nt, Artificial Sequence
  Description of Artificial Sequence: Synthetic oligonucleotide
  Sense strand starting at position 3311 of SEQ ID NO: 587594
guuuguauuuguccauucu

SEQ ID NO: 803833 - RNA, 19 nt, Artificial Sequence
  Description of Artificial Sequence: Synthetic oligonucleotide
  Antisense strand to SEQ ID NO: 803832
agaauggacaaauacaaac

SEQ ID NO: 803834 - RNA, 19 nt, Artificial Sequence
  Description of Artificial Sequence: Synthetic oligonucleotide
  Sense strand starting at position 3548 of SEQ ID NO: 587594
acaacuagaucucaggaua

SEQ ID NO: 803835 - RNA, 19 nt, Artificial Sequence
  Description of Artificial Sequence: Synthetic oligonucleotide
  Antisense strand to SEQ ID NO: 803834
uauccugagaucuaguugu

SEQ ID NO: 803836 - RNA, 19 nt, Artificial Sequence
  Description of Artificial Sequence: Synthetic oligonucleotide
  Sense strand starting at position 3818 of SEQ ID NO: 587594
gggaguuguggccaguaac

SEQ ID NO: 803837 - RNA, 19 nt, Artificial Sequence
  Description of Artificial Sequence: Synthetic oligonucleotide
  Antisense strand to SEQ ID NO: 803836
guuacuggccacaacuccc

SEQ ID NO: 803838 - RNA, 19 nt, Artificial Sequence
  Description of Artificial Sequence: Synthetic oligonucleotide
  Sense strand starting at position 3821 of SEQ ID NO: 587594
aguuguggccaguaacauu

SEQ ID NO: 803839 - RNA, 19 nt, Artificial Sequence
  Description of Artificial Sequence: Synthetic oligonucleotide
  Antisense strand to SEQ ID NO: 803838
aauguuacuggccacaacu

SEQ ID NO: 803840 - RNA, 19 nt, Artificial Sequence
  Description of Artificial Sequence: Synthetic oligonucleotide
  Sense strand starting at position 3876 of SEQ ID NO: 587594
augagucuuagaggcauua

SEQ ID NO: 803841 - RNA, 19 nt, Artificial Sequence
  Description of Artificial Sequence: Synthetic oligonucleotide
  Antisense strand to SEQ ID NO: 803840
uaaugccucuaagacucau

SEQ ID NO: 803842 - RNA, 19 nt, Artificial Sequence
  Description of Artificial Sequence: Synthetic oligonucleotide
  Sense strand starting at position 3965 of SEQ ID NO: 587594
cacugaaagugaucugaac

SEQ ID NO: 803843 - RNA, 19 nt, Artificial Sequence
  Description of Artificial Sequence: Synthetic oligonucleotide
  Antisense strand to SEQ ID NO: 803842
guucagaucacuuucagug

SEQ ID NO: 803844 - RNA, 19 nt, Artificial Sequence
  Description of Artificial Sequence: Synthetic oligonucleotide
  Sense strand starting at position 15 of SEQ ID NO: 587595
agaucucaugcuggagauu

SEQ ID NO: 803845 - RNA, 19 nt, Artificial Sequence
  Description of Artificial Sequence: Synthetic oligonucleotide
  Antisense strand to SEQ ID NO: 803844
aaucuccagcaugagaucu

SEQ ID NO: 803846 - RNA, 19 nt, Artificial Sequence
  Description of Artificial Sequence: Synthetic oligonucleotide
  Sense strand starting at position 18 of SEQ ID NO: 587595
ucucaugcuggagauuaua

SEQ ID NO: 803847 - RNA, 19 nt, Artificial Sequence
  Description of Artificial Sequence: Synthetic oligonucleotide
  Antisense strand to SEQ ID NO: 803846
uauaaucuccagcaugaga

SEQ ID NO: 803848 - RNA, 19 nt, Artificial Sequence
  Description of Artificial Sequence: Synthetic oligonucleotide
  Sense strand starting at position 215 of SEQ ID NO: 587595
gcuucuccugaagauagua

SEQ ID NO: 803849 - RNA, 19 nt, Artificial Sequence
  Description of Artificial Sequence: Synthetic oligonucleotide
  Antisense strand to SEQ ID NO: 803848
uacuaucuucaggagaagc

SEQ ID NO: 803850 - RNA, 19 nt, Artificial Sequence
  Description of Artificial Sequence: Synthetic oligonucleotide
  Sense strand starting at position 228 of SEQ ID NO: 587595
auaguaguuccaggaacac

SEQ ID NO: 803851 - RNA, 19 nt, Artificial Sequence
  Description of Artificial Sequence: Synthetic oligonucleotide
  Antisense strand to SEQ ID NO: 803850
guguuccuggaacuacuau

SEQ ID NO: 803852 - RNA, 19 nt, Artificial Sequence
  Description of Artificial Sequence: Synthetic oligonucleotide
  Sense strand starting at position 268 of SEQ ID NO: 587595
ggaguugcuagaugggaga

SEQ ID NO: 803853 - RNA, 19 nt, Artificial Sequence
  Description of Artificial Sequence: Synthetic oligonucleotide
  Antisense strand to SEQ ID NO: 803852
ucucccaucuagcaacucc

SEQ ID NO: 803854 - RNA, 19 nt, Artificial Sequence
  Description of Artificial Sequence: Synthetic oligonucleotide
  Sense strand starting at position 270 of SEQ ID NO: 587595
aguugcuagaugggagaua

SEQ ID NO: 803855 - RNA, 19 nt, Artificial Sequence
  Description of Artificial Sequence: Synthetic oligonucleotide
  Antisense strand to SEQ ID NO: 803854
uaucucccaucuagcaacu

SEQ ID NO: 803856 - RNA, 19 nt, Artificial Sequence
  Description of Artificial Sequence: Synthetic oligonucleotide
  Sense strand starting at position 341 of SEQ ID NO: 587595
aucuuacagcuguaggaaa

SEQ ID NO: 803857 - RNA, 19 nt, Artificial Sequence
  Description of Artificial Sequence: Synthetic oligonucleotide
  Antisense strand to SEQ ID NO: 803856
uuuccuacagcuguaagau

SEQ ID NO: 803858 - RNA, 19 nt, Artificial Sequence
  Description of Artificial Sequence: Synthetic oligonucleotide
  Sense strand starting at position 443 of SEQ ID NO: 587595
ccugcugugucauuuacuu

SEQ ID NO: 803859 - RNA, 19 nt, Artificial Sequence
  Description of Artificial Sequence: Synthetic oligonucleotide
  Antisense strand to SEQ ID NO: 803858
aaguaaaugacacagcagg

SEQ ID NO: 803860 - RNA, 19 nt, Artificial Sequence
  Description of Artificial Sequence: Synthetic oligonucleotide
  Sense strand starting at position 447 of SEQ ID NO: 587595
cugugucauuuacuugagu

SEQ ID NO: 803861 - RNA, 19 nt, Artificial Sequence
  Description of Artificial Sequence: Synthetic oligonucleotide
  Antisense strand to SEQ ID NO: 803860
acucaaguaaaugacacag

SEQ ID NO: 803862 - RNA, 19 nt, Artificial Sequence
  Description of Artificial Sequence: Synthetic oligonucleotide
  Sense strand starting at position 449 of SEQ ID NO: 587595
gugucauuuacuugaguuc

SEQ ID NO: 803863 - RNA, 19 nt, Artificial Sequence
  Description of Artificial Sequence: Synthetic oligonucleotide
  Antisense strand to SEQ ID NO: 803862
gaacucaaguaaaugacac

SEQ ID NO: 803864 - RNA, 19 nt, Artificial Sequence
  Description of Artificial Sequence: Synthetic oligonucleotide
  Sense strand starting at position 537 of SEQ ID NO: 587595
ucaguuucucgacauuaau

SEQ ID NO: 803865 - RNA, 19 nt, Artificial Sequence
  Description of Artificial Sequence: Synthetic oligonucleotide
  Antisense strand to SEQ ID NO: 803864
auuaaugucgagaaacuga

SEQ ID NO: 803866 - RNA, 19 nt, Artificial Sequence
  Description of Artificial Sequence: Synthetic oligonucleotide
  Sense strand starting at position 540 of SEQ ID NO: 587595
guuucucgacauuaauaau

SEQ ID NO: 803867 - RNA, 19 nt, Artificial Sequence
  Description of Artificial Sequence: Synthetic oligonucleotide
  Antisense strand to SEQ ID NO: 803866
auuauuaaugucgagaaac

SEQ ID NO: 803868 - RNA, 19 nt, Artificial Sequence
  Description of Artificial Sequence: Synthetic oligonucleotide
  Sense strand starting at position 719 of SEQ ID NO: 587595
aauugcugugaggauuacu

SEQ ID NO: 803869 - RNA, 19 nt, Artificial Sequence
  Description of Artificial Sequence: Synthetic oligonucleotide
  Antisense strand to SEQ ID NO: 803868
aguaauccucacagcaauu

SEQ ID NO: 803870 - RNA, 19 nt, Artificial Sequence
  Description of Artificial Sequence: Synthetic oligonucleotide
  Sense strand starting at position 722 of SEQ ID NO: 587595
ugcugugaggauuacugau

SEQ ID NO: 803871 - RNA, 19 nt, Artificial Sequence
  Description of Artificial Sequence: Synthetic oligonucleotide
  Antisense strand to SEQ ID NO: 803870
aucaguaauccucacagca

SEQ ID NO: 803872 - RNA, 19 nt, Artificial Sequence
  Description of Artificial Sequence: Synthetic oligonucleotide
  Sense strand starting at position 724 of SEQ ID NO: 587595
cugugaggauuacugauaa

SEQ ID NO: 803873 - RNA, 19 nt, Artificial Sequence
  Description of Artificial Sequence: Synthetic oligonucleotide
  Antisense strand to SEQ ID NO: 803872
uuaucaguaauccucacag

SEQ ID NO: 803874 - RNA, 19 nt, Artificial Sequence
  Description of Artificial Sequence: Synthetic oligonucleotide
  Sense strand starting at position 822 of SEQ ID NO: 587595
cagcaucuucuugggauca

SEQ ID NO: 803875 - RNA, 19 nt, Artificial Sequence
  Description of Artificial Sequence: Synthetic oligonucleotide
  Antisense strand to SEQ ID NO: 803874
ugaucccaagaagaugcug

SEQ ID NO: 803876 - RNA, 19 nt, Artificial Sequence
  Description of Artificial Sequence: Synthetic oligonucleotide
  Sense strand starting at position 877 of SEQ ID NO: 587595
cuuaauuaucaguagcaga

SEQ ID NO: 803877 - RNA, 19 nt, Artificial Sequence
  Description of Artificial Sequence: Synthetic oligonucleotide
  Antisense strand to SEQ ID NO: 803876
ucugcuacugauaauuaag

SEQ ID NO: 803878 - RNA, 19 nt, Artificial Sequence
  Description of Artificial Sequence: Synthetic oligonucleotide
  Sense strand starting at position 940 of SEQ ID NO: 587595
cacagagaagucugcuaug

SEQ ID NO: 803879 - RNA, 19 nt, Artificial Sequence
  Description of Artificial Sequence: Synthetic oligonucleotide
  Antisense strand to SEQ ID NO: 803878
cauagcagacuucucugug

SEQ ID NO: 803880 - RNA, 19 nt, Artificial Sequence
  Description of Artificial Sequence: Synthetic oligonucleotide
  Sense strand starting at position 945 of SEQ ID NO: 587595
agaagucugcuauggaauu

SEQ ID NO: 803881 - RNA, 19 nt, Artificial Sequence
  Description of Artificial Sequence: Synthetic oligonucleotide
  Antisense strand to SEQ ID NO: 803880
aauuccauagcagacuucu

SEQ ID NO: 803882 - RNA, 19 nt, Artificial Sequence
  Description of Artificial Sequence: Synthetic oligonucleotide
  Sense strand starting at position 980 of SEQ ID NO: 587595
agguaaauaaaguguaagu

SEQ ID NO: 803883 - RNA, 19 nt, Artificial Sequence
  Description of Artificial Sequence: Synthetic oligonucleotide
  Antisense strand to SEQ ID NO: 803882
acuuacacuuuauuuaccu

SEQ ID NO: 803884 - RNA, 19 nt, Artificial Sequence
  Description of Artificial Sequence: Synthetic oligonucleotide
  Sense strand starting at position 987 of SEQ ID NO: 587595
uaaaguguaaguggagaaa

SEQ ID NO: 803885 - RNA, 19 nt, Artificial Sequence
  Description of Artificial Sequence: Synthetic oligonucleotide
  Antisense strand to SEQ ID NO: 803884
uuucuccacuuacacuuua

SEQ ID NO: 803886 - RNA, 19 nt, Artificial Sequence
  Description of Artificial Sequence: Synthetic oligonucleotide
  Sense strand starting at position 990 of SEQ ID NO: 587595
aguguaaguggagaaaugu

SEQ ID NO: 803887 - RNA, 19 nt, Artificial Sequence
  Description of Artificial Sequence: Synthetic oligonucleotide
  Antisense strand to SEQ ID NO: 803886
acauuucuccacuuacacu

SEQ ID NO: 803888 - RNA, 19 nt, Artificial Sequence
  Description of Artificial Sequence: Synthetic oligonucleotide
  Sense strand starting at position 1043 of SEQ ID NO: 587595
ggagaccugcuuuacagua

SEQ ID NO: 803889 - RNA, 19 nt, Artificial Sequence
  Description of Artificial Sequence: Synthetic oligonucleotide
  Antisense strand to SEQ ID NO: 803888
uacuguaaagcaggucucc

SEQ ID NO: 803890 - RNA, 19 nt, Artificial Sequence
  Description of Artificial Sequence: Synthetic oligonucleotide
  Sense strand starting at position 1048 of SEQ ID NO: 587595
ccugcuuuacaguauuaca

SEQ ID NO: 803891 - RNA, 19 nt, Artificial Sequence
  Description of Artificial Sequence: Synthetic oligonucleotide
  Antisense strand to SEQ ID NO: 803890
uguaauacuguaaagcagg

SEQ ID NO: 803892 - RNA, 19 nt, Artificial Sequence
  Description of Artificial Sequence: Synthetic oligonucleotide
  Sense strand starting at position 1182 of SEQ ID NO: 587595
uguucuguaacggacaaau

SEQ ID NO: 803893 - RNA, 19 nt, Artificial Sequence
  Description of Artificial Sequence: Synthetic oligonucleotide
  Antisense strand to SEQ ID NO: 803892
auuuguccguuacagaaca

SEQ ID NO: 803894 - RNA, 19 nt, Artificial Sequence
  Description of Artificial Sequence: Synthetic oligonucleotide
  Sense strand starting at position 1275 of SEQ ID NO: 587595
gauacuauccugcagguuu

SEQ ID NO: 803895 - RNA, 19 nt, Artificial Sequence
  Description of Artificial Sequence: Synthetic oligonucleotide
  Antisense strand to SEQ ID NO: 803894
aaaccugcaggauaguauc

SEQ ID NO: 803896 - RNA, 19 nt, Artificial Sequence
  Description of Artificial Sequence: Synthetic oligonucleotide
  Sense strand starting at position 1575 of SEQ ID NO: 587595
acuuauggucuugguaaag

SEQ ID NO: 803897 - RNA, 19 nt, Artificial Sequence
  Description of Artificial Sequence: Synthetic oligonucleotide
  Antisense strand to SEQ ID NO: 803896
cuuuaccaagaccauaagu

SEQ ID NO: 803898 - RNA, 19 nt, Artificial Sequence
  Description of Artificial Sequence: Synthetic oligonucleotide
  Sense strand starting at position 2023 of SEQ ID NO: 587595
uugaacuugcuguaaagua

SEQ ID NO: 803899 - RNA, 19 nt, Artificial Sequence
  Description of Artificial Sequence: Synthetic oligonucleotide
  Antisense strand to SEQ ID NO: 803898
uacuuuacagcaaguucaa

SEQ ID NO: 803900 - RNA, 19 nt, Artificial Sequence
  Description of Artificial Sequence: Synthetic oligonucleotide
  Sense strand starting at position 2087 of SEQ ID NO: 587595
uccugugugcuucuguaua

SEQ ID NO: 803901 - RNA, 19 nt, Artificial Sequence
  Description of Artificial Sequence: Synthetic oligonucleotide
  Antisense strand to SEQ ID NO: 803900
uauacagaagcacacagga

SEQ ID NO: 803902 - RNA, 19 nt, Artificial Sequence
  Description of Artificial Sequence: Synthetic oligonucleotide
  Sense strand starting at position 2098 of SEQ ID NO: 587595
ucuguauauuugccuagua

SEQ ID NO: 803903 - RNA, 19 nt, Artificial Sequence
  Description of Artificial Sequence: Synthetic oligonucleotide
  Antisense strand to SEQ ID NO: 803902
uacuaggcaaauauacaga

SEQ ID NO: 803904 - RNA, 19 nt, Artificial Sequence
  Description of Artificial Sequence: Synthetic oligonucleotide
  Sense strand starting at position 2155 of SEQ ID NO: 587595
gcuuuacgugccuuuacau

SEQ ID NO: 803905 - RNA, 19 nt, Artificial Sequence
  Description of Artificial Sequence: Synthetic oligonucleotide
  Antisense strand to SEQ ID NO: 803904
auguaaaggcacguaaagc

SEQ ID NO: 803906 - RNA, 19 nt, Artificial Sequence
  Description of Artificial Sequence: Synthetic oligonucleotide
  Sense strand starting at position 2177 of SEQ ID NO: 587595
cuuacauacguauaaauug

SEQ ID NO: 803907 - RNA, 19 nt, Artificial Sequence
  Description of Artificial Sequence: Synthetic oligonucleotide
  Antisense strand to SEQ ID NO: 803906
caauuuauacguauguaag

SEQ ID NO: 803908 - RNA, 19 nt, Artificial Sequence
  Description of Artificial Sequence: Synthetic oligonucleotide
  Sense strand starting at position 2297 of SEQ ID NO: 587595
cuauucuuguuccuggaaa

SEQ ID NO: 803909 - RNA, 19 nt, Artificial Sequence
  Description of Artificial Sequence: Synthetic oligonucleotide
  Antisense strand to SEQ ID NO: 803908
uuuccaggaacaagaauag

SEQ ID NO: 803910 - RNA, 19 nt, Artificial Sequence
  Description of Artificial Sequence: Synthetic oligonucleotide
  Sense strand starting at position 2299 of SEQ ID NO: 587595
auucuuguuccuggaaaca

SEQ ID NO: 803911 - RNA, 19 nt, Artificial Sequence
  Description of Artificial Sequence: Synthetic oligonucleotide
  Antisense strand to SEQ ID NO: 803910
uguuuccaggaacaagaau

SEQ ID NO: 803912 - RNA, 19 nt, Artificial Sequence
  Description of Artificial Sequence: Synthetic oligonucleotide
  Sense strand starting at position 2338 of SEQ ID NO: 587595
acagaauugccauacagua

SEQ ID NO: 803913 - RNA, 19 nt, Artificial Sequence
  Description of Artificial Sequence: Synthetic oligonucleotide
  Antisense strand to SEQ ID NO: 803912
uacuguauggcaauucugu

SEQ ID NO: 803914 - RNA, 19 nt, Artificial Sequence
  Description of Artificial Sequence: Synthetic oligonucleotide
  Sense strand starting at position 2392 of SEQ ID NO: 587595
ccaacucuagagugauaug

SEQ ID NO: 803915 - RNA, 19 nt, Artificial Sequence
  Description of Artificial Sequence: Synthetic oligonucleotide
  Antisense strand to SEQ ID NO: 803914
cauaucacucuagaguugg

SEQ ID NO: 803916 - RNA, 19 nt, Artificial Sequence
  Description of Artificial Sequence: Synthetic oligonucleotide
  Sense strand starting at position 2489 of SEQ ID NO: 587595
uggcauuacaggugggaaa

SEQ ID NO: 803917 - RNA, 19 nt, Artificial Sequence
  Description of Artificial Sequence: Synthetic oligonucleotide
  Antisense strand to SEQ ID NO: 803916
uuucccaccuguaaugcca

SEQ ID NO: 803918 - RNA, 19 nt, Artificial Sequence
  Description of Artificial Sequence: Synthetic oligonucleotide
  Sense strand starting at position 2550 of SEQ ID NO: 587595
cuuccuaaggcauaguaau

SEQ ID NO: 803919 - RNA, 19 nt, Artificial Sequence
  Description of Artificial Sequence: Synthetic oligonucleotide
  Antisense strand to SEQ ID NO: 803918
auuacuaugccuuaggaag

SEQ ID NO: 803920 - RNA, 19 nt, Artificial Sequence
  Description of Artificial Sequence: Synthetic oligonucleotide
  Sense strand starting at position 2837 of SEQ ID NO: 587595
ggccaaagguucccaaaca

SEQ ID NO: 803921 - RNA, 19 nt, Artificial Sequence
  Description of Artificial Sequence: Synthetic oligonucleotide
  Antisense strand to SEQ ID NO: 803920
uguuugggaaccuuuggcc

SEQ ID NO: 803922 - RNA, 19 nt, Artificial Sequence
  Description of Artificial Sequence: Synthetic oligonucleotide
  Sense strand starting at position 3398 of SEQ ID NO: 587595
ccuggauugaacgguaauu

SEQ ID NO: 803923 - RNA, 19 nt, Artificial Sequence
  Description of Artificial Sequence: Synthetic oligonucleotide
  Antisense strand to SEQ ID NO: 803922
aauuaccguucaauccagg

SEQ ID NO: 803924 - RNA, 19 nt, Artificial Sequence
  Description of Artificial Sequence: Synthetic oligonucleotide
  Sense strand starting at position 681 of SEQ ID NO: 587596
cagaguaacugagacgauu

SEQ ID NO: 803925 - RNA, 19 nt, Artificial Sequence
  Description of Artificial Sequence: Synthetic oligonucleotide
  Antisense strand to SEQ ID NO: 803924
aaucgucucaguuacucug

SEQ ID NO: 803926 - RNA, 19 nt, Artificial Sequence
  Description of Artificial Sequence: Synthetic oligonucleotide
  Sense strand starting at position 689 of SEQ ID NO: 587596
cugagacgauugcaacuua

SEQ ID NO: 803927 - RNA, 19 nt, Artificial Sequence
  Description of Artificial Sequence: Synthetic oligonucleotide
  Antisense strand to SEQ ID NO: 803926
uaaguugcaaucgucucag

SEQ ID NO: 803928 - RNA, 19 nt, Artificial Sequence
  Description of Artificial Sequence: Synthetic oligonucleotide
  Sense strand starting at position 717 of SEQ ID NO: 587596
auguguaaaucaucuugaa

SEQ ID NO: 803929 - RNA, 19 nt, Artificial Sequence
  Description of Artificial Sequence: Synthetic oligonucleotide
  Antisense strand to SEQ ID NO: 803928
uucaagaugauuuacacau

SEQ ID NO: 803930 - RNA, 19 nt, Artificial Sequence
  Description of Artificial Sequence: Synthetic oligonucleotide
  Sense strand starting at position 745 of SEQ ID NO: 587596
ugagaaagaucacaugauu

SEQ ID NO: 803931 - RNA, 19 nt, Artificial Sequence
  Description of Artificial Sequence: Synthetic oligonucleotide
  Antisense strand to SEQ ID NO: 803930
aaucaugugaucuuucuca

SEQ ID NO: 803932 - RNA, 19 nt, Artificial Sequence
  Description of Artificial Sequence: Synthetic oligonucleotide
  Sense strand starting at position 780 of SEQ ID NO: 587596
uugcuugaggaauaaugca

SEQ ID NO: 803933 - RNA, 19 nt, Artificial Sequence
  Description of Artificial Sequence: Synthetic oligonucleotide
  Antisense strand to SEQ ID NO: 803932
ugcauuauuccucaagcaa

SEQ ID NO: 803934 - RNA, 19 nt, Artificial Sequence
  Description of Artificial Sequence: Synthetic oligonucleotide
  Sense strand starting at position 1000 of SEQ ID NO: 587596
aguggucucuacuacaaua

SEQ ID NO: 803935 - RNA, 19 nt, Artificial Sequence
  Description of Artificial Sequence: Synthetic oligonucleotide
  Antisense strand to SEQ ID NO: 803934
uauuguaguagagaccacu

SEQ ID NO: 803936 - RNA, 19 nt, Artificial Sequence
  Description of Artificial Sequence: Synthetic oligonucleotide
  Sense strand starting at position 1029 of SEQ ID NO: 587596
gcuaaugacccucacagua

SEQ ID NO: 803937 - RNA, 19 nt, Artificial Sequence
  Description of Artificial Sequence: Synthetic oligonucleotide
  Antisense strand to SEQ ID NO: 803936
uacugugagggucauuagc

SEQ ID NO: 803938 - RNA, 19 nt, Artificial Sequence
  Description of Artificial Sequence: Synthetic oligonucleotide
  Sense strand starting at position 1106 of SEQ ID NO: 587596
aacugccgcugucuuaaua

SEQ ID NO: 803939 - RNA, 19 nt, Artificial Sequence
  Description of Artificial Sequence: Synthetic oligonucleotide
  Antisense strand to SEQ ID NO: 803938
uauuaagacagcggcaguu

SEQ ID NO: 803940 - RNA, 19 nt, Artificial Sequence
  Description of Artificial Sequence: Synthetic oligonucleotide
  Sense strand starting at position 1172 of SEQ ID NO: 587596
ccgguaacacgcugauacu

SEQ ID NO: 803941 - RNA, 19 nt, Artificial Sequence
  Description of Artificial Sequence: Synthetic oligonucleotide
  Antisense strand to SEQ ID NO: 803940
aguaucagcguguuaccgg

SEQ ID NO: 803942 - RNA, 19 nt, Artificial Sequence
  Description of Artificial Sequence: Synthetic oligonucleotide
  Sense strand starting at position 1173 of SEQ ID NO: 587596
cgguaacacgcugauacuu

SEQ ID NO: 803943 - RNA, 19 nt, Artificial Sequence
  Description of Artificial Sequence: Synthetic oligonucleotide
  Antisense strand to SEQ ID NO: 803942
aaguaucagcguguuaccg

SEQ ID NO: 803944 - RNA, 19 nt, Artificial Sequence
  Description of Artificial Sequence: Synthetic oligonucleotide
  Sense strand starting at position 1178 of SEQ ID NO: 587596
acacgcugauacuucgaaa

SEQ ID NO: 803945 - RNA, 19 nt, Artificial Sequence
  Description of Artificial Sequence: Synthetic oligonucleotide
  Antisense strand to SEQ ID NO: 803944
uuucgaaguaucagcgugu

SEQ ID NO: 803946 - RNA, 19 nt, Artificial Sequence
  Description of Artificial Sequence: Synthetic oligonucleotide
  Sense strand starting at position 1420 of SEQ ID NO: 587596
ccggauugagcucagaaca

SEQ ID NO: 803947 - RNA, 19 nt, Artificial Sequence
  Description of Artificial Sequence: Synthetic oligonucleotide
  Antisense strand to SEQ ID NO: 803946
uguucugagcucaauccgg

SEQ ID NO: 803948 - RNA, 19 nt, Artificial Sequence
  Description of Artificial Sequence: Synthetic oligonucleotide
  Sense strand starting at position 1454 of SEQ ID NO: 587596
ggacucauucuacaagcuu

SEQ ID NO: 803949 - RNA, 19 nt, Artificial Sequence
  Description of Artificial Sequence: Synthetic oligonucleotide
  Antisense strand to SEQ ID NO: 803948
aagcuuguagaaugagucc

SEQ ID NO: 803950 - RNA, 19 nt, Artificial Sequence
  Description of Artificial Sequence: Synthetic oligonucleotide
  Sense strand starting at position 1462 of SEQ ID NO: 587596
ucuacaagcuucuucggaa

SEQ ID NO: 803951 - RNA, 19 nt, Artificial Sequence
  Description of Artificial Sequence: Synthetic oligonucleotide
  Antisense strand to SEQ ID NO: 803950
uuccgaagaagcuuguaga

SEQ ID NO: 803952 - RNA, 19 nt, Artificial Sequence
  Description of Artificial Sequence: Synthetic oligonucleotide
  Sense strand starting at position 1544 of SEQ ID NO: 587596
cugucaauguccucgauga

SEQ ID NO: 803953 - RNA, 19 nt, Artificial Sequence
  Description of Artificial Sequence: Synthetic oligonucleotide
  Antisense strand to SEQ ID NO: 803952
ucaucgaggacauugacag

SEQ ID NO: 803954 - RNA, 19 nt, Artificial Sequence
  Description of Artificial Sequence: Synthetic oligonucleotide
  Sense strand starting at position 1545 of SEQ ID NO: 587596
ugucaauguccucgaugag

SEQ ID NO: 803955 - RNA, 19 nt, Artificial Sequence
  Description of Artificial Sequence: Synthetic oligonucleotide
  Antisense strand to SEQ ID NO: 803954
cucaucgaggacauugaca

SEQ ID NO: 803956 - RNA, 19 nt, Artificial Sequence
  Description of Artificial Sequence: Synthetic oligonucleotide
  Sense strand starting at position 1744 of SEQ ID NO: 587596
gccggaagcuccuccauau

SEQ ID NO: 803957 - RNA, 19 nt, Artificial Sequence
  Description of Artificial Sequence: Synthetic oligonucleotide
  Antisense strand to SEQ ID NO: 803956
auauggaggagcuuccggc

SEQ ID NO: 803958 - RNA, 19 nt, Artificial Sequence
  Description of Artificial Sequence: Synthetic oligonucleotide
  Sense strand starting at position 1845 of SEQ ID NO: 587596
guuccuguuaaguagguaa

SEQ ID NO: 803959 - RNA, 19 nt, Artificial Sequence
  Description of Artificial Sequence: Synthetic oligonucleotide
  Antisense strand to SEQ ID NO: 803958
uuaccuacuuaacaggaac

SEQ ID NO: 803960 - RNA, 19 nt, Artificial Sequence
  Description of Artificial Sequence: Synthetic oligonucleotide
  Sense strand starting at position 1847 of SEQ ID NO: 587596
uccuguuaaguagguaaga

SEQ ID NO: 803961 - RNA, 19 nt, Artificial Sequence
  Description of Artificial Sequence: Synthetic oligonucleotide
  Antisense strand to SEQ ID NO: 803960
ucuuaccuacuuaacagga

SEQ ID NO: 803962 - RNA, 19 nt, Artificial Sequence
  Description of Artificial Sequence: Synthetic oligonucleotide
  Sense strand starting at position 2637 of SEQ ID NO: 587596
gaaagauccugcgcggacu

SEQ ID NO: 803963 - RNA, 19 nt, Artificial Sequence
  Description of Artificial Sequence: Synthetic oligonucleotide
  Antisense strand to SEQ ID NO: 803962
aguccgcgcaggaucuuuc

SEQ ID NO: 803964 - RNA, 19 nt, Artificial Sequence
  Description of Artificial Sequence: Synthetic oligonucleotide
  Sense strand starting at position 2741 of SEQ ID NO: 587596
caauuuauccugcguggcu

SEQ ID NO: 803965 - RNA, 19 nt, Artificial Sequence
  Description of Artificial Sequence: Synthetic oligonucleotide
  Antisense strand to SEQ ID NO: 803964
agccacgcaggauaaauug

SEQ ID NO: 803966 - RNA, 19 nt, Artificial Sequence
  Description of Artificial Sequence: Synthetic oligonucleotide
  Sense strand starting at position 2878 of SEQ ID NO: 587596
ccuaaugccuugccugaga

SEQ ID NO: 803967 - RNA, 19 nt, Artificial Sequence
  Description of Artificial Sequence: Synthetic oligonucleotide
  Antisense strand to SEQ ID NO: 803966
ucucaggcaaggcauuagg

SEQ ID NO: 803968 - RNA, 19 nt, Artificial Sequence
  Description of Artificial Sequence: Synthetic oligonucleotide
  Sense strand starting at position 2887 of SEQ ID NO: 587596
uugccugagaucgaaucau

SEQ ID NO: 803969 - RNA, 19 nt, Artificial Sequence
  Description of Artificial Sequence: Synthetic oligonucleotide
  Antisense strand to SEQ ID NO: 803968
augauucgaucucaggcaa

SEQ ID NO: 803970 - RNA, 19 nt, Artificial Sequence
  Description of Artificial Sequence: Synthetic oligonucleotide
  Sense strand starting at position 2893 of SEQ ID NO: 587596
gagaucgaaucaugaauaa

SEQ ID NO: 803971 - RNA, 19 nt, Artificial Sequence
  Description of Artificial Sequence: Synthetic oligonucleotide
  Antisense strand to SEQ ID NO: 803970
uuauucaugauucgaucuc

SEQ ID NO: 803972 - RNA, 19 nt, Artificial Sequence
  Description of Artificial Sequence: Synthetic oligonucleotide
  Sense strand starting at position 2903 of SEQ ID NO: 587596
caugaauaaucaguguugu

SEQ ID NO: 803973 - RNA, 19 nt, Artificial Sequence
  Description of Artificial Sequence: Synthetic oligonucleotide
  Antisense strand to SEQ ID NO: 803972
acaacacugauuauucaug

SEQ ID NO: 803974 - RNA, 19 nt, Artificial Sequence
  Description of Artificial Sequence: Synthetic oligonucleotide
  Sense strand starting at position 2904 of SEQ ID NO: 587596
augaauaaucaguguugua

SEQ ID NO: 803975 - RNA, 19 nt, Artificial Sequence
  Description of Artificial Sequence: Synthetic oligonucleotide
  Antisense strand to SEQ ID NO: 803974
uacaacacugauuauucau

SEQ ID NO: 803976 - RNA, 19 nt, Artificial Sequence
  Description of Artificial Sequence: Synthetic oligonucleotide
  Sense strand starting at position 2925 of SEQ ID NO: 587596
guaccuuuacgcggauuga

SEQ ID NO: 803977 - RNA, 19 nt, Artificial Sequence
  Description of Artificial Sequence: Synthetic oligonucleotide
  Antisense strand to SEQ ID NO: 803976
ucaauccgcguaaagguac

SEQ ID NO: 803978 - RNA, 19 nt, Artificial Sequence
  Description of Artificial Sequence: Synthetic oligonucleotide
  Sense strand starting at position 3097 of SEQ ID NO: 587596
auauacuucugcuuuguua

SEQ ID NO: 803979 - RNA, 19 nt, Artificial Sequence
  Description of Artificial Sequence: Synthetic oligonucleotide
  Antisense strand to SEQ ID NO: 803978
uaacaaagcagaaguauau

SEQ ID NO: 803980 - RNA, 19 nt, Artificial Sequence
  Description of Artificial Sequence: Synthetic oligonucleotide
  Sense strand starting at position 3211 of SEQ ID NO: 587596
gaaauucucguacauugcu

SEQ ID NO: 803981 - RNA, 19 nt, Artificial Sequence
  Description of Artificial Sequence: Synthetic oligonucleotide
  Antisense strand to SEQ ID NO: 803980
agcaauguacgagaauuuc

SEQ ID NO: 803982 - RNA, 19 nt, Artificial Sequence
  Description of Artificial Sequence: Synthetic oligonucleotide
  Sense strand starting at position 3282 of SEQ ID NO: 587596
gcauuagaauuagucuaug

SEQ ID NO: 803983 - RNA, 19 nt, Artificial Sequence
  Description of Artificial Sequence: Synthetic oligonucleotide
  Antisense strand to SEQ ID NO: 803982
cauagacuaauucuaaugc

SEQ ID NO: 803984 - RNA, 19 nt, Artificial Sequence
  Description of Artificial Sequence: Synthetic oligonucleotide
  Sense strand starting at position 3287 of SEQ ID NO: 587596
agaauuagucuaugaccca

SEQ ID NO: 803985 - RNA, 19 nt, Artificial Sequence
  Description of Artificial Sequence: Synthetic oligonucleotide
  Antisense strand to SEQ ID NO: 803984
ugggucauagacuaauucu

SEQ ID NO: 803986 - RNA, 19 nt, Artificial Sequence
  Description of Artificial Sequence: Synthetic oligonucleotide
  Sense strand starting at position 3310 of SEQ ID NO: 587596
gcccacuccuggcuauaua

SEQ ID NO: 803987 - RNA, 19 nt, Artificial Sequence
  Description of Artificial Sequence: Synthetic oligonucleotide
  Antisense strand to SEQ ID NO: 803986
uauauagccaggagugggc

SEQ ID NO: 803988 - RNA, 19 nt, Artificial Sequence
  Description of Artificial Sequence: Synthetic oligonucleotide
  Sense strand starting at position 3318 of SEQ ID NO: 587596
cuggcuauauacccaagaa

SEQ ID NO: 803989 - RNA, 19 nt, Artificial Sequence
  Description of Artificial Sequence: Synthetic oligonucleotide
  Antisense strand to SEQ ID NO: 803988
uucuuggguauauagccag

SEQ ID NO: 803990 - RNA, 19 nt, Artificial Sequence
  Description of Artificial Sequence: Synthetic oligonucleotide
  Sense strand starting at position 3785 of SEQ ID NO: 587596
ccugguucuuuauucgaau

SEQ ID NO: 803991 - RNA, 19 nt, Artificial Sequence
  Description of Artificial Sequence: Synthetic oligonucleotide
  Antisense strand to SEQ ID NO: 803990
auucgaauaaagaaccagg

SEQ ID NO: 803992 - RNA, 19 nt, Artificial Sequence
  Description of Artificial Sequence: Synthetic oligonucleotide
  Sense strand starting at position 3786 of SEQ ID NO: 587596
cugguucuuuauucgaaua

SEQ ID NO: 803993 - RNA, 19 nt, Artificial Sequence
  Description of Artificial Sequence: Synthetic oligonucleotide
  Antisense strand to SEQ ID NO: 803992
uauucgaauaaagaaccag

SEQ ID NO: 803994 - RNA, 19 nt, Artificial Sequence
  Description of Artificial Sequence: Synthetic oligonucleotide
  Sense strand starting at position 3799 of SEQ ID NO: 587596
cgaauacaggaauguugua

SEQ ID NO: 803995 - RNA, 19 nt, Artificial Sequence
  Description of Artificial Sequence: Synthetic oligonucleotide
  Antisense strand to SEQ ID NO: 803994
uacaacauuccuguauucg

SEQ ID NO: 803996 - RNA, 19 nt, Artificial Sequence
  Description of Artificial Sequence: Synthetic oligonucleotide
  Sense strand starting at position 3804 of SEQ ID NO: 587596
acaggaauguuguaaggac

SEQ ID NO: 803997 - RNA, 19 nt, Artificial Sequence
  Description of Artificial Sequence: Synthetic oligonucleotide
  Antisense strand to SEQ ID NO: 803996
guccuuacaacauuccugu

SEQ ID NO: 803998 - RNA, 19 nt, Artificial Sequence
  Description of Artificial Sequence: Synthetic oligonucleotide
  Sense strand starting at position 3819 of SEQ ID NO: 587596
ggacauaacgacugaugca

SEQ ID NO: 803999 - RNA, 19 nt, Artificial Sequence
  Description of Artificial Sequence: Synthetic oligonucleotide
  Antisense strand to SEQ ID NO: 803998
ugcaucagucguuaugucc

SEQ ID NO: 804000 - RNA, 19 nt, Artificial Sequence
  Description of Artificial Sequence: Synthetic oligonucleotide
  Sense strand starting at position 3957 of SEQ ID NO: 587596
ugagcuaagucagucagaa

SEQ ID NO: 804001 - RNA, 19 nt, Artificial Sequence
  Description of Artificial Sequence: Synthetic oligonucleotide
  Antisense strand to SEQ ID NO: 804000
uucugacugacuuagcuca

SEQ ID NO: 804002 - RNA, 19 nt, Artificial Sequence
  Description of Artificial Sequence: Synthetic oligonucleotide
  Sense strand starting at position 3959 of SEQ ID NO: 587596
agcuaagucagucagaaag

SEQ ID NO: 804003 - RNA, 19 nt, Artificial Sequence
  Description of Artificial Sequence: Synthetic oligonucleotide
  Antisense strand to SEQ ID NO: 804002
cuuucugacugacuuagcu

SEQ ID NO: 804004 - RNA, 19 nt, Artificial Sequence
  Description of Artificial Sequence: Synthetic oligonucleotide
  Sense strand starting at position 224 of SEQ ID NO: 587597
guaccuauguggccugaua

SEQ ID NO: 804005 - RNA, 19 nt, Artificial Sequence
  Description of Artificial Sequence: Synthetic oligonucleotide
  Antisense strand to SEQ ID NO: 804004
uaucaggccacauagguac

SEQ ID NO: 804006 - RNA, 19 nt, Artificial Sequence
  Description of Artificial Sequence: Synthetic oligonucleotide
  Sense strand starting at position 226 of SEQ ID NO: 587597
accuauguggccugauauc

SEQ ID NO: 804007 - RNA, 19 nt, Artificial Sequence
  Description of Artificial Sequence: Synthetic oligonucleotide
  Antisense strand to SEQ ID NO: 804006
gauaucaggccacauaggu

SEQ ID NO: 804008 - RNA, 19 nt, Artificial Sequence
  Description of Artificial Sequence: Synthetic oligonucleotide
  Sense strand starting at position 254 of SEQ ID NO: 587597
gcuccuccgucccagaaua

SEQ ID NO: 804009 - RNA, 19 nt, Artificial Sequence
  Description of Artificial Sequence: Synthetic oligonucleotide
  Antisense strand to SEQ ID NO: 804008
uauucugggacggaggagc

SEQ ID NO: 804010 - RNA, 19 nt, Artificial Sequence
  Description of Artificial Sequence: Synthetic oligonucleotide
  Sense strand starting at position 284 of SEQ ID NO: 587597
gccacacugguuuaaauca

SEQ ID NO: 804011 - RNA, 19 nt, Artificial Sequence
  Description of Artificial Sequence: Synthetic oligonucleotide
  Antisense strand to SEQ ID NO: 804010
ugauuuaaaccaguguggc

SEQ ID NO: 804012 - RNA, 19 nt, Artificial Sequence
  Description of Artificial Sequence: Synthetic oligonucleotide
  Sense strand starting at position 464 of SEQ ID NO: 587597
gcuccaagucaucagcauu

SEQ ID NO: 804013 - RNA, 19 nt, Artificial Sequence
  Description of Artificial Sequence: Synthetic oligonucleotide
  Antisense strand to SEQ ID NO: 804012
aaugcugaugacuuggagc

SEQ ID NO: 804014 - RNA, 19 nt, Artificial Sequence
  Description of Artificial Sequence: Synthetic oligonucleotide
  Sense strand starting at position 726 of SEQ ID NO: 587597
ugcagcuucucauugcaca

SEQ ID NO: 804015 - RNA, 19 nt, Artificial Sequence
  Description of Artificial Sequence: Synthetic oligonucleotide
  Antisense strand to SEQ ID NO: 804014
ugugcaaugagaagcugca

SEQ ID NO: 804016 - RNA, 19 nt, Artificial Sequence
  Description of Artificial Sequence: Synthetic oligonucleotide
  Sense strand starting at position 997 of SEQ ID NO: 587597
cuguguucguggucuugca

SEQ ID NO: 804017 - RNA, 19 nt, Artificial Sequence
  Description of Artificial Sequence: Synthetic oligonucleotide
  Antisense strand to SEQ ID NO: 804016
ugcaagaccacgaacacag

SEQ ID NO: 804018 - RNA, 19 nt, Artificial Sequence
  Description of Artificial Sequence: Synthetic oligonucleotide
  Sense strand starting at position 999 of SEQ ID NO: 587597
guguucguggucuugcaga

SEQ ID NO: 804019 - RNA, 19 nt, Artificial Sequence
  Description of Artificial Sequence: Synthetic oligonucleotide
  Antisense strand to SEQ ID NO: 804018
ucugcaagaccacgaacac

SEQ ID NO: 804020 - RNA, 19 nt, Artificial Sequence
  Description of Artificial Sequence: Synthetic oligonucleotide
  Sense strand starting at position 1425 of SEQ ID NO: 587597
ggaggagauggcuauguuu

SEQ ID NO: 804021 - RNA, 19 nt, Artificial Sequence
  Description of Artificial Sequence: Synthetic oligonucleotide
  Antisense strand to SEQ ID NO: 804020
aaacauagccaucuccucc

SEQ ID NO: 804022 - RNA, 19 nt, Artificial Sequence
  Description of Artificial Sequence: Synthetic oligonucleotide
  Sense strand starting at position 1427 of SEQ ID NO: 587597
aggagauggcuauguuucu

SEQ ID NO: 804023 - RNA, 19 nt, Artificial Sequence
  Description of Artificial Sequence: Synthetic oligonucleotide
  Antisense strand to SEQ ID NO: 804022
agaaacauagccaucuccu

SEQ ID NO: 804024 - RNA, 19 nt, Artificial Sequence
  Description of Artificial Sequence: Synthetic oligonucleotide
  Sense strand starting at position 1488 of SEQ ID NO: 587597
cugcucugagccuaugaca

SEQ ID NO: 804025 - RNA, 19 nt, Artificial Sequence
  Description of Artificial Sequence: Synthetic oligonucleotide
  Antisense strand to SEQ ID NO: 804024
ugucauaggcucagagcag

SEQ ID NO: 804026 - RNA, 19 nt, Artificial Sequence
  Description of Artificial Sequence: Synthetic oligonucleotide
  Sense strand starting at position 1594 of SEQ ID NO: 587597
ccgcucucccagugagaag

SEQ ID NO: 804027 - RNA, 19 nt, Artificial Sequence
  Description of Artificial Sequence: Synthetic oligonucleotide
  Antisense strand to SEQ ID NO: 804026
cuucucacugggagagcgg

SEQ ID NO: 804028 - RNA, 19 nt, Artificial Sequence
  Description of Artificial Sequence: Synthetic oligonucleotide
  Sense strand starting at position 1606 of SEQ ID NO: 587597
ugagaagcaucucaagaca

SEQ ID NO: 804029 - RNA, 19 nt, Artificial Sequence
  Description of Artificial Sequence: Synthetic oligonucleotide
  Antisense strand to SEQ ID NO: 804028
ugucuugagaugcuucuca

SEQ ID NO: 804030 - RNA, 19 nt, Artificial Sequence
  Description of Artificial Sequence: Synthetic oligonucleotide
  Sense strand starting at position 1660 of SEQ ID NO: 587597
aggagucaguucuaagauc

SEQ ID NO: 804031 - RNA, 19 nt, Artificial Sequence
  Description of Artificial Sequence: Synthetic oligonucleotide
  Antisense strand to SEQ ID NO: 804030
gaucuuagaacugacuccu

SEQ ID NO: 804032 - RNA, 19 nt, Artificial Sequence
  Description of Artificial Sequence: Synthetic oligonucleotide
  Sense strand starting at position 1668 of SEQ ID NO: 587597
guucuaagauccucagauu

SEQ ID NO: 804033 - RNA, 19 nt, Artificial Sequence
  Description of Artificial Sequence: Synthetic oligonucleotide
  Antisense strand to SEQ ID NO: 804032
aaucugaggaucuuagaac

SEQ ID NO: 804034 - RNA, 19 nt, Artificial Sequence
  Description of Artificial Sequence: Synthetic oligonucleotide
  Sense strand starting at position 1701 of SEQ ID NO: 587597
aucugacacucguuaagau

SEQ ID NO: 804035 - RNA, 19 nt, Artificial Sequence
  Description of Artificial Sequence: Synthetic oligonucleotide
  Antisense strand to SEQ ID NO: 804034
aucuuaacgagugucagau

SEQ ID NO: 804036 - RNA, 19 nt, Artificial Sequence
  Description of Artificial Sequence: Synthetic oligonucleotide
  Sense strand starting at position 1702 of SEQ ID NO: 587597
ucugacacucguuaagauu

SEQ ID NO: 804037 - RNA, 19 nt, Artificial Sequence
  Description of Artificial Sequence: Synthetic oligonucleotide
  Antisense strand to SEQ ID NO: 804036
aaucuuaacgagugucaga

SEQ ID NO: 804038 - RNA, 19 nt, Artificial Sequence
  Description of Artificial Sequence: Synthetic oligonucleotide
  Sense strand starting at position 1772 of SEQ ID NO: 587597
guucucugugccuagaugu

SEQ ID NO: 804039 - RNA, 19 nt, Artificial Sequence
  Description of Artificial Sequence: Synthetic oligonucleotide
  Antisense strand to SEQ ID NO: 804038
acaucuaggcacagagaac

SEQ ID NO: 804040 - RNA, 19 nt, Artificial Sequence
  Description of Artificial Sequence: Synthetic oligonucleotide
  Sense strand starting at position 1796 of SEQ ID NO: 587597
gcuccaggcuccuaguauu

SEQ ID NO: 804041 - RNA, 19 nt, Artificial Sequence
  Description of Artificial Sequence: Synthetic oligonucleotide
  Antisense strand to SEQ ID NO: 804040
aauacuaggagccuggagc

SEQ ID NO: 804042 - RNA, 19 nt, Artificial Sequence
  Description of Artificial Sequence: Synthetic oligonucleotide
  Sense strand starting at position 2335 of SEQ ID NO: 587597
gugucuuugucccugcauu

SEQ ID NO: 804043 - RNA, 19 nt, Artificial Sequence
  Description of Artificial Sequence: Synthetic oligonucleotide
  Antisense strand to SEQ ID NO: 804042
aaugcagggacaaagacac

SEQ ID NO: 804044 - RNA, 19 nt, Artificial Sequence
  Description of Artificial Sequence: Synthetic oligonucleotide
  Sense strand starting at position 2867 of SEQ ID NO: 587597
uaacuauugcucuaggugu

SEQ ID NO: 804045 - RNA, 19 nt, Artificial Sequence
  Description of Artificial Sequence: Synthetic oligonucleotide
  Antisense strand to SEQ ID NO: 804044
acaccuagagcaauaguua

SEQ ID NO: 804046 - RNA, 19 nt, Artificial Sequence
  Description of Artificial Sequence: Synthetic oligonucleotide
  Sense strand starting at position 3024 of SEQ ID NO: 587597
gacuuucuuucccuggaga

SEQ ID NO: 804047 - RNA, 19 nt, Artificial Sequence
  Description of Artificial Sequence: Synthetic oligonucleotide
  Antisense strand to SEQ ID NO: 804046
ucuccagggaaagaaaguc

SEQ ID NO: 804048 - RNA, 19 nt, Artificial Sequence
  Description of Artificial Sequence: Synthetic oligonucleotide
  Sense strand starting at position 3474 of SEQ ID NO: 587597
cagcaaaugucuccugaga

SEQ ID NO: 804049 - RNA, 19 nt, Artificial Sequence
  Description of Artificial Sequence: Synthetic oligonucleotide
  Antisense strand to SEQ ID NO: 804048
ucucaggagacauuugcug

SEQ ID NO: 804050 - RNA, 19 nt, Artificial Sequence
  Description of Artificial Sequence: Synthetic oligonucleotide
  Sense strand starting at position 3476 of SEQ ID NO: 587597
gcaaaugucuccugagaau

SEQ ID NO: 804051 - RNA, 19 nt, Artificial Sequence
  Description of Artificial Sequence: Synthetic oligonucleotide
  Antisense strand to SEQ ID NO: 804050
auucucaggagacauuugc

SEQ ID NO: 804052 - RNA, 19 nt, Artificial Sequence
  Description of Artificial Sequence: Synthetic oligonucleotide
  Sense strand starting at position 3479 of SEQ ID NO: 587597
aaugucuccugagaaugcu

SEQ ID NO: 804053 - RNA, 19 nt, Artificial Sequence
  Description of Artificial Sequence: Synthetic oligonucleotide
  Antisense strand to SEQ ID NO: 804052
agcauucucaggagacauu

SEQ ID NO: 804054 - RNA, 19 nt, Artificial Sequence
  Description of Artificial Sequence: Synthetic oligonucleotide
  Sense strand starting at position 3656 of SEQ ID NO: 587597
ggacguguguagucucacu

SEQ ID NO: 804055 - RNA, 19 nt, Artificial Sequence
  Description of Artificial Sequence: Synthetic oligonucleotide
  Antisense strand to SEQ ID NO: 804054
agugagacuacacacgucc

SEQ ID NO: 804056 - RNA, 19 nt, Artificial Sequence
  Description of Artificial Sequence: Synthetic oligonucleotide
  Sense strand starting at position 3838 of SEQ ID NO: 587597
gugaugacucggugggcau

SEQ ID NO: 804057 - RNA, 19 nt, Artificial Sequence
  Description of Artificial Sequence: Synthetic oligonucleotide
  Antisense strand to SEQ ID NO: 804056
augcccaccgagucaucac

SEQ ID NO: 804058 - RNA, 19 nt, Artificial Sequence
  Description of Artificial Sequence: Synthetic oligonucleotide
  Sense strand starting at position 3972 of SEQ ID NO: 587597
gagaguggguucugagugu

SEQ ID NO: 804059 - RNA, 19 nt, Artificial Sequence
  Description of Artificial Sequence: Synthetic oligonucleotide
  Antisense strand to SEQ ID NO: 804058
acacucagaacccacucuc

SEQ ID NO: 804060 - RNA, 19 nt, Artificial Sequence
  Description of Artificial Sequence: Synthetic oligonucleotide
  Sense strand starting at position 263 of SEQ ID NO: 587598
auguguaucugucagugua

SEQ ID NO: 804061 - RNA, 19 nt, Artificial Sequence
  Description of Artificial Sequence: Synthetic oligonucleotide
  Antisense strand to SEQ ID NO: 804060
uacacugacagauacacau

SEQ ID NO: 804062 - RNA, 19 nt, Artificial Sequence
  Description of Artificial Sequence: Synthetic oligonucleotide
  Sense strand starting at position 265 of SEQ ID NO: 587598
guguaucugucaguguaua

SEQ ID NO: 804063 - RNA, 19 nt, Artificial Sequence
  Description of Artificial Sequence: Synthetic oligonucleotide
  Antisense strand to SEQ ID NO: 804062
uauacacugacagauacac

SEQ ID NO: 804064 - RNA, 19 nt, Artificial Sequence
  Description of Artificial Sequence: Synthetic oligonucleotide
  Sense strand starting at position 266 of SEQ ID NO: 587598
uguaucugucaguguauau

SEQ ID NO: 804065 - RNA, 19 nt, Artificial Sequence
  Description of Artificial Sequence: Synthetic oligonucleotide
  Antisense strand to SEQ ID NO: 804064
auauacacugacagauaca

SEQ ID NO: 804066 - RNA, 19 nt, Artificial Sequence
  Description of Artificial Sequence: Synthetic oligonucleotide
  Sense strand starting at position 273 of SEQ ID NO: 587598
gucaguguauauuagcuaa

SEQ ID NO: 804067 - RNA, 19 nt, Artificial Sequence
  Description of Artificial Sequence: Synthetic oligonucleotide
  Antisense strand to SEQ ID NO: 804066
uuagcuaauauacacugac

SEQ ID NO: 804068 - RNA, 19 nt, Artificial Sequence
  Description of Artificial Sequence: Synthetic oligonucleotide
  Sense strand starting at position 276 of SEQ ID NO: 587598
aguguauauuagcuaaucu

SEQ ID NO: 804069 - RNA, 19 nt, Artificial Sequence
  Description of Artificial Sequence: Synthetic oligonucleotide
  Antisense strand to SEQ ID NO: 804068
agauuagcuaauauacacu

SEQ ID NO: 804070 - RNA, 19 nt, Artificial Sequence
  Description of Artificial Sequence: Synthetic oligonucleotide
  Sense strand starting at position 287 of SEQ ID NO: 587598
gcuaaucuguaucuagaau

SEQ ID NO: 804071 - RNA, 19 nt, Artificial Sequence
  Description of Artificial Sequence: Synthetic oligonucleotide
  Antisense strand to SEQ ID NO: 804070
auucuagauacagauuagc

SEQ ID NO: 804072 - RNA, 19 nt, Artificial Sequence
  Description of Artificial Sequence: Synthetic oligonucleotide
  Sense strand starting at position 408 of SEQ ID NO: 587598
ugauguuacucaguuccga

SEQ ID NO: 804073 - RNA, 19 nt, Artificial Sequence
  Description of Artificial Sequence: Synthetic oligonucleotide
  Antisense strand to SEQ ID NO: 804072
ucggaacugaguaacauca

SEQ ID NO: 804074 - RNA, 19 nt, Artificial Sequence
  Description of Artificial Sequence: Synthetic oligonucleotide
  Sense strand starting at position 412 of SEQ ID NO: 587598
guuacucaguuccgaggaa

SEQ ID NO: 804075 - RNA, 19 nt, Artificial Sequence
  Description of Artificial Sequence: Synthetic oligonucleotide
  Antisense strand to SEQ ID NO: 804074
uuccucggaacugaguaac

SEQ ID NO: 804076 - RNA, 19 nt, Artificial Sequence
  Description of Artificial Sequence: Synthetic oligonucleotide
  Sense strand starting at position 413 of SEQ ID NO: 587598
uuacucaguuccgaggaaa

SEQ ID NO: 804077 - RNA, 19 nt, Artificial Sequence
  Description of Artificial Sequence: Synthetic oligonucleotide
  Antisense strand to SEQ ID NO: 804076
uuuccucggaacugaguaa

SEQ ID NO: 804078 - RNA, 19 nt, Artificial Sequence
  Description of Artificial Sequence: Synthetic oligonucleotide
  Sense strand starting at position 458 of SEQ ID NO: 587598
ccauucuguggcugggaaa

SEQ ID NO: 804079 - RNA, 19 nt, Artificial Sequence
  Description of Artificial Sequence: Synthetic oligonucleotide
  Antisense strand to SEQ ID NO: 804078
uuucccagccacagaaugg

SEQ ID NO: 804080 - RNA, 19 nt, Artificial Sequence
  Description of Artificial Sequence: Synthetic oligonucleotide
  Sense strand starting at position 459 of SEQ ID NO: 587598
cauucuguggcugggaaau

SEQ ID NO: 804081 - RNA, 19 nt, Artificial Sequence
  Description of Artificial Sequence: Synthetic oligonucleotide
  Antisense strand to SEQ ID NO: 804080
auuucccagccacagaaug

SEQ ID NO: 804082 - RNA, 19 nt, Artificial Sequence
  Description of Artificial Sequence: Synthetic oligonucleotide
  Sense strand starting at position 472 of SEQ ID NO: 587598
ggaaaugggcuccgagaga

SEQ ID NO: 804083 - RNA, 19 nt, Artificial Sequence
  Description of Artificial Sequence: Synthetic oligonucleotide
  Antisense strand to SEQ ID NO: 804082
ucucucggagcccauuucc

SEQ ID NO: 804084 - RNA, 19 nt, Artificial Sequence
  Description of Artificial Sequence: Synthetic oligonucleotide
  Sense strand starting at position 572 of SEQ ID NO: 587598
cucugcacugcuggagaaa

SEQ ID NO: 804085 - RNA, 19 nt, Artificial Sequence
  Description of Artificial Sequence: Synthetic oligonucleotide
  Antisense strand to SEQ ID NO: 804084
uuucuccagcagugcagag

SEQ ID NO: 804086 - RNA, 19 nt, Artificial Sequence
  Description of Artificial Sequence: Synthetic oligonucleotide
  Sense strand starting at position 749 of SEQ ID NO: 587598
gaggaugccucagagaaca

SEQ ID NO: 804087 - RNA, 19 nt, Artificial Sequence
  Description of Artificial Sequence: Synthetic oligonucleotide
  Antisense strand to SEQ ID NO: 804086
uguucucugaggcauccuc

SEQ ID NO: 804088 - RNA, 19 nt, Artificial Sequence
  Description of Artificial Sequence: Synthetic oligonucleotide
  Sense strand starting at position 994 of SEQ ID NO: 587598
cugagcugucucugaggaa

SEQ ID NO: 804089 - RNA, 19 nt, Artificial Sequence
  Description of Artificial Sequence: Synthetic oligonucleotide
  Antisense strand to SEQ ID NO: 804088
uuccucagagacagcucag

SEQ ID NO: 804090 - RNA, 19 nt, Artificial Sequence
  Description of Artificial Sequence: Synthetic oligonucleotide
  Sense strand starting at position 995 of SEQ ID NO: 587598
ugagcugucucugaggaag

SEQ ID NO: 804091 - RNA, 19 nt, Artificial Sequence
  Description of Artificial Sequence: Synthetic oligonucleotide
  Antisense strand to SEQ ID NO: 804090
cuuccucagagacagcuca

SEQ ID NO: 804092 - RNA, 19 nt, Artificial Sequence
  Description of Artificial Sequence: Synthetic oligonucleotide
  Sense strand starting at position 1625 of SEQ ID NO: 587598
cccagaucuuuggaaacau

SEQ ID NO: 804093 - RNA, 19 nt, Artificial Sequence
  Description of Artificial Sequence: Synthetic oligonucleotide
  Antisense strand to SEQ ID NO: 804092
auguuuccaaagaucuggg

SEQ ID NO: 804094 - RNA, 19 nt, Artificial Sequence
  Description of Artificial Sequence: Synthetic oligonucleotide
  Sense strand starting at position 2093 of SEQ ID NO: 587598
cccggcuccuugggauaga

SEQ ID NO: 804095 - RNA, 19 nt, Artificial Sequence
  Description of Artificial Sequence: Synthetic oligonucleotide
  Antisense strand to SEQ ID NO: 804094
ucuaucccaaggagccggg

SEQ ID NO: 804096 - RNA, 19 nt, Artificial Sequence
  Description of Artificial Sequence: Synthetic oligonucleotide
  Sense strand starting at position 2094 of SEQ ID NO: 587598
ccggcuccuugggauagau

SEQ ID NO: 804097 - RNA, 19 nt, Artificial Sequence
  Description of Artificial Sequence: Synthetic oligonucleotide
  Antisense strand to SEQ ID NO: 804096
aucuaucccaaggagccgg

SEQ ID NO: 804098 - RNA, 19 nt, Artificial Sequence
  Description of Artificial Sequence: Synthetic oligonucleotide
  Sense strand starting at position 2335 of SEQ ID NO: 587598
acguguuugggugugagca

SEQ ID NO: 804099 - RNA, 19 nt, Artificial Sequence
  Description of Artificial Sequence: Synthetic oligonucleotide
  Antisense strand to SEQ ID NO: 804098
ugcucacacccaaacacgu

SEQ ID NO: 804100 - RNA, 19 nt, Artificial Sequence
  Description of Artificial Sequence: Synthetic oligonucleotide
  Sense strand starting at position 2452 of SEQ ID NO: 587598
ugggauuccugaggucauc

SEQ ID NO: 804101 - RNA, 19 nt, Artificial Sequence
  Description of Artificial Sequence: Synthetic oligonucleotide
  Antisense strand to SEQ ID NO: 804100
gaugaccucaggaauccca

SEQ ID NO: 804102 - RNA, 19 nt, Artificial Sequence
  Description of Artificial Sequence: Synthetic oligonucleotide
  Sense strand starting at position 2667 of SEQ ID NO: 587598
cggccuguucuccaguuga

SEQ ID NO: 804103 - RNA, 19 nt, Artificial Sequence
  Description of Artificial Sequence: Synthetic oligonucleotide
  Antisense strand to SEQ ID NO: 804102
ucaacuggagaacaggccg

SEQ ID NO: 804104 - RNA, 19 nt, Artificial Sequence
  Description of Artificial Sequence: Synthetic oligonucleotide
  Sense strand starting at position 2671 of SEQ ID NO: 587598
cuguucuccaguugacagu

SEQ ID NO: 804105 - RNA, 19 nt, Artificial Sequence
  Description of Artificial Sequence: Synthetic oligonucleotide
  Antisense strand to SEQ ID NO: 804104
acugucaacuggagaacag

SEQ ID NO: 804106 - RNA, 19 nt, Artificial Sequence
  Description of Artificial Sequence: Synthetic oligonucleotide
  Sense strand starting at position 2692 of SEQ ID NO: 587598
guuuccuuucugggugaca

SEQ ID NO: 804107 - RNA, 19 nt, Artificial Sequence
  Description of Artificial Sequence: Synthetic oligonucleotide
  Antisense strand to SEQ ID NO: 804106
ugucacccagaaaggaaac

SEQ ID NO: 804108 - RNA, 19 nt, Artificial Sequence
  Description of Artificial Sequence: Synthetic oligonucleotide
  Sense strand starting at position 2758 of SEQ ID NO: 587598
ggagggugugcggaaaugu

SEQ ID NO: 804109 - RNA, 19 nt, Artificial Sequence
  Description of Artificial Sequence: Synthetic oligonucleotide
  Antisense strand to SEQ ID NO: 804108
acauuuccgcacacccucc

SEQ ID NO: 804110 - RNA, 19 nt, Artificial Sequence
  Description of Artificial Sequence: Synthetic oligonucleotide
  Sense strand starting at position 3195 of SEQ ID NO: 587598
cucaguaagaacuguggga

SEQ ID NO: 804111 - RNA, 19 nt, Artificial Sequence
  Description of Artificial Sequence: Synthetic oligonucleotide
  Antisense strand to SEQ ID NO: 804110
ucccacaguucuuacugag

SEQ ID NO: 804112 - RNA, 19 nt, Artificial Sequence
  Description of Artificial Sequence: Synthetic oligonucleotide
  Sense strand starting at position 3199 of SEQ ID NO: 587598
guaagaacugugggacgaa

SEQ ID NO: 804113 - RNA, 19 nt, Artificial Sequence
  Description of Artificial Sequence: Synthetic oligonucleotide
  Antisense strand to SEQ ID NO: 804112
uucgucccacaguucuuac

SEQ ID NO: 804114 - RNA, 19 nt, Artificial Sequence
  Description of Artificial Sequence: Synthetic oligonucleotide
  Sense strand starting at position 3200 of SEQ ID NO: 587598
uaagaacugugggacgaaa

SEQ ID NO: 804115 - RNA, 19 nt, Artificial Sequence
  Description of Artificial Sequence: Synthetic oligonucleotide
  Antisense strand to SEQ ID NO: 804114
uuucgucccacaguucuua

SEQ ID NO: 804116 - RNA, 19 nt, Artificial Sequence
  Description of Artificial Sequence: Synthetic oligonucleotide
  Sense strand starting at position 3440 of SEQ ID NO: 587598
agccgaguguccuccaaca

SEQ ID NO: 804117 - RNA, 19 nt, Artificial Sequence
  Description of Artificial Sequence: Synthetic oligonucleotide
  Antisense strand to SEQ ID NO: 804116
uguuggaggacacucggcu

SEQ ID NO: 804118 - RNA, 19 nt, Artificial Sequence
  Description of Artificial Sequence: Synthetic oligonucleotide
  Sense strand starting at position 3590 of SEQ ID NO: 587598
cguugagguucccacuguu

SEQ ID NO: 804119 - RNA, 19 nt, Artificial Sequence
  Description of Artificial Sequence: Synthetic oligonucleotide
  Antisense strand to SEQ ID NO: 804118
aacagugggaaccucaacg

SEQ ID NO: 804120 - RNA, 19 nt, Artificial Sequence
  Description of Artificial Sequence: Synthetic oligonucleotide
  Sense strand starting at position 3628 of SEQ ID NO: 587598
aggccucugguuuaaugaa

SEQ ID NO: 804121 - RNA, 19 nt, Artificial Sequence
  Description of Artificial Sequence: Synthetic oligonucleotide
  Antisense strand to SEQ ID NO: 804120
uucauuaaaccagaggccu

SEQ ID NO: 804122 - RNA, 19 nt, Artificial Sequence
  Description of Artificial Sequence: Synthetic oligonucleotide
  Sense strand starting at position 3700 of SEQ ID NO: 587598
cuauaagguuaaugcuuau

SEQ ID NO: 804123 - RNA, 19 nt, Artificial Sequence
  Description of Artificial Sequence: Synthetic oligonucleotide
  Antisense strand to SEQ ID NO: 804122
auaagcauuaaccuuauag

SEQ ID NO: 804124 - RNA, 19 nt, Artificial Sequence
  Description of Artificial Sequence: Synthetic oligonucleotide
  Sense strand starting at position 3706 of SEQ ID NO: 587598
gguuaaugcuuauggucua

SEQ ID NO: 804125 - RNA, 19 nt, Artificial Sequence
  Description of Artificial Sequence: Synthetic oligonucleotide
  Antisense strand to SEQ ID NO: 804124
uagaccauaagcauuaacc

SEQ ID NO: 804126 - RNA, 19 nt, Artificial Sequence
  Description of Artificial Sequence: Synthetic oligonucleotide
  Sense strand starting at position 3707 of SEQ ID NO: 587598
guuaaugcuuauggucuaa

SEQ ID NO: 804127 - RNA, 19 nt, Artificial Sequence
  Description of Artificial Sequence: Synthetic oligonucleotide
  Antisense strand to SEQ ID NO: 804126
uuagaccauaagcauuaac

SEQ ID NO: 804128 - RNA, 19 nt, Artificial Sequence
  Description of Artificial Sequence: Synthetic oligonucleotide
  Sense strand starting at position 3763 of SEQ ID NO: 587598
acagaauauuuguggccau

SEQ ID NO: 804129 - RNA, 19 nt, Artificial Sequence
  Description of Artificial Sequence: Synthetic oligonucleotide
  Antisense strand to SEQ ID NO: 804128
auggccacaaauauucugu

SEQ ID NO: 804130 - RNA, 19 nt, Artificial Sequence
  Description of Artificial Sequence: Synthetic oligonucleotide
  Sense strand starting at position 3802 of SEQ ID NO: 587598
cccgcagacuguccagaua

SEQ ID NO: 804131 - RNA, 19 nt, Artificial Sequence
  Description of Artificial Sequence: Synthetic oligonucleotide
  Antisense strand to SEQ ID NO: 804130
uaucuggacagucugcggg

SEQ ID NO: 804132 - RNA, 19 nt, Artificial Sequence
  Description of Artificial Sequence: Synthetic oligonucleotide
  Sense strand starting at position 3833 of SEQ ID NO: 587598
aggccacuuuacucagaga

SEQ ID NO: 804133 - RNA, 19 nt, Artificial Sequence
  Description of Artificial Sequence: Synthetic oligonucleotide
  Antisense strand to SEQ ID NO: 804132
ucucugaguaaaguggccu

SEQ ID NO: 804134 - RNA, 19 nt, Artificial Sequence
  Description of Artificial Sequence: Synthetic oligonucleotide
  Sense strand starting at position 3931 of SEQ ID NO: 587598
cugcccauuccagguguaa

SEQ ID NO: 804135 - RNA, 19 nt, Artificial Sequence
  Description of Artificial Sequence: Synthetic oligonucleotide
  Antisense strand to SEQ ID NO: 804134
uuacaccuggaaugggcag

SEQ ID NO: 804136 - RNA, 19 nt, Artificial Sequence
  Description of Artificial Sequence: Synthetic oligonucleotide
  Sense strand starting at position 3944 of SEQ ID NO: 587598
guguaauuguagcuccuua

SEQ ID NO: 804137 - RNA, 19 nt, Artificial Sequence
  Description of Artificial Sequence: Synthetic oligonucleotide
  Antisense strand to SEQ ID NO: 804136
uaaggagcuacaauuacac

SEQ ID NO: 804138 - RNA, 19 nt, Artificial Sequence
  Description of Artificial Sequence: Synthetic oligonucleotide
  Sense strand starting at position 3957 of SEQ ID NO: 587598
uccuuacaguuucuuguaa

SEQ ID NO: 804139 - RNA, 19 nt, Artificial Sequence
  Description of Artificial Sequence: Synthetic oligonucleotide
  Antisense strand to SEQ ID NO: 804138
uuacaagaaacuguaagga

SEQ ID NO: 804140 - RNA, 19 nt, Artificial Sequence
  Description of Artificial Sequence: Synthetic oligonucleotide
  Sense strand starting at position 1083 of SEQ ID NO: 587599
agaagcaucggucaggaga

SEQ ID NO: 804141 - RNA, 19 nt, Artificial Sequence
  Description of Artificial Sequence: Synthetic oligonucleotide
  Antisense strand to SEQ ID NO: 804140
ucuccugaccgaugcuucu

SEQ ID NO: 804142 - RNA, 19 nt, Artificial Sequence
  Description of Artificial Sequence: Synthetic oligonucleotide
  Sense strand starting at position 1350 of SEQ ID NO: 587599
ggugcguccggacaggaau

SEQ ID NO: 804143 - RNA, 19 nt, Artificial Sequence
  Description of Artificial Sequence: Synthetic oligonucleotide
  Antisense strand to SEQ ID NO: 804142
auuccuguccggacgcacc

SEQ ID NO: 804144 - RNA, 19 nt, Artificial Sequence
  Description of Artificial Sequence: Synthetic oligonucleotide
  Sense strand starting at position 1956 of SEQ ID NO: 587599
cuuggaauuucucggaaga

SEQ ID NO: 804145 - RNA, 19 nt, Artificial Sequence
  Description of Artificial Sequence: Synthetic oligonucleotide
  Antisense strand to SEQ ID NO: 804144
ucuuccgagaaauuccaag

SEQ ID NO: 804146 - RNA, 19 nt, Artificial Sequence
  Description of Artificial Sequence: Synthetic oligonucleotide
  Sense strand starting at position 1958 of SEQ ID NO: 587599
uggaauuucucggaagaac

SEQ ID NO: 804147 - RNA, 19 nt, Artificial Sequence
  Description of Artificial Sequence: Synthetic oligonucleotide
  Antisense strand to SEQ ID NO: 804146
guucuuccgagaaauucca

SEQ ID NO: 804148 - RNA, 19 nt, Artificial Sequence
  Description of Artificial Sequence: Synthetic oligonucleotide
  Sense strand starting at position 1970 of SEQ ID NO: 587599
gaagaacguuuacugcgaa

SEQ ID NO: 804149 - RNA, 19 nt, Artificial Sequence
  Description of Artificial Sequence: Synthetic oligonucleotide
  Antisense strand to SEQ ID NO: 804148
uucgcaguaaacguucuuc

SEQ ID NO: 804150 - RNA, 19 nt, Artificial Sequence
  Description of Artificial Sequence: Synthetic oligonucleotide
  Sense strand starting at position 1971 of SEQ ID NO: 587599
aagaacguuuacugcgaaa

SEQ ID NO: 804151 - RNA, 19 nt, Artificial Sequence
  Description of Artificial Sequence: Synthetic oligonucleotide
  Antisense strand to SEQ ID NO: 804150
uuucgcaguaaacguucuu

SEQ ID NO: 804152 - RNA, 19 nt, Artificial Sequence
  Description of Artificial Sequence: Synthetic oligonucleotide
  Sense strand starting at position 1973 of SEQ ID NO: 587599
gaacguuuacugcgaaagg

SEQ ID NO: 804153 - RNA, 19 nt, Artificial Sequence
  Description of Artificial Sequence: Synthetic oligonucleotide
  Antisense strand to SEQ ID NO: 804152
ccuuucgcaguaaacguuc

SEQ ID NO: 804154 - RNA, 19 nt, Artificial Sequence
  Description of Artificial Sequence: Synthetic oligonucleotide
  Sense strand starting at position 1974 of SEQ ID NO: 587599
aacguuuacugcgaaagga

SEQ ID NO: 804155 - RNA, 19 nt, Artificial Sequence
  Description of Artificial Sequence: Synthetic oligonucleotide
  Antisense strand to SEQ ID NO: 804154
uccuuucgcaguaaacguu

SEQ ID NO: 804156 - RNA, 19 nt, Artificial Sequence
  Description of Artificial Sequence: Synthetic oligonucleotide
  Sense strand starting at position 2226 of SEQ ID NO: 587599
gggcuucugucgccaaaua

SEQ ID NO: 804157 - RNA, 19 nt, Artificial Sequence
  Description of Artificial Sequence: Synthetic oligonucleotide
  Antisense strand to SEQ ID NO: 804156
uauuuggcgacagaagccc

SEQ ID NO: 804158 - RNA, 19 nt, Artificial Sequence
  Description of Artificial Sequence: Synthetic oligonucleotide
  Sense strand starting at position 2265 of SEQ ID NO: 587599
gguacaaauccuggccaga

SEQ ID NO: 804159 - RNA, 19 nt, Artificial Sequence
  Description of Artificial Sequence: Synthetic oligonucleotide
  Antisense strand to SEQ ID NO: 804158
ucuggccaggauuuguacc

SEQ ID NO: 804160 - RNA, 19 nt, Artificial Sequence
  Description of Artificial Sequence: Synthetic oligonucleotide
  Sense strand starting at position 2367 of SEQ ID NO: 587599
gugucccugugccugaaau

SEQ ID NO: 804161 - RNA, 19 nt, Artificial Sequence
  Description of Artificial Sequence: Synthetic oligonucleotide
  Antisense strand to SEQ ID NO: 804160
auuucaggcacagggacac

SEQ ID NO: 804162 - RNA, 19 nt, Artificial Sequence
  Description of Artificial Sequence: Synthetic oligonucleotide
  Sense strand starting at position 2496 of SEQ ID NO: 587599
ugcccugagcccugggaaa

SEQ ID NO: 804163 - RNA, 19 nt, Artificial Sequence
  Description of Artificial Sequence: Synthetic oligonucleotide
  Antisense strand to SEQ ID NO: 804162
uuucccagggcucagggca

SEQ ID NO: 804164 - RNA, 19 nt, Artificial Sequence
  Description of Artificial Sequence: Synthetic oligonucleotide
  Sense strand starting at position 2583 of SEQ ID NO: 587599
gcagcauaucuuugcagga

SEQ ID NO: 804165 - RNA, 19 nt, Artificial Sequence
  Description of Artificial Sequence: Synthetic oligonucleotide
  Antisense strand to SEQ ID NO: 804164
uccugcaaagauaugcugc

SEQ ID NO: 804166 - RNA, 19 nt, Artificial Sequence
  Description of Artificial Sequence: Synthetic oligonucleotide
  Sense strand starting at position 2584 of SEQ ID NO: 587599
cagcauaucuuugcaggau

SEQ ID NO: 804167 - RNA, 19 nt, Artificial Sequence
  Description of Artificial Sequence: Synthetic oligonucleotide
  Antisense strand to SEQ ID NO: 804166
auccugcaaagauaugcug

SEQ ID NO: 804168 - RNA, 19 nt, Artificial Sequence
  Description of Artificial Sequence: Synthetic oligonucleotide
  Sense strand starting at position 2588 of SEQ ID NO: 587599
auaucuuugcaggauguga

SEQ ID NO: 804169 - RNA, 19 nt, Artificial Sequence
  Description of Artificial Sequence: Synthetic oligonucleotide
  Antisense strand to SEQ ID NO: 804168
ucacauccugcaaagauau

SEQ ID NO: 804170 - RNA, 19 nt, Artificial Sequence
  Description of Artificial Sequence: Synthetic oligonucleotide
  Sense strand starting at position 2622 of SEQ ID NO: 587599
uugagcauguacuauggau

SEQ ID NO: 804171 - RNA, 19 nt, Artificial Sequence
  Description of Artificial Sequence: Synthetic oligonucleotide
  Antisense strand to SEQ ID NO: 804170
auccauaguacaugcucaa

SEQ ID NO: 804172 - RNA, 19 nt, Artificial Sequence
  Description of Artificial Sequence: Synthetic oligonucleotide
  Sense strand starting at position 2642 of SEQ ID NO: 587599
ccaccuguucuagacacuu

SEQ ID NO: 804173 - RNA, 19 nt, Artificial Sequence
  Description of Artificial Sequence: Synthetic oligonucleotide
  Antisense strand to SEQ ID NO: 804172
aagugucuagaacaggugg

SEQ ID NO: 804174 - RNA, 19 nt, Artificial Sequence
  Description of Artificial Sequence: Synthetic oligonucleotide
  Sense strand starting at position 2699 of SEQ ID NO: 587599
cugugcagauaguaucauu

SEQ ID NO: 804175 - RNA, 19 nt, Artificial Sequence
  Description of Artificial Sequence: Synthetic oligonucleotide
  Antisense strand to SEQ ID NO: 804174
aaugauacuaucugcacag

SEQ ID NO: 804176 - RNA, 19 nt, Artificial Sequence
  Description of Artificial Sequence: Synthetic oligonucleotide
  Sense strand starting at position 2852 of SEQ ID NO: 587599
gcuccauuguggcuccaga

SEQ ID NO: 804177 - RNA, 19 nt, Artificial Sequence
  Description of Artificial Sequence: Synthetic oligonucleotide
  Antisense strand to SEQ ID NO: 804176
ucuggagccacaauggagc

SEQ ID NO: 804178 - RNA, 19 nt, Artificial Sequence
  Description of Artificial Sequence: Synthetic oligonucleotide
  Sense strand starting at position 2935 of SEQ ID NO: 587599
gggagagcuucucccagga

SEQ ID NO: 804179 - RNA, 19 nt, Artificial Sequence
  Description of Artificial Sequence: Synthetic oligonucleotide
  Antisense strand to SEQ ID NO: 804178
uccugggagaagcucuccc

SEQ ID NO: 804180 - RNA, 19 nt, Artificial Sequence
  Description of Artificial Sequence: Synthetic oligonucleotide
  Sense strand starting at position 2954 of SEQ ID NO: 587599
ccugauacuuuagccgaga

SEQ ID NO: 804181 - RNA, 19 nt, Artificial Sequence
  Description of Artificial Sequence: Synthetic oligonucleotide
  Antisense strand to SEQ ID NO: 804180
ucucggcuaaaguaucagg

SEQ ID NO: 804182 - RNA, 19 nt, Artificial Sequence
  Description of Artificial Sequence: Synthetic oligonucleotide
  Sense strand starting at position 2955 of SEQ ID NO: 587599
cugauacuuuagccgagaa

SEQ ID NO: 804183 - RNA, 19 nt, Artificial Sequence
  Description of Artificial Sequence: Synthetic oligonucleotide
  Antisense strand to SEQ ID NO: 804182
uucucggcuaaaguaucag

SEQ ID NO: 804184 - RNA, 19 nt, Artificial Sequence
  Description of Artificial Sequence: Synthetic oligonucleotide
  Sense strand starting at position 2956 of SEQ ID NO: 587599
ugauacuuuagccgagaac

SEQ ID NO: 804185 - RNA, 19 nt, Artificial Sequence
  Description of Artificial Sequence: Synthetic oligonucleotide
  Antisense strand to SEQ ID NO: 804184
guucucggcuaaaguauca

SEQ ID NO: 804186 - RNA, 19 nt, Artificial Sequence
  Description of Artificial Sequence: Synthetic oligonucleotide
  Sense strand starting at position 2957 of SEQ ID NO: 587599
gauacuuuagccgagaacu

SEQ ID NO: 804187 - RNA, 19 nt, Artificial Sequence
  Description of Artificial Sequence: Synthetic oligonucleotide
  Antisense strand to SEQ ID NO: 804186
aguucucggcuaaaguauc

SEQ ID NO: 804188 - RNA, 19 nt, Artificial Sequence
  Description of Artificial Sequence: Synthetic oligonucleotide
  Sense strand starting at position 2959 of SEQ ID NO: 587599
uacuuuagccgagaacuga

SEQ ID NO: 804189 - RNA, 19 nt, Artificial Sequence
  Description of Artificial Sequence: Synthetic oligonucleotide
  Antisense strand to SEQ ID NO: 804188
ucaguucucggcuaaagua

SEQ ID NO: 804190 - RNA, 19 nt, Artificial Sequence
  Description of Artificial Sequence: Synthetic oligonucleotide
  Sense strand starting at position 2984 of SEQ ID NO: 587599
aguugagauucauaaggug

SEQ ID NO: 804191 - RNA, 19 nt, Artificial Sequence
  Description of Artificial Sequence: Synthetic oligonucleotide
  Antisense strand to SEQ ID NO: 804190
caccuuaugaaucucaacu

SEQ ID NO: 804192 - RNA, 19 nt, Artificial Sequence
  Description of Artificial Sequence: Synthetic oligonucleotide
  Sense strand starting at position 3054 of SEQ ID NO: 587599
cagagcucgcaagaaagua

SEQ ID NO: 804193 - RNA, 19 nt, Artificial Sequence
  Description of Artificial Sequence: Synthetic oligonucleotide
  Antisense strand to SEQ ID NO: 804192
uacuuucuugcgagcucug

SEQ ID NO: 804194 - RNA, 19 nt, Artificial Sequence
  Description of Artificial Sequence: Synthetic oligonucleotide
  Sense strand starting at position 3139 of SEQ ID NO: 587599
gcaggaggcagaugugaaa

SEQ ID NO: 804195 - RNA, 19 nt, Artificial Sequence
  Description of Artificial Sequence: Synthetic oligonucleotide
  Antisense strand to SEQ ID NO: 804194
uuucacaucugccuccugc

SEQ ID NO: 804196 - RNA, 19 nt, Artificial Sequence
  Description of Artificial Sequence: Synthetic oligonucleotide
  Sense strand starting at position 3150 of SEQ ID NO: 587599
augugaaacucacaguggu

SEQ ID NO: 804197 - RNA, 19 nt, Artificial Sequence
  Description of Artificial Sequence: Synthetic oligonucleotide
  Antisense strand to SEQ ID NO: 804196
accacugugaguuucacau

SEQ ID NO: 804198 - RNA, 19 nt, Artificial Sequence
  Description of Artificial Sequence: Synthetic oligonucleotide
  Sense strand starting at position 3451 of SEQ ID NO: 587599
acccaagagucauugauug

SEQ ID NO: 804199 - RNA, 19 nt, Artificial Sequence
  Description of Artificial Sequence: Synthetic oligonucleotide
  Antisense strand to SEQ ID NO: 804198
caaucaaugacucuugggu

SEQ ID NO: 804200 - RNA, 19 nt, Artificial Sequence
  Description of Artificial Sequence: Synthetic oligonucleotide
  Sense strand starting at position 3589 of SEQ ID NO: 587599
gaugaauacucuggagaaa

SEQ ID NO: 804201 - RNA, 19 nt, Artificial Sequence
  Description of Artificial Sequence: Synthetic oligonucleotide
  Antisense strand to SEQ ID NO: 804200
uuucuccagaguauucauc

SEQ ID NO: 804202 - RNA, 19 nt, Artificial Sequence
  Description of Artificial Sequence: Synthetic oligonucleotide
  Sense strand starting at position 3625 of SEQ ID NO: 587599
gacugagguucccacagau

SEQ ID NO: 804203 - RNA, 19 nt, Artificial Sequence
  Description of Artificial Sequence: Synthetic oligonucleotide
  Antisense strand to SEQ ID NO: 804202
aucugugggaaccucaguc

SEQ ID NO: 804204 - RNA, 19 nt, Artificial Sequence
  Description of Artificial Sequence: Synthetic oligonucleotide
  Sense strand starting at position 3678 of SEQ ID NO: 587599
ucagcacaugucuaaagaa

SEQ ID NO: 804205 - RNA, 19 nt, Artificial Sequence
  Description of Artificial Sequence: Synthetic oligonucleotide
  Antisense strand to SEQ ID NO: 804204
uucuuuagacaugugcuga

SEQ ID NO: 804206 - RNA, 19 nt, Artificial Sequence
  Description of Artificial Sequence: Synthetic oligonucleotide
  Sense strand starting at position 3708 of SEQ ID NO: 587599
aagugagacucagcugaca

SEQ ID NO: 804207 - RNA, 19 nt, Artificial Sequence
  Description of Artificial Sequence: Synthetic oligonucleotide
  Antisense strand to SEQ ID NO: 804206
ugucagcugagucucacuu

SEQ ID NO: 804208 - RNA, 19 nt, Artificial Sequence
  Description of Artificial Sequence: Synthetic oligonucleotide
  Sense strand starting at position 3710 of SEQ ID NO: 587599
gugagacucagcugacagu

SEQ ID NO: 804209 - RNA, 19 nt, Artificial Sequence
  Description of Artificial Sequence: Synthetic oligonucleotide
  Antisense strand to SEQ ID NO: 804208
acugucagcugagucucac

SEQ ID NO: 804210 - RNA, 19 nt, Artificial Sequence
  Description of Artificial Sequence: Synthetic oligonucleotide
  Sense strand starting at position 37 of SEQ ID NO: 587600
ccuuuaagaucccagaguu

SEQ ID NO: 804211 - RNA, 19 nt, Artificial Sequence
  Description of Artificial Sequence: Synthetic oligonucleotide
  Antisense strand to SEQ ID NO: 804210
aacucugggaucuuaaagg

SEQ ID NO: 804212 - RNA, 19 nt, Artificial Sequence
  Description of Artificial Sequence: Synthetic oligonucleotide
  Sense strand starting at position 63 of SEQ ID NO: 587600
cccaucagauagucugaga

SEQ ID NO: 804213 - RNA, 19 nt, Artificial Sequence
  Description of Artificial Sequence: Synthetic oligonucleotide
  Antisense strand to SEQ ID NO: 804212
ucucagacuaucugauggg

SEQ ID NO: 804214 - RNA, 19 nt, Artificial Sequence
  Description of Artificial Sequence: Synthetic oligonucleotide
  Sense strand starting at position 136 of SEQ ID NO: 587600
gauccuuccugccugggaa

SEQ ID NO: 804215 - RNA, 19 nt, Artificial Sequence
  Description of Artificial Sequence: Synthetic oligonucleotide
  Antisense strand to SEQ ID NO: 804214
uucccaggcaggaaggauc

SEQ ID NO: 804216 - RNA, 19 nt, Artificial Sequence
  Description of Artificial Sequence: Synthetic oligonucleotide
  Sense strand starting at position 1381 of SEQ ID NO: 587600
agaagcaucggucaggaga

SEQ ID NO: 804217 - RNA, 19 nt, Artificial Sequence
  Description of Artificial Sequence: Synthetic oligonucleotide
  Antisense strand to SEQ ID NO: 804216
ucuccugaccgaugcuucu

SEQ ID NO: 804218 - RNA, 19 nt, Artificial Sequence
  Description of Artificial Sequence: Synthetic oligonucleotide
  Sense strand starting at position 1648 of SEQ ID NO: 587600
ggugcguccggacaggaau

SEQ ID NO: 804219 - RNA, 19 nt, Artificial Sequence
  Description of Artificial Sequence: Synthetic oligonucleotide
  Antisense strand to SEQ ID NO: 804218
auuccuguccggacgcacc

SEQ ID NO: 804220 - RNA, 19 nt, Artificial Sequence
  Description of Artificial Sequence: Synthetic oligonucleotide
  Sense strand starting at position 2254 of SEQ ID NO: 587600
cuuggaauuucucggaaga

SEQ ID NO: 804221 - RNA, 19 nt, Artificial Sequence
  Description of Artificial Sequence: Synthetic oligonucleotide
  Antisense strand to SEQ ID NO: 804220
ucuuccgagaaauuccaag

SEQ ID NO: 804222 - RNA, 19 nt, Artificial Sequence
  Description of Artificial Sequence: Synthetic oligonucleotide
  Sense strand starting at position 2256 of SEQ ID NO: 587600
uggaauuucucggaagaac

SEQ ID NO: 804223 - RNA, 19 nt, Artificial Sequence
  Description of Artificial Sequence: Synthetic oligonucleotide
  Antisense strand to SEQ ID NO: 804222
guucuuccgagaaauucca

SEQ ID NO: 804224 - RNA, 19 nt, Artificial Sequence
  Description of Artificial Sequence: Synthetic oligonucleotide
  Sense strand starting at position 2268 of SEQ ID NO: 587600
gaagaacguuuacugcgaa

SEQ ID NO: 804225 - RNA, 19 nt, Artificial Sequence
  Description of Artificial Sequence: Synthetic oligonucleotide
  Antisense strand to SEQ ID NO: 804224
uucgcaguaaacguucuuc

SEQ ID NO: 804226 - RNA, 19 nt, Artificial Sequence
  Description of Artificial Sequence: Synthetic oligonucleotide
  Sense strand starting at position 2269 of SEQ ID NO: 587600
aagaacguuuacugcgaaa

SEQ ID NO: 804227 - RNA, 19 nt, Artificial Sequence
  Description of Artificial Sequence: Synthetic oligonucleotide
  Antisense strand to SEQ ID NO: 804226
uuucgcaguaaacguucuu

SEQ ID NO: 804228 - RNA, 19 nt, Artificial Sequence
  Description of Artificial Sequence: Synthetic oligonucleotide
  Sense strand starting at position 2271 of SEQ ID NO: 587600
gaacguuuacugcgaaagg

SEQ ID NO: 804229 - RNA, 19 nt, Artificial Sequence
  Description of Artificial Sequence: Synthetic oligonucleotide
  Antisense strand to SEQ ID NO: 804228
ccuuucgcaguaaacguuc

SEQ ID NO: 804230 - RNA, 19 nt, Artificial Sequence
  Description of Artificial Sequence: Synthetic oligonucleotide
  Sense strand starting at position 2272 of SEQ ID NO: 587600
aacguuuacugcgaaagga

SEQ ID NO: 804231 - RNA, 19 nt, Artificial Sequence
  Description of Artificial Sequence: Synthetic oligonucleotide
  Antisense strand to SEQ ID NO: 804230
uccuuucgcaguaaacguu

SEQ ID NO: 804232 - RNA, 19 nt, Artificial Sequence
  Description of Artificial Sequence: Synthetic oligonucleotide
  Sense strand starting at position 2524 of SEQ ID NO: 587600
gggcuucugucgccaaaua

SEQ ID NO: 804233 - RNA, 19 nt, Artificial Sequence
  Description of Artificial Sequence: Synthetic oligonucleotide
  Antisense strand to SEQ ID NO: 804232
uauuuggcgacagaagccc

SEQ ID NO: 804234 - RNA, 19 nt, Artificial Sequence
  Description of Artificial Sequence: Synthetic oligonucleotide
  Sense strand starting at position 2563 of SEQ ID NO: 587600
gguacaaauccuggccaga

SEQ ID NO: 804235 - RNA, 19 nt, Artificial Sequence
  Description of Artificial Sequence: Synthetic oligonucleotide
  Antisense strand to SEQ ID NO: 804234
ucuggccaggauuuguacc

SEQ ID NO: 804236 - RNA, 19 nt, Artificial Sequence
  Description of Artificial Sequence: Synthetic oligonucleotide
  Sense strand starting at position 2665 of SEQ ID NO: 587600
gugucccugugccugaaau

SEQ ID NO: 804237 - RNA, 19 nt, Artificial Sequence
  Description of Artificial Sequence: Synthetic oligonucleotide
  Antisense strand to SEQ ID NO: 804236
auuucaggcacagggacac

SEQ ID NO: 804238 - RNA, 19 nt, Artificial Sequence
  Description of Artificial Sequence: Synthetic oligonucleotide
  Sense strand starting at position 2794 of SEQ ID NO: 587600
ugcccugagcccugggaaa

SEQ ID NO: 804239 - RNA, 19 nt, Artificial Sequence
  Description of Artificial Sequence: Synthetic oligonucleotide
  Antisense strand to SEQ ID NO: 804238
uuucccagggcucagggca

SEQ ID NO: 804240 - RNA, 19 nt, Artificial Sequence
  Description of Artificial Sequence: Synthetic oligonucleotide
  Sense strand starting at position 2881 of SEQ ID NO: 587600
gcagcauaucuuugcagga

SEQ ID NO: 804241 - RNA, 19 nt, Artificial Sequence
  Description of Artificial Sequence: Synthetic oligonucleotide
  Antisense strand to SEQ ID NO: 804240
uccugcaaagauaugcugc

SEQ ID NO: 804242 - RNA, 19 nt, Artificial Sequence
  Description of Artificial Sequence: Synthetic oligonucleotide
  Sense strand starting at position 2882 of SEQ ID NO: 587600
cagcauaucuuugcaggau

SEQ ID NO: 804243 - RNA, 19 nt, Artificial Sequence
  Description of Artificial Sequence: Synthetic oligonucleotide
  Antisense strand to SEQ ID NO: 804242
auccugcaaagauaugcug

SEQ ID NO: 804244 - RNA, 19 nt, Artificial Sequence
  Description of Artificial Sequence: Synthetic oligonucleotide
  Sense strand starting at position 2886 of SEQ ID NO: 587600
auaucuuugcaggauguga

SEQ ID NO: 804245 - RNA, 19 nt, Artificial Sequence
  Description of Artificial Sequence: Synthetic oligonucleotide
  Antisense strand to SEQ ID NO: 804244
ucacauccugcaaagauau

SEQ ID NO: 804246 - RNA, 19 nt, Artificial Sequence
  Description of Artificial Sequence: Synthetic oligonucleotide
  Sense strand starting at position 2920 of SEQ ID NO: 587600
uugagcauguacuauggau

SEQ ID NO: 804247 - RNA, 19 nt, Artificial Sequence
  Description of Artificial Sequence: Synthetic oligonucleotide
  Antisense strand to SEQ ID NO: 804246
auccauaguacaugcucaa

SEQ ID NO: 804248 - RNA, 19 nt, Artificial Sequence
  Description of Artificial Sequence: Synthetic oligonucleotide
  Sense strand starting at position 2940 of SEQ ID NO: 587600
ccaccuguucuagacacuu

SEQ ID NO: 804249 - RNA, 19 nt, Artificial Sequence
  Description of Artificial Sequence: Synthetic oligonucleotide
  Antisense strand to SEQ ID NO: 804248
aagugucuagaacaggugg

SEQ ID NO: 804250 - RNA, 19 nt, Artificial Sequence
  Description of Artificial Sequence: Synthetic oligonucleotide
  Sense strand starting at position 2997 of SEQ ID NO: 587600
cugugcagauaguaucauu

SEQ ID NO: 804251 - RNA, 19 nt, Artificial Sequence
  Description of Artificial Sequence: Synthetic oligonucleotide
  Antisense strand to SEQ ID NO: 804250
aaugauacuaucugcacag

SEQ ID NO: 804252 - RNA, 19 nt, Artificial Sequence
  Description of Artificial Sequence: Synthetic oligonucleotide
  Sense strand starting at position 3150 of SEQ ID NO: 587600
gcuccauuguggcuccaga

SEQ ID NO: 804253 - RNA, 19 nt, Artificial Sequence
  Description of Artificial Sequence: Synthetic oligonucleotide
  Antisense strand to SEQ ID NO: 804252
ucuggagccacaauggagc

SEQ ID NO: 804254 - RNA, 19 nt, Artificial Sequence
  Description of Artificial Sequence: Synthetic oligonucleotide
  Sense strand starting at position 3233 of SEQ ID NO: 587600
gggagagcuucucccagga

SEQ ID NO: 804255 - RNA, 19 nt, Artificial Sequence
  Description of Artificial Sequence: Synthetic oligonucleotide
  Antisense strand to SEQ ID NO: 804254
uccugggagaagcucuccc

SEQ ID NO: 804256 - RNA, 19 nt, Artificial Sequence
  Description of Artificial Sequence: Synthetic oligonucleotide
  Sense strand starting at position 3252 of SEQ ID NO: 587600
ccugauacuuuagccgaga

SEQ ID NO: 804257 - RNA, 19 nt, Artificial Sequence
  Description of Artificial Sequence: Synthetic oligonucleotide
  Antisense strand to SEQ ID NO: 804256
ucucggcuaaaguaucagg

SEQ ID NO: 804258 - RNA, 19 nt, Artificial Sequence
  Description of Artificial Sequence: Synthetic oligonucleotide
  Sense strand starting at position 3253 of SEQ ID NO: 587600
cugauacuuuagccgagaa

SEQ ID NO: 804259 - RNA, 19 nt, Artificial Sequence
  Description of Artificial Sequence: Synthetic oligonucleotide
  Antisense strand to SEQ ID NO: 804258
uucucggcuaaaguaucag

SEQ ID NO: 804260 - RNA, 19 nt, Artificial Sequence
  Description of Artificial Sequence: Synthetic oligonucleotide
  Sense strand starting at position 3254 of SEQ ID NO: 587600
ugauacuuuagccgagaac

SEQ ID NO: 804261 - RNA, 19 nt, Artificial Sequence
  Description of Artificial Sequence: Synthetic oligonucleotide
  Antisense strand to SEQ ID NO: 804260
guucucggcuaaaguauca

SEQ ID NO: 804262 - RNA, 19 nt, Artificial Sequence
  Description of Artificial Sequence: Synthetic oligonucleotide
  Sense strand starting at position 3255 of SEQ ID NO: 587600
gauacuuuagccgagaacu

SEQ ID NO: 804263 - RNA, 19 nt, Artificial Sequence
  Description of Artificial Sequence: Synthetic oligonucleotide
  Antisense strand to SEQ ID NO: 804262
aguucucggcuaaaguauc

SEQ ID NO: 804264 - RNA, 19 nt, Artificial Sequence
  Description of Artificial Sequence: Synthetic oligonucleotide
  Sense strand starting at position 3257 of SEQ ID NO: 587600
uacuuuagccgagaacuga

SEQ ID NO: 804265 - RNA, 19 nt, Artificial Sequence
  Description of Artificial Sequence: Synthetic oligonucleotide
  Antisense strand to SEQ ID NO: 804264
ucaguucucggcuaaagua

SEQ ID NO: 804266 - RNA, 19 nt, Artificial Sequence
  Description of Artificial Sequence: Synthetic oligonucleotide
  Sense strand starting at position 3282 of SEQ ID NO: 587600
aguugagauucauaaggug

SEQ ID NO: 804267 - RNA, 19 nt, Artificial Sequence
  Description of Artificial Sequence: Synthetic oligonucleotide
  Antisense strand to SEQ ID NO: 804266
caccuuaugaaucucaacu

SEQ ID NO: 804268 - RNA, 19 nt, Artificial Sequence
  Description of Artificial Sequence: Synthetic oligonucleotide
  Sense strand starting at position 3352 of SEQ ID NO: 587600
cagagcucgcaagaaagua

SEQ ID NO: 804269 - RNA, 19 nt, Artificial Sequence
  Description of Artificial Sequence: Synthetic oligonucleotide
  Antisense strand to SEQ ID NO: 804268
uacuuucuugcgagcucug

SEQ ID NO: 804270 - RNA, 19 nt, Artificial Sequence
  Description of Artificial Sequence: Synthetic oligonucleotide
  Sense strand starting at position 3437 of SEQ ID NO: 587600
gcaggaggcagaugugaaa

SEQ ID NO: 804271 - RNA, 19 nt, Artificial Sequence
  Description of Artificial Sequence: Synthetic oligonucleotide
  Antisense strand to SEQ ID NO: 804270
uuucacaucugccuccugc

SEQ ID NO: 804272 - RNA, 19 nt, Artificial Sequence
  Description of Artificial Sequence: Synthetic oligonucleotide
  Sense strand starting at position 3448 of SEQ ID NO: 587600
augugaaacucacaguggu

SEQ ID NO: 804273 - RNA, 19 nt, Artificial Sequence
  Description of Artificial Sequence: Synthetic oligonucleotide
  Antisense strand to SEQ ID NO: 804272
accacugugaguuucacau

SEQ ID NO: 804274 - RNA, 19 nt, Artificial Sequence
  Description of Artificial Sequence: Synthetic oligonucleotide
  Sense strand starting at position 3749 of SEQ ID NO: 587600
acccaagagucauugauug

SEQ ID NO: 804275 - RNA, 19 nt, Artificial Sequence
  Description of Artificial Sequence: Synthetic oligonucleotide
  Antisense strand to SEQ ID NO: 804274
caaucaaugacucuugggu

SEQ ID NO: 804276 - RNA, 19 nt, Artificial Sequence
  Description of Artificial Sequence: Synthetic oligonucleotide
  Sense strand starting at position 3887 of SEQ ID NO: 587600
gaugaauacucuggagaaa

SEQ ID NO: 804277 - RNA, 19 nt, Artificial Sequence
  Description of Artificial Sequence: Synthetic oligonucleotide
  Antisense strand to SEQ ID NO: 804276
uuucuccagaguauucauc

SEQ ID NO: 804278 - RNA, 19 nt, Artificial Sequence
  Description of Artificial Sequence: Synthetic oligonucleotide
  Sense strand starting at position 3923 of SEQ ID NO: 587600
gacugagguucccacagau

SEQ ID NO: 804279 - RNA, 19 nt, Artificial Sequence
  Description of Artificial Sequence: Synthetic oligonucleotide
  Antisense strand to SEQ ID NO: 804278
aucugugggaaccucaguc

SEQ ID NO: 804280 - RNA, 19 nt, Artificial Sequence
  Description of Artificial Sequence: Synthetic oligonucleotide
  Sense strand starting at position 3976 of SEQ ID NO: 587600
ucagcacaugucuaaagaa

SEQ ID NO: 804281 - RNA, 19 nt, Artificial Sequence
  Description of Artificial Sequence: Synthetic oligonucleotide
  Antisense strand to SEQ ID NO: 804280
uucuuuagacaugugcuga

SEQ ID NO: 804282 - RNA, 19 nt, Artificial Sequence
  Description of Artificial Sequence: Synthetic oligonucleotide
  Sense strand starting at position 2 of SEQ ID NO: 587601
ccugguuuccuggagaugu

SEQ ID NO: 804283 - RNA, 19 nt, Artificial Sequence
  Description of Artificial Sequence: Synthetic oligonucleotide
  Antisense strand to SEQ ID NO: 804282
acaucuccaggaaaccagg

SEQ ID NO: 804284 - RNA, 19 nt, Artificial Sequence
  Description of Artificial Sequence: Synthetic oligonucleotide
  Sense strand starting at position 335 of SEQ ID NO: 587601
ccuuuaagaucccagaguu

SEQ ID NO: 804285 - RNA, 19 nt, Artificial Sequence
  Description of Artificial Sequence: Synthetic oligonucleotide
  Antisense strand to SEQ ID NO: 804284
aacucugggaucuuaaagg

SEQ ID NO: 804286 - RNA, 19 nt, Artificial Sequence
  Description of Artificial Sequence: Synthetic oligonucleotide
  Sense strand starting at position 361 of SEQ ID NO: 587601
cccaucagauagucugaga

SEQ ID NO: 804287 - RNA, 19 nt, Artificial Sequence
  Description of Artificial Sequence: Synthetic oligonucleotide
  Antisense strand to SEQ ID NO: 804286
ucucagacuaucugauggg

SEQ ID NO: 804288 - RNA, 19 nt, Artificial Sequence
  Description of Artificial Sequence: Synthetic oligonucleotide
  Sense strand starting at position 434 of SEQ ID NO: 587601
gauccuuccugccugggaa

SEQ ID NO: 804289 - RNA, 19 nt, Artificial Sequence
  Description of Artificial Sequence: Synthetic oligonucleotide
  Antisense strand to SEQ ID NO: 804288
uucccaggcaggaaggauc

SEQ ID NO: 804290 - RNA, 19 nt, Artificial Sequence
  Description of Artificial Sequence: Synthetic oligonucleotide
  Sense strand starting at position 1679 of SEQ ID NO: 587601
agaagcaucggucaggaga

SEQ ID NO: 804291 - RNA, 19 nt, Artificial Sequence
  Description of Artificial Sequence: Synthetic oligonucleotide
  Antisense strand to SEQ ID NO: 804290
ucuccugaccgaugcuucu

SEQ ID NO: 804292 - RNA, 19 nt, Artificial Sequence
  Description of Artificial Sequence: Synthetic oligonucleotide
  Sense strand starting at position 1946 of SEQ ID NO: 587601
ggugcguccggacaggaau

SEQ ID NO: 804293 - RNA, 19 nt, Artificial Sequence
  Description of Artificial Sequence: Synthetic oligonucleotide
  Antisense strand to SEQ ID NO: 804292
auuccuguccggacgcacc

SEQ ID NO: 804294 - RNA, 19 nt, Artificial Sequence
  Description of Artificial Sequence: Synthetic oligonucleotide
  Sense strand starting at position 2552 of SEQ ID NO: 587601
cuuggaauuucucggaaga

SEQ ID NO: 804295 - RNA, 19 nt, Artificial Sequence
  Description of Artificial Sequence: Synthetic oligonucleotide
  Antisense strand to SEQ ID NO: 804294
ucuuccgagaaauuccaag

SEQ ID NO: 804296 - RNA, 19 nt, Artificial Sequence
  Description of Artificial Sequence: Synthetic oligonucleotide
  Sense strand starting at position 2554 of SEQ ID NO: 587601
uggaauuucucggaagaac

SEQ ID NO: 804297 - RNA, 19 nt, Artificial Sequence
  Description of Artificial Sequence: Synthetic oligonucleotide
  Antisense strand to SEQ ID NO: 804296
guucuuccgagaaauucca

SEQ ID NO: 804298 - RNA, 19 nt, Artificial Sequence
  Description of Artificial Sequence: Synthetic oligonucleotide
  Sense strand starting at position 2566 of SEQ ID NO: 587601
gaagaacguuuacugcgaa

SEQ ID NO: 804299 - RNA, 19 nt, Artificial Sequence
  Description of Artificial Sequence: Synthetic oligonucleotide
  Antisense strand to SEQ ID NO: 804298
uucgcaguaaacguucuuc

SEQ ID NO: 804300 - RNA, 19 nt, Artificial Sequence
  Description of Artificial Sequence: Synthetic oligonucleotide
  Sense strand starting at position 2567 of SEQ ID NO: 587601
aagaacguuuacugcgaaa

SEQ ID NO: 804301 - RNA, 19 nt, Artificial Sequence
  Description of Artificial Sequence: Synthetic oligonucleotide
  Antisense strand to SEQ ID NO: 804300
uuucgcaguaaacguucuu

SEQ ID NO: 804302 - RNA, 19 nt, Artificial Sequence
  Description of Artificial Sequence: Synthetic oligonucleotide
  Sense strand starting at position 2569 of SEQ ID NO: 587601
gaacguuuacugcgaaagg

SEQ ID NO: 804303 - RNA, 19 nt, Artificial Sequence
  Description of Artificial Sequence: Synthetic oligonucleotide
  Antisense strand to SEQ ID NO: 804302
ccuuucgcaguaaacguuc

SEQ ID NO: 804304 - RNA, 19 nt, Artificial Sequence
  Description of Artificial Sequence: Synthetic oligonucleotide
  Sense strand starting at position 2570 of SEQ ID NO: 587601
aacguuuacugcgaaagga

SEQ ID NO: 804305 - RNA, 19 nt, Artificial Sequence
  Description of Artificial Sequence: Synthetic oligonucleotide
  Antisense strand to SEQ ID NO: 804304
uccuuucgcaguaaacguu

SEQ ID NO: 804306 - RNA, 19 nt, Artificial Sequence
  Description of Artificial Sequence: Synthetic oligonucleotide
  Sense strand starting at position 2822 of SEQ ID NO: 587601
gggcuucugucgccaaaua

SEQ ID NO: 804307 - RNA, 19 nt, Artificial Sequence
  Description of Artificial Sequence: Synthetic oligonucleotide
  Antisense strand to SEQ ID NO: 804306
uauuuggcgacagaagccc

SEQ ID NO: 804308 - RNA, 19 nt, Artificial Sequence
  Description of Artificial Sequence: Synthetic oligonucleotide
  Sense strand starting at position 2861 of SEQ ID NO: 587601
gguacaaauccuggccaga

SEQ ID NO: 804309 - RNA, 19 nt, Artificial Sequence
  Description of Artificial Sequence: Synthetic oligonucleotide
  Antisense strand to SEQ ID NO: 804308
ucuggccaggauuuguacc

SEQ ID NO: 804310 - RNA, 19 nt, Artificial Sequence
  Description of Artificial Sequence: Synthetic oligonucleotide
  Sense strand starting at position 2963 of SEQ ID NO: 587601
gugucccugugccugaaau

SEQ ID NO: 804311 - RNA, 19 nt, Artificial Sequence
  Description of Artificial Sequence: Synthetic oligonucleotide
  Antisense strand to SEQ ID NO: 804310
auuucaggcacagggacac

SEQ ID NO: 804312 - RNA, 19 nt, Artificial Sequence
  Description of Artificial Sequence: Synthetic oligonucleotide
  Sense strand starting at position 3092 of SEQ ID NO: 587601
ugcccugagcccugggaaa

SEQ ID NO: 804313 - RNA, 19 nt, Artificial Sequence
  Description of Artificial Sequence: Synthetic oligonucleotide
  Antisense strand to SEQ ID NO: 804312
uuucccagggcucagggca

SEQ ID NO: 804314 - RNA, 19 nt, Artificial Sequence
  Description of Artificial Sequence: Synthetic oligonucleotide
  Sense strand starting at position 3179 of SEQ ID NO: 587601
gcagcauaucuuugcagga

SEQ ID NO: 804315 - RNA, 19 nt, Artificial Sequence
  Description of Artificial Sequence: Synthetic oligonucleotide
  Antisense strand to SEQ ID NO: 804314
uccugcaaagauaugcugc

SEQ ID NO: 804316 - RNA, 19 nt, Artificial Sequence
  Description of Artificial Sequence: Synthetic oligonucleotide
  Sense strand starting at position 3180 of SEQ ID NO: 587601
cagcauaucuuugcaggau

SEQ ID NO: 804317 - RNA, 19 nt, Artificial Sequence
  Description of Artificial Sequence: Synthetic oligonucleotide
  Antisense strand to SEQ ID NO: 804316
auccugcaaagauaugcug

SEQ ID NO: 804318 - RNA, 19 nt, Artificial Sequence
  Description of Artificial Sequence: Synthetic oligonucleotide
  Sense strand starting at position 3184 of SEQ ID NO: 587601
auaucuuugcaggauguga

SEQ ID NO: 804319 - RNA, 19 nt, Artificial Sequence
  Description of Artificial Sequence: Synthetic oligonucleotide
  Antisense strand to SEQ ID NO: 804318
ucacauccugcaaagauau

SEQ ID NO: 804320 - RNA, 19 nt, Artificial Sequence
  Description of Artificial Sequence: Synthetic oligonucleotide
  Sense strand starting at position 3218 of SEQ ID NO: 587601
uugagcauguacuauggau

SEQ ID NO: 804321 - RNA, 19 nt, Artificial Sequence
  Description of Artificial Sequence: Synthetic oligonucleotide
  Antisense strand to SEQ ID NO: 804320
auccauaguacaugcucaa

SEQ ID NO: 804322 - RNA, 19 nt, Artificial Sequence
  Description of Artificial Sequence: Synthetic oligonucleotide
  Sense strand starting at position 3238 of SEQ ID NO: 587601
ccaccuguucuagacacuu

SEQ ID NO: 804323 - RNA, 19 nt, Artificial Sequence
  Description of Artificial Sequence: Synthetic oligonucleotide
  Antisense strand to SEQ ID NO: 804322
aagugucuagaacaggugg

SEQ ID NO: 804324 - RNA, 19 nt, Artificial Sequence
  Description of Artificial Sequence: Synthetic oligonucleotide
  Sense strand starting at position 3295 of SEQ ID NO: 587601
cugugcagauaguaucauu

SEQ ID NO: 804325 - RNA, 19 nt, Artificial Sequence
  Description of Artificial Sequence: Synthetic oligonucleotide
  Antisense strand to SEQ ID NO: 804324
aaugauacuaucugcacag

SEQ ID NO: 804326 - RNA, 19 nt, Artificial Sequence
  Description of Artificial Sequence: Synthetic oligonucleotide
  Sense strand starting at position 3448 of SEQ ID NO: 587601
gcuccauuguggcuccaga

SEQ ID NO: 804327 - RNA, 19 nt, Artificial Sequence
  Description of Artificial Sequence: Synthetic oligonucleotide
  Antisense strand to SEQ ID NO: 804326
ucuggagccacaauggagc

SEQ ID NO: 804328 - RNA, 19 nt, Artificial Sequence
  Description of Artificial Sequence: Synthetic oligonucleotide
  Sense strand starting at position 3531 of SEQ ID NO: 587601
gggagagcuucucccagga

SEQ ID NO: 804329 - RNA, 19 nt, Artificial Sequence
  Description of Artificial Sequence: Synthetic oligonucleotide
  Antisense strand to SEQ ID NO: 804328
uccugggagaagcucuccc

SEQ ID NO: 804330 - RNA, 19 nt, Artificial Sequence
  Description of Artificial Sequence: Synthetic oligonucleotide
  Sense strand starting at position 3550 of SEQ ID NO: 587601
ccugauacuuuagccgaga

SEQ ID NO: 804331 - RNA, 19 nt, Artificial Sequence
  Description of Artificial Sequence: Synthetic oligonucleotide
  Antisense strand to SEQ ID NO: 804330
ucucggcuaaaguaucagg

SEQ ID NO: 804332 - RNA, 19 nt, Artificial Sequence
  Description of Artificial Sequence: Synthetic oligonucleotide
  Sense strand starting at position 3551 of SEQ ID NO: 587601
cugauacuuuagccgagaa

SEQ ID NO: 804333 - RNA, 19 nt, Artificial Sequence
  Description of Artificial Sequence: Synthetic oligonucleotide
  Antisense strand to SEQ ID NO: 804332
uucucggcuaaaguaucag

SEQ ID NO: 804334 - RNA, 19 nt, Artificial Sequence
  Description of Artificial Sequence: Synthetic oligonucleotide
  Sense strand starting at position 3552 of SEQ ID NO: 587601
ugauacuuuagccgagaac

SEQ ID NO: 804335 - RNA, 19 nt, Artificial Sequence
  Description of Artificial Sequence: Synthetic oligonucleotide
  Antisense strand to SEQ ID NO: 804334
guucucggcuaaaguauca

SEQ ID NO: 804336 - RNA, 19 nt, Artificial Sequence
  Description of Artificial Sequence: Synthetic oligonucleotide
  Sense strand starting at position 3553 of SEQ ID NO: 587601
gauacuuuagccgagaacu

SEQ ID NO: 804337 - RNA, 19 nt, Artificial Sequence
  Description of Artificial Sequence: Synthetic oligonucleotide
  Antisense strand to SEQ ID NO: 804336
aguucucggcuaaaguauc

SEQ ID NO: 804338 - RNA, 19 nt, Artificial Sequence
  Description of Artificial Sequence: Synthetic oligonucleotide
  Sense strand starting at position 3555 of SEQ ID NO: 587601
uacuuuagccgagaacuga

SEQ ID NO: 804339 - RNA, 19 nt, Artificial Sequence
  Description of Artificial Sequence: Synthetic oligonucleotide
  Antisense strand to SEQ ID NO: 804338
ucaguucucggcuaaagua

SEQ ID NO: 804340 - RNA, 19 nt, Artificial Sequence
  Description of Artificial Sequence: Synthetic oligonucleotide
  Sense strand starting at position 3580 of SEQ ID NO: 587601
aguugagauucauaaggug

SEQ ID NO: 804341 - RNA, 19 nt, Artificial Sequence
  Description of Artificial Sequence: Synthetic oligonucleotide
  Antisense strand to SEQ ID NO: 804340
caccuuaugaaucucaacu

SEQ ID NO: 804342 - RNA, 19 nt, Artificial Sequence
  Description of Artificial Sequence: Synthetic oligonucleotide
  Sense strand starting at position 3650 of SEQ ID NO: 587601
cagagcucgcaagaaagua

SEQ ID NO: 804343 - RNA, 19 nt, Artificial Sequence
  Description of Artificial Sequence: Synthetic oligonucleotide
  Antisense strand to SEQ ID NO: 804342
uacuuucuugcgagcucug

SEQ ID NO: 804344 - RNA, 19 nt, Artificial Sequence
  Description of Artificial Sequence: Synthetic oligonucleotide
  Sense strand starting at position 3735 of SEQ ID NO: 587601
gcaggaggcagaugugaaa

SEQ ID NO: 804345 - RNA, 19 nt, Artificial Sequence
  Description of Artificial Sequence: Synthetic oligonucleotide
  Antisense strand to SEQ ID NO: 804344
uuucacaucugccuccugc

SEQ ID NO: 804346 - RNA, 19 nt, Artificial Sequence
  Description of Artificial Sequence: Synthetic oligonucleotide
  Sense strand starting at position 3746 of SEQ ID NO: 587601
augugaaacucacaguggu

SEQ ID NO: 804347 - RNA, 19 nt, Artificial Sequence
  Description of Artificial Sequence: Synthetic oligonucleotide
  Antisense strand to SEQ ID NO: 804346
accacugugaguuucacau

SEQ ID NO: 804348 - RNA, 19 nt, Artificial Sequence
  Description of Artificial Sequence: Synthetic oligonucleotide
  Sense strand starting at position 291 of SEQ ID NO: 587602
gcuacuuucuauuaguuau

SEQ ID NO: 804349 - RNA, 19 nt, Artificial Sequence
  Description of Artificial Sequence: Synthetic oligonucleotide
  Antisense strand to SEQ ID NO: 804348
auaacuaauagaaaguagc

SEQ ID NO: 804350 - RNA, 19 nt, Artificial Sequence
  Description of Artificial Sequence: Synthetic oligonucleotide
  Sense strand starting at position 383 of SEQ ID NO: 587602
gagcgaagauacucacuca

SEQ ID NO: 804351 - RNA, 19 nt, Artificial Sequence
  Description of Artificial Sequence: Synthetic oligonucleotide
  Antisense strand to SEQ ID NO: 804350
ugagugaguaucuucgcuc

SEQ ID NO: 804352 - RNA, 19 nt, Artificial Sequence
  Description of Artificial Sequence: Synthetic oligonucleotide
  Sense strand starting at position 500 of SEQ ID NO: 587602
uugucacccucgucugaaa

SEQ ID NO: 804353 - RNA, 19 nt, Artificial Sequence
  Description of Artificial Sequence: Synthetic oligonucleotide
  Antisense strand to SEQ ID NO: 804352
uuucagacgagggugacaa

SEQ ID NO: 804354 - RNA, 19 nt, Artificial Sequence
  Description of Artificial Sequence: Synthetic oligonucleotide
  Sense strand starting at position 536 of SEQ ID NO: 587602
agcagaauguuccaguucu

SEQ ID NO: 804355 - RNA, 19 nt, Artificial Sequence
  Description of Artificial Sequence: Synthetic oligonucleotide
  Antisense strand to SEQ ID NO: 804354
agaacuggaacauucugcu

SEQ ID NO: 804356 - RNA, 19 nt, Artificial Sequence
  Description of Artificial Sequence: Synthetic oligonucleotide
  Sense strand starting at position 546 of SEQ ID NO: 587602
uccaguucuccgugccuau

SEQ ID NO: 804357 - RNA, 19 nt, Artificial Sequence
  Description of Artificial Sequence: Synthetic oligonucleotide
  Antisense strand to SEQ ID NO: 804356
auaggcacggagaacugga

SEQ ID NO: 804358 - RNA, 19 nt, Artificial Sequence
  Description of Artificial Sequence: Synthetic oligonucleotide
  Sense strand starting at position 557 of SEQ ID NO: 587602
gugccuaucugaugaacac

SEQ ID NO: 804359 - RNA, 19 nt, Artificial Sequence
  Description of Artificial Sequence: Synthetic oligonucleotide
  Antisense strand to SEQ ID NO: 804358
guguucaucagauaggcac

SEQ ID NO: 804360 - RNA, 19 nt, Artificial Sequence
  Description of Artificial Sequence: Synthetic oligonucleotide
  Sense strand starting at position 558 of SEQ ID NO: 587602
ugccuaucugaugaacaca

SEQ ID NO: 804361 - RNA, 19 nt, Artificial Sequence
  Description of Artificial Sequence: Synthetic oligonucleotide
  Antisense strand to SEQ ID NO: 804360
uguguucaucagauaggca

SEQ ID NO: 804362 - RNA, 19 nt, Artificial Sequence
  Description of Artificial Sequence: Synthetic oligonucleotide
  Sense strand starting at position 640 of SEQ ID NO: 587602
ggccacaugacucgaguga

SEQ ID NO: 804363 - RNA, 19 nt, Artificial Sequence
  Description of Artificial Sequence: Synthetic oligonucleotide
  Antisense strand to SEQ ID NO: 804362
ucacucgagucauguggcc

SEQ ID NO: 804364 - RNA, 19 nt, Artificial Sequence
  Description of Artificial Sequence: Synthetic oligonucleotide
  Sense strand starting at position 845 of SEQ ID NO: 587602
uucuuuacauucugaguga

SEQ ID NO: 804365 - RNA, 19 nt, Artificial Sequence
  Description of Artificial Sequence: Synthetic oligonucleotide
  Antisense strand to SEQ ID NO: 804364
ucacucagaauguaaagaa

SEQ ID NO: 804366 - RNA, 19 nt, Artificial Sequence
  Description of Artificial Sequence: Synthetic oligonucleotide
  Sense strand starting at position 846 of SEQ ID NO: 587602
ucuuuacauucugagugau

SEQ ID NO: 804367 - RNA, 19 nt, Artificial Sequence
  Description of Artificial Sequence: Synthetic oligonucleotide
  Antisense strand to SEQ ID NO: 804366
aucacucagaauguaaaga

SEQ ID NO: 804368 - RNA, 19 nt, Artificial Sequence
  Description of Artificial Sequence: Synthetic oligonucleotide
  Sense strand starting at position 1110 of SEQ ID NO: 587602
ggaguucucccuugggucu

SEQ ID NO: 804369 - RNA, 19 nt, Artificial Sequence
  Description of Artificial Sequence: Synthetic oligonucleotide
  Antisense strand to SEQ ID NO: 804368
agacccaagggagaacucc

SEQ ID NO: 804370 - RNA, 19 nt, Artificial Sequence
  Description of Artificial Sequence: Synthetic oligonucleotide
  Sense strand starting at position 2078 of SEQ ID NO: 587602
uccagaugcuaaugacaca

SEQ ID NO: 804371 - RNA, 19 nt, Artificial Sequence
  Description of Artificial Sequence: Synthetic oligonucleotide
  Antisense strand to SEQ ID NO: 804370
ugugucauuagcaucugga

SEQ ID NO: 804372 - RNA, 19 nt, Artificial Sequence
  Description of Artificial Sequence: Synthetic oligonucleotide
  Sense strand starting at position 2180 of SEQ ID NO: 587602
ugggccguucgugaguaau

SEQ ID NO: 804373 - RNA, 19 nt, Artificial Sequence
  Description of Artificial Sequence: Synthetic oligonucleotide
  Antisense strand to SEQ ID NO: 804372
auuacucacgaacggccca

SEQ ID NO: 804374 - RNA, 19 nt, Artificial Sequence
  Description of Artificial Sequence: Synthetic oligonucleotide
  Sense strand starting at position 2183 of SEQ ID NO: 587602
gccguucgugaguaauccu

SEQ ID NO: 804375 - RNA, 19 nt, Artificial Sequence
  Description of Artificial Sequence: Synthetic oligonucleotide
  Antisense strand to SEQ ID NO: 804374
aggauuacucacgaacggc

SEQ ID NO: 804376 - RNA, 19 nt, Artificial Sequence
  Description of Artificial Sequence: Synthetic oligonucleotide
  Sense strand starting at position 2186 of SEQ ID NO: 587602
guucgugaguaauccugua

SEQ ID NO: 804377 - RNA, 19 nt, Artificial Sequence
  Description of Artificial Sequence: Synthetic oligonucleotide
  Antisense strand to SEQ ID NO: 804376
uacaggauuacucacgaac

SEQ ID NO: 804378 - RNA, 19 nt, Artificial Sequence
  Description of Artificial Sequence: Synthetic oligonucleotide
  Sense strand starting at position 2233 of SEQ ID NO: 587602
gugaguagcgacugacuca

SEQ ID NO: 804379 - RNA, 19 nt, Artificial Sequence
  Description of Artificial Sequence: Synthetic oligonucleotide
  Antisense strand to SEQ ID NO: 804378
ugagucagucgcuacucac

SEQ ID NO: 804380 - RNA, 19 nt, Artificial Sequence
  Description of Artificial Sequence: Synthetic oligonucleotide
  Sense strand starting at position 2234 of SEQ ID NO: 587602
ugaguagcgacugacucau

SEQ ID NO: 804381 - RNA, 19 nt, Artificial Sequence
  Description of Artificial Sequence: Synthetic oligonucleotide
  Antisense strand to SEQ ID NO: 804380
augagucagucgcuacuca

SEQ ID NO: 804382 - RNA, 19 nt, Artificial Sequence
  Description of Artificial Sequence: Synthetic oligonucleotide
  Sense strand starting at position 2535 of SEQ ID NO: 587602
ugucuugucucucugagau

SEQ ID NO: 804383 - RNA, 19 nt, Artificial Sequence
  Description of Artificial Sequence: Synthetic oligonucleotide
  Antisense strand to SEQ ID NO: 804382
aucucagagagacaagaca

SEQ ID NO: 804384 - RNA, 19 nt, Artificial Sequence
  Description of Artificial Sequence: Synthetic oligonucleotide
  Sense strand starting at position 2545 of SEQ ID NO: 587602
cucugagauccugacucuu

SEQ ID NO: 804385 - RNA, 19 nt, Artificial Sequence
  Description of Artificial Sequence: Synthetic oligonucleotide
  Antisense strand to SEQ ID NO: 804384
aagagucaggaucucagag

SEQ ID NO: 804386 - RNA, 19 nt, Artificial Sequence
  Description of Artificial Sequence: Synthetic oligonucleotide
  Sense strand starting at position 2547 of SEQ ID NO: 587602
cugagauccugacucuuua

SEQ ID NO: 804387 - RNA, 19 nt, Artificial Sequence
  Description of Artificial Sequence: Synthetic oligonucleotide
  Antisense strand to SEQ ID NO: 804386
uaaagagucaggaucucag

SEQ ID NO: 804388 - RNA, 19 nt, Artificial Sequence
  Description of Artificial Sequence: Synthetic oligonucleotide
  Sense strand starting at position 2596 of SEQ ID NO: 587602
cuaggcaucucuugucuga

SEQ ID NO: 804389 - RNA, 19 nt, Artificial Sequence
  Description of Artificial Sequence: Synthetic oligonucleotide
  Antisense strand to SEQ ID NO: 804388
ucagacaagagaugccuag

SEQ ID NO: 804390 - RNA, 19 nt, Artificial Sequence
  Description of Artificial Sequence: Synthetic oligonucleotide
  Sense strand starting at position 2598 of SEQ ID NO: 587602
aggcaucucuugucugaau

SEQ ID NO: 804391 - RNA, 19 nt, Artificial Sequence
  Description of Artificial Sequence: Synthetic oligonucleotide
  Antisense strand to SEQ ID NO: 804390
auucagacaagagaugccu

SEQ ID NO: 804392 - RNA, 19 nt, Artificial Sequence
  Description of Artificial Sequence: Synthetic oligonucleotide
  Sense strand starting at position 2599 of SEQ ID NO: 587602
ggcaucucuugucugaauu

SEQ ID NO: 804393 - RNA, 19 nt, Artificial Sequence
  Description of Artificial Sequence: Synthetic oligonucleotide
  Antisense strand to SEQ ID NO: 804392
aauucagacaagagaugcc

SEQ ID NO: 804394 - RNA, 19 nt, Artificial Sequence
  Description of Artificial Sequence: Synthetic oligonucleotide
  Sense strand starting at position 2683 of SEQ ID NO: 587602
acaucaggguugucaucua

SEQ ID NO: 804395 - RNA, 19 nt, Artificial Sequence
  Description of Artificial Sequence: Synthetic oligonucleotide
  Antisense strand to SEQ ID NO: 804394
uagaugacaacccugaugu

SEQ ID NO: 804396 - RNA, 19 nt, Artificial Sequence
  Description of Artificial Sequence: Synthetic oligonucleotide
  Sense strand starting at position 2766 of SEQ ID NO: 587602
agugcuacagcccagagau

SEQ ID NO: 804397 - RNA, 19 nt, Artificial Sequence
  Description of Artificial Sequence: Synthetic oligonucleotide
  Antisense strand to SEQ ID NO: 804396
aucucugggcuguagcacu

SEQ ID NO: 804398 - RNA, 19 nt, Artificial Sequence
  Description of Artificial Sequence: Synthetic oligonucleotide
  Sense strand starting at position 2824 of SEQ ID NO: 587602
auuagaaguuuccagagca

SEQ ID NO: 804399 - RNA, 19 nt, Artificial Sequence
  Description of Artificial Sequence: Synthetic oligonucleotide
  Antisense strand to SEQ ID NO: 804398
ugcucuggaaacuucuaau

SEQ ID NO: 804400 - RNA, 19 nt, Artificial Sequence
  Description of Artificial Sequence: Synthetic oligonucleotide
  Sense strand starting at position 2845 of SEQ ID NO: 587602
gaagaaaugucacccugug

SEQ ID NO: 804401 - RNA, 19 nt, Artificial Sequence
  Description of Artificial Sequence: Synthetic oligonucleotide
  Antisense strand to SEQ ID NO: 804400
cacagggugacauuucuuc

SEQ ID NO: 804402 - RNA, 19 nt, Artificial Sequence
  Description of Artificial Sequence: Synthetic oligonucleotide
  Sense strand starting at position 3426 of SEQ ID NO: 587602
uggaguucucacgagaucu

SEQ ID NO: 804403 - RNA, 19 nt, Artificial Sequence
  Description of Artificial Sequence: Synthetic oligonucleotide
  Antisense strand to SEQ ID NO: 804402
agaucucgugagaacucca

SEQ ID NO: 804404 - RNA, 19 nt, Artificial Sequence
  Description of Artificial Sequence: Synthetic oligonucleotide
  Sense strand starting at position 3692 of SEQ ID NO: 587602
auuccauggccuggaugua

SEQ ID NO: 804405 - RNA, 19 nt, Artificial Sequence
  Description of Artificial Sequence: Synthetic oligonucleotide
  Antisense strand to SEQ ID NO: 804404
uacauccaggccauggaau

SEQ ID NO: 804406 - RNA, 19 nt, Artificial Sequence
  Description of Artificial Sequence: Synthetic oligonucleotide
  Sense strand starting at position 3702 of SEQ ID NO: 587602
cuggauguaccauaguuaa

SEQ ID NO: 804407 - RNA, 19 nt, Artificial Sequence
  Description of Artificial Sequence: Synthetic oligonucleotide
  Antisense strand to SEQ ID NO: 804406
uuaacuaugguacauccag

SEQ ID NO: 804408 - RNA, 19 nt, Artificial Sequence
  Description of Artificial Sequence: Synthetic oligonucleotide
  Sense strand starting at position 3728 of SEQ ID NO: 587602
agccuccuugaaugaacau

SEQ ID NO: 804409 - RNA, 19 nt, Artificial Sequence
  Description of Artificial Sequence: Synthetic oligonucleotide
  Antisense strand to SEQ ID NO: 804408
auguucauucaaggaggcu

SEQ ID NO: 804410 - RNA, 19 nt, Artificial Sequence
  Description of Artificial Sequence: Synthetic oligonucleotide
  Sense strand starting at position 3837 of SEQ ID NO: 587602
aauuguaauucugggcgua

SEQ ID NO: 804411 - RNA, 19 nt, Artificial Sequence
  Description of Artificial Sequence: Synthetic oligonucleotide
  Antisense strand to SEQ ID NO: 804410
uacgcccagaauuacaauu

SEQ ID NO: 804412 - RNA, 19 nt, Artificial Sequence
  Description of Artificial Sequence: Synthetic oligonucleotide
  Sense strand starting at position 3839 of SEQ ID NO: 587602
uuguaauucugggcguaca

SEQ ID NO: 804413 - RNA, 19 nt, Artificial Sequence
  Description of Artificial Sequence: Synthetic oligonucleotide
  Antisense strand to SEQ ID NO: 804412
uguacgcccagaauuacaa

SEQ ID NO: 804414 - RNA, 19 nt, Artificial Sequence
  Description of Artificial Sequence: Synthetic oligonucleotide
  Sense strand starting at position 3862 of SEQ ID NO: 587602
ccagaaauguguuuggugu

SEQ ID NO: 804415 - RNA, 19 nt, Artificial Sequence
  Description of Artificial Sequence: Synthetic oligonucleotide
  Antisense strand to SEQ ID NO: 804414
acaccaaacacauuucugg

SEQ ID NO: 804416 - RNA, 19 nt, Artificial Sequence
  Description of Artificial Sequence: Synthetic oligonucleotide
  Sense strand starting at position 3863 of SEQ ID NO: 587602
cagaaauguguuuggugug

SEQ ID NO: 804417 - RNA, 19 nt, Artificial Sequence
  Description of Artificial Sequence: Synthetic oligonucleotide
  Antisense strand to SEQ ID NO: 804416
cacaccaaacacauuucug

SEQ ID NO: 804418 - RNA, 19 nt, Artificial Sequence
  Description of Artificial Sequence: Synthetic oligonucleotide
  Sense strand starting at position 3868 of SEQ ID NO: 587602
auguguuuggugugucuga

SEQ ID NO: 804419 - RNA, 19 nt, Artificial Sequence
  Description of Artificial Sequence: Synthetic oligonucleotide
  Antisense strand to SEQ ID NO: 804418
ucagacacaccaaacacau

SEQ ID NO: 804420 - RNA, 19 nt, Artificial Sequence
  Description of Artificial Sequence: Synthetic oligonucleotide
  Sense strand starting at position 3875 of SEQ ID NO: 587602
uggugugucugacgaacaa

SEQ ID NO: 804421 - RNA, 19 nt, Artificial Sequence
  Description of Artificial Sequence: Synthetic oligonucleotide
  Antisense strand to SEQ ID NO: 804420
uuguucgucagacacacca

SEQ ID NO: 804422 - RNA, 19 nt, Artificial Sequence
  Description of Artificial Sequence: Synthetic oligonucleotide
  Sense strand starting at position 3923 of SEQ ID NO: 587602
uguuaccuauuguuuagaa

SEQ ID NO: 804423 - RNA, 19 nt, Artificial Sequence
  Description of Artificial Sequence: Synthetic oligonucleotide
  Antisense strand to SEQ ID NO: 804422
uucuaaacaauagguaaca

SEQ ID NO: 804424 - RNA, 19 nt, Artificial Sequence
  Description of Artificial Sequence: Synthetic oligonucleotide
  Sense strand starting at position 3924 of SEQ ID NO: 587602
guuaccuauuguuuagaaa

SEQ ID NO: 804425 - RNA, 19 nt, Artificial Sequence
  Description of Artificial Sequence: Synthetic oligonucleotide
  Antisense strand to SEQ ID NO: 804424
uuucuaaacaauagguaac

SEQ ID NO: 804426 - RNA, 19 nt, Artificial Sequence
  Description of Artificial Sequence: Synthetic oligonucleotide
  Sense strand starting at position 3983 of SEQ ID NO: 587602
ggcucugaugggugaguga

SEQ ID NO: 804427 - RNA, 19 nt, Artificial Sequence
  Description of Artificial Sequence: Synthetic oligonucleotide
  Antisense strand to SEQ ID NO: 804426
ucacucacccaucagagcc

SEQ ID NO: 804428 - RNA, 19 nt, Artificial Sequence
  Description of Artificial Sequence: Synthetic oligonucleotide
  Sense strand starting at position 151 of SEQ ID NO: 587603
ccauauaaagaguggcaua

SEQ ID NO: 804429 - RNA, 19 nt, Artificial Sequence
  Description of Artificial Sequence: Synthetic oligonucleotide
  Antisense strand to SEQ ID NO: 804428
uaugccacucuuuauaugg

SEQ ID NO: 804430 - RNA, 19 nt, Artificial Sequence
  Description of Artificial Sequence: Synthetic oligonucleotide
  Sense strand starting at position 364 of SEQ ID NO: 587603
augggaaucguuugaacuu

SEQ ID NO: 804431 - RNA, 19 nt, Artificial Sequence
  Description of Artificial Sequence: Synthetic oligonucleotide
  Antisense strand to SEQ ID NO: 804430
aaguucaaacgauucccau

SEQ ID NO: 804432 - RNA, 19 nt, Artificial Sequence
  Description of Artificial Sequence: Synthetic oligonucleotide
  Sense strand starting at position 497 of SEQ ID NO: 587603
gcauaauuagcacauggua

SEQ ID NO: 804433 - RNA, 19 nt, Artificial Sequence
  Description of Artificial Sequence: Synthetic oligonucleotide
  Antisense strand to SEQ ID NO: 804432
uaccaugugcuaauuaugc

SEQ ID NO: 804434 - RNA, 19 nt, Artificial Sequence
  Description of Artificial Sequence: Synthetic oligonucleotide
  Sense strand starting at position 705 of SEQ ID NO: 587603
uguggcaauuaucccaauu

SEQ ID NO: 804435 - RNA, 19 nt, Artificial Sequence
  Description of Artificial Sequence: Synthetic oligonucleotide
  Antisense strand to SEQ ID NO: 804434
aauugggauaauugccaca

SEQ ID NO: 804436 - RNA, 19 nt, Artificial Sequence
  Description of Artificial Sequence: Synthetic oligonucleotide
  Sense strand starting at position 724 of SEQ ID NO: 587603
ucccgaaagucacuuuaua

SEQ ID NO: 804437 - RNA, 19 nt, Artificial Sequence
  Description of Artificial Sequence: Synthetic oligonucleotide
  Antisense strand to SEQ ID NO: 804436
uauaaagugacuuucggga

SEQ ID NO: 804438 - RNA, 19 nt, Artificial Sequence
  Description of Artificial Sequence: Synthetic oligonucleotide
  Sense strand starting at position 752 of SEQ ID NO: 587603
ggcagagcauguuucucaa

SEQ ID NO: 804439 - RNA, 19 nt, Artificial Sequence
  Description of Artificial Sequence: Synthetic oligonucleotide
  Antisense strand to SEQ ID NO: 804438
uugagaaacaugcucugcc

SEQ ID NO: 804440 - RNA, 19 nt, Artificial Sequence
  Description of Artificial Sequence: Synthetic oligonucleotide
  Sense strand starting at position 754 of SEQ ID NO: 587603
cagagcauguuucucaaga

SEQ ID NO: 804441 - RNA, 19 nt, Artificial Sequence
  Description of Artificial Sequence: Synthetic oligonucleotide
  Antisense strand to SEQ ID NO: 804440
ucuugagaaacaugcucug

SEQ ID NO: 804442 - RNA, 19 nt, Artificial Sequence
  Description of Artificial Sequence: Synthetic oligonucleotide
  Sense strand starting at position 755 of SEQ ID NO: 587603
agagcauguuucucaagag

SEQ ID NO: 804443 - RNA, 19 nt, Artificial Sequence
  Description of Artificial Sequence: Synthetic oligonucleotide
  Antisense strand to SEQ ID NO: 804442
cucuugagaaacaugcucu

SEQ ID NO: 804444 - RNA, 19 nt, Artificial Sequence
  Description of Artificial Sequence: Synthetic oligonucleotide
  Sense strand starting at position 759 of SEQ ID NO: 587603
cauguuucucaagagaguu

SEQ ID NO: 804445 - RNA, 19 nt, Artificial Sequence
  Description of Artificial Sequence: Synthetic oligonucleotide
  Antisense strand to SEQ ID NO: 804444
aacucucuugagaaacaug

SEQ ID NO: 804446 - RNA, 19 nt, Artificial Sequence
  Description of Artificial Sequence: Synthetic oligonucleotide
  Sense strand starting at position 847 of SEQ ID NO: 587603
gccuuuauugcagaacuuc

SEQ ID NO: 804447 - RNA, 19 nt, Artificial Sequence
  Description of Artificial Sequence: Synthetic oligonucleotide
  Antisense strand to SEQ ID NO: 804446
gaaguucugcaauaaaggc

SEQ ID NO: 804448 - RNA, 19 nt, Artificial Sequence
  Description of Artificial Sequence: Synthetic oligonucleotide
  Sense strand starting at position 983 of SEQ ID NO: 587603
uauugcuaguggguggaaa

SEQ ID NO: 804449 - RNA, 19 nt, Artificial Sequence
  Description of Artificial Sequence: Synthetic oligonucleotide
  Antisense strand to SEQ ID NO: 804448
uuuccacccacuagcaaua

SEQ ID NO: 804450 - RNA, 19 nt, Artificial Sequence
  Description of Artificial Sequence: Synthetic oligonucleotide
  Sense strand starting at position 1085 of SEQ ID NO: 587603
ccaggacacuugcuaauga

SEQ ID NO: 804451 - RNA, 19 nt, Artificial Sequence
  Description of Artificial Sequence: Synthetic oligonucleotide
  Antisense strand to SEQ ID NO: 804450
ucauuagcaaguguccugg

SEQ ID NO: 804452 - RNA, 19 nt, Artificial Sequence
  Description of Artificial Sequence: Synthetic oligonucleotide
  Sense strand starting at position 1148 of SEQ ID NO: 587603
ggguauggcugacuccaaa

SEQ ID NO: 804453 - RNA, 19 nt, Artificial Sequence
  Description of Artificial Sequence: Synthetic oligonucleotide
  Antisense strand to SEQ ID NO: 804452
uuuggagucagccauaccc

SEQ ID NO: 804454 - RNA, 19 nt, Artificial Sequence
  Description of Artificial Sequence: Synthetic oligonucleotide
  Sense strand starting at position 1176 of SEQ ID NO: 587603
agaguauuauugucucuau

SEQ ID NO: 804455 - RNA, 19 nt, Artificial Sequence
  Description of Artificial Sequence: Synthetic oligonucleotide
  Antisense strand to SEQ ID NO: 804454
auagagacaauaauacucu

SEQ ID NO: 804456 - RNA, 19 nt, Artificial Sequence
  Description of Artificial Sequence: Synthetic oligonucleotide
  Sense strand starting at position 1177 of SEQ ID NO: 587603
gaguauuauugucucuaug

SEQ ID NO: 804457 - RNA, 19 nt, Artificial Sequence
  Description of Artificial Sequence: Synthetic oligonucleotide
  Antisense strand to SEQ ID NO: 804456
cauagagacaauaauacuc

SEQ ID NO: 804458 - RNA, 19 nt, Artificial Sequence
  Description of Artificial Sequence: Synthetic oligonucleotide
  Sense strand starting at position 1179 of SEQ ID NO: 587603
guauuauugucucuaugug

SEQ ID NO: 804459 - RNA, 19 nt, Artificial Sequence
  Description of Artificial Sequence: Synthetic oligonucleotide
  Antisense strand to SEQ ID NO: 804458
cacauagagacaauaauac

SEQ ID NO: 804460 - RNA, 19 nt, Artificial Sequence
  Description of Artificial Sequence: Synthetic oligonucleotide
  Sense strand starting at position 1277 of SEQ ID NO: 587603
gcuggaguacuuugcuuaa

SEQ ID NO: 804461 - RNA, 19 nt, Artificial Sequence
  Description of Artificial Sequence: Synthetic oligonucleotide
  Antisense strand to SEQ ID NO: 804460
uuaagcaaaguacuccagc

SEQ ID NO: 804462 - RNA, 19 nt, Artificial Sequence
  Description of Artificial Sequence: Synthetic oligonucleotide
  Sense strand starting at position 1280 of SEQ ID NO: 587603
ggaguacuuugcuuaaggu

SEQ ID NO: 804463 - RNA, 19 nt, Artificial Sequence
  Description of Artificial Sequence: Synthetic oligonucleotide
  Antisense strand to SEQ ID NO: 804462
accuuaagcaaaguacucc

SEQ ID NO: 804464 - RNA, 19 nt, Artificial Sequence
  Description of Artificial Sequence: Synthetic oligonucleotide
  Sense strand starting at position 1281 of SEQ ID NO: 587603
gaguacuuugcuuaagguc

SEQ ID NO: 804465 - RNA, 19 nt, Artificial Sequence
  Description of Artificial Sequence: Synthetic oligonucleotide
  Antisense strand to SEQ ID NO: 804464
gaccuuaagcaaaguacuc

SEQ ID NO: 804466 - RNA, 19 nt, Artificial Sequence
  Description of Artificial Sequence: Synthetic oligonucleotide
  Sense strand starting at position 1576 of SEQ ID NO: 587603
acucacaagcucugugagu

SEQ ID NO: 804467 - RNA, 19 nt, Artificial Sequence
  Description of Artificial Sequence: Synthetic oligonucleotide
  Antisense strand to SEQ ID NO: 804466
acucacagagcuugugagu

SEQ ID NO: 804468 - RNA, 19 nt, Artificial Sequence
  Description of Artificial Sequence: Synthetic oligonucleotide
  Sense strand starting at position 1585 of SEQ ID NO: 587603
cucugugaguggucgagaa

SEQ ID NO: 804469 - RNA, 19 nt, Artificial Sequence
  Description of Artificial Sequence: Synthetic oligonucleotide
  Antisense strand to SEQ ID NO: 804468
uucucgaccacucacagag

SEQ ID NO: 804470 - RNA, 19 nt, Artificial Sequence
  Description of Artificial Sequence: Synthetic oligonucleotide
  Sense strand starting at position 1587 of SEQ ID NO: 587603
cugugaguggucgagaaca

SEQ ID NO: 804471 - RNA, 19 nt, Artificial Sequence
  Description of Artificial Sequence: Synthetic oligonucleotide
  Antisense strand to SEQ ID NO: 804470
uguucucgaccacucacag

SEQ ID NO: 804472 - RNA, 19 nt, Artificial Sequence
  Description of Artificial Sequence: Synthetic oligonucleotide
  Sense strand starting at position 1589 of SEQ ID NO: 587603
gugaguggucgagaacauu

SEQ ID NO: 804473 - RNA, 19 nt, Artificial Sequence
  Description of Artificial Sequence: Synthetic oligonucleotide
  Antisense strand to SEQ ID NO: 804472
aauguucucgaccacucac

SEQ ID NO: 804474 - RNA, 19 nt, Artificial Sequence
  Description of Artificial Sequence: Synthetic oligonucleotide
  Sense strand starting at position 1663 of SEQ ID NO: 587603
gcuggaacacacugauguu

SEQ ID NO: 804475 - RNA, 19 nt, Artificial Sequence
  Description of Artificial Sequence: Synthetic oligonucleotide
  Antisense strand to SEQ ID NO: 804474
aacaucaguguguuccagc

SEQ ID NO: 804476 - RNA, 19 nt, Artificial Sequence
  Description of Artificial Sequence: Synthetic oligonucleotide
  Sense strand starting at position 1682 of SEQ ID NO: 587603
ucguguguuccagccacaa

SEQ ID NO: 804477 - RNA, 19 nt, Artificial Sequence
  Description of Artificial Sequence: Synthetic oligonucleotide
  Antisense strand to SEQ ID NO: 804476
uuguggcuggaacacacga

SEQ ID NO: 804478 - RNA, 19 nt, Artificial Sequence
  Description of Artificial Sequence: Synthetic oligonucleotide
  Sense strand starting at position 1684 of SEQ ID NO: 587603
guguguuccagccacaaca

SEQ ID NO: 804479 - RNA, 19 nt, Artificial Sequence
  Description of Artificial Sequence: Synthetic oligonucleotide
  Antisense strand to SEQ ID NO: 804478
uguuguggcuggaacacac

SEQ ID NO: 804480 - RNA, 19 nt, Artificial Sequence
  Description of Artificial Sequence: Synthetic oligonucleotide
  Sense strand starting at position 1989 of SEQ ID NO: 587603
ucacaugauuucugaguuc

SEQ ID NO: 804481 - RNA, 19 nt, Artificial Sequence
  Description of Artificial Sequence: Synthetic oligonucleotide
  Antisense strand to SEQ ID NO: 804480
gaacucagaaaucauguga

SEQ ID NO: 804482 - RNA, 19 nt, Artificial Sequence
  Description of Artificial Sequence: Synthetic oligonucleotide
  Sense strand starting at position 2037 of SEQ ID NO: 587603
gugugugcucaacauuuga

SEQ ID NO: 804483 - RNA, 19 nt, Artificial Sequence
  Description of Artificial Sequence: Synthetic oligonucleotide
  Antisense strand to SEQ ID NO: 804482
ucaaauguugagcacacac

SEQ ID NO: 804484 - RNA, 19 nt, Artificial Sequence
  Description of Artificial Sequence: Synthetic oligonucleotide
  Sense strand starting at position 2054 of SEQ ID NO: 587603
gagcacuuccuguaaagga

SEQ ID NO: 804485 - RNA, 19 nt, Artificial Sequence
  Description of Artificial Sequence: Synthetic oligonucleotide
  Antisense strand to SEQ ID NO: 804484
uccuuuacaggaagugcuc

SEQ ID NO: 804486 - RNA, 19 nt, Artificial Sequence
  Description of Artificial Sequence: Synthetic oligonucleotide
  Sense strand starting at position 2114 of SEQ ID NO: 587603
uguaaaugagagugaucaa

SEQ ID NO: 804487 - RNA, 19 nt, Artificial Sequence
  Description of Artificial Sequence: Synthetic oligonucleotide
  Antisense strand to SEQ ID NO: 804486
uugaucacucucauuuaca

SEQ ID NO: 804488 - RNA, 19 nt, Artificial Sequence
  Description of Artificial Sequence: Synthetic oligonucleotide
  Sense strand starting at position 2354 of SEQ ID NO: 587603
ucacuuuaucugggaggca

SEQ ID NO: 804489 - RNA, 19 nt, Artificial Sequence
  Description of Artificial Sequence: Synthetic oligonucleotide
  Antisense strand to SEQ ID NO: 804488
ugccucccagauaaaguga

SEQ ID NO: 804490 - RNA, 19 nt, Artificial Sequence
  Description of Artificial Sequence: Synthetic oligonucleotide
  Sense strand starting at position 2741 of SEQ ID NO: 587603
cuagaucccucgcuuguau

SEQ ID NO: 804491 - RNA, 19 nt, Artificial Sequence
  Description of Artificial Sequence: Synthetic oligonucleotide
  Antisense strand to SEQ ID NO: 804490
auacaagcgagggaucuag

SEQ ID NO: 804492 - RNA, 19 nt, Artificial Sequence
  Description of Artificial Sequence: Synthetic oligonucleotide
  Sense strand starting at position 3286 of SEQ ID NO: 587603
guggcucaccucuguaaau

SEQ ID NO: 804493 - RNA, 19 nt, Artificial Sequence
  Description of Artificial Sequence: Synthetic oligonucleotide
  Antisense strand to SEQ ID NO: 804492
auuuacagaggugagccac

SEQ ID NO: 804494 - RNA, 19 nt, Artificial Sequence
  Description of Artificial Sequence: Synthetic oligonucleotide
  Sense strand starting at position 3287 of SEQ ID NO: 587603
uggcucaccucuguaaauc

SEQ ID NO: 804495 - RNA, 19 nt, Artificial Sequence
  Description of Artificial Sequence: Synthetic oligonucleotide
  Antisense strand to SEQ ID NO: 804494
gauuuacagaggugagcca

SEQ ID NO: 804496 - RNA, 19 nt, Artificial Sequence
  Description of Artificial Sequence: Synthetic oligonucleotide
  Sense strand starting at position 3610 of SEQ ID NO: 587603
accuauagaucugaaguaa

SEQ ID NO: 804497 - RNA, 19 nt, Artificial Sequence
  Description of Artificial Sequence: Synthetic oligonucleotide
  Antisense strand to SEQ ID NO: 804496
uuacuucagaucuauaggu

SEQ ID NO: 804498 - RNA, 19 nt, Artificial Sequence
  Description of Artificial Sequence: Synthetic oligonucleotide
  Sense strand starting at position 3663 of SEQ ID NO: 587603
gguuuaguuacaggacaga

SEQ ID NO: 804499 - RNA, 19 nt, Artificial Sequence
  Description of Artificial Sequence: Synthetic oligonucleotide
  Antisense strand to SEQ ID NO: 804498
ucuguccuguaacuaaacc

SEQ ID NO: 804500 - RNA, 19 nt, Artificial Sequence
  Description of Artificial Sequence: Synthetic oligonucleotide
  Sense strand starting at position 3709 of SEQ ID NO: 587603
ggacacuagcuguaauucu

SEQ ID NO: 804501 - RNA, 19 nt, Artificial Sequence
  Description of Artificial Sequence: Synthetic oligonucleotide
  Antisense strand to SEQ ID NO: 804500
agaauuacagcuagugucc

SEQ ID NO: 804502 - RNA, 19 nt, Artificial Sequence
  Description of Artificial Sequence: Synthetic oligonucleotide
  Sense strand starting at position 3891 of SEQ ID NO: 587603
uuagauaucuugcuacuug

SEQ ID NO: 804503 - RNA, 19 nt, Artificial Sequence
  Description of Artificial Sequence: Synthetic oligonucleotide
  Antisense strand to SEQ ID NO: 804502
caaguagcaagauaucuaa

SEQ ID NO: 804504 - RNA, 19 nt, Artificial Sequence
  Description of Artificial Sequence: Synthetic oligonucleotide
  Sense strand starting at position 3908 of SEQ ID NO: 587603
ugaaauccuuuacaggaua

SEQ ID NO: 804505 - RNA, 19 nt, Artificial Sequence
  Description of Artificial Sequence: Synthetic oligonucleotide
  Antisense strand to SEQ ID NO: 804504
uauccuguaaaggauuuca

SEQ ID NO: 804506 - RNA, 19 nt, Artificial Sequence
  Description of Artificial Sequence: Synthetic oligonucleotide
  Sense strand starting at position 3920 of SEQ ID NO: 587603
caggauauagcuuaggguu

SEQ ID NO: 804507 - RNA, 19 nt, Artificial Sequence
  Description of Artificial Sequence: Synthetic oligonucleotide
  Antisense strand to SEQ ID NO: 804506
aacccuaagcuauauccug

SEQ ID NO: 804508 - RNA, 19 nt, Artificial Sequence
  Description of Artificial Sequence: Synthetic oligonucleotide
  Sense strand starting at position 77 of SEQ ID NO: 587604
aaggaaaucuuggcugaau

SEQ ID NO: 804509 - RNA, 19 nt, Artificial Sequence
  Description of Artificial Sequence: Synthetic oligonucleotide
  Antisense strand to SEQ ID NO: 804508
auucagccaagauuuccuu

SEQ ID NO: 804510 - RNA, 19 nt, Artificial Sequence
  Description of Artificial Sequence: Synthetic oligonucleotide
  Sense strand starting at position 78 of SEQ ID NO: 587604
aggaaaucuuggcugaaua

SEQ ID NO: 804511 - RNA, 19 nt, Artificial Sequence
  Description of Artificial Sequence: Synthetic oligonucleotide
  Antisense strand to SEQ ID NO: 804510
uauucagccaagauuuccu

SEQ ID NO: 804512 - RNA, 19 nt, Artificial Sequence
  Description of Artificial Sequence: Synthetic oligonucleotide
  Sense strand starting at position 79 of SEQ ID NO: 587604
ggaaaucuuggcugaauaa

SEQ ID NO: 804513 - RNA, 19 nt, Artificial Sequence
  Description of Artificial Sequence: Synthetic oligonucleotide
  Antisense strand to SEQ ID NO: 804512
uuauucagccaagauuucc

SEQ ID NO: 804514 - RNA, 19 nt, Artificial Sequence
  Description of Artificial Sequence: Synthetic oligonucleotide
  Sense strand starting at position 103 of SEQ ID NO: 587604
ccaaguggcuuaucccaaa

SEQ ID NO: 804515 - RNA, 19 nt, Artificial Sequence
  Description of Artificial Sequence: Synthetic oligonucleotide
  Antisense strand to SEQ ID NO: 804514
uuugggauaagccacuugg

SEQ ID NO: 804516 - RNA, 19 nt, Artificial Sequence
  Description of Artificial Sequence: Synthetic oligonucleotide
  Sense strand starting at position 483 of SEQ ID NO: 587604
uggcuaguucuuuagggaa

SEQ ID NO: 804517 - RNA, 19 nt, Artificial Sequence
  Description of Artificial Sequence: Synthetic oligonucleotide
  Antisense strand to SEQ ID NO: 804516
uucccuaaagaacuagcca

SEQ ID NO: 804518 - RNA, 19 nt, Artificial Sequence
  Description of Artificial Sequence: Synthetic oligonucleotide
  Sense strand starting at position 571 of SEQ ID NO: 587604
aggucagauggcuaaaucu

SEQ ID NO: 804519 - RNA, 19 nt, Artificial Sequence
  Description of Artificial Sequence: Synthetic oligonucleotide
  Antisense strand to SEQ ID NO: 804518
agauuuagccaucugaccu

SEQ ID NO: 804520 - RNA, 19 nt, Artificial Sequence
  Description of Artificial Sequence: Synthetic oligonucleotide
  Sense strand starting at position 676 of SEQ ID NO: 587604
acaguaacaucguuuauga

SEQ ID NO: 804521 - RNA, 19 nt, Artificial Sequence
  Description of Artificial Sequence: Synthetic oligonucleotide
  Antisense strand to SEQ ID NO: 804520
ucauaaacgauguuacugu

SEQ ID NO: 804522 - RNA, 19 nt, Artificial Sequence
  Description of Artificial Sequence: Synthetic oligonucleotide
  Sense strand starting at position 678 of SEQ ID NO: 587604
aguaacaucguuuaugaaa

SEQ ID NO: 804523 - RNA, 19 nt, Artificial Sequence
  Description of Artificial Sequence: Synthetic oligonucleotide
  Antisense strand to SEQ ID NO: 804522
uuucauaaacgauguuacu

SEQ ID NO: 804524 - RNA, 19 nt, Artificial Sequence
  Description of Artificial Sequence: Synthetic oligonucleotide
  Sense strand starting at position 855 of SEQ ID NO: 587604
gggcgaauuugggauaauu

SEQ ID NO: 804525 - RNA, 19 nt, Artificial Sequence
  Description of Artificial Sequence: Synthetic oligonucleotide
  Antisense strand to SEQ ID NO: 804524
aauuaucccaaauucgccc

SEQ ID NO: 804526 - RNA, 19 nt, Artificial Sequence
  Description of Artificial Sequence: Synthetic oligonucleotide
  Sense strand starting at position 871 of SEQ ID NO: 587604
auuaacacacucggauaua

SEQ ID NO: 804527 - RNA, 19 nt, Artificial Sequence
  Description of Artificial Sequence: Synthetic oligonucleotide
  Antisense strand to SEQ ID NO: 804526
uauauccgaguguguuaau

SEQ ID NO: 804528 - RNA, 19 nt, Artificial Sequence
  Description of Artificial Sequence: Synthetic oligonucleotide
  Sense strand starting at position 900 of SEQ ID NO: 587604
accgcuaauccacaugaca

SEQ ID NO: 804529 - RNA, 19 nt, Artificial Sequence
  Description of Artificial Sequence: Synthetic oligonucleotide
  Antisense strand to SEQ ID NO: 804528
ugucauguggauuagcggu

SEQ ID NO: 804530 - RNA, 19 nt, Artificial Sequence
  Description of Artificial Sequence: Synthetic oligonucleotide
  Sense strand starting at position 1290 of SEQ ID NO: 587604
aggaguccucuccaguauc

SEQ ID NO: 804531 - RNA, 19 nt, Artificial Sequence
  Description of Artificial Sequence: Synthetic oligonucleotide
  Antisense strand to SEQ ID NO: 804530
gauacuggagaggacuccu

SEQ ID NO: 804532 - RNA, 19 nt, Artificial Sequence
  Description of Artificial Sequence: Synthetic oligonucleotide
  Sense strand starting at position 2035 of SEQ ID NO: 587604
ggugcucggauuugcauau

SEQ ID NO: 804533 - RNA, 19 nt, Artificial Sequence
  Description of Artificial Sequence: Synthetic oligonucleotide
  Antisense strand to SEQ ID NO: 804532
auaugcaaauccgagcacc

SEQ ID NO: 804534 - RNA, 19 nt, Artificial Sequence
  Description of Artificial Sequence: Synthetic oligonucleotide
  Sense strand starting at position 2389 of SEQ ID NO: 587604
ugcgauaugccgaggugau

SEQ ID NO: 804535 - RNA, 19 nt, Artificial Sequence
  Description of Artificial Sequence: Synthetic oligonucleotide
  Antisense strand to SEQ ID NO: 804534
aucaccucggcauaucgca

SEQ ID NO: 804536 - RNA, 19 nt, Artificial Sequence
  Description of Artificial Sequence: Synthetic oligonucleotide
  Sense strand starting at position 2444 of SEQ ID NO: 587604
aaguaaguuccuuaagggu

SEQ ID NO: 804537 - RNA, 19 nt, Artificial Sequence
  Description of Artificial Sequence: Synthetic oligonucleotide
  Antisense strand to SEQ ID NO: 804536
acccuuaaggaacuuacuu

SEQ ID NO: 804538 - RNA, 19 nt, Artificial Sequence
  Description of Artificial Sequence: Synthetic oligonucleotide
  Sense strand starting at position 2471 of SEQ ID NO: 587604
ggcuguucagggcauugau

SEQ ID NO: 804539 - RNA, 19 nt, Artificial Sequence
  Description of Artificial Sequence: Synthetic oligonucleotide
  Antisense strand to SEQ ID NO: 804538
aucaaugcccugaacagcc

SEQ ID NO: 804540 - RNA, 19 nt, Artificial Sequence
  Description of Artificial Sequence: Synthetic oligonucleotide
  Sense strand starting at position 2585 of SEQ ID NO: 587604
ucucguguaccuuucugua

SEQ ID NO: 804541 - RNA, 19 nt, Artificial Sequence
  Description of Artificial Sequence: Synthetic oligonucleotide
  Antisense strand to SEQ ID NO: 804540
uacagaaagguacacgaga

SEQ ID NO: 804542 - RNA, 19 nt, Artificial Sequence
  Description of Artificial Sequence: Synthetic oligonucleotide
  Sense strand starting at position 2847 of SEQ ID NO: 587604
cugggaucucagcauugca

SEQ ID NO: 804543 - RNA, 19 nt, Artificial Sequence
  Description of Artificial Sequence: Synthetic oligonucleotide
  Antisense strand to SEQ ID NO: 804542
ugcaaugcugagaucccag

SEQ ID NO: 804544 - RNA, 19 nt, Artificial Sequence
  Description of Artificial Sequence: Synthetic oligonucleotide
  Sense strand starting at position 2961 of SEQ ID NO: 587604
gcuacagagcaauaaguca

SEQ ID NO: 804545 - RNA, 19 nt, Artificial Sequence
  Description of Artificial Sequence: Synthetic oligonucleotide
  Antisense strand to SEQ ID NO: 804544
ugacuuauugcucuguagc

SEQ ID NO: 804546 - RNA, 19 nt, Artificial Sequence
  Description of Artificial Sequence: Synthetic oligonucleotide
  Sense strand starting at position 3010 of SEQ ID NO: 587604
agcaguuauuuguuacuag

SEQ ID NO: 804547 - RNA, 19 nt, Artificial Sequence
  Description of Artificial Sequence: Synthetic oligonucleotide
  Antisense strand to SEQ ID NO: 804546
cuaguaacaaauaacugcu

SEQ ID NO: 804548 - RNA, 19 nt, Artificial Sequence
  Description of Artificial Sequence: Synthetic oligonucleotide
  Sense strand starting at position 3067 of SEQ ID NO: 587604
gaagaaaggugguuuauac

SEQ ID NO: 804549 - RNA, 19 nt, Artificial Sequence
  Description of Artificial Sequence: Synthetic oligonucleotide
  Antisense strand to SEQ ID NO: 804548
guauaaaccaccuuucuuc

SEQ ID NO: 804550 - RNA, 19 nt, Artificial Sequence
  Description of Artificial Sequence: Synthetic oligonucleotide
  Sense strand starting at position 3137 of SEQ ID NO: 587604
uggguugcccauggaaaua

SEQ ID NO: 804551 - RNA, 19 nt, Artificial Sequence
  Description of Artificial Sequence: Synthetic oligonucleotide
  Antisense strand to SEQ ID NO: 804550
uauuuccaugggcaaccca

SEQ ID NO: 804552 - RNA, 19 nt, Artificial Sequence
  Description of Artificial Sequence: Synthetic oligonucleotide
  Sense strand starting at position 3160 of SEQ ID NO: 587604
ugggaaggugugugauuga

SEQ ID NO: 804553 - RNA, 19 nt, Artificial Sequence
  Description of Artificial Sequence: Synthetic oligonucleotide
  Antisense strand to SEQ ID NO: 804552
ucaaucacacaccuuccca

SEQ ID NO: 804554 - RNA, 19 nt, Artificial Sequence
  Description of Artificial Sequence: Synthetic oligonucleotide
  Sense strand starting at position 3163 of SEQ ID NO: 587604
gaaggugugugauugaaac

SEQ ID NO: 804555 - RNA, 19 nt, Artificial Sequence
  Description of Artificial Sequence: Synthetic oligonucleotide
  Antisense strand to SEQ ID NO: 804554
guuucaaucacacaccuuc

SEQ ID NO: 804556 - RNA, 19 nt, Artificial Sequence
  Description of Artificial Sequence: Synthetic oligonucleotide
  Sense strand starting at position 3165 of SEQ ID NO: 587604
aggugugugauugaaaccu

SEQ ID NO: 804557 - RNA, 19 nt, Artificial Sequence
  Description of Artificial Sequence: Synthetic oligonucleotide
  Antisense strand to SEQ ID NO: 804556
agguuucaaucacacaccu

SEQ ID NO: 804558 - RNA, 19 nt, Artificial Sequence
  Description of Artificial Sequence: Synthetic oligonucleotide
  Sense strand starting at position 3285 of SEQ ID NO: 587604
gggccuauugccuagacuu

SEQ ID NO: 804559 - RNA, 19 nt, Artificial Sequence
  Description of Artificial Sequence: Synthetic oligonucleotide
  Antisense strand to SEQ ID NO: 804558
aagucuaggcaauaggccc

SEQ ID NO: 804560 - RNA, 19 nt, Artificial Sequence
  Description of Artificial Sequence: Synthetic oligonucleotide
  Sense strand starting at position 3370 of SEQ ID NO: 587604
uugagauccugacuaaacg

SEQ ID NO: 804561 - RNA, 19 nt, Artificial Sequence
  Description of Artificial Sequence: Synthetic oligonucleotide
  Antisense strand to SEQ ID NO: 804560
cguuuagucaggaucucaa

SEQ ID NO: 804562 - RNA, 19 nt, Artificial Sequence
  Description of Artificial Sequence: Synthetic oligonucleotide
  Sense strand starting at position 3371 of SEQ ID NO: 587604
ugagauccugacuaaacgu

SEQ ID NO: 804563 - RNA, 19 nt, Artificial Sequence
  Description of Artificial Sequence: Synthetic oligonucleotide
  Antisense strand to SEQ ID NO: 804562
acguuuagucaggaucuca

SEQ ID NO: 804564 - RNA, 19 nt, Artificial Sequence
  Description of Artificial Sequence: Synthetic oligonucleotide
  Sense strand starting at position 3388 of SEQ ID NO: 587604
guguguggcaaauaagaau

SEQ ID NO: 804565 - RNA, 19 nt, Artificial Sequence
  Description of Artificial Sequence: Synthetic oligonucleotide
  Antisense strand to SEQ ID NO: 804564
auucuuauuugccacacac

SEQ ID NO: 804566 - RNA, 19 nt, Artificial Sequence
  Description of Artificial Sequence: Synthetic oligonucleotide
  Sense strand starting at position 3421 of SEQ ID NO: 587604
uuugguauugguuaaucua

SEQ ID NO: 804567 - RNA, 19 nt, Artificial Sequence
  Description of Artificial Sequence: Synthetic oligonucleotide
  Antisense strand to SEQ ID NO: 804566
uagauuaaccaauaccaaa

SEQ ID NO: 804568 - RNA, 19 nt, Artificial Sequence
  Description of Artificial Sequence: Synthetic oligonucleotide
  Sense strand starting at position 3424 of SEQ ID NO: 587604
gguauugguuaaucuauca

SEQ ID NO: 804569 - RNA, 19 nt, Artificial Sequence
  Description of Artificial Sequence: Synthetic oligonucleotide
  Antisense strand to SEQ ID NO: 804568
ugauagauuaaccaauacc

SEQ ID NO: 804570 - RNA, 19 nt, Artificial Sequence
  Description of Artificial Sequence: Synthetic oligonucleotide
  Sense strand starting at position 3471 of SEQ ID NO: 587604
ugucucucaggguaaggaa

SEQ ID NO: 804571 - RNA, 19 nt, Artificial Sequence
  Description of Artificial Sequence: Synthetic oligonucleotide
  Antisense strand to SEQ ID NO: 804570
uuccuuacccugagagaca

SEQ ID NO: 804572 - RNA, 19 nt, Artificial Sequence
  Description of Artificial Sequence: Synthetic oligonucleotide
  Sense strand starting at position 3684 of SEQ ID NO: 587604
cuuaaugucccaugaaagu

SEQ ID NO: 804573 - RNA, 19 nt, Artificial Sequence
  Description of Artificial Sequence: Synthetic oligonucleotide
  Antisense strand to SEQ ID NO: 804572
acuuucaugggacauuaag

SEQ ID NO: 804574 - RNA, 19 nt, Artificial Sequence
  Description of Artificial Sequence: Synthetic oligonucleotide
  Sense strand starting at position 3700 of SEQ ID NO: 587604
aguucuauuucucaggaaa

SEQ ID NO: 804575 - RNA, 19 nt, Artificial Sequence
  Description of Artificial Sequence: Synthetic oligonucleotide
  Antisense strand to SEQ ID NO: 804574
uuuccugagaaauagaacu

SEQ ID NO: 804576 - RNA, 19 nt, Artificial Sequence
  Description of Artificial Sequence: Synthetic oligonucleotide
  Sense strand starting at position 3772 of SEQ ID NO: 587604
uauggugugcaacauuauu

SEQ ID NO: 804577 - RNA, 19 nt, Artificial Sequence
  Description of Artificial Sequence: Synthetic oligonucleotide
  Antisense strand to SEQ ID NO: 804576
aauaauguugcacaccaua

SEQ ID NO: 804578 - RNA, 19 nt, Artificial Sequence
  Description of Artificial Sequence: Synthetic oligonucleotide
  Sense strand starting at position 3913 of SEQ ID NO: 587604
cccagaaauuauguugggu

SEQ ID NO: 804579 - RNA, 19 nt, Artificial Sequence
  Description of Artificial Sequence: Synthetic oligonucleotide
  Antisense strand to SEQ ID NO: 804578
acccaacauaauuucuggg

SEQ ID NO: 804580 - RNA, 19 nt, Artificial Sequence
  Description of Artificial Sequence: Synthetic oligonucleotide
  Sense strand starting at position 3948 of SEQ ID NO: 587604
uuaguauugauugauuggu

SEQ ID NO: 804581 - RNA, 19 nt, Artificial Sequence
  Description of Artificial Sequence: Synthetic oligonucleotide
  Antisense strand to SEQ ID NO: 804580
accaaucaaucaauacuaa

SEQ ID NO: 804582 - RNA, 19 nt, Artificial Sequence
  Description of Artificial Sequence: Synthetic oligonucleotide
  Sense strand starting at position 3950 of SEQ ID NO: 587604
aguauugauugauugguua

SEQ ID NO: 804583 - RNA, 19 nt, Artificial Sequence
  Description of Artificial Sequence: Synthetic oligonucleotide
  Antisense strand to SEQ ID NO: 804582
uaaccaaucaaucaauacu

SEQ ID NO: 804584 - RNA, 19 nt, Artificial Sequence
  Description of Artificial Sequence: Synthetic oligonucleotide
  Sense strand starting at position 3962 of SEQ ID NO: 587604
uugguuaauugauugauga

SEQ ID NO: 804585 - RNA, 19 nt, Artificial Sequence
  Description of Artificial Sequence: Synthetic oligonucleotide
  Antisense strand to SEQ ID NO: 804584
ucaucaaucaauuaaccaa

SEQ ID NO: 804586 - RNA, 19 nt, Artificial Sequence
  Description of Artificial Sequence: Synthetic oligonucleotide
  Sense strand starting at position 3963 of SEQ ID NO: 587604
ugguuaauugauugaugac

SEQ ID NO: 804587 - RNA, 19 nt, Artificial Sequence
  Description of Artificial Sequence: Synthetic oligonucleotide
  Antisense strand to SEQ ID NO: 804586
gucaucaaucaauuaacca

SEQ ID NO: 804588 - RNA, 19 nt, Artificial Sequence
  Description of Artificial Sequence: Synthetic oligonucleotide
  Sense strand starting at position 383 of SEQ ID NO: 587605
gguuccuucuuccagaaga

SEQ ID NO: 804589 - RNA, 19 nt, Artificial Sequence
  Description of Artificial Sequence: Synthetic oligonucleotide
  Antisense strand to SEQ ID NO: 804588
ucuucuggaagaaggaacc

SEQ ID NO: 804590 - RNA, 19 nt, Artificial Sequence
  Description of Artificial Sequence: Synthetic oligonucleotide
  Sense strand starting at position 412 of SEQ ID NO: 587605
ccugguuaggguugucuga

SEQ ID NO: 804591 - RNA, 19 nt, Artificial Sequence
  Description of Artificial Sequence: Synthetic oligonucleotide
  Antisense strand to SEQ ID NO: 804590
ucagacaacccuaaccagg

SEQ ID NO: 804592 - RNA, 19 nt, Artificial Sequence
  Description of Artificial Sequence: Synthetic oligonucleotide
  Sense strand starting at position 414 of SEQ ID NO: 587605
ugguuaggguugucugagu

SEQ ID NO: 804593 - RNA, 19 nt, Artificial Sequence
  Description of Artificial Sequence: Synthetic oligonucleotide
  Antisense strand to SEQ ID NO: 804592
acucagacaacccuaacca

SEQ ID NO: 804594 - RNA, 19 nt, Artificial Sequence
  Description of Artificial Sequence: Synthetic oligonucleotide
  Sense strand starting at position 425 of SEQ ID NO: 587605
gucugaguccucggccacu

SEQ ID NO: 804595 - RNA, 19 nt, Artificial Sequence
  Description of Artificial Sequence: Synthetic oligonucleotide
  Antisense strand to SEQ ID NO: 804594
aguggccgaggacucagac

SEQ ID NO: 804596 - RNA, 19 nt, Artificial Sequence
  Description of Artificial Sequence: Synthetic oligonucleotide
  Sense strand starting at position 557 of SEQ ID NO: 587605
ugguguuuggaacgggaau

SEQ ID NO: 804597 - RNA, 19 nt, Artificial Sequence
  Description of Artificial Sequence: Synthetic oligonucleotide
  Antisense strand to SEQ ID NO: 804596
auucccguuccaaacacca

SEQ ID NO: 804598 - RNA, 19 nt, Artificial Sequence
  Description of Artificial Sequence: Synthetic oligonucleotide
  Sense strand starting at position 687 of SEQ ID NO: 587605
uuacgccuucccgagaaca

SEQ ID NO: 804599 - RNA, 19 nt, Artificial Sequence
  Description of Artificial Sequence: Synthetic oligonucleotide
  Antisense strand to SEQ ID NO: 804598
uguucucgggaaggcguaa

SEQ ID NO: 804600 - RNA, 19 nt, Artificial Sequence
  Description of Artificial Sequence: Synthetic oligonucleotide
  Sense strand starting at position 948 of SEQ ID NO: 587605
gugccugccugagucuaau

SEQ ID NO: 804601 - RNA, 19 nt, Artificial Sequence
  Description of Artificial Sequence: Synthetic oligonucleotide
  Antisense strand to SEQ ID NO: 804600
auuagacucaggcaggcac

SEQ ID NO: 804602 - RNA, 19 nt, Artificial Sequence
  Description of Artificial Sequence: Synthetic oligonucleotide
  Sense strand starting at position 1504 of SEQ ID NO: 587605
cgcagugauucccuggcga

SEQ ID NO: 804603 - RNA, 19 nt, Artificial Sequence
  Description of Artificial Sequence: Synthetic oligonucleotide
  Antisense strand to SEQ ID NO: 804602
ucgccagggaaucacugcg

SEQ ID NO: 804604 - RNA, 19 nt, Artificial Sequence
  Description of Artificial Sequence: Synthetic oligonucleotide
  Sense strand starting at position 1831 of SEQ ID NO: 587605
ggucccucucaccaucaua

SEQ ID NO: 804605 - RNA, 19 nt, Artificial Sequence
  Description of Artificial Sequence: Synthetic oligonucleotide
  Antisense strand to SEQ ID NO: 804604
uaugauggugagagggacc

SEQ ID NO: 804606 - RNA, 19 nt, Artificial Sequence
  Description of Artificial Sequence: Synthetic oligonucleotide
  Sense strand starting at position 1885 of SEQ ID NO: 587605
gaauacuuauguuauuggu

SEQ ID NO: 804607 - RNA, 19 nt, Artificial Sequence
  Description of Artificial Sequence: Synthetic oligonucleotide
  Antisense strand to SEQ ID NO: 804606
accaauaacauaaguauuc

SEQ ID NO: 804608 - RNA, 19 nt, Artificial Sequence
  Description of Artificial Sequence: Synthetic oligonucleotide
  Sense strand starting at position 1891 of SEQ ID NO: 587605
uuauguuauugguucuguu

SEQ ID NO: 804609 - RNA, 19 nt, Artificial Sequence
  Description of Artificial Sequence: Synthetic oligonucleotide
  Antisense strand to SEQ ID NO: 804608
aacagaaccaauaacauaa

SEQ ID NO: 804610 - RNA, 19 nt, Artificial Sequence
  Description of Artificial Sequence: Synthetic oligonucleotide
  Sense strand starting at position 1956 of SEQ ID NO: 587605
uuuccaaugugagaaagaa

SEQ ID NO: 804611 - RNA, 19 nt, Artificial Sequence
  Description of Artificial Sequence: Synthetic oligonucleotide
  Antisense strand to SEQ ID NO: 804610
uucuuucucacauuggaaa

SEQ ID NO: 804612 - RNA, 19 nt, Artificial Sequence
  Description of Artificial Sequence: Synthetic oligonucleotide
  Sense strand starting at position 2113 of SEQ ID NO: 587605
gccaguuaguuguucuguu

SEQ ID NO: 804613 - RNA, 19 nt, Artificial Sequence
  Description of Artificial Sequence: Synthetic oligonucleotide
  Antisense strand to SEQ ID NO: 804612
aacagaacaacuaacuggc

SEQ ID NO: 804614 - RNA, 19 nt, Artificial Sequence
  Description of Artificial Sequence: Synthetic oligonucleotide
  Sense strand starting at position 2114 of SEQ ID NO: 587605
ccaguuaguuguucuguuu

SEQ ID NO: 804615 - RNA, 19 nt, Artificial Sequence
  Description of Artificial Sequence: Synthetic oligonucleotide
  Antisense strand to SEQ ID NO: 804614
aaacagaacaacuaacugg

SEQ ID NO: 804616 - RNA, 19 nt, Artificial Sequence
  Description of Artificial Sequence: Synthetic oligonucleotide
  Sense strand starting at position 2121 of SEQ ID NO: 587605
guuguucuguuugccgaga

SEQ ID NO: 804617 - RNA, 19 nt, Artificial Sequence
  Description of Artificial Sequence: Synthetic oligonucleotide
  Antisense strand to SEQ ID NO: 804616
ucucggcaaacagaacaac

SEQ ID NO: 804618 - RNA, 19 nt, Artificial Sequence
  Description of Artificial Sequence: Synthetic oligonucleotide
  Sense strand starting at position 2126 of SEQ ID NO: 587605
ucuguuugccgagagguaa

SEQ ID NO: 804619 - RNA, 19 nt, Artificial Sequence
  Description of Artificial Sequence: Synthetic oligonucleotide
  Antisense strand to SEQ ID NO: 804618
uuaccucucggcaaacaga

SEQ ID NO: 804620 - RNA, 19 nt, Artificial Sequence
  Description of Artificial Sequence: Synthetic oligonucleotide
  Sense strand starting at position 2199 of SEQ ID NO: 587605
gcagacguuccagaauauu

SEQ ID NO: 804621 - RNA, 19 nt, Artificial Sequence
  Description of Artificial Sequence: Synthetic oligonucleotide
  Antisense strand to SEQ ID NO: 804620
aauauucuggaacgucugc

SEQ ID NO: 804622 - RNA, 19 nt, Artificial Sequence
  Description of Artificial Sequence: Synthetic oligonucleotide
  Sense strand starting at position 2284 of SEQ ID NO: 587605
gaguaugucgcggucuuca

SEQ ID NO: 804623 - RNA, 19 nt, Artificial Sequence
  Description of Artificial Sequence: Synthetic oligonucleotide
  Antisense strand to SEQ ID NO: 804622
ugaagaccgcgacauacuc

SEQ ID NO: 804624 - RNA, 19 nt, Artificial Sequence
  Description of Artificial Sequence: Synthetic oligonucleotide
  Sense strand starting at position 2303 of SEQ ID NO: 587605
gccucagaccacgaugaau

SEQ ID NO: 804625 - RNA, 19 nt, Artificial Sequence
  Description of Artificial Sequence: Synthetic oligonucleotide
  Antisense strand to SEQ ID NO: 804624
auucaucguggucugaggc

SEQ ID NO: 804626 - RNA, 19 nt, Artificial Sequence
  Description of Artificial Sequence: Synthetic oligonucleotide
  Sense strand starting at position 2305 of SEQ ID NO: 587605
cucagaccacgaugaauua

SEQ ID NO: 804627 - RNA, 19 nt, Artificial Sequence
  Description of Artificial Sequence: Synthetic oligonucleotide
  Antisense strand to SEQ ID NO: 804626
uaauucaucguggucugag

SEQ ID NO: 804628 - RNA, 19 nt, Artificial Sequence
  Description of Artificial Sequence: Synthetic oligonucleotide
  Sense strand starting at position 2316 of SEQ ID NO: 587605
augaauuaauacggaugaa

SEQ ID NO: 804629 - RNA, 19 nt, Artificial Sequence
  Description of Artificial Sequence: Synthetic oligonucleotide
  Antisense strand to SEQ ID NO: 804628
uucauccguauuaauucau

SEQ ID NO: 804630 - RNA, 19 nt, Artificial Sequence
  Description of Artificial Sequence: Synthetic oligonucleotide
  Sense strand starting at position 2413 of SEQ ID NO: 587605
ggaccuuuauguuaaagga

SEQ ID NO: 804631 - RNA, 19 nt, Artificial Sequence
  Description of Artificial Sequence: Synthetic oligonucleotide
  Antisense strand to SEQ ID NO: 804630
uccuuuaacauaaaggucc

SEQ ID NO: 804632 - RNA, 19 nt, Artificial Sequence
  Description of Artificial Sequence: Synthetic oligonucleotide
  Sense strand starting at position 2532 of SEQ ID NO: 587605
gauaguugauuaccuaaag

SEQ ID NO: 804633 - RNA, 19 nt, Artificial Sequence
  Description of Artificial Sequence: Synthetic oligonucleotide
  Antisense strand to SEQ ID NO: 804632
cuuuagguaaucaacuauc

SEQ ID NO: 804634 - RNA, 19 nt, Artificial Sequence
  Description of Artificial Sequence: Synthetic oligonucleotide
  Sense strand starting at position 2573 of SEQ ID NO: 587605
aggaauuuauagcaaaugu

SEQ ID NO: 804635 - RNA, 19 nt, Artificial Sequence
  Description of Artificial Sequence: Synthetic oligonucleotide
  Antisense strand to SEQ ID NO: 804634
acauuugcuauaaauuccu

SEQ ID NO: 804636 - RNA, 19 nt, Artificial Sequence
  Description of Artificial Sequence: Synthetic oligonucleotide
  Sense strand starting at position 2897 of SEQ ID NO: 587605
gcaagacgcugugucaaau

SEQ ID NO: 804637 - RNA, 19 nt, Artificial Sequence
  Description of Artificial Sequence: Synthetic oligonucleotide
  Antisense strand to SEQ ID NO: 804636
auuugacacagcgucuugc

SEQ ID NO: 804638 - RNA, 19 nt, Artificial Sequence
  Description of Artificial Sequence: Synthetic oligonucleotide
  Sense strand starting at position 2977 of SEQ ID NO: 587605
guagauuuauucuacucua

SEQ ID NO: 804639 - RNA, 19 nt, Artificial Sequence
  Description of Artificial Sequence: Synthetic oligonucleotide
  Antisense strand to SEQ ID NO: 804638
uagaguagaauaaaucuac

SEQ ID NO: 804640 - RNA, 19 nt, Artificial Sequence
  Description of Artificial Sequence: Synthetic oligonucleotide
  Sense strand starting at position 2982 of SEQ ID NO: 587605
uuuauucuacucuauguga

SEQ ID NO: 804641 - RNA, 19 nt, Artificial Sequence
  Description of Artificial Sequence: Synthetic oligonucleotide
  Antisense strand to SEQ ID NO: 804640
ucacauagaguagaauaaa

SEQ ID NO: 804642 - RNA, 19 nt, Artificial Sequence
  Description of Artificial Sequence: Synthetic oligonucleotide
  Sense strand starting at position 2985 of SEQ ID NO: 587605
auucuacucuaugugaagu

SEQ ID NO: 804643 - RNA, 19 nt, Artificial Sequence
  Description of Artificial Sequence: Synthetic oligonucleotide
  Antisense strand to SEQ ID NO: 804642
acuucacauagaguagaau

SEQ ID NO: 804644 - RNA, 19 nt, Artificial Sequence
  Description of Artificial Sequence: Synthetic oligonucleotide
  Sense strand starting at position 2996 of SEQ ID NO: 587605
ugugaaguggccuacuauu

SEQ ID NO: 804645 - RNA, 19 nt, Artificial Sequence
  Description of Artificial Sequence: Synthetic oligonucleotide
  Antisense strand to SEQ ID NO: 804644
aauaguaggccacuucaca

SEQ ID NO: 804646 - RNA, 19 nt, Artificial Sequence
  Description of Artificial Sequence: Synthetic oligonucleotide
  Sense strand starting at position 3006 of SEQ ID NO: 587605
ccuacuauuucuuggaggu

SEQ ID NO: 804647 - RNA, 19 nt, Artificial Sequence
  Description of Artificial Sequence: Synthetic oligonucleotide
  Antisense strand to SEQ ID NO: 804646
accuccaagaaauaguagg

SEQ ID NO: 804648 - RNA, 19 nt, Artificial Sequence
  Description of Artificial Sequence: Synthetic oligonucleotide
  Sense strand starting at position 3008 of SEQ ID NO: 587605
uacuauuucuuggagguag

SEQ ID NO: 804649 - RNA, 19 nt, Artificial Sequence
  Description of Artificial Sequence: Synthetic oligonucleotide
  Antisense strand to SEQ ID NO: 804648
cuaccuccaagaaauagua

SEQ ID NO: 804650 - RNA, 19 nt, Artificial Sequence
  Description of Artificial Sequence: Synthetic oligonucleotide
  Sense strand starting at position 3020 of SEQ ID NO: 587605
gagguagacuaguaaguca

SEQ ID NO: 804651 - RNA, 19 nt, Artificial Sequence
  Description of Artificial Sequence: Synthetic oligonucleotide
  Antisense strand to SEQ ID NO: 804650
ugacuuacuagucuaccuc

SEQ ID NO: 804652 - RNA, 19 nt, Artificial Sequence
  Description of Artificial Sequence: Synthetic oligonucleotide
  Sense strand starting at position 3033 of SEQ ID NO: 587605
aagucaaagguguaugcua

SEQ ID NO: 804653 - RNA, 19 nt, Artificial Sequence
  Description of Artificial Sequence: Synthetic oligonucleotide
  Antisense strand to SEQ ID NO: 804652
uagcauacaccuuugacuu

SEQ ID NO: 804654 - RNA, 19 nt, Artificial Sequence
  Description of Artificial Sequence: Synthetic oligonucleotide
  Sense strand starting at position 3094 of SEQ ID NO: 587605
aagucaaagcacuguaguu

SEQ ID NO: 804655 - RNA, 19 nt, Artificial Sequence
  Description of Artificial Sequence: Synthetic oligonucleotide
  Antisense strand to SEQ ID NO: 804654
aacuacagugcuuugacuu

SEQ ID NO: 804656 - RNA, 19 nt, Artificial Sequence
  Description of Artificial Sequence: Synthetic oligonucleotide
  Sense strand starting at position 3096 of SEQ ID NO: 587605
gucaaagcacuguaguuaa

SEQ ID NO: 804657 - RNA, 19 nt, Artificial Sequence
  Description of Artificial Sequence: Synthetic oligonucleotide
  Antisense strand to SEQ ID NO: 804656
uuaacuacagugcuuugac

SEQ ID NO: 804658 - RNA, 19 nt, Artificial Sequence
  Description of Artificial Sequence: Synthetic oligonucleotide
  Sense strand starting at position 3221 of SEQ ID NO: 587605
auagcaagaugacauauau

SEQ ID NO: 804659 - RNA, 19 nt, Artificial Sequence
  Description of Artificial Sequence: Synthetic oligonucleotide
  Antisense strand to SEQ ID NO: 804658
auauaugucaucuugcuau

SEQ ID NO: 804660 - RNA, 19 nt, Artificial Sequence
  Description of Artificial Sequence: Synthetic oligonucleotide
  Sense strand starting at position 3662 of SEQ ID NO: 587605
auaugcugucagugggaaa

SEQ ID NO: 804661 - RNA, 19 nt, Artificial Sequence
  Description of Artificial Sequence: Synthetic oligonucleotide
  Antisense strand to SEQ ID NO: 804660
uuucccacugacagcauau

SEQ ID NO: 804662 - RNA, 19 nt, Artificial Sequence
  Description of Artificial Sequence: Synthetic oligonucleotide
  Sense strand starting at position 3765 of SEQ ID NO: 587605
cagacaugacuacgucaau

SEQ ID NO: 804663 - RNA, 19 nt, Artificial Sequence
  Description of Artificial Sequence: Synthetic oligonucleotide
  Antisense strand to SEQ ID NO: 804662
auugacguagucaugucug

SEQ ID NO: 804664 - RNA, 19 nt, Artificial Sequence
  Description of Artificial Sequence: Synthetic oligonucleotide
  Sense strand starting at position 3766 of SEQ ID NO: 587605
agacaugacuacgucaaua

SEQ ID NO: 804665 - RNA, 19 nt, Artificial Sequence
  Description of Artificial Sequence: Synthetic oligonucleotide
  Antisense strand to SEQ ID NO: 804664
uauugacguagucaugucu

SEQ ID NO: 804666 - RNA, 19 nt, Artificial Sequence
  Description of Artificial Sequence: Synthetic oligonucleotide
  Sense strand starting at position 3768 of SEQ ID NO: 587605
acaugacuacgucaauauc

SEQ ID NO: 804667 - RNA, 19 nt, Artificial Sequence
  Description of Artificial Sequence: Synthetic oligonucleotide
  Antisense strand to SEQ ID NO: 804666
gauauugacguagucaugu

SEQ ID NO: 804668 - RNA, 19 nt, Artificial Sequence
  Description of Artificial Sequence: Synthetic oligonucleotide
  Sense strand starting at position 382 of SEQ ID NO: 587606
gguuccuucuuccagaaga

SEQ ID NO: 804669 - RNA, 19 nt, Artificial Sequence
  Description of Artificial Sequence: Synthetic oligonucleotide
  Antisense strand to SEQ ID NO: 804668
ucuucuggaagaaggaacc

SEQ ID NO: 804670 - RNA, 19 nt, Artificial Sequence
  Description of Artificial Sequence: Synthetic oligonucleotide
  Sense strand starting at position 411 of SEQ ID NO: 587606
ccugguuaggguugucuga

SEQ ID NO: 804671 - RNA, 19 nt, Artificial Sequence
  Description of Artificial Sequence: Synthetic oligonucleotide
  Antisense strand to SEQ ID NO: 804670
ucagacaacccuaaccagg

SEQ ID NO: 804672 - RNA, 19 nt, Artificial Sequence
  Description of Artificial Sequence: Synthetic oligonucleotide
  Sense strand starting at position 413 of SEQ ID NO: 587606
ugguuaggguugucugagu

SEQ ID NO: 804673 - RNA, 19 nt, Artificial Sequence
  Description of Artificial Sequence: Synthetic oligonucleotide
  Antisense strand to SEQ ID NO: 804672
acucagacaacccuaacca

SEQ ID NO: 804674 - RNA, 19 nt, Artificial Sequence
  Description of Artificial Sequence: Synthetic oligonucleotide
  Sense strand starting at position 424 of SEQ ID NO: 587606
gucugaguccucggccacu

SEQ ID NO: 804675 - RNA, 19 nt, Artificial Sequence
  Description of Artificial Sequence: Synthetic oligonucleotide
  Antisense strand to SEQ ID NO: 804674
aguggccgaggacucagac

SEQ ID NO: 804676 - RNA, 19 nt, Artificial Sequence
  Description of Artificial Sequence: Synthetic oligonucleotide
  Sense strand starting at position 556 of SEQ ID NO: 587606
ugguguuuggaacgggaau

SEQ ID NO: 804677 - RNA, 19 nt, Artificial Sequence
  Description of Artificial Sequence: Synthetic oligonucleotide
  Antisense strand to SEQ ID NO: 804676
auucccguuccaaacacca

SEQ ID NO: 804678 - RNA, 19 nt, Artificial Sequence
  Description of Artificial Sequence: Synthetic oligonucleotide
  Sense strand starting at position 686 of SEQ ID NO: 587606
uuacgccuucccgagaaca

SEQ ID NO: 804679 - RNA, 19 nt, Artificial Sequence
  Description of Artificial Sequence: Synthetic oligonucleotide
  Antisense strand to SEQ ID NO: 804678
uguucucgggaaggcguaa

SEQ ID NO: 804680 - RNA, 19 nt, Artificial Sequence
  Description of Artificial Sequence: Synthetic oligonucleotide
  Sense strand starting at position 947 of SEQ ID NO: 587606
gugccugccugagucuaau

SEQ ID NO: 804681 - RNA, 19 nt, Artificial Sequence
  Description of Artificial Sequence: Synthetic oligonucleotide
  Antisense strand to SEQ ID NO: 804680
auuagacucaggcaggcac

SEQ ID NO: 804682 - RNA, 19 nt, Artificial Sequence
  Description of Artificial Sequence: Synthetic oligonucleotide
  Sense strand starting at position 1503 of SEQ ID NO: 587606
cgcagugauucccuggcga

SEQ ID NO: 804683 - RNA, 19 nt, Artificial Sequence
  Description of Artificial Sequence: Synthetic oligonucleotide
  Antisense strand to SEQ ID NO: 804682
ucgccagggaaucacugcg

SEQ ID NO: 804684 - RNA, 19 nt, Artificial Sequence
  Description of Artificial Sequence: Synthetic oligonucleotide
  Sense strand starting at position 1830 of SEQ ID NO: 587606
ggucccucucaccaucaua

SEQ ID NO: 804685 - RNA, 19 nt, Artificial Sequence
  Description of Artificial Sequence: Synthetic oligonucleotide
  Antisense strand to SEQ ID NO: 804684
uaugauggugagagggacc

SEQ ID NO: 804686 - RNA, 19 nt, Artificial Sequence
  Description of Artificial Sequence: Synthetic oligonucleotide
  Sense strand starting at position 1890 of SEQ ID NO: 587606
uuauguuauugguucuguu

SEQ ID NO: 804687 - RNA, 19 nt, Artificial Sequence
  Description of Artificial Sequence: Synthetic oligonucleotide
  Antisense strand to SEQ ID NO: 804686
aacagaaccaauaacauaa

SEQ ID NO: 804688 - RNA, 19 nt, Artificial Sequence
  Description of Artificial Sequence: Synthetic oligonucleotide
  Sense strand starting at position 1955 of SEQ ID NO: 587606
uuuccaaugugagaaagaa

SEQ ID NO: 804689 - RNA, 19 nt, Artificial Sequence
  Description of Artificial Sequence: Synthetic oligonucleotide
  Antisense strand to SEQ ID NO: 804688
uucuuucucacauuggaaa

SEQ ID NO: 804690 - RNA, 19 nt, Artificial Sequence
  Description of Artificial Sequence: Synthetic oligonucleotide
  Sense strand starting at position 2112 of SEQ ID NO: 587606
gccaguuaguuguucuguu

SEQ ID NO: 804691 - RNA, 19 nt, Artificial Sequence
  Description of Artificial Sequence: Synthetic oligonucleotide
  Antisense strand to SEQ ID NO: 804690
aacagaacaacuaacuggc

SEQ ID NO: 804692 - RNA, 19 nt, Artificial Sequence
  Description of Artificial Sequence: Synthetic oligonucleotide
  Sense strand starting at position 2113 of SEQ ID NO: 587606
ccaguuaguuguucuguuu

SEQ ID NO: 804693 - RNA, 19 nt, Artificial Sequence
  Description of Artificial Sequence: Synthetic oligonucleotide
  Antisense strand to SEQ ID NO: 804692
aaacagaacaacuaacugg

SEQ ID NO: 804694 - RNA, 19 nt, Artificial Sequence
  Description of Artificial Sequence: Synthetic oligonucleotide
  Sense strand starting at position 2120 of SEQ ID NO: 587606
guuguucuguuugccgaga

SEQ ID NO: 804695 - RNA, 19 nt, Artificial Sequence
  Description of Artificial Sequence: Synthetic oligonucleotide
  Antisense strand to SEQ ID NO: 804694
ucucggcaaacagaacaac

SEQ ID NO: 804696 - RNA, 19 nt, Artificial Sequence
  Description of Artificial Sequence: Synthetic oligonucleotide
  Sense strand starting at position 2125 of SEQ ID NO: 587606
ucuguuugccgagagguaa

SEQ ID NO: 804697 - RNA, 19 nt, Artificial Sequence
  Description of Artificial Sequence: Synthetic oligonucleotide
  Antisense strand to SEQ ID NO: 804696
uuaccucucggcaaacaga

SEQ ID NO: 804698 - RNA, 19 nt, Artificial Sequence
  Description of Artificial Sequence: Synthetic oligonucleotide
  Sense strand starting at position 2198 of SEQ ID NO: 587606
gcagacguuccagaauauu

SEQ ID NO: 804699 - RNA, 19 nt, Artificial Sequence
  Description of Artificial Sequence: Synthetic oligonucleotide
  Antisense strand to SEQ ID NO: 804698
aauauucuggaacgucugc

SEQ ID NO: 804700 - RNA, 19 nt, Artificial Sequence
  Description of Artificial Sequence: Synthetic oligonucleotide
  Sense strand starting at position 2283 of SEQ ID NO: 587606
gaguaugucgcggucuuca

SEQ ID NO: 804701 - RNA, 19 nt, Artificial Sequence
  Description of Artificial Sequence: Synthetic oligonucleotide
  Antisense strand to SEQ ID NO: 804700
ugaagaccgcgacauacuc

SEQ ID NO: 804702 - RNA, 19 nt, Artificial Sequence
  Description of Artificial Sequence: Synthetic oligonucleotide
  Sense strand starting at position 2302 of SEQ ID NO: 587606
gccucagaccacgaugaau

SEQ ID NO: 804703 - RNA, 19 nt, Artificial Sequence
  Description of Artificial Sequence: Synthetic oligonucleotide
  Antisense strand to SEQ ID NO: 804702
auucaucguggucugaggc

SEQ ID NO: 804704 - RNA, 19 nt, Artificial Sequence
  Description of Artificial Sequence: Synthetic oligonucleotide
  Sense strand starting at position 2304 of SEQ ID NO: 587606
cucagaccacgaugaauua

SEQ ID NO: 804705 - RNA, 19 nt, Artificial Sequence
  Description of Artificial Sequence: Synthetic oligonucleotide
  Antisense strand to SEQ ID NO: 804704
uaauucaucguggucugag

SEQ ID NO: 804706 - RNA, 19 nt, Artificial Sequence
  Description of Artificial Sequence: Synthetic oligonucleotide
  Sense strand starting at position 2315 of SEQ ID NO: 587606
augaauuaauacggaugaa

SEQ ID NO: 804707 - RNA, 19 nt, Artificial Sequence
  Description of Artificial Sequence: Synthetic oligonucleotide
  Antisense strand to SEQ ID NO: 804706
uucauccguauuaauucau

SEQ ID NO: 804708 - RNA, 19 nt, Artificial Sequence
  Description of Artificial Sequence: Synthetic oligonucleotide
  Sense strand starting at position 2412 of SEQ ID NO: 587606
ggaccuuuauguuaaagga

SEQ ID NO: 804709 - RNA, 19 nt, Artificial Sequence
  Description of Artificial Sequence: Synthetic oligonucleotide
  Antisense strand to SEQ ID NO: 804708
uccuuuaacauaaaggucc

SEQ ID NO: 804710 - RNA, 19 nt, Artificial Sequence
  Description of Artificial Sequence: Synthetic oligonucleotide
  Sense strand starting at position 2531 of SEQ ID NO: 587606
gauaguugauuaccuaaag

SEQ ID NO: 804711 - RNA, 19 nt, Artificial Sequence
  Description of Artificial Sequence: Synthetic oligonucleotide
  Antisense strand to SEQ ID NO: 804710
cuuuagguaaucaacuauc

SEQ ID NO: 804712 - RNA, 19 nt, Artificial Sequence
  Description of Artificial Sequence: Synthetic oligonucleotide
  Sense strand starting at position 2572 of SEQ ID NO: 587606
aggaauuuauagcaaaugu

SEQ ID NO: 804713 - RNA, 19 nt, Artificial Sequence
  Description of Artificial Sequence: Synthetic oligonucleotide
  Antisense strand to SEQ ID NO: 804712
acauuugcuauaaauuccu

SEQ ID NO: 804714 - RNA, 19 nt, Artificial Sequence
  Description of Artificial Sequence: Synthetic oligonucleotide
  Sense strand starting at position 2896 of SEQ ID NO: 587606
gcaagacgcugugucaaau

SEQ ID NO: 804715 - RNA, 19 nt, Artificial Sequence
  Description of Artificial Sequence: Synthetic oligonucleotide
  Antisense strand to SEQ ID NO: 804714
auuugacacagcgucuugc

SEQ ID NO: 804716 - RNA, 19 nt, Artificial Sequence
  Description of Artificial Sequence: Synthetic oligonucleotide
  Sense strand starting at position 2976 of SEQ ID NO: 587606
guagauuuauucuacucua

SEQ ID NO: 804717 - RNA, 19 nt, Artificial Sequence
  Description of Artificial Sequence: Synthetic oligonucleotide
  Antisense strand to SEQ ID NO: 804716
uagaguagaauaaaucuac

SEQ ID NO: 804718 - RNA, 19 nt, Artificial Sequence
  Description of Artificial Sequence: Synthetic oligonucleotide
  Sense strand starting at position 2981 of SEQ ID NO: 587606
uuuauucuacucuauguga

SEQ ID NO: 804719 - RNA, 19 nt, Artificial Sequence
  Description of Artificial Sequence: Synthetic oligonucleotide
  Antisense strand to SEQ ID NO: 804718
ucacauagaguagaauaaa

SEQ ID NO: 804720 - RNA, 19 nt, Artificial Sequence
  Description of Artificial Sequence: Synthetic oligonucleotide
  Sense strand starting at position 2984 of SEQ ID NO: 587606
auucuacucuaugugaagu

SEQ ID NO: 804721 - RNA, 19 nt, Artificial Sequence
  Description of Artificial Sequence: Synthetic oligonucleotide
  Antisense strand to SEQ ID NO: 804720
acuucacauagaguagaau

SEQ ID NO: 804722 - RNA, 19 nt, Artificial Sequence
  Description of Artificial Sequence: Synthetic oligonucleotide
  Sense strand starting at position 2995 of SEQ ID NO: 587606
ugugaaguggccuacuauu

SEQ ID NO: 804723 - RNA, 19 nt, Artificial Sequence
  Description of Artificial Sequence: Synthetic oligonucleotide
  Antisense strand to SEQ ID NO: 804722
aauaguaggccacuucaca

SEQ ID NO: 804724 - RNA, 19 nt, Artificial Sequence
  Description of Artificial Sequence: Synthetic oligonucleotide
  Sense strand starting at position 3005 of SEQ ID NO: 587606
ccuacuauuucuuggaggu

SEQ ID NO: 804725 - RNA, 19 nt, Artificial Sequence
  Description of Artificial Sequence: Synthetic oligonucleotide
  Antisense strand to SEQ ID NO: 804724
accuccaagaaauaguagg

SEQ ID NO: 804726 - RNA, 19 nt, Artificial Sequence
  Description of Artificial Sequence: Synthetic oligonucleotide
  Sense strand starting at position 3007 of SEQ ID NO: 587606
uacuauuucuuggagguag

SEQ ID NO: 804727 - RNA, 19 nt, Artificial Sequence
  Description of Artificial Sequence: Synthetic oligonucleotide
  Antisense strand to SEQ ID NO: 804726
cuaccuccaagaaauagua

SEQ ID NO: 804728 - RNA, 19 nt, Artificial Sequence
  Description of Artificial Sequence: Synthetic oligonucleotide
  Sense strand starting at position 3019 of SEQ ID NO: 587606
gagguagacuaguaaguca

SEQ ID NO: 804729 - RNA, 19 nt, Artificial Sequence
  Description of Artificial Sequence: Synthetic oligonucleotide
  Antisense strand to SEQ ID NO: 804728
ugacuuacuagucuaccuc

SEQ ID NO: 804730 - RNA, 19 nt, Artificial Sequence
  Description of Artificial Sequence: Synthetic oligonucleotide
  Sense strand starting at position 3032 of SEQ ID NO: 587606
aagucaaagguguaugcua

SEQ ID NO: 804731 - RNA, 19 nt, Artificial Sequence
  Description of Artificial Sequence: Synthetic oligonucleotide
  Antisense strand to SEQ ID NO: 804730
uagcauacaccuuugacuu

SEQ ID NO: 804732 - RNA, 19 nt, Artificial Sequence
  Description of Artificial Sequence: Synthetic oligonucleotide
  Sense strand starting at position 3093 of SEQ ID NO: 587606
aagucaaagcacuguaguu

SEQ ID NO: 804733 - RNA, 19 nt, Artificial Sequence
  Description of Artificial Sequence: Synthetic oligonucleotide
  Antisense strand to SEQ ID NO: 804732
aacuacagugcuuugacuu

SEQ ID NO: 804734 - RNA, 19 nt, Artificial Sequence
  Description of Artificial Sequence: Synthetic oligonucleotide
  Sense strand starting at position 3095 of SEQ ID NO: 587606
gucaaagcacuguaguuaa

SEQ ID NO: 804735 - RNA, 19 nt, Artificial Sequence
  Description of Artificial Sequence: Synthetic oligonucleotide
  Antisense strand to SEQ ID NO: 804734
uuaacuacagugcuuugac

SEQ ID NO: 804736 - RNA, 19 nt, Artificial Sequence
  Description of Artificial Sequence: Synthetic oligonucleotide
  Sense strand starting at position 3220 of SEQ ID NO: 587606
auagcaagaugacauauau

SEQ ID NO: 804737 - RNA, 19 nt, Artificial Sequence
  Description of Artificial Sequence: Synthetic oligonucleotide
  Antisense strand to SEQ ID NO: 804736
auauaugucaucuugcuau

SEQ ID NO: 804738 - RNA, 19 nt, Artificial Sequence
  Description of Artificial Sequence: Synthetic oligonucleotide
  Sense strand starting at position 3661 of SEQ ID NO: 587606
auaugcugucagugggaaa

SEQ ID NO: 804739 - RNA, 19 nt, Artificial Sequence
  Description of Artificial Sequence: Synthetic oligonucleotide
  Antisense strand to SEQ ID NO: 804738
uuucccacugacagcauau

SEQ ID NO: 804740 - RNA, 19 nt, Artificial Sequence
  Description of Artificial Sequence: Synthetic oligonucleotide
  Sense strand starting at position 3764 of SEQ ID NO: 587606
cagacaugacuacgucaau

SEQ ID NO: 804741 - RNA, 19 nt, Artificial Sequence
  Description of Artificial Sequence: Synthetic oligonucleotide
  Antisense strand to SEQ ID NO: 804740
auugacguagucaugucug

SEQ ID NO: 804742 - RNA, 19 nt, Artificial Sequence
  Description of Artificial Sequence: Synthetic oligonucleotide
  Sense strand starting at position 3765 of SEQ ID NO: 587606
agacaugacuacgucaaua

SEQ ID NO: 804743 - RNA, 19 nt, Artificial Sequence
  Description of Artificial Sequence: Synthetic oligonucleotide
  Antisense strand to SEQ ID NO: 804742
uauugacguagucaugucu

SEQ ID NO: 804744 - RNA, 19 nt, Artificial Sequence
  Description of Artificial Sequence: Synthetic oligonucleotide
  Sense strand starting at position 3767 of SEQ ID NO: 587606
acaugacuacgucaauauc

SEQ ID NO: 804745 - RNA, 19 nt, Artificial Sequence
  Description of Artificial Sequence: Synthetic oligonucleotide
  Antisense strand to SEQ ID NO: 804744
gauauugacguagucaugu

SEQ ID NO: 804746 - RNA, 19 nt, Artificial Sequence
  Description of Artificial Sequence: Synthetic oligonucleotide
  Sense strand starting at position 3983 of SEQ ID NO: 587606
gagggacauuaccaaauga

SEQ ID NO: 804747 - RNA, 19 nt, Artificial Sequence
  Description of Artificial Sequence: Synthetic oligonucleotide
  Antisense strand to SEQ ID NO: 804746
ucauuugguaaugucccuc

SEQ ID NO: 804748 - RNA, 19 nt, Artificial Sequence
  Description of Artificial Sequence: Synthetic oligonucleotide
  Sense strand starting at position 51 of SEQ ID NO: 587607
aggcuugcagaaugaauga

SEQ ID NO: 804749 - RNA, 19 nt, Artificial Sequence
  Description of Artificial Sequence: Synthetic oligonucleotide
  Antisense strand to SEQ ID NO: 804748
ucauucauucugcaagccu

SEQ ID NO: 804750 - RNA, 19 nt, Artificial Sequence
  Description of Artificial Sequence: Synthetic oligonucleotide
  Sense strand starting at position 153 of SEQ ID NO: 587607
ugucccuuaucagaggguu

SEQ ID NO: 804751 - RNA, 19 nt, Artificial Sequence
  Description of Artificial Sequence: Synthetic oligonucleotide
  Antisense strand to SEQ ID NO: 804750
aacccucugauaagggaca

SEQ ID NO: 804752 - RNA, 19 nt, Artificial Sequence
  Description of Artificial Sequence: Synthetic oligonucleotide
  Sense strand starting at position 537 of SEQ ID NO: 587607
gggagauugugcuguccau

SEQ ID NO: 804753 - RNA, 19 nt, Artificial Sequence
  Description of Artificial Sequence: Synthetic oligonucleotide
  Antisense strand to SEQ ID NO: 804752
auggacagcacaaucuccc

SEQ ID NO: 804754 - RNA, 19 nt, Artificial Sequence
  Description of Artificial Sequence: Synthetic oligonucleotide
  Sense strand starting at position 541 of SEQ ID NO: 587607
gauugugcuguccauguau

SEQ ID NO: 804755 - RNA, 19 nt, Artificial Sequence
  Description of Artificial Sequence: Synthetic oligonucleotide
  Antisense strand to SEQ ID NO: 804754
auacauggacagcacaauc

SEQ ID NO: 804756 - RNA, 19 nt, Artificial Sequence
  Description of Artificial Sequence: Synthetic oligonucleotide
  Sense strand starting at position 552 of SEQ ID NO: 587607
ccauguauggcagagagca

SEQ ID NO: 804757 - RNA, 19 nt, Artificial Sequence
  Description of Artificial Sequence: Synthetic oligonucleotide
  Antisense strand to SEQ ID NO: 804756
ugcucucugccauacaugg

SEQ ID NO: 804758 - RNA, 19 nt, Artificial Sequence
  Description of Artificial Sequence: Synthetic oligonucleotide
  Sense strand starting at position 767 of SEQ ID NO: 587607
ggcagaggcuccugugaug

SEQ ID NO: 804759 - RNA, 19 nt, Artificial Sequence
  Description of Artificial Sequence: Synthetic oligonucleotide
  Antisense strand to SEQ ID NO: 804758
caucacaggagccucugcc

SEQ ID NO: 804760 - RNA, 19 nt, Artificial Sequence
  Description of Artificial Sequence: Synthetic oligonucleotide
  Sense strand starting at position 822 of SEQ ID NO: 587607
uccaguccugaugguuaca

SEQ ID NO: 804761 - RNA, 19 nt, Artificial Sequence
  Description of Artificial Sequence: Synthetic oligonucleotide
  Antisense strand to SEQ ID NO: 804760
uguaaccaucaggacugga

SEQ ID NO: 804762 - RNA, 19 nt, Artificial Sequence
  Description of Artificial Sequence: Synthetic oligonucleotide
  Sense strand starting at position 824 of SEQ ID NO: 587607
caguccugaugguuacaaa

SEQ ID NO: 804763 - RNA, 19 nt, Artificial Sequence
  Description of Artificial Sequence: Synthetic oligonucleotide
  Antisense strand to SEQ ID NO: 804762
uuuguaaccaucaggacug

SEQ ID NO: 804764 - RNA, 19 nt, Artificial Sequence
  Description of Artificial Sequence: Synthetic oligonucleotide
  Sense strand starting at position 842 of SEQ ID NO: 587607
aggccuucuccagguuaag

SEQ ID NO: 804765 - RNA, 19 nt, Artificial Sequence
  Description of Artificial Sequence: Synthetic oligonucleotide
  Antisense strand to SEQ ID NO: 804764
cuuaaccuggagaaggccu

SEQ ID NO: 804766 - RNA, 19 nt, Artificial Sequence
  Description of Artificial Sequence: Synthetic oligonucleotide
  Sense strand starting at position 1697 of SEQ ID NO: 587607
ggcugugcauccugagaag

SEQ ID NO: 804767 - RNA, 19 nt, Artificial Sequence
  Description of Artificial Sequence: Synthetic oligonucleotide
  Antisense strand to SEQ ID NO: 804766
cuucucaggaugcacagcc

SEQ ID NO: 804768 - RNA, 19 nt, Artificial Sequence
  Description of Artificial Sequence: Synthetic oligonucleotide
  Sense strand starting at position 1700 of SEQ ID NO: 587607
ugugcauccugagaagugu

SEQ ID NO: 804769 - RNA, 19 nt, Artificial Sequence
  Description of Artificial Sequence: Synthetic oligonucleotide
  Antisense strand to SEQ ID NO: 804768
acacuucucaggaugcaca

SEQ ID NO: 804770 - RNA, 19 nt, Artificial Sequence
  Description of Artificial Sequence: Synthetic oligonucleotide
  Sense strand starting at position 1867 of SEQ ID NO: 587607
gugguugggcuagagugau

SEQ ID NO: 804771 - RNA, 19 nt, Artificial Sequence
  Description of Artificial Sequence: Synthetic oligonucleotide
  Antisense strand to SEQ ID NO: 804770
aucacucuagcccaaccac

SEQ ID NO: 804772 - RNA, 19 nt, Artificial Sequence
  Description of Artificial Sequence: Synthetic oligonucleotide
  Sense strand starting at position 2182 of SEQ ID NO: 587607
ggugucaucucaugagcca

SEQ ID NO: 804773 - RNA, 19 nt, Artificial Sequence
  Description of Artificial Sequence: Synthetic oligonucleotide
  Antisense strand to SEQ ID NO: 804772
uggcucaugagaugacacc

SEQ ID NO: 804774 - RNA, 19 nt, Artificial Sequence
  Description of Artificial Sequence: Synthetic oligonucleotide
  Sense strand starting at position 2183 of SEQ ID NO: 587607
gugucaucucaugagccau

SEQ ID NO: 804775 - RNA, 19 nt, Artificial Sequence
  Description of Artificial Sequence: Synthetic oligonucleotide
  Antisense strand to SEQ ID NO: 804774
auggcucaugagaugacac

SEQ ID NO: 804776 - RNA, 19 nt, Artificial Sequence
  Description of Artificial Sequence: Synthetic oligonucleotide
  Sense strand starting at position 2220 of SEQ ID NO: 587607
uagggauagcccuggcuga

SEQ ID NO: 804777 - RNA, 19 nt, Artificial Sequence
  Description of Artificial Sequence: Synthetic oligonucleotide
  Antisense strand to SEQ ID NO: 804776
ucagccagggcuaucccua

SEQ ID NO: 804778 - RNA, 19 nt, Artificial Sequence
  Description of Artificial Sequence: Synthetic oligonucleotide
  Sense strand starting at position 2233 of SEQ ID NO: 587607
ggcugacaggauugaggau

SEQ ID NO: 804779 - RNA, 19 nt, Artificial Sequence
  Description of Artificial Sequence: Synthetic oligonucleotide
  Antisense strand to SEQ ID NO: 804778
auccucaauccugucagcc

SEQ ID NO: 804780 - RNA, 19 nt, Artificial Sequence
  Description of Artificial Sequence: Synthetic oligonucleotide
  Sense strand starting at position 2493 of SEQ ID NO: 587607
acccuagaaugaguuccau

SEQ ID NO: 804781 - RNA, 19 nt, Artificial Sequence
  Description of Artificial Sequence: Synthetic oligonucleotide
  Antisense strand to SEQ ID NO: 804780
auggaacucauucuagggu

SEQ ID NO: 804782 - RNA, 19 nt, Artificial Sequence
  Description of Artificial Sequence: Synthetic oligonucleotide
  Sense strand starting at position 2497 of SEQ ID NO: 587607
uagaaugaguuccaugaca

SEQ ID NO: 804783 - RNA, 19 nt, Artificial Sequence
  Description of Artificial Sequence: Synthetic oligonucleotide
  Antisense strand to SEQ ID NO: 804782
ugucauggaacucauucua

SEQ ID NO: 804784 - RNA, 19 nt, Artificial Sequence
  Description of Artificial Sequence: Synthetic oligonucleotide
  Sense strand starting at position 2525 of SEQ ID NO: 587607
ccaaauaagccagagcuuu

SEQ ID NO: 804785 - RNA, 19 nt, Artificial Sequence
  Description of Artificial Sequence: Synthetic oligonucleotide
  Antisense strand to SEQ ID NO: 804784
aaagcucuggcuuauuugg

SEQ ID NO: 804786 - RNA, 19 nt, Artificial Sequence
  Description of Artificial Sequence: Synthetic oligonucleotide
  Sense strand starting at position 2605 of SEQ ID NO: 587607
cugucauccguacagggaa

SEQ ID NO: 804787 - RNA, 19 nt, Artificial Sequence
  Description of Artificial Sequence: Synthetic oligonucleotide
  Antisense strand to SEQ ID NO: 804786
uucccuguacggaugacag

SEQ ID NO: 804788 - RNA, 19 nt, Artificial Sequence
  Description of Artificial Sequence: Synthetic oligonucleotide
  Sense strand starting at position 2618 of SEQ ID NO: 587607
agggaaucauggccauugu

SEQ ID NO: 804789 - RNA, 19 nt, Artificial Sequence
  Description of Artificial Sequence: Synthetic oligonucleotide
  Antisense strand to SEQ ID NO: 804788
acaauggccaugauucccu

SEQ ID NO: 804790 - RNA, 19 nt, Artificial Sequence
  Description of Artificial Sequence: Synthetic oligonucleotide
  Sense strand starting at position 2632 of SEQ ID NO: 587607
auugucacacugugacuaa

SEQ ID NO: 804791 - RNA, 19 nt, Artificial Sequence
  Description of Artificial Sequence: Synthetic oligonucleotide
  Antisense strand to SEQ ID NO: 804790
uuagucacagugugacaau

SEQ ID NO: 804792 - RNA, 19 nt, Artificial Sequence
  Description of Artificial Sequence: Synthetic oligonucleotide
  Sense strand starting at position 2655 of SEQ ID NO: 587607
ccaggaucugugcagagga

SEQ ID NO: 804793 - RNA, 19 nt, Artificial Sequence
  Description of Artificial Sequence: Synthetic oligonucleotide
  Antisense strand to SEQ ID NO: 804792
uccucugcacagauccugg

SEQ ID NO: 804794 - RNA, 19 nt, Artificial Sequence
  Description of Artificial Sequence: Synthetic oligonucleotide
  Sense strand starting at position 3371 of SEQ ID NO: 587607
caaugcgaaucuguugauu

SEQ ID NO: 804795 - RNA, 19 nt, Artificial Sequence
  Description of Artificial Sequence: Synthetic oligonucleotide
  Antisense strand to SEQ ID NO: 804794
aaucaacagauucgcauug

SEQ ID NO: 804796 - RNA, 19 nt, Artificial Sequence
  Description of Artificial Sequence: Synthetic oligonucleotide
  Sense strand starting at position 3390 of SEQ ID NO: 587607
uauuuacggcucggugaga

SEQ ID NO: 804797 - RNA, 19 nt, Artificial Sequence
  Description of Artificial Sequence: Synthetic oligonucleotide
  Antisense strand to SEQ ID NO: 804796
ucucaccgagccguaaaua

SEQ ID NO: 804798 - RNA, 19 nt, Artificial Sequence
  Description of Artificial Sequence: Synthetic oligonucleotide
  Sense strand starting at position 3808 of SEQ ID NO: 587607
cccagaguagugggagaaa

SEQ ID NO: 804799 - RNA, 19 nt, Artificial Sequence
  Description of Artificial Sequence: Synthetic oligonucleotide
  Antisense strand to SEQ ID NO: 804798
uuucucccacuacucuggg

SEQ ID NO: 804800 - RNA, 19 nt, Artificial Sequence
  Description of Artificial Sequence: Synthetic oligonucleotide
  Sense strand starting at position 3927 of SEQ ID NO: 587607
ugacgaaucagaugcuaca

SEQ ID NO: 804801 - RNA, 19 nt, Artificial Sequence
  Description of Artificial Sequence: Synthetic oligonucleotide
  Antisense strand to SEQ ID NO: 804800
uguagcaucugauucguca

SEQ ID NO: 804802 - RNA, 19 nt, Artificial Sequence
  Description of Artificial Sequence: Synthetic oligonucleotide
  Sense strand starting at position 94 of SEQ ID NO: 587608
guagcagugugucucgaga

SEQ ID NO: 804803 - RNA, 19 nt, Artificial Sequence
  Description of Artificial Sequence: Synthetic oligonucleotide
  Antisense strand to SEQ ID NO: 804802
ucucgagacacacugcuac

SEQ ID NO: 804804 - RNA, 19 nt, Artificial Sequence
  Description of Artificial Sequence: Synthetic oligonucleotide
  Sense strand starting at position 100 of SEQ ID NO: 587608
gugugucucgagagcuuug

SEQ ID NO: 804805 - RNA, 19 nt, Artificial Sequence
  Description of Artificial Sequence: Synthetic oligonucleotide
  Antisense strand to SEQ ID NO: 804804
caaagcucucgagacacac

SEQ ID NO: 804806 - RNA, 19 nt, Artificial Sequence
  Description of Artificial Sequence: Synthetic oligonucleotide
  Sense strand starting at position 105 of SEQ ID NO: 587608
ucucgagagcuuuguucuu

SEQ ID NO: 804807 - RNA, 19 nt, Artificial Sequence
  Description of Artificial Sequence: Synthetic oligonucleotide
  Antisense strand to SEQ ID NO: 804806
aagaacaaagcucucgaga

SEQ ID NO: 804808 - RNA, 19 nt, Artificial Sequence
  Description of Artificial Sequence: Synthetic oligonucleotide
  Sense strand starting at position 107 of SEQ ID NO: 587608
ucgagagcuuuguucuuga

SEQ ID NO: 804809 - RNA, 19 nt, Artificial Sequence
  Description of Artificial Sequence: Synthetic oligonucleotide
  Antisense strand to SEQ ID NO: 804808
ucaagaacaaagcucucga

SEQ ID NO: 804810 - RNA, 19 nt, Artificial Sequence
  Description of Artificial Sequence: Synthetic oligonucleotide
  Sense strand starting at position 110 of SEQ ID NO: 587608
agagcuuuguucuugagug

SEQ ID NO: 804811 - RNA, 19 nt, Artificial Sequence
  Description of Artificial Sequence: Synthetic oligonucleotide
  Antisense strand to SEQ ID NO: 804810
cacucaagaacaaagcucu

SEQ ID NO: 804812 - RNA, 19 nt, Artificial Sequence
  Description of Artificial Sequence: Synthetic oligonucleotide
  Sense strand starting at position 111 of SEQ ID NO: 587608
gagcuuuguucuugagugg

SEQ ID NO: 804813 - RNA, 19 nt, Artificial Sequence
  Description of Artificial Sequence: Synthetic oligonucleotide
  Antisense strand to SEQ ID NO: 804812
ccacucaagaacaaagcuc

SEQ ID NO: 804814 - RNA, 19 nt, Artificial Sequence
  Description of Artificial Sequence: Synthetic oligonucleotide
  Sense strand starting at position 265 of SEQ ID NO: 587608
uggaguagccaucauacac

SEQ ID NO: 804815 - RNA, 19 nt, Artificial Sequence
  Description of Artificial Sequence: Synthetic oligonucleotide
  Antisense strand to SEQ ID NO: 804814
guguaugauggcuacucca

SEQ ID NO: 804816 - RNA, 19 nt, Artificial Sequence
  Description of Artificial Sequence: Synthetic oligonucleotide
  Sense strand starting at position 626 of SEQ ID NO: 587608
agcaguugucuccguugua

SEQ ID NO: 804817 - RNA, 19 nt, Artificial Sequence
  Description of Artificial Sequence: Synthetic oligonucleotide
  Antisense strand to SEQ ID NO: 804816
uacaacggagacaacugcu

SEQ ID NO: 804818 - RNA, 19 nt, Artificial Sequence
  Description of Artificial Sequence: Synthetic oligonucleotide
  Sense strand starting at position 627 of SEQ ID NO: 587608
gcaguugucuccguuguag

SEQ ID NO: 804819 - RNA, 19 nt, Artificial Sequence
  Description of Artificial Sequence: Synthetic oligonucleotide
  Antisense strand to SEQ ID NO: 804818
cuacaacggagacaacugc

SEQ ID NO: 804820 - RNA, 19 nt, Artificial Sequence
  Description of Artificial Sequence: Synthetic oligonucleotide
  Sense strand starting at position 800 of SEQ ID NO: 587608
ugggaauucuagccuccuu

SEQ ID NO: 804821 - RNA, 19 nt, Artificial Sequence
  Description of Artificial Sequence: Synthetic oligonucleotide
  Antisense strand to SEQ ID NO: 804820
aaggaggcuagaauuccca

SEQ ID NO: 804822 - RNA, 19 nt, Artificial Sequence
  Description of Artificial Sequence: Synthetic oligonucleotide
  Sense strand starting at position 1201 of SEQ ID NO: 587608
gugggugucagggaagguu

SEQ ID NO: 804823 - RNA, 19 nt, Artificial Sequence
  Description of Artificial Sequence: Synthetic oligonucleotide
  Antisense strand to SEQ ID NO: 804822
aaccuucccugacacccac

SEQ ID NO: 804824 - RNA, 19 nt, Artificial Sequence
  Description of Artificial Sequence: Synthetic oligonucleotide
  Sense strand starting at position 1585 of SEQ ID NO: 587608
gguuccuucuuccagaaga

SEQ ID NO: 804825 - RNA, 19 nt, Artificial Sequence
  Description of Artificial Sequence: Synthetic oligonucleotide
  Antisense strand to SEQ ID NO: 804824
ucuucuggaagaaggaacc

SEQ ID NO: 804826 - RNA, 19 nt, Artificial Sequence
  Description of Artificial Sequence: Synthetic oligonucleotide
  Sense strand starting at position 1614 of SEQ ID NO: 587608
ccugguuaggguugucuga

SEQ ID NO: 804827 - RNA, 19 nt, Artificial Sequence
  Description of Artificial Sequence: Synthetic oligonucleotide
  Antisense strand to SEQ ID NO: 804826
ucagacaacccuaaccagg

SEQ ID NO: 804828 - RNA, 19 nt, Artificial Sequence
  Description of Artificial Sequence: Synthetic oligonucleotide
  Sense strand starting at position 1616 of SEQ ID NO: 587608
ugguuaggguugucugagu

SEQ ID NO: 804829 - RNA, 19 nt, Artificial Sequence
  Description of Artificial Sequence: Synthetic oligonucleotide
  Antisense strand to SEQ ID NO: 804828
acucagacaacccuaacca

SEQ ID NO: 804830 - RNA, 19 nt, Artificial Sequence
  Description of Artificial Sequence: Synthetic oligonucleotide
  Sense strand starting at position 1627 of SEQ ID NO: 587608
gucugaguccucggccacu

SEQ ID NO: 804831 - RNA, 19 nt, Artificial Sequence
  Description of Artificial Sequence: Synthetic oligonucleotide
  Antisense strand to SEQ ID NO: 804830
aguggccgaggacucagac

SEQ ID NO: 804832 - RNA, 19 nt, Artificial Sequence
  Description of Artificial Sequence: Synthetic oligonucleotide
  Sense strand starting at position 1759 of SEQ ID NO: 587608
ugguguuuggaacgggaau

SEQ ID NO: 804833 - RNA, 19 nt, Artificial Sequence
  Description of Artificial Sequence: Synthetic oligonucleotide
  Antisense strand to SEQ ID NO: 804832
auucccguuccaaacacca

SEQ ID NO: 804834 - RNA, 19 nt, Artificial Sequence
  Description of Artificial Sequence: Synthetic oligonucleotide
  Sense strand starting at position 1889 of SEQ ID NO: 587608
uuacgccuucccgagaaca

SEQ ID NO: 804835 - RNA, 19 nt, Artificial Sequence
  Description of Artificial Sequence: Synthetic oligonucleotide
  Antisense strand to SEQ ID NO: 804834
uguucucgggaaggcguaa

SEQ ID NO: 804836 - RNA, 19 nt, Artificial Sequence
  Description of Artificial Sequence: Synthetic oligonucleotide
  Sense strand starting at position 2150 of SEQ ID NO: 587608
gugccugccugagucuaau

SEQ ID NO: 804837 - RNA, 19 nt, Artificial Sequence
  Description of Artificial Sequence: Synthetic oligonucleotide
  Antisense strand to SEQ ID NO: 804836
auuagacucaggcaggcac

SEQ ID NO: 804838 - RNA, 19 nt, Artificial Sequence
  Description of Artificial Sequence: Synthetic oligonucleotide
  Sense strand starting at position 2161 of SEQ ID NO: 587608
agucuaaucguaggcgugu

SEQ ID NO: 804839 - RNA, 19 nt, Artificial Sequence
  Description of Artificial Sequence: Synthetic oligonucleotide
  Antisense strand to SEQ ID NO: 804838
acacgccuacgauuagacu

SEQ ID NO: 804840 - RNA, 19 nt, Artificial Sequence
  Description of Artificial Sequence: Synthetic oligonucleotide
  Sense strand starting at position 2706 of SEQ ID NO: 587608
cgcagugauucccuggcga

SEQ ID NO: 804841 - RNA, 19 nt, Artificial Sequence
  Description of Artificial Sequence: Synthetic oligonucleotide
  Antisense strand to SEQ ID NO: 804840
ucgccagggaaucacugcg

SEQ ID NO: 804842 - RNA, 19 nt, Artificial Sequence
  Description of Artificial Sequence: Synthetic oligonucleotide
  Sense strand starting at position 3033 of SEQ ID NO: 587608
ggucccucucaccaucaua

SEQ ID NO: 804843 - RNA, 19 nt, Artificial Sequence
  Description of Artificial Sequence: Synthetic oligonucleotide
  Antisense strand to SEQ ID NO: 804842
uaugauggugagagggacc

SEQ ID NO: 804844 - RNA, 19 nt, Artificial Sequence
  Description of Artificial Sequence: Synthetic oligonucleotide
  Sense strand starting at position 3087 of SEQ ID NO: 587608
gaauacuuauguuauuggu

SEQ ID NO: 804845 - RNA, 19 nt, Artificial Sequence
  Description of Artificial Sequence: Synthetic oligonucleotide
  Antisense strand to SEQ ID NO: 804844
accaauaacauaaguauuc

SEQ ID NO: 804846 - RNA, 19 nt, Artificial Sequence
  Description of Artificial Sequence: Synthetic oligonucleotide
  Sense strand starting at position 3093 of SEQ ID NO: 587608
uuauguuauugguucuguu

SEQ ID NO: 804847 - RNA, 19 nt, Artificial Sequence
  Description of Artificial Sequence: Synthetic oligonucleotide
  Antisense strand to SEQ ID NO: 804846
aacagaaccaauaacauaa

SEQ ID NO: 804848 - RNA, 19 nt, Artificial Sequence
  Description of Artificial Sequence: Synthetic oligonucleotide
  Sense strand starting at position 3132 of SEQ ID NO: 587608
uuucauggguccgaaaguu

SEQ ID NO: 804849 - RNA, 19 nt, Artificial Sequence
  Description of Artificial Sequence: Synthetic oligonucleotide
  Antisense strand to SEQ ID NO: 804848
aacuuucggacccaugaaa

SEQ ID NO: 804850 - RNA, 19 nt, Artificial Sequence
  Description of Artificial Sequence: Synthetic oligonucleotide
  Sense strand starting at position 3158 of SEQ ID NO: 587608
uuuccaaugugagaaagaa

SEQ ID NO: 804851 - RNA, 19 nt, Artificial Sequence
  Description of Artificial Sequence: Synthetic oligonucleotide
  Antisense strand to SEQ ID NO: 804850
uucuuucucacauuggaaa

SEQ ID NO: 804852 - RNA, 19 nt, Artificial Sequence
  Description of Artificial Sequence: Synthetic oligonucleotide
  Sense strand starting at position 3315 of SEQ ID NO: 587608
gccaguuaguuguucuguu

SEQ ID NO: 804853 - RNA, 19 nt, Artificial Sequence
  Description of Artificial Sequence: Synthetic oligonucleotide
  Antisense strand to SEQ ID NO: 804852
aacagaacaacuaacuggc

SEQ ID NO: 804854 - RNA, 19 nt, Artificial Sequence
  Description of Artificial Sequence: Synthetic oligonucleotide
  Sense strand starting at position 3316 of SEQ ID NO: 587608
ccaguuaguuguucuguuu

SEQ ID NO: 804855 - RNA, 19 nt, Artificial Sequence
  Description of Artificial Sequence: Synthetic oligonucleotide
  Antisense strand to SEQ ID NO: 804854
aaacagaacaacuaacugg

SEQ ID NO: 804856 - RNA, 19 nt, Artificial Sequence
  Description of Artificial Sequence: Synthetic oligonucleotide
  Sense strand starting at position 3323 of SEQ ID NO: 587608
guuguucuguuugccgaga

SEQ ID NO: 804857 - RNA, 19 nt, Artificial Sequence
  Description of Artificial Sequence: Synthetic oligonucleotide
  Antisense strand to SEQ ID NO: 804856
ucucggcaaacagaacaac

SEQ ID NO: 804858 - RNA, 19 nt, Artificial Sequence
  Description of Artificial Sequence: Synthetic oligonucleotide
  Sense strand starting at position 3328 of SEQ ID NO: 587608
ucuguuugccgagagguaa

SEQ ID NO: 804859 - RNA, 19 nt, Artificial Sequence
  Description of Artificial Sequence: Synthetic oligonucleotide
  Antisense strand to SEQ ID NO: 804858
uuaccucucggcaaacaga

SEQ ID NO: 804860 - RNA, 19 nt, Artificial Sequence
  Description of Artificial Sequence: Synthetic oligonucleotide
  Sense strand starting at position 3401 of SEQ ID NO: 587608
gcagacguuccagaauauu

SEQ ID NO: 804861 - RNA, 19 nt, Artificial Sequence
  Description of Artificial Sequence: Synthetic oligonucleotide
  Antisense strand to SEQ ID NO: 804860
aauauucuggaacgucugc

SEQ ID NO: 804862 - RNA, 19 nt, Artificial Sequence
  Description of Artificial Sequence: Synthetic oligonucleotide
  Sense strand starting at position 3434 of SEQ ID NO: 587608
cucacacucuggugggaua

SEQ ID NO: 804863 - RNA, 19 nt, Artificial Sequence
  Description of Artificial Sequence: Synthetic oligonucleotide
  Antisense strand to SEQ ID NO: 804862
uaucccaccagagugugag

SEQ ID NO: 804864 - RNA, 19 nt, Artificial Sequence
  Description of Artificial Sequence: Synthetic oligonucleotide
  Sense strand starting at position 3484 of SEQ ID NO: 587608
cagaguaugucgcggucuu

SEQ ID NO: 804865 - RNA, 19 nt, Artificial Sequence
  Description of Artificial Sequence: Synthetic oligonucleotide
  Antisense strand to SEQ ID NO: 804864
aagaccgcgacauacucug

SEQ ID NO: 804866 - RNA, 19 nt, Artificial Sequence
  Description of Artificial Sequence: Synthetic oligonucleotide
  Sense strand starting at position 3486 of SEQ ID NO: 587608
gaguaugucgcggucuuca

SEQ ID NO: 804867 - RNA, 19 nt, Artificial Sequence
  Description of Artificial Sequence: Synthetic oligonucleotide
  Antisense strand to SEQ ID NO: 804866
ugaagaccgcgacauacuc

SEQ ID NO: 804868 - RNA, 19 nt, Artificial Sequence
  Description of Artificial Sequence: Synthetic oligonucleotide
  Sense strand starting at position 3505 of SEQ ID NO: 587608
gccucagaccacgaugaau

SEQ ID NO: 804869 - RNA, 19 nt, Artificial Sequence
  Description of Artificial Sequence: Synthetic oligonucleotide
  Antisense strand to SEQ ID NO: 804868
auucaucguggucugaggc

SEQ ID NO: 804870 - RNA, 19 nt, Artificial Sequence
  Description of Artificial Sequence: Synthetic oligonucleotide
  Sense strand starting at position 3507 of SEQ ID NO: 587608
cucagaccacgaugaauua

SEQ ID NO: 804871 - RNA, 19 nt, Artificial Sequence
  Description of Artificial Sequence: Synthetic oligonucleotide
  Antisense strand to SEQ ID NO: 804870
uaauucaucguggucugag

SEQ ID NO: 804872 - RNA, 19 nt, Artificial Sequence
  Description of Artificial Sequence: Synthetic oligonucleotide
  Sense strand starting at position 3518 of SEQ ID NO: 587608
augaauuaauacggaugaa

SEQ ID NO: 804873 - RNA, 19 nt, Artificial Sequence
  Description of Artificial Sequence: Synthetic oligonucleotide
  Antisense strand to SEQ ID NO: 804872
uucauccguauuaauucau

SEQ ID NO: 804874 - RNA, 19 nt, Artificial Sequence
  Description of Artificial Sequence: Synthetic oligonucleotide
  Sense strand starting at position 3615 of SEQ ID NO: 587608
ggaccuuuauguuaaagga

SEQ ID NO: 804875 - RNA, 19 nt, Artificial Sequence
  Description of Artificial Sequence: Synthetic oligonucleotide
  Antisense strand to SEQ ID NO: 804874
uccuuuaacauaaaggucc

SEQ ID NO: 804876 - RNA, 19 nt, Artificial Sequence
  Description of Artificial Sequence: Synthetic oligonucleotide
  Sense strand starting at position 3734 of SEQ ID NO: 587608
gauaguugauuaccuaaag

SEQ ID NO: 804877 - RNA, 19 nt, Artificial Sequence
  Description of Artificial Sequence: Synthetic oligonucleotide
  Antisense strand to SEQ ID NO: 804876
cuuuagguaaucaacuauc

SEQ ID NO: 804878 - RNA, 19 nt, Artificial Sequence
  Description of Artificial Sequence: Synthetic oligonucleotide
  Sense strand starting at position 3775 of SEQ ID NO: 587608
aggaauuuauagcaaaugu

SEQ ID NO: 804879 - RNA, 19 nt, Artificial Sequence
  Description of Artificial Sequence: Synthetic oligonucleotide
  Antisense strand to SEQ ID NO: 804878
acauuugcuauaaauuccu

SEQ ID NO: 804880 - RNA, 19 nt, Artificial Sequence
  Description of Artificial Sequence: Synthetic oligonucleotide
  Sense strand starting at position 3805 of SEQ ID NO: 587608
guaugauaauaguagugca

SEQ ID NO: 804881 - RNA, 19 nt, Artificial Sequence
  Description of Artificial Sequence: Synthetic oligonucleotide
  Antisense strand to SEQ ID NO: 804880
ugcacuacuauuaucauac

SEQ ID NO: 804882 - RNA, 19 nt, Artificial Sequence
  Description of Artificial Sequence: Synthetic oligonucleotide
  Sense strand starting at position 319 of SEQ ID NO: 587609
agcaguugucuccguugua

SEQ ID NO: 804883 - RNA, 19 nt, Artificial Sequence
  Description of Artificial Sequence: Synthetic oligonucleotide
  Antisense strand to SEQ ID NO: 804882
uacaacggagacaacugcu

SEQ ID NO: 804884 - RNA, 19 nt, Artificial Sequence
  Description of Artificial Sequence: Synthetic oligonucleotide
  Sense strand starting at position 320 of SEQ ID NO: 587609
gcaguugucuccguuguag

SEQ ID NO: 804885 - RNA, 19 nt, Artificial Sequence
  Description of Artificial Sequence: Synthetic oligonucleotide
  Antisense strand to SEQ ID NO: 804884
cuacaacggagacaacugc

SEQ ID NO: 804886 - RNA, 19 nt, Artificial Sequence
  Description of Artificial Sequence: Synthetic oligonucleotide
  Sense strand starting at position 493 of SEQ ID NO: 587609
ugggaauucuagccuccuu

SEQ ID NO: 804887 - RNA, 19 nt, Artificial Sequence
  Description of Artificial Sequence: Synthetic oligonucleotide
  Antisense strand to SEQ ID NO: 804886
aaggaggcuagaauuccca

SEQ ID NO: 804888 - RNA, 19 nt, Artificial Sequence
  Description of Artificial Sequence: Synthetic oligonucleotide
  Sense strand starting at position 894 of SEQ ID NO: 587609
gugggugucagggaagguu

SEQ ID NO: 804889 - RNA, 19 nt, Artificial Sequence
  Description of Artificial Sequence: Synthetic oligonucleotide
  Antisense strand to SEQ ID NO: 804888
aaccuucccugacacccac

SEQ ID NO: 804890 - RNA, 19 nt, Artificial Sequence
  Description of Artificial Sequence: Synthetic oligonucleotide
  Sense strand starting at position 1278 of SEQ ID NO: 587609
gguuccuucuuccagaaga

SEQ ID NO: 804891 - RNA, 19 nt, Artificial Sequence
  Description of Artificial Sequence: Synthetic oligonucleotide
  Antisense strand to SEQ ID NO: 804890
ucuucuggaagaaggaacc

SEQ ID NO: 804892 - RNA, 19 nt, Artificial Sequence
  Description of Artificial Sequence: Synthetic oligonucleotide
  Sense strand starting at position 1307 of SEQ ID NO: 587609
ccugguuaggguugucuga

SEQ ID NO: 804893 - RNA, 19 nt, Artificial Sequence
  Description of Artificial Sequence: Synthetic oligonucleotide
  Antisense strand to SEQ ID NO: 804892
ucagacaacccuaaccagg

SEQ ID NO: 804894 - RNA, 19 nt, Artificial Sequence
  Description of Artificial Sequence: Synthetic oligonucleotide
  Sense strand starting at position 1309 of SEQ ID NO: 587609
ugguuaggguugucugagu

SEQ ID NO: 804895 - RNA, 19 nt, Artificial Sequence
  Description of Artificial Sequence: Synthetic oligonucleotide
  Antisense strand to SEQ ID NO: 804894
acucagacaacccuaacca

SEQ ID NO: 804896 - RNA, 19 nt, Artificial Sequence
  Description of Artificial Sequence: Synthetic oligonucleotide
  Sense strand starting at position 1320 of SEQ ID NO: 587609
gucugaguccucggccacu

SEQ ID NO: 804897 - RNA, 19 nt, Artificial Sequence
  Description of Artificial Sequence: Synthetic oligonucleotide
  Antisense strand to SEQ ID NO: 804896
aguggccgaggacucagac

SEQ ID NO: 804898 - RNA, 19 nt, Artificial Sequence
  Description of Artificial Sequence: Synthetic oligonucleotide
  Sense strand starting at position 1452 of SEQ ID NO: 587609
ugguguuuggaacgggaau

SEQ ID NO: 804899 - RNA, 19 nt, Artificial Sequence
  Description of Artificial Sequence: Synthetic oligonucleotide
  Antisense strand to SEQ ID NO: 804898
auucccguuccaaacacca

SEQ ID NO: 804900 - RNA, 19 nt, Artificial Sequence
  Description of Artificial Sequence: Synthetic oligonucleotide
  Sense strand starting at position 1582 of SEQ ID NO: 587609
uuacgccuucccgagaaca

SEQ ID NO: 804901 - RNA, 19 nt, Artificial Sequence
  Description of Artificial Sequence: Synthetic oligonucleotide
  Antisense strand to SEQ ID NO: 804900
uguucucgggaaggcguaa

SEQ ID NO: 804902 - RNA, 19 nt, Artificial Sequence
  Description of Artificial Sequence: Synthetic oligonucleotide
  Sense strand starting at position 1843 of SEQ ID NO: 587609
gugccugccugagucuaau

SEQ ID NO: 804903 - RNA, 19 nt, Artificial Sequence
  Description of Artificial Sequence: Synthetic oligonucleotide
  Antisense strand to SEQ ID NO: 804902
auuagacucaggcaggcac

SEQ ID NO: 804904 - RNA, 19 nt, Artificial Sequence
  Description of Artificial Sequence: Synthetic oligonucleotide
  Sense strand starting at position 1854 of SEQ ID NO: 587609
agucuaaucguaggcgugu

SEQ ID NO: 804905 - RNA, 19 nt, Artificial Sequence
  Description of Artificial Sequence: Synthetic oligonucleotide
  Antisense strand to SEQ ID NO: 804904
acacgccuacgauuagacu

SEQ ID NO: 804906 - RNA, 19 nt, Artificial Sequence
  Description of Artificial Sequence: Synthetic oligonucleotide
  Sense strand starting at position 2399 of SEQ ID NO: 587609
cgcagugauucccuggcga

SEQ ID NO: 804907 - RNA, 19 nt, Artificial Sequence
  Description of Artificial Sequence: Synthetic oligonucleotide
  Antisense strand to SEQ ID NO: 804906
ucgccagggaaucacugcg

SEQ ID NO: 804908 - RNA, 19 nt, Artificial Sequence
  Description of Artificial Sequence: Synthetic oligonucleotide
  Sense strand starting at position 2726 of SEQ ID NO: 587609
ggucccucucaccaucaua

SEQ ID NO: 804909 - RNA, 19 nt, Artificial Sequence
  Description of Artificial Sequence: Synthetic oligonucleotide
  Antisense strand to SEQ ID NO: 804908
uaugauggugagagggacc

SEQ ID NO: 804910 - RNA, 19 nt, Artificial Sequence
  Description of Artificial Sequence: Synthetic oligonucleotide
  Sense strand starting at position 2780 of SEQ ID NO: 587609
gaauacuuauguuauuggu

SEQ ID NO: 804911 - RNA, 19 nt, Artificial Sequence
  Description of Artificial Sequence: Synthetic oligonucleotide
  Antisense strand to SEQ ID NO: 804910
accaauaacauaaguauuc

SEQ ID NO: 804912 - RNA, 19 nt, Artificial Sequence
  Description of Artificial Sequence: Synthetic oligonucleotide
  Sense strand starting at position 2786 of SEQ ID NO: 587609
uuauguuauugguucuguu

SEQ ID NO: 804913 - RNA, 19 nt, Artificial Sequence
  Description of Artificial Sequence: Synthetic oligonucleotide
  Antisense strand to SEQ ID NO: 804912
aacagaaccaauaacauaa

SEQ ID NO: 804914 - RNA, 19 nt, Artificial Sequence
  Description of Artificial Sequence: Synthetic oligonucleotide
  Sense strand starting at position 2851 of SEQ ID NO: 587609
uuuccaaugugagaaagaa

SEQ ID NO: 804915 - RNA, 19 nt, Artificial Sequence
  Description of Artificial Sequence: Synthetic oligonucleotide
  Antisense strand to SEQ ID NO: 804914
uucuuucucacauuggaaa

SEQ ID NO: 804916 - RNA, 19 nt, Artificial Sequence
  Description of Artificial Sequence: Synthetic oligonucleotide
  Sense strand starting at position 3008 of SEQ ID NO: 587609
gccaguuaguuguucuguu

SEQ ID NO: 804917 - RNA, 19 nt, Artificial Sequence
  Description of Artificial Sequence: Synthetic oligonucleotide
  Antisense strand to SEQ ID NO: 804916
aacagaacaacuaacuggc

SEQ ID NO: 804918 - RNA, 19 nt, Artificial Sequence
  Description of Artificial Sequence: Synthetic oligonucleotide
  Sense strand starting at position 3009 of SEQ ID NO: 587609
ccaguuaguuguucuguuu

SEQ ID NO: 804919 - RNA, 19 nt, Artificial Sequence
  Description of Artificial Sequence: Synthetic oligonucleotide
  Antisense strand to SEQ ID NO: 804918
aaacagaacaacuaacugg

SEQ ID NO: 804920 - RNA, 19 nt, Artificial Sequence
  Description of Artificial Sequence: Synthetic oligonucleotide
  Sense strand starting at position 3016 of SEQ ID NO: 587609
guuguucuguuugccgaga

SEQ ID NO: 804921 - RNA, 19 nt, Artificial Sequence
  Description of Artificial Sequence: Synthetic oligonucleotide
  Antisense strand to SEQ ID NO: 804920
ucucggcaaacagaacaac

SEQ ID NO: 804922 - RNA, 19 nt, Artificial Sequence
  Description of Artificial Sequence: Synthetic oligonucleotide
  Sense strand starting at position 3021 of SEQ ID NO: 587609
ucuguuugccgagagguaa

SEQ ID NO: 804923 - RNA, 19 nt, Artificial Sequence
  Description of Artificial Sequence: Synthetic oligonucleotide
  Antisense strand to SEQ ID NO: 804922
uuaccucucggcaaacaga

SEQ ID NO: 804924 - RNA, 19 nt, Artificial Sequence
  Description of Artificial Sequence: Synthetic oligonucleotide
  Sense strand starting at position 3094 of SEQ ID NO: 587609
gcagacguuccagaauauu

SEQ ID NO: 804925 - RNA, 19 nt, Artificial Sequence
  Description of Artificial Sequence: Synthetic oligonucleotide
  Antisense strand to SEQ ID NO: 804924
aauauucuggaacgucugc

SEQ ID NO: 804926 - RNA, 19 nt, Artificial Sequence
  Description of Artificial Sequence: Synthetic oligonucleotide
  Sense strand starting at position 3127 of SEQ ID NO: 587609
cucacacucuggugggaua

SEQ ID NO: 804927 - RNA, 19 nt, Artificial Sequence
  Description of Artificial Sequence: Synthetic oligonucleotide
  Antisense strand to SEQ ID NO: 804926
uaucccaccagagugugag

SEQ ID NO: 804928 - RNA, 19 nt, Artificial Sequence
  Description of Artificial Sequence: Synthetic oligonucleotide
  Sense strand starting at position 3179 of SEQ ID NO: 587609
gaguaugucgcggucuuca

SEQ ID NO: 804929 - RNA, 19 nt, Artificial Sequence
  Description of Artificial Sequence: Synthetic oligonucleotide
  Antisense strand to SEQ ID NO: 804928
ugaagaccgcgacauacuc

SEQ ID NO: 804930 - RNA, 19 nt, Artificial Sequence
  Description of Artificial Sequence: Synthetic oligonucleotide
  Sense strand starting at position 3198 of SEQ ID NO: 587609
gccucagaccacgaugaau

SEQ ID NO: 804931 - RNA, 19 nt, Artificial Sequence
  Description of Artificial Sequence: Synthetic oligonucleotide
  Antisense strand to SEQ ID NO: 804930
auucaucguggucugaggc

SEQ ID NO: 804932 - RNA, 19 nt, Artificial Sequence
  Description of Artificial Sequence: Synthetic oligonucleotide
  Sense strand starting at position 3200 of SEQ ID NO: 587609
cucagaccacgaugaauua

SEQ ID NO: 804933 - RNA, 19 nt, Artificial Sequence
  Description of Artificial Sequence: Synthetic oligonucleotide
  Antisense strand to SEQ ID NO: 804932
uaauucaucguggucugag

SEQ ID NO: 804934 - RNA, 19 nt, Artificial Sequence
  Description of Artificial Sequence: Synthetic oligonucleotide
  Sense strand starting at position 3211 of SEQ ID NO: 587609
augaauuaauacggaugaa

SEQ ID NO: 804935 - RNA, 19 nt, Artificial Sequence
  Description of Artificial Sequence: Synthetic oligonucleotide
  Antisense strand to SEQ ID NO: 804934
uucauccguauuaauucau

SEQ ID NO: 804936 - RNA, 19 nt, Artificial Sequence
  Description of Artificial Sequence: Synthetic oligonucleotide
  Sense strand starting at position 3308 of SEQ ID NO: 587609
ggaccuuuauguuaaagga

SEQ ID NO: 804937 - RNA, 19 nt, Artificial Sequence
  Description of Artificial Sequence: Synthetic oligonucleotide
  Antisense strand to SEQ ID NO: 804936
uccuuuaacauaaaggucc

SEQ ID NO: 804938 - RNA, 19 nt, Artificial Sequence
  Description of Artificial Sequence: Synthetic oligonucleotide
  Sense strand starting at position 3427 of SEQ ID NO: 587609
gauaguugauuaccuaaag

SEQ ID NO: 804939 - RNA, 19 nt, Artificial Sequence
  Description of Artificial Sequence: Synthetic oligonucleotide
  Antisense strand to SEQ ID NO: 804938
cuuuagguaaucaacuauc

SEQ ID NO: 804940 - RNA, 19 nt, Artificial Sequence
  Description of Artificial Sequence: Synthetic oligonucleotide
  Sense strand starting at position 3468 of SEQ ID NO: 587609
aggaauuuauagcaaaugu

SEQ ID NO: 804941 - RNA, 19 nt, Artificial Sequence
  Description of Artificial Sequence: Synthetic oligonucleotide
  Antisense strand to SEQ ID NO: 804940
acauuugcuauaaauuccu

SEQ ID NO: 804942 - RNA, 19 nt, Artificial Sequence
  Description of Artificial Sequence: Synthetic oligonucleotide
  Sense strand starting at position 3498 of SEQ ID NO: 587609
guaugauaauaguagugca

SEQ ID NO: 804943 - RNA, 19 nt, Artificial Sequence
  Description of Artificial Sequence: Synthetic oligonucleotide
  Antisense strand to SEQ ID NO: 804942
ugcacuacuauuaucauac

SEQ ID NO: 804944 - RNA, 19 nt, Artificial Sequence
  Description of Artificial Sequence: Synthetic oligonucleotide
  Sense strand starting at position 3792 of SEQ ID NO: 587609
gcaagacgcugugucaaau

SEQ ID NO: 804945 - RNA, 19 nt, Artificial Sequence
  Description of Artificial Sequence: Synthetic oligonucleotide
  Antisense strand to SEQ ID NO: 804944
auuugacacagcgucuugc

SEQ ID NO: 804946 - RNA, 19 nt, Artificial Sequence
  Description of Artificial Sequence: Synthetic oligonucleotide
  Sense strand starting at position 3872 of SEQ ID NO: 587609
guagauuuauucuacucua

SEQ ID NO: 804947 - RNA, 19 nt, Artificial Sequence
  Description of Artificial Sequence: Synthetic oligonucleotide
  Antisense strand to SEQ ID NO: 804946
uagaguagaauaaaucuac

SEQ ID NO: 804948 - RNA, 19 nt, Artificial Sequence
  Description of Artificial Sequence: Synthetic oligonucleotide
  Sense strand starting at position 3877 of SEQ ID NO: 587609
uuuauucuacucuauguga

SEQ ID NO: 804949 - RNA, 19 nt, Artificial Sequence
  Description of Artificial Sequence: Synthetic oligonucleotide
  Antisense strand to SEQ ID NO: 804948
ucacauagaguagaauaaa

SEQ ID NO: 804950 - RNA, 19 nt, Artificial Sequence
  Description of Artificial Sequence: Synthetic oligonucleotide
  Sense strand starting at position 3880 of SEQ ID NO: 587609
auucuacucuaugugaagu

SEQ ID NO: 804951 - RNA, 19 nt, Artificial Sequence
  Description of Artificial Sequence: Synthetic oligonucleotide
  Antisense strand to SEQ ID NO: 804950
acuucacauagaguagaau

SEQ ID NO: 804952 - RNA, 19 nt, Artificial Sequence
  Description of Artificial Sequence: Synthetic oligonucleotide
  Sense strand starting at position 3891 of SEQ ID NO: 587609
ugugaaguggccuacuauu

SEQ ID NO: 804953 - RNA, 19 nt, Artificial Sequence
  Description of Artificial Sequence: Synthetic oligonucleotide
  Antisense strand to SEQ ID NO: 804952
aauaguaggccacuucaca

SEQ ID NO: 804954 - RNA, 19 nt, Artificial Sequence
  Description of Artificial Sequence: Synthetic oligonucleotide
  Sense strand starting at position 3901 of SEQ ID NO: 587609
ccuacuauuucuuggaggu

SEQ ID NO: 804955 - RNA, 19 nt, Artificial Sequence
  Description of Artificial Sequence: Synthetic oligonucleotide
  Antisense strand to SEQ ID NO: 804954
accuccaagaaauaguagg

SEQ ID NO: 804956 - RNA, 19 nt, Artificial Sequence
  Description of Artificial Sequence: Synthetic oligonucleotide
  Sense strand starting at position 3903 of SEQ ID NO: 587609
uacuauuucuuggagguag

SEQ ID NO: 804957 - RNA, 19 nt, Artificial Sequence
  Description of Artificial Sequence: Synthetic oligonucleotide
  Antisense strand to SEQ ID NO: 804956
cuaccuccaagaaauagua

SEQ ID NO: 804958 - RNA, 19 nt, Artificial Sequence
  Description of Artificial Sequence: Synthetic oligonucleotide
  Sense strand starting at position 3915 of SEQ ID NO: 587609
gagguagacuaguaaguca

SEQ ID NO: 804959 - RNA, 19 nt, Artificial Sequence
  Description of Artificial Sequence: Synthetic oligonucleotide
  Antisense strand to SEQ ID NO: 804958
ugacuuacuagucuaccuc

SEQ ID NO: 804960 - RNA, 19 nt, Artificial Sequence
  Description of Artificial Sequence: Synthetic oligonucleotide
  Sense strand starting at position 3928 of SEQ ID NO: 587609
aagucaaagguguaugcua

SEQ ID NO: 804961 - RNA, 19 nt, Artificial Sequence
  Description of Artificial Sequence: Synthetic oligonucleotide
  Antisense strand to SEQ ID NO: 804960
uagcauacaccuuugacuu

SEQ ID NO: 804962 - RNA, 19 nt, Artificial Sequence
  Description of Artificial Sequence: Synthetic oligonucleotide
  Sense strand starting at position 106 of SEQ ID NO: 587610
gacguuguccgggugucua

SEQ ID NO: 804963 - RNA, 19 nt, Artificial Sequence
  Description of Artificial Sequence: Synthetic oligonucleotide
  Antisense strand to SEQ ID NO: 804962
uagacacccggacaacguc

SEQ ID NO: 804964 - RNA, 19 nt, Artificial Sequence
  Description of Artificial Sequence: Synthetic oligonucleotide
  Sense strand starting at position 226 of SEQ ID NO: 587610
cgagguugcagauauguuc

SEQ ID NO: 804965 - RNA, 19 nt, Artificial Sequence
  Description of Artificial Sequence: Synthetic oligonucleotide
  Antisense strand to SEQ ID NO: 804964
gaacauaucugcaaccucg

SEQ ID NO: 804966 - RNA, 19 nt, Artificial Sequence
  Description of Artificial Sequence: Synthetic oligonucleotide
  Sense strand starting at position 233 of SEQ ID NO: 587610
gcagauauguucccaccga

SEQ ID NO: 804967 - RNA, 19 nt, Artificial Sequence
  Description of Artificial Sequence: Synthetic oligonucleotide
  Antisense strand to SEQ ID NO: 804966
ucggugggaacauaucugc

SEQ ID NO: 804968 - RNA, 19 nt, Artificial Sequence
  Description of Artificial Sequence: Synthetic oligonucleotide
  Sense strand starting at position 237 of SEQ ID NO: 587610
auauguucccaccgaagga

SEQ ID NO: 804969 - RNA, 19 nt, Artificial Sequence
  Description of Artificial Sequence: Synthetic oligonucleotide
  Antisense strand to SEQ ID NO: 804968
uccuucggugggaacauau

SEQ ID NO: 804970 - RNA, 19 nt, Artificial Sequence
  Description of Artificial Sequence: Synthetic oligonucleotide
  Sense strand starting at position 308 of SEQ ID NO: 587610
gaaagccauuucuggagau

SEQ ID NO: 804971 - RNA, 19 nt, Artificial Sequence
  Description of Artificial Sequence: Synthetic oligonucleotide
  Antisense strand to SEQ ID NO: 804970
aucuccagaaauggcuuuc

SEQ ID NO: 804972 - RNA, 19 nt, Artificial Sequence
  Description of Artificial Sequence: Synthetic oligonucleotide
  Sense strand starting at position 430 of SEQ ID NO: 587610
gcccuaucuccugggagua

SEQ ID NO: 804973 - RNA, 19 nt, Artificial Sequence
  Description of Artificial Sequence: Synthetic oligonucleotide
  Antisense strand to SEQ ID NO: 804972
uacucccaggagauagggc

SEQ ID NO: 804974 - RNA, 19 nt, Artificial Sequence
  Description of Artificial Sequence: Synthetic oligonucleotide
  Sense strand starting at position 514 of SEQ ID NO: 587610
gaccuaucucccgggagua

SEQ ID NO: 804975 - RNA, 19 nt, Artificial Sequence
  Description of Artificial Sequence: Synthetic oligonucleotide
  Antisense strand to SEQ ID NO: 804974
uacucccgggagauagguc

SEQ ID NO: 804976 - RNA, 19 nt, Artificial Sequence
  Description of Artificial Sequence: Synthetic oligonucleotide
  Sense strand starting at position 516 of SEQ ID NO: 587610
ccuaucucccgggaguaga

SEQ ID NO: 804977 - RNA, 19 nt, Artificial Sequence
  Description of Artificial Sequence: Synthetic oligonucleotide
  Antisense strand to SEQ ID NO: 804976
ucuacucccgggagauagg

SEQ ID NO: 804978 - RNA, 19 nt, Artificial Sequence
  Description of Artificial Sequence: Synthetic oligonucleotide
  Sense strand starting at position 526 of SEQ ID NO: 587610
gggaguagaguguggucuu

SEQ ID NO: 804979 - RNA, 19 nt, Artificial Sequence
  Description of Artificial Sequence: Synthetic oligonucleotide
  Antisense strand to SEQ ID NO: 804978
aagaccacacucuacuccc

SEQ ID NO: 804980 - RNA, 19 nt, Artificial Sequence
  Description of Artificial Sequence: Synthetic oligonucleotide
  Sense strand starting at position 529 of SEQ ID NO: 587610
aguagaguguggucuugca

SEQ ID NO: 804981 - RNA, 19 nt, Artificial Sequence
  Description of Artificial Sequence: Synthetic oligonucleotide
  Antisense strand to SEQ ID NO: 804980
ugcaagaccacacucuacu

SEQ ID NO: 804982 - RNA, 19 nt, Artificial Sequence
  Description of Artificial Sequence: Synthetic oligonucleotide
  Sense strand starting at position 902 of SEQ ID NO: 587610
uuuggaaguguuugggaga

SEQ ID NO: 804983 - RNA, 19 nt, Artificial Sequence
  Description of Artificial Sequence: Synthetic oligonucleotide
  Antisense strand to SEQ ID NO: 804982
ucucccaaacacuuccaaa

SEQ ID NO: 804984 - RNA, 19 nt, Artificial Sequence
  Description of Artificial Sequence: Synthetic oligonucleotide
  Sense strand starting at position 905 of SEQ ID NO: 587610
ggaaguguuugggagacuc

SEQ ID NO: 804985 - RNA, 19 nt, Artificial Sequence
  Description of Artificial Sequence: Synthetic oligonucleotide
  Antisense strand to SEQ ID NO: 804984
gagucucccaaacacuucc

SEQ ID NO: 804986 - RNA, 19 nt, Artificial Sequence
  Description of Artificial Sequence: Synthetic oligonucleotide
  Sense strand starting at position 1392 of SEQ ID NO: 587610
gguugaguccaggacauug

SEQ ID NO: 804987 - RNA, 19 nt, Artificial Sequence
  Description of Artificial Sequence: Synthetic oligonucleotide
  Antisense strand to SEQ ID NO: 804986
caauguccuggacucaacc

SEQ ID NO: 804988 - RNA, 19 nt, Artificial Sequence
  Description of Artificial Sequence: Synthetic oligonucleotide
  Sense strand starting at position 1788 of SEQ ID NO: 587610
ccgggaacagugugaaugu

SEQ ID NO: 804989 - RNA, 19 nt, Artificial Sequence
  Description of Artificial Sequence: Synthetic oligonucleotide
  Antisense strand to SEQ ID NO: 804988
acauucacacuguucccgg

SEQ ID NO: 804990 - RNA, 19 nt, Artificial Sequence
  Description of Artificial Sequence: Synthetic oligonucleotide
  Sense strand starting at position 2387 of SEQ ID NO: 587610
gggaguguuacgggccacu

SEQ ID NO: 804991 - RNA, 19 nt, Artificial Sequence
  Description of Artificial Sequence: Synthetic oligonucleotide
  Antisense strand to SEQ ID NO: 804990
aguggcccguaacacuccc

SEQ ID NO: 804992 - RNA, 19 nt, Artificial Sequence
  Description of Artificial Sequence: Synthetic oligonucleotide
  Sense strand starting at position 2440 of SEQ ID NO: 587610
ucaggucaucuguguucca

SEQ ID NO: 804993 - RNA, 19 nt, Artificial Sequence
  Description of Artificial Sequence: Synthetic oligonucleotide
  Antisense strand to SEQ ID NO: 804992
uggaacacagaugaccuga

SEQ ID NO: 804994 - RNA, 19 nt, Artificial Sequence
  Description of Artificial Sequence: Synthetic oligonucleotide
  Sense strand starting at position 2441 of SEQ ID NO: 587610
caggucaucuguguuccaa

SEQ ID NO: 804995 - RNA, 19 nt, Artificial Sequence
  Description of Artificial Sequence: Synthetic oligonucleotide
  Antisense strand to SEQ ID NO: 804994
uuggaacacagaugaccug

SEQ ID NO: 804996 - RNA, 19 nt, Artificial Sequence
  Description of Artificial Sequence: Synthetic oligonucleotide
  Sense strand starting at position 2460 of SEQ ID NO: 587610
ggcagaucugugugcugga

SEQ ID NO: 804997 - RNA, 19 nt, Artificial Sequence
  Description of Artificial Sequence: Synthetic oligonucleotide
  Antisense strand to SEQ ID NO: 804996
uccagcacacagaucugcc

SEQ ID NO: 804998 - RNA, 19 nt, Artificial Sequence
  Description of Artificial Sequence: Synthetic oligonucleotide
  Sense strand starting at position 2461 of SEQ ID NO: 587610
gcagaucugugugcuggau

SEQ ID NO: 804999 - RNA, 19 nt, Artificial Sequence
  Description of Artificial Sequence: Synthetic oligonucleotide
  Antisense strand to SEQ ID NO: 804998
auccagcacacagaucugc

SEQ ID NO: 805000 - RNA, 19 nt, Artificial Sequence
  Description of Artificial Sequence: Synthetic oligonucleotide
  Sense strand starting at position 2470 of SEQ ID NO: 587610
ugugcuggaucuuccaaga

SEQ ID NO: 805001 - RNA, 19 nt, Artificial Sequence
  Description of Artificial Sequence: Synthetic oligonucleotide
  Antisense strand to SEQ ID NO: 805000
ucuuggaagauccagcaca

SEQ ID NO: 805002 - RNA, 19 nt, Artificial Sequence
  Description of Artificial Sequence: Synthetic oligonucleotide
  Sense strand starting at position 2483 of SEQ ID NO: 587610
ccaagauucugggcuggaa

SEQ ID NO: 805003 - RNA, 19 nt, Artificial Sequence
  Description of Artificial Sequence: Synthetic oligonucleotide
  Antisense strand to SEQ ID NO: 805002
uuccagcccagaaucuugg

SEQ ID NO: 805004 - RNA, 19 nt, Artificial Sequence
  Description of Artificial Sequence: Synthetic oligonucleotide
  Sense strand starting at position 2603 of SEQ ID NO: 587610
gggugugcucagaggcuua

SEQ ID NO: 805005 - RNA, 19 nt, Artificial Sequence
  Description of Artificial Sequence: Synthetic oligonucleotide
  Antisense strand to SEQ ID NO: 805004
uaagccucugagcacaccc

SEQ ID NO: 805006 - RNA, 19 nt, Artificial Sequence
  Description of Artificial Sequence: Synthetic oligonucleotide
  Sense strand starting at position 2653 of SEQ ID NO: 587610
cagagaagguccuggauag

SEQ ID NO: 805007 - RNA, 19 nt, Artificial Sequence
  Description of Artificial Sequence: Synthetic oligonucleotide
  Antisense strand to SEQ ID NO: 805006
cuauccaggaccuucucug

SEQ ID NO: 805008 - RNA, 19 nt, Artificial Sequence
  Description of Artificial Sequence: Synthetic oligonucleotide
  Sense strand starting at position 2951 of SEQ ID NO: 587610
uugugucuggucugugauc

SEQ ID NO: 805009 - RNA, 19 nt, Artificial Sequence
  Description of Artificial Sequence: Synthetic oligonucleotide
  Antisense strand to SEQ ID NO: 805008
gaucacagaccagacacaa

SEQ ID NO: 805010 - RNA, 19 nt, Artificial Sequence
  Description of Artificial Sequence: Synthetic oligonucleotide
  Sense strand starting at position 2953 of SEQ ID NO: 587610
gugucuggucugugauccu

SEQ ID NO: 805011 - RNA, 19 nt, Artificial Sequence
  Description of Artificial Sequence: Synthetic oligonucleotide
  Antisense strand to SEQ ID NO: 805010
aggaucacagaccagacac

SEQ ID NO: 805012 - RNA, 19 nt, Artificial Sequence
  Description of Artificial Sequence: Synthetic oligonucleotide
  Sense strand starting at position 3197 of SEQ ID NO: 587610
cugucccaguguuugaaau

SEQ ID NO: 805013 - RNA, 19 nt, Artificial Sequence
  Description of Artificial Sequence: Synthetic oligonucleotide
  Antisense strand to SEQ ID NO: 805012
auuucaaacacugggacag

SEQ ID NO: 805014 - RNA, 19 nt, Artificial Sequence
  Description of Artificial Sequence: Synthetic oligonucleotide
  Sense strand starting at position 3198 of SEQ ID NO: 587610
ugucccaguguuugaaauu

SEQ ID NO: 805015 - RNA, 19 nt, Artificial Sequence
  Description of Artificial Sequence: Synthetic oligonucleotide
  Antisense strand to SEQ ID NO: 805014
aauuucaaacacugggaca

SEQ ID NO: 805016 - RNA, 19 nt, Artificial Sequence
  Description of Artificial Sequence: Synthetic oligonucleotide
  Sense strand starting at position 3207 of SEQ ID NO: 587610
guuugaaauucugucuuug

SEQ ID NO: 805017 - RNA, 19 nt, Artificial Sequence
  Description of Artificial Sequence: Synthetic oligonucleotide
  Antisense strand to SEQ ID NO: 805016
caaagacagaauuucaaac

SEQ ID NO: 805018 - RNA, 19 nt, Artificial Sequence
  Description of Artificial Sequence: Synthetic oligonucleotide
  Sense strand starting at position 3420 of SEQ ID NO: 587610
acuugugucagagacuuag

SEQ ID NO: 805019 - RNA, 19 nt, Artificial Sequence
  Description of Artificial Sequence: Synthetic oligonucleotide
  Antisense strand to SEQ ID NO: 805018
cuaagucucugacacaagu

SEQ ID NO: 805020 - RNA, 19 nt, Artificial Sequence
  Description of Artificial Sequence: Synthetic oligonucleotide
  Sense strand starting at position 3424 of SEQ ID NO: 587610
gugucagagacuuagccua

SEQ ID NO: 805021 - RNA, 19 nt, Artificial Sequence
  Description of Artificial Sequence: Synthetic oligonucleotide
  Antisense strand to SEQ ID NO: 805020
uaggcuaagucucugacac

SEQ ID NO: 805022 - RNA, 19 nt, Artificial Sequence
  Description of Artificial Sequence: Synthetic oligonucleotide
  Sense strand starting at position 3429 of SEQ ID NO: 587610
agagacuuagccuagcaga

SEQ ID NO: 805023 - RNA, 19 nt, Artificial Sequence
  Description of Artificial Sequence: Synthetic oligonucleotide
  Antisense strand to SEQ ID NO: 805022
ucugcuaggcuaagucucu

SEQ ID NO: 805024 - RNA, 19 nt, Artificial Sequence
  Description of Artificial Sequence: Synthetic oligonucleotide
  Sense strand starting at position 3580 of SEQ ID NO: 587610
gcagcaagccugucugguu

SEQ ID NO: 805025 - RNA, 19 nt, Artificial Sequence
  Description of Artificial Sequence: Synthetic oligonucleotide
  Antisense strand to SEQ ID NO: 805024
aaccagacaggcuugcugc

SEQ ID NO: 805026 - RNA, 19 nt, Artificial Sequence
  Description of Artificial Sequence: Synthetic oligonucleotide
  Sense strand starting at position 3621 of SEQ ID NO: 587610
gcugcaacuggccauugau

SEQ ID NO: 805027 - RNA, 19 nt, Artificial Sequence
  Description of Artificial Sequence: Synthetic oligonucleotide
  Antisense strand to SEQ ID NO: 805026
aucaauggccaguugcagc

SEQ ID NO: 805028 - RNA, 19 nt, Artificial Sequence
  Description of Artificial Sequence: Synthetic oligonucleotide
  Sense strand starting at position 3733 of SEQ ID NO: 587610
gcuccuuccuguccucaga

SEQ ID NO: 805029 - RNA, 19 nt, Artificial Sequence
  Description of Artificial Sequence: Synthetic oligonucleotide
  Antisense strand to SEQ ID NO: 805028
ucugaggacaggaaggagc

SEQ ID NO: 805030 - RNA, 19 nt, Artificial Sequence
  Description of Artificial Sequence: Synthetic oligonucleotide
  Sense strand starting at position 3767 of SEQ ID NO: 587610
ugugccuucuacccagaau

SEQ ID NO: 805031 - RNA, 19 nt, Artificial Sequence
  Description of Artificial Sequence: Synthetic oligonucleotide
  Antisense strand to SEQ ID NO: 805030
auucuggguagaaggcaca

SEQ ID NO: 805032 - RNA, 19 nt, Artificial Sequence
  Description of Artificial Sequence: Synthetic oligonucleotide
  Sense strand starting at position 3841 of SEQ ID NO: 587610
uggagagauccaggcuaag

SEQ ID NO: 805033 - RNA, 19 nt, Artificial Sequence
  Description of Artificial Sequence: Synthetic oligonucleotide
  Antisense strand to SEQ ID NO: 805032
cuuagccuggaucucucca

SEQ ID NO: 805034 - RNA, 19 nt, Artificial Sequence
  Description of Artificial Sequence: Synthetic oligonucleotide
  Sense strand starting at position 3853 of SEQ ID NO: 587610
ggcuaagccuuucugcaaa

SEQ ID NO: 805035 - RNA, 19 nt, Artificial Sequence
  Description of Artificial Sequence: Synthetic oligonucleotide
  Antisense strand to SEQ ID NO: 805034
uuugcagaaaggcuuagcc

SEQ ID NO: 805036 - RNA, 19 nt, Artificial Sequence
  Description of Artificial Sequence: Synthetic oligonucleotide
  Sense strand starting at position 3929 of SEQ ID NO: 587610
cuuuguuugggaggacugu

SEQ ID NO: 805037 - RNA, 19 nt, Artificial Sequence
  Description of Artificial Sequence: Synthetic oligonucleotide
  Antisense strand to SEQ ID NO: 805036
acaguccucccaaacaaag

SEQ ID NO: 805038 - RNA, 19 nt, Artificial Sequence
  Description of Artificial Sequence: Synthetic oligonucleotide
  Sense strand starting at position 3938 of SEQ ID NO: 587610
ggaggacuguguuccagga

SEQ ID NO: 805039 - RNA, 19 nt, Artificial Sequence
  Description of Artificial Sequence: Synthetic oligonucleotide
  Antisense strand to SEQ ID NO: 805038
uccuggaacacaguccucc

SEQ ID NO: 805040 - RNA, 19 nt, Artificial Sequence
  Description of Artificial Sequence: Synthetic oligonucleotide
  Sense strand starting at position 3942 of SEQ ID NO: 587610
gacuguguuccaggaagac

SEQ ID NO: 805041 - RNA, 19 nt, Artificial Sequence
  Description of Artificial Sequence: Synthetic oligonucleotide
  Antisense strand to SEQ ID NO: 805040
gucuuccuggaacacaguc

SEQ ID NO: 805042 - RNA, 19 nt, Artificial Sequence
  Description of Artificial Sequence: Synthetic oligonucleotide
  Sense strand starting at position 317 of SEQ ID NO: 587611
gagagcccuugucucuaaa

SEQ ID NO: 805043 - RNA, 19 nt, Artificial Sequence
  Description of Artificial Sequence: Synthetic oligonucleotide
  Antisense strand to SEQ ID NO: 805042
uuuagagacaagggcucuc

SEQ ID NO: 805044 - RNA, 19 nt, Artificial Sequence
  Description of Artificial Sequence: Synthetic oligonucleotide
  Sense strand starting at position 382 of SEQ ID NO: 587611
auaaguaguuaguacaaca

SEQ ID NO: 805045 - RNA, 19 nt, Artificial Sequence
  Description of Artificial Sequence: Synthetic oligonucleotide
  Antisense strand to SEQ ID NO: 805044
uguuguacuaacuacuuau

SEQ ID NO: 805046 - RNA, 19 nt, Artificial Sequence
  Description of Artificial Sequence: Synthetic oligonucleotide
  Sense strand starting at position 509 of SEQ ID NO: 587611
gccacuaguucucuuauca

SEQ ID NO: 805047 - RNA, 19 nt, Artificial Sequence
  Description of Artificial Sequence: Synthetic oligonucleotide
  Antisense strand to SEQ ID NO: 805046
ugauaagagaacuaguggc

SEQ ID NO: 805048 - RNA, 19 nt, Artificial Sequence
  Description of Artificial Sequence: Synthetic oligonucleotide
  Sense strand starting at position 566 of SEQ ID NO: 587611
uuaacugcucuggaaagcu

SEQ ID NO: 805049 - RNA, 19 nt, Artificial Sequence
  Description of Artificial Sequence: Synthetic oligonucleotide
  Antisense strand to SEQ ID NO: 805048
agcuuuccagagcaguuaa

SEQ ID NO: 805050 - RNA, 19 nt, Artificial Sequence
  Description of Artificial Sequence: Synthetic oligonucleotide
  Sense strand starting at position 970 of SEQ ID NO: 587611
acaggauuguuacacacua

SEQ ID NO: 805051 - RNA, 19 nt, Artificial Sequence
  Description of Artificial Sequence: Synthetic oligonucleotide
  Antisense strand to SEQ ID NO: 805050
uaguguguaacaauccugu

SEQ ID NO: 805052 - RNA, 19 nt, Artificial Sequence
  Description of Artificial Sequence: Synthetic oligonucleotide
  Sense strand starting at position 1022 of SEQ ID NO: 587611
acgagagaauuacacaaca

SEQ ID NO: 805053 - RNA, 19 nt, Artificial Sequence
  Description of Artificial Sequence: Synthetic oligonucleotide
  Antisense strand to SEQ ID NO: 805052
uguuguguaauucucucgu

SEQ ID NO: 805054 - RNA, 19 nt, Artificial Sequence
  Description of Artificial Sequence: Synthetic oligonucleotide
  Sense strand starting at position 1038 of SEQ ID NO: 587611
acacuaucuucggcgacuu

SEQ ID NO: 805055 - RNA, 19 nt, Artificial Sequence
  Description of Artificial Sequence: Synthetic oligonucleotide
  Antisense strand to SEQ ID NO: 805054
aagucgccgaagauagugu

SEQ ID NO: 805056 - RNA, 19 nt, Artificial Sequence
  Description of Artificial Sequence: Synthetic oligonucleotide
  Sense strand starting at position 1039 of SEQ ID NO: 587611
cacuaucuucggcgacuua

SEQ ID NO: 805057 - RNA, 19 nt, Artificial Sequence
  Description of Artificial Sequence: Synthetic oligonucleotide
  Antisense strand to SEQ ID NO: 805056
uaagucgccgaagauagug

SEQ ID NO: 805058 - RNA, 19 nt, Artificial Sequence
  Description of Artificial Sequence: Synthetic oligonucleotide
  Sense strand starting at position 1040 of SEQ ID NO: 587611
acuaucuucggcgacuuaa

SEQ ID NO: 805059 - RNA, 19 nt, Artificial Sequence
  Description of Artificial Sequence: Synthetic oligonucleotide
  Antisense strand to SEQ ID NO: 805058
uuaagucgccgaagauagu

SEQ ID NO: 805060 - RNA, 19 nt, Artificial Sequence
  Description of Artificial Sequence: Synthetic oligonucleotide
  Sense strand starting at position 1050 of SEQ ID NO: 587611
gcgacuuaaucuuuaucga

SEQ ID NO: 805061 - RNA, 19 nt, Artificial Sequence
  Description of Artificial Sequence: Synthetic oligonucleotide
  Antisense strand to SEQ ID NO: 805060
ucgauaaagauuaagucgc

SEQ ID NO: 805062 - RNA, 19 nt, Artificial Sequence
  Description of Artificial Sequence: Synthetic oligonucleotide
  Sense strand starting at position 1051 of SEQ ID NO: 587611
cgacuuaaucuuuaucgac

SEQ ID NO: 805063 - RNA, 19 nt, Artificial Sequence
  Description of Artificial Sequence: Synthetic oligonucleotide
  Antisense strand to SEQ ID NO: 805062
gucgauaaagauuaagucg

SEQ ID NO: 805064 - RNA, 19 nt, Artificial Sequence
  Description of Artificial Sequence: Synthetic oligonucleotide
  Sense strand starting at position 1157 of SEQ ID NO: 587611
guuagacauugagugcaaa

SEQ ID NO: 805065 - RNA, 19 nt, Artificial Sequence
  Description of Artificial Sequence: Synthetic oligonucleotide
  Antisense strand to SEQ ID NO: 805064
uuugcacucaaugucuaac

SEQ ID NO: 805066 - RNA, 19 nt, Artificial Sequence
  Description of Artificial Sequence: Synthetic oligonucleotide
  Sense strand starting at position 1167 of SEQ ID NO: 587611
gagugcaaaugaucacauu

SEQ ID NO: 805067 - RNA, 19 nt, Artificial Sequence
  Description of Artificial Sequence: Synthetic oligonucleotide
  Antisense strand to SEQ ID NO: 805066
aaugugaucauuugcacuc

SEQ ID NO: 805068 - RNA, 19 nt, Artificial Sequence
  Description of Artificial Sequence: Synthetic oligonucleotide
  Sense strand starting at position 1374 of SEQ ID NO: 587611
aagagugcgaggugacaau

SEQ ID NO: 805069 - RNA, 19 nt, Artificial Sequence
  Description of Artificial Sequence: Synthetic oligonucleotide
  Antisense strand to SEQ ID NO: 805068
auugucaccucgcacucuu

SEQ ID NO: 805070 - RNA, 19 nt, Artificial Sequence
  Description of Artificial Sequence: Synthetic oligonucleotide
  Sense strand starting at position 1397 of SEQ ID NO: 587611
cgauuuccuggcggacuua

SEQ ID NO: 805071 - RNA, 19 nt, Artificial Sequence
  Description of Artificial Sequence: Synthetic oligonucleotide
  Antisense strand to SEQ ID NO: 805070
uaaguccgccaggaaaucg

SEQ ID NO: 805072 - RNA, 19 nt, Artificial Sequence
  Description of Artificial Sequence: Synthetic oligonucleotide
  Sense strand starting at position 1790 of SEQ ID NO: 587611
auguuauugccgcacauac

SEQ ID NO: 805073 - RNA, 19 nt, Artificial Sequence
  Description of Artificial Sequence: Synthetic oligonucleotide
  Antisense strand to SEQ ID NO: 805072
guaugugcggcaauaacau

SEQ ID NO: 805074 - RNA, 19 nt, Artificial Sequence
  Description of Artificial Sequence: Synthetic oligonucleotide
  Sense strand starting at position 2109 of SEQ ID NO: 587611
cucagugcuggcuagggaa

SEQ ID NO: 805075 - RNA, 19 nt, Artificial Sequence
  Description of Artificial Sequence: Synthetic oligonucleotide
  Antisense strand to SEQ ID NO: 805074
uucccuagccagcacugag

SEQ ID NO: 805076 - RNA, 19 nt, Artificial Sequence
  Description of Artificial Sequence: Synthetic oligonucleotide
  Sense strand starting at position 2345 of SEQ ID NO: 587611
gcuacagcaguauguagau

SEQ ID NO: 805077 - RNA, 19 nt, Artificial Sequence
  Description of Artificial Sequence: Synthetic oligonucleotide
  Antisense strand to SEQ ID NO: 805076
aucuacauacugcuguagc

SEQ ID NO: 805078 - RNA, 19 nt, Artificial Sequence
  Description of Artificial Sequence: Synthetic oligonucleotide
  Sense strand starting at position 2354 of SEQ ID NO: 587611
guauguagauuuggguuca

SEQ ID NO: 805079 - RNA, 19 nt, Artificial Sequence
  Description of Artificial Sequence: Synthetic oligonucleotide
  Antisense strand to SEQ ID NO: 805078
ugaacccaaaucuacauac

SEQ ID NO: 805080 - RNA, 19 nt, Artificial Sequence
  Description of Artificial Sequence: Synthetic oligonucleotide
  Sense strand starting at position 2382 of SEQ ID NO: 587611
cuuuaaacuuuaguuggaa

SEQ ID NO: 805081 - RNA, 19 nt, Artificial Sequence
  Description of Artificial Sequence: Synthetic oligonucleotide
  Antisense strand to SEQ ID NO: 805080
uuccaacuaaaguuuaaag

SEQ ID NO: 805082 - RNA, 19 nt, Artificial Sequence
  Description of Artificial Sequence: Synthetic oligonucleotide
  Sense strand starting at position 2433 of SEQ ID NO: 587611
ucccuaacuugaucgacaa

SEQ ID NO: 805083 - RNA, 19 nt, Artificial Sequence
  Description of Artificial Sequence: Synthetic oligonucleotide
  Antisense strand to SEQ ID NO: 805082
uugucgaucaaguuaggga

SEQ ID NO: 805084 - RNA, 19 nt, Artificial Sequence
  Description of Artificial Sequence: Synthetic oligonucleotide
  Sense strand starting at position 2454 of SEQ ID NO: 587611
cuuacugauguacggauau

SEQ ID NO: 805085 - RNA, 19 nt, Artificial Sequence
  Description of Artificial Sequence: Synthetic oligonucleotide
  Antisense strand to SEQ ID NO: 805084
auauccguacaucaguaag

SEQ ID NO: 805086 - RNA, 19 nt, Artificial Sequence
  Description of Artificial Sequence: Synthetic oligonucleotide
  Sense strand starting at position 2464 of SEQ ID NO: 587611
uacggauauugacacagua

SEQ ID NO: 805087 - RNA, 19 nt, Artificial Sequence
  Description of Artificial Sequence: Synthetic oligonucleotide
  Antisense strand to SEQ ID NO: 805086
uacugugucaauauccgua

SEQ ID NO: 805088 - RNA, 19 nt, Artificial Sequence
  Description of Artificial Sequence: Synthetic oligonucleotide
  Sense strand starting at position 2482 of SEQ ID NO: 587611
acagguuuaagugagaggu

SEQ ID NO: 805089 - RNA, 19 nt, Artificial Sequence
  Description of Artificial Sequence: Synthetic oligonucleotide
  Antisense strand to SEQ ID NO: 805088
accucucacuuaaaccugu

SEQ ID NO: 805090 - RNA, 19 nt, Artificial Sequence
  Description of Artificial Sequence: Synthetic oligonucleotide
  Sense strand starting at position 2484 of SEQ ID NO: 587611
agguuuaagugagagguaa

SEQ ID NO: 805091 - RNA, 19 nt, Artificial Sequence
  Description of Artificial Sequence: Synthetic oligonucleotide
  Antisense strand to SEQ ID NO: 805090
uuaccucucacuuaaaccu

SEQ ID NO: 805092 - RNA, 19 nt, Artificial Sequence
  Description of Artificial Sequence: Synthetic oligonucleotide
  Sense strand starting at position 2486 of SEQ ID NO: 587611
guuuaagugagagguaaag

SEQ ID NO: 805093 - RNA, 19 nt, Artificial Sequence
  Description of Artificial Sequence: Synthetic oligonucleotide
  Antisense strand to SEQ ID NO: 805092
cuuuaccucucacuuaaac

SEQ ID NO: 805094 - RNA, 19 nt, Artificial Sequence
  Description of Artificial Sequence: Synthetic oligonucleotide
  Sense strand starting at position 2675 of SEQ ID NO: 587611
gcuaaucaguguucuguaa

SEQ ID NO: 805095 - RNA, 19 nt, Artificial Sequence
  Description of Artificial Sequence: Synthetic oligonucleotide
  Antisense strand to SEQ ID NO: 805094
uuacagaacacugauuagc

SEQ ID NO: 805096 - RNA, 19 nt, Artificial Sequence
  Description of Artificial Sequence: Synthetic oligonucleotide
  Sense strand starting at position 2679 of SEQ ID NO: 587611
aucaguguucuguaaagug

SEQ ID NO: 805097 - RNA, 19 nt, Artificial Sequence
  Description of Artificial Sequence: Synthetic oligonucleotide
  Antisense strand to SEQ ID NO: 805096
cacuuuacagaacacugau

SEQ ID NO: 805098 - RNA, 19 nt, Artificial Sequence
  Description of Artificial Sequence: Synthetic oligonucleotide
  Sense strand starting at position 2710 of SEQ ID NO: 587611
ggacuugggccgggacaaa

SEQ ID NO: 805099 - RNA, 19 nt, Artificial Sequence
  Description of Artificial Sequence: Synthetic oligonucleotide
  Antisense strand to SEQ ID NO: 805098
uuugucccggcccaagucc

SEQ ID NO: 805100 - RNA, 19 nt, Artificial Sequence
  Description of Artificial Sequence: Synthetic oligonucleotide
  Sense strand starting at position 2949 of SEQ ID NO: 587611
cugccuuaacacggugaga

SEQ ID NO: 805101 - RNA, 19 nt, Artificial Sequence
  Description of Artificial Sequence: Synthetic oligonucleotide
  Antisense strand to SEQ ID NO: 805100
ucucaccguguuaaggcag

SEQ ID NO: 805102 - RNA, 19 nt, Artificial Sequence
  Description of Artificial Sequence: Synthetic oligonucleotide
  Sense strand starting at position 3007 of SEQ ID NO: 587611
ggucguguaguccaagcua

SEQ ID NO: 805103 - RNA, 19 nt, Artificial Sequence
  Description of Artificial Sequence: Synthetic oligonucleotide
  Antisense strand to SEQ ID NO: 805102
uagcuuggacuacacgacc

SEQ ID NO: 805104 - RNA, 19 nt, Artificial Sequence
  Description of Artificial Sequence: Synthetic oligonucleotide
  Sense strand starting at position 3182 of SEQ ID NO: 587611
ggugacaagcuuuauucuu

SEQ ID NO: 805105 - RNA, 19 nt, Artificial Sequence
  Description of Artificial Sequence: Synthetic oligonucleotide
  Antisense strand to SEQ ID NO: 805104
aagaauaaagcuugucacc

SEQ ID NO: 805106 - RNA, 19 nt, Artificial Sequence
  Description of Artificial Sequence: Synthetic oligonucleotide
  Sense strand starting at position 3184 of SEQ ID NO: 587611
ugacaagcuuuauucuuga

SEQ ID NO: 805107 - RNA, 19 nt, Artificial Sequence
  Description of Artificial Sequence: Synthetic oligonucleotide
  Antisense strand to SEQ ID NO: 805106
ucaagaauaaagcuuguca

SEQ ID NO: 805108 - RNA, 19 nt, Artificial Sequence
  Description of Artificial Sequence: Synthetic oligonucleotide
  Sense strand starting at position 3326 of SEQ ID NO: 587611
gcauaucaacuacauggua

SEQ ID NO: 805109 - RNA, 19 nt, Artificial Sequence
  Description of Artificial Sequence: Synthetic oligonucleotide
  Antisense strand to SEQ ID NO: 805108
uaccauguaguugauaugc

SEQ ID NO: 805110 - RNA, 19 nt, Artificial Sequence
  Description of Artificial Sequence: Synthetic oligonucleotide
  Sense strand starting at position 3339 of SEQ ID NO: 587611
augguaagaucuggaagag

SEQ ID NO: 805111 - RNA, 19 nt, Artificial Sequence
  Description of Artificial Sequence: Synthetic oligonucleotide
  Antisense strand to SEQ ID NO: 805110
cucuuccagaucuuaccau

SEQ ID NO: 805112 - RNA, 19 nt, Artificial Sequence
  Description of Artificial Sequence: Synthetic oligonucleotide
  Sense strand starting at position 3745 of SEQ ID NO: 587611
auaccauccuuagagagua

SEQ ID NO: 805113 - RNA, 19 nt, Artificial Sequence
  Description of Artificial Sequence: Synthetic oligonucleotide
  Antisense strand to SEQ ID NO: 805112
uacucucuaaggaugguau

SEQ ID NO: 805114 - RNA, 19 nt, Artificial Sequence
  Description of Artificial Sequence: Synthetic oligonucleotide
  Sense strand starting at position 3757 of SEQ ID NO: 587611
gagaguaagguucggaaga

SEQ ID NO: 805115 - RNA, 19 nt, Artificial Sequence
  Description of Artificial Sequence: Synthetic oligonucleotide
  Antisense strand to SEQ ID NO: 805114
ucuuccgaaccuuacucuc

SEQ ID NO: 805116 - RNA, 19 nt, Artificial Sequence
  Description of Artificial Sequence: Synthetic oligonucleotide
  Sense strand starting at position 3759 of SEQ ID NO: 587611
gaguaagguucggaagaaa

SEQ ID NO: 805117 - RNA, 19 nt, Artificial Sequence
  Description of Artificial Sequence: Synthetic oligonucleotide
  Antisense strand to SEQ ID NO: 805116
uuucuuccgaaccuuacuc

SEQ ID NO: 805118 - RNA, 19 nt, Artificial Sequence
  Description of Artificial Sequence: Synthetic oligonucleotide
  Sense strand starting at position 3810 of SEQ ID NO: 587611
cacgguaaccagugucaga

SEQ ID NO: 805119 - RNA, 19 nt, Artificial Sequence
  Description of Artificial Sequence: Synthetic oligonucleotide
  Antisense strand to SEQ ID NO: 805118
ucugacacugguuaccgug

SEQ ID NO: 805120 - RNA, 19 nt, Artificial Sequence
  Description of Artificial Sequence: Synthetic oligonucleotide
  Sense strand starting at position 3938 of SEQ ID NO: 587611
gauagaacgucagcgcaaa

SEQ ID NO: 805121 - RNA, 19 nt, Artificial Sequence
  Description of Artificial Sequence: Synthetic oligonucleotide
  Antisense strand to SEQ ID NO: 805120
uuugcgcugacguucuauc

SEQ ID NO: 805122 - RNA, 19 nt, Artificial Sequence
  Description of Artificial Sequence: Synthetic oligonucleotide
  Sense strand starting at position 346 of SEQ ID NO: 587612
ugucgaacucuugacauca

SEQ ID NO: 805123 - RNA, 19 nt, Artificial Sequence
  Description of Artificial Sequence: Synthetic oligonucleotide
  Antisense strand to SEQ ID NO: 805122
ugaugucaagaguucgaca

SEQ ID NO: 805124 - RNA, 19 nt, Artificial Sequence
  Description of Artificial Sequence: Synthetic oligonucleotide
  Sense strand starting at position 780 of SEQ ID NO: 587612
gagagcccuugucucuaaa

SEQ ID NO: 805125 - RNA, 19 nt, Artificial Sequence
  Description of Artificial Sequence: Synthetic oligonucleotide
  Antisense strand to SEQ ID NO: 805124
uuuagagacaagggcucuc

SEQ ID NO: 805126 - RNA, 19 nt, Artificial Sequence
  Description of Artificial Sequence: Synthetic oligonucleotide
  Sense strand starting at position 845 of SEQ ID NO: 587612
auaaguaguuaguacaaca

SEQ ID NO: 805127 - RNA, 19 nt, Artificial Sequence
  Description of Artificial Sequence: Synthetic oligonucleotide
  Antisense strand to SEQ ID NO: 805126
uguuguacuaacuacuuau

SEQ ID NO: 805128 - RNA, 19 nt, Artificial Sequence
  Description of Artificial Sequence: Synthetic oligonucleotide
  Sense strand starting at position 972 of SEQ ID NO: 587612
gccacuaguucucuuauca

SEQ ID NO: 805129 - RNA, 19 nt, Artificial Sequence
  Description of Artificial Sequence: Synthetic oligonucleotide
  Antisense strand to SEQ ID NO: 805128
ugauaagagaacuaguggc

SEQ ID NO: 805130 - RNA, 19 nt, Artificial Sequence
  Description of Artificial Sequence: Synthetic oligonucleotide
  Sense strand starting at position 1029 of SEQ ID NO: 587612
uuaacugcucuggaaagcu

SEQ ID NO: 805131 - RNA, 19 nt, Artificial Sequence
  Description of Artificial Sequence: Synthetic oligonucleotide
  Antisense strand to SEQ ID NO: 805130
agcuuuccagagcaguuaa

SEQ ID NO: 805132 - RNA, 19 nt, Artificial Sequence
  Description of Artificial Sequence: Synthetic oligonucleotide
  Sense strand starting at position 1079 of SEQ ID NO: 587612
acggaucucugguauccaa

SEQ ID NO: 805133 - RNA, 19 nt, Artificial Sequence
  Description of Artificial Sequence: Synthetic oligonucleotide
  Antisense strand to SEQ ID NO: 805132
uuggauaccagagauccgu

SEQ ID NO: 805134 - RNA, 19 nt, Artificial Sequence
  Description of Artificial Sequence: Synthetic oligonucleotide
  Sense strand starting at position 1161 of SEQ ID NO: 587612
ucaauaaacucacgaugau

SEQ ID NO: 805135 - RNA, 19 nt, Artificial Sequence
  Description of Artificial Sequence: Synthetic oligonucleotide
  Antisense strand to SEQ ID NO: 805134
aucaucgugaguuuauuga

SEQ ID NO: 805136 - RNA, 19 nt, Artificial Sequence
  Description of Artificial Sequence: Synthetic oligonucleotide
  Sense strand starting at position 1433 of SEQ ID NO: 587612
acaggauuguuacacacua

SEQ ID NO: 805137 - RNA, 19 nt, Artificial Sequence
  Description of Artificial Sequence: Synthetic oligonucleotide
  Antisense strand to SEQ ID NO: 805136
uaguguguaacaauccugu

SEQ ID NO: 805138 - RNA, 19 nt, Artificial Sequence
  Description of Artificial Sequence: Synthetic oligonucleotide
  Sense strand starting at position 1485 of SEQ ID NO: 587612
acgagagaauuacacaaca

SEQ ID NO: 805139 - RNA, 19 nt, Artificial Sequence
  Description of Artificial Sequence: Synthetic oligonucleotide
  Antisense strand to SEQ ID NO: 805138
uguuguguaauucucucgu

SEQ ID NO: 805140 - RNA, 19 nt, Artificial Sequence
  Description of Artificial Sequence: Synthetic oligonucleotide
  Sense strand starting at position 1501 of SEQ ID NO: 587612
acacuaucuucggcgacuu

SEQ ID NO: 805141 - RNA, 19 nt, Artificial Sequence
  Description of Artificial Sequence: Synthetic oligonucleotide
  Antisense strand to SEQ ID NO: 805140
aagucgccgaagauagugu

SEQ ID NO: 805142 - RNA, 19 nt, Artificial Sequence
  Description of Artificial Sequence: Synthetic oligonucleotide
  Sense strand starting at position 1502 of SEQ ID NO: 587612
cacuaucuucggcgacuua

SEQ ID NO: 805143 - RNA, 19 nt, Artificial Sequence
  Description of Artificial Sequence: Synthetic oligonucleotide
  Antisense strand to SEQ ID NO: 805142
uaagucgccgaagauagug

SEQ ID NO: 805144 - RNA, 19 nt, Artificial Sequence
  Description of Artificial Sequence: Synthetic oligonucleotide
  Sense strand starting at position 1503 of SEQ ID NO: 587612
acuaucuucggcgacuuaa

SEQ ID NO: 805145 - RNA, 19 nt, Artificial Sequence
  Description of Artificial Sequence: Synthetic oligonucleotide
  Antisense strand to SEQ ID NO: 805144
uuaagucgccgaagauagu

SEQ ID NO: 805146 - RNA, 19 nt, Artificial Sequence
  Description of Artificial Sequence: Synthetic oligonucleotide
  Sense strand starting at position 1513 of SEQ ID NO: 587612
gcgacuuaaucuuuaucga

SEQ ID NO: 805147 - RNA, 19 nt, Artificial Sequence
  Description of Artificial Sequence: Synthetic oligonucleotide
  Antisense strand to SEQ ID NO: 805146
ucgauaaagauuaagucgc

SEQ ID NO: 805148 - RNA, 19 nt, Artificial Sequence
  Description of Artificial Sequence: Synthetic oligonucleotide
  Sense strand starting at position 1514 of SEQ ID NO: 587612
cgacuuaaucuuuaucgac

SEQ ID NO: 805149 - RNA, 19 nt, Artificial Sequence
  Description of Artificial Sequence: Synthetic oligonucleotide
  Antisense strand to SEQ ID NO: 805148
gucgauaaagauuaagucg

SEQ ID NO: 805150 - RNA, 19 nt, Artificial Sequence
  Description of Artificial Sequence: Synthetic oligonucleotide
  Sense strand starting at position 1620 of SEQ ID NO: 587612
guuagacauugagugcaaa

SEQ ID NO: 805151 - RNA, 19 nt, Artificial Sequence
  Description of Artificial Sequence: Synthetic oligonucleotide
  Antisense strand to SEQ ID NO: 805150
uuugcacucaaugucuaac

SEQ ID NO: 805152 - RNA, 19 nt, Artificial Sequence
  Description of Artificial Sequence: Synthetic oligonucleotide
  Sense strand starting at position 1630 of SEQ ID NO: 587612
gagugcaaaugaucacauu

SEQ ID NO: 805153 - RNA, 19 nt, Artificial Sequence
  Description of Artificial Sequence: Synthetic oligonucleotide
  Antisense strand to SEQ ID NO: 805152
aaugugaucauuugcacuc

SEQ ID NO: 805154 - RNA, 19 nt, Artificial Sequence
  Description of Artificial Sequence: Synthetic oligonucleotide
  Sense strand starting at position 1837 of SEQ ID NO: 587612
aagagugcgaggugacaau

SEQ ID NO: 805155 - RNA, 19 nt, Artificial Sequence
  Description of Artificial Sequence: Synthetic oligonucleotide
  Antisense strand to SEQ ID NO: 805154
auugucaccucgcacucuu

SEQ ID NO: 805156 - RNA, 19 nt, Artificial Sequence
  Description of Artificial Sequence: Synthetic oligonucleotide
  Sense strand starting at position 1859 of SEQ ID NO: 587612
gcgauuuccuggcggacuu

SEQ ID NO: 805157 - RNA, 19 nt, Artificial Sequence
  Description of Artificial Sequence: Synthetic oligonucleotide
  Antisense strand to SEQ ID NO: 805156
aaguccgccaggaaaucgc

SEQ ID NO: 805158 - RNA, 19 nt, Artificial Sequence
  Description of Artificial Sequence: Synthetic oligonucleotide
  Sense strand starting at position 1860 of SEQ ID NO: 587612
cgauuuccuggcggacuua

SEQ ID NO: 805159 - RNA, 19 nt, Artificial Sequence
  Description of Artificial Sequence: Synthetic oligonucleotide
  Antisense strand to SEQ ID NO: 805158
uaaguccgccaggaaaucg

SEQ ID NO: 805160 - RNA, 19 nt, Artificial Sequence
  Description of Artificial Sequence: Synthetic oligonucleotide
  Sense strand starting at position 2253 of SEQ ID NO: 587612
auguuauugccgcacauac

SEQ ID NO: 805161 - RNA, 19 nt, Artificial Sequence
  Description of Artificial Sequence: Synthetic oligonucleotide
  Antisense strand to SEQ ID NO: 805160
guaugugcggcaauaacau

SEQ ID NO: 805162 - RNA, 19 nt, Artificial Sequence
  Description of Artificial Sequence: Synthetic oligonucleotide
  Sense strand starting at position 2572 of SEQ ID NO: 587612
cucagugcuggcuagggaa

SEQ ID NO: 805163 - RNA, 19 nt, Artificial Sequence
  Description of Artificial Sequence: Synthetic oligonucleotide
  Antisense strand to SEQ ID NO: 805162
uucccuagccagcacugag

SEQ ID NO: 805164 - RNA, 19 nt, Artificial Sequence
  Description of Artificial Sequence: Synthetic oligonucleotide
  Sense strand starting at position 2808 of SEQ ID NO: 587612
gcuacagcaguauguagau

SEQ ID NO: 805165 - RNA, 19 nt, Artificial Sequence
  Description of Artificial Sequence: Synthetic oligonucleotide
  Antisense strand to SEQ ID NO: 805164
aucuacauacugcuguagc

SEQ ID NO: 805166 - RNA, 19 nt, Artificial Sequence
  Description of Artificial Sequence: Synthetic oligonucleotide
  Sense strand starting at position 2817 of SEQ ID NO: 587612
guauguagauuuggguuca

SEQ ID NO: 805167 - RNA, 19 nt, Artificial Sequence
  Description of Artificial Sequence: Synthetic oligonucleotide
  Antisense strand to SEQ ID NO: 805166
ugaacccaaaucuacauac

SEQ ID NO: 805168 - RNA, 19 nt, Artificial Sequence
  Description of Artificial Sequence: Synthetic oligonucleotide
  Sense strand starting at position 2845 of SEQ ID NO: 587612
cuuuaaacuuuaguuggaa

SEQ ID NO: 805169 - RNA, 19 nt, Artificial Sequence
  Description of Artificial Sequence: Synthetic oligonucleotide
  Antisense strand to SEQ ID NO: 805168
uuccaacuaaaguuuaaag

SEQ ID NO: 805170 - RNA, 19 nt, Artificial Sequence
  Description of Artificial Sequence: Synthetic oligonucleotide
  Sense strand starting at position 2896 of SEQ ID NO: 587612
ucccuaacuugaucgacaa

SEQ ID NO: 805171 - RNA, 19 nt, Artificial Sequence
  Description of Artificial Sequence: Synthetic oligonucleotide
  Antisense strand to SEQ ID NO: 805170
uugucgaucaaguuaggga

SEQ ID NO: 805172 - RNA, 19 nt, Artificial Sequence
  Description of Artificial Sequence: Synthetic oligonucleotide
  Sense strand starting at position 2917 of SEQ ID NO: 587612
cuuacugauguacggauau

SEQ ID NO: 805173 - RNA, 19 nt, Artificial Sequence
  Description of Artificial Sequence: Synthetic oligonucleotide
  Antisense strand to SEQ ID NO: 805172
auauccguacaucaguaag

SEQ ID NO: 805174 - RNA, 19 nt, Artificial Sequence
  Description of Artificial Sequence: Synthetic oligonucleotide
  Sense strand starting at position 2927 of SEQ ID NO: 587612
uacggauauugacacagua

SEQ ID NO: 805175 - RNA, 19 nt, Artificial Sequence
  Description of Artificial Sequence: Synthetic oligonucleotide
  Antisense strand to SEQ ID NO: 805174
uacugugucaauauccgua

SEQ ID NO: 805176 - RNA, 19 nt, Artificial Sequence
  Description of Artificial Sequence: Synthetic oligonucleotide
  Sense strand starting at position 2945 of SEQ ID NO: 587612
acagguuuaagugagaggu

SEQ ID NO: 805177 - RNA, 19 nt, Artificial Sequence
  Description of Artificial Sequence: Synthetic oligonucleotide
  Antisense strand to SEQ ID NO: 805176
accucucacuuaaaccugu

SEQ ID NO: 805178 - RNA, 19 nt, Artificial Sequence
  Description of Artificial Sequence: Synthetic oligonucleotide
  Sense strand starting at position 2947 of SEQ ID NO: 587612
agguuuaagugagagguaa

SEQ ID NO: 805179 - RNA, 19 nt, Artificial Sequence
  Description of Artificial Sequence: Synthetic oligonucleotide
  Antisense strand to SEQ ID NO: 805178
uuaccucucacuuaaaccu

SEQ ID NO: 805180 - RNA, 19 nt, Artificial Sequence
  Description of Artificial Sequence: Synthetic oligonucleotide
  Sense strand starting at position 2949 of SEQ ID NO: 587612
guuuaagugagagguaaag

SEQ ID NO: 805181 - RNA, 19 nt, Artificial Sequence
  Description of Artificial Sequence: Synthetic oligonucleotide
  Antisense strand to SEQ ID NO: 805180
cuuuaccucucacuuaaac

SEQ ID NO: 805182 - RNA, 19 nt, Artificial Sequence
  Description of Artificial Sequence: Synthetic oligonucleotide
  Sense strand starting at position 3138 of SEQ ID NO: 587612
gcuaaucaguguucuguaa

SEQ ID NO: 805183 - RNA, 19 nt, Artificial Sequence
  Description of Artificial Sequence: Synthetic oligonucleotide
  Antisense strand to SEQ ID NO: 805182
uuacagaacacugauuagc

SEQ ID NO: 805184 - RNA, 19 nt, Artificial Sequence
  Description of Artificial Sequence: Synthetic oligonucleotide
  Sense strand starting at position 3142 of SEQ ID NO: 587612
aucaguguucuguaaagug

SEQ ID NO: 805185 - RNA, 19 nt, Artificial Sequence
  Description of Artificial Sequence: Synthetic oligonucleotide
  Antisense strand to SEQ ID NO: 805184
cacuuuacagaacacugau

SEQ ID NO: 805186 - RNA, 19 nt, Artificial Sequence
  Description of Artificial Sequence: Synthetic oligonucleotide
  Sense strand starting at position 3173 of SEQ ID NO: 587612
ggacuugggccgggacaaa

SEQ ID NO: 805187 - RNA, 19 nt, Artificial Sequence
  Description of Artificial Sequence: Synthetic oligonucleotide
  Antisense strand to SEQ ID NO: 805186
uuugucccggcccaagucc

SEQ ID NO: 805188 - RNA, 19 nt, Artificial Sequence
  Description of Artificial Sequence: Synthetic oligonucleotide
  Sense strand starting at position 3412 of SEQ ID NO: 587612
cugccuuaacacggugaga

SEQ ID NO: 805189 - RNA, 19 nt, Artificial Sequence
  Description of Artificial Sequence: Synthetic oligonucleotide
  Antisense strand to SEQ ID NO: 805188
ucucaccguguuaaggcag

SEQ ID NO: 805190 - RNA, 19 nt, Artificial Sequence
  Description of Artificial Sequence: Synthetic oligonucleotide
  Sense strand starting at position 3470 of SEQ ID NO: 587612
ggucguguaguccaagcua

SEQ ID NO: 805191 - RNA, 19 nt, Artificial Sequence
  Description of Artificial Sequence: Synthetic oligonucleotide
  Antisense strand to SEQ ID NO: 805190
uagcuuggacuacacgacc

SEQ ID NO: 805192 - RNA, 19 nt, Artificial Sequence
  Description of Artificial Sequence: Synthetic oligonucleotide
  Sense strand starting at position 3645 of SEQ ID NO: 587612
ggugacaagcuuuauucuu

SEQ ID NO: 805193 - RNA, 19 nt, Artificial Sequence
  Description of Artificial Sequence: Synthetic oligonucleotide
  Antisense strand to SEQ ID NO: 805192
aagaauaaagcuugucacc

SEQ ID NO: 805194 - RNA, 19 nt, Artificial Sequence
  Description of Artificial Sequence: Synthetic oligonucleotide
  Sense strand starting at position 3647 of SEQ ID NO: 587612
ugacaagcuuuauucuuga

SEQ ID NO: 805195 - RNA, 19 nt, Artificial Sequence
  Description of Artificial Sequence: Synthetic oligonucleotide
  Antisense strand to SEQ ID NO: 805194
ucaagaauaaagcuuguca

SEQ ID NO: 805196 - RNA, 19 nt, Artificial Sequence
  Description of Artificial Sequence: Synthetic oligonucleotide
  Sense strand starting at position 3778 of SEQ ID NO: 587612
acaaauguguugcauauca

SEQ ID NO: 805197 - RNA, 19 nt, Artificial Sequence
  Description of Artificial Sequence: Synthetic oligonucleotide
  Antisense strand to SEQ ID NO: 805196
ugauaugcaacacauuugu

SEQ ID NO: 805198 - RNA, 19 nt, Artificial Sequence
  Description of Artificial Sequence: Synthetic oligonucleotide
  Sense strand starting at position 3789 of SEQ ID NO: 587612
gcauaucaacuacauggua

SEQ ID NO: 805199 - RNA, 19 nt, Artificial Sequence
  Description of Artificial Sequence: Synthetic oligonucleotide
  Antisense strand to SEQ ID NO: 805198
uaccauguaguugauaugc

SEQ ID NO: 805200 - RNA, 19 nt, Artificial Sequence
  Description of Artificial Sequence: Synthetic oligonucleotide
  Sense strand starting at position 3802 of SEQ ID NO: 587612
augguaagaucuggaagag

SEQ ID NO: 805201 - RNA, 19 nt, Artificial Sequence
  Description of Artificial Sequence: Synthetic oligonucleotide
  Antisense strand to SEQ ID NO: 805200
cucuuccagaucuuaccau

SEQ ID NO: 805202 - RNA, 19 nt, Artificial Sequence
  Description of Artificial Sequence: Synthetic oligonucleotide
  Sense strand starting at position 459 of SEQ ID NO: 587613
agcugaaugucaucucucu

SEQ ID NO: 805203 - RNA, 19 nt, Artificial Sequence
  Description of Artificial Sequence: Synthetic oligonucleotide
  Antisense strand to SEQ ID NO: 805202
agagagaugacauucagcu

SEQ ID NO: 805204 - RNA, 19 nt, Artificial Sequence
  Description of Artificial Sequence: Synthetic oligonucleotide
  Sense strand starting at position 505 of SEQ ID NO: 587613
ugggcacuuuguucuauga

SEQ ID NO: 805205 - RNA, 19 nt, Artificial Sequence
  Description of Artificial Sequence: Synthetic oligonucleotide
  Antisense strand to SEQ ID NO: 805204
ucauagaacaaagugccca

SEQ ID NO: 805206 - RNA, 19 nt, Artificial Sequence
  Description of Artificial Sequence: Synthetic oligonucleotide
  Sense strand starting at position 552 of SEQ ID NO: 587613
gcccucccgaggugauaaa

SEQ ID NO: 805207 - RNA, 19 nt, Artificial Sequence
  Description of Artificial Sequence: Synthetic oligonucleotide
  Antisense strand to SEQ ID NO: 805206
uuuaucaccucgggagggc

SEQ ID NO: 805208 - RNA, 19 nt, Artificial Sequence
  Description of Artificial Sequence: Synthetic oligonucleotide
  Sense strand starting at position 684 of SEQ ID NO: 587613
uccauuaagccuggagcaa

SEQ ID NO: 805209 - RNA, 19 nt, Artificial Sequence
  Description of Artificial Sequence: Synthetic oligonucleotide
  Antisense strand to SEQ ID NO: 805208
uugcuccaggcuuaaugga

SEQ ID NO: 805210 - RNA, 19 nt, Artificial Sequence
  Description of Artificial Sequence: Synthetic oligonucleotide
  Sense strand starting at position 782 of SEQ ID NO: 587613
gguagagugcuucacaguu

SEQ ID NO: 805211 - RNA, 19 nt, Artificial Sequence
  Description of Artificial Sequence: Synthetic oligonucleotide
  Antisense strand to SEQ ID NO: 805210
aacugugaagcacucuacc

SEQ ID NO: 805212 - RNA, 19 nt, Artificial Sequence
  Description of Artificial Sequence: Synthetic oligonucleotide
  Sense strand starting at position 822 of SEQ ID NO: 587613
agcugaaugcucuaugcaa

SEQ ID NO: 805213 - RNA, 19 nt, Artificial Sequence
  Description of Artificial Sequence: Synthetic oligonucleotide
  Antisense strand to SEQ ID NO: 805212
uugcauagagcauucagcu

SEQ ID NO: 805214 - RNA, 19 nt, Artificial Sequence
  Description of Artificial Sequence: Synthetic oligonucleotide
  Sense strand starting at position 824 of SEQ ID NO: 587613
cugaaugcucuaugcaaac

SEQ ID NO: 805215 - RNA, 19 nt, Artificial Sequence
  Description of Artificial Sequence: Synthetic oligonucleotide
  Antisense strand to SEQ ID NO: 805214
guuugcauagagcauucag

SEQ ID NO: 805216 - RNA, 19 nt, Artificial Sequence
  Description of Artificial Sequence: Synthetic oligonucleotide
  Sense strand starting at position 846 of SEQ ID NO: 587613
agaggcucuuuccuaguaa

SEQ ID NO: 805217 - RNA, 19 nt, Artificial Sequence
  Description of Artificial Sequence: Synthetic oligonucleotide
  Antisense strand to SEQ ID NO: 805216
uuacuaggaaagagccucu

SEQ ID NO: 805218 - RNA, 19 nt, Artificial Sequence
  Description of Artificial Sequence: Synthetic oligonucleotide
  Sense strand starting at position 963 of SEQ ID NO: 587613
uggugugagggcuggauuu

SEQ ID NO: 805219 - RNA, 19 nt, Artificial Sequence
  Description of Artificial Sequence: Synthetic oligonucleotide
  Antisense strand to SEQ ID NO: 805218
aaauccagcccucacacca

SEQ ID NO: 805220 - RNA, 19 nt, Artificial Sequence
  Description of Artificial Sequence: Synthetic oligonucleotide
  Sense strand starting at position 1001 of SEQ ID NO: 587613
uugcccuaaucucugguaa

SEQ ID NO: 805221 - RNA, 19 nt, Artificial Sequence
  Description of Artificial Sequence: Synthetic oligonucleotide
  Antisense strand to SEQ ID NO: 805220
uuaccagagauuagggcaa

SEQ ID NO: 805222 - RNA, 19 nt, Artificial Sequence
  Description of Artificial Sequence: Synthetic oligonucleotide
  Sense strand starting at position 1002 of SEQ ID NO: 587613
ugcccuaaucucugguaaa

SEQ ID NO: 805223 - RNA, 19 nt, Artificial Sequence
  Description of Artificial Sequence: Synthetic oligonucleotide
  Antisense strand to SEQ ID NO: 805222
uuuaccagagauuagggca

SEQ ID NO: 805224 - RNA, 19 nt, Artificial Sequence
  Description of Artificial Sequence: Synthetic oligonucleotide
  Sense strand starting at position 1179 of SEQ ID NO: 587613
ugugcuuccagaugagaac

SEQ ID NO: 805225 - RNA, 19 nt, Artificial Sequence
  Description of Artificial Sequence: Synthetic oligonucleotide
  Antisense strand to SEQ ID NO: 805224
guucucaucuggaagcaca

SEQ ID NO: 805226 - RNA, 19 nt, Artificial Sequence
  Description of Artificial Sequence: Synthetic oligonucleotide
  Sense strand starting at position 1180 of SEQ ID NO: 587613
gugcuuccagaugagaaca

SEQ ID NO: 805227 - RNA, 19 nt, Artificial Sequence
  Description of Artificial Sequence: Synthetic oligonucleotide
  Antisense strand to SEQ ID NO: 805226
uguucucaucuggaagcac

SEQ ID NO: 805228 - RNA, 19 nt, Artificial Sequence
  Description of Artificial Sequence: Synthetic oligonucleotide
  Sense strand starting at position 1232 of SEQ ID NO: 587613
ccuggauccuacguugaca

SEQ ID NO: 805229 - RNA, 19 nt, Artificial Sequence
  Description of Artificial Sequence: Synthetic oligonucleotide
  Antisense strand to SEQ ID NO: 805228
ugucaacguaggauccagg

SEQ ID NO: 805230 - RNA, 19 nt, Artificial Sequence
  Description of Artificial Sequence: Synthetic oligonucleotide
  Sense strand starting at position 1234 of SEQ ID NO: 587613
uggauccuacguugacaau

SEQ ID NO: 805231 - RNA, 19 nt, Artificial Sequence
  Description of Artificial Sequence: Synthetic oligonucleotide
  Antisense strand to SEQ ID NO: 805230
auugucaacguaggaucca

SEQ ID NO: 805232 - RNA, 19 nt, Artificial Sequence
  Description of Artificial Sequence: Synthetic oligonucleotide
  Sense strand starting at position 1339 of SEQ ID NO: 587613
gggacugagcgaugcucua

SEQ ID NO: 805233 - RNA, 19 nt, Artificial Sequence
  Description of Artificial Sequence: Synthetic oligonucleotide
  Antisense strand to SEQ ID NO: 805232
uagagcaucgcucaguccc

SEQ ID NO: 805234 - RNA, 19 nt, Artificial Sequence
  Description of Artificial Sequence: Synthetic oligonucleotide
  Sense strand starting at position 1547 of SEQ ID NO: 587613
uuucuagcugauuggagaa

SEQ ID NO: 805235 - RNA, 19 nt, Artificial Sequence
  Description of Artificial Sequence: Synthetic oligonucleotide
  Antisense strand to SEQ ID NO: 805234
uucuccaaucagcuagaaa

SEQ ID NO: 805236 - RNA, 19 nt, Artificial Sequence
  Description of Artificial Sequence: Synthetic oligonucleotide
  Sense strand starting at position 1673 of SEQ ID NO: 587613
ucuggcugaccuugaugua

SEQ ID NO: 805237 - RNA, 19 nt, Artificial Sequence
  Description of Artificial Sequence: Synthetic oligonucleotide
  Antisense strand to SEQ ID NO: 805236
uacaucaaggucagccaga

SEQ ID NO: 805238 - RNA, 19 nt, Artificial Sequence
  Description of Artificial Sequence: Synthetic oligonucleotide
  Sense strand starting at position 1691 of SEQ ID NO: 587613
agaagaagucuucgcucuu

SEQ ID NO: 805239 - RNA, 19 nt, Artificial Sequence
  Description of Artificial Sequence: Synthetic oligonucleotide
  Antisense strand to SEQ ID NO: 805238
aagagcgaagacuucuucu

SEQ ID NO: 805240 - RNA, 19 nt, Artificial Sequence
  Description of Artificial Sequence: Synthetic oligonucleotide
  Sense strand starting at position 1692 of SEQ ID NO: 587613
gaagaagucuucgcucuug

SEQ ID NO: 805241 - RNA, 19 nt, Artificial Sequence
  Description of Artificial Sequence: Synthetic oligonucleotide
  Antisense strand to SEQ ID NO: 805240
caagagcgaagacuucuuc

SEQ ID NO: 805242 - RNA, 19 nt, Artificial Sequence
  Description of Artificial Sequence: Synthetic oligonucleotide
  Sense strand starting at position 1737 of SEQ ID NO: 587613
accggaguccugggagaag

SEQ ID NO: 805243 - RNA, 19 nt, Artificial Sequence
  Description of Artificial Sequence: Synthetic oligonucleotide
  Antisense strand to SEQ ID NO: 805242
cuucucccaggacuccggu

SEQ ID NO: 805244 - RNA, 19 nt, Artificial Sequence
  Description of Artificial Sequence: Synthetic oligonucleotide
  Sense strand starting at position 2014 of SEQ ID NO: 587613
agccguagaccuggaagaa

SEQ ID NO: 805245 - RNA, 19 nt, Artificial Sequence
  Description of Artificial Sequence: Synthetic oligonucleotide
  Antisense strand to SEQ ID NO: 805244
uucuuccaggucuacggcu

SEQ ID NO: 805246 - RNA, 19 nt, Artificial Sequence
  Description of Artificial Sequence: Synthetic oligonucleotide
  Sense strand starting at position 2090 of SEQ ID NO: 587613
cuuccagaucugggcagua

SEQ ID NO: 805247 - RNA, 19 nt, Artificial Sequence
  Description of Artificial Sequence: Synthetic oligonucleotide
  Antisense strand to SEQ ID NO: 805246
uacugcccagaucuggaag

SEQ ID NO: 805248 - RNA, 19 nt, Artificial Sequence
  Description of Artificial Sequence: Synthetic oligonucleotide
  Sense strand starting at position 2092 of SEQ ID NO: 587613
uccagaucugggcaguaga

SEQ ID NO: 805249 - RNA, 19 nt, Artificial Sequence
  Description of Artificial Sequence: Synthetic oligonucleotide
  Antisense strand to SEQ ID NO: 805248
ucuacugcccagaucugga

SEQ ID NO: 805250 - RNA, 19 nt, Artificial Sequence
  Description of Artificial Sequence: Synthetic oligonucleotide
  Sense strand starting at position 2268 of SEQ ID NO: 587613
cccugcauuccuggaacuu

SEQ ID NO: 805251 - RNA, 19 nt, Artificial Sequence
  Description of Artificial Sequence: Synthetic oligonucleotide
  Antisense strand to SEQ ID NO: 805250
aaguuccaggaaugcaggg

SEQ ID NO: 805252 - RNA, 19 nt, Artificial Sequence
  Description of Artificial Sequence: Synthetic oligonucleotide
  Sense strand starting at position 2588 of SEQ ID NO: 587613
gccugugcaacuuagagaa

SEQ ID NO: 805253 - RNA, 19 nt, Artificial Sequence
  Description of Artificial Sequence: Synthetic oligonucleotide
  Antisense strand to SEQ ID NO: 805252
uucucuaaguugcacaggc

SEQ ID NO: 805254 - RNA, 19 nt, Artificial Sequence
  Description of Artificial Sequence: Synthetic oligonucleotide
  Sense strand starting at position 2812 of SEQ ID NO: 587613
ugaggugcaagucauauga

SEQ ID NO: 805255 - RNA, 19 nt, Artificial Sequence
  Description of Artificial Sequence: Synthetic oligonucleotide
  Antisense strand to SEQ ID NO: 805254
ucauaugacuugcaccuca

SEQ ID NO: 805256 - RNA, 19 nt, Artificial Sequence
  Description of Artificial Sequence: Synthetic oligonucleotide
  Sense strand starting at position 3018 of SEQ ID NO: 587613
cucaaagagcucuggcuuu

SEQ ID NO: 805257 - RNA, 19 nt, Artificial Sequence
  Description of Artificial Sequence: Synthetic oligonucleotide
  Antisense strand to SEQ ID NO: 805256
aaagccagagcucuuugag

SEQ ID NO: 805258 - RNA, 19 nt, Artificial Sequence
  Description of Artificial Sequence: Synthetic oligonucleotide
  Sense strand starting at position 3033 of SEQ ID NO: 587613
cuuugcuuggguugagaca

SEQ ID NO: 805259 - RNA, 19 nt, Artificial Sequence
  Description of Artificial Sequence: Synthetic oligonucleotide
  Antisense strand to SEQ ID NO: 805258
ugucucaacccaagcaaag

SEQ ID NO: 805260 - RNA, 19 nt, Artificial Sequence
  Description of Artificial Sequence: Synthetic oligonucleotide
  Sense strand starting at position 3157 of SEQ ID NO: 587613
gauagaagugguggccaau

SEQ ID NO: 805261 - RNA, 19 nt, Artificial Sequence
  Description of Artificial Sequence: Synthetic oligonucleotide
  Antisense strand to SEQ ID NO: 805260
auuggccaccacuucuauc

SEQ ID NO: 805262 - RNA, 19 nt, Artificial Sequence
  Description of Artificial Sequence: Synthetic oligonucleotide
  Sense strand starting at position 3171 of SEQ ID NO: 587613
ccaauuacaggcuaauagu

SEQ ID NO: 805263 - RNA, 19 nt, Artificial Sequence
  Description of Artificial Sequence: Synthetic oligonucleotide
  Antisense strand to SEQ ID NO: 805262
acuauuagccuguaauugg

SEQ ID NO: 805264 - RNA, 19 nt, Artificial Sequence
  Description of Artificial Sequence: Synthetic oligonucleotide
  Sense strand starting at position 3361 of SEQ ID NO: 587613
gcugacaggacuugcuaaa

SEQ ID NO: 805265 - RNA, 19 nt, Artificial Sequence
  Description of Artificial Sequence: Synthetic oligonucleotide
  Antisense strand to SEQ ID NO: 805264
uuuagcaaguccugucagc

SEQ ID NO: 805266 - RNA, 19 nt, Artificial Sequence
  Description of Artificial Sequence: Synthetic oligonucleotide
  Sense strand starting at position 3429 of SEQ ID NO: 587613
aagagaggaguuugguuga

SEQ ID NO: 805267 - RNA, 19 nt, Artificial Sequence
  Description of Artificial Sequence: Synthetic oligonucleotide
  Antisense strand to SEQ ID NO: 805266
ucaaccaaacuccucucuu

SEQ ID NO: 805268 - RNA, 19 nt, Artificial Sequence
  Description of Artificial Sequence: Synthetic oligonucleotide
  Sense strand starting at position 3432 of SEQ ID NO: 587613
agaggaguuugguugaaga

SEQ ID NO: 805269 - RNA, 19 nt, Artificial Sequence
  Description of Artificial Sequence: Synthetic oligonucleotide
  Antisense strand to SEQ ID NO: 805268
ucuucaaccaaacuccucu

SEQ ID NO: 805270 - RNA, 19 nt, Artificial Sequence
  Description of Artificial Sequence: Synthetic oligonucleotide
  Sense strand starting at position 3472 of SEQ ID NO: 587613
uuggcauccagggagugau

SEQ ID NO: 805271 - RNA, 19 nt, Artificial Sequence
  Description of Artificial Sequence: Synthetic oligonucleotide
  Antisense strand to SEQ ID NO: 805270
aucacucccuggaugccaa

SEQ ID NO: 805272 - RNA, 19 nt, Artificial Sequence
  Description of Artificial Sequence: Synthetic oligonucleotide
  Sense strand starting at position 3558 of SEQ ID NO: 587613
uguggaaguggcuaugaga

SEQ ID NO: 805273 - RNA, 19 nt, Artificial Sequence
  Description of Artificial Sequence: Synthetic oligonucleotide
  Antisense strand to SEQ ID NO: 805272
ucucauagccacuuccaca

SEQ ID NO: 805274 - RNA, 19 nt, Artificial Sequence
  Description of Artificial Sequence: Synthetic oligonucleotide
  Sense strand starting at position 3617 of SEQ ID NO: 587613
gaggccugaggaugguuaa

SEQ ID NO: 805275 - RNA, 19 nt, Artificial Sequence
  Description of Artificial Sequence: Synthetic oligonucleotide
  Antisense strand to SEQ ID NO: 805274
uuaaccauccucaggccuc

SEQ ID NO: 805276 - RNA, 19 nt, Artificial Sequence
  Description of Artificial Sequence: Synthetic oligonucleotide
  Sense strand starting at position 3620 of SEQ ID NO: 587613
gccugaggaugguuaacau

SEQ ID NO: 805277 - RNA, 19 nt, Artificial Sequence
  Description of Artificial Sequence: Synthetic oligonucleotide
  Antisense strand to SEQ ID NO: 805276
auguuaaccauccucaggc

SEQ ID NO: 805278 - RNA, 19 nt, Artificial Sequence
  Description of Artificial Sequence: Synthetic oligonucleotide
  Sense strand starting at position 3705 of SEQ ID NO: 587613
cagggugaugucgauauag

SEQ ID NO: 805279 - RNA, 19 nt, Artificial Sequence
  Description of Artificial Sequence: Synthetic oligonucleotide
  Antisense strand to SEQ ID NO: 805278
cuauaucgacaucacccug

SEQ ID NO: 805280 - RNA, 19 nt, Artificial Sequence
  Description of Artificial Sequence: Synthetic oligonucleotide
  Sense strand starting at position 3707 of SEQ ID NO: 587613
gggugaugucgauauagaa

SEQ ID NO: 805281 - RNA, 19 nt, Artificial Sequence
  Description of Artificial Sequence: Synthetic oligonucleotide
  Antisense strand to SEQ ID NO: 805280
uucuauaucgacaucaccc

SEQ ID NO: 805282 - RNA, 19 nt, Artificial Sequence
  Description of Artificial Sequence: Synthetic oligonucleotide
  Sense strand starting at position 524 of SEQ ID NO: 587614
agcucucaauccuauagga

SEQ ID NO: 805283 - RNA, 19 nt, Artificial Sequence
  Description of Artificial Sequence: Synthetic oligonucleotide
  Antisense strand to SEQ ID NO: 805282
uccuauaggauugagagcu

SEQ ID NO: 805284 - RNA, 19 nt, Artificial Sequence
  Description of Artificial Sequence: Synthetic oligonucleotide
  Sense strand starting at position 595 of SEQ ID NO: 587614
cagugugaccuccgagaug

SEQ ID NO: 805285 - RNA, 19 nt, Artificial Sequence
  Description of Artificial Sequence: Synthetic oligonucleotide
  Antisense strand to SEQ ID NO: 805284
caucucggaggucacacug

SEQ ID NO: 805286 - RNA, 19 nt, Artificial Sequence
  Description of Artificial Sequence: Synthetic oligonucleotide
  Sense strand starting at position 992 of SEQ ID NO: 587614
acgcgaguucugggacuag

SEQ ID NO: 805287 - RNA, 19 nt, Artificial Sequence
  Description of Artificial Sequence: Synthetic oligonucleotide
  Antisense strand to SEQ ID NO: 805286
cuagucccagaacucgcgu

SEQ ID NO: 805288 - RNA, 19 nt, Artificial Sequence
  Description of Artificial Sequence: Synthetic oligonucleotide
  Sense strand starting at position 1049 of SEQ ID NO: 587614
ggcugagauuguugcucaa

SEQ ID NO: 805289 - RNA, 19 nt, Artificial Sequence
  Description of Artificial Sequence: Synthetic oligonucleotide
  Antisense strand to SEQ ID NO: 805288
uugagcaacaaucucagcc

SEQ ID NO: 805290 - RNA, 19 nt, Artificial Sequence
  Description of Artificial Sequence: Synthetic oligonucleotide
  Sense strand starting at position 1051 of SEQ ID NO: 587614
cugagauuguugcucaaca

SEQ ID NO: 805291 - RNA, 19 nt, Artificial Sequence
  Description of Artificial Sequence: Synthetic oligonucleotide
  Antisense strand to SEQ ID NO: 805290
uguugagcaacaaucucag

SEQ ID NO: 805292 - RNA, 19 nt, Artificial Sequence
  Description of Artificial Sequence: Synthetic oligonucleotide
  Sense strand starting at position 1052 of SEQ ID NO: 587614
ugagauuguugcucaacau

SEQ ID NO: 805293 - RNA, 19 nt, Artificial Sequence
  Description of Artificial Sequence: Synthetic oligonucleotide
  Antisense strand to SEQ ID NO: 805292
auguugagcaacaaucuca

SEQ ID NO: 805294 - RNA, 19 nt, Artificial Sequence
  Description of Artificial Sequence: Synthetic oligonucleotide
  Sense strand starting at position 1053 of SEQ ID NO: 587614
gagauuguugcucaacauu

SEQ ID NO: 805295 - RNA, 19 nt, Artificial Sequence
  Description of Artificial Sequence: Synthetic oligonucleotide
  Antisense strand to SEQ ID NO: 805294
aauguugagcaacaaucuc

SEQ ID NO: 805296 - RNA, 19 nt, Artificial Sequence
  Description of Artificial Sequence: Synthetic oligonucleotide
  Sense strand starting at position 2017 of SEQ ID NO: 587614
uacgucuacugguuaugga

SEQ ID NO: 805297 - RNA, 19 nt, Artificial Sequence
  Description of Artificial Sequence: Synthetic oligonucleotide
  Antisense strand to SEQ ID NO: 805296
uccauaaccaguagacgua

SEQ ID NO: 805298 - RNA, 19 nt, Artificial Sequence
  Description of Artificial Sequence: Synthetic oligonucleotide
  Sense strand starting at position 2046 of SEQ ID NO: 587614
cacucuucucgucguacua

SEQ ID NO: 805299 - RNA, 19 nt, Artificial Sequence
  Description of Artificial Sequence: Synthetic oligonucleotide
  Antisense strand to SEQ ID NO: 805298
uaguacgacgagaagagug

SEQ ID NO: 805300 - RNA, 19 nt, Artificial Sequence
  Description of Artificial Sequence: Synthetic oligonucleotide
  Sense strand starting at position 2242 of SEQ ID NO: 587614
gccguuaggcgcugggaua

SEQ ID NO: 805301 - RNA, 19 nt, Artificial Sequence
  Description of Artificial Sequence: Synthetic oligonucleotide
  Antisense strand to SEQ ID NO: 805300
uaucccagcgccuaacggc

SEQ ID NO: 805302 - RNA, 19 nt, Artificial Sequence
  Description of Artificial Sequence: Synthetic oligonucleotide
  Sense strand starting at position 2458 of SEQ ID NO: 587614
guguccauuugugggcaaa

SEQ ID NO: 805303 - RNA, 19 nt, Artificial Sequence
  Description of Artificial Sequence: Synthetic oligonucleotide
  Antisense strand to SEQ ID NO: 805302
uuugcccacaaauggacac

SEQ ID NO: 805304 - RNA, 19 nt, Artificial Sequence
  Description of Artificial Sequence: Synthetic oligonucleotide
  Sense strand starting at position 2459 of SEQ ID NO: 587614
uguccauuugugggcaaag

SEQ ID NO: 805305 - RNA, 19 nt, Artificial Sequence
  Description of Artificial Sequence: Synthetic oligonucleotide
  Antisense strand to SEQ ID NO: 805304
cuuugcccacaaauggaca

SEQ ID NO: 805306 - RNA, 19 nt, Artificial Sequence
  Description of Artificial Sequence: Synthetic oligonucleotide
  Sense strand starting at position 2949 of SEQ ID NO: 587614
gcaguuauguuucuuugcu

SEQ ID NO: 805307 - RNA, 19 nt, Artificial Sequence
  Description of Artificial Sequence: Synthetic oligonucleotide
  Antisense strand to SEQ ID NO: 805306
agcaaagaaacauaacugc

SEQ ID NO: 805308 - RNA, 19 nt, Artificial Sequence
  Description of Artificial Sequence: Synthetic oligonucleotide
  Sense strand starting at position 3043 of SEQ ID NO: 587614
uugugaggauuugaugaua

SEQ ID NO: 805309 - RNA, 19 nt, Artificial Sequence
  Description of Artificial Sequence: Synthetic oligonucleotide
  Antisense strand to SEQ ID NO: 805308
uaucaucaaauccucacaa

SEQ ID NO: 805310 - RNA, 19 nt, Artificial Sequence
  Description of Artificial Sequence: Synthetic oligonucleotide
  Sense strand starting at position 3071 of SEQ ID NO: 587614
ggcuuaggaccguguaaau

SEQ ID NO: 805311 - RNA, 19 nt, Artificial Sequence
  Description of Artificial Sequence: Synthetic oligonucleotide
  Antisense strand to SEQ ID NO: 805310
auuuacacgguccuaagcc

SEQ ID NO: 805312 - RNA, 19 nt, Artificial Sequence
  Description of Artificial Sequence: Synthetic oligonucleotide
  Sense strand starting at position 3078 of SEQ ID NO: 587614
gaccguguaaauggucuau

SEQ ID NO: 805313 - RNA, 19 nt, Artificial Sequence
  Description of Artificial Sequence: Synthetic oligonucleotide
  Antisense strand to SEQ ID NO: 805312
auagaccauuuacacgguc

SEQ ID NO: 805314 - RNA, 19 nt, Artificial Sequence
  Description of Artificial Sequence: Synthetic oligonucleotide
  Sense strand starting at position 3080 of SEQ ID NO: 587614
ccguguaaauggucuauaa

SEQ ID NO: 805315 - RNA, 19 nt, Artificial Sequence
  Description of Artificial Sequence: Synthetic oligonucleotide
  Antisense strand to SEQ ID NO: 805314
uuauagaccauuuacacgg

SEQ ID NO: 805316 - RNA, 19 nt, Artificial Sequence
  Description of Artificial Sequence: Synthetic oligonucleotide
  Sense strand starting at position 3082 of SEQ ID NO: 587614
guguaaauggucuauaaau

SEQ ID NO: 805317 - RNA, 19 nt, Artificial Sequence
  Description of Artificial Sequence: Synthetic oligonucleotide
  Antisense strand to SEQ ID NO: 805316
auuuauagaccauuuacac

SEQ ID NO: 805318 - RNA, 19 nt, Artificial Sequence
  Description of Artificial Sequence: Synthetic oligonucleotide
  Sense strand starting at position 3084 of SEQ ID NO: 587614
guaaauggucuauaaaugu

SEQ ID NO: 805319 - RNA, 19 nt, Artificial Sequence
  Description of Artificial Sequence: Synthetic oligonucleotide
  Antisense strand to SEQ ID NO: 805318
acauuuauagaccauuuac

SEQ ID NO: 805320 - RNA, 19 nt, Artificial Sequence
  Description of Artificial Sequence: Synthetic oligonucleotide
  Sense strand starting at position 3201 of SEQ ID NO: 587614
gucaguuuccuacaccauc

SEQ ID NO: 805321 - RNA, 19 nt, Artificial Sequence
  Description of Artificial Sequence: Synthetic oligonucleotide
  Antisense strand to SEQ ID NO: 805320
gaugguguaggaaacugac

SEQ ID NO: 805322 - RNA, 19 nt, Artificial Sequence
  Description of Artificial Sequence: Synthetic oligonucleotide
  Sense strand starting at position 3349 of SEQ ID NO: 587614
aauggucagugcccuguaa

SEQ ID NO: 805323 - RNA, 19 nt, Artificial Sequence
  Description of Artificial Sequence: Synthetic oligonucleotide
  Antisense strand to SEQ ID NO: 805322
uuacagggcacugaccauu

SEQ ID NO: 805324 - RNA, 19 nt, Artificial Sequence
  Description of Artificial Sequence: Synthetic oligonucleotide
  Sense strand starting at position 3351 of SEQ ID NO: 587614
uggucagugcccuguaaug

SEQ ID NO: 805325 - RNA, 19 nt, Artificial Sequence
  Description of Artificial Sequence: Synthetic oligonucleotide
  Antisense strand to SEQ ID NO: 805324
cauuacagggcacugacca

SEQ ID NO: 805326 - RNA, 19 nt, Artificial Sequence
  Description of Artificial Sequence: Synthetic oligonucleotide
  Sense strand starting at position 3353 of SEQ ID NO: 587614
gucagugcccuguaaugga

SEQ ID NO: 805327 - RNA, 19 nt, Artificial Sequence
  Description of Artificial Sequence: Synthetic oligonucleotide
  Antisense strand to SEQ ID NO: 805326
uccauuacagggcacugac

SEQ ID NO: 805328 - RNA, 19 nt, Artificial Sequence
  Description of Artificial Sequence: Synthetic oligonucleotide
  Sense strand starting at position 3357 of SEQ ID NO: 587614
gugcccuguaauggauaca

SEQ ID NO: 805329 - RNA, 19 nt, Artificial Sequence
  Description of Artificial Sequence: Synthetic oligonucleotide
  Antisense strand to SEQ ID NO: 805328
uguauccauuacagggcac

SEQ ID NO: 805330 - RNA, 19 nt, Artificial Sequence
  Description of Artificial Sequence: Synthetic oligonucleotide
  Sense strand starting at position 3483 of SEQ ID NO: 587614
ccuggaguagcuuggagua

SEQ ID NO: 805331 - RNA, 19 nt, Artificial Sequence
  Description of Artificial Sequence: Synthetic oligonucleotide
  Antisense strand to SEQ ID NO: 805330
uacuccaagcuacuccagg

SEQ ID NO: 805332 - RNA, 19 nt, Artificial Sequence
  Description of Artificial Sequence: Synthetic oligonucleotide
  Sense strand starting at position 3660 of SEQ ID NO: 587614
ggaccugugugagaagaca

SEQ ID NO: 805333 - RNA, 19 nt, Artificial Sequence
  Description of Artificial Sequence: Synthetic oligonucleotide
  Antisense strand to SEQ ID NO: 805332
ugucuucucacacaggucc

SEQ ID NO: 805334 - RNA, 19 nt, Artificial Sequence
  Description of Artificial Sequence: Synthetic oligonucleotide
  Sense strand starting at position 3749 of SEQ ID NO: 587614
agaguucugcaguggcaag

SEQ ID NO: 805335 - RNA, 19 nt, Artificial Sequence
  Description of Artificial Sequence: Synthetic oligonucleotide
  Antisense strand to SEQ ID NO: 805334
cuugccacugcagaacucu

SEQ ID NO: 805336 - RNA, 19 nt, Artificial Sequence
  Description of Artificial Sequence: Synthetic oligonucleotide
  Sense strand starting at position 3792 of SEQ ID NO: 587614
gaaggauguuucuagagau

SEQ ID NO: 805337 - RNA, 19 nt, Artificial Sequence
  Description of Artificial Sequence: Synthetic oligonucleotide
  Antisense strand to SEQ ID NO: 805336
aucucuagaaacauccuuc

SEQ ID NO: 805338 - RNA, 19 nt, Artificial Sequence
  Description of Artificial Sequence: Synthetic oligonucleotide
  Sense strand starting at position 42 of SEQ ID NO: 587615
cuagaaauacugugcauua

SEQ ID NO: 805339 - RNA, 19 nt, Artificial Sequence
  Description of Artificial Sequence: Synthetic oligonucleotide
  Antisense strand to SEQ ID NO: 805338
uaaugcacaguauuucuag

SEQ ID NO: 805340 - RNA, 19 nt, Artificial Sequence
  Description of Artificial Sequence: Synthetic oligonucleotide
  Sense strand starting at position 44 of SEQ ID NO: 587615
agaaauacugugcauuacu

SEQ ID NO: 805341 - RNA, 19 nt, Artificial Sequence
  Description of Artificial Sequence: Synthetic oligonucleotide
  Antisense strand to SEQ ID NO: 805340
aguaaugcacaguauuucu

SEQ ID NO: 805342 - RNA, 19 nt, Artificial Sequence
  Description of Artificial Sequence: Synthetic oligonucleotide
  Sense strand starting at position 116 of SEQ ID NO: 587615
acagauauguucuggugca

SEQ ID NO: 805343 - RNA, 19 nt, Artificial Sequence
  Description of Artificial Sequence: Synthetic oligonucleotide
  Antisense strand to SEQ ID NO: 805342
ugcaccagaacauaucugu

SEQ ID NO: 805344 - RNA, 19 nt, Artificial Sequence
  Description of Artificial Sequence: Synthetic oligonucleotide
  Sense strand starting at position 117 of SEQ ID NO: 587615
cagauauguucuggugcau

SEQ ID NO: 805345 - RNA, 19 nt, Artificial Sequence
  Description of Artificial Sequence: Synthetic oligonucleotide
  Antisense strand to SEQ ID NO: 805344
augcaccagaacauaucug

SEQ ID NO: 805346 - RNA, 19 nt, Artificial Sequence
  Description of Artificial Sequence: Synthetic oligonucleotide
  Sense strand starting at position 641 of SEQ ID NO: 587615
gacgcuuggaaagaaguua

SEQ ID NO: 805347 - RNA, 19 nt, Artificial Sequence
  Description of Artificial Sequence: Synthetic oligonucleotide
  Antisense strand to SEQ ID NO: 805346
uaacuucuuuccaagcguc

SEQ ID NO: 805348 - RNA, 19 nt, Artificial Sequence
  Description of Artificial Sequence: Synthetic oligonucleotide
  Sense strand starting at position 652 of SEQ ID NO: 587615
agaaguuagaccuggcuca

SEQ ID NO: 805349 - RNA, 19 nt, Artificial Sequence
  Description of Artificial Sequence: Synthetic oligonucleotide
  Antisense strand to SEQ ID NO: 805348
ugagccaggucuaacuucu

SEQ ID NO: 805350 - RNA, 19 nt, Artificial Sequence
  Description of Artificial Sequence: Synthetic oligonucleotide
  Sense strand starting at position 653 of SEQ ID NO: 587615
gaaguuagaccuggcucaa

SEQ ID NO: 805351 - RNA, 19 nt, Artificial Sequence
  Description of Artificial Sequence: Synthetic oligonucleotide
  Antisense strand to SEQ ID NO: 805350
uugagccaggucuaacuuc

SEQ ID NO: 805352 - RNA, 19 nt, Artificial Sequence
  Description of Artificial Sequence: Synthetic oligonucleotide
  Sense strand starting at position 664 of SEQ ID NO: 587615
uggcucaaguuuccuuaga

SEQ ID NO: 805353 - RNA, 19 nt, Artificial Sequence
  Description of Artificial Sequence: Synthetic oligonucleotide
  Antisense strand to SEQ ID NO: 805352
ucuaaggaaacuugagcca

SEQ ID NO: 805354 - RNA, 19 nt, Artificial Sequence
  Description of Artificial Sequence: Synthetic oligonucleotide
  Sense strand starting at position 665 of SEQ ID NO: 587615
ggcucaaguuuccuuagaa

SEQ ID NO: 805355 - RNA, 19 nt, Artificial Sequence
  Description of Artificial Sequence: Synthetic oligonucleotide
  Antisense strand to SEQ ID NO: 805354
uucuaaggaaacuugagcc

SEQ ID NO: 805356 - RNA, 19 nt, Artificial Sequence
  Description of Artificial Sequence: Synthetic oligonucleotide
  Sense strand starting at position 666 of SEQ ID NO: 587615
gcucaaguuuccuuagaaa

SEQ ID NO: 805357 - RNA, 19 nt, Artificial Sequence
  Description of Artificial Sequence: Synthetic oligonucleotide
  Antisense strand to SEQ ID NO: 805356
uuucuaaggaaacuugagc

SEQ ID NO: 805358 - RNA, 19 nt, Artificial Sequence
  Description of Artificial Sequence: Synthetic oligonucleotide
  Sense strand starting at position 1020 of SEQ ID NO: 587615
ccgccagcuucucguauuu

SEQ ID NO: 805359 - RNA, 19 nt, Artificial Sequence
  Description of Artificial Sequence: Synthetic oligonucleotide
  Antisense strand to SEQ ID NO: 805358
aaauacgagaagcuggcgg

SEQ ID NO: 805360 - RNA, 19 nt, Artificial Sequence
  Description of Artificial Sequence: Synthetic oligonucleotide
  Sense strand starting at position 1022 of SEQ ID NO: 587615
gccagcuucucguauuucu

SEQ ID NO: 805361 - RNA, 19 nt, Artificial Sequence
  Description of Artificial Sequence: Synthetic oligonucleotide
  Antisense strand to SEQ ID NO: 805360
agaaauacgagaagcuggc

SEQ ID NO: 805362 - RNA, 19 nt, Artificial Sequence
  Description of Artificial Sequence: Synthetic oligonucleotide
  Sense strand starting at position 1031 of SEQ ID NO: 587615
ucguauuucuccuuguaca

SEQ ID NO: 805363 - RNA, 19 nt, Artificial Sequence
  Description of Artificial Sequence: Synthetic oligonucleotide
  Antisense strand to SEQ ID NO: 805362
uguacaaggagaaauacga

SEQ ID NO: 805364 - RNA, 19 nt, Artificial Sequence
  Description of Artificial Sequence: Synthetic oligonucleotide
  Sense strand starting at position 1032 of SEQ ID NO: 587615
cguauuucuccuuguacag

SEQ ID NO: 805365 - RNA, 19 nt, Artificial Sequence
  Description of Artificial Sequence: Synthetic oligonucleotide
  Antisense strand to SEQ ID NO: 805364
cuguacaaggagaaauacg

SEQ ID NO: 805366 - RNA, 19 nt, Artificial Sequence
  Description of Artificial Sequence: Synthetic oligonucleotide
  Sense strand starting at position 1116 of SEQ ID NO: 587615
acuucucgcucuccagaau

SEQ ID NO: 805367 - RNA, 19 nt, Artificial Sequence
  Description of Artificial Sequence: Synthetic oligonucleotide
  Antisense strand to SEQ ID NO: 805366
auucuggagagcgagaagu

SEQ ID NO: 805368 - RNA, 19 nt, Artificial Sequence
  Description of Artificial Sequence: Synthetic oligonucleotide
  Sense strand starting at position 1613 of SEQ ID NO: 587615
ccgcucauccaguacagau

SEQ ID NO: 805369 - RNA, 19 nt, Artificial Sequence
  Description of Artificial Sequence: Synthetic oligonucleotide
  Antisense strand to SEQ ID NO: 805368
aucuguacuggaugagcgg

SEQ ID NO: 805370 - RNA, 19 nt, Artificial Sequence
  Description of Artificial Sequence: Synthetic oligonucleotide
  Sense strand starting at position 1887 of SEQ ID NO: 587615
cgaacuucaucaggucgaa

SEQ ID NO: 805371 - RNA, 19 nt, Artificial Sequence
  Description of Artificial Sequence: Synthetic oligonucleotide
  Antisense strand to SEQ ID NO: 805370
uucgaccugaugaaguucg

SEQ ID NO: 805372 - RNA, 19 nt, Artificial Sequence
  Description of Artificial Sequence: Synthetic oligonucleotide
  Sense strand starting at position 1899 of SEQ ID NO: 587615
ggucgaagucguugacgua

SEQ ID NO: 805373 - RNA, 19 nt, Artificial Sequence
  Description of Artificial Sequence: Synthetic oligonucleotide
  Antisense strand to SEQ ID NO: 805372
uacgucaacgacuucgacc

SEQ ID NO: 805374 - RNA, 19 nt, Artificial Sequence
  Description of Artificial Sequence: Synthetic oligonucleotide
  Sense strand starting at position 2441 of SEQ ID NO: 587615
cugucaaucuccugcggga

SEQ ID NO: 805375 - RNA, 19 nt, Artificial Sequence
  Description of Artificial Sequence: Synthetic oligonucleotide
  Antisense strand to SEQ ID NO: 805374
ucccgcaggagauugacag

SEQ ID NO: 805376 - RNA, 19 nt, Artificial Sequence
  Description of Artificial Sequence: Synthetic oligonucleotide
  Sense strand starting at position 2443 of SEQ ID NO: 587615
gucaaucuccugcgggaaa

SEQ ID NO: 805377 - RNA, 19 nt, Artificial Sequence
  Description of Artificial Sequence: Synthetic oligonucleotide
  Antisense strand to SEQ ID NO: 805376
uuucccgcaggagauugac

SEQ ID NO: 805378 - RNA, 19 nt, Artificial Sequence
  Description of Artificial Sequence: Synthetic oligonucleotide
  Sense strand starting at position 2445 of SEQ ID NO: 587615
caaucuccugcgggaaaca

SEQ ID NO: 805379 - RNA, 19 nt, Artificial Sequence
  Description of Artificial Sequence: Synthetic oligonucleotide
  Antisense strand to SEQ ID NO: 805378
uguuucccgcaggagauug

SEQ ID NO: 805380 - RNA, 19 nt, Artificial Sequence
  Description of Artificial Sequence: Synthetic oligonucleotide
  Sense strand starting at position 2854 of SEQ ID NO: 587615
cucagacgcguucaggaau

SEQ ID NO: 805381 - RNA, 19 nt, Artificial Sequence
  Description of Artificial Sequence: Synthetic oligonucleotide
  Antisense strand to SEQ ID NO: 805380
auuccugaacgcgucugag

SEQ ID NO: 805382 - RNA, 19 nt, Artificial Sequence
  Description of Artificial Sequence: Synthetic oligonucleotide
  Sense strand starting at position 3073 of SEQ ID NO: 587615
cccucagggcguuaggaau

SEQ ID NO: 805383 - RNA, 19 nt, Artificial Sequence
  Description of Artificial Sequence: Synthetic oligonucleotide
  Antisense strand to SEQ ID NO: 805382
auuccuaacgcccugaggg

SEQ ID NO: 805384 - RNA, 19 nt, Artificial Sequence
  Description of Artificial Sequence: Synthetic oligonucleotide
  Sense strand starting at position 3320 of SEQ ID NO: 587615
gaggguugcgccaggaguu

SEQ ID NO: 805385 - RNA, 19 nt, Artificial Sequence
  Description of Artificial Sequence: Synthetic oligonucleotide
  Antisense strand to SEQ ID NO: 805384
aacuccuggcgcaacccuc

SEQ ID NO: 805386 - RNA, 19 nt, Artificial Sequence
  Description of Artificial Sequence: Synthetic oligonucleotide
  Sense strand starting at position 3321 of SEQ ID NO: 587615
aggguugcgccaggaguua

SEQ ID NO: 805387 - RNA, 19 nt, Artificial Sequence
  Description of Artificial Sequence: Synthetic oligonucleotide
  Antisense strand to SEQ ID NO: 805386
uaacuccuggcgcaacccu

SEQ ID NO: 805388 - RNA, 19 nt, Artificial Sequence
  Description of Artificial Sequence: Synthetic oligonucleotide
  Sense strand starting at position 3362 of SEQ ID NO: 587615
gccuauuguuucuucucga

SEQ ID NO: 805389 - RNA, 19 nt, Artificial Sequence
  Description of Artificial Sequence: Synthetic oligonucleotide
  Antisense strand to SEQ ID NO: 805388
ucgagaagaaacaauaggc

SEQ ID NO: 805390 - RNA, 19 nt, Artificial Sequence
  Description of Artificial Sequence: Synthetic oligonucleotide
  Sense strand starting at position 3363 of SEQ ID NO: 587615
ccuauuguuucuucucgaa

SEQ ID NO: 805391 - RNA, 19 nt, Artificial Sequence
  Description of Artificial Sequence: Synthetic oligonucleotide
  Antisense strand to SEQ ID NO: 805390
uucgagaagaaacaauagg

SEQ ID NO: 805392 - RNA, 19 nt, Artificial Sequence
  Description of Artificial Sequence: Synthetic oligonucleotide
  Sense strand starting at position 3366 of SEQ ID NO: 587615
auuguuucuucucgaaauu

SEQ ID NO: 805393 - RNA, 19 nt, Artificial Sequence
  Description of Artificial Sequence: Synthetic oligonucleotide
  Antisense strand to SEQ ID NO: 805392
aauuucgagaagaaacaau

SEQ ID NO: 805394 - RNA, 19 nt, Artificial Sequence
  Description of Artificial Sequence: Synthetic oligonucleotide
  Sense strand starting at position 3367 of SEQ ID NO: 587615
uuguuucuucucgaaauuc

SEQ ID NO: 805395 - RNA, 19 nt, Artificial Sequence
  Description of Artificial Sequence: Synthetic oligonucleotide
  Antisense strand to SEQ ID NO: 805394
gaauuucgagaagaaacaa

SEQ ID NO: 805396 - RNA, 19 nt, Artificial Sequence
  Description of Artificial Sequence: Synthetic oligonucleotide
  Sense strand starting at position 3378 of SEQ ID NO: 587615
cgaaauucucuccauugcu

SEQ ID NO: 805397 - RNA, 19 nt, Artificial Sequence
  Description of Artificial Sequence: Synthetic oligonucleotide
  Antisense strand to SEQ ID NO: 805396
agcaauggagagaauuucg

SEQ ID NO: 805398 - RNA, 19 nt, Artificial Sequence
  Description of Artificial Sequence: Synthetic oligonucleotide
  Sense strand starting at position 3387 of SEQ ID NO: 587615
cuccauugcuguucuauga

SEQ ID NO: 805399 - RNA, 19 nt, Artificial Sequence
  Description of Artificial Sequence: Synthetic oligonucleotide
  Antisense strand to SEQ ID NO: 805398
ucauagaacagcaauggag

SEQ ID NO: 805400 - RNA, 19 nt, Artificial Sequence
  Description of Artificial Sequence: Synthetic oligonucleotide
  Sense strand starting at position 3576 of SEQ ID NO: 587615
caagaagacugucaugaag

SEQ ID NO: 805401 - RNA, 19 nt, Artificial Sequence
  Description of Artificial Sequence: Synthetic oligonucleotide
  Antisense strand to SEQ ID NO: 805400
cuucaugacagucuucuug

SEQ ID NO: 805402 - RNA, 19 nt, Artificial Sequence
  Description of Artificial Sequence: Synthetic oligonucleotide
  Sense strand starting at position 3578 of SEQ ID NO: 587615
agaagacugucaugaagug

SEQ ID NO: 805403 - RNA, 19 nt, Artificial Sequence
  Description of Artificial Sequence: Synthetic oligonucleotide
  Antisense strand to SEQ ID NO: 805402
cacuucaugacagucuucu

SEQ ID NO: 805404 - RNA, 19 nt, Artificial Sequence
  Description of Artificial Sequence: Synthetic oligonucleotide
  Sense strand starting at position 3680 of SEQ ID NO: 587615
gacugcugauuugggaaga

SEQ ID NO: 805405 - RNA, 19 nt, Artificial Sequence
  Description of Artificial Sequence: Synthetic oligonucleotide
  Antisense strand to SEQ ID NO: 805404
ucuucccaaaucagcaguc

SEQ ID NO: 805406 - RNA, 19 nt, Artificial Sequence
  Description of Artificial Sequence: Synthetic oligonucleotide
  Sense strand starting at position 20 of SEQ ID NO: 587616
ccacauagcaugcguaaga

SEQ ID NO: 805407 - RNA, 19 nt, Artificial Sequence
  Description of Artificial Sequence: Synthetic oligonucleotide
  Antisense strand to SEQ ID NO: 805406
ucuuacgcaugcuaugugg

SEQ ID NO: 805408 - RNA, 19 nt, Artificial Sequence
  Description of Artificial Sequence: Synthetic oligonucleotide
  Sense strand starting at position 241 of SEQ ID NO: 587616
auggaugacuccuaaauug

SEQ ID NO: 805409 - RNA, 19 nt, Artificial Sequence
  Description of Artificial Sequence: Synthetic oligonucleotide
  Antisense strand to SEQ ID NO: 805408
caauuuaggagucauccau

SEQ ID NO: 805410 - RNA, 19 nt, Artificial Sequence
  Description of Artificial Sequence: Synthetic oligonucleotide
  Sense strand starting at position 366 of SEQ ID NO: 587616
uuccacaucccucguaaga

SEQ ID NO: 805411 - RNA, 19 nt, Artificial Sequence
  Description of Artificial Sequence: Synthetic oligonucleotide
  Antisense strand to SEQ ID NO: 805410
ucuuacgagggauguggaa

SEQ ID NO: 805412 - RNA, 19 nt, Artificial Sequence
  Description of Artificial Sequence: Synthetic oligonucleotide
  Sense strand starting at position 382 of SEQ ID NO: 587616
agaacagucuucccuagag

SEQ ID NO: 805413 - RNA, 19 nt, Artificial Sequence
  Description of Artificial Sequence: Synthetic oligonucleotide
  Antisense strand to SEQ ID NO: 805412
cucuagggaagacuguucu

SEQ ID NO: 805414 - RNA, 19 nt, Artificial Sequence
  Description of Artificial Sequence: Synthetic oligonucleotide
  Sense strand starting at position 494 of SEQ ID NO: 587616
accaaagucuugucaauua

SEQ ID NO: 805415 - RNA, 19 nt, Artificial Sequence
  Description of Artificial Sequence: Synthetic oligonucleotide
  Antisense strand to SEQ ID NO: 805414
uaauugacaagacuuuggu

SEQ ID NO: 805416 - RNA, 19 nt, Artificial Sequence
  Description of Artificial Sequence: Synthetic oligonucleotide
  Sense strand starting at position 898 of SEQ ID NO: 587616
ugaagcaaccuuugucaua

SEQ ID NO: 805417 - RNA, 19 nt, Artificial Sequence
  Description of Artificial Sequence: Synthetic oligonucleotide
  Antisense strand to SEQ ID NO: 805416
uaugacaaagguugcuuca

SEQ ID NO: 805418 - RNA, 19 nt, Artificial Sequence
  Description of Artificial Sequence: Synthetic oligonucleotide
  Sense strand starting at position 1072 of SEQ ID NO: 587616
ugucuuacauugucacuuu

SEQ ID NO: 805419 - RNA, 19 nt, Artificial Sequence
  Description of Artificial Sequence: Synthetic oligonucleotide
  Antisense strand to SEQ ID NO: 805418
aaagugacaauguaagaca

SEQ ID NO: 805420 - RNA, 19 nt, Artificial Sequence
  Description of Artificial Sequence: Synthetic oligonucleotide
  Sense strand starting at position 1075 of SEQ ID NO: 587616
cuuacauugucacuuugau

SEQ ID NO: 805421 - RNA, 19 nt, Artificial Sequence
  Description of Artificial Sequence: Synthetic oligonucleotide
  Antisense strand to SEQ ID NO: 805420
aucaaagugacaauguaag

SEQ ID NO: 805422 - RNA, 19 nt, Artificial Sequence
  Description of Artificial Sequence: Synthetic oligonucleotide
  Sense strand starting at position 1131 of SEQ ID NO: 587616
guacuuuacuguuccuacu

SEQ ID NO: 805423 - RNA, 19 nt, Artificial Sequence
  Description of Artificial Sequence: Synthetic oligonucleotide
  Antisense strand to SEQ ID NO: 805422
aguaggaacaguaaaguac

SEQ ID NO: 805424 - RNA, 19 nt, Artificial Sequence
  Description of Artificial Sequence: Synthetic oligonucleotide
  Sense strand starting at position 1177 of SEQ ID NO: 587616
cagugacuggcuuauucuu

SEQ ID NO: 805425 - RNA, 19 nt, Artificial Sequence
  Description of Artificial Sequence: Synthetic oligonucleotide
  Antisense strand to SEQ ID NO: 805424
aagaauaagccagucacug

SEQ ID NO: 805426 - RNA, 19 nt, Artificial Sequence
  Description of Artificial Sequence: Synthetic oligonucleotide
  Sense strand starting at position 1179 of SEQ ID NO: 587616
gugacuggcuuauucuuau

SEQ ID NO: 805427 - RNA, 19 nt, Artificial Sequence
  Description of Artificial Sequence: Synthetic oligonucleotide
  Antisense strand to SEQ ID NO: 805426
auaagaauaagccagucac

SEQ ID NO: 805428 - RNA, 19 nt, Artificial Sequence
  Description of Artificial Sequence: Synthetic oligonucleotide
  Sense strand starting at position 1230 of SEQ ID NO: 587616
agagaaaccuucccugagu

SEQ ID NO: 805429 - RNA, 19 nt, Artificial Sequence
  Description of Artificial Sequence: Synthetic oligonucleotide
  Antisense strand to SEQ ID NO: 805428
acucagggaagguuucucu

SEQ ID NO: 805430 - RNA, 19 nt, Artificial Sequence
  Description of Artificial Sequence: Synthetic oligonucleotide
  Sense strand starting at position 1231 of SEQ ID NO: 587616
gagaaaccuucccugagua

SEQ ID NO: 805431 - RNA, 19 nt, Artificial Sequence
  Description of Artificial Sequence: Synthetic oligonucleotide
  Antisense strand to SEQ ID NO: 805430
uacucagggaagguuucuc

SEQ ID NO: 805432 - RNA, 19 nt, Artificial Sequence
  Description of Artificial Sequence: Synthetic oligonucleotide
  Sense strand starting at position 1232 of SEQ ID NO: 587616
agaaaccuucccugaguaa

SEQ ID NO: 805433 - RNA, 19 nt, Artificial Sequence
  Description of Artificial Sequence: Synthetic oligonucleotide
  Antisense strand to SEQ ID NO: 805432
uuacucagggaagguuucu

SEQ ID NO: 805434 - RNA, 19 nt, Artificial Sequence
  Description of Artificial Sequence: Synthetic oligonucleotide
  Sense strand starting at position 1245 of SEQ ID NO: 587616
gaguaacccuaucugaagu

SEQ ID NO: 805435 - RNA, 19 nt, Artificial Sequence
  Description of Artificial Sequence: Synthetic oligonucleotide
  Antisense strand to SEQ ID NO: 805434
acuucagauaggguuacuc

SEQ ID NO: 805436 - RNA, 19 nt, Artificial Sequence
  Description of Artificial Sequence: Synthetic oligonucleotide
  Sense strand starting at position 1352 of SEQ ID NO: 587616
ccaucaguguuccaggaga

SEQ ID NO: 805437 - RNA, 19 nt, Artificial Sequence
  Description of Artificial Sequence: Synthetic oligonucleotide
  Antisense strand to SEQ ID NO: 805436
ucuccuggaacacugaugg

SEQ ID NO: 805438 - RNA, 19 nt, Artificial Sequence
  Description of Artificial Sequence: Synthetic oligonucleotide
  Sense strand starting at position 1429 of SEQ ID NO: 587616
cuguaagcacacuguuauu

SEQ ID NO: 805439 - RNA, 19 nt, Artificial Sequence
  Description of Artificial Sequence: Synthetic oligonucleotide
  Antisense strand to SEQ ID NO: 805438
aauaacagugugcuuacag

SEQ ID NO: 805440 - RNA, 19 nt, Artificial Sequence
  Description of Artificial Sequence: Synthetic oligonucleotide
  Sense strand starting at position 1493 of SEQ ID NO: 587616
uuaugacuuaggcagaagu

SEQ ID NO: 805441 - RNA, 19 nt, Artificial Sequence
  Description of Artificial Sequence: Synthetic oligonucleotide
  Antisense strand to SEQ ID NO: 805440
acuucugccuaagucauaa

SEQ ID NO: 805442 - RNA, 19 nt, Artificial Sequence
  Description of Artificial Sequence: Synthetic oligonucleotide
  Sense strand starting at position 1552 of SEQ ID NO: 587616
ggaagaguaacgcgcacau

SEQ ID NO: 805443 - RNA, 19 nt, Artificial Sequence
  Description of Artificial Sequence: Synthetic oligonucleotide
  Antisense strand to SEQ ID NO: 805442
augugcgcguuacucuucc

SEQ ID NO: 805444 - RNA, 19 nt, Artificial Sequence
  Description of Artificial Sequence: Synthetic oligonucleotide
  Sense strand starting at position 1571 of SEQ ID NO: 587616
ggaugagaaggacgcuuaa

SEQ ID NO: 805445 - RNA, 19 nt, Artificial Sequence
  Description of Artificial Sequence: Synthetic oligonucleotide
  Antisense strand to SEQ ID NO: 805444
uuaagcguccuucucaucc

SEQ ID NO: 805446 - RNA, 19 nt, Artificial Sequence
  Description of Artificial Sequence: Synthetic oligonucleotide
  Sense strand starting at position 1582 of SEQ ID NO: 587616
acgcuuaaacuuggaguca

SEQ ID NO: 805447 - RNA, 19 nt, Artificial Sequence
  Description of Artificial Sequence: Synthetic oligonucleotide
  Antisense strand to SEQ ID NO: 805446
ugacuccaaguuuaagcgu

SEQ ID NO: 805448 - RNA, 19 nt, Artificial Sequence
  Description of Artificial Sequence: Synthetic oligonucleotide
  Sense strand starting at position 1593 of SEQ ID NO: 587616
uggagucagcuucgccaaa

SEQ ID NO: 805449 - RNA, 19 nt, Artificial Sequence
  Description of Artificial Sequence: Synthetic oligonucleotide
  Antisense strand to SEQ ID NO: 805448
uuuggcgaagcugacucca

SEQ ID NO: 805450 - RNA, 19 nt, Artificial Sequence
  Description of Artificial Sequence: Synthetic oligonucleotide
  Sense strand starting at position 1594 of SEQ ID NO: 587616
ggagucagcuucgccaaau

SEQ ID NO: 805451 - RNA, 19 nt, Artificial Sequence
  Description of Artificial Sequence: Synthetic oligonucleotide
  Antisense strand to SEQ ID NO: 805450
auuuggcgaagcugacucc

SEQ ID NO: 805452 - RNA, 19 nt, Artificial Sequence
  Description of Artificial Sequence: Synthetic oligonucleotide
  Sense strand starting at position 1595 of SEQ ID NO: 587616
gagucagcuucgccaaauc

SEQ ID NO: 805453 - RNA, 19 nt, Artificial Sequence
  Description of Artificial Sequence: Synthetic oligonucleotide
  Antisense strand to SEQ ID NO: 805452
gauuuggcgaagcugacuc

SEQ ID NO: 805454 - RNA, 19 nt, Artificial Sequence
  Description of Artificial Sequence: Synthetic oligonucleotide
  Sense strand starting at position 1791 of SEQ ID NO: 587616
gugagaaccuauguuggaa

SEQ ID NO: 805455 - RNA, 19 nt, Artificial Sequence
  Description of Artificial Sequence: Synthetic oligonucleotide
  Antisense strand to SEQ ID NO: 805454
uuccaacauagguucucac

SEQ ID NO: 805456 - RNA, 19 nt, Artificial Sequence
  Description of Artificial Sequence: Synthetic oligonucleotide
  Sense strand starting at position 1934 of SEQ ID NO: 587616
ggaggagacucacaucauc

SEQ ID NO: 805457 - RNA, 19 nt, Artificial Sequence
  Description of Artificial Sequence: Synthetic oligonucleotide
  Antisense strand to SEQ ID NO: 805456
gaugaugugagucuccucc

SEQ ID NO: 805458 - RNA, 19 nt, Artificial Sequence
  Description of Artificial Sequence: Synthetic oligonucleotide
  Sense strand starting at position 2307 of SEQ ID NO: 587616
cccuguuugugaccguuca

SEQ ID NO: 805459 - RNA, 19 nt, Artificial Sequence
  Description of Artificial Sequence: Synthetic oligonucleotide
  Antisense strand to SEQ ID NO: 805458
ugaacggucacaaacaggg

SEQ ID NO: 805460 - RNA, 19 nt, Artificial Sequence
  Description of Artificial Sequence: Synthetic oligonucleotide
  Sense strand starting at position 2308 of SEQ ID NO: 587616
ccuguuugugaccguucau

SEQ ID NO: 805461 - RNA, 19 nt, Artificial Sequence
  Description of Artificial Sequence: Synthetic oligonucleotide
  Antisense strand to SEQ ID NO: 805460
augaacggucacaaacagg

SEQ ID NO: 805462 - RNA, 19 nt, Artificial Sequence
  Description of Artificial Sequence: Synthetic oligonucleotide
  Sense strand starting at position 2545 of SEQ ID NO: 587616
uuccuccugcuuugagaaa

SEQ ID NO: 805463 - RNA, 19 nt, Artificial Sequence
  Description of Artificial Sequence: Synthetic oligonucleotide
  Antisense strand to SEQ ID NO: 805462
uuucucaaagcaggaggaa

SEQ ID NO: 805464 - RNA, 19 nt, Artificial Sequence
  Description of Artificial Sequence: Synthetic oligonucleotide
  Sense strand starting at position 2608 of SEQ ID NO: 587616
gugucuuccucauugccua

SEQ ID NO: 805465 - RNA, 19 nt, Artificial Sequence
  Description of Artificial Sequence: Synthetic oligonucleotide
  Antisense strand to SEQ ID NO: 805464
uaggcaaugaggaagacac

SEQ ID NO: 805466 - RNA, 19 nt, Artificial Sequence
  Description of Artificial Sequence: Synthetic oligonucleotide
  Sense strand starting at position 2620 of SEQ ID NO: 587616
uugccuauuugagacaaca

SEQ ID NO: 805467 - RNA, 19 nt, Artificial Sequence
  Description of Artificial Sequence: Synthetic oligonucleotide
  Antisense strand to SEQ ID NO: 805466
uguugucucaaauaggcaa

SEQ ID NO: 805468 - RNA, 19 nt, Artificial Sequence
  Description of Artificial Sequence: Synthetic oligonucleotide
  Sense strand starting at position 2762 of SEQ ID NO: 587616
uguaucguauuauagaaga

SEQ ID NO: 805469 - RNA, 19 nt, Artificial Sequence
  Description of Artificial Sequence: Synthetic oligonucleotide
  Antisense strand to SEQ ID NO: 805468
ucuucuauaauacgauaca

SEQ ID NO: 805470 - RNA, 19 nt, Artificial Sequence
  Description of Artificial Sequence: Synthetic oligonucleotide
  Sense strand starting at position 3226 of SEQ ID NO: 587616
aaauacaggucauaaggau

SEQ ID NO: 805471 - RNA, 19 nt, Artificial Sequence
  Description of Artificial Sequence: Synthetic oligonucleotide
  Antisense strand to SEQ ID NO: 805470
auccuuaugaccuguauuu

SEQ ID NO: 805472 - RNA, 19 nt, Artificial Sequence
  Description of Artificial Sequence: Synthetic oligonucleotide
  Sense strand starting at position 3295 of SEQ ID NO: 587616
ccaagauggcaaugaguuu

SEQ ID NO: 805473 - RNA, 19 nt, Artificial Sequence
  Description of Artificial Sequence: Synthetic oligonucleotide
  Antisense strand to SEQ ID NO: 805472
aaacucauugccaucuugg

SEQ ID NO: 805474 - RNA, 19 nt, Artificial Sequence
  Description of Artificial Sequence: Synthetic oligonucleotide
  Sense strand starting at position 3308 of SEQ ID NO: 587616
gaguuugaccucuggucgu

SEQ ID NO: 805475 - RNA, 19 nt, Artificial Sequence
  Description of Artificial Sequence: Synthetic oligonucleotide
  Antisense strand to SEQ ID NO: 805474
acgaccagaggucaaacuc

SEQ ID NO: 805476 - RNA, 19 nt, Artificial Sequence
  Description of Artificial Sequence: Synthetic oligonucleotide
  Sense strand starting at position 3398 of SEQ ID NO: 587616
aaaggagaggcguaaguaa

SEQ ID NO: 805477 - RNA, 19 nt, Artificial Sequence
  Description of Artificial Sequence: Synthetic oligonucleotide
  Antisense strand to SEQ ID NO: 805476
uuacuuacgccucuccuuu

SEQ ID NO: 805478 - RNA, 19 nt, Artificial Sequence
  Description of Artificial Sequence: Synthetic oligonucleotide
  Sense strand starting at position 3410 of SEQ ID NO: 587616
uaaguaauccgcuccgugu

SEQ ID NO: 805479 - RNA, 19 nt, Artificial Sequence
  Description of Artificial Sequence: Synthetic oligonucleotide
  Antisense strand to SEQ ID NO: 805478
acacggagcggauuacuua

SEQ ID NO: 805480 - RNA, 19 nt, Artificial Sequence
  Description of Artificial Sequence: Synthetic oligonucleotide
  Sense strand starting at position 3411 of SEQ ID NO: 587616
aaguaauccgcuccguguu

SEQ ID NO: 805481 - RNA, 19 nt, Artificial Sequence
  Description of Artificial Sequence: Synthetic oligonucleotide
  Antisense strand to SEQ ID NO: 805480
aacacggagcggauuacuu

SEQ ID NO: 805482 - RNA, 19 nt, Artificial Sequence
  Description of Artificial Sequence: Synthetic oligonucleotide
  Sense strand starting at position 3739 of SEQ ID NO: 587616
augaacaaauagcgauaaa

SEQ ID NO: 805483 - RNA, 19 nt, Artificial Sequence
  Description of Artificial Sequence: Synthetic oligonucleotide
  Antisense strand to SEQ ID NO: 805482
uuuaucgcuauuuguucau

SEQ ID NO: 805484 - RNA, 19 nt, Artificial Sequence
  Description of Artificial Sequence: Synthetic oligonucleotide
  Sense strand starting at position 3969 of SEQ ID NO: 587616
gacacagucucaguaagga

SEQ ID NO: 805485 - RNA, 19 nt, Artificial Sequence
  Description of Artificial Sequence: Synthetic oligonucleotide
  Antisense strand to SEQ ID NO: 805484
uccuuacugagacuguguc

SEQ ID NO: 805486 - RNA, 19 nt, Artificial Sequence
  Description of Artificial Sequence: Synthetic oligonucleotide
  Sense strand starting at position 39 of SEQ ID NO: 587617
gacuacagguucuugagau

SEQ ID NO: 805487 - RNA, 19 nt, Artificial Sequence
  Description of Artificial Sequence: Synthetic oligonucleotide
  Antisense strand to SEQ ID NO: 805486
aucucaagaaccuguaguc

SEQ ID NO: 805488 - RNA, 19 nt, Artificial Sequence
  Description of Artificial Sequence: Synthetic oligonucleotide
  Sense strand starting at position 45 of SEQ ID NO: 587617
agguucuugagaugguauu

SEQ ID NO: 805489 - RNA, 19 nt, Artificial Sequence
  Description of Artificial Sequence: Synthetic oligonucleotide
  Antisense strand to SEQ ID NO: 805488
aauaccaucucaagaaccu

SEQ ID NO: 805490 - RNA, 19 nt, Artificial Sequence
  Description of Artificial Sequence: Synthetic oligonucleotide
  Sense strand starting at position 58 of SEQ ID NO: 587617
gguauuugauuagagggca

SEQ ID NO: 805491 - RNA, 19 nt, Artificial Sequence
  Description of Artificial Sequence: Synthetic oligonucleotide
  Antisense strand to SEQ ID NO: 805490
ugcccucuaaucaaauacc

SEQ ID NO: 805492 - RNA, 19 nt, Artificial Sequence
  Description of Artificial Sequence: Synthetic oligonucleotide
  Sense strand starting at position 267 of SEQ ID NO: 587617
augaacugucuguaaauuc

SEQ ID NO: 805493 - RNA, 19 nt, Artificial Sequence
  Description of Artificial Sequence: Synthetic oligonucleotide
  Antisense strand to SEQ ID NO: 805492
gaauuuacagacaguucau

SEQ ID NO: 805494 - RNA, 19 nt, Artificial Sequence
  Description of Artificial Sequence: Synthetic oligonucleotide
  Sense strand starting at position 359 of SEQ ID NO: 587617
ggaauaaaguagccgagaa

SEQ ID NO: 805495 - RNA, 19 nt, Artificial Sequence
  Description of Artificial Sequence: Synthetic oligonucleotide
  Antisense strand to SEQ ID NO: 805494
uucucggcuacuuuauucc

SEQ ID NO: 805496 - RNA, 19 nt, Artificial Sequence
  Description of Artificial Sequence: Synthetic oligonucleotide
  Sense strand starting at position 363 of SEQ ID NO: 587617
uaaaguagccgagaaccua

SEQ ID NO: 805497 - RNA, 19 nt, Artificial Sequence
  Description of Artificial Sequence: Synthetic oligonucleotide
  Antisense strand to SEQ ID NO: 805496
uagguucucggcuacuuua

SEQ ID NO: 805498 - RNA, 19 nt, Artificial Sequence
  Description of Artificial Sequence: Synthetic oligonucleotide
  Sense strand starting at position 464 of SEQ ID NO: 587617
ccgcucuucccacauggau

SEQ ID NO: 805499 - RNA, 19 nt, Artificial Sequence
  Description of Artificial Sequence: Synthetic oligonucleotide
  Antisense strand to SEQ ID NO: 805498
auccaugugggaagagcgg

SEQ ID NO: 805500 - RNA, 19 nt, Artificial Sequence
  Description of Artificial Sequence: Synthetic oligonucleotide
  Sense strand starting at position 501 of SEQ ID NO: 587617
gcacucagaugcuucugaa

SEQ ID NO: 805501 - RNA, 19 nt, Artificial Sequence
  Description of Artificial Sequence: Synthetic oligonucleotide
  Antisense strand to SEQ ID NO: 805500
uucagaagcaucugagugc

SEQ ID NO: 805502 - RNA, 19 nt, Artificial Sequence
  Description of Artificial Sequence: Synthetic oligonucleotide
  Sense strand starting at position 607 of SEQ ID NO: 587617
ucaaauccgggcuaaacuu

SEQ ID NO: 805503 - RNA, 19 nt, Artificial Sequence
  Description of Artificial Sequence: Synthetic oligonucleotide
  Antisense strand to SEQ ID NO: 805502
aaguuuagcccggauuuga

SEQ ID NO: 805504 - RNA, 19 nt, Artificial Sequence
  Description of Artificial Sequence: Synthetic oligonucleotide
  Sense strand starting at position 640 of SEQ ID NO: 587617
uggcuaccugagcauaaua

SEQ ID NO: 805505 - RNA, 19 nt, Artificial Sequence
  Description of Artificial Sequence: Synthetic oligonucleotide
  Antisense strand to SEQ ID NO: 805504
uauuaugcucagguagcca

SEQ ID NO: 805506 - RNA, 19 nt, Artificial Sequence
  Description of Artificial Sequence: Synthetic oligonucleotide
  Sense strand starting at position 642 of SEQ ID NO: 587617
gcuaccugagcauaauaga

SEQ ID NO: 805507 - RNA, 19 nt, Artificial Sequence
  Description of Artificial Sequence: Synthetic oligonucleotide
  Antisense strand to SEQ ID NO: 805506
ucuauuaugcucagguagc

SEQ ID NO: 805508 - RNA, 19 nt, Artificial Sequence
  Description of Artificial Sequence: Synthetic oligonucleotide
  Sense strand starting at position 805 of SEQ ID NO: 587617
gcacuaacucgcuaacauu

SEQ ID NO: 805509 - RNA, 19 nt, Artificial Sequence
  Description of Artificial Sequence: Synthetic oligonucleotide
  Antisense strand to SEQ ID NO: 805508
aauguuagcgaguuagugc

SEQ ID NO: 805510 - RNA, 19 nt, Artificial Sequence
  Description of Artificial Sequence: Synthetic oligonucleotide
  Sense strand starting at position 837 of SEQ ID NO: 587617
gccauucucaggcaugaug

SEQ ID NO: 805511 - RNA, 19 nt, Artificial Sequence
  Description of Artificial Sequence: Synthetic oligonucleotide
  Antisense strand to SEQ ID NO: 805510
caucaugccugagaauggc

SEQ ID NO: 805512 - RNA, 19 nt, Artificial Sequence
  Description of Artificial Sequence: Synthetic oligonucleotide
  Sense strand starting at position 997 of SEQ ID NO: 587617
uuuacuugggcccaacaaa

SEQ ID NO: 805513 - RNA, 19 nt, Artificial Sequence
  Description of Artificial Sequence: Synthetic oligonucleotide
  Antisense strand to SEQ ID NO: 805512
uuuguugggcccaaguaaa

SEQ ID NO: 805514 - RNA, 19 nt, Artificial Sequence
  Description of Artificial Sequence: Synthetic oligonucleotide
  Sense strand starting at position 2431 of SEQ ID NO: 587617
augggacucgagugggauu

SEQ ID NO: 805515 - RNA, 19 nt, Artificial Sequence
  Description of Artificial Sequence: Synthetic oligonucleotide
  Antisense strand to SEQ ID NO: 805514
aaucccacucgagucccau

SEQ ID NO: 805516 - RNA, 19 nt, Artificial Sequence
  Description of Artificial Sequence: Synthetic oligonucleotide
  Sense strand starting at position 2480 of SEQ ID NO: 587617
gugggagucggaugaguca

SEQ ID NO: 805517 - RNA, 19 nt, Artificial Sequence
  Description of Artificial Sequence: Synthetic oligonucleotide
  Antisense strand to SEQ ID NO: 805516
ugacucauccgacucccac

SEQ ID NO: 805518 - RNA, 19 nt, Artificial Sequence
  Description of Artificial Sequence: Synthetic oligonucleotide
  Sense strand starting at position 2567 of SEQ ID NO: 587617
gugaaauccaccggcauag

SEQ ID NO: 805519 - RNA, 19 nt, Artificial Sequence
  Description of Artificial Sequence: Synthetic oligonucleotide
  Antisense strand to SEQ ID NO: 805518
cuaugccgguggauuucac

SEQ ID NO: 805520 - RNA, 19 nt, Artificial Sequence
  Description of Artificial Sequence: Synthetic oligonucleotide
  Sense strand starting at position 2569 of SEQ ID NO: 587617
gaaauccaccggcauagau

SEQ ID NO: 805521 - RNA, 19 nt, Artificial Sequence
  Description of Artificial Sequence: Synthetic oligonucleotide
  Antisense strand to SEQ ID NO: 805520
aucuaugccgguggauuuc

SEQ ID NO: 805522 - RNA, 19 nt, Artificial Sequence
  Description of Artificial Sequence: Synthetic oligonucleotide
  Sense strand starting at position 2579 of SEQ ID NO: 587617
ggcauagaugcucacauua

SEQ ID NO: 805523 - RNA, 19 nt, Artificial Sequence
  Description of Artificial Sequence: Synthetic oligonucleotide
  Antisense strand to SEQ ID NO: 805522
uaaugugagcaucuaugcc

SEQ ID NO: 805524 - RNA, 19 nt, Artificial Sequence
  Description of Artificial Sequence: Synthetic oligonucleotide
  Sense strand starting at position 2614 of SEQ ID NO: 587617
aagaguugagcgcacagua

SEQ ID NO: 805525 - RNA, 19 nt, Artificial Sequence
  Description of Artificial Sequence: Synthetic oligonucleotide
  Antisense strand to SEQ ID NO: 805524
uacugugcgcucaacucuu

SEQ ID NO: 805526 - RNA, 19 nt, Artificial Sequence
  Description of Artificial Sequence: Synthetic oligonucleotide
  Sense strand starting at position 2627 of SEQ ID NO: 587617
acaguaagcuccuuaaaug

SEQ ID NO: 805527 - RNA, 19 nt, Artificial Sequence
  Description of Artificial Sequence: Synthetic oligonucleotide
  Antisense strand to SEQ ID NO: 805526
cauuuaaggagcuuacugu

SEQ ID NO: 805528 - RNA, 19 nt, Artificial Sequence
  Description of Artificial Sequence: Synthetic oligonucleotide
  Sense strand starting at position 2638 of SEQ ID NO: 587617
cuuaaaugcuagcugauau

SEQ ID NO: 805529 - RNA, 19 nt, Artificial Sequence
  Description of Artificial Sequence: Synthetic oligonucleotide
  Antisense strand to SEQ ID NO: 805528
auaucagcuagcauuuaag

SEQ ID NO: 805530 - RNA, 19 nt, Artificial Sequence
  Description of Artificial Sequence: Synthetic oligonucleotide
  Sense strand starting at position 2682 of SEQ ID NO: 587617
gcgccuaucacugcucagu

SEQ ID NO: 805531 - RNA, 19 nt, Artificial Sequence
  Description of Artificial Sequence: Synthetic oligonucleotide
  Antisense strand to SEQ ID NO: 805530
acugagcagugauaggcgc

SEQ ID NO: 805532 - RNA, 19 nt, Artificial Sequence
  Description of Artificial Sequence: Synthetic oligonucleotide
  Sense strand starting at position 2821 of SEQ ID NO: 587617
cuauguaugguucgaauuu

SEQ ID NO: 805533 - RNA, 19 nt, Artificial Sequence
  Description of Artificial Sequence: Synthetic oligonucleotide
  Antisense strand to SEQ ID NO: 805532
aaauucgaaccauacauag

SEQ ID NO: 805534 - RNA, 19 nt, Artificial Sequence
  Description of Artificial Sequence: Synthetic oligonucleotide
  Sense strand starting at position 2833 of SEQ ID NO: 587617
cgaauuuccugcucuaguu

SEQ ID NO: 805535 - RNA, 19 nt, Artificial Sequence
  Description of Artificial Sequence: Synthetic oligonucleotide
  Antisense strand to SEQ ID NO: 805534
aacuagagcaggaaauucg

SEQ ID NO: 805536 - RNA, 19 nt, Artificial Sequence
  Description of Artificial Sequence: Synthetic oligonucleotide
  Sense strand starting at position 3011 of SEQ ID NO: 587617
uggcuaaucucaucagaca

SEQ ID NO: 805537 - RNA, 19 nt, Artificial Sequence
  Description of Artificial Sequence: Synthetic oligonucleotide
  Antisense strand to SEQ ID NO: 805536
ugucugaugagauuagcca

SEQ ID NO: 805538 - RNA, 19 nt, Artificial Sequence
  Description of Artificial Sequence: Synthetic oligonucleotide
  Sense strand starting at position 3012 of SEQ ID NO: 587617
ggcuaaucucaucagacau

SEQ ID NO: 805539 - RNA, 19 nt, Artificial Sequence
  Description of Artificial Sequence: Synthetic oligonucleotide
  Antisense strand to SEQ ID NO: 805538
augucugaugagauuagcc

SEQ ID NO: 805540 - RNA, 19 nt, Artificial Sequence
  Description of Artificial Sequence: Synthetic oligonucleotide
  Sense strand starting at position 3061 of SEQ ID NO: 587617
agguucagucucugaggaa

SEQ ID NO: 805541 - RNA, 19 nt, Artificial Sequence
  Description of Artificial Sequence: Synthetic oligonucleotide
  Antisense strand to SEQ ID NO: 805540
uuccucagagacugaaccu

SEQ ID NO: 805542 - RNA, 19 nt, Artificial Sequence
  Description of Artificial Sequence: Synthetic oligonucleotide
  Sense strand starting at position 3105 of SEQ ID NO: 587617
agcagauucuaguuacucu

SEQ ID NO: 805543 - RNA, 19 nt, Artificial Sequence
  Description of Artificial Sequence: Synthetic oligonucleotide
  Antisense strand to SEQ ID NO: 805542
agaguaacuagaaucugcu

SEQ ID NO: 805544 - RNA, 19 nt, Artificial Sequence
  Description of Artificial Sequence: Synthetic oligonucleotide
  Sense strand starting at position 3147 of SEQ ID NO: 587617
gaaacucauaggugugguu

SEQ ID NO: 805545 - RNA, 19 nt, Artificial Sequence
  Description of Artificial Sequence: Synthetic oligonucleotide
  Antisense strand to SEQ ID NO: 805544
aaccacaccuaugaguuuc

SEQ ID NO: 805546 - RNA, 19 nt, Artificial Sequence
  Description of Artificial Sequence: Synthetic oligonucleotide
  Sense strand starting at position 3202 of SEQ ID NO: 587617
gugaaaccuucuguauauc

SEQ ID NO: 805547 - RNA, 19 nt, Artificial Sequence
  Description of Artificial Sequence: Synthetic oligonucleotide
  Antisense strand to SEQ ID NO: 805546
gauauacagaagguuucac

SEQ ID NO: 805548 - RNA, 19 nt, Artificial Sequence
  Description of Artificial Sequence: Synthetic oligonucleotide
  Sense strand starting at position 3240 of SEQ ID NO: 587617
agucaccacuuucugauau

SEQ ID NO: 805549 - RNA, 19 nt, Artificial Sequence
  Description of Artificial Sequence: Synthetic oligonucleotide
  Antisense strand to SEQ ID NO: 805548
auaucagaaaguggugacu

SEQ ID NO: 805550 - RNA, 19 nt, Artificial Sequence
  Description of Artificial Sequence: Synthetic oligonucleotide
  Sense strand starting at position 3255 of SEQ ID NO: 587617
auauuuaaugugugguguu

SEQ ID NO: 805551 - RNA, 19 nt, Artificial Sequence
  Description of Artificial Sequence: Synthetic oligonucleotide
  Antisense strand to SEQ ID NO: 805550
aacaccacacauuaaauau

SEQ ID NO: 805552 - RNA, 19 nt, Artificial Sequence
  Description of Artificial Sequence: Synthetic oligonucleotide
  Sense strand starting at position 3349 of SEQ ID NO: 587617
acgggaugaucuuucuguu

SEQ ID NO: 805553 - RNA, 19 nt, Artificial Sequence
  Description of Artificial Sequence: Synthetic oligonucleotide
  Antisense strand to SEQ ID NO: 805552
aacagaaagaucaucccgu

SEQ ID NO: 805554 - RNA, 19 nt, Artificial Sequence
  Description of Artificial Sequence: Synthetic oligonucleotide
  Sense strand starting at position 3377 of SEQ ID NO: 587617
gccuaagaauucucaguaa

SEQ ID NO: 805555 - RNA, 19 nt, Artificial Sequence
  Description of Artificial Sequence: Synthetic oligonucleotide
  Antisense strand to SEQ ID NO: 805554
uuacugagaauucuuaggc

SEQ ID NO: 805556 - RNA, 19 nt, Artificial Sequence
  Description of Artificial Sequence: Synthetic oligonucleotide
  Sense strand starting at position 3440 of SEQ ID NO: 587617
uggagaugaucagcaacua

SEQ ID NO: 805557 - RNA, 19 nt, Artificial Sequence
  Description of Artificial Sequence: Synthetic oligonucleotide
  Antisense strand to SEQ ID NO: 805556
uaguugcugaucaucucca

SEQ ID NO: 805558 - RNA, 19 nt, Artificial Sequence
  Description of Artificial Sequence: Synthetic oligonucleotide
  Sense strand starting at position 3504 of SEQ ID NO: 587617
gaguuucuagaagggcuaa

SEQ ID NO: 805559 - RNA, 19 nt, Artificial Sequence
  Description of Artificial Sequence: Synthetic oligonucleotide
  Antisense strand to SEQ ID NO: 805558
uuagcccuucuagaaacuc

SEQ ID NO: 805560 - RNA, 19 nt, Artificial Sequence
  Description of Artificial Sequence: Synthetic oligonucleotide
  Sense strand starting at position 3555 of SEQ ID NO: 587617
agcauugccaccuaggaga

SEQ ID NO: 805561 - RNA, 19 nt, Artificial Sequence
  Description of Artificial Sequence: Synthetic oligonucleotide
  Antisense strand to SEQ ID NO: 805560
ucuccuagguggcaaugcu

SEQ ID NO: 805562 - RNA, 19 nt, Artificial Sequence
  Description of Artificial Sequence: Synthetic oligonucleotide
  Sense strand starting at position 3687 of SEQ ID NO: 587617
ugucaaugagcgcucuguu

SEQ ID NO: 805563 - RNA, 19 nt, Artificial Sequence
  Description of Artificial Sequence: Synthetic oligonucleotide
  Antisense strand to SEQ ID NO: 805562
aacagagcgcucauugaca

SEQ ID NO: 805564 - RNA, 19 nt, Artificial Sequence
  Description of Artificial Sequence: Synthetic oligonucleotide
  Sense strand starting at position 3688 of SEQ ID NO: 587617
gucaaugagcgcucuguua

SEQ ID NO: 805565 - RNA, 19 nt, Artificial Sequence
  Description of Artificial Sequence: Synthetic oligonucleotide
  Antisense strand to SEQ ID NO: 805564
uaacagagcgcucauugac

SEQ ID NO: 805566 - RNA, 19 nt, Artificial Sequence
  Description of Artificial Sequence: Synthetic oligonucleotide
  Sense strand starting at position 197 of SEQ ID NO: 587618
cucuccugucuggagagau

SEQ ID NO: 805567 - RNA, 19 nt, Artificial Sequence
  Description of Artificial Sequence: Synthetic oligonucleotide
  Antisense strand to SEQ ID NO: 805566
aucucuccagacaggagag

SEQ ID NO: 805568 - RNA, 19 nt, Artificial Sequence
  Description of Artificial Sequence: Synthetic oligonucleotide
  Sense strand starting at position 279 of SEQ ID NO: 587618
cccggaauguucucugaag

SEQ ID NO: 805569 - RNA, 19 nt, Artificial Sequence
  Description of Artificial Sequence: Synthetic oligonucleotide
  Antisense strand to SEQ ID NO: 805568
cuucagagaacauuccggg

SEQ ID NO: 805570 - RNA, 19 nt, Artificial Sequence
  Description of Artificial Sequence: Synthetic oligonucleotide
  Sense strand starting at position 280 of SEQ ID NO: 587618
ccggaauguucucugaaga

SEQ ID NO: 805571 - RNA, 19 nt, Artificial Sequence
  Description of Artificial Sequence: Synthetic oligonucleotide
  Antisense strand to SEQ ID NO: 805570
ucuucagagaacauuccgg

SEQ ID NO: 805572 - RNA, 19 nt, Artificial Sequence
  Description of Artificial Sequence: Synthetic oligonucleotide
  Sense strand starting at position 281 of SEQ ID NO: 587618
cggaauguucucugaagag

SEQ ID NO: 805573 - RNA, 19 nt, Artificial Sequence
  Description of Artificial Sequence: Synthetic oligonucleotide
  Antisense strand to SEQ ID NO: 805572
cucuucagagaacauuccg

SEQ ID NO: 805574 - RNA, 19 nt, Artificial Sequence
  Description of Artificial Sequence: Synthetic oligonucleotide
  Sense strand starting at position 339 of SEQ ID NO: 587618
agcccauguccugagagga

SEQ ID NO: 805575 - RNA, 19 nt, Artificial Sequence
  Description of Artificial Sequence: Synthetic oligonucleotide
  Antisense strand to SEQ ID NO: 805574
uccucucaggacaugggcu

SEQ ID NO: 805576 - RNA, 19 nt, Artificial Sequence
  Description of Artificial Sequence: Synthetic oligonucleotide
  Sense strand starting at position 367 of SEQ ID NO: 587618
gcugaugucugucacccaa

SEQ ID NO: 805577 - RNA, 19 nt, Artificial Sequence
  Description of Artificial Sequence: Synthetic oligonucleotide
  Antisense strand to SEQ ID NO: 805576
uugggugacagacaucagc

SEQ ID NO: 805578 - RNA, 19 nt, Artificial Sequence
  Description of Artificial Sequence: Synthetic oligonucleotide
  Sense strand starting at position 369 of SEQ ID NO: 587618
ugaugucugucacccaaua

SEQ ID NO: 805579 - RNA, 19 nt, Artificial Sequence
  Description of Artificial Sequence: Synthetic oligonucleotide
  Antisense strand to SEQ ID NO: 805578
uauugggugacagacauca

SEQ ID NO: 805580 - RNA, 19 nt, Artificial Sequence
  Description of Artificial Sequence: Synthetic oligonucleotide
  Sense strand starting at position 412 of SEQ ID NO: 587618
gggcaguguuccgagacag

SEQ ID NO: 805581 - RNA, 19 nt, Artificial Sequence
  Description of Artificial Sequence: Synthetic oligonucleotide
  Antisense strand to SEQ ID NO: 805580
cugucucggaacacugccc

SEQ ID NO: 805582 - RNA, 19 nt, Artificial Sequence
  Description of Artificial Sequence: Synthetic oligonucleotide
  Sense strand starting at position 431 of SEQ ID NO: 587618
gccagaacaucugcuauga

SEQ ID NO: 805583 - RNA, 19 nt, Artificial Sequence
  Description of Artificial Sequence: Synthetic oligonucleotide
  Antisense strand to SEQ ID NO: 805582
ucauagcagauguucuggc

SEQ ID NO: 805584 - RNA, 19 nt, Artificial Sequence
  Description of Artificial Sequence: Synthetic oligonucleotide
  Sense strand starting at position 699 of SEQ ID NO: 587618
cccagauugucccuacaga

SEQ ID NO: 805585 - RNA, 19 nt, Artificial Sequence
  Description of Artificial Sequence: Synthetic oligonucleotide
  Antisense strand to SEQ ID NO: 805584
ucuguagggacaaucuggg

SEQ ID NO: 805586 - RNA, 19 nt, Artificial Sequence
  Description of Artificial Sequence: Synthetic oligonucleotide
  Sense strand starting at position 700 of SEQ ID NO: 587618
ccagauugucccuacagac

SEQ ID NO: 805587 - RNA, 19 nt, Artificial Sequence
  Description of Artificial Sequence: Synthetic oligonucleotide
  Antisense strand to SEQ ID NO: 805586
gucuguagggacaaucugg

SEQ ID NO: 805588 - RNA, 19 nt, Artificial Sequence
  Description of Artificial Sequence: Synthetic oligonucleotide
  Sense strand starting at position 1210 of SEQ ID NO: 587618
aaaccaaagucuuggaagu

SEQ ID NO: 805589 - RNA, 19 nt, Artificial Sequence
  Description of Artificial Sequence: Synthetic oligonucleotide
  Antisense strand to SEQ ID NO: 805588
acuuccaagacuuugguuu

SEQ ID NO: 805590 - RNA, 19 nt, Artificial Sequence
  Description of Artificial Sequence: Synthetic oligonucleotide
  Sense strand starting at position 1211 of SEQ ID NO: 587618
aaccaaagucuuggaaguu

SEQ ID NO: 805591 - RNA, 19 nt, Artificial Sequence
  Description of Artificial Sequence: Synthetic oligonucleotide
  Antisense strand to SEQ ID NO: 805590
aacuuccaagacuuugguu

SEQ ID NO: 805592 - RNA, 19 nt, Artificial Sequence
  Description of Artificial Sequence: Synthetic oligonucleotide
  Sense strand starting at position 1415 of SEQ ID NO: 587618
aggcuuacaugcucacaca

SEQ ID NO: 805593 - RNA, 19 nt, Artificial Sequence
  Description of Artificial Sequence: Synthetic oligonucleotide
  Antisense strand to SEQ ID NO: 805592
ugugugagcauguaagccu

SEQ ID NO: 805594 - RNA, 19 nt, Artificial Sequence
  Description of Artificial Sequence: Synthetic oligonucleotide
  Sense strand starting at position 1686 of SEQ ID NO: 587618
gagccagguuccugggagu

SEQ ID NO: 805595 - RNA, 19 nt, Artificial Sequence
  Description of Artificial Sequence: Synthetic oligonucleotide
  Antisense strand to SEQ ID NO: 805594
acucccaggaaccuggcuc

SEQ ID NO: 805596 - RNA, 19 nt, Artificial Sequence
  Description of Artificial Sequence: Synthetic oligonucleotide
  Sense strand starting at position 1699 of SEQ ID NO: 587618
gggagucaggaucguguua

SEQ ID NO: 805597 - RNA, 19 nt, Artificial Sequence
  Description of Artificial Sequence: Synthetic oligonucleotide
  Antisense strand to SEQ ID NO: 805596
uaacacgauccugacuccc

SEQ ID NO: 805598 - RNA, 19 nt, Artificial Sequence
  Description of Artificial Sequence: Synthetic oligonucleotide
  Sense strand starting at position 2228 of SEQ ID NO: 587618
agaacuaucuguuguggac

SEQ ID NO: 805599 - RNA, 19 nt, Artificial Sequence
  Description of Artificial Sequence: Synthetic oligonucleotide
  Antisense strand to SEQ ID NO: 805598
guccacaacagauaguucu

SEQ ID NO: 805600 - RNA, 19 nt, Artificial Sequence
  Description of Artificial Sequence: Synthetic oligonucleotide
  Sense strand starting at position 2237 of SEQ ID NO: 587618
uguuguggacucuauaacu

SEQ ID NO: 805601 - RNA, 19 nt, Artificial Sequence
  Description of Artificial Sequence: Synthetic oligonucleotide
  Antisense strand to SEQ ID NO: 805600
aguuauagaguccacaaca

SEQ ID NO: 805602 - RNA, 19 nt, Artificial Sequence
  Description of Artificial Sequence: Synthetic oligonucleotide
  Sense strand starting at position 2246 of SEQ ID NO: 587618
cucuauaacuuguagaagu

SEQ ID NO: 805603 - RNA, 19 nt, Artificial Sequence
  Description of Artificial Sequence: Synthetic oligonucleotide
  Antisense strand to SEQ ID NO: 805602
acuucuacaaguuauagag

SEQ ID NO: 805604 - RNA, 19 nt, Artificial Sequence
  Description of Artificial Sequence: Synthetic oligonucleotide
  Sense strand starting at position 2336 of SEQ ID NO: 587618
acaugagaauauguauugu

SEQ ID NO: 805605 - RNA, 19 nt, Artificial Sequence
  Description of Artificial Sequence: Synthetic oligonucleotide
  Antisense strand to SEQ ID NO: 805604
acaauacauauucucaugu

SEQ ID NO: 805606 - RNA, 19 nt, Artificial Sequence
  Description of Artificial Sequence: Synthetic oligonucleotide
  Sense strand starting at position 2340 of SEQ ID NO: 587618
gagaauauguauuguaagg

SEQ ID NO: 805607 - RNA, 19 nt, Artificial Sequence
  Description of Artificial Sequence: Synthetic oligonucleotide
  Antisense strand to SEQ ID NO: 805606
ccuuacaauacauauucuc

SEQ ID NO: 805608 - RNA, 19 nt, Artificial Sequence
  Description of Artificial Sequence: Synthetic oligonucleotide
  Sense strand starting at position 2342 of SEQ ID NO: 587618
gaauauguauuguaagguu

SEQ ID NO: 805609 - RNA, 19 nt, Artificial Sequence
  Description of Artificial Sequence: Synthetic oligonucleotide
  Antisense strand to SEQ ID NO: 805608
aaccuuacaauacauauuc

SEQ ID NO: 805610 - RNA, 19 nt, Artificial Sequence
  Description of Artificial Sequence: Synthetic oligonucleotide
  Sense strand starting at position 2345 of SEQ ID NO: 587618
uauguauuguaagguucuu

SEQ ID NO: 805611 - RNA, 19 nt, Artificial Sequence
  Description of Artificial Sequence: Synthetic oligonucleotide
  Antisense strand to SEQ ID NO: 805610
aagaaccuuacaauacaua

SEQ ID NO: 805612 - RNA, 19 nt, Artificial Sequence
  Description of Artificial Sequence: Synthetic oligonucleotide
  Sense strand starting at position 2350 of SEQ ID NO: 587618
auuguaagguucuuaaguu

SEQ ID NO: 805613 - RNA, 19 nt, Artificial Sequence
  Description of Artificial Sequence: Synthetic oligonucleotide
  Antisense strand to SEQ ID NO: 805612
aacuuaagaaccuuacaau

SEQ ID NO: 805614 - RNA, 19 nt, Artificial Sequence
  Description of Artificial Sequence: Synthetic oligonucleotide
  Sense strand starting at position 2351 of SEQ ID NO: 587618
uuguaagguucuuaaguua

SEQ ID NO: 805615 - RNA, 19 nt, Artificial Sequence
  Description of Artificial Sequence: Synthetic oligonucleotide
  Antisense strand to SEQ ID NO: 805614
uaacuuaagaaccuuacaa

SEQ ID NO: 805616 - RNA, 19 nt, Artificial Sequence
  Description of Artificial Sequence: Synthetic oligonucleotide
  Sense strand starting at position 2358 of SEQ ID NO: 587618
guucuuaaguuacauguga

SEQ ID NO: 805617 - RNA, 19 nt, Artificial Sequence
  Description of Artificial Sequence: Synthetic oligonucleotide
  Antisense strand to SEQ ID NO: 805616
ucacauguaacuuaagaac

SEQ ID NO: 805618 - RNA, 19 nt, Artificial Sequence
  Description of Artificial Sequence: Synthetic oligonucleotide
  Sense strand starting at position 2363 of SEQ ID NO: 587618
uaaguuacaugugaaguau

SEQ ID NO: 805619 - RNA, 19 nt, Artificial Sequence
  Description of Artificial Sequence: Synthetic oligonucleotide
  Antisense strand to SEQ ID NO: 805618
auacuucacauguaacuua

SEQ ID NO: 805620 - RNA, 19 nt, Artificial Sequence
  Description of Artificial Sequence: Synthetic oligonucleotide
  Sense strand starting at position 2548 of SEQ ID NO: 587618
gcuaaugacucaggaauug

SEQ ID NO: 805621 - RNA, 19 nt, Artificial Sequence
  Description of Artificial Sequence: Synthetic oligonucleotide
  Antisense strand to SEQ ID NO: 805620
caauuccugagucauuagc

SEQ ID NO: 805622 - RNA, 19 nt, Artificial Sequence
  Description of Artificial Sequence: Synthetic oligonucleotide
  Sense strand starting at position 3500 of SEQ ID NO: 587618
aagcaagauggcugacgua

SEQ ID NO: 805623 - RNA, 19 nt, Artificial Sequence
  Description of Artificial Sequence: Synthetic oligonucleotide
  Antisense strand to SEQ ID NO: 805622
uacgucagccaucuugcuu

SEQ ID NO: 805624 - RNA, 19 nt, Artificial Sequence
  Description of Artificial Sequence: Synthetic oligonucleotide
  Sense strand starting at position 51 of SEQ ID NO: 587619
cuggguugccugggaacaa

SEQ ID NO: 805625 - RNA, 19 nt, Artificial Sequence
  Description of Artificial Sequence: Synthetic oligonucleotide
  Antisense strand to SEQ ID NO: 805624
uuguucccaggcaacccag

SEQ ID NO: 805626 - RNA, 19 nt, Artificial Sequence
  Description of Artificial Sequence: Synthetic oligonucleotide
  Sense strand starting at position 93 of SEQ ID NO: 587619
agaagacaguguccuggua

SEQ ID NO: 805627 - RNA, 19 nt, Artificial Sequence
  Description of Artificial Sequence: Synthetic oligonucleotide
  Antisense strand to SEQ ID NO: 805626
uaccaggacacugucuucu

SEQ ID NO: 805628 - RNA, 19 nt, Artificial Sequence
  Description of Artificial Sequence: Synthetic oligonucleotide
  Sense strand starting at position 129 of SEQ ID NO: 587619
ugaauucuauuggcagaaa

SEQ ID NO: 805629 - RNA, 19 nt, Artificial Sequence
  Description of Artificial Sequence: Synthetic oligonucleotide
  Antisense strand to SEQ ID NO: 805628
uuucugccaauagaauuca

SEQ ID NO: 805630 - RNA, 19 nt, Artificial Sequence
  Description of Artificial Sequence: Synthetic oligonucleotide
  Sense strand starting at position 184 of SEQ ID NO: 587619
ggugaagagccauaaguau

SEQ ID NO: 805631 - RNA, 19 nt, Artificial Sequence
  Description of Artificial Sequence: Synthetic oligonucleotide
  Antisense strand to SEQ ID NO: 805630
auacuuauggcucuucacc

SEQ ID NO: 805632 - RNA, 19 nt, Artificial Sequence
  Description of Artificial Sequence: Synthetic oligonucleotide
  Sense strand starting at position 199 of SEQ ID NO: 587619
guaucucauucuccacaga

SEQ ID NO: 805633 - RNA, 19 nt, Artificial Sequence
  Description of Artificial Sequence: Synthetic oligonucleotide
  Antisense strand to SEQ ID NO: 805632
ucuguggagaaugagauac

SEQ ID NO: 805634 - RNA, 19 nt, Artificial Sequence
  Description of Artificial Sequence: Synthetic oligonucleotide
  Sense strand starting at position 215 of SEQ ID NO: 587619
agaggauucuaagugccaa

SEQ ID NO: 805635 - RNA, 19 nt, Artificial Sequence
  Description of Artificial Sequence: Synthetic oligonucleotide
  Antisense strand to SEQ ID NO: 805634
uuggcacuuagaauccucu

SEQ ID NO: 805636 - RNA, 19 nt, Artificial Sequence
  Description of Artificial Sequence: Synthetic oligonucleotide
  Sense strand starting at position 250 of SEQ ID NO: 587619
ggaaacauuccaggucaua

SEQ ID NO: 805637 - RNA, 19 nt, Artificial Sequence
  Description of Artificial Sequence: Synthetic oligonucleotide
  Antisense strand to SEQ ID NO: 805636
uaugaccuggaauguuucc

SEQ ID NO: 805638 - RNA, 19 nt, Artificial Sequence
  Description of Artificial Sequence: Synthetic oligonucleotide
  Sense strand starting at position 341 of SEQ ID NO: 587619
uguggacuccugcauggaa

SEQ ID NO: 805639 - RNA, 19 nt, Artificial Sequence
  Description of Artificial Sequence: Synthetic oligonucleotide
  Antisense strand to SEQ ID NO: 805638
uuccaugcaggaguccaca

SEQ ID NO: 805640 - RNA, 19 nt, Artificial Sequence
  Description of Artificial Sequence: Synthetic oligonucleotide
  Sense strand starting at position 344 of SEQ ID NO: 587619
ggacuccugcauggaacua

SEQ ID NO: 805641 - RNA, 19 nt, Artificial Sequence
  Description of Artificial Sequence: Synthetic oligonucleotide
  Antisense strand to SEQ ID NO: 805640
uaguuccaugcaggagucc

SEQ ID NO: 805642 - RNA, 19 nt, Artificial Sequence
  Description of Artificial Sequence: Synthetic oligonucleotide
  Sense strand starting at position 506 of SEQ ID NO: 587619
uagaaugcuccuggaaaug

SEQ ID NO: 805643 - RNA, 19 nt, Artificial Sequence
  Description of Artificial Sequence: Synthetic oligonucleotide
  Antisense strand to SEQ ID NO: 805642
cauuuccaggagcauucua

SEQ ID NO: 805644 - RNA, 19 nt, Artificial Sequence
  Description of Artificial Sequence: Synthetic oligonucleotide
  Sense strand starting at position 531 of SEQ ID NO: 587619
ggacuuuacuugccauauc

SEQ ID NO: 805645 - RNA, 19 nt, Artificial Sequence
  Description of Artificial Sequence: Synthetic oligonucleotide
  Antisense strand to SEQ ID NO: 805644
gauauggcaaguaaagucc

SEQ ID NO: 805646 - RNA, 19 nt, Artificial Sequence
  Description of Artificial Sequence: Synthetic oligonucleotide
  Sense strand starting at position 881 of SEQ ID NO: 587619
guauuaccauccucauuag

SEQ ID NO: 805647 - RNA, 19 nt, Artificial Sequence
  Description of Artificial Sequence: Synthetic oligonucleotide
  Antisense strand to SEQ ID NO: 805646
cuaaugaggaugguaauac

SEQ ID NO: 805648 - RNA, 19 nt, Artificial Sequence
  Description of Artificial Sequence: Synthetic oligonucleotide
  Sense strand starting at position 937 of SEQ ID NO: 587619
aguuaucaacccuguaaac

SEQ ID NO: 805649 - RNA, 19 nt, Artificial Sequence
  Description of Artificial Sequence: Synthetic oligonucleotide
  Antisense strand to SEQ ID NO: 805648
guuuacaggguugauaacu

SEQ ID NO: 805650 - RNA, 19 nt, Artificial Sequence
  Description of Artificial Sequence: Synthetic oligonucleotide
  Sense strand starting at position 1079 of SEQ ID NO: 587619
cauuguggcuuccugauuu

SEQ ID NO: 805651 - RNA, 19 nt, Artificial Sequence
  Description of Artificial Sequence: Synthetic oligonucleotide
  Antisense strand to SEQ ID NO: 805650
aaaucaggaagccacaaug

SEQ ID NO: 805652 - RNA, 19 nt, Artificial Sequence
  Description of Artificial Sequence: Synthetic oligonucleotide
  Sense strand starting at position 1090 of SEQ ID NO: 587619
ccugauuuaugacaaauug

SEQ ID NO: 805653 - RNA, 19 nt, Artificial Sequence
  Description of Artificial Sequence: Synthetic oligonucleotide
  Antisense strand to SEQ ID NO: 805652
caauuugucauaaaucagg

SEQ ID NO: 805654 - RNA, 19 nt, Artificial Sequence
  Description of Artificial Sequence: Synthetic oligonucleotide
  Sense strand starting at position 1105 of SEQ ID NO: 587619
auugaaacuuggucaauug

SEQ ID NO: 805655 - RNA, 19 nt, Artificial Sequence
  Description of Artificial Sequence: Synthetic oligonucleotide
  Antisense strand to SEQ ID NO: 805654
caauugaccaaguuucaau

SEQ ID NO: 805656 - RNA, 19 nt, Artificial Sequence
  Description of Artificial Sequence: Synthetic oligonucleotide
  Sense strand starting at position 1142 of SEQ ID NO: 587619
gcgagugucccugaggaga

SEQ ID NO: 805657 - RNA, 19 nt, Artificial Sequence
  Description of Artificial Sequence: Synthetic oligonucleotide
  Antisense strand to SEQ ID NO: 805656
ucuccucagggacacucgc

SEQ ID NO: 805658 - RNA, 19 nt, Artificial Sequence
  Description of Artificial Sequence: Synthetic oligonucleotide
  Sense strand starting at position 2420 of SEQ ID NO: 587619
aguggugagaauugggcua

SEQ ID NO: 805659 - RNA, 19 nt, Artificial Sequence
  Description of Artificial Sequence: Synthetic oligonucleotide
  Antisense strand to SEQ ID NO: 805658
uagcccaauucucaccacu

SEQ ID NO: 805660 - RNA, 19 nt, Artificial Sequence
  Description of Artificial Sequence: Synthetic oligonucleotide
  Sense strand starting at position 2603 of SEQ ID NO: 587619
gggaaagucuaguucagac

SEQ ID NO: 805661 - RNA, 19 nt, Artificial Sequence
  Description of Artificial Sequence: Synthetic oligonucleotide
  Antisense strand to SEQ ID NO: 805660
gucugaacuagacuuuccc

SEQ ID NO: 805662 - RNA, 19 nt, Artificial Sequence
  Description of Artificial Sequence: Synthetic oligonucleotide
  Sense strand starting at position 2814 of SEQ ID NO: 587619
ggacaucuccuauaaagcu

SEQ ID NO: 805663 - RNA, 19 nt, Artificial Sequence
  Description of Artificial Sequence: Synthetic oligonucleotide
  Antisense strand to SEQ ID NO: 805662
agcuuuauaggagaugucc

SEQ ID NO: 805664 - RNA, 19 nt, Artificial Sequence
  Description of Artificial Sequence: Synthetic oligonucleotide
  Sense strand starting at position 3298 of SEQ ID NO: 587619
auuccuauuugaugauaga

SEQ ID NO: 805665 - RNA, 19 nt, Artificial Sequence
  Description of Artificial Sequence: Synthetic oligonucleotide
  Antisense strand to SEQ ID NO: 805664
ucuaucaucaaauaggaau

SEQ ID NO: 805666 - RNA, 19 nt, Artificial Sequence
  Description of Artificial Sequence: Synthetic oligonucleotide
  Sense strand starting at position 3301 of SEQ ID NO: 587619
ccuauuugaugauagaguu

SEQ ID NO: 805667 - RNA, 19 nt, Artificial Sequence
  Description of Artificial Sequence: Synthetic oligonucleotide
  Antisense strand to SEQ ID NO: 805666
aacucuaucaucaaauagg

SEQ ID NO: 805668 - RNA, 19 nt, Artificial Sequence
  Description of Artificial Sequence: Synthetic oligonucleotide
  Sense strand starting at position 3314 of SEQ ID NO: 587619
agaguugauuucugaaaua

SEQ ID NO: 805669 - RNA, 19 nt, Artificial Sequence
  Description of Artificial Sequence: Synthetic oligonucleotide
  Antisense strand to SEQ ID NO: 805668
uauuucagaaaucaacucu

SEQ ID NO: 805670 - RNA, 19 nt, Artificial Sequence
  Description of Artificial Sequence: Synthetic oligonucleotide
  Sense strand starting at position 3517 of SEQ ID NO: 587619
gccugcacugaucacaaau

SEQ ID NO: 805671 - RNA, 19 nt, Artificial Sequence
  Description of Artificial Sequence: Synthetic oligonucleotide
  Antisense strand to SEQ ID NO: 805670
auuugugaucagugcaggc

SEQ ID NO: 805672 - RNA, 19 nt, Artificial Sequence
  Description of Artificial Sequence: Synthetic oligonucleotide
  Sense strand starting at position 3543 of SEQ ID NO: 587619
uuguuaugucuuugggagg

SEQ ID NO: 805673 - RNA, 19 nt, Artificial Sequence
  Description of Artificial Sequence: Synthetic oligonucleotide
  Antisense strand to SEQ ID NO: 805672
ccucccaaagacauaacaa

SEQ ID NO: 805674 - RNA, 19 nt, Artificial Sequence
  Description of Artificial Sequence: Synthetic oligonucleotide
  Sense strand starting at position 3548 of SEQ ID NO: 587619
augucuuugggaggaggua

SEQ ID NO: 805675 - RNA, 19 nt, Artificial Sequence
  Description of Artificial Sequence: Synthetic oligonucleotide
  Antisense strand to SEQ ID NO: 805674
uaccuccucccaaagacau

SEQ ID NO: 805676 - RNA, 19 nt, Artificial Sequence
  Description of Artificial Sequence: Synthetic oligonucleotide
  Sense strand starting at position 3599 of SEQ ID NO: 587619
ggaaauguuuggucucuga

SEQ ID NO: 805677 - RNA, 19 nt, Artificial Sequence
  Description of Artificial Sequence: Synthetic oligonucleotide
  Antisense strand to SEQ ID NO: 805676
ucagagaccaaacauuucc

SEQ ID NO: 805678 - RNA, 19 nt, Artificial Sequence
  Description of Artificial Sequence: Synthetic oligonucleotide
  Sense strand starting at position 3685 of SEQ ID NO: 587619
gaaguugagcuacaguuua

SEQ ID NO: 805679 - RNA, 19 nt, Artificial Sequence
  Description of Artificial Sequence: Synthetic oligonucleotide
  Antisense strand to SEQ ID NO: 805678
uaaacuguagcucaacuuc

SEQ ID NO: 805680 - RNA, 19 nt, Artificial Sequence
  Description of Artificial Sequence: Synthetic oligonucleotide
  Sense strand starting at position 3690 of SEQ ID NO: 587619
ugagcuacaguuuauggaa

SEQ ID NO: 805681 - RNA, 19 nt, Artificial Sequence
  Description of Artificial Sequence: Synthetic oligonucleotide
  Antisense strand to SEQ ID NO: 805680
uuccauaaacuguagcuca

SEQ ID NO: 805682 - RNA, 19 nt, Artificial Sequence
  Description of Artificial Sequence: Synthetic oligonucleotide
  Sense strand starting at position 3723 of SEQ ID NO: 587619
uguguugacuuauuccaag

SEQ ID NO: 805683 - RNA, 19 nt, Artificial Sequence
  Description of Artificial Sequence: Synthetic oligonucleotide
  Antisense strand to SEQ ID NO: 805682
cuuggaauaagucaacaca

SEQ ID NO: 805684 - RNA, 19 nt, Artificial Sequence
  Description of Artificial Sequence: Synthetic oligonucleotide
  Sense strand starting at position 3737 of SEQ ID NO: 587619
ccaagacaccagugugauc

SEQ ID NO: 805685 - RNA, 19 nt, Artificial Sequence
  Description of Artificial Sequence: Synthetic oligonucleotide
  Antisense strand to SEQ ID NO: 805684
gaucacacuggugucuugg

SEQ ID NO: 805686 - RNA, 19 nt, Artificial Sequence
  Description of Artificial Sequence: Synthetic oligonucleotide
  Sense strand starting at position 3742 of SEQ ID NO: 587619
acaccagugugauccagua

SEQ ID NO: 805687 - RNA, 19 nt, Artificial Sequence
  Description of Artificial Sequence: Synthetic oligonucleotide
  Antisense strand to SEQ ID NO: 805686
uacuggaucacacuggugu

SEQ ID NO: 805688 - RNA, 19 nt, Artificial Sequence
  Description of Artificial Sequence: Synthetic oligonucleotide
  Sense strand starting at position 3744 of SEQ ID NO: 587619
accagugugauccaguaau

SEQ ID NO: 805689 - RNA, 19 nt, Artificial Sequence
  Description of Artificial Sequence: Synthetic oligonucleotide
  Antisense strand to SEQ ID NO: 805688
auuacuggaucacacuggu

SEQ ID NO: 805690 - RNA, 19 nt, Artificial Sequence
  Description of Artificial Sequence: Synthetic oligonucleotide
  Sense strand starting at position 3755 of SEQ ID NO: 587619
ccaguaauuuaccaggaaa

SEQ ID NO: 805691 - RNA, 19 nt, Artificial Sequence
  Description of Artificial Sequence: Synthetic oligonucleotide
  Antisense strand to SEQ ID NO: 805690
uuuccugguaaauuacugg

SEQ ID NO: 805692 - RNA, 19 nt, Artificial Sequence
  Description of Artificial Sequence: Synthetic oligonucleotide
  Sense strand starting at position 3819 of SEQ ID NO: 587619
uuuaguaacugauuccagu

SEQ ID NO: 805693 - RNA, 19 nt, Artificial Sequence
  Description of Artificial Sequence: Synthetic oligonucleotide
  Antisense strand to SEQ ID NO: 805692
acuggaaucaguuacuaaa

SEQ ID NO: 805694 - RNA, 19 nt, Artificial Sequence
  Description of Artificial Sequence: Synthetic oligonucleotide
  Sense strand starting at position 3879 of SEQ ID NO: 587619
gggaguucuauuggaauuc

SEQ ID NO: 805695 - RNA, 19 nt, Artificial Sequence
  Description of Artificial Sequence: Synthetic oligonucleotide
  Antisense strand to SEQ ID NO: 805694
gaauuccaauagaacuccc

SEQ ID NO: 805696 - RNA, 19 nt, Artificial Sequence
  Description of Artificial Sequence: Synthetic oligonucleotide
  Sense strand starting at position 3934 of SEQ ID NO: 587619
ggccaagucaaauagguua

SEQ ID NO: 805697 - RNA, 19 nt, Artificial Sequence
  Description of Artificial Sequence: Synthetic oligonucleotide
  Antisense strand to SEQ ID NO: 805696
uaaccuauuugacuuggcc

SEQ ID NO: 805698 - RNA, 19 nt, Artificial Sequence
  Description of Artificial Sequence: Synthetic oligonucleotide
  Sense strand starting at position 3948 of SEQ ID NO: 587619
gguuaaaugaguuguucua

SEQ ID NO: 805699 - RNA, 19 nt, Artificial Sequence
  Description of Artificial Sequence: Synthetic oligonucleotide
  Antisense strand to SEQ ID NO: 805698
uagaacaacucauuuaacc

SEQ ID NO: 805700 - RNA, 19 nt, Artificial Sequence
  Description of Artificial Sequence: Synthetic oligonucleotide
  Sense strand starting at position 3965 of SEQ ID NO: 587619
uaccuugugggaugaucuu

SEQ ID NO: 805701 - RNA, 19 nt, Artificial Sequence
  Description of Artificial Sequence: Synthetic oligonucleotide
  Antisense strand to SEQ ID NO: 805700
aagaucaucccacaaggua

SEQ ID NO: 805702 - RNA, 19 nt, Artificial Sequence
  Description of Artificial Sequence: Synthetic oligonucleotide
  Sense strand starting at position 3971 of SEQ ID NO: 587619
gugggaugaucuucagguc

SEQ ID NO: 805703 - RNA, 19 nt, Artificial Sequence
  Description of Artificial Sequence: Synthetic oligonucleotide
  Antisense strand to SEQ ID NO: 805702
gaccugaagaucaucccac

SEQ ID NO: 805704 - RNA, 19 nt, Artificial Sequence
  Description of Artificial Sequence: Synthetic oligonucleotide
  Sense strand starting at position 69 of SEQ ID NO: 587620
aggaaacuucuuuacagcu

SEQ ID NO: 805705 - RNA, 19 nt, Artificial Sequence
  Description of Artificial Sequence: Synthetic oligonucleotide
  Antisense strand to SEQ ID NO: 805704
agcuguaaagaaguuuccu

SEQ ID NO: 805706 - RNA, 19 nt, Artificial Sequence
  Description of Artificial Sequence: Synthetic oligonucleotide
  Sense strand starting at position 116 of SEQ ID NO: 587620
aguuaagggccaugagaca

SEQ ID NO: 805707 - RNA, 19 nt, Artificial Sequence
  Description of Artificial Sequence: Synthetic oligonucleotide
  Antisense strand to SEQ ID NO: 805706
ugucucauggcccuuaacu

SEQ ID NO: 805708 - RNA, 19 nt, Artificial Sequence
  Description of Artificial Sequence: Synthetic oligonucleotide
  Sense strand starting at position 125 of SEQ ID NO: 587620
ccaugagacaguugugaac

SEQ ID NO: 805709 - RNA, 19 nt, Artificial Sequence
  Description of Artificial Sequence: Synthetic oligonucleotide
  Antisense strand to SEQ ID NO: 805708
guucacaacugucucaugg

SEQ ID NO: 805710 - RNA, 19 nt, Artificial Sequence
  Description of Artificial Sequence: Synthetic oligonucleotide
  Sense strand starting at position 178 of SEQ ID NO: 587620
auccuaacugaucguuaga

SEQ ID NO: 805711 - RNA, 19 nt, Artificial Sequence
  Description of Artificial Sequence: Synthetic oligonucleotide
  Antisense strand to SEQ ID NO: 805710
ucuaacgaucaguuaggau

SEQ ID NO: 805712 - RNA, 19 nt, Artificial Sequence
  Description of Artificial Sequence: Synthetic oligonucleotide
  Sense strand starting at position 180 of SEQ ID NO: 587620
ccuaacugaucguuagaua

SEQ ID NO: 805713 - RNA, 19 nt, Artificial Sequence
  Description of Artificial Sequence: Synthetic oligonucleotide
  Antisense strand to SEQ ID NO: 805712
uaucuaacgaucaguuagg

SEQ ID NO: 805714 - RNA, 19 nt, Artificial Sequence
  Description of Artificial Sequence: Synthetic oligonucleotide
  Sense strand starting at position 181 of SEQ ID NO: 587620
cuaacugaucguuagauac

SEQ ID NO: 805715 - RNA, 19 nt, Artificial Sequence
  Description of Artificial Sequence: Synthetic oligonucleotide
  Antisense strand to SEQ ID NO: 805714
guaucuaacgaucaguuag

SEQ ID NO: 805716 - RNA, 19 nt, Artificial Sequence
  Description of Artificial Sequence: Synthetic oligonucleotide
  Sense strand starting at position 890 of SEQ ID NO: 587620
cucuaauguguugagguua

SEQ ID NO: 805717 - RNA, 19 nt, Artificial Sequence
  Description of Artificial Sequence: Synthetic oligonucleotide
  Antisense strand to SEQ ID NO: 805716
uaaccucaacacauuagag

SEQ ID NO: 805718 - RNA, 19 nt, Artificial Sequence
  Description of Artificial Sequence: Synthetic oligonucleotide
  Sense strand starting at position 938 of SEQ ID NO: 587620
gucaucacaucucuaguga

SEQ ID NO: 805719 - RNA, 19 nt, Artificial Sequence
  Description of Artificial Sequence: Synthetic oligonucleotide
  Antisense strand to SEQ ID NO: 805718
ucacuagagaugugaugac

SEQ ID NO: 805720 - RNA, 19 nt, Artificial Sequence
  Description of Artificial Sequence: Synthetic oligonucleotide
  Sense strand starting at position 939 of SEQ ID NO: 587620
ucaucacaucucuagugau

SEQ ID NO: 805721 - RNA, 19 nt, Artificial Sequence
  Description of Artificial Sequence: Synthetic oligonucleotide
  Antisense strand to SEQ ID NO: 805720
aucacuagagaugugauga

SEQ ID NO: 805722 - RNA, 19 nt, Artificial Sequence
  Description of Artificial Sequence: Synthetic oligonucleotide
  Sense strand starting at position 1155 of SEQ ID NO: 587620
aucugagauccaugguuga

SEQ ID NO: 805723 - RNA, 19 nt, Artificial Sequence
  Description of Artificial Sequence: Synthetic oligonucleotide
  Antisense strand to SEQ ID NO: 805722
ucaaccauggaucucagau

SEQ ID NO: 805724 - RNA, 19 nt, Artificial Sequence
  Description of Artificial Sequence: Synthetic oligonucleotide
  Sense strand starting at position 1162 of SEQ ID NO: 587620
auccaugguugacagagau

SEQ ID NO: 805725 - RNA, 19 nt, Artificial Sequence
  Description of Artificial Sequence: Synthetic oligonucleotide
  Antisense strand to SEQ ID NO: 805724
aucucugucaaccauggau

SEQ ID NO: 805726 - RNA, 19 nt, Artificial Sequence
  Description of Artificial Sequence: Synthetic oligonucleotide
  Sense strand starting at position 1179 of SEQ ID NO: 587620
auguauccauuuggagaau

SEQ ID NO: 805727 - RNA, 19 nt, Artificial Sequence
  Description of Artificial Sequence: Synthetic oligonucleotide
  Antisense strand to SEQ ID NO: 805726
auucuccaaauggauacau

SEQ ID NO: 805728 - RNA, 19 nt, Artificial Sequence
  Description of Artificial Sequence: Synthetic oligonucleotide
  Sense strand starting at position 1180 of SEQ ID NO: 587620
uguauccauuuggagaauu

SEQ ID NO: 805729 - RNA, 19 nt, Artificial Sequence
  Description of Artificial Sequence: Synthetic oligonucleotide
  Antisense strand to SEQ ID NO: 805728
aauucuccaaauggauaca

SEQ ID NO: 805730 - RNA, 19 nt, Artificial Sequence
  Description of Artificial Sequence: Synthetic oligonucleotide
  Sense strand starting at position 1216 of SEQ ID NO: 587620
accaucucuccugagaguu

SEQ ID NO: 805731 - RNA, 19 nt, Artificial Sequence
  Description of Artificial Sequence: Synthetic oligonucleotide
  Antisense strand to SEQ ID NO: 805730
aacucucaggagagauggu

SEQ ID NO: 805732 - RNA, 19 nt, Artificial Sequence
  Description of Artificial Sequence: Synthetic oligonucleotide
  Sense strand starting at position 1346 of SEQ ID NO: 587620
aucaauaaucagugacagu

SEQ ID NO: 805733 - RNA, 19 nt, Artificial Sequence
  Description of Artificial Sequence: Synthetic oligonucleotide
  Antisense strand to SEQ ID NO: 805732
acugucacugauuauugau

SEQ ID NO: 805734 - RNA, 19 nt, Artificial Sequence
  Description of Artificial Sequence: Synthetic oligonucleotide
  Sense strand starting at position 1353 of SEQ ID NO: 587620
aucagugacagugagagua

SEQ ID NO: 805735 - RNA, 19 nt, Artificial Sequence
  Description of Artificial Sequence: Synthetic oligonucleotide
  Antisense strand to SEQ ID NO: 805734
uacucucacugucacugau

SEQ ID NO: 805736 - RNA, 19 nt, Artificial Sequence
  Description of Artificial Sequence: Synthetic oligonucleotide
  Sense strand starting at position 1742 of SEQ ID NO: 587620
gcacccagucacuauagua

SEQ ID NO: 805737 - RNA, 19 nt, Artificial Sequence
  Description of Artificial Sequence: Synthetic oligonucleotide
  Antisense strand to SEQ ID NO: 805736
uacuauagugacugggugc

SEQ ID NO: 805738 - RNA, 19 nt, Artificial Sequence
  Description of Artificial Sequence: Synthetic oligonucleotide
  Sense strand starting at position 1754 of SEQ ID NO: 587620
uauaguauuucuggaugua

SEQ ID NO: 805739 - RNA, 19 nt, Artificial Sequence
  Description of Artificial Sequence: Synthetic oligonucleotide
  Antisense strand to SEQ ID NO: 805738
uacauccagaaauacuaua

SEQ ID NO: 805740 - RNA, 19 nt, Artificial Sequence
  Description of Artificial Sequence: Synthetic oligonucleotide
  Sense strand starting at position 1963 of SEQ ID NO: 587620
gaugccuuccuccaagagu

SEQ ID NO: 805741 - RNA, 19 nt, Artificial Sequence
  Description of Artificial Sequence: Synthetic oligonucleotide
  Antisense strand to SEQ ID NO: 805740
acucuuggaggaaggcauc

SEQ ID NO: 805742 - RNA, 19 nt, Artificial Sequence
  Description of Artificial Sequence: Synthetic oligonucleotide
  Sense strand starting at position 2079 of SEQ ID NO: 587620
cuggcuuucugauugagga

SEQ ID NO: 805743 - RNA, 19 nt, Artificial Sequence
  Description of Artificial Sequence: Synthetic oligonucleotide
  Antisense strand to SEQ ID NO: 805742
uccucaaucagaaagccag

SEQ ID NO: 805744 - RNA, 19 nt, Artificial Sequence
  Description of Artificial Sequence: Synthetic oligonucleotide
  Sense strand starting at position 2080 of SEQ ID NO: 587620
uggcuuucugauugaggaa

SEQ ID NO: 805745 - RNA, 19 nt, Artificial Sequence
  Description of Artificial Sequence: Synthetic oligonucleotide
  Antisense strand to SEQ ID NO: 805744
uuccucaaucagaaagcca

SEQ ID NO: 805746 - RNA, 19 nt, Artificial Sequence
  Description of Artificial Sequence: Synthetic oligonucleotide
  Sense strand starting at position 2081 of SEQ ID NO: 587620
ggcuuucugauugaggaac

SEQ ID NO: 805747 - RNA, 19 nt, Artificial Sequence
  Description of Artificial Sequence: Synthetic oligonucleotide
  Antisense strand to SEQ ID NO: 805746
guuccucaaucagaaagcc

SEQ ID NO: 805748 - RNA, 19 nt, Artificial Sequence
  Description of Artificial Sequence: Synthetic oligonucleotide
  Sense strand starting at position 2128 of SEQ ID NO: 587620
guguaacauuaaucaugac

SEQ ID NO: 805749 - RNA, 19 nt, Artificial Sequence
  Description of Artificial Sequence: Synthetic oligonucleotide
  Antisense strand to SEQ ID NO: 805748
gucaugauuaauguuacac

SEQ ID NO: 805750 - RNA, 19 nt, Artificial Sequence
  Description of Artificial Sequence: Synthetic oligonucleotide
  Sense strand starting at position 2216 of SEQ ID NO: 587620
agucaucaugcugucguau

SEQ ID NO: 805751 - RNA, 19 nt, Artificial Sequence
  Description of Artificial Sequence: Synthetic oligonucleotide
  Antisense strand to SEQ ID NO: 805750
auacgacagcaugaugacu

SEQ ID NO: 805752 - RNA, 19 nt, Artificial Sequence
  Description of Artificial Sequence: Synthetic oligonucleotide
  Sense strand starting at position 2217 of SEQ ID NO: 587620
gucaucaugcugucguauu

SEQ ID NO: 805753 - RNA, 19 nt, Artificial Sequence
  Description of Artificial Sequence: Synthetic oligonucleotide
  Antisense strand to SEQ ID NO: 805752
aauacgacagcaugaugac

SEQ ID NO: 805754 - RNA, 19 nt, Artificial Sequence
  Description of Artificial Sequence: Synthetic oligonucleotide
  Sense strand starting at position 2806 of SEQ ID NO: 587620
uguugauuacuguauccgu

SEQ ID NO: 805755 - RNA, 19 nt, Artificial Sequence
  Description of Artificial Sequence: Synthetic oligonucleotide
  Antisense strand to SEQ ID NO: 805754
acggauacaguaaucaaca

SEQ ID NO: 805756 - RNA, 19 nt, Artificial Sequence
  Description of Artificial Sequence: Synthetic oligonucleotide
  Sense strand starting at position 3242 of SEQ ID NO: 587620
cuugacaaguaauacagaa

SEQ ID NO: 805757 - RNA, 19 nt, Artificial Sequence
  Description of Artificial Sequence: Synthetic oligonucleotide
  Antisense strand to SEQ ID NO: 805756
uucuguauuacuugucaag

SEQ ID NO: 805758 - RNA, 19 nt, Artificial Sequence
  Description of Artificial Sequence: Synthetic oligonucleotide
  Sense strand starting at position 3277 of SEQ ID NO: 587620
aagacaucucuuggcuagu

SEQ ID NO: 805759 - RNA, 19 nt, Artificial Sequence
  Description of Artificial Sequence: Synthetic oligonucleotide
  Antisense strand to SEQ ID NO: 805758
acuagccaagagaugucuu

SEQ ID NO: 805760 - RNA, 19 nt, Artificial Sequence
  Description of Artificial Sequence: Synthetic oligonucleotide
  Sense strand starting at position 3278 of SEQ ID NO: 587620
agacaucucuuggcuagua

SEQ ID NO: 805761 - RNA, 19 nt, Artificial Sequence
  Description of Artificial Sequence: Synthetic oligonucleotide
  Antisense strand to SEQ ID NO: 805760
uacuagccaagagaugucu

SEQ ID NO: 805762 - RNA, 19 nt, Artificial Sequence
  Description of Artificial Sequence: Synthetic oligonucleotide
  Sense strand starting at position 3361 of SEQ ID NO: 587620
aagucacuugcaugagcaa

SEQ ID NO: 805763 - RNA, 19 nt, Artificial Sequence
  Description of Artificial Sequence: Synthetic oligonucleotide
  Antisense strand to SEQ ID NO: 805762
uugcucaugcaagugacuu

SEQ ID NO: 805764 - RNA, 19 nt, Artificial Sequence
  Description of Artificial Sequence: Synthetic oligonucleotide
  Sense strand starting at position 3370 of SEQ ID NO: 587620
gcaugagcaaguugucaau

SEQ ID NO: 805765 - RNA, 19 nt, Artificial Sequence
  Description of Artificial Sequence: Synthetic oligonucleotide
  Antisense strand to SEQ ID NO: 805764
auugacaacuugcucaugc

SEQ ID NO: 805766 - RNA, 19 nt, Artificial Sequence
  Description of Artificial Sequence: Synthetic oligonucleotide
  Sense strand starting at position 3372 of SEQ ID NO: 587620
augagcaaguugucaauaa

SEQ ID NO: 805767 - RNA, 19 nt, Artificial Sequence
  Description of Artificial Sequence: Synthetic oligonucleotide
  Antisense strand to SEQ ID NO: 805766
uuauugacaacuugcucau

SEQ ID NO: 805768 - RNA, 19 nt, Artificial Sequence
  Description of Artificial Sequence: Synthetic oligonucleotide
  Sense strand starting at position 3376 of SEQ ID NO: 587620
gcaaguugucaauaaagga

SEQ ID NO: 805769 - RNA, 19 nt, Artificial Sequence
  Description of Artificial Sequence: Synthetic oligonucleotide
  Antisense strand to SEQ ID NO: 805768
uccuuuauugacaacuugc

SEQ ID NO: 805770 - RNA, 19 nt, Artificial Sequence
  Description of Artificial Sequence: Synthetic oligonucleotide
  Sense strand starting at position 3492 of SEQ ID NO: 587620
accgguaauuuauaaagga

SEQ ID NO: 805771 - RNA, 19 nt, Artificial Sequence
  Description of Artificial Sequence: Synthetic oligonucleotide
  Antisense strand to SEQ ID NO: 805770
uccuuuauaaauuaccggu

SEQ ID NO: 805772 - RNA, 19 nt, Artificial Sequence
  Description of Artificial Sequence: Synthetic oligonucleotide
  Sense strand starting at position 3678 of SEQ ID NO: 587620
gaacuaucaugugagaaug

SEQ ID NO: 805773 - RNA, 19 nt, Artificial Sequence
  Description of Artificial Sequence: Synthetic oligonucleotide
  Antisense strand to SEQ ID NO: 805772
cauucucacaugauaguuc

SEQ ID NO: 805774 - RNA, 19 nt, Artificial Sequence
  Description of Artificial Sequence: Synthetic oligonucleotide
  Sense strand starting at position 3680 of SEQ ID NO: 587620
acuaucaugugagaaugau

SEQ ID NO: 805775 - RNA, 19 nt, Artificial Sequence
  Description of Artificial Sequence: Synthetic oligonucleotide
  Antisense strand to SEQ ID NO: 805774
aucauucucacaugauagu

SEQ ID NO: 805776 - RNA, 19 nt, Artificial Sequence
  Description of Artificial Sequence: Synthetic oligonucleotide
  Sense strand starting at position 3714 of SEQ ID NO: 587620
gggaaaccguucccauaau

SEQ ID NO: 805777 - RNA, 19 nt, Artificial Sequence
  Description of Artificial Sequence: Synthetic oligonucleotide
  Antisense strand to SEQ ID NO: 805776
auuaugggaacgguuuccc

SEQ ID NO: 805778 - RNA, 19 nt, Artificial Sequence
  Description of Artificial Sequence: Synthetic oligonucleotide
  Sense strand starting at position 3812 of SEQ ID NO: 587620
agagacugcucugcacaga

SEQ ID NO: 805779 - RNA, 19 nt, Artificial Sequence
  Description of Artificial Sequence: Synthetic oligonucleotide
  Antisense strand to SEQ ID NO: 805778
ucugugcagagcagucucu

SEQ ID NO: 805780 - RNA, 19 nt, Artificial Sequence
  Description of Artificial Sequence: Synthetic oligonucleotide
  Sense strand starting at position 3815 of SEQ ID NO: 587620
gacugcucugcacagagaa

SEQ ID NO: 805781 - RNA, 19 nt, Artificial Sequence
  Description of Artificial Sequence: Synthetic oligonucleotide
  Antisense strand to SEQ ID NO: 805780
uucucugugcagagcaguc

SEQ ID NO: 805782 - RNA, 19 nt, Artificial Sequence
  Description of Artificial Sequence: Synthetic oligonucleotide
  Sense strand starting at position 3927 of SEQ ID NO: 587620
ggccuaucucaacagaacu

SEQ ID NO: 805783 - RNA, 19 nt, Artificial Sequence
  Description of Artificial Sequence: Synthetic oligonucleotide
  Antisense strand to SEQ ID NO: 805782
aguucuguugagauaggcc

SEQ ID NO: 805784 - RNA, 19 nt, Artificial Sequence
  Description of Artificial Sequence: Synthetic oligonucleotide
  Sense strand starting at position 169 of SEQ ID NO: 587621
ggaaauucugguggcauau

SEQ ID NO: 805785 - RNA, 19 nt, Artificial Sequence
  Description of Artificial Sequence: Synthetic oligonucleotide
  Antisense strand to SEQ ID NO: 805784
auaugccaccagaauuucc

SEQ ID NO: 805786 - RNA, 19 nt, Artificial Sequence
  Description of Artificial Sequence: Synthetic oligonucleotide
  Sense strand starting at position 212 of SEQ ID NO: 587621
ucuguugaucuauaccauc

SEQ ID NO: 805787 - RNA, 19 nt, Artificial Sequence
  Description of Artificial Sequence: Synthetic oligonucleotide
  Antisense strand to SEQ ID NO: 805786
gaugguauagaucaacaga

SEQ ID NO: 805788 - RNA, 19 nt, Artificial Sequence
  Description of Artificial Sequence: Synthetic oligonucleotide
  Sense strand starting at position 274 of SEQ ID NO: 587621
cugagauucugagcacucu

SEQ ID NO: 805789 - RNA, 19 nt, Artificial Sequence
  Description of Artificial Sequence: Synthetic oligonucleotide
  Antisense strand to SEQ ID NO: 805788
agagugcucagaaucucag

SEQ ID NO: 805790 - RNA, 19 nt, Artificial Sequence
  Description of Artificial Sequence: Synthetic oligonucleotide
  Sense strand starting at position 275 of SEQ ID NO: 587621
ugagauucugagcacucuu

SEQ ID NO: 805791 - RNA, 19 nt, Artificial Sequence
  Description of Artificial Sequence: Synthetic oligonucleotide
  Antisense strand to SEQ ID NO: 805790
aagagugcucagaaucuca

SEQ ID NO: 805792 - RNA, 19 nt, Artificial Sequence
  Description of Artificial Sequence: Synthetic oligonucleotide
  Sense strand starting at position 377 of SEQ ID NO: 587621
cagcuccucugguuaagaa

SEQ ID NO: 805793 - RNA, 19 nt, Artificial Sequence
  Description of Artificial Sequence: Synthetic oligonucleotide
  Antisense strand to SEQ ID NO: 805792
uucuuaaccagaggagcug

SEQ ID NO: 805794 - RNA, 19 nt, Artificial Sequence
  Description of Artificial Sequence: Synthetic oligonucleotide
  Sense strand starting at position 389 of SEQ ID NO: 587621
uuaagaacaugcucaguca

SEQ ID NO: 805795 - RNA, 19 nt, Artificial Sequence
  Description of Artificial Sequence: Synthetic oligonucleotide
  Antisense strand to SEQ ID NO: 805794
ugacugagcauguucuuaa

SEQ ID NO: 805796 - RNA, 19 nt, Artificial Sequence
  Description of Artificial Sequence: Synthetic oligonucleotide
  Sense strand starting at position 429 of SEQ ID NO: 587621
gcguuaugccaacuguuau

SEQ ID NO: 805797 - RNA, 19 nt, Artificial Sequence
  Description of Artificial Sequence: Synthetic oligonucleotide
  Antisense strand to SEQ ID NO: 805796
auaacaguuggcauaacgc

SEQ ID NO: 805798 - RNA, 19 nt, Artificial Sequence
  Description of Artificial Sequence: Synthetic oligonucleotide
  Sense strand starting at position 451 of SEQ ID NO: 587621
gccaguaaaccugagcaga

SEQ ID NO: 805799 - RNA, 19 nt, Artificial Sequence
  Description of Artificial Sequence: Synthetic oligonucleotide
  Antisense strand to SEQ ID NO: 805798
ucugcucagguuuacuggc

SEQ ID NO: 805800 - RNA, 19 nt, Artificial Sequence
  Description of Artificial Sequence: Synthetic oligonucleotide
  Sense strand starting at position 453 of SEQ ID NO: 587621
caguaaaccugagcagaua

SEQ ID NO: 805801 - RNA, 19 nt, Artificial Sequence
  Description of Artificial Sequence: Synthetic oligonucleotide
  Antisense strand to SEQ ID NO: 805800
uaucugcucagguuuacug

SEQ ID NO: 805802 - RNA, 19 nt, Artificial Sequence
  Description of Artificial Sequence: Synthetic oligonucleotide
  Sense strand starting at position 474 of SEQ ID NO: 587621
gcaucagcuguguaucaag

SEQ ID NO: 805803 - RNA, 19 nt, Artificial Sequence
  Description of Artificial Sequence: Synthetic oligonucleotide
  Antisense strand to SEQ ID NO: 805802
cuugauacacagcugaugc

SEQ ID NO: 805804 - RNA, 19 nt, Artificial Sequence
  Description of Artificial Sequence: Synthetic oligonucleotide
  Sense strand starting at position 2304 of SEQ ID NO: 587621
cgcuucucuguguuuagau

SEQ ID NO: 805805 - RNA, 19 nt, Artificial Sequence
  Description of Artificial Sequence: Synthetic oligonucleotide
  Antisense strand to SEQ ID NO: 805804
aucuaaacacagagaagcg

SEQ ID NO: 805806 - RNA, 19 nt, Artificial Sequence
  Description of Artificial Sequence: Synthetic oligonucleotide
  Sense strand starting at position 2306 of SEQ ID NO: 587621
cuucucuguguuuagauga

SEQ ID NO: 805807 - RNA, 19 nt, Artificial Sequence
  Description of Artificial Sequence: Synthetic oligonucleotide
  Antisense strand to SEQ ID NO: 805806
ucaucuaaacacagagaag

SEQ ID NO: 805808 - RNA, 19 nt, Artificial Sequence
  Description of Artificial Sequence: Synthetic oligonucleotide
  Sense strand starting at position 2311 of SEQ ID NO: 587621
cuguguuuagaugacggua

SEQ ID NO: 805809 - RNA, 19 nt, Artificial Sequence
  Description of Artificial Sequence: Synthetic oligonucleotide
  Antisense strand to SEQ ID NO: 805808
uaccgucaucuaaacacag

SEQ ID NO: 805810 - RNA, 19 nt, Artificial Sequence
  Description of Artificial Sequence: Synthetic oligonucleotide
  Sense strand starting at position 2314 of SEQ ID NO: 587621
uguuuagaugacgguauuu

SEQ ID NO: 805811 - RNA, 19 nt, Artificial Sequence
  Description of Artificial Sequence: Synthetic oligonucleotide
  Antisense strand to SEQ ID NO: 805810
aaauaccgucaucuaaaca

SEQ ID NO: 805812 - RNA, 19 nt, Artificial Sequence
  Description of Artificial Sequence: Synthetic oligonucleotide
  Sense strand starting at position 2368 of SEQ ID NO: 587621
guguauguguauaaaggga

SEQ ID NO: 805813 - RNA, 19 nt, Artificial Sequence
  Description of Artificial Sequence: Synthetic oligonucleotide
  Antisense strand to SEQ ID NO: 805812
ucccuuuauacacauacac

SEQ ID NO: 805814 - RNA, 19 nt, Artificial Sequence
  Description of Artificial Sequence: Synthetic oligonucleotide
  Sense strand starting at position 2382 of SEQ ID NO: 587621
agggauuugucauacugcu

SEQ ID NO: 805815 - RNA, 19 nt, Artificial Sequence
  Description of Artificial Sequence: Synthetic oligonucleotide
  Antisense strand to SEQ ID NO: 805814
agcaguaugacaaaucccu

SEQ ID NO: 805816 - RNA, 19 nt, Artificial Sequence
  Description of Artificial Sequence: Synthetic oligonucleotide
  Sense strand starting at position 2470 of SEQ ID NO: 587621
aaucauugcuaugcagagu

SEQ ID NO: 805817 - RNA, 19 nt, Artificial Sequence
  Description of Artificial Sequence: Synthetic oligonucleotide
  Antisense strand to SEQ ID NO: 805816
acucugcauagcaaugauu

SEQ ID NO: 805818 - RNA, 19 nt, Artificial Sequence
  Description of Artificial Sequence: Synthetic oligonucleotide
  Sense strand starting at position 2828 of SEQ ID NO: 587621
accugaaucucgccuaauc

SEQ ID NO: 805819 - RNA, 19 nt, Artificial Sequence
  Description of Artificial Sequence: Synthetic oligonucleotide
  Antisense strand to SEQ ID NO: 805818
gauuaggcgagauucaggu

SEQ ID NO: 805820 - RNA, 19 nt, Artificial Sequence
  Description of Artificial Sequence: Synthetic oligonucleotide
  Sense strand starting at position 2879 of SEQ ID NO: 587621
ccguuccuacuuugagaaa

SEQ ID NO: 805821 - RNA, 19 nt, Artificial Sequence
  Description of Artificial Sequence: Synthetic oligonucleotide
  Antisense strand to SEQ ID NO: 805820
uuucucaaaguaggaacgg

SEQ ID NO: 805822 - RNA, 19 nt, Artificial Sequence
  Description of Artificial Sequence: Synthetic oligonucleotide
  Sense strand starting at position 3019 of SEQ ID NO: 587621
uuauguggaucuccuguau

SEQ ID NO: 805823 - RNA, 19 nt, Artificial Sequence
  Description of Artificial Sequence: Synthetic oligonucleotide
  Antisense strand to SEQ ID NO: 805822
auacaggagauccacauaa

SEQ ID NO: 805824 - RNA, 19 nt, Artificial Sequence
  Description of Artificial Sequence: Synthetic oligonucleotide
  Sense strand starting at position 3056 of SEQ ID NO: 587621
guaugcagaccuugauguu

SEQ ID NO: 805825 - RNA, 19 nt, Artificial Sequence
  Description of Artificial Sequence: Synthetic oligonucleotide
  Antisense strand to SEQ ID NO: 805824
aacaucaaggucugcauac

SEQ ID NO: 805826 - RNA, 19 nt, Artificial Sequence
  Description of Artificial Sequence: Synthetic oligonucleotide
  Sense strand starting at position 3069 of SEQ ID NO: 587621
gauguugugcccuauuaaa

SEQ ID NO: 805827 - RNA, 19 nt, Artificial Sequence
  Description of Artificial Sequence: Synthetic oligonucleotide
  Antisense strand to SEQ ID NO: 805826
uuuaauagggcacaacauc

SEQ ID NO: 805828 - RNA, 19 nt, Artificial Sequence
  Description of Artificial Sequence: Synthetic oligonucleotide
  Sense strand starting at position 3108 of SEQ ID NO: 587621
gggucuaguagugaauaug

SEQ ID NO: 805829 - RNA, 19 nt, Artificial Sequence
  Description of Artificial Sequence: Synthetic oligonucleotide
  Antisense strand to SEQ ID NO: 805828
cauauucacuacuagaccc

SEQ ID NO: 805830 - RNA, 19 nt, Artificial Sequence
  Description of Artificial Sequence: Synthetic oligonucleotide
  Sense strand starting at position 3118 of SEQ ID NO: 587621
gugaauaugguguaggaau

SEQ ID NO: 805831 - RNA, 19 nt, Artificial Sequence
  Description of Artificial Sequence: Synthetic oligonucleotide
  Antisense strand to SEQ ID NO: 805830
auuccuacaccauauucac

SEQ ID NO: 805832 - RNA, 19 nt, Artificial Sequence
  Description of Artificial Sequence: Synthetic oligonucleotide
  Sense strand starting at position 3478 of SEQ ID NO: 587621
acauguauccuauauguac

SEQ ID NO: 805833 - RNA, 19 nt, Artificial Sequence
  Description of Artificial Sequence: Synthetic oligonucleotide
  Antisense strand to SEQ ID NO: 805832
guacauauaggauacaugu

SEQ ID NO: 805834 - RNA, 19 nt, Artificial Sequence
  Description of Artificial Sequence: Synthetic oligonucleotide
  Sense strand starting at position 3487 of SEQ ID NO: 587621
cuauauguacucuaucugu

SEQ ID NO: 805835 - RNA, 19 nt, Artificial Sequence
  Description of Artificial Sequence: Synthetic oligonucleotide
  Antisense strand to SEQ ID NO: 805834
acagauagaguacauauag

SEQ ID NO: 805836 - RNA, 19 nt, Artificial Sequence
  Description of Artificial Sequence: Synthetic oligonucleotide
  Sense strand starting at position 3496 of SEQ ID NO: 587621
cucuaucuguugucaagaa

SEQ ID NO: 805837 - RNA, 19 nt, Artificial Sequence
  Description of Artificial Sequence: Synthetic oligonucleotide
  Antisense strand to SEQ ID NO: 805836
uucuugacaacagauagag

SEQ ID NO: 805838 - RNA, 19 nt, Artificial Sequence
  Description of Artificial Sequence: Synthetic oligonucleotide
  Sense strand starting at position 3500 of SEQ ID NO: 587621
aucuguugucaagaauaua

SEQ ID NO: 805839 - RNA, 19 nt, Artificial Sequence
  Description of Artificial Sequence: Synthetic oligonucleotide
  Antisense strand to SEQ ID NO: 805838
uauauucuugacaacagau

SEQ ID NO: 805840 - RNA, 19 nt, Artificial Sequence
  Description of Artificial Sequence: Synthetic oligonucleotide
  Sense strand starting at position 3546 of SEQ ID NO: 587621
aacuaacauugcgugauua

SEQ ID NO: 805841 - RNA, 19 nt, Artificial Sequence
  Description of Artificial Sequence: Synthetic oligonucleotide
  Antisense strand to SEQ ID NO: 805840
uaaucacgcaauguuaguu

SEQ ID NO: 805842 - RNA, 19 nt, Artificial Sequence
  Description of Artificial Sequence: Synthetic oligonucleotide
  Sense strand starting at position 3547 of SEQ ID NO: 587621
acuaacauugcgugauuac

SEQ ID NO: 805843 - RNA, 19 nt, Artificial Sequence
  Description of Artificial Sequence: Synthetic oligonucleotide
  Antisense strand to SEQ ID NO: 805842
guaaucacgcaauguuagu

SEQ ID NO: 805844 - RNA, 19 nt, Artificial Sequence
  Description of Artificial Sequence: Synthetic oligonucleotide
  Sense strand starting at position 3548 of SEQ ID NO: 587621
cuaacauugcgugauuacu

SEQ ID NO: 805845 - RNA, 19 nt, Artificial Sequence
  Description of Artificial Sequence: Synthetic oligonucleotide
  Antisense strand to SEQ ID NO: 805844
aguaaucacgcaauguuag

SEQ ID NO: 805846 - RNA, 19 nt, Artificial Sequence
  Description of Artificial Sequence: Synthetic oligonucleotide
  Sense strand starting at position 3550 of SEQ ID NO: 587621
aacauugcgugauuacuuu

SEQ ID NO: 805847 - RNA, 19 nt, Artificial Sequence
  Description of Artificial Sequence: Synthetic oligonucleotide
  Antisense strand to SEQ ID NO: 805846
aaaguaaucacgcaauguu

SEQ ID NO: 805848 - RNA, 19 nt, Artificial Sequence
  Description of Artificial Sequence: Synthetic oligonucleotide
  Sense strand starting at position 3688 of SEQ ID NO: 587621
ggaaguguauuaguuccuu

SEQ ID NO: 805849 - RNA, 19 nt, Artificial Sequence
  Description of Artificial Sequence: Synthetic oligonucleotide
  Antisense strand to SEQ ID NO: 805848
aaggaacuaauacacuucc

SEQ ID NO: 805850 - RNA, 19 nt, Artificial Sequence
  Description of Artificial Sequence: Synthetic oligonucleotide
  Sense strand starting at position 3694 of SEQ ID NO: 587621
guauuaguuccuuauugcu

SEQ ID NO: 805851 - RNA, 19 nt, Artificial Sequence
  Description of Artificial Sequence: Synthetic oligonucleotide
  Antisense strand to SEQ ID NO: 805850
agcaauaaggaacuaauac

SEQ ID NO: 805852 - RNA, 19 nt, Artificial Sequence
  Description of Artificial Sequence: Synthetic oligonucleotide
  Sense strand starting at position 3787 of SEQ ID NO: 587621
gggauucugugagucagaa

SEQ ID NO: 805853 - RNA, 19 nt, Artificial Sequence
  Description of Artificial Sequence: Synthetic oligonucleotide
  Antisense strand to SEQ ID NO: 805852
uucugacucacagaauccc

SEQ ID NO: 805854 - RNA, 19 nt, Artificial Sequence
  Description of Artificial Sequence: Synthetic oligonucleotide
  Sense strand starting at position 3799 of SEQ ID NO: 587621
gucagaaucccacacaggu

SEQ ID NO: 805855 - RNA, 19 nt, Artificial Sequence
  Description of Artificial Sequence: Synthetic oligonucleotide
  Antisense strand to SEQ ID NO: 805854
accugugugggauucugac

SEQ ID NO: 805856 - RNA, 19 nt, Artificial Sequence
  Description of Artificial Sequence: Synthetic oligonucleotide
  Sense strand starting at position 3877 of SEQ ID NO: 587621
gaggauccauugccuuauu

SEQ ID NO: 805857 - RNA, 19 nt, Artificial Sequence
  Description of Artificial Sequence: Synthetic oligonucleotide
  Antisense strand to SEQ ID NO: 805856
aauaaggcaauggauccuc

SEQ ID NO: 805858 - RNA, 19 nt, Artificial Sequence
  Description of Artificial Sequence: Synthetic oligonucleotide
  Sense strand starting at position 3899 of SEQ ID NO: 587621
ucagguuauauaggauuga

SEQ ID NO: 805859 - RNA, 19 nt, Artificial Sequence
  Description of Artificial Sequence: Synthetic oligonucleotide
  Antisense strand to SEQ ID NO: 805858
ucaauccuauauaaccuga

SEQ ID NO: 805860 - RNA, 19 nt, Artificial Sequence
  Description of Artificial Sequence: Synthetic oligonucleotide
  Sense strand starting at position 3903 of SEQ ID NO: 587621
guuauauaggauugagguc

SEQ ID NO: 805861 - RNA, 19 nt, Artificial Sequence
  Description of Artificial Sequence: Synthetic oligonucleotide
  Antisense strand to SEQ ID NO: 805860
gaccucaauccuauauaac

SEQ ID NO: 805862 - RNA, 19 nt, Artificial Sequence
  Description of Artificial Sequence: Synthetic oligonucleotide
  Sense strand starting at position 3912 of SEQ ID NO: 587621
gauugaggucccugacauu

SEQ ID NO: 805863 - RNA, 19 nt, Artificial Sequence
  Description of Artificial Sequence: Synthetic oligonucleotide
  Antisense strand to SEQ ID NO: 805862
aaugucagggaccucaauc

SEQ ID NO: 805864 - RNA, 19 nt, Artificial Sequence
  Description of Artificial Sequence: Synthetic oligonucleotide
  Sense strand starting at position 132 of SEQ ID NO: 587622
accugagaacuugguucua

SEQ ID NO: 805865 - RNA, 19 nt, Artificial Sequence
  Description of Artificial Sequence: Synthetic oligonucleotide
  Antisense strand to SEQ ID NO: 805864
uagaaccaaguucucaggu

SEQ ID NO: 805866 - RNA, 19 nt, Artificial Sequence
  Description of Artificial Sequence: Synthetic oligonucleotide
  Sense strand starting at position 134 of SEQ ID NO: 587622
cugagaacuugguucuaga

SEQ ID NO: 805867 - RNA, 19 nt, Artificial Sequence
  Description of Artificial Sequence: Synthetic oligonucleotide
  Antisense strand to SEQ ID NO: 805866
ucuagaaccaaguucucag

SEQ ID NO: 805868 - RNA, 19 nt, Artificial Sequence
  Description of Artificial Sequence: Synthetic oligonucleotide
  Sense strand starting at position 156 of SEQ ID NO: 587622
agcauuuccugguugcuau

SEQ ID NO: 805869 - RNA, 19 nt, Artificial Sequence
  Description of Artificial Sequence: Synthetic oligonucleotide
  Antisense strand to SEQ ID NO: 805868
auagcaaccaggaaaugcu

SEQ ID NO: 805870 - RNA, 19 nt, Artificial Sequence
  Description of Artificial Sequence: Synthetic oligonucleotide
  Sense strand starting at position 202 of SEQ ID NO: 587622
caguaucuaucuguaggaa

SEQ ID NO: 805871 - RNA, 19 nt, Artificial Sequence
  Description of Artificial Sequence: Synthetic oligonucleotide
  Antisense strand to SEQ ID NO: 805870
uuccuacagauagauacug

SEQ ID NO: 805872 - RNA, 19 nt, Artificial Sequence
  Description of Artificial Sequence: Synthetic oligonucleotide
  Sense strand starting at position 216 of SEQ ID NO: 587622
aggaaaggaaaguguugua

SEQ ID NO: 805873 - RNA, 19 nt, Artificial Sequence
  Description of Artificial Sequence: Synthetic oligonucleotide
  Antisense strand to SEQ ID NO: 805872
uacaacacuuuccuuuccu

SEQ ID NO: 805874 - RNA, 19 nt, Artificial Sequence
  Description of Artificial Sequence: Synthetic oligonucleotide
  Sense strand starting at position 269 of SEQ ID NO: 587622
ugugucagugaccaacaua

SEQ ID NO: 805875 - RNA, 19 nt, Artificial Sequence
  Description of Artificial Sequence: Synthetic oligonucleotide
  Antisense strand to SEQ ID NO: 805874
uauguuggucacugacaca

SEQ ID NO: 805876 - RNA, 19 nt, Artificial Sequence
  Description of Artificial Sequence: Synthetic oligonucleotide
  Sense strand starting at position 853 of SEQ ID NO: 587622
cuacuauagguuggauacu

SEQ ID NO: 805877 - RNA, 19 nt, Artificial Sequence
  Description of Artificial Sequence: Synthetic oligonucleotide
  Antisense strand to SEQ ID NO: 805876
aguauccaaccuauaguag

SEQ ID NO: 805878 - RNA, 19 nt, Artificial Sequence
  Description of Artificial Sequence: Synthetic oligonucleotide
  Sense strand starting at position 864 of SEQ ID NO: 587622
uggauacuagauuguccua

SEQ ID NO: 805879 - RNA, 19 nt, Artificial Sequence
  Description of Artificial Sequence: Synthetic oligonucleotide
  Antisense strand to SEQ ID NO: 805878
uaggacaaucuaguaucca

SEQ ID NO: 805880 - RNA, 19 nt, Artificial Sequence
  Description of Artificial Sequence: Synthetic oligonucleotide
  Sense strand starting at position 877 of SEQ ID NO: 587622
guccuaggcacuuaaggau

SEQ ID NO: 805881 - RNA, 19 nt, Artificial Sequence
  Description of Artificial Sequence: Synthetic oligonucleotide
  Antisense strand to SEQ ID NO: 805880
auccuuaagugccuaggac

SEQ ID NO: 805882 - RNA, 19 nt, Artificial Sequence
  Description of Artificial Sequence: Synthetic oligonucleotide
  Sense strand starting at position 930 of SEQ ID NO: 587622
gaaagagugcagugagaga

SEQ ID NO: 805883 - RNA, 19 nt, Artificial Sequence
  Description of Artificial Sequence: Synthetic oligonucleotide
  Antisense strand to SEQ ID NO: 805882
ucucucacugcacucuuuc

SEQ ID NO: 805884 - RNA, 19 nt, Artificial Sequence
  Description of Artificial Sequence: Synthetic oligonucleotide
  Sense strand starting at position 972 of SEQ ID NO: 587622
uggcaauuuaagugcugua

SEQ ID NO: 805885 - RNA, 19 nt, Artificial Sequence
  Description of Artificial Sequence: Synthetic oligonucleotide
  Antisense strand to SEQ ID NO: 805884
uacagcacuuaaauugcca

SEQ ID NO: 805886 - RNA, 19 nt, Artificial Sequence
  Description of Artificial Sequence: Synthetic oligonucleotide
  Sense strand starting at position 1066 of SEQ ID NO: 587622
uuguauaugggucauaaca

SEQ ID NO: 805887 - RNA, 19 nt, Artificial Sequence
  Description of Artificial Sequence: Synthetic oligonucleotide
  Antisense strand to SEQ ID NO: 805886
uguuaugacccauauacaa

SEQ ID NO: 805888 - RNA, 19 nt, Artificial Sequence
  Description of Artificial Sequence: Synthetic oligonucleotide
  Sense strand starting at position 1296 of SEQ ID NO: 587622
ucaggcuacuuuccaaaga

SEQ ID NO: 805889 - RNA, 19 nt, Artificial Sequence
  Description of Artificial Sequence: Synthetic oligonucleotide
  Antisense strand to SEQ ID NO: 805888
ucuuuggaaaguagccuga

SEQ ID NO: 805890 - RNA, 19 nt, Artificial Sequence
  Description of Artificial Sequence: Synthetic oligonucleotide
  Sense strand starting at position 1368 of SEQ ID NO: 587622
uuauuucuccguggccaua

SEQ ID NO: 805891 - RNA, 19 nt, Artificial Sequence
  Description of Artificial Sequence: Synthetic oligonucleotide
  Antisense strand to SEQ ID NO: 805890
uauggccacggagaaauaa

SEQ ID NO: 805892 - RNA, 19 nt, Artificial Sequence
  Description of Artificial Sequence: Synthetic oligonucleotide
  Sense strand starting at position 1438 of SEQ ID NO: 587622
gcacuagaacauuagguuu

SEQ ID NO: 805893 - RNA, 19 nt, Artificial Sequence
  Description of Artificial Sequence: Synthetic oligonucleotide
  Antisense strand to SEQ ID NO: 805892
aaaccuaauguucuagugc

SEQ ID NO: 805894 - RNA, 19 nt, Artificial Sequence
  Description of Artificial Sequence: Synthetic oligonucleotide
  Sense strand starting at position 1476 of SEQ ID NO: 587622
gacuauugguaauuaaaug

SEQ ID NO: 805895 - RNA, 19 nt, Artificial Sequence
  Description of Artificial Sequence: Synthetic oligonucleotide
  Antisense strand to SEQ ID NO: 805894
cauuuaauuaccaauaguc

SEQ ID NO: 805896 - RNA, 19 nt, Artificial Sequence
  Description of Artificial Sequence: Synthetic oligonucleotide
  Sense strand starting at position 1485 of SEQ ID NO: 587622
uaauuaaaugguuggguga

SEQ ID NO: 805897 - RNA, 19 nt, Artificial Sequence
  Description of Artificial Sequence: Synthetic oligonucleotide
  Antisense strand to SEQ ID NO: 805896
ucacccaaccauuuaauua

SEQ ID NO: 805898 - RNA, 19 nt, Artificial Sequence
  Description of Artificial Sequence: Synthetic oligonucleotide
  Sense strand starting at position 1908 of SEQ ID NO: 587622
uggaaaguagguuggaaua

SEQ ID NO: 805899 - RNA, 19 nt, Artificial Sequence
  Description of Artificial Sequence: Synthetic oligonucleotide
  Antisense strand to SEQ ID NO: 805898
uauuccaaccuacuuucca

SEQ ID NO: 805900 - RNA, 19 nt, Artificial Sequence
  Description of Artificial Sequence: Synthetic oligonucleotide
  Sense strand starting at position 1931 of SEQ ID NO: 587622
gagagcugauaaucaguuu

SEQ ID NO: 805901 - RNA, 19 nt, Artificial Sequence
  Description of Artificial Sequence: Synthetic oligonucleotide
  Antisense strand to SEQ ID NO: 805900
aaacugauuaucagcucuc

SEQ ID NO: 805902 - RNA, 19 nt, Artificial Sequence
  Description of Artificial Sequence: Synthetic oligonucleotide
  Sense strand starting at position 2053 of SEQ ID NO: 587622
ggaccuggugaucagucua

SEQ ID NO: 805903 - RNA, 19 nt, Artificial Sequence
  Description of Artificial Sequence: Synthetic oligonucleotide
  Antisense strand to SEQ ID NO: 805902
uagacugaucaccaggucc

SEQ ID NO: 805904 - RNA, 19 nt, Artificial Sequence
  Description of Artificial Sequence: Synthetic oligonucleotide
  Sense strand starting at position 2058 of SEQ ID NO: 587622
uggugaucagucuacaaua

SEQ ID NO: 805905 - RNA, 19 nt, Artificial Sequence
  Description of Artificial Sequence: Synthetic oligonucleotide
  Antisense strand to SEQ ID NO: 805904
uauuguagacugaucacca

SEQ ID NO: 805906 - RNA, 19 nt, Artificial Sequence
  Description of Artificial Sequence: Synthetic oligonucleotide
  Sense strand starting at position 2069 of SEQ ID NO: 587622
cuacaauacgcagaagagu

SEQ ID NO: 805907 - RNA, 19 nt, Artificial Sequence
  Description of Artificial Sequence: Synthetic oligonucleotide
  Antisense strand to SEQ ID NO: 805906
acucuucugcguauuguag

SEQ ID NO: 805908 - RNA, 19 nt, Artificial Sequence
  Description of Artificial Sequence: Synthetic oligonucleotide
  Sense strand starting at position 2078 of SEQ ID NO: 587622
gcagaagaguaaucgaaag

SEQ ID NO: 805909 - RNA, 19 nt, Artificial Sequence
  Description of Artificial Sequence: Synthetic oligonucleotide
  Antisense strand to SEQ ID NO: 805908
cuuucgauuacucuucugc

SEQ ID NO: 805910 - RNA, 19 nt, Artificial Sequence
  Description of Artificial Sequence: Synthetic oligonucleotide
  Sense strand starting at position 2167 of SEQ ID NO: 587622
guguuaaggacaugaggaa

SEQ ID NO: 805911 - RNA, 19 nt, Artificial Sequence
  Description of Artificial Sequence: Synthetic oligonucleotide
  Antisense strand to SEQ ID NO: 805910
uuccucauguccuuaacac

SEQ ID NO: 805912 - RNA, 19 nt, Artificial Sequence
  Description of Artificial Sequence: Synthetic oligonucleotide
  Sense strand starting at position 2379 of SEQ ID NO: 587622
gacauagaagccuguggaa

SEQ ID NO: 805913 - RNA, 19 nt, Artificial Sequence
  Description of Artificial Sequence: Synthetic oligonucleotide
  Antisense strand to SEQ ID NO: 805912
uuccacaggcuucuauguc

SEQ ID NO: 805914 - RNA, 19 nt, Artificial Sequence
  Description of Artificial Sequence: Synthetic oligonucleotide
  Sense strand starting at position 2441 of SEQ ID NO: 587622
cuucccuuagucuaacgaa

SEQ ID NO: 805915 - RNA, 19 nt, Artificial Sequence
  Description of Artificial Sequence: Synthetic oligonucleotide
  Antisense strand to SEQ ID NO: 805914
uucguuagacuaagggaag

SEQ ID NO: 805916 - RNA, 19 nt, Artificial Sequence
  Description of Artificial Sequence: Synthetic oligonucleotide
  Sense strand starting at position 2822 of SEQ ID NO: 587622
gggcuuguucccuuacguu

SEQ ID NO: 805917 - RNA, 19 nt, Artificial Sequence
  Description of Artificial Sequence: Synthetic oligonucleotide
  Antisense strand to SEQ ID NO: 805916
aacguaagggaacaagccc

SEQ ID NO: 805918 - RNA, 19 nt, Artificial Sequence
  Description of Artificial Sequence: Synthetic oligonucleotide
  Sense strand starting at position 2997 of SEQ ID NO: 587622
caguauucccucgaaggac

SEQ ID NO: 805919 - RNA, 19 nt, Artificial Sequence
  Description of Artificial Sequence: Synthetic oligonucleotide
  Antisense strand to SEQ ID NO: 805918
guccuucgagggaauacug

SEQ ID NO: 805920 - RNA, 19 nt, Artificial Sequence
  Description of Artificial Sequence: Synthetic oligonucleotide
  Sense strand starting at position 3105 of SEQ ID NO: 587622
agacuucuacacgaauguu

SEQ ID NO: 805921 - RNA, 19 nt, Artificial Sequence
  Description of Artificial Sequence: Synthetic oligonucleotide
  Antisense strand to SEQ ID NO: 805920
aacauucguguagaagucu

SEQ ID NO: 805922 - RNA, 19 nt, Artificial Sequence
  Description of Artificial Sequence: Synthetic oligonucleotide
  Sense strand starting at position 3176 of SEQ ID NO: 587622
ccgauuaauggauaacugu

SEQ ID NO: 805923 - RNA, 19 nt, Artificial Sequence
  Description of Artificial Sequence: Synthetic oligonucleotide
  Antisense strand to SEQ ID NO: 805922
acaguuauccauuaaucgg

SEQ ID NO: 805924 - RNA, 19 nt, Artificial Sequence
  Description of Artificial Sequence: Synthetic oligonucleotide
  Sense strand starting at position 3194 of SEQ ID NO: 587622
ugguguaagccauacaaug

SEQ ID NO: 805925 - RNA, 19 nt, Artificial Sequence
  Description of Artificial Sequence: Synthetic oligonucleotide
  Antisense strand to SEQ ID NO: 805924
cauuguauggcuuacacca

SEQ ID NO: 805926 - RNA, 19 nt, Artificial Sequence
  Description of Artificial Sequence: Synthetic oligonucleotide
  Sense strand starting at position 3273 of SEQ ID NO: 587622
uggcaaacacuauguaaga

SEQ ID NO: 805927 - RNA, 19 nt, Artificial Sequence
  Description of Artificial Sequence: Synthetic oligonucleotide
  Antisense strand to SEQ ID NO: 805926
ucuuacauaguguuugcca

SEQ ID NO: 805928 - RNA, 19 nt, Artificial Sequence
  Description of Artificial Sequence: Synthetic oligonucleotide
  Sense strand starting at position 3274 of SEQ ID NO: 587622
ggcaaacacuauguaagaa

SEQ ID NO: 805929 - RNA, 19 nt, Artificial Sequence
  Description of Artificial Sequence: Synthetic oligonucleotide
  Antisense strand to SEQ ID NO: 805928
uucuuacauaguguuugcc

SEQ ID NO: 805930 - RNA, 19 nt, Artificial Sequence
  Description of Artificial Sequence: Synthetic oligonucleotide
  Sense strand starting at position 3307 of SEQ ID NO: 587622
gccauauguuguguaauuu

SEQ ID NO: 805931 - RNA, 19 nt, Artificial Sequence
  Description of Artificial Sequence: Synthetic oligonucleotide
  Antisense strand to SEQ ID NO: 805930
aaauuacacaacauauggc

SEQ ID NO: 805932 - RNA, 19 nt, Artificial Sequence
  Description of Artificial Sequence: Synthetic oligonucleotide
  Sense strand starting at position 3387 of SEQ ID NO: 587622
cccagagguugguugagaa

SEQ ID NO: 805933 - RNA, 19 nt, Artificial Sequence
  Description of Artificial Sequence: Synthetic oligonucleotide
  Antisense strand to SEQ ID NO: 805932
uucucaaccaaccucuggg

SEQ ID NO: 805934 - RNA, 19 nt, Artificial Sequence
  Description of Artificial Sequence: Synthetic oligonucleotide
  Sense strand starting at position 3537 of SEQ ID NO: 587622
ccacuaucuguagaacugu

SEQ ID NO: 805935 - RNA, 19 nt, Artificial Sequence
  Description of Artificial Sequence: Synthetic oligonucleotide
  Antisense strand to SEQ ID NO: 805934
acaguucuacagauagugg

SEQ ID NO: 805936 - RNA, 19 nt, Artificial Sequence
  Description of Artificial Sequence: Synthetic oligonucleotide
  Sense strand starting at position 3646 of SEQ ID NO: 587622
cuugaauucgacuacucca

SEQ ID NO: 805937 - RNA, 19 nt, Artificial Sequence
  Description of Artificial Sequence: Synthetic oligonucleotide
  Antisense strand to SEQ ID NO: 805936
uggaguagucgaauucaag

SEQ ID NO: 805938 - RNA, 19 nt, Artificial Sequence
  Description of Artificial Sequence: Synthetic oligonucleotide
  Sense strand starting at position 3945 of SEQ ID NO: 587622
aguugaauuguacaguacu

SEQ ID NO: 805939 - RNA, 19 nt, Artificial Sequence
  Description of Artificial Sequence: Synthetic oligonucleotide
  Antisense strand to SEQ ID NO: 805938
aguacuguacaauucaacu

SEQ ID NO: 805940 - RNA, 19 nt, Artificial Sequence
  Description of Artificial Sequence: Synthetic oligonucleotide
  Sense strand starting at position 3948 of SEQ ID NO: 587622
ugaauuguacaguacuuga

SEQ ID NO: 805941 - RNA, 19 nt, Artificial Sequence
  Description of Artificial Sequence: Synthetic oligonucleotide
  Antisense strand to SEQ ID NO: 805940
ucaaguacuguacaauuca

SEQ ID NO: 805942 - RNA, 19 nt, Artificial Sequence
  Description of Artificial Sequence: Synthetic oligonucleotide
  Sense strand starting at position 3953 of SEQ ID NO: 587622
uguacaguacuugaauuaa

SEQ ID NO: 805943 - RNA, 19 nt, Artificial Sequence
  Description of Artificial Sequence: Synthetic oligonucleotide
  Antisense strand to SEQ ID NO: 805942
uuaauucaaguacuguaca

SEQ ID NO: 805944 - RNA, 19 nt, Artificial Sequence
  Description of Artificial Sequence: Synthetic oligonucleotide
  Sense strand starting at position 100 of SEQ ID NO: 587623
cuacuauagguuggauacu

SEQ ID NO: 805945 - RNA, 19 nt, Artificial Sequence
  Description of Artificial Sequence: Synthetic oligonucleotide
  Antisense strand to SEQ ID NO: 805944
aguauccaaccuauaguag

SEQ ID NO: 805946 - RNA, 19 nt, Artificial Sequence
  Description of Artificial Sequence: Synthetic oligonucleotide
  Sense strand starting at position 111 of SEQ ID NO: 587623
uggauacuagauuguccua

SEQ ID NO: 805947 - RNA, 19 nt, Artificial Sequence
  Description of Artificial Sequence: Synthetic oligonucleotide
  Antisense strand to SEQ ID NO: 805946
uaggacaaucuaguaucca

SEQ ID NO: 805948 - RNA, 19 nt, Artificial Sequence
  Description of Artificial Sequence: Synthetic oligonucleotide
  Sense strand starting at position 124 of SEQ ID NO: 587623
guccuaggcacuuaaggau

SEQ ID NO: 805949 - RNA, 19 nt, Artificial Sequence
  Description of Artificial Sequence: Synthetic oligonucleotide
  Antisense strand to SEQ ID NO: 805948
auccuuaagugccuaggac

SEQ ID NO: 805950 - RNA, 19 nt, Artificial Sequence
  Description of Artificial Sequence: Synthetic oligonucleotide
  Sense strand starting at position 177 of SEQ ID NO: 587623
gaaagagugcagugagaga

SEQ ID NO: 805951 - RNA, 19 nt, Artificial Sequence
  Description of Artificial Sequence: Synthetic oligonucleotide
  Antisense strand to SEQ ID NO: 805950
ucucucacugcacucuuuc

SEQ ID NO: 805952 - RNA, 19 nt, Artificial Sequence
  Description of Artificial Sequence: Synthetic oligonucleotide
  Sense strand starting at position 219 of SEQ ID NO: 587623
uggcaauuuaagugcugua

SEQ ID NO: 805953 - RNA, 19 nt, Artificial Sequence
  Description of Artificial Sequence: Synthetic oligonucleotide
  Antisense strand to SEQ ID NO: 805952
uacagcacuuaaauugcca

SEQ ID NO: 805954 - RNA, 19 nt, Artificial Sequence
  Description of Artificial Sequence: Synthetic oligonucleotide
  Sense strand starting at position 313 of SEQ ID NO: 587623
uuguauaugggucauaaca

SEQ ID NO: 805955 - RNA, 19 nt, Artificial Sequence
  Description of Artificial Sequence: Synthetic oligonucleotide
  Antisense strand to SEQ ID NO: 805954
uguuaugacccauauacaa

SEQ ID NO: 805956 - RNA, 19 nt, Artificial Sequence
  Description of Artificial Sequence: Synthetic oligonucleotide
  Sense strand starting at position 398 of SEQ ID NO: 587623
acuuuaaggugacauuuga

SEQ ID NO: 805957 - RNA, 19 nt, Artificial Sequence
  Description of Artificial Sequence: Synthetic oligonucleotide
  Antisense strand to SEQ ID NO: 805956
ucaaaugucaccuuaaagu

SEQ ID NO: 805958 - RNA, 19 nt, Artificial Sequence
  Description of Artificial Sequence: Synthetic oligonucleotide
  Sense strand starting at position 543 of SEQ ID NO: 587623
ucaggcuacuuuccaaaga

SEQ ID NO: 805959 - RNA, 19 nt, Artificial Sequence
  Description of Artificial Sequence: Synthetic oligonucleotide
  Antisense strand to SEQ ID NO: 805958
ucuuuggaaaguagccuga

SEQ ID NO: 805960 - RNA, 19 nt, Artificial Sequence
  Description of Artificial Sequence: Synthetic oligonucleotide
  Sense strand starting at position 615 of SEQ ID NO: 587623
uuauuucuccguggccaua

SEQ ID NO: 805961 - RNA, 19 nt, Artificial Sequence
  Description of Artificial Sequence: Synthetic oligonucleotide
  Antisense strand to SEQ ID NO: 805960
uauggccacggagaaauaa

SEQ ID NO: 805962 - RNA, 19 nt, Artificial Sequence
  Description of Artificial Sequence: Synthetic oligonucleotide
  Sense strand starting at position 685 of SEQ ID NO: 587623
gcacuagaacauuagguuu

SEQ ID NO: 805963 - RNA, 19 nt, Artificial Sequence
  Description of Artificial Sequence: Synthetic oligonucleotide
  Antisense strand to SEQ ID NO: 805962
aaaccuaauguucuagugc

SEQ ID NO: 805964 - RNA, 19 nt, Artificial Sequence
  Description of Artificial Sequence: Synthetic oligonucleotide
  Sense strand starting at position 723 of SEQ ID NO: 587623
gacuauugguaauuaaaug

SEQ ID NO: 805965 - RNA, 19 nt, Artificial Sequence
  Description of Artificial Sequence: Synthetic oligonucleotide
  Antisense strand to SEQ ID NO: 805964
cauuuaauuaccaauaguc

SEQ ID NO: 805966 - RNA, 19 nt, Artificial Sequence
  Description of Artificial Sequence: Synthetic oligonucleotide
  Sense strand starting at position 732 of SEQ ID NO: 587623
uaauuaaaugguuggguga

SEQ ID NO: 805967 - RNA, 19 nt, Artificial Sequence
  Description of Artificial Sequence: Synthetic oligonucleotide
  Antisense strand to SEQ ID NO: 805966
ucacccaaccauuuaauua

SEQ ID NO: 805968 - RNA, 19 nt, Artificial Sequence
  Description of Artificial Sequence: Synthetic oligonucleotide
  Sense strand starting at position 1155 of SEQ ID NO: 587623
uggaaaguagguuggaaua

SEQ ID NO: 805969 - RNA, 19 nt, Artificial Sequence
  Description of Artificial Sequence: Synthetic oligonucleotide
  Antisense strand to SEQ ID NO: 805968
uauuccaaccuacuuucca

SEQ ID NO: 805970 - RNA, 19 nt, Artificial Sequence
  Description of Artificial Sequence: Synthetic oligonucleotide
  Sense strand starting at position 1178 of SEQ ID NO: 587623
gagagcugauaaucaguuu

SEQ ID NO: 805971 - RNA, 19 nt, Artificial Sequence
  Description of Artificial Sequence: Synthetic oligonucleotide
  Antisense strand to SEQ ID NO: 805970
aaacugauuaucagcucuc

SEQ ID NO: 805972 - RNA, 19 nt, Artificial Sequence
  Description of Artificial Sequence: Synthetic oligonucleotide
  Sense strand starting at position 1300 of SEQ ID NO: 587623
ggaccuggugaucagucua

SEQ ID NO: 805973 - RNA, 19 nt, Artificial Sequence
  Description of Artificial Sequence: Synthetic oligonucleotide
  Antisense strand to SEQ ID NO: 805972
uagacugaucaccaggucc

SEQ ID NO: 805974 - RNA, 19 nt, Artificial Sequence
  Description of Artificial Sequence: Synthetic oligonucleotide
  Sense strand starting at position 1305 of SEQ ID NO: 587623
uggugaucagucuacaaua

SEQ ID NO: 805975 - RNA, 19 nt, Artificial Sequence
  Description of Artificial Sequence: Synthetic oligonucleotide
  Antisense strand to SEQ ID NO: 805974
uauuguagacugaucacca

SEQ ID NO: 805976 - RNA, 19 nt, Artificial Sequence
  Description of Artificial Sequence: Synthetic oligonucleotide
  Sense strand starting at position 1316 of SEQ ID NO: 587623
cuacaauacgcagaagagu

SEQ ID NO: 805977 - RNA, 19 nt, Artificial Sequence
  Description of Artificial Sequence: Synthetic oligonucleotide
  Antisense strand to SEQ ID NO: 805976
acucuucugcguauuguag

SEQ ID NO: 805978 - RNA, 19 nt, Artificial Sequence
  Description of Artificial Sequence: Synthetic oligonucleotide
  Sense strand starting at position 1325 of SEQ ID NO: 587623
gcagaagaguaaucgaaag

SEQ ID NO: 805979 - RNA, 19 nt, Artificial Sequence
  Description of Artificial Sequence: Synthetic oligonucleotide
  Antisense strand to SEQ ID NO: 805978
cuuucgauuacucuucugc

SEQ ID NO: 805980 - RNA, 19 nt, Artificial Sequence
  Description of Artificial Sequence: Synthetic oligonucleotide
  Sense strand starting at position 1414 of SEQ ID NO: 587623
guguuaaggacaugaggaa

SEQ ID NO: 805981 - RNA, 19 nt, Artificial Sequence
  Description of Artificial Sequence: Synthetic oligonucleotide
  Antisense strand to SEQ ID NO: 805980
uuccucauguccuuaacac

SEQ ID NO: 805982 - RNA, 19 nt, Artificial Sequence
  Description of Artificial Sequence: Synthetic oligonucleotide
  Sense strand starting at position 1606 of SEQ ID NO: 587623
ggcauauuaagucgggaaa

SEQ ID NO: 805983 - RNA, 19 nt, Artificial Sequence
  Description of Artificial Sequence: Synthetic oligonucleotide
  Antisense strand to SEQ ID NO: 805982
uuucccgacuuaauaugcc

SEQ ID NO: 805984 - RNA, 19 nt, Artificial Sequence
  Description of Artificial Sequence: Synthetic oligonucleotide
  Sense strand starting at position 1626 of SEQ ID NO: 587623
gacauagaagccuguggaa

SEQ ID NO: 805985 - RNA, 19 nt, Artificial Sequence
  Description of Artificial Sequence: Synthetic oligonucleotide
  Antisense strand to SEQ ID NO: 805984
uuccacaggcuucuauguc

SEQ ID NO: 805986 - RNA, 19 nt, Artificial Sequence
  Description of Artificial Sequence: Synthetic oligonucleotide
  Sense strand starting at position 1688 of SEQ ID NO: 587623
cuucccuuagucuaacgaa

SEQ ID NO: 805987 - RNA, 19 nt, Artificial Sequence
  Description of Artificial Sequence: Synthetic oligonucleotide
  Antisense strand to SEQ ID NO: 805986
uucguuagacuaagggaag

SEQ ID NO: 805988 - RNA, 19 nt, Artificial Sequence
  Description of Artificial Sequence: Synthetic oligonucleotide
  Sense strand starting at position 2069 of SEQ ID NO: 587623
gggcuuguucccuuacguu

SEQ ID NO: 805989 - RNA, 19 nt, Artificial Sequence
  Description of Artificial Sequence: Synthetic oligonucleotide
  Antisense strand to SEQ ID NO: 805988
aacguaagggaacaagccc

SEQ ID NO: 805990 - RNA, 19 nt, Artificial Sequence
  Description of Artificial Sequence: Synthetic oligonucleotide
  Sense strand starting at position 2244 of SEQ ID NO: 587623
caguauucccucgaaggac

SEQ ID NO: 805991 - RNA, 19 nt, Artificial Sequence
  Description of Artificial Sequence: Synthetic oligonucleotide
  Antisense strand to SEQ ID NO: 805990
guccuucgagggaauacug

SEQ ID NO: 805992 - RNA, 19 nt, Artificial Sequence
  Description of Artificial Sequence: Synthetic oligonucleotide
  Sense strand starting at position 2352 of SEQ ID NO: 587623
agacuucuacacgaauguu

SEQ ID NO: 805993 - RNA, 19 nt, Artificial Sequence
  Description of Artificial Sequence: Synthetic oligonucleotide
  Antisense strand to SEQ ID NO: 805992
aacauucguguagaagucu

SEQ ID NO: 805994 - RNA, 19 nt, Artificial Sequence
  Description of Artificial Sequence: Synthetic oligonucleotide
  Sense strand starting at position 2423 of SEQ ID NO: 587623
ccgauuaauggauaacugu

SEQ ID NO: 805995 - RNA, 19 nt, Artificial Sequence
  Description of Artificial Sequence: Synthetic oligonucleotide
  Antisense strand to SEQ ID NO: 805994
acaguuauccauuaaucgg

SEQ ID NO: 805996 - RNA, 19 nt, Artificial Sequence
  Description of Artificial Sequence: Synthetic oligonucleotide
  Sense strand starting at position 2441 of SEQ ID NO: 587623
ugguguaagccauacaaug

SEQ ID NO: 805997 - RNA, 19 nt, Artificial Sequence
  Description of Artificial Sequence: Synthetic oligonucleotide
  Antisense strand to SEQ ID NO: 805996
cauuguauggcuuacacca

SEQ ID NO: 805998 - RNA, 19 nt, Artificial Sequence
  Description of Artificial Sequence: Synthetic oligonucleotide
  Sense strand starting at position 2520 of SEQ ID NO: 587623
uggcaaacacuauguaaga

SEQ ID NO: 805999 - RNA, 19 nt, Artificial Sequence
  Description of Artificial Sequence: Synthetic oligonucleotide
  Antisense strand to SEQ ID NO: 805998
ucuuacauaguguuugcca

SEQ ID NO: 806000 - RNA, 19 nt, Artificial Sequence
  Description of Artificial Sequence: Synthetic oligonucleotide
  Sense strand starting at position 2521 of SEQ ID NO: 587623
ggcaaacacuauguaagaa

SEQ ID NO: 806001 - RNA, 19 nt, Artificial Sequence
  Description of Artificial Sequence: Synthetic oligonucleotide
  Antisense strand to SEQ ID NO: 806000
uucuuacauaguguuugcc

SEQ ID NO: 806002 - RNA, 19 nt, Artificial Sequence
  Description of Artificial Sequence: Synthetic oligonucleotide
  Sense strand starting at position 2554 of SEQ ID NO: 587623
gccauauguuguguaauuu

SEQ ID NO: 806003 - RNA, 19 nt, Artificial Sequence
  Description of Artificial Sequence: Synthetic oligonucleotide
  Antisense strand to SEQ ID NO: 806002
aaauuacacaacauauggc

SEQ ID NO: 806004 - RNA, 19 nt, Artificial Sequence
  Description of Artificial Sequence: Synthetic oligonucleotide
  Sense strand starting at position 2634 of SEQ ID NO: 587623
cccagagguugguugagaa

SEQ ID NO: 806005 - RNA, 19 nt, Artificial Sequence
  Description of Artificial Sequence: Synthetic oligonucleotide
  Antisense strand to SEQ ID NO: 806004
uucucaaccaaccucuggg

SEQ ID NO: 806006 - RNA, 19 nt, Artificial Sequence
  Description of Artificial Sequence: Synthetic oligonucleotide
  Sense strand starting at position 2784 of SEQ ID NO: 587623
ccacuaucuguagaacugu

SEQ ID NO: 806007 - RNA, 19 nt, Artificial Sequence
  Description of Artificial Sequence: Synthetic oligonucleotide
  Antisense strand to SEQ ID NO: 806006
acaguucuacagauagugg

SEQ ID NO: 806008 - RNA, 19 nt, Artificial Sequence
  Description of Artificial Sequence: Synthetic oligonucleotide
  Sense strand starting at position 2893 of SEQ ID NO: 587623
cuugaauucgacuacucca

SEQ ID NO: 806009 - RNA, 19 nt, Artificial Sequence
  Description of Artificial Sequence: Synthetic oligonucleotide
  Antisense strand to SEQ ID NO: 806008
uggaguagucgaauucaag

SEQ ID NO: 806010 - RNA, 19 nt, Artificial Sequence
  Description of Artificial Sequence: Synthetic oligonucleotide
  Sense strand starting at position 3192 of SEQ ID NO: 587623
aguugaauuguacaguacu

SEQ ID NO: 806011 - RNA, 19 nt, Artificial Sequence
  Description of Artificial Sequence: Synthetic oligonucleotide
  Antisense strand to SEQ ID NO: 806010
aguacuguacaauucaacu

SEQ ID NO: 806012 - RNA, 19 nt, Artificial Sequence
  Description of Artificial Sequence: Synthetic oligonucleotide
  Sense strand starting at position 3195 of SEQ ID NO: 587623
ugaauuguacaguacuuga

SEQ ID NO: 806013 - RNA, 19 nt, Artificial Sequence
  Description of Artificial Sequence: Synthetic oligonucleotide
  Antisense strand to SEQ ID NO: 806012
ucaaguacuguacaauuca

SEQ ID NO: 806014 - RNA, 19 nt, Artificial Sequence
  Description of Artificial Sequence: Synthetic oligonucleotide
  Sense strand starting at position 3200 of SEQ ID NO: 587623
uguacaguacuugaauuaa

SEQ ID NO: 806015 - RNA, 19 nt, Artificial Sequence
  Description of Artificial Sequence: Synthetic oligonucleotide
  Antisense strand to SEQ ID NO: 806014
uuaauucaaguacuguaca

SEQ ID NO: 806016 - RNA, 19 nt, Artificial Sequence
  Description of Artificial Sequence: Synthetic oligonucleotide
  Sense strand starting at position 3397 of SEQ ID NO: 587623
ccagcuacucuggauuaau

SEQ ID NO: 806017 - RNA, 19 nt, Artificial Sequence
  Description of Artificial Sequence: Synthetic oligonucleotide
  Antisense strand to SEQ ID NO: 806016
auuaauccagaguagcugg

SEQ ID NO: 806018 - RNA, 19 nt, Artificial Sequence
  Description of Artificial Sequence: Synthetic oligonucleotide
  Sense strand starting at position 3400 of SEQ ID NO: 587623
gcuacucuggauuaauacu

SEQ ID NO: 806019 - RNA, 19 nt, Artificial Sequence
  Description of Artificial Sequence: Synthetic oligonucleotide
  Antisense strand to SEQ ID NO: 806018
aguauuaauccagaguagc

SEQ ID NO: 806020 - RNA, 19 nt, Artificial Sequence
  Description of Artificial Sequence: Synthetic oligonucleotide
  Sense strand starting at position 3890 of SEQ ID NO: 587623
uuuaguguucuugauacag

SEQ ID NO: 806021 - RNA, 19 nt, Artificial Sequence
  Description of Artificial Sequence: Synthetic oligonucleotide
  Antisense strand to SEQ ID NO: 806020
cuguaucaagaacacuaaa

SEQ ID NO: 806022 - RNA, 19 nt, Artificial Sequence
  Description of Artificial Sequence: Synthetic oligonucleotide
  Sense strand starting at position 3982 of SEQ ID NO: 587623
auauaauaggaguggcaaa

SEQ ID NO: 806023 - RNA, 19 nt, Artificial Sequence
  Description of Artificial Sequence: Synthetic oligonucleotide
  Antisense strand to SEQ ID NO: 806022
uuugccacuccuauuauau

SEQ ID NO: 806024 - RNA, 19 nt, Artificial Sequence
  Description of Artificial Sequence: Synthetic oligonucleotide
  Sense strand starting at position 63 of SEQ ID NO: 587624
ucuucuacuggcugaacaa

SEQ ID NO: 806025 - RNA, 19 nt, Artificial Sequence
  Description of Artificial Sequence: Synthetic oligonucleotide
  Antisense strand to SEQ ID NO: 806024
uuguucagccaguagaaga

SEQ ID NO: 806026 - RNA, 19 nt, Artificial Sequence
  Description of Artificial Sequence: Synthetic oligonucleotide
  Sense strand starting at position 64 of SEQ ID NO: 587624
cuucuacuggcugaacaaa

SEQ ID NO: 806027 - RNA, 19 nt, Artificial Sequence
  Description of Artificial Sequence: Synthetic oligonucleotide
  Antisense strand to SEQ ID NO: 806026
uuuguucagccaguagaag

SEQ ID NO: 806028 - RNA, 19 nt, Artificial Sequence
  Description of Artificial Sequence: Synthetic oligonucleotide
  Sense strand starting at position 274 of SEQ ID NO: 587624
gcagaauugcuugagcuau

SEQ ID NO: 806029 - RNA, 19 nt, Artificial Sequence
  Description of Artificial Sequence: Synthetic oligonucleotide
  Antisense strand to SEQ ID NO: 806028
auagcucaagcaauucugc

SEQ ID NO: 806030 - RNA, 19 nt, Artificial Sequence
  Description of Artificial Sequence: Synthetic oligonucleotide
  Sense strand starting at position 276 of SEQ ID NO: 587624
agaauugcuugagcuauua

SEQ ID NO: 806031 - RNA, 19 nt, Artificial Sequence
  Description of Artificial Sequence: Synthetic oligonucleotide
  Antisense strand to SEQ ID NO: 806030
uaauagcucaagcaauucu

SEQ ID NO: 806032 - RNA, 19 nt, Artificial Sequence
  Description of Artificial Sequence: Synthetic oligonucleotide
  Sense strand starting at position 284 of SEQ ID NO: 587624
uugagcuauuaugugauca

SEQ ID NO: 806033 - RNA, 19 nt, Artificial Sequence
  Description of Artificial Sequence: Synthetic oligonucleotide
  Antisense strand to SEQ ID NO: 806032
ugaucacauaauagcucaa

SEQ ID NO: 806034 - RNA, 19 nt, Artificial Sequence
  Description of Artificial Sequence: Synthetic oligonucleotide
  Sense strand starting at position 288 of SEQ ID NO: 587624
gcuauuaugugaucacauc

SEQ ID NO: 806035 - RNA, 19 nt, Artificial Sequence
  Description of Artificial Sequence: Synthetic oligonucleotide
  Antisense strand to SEQ ID NO: 806034
gaugugaucacauaauagc

SEQ ID NO: 806036 - RNA, 19 nt, Artificial Sequence
  Description of Artificial Sequence: Synthetic oligonucleotide
  Sense strand starting at position 544 of SEQ ID NO: 587624
aggcuuuguggccaauaca

SEQ ID NO: 806037 - RNA, 19 nt, Artificial Sequence
  Description of Artificial Sequence: Synthetic oligonucleotide
  Antisense strand to SEQ ID NO: 806036
uguauuggccacaaagccu

SEQ ID NO: 806038 - RNA, 19 nt, Artificial Sequence
  Description of Artificial Sequence: Synthetic oligonucleotide
  Sense strand starting at position 588 of SEQ ID NO: 587624
acgguuguggcacaaacau

SEQ ID NO: 806039 - RNA, 19 nt, Artificial Sequence
  Description of Artificial Sequence: Synthetic oligonucleotide
  Antisense strand to SEQ ID NO: 806038
auguuugugccacaaccgu

SEQ ID NO: 806040 - RNA, 19 nt, Artificial Sequence
  Description of Artificial Sequence: Synthetic oligonucleotide
  Sense strand starting at position 942 of SEQ ID NO: 587624
agccacaucugauuacaga

SEQ ID NO: 806041 - RNA, 19 nt, Artificial Sequence
  Description of Artificial Sequence: Synthetic oligonucleotide
  Antisense strand to SEQ ID NO: 806040
ucuguaaucagauguggcu

SEQ ID NO: 806042 - RNA, 19 nt, Artificial Sequence
  Description of Artificial Sequence: Synthetic oligonucleotide
  Sense strand starting at position 943 of SEQ ID NO: 587624
gccacaucugauuacagac

SEQ ID NO: 806043 - RNA, 19 nt, Artificial Sequence
  Description of Artificial Sequence: Synthetic oligonucleotide
  Antisense strand to SEQ ID NO: 806042
gucuguaaucagauguggc

SEQ ID NO: 806044 - RNA, 19 nt, Artificial Sequence
  Description of Artificial Sequence: Synthetic oligonucleotide
  Sense strand starting at position 965 of SEQ ID NO: 587624
guauaaagccucuagucuu

SEQ ID NO: 806045 - RNA, 19 nt, Artificial Sequence
  Description of Artificial Sequence: Synthetic oligonucleotide
  Antisense strand to SEQ ID NO: 806044
aagacuagaggcuuuauac

SEQ ID NO: 806046 - RNA, 19 nt, Artificial Sequence
  Description of Artificial Sequence: Synthetic oligonucleotide
  Sense strand starting at position 1116 of SEQ ID NO: 587624
cugcgugcgguaucauaua

SEQ ID NO: 806047 - RNA, 19 nt, Artificial Sequence
  Description of Artificial Sequence: Synthetic oligonucleotide
  Antisense strand to SEQ ID NO: 806046
uauaugauaccgcacgcag

SEQ ID NO: 806048 - RNA, 19 nt, Artificial Sequence
  Description of Artificial Sequence: Synthetic oligonucleotide
  Sense strand starting at position 1192 of SEQ ID NO: 587624
gggagagucaccuaaacgu

SEQ ID NO: 806049 - RNA, 19 nt, Artificial Sequence
  Description of Artificial Sequence: Synthetic oligonucleotide
  Antisense strand to SEQ ID NO: 806048
acguuuaggugacucuccc

SEQ ID NO: 806050 - RNA, 19 nt, Artificial Sequence
  Description of Artificial Sequence: Synthetic oligonucleotide
  Sense strand starting at position 1249 of SEQ ID NO: 587624
aguugauagagcgguuaaa

SEQ ID NO: 806051 - RNA, 19 nt, Artificial Sequence
  Description of Artificial Sequence: Synthetic oligonucleotide
  Antisense strand to SEQ ID NO: 806050
uuuaaccgcucuaucaacu

SEQ ID NO: 806052 - RNA, 19 nt, Artificial Sequence
  Description of Artificial Sequence: Synthetic oligonucleotide
  Sense strand starting at position 2041 of SEQ ID NO: 587624
ccgcguuuccgggauuucu

SEQ ID NO: 806053 - RNA, 19 nt, Artificial Sequence
  Description of Artificial Sequence: Synthetic oligonucleotide
  Antisense strand to SEQ ID NO: 806052
agaaaucccggaaacgcgg

SEQ ID NO: 806054 - RNA, 19 nt, Artificial Sequence
  Description of Artificial Sequence: Synthetic oligonucleotide
  Sense strand starting at position 2049 of SEQ ID NO: 587624
ccgggauuucucuguaggu

SEQ ID NO: 806055 - RNA, 19 nt, Artificial Sequence
  Description of Artificial Sequence: Synthetic oligonucleotide
  Antisense strand to SEQ ID NO: 806054
accuacagagaaaucccgg

SEQ ID NO: 806056 - RNA, 19 nt, Artificial Sequence
  Description of Artificial Sequence: Synthetic oligonucleotide
  Sense strand starting at position 2050 of SEQ ID NO: 587624
cgggauuucucuguaggug

SEQ ID NO: 806057 - RNA, 19 nt, Artificial Sequence
  Description of Artificial Sequence: Synthetic oligonucleotide
  Antisense strand to SEQ ID NO: 806056
caccuacagagaaaucccg

SEQ ID NO: 806058 - RNA, 19 nt, Artificial Sequence
  Description of Artificial Sequence: Synthetic oligonucleotide
  Sense strand starting at position 2154 of SEQ ID NO: 587624
uucucuucuccugggagua

SEQ ID NO: 806059 - RNA, 19 nt, Artificial Sequence
  Description of Artificial Sequence: Synthetic oligonucleotide
  Antisense strand to SEQ ID NO: 806058
uacucccaggagaagagaa

SEQ ID NO: 806060 - RNA, 19 nt, Artificial Sequence
  Description of Artificial Sequence: Synthetic oligonucleotide
  Sense strand starting at position 2155 of SEQ ID NO: 587624
ucucuucuccugggaguaa

SEQ ID NO: 806061 - RNA, 19 nt, Artificial Sequence
  Description of Artificial Sequence: Synthetic oligonucleotide
  Antisense strand to SEQ ID NO: 806060
uuacucccaggagaagaga

SEQ ID NO: 806062 - RNA, 19 nt, Artificial Sequence
  Description of Artificial Sequence: Synthetic oligonucleotide
  Sense strand starting at position 2213 of SEQ ID NO: 587624
uuccauuagugacuuagaa

SEQ ID NO: 806063 - RNA, 19 nt, Artificial Sequence
  Description of Artificial Sequence: Synthetic oligonucleotide
  Antisense strand to SEQ ID NO: 806062
uucuaagucacuaauggaa

SEQ ID NO: 806064 - RNA, 19 nt, Artificial Sequence
  Description of Artificial Sequence: Synthetic oligonucleotide
  Sense strand starting at position 2854 of SEQ ID NO: 587624
ccagauucgcgggagguua

SEQ ID NO: 806065 - RNA, 19 nt, Artificial Sequence
  Description of Artificial Sequence: Synthetic oligonucleotide
  Antisense strand to SEQ ID NO: 806064
uaaccucccgcgaaucugg

SEQ ID NO: 806066 - RNA, 19 nt, Artificial Sequence
  Description of Artificial Sequence: Synthetic oligonucleotide
  Sense strand starting at position 2867 of SEQ ID NO: 587624
agguuaccugacugaucca

SEQ ID NO: 806067 - RNA, 19 nt, Artificial Sequence
  Description of Artificial Sequence: Synthetic oligonucleotide
  Antisense strand to SEQ ID NO: 806066
uggaucagucagguaaccu

SEQ ID NO: 806068 - RNA, 19 nt, Artificial Sequence
  Description of Artificial Sequence: Synthetic oligonucleotide
  Sense strand starting at position 2886 of SEQ ID NO: 587624
aggugauacagcugguaac

SEQ ID NO: 806069 - RNA, 19 nt, Artificial Sequence
  Description of Artificial Sequence: Synthetic oligonucleotide
  Antisense strand to SEQ ID NO: 806068
guuaccagcuguaucaccu

SEQ ID NO: 806070 - RNA, 19 nt, Artificial Sequence
  Description of Artificial Sequence: Synthetic oligonucleotide
  Sense strand starting at position 2887 of SEQ ID NO: 587624
ggugauacagcugguaacu

SEQ ID NO: 806071 - RNA, 19 nt, Artificial Sequence
  Description of Artificial Sequence: Synthetic oligonucleotide
  Antisense strand to SEQ ID NO: 806070
aguuaccagcuguaucacc

SEQ ID NO: 806072 - RNA, 19 nt, Artificial Sequence
  Description of Artificial Sequence: Synthetic oligonucleotide
  Sense strand starting at position 2912 of SEQ ID NO: 587624
gauguugguagugaaauuc

SEQ ID NO: 806073 - RNA, 19 nt, Artificial Sequence
  Description of Artificial Sequence: Synthetic oligonucleotide
  Antisense strand to SEQ ID NO: 806072
gaauuucacuaccaacauc

SEQ ID NO: 806074 - RNA, 19 nt, Artificial Sequence
  Description of Artificial Sequence: Synthetic oligonucleotide
  Sense strand starting at position 3075 of SEQ ID NO: 587624
gaagaauugccuugaguau

SEQ ID NO: 806075 - RNA, 19 nt, Artificial Sequence
  Description of Artificial Sequence: Synthetic oligonucleotide
  Antisense strand to SEQ ID NO: 806074
auacucaaggcaauucuuc

SEQ ID NO: 806076 - RNA, 19 nt, Artificial Sequence
  Description of Artificial Sequence: Synthetic oligonucleotide
  Sense strand starting at position 3076 of SEQ ID NO: 587624
aagaauugccuugaguaua

SEQ ID NO: 806077 - RNA, 19 nt, Artificial Sequence
  Description of Artificial Sequence: Synthetic oligonucleotide
  Antisense strand to SEQ ID NO: 806076
uauacucaaggcaauucuu

SEQ ID NO: 806078 - RNA, 19 nt, Artificial Sequence
  Description of Artificial Sequence: Synthetic oligonucleotide
  Sense strand starting at position 3120 of SEQ ID NO: 587624
aggcucagucuuugaucaa

SEQ ID NO: 806079 - RNA, 19 nt, Artificial Sequence
  Description of Artificial Sequence: Synthetic oligonucleotide
  Antisense strand to SEQ ID NO: 806078
uugaucaaagacugagccu

SEQ ID NO: 806080 - RNA, 19 nt, Artificial Sequence
  Description of Artificial Sequence: Synthetic oligonucleotide
  Sense strand starting at position 3153 of SEQ ID NO: 587624
accaguuauuguucuaaua

SEQ ID NO: 806081 - RNA, 19 nt, Artificial Sequence
  Description of Artificial Sequence: Synthetic oligonucleotide
  Antisense strand to SEQ ID NO: 806080
uauuagaacaauaacuggu

SEQ ID NO: 806082 - RNA, 19 nt, Artificial Sequence
  Description of Artificial Sequence: Synthetic oligonucleotide
  Sense strand starting at position 3214 of SEQ ID NO: 587624
gugaguucagggcaucauu

SEQ ID NO: 806083 - RNA, 19 nt, Artificial Sequence
  Description of Artificial Sequence: Synthetic oligonucleotide
  Antisense strand to SEQ ID NO: 806082
aaugaugcccugaacucac

SEQ ID NO: 806084 - RNA, 19 nt, Artificial Sequence
  Description of Artificial Sequence: Synthetic oligonucleotide
  Sense strand starting at position 3258 of SEQ ID NO: 587624
aagugacauugaucucugu

SEQ ID NO: 806085 - RNA, 19 nt, Artificial Sequence
  Description of Artificial Sequence: Synthetic oligonucleotide
  Antisense strand to SEQ ID NO: 806084
acagagaucaaugucacuu

SEQ ID NO: 806086 - RNA, 19 nt, Artificial Sequence
  Description of Artificial Sequence: Synthetic oligonucleotide
  Sense strand starting at position 3261 of SEQ ID NO: 587624
ugacauugaucucuguaga

SEQ ID NO: 806087 - RNA, 19 nt, Artificial Sequence
  Description of Artificial Sequence: Synthetic oligonucleotide
  Antisense strand to SEQ ID NO: 806086
ucuacagagaucaauguca

SEQ ID NO: 806088 - RNA, 19 nt, Artificial Sequence
  Description of Artificial Sequence: Synthetic oligonucleotide
  Sense strand starting at position 3262 of SEQ ID NO: 587624
gacauugaucucuguagau

SEQ ID NO: 806089 - RNA, 19 nt, Artificial Sequence
  Description of Artificial Sequence: Synthetic oligonucleotide
  Antisense strand to SEQ ID NO: 806088
aucuacagagaucaauguc

SEQ ID NO: 806090 - RNA, 19 nt, Artificial Sequence
  Description of Artificial Sequence: Synthetic oligonucleotide
  Sense strand starting at position 3580 of SEQ ID NO: 587624
uuguauacgguaugggaua

SEQ ID NO: 806091 - RNA, 19 nt, Artificial Sequence
  Description of Artificial Sequence: Synthetic oligonucleotide
  Antisense strand to SEQ ID NO: 806090
uaucccauaccguauacaa

SEQ ID NO: 806092 - RNA, 19 nt, Artificial Sequence
  Description of Artificial Sequence: Synthetic oligonucleotide
  Sense strand starting at position 3680 of SEQ ID NO: 587624
ugcauuuccuuugugcuua

SEQ ID NO: 806093 - RNA, 19 nt, Artificial Sequence
  Description of Artificial Sequence: Synthetic oligonucleotide
  Antisense strand to SEQ ID NO: 806092
uaagcacaaaggaaaugca

SEQ ID NO: 806094 - RNA, 19 nt, Artificial Sequence
  Description of Artificial Sequence: Synthetic oligonucleotide
  Sense strand starting at position 3749 of SEQ ID NO: 587624
guguuccauugagcuauuu

SEQ ID NO: 806095 - RNA, 19 nt, Artificial Sequence
  Description of Artificial Sequence: Synthetic oligonucleotide
  Antisense strand to SEQ ID NO: 806094
aaauagcucaauggaacac

SEQ ID NO: 806096 - RNA, 19 nt, Artificial Sequence
  Description of Artificial Sequence: Synthetic oligonucleotide
  Sense strand starting at position 3826 of SEQ ID NO: 587624
gaaaucagauaguuuaugu

SEQ ID NO: 806097 - RNA, 19 nt, Artificial Sequence
  Description of Artificial Sequence: Synthetic oligonucleotide
  Antisense strand to SEQ ID NO: 806096
acauaaacuaucugauuuc

SEQ ID NO: 806098 - RNA, 19 nt, Artificial Sequence
  Description of Artificial Sequence: Synthetic oligonucleotide
  Sense strand starting at position 3837 of SEQ ID NO: 587624
guuuauguccuacaacuuu

SEQ ID NO: 806099 - RNA, 19 nt, Artificial Sequence
  Description of Artificial Sequence: Synthetic oligonucleotide
  Antisense strand to SEQ ID NO: 806098
aaaguuguaggacauaaac

SEQ ID NO: 806100 - RNA, 19 nt, Artificial Sequence
  Description of Artificial Sequence: Synthetic oligonucleotide
  Sense strand starting at position 3956 of SEQ ID NO: 587624
gauugagauuguguugacu

SEQ ID NO: 806101 - RNA, 19 nt, Artificial Sequence
  Description of Artificial Sequence: Synthetic oligonucleotide
  Antisense strand to SEQ ID NO: 806100
agucaacacaaucucaauc

SEQ ID NO: 806102 - RNA, 19 nt, Artificial Sequence
  Description of Artificial Sequence: Synthetic oligonucleotide
  Sense strand starting at position 3959 of SEQ ID NO: 587624
ugagauuguguugacucua

SEQ ID NO: 806103 - RNA, 19 nt, Artificial Sequence
  Description of Artificial Sequence: Synthetic oligonucleotide
  Antisense strand to SEQ ID NO: 806102
uagagucaacacaaucuca

SEQ ID NO: 806104 - RNA, 19 nt, Artificial Sequence
  Description of Artificial Sequence: Synthetic oligonucleotide
  Sense strand starting at position 237 of SEQ ID NO: 587625
acauguaguggguaauaua

SEQ ID NO: 806105 - RNA, 19 nt, Artificial Sequence
  Description of Artificial Sequence: Synthetic oligonucleotide
  Antisense strand to SEQ ID NO: 806104
uauauuacccacuacaugu

SEQ ID NO: 806106 - RNA, 19 nt, Artificial Sequence
  Description of Artificial Sequence: Synthetic oligonucleotide
  Sense strand starting at position 246 of SEQ ID NO: 587625
ggguaauauaagcaagcau

SEQ ID NO: 806107 - RNA, 19 nt, Artificial Sequence
  Description of Artificial Sequence: Synthetic oligonucleotide
  Antisense strand to SEQ ID NO: 806106
augcuugcuuauauuaccc

SEQ ID NO: 806108 - RNA, 19 nt, Artificial Sequence
  Description of Artificial Sequence: Synthetic oligonucleotide
  Sense strand starting at position 618 of SEQ ID NO: 587625
agacauaacagguguugau

SEQ ID NO: 806109 - RNA, 19 nt, Artificial Sequence
  Description of Artificial Sequence: Synthetic oligonucleotide
  Antisense strand to SEQ ID NO: 806108
aucaacaccuguuaugucu

SEQ ID NO: 806110 - RNA, 19 nt, Artificial Sequence
  Description of Artificial Sequence: Synthetic oligonucleotide
  Sense strand starting at position 688 of SEQ ID NO: 587625
agcaauaaucgggacguaa

SEQ ID NO: 806111 - RNA, 19 nt, Artificial Sequence
  Description of Artificial Sequence: Synthetic oligonucleotide
  Antisense strand to SEQ ID NO: 806110
uuacgucccgauuauugcu

SEQ ID NO: 806112 - RNA, 19 nt, Artificial Sequence
  Description of Artificial Sequence: Synthetic oligonucleotide
  Sense strand starting at position 971 of SEQ ID NO: 587625
gaugcauucuuagugaagg

SEQ ID NO: 806113 - RNA, 19 nt, Artificial Sequence
  Description of Artificial Sequence: Synthetic oligonucleotide
  Antisense strand to SEQ ID NO: 806112
ccuucacuaagaaugcauc

SEQ ID NO: 806114 - RNA, 19 nt, Artificial Sequence
  Description of Artificial Sequence: Synthetic oligonucleotide
  Sense strand starting at position 973 of SEQ ID NO: 587625
ugcauucuuagugaaggau

SEQ ID NO: 806115 - RNA, 19 nt, Artificial Sequence
  Description of Artificial Sequence: Synthetic oligonucleotide
  Antisense strand to SEQ ID NO: 806114
auccuucacuaagaaugca

SEQ ID NO: 806116 - RNA, 19 nt, Artificial Sequence
  Description of Artificial Sequence: Synthetic oligonucleotide
  Sense strand starting at position 1020 of SEQ ID NO: 587625
guagacuccguuuauauaa

SEQ ID NO: 806117 - RNA, 19 nt, Artificial Sequence
  Description of Artificial Sequence: Synthetic oligonucleotide
  Antisense strand to SEQ ID NO: 806116
uuauauaaacggagucuac

SEQ ID NO: 806118 - RNA, 19 nt, Artificial Sequence
  Description of Artificial Sequence: Synthetic oligonucleotide
  Sense strand starting at position 1145 of SEQ ID NO: 587625
cugggaugauguguacacu

SEQ ID NO: 806119 - RNA, 19 nt, Artificial Sequence
  Description of Artificial Sequence: Synthetic oligonucleotide
  Antisense strand to SEQ ID NO: 806118
aguguacacaucaucccag

SEQ ID NO: 806120 - RNA, 19 nt, Artificial Sequence
  Description of Artificial Sequence: Synthetic oligonucleotide
  Sense strand starting at position 1146 of SEQ ID NO: 587625
ugggaugauguguacacua

SEQ ID NO: 806121 - RNA, 19 nt, Artificial Sequence
  Description of Artificial Sequence: Synthetic oligonucleotide
  Antisense strand to SEQ ID NO: 806120
uaguguacacaucauccca

SEQ ID NO: 806122 - RNA, 19 nt, Artificial Sequence
  Description of Artificial Sequence: Synthetic oligonucleotide
  Sense strand starting at position 1148 of SEQ ID NO: 587625
ggaugauguguacacuauu

SEQ ID NO: 806123 - RNA, 19 nt, Artificial Sequence
  Description of Artificial Sequence: Synthetic oligonucleotide
  Antisense strand to SEQ ID NO: 806122
aauaguguacacaucaucc

SEQ ID NO: 806124 - RNA, 19 nt, Artificial Sequence
  Description of Artificial Sequence: Synthetic oligonucleotide
  Sense strand starting at position 1381 of SEQ ID NO: 587625
caucucugccuugaaaggu

SEQ ID NO: 806125 - RNA, 19 nt, Artificial Sequence
  Description of Artificial Sequence: Synthetic oligonucleotide
  Antisense strand to SEQ ID NO: 806124
accuuucaaggcagagaug

SEQ ID NO: 806126 - RNA, 19 nt, Artificial Sequence
  Description of Artificial Sequence: Synthetic oligonucleotide
  Sense strand starting at position 1389 of SEQ ID NO: 587625
ccuugaaaggugcaagagu

SEQ ID NO: 806127 - RNA, 19 nt, Artificial Sequence
  Description of Artificial Sequence: Synthetic oligonucleotide
  Antisense strand to SEQ ID NO: 806126
acucuugcaccuuucaagg

SEQ ID NO: 806128 - RNA, 19 nt, Artificial Sequence
  Description of Artificial Sequence: Synthetic oligonucleotide
  Sense strand starting at position 1417 of SEQ ID NO: 587625
aacuaaagagcucgauuga

SEQ ID NO: 806129 - RNA, 19 nt, Artificial Sequence
  Description of Artificial Sequence: Synthetic oligonucleotide
  Antisense strand to SEQ ID NO: 806128
ucaaucgagcucuuuaguu

SEQ ID NO: 806130 - RNA, 19 nt, Artificial Sequence
  Description of Artificial Sequence: Synthetic oligonucleotide
  Sense strand starting at position 1462 of SEQ ID NO: 587625
gcagaaaucuggucuggaa

SEQ ID NO: 806131 - RNA, 19 nt, Artificial Sequence
  Description of Artificial Sequence: Synthetic oligonucleotide
  Antisense strand to SEQ ID NO: 806130
uuccagaccagauuucugc

SEQ ID NO: 806132 - RNA, 19 nt, Artificial Sequence
  Description of Artificial Sequence: Synthetic oligonucleotide
  Sense strand starting at position 1511 of SEQ ID NO: 587625
gacacucuugagugugaau

SEQ ID NO: 806133 - RNA, 19 nt, Artificial Sequence
  Description of Artificial Sequence: Synthetic oligonucleotide
  Antisense strand to SEQ ID NO: 806132
auucacacucaagaguguc

SEQ ID NO: 806134 - RNA, 19 nt, Artificial Sequence
  Description of Artificial Sequence: Synthetic oligonucleotide
  Sense strand starting at position 2161 of SEQ ID NO: 587625
gugaguucccagaguucgu

SEQ ID NO: 806135 - RNA, 19 nt, Artificial Sequence
  Description of Artificial Sequence: Synthetic oligonucleotide
  Antisense strand to SEQ ID NO: 806134
acgaacucugggaacucac

SEQ ID NO: 806136 - RNA, 19 nt, Artificial Sequence
  Description of Artificial Sequence: Synthetic oligonucleotide
  Sense strand starting at position 2197 of SEQ ID NO: 587625
gcguuagaaccuucugugu

SEQ ID NO: 806137 - RNA, 19 nt, Artificial Sequence
  Description of Artificial Sequence: Synthetic oligonucleotide
  Antisense strand to SEQ ID NO: 806136
acacagaagguucuaacgc

SEQ ID NO: 806138 - RNA, 19 nt, Artificial Sequence
  Description of Artificial Sequence: Synthetic oligonucleotide
  Sense strand starting at position 2269 of SEQ ID NO: 587625
agcuaagagacagguuaaa

SEQ ID NO: 806139 - RNA, 19 nt, Artificial Sequence
  Description of Artificial Sequence: Synthetic oligonucleotide
  Antisense strand to SEQ ID NO: 806138
uuuaaccugucucuuagcu

SEQ ID NO: 806140 - RNA, 19 nt, Artificial Sequence
  Description of Artificial Sequence: Synthetic oligonucleotide
  Sense strand starting at position 2280 of SEQ ID NO: 587625
agguuaaaguacuuguuga

SEQ ID NO: 806141 - RNA, 19 nt, Artificial Sequence
  Description of Artificial Sequence: Synthetic oligonucleotide
  Antisense strand to SEQ ID NO: 806140
ucaacaaguacuuuaaccu

SEQ ID NO: 806142 - RNA, 19 nt, Artificial Sequence
  Description of Artificial Sequence: Synthetic oligonucleotide
  Sense strand starting at position 2495 of SEQ ID NO: 587625
ucuuauuagugucugauuu

SEQ ID NO: 806143 - RNA, 19 nt, Artificial Sequence
  Description of Artificial Sequence: Synthetic oligonucleotide
  Antisense strand to SEQ ID NO: 806142
aaaucagacacuaauaaga

SEQ ID NO: 806144 - RNA, 19 nt, Artificial Sequence
  Description of Artificial Sequence: Synthetic oligonucleotide
  Sense strand starting at position 2927 of SEQ ID NO: 587625
acaccuagugauuggcaca

SEQ ID NO: 806145 - RNA, 19 nt, Artificial Sequence
  Description of Artificial Sequence: Synthetic oligonucleotide
  Antisense strand to SEQ ID NO: 806144
ugugccaaucacuaggugu

SEQ ID NO: 806146 - RNA, 19 nt, Artificial Sequence
  Description of Artificial Sequence: Synthetic oligonucleotide
  Sense strand starting at position 2932 of SEQ ID NO: 587625
uagugauuggcacaaguau

SEQ ID NO: 806147 - RNA, 19 nt, Artificial Sequence
  Description of Artificial Sequence: Synthetic oligonucleotide
  Antisense strand to SEQ ID NO: 806146
auacuugugccaaucacua

SEQ ID NO: 806148 - RNA, 19 nt, Artificial Sequence
  Description of Artificial Sequence: Synthetic oligonucleotide
  Sense strand starting at position 2960 of SEQ ID NO: 587625
cuuauugaaugauuguuga

SEQ ID NO: 806149 - RNA, 19 nt, Artificial Sequence
  Description of Artificial Sequence: Synthetic oligonucleotide
  Antisense strand to SEQ ID NO: 806148
ucaacaaucauucaauaag

SEQ ID NO: 806150 - RNA, 19 nt, Artificial Sequence
  Description of Artificial Sequence: Synthetic oligonucleotide
  Sense strand starting at position 2967 of SEQ ID NO: 587625
aaugauuguugagugacau

SEQ ID NO: 806151 - RNA, 19 nt, Artificial Sequence
  Description of Artificial Sequence: Synthetic oligonucleotide
  Antisense strand to SEQ ID NO: 806150
augucacucaacaaucauu

SEQ ID NO: 806152 - RNA, 19 nt, Artificial Sequence
  Description of Artificial Sequence: Synthetic oligonucleotide
  Sense strand starting at position 2968 of SEQ ID NO: 587625
augauuguugagugacaug

SEQ ID NO: 806153 - RNA, 19 nt, Artificial Sequence
  Description of Artificial Sequence: Synthetic oligonucleotide
  Antisense strand to SEQ ID NO: 806152
caugucacucaacaaucau

SEQ ID NO: 806154 - RNA, 19 nt, Artificial Sequence
  Description of Artificial Sequence: Synthetic oligonucleotide
  Sense strand starting at position 2973 of SEQ ID NO: 587625
uguugagugacaugauaaa

SEQ ID NO: 806155 - RNA, 19 nt, Artificial Sequence
  Description of Artificial Sequence: Synthetic oligonucleotide
  Antisense strand to SEQ ID NO: 806154
uuuaucaugucacucaaca

SEQ ID NO: 806156 - RNA, 19 nt, Artificial Sequence
  Description of Artificial Sequence: Synthetic oligonucleotide
  Sense strand starting at position 3105 of SEQ ID NO: 587625
gaaguaucugaaugcucca

SEQ ID NO: 806157 - RNA, 19 nt, Artificial Sequence
  Description of Artificial Sequence: Synthetic oligonucleotide
  Antisense strand to SEQ ID NO: 806156
uggagcauucagauacuuc

SEQ ID NO: 806158 - RNA, 19 nt, Artificial Sequence
  Description of Artificial Sequence: Synthetic oligonucleotide
  Sense strand starting at position 3110 of SEQ ID NO: 587625
aucugaaugcuccauugua

SEQ ID NO: 806159 - RNA, 19 nt, Artificial Sequence
  Description of Artificial Sequence: Synthetic oligonucleotide
  Antisense strand to SEQ ID NO: 806158
uacaauggagcauucagau

SEQ ID NO: 806160 - RNA, 19 nt, Artificial Sequence
  Description of Artificial Sequence: Synthetic oligonucleotide
  Sense strand starting at position 3128 of SEQ ID NO: 587625
acggacuuuccaggaaaua

SEQ ID NO: 806161 - RNA, 19 nt, Artificial Sequence
  Description of Artificial Sequence: Synthetic oligonucleotide
  Antisense strand to SEQ ID NO: 806160
uauuuccuggaaaguccgu

SEQ ID NO: 806162 - RNA, 19 nt, Artificial Sequence
  Description of Artificial Sequence: Synthetic oligonucleotide
  Sense strand starting at position 3223 of SEQ ID NO: 587625
gacaaauauuggcugagca

SEQ ID NO: 806163 - RNA, 19 nt, Artificial Sequence
  Description of Artificial Sequence: Synthetic oligonucleotide
  Antisense strand to SEQ ID NO: 806162
ugcucagccaauauuuguc

SEQ ID NO: 806164 - RNA, 19 nt, Artificial Sequence
  Description of Artificial Sequence: Synthetic oligonucleotide
  Sense strand starting at position 3255 of SEQ ID NO: 587625
gggugcuaggagugaagau

SEQ ID NO: 806165 - RNA, 19 nt, Artificial Sequence
  Description of Artificial Sequence: Synthetic oligonucleotide
  Antisense strand to SEQ ID NO: 806164
aucuucacuccuagcaccc

SEQ ID NO: 806166 - RNA, 19 nt, Artificial Sequence
  Description of Artificial Sequence: Synthetic oligonucleotide
  Sense strand starting at position 3256 of SEQ ID NO: 587625
ggugcuaggagugaagaua

SEQ ID NO: 806167 - RNA, 19 nt, Artificial Sequence
  Description of Artificial Sequence: Synthetic oligonucleotide
  Antisense strand to SEQ ID NO: 806166
uaucuucacuccuagcacc

SEQ ID NO: 806168 - RNA, 19 nt, Artificial Sequence
  Description of Artificial Sequence: Synthetic oligonucleotide
  Sense strand starting at position 3368 of SEQ ID NO: 587625
cugauaucagggugcuaac

SEQ ID NO: 806169 - RNA, 19 nt, Artificial Sequence
  Description of Artificial Sequence: Synthetic oligonucleotide
  Antisense strand to SEQ ID NO: 806168
guuagcacccugauaucag

SEQ ID NO: 806170 - RNA, 19 nt, Artificial Sequence
  Description of Artificial Sequence: Synthetic oligonucleotide
  Sense strand starting at position 3542 of SEQ ID NO: 587625
ggaagaaguucagugugag

SEQ ID NO: 806171 - RNA, 19 nt, Artificial Sequence
  Description of Artificial Sequence: Synthetic oligonucleotide
  Antisense strand to SEQ ID NO: 806170
cucacacugaacuucuucc

SEQ ID NO: 806172 - RNA, 19 nt, Artificial Sequence
  Description of Artificial Sequence: Synthetic oligonucleotide
  Sense strand starting at position 3543 of SEQ ID NO: 587625
gaagaaguucagugugagg

SEQ ID NO: 806173 - RNA, 19 nt, Artificial Sequence
  Description of Artificial Sequence: Synthetic oligonucleotide
  Antisense strand to SEQ ID NO: 806172
ccucacacugaacuucuuc

SEQ ID NO: 806174 - RNA, 19 nt, Artificial Sequence
  Description of Artificial Sequence: Synthetic oligonucleotide
  Sense strand starting at position 3619 of SEQ ID NO: 587625
augucaagcaguugagaau

SEQ ID NO: 806175 - RNA, 19 nt, Artificial Sequence
  Description of Artificial Sequence: Synthetic oligonucleotide
  Antisense strand to SEQ ID NO: 806174
auucucaacugcuugacau

SEQ ID NO: 806176 - RNA, 19 nt, Artificial Sequence
  Description of Artificial Sequence: Synthetic oligonucleotide
  Sense strand starting at position 3620 of SEQ ID NO: 587625
ugucaagcaguugagaauu

SEQ ID NO: 806177 - RNA, 19 nt, Artificial Sequence
  Description of Artificial Sequence: Synthetic oligonucleotide
  Antisense strand to SEQ ID NO: 806176
aauucucaacugcuugaca

SEQ ID NO: 806178 - RNA, 19 nt, Artificial Sequence
  Description of Artificial Sequence: Synthetic oligonucleotide
  Sense strand starting at position 3735 of SEQ ID NO: 587625
aacagaugguggguuucua

SEQ ID NO: 806179 - RNA, 19 nt, Artificial Sequence
  Description of Artificial Sequence: Synthetic oligonucleotide
  Antisense strand to SEQ ID NO: 806178
uagaaacccaccaucuguu

SEQ ID NO: 806180 - RNA, 19 nt, Artificial Sequence
  Description of Artificial Sequence: Synthetic oligonucleotide
  Sense strand starting at position 3789 of SEQ ID NO: 587625
ucaugaccugugcagagaa

SEQ ID NO: 806181 - RNA, 19 nt, Artificial Sequence
  Description of Artificial Sequence: Synthetic oligonucleotide
  Antisense strand to SEQ ID NO: 806180
uucucugcacaggucauga

SEQ ID NO: 806182 - RNA, 19 nt, Artificial Sequence
  Description of Artificial Sequence: Synthetic oligonucleotide
  Sense strand starting at position 3939 of SEQ ID NO: 587625
ucaggugaaguuuauguca

SEQ ID NO: 806183 - RNA, 19 nt, Artificial Sequence
  Description of Artificial Sequence: Synthetic oligonucleotide
  Antisense strand to SEQ ID NO: 806182
ugacauaaacuucaccuga

SEQ ID NO: 806184 - RNA, 19 nt, Artificial Sequence
  Description of Artificial Sequence: Synthetic oligonucleotide
  Sense strand starting at position 1 of SEQ ID NO: 587626
agcuaagucauacacgaug

SEQ ID NO: 806185 - RNA, 19 nt, Artificial Sequence
  Description of Artificial Sequence: Synthetic oligonucleotide
  Antisense strand to SEQ ID NO: 806184
caucguguaugacuuagcu

SEQ ID NO: 806186 - RNA, 19 nt, Artificial Sequence
  Description of Artificial Sequence: Synthetic oligonucleotide
  Sense strand starting at position 303 of SEQ ID NO: 587626
ggaucaguggguugucuuu

SEQ ID NO: 806187 - RNA, 19 nt, Artificial Sequence
  Description of Artificial Sequence: Synthetic oligonucleotide
  Antisense strand to SEQ ID NO: 806186
aaagacaacccacugaucc

SEQ ID NO: 806188 - RNA, 19 nt, Artificial Sequence
  Description of Artificial Sequence: Synthetic oligonucleotide
  Sense strand starting at position 309 of SEQ ID NO: 587626
guggguugucuuugaucuu

SEQ ID NO: 806189 - RNA, 19 nt, Artificial Sequence
  Description of Artificial Sequence: Synthetic oligonucleotide
  Antisense strand to SEQ ID NO: 806188
aagaucaaagacaacccac

SEQ ID NO: 806190 - RNA, 19 nt, Artificial Sequence
  Description of Artificial Sequence: Synthetic oligonucleotide
  Sense strand starting at position 312 of SEQ ID NO: 587626
gguugucuuugaucuucca

SEQ ID NO: 806191 - RNA, 19 nt, Artificial Sequence
  Description of Artificial Sequence: Synthetic oligonucleotide
  Antisense strand to SEQ ID NO: 806190
uggaagaucaaagacaacc

SEQ ID NO: 806192 - RNA, 19 nt, Artificial Sequence
  Description of Artificial Sequence: Synthetic oligonucleotide
  Sense strand starting at position 441 of SEQ ID NO: 587626
agcggaugcgguuauuauc

SEQ ID NO: 806193 - RNA, 19 nt, Artificial Sequence
  Description of Artificial Sequence: Synthetic oligonucleotide
  Antisense strand to SEQ ID NO: 806192
gauaauaaccgcauccgcu

SEQ ID NO: 806194 - RNA, 19 nt, Artificial Sequence
  Description of Artificial Sequence: Synthetic oligonucleotide
  Sense strand starting at position 516 of SEQ ID NO: 587626
gcugguugcgacuaaggua

SEQ ID NO: 806195 - RNA, 19 nt, Artificial Sequence
  Description of Artificial Sequence: Synthetic oligonucleotide
  Antisense strand to SEQ ID NO: 806194
uaccuuagucgcaaccagc

SEQ ID NO: 806196 - RNA, 19 nt, Artificial Sequence
  Description of Artificial Sequence: Synthetic oligonucleotide
  Sense strand starting at position 669 of SEQ ID NO: 587626
gcaugaggcucuccaaacu

SEQ ID NO: 806197 - RNA, 19 nt, Artificial Sequence
  Description of Artificial Sequence: Synthetic oligonucleotide
  Antisense strand to SEQ ID NO: 806196
aguuuggagagccucaugc

SEQ ID NO: 806198 - RNA, 19 nt, Artificial Sequence
  Description of Artificial Sequence: Synthetic oligonucleotide
  Sense strand starting at position 855 of SEQ ID NO: 587626
cagugagcugguugugauc

SEQ ID NO: 806199 - RNA, 19 nt, Artificial Sequence
  Description of Artificial Sequence: Synthetic oligonucleotide
  Antisense strand to SEQ ID NO: 806198
gaucacaaccagcucacug

SEQ ID NO: 806200 - RNA, 19 nt, Artificial Sequence
  Description of Artificial Sequence: Synthetic oligonucleotide
  Sense strand starting at position 2288 of SEQ ID NO: 587626
gccggcuucccuuacucau

SEQ ID NO: 806201 - RNA, 19 nt, Artificial Sequence
  Description of Artificial Sequence: Synthetic oligonucleotide
  Antisense strand to SEQ ID NO: 806200
augaguaagggaagccggc

SEQ ID NO: 806202 - RNA, 19 nt, Artificial Sequence
  Description of Artificial Sequence: Synthetic oligonucleotide
  Sense strand starting at position 2376 of SEQ ID NO: 587626
uggguaucaucauagaagc

SEQ ID NO: 806203 - RNA, 19 nt, Artificial Sequence
  Description of Artificial Sequence: Synthetic oligonucleotide
  Antisense strand to SEQ ID NO: 806202
gcuucuaugaugauaccca

SEQ ID NO: 806204 - RNA, 19 nt, Artificial Sequence
  Description of Artificial Sequence: Synthetic oligonucleotide
  Sense strand starting at position 2397 of SEQ ID NO: 587626
aggacaagagugugguuaa

SEQ ID NO: 806205 - RNA, 19 nt, Artificial Sequence
  Description of Artificial Sequence: Synthetic oligonucleotide
  Antisense strand to SEQ ID NO: 806204
uuaaccacacucuuguccu

SEQ ID NO: 806206 - RNA, 19 nt, Artificial Sequence
  Description of Artificial Sequence: Synthetic oligonucleotide
  Sense strand starting at position 2400 of SEQ ID NO: 587626
acaagagugugguuaaaca

SEQ ID NO: 806207 - RNA, 19 nt, Artificial Sequence
  Description of Artificial Sequence: Synthetic oligonucleotide
  Antisense strand to SEQ ID NO: 806206
uguuuaaccacacucuugu

SEQ ID NO: 806208 - RNA, 19 nt, Artificial Sequence
  Description of Artificial Sequence: Synthetic oligonucleotide
  Sense strand starting at position 2468 of SEQ ID NO: 587626
ccuauuucguguugaacau

SEQ ID NO: 806209 - RNA, 19 nt, Artificial Sequence
  Description of Artificial Sequence: Synthetic oligonucleotide
  Antisense strand to SEQ ID NO: 806208
auguucaacacgaaauagg

SEQ ID NO: 806210 - RNA, 19 nt, Artificial Sequence
  Description of Artificial Sequence: Synthetic oligonucleotide
  Sense strand starting at position 2474 of SEQ ID NO: 587626
ucguguugaacaugggaca

SEQ ID NO: 806211 - RNA, 19 nt, Artificial Sequence
  Description of Artificial Sequence: Synthetic oligonucleotide
  Antisense strand to SEQ ID NO: 806210
ugucccauguucaacacga

SEQ ID NO: 806212 - RNA, 19 nt, Artificial Sequence
  Description of Artificial Sequence: Synthetic oligonucleotide
  Sense strand starting at position 2690 of SEQ ID NO: 587626
acaccagugccaugacaau

SEQ ID NO: 806213 - RNA, 19 nt, Artificial Sequence
  Description of Artificial Sequence: Synthetic oligonucleotide
  Antisense strand to SEQ ID NO: 806212
auugucauggcacuggugu

SEQ ID NO: 806214 - RNA, 19 nt, Artificial Sequence
  Description of Artificial Sequence: Synthetic oligonucleotide
  Sense strand starting at position 2898 of SEQ ID NO: 587626
gcaauaaaucugcauauug

SEQ ID NO: 806215 - RNA, 19 nt, Artificial Sequence
  Description of Artificial Sequence: Synthetic oligonucleotide
  Antisense strand to SEQ ID NO: 806214
caauaugcagauuuauugc

SEQ ID NO: 806216 - RNA, 19 nt, Artificial Sequence
  Description of Artificial Sequence: Synthetic oligonucleotide
  Sense strand starting at position 2905 of SEQ ID NO: 587626
aucugcauauugucacuau

SEQ ID NO: 806217 - RNA, 19 nt, Artificial Sequence
  Description of Artificial Sequence: Synthetic oligonucleotide
  Antisense strand to SEQ ID NO: 806216
auagugacaauaugcagau

SEQ ID NO: 806218 - RNA, 19 nt, Artificial Sequence
  Description of Artificial Sequence: Synthetic oligonucleotide
  Sense strand starting at position 2927 of SEQ ID NO: 587626
cugaguuguccuugaacuc

SEQ ID NO: 806219 - RNA, 19 nt, Artificial Sequence
  Description of Artificial Sequence: Synthetic oligonucleotide
  Antisense strand to SEQ ID NO: 806218
gaguucaaggacaacucag

SEQ ID NO: 806220 - RNA, 19 nt, Artificial Sequence
  Description of Artificial Sequence: Synthetic oligonucleotide
  Sense strand starting at position 2928 of SEQ ID NO: 587626
ugaguuguccuugaacuca

SEQ ID NO: 806221 - RNA, 19 nt, Artificial Sequence
  Description of Artificial Sequence: Synthetic oligonucleotide
  Antisense strand to SEQ ID NO: 806220
ugaguucaaggacaacuca

SEQ ID NO: 806222 - RNA, 19 nt, Artificial Sequence
  Description of Artificial Sequence: Synthetic oligonucleotide
  Sense strand starting at position 2940 of SEQ ID NO: 587626
gaacucauucucuggaugu

SEQ ID NO: 806223 - RNA, 19 nt, Artificial Sequence
  Description of Artificial Sequence: Synthetic oligonucleotide
  Antisense strand to SEQ ID NO: 806222
acauccagagaaugaguuc

SEQ ID NO: 806224 - RNA, 19 nt, Artificial Sequence
  Description of Artificial Sequence: Synthetic oligonucleotide
  Sense strand starting at position 3160 of SEQ ID NO: 587626
acaacaacgcugugaaaca

SEQ ID NO: 806225 - RNA, 19 nt, Artificial Sequence
  Description of Artificial Sequence: Synthetic oligonucleotide
  Antisense strand to SEQ ID NO: 806224
uguuucacagcguuguugu

SEQ ID NO: 806226 - RNA, 19 nt, Artificial Sequence
  Description of Artificial Sequence: Synthetic oligonucleotide
  Sense strand starting at position 3207 of SEQ ID NO: 587626
uguuguucugcggacucaa

SEQ ID NO: 806227 - RNA, 19 nt, Artificial Sequence
  Description of Artificial Sequence: Synthetic oligonucleotide
  Antisense strand to SEQ ID NO: 806226
uugaguccgcagaacaaca

SEQ ID NO: 806228 - RNA, 19 nt, Artificial Sequence
  Description of Artificial Sequence: Synthetic oligonucleotide
  Sense strand starting at position 3288 of SEQ ID NO: 587626
gcuguuaggaaauguuucu

SEQ ID NO: 806229 - RNA, 19 nt, Artificial Sequence
  Description of Artificial Sequence: Synthetic oligonucleotide
  Antisense strand to SEQ ID NO: 806228
agaaacauuuccuaacagc

SEQ ID NO: 806230 - RNA, 19 nt, Artificial Sequence
  Description of Artificial Sequence: Synthetic oligonucleotide
  Sense strand starting at position 3294 of SEQ ID NO: 587626
aggaaauguuucuuugagc

SEQ ID NO: 806231 - RNA, 19 nt, Artificial Sequence
  Description of Artificial Sequence: Synthetic oligonucleotide
  Antisense strand to SEQ ID NO: 806230
gcucaaagaaacauuuccu

SEQ ID NO: 806232 - RNA, 19 nt, Artificial Sequence
  Description of Artificial Sequence: Synthetic oligonucleotide
  Sense strand starting at position 3295 of SEQ ID NO: 587626
ggaaauguuucuuugagcu

SEQ ID NO: 806233 - RNA, 19 nt, Artificial Sequence
  Description of Artificial Sequence: Synthetic oligonucleotide
  Antisense strand to SEQ ID NO: 806232
agcucaaagaaacauuucc

SEQ ID NO: 806234 - RNA, 19 nt, Artificial Sequence
  Description of Artificial Sequence: Synthetic oligonucleotide
  Sense strand starting at position 3299 of SEQ ID NO: 587626
auguuucuuugagcucaca

SEQ ID NO: 806235 - RNA, 19 nt, Artificial Sequence
  Description of Artificial Sequence: Synthetic oligonucleotide
  Antisense strand to SEQ ID NO: 806234
ugugagcucaaagaaacau

SEQ ID NO: 806236 - RNA, 19 nt, Artificial Sequence
  Description of Artificial Sequence: Synthetic oligonucleotide
  Sense strand starting at position 3311 of SEQ ID NO: 587626
gcucacaucuaugcuaagu

SEQ ID NO: 806237 - RNA, 19 nt, Artificial Sequence
  Description of Artificial Sequence: Synthetic oligonucleotide
  Antisense strand to SEQ ID NO: 806236
acuuagcauagaugugagc

SEQ ID NO: 806238 - RNA, 19 nt, Artificial Sequence
  Description of Artificial Sequence: Synthetic oligonucleotide
  Sense strand starting at position 3403 of SEQ ID NO: 587626
cagguugauugauaaggaa

SEQ ID NO: 806239 - RNA, 19 nt, Artificial Sequence
  Description of Artificial Sequence: Synthetic oligonucleotide
  Antisense strand to SEQ ID NO: 806238
uuccuuaucaaucaaccug

SEQ ID NO: 806240 - RNA, 19 nt, Artificial Sequence
  Description of Artificial Sequence: Synthetic oligonucleotide
  Sense strand starting at position 3447 of SEQ ID NO: 587626
cugcguucaguugguuaaa

SEQ ID NO: 806241 - RNA, 19 nt, Artificial Sequence
  Description of Artificial Sequence: Synthetic oligonucleotide
  Antisense strand to SEQ ID NO: 806240
uuuaaccaacugaacgcag

SEQ ID NO: 806242 - RNA, 19 nt, Artificial Sequence
  Description of Artificial Sequence: Synthetic oligonucleotide
  Sense strand starting at position 3459 of SEQ ID NO: 587626
gguuaaaggcaucacuuga

SEQ ID NO: 806243 - RNA, 19 nt, Artificial Sequence
  Description of Artificial Sequence: Synthetic oligonucleotide
  Antisense strand to SEQ ID NO: 806242
ucaagugaugccuuuaacc

SEQ ID NO: 806244 - RNA, 19 nt, Artificial Sequence
  Description of Artificial Sequence: Synthetic oligonucleotide
  Sense strand starting at position 3523 of SEQ ID NO: 587626
acccauauuuggugcagua

SEQ ID NO: 806245 - RNA, 19 nt, Artificial Sequence
  Description of Artificial Sequence: Synthetic oligonucleotide
  Antisense strand to SEQ ID NO: 806244
uacugcaccaaauaugggu

SEQ ID NO: 806246 - RNA, 19 nt, Artificial Sequence
  Description of Artificial Sequence: Synthetic oligonucleotide
  Sense strand starting at position 3533 of SEQ ID NO: 587626
ggugcaguaacgugagaag

SEQ ID NO: 806247 - RNA, 19 nt, Artificial Sequence
  Description of Artificial Sequence: Synthetic oligonucleotide
  Antisense strand to SEQ ID NO: 806246
cuucucacguuacugcacc

SEQ ID NO: 806248 - RNA, 19 nt, Artificial Sequence
  Description of Artificial Sequence: Synthetic oligonucleotide
  Sense strand starting at position 3577 of SEQ ID NO: 587626
aacaucugaggcuggaaau

SEQ ID NO: 806249 - RNA, 19 nt, Artificial Sequence
  Description of Artificial Sequence: Synthetic oligonucleotide
  Antisense strand to SEQ ID NO: 806248
auuuccagccucagauguu

SEQ ID NO: 806250 - RNA, 19 nt, Artificial Sequence
  Description of Artificial Sequence: Synthetic oligonucleotide
  Sense strand starting at position 3602 of SEQ ID NO: 587626
cagugaugguuaucaggcu

SEQ ID NO: 806251 - RNA, 19 nt, Artificial Sequence
  Description of Artificial Sequence: Synthetic oligonucleotide
  Antisense strand to SEQ ID NO: 806250
agccugauaaccaucacug

SEQ ID NO: 806252 - RNA, 19 nt, Artificial Sequence
  Description of Artificial Sequence: Synthetic oligonucleotide
  Sense strand starting at position 3634 of SEQ ID NO: 587626
gcuguaacuggaggauguu

SEQ ID NO: 806253 - RNA, 19 nt, Artificial Sequence
  Description of Artificial Sequence: Synthetic oligonucleotide
  Antisense strand to SEQ ID NO: 806252
aacauccuccaguuacagc

SEQ ID NO: 806254 - RNA, 19 nt, Artificial Sequence
  Description of Artificial Sequence: Synthetic oligonucleotide
  Sense strand starting at position 3691 of SEQ ID NO: 587626
gaugaaaugugaguaagug

SEQ ID NO: 806255 - RNA, 19 nt, Artificial Sequence
  Description of Artificial Sequence: Synthetic oligonucleotide
  Antisense strand to SEQ ID NO: 806254
cacuuacucacauuucauc

SEQ ID NO: 806256 - RNA, 19 nt, Artificial Sequence
  Description of Artificial Sequence: Synthetic oligonucleotide
  Sense strand starting at position 3695 of SEQ ID NO: 587626
aaaugugaguaagugaaca

SEQ ID NO: 806257 - RNA, 19 nt, Artificial Sequence
  Description of Artificial Sequence: Synthetic oligonucleotide
  Antisense strand to SEQ ID NO: 806256
uguucacuuacucacauuu

SEQ ID NO: 806258 - RNA, 19 nt, Artificial Sequence
  Description of Artificial Sequence: Synthetic oligonucleotide
  Sense strand starting at position 3820 of SEQ ID NO: 587626
uucugaguuaucuaggcug

SEQ ID NO: 806259 - RNA, 19 nt, Artificial Sequence
  Description of Artificial Sequence: Synthetic oligonucleotide
  Antisense strand to SEQ ID NO: 806258
cagccuagauaacucagaa

SEQ ID NO: 806260 - RNA, 19 nt, Artificial Sequence
  Description of Artificial Sequence: Synthetic oligonucleotide
  Sense strand starting at position 3822 of SEQ ID NO: 587626
cugaguuaucuaggcugac

SEQ ID NO: 806261 - RNA, 19 nt, Artificial Sequence
  Description of Artificial Sequence: Synthetic oligonucleotide
  Antisense strand to SEQ ID NO: 806260
gucagccuagauaacucag

SEQ ID NO: 806262 - RNA, 19 nt, Artificial Sequence
  Description of Artificial Sequence: Synthetic oligonucleotide
  Sense strand starting at position 3878 of SEQ ID NO: 587626
guaagugacuucucaauca

SEQ ID NO: 806263 - RNA, 19 nt, Artificial Sequence
  Description of Artificial Sequence: Synthetic oligonucleotide
  Antisense strand to SEQ ID NO: 806262
ugauugagaagucacuuac

SEQ ID NO: 806264 - RNA, 19 nt, Artificial Sequence
  Description of Artificial Sequence: Synthetic oligonucleotide
  Sense strand starting at position 562 of SEQ ID NO: 587627
gcagcaguuuccugggaug

SEQ ID NO: 806265 - RNA, 19 nt, Artificial Sequence
  Description of Artificial Sequence: Synthetic oligonucleotide
  Antisense strand to SEQ ID NO: 806264
caucccaggaaacugcugc

SEQ ID NO: 806266 - RNA, 19 nt, Artificial Sequence
  Description of Artificial Sequence: Synthetic oligonucleotide
  Sense strand starting at position 587 of SEQ ID NO: 587627
ggaaaugggucaguauagu

SEQ ID NO: 806267 - RNA, 19 nt, Artificial Sequence
  Description of Artificial Sequence: Synthetic oligonucleotide
  Antisense strand to SEQ ID NO: 806266
acuauacugacccauuucc

SEQ ID NO: 806268 - RNA, 19 nt, Artificial Sequence
  Description of Artificial Sequence: Synthetic oligonucleotide
  Sense strand starting at position 2143 of SEQ ID NO: 587627
cccaccaugcucugcgaua

SEQ ID NO: 806269 - RNA, 19 nt, Artificial Sequence
  Description of Artificial Sequence: Synthetic oligonucleotide
  Antisense strand to SEQ ID NO: 806268
uaucgcagagcaugguggg

SEQ ID NO: 806270 - RNA, 19 nt, Artificial Sequence
  Description of Artificial Sequence: Synthetic oligonucleotide
  Sense strand starting at position 2288 of SEQ ID NO: 587627
gccggacucucagcaguuu

SEQ ID NO: 806271 - RNA, 19 nt, Artificial Sequence
  Description of Artificial Sequence: Synthetic oligonucleotide
  Antisense strand to SEQ ID NO: 806270
aaacugcugagaguccggc

SEQ ID NO: 806272 - RNA, 19 nt, Artificial Sequence
  Description of Artificial Sequence: Synthetic oligonucleotide
  Sense strand starting at position 2806 of SEQ ID NO: 587627
gugacagagccauggaagu

SEQ ID NO: 806273 - RNA, 19 nt, Artificial Sequence
  Description of Artificial Sequence: Synthetic oligonucleotide
  Antisense strand to SEQ ID NO: 806272
acuuccauggcucugucac

SEQ ID NO: 806274 - RNA, 19 nt, Artificial Sequence
  Description of Artificial Sequence: Synthetic oligonucleotide
  Sense strand starting at position 3035 of SEQ ID NO: 587627
guguguggccugugguuaa

SEQ ID NO: 806275 - RNA, 19 nt, Artificial Sequence
  Description of Artificial Sequence: Synthetic oligonucleotide
  Antisense strand to SEQ ID NO: 806274
uuaaccacaggccacacac

SEQ ID NO: 806276 - RNA, 19 nt, Artificial Sequence
  Description of Artificial Sequence: Synthetic oligonucleotide
  Sense strand starting at position 3038 of SEQ ID NO: 587627
uguggccugugguuaagaa

SEQ ID NO: 806277 - RNA, 19 nt, Artificial Sequence
  Description of Artificial Sequence: Synthetic oligonucleotide
  Antisense strand to SEQ ID NO: 806276
uucuuaaccacaggccaca

SEQ ID NO: 806278 - RNA, 19 nt, Artificial Sequence
  Description of Artificial Sequence: Synthetic oligonucleotide
  Sense strand starting at position 3042 of SEQ ID NO: 587627
gccugugguuaagaaccau

SEQ ID NO: 806279 - RNA, 19 nt, Artificial Sequence
  Description of Artificial Sequence: Synthetic oligonucleotide
  Antisense strand to SEQ ID NO: 806278
augguucuuaaccacaggc

SEQ ID NO: 806280 - RNA, 19 nt, Artificial Sequence
  Description of Artificial Sequence: Synthetic oligonucleotide
  Sense strand starting at position 3054 of SEQ ID NO: 587627
gaaccaucuccagagcgaa

SEQ ID NO: 806281 - RNA, 19 nt, Artificial Sequence
  Description of Artificial Sequence: Synthetic oligonucleotide
  Antisense strand to SEQ ID NO: 806280
uucgcucuggagaugguuc

SEQ ID NO: 806282 - RNA, 19 nt, Artificial Sequence
  Description of Artificial Sequence: Synthetic oligonucleotide
  Sense strand starting at position 3094 of SEQ ID NO: 587627
aguccuaucucccaaguuu

SEQ ID NO: 806283 - RNA, 19 nt, Artificial Sequence
  Description of Artificial Sequence: Synthetic oligonucleotide
  Antisense strand to SEQ ID NO: 806282
aaacuugggagauaggacu

SEQ ID NO: 806284 - RNA, 19 nt, Artificial Sequence
  Description of Artificial Sequence: Synthetic oligonucleotide
  Sense strand starting at position 3105 of SEQ ID NO: 587627
ccaaguuugugagucucua

SEQ ID NO: 806285 - RNA, 19 nt, Artificial Sequence
  Description of Artificial Sequence: Synthetic oligonucleotide
  Antisense strand to SEQ ID NO: 806284
uagagacucacaaacuugg

SEQ ID NO: 806286 - RNA, 19 nt, Artificial Sequence
  Description of Artificial Sequence: Synthetic oligonucleotide
  Sense strand starting at position 3200 of SEQ ID NO: 587627
guuucuugucagcucagca

SEQ ID NO: 806287 - RNA, 19 nt, Artificial Sequence
  Description of Artificial Sequence: Synthetic oligonucleotide
  Antisense strand to SEQ ID NO: 806286
ugcugagcugacaagaaac

SEQ ID NO: 806288 - RNA, 19 nt, Artificial Sequence
  Description of Artificial Sequence: Synthetic oligonucleotide
  Sense strand starting at position 3234 of SEQ ID NO: 587627
gguuuccacgucuaucaaa

SEQ ID NO: 806289 - RNA, 19 nt, Artificial Sequence
  Description of Artificial Sequence: Synthetic oligonucleotide
  Antisense strand to SEQ ID NO: 806288
uuugauagacguggaaacc

SEQ ID NO: 806290 - RNA, 19 nt, Artificial Sequence
  Description of Artificial Sequence: Synthetic oligonucleotide
  Sense strand starting at position 3306 of SEQ ID NO: 587627
ccagcagugucugcaugua

SEQ ID NO: 806291 - RNA, 19 nt, Artificial Sequence
  Description of Artificial Sequence: Synthetic oligonucleotide
  Antisense strand to SEQ ID NO: 806290
uacaugcagacacugcugg

SEQ ID NO: 806292 - RNA, 19 nt, Artificial Sequence
  Description of Artificial Sequence: Synthetic oligonucleotide
  Sense strand starting at position 3527 of SEQ ID NO: 587627
ccugcuuccuuggguaaga

SEQ ID NO: 806293 - RNA, 19 nt, Artificial Sequence
  Description of Artificial Sequence: Synthetic oligonucleotide
  Antisense strand to SEQ ID NO: 806292
ucuuacccaaggaagcagg

SEQ ID NO: 806294 - RNA, 19 nt, Artificial Sequence
  Description of Artificial Sequence: Synthetic oligonucleotide
  Sense strand starting at position 3529 of SEQ ID NO: 587627
ugcuuccuuggguaagaga

SEQ ID NO: 806295 - RNA, 19 nt, Artificial Sequence
  Description of Artificial Sequence: Synthetic oligonucleotide
  Antisense strand to SEQ ID NO: 806294
ucucuuacccaaggaagca

SEQ ID NO: 806296 - RNA, 19 nt, Artificial Sequence
  Description of Artificial Sequence: Synthetic oligonucleotide
  Sense strand starting at position 3591 of SEQ ID NO: 587627
gcaccaugcugguuuagua

SEQ ID NO: 806297 - RNA, 19 nt, Artificial Sequence
  Description of Artificial Sequence: Synthetic oligonucleotide
  Antisense strand to SEQ ID NO: 806296
uacuaaaccagcauggugc

SEQ ID NO: 806298 - RNA, 19 nt, Artificial Sequence
  Description of Artificial Sequence: Synthetic oligonucleotide
  Sense strand starting at position 3674 of SEQ ID NO: 587627
cugugccuuccucaggaaa

SEQ ID NO: 806299 - RNA, 19 nt, Artificial Sequence
  Description of Artificial Sequence: Synthetic oligonucleotide
  Antisense strand to SEQ ID NO: 806298
uuuccugaggaaggcacag

SEQ ID NO: 806300 - RNA, 19 nt, Artificial Sequence
  Description of Artificial Sequence: Synthetic oligonucleotide
  Sense strand starting at position 3686 of SEQ ID NO: 587627
caggaaaggcuguguuucu

SEQ ID NO: 806301 - RNA, 19 nt, Artificial Sequence
  Description of Artificial Sequence: Synthetic oligonucleotide
  Antisense strand to SEQ ID NO: 806300
agaaacacagccuuuccug

SEQ ID NO: 806302 - RNA, 19 nt, Artificial Sequence
  Description of Artificial Sequence: Synthetic oligonucleotide
  Sense strand starting at position 3801 of SEQ ID NO: 587627
acccauuucugugugaucu

SEQ ID NO: 806303 - RNA, 19 nt, Artificial Sequence
  Description of Artificial Sequence: Synthetic oligonucleotide
  Antisense strand to SEQ ID NO: 806302
agaucacacagaaaugggu

SEQ ID NO: 806304 - RNA, 19 nt, Artificial Sequence
  Description of Artificial Sequence: Synthetic oligonucleotide
  Sense strand starting at position 3802 of SEQ ID NO: 587627
cccauuucugugugaucug

SEQ ID NO: 806305 - RNA, 19 nt, Artificial Sequence
  Description of Artificial Sequence: Synthetic oligonucleotide
  Antisense strand to SEQ ID NO: 806304
cagaucacacagaaauggg

SEQ ID NO: 806306 - RNA, 19 nt, Artificial Sequence
  Description of Artificial Sequence: Synthetic oligonucleotide
  Sense strand starting at position 3803 of SEQ ID NO: 587627
ccauuucugugugaucuga

SEQ ID NO: 806307 - RNA, 19 nt, Artificial Sequence
  Description of Artificial Sequence: Synthetic oligonucleotide
  Antisense strand to SEQ ID NO: 806306
ucagaucacacagaaaugg

SEQ ID NO: 806308 - RNA, 19 nt, Artificial Sequence
  Description of Artificial Sequence: Synthetic oligonucleotide
  Sense strand starting at position 3916 of SEQ ID NO: 587627
ggucccuucucugaaggga

SEQ ID NO: 806309 - RNA, 19 nt, Artificial Sequence
  Description of Artificial Sequence: Synthetic oligonucleotide
  Antisense strand to SEQ ID NO: 806308
ucccuucagagaagggacc

SEQ ID NO: 806310 - RNA, 19 nt, Artificial Sequence
  Description of Artificial Sequence: Synthetic oligonucleotide
  Sense strand starting at position 3931 of SEQ ID NO: 587627
gggacucaggccugcaaga

SEQ ID NO: 806311 - RNA, 19 nt, Artificial Sequence
  Description of Artificial Sequence: Synthetic oligonucleotide
  Antisense strand to SEQ ID NO: 806310
ucuugcaggccugaguccc

SEQ ID NO: 806312 - RNA, 19 nt, Artificial Sequence
  Description of Artificial Sequence: Synthetic oligonucleotide
  Sense strand starting at position 131 of SEQ ID NO: 587628
ggagacuauuagccucauu

SEQ ID NO: 806313 - RNA, 19 nt, Artificial Sequence
  Description of Artificial Sequence: Synthetic oligonucleotide
  Antisense strand to SEQ ID NO: 806312
aaugaggcuaauagucucc

SEQ ID NO: 806314 - RNA, 19 nt, Artificial Sequence
  Description of Artificial Sequence: Synthetic oligonucleotide
  Sense strand starting at position 424 of SEQ ID NO: 587628
guggauguguauuugugaa

SEQ ID NO: 806315 - RNA, 19 nt, Artificial Sequence
  Description of Artificial Sequence: Synthetic oligonucleotide
  Antisense strand to SEQ ID NO: 806314
uucacaaauacacauccac

SEQ ID NO: 806316 - RNA, 19 nt, Artificial Sequence
  Description of Artificial Sequence: Synthetic oligonucleotide
  Sense strand starting at position 463 of SEQ ID NO: 587628
gaggguauuuccuaguauu

SEQ ID NO: 806317 - RNA, 19 nt, Artificial Sequence
  Description of Artificial Sequence: Synthetic oligonucleotide
  Antisense strand to SEQ ID NO: 806316
aauacuaggaaauacccuc

SEQ ID NO: 806318 - RNA, 19 nt, Artificial Sequence
  Description of Artificial Sequence: Synthetic oligonucleotide
  Sense strand starting at position 529 of SEQ ID NO: 587628
gcugcuagauaguccauaa

SEQ ID NO: 806319 - RNA, 19 nt, Artificial Sequence
  Description of Artificial Sequence: Synthetic oligonucleotide
  Antisense strand to SEQ ID NO: 806318
uuauggacuaucuagcagc

SEQ ID NO: 806320 - RNA, 19 nt, Artificial Sequence
  Description of Artificial Sequence: Synthetic oligonucleotide
  Sense strand starting at position 533 of SEQ ID NO: 587628
cuagauaguccauaaagca

SEQ ID NO: 806321 - RNA, 19 nt, Artificial Sequence
  Description of Artificial Sequence: Synthetic oligonucleotide
  Antisense strand to SEQ ID NO: 806320
ugcuuuauggacuaucuag

SEQ ID NO: 806322 - RNA, 19 nt, Artificial Sequence
  Description of Artificial Sequence: Synthetic oligonucleotide
  Sense strand starting at position 555 of SEQ ID NO: 587628
uccguaaccuaauugcauu

SEQ ID NO: 806323 - RNA, 19 nt, Artificial Sequence
  Description of Artificial Sequence: Synthetic oligonucleotide
  Antisense strand to SEQ ID NO: 806322
aaugcaauuagguuacgga

SEQ ID NO: 806324 - RNA, 19 nt, Artificial Sequence
  Description of Artificial Sequence: Synthetic oligonucleotide
  Sense strand starting at position 610 of SEQ ID NO: 587628
agaucaccacugcguauua

SEQ ID NO: 806325 - RNA, 19 nt, Artificial Sequence
  Description of Artificial Sequence: Synthetic oligonucleotide
  Antisense strand to SEQ ID NO: 806324
uaauacgcaguggugaucu

SEQ ID NO: 806326 - RNA, 19 nt, Artificial Sequence
  Description of Artificial Sequence: Synthetic oligonucleotide
  Sense strand starting at position 744 of SEQ ID NO: 587628
ccuagucauuuacaugacu

SEQ ID NO: 806327 - RNA, 19 nt, Artificial Sequence
  Description of Artificial Sequence: Synthetic oligonucleotide
  Antisense strand to SEQ ID NO: 806326
agucauguaaaugacuagg

SEQ ID NO: 806328 - RNA, 19 nt, Artificial Sequence
  Description of Artificial Sequence: Synthetic oligonucleotide
  Sense strand starting at position 871 of SEQ ID NO: 587628
acgugacuuucuucuguag

SEQ ID NO: 806329 - RNA, 19 nt, Artificial Sequence
  Description of Artificial Sequence: Synthetic oligonucleotide
  Antisense strand to SEQ ID NO: 806328
cuacagaagaaagucacgu

SEQ ID NO: 806330 - RNA, 19 nt, Artificial Sequence
  Description of Artificial Sequence: Synthetic oligonucleotide
  Sense strand starting at position 875 of SEQ ID NO: 587628
gacuuucuucuguaggagu

SEQ ID NO: 806331 - RNA, 19 nt, Artificial Sequence
  Description of Artificial Sequence: Synthetic oligonucleotide
  Antisense strand to SEQ ID NO: 806330
acuccuacagaagaaaguc

SEQ ID NO: 806332 - RNA, 19 nt, Artificial Sequence
  Description of Artificial Sequence: Synthetic oligonucleotide
  Sense strand starting at position 877 of SEQ ID NO: 587628
cuuucuucuguaggaguuu

SEQ ID NO: 806333 - RNA, 19 nt, Artificial Sequence
  Description of Artificial Sequence: Synthetic oligonucleotide
  Antisense strand to SEQ ID NO: 806332
aaacuccuacagaagaaag

SEQ ID NO: 806334 - RNA, 19 nt, Artificial Sequence
  Description of Artificial Sequence: Synthetic oligonucleotide
  Sense strand starting at position 886 of SEQ ID NO: 587628
guaggaguuugugucauuc

SEQ ID NO: 806335 - RNA, 19 nt, Artificial Sequence
  Description of Artificial Sequence: Synthetic oligonucleotide
  Antisense strand to SEQ ID NO: 806334
gaaugacacaaacuccuac

SEQ ID NO: 806336 - RNA, 19 nt, Artificial Sequence
  Description of Artificial Sequence: Synthetic oligonucleotide
  Sense strand starting at position 959 of SEQ ID NO: 587628
acgggauucuggcuuuagu

SEQ ID NO: 806337 - RNA, 19 nt, Artificial Sequence
  Description of Artificial Sequence: Synthetic oligonucleotide
  Antisense strand to SEQ ID NO: 806336
acuaaagccagaaucccgu

SEQ ID NO: 806338 - RNA, 19 nt, Artificial Sequence
  Description of Artificial Sequence: Synthetic oligonucleotide
  Sense strand starting at position 1051 of SEQ ID NO: 587628
aucaacauucccuggguau

SEQ ID NO: 806339 - RNA, 19 nt, Artificial Sequence
  Description of Artificial Sequence: Synthetic oligonucleotide
  Antisense strand to SEQ ID NO: 806338
auacccagggaauguugau

SEQ ID NO: 806340 - RNA, 19 nt, Artificial Sequence
  Description of Artificial Sequence: Synthetic oligonucleotide
  Sense strand starting at position 1064 of SEQ ID NO: 587628
ggguaugauaagggcguua

SEQ ID NO: 806341 - RNA, 19 nt, Artificial Sequence
  Description of Artificial Sequence: Synthetic oligonucleotide
  Antisense strand to SEQ ID NO: 806340
uaacgcccuuaucauaccc

SEQ ID NO: 806342 - RNA, 19 nt, Artificial Sequence
  Description of Artificial Sequence: Synthetic oligonucleotide
  Sense strand starting at position 1188 of SEQ ID NO: 587628
acagaccuccugggucauu

SEQ ID NO: 806343 - RNA, 19 nt, Artificial Sequence
  Description of Artificial Sequence: Synthetic oligonucleotide
  Antisense strand to SEQ ID NO: 806342
aaugacccaggaggucugu

SEQ ID NO: 806344 - RNA, 19 nt, Artificial Sequence
  Description of Artificial Sequence: Synthetic oligonucleotide
  Sense strand starting at position 1189 of SEQ ID NO: 587628
cagaccuccugggucauua

SEQ ID NO: 806345 - RNA, 19 nt, Artificial Sequence
  Description of Artificial Sequence: Synthetic oligonucleotide
  Antisense strand to SEQ ID NO: 806344
uaaugacccaggaggucug

SEQ ID NO: 806346 - RNA, 19 nt, Artificial Sequence
  Description of Artificial Sequence: Synthetic oligonucleotide
  Sense strand starting at position 1326 of SEQ ID NO: 587628
uuggguuuggauugauacu

SEQ ID NO: 806347 - RNA, 19 nt, Artificial Sequence
  Description of Artificial Sequence: Synthetic oligonucleotide
  Antisense strand to SEQ ID NO: 806346
aguaucaauccaaacccaa

SEQ ID NO: 806348 - RNA, 19 nt, Artificial Sequence
  Description of Artificial Sequence: Synthetic oligonucleotide
  Sense strand starting at position 1327 of SEQ ID NO: 587628
uggguuuggauugauacuu

SEQ ID NO: 806349 - RNA, 19 nt, Artificial Sequence
  Description of Artificial Sequence: Synthetic oligonucleotide
  Antisense strand to SEQ ID NO: 806348
aaguaucaauccaaaccca

SEQ ID NO: 806350 - RNA, 19 nt, Artificial Sequence
  Description of Artificial Sequence: Synthetic oligonucleotide
  Sense strand starting at position 1361 of SEQ ID NO: 587628
cuuuaagguccugaugcau

SEQ ID NO: 806351 - RNA, 19 nt, Artificial Sequence
  Description of Artificial Sequence: Synthetic oligonucleotide
  Antisense strand to SEQ ID NO: 806350
augcaucaggaccuuaaag

SEQ ID NO: 806352 - RNA, 19 nt, Artificial Sequence
  Description of Artificial Sequence: Synthetic oligonucleotide
  Sense strand starting at position 2028 of SEQ ID NO: 587628
cgccgaaaucucgcgagaa

SEQ ID NO: 806353 - RNA, 19 nt, Artificial Sequence
  Description of Artificial Sequence: Synthetic oligonucleotide
  Antisense strand to SEQ ID NO: 806352
uucucgcgagauuucggcg

SEQ ID NO: 806354 - RNA, 19 nt, Artificial Sequence
  Description of Artificial Sequence: Synthetic oligonucleotide
  Sense strand starting at position 2030 of SEQ ID NO: 587628
ccgaaaucucgcgagaagu

SEQ ID NO: 806355 - RNA, 19 nt, Artificial Sequence
  Description of Artificial Sequence: Synthetic oligonucleotide
  Antisense strand to SEQ ID NO: 806354
acuucucgcgagauuucgg

SEQ ID NO: 806356 - RNA, 19 nt, Artificial Sequence
  Description of Artificial Sequence: Synthetic oligonucleotide
  Sense strand starting at position 2031 of SEQ ID NO: 587628
cgaaaucucgcgagaaguc

SEQ ID NO: 806357 - RNA, 19 nt, Artificial Sequence
  Description of Artificial Sequence: Synthetic oligonucleotide
  Antisense strand to SEQ ID NO: 806356
gacuucucgcgagauuucg

SEQ ID NO: 806358 - RNA, 19 nt, Artificial Sequence
  Description of Artificial Sequence: Synthetic oligonucleotide
  Sense strand starting at position 2150 of SEQ ID NO: 587628
ccgggaagaucauggaaga

SEQ ID NO: 806359 - RNA, 19 nt, Artificial Sequence
  Description of Artificial Sequence: Synthetic oligonucleotide
  Antisense strand to SEQ ID NO: 806358
ucuuccaugaucuucccgg

SEQ ID NO: 806360 - RNA, 19 nt, Artificial Sequence
  Description of Artificial Sequence: Synthetic oligonucleotide
  Sense strand starting at position 2441 of SEQ ID NO: 587628
acucaaggucgugaacgau

SEQ ID NO: 806361 - RNA, 19 nt, Artificial Sequence
  Description of Artificial Sequence: Synthetic oligonucleotide
  Antisense strand to SEQ ID NO: 806360
aucguucacgaccuugagu

SEQ ID NO: 806362 - RNA, 19 nt, Artificial Sequence
  Description of Artificial Sequence: Synthetic oligonucleotide
  Sense strand starting at position 2449 of SEQ ID NO: 587628
ucgugaacgauuugcaauu

SEQ ID NO: 806363 - RNA, 19 nt, Artificial Sequence
  Description of Artificial Sequence: Synthetic oligonucleotide
  Antisense strand to SEQ ID NO: 806362
aauugcaaaucguucacga

SEQ ID NO: 806364 - RNA, 19 nt, Artificial Sequence
  Description of Artificial Sequence: Synthetic oligonucleotide
  Sense strand starting at position 2495 of SEQ ID NO: 587628
gguauaagcauuuggcuca

SEQ ID NO: 806365 - RNA, 19 nt, Artificial Sequence
  Description of Artificial Sequence: Synthetic oligonucleotide
  Antisense strand to SEQ ID NO: 806364
ugagccaaaugcuuauacc

SEQ ID NO: 806366 - RNA, 19 nt, Artificial Sequence
  Description of Artificial Sequence: Synthetic oligonucleotide
  Sense strand starting at position 2498 of SEQ ID NO: 587628
auaagcauuuggcucaagu

SEQ ID NO: 806367 - RNA, 19 nt, Artificial Sequence
  Description of Artificial Sequence: Synthetic oligonucleotide
  Antisense strand to SEQ ID NO: 806366
acuugagccaaaugcuuau

SEQ ID NO: 806368 - RNA, 19 nt, Artificial Sequence
  Description of Artificial Sequence: Synthetic oligonucleotide
  Sense strand starting at position 2514 of SEQ ID NO: 587628
agucauaacgauugcaaau

SEQ ID NO: 806369 - RNA, 19 nt, Artificial Sequence
  Description of Artificial Sequence: Synthetic oligonucleotide
  Antisense strand to SEQ ID NO: 806368
auuugcaaucguuaugacu

SEQ ID NO: 806370 - RNA, 19 nt, Artificial Sequence
  Description of Artificial Sequence: Synthetic oligonucleotide
  Sense strand starting at position 2706 of SEQ ID NO: 587628
cuugaacgauacccugauu

SEQ ID NO: 806371 - RNA, 19 nt, Artificial Sequence
  Description of Artificial Sequence: Synthetic oligonucleotide
  Antisense strand to SEQ ID NO: 806370
aaucaggguaucguucaag

SEQ ID NO: 806372 - RNA, 19 nt, Artificial Sequence
  Description of Artificial Sequence: Synthetic oligonucleotide
  Sense strand starting at position 2766 of SEQ ID NO: 587628
aagcguauugugucaucuu

SEQ ID NO: 806373 - RNA, 19 nt, Artificial Sequence
  Description of Artificial Sequence: Synthetic oligonucleotide
  Antisense strand to SEQ ID NO: 806372
aagaugacacaauacgcuu

SEQ ID NO: 806374 - RNA, 19 nt, Artificial Sequence
  Description of Artificial Sequence: Synthetic oligonucleotide
  Sense strand starting at position 2803 of SEQ ID NO: 587628
uuuguuugcuauguuauca

SEQ ID NO: 806375 - RNA, 19 nt, Artificial Sequence
  Description of Artificial Sequence: Synthetic oligonucleotide
  Antisense strand to SEQ ID NO: 806374
ugauaacauagcaaacaaa

SEQ ID NO: 806376 - RNA, 19 nt, Artificial Sequence
  Description of Artificial Sequence: Synthetic oligonucleotide
  Sense strand starting at position 2807 of SEQ ID NO: 587628
uuugcuauguuaucaguau

SEQ ID NO: 806377 - RNA, 19 nt, Artificial Sequence
  Description of Artificial Sequence: Synthetic oligonucleotide
  Antisense strand to SEQ ID NO: 806376
auacugauaacauagcaaa

SEQ ID NO: 806378 - RNA, 19 nt, Artificial Sequence
  Description of Artificial Sequence: Synthetic oligonucleotide
  Sense strand starting at position 2811 of SEQ ID NO: 587628
cuauguuaucaguaucagu

SEQ ID NO: 806379 - RNA, 19 nt, Artificial Sequence
  Description of Artificial Sequence: Synthetic oligonucleotide
  Antisense strand to SEQ ID NO: 806378
acugauacugauaacauag

SEQ ID NO: 806380 - RNA, 19 nt, Artificial Sequence
  Description of Artificial Sequence: Synthetic oligonucleotide
  Sense strand starting at position 3580 of SEQ ID NO: 587628
cucugauagcgucuugcuu

SEQ ID NO: 806381 - RNA, 19 nt, Artificial Sequence
  Description of Artificial Sequence: Synthetic oligonucleotide
  Antisense strand to SEQ ID NO: 806380
aagcaagacgcuaucagag

SEQ ID NO: 806382 - RNA, 19 nt, Artificial Sequence
  Description of Artificial Sequence: Synthetic oligonucleotide
  Sense strand starting at position 3581 of SEQ ID NO: 587628
ucugauagcgucuugcuuu

SEQ ID NO: 806383 - RNA, 19 nt, Artificial Sequence
  Description of Artificial Sequence: Synthetic oligonucleotide
  Antisense strand to SEQ ID NO: 806382
aaagcaagacgcuaucaga

SEQ ID NO: 806384 - RNA, 19 nt, Artificial Sequence
  Description of Artificial Sequence: Synthetic oligonucleotide
  Sense strand starting at position 3589 of SEQ ID NO: 587628
cgucuugcuuuaucaccaa

SEQ ID NO: 806385 - RNA, 19 nt, Artificial Sequence
  Description of Artificial Sequence: Synthetic oligonucleotide
  Antisense strand to SEQ ID NO: 806384
uuggugauaaagcaagacg

SEQ ID NO: 806386 - RNA, 19 nt, Artificial Sequence
  Description of Artificial Sequence: Synthetic oligonucleotide
  Sense strand starting at position 3629 of SEQ ID NO: 587628
cucuauauucugugaaaug

SEQ ID NO: 806387 - RNA, 19 nt, Artificial Sequence
  Description of Artificial Sequence: Synthetic oligonucleotide
  Antisense strand to SEQ ID NO: 806386
cauuucacagaauauagag

SEQ ID NO: 806388 - RNA, 19 nt, Artificial Sequence
  Description of Artificial Sequence: Synthetic oligonucleotide
  Sense strand starting at position 3665 of SEQ ID NO: 587628
auuaucuucuggguaauaa

SEQ ID NO: 806389 - RNA, 19 nt, Artificial Sequence
  Description of Artificial Sequence: Synthetic oligonucleotide
  Antisense strand to SEQ ID NO: 806388
uuauuacccagaagauaau

SEQ ID NO: 806390 - RNA, 19 nt, Artificial Sequence
  Description of Artificial Sequence: Synthetic oligonucleotide
  Sense strand starting at position 3666 of SEQ ID NO: 587628
uuaucuucuggguaauaau

SEQ ID NO: 806391 - RNA, 19 nt, Artificial Sequence
  Description of Artificial Sequence: Synthetic oligonucleotide
  Antisense strand to SEQ ID NO: 806390
auuauuacccagaagauaa

SEQ ID NO: 806392 - RNA, 19 nt, Artificial Sequence
  Description of Artificial Sequence: Synthetic oligonucleotide
  Sense strand starting at position 278 of SEQ ID NO: 587629
acuuaauaucugugaaggu

SEQ ID NO: 806393 - RNA, 19 nt, Artificial Sequence
  Description of Artificial Sequence: Synthetic oligonucleotide
  Antisense strand to SEQ ID NO: 806392
accuucacagauauuaagu

SEQ ID NO: 806394 - RNA, 19 nt, Artificial Sequence
  Description of Artificial Sequence: Synthetic oligonucleotide
  Sense strand starting at position 287 of SEQ ID NO: 587629
cugugaaggucuuuaacuc

SEQ ID NO: 806395 - RNA, 19 nt, Artificial Sequence
  Description of Artificial Sequence: Synthetic oligonucleotide
  Antisense strand to SEQ ID NO: 806394
gaguuaaagaccuucacag

SEQ ID NO: 806396 - RNA, 19 nt, Artificial Sequence
  Description of Artificial Sequence: Synthetic oligonucleotide
  Sense strand starting at position 288 of SEQ ID NO: 587629
ugugaaggucuuuaacucu

SEQ ID NO: 806397 - RNA, 19 nt, Artificial Sequence
  Description of Artificial Sequence: Synthetic oligonucleotide
  Antisense strand to SEQ ID NO: 806396
agaguuaaagaccuucaca

SEQ ID NO: 806398 - RNA, 19 nt, Artificial Sequence
  Description of Artificial Sequence: Synthetic oligonucleotide
  Sense strand starting at position 291 of SEQ ID NO: 587629
gaaggucuuuaacucuuga

SEQ ID NO: 806399 - RNA, 19 nt, Artificial Sequence
  Description of Artificial Sequence: Synthetic oligonucleotide
  Antisense strand to SEQ ID NO: 806398
ucaagaguuaaagaccuuc

SEQ ID NO: 806400 - RNA, 19 nt, Artificial Sequence
  Description of Artificial Sequence: Synthetic oligonucleotide
  Sense strand starting at position 435 of SEQ ID NO: 587629
gcacacucuguguaucaau

SEQ ID NO: 806401 - RNA, 19 nt, Artificial Sequence
  Description of Artificial Sequence: Synthetic oligonucleotide
  Antisense strand to SEQ ID NO: 806400
auugauacacagagugugc

SEQ ID NO: 806402 - RNA, 19 nt, Artificial Sequence
  Description of Artificial Sequence: Synthetic oligonucleotide
  Sense strand starting at position 443 of SEQ ID NO: 587629
uguguaucaauugguuaca

SEQ ID NO: 806403 - RNA, 19 nt, Artificial Sequence
  Description of Artificial Sequence: Synthetic oligonucleotide
  Antisense strand to SEQ ID NO: 806402
uguaaccaauugauacaca

SEQ ID NO: 806404 - RNA, 19 nt, Artificial Sequence
  Description of Artificial Sequence: Synthetic oligonucleotide
  Sense strand starting at position 444 of SEQ ID NO: 587629
guguaucaauugguuacau

SEQ ID NO: 806405 - RNA, 19 nt, Artificial Sequence
  Description of Artificial Sequence: Synthetic oligonucleotide
  Antisense strand to SEQ ID NO: 806404
auguaaccaauugauacac

SEQ ID NO: 806406 - RNA, 19 nt, Artificial Sequence
  Description of Artificial Sequence: Synthetic oligonucleotide
  Sense strand starting at position 446 of SEQ ID NO: 587629
guaucaauugguuacauga

SEQ ID NO: 806407 - RNA, 19 nt, Artificial Sequence
  Description of Artificial Sequence: Synthetic oligonucleotide
  Antisense strand to SEQ ID NO: 806406
ucauguaaccaauugauac

SEQ ID NO: 806408 - RNA, 19 nt, Artificial Sequence
  Description of Artificial Sequence: Synthetic oligonucleotide
  Sense strand starting at position 492 of SEQ ID NO: 587629
cuugcuauuguguaaacac

SEQ ID NO: 806409 - RNA, 19 nt, Artificial Sequence
  Description of Artificial Sequence: Synthetic oligonucleotide
  Antisense strand to SEQ ID NO: 806408
guguuuacacaauagcaag

SEQ ID NO: 806410 - RNA, 19 nt, Artificial Sequence
  Description of Artificial Sequence: Synthetic oligonucleotide
  Sense strand starting at position 688 of SEQ ID NO: 587629
ugauaaaguuguguuacag

SEQ ID NO: 806411 - RNA, 19 nt, Artificial Sequence
  Description of Artificial Sequence: Synthetic oligonucleotide
  Antisense strand to SEQ ID NO: 806410
cuguaacacaacuuuauca

SEQ ID NO: 806412 - RNA, 19 nt, Artificial Sequence
  Description of Artificial Sequence: Synthetic oligonucleotide
  Sense strand starting at position 754 of SEQ ID NO: 587629
cagugcugacuugaugaca

SEQ ID NO: 806413 - RNA, 19 nt, Artificial Sequence
  Description of Artificial Sequence: Synthetic oligonucleotide
  Antisense strand to SEQ ID NO: 806412
ugucaucaagucagcacug

SEQ ID NO: 806414 - RNA, 19 nt, Artificial Sequence
  Description of Artificial Sequence: Synthetic oligonucleotide
  Sense strand starting at position 773 of SEQ ID NO: 587629
ggaagaguacuuuggcaga

SEQ ID NO: 806415 - RNA, 19 nt, Artificial Sequence
  Description of Artificial Sequence: Synthetic oligonucleotide
  Antisense strand to SEQ ID NO: 806414
ucugccaaaguacucuucc

SEQ ID NO: 806416 - RNA, 19 nt, Artificial Sequence
  Description of Artificial Sequence: Synthetic oligonucleotide
  Sense strand starting at position 1023 of SEQ ID NO: 587629
gccagaucuaguuacagug

SEQ ID NO: 806417 - RNA, 19 nt, Artificial Sequence
  Description of Artificial Sequence: Synthetic oligonucleotide
  Antisense strand to SEQ ID NO: 806416
cacuguaacuagaucuggc

SEQ ID NO: 806418 - RNA, 19 nt, Artificial Sequence
  Description of Artificial Sequence: Synthetic oligonucleotide
  Sense strand starting at position 1030 of SEQ ID NO: 587629
cuaguuacaguguauuaag

SEQ ID NO: 806419 - RNA, 19 nt, Artificial Sequence
  Description of Artificial Sequence: Synthetic oligonucleotide
  Antisense strand to SEQ ID NO: 806418
cuuaauacacuguaacuag

SEQ ID NO: 806420 - RNA, 19 nt, Artificial Sequence
  Description of Artificial Sequence: Synthetic oligonucleotide
  Sense strand starting at position 1038 of SEQ ID NO: 587629
aguguauuaaguuaugucu

SEQ ID NO: 806421 - RNA, 19 nt, Artificial Sequence
  Description of Artificial Sequence: Synthetic oligonucleotide
  Antisense strand to SEQ ID NO: 806420
agacauaacuuaauacacu

SEQ ID NO: 806422 - RNA, 19 nt, Artificial Sequence
  Description of Artificial Sequence: Synthetic oligonucleotide
  Sense strand starting at position 1216 of SEQ ID NO: 587629
acaugaugccagggaauua

SEQ ID NO: 806423 - RNA, 19 nt, Artificial Sequence
  Description of Artificial Sequence: Synthetic oligonucleotide
  Antisense strand to SEQ ID NO: 806422
uaauucccuggcaucaugu

SEQ ID NO: 806424 - RNA, 19 nt, Artificial Sequence
  Description of Artificial Sequence: Synthetic oligonucleotide
  Sense strand starting at position 1295 of SEQ ID NO: 587629
gguugcuauauguaggacu

SEQ ID NO: 806425 - RNA, 19 nt, Artificial Sequence
  Description of Artificial Sequence: Synthetic oligonucleotide
  Antisense strand to SEQ ID NO: 806424
aguccuacauauagcaacc

SEQ ID NO: 806426 - RNA, 19 nt, Artificial Sequence
  Description of Artificial Sequence: Synthetic oligonucleotide
  Sense strand starting at position 1311 of SEQ ID NO: 587629
acuucucuucccuggguga

SEQ ID NO: 806427 - RNA, 19 nt, Artificial Sequence
  Description of Artificial Sequence: Synthetic oligonucleotide
  Antisense strand to SEQ ID NO: 806426
ucacccagggaagagaagu

SEQ ID NO: 806428 - RNA, 19 nt, Artificial Sequence
  Description of Artificial Sequence: Synthetic oligonucleotide
  Sense strand starting at position 1312 of SEQ ID NO: 587629
cuucucuucccugggugaa

SEQ ID NO: 806429 - RNA, 19 nt, Artificial Sequence
  Description of Artificial Sequence: Synthetic oligonucleotide
  Antisense strand to SEQ ID NO: 806428
uucacccagggaagagaag

SEQ ID NO: 806430 - RNA, 19 nt, Artificial Sequence
  Description of Artificial Sequence: Synthetic oligonucleotide
  Sense strand starting at position 1313 of SEQ ID NO: 587629
uucucuucccugggugaaa

SEQ ID NO: 806431 - RNA, 19 nt, Artificial Sequence
  Description of Artificial Sequence: Synthetic oligonucleotide
  Antisense strand to SEQ ID NO: 806430
uuucacccagggaagagaa

SEQ ID NO: 806432 - RNA, 19 nt, Artificial Sequence
  Description of Artificial Sequence: Synthetic oligonucleotide
  Sense strand starting at position 1344 of SEQ ID NO: 587629
cuacaauugugucuuugag

SEQ ID NO: 806433 - RNA, 19 nt, Artificial Sequence
  Description of Artificial Sequence: Synthetic oligonucleotide
  Antisense strand to SEQ ID NO: 806432
cucaaagacacaauuguag

SEQ ID NO: 806434 - RNA, 19 nt, Artificial Sequence
  Description of Artificial Sequence: Synthetic oligonucleotide
  Sense strand starting at position 1637 of SEQ ID NO: 587629
aaagcaagguuugcaagaa

SEQ ID NO: 806435 - RNA, 19 nt, Artificial Sequence
  Description of Artificial Sequence: Synthetic oligonucleotide
  Antisense strand to SEQ ID NO: 806434
uucuugcaaaccuugcuuu

SEQ ID NO: 806436 - RNA, 19 nt, Artificial Sequence
  Description of Artificial Sequence: Synthetic oligonucleotide
  Sense strand starting at position 1664 of SEQ ID NO: 587629
ccgaaugaugcacgaaauc

SEQ ID NO: 806437 - RNA, 19 nt, Artificial Sequence
  Description of Artificial Sequence: Synthetic oligonucleotide
  Antisense strand to SEQ ID NO: 806436
gauuucgugcaucauucgg

SEQ ID NO: 806438 - RNA, 19 nt, Artificial Sequence
  Description of Artificial Sequence: Synthetic oligonucleotide
  Sense strand starting at position 1697 of SEQ ID NO: 587629
ugcugaaugugaguaagau

SEQ ID NO: 806439 - RNA, 19 nt, Artificial Sequence
  Description of Artificial Sequence: Synthetic oligonucleotide
  Antisense strand to SEQ ID NO: 806438
aucuuacucacauucagca

SEQ ID NO: 806440 - RNA, 19 nt, Artificial Sequence
  Description of Artificial Sequence: Synthetic oligonucleotide
  Sense strand starting at position 1698 of SEQ ID NO: 587629
gcugaaugugaguaagauc

SEQ ID NO: 806441 - RNA, 19 nt, Artificial Sequence
  Description of Artificial Sequence: Synthetic oligonucleotide
  Antisense strand to SEQ ID NO: 806440
gaucuuacucacauucagc

SEQ ID NO: 806442 - RNA, 19 nt, Artificial Sequence
  Description of Artificial Sequence: Synthetic oligonucleotide
  Sense strand starting at position 2664 of SEQ ID NO: 587629
gucggcauuccugaggaag

SEQ ID NO: 806443 - RNA, 19 nt, Artificial Sequence
  Description of Artificial Sequence: Synthetic oligonucleotide
  Antisense strand to SEQ ID NO: 806442
cuuccucaggaaugccgac

SEQ ID NO: 806444 - RNA, 19 nt, Artificial Sequence
  Description of Artificial Sequence: Synthetic oligonucleotide
  Sense strand starting at position 3003 of SEQ ID NO: 587629
agagaugguccuggguguu

SEQ ID NO: 806445 - RNA, 19 nt, Artificial Sequence
  Description of Artificial Sequence: Synthetic oligonucleotide
  Antisense strand to SEQ ID NO: 806444
aacacccaggaccaucucu

SEQ ID NO: 806446 - RNA, 19 nt, Artificial Sequence
  Description of Artificial Sequence: Synthetic oligonucleotide
  Sense strand starting at position 3349 of SEQ ID NO: 587629
agugaugguuuggcugaaa

SEQ ID NO: 806447 - RNA, 19 nt, Artificial Sequence
  Description of Artificial Sequence: Synthetic oligonucleotide
  Antisense strand to SEQ ID NO: 806446
uuucagccaaaccaucacu

SEQ ID NO: 806448 - RNA, 19 nt, Artificial Sequence
  Description of Artificial Sequence: Synthetic oligonucleotide
  Sense strand starting at position 3354 of SEQ ID NO: 587629
ugguuuggcugaaagagga

SEQ ID NO: 806449 - RNA, 19 nt, Artificial Sequence
  Description of Artificial Sequence: Synthetic oligonucleotide
  Antisense strand to SEQ ID NO: 806448
uccucuuucagccaaacca

SEQ ID NO: 806450 - RNA, 19 nt, Artificial Sequence
  Description of Artificial Sequence: Synthetic oligonucleotide
  Sense strand starting at position 3407 of SEQ ID NO: 587629
ggcuaaugccaguaaaugu

SEQ ID NO: 806451 - RNA, 19 nt, Artificial Sequence
  Description of Artificial Sequence: Synthetic oligonucleotide
  Antisense strand to SEQ ID NO: 806450
acauuuacuggcauuagcc

SEQ ID NO: 806452 - RNA, 19 nt, Artificial Sequence
  Description of Artificial Sequence: Synthetic oligonucleotide
  Sense strand starting at position 3489 of SEQ ID NO: 587629
aagaauaaagaguguucca

SEQ ID NO: 806453 - RNA, 19 nt, Artificial Sequence
  Description of Artificial Sequence: Synthetic oligonucleotide
  Antisense strand to SEQ ID NO: 806452
uggaacacucuuuauucuu

SEQ ID NO: 806454 - RNA, 19 nt, Artificial Sequence
  Description of Artificial Sequence: Synthetic oligonucleotide
  Sense strand starting at position 3492 of SEQ ID NO: 587629
aauaaagaguguuccaggu

SEQ ID NO: 806455 - RNA, 19 nt, Artificial Sequence
  Description of Artificial Sequence: Synthetic oligonucleotide
  Antisense strand to SEQ ID NO: 806454
accuggaacacucuuuauu

SEQ ID NO: 806456 - RNA, 19 nt, Artificial Sequence
  Description of Artificial Sequence: Synthetic oligonucleotide
  Sense strand starting at position 3496 of SEQ ID NO: 587629
aagaguguuccagguauga

SEQ ID NO: 806457 - RNA, 19 nt, Artificial Sequence
  Description of Artificial Sequence: Synthetic oligonucleotide
  Antisense strand to SEQ ID NO: 806456
ucauaccuggaacacucuu

SEQ ID NO: 806458 - RNA, 19 nt, Artificial Sequence
  Description of Artificial Sequence: Synthetic oligonucleotide
  Sense strand starting at position 3498 of SEQ ID NO: 587629
gaguguuccagguaugaca

SEQ ID NO: 806459 - RNA, 19 nt, Artificial Sequence
  Description of Artificial Sequence: Synthetic oligonucleotide
  Antisense strand to SEQ ID NO: 806458
ugucauaccuggaacacuc

SEQ ID NO: 806460 - RNA, 19 nt, Artificial Sequence
  Description of Artificial Sequence: Synthetic oligonucleotide
  Sense strand starting at position 3557 of SEQ ID NO: 587629
uuucaugggugaguuggaa

SEQ ID NO: 806461 - RNA, 19 nt, Artificial Sequence
  Description of Artificial Sequence: Synthetic oligonucleotide
  Antisense strand to SEQ ID NO: 806460
uuccaacucacccaugaaa

SEQ ID NO: 806462 - RNA, 19 nt, Artificial Sequence
  Description of Artificial Sequence: Synthetic oligonucleotide
  Sense strand starting at position 3626 of SEQ ID NO: 587629
uucugagaaugguuugcca

SEQ ID NO: 806463 - RNA, 19 nt, Artificial Sequence
  Description of Artificial Sequence: Synthetic oligonucleotide
  Antisense strand to SEQ ID NO: 806462
uggcaaaccauucucagaa

SEQ ID NO: 806464 - RNA, 19 nt, Artificial Sequence
  Description of Artificial Sequence: Synthetic oligonucleotide
  Sense strand starting at position 3628 of SEQ ID NO: 587629
cugagaaugguuugccaaa

SEQ ID NO: 806465 - RNA, 19 nt, Artificial Sequence
  Description of Artificial Sequence: Synthetic oligonucleotide
  Antisense strand to SEQ ID NO: 806464
uuuggcaaaccauucucag

SEQ ID NO: 806466 - RNA, 19 nt, Artificial Sequence
  Description of Artificial Sequence: Synthetic oligonucleotide
  Sense strand starting at position 3648 of SEQ ID NO: 587629
auuguauuagacugcaaua

SEQ ID NO: 806467 - RNA, 19 nt, Artificial Sequence
  Description of Artificial Sequence: Synthetic oligonucleotide
  Antisense strand to SEQ ID NO: 806466
uauugcagucuaauacaau

SEQ ID NO: 806468 - RNA, 19 nt, Artificial Sequence
  Description of Artificial Sequence: Synthetic oligonucleotide
  Sense strand starting at position 3650 of SEQ ID NO: 587629
uguauuagacugcaauaac

SEQ ID NO: 806469 - RNA, 19 nt, Artificial Sequence
  Description of Artificial Sequence: Synthetic oligonucleotide
  Antisense strand to SEQ ID NO: 806468
guuauugcagucuaauaca

SEQ ID NO: 806470 - RNA, 19 nt, Artificial Sequence
  Description of Artificial Sequence: Synthetic oligonucleotide
  Sense strand starting at position 3731 of SEQ ID NO: 587629
guaagaaaugcccacccaa

SEQ ID NO: 806471 - RNA, 19 nt, Artificial Sequence
  Description of Artificial Sequence: Synthetic oligonucleotide
  Antisense strand to SEQ ID NO: 806470
uugggugggcauuucuuac

SEQ ID NO: 806472 - RNA, 19 nt, Artificial Sequence
  Description of Artificial Sequence: Synthetic oligonucleotide
  Sense strand starting at position 189 of SEQ ID NO: 587630
ugaugucuagagugggcaa

SEQ ID NO: 806473 - RNA, 19 nt, Artificial Sequence
  Description of Artificial Sequence: Synthetic oligonucleotide
  Antisense strand to SEQ ID NO: 806472
uugcccacucuagacauca

SEQ ID NO: 806474 - RNA, 19 nt, Artificial Sequence
  Description of Artificial Sequence: Synthetic oligonucleotide
  Sense strand starting at position 190 of SEQ ID NO: 587630
gaugucuagagugggcaau

SEQ ID NO: 806475 - RNA, 19 nt, Artificial Sequence
  Description of Artificial Sequence: Synthetic oligonucleotide
  Antisense strand to SEQ ID NO: 806474
auugcccacucuagacauc

SEQ ID NO: 806476 - RNA, 19 nt, Artificial Sequence
  Description of Artificial Sequence: Synthetic oligonucleotide
  Sense strand starting at position 201 of SEQ ID NO: 587630
ugggcaaucuaguucuauu

SEQ ID NO: 806477 - RNA, 19 nt, Artificial Sequence
  Description of Artificial Sequence: Synthetic oligonucleotide
  Antisense strand to SEQ ID NO: 806476
aauagaacuagauugccca

SEQ ID NO: 806478 - RNA, 19 nt, Artificial Sequence
  Description of Artificial Sequence: Synthetic oligonucleotide
  Sense strand starting at position 459 of SEQ ID NO: 587630
aauguaccucaguguauga

SEQ ID NO: 806479 - RNA, 19 nt, Artificial Sequence
  Description of Artificial Sequence: Synthetic oligonucleotide
  Antisense strand to SEQ ID NO: 806478
ucauacacugagguacauu

SEQ ID NO: 806480 - RNA, 19 nt, Artificial Sequence
  Description of Artificial Sequence: Synthetic oligonucleotide
  Sense strand starting at position 485 of SEQ ID NO: 587630
gagugaaggucauuacaaa

SEQ ID NO: 806481 - RNA, 19 nt, Artificial Sequence
  Description of Artificial Sequence: Synthetic oligonucleotide
  Antisense strand to SEQ ID NO: 806480
uuuguaaugaccuucacuc

SEQ ID NO: 806482 - RNA, 19 nt, Artificial Sequence
  Description of Artificial Sequence: Synthetic oligonucleotide
  Sense strand starting at position 528 of SEQ ID NO: 587630
guaggaaagcauuacuuau

SEQ ID NO: 806483 - RNA, 19 nt, Artificial Sequence
  Description of Artificial Sequence: Synthetic oligonucleotide
  Antisense strand to SEQ ID NO: 806482
auaaguaaugcuuuccuac

SEQ ID NO: 806484 - RNA, 19 nt, Artificial Sequence
  Description of Artificial Sequence: Synthetic oligonucleotide
  Sense strand starting at position 610 of SEQ ID NO: 587630
gugguagguaugggauaua

SEQ ID NO: 806485 - RNA, 19 nt, Artificial Sequence
  Description of Artificial Sequence: Synthetic oligonucleotide
  Antisense strand to SEQ ID NO: 806484
uauaucccauaccuaccac

SEQ ID NO: 806486 - RNA, 19 nt, Artificial Sequence
  Description of Artificial Sequence: Synthetic oligonucleotide
  Sense strand starting at position 651 of SEQ ID NO: 587630
acauuucugcaguggaguu

SEQ ID NO: 806487 - RNA, 19 nt, Artificial Sequence
  Description of Artificial Sequence: Synthetic oligonucleotide
  Antisense strand to SEQ ID NO: 806486
aacuccacugcagaaaugu

SEQ ID NO: 806488 - RNA, 19 nt, Artificial Sequence
  Description of Artificial Sequence: Synthetic oligonucleotide
  Sense strand starting at position 1177 of SEQ ID NO: 587630
uugguagucauuugccaga

SEQ ID NO: 806489 - RNA, 19 nt, Artificial Sequence
  Description of Artificial Sequence: Synthetic oligonucleotide
  Antisense strand to SEQ ID NO: 806488
ucuggcaaaugacuaccaa

SEQ ID NO: 806490 - RNA, 19 nt, Artificial Sequence
  Description of Artificial Sequence: Synthetic oligonucleotide
  Sense strand starting at position 1209 of SEQ ID NO: 587630
ggaauaaaugucggcuuua

SEQ ID NO: 806491 - RNA, 19 nt, Artificial Sequence
  Description of Artificial Sequence: Synthetic oligonucleotide
  Antisense strand to SEQ ID NO: 806490
uaaagccgacauuuauucc

SEQ ID NO: 806492 - RNA, 19 nt, Artificial Sequence
  Description of Artificial Sequence: Synthetic oligonucleotide
  Sense strand starting at position 1210 of SEQ ID NO: 587630
gaauaaaugucggcuuuag

SEQ ID NO: 806493 - RNA, 19 nt, Artificial Sequence
  Description of Artificial Sequence: Synthetic oligonucleotide
  Antisense strand to SEQ ID NO: 806492
cuaaagccgacauuuauuc

SEQ ID NO: 806494 - RNA, 19 nt, Artificial Sequence
  Description of Artificial Sequence: Synthetic oligonucleotide
  Sense strand starting at position 1358 of SEQ ID NO: 587630
agacauccugcucacugau

SEQ ID NO: 806495 - RNA, 19 nt, Artificial Sequence
  Description of Artificial Sequence: Synthetic oligonucleotide
  Antisense strand to SEQ ID NO: 806494
aucagugagcaggaugucu

SEQ ID NO: 806496 - RNA, 19 nt, Artificial Sequence
  Description of Artificial Sequence: Synthetic oligonucleotide
  Sense strand starting at position 1364 of SEQ ID NO: 587630
ccugcucacugaucaagau

SEQ ID NO: 806497 - RNA, 19 nt, Artificial Sequence
  Description of Artificial Sequence: Synthetic oligonucleotide
  Antisense strand to SEQ ID NO: 806496
aucuugaucagugagcagg

SEQ ID NO: 806498 - RNA, 19 nt, Artificial Sequence
  Description of Artificial Sequence: Synthetic oligonucleotide
  Sense strand starting at position 1447 of SEQ ID NO: 587630
acaucuagugaguacuuga

SEQ ID NO: 806499 - RNA, 19 nt, Artificial Sequence
  Description of Artificial Sequence: Synthetic oligonucleotide
  Antisense strand to SEQ ID NO: 806498
ucaaguacucacuagaugu

SEQ ID NO: 806500 - RNA, 19 nt, Artificial Sequence
  Description of Artificial Sequence: Synthetic oligonucleotide
  Sense strand starting at position 1544 of SEQ ID NO: 587630
cauagaugacuugguguaa

SEQ ID NO: 806501 - RNA, 19 nt, Artificial Sequence
  Description of Artificial Sequence: Synthetic oligonucleotide
  Antisense strand to SEQ ID NO: 806500
uuacaccaagucaucuaug

SEQ ID NO: 806502 - RNA, 19 nt, Artificial Sequence
  Description of Artificial Sequence: Synthetic oligonucleotide
  Sense strand starting at position 1545 of SEQ ID NO: 587630
auagaugacuugguguaaa

SEQ ID NO: 806503 - RNA, 19 nt, Artificial Sequence
  Description of Artificial Sequence: Synthetic oligonucleotide
  Antisense strand to SEQ ID NO: 806502
uuuacaccaagucaucuau

SEQ ID NO: 806504 - RNA, 19 nt, Artificial Sequence
  Description of Artificial Sequence: Synthetic oligonucleotide
  Sense strand starting at position 1548 of SEQ ID NO: 587630
gaugacuugguguaaagug

SEQ ID NO: 806505 - RNA, 19 nt, Artificial Sequence
  Description of Artificial Sequence: Synthetic oligonucleotide
  Antisense strand to SEQ ID NO: 806504
cacuuuacaccaagucauc

SEQ ID NO: 806506 - RNA, 19 nt, Artificial Sequence
  Description of Artificial Sequence: Synthetic oligonucleotide
  Sense strand starting at position 1587 of SEQ ID NO: 587630
gaugauggucccuaggcua

SEQ ID NO: 806507 - RNA, 19 nt, Artificial Sequence
  Description of Artificial Sequence: Synthetic oligonucleotide
  Antisense strand to SEQ ID NO: 806506
uagccuagggaccaucauc

SEQ ID NO: 806508 - RNA, 19 nt, Artificial Sequence
  Description of Artificial Sequence: Synthetic oligonucleotide
  Sense strand starting at position 1739 of SEQ ID NO: 587630
gcuuuauggccacaggaac

SEQ ID NO: 806509 - RNA, 19 nt, Artificial Sequence
  Description of Artificial Sequence: Synthetic oligonucleotide
  Antisense strand to SEQ ID NO: 806508
guuccuguggccauaaagc

SEQ ID NO: 806510 - RNA, 19 nt, Artificial Sequence
  Description of Artificial Sequence: Synthetic oligonucleotide
  Sense strand starting at position 1761 of SEQ ID NO: 587630
gcgguaagucgccuuguac

SEQ ID NO: 806511 - RNA, 19 nt, Artificial Sequence
  Description of Artificial Sequence: Synthetic oligonucleotide
  Antisense strand to SEQ ID NO: 806510
guacaaggcgacuuaccgc

SEQ ID NO: 806512 - RNA, 19 nt, Artificial Sequence
  Description of Artificial Sequence: Synthetic oligonucleotide
  Sense strand starting at position 1762 of SEQ ID NO: 587630
cgguaagucgccuuguaca

SEQ ID NO: 806513 - RNA, 19 nt, Artificial Sequence
  Description of Artificial Sequence: Synthetic oligonucleotide
  Antisense strand to SEQ ID NO: 806512
uguacaaggcgacuuaccg

SEQ ID NO: 806514 - RNA, 19 nt, Artificial Sequence
  Description of Artificial Sequence: Synthetic oligonucleotide
  Sense strand starting at position 2360 of SEQ ID NO: 587630
gucucauccgcugcacauu

SEQ ID NO: 806515 - RNA, 19 nt, Artificial Sequence
  Description of Artificial Sequence: Synthetic oligonucleotide
  Antisense strand to SEQ ID NO: 806514
aaugugcagcggaugagac

SEQ ID NO: 806516 - RNA, 19 nt, Artificial Sequence
  Description of Artificial Sequence: Synthetic oligonucleotide
  Sense strand starting at position 2429 of SEQ ID NO: 587630
cuuugcaggcuguaaugau

SEQ ID NO: 806517 - RNA, 19 nt, Artificial Sequence
  Description of Artificial Sequence: Synthetic oligonucleotide
  Antisense strand to SEQ ID NO: 806516
aucauuacagccugcaaag

SEQ ID NO: 806518 - RNA, 19 nt, Artificial Sequence
  Description of Artificial Sequence: Synthetic oligonucleotide
  Sense strand starting at position 2441 of SEQ ID NO: 587630
uaaugauuguuagugucau

SEQ ID NO: 806519 - RNA, 19 nt, Artificial Sequence
  Description of Artificial Sequence: Synthetic oligonucleotide
  Antisense strand to SEQ ID NO: 806518
augacacuaacaaucauua

SEQ ID NO: 806520 - RNA, 19 nt, Artificial Sequence
  Description of Artificial Sequence: Synthetic oligonucleotide
  Sense strand starting at position 2486 of SEQ ID NO: 587630
gcagguauuggcuaagagu

SEQ ID NO: 806521 - RNA, 19 nt, Artificial Sequence
  Description of Artificial Sequence: Synthetic oligonucleotide
  Antisense strand to SEQ ID NO: 806520
acucuuagccaauaccugc

SEQ ID NO: 806522 - RNA, 19 nt, Artificial Sequence
  Description of Artificial Sequence: Synthetic oligonucleotide
  Sense strand starting at position 2686 of SEQ ID NO: 587630
gcaaauuagcaagacaucu

SEQ ID NO: 806523 - RNA, 19 nt, Artificial Sequence
  Description of Artificial Sequence: Synthetic oligonucleotide
  Antisense strand to SEQ ID NO: 806522
agaugucuugcuaauuugc

SEQ ID NO: 806524 - RNA, 19 nt, Artificial Sequence
  Description of Artificial Sequence: Synthetic oligonucleotide
  Sense strand starting at position 2766 of SEQ ID NO: 587630
gcucacuugcaagagagau

SEQ ID NO: 806525 - RNA, 19 nt, Artificial Sequence
  Description of Artificial Sequence: Synthetic oligonucleotide
  Antisense strand to SEQ ID NO: 806524
aucucucuugcaagugagc

SEQ ID NO: 806526 - RNA, 19 nt, Artificial Sequence
  Description of Artificial Sequence: Synthetic oligonucleotide
  Sense strand starting at position 2893 of SEQ ID NO: 587630
augggagaauuguagaaga

SEQ ID NO: 806527 - RNA, 19 nt, Artificial Sequence
  Description of Artificial Sequence: Synthetic oligonucleotide
  Antisense strand to SEQ ID NO: 806526
ucuucuacaauucucccau

SEQ ID NO: 806528 - RNA, 19 nt, Artificial Sequence
  Description of Artificial Sequence: Synthetic oligonucleotide
  Sense strand starting at position 2994 of SEQ ID NO: 587630
caggguauuggccaucaga

SEQ ID NO: 806529 - RNA, 19 nt, Artificial Sequence
  Description of Artificial Sequence: Synthetic oligonucleotide
  Antisense strand to SEQ ID NO: 806528
ucugauggccaauacccug

SEQ ID NO: 806530 - RNA, 19 nt, Artificial Sequence
  Description of Artificial Sequence: Synthetic oligonucleotide
  Sense strand starting at position 2997 of SEQ ID NO: 587630
gguauuggccaucagacaa

SEQ ID NO: 806531 - RNA, 19 nt, Artificial Sequence
  Description of Artificial Sequence: Synthetic oligonucleotide
  Antisense strand to SEQ ID NO: 806530
uugucugauggccaauacc

SEQ ID NO: 806532 - RNA, 19 nt, Artificial Sequence
  Description of Artificial Sequence: Synthetic oligonucleotide
  Sense strand starting at position 3069 of SEQ ID NO: 587630
gugaguuaugccuauaaua

SEQ ID NO: 806533 - RNA, 19 nt, Artificial Sequence
  Description of Artificial Sequence: Synthetic oligonucleotide
  Antisense strand to SEQ ID NO: 806532
uauuauaggcauaacucac

SEQ ID NO: 806534 - RNA, 19 nt, Artificial Sequence
  Description of Artificial Sequence: Synthetic oligonucleotide
  Sense strand starting at position 3117 of SEQ ID NO: 587630
gccacuugaggccaagaau

SEQ ID NO: 806535 - RNA, 19 nt, Artificial Sequence
  Description of Artificial Sequence: Synthetic oligonucleotide
  Antisense strand to SEQ ID NO: 806534
auucuuggccucaaguggc

SEQ ID NO: 806536 - RNA, 19 nt, Artificial Sequence
  Description of Artificial Sequence: Synthetic oligonucleotide
  Sense strand starting at position 3161 of SEQ ID NO: 587630
auaauaaaguuagcugagu

SEQ ID NO: 806537 - RNA, 19 nt, Artificial Sequence
  Description of Artificial Sequence: Synthetic oligonucleotide
  Antisense strand to SEQ ID NO: 806536
acucagcuaacuuuauuau

SEQ ID NO: 806538 - RNA, 19 nt, Artificial Sequence
  Description of Artificial Sequence: Synthetic oligonucleotide
  Sense strand starting at position 3303 of SEQ ID NO: 587630
gcaagauccugacucuaag

SEQ ID NO: 806539 - RNA, 19 nt, Artificial Sequence
  Description of Artificial Sequence: Synthetic oligonucleotide
  Antisense strand to SEQ ID NO: 806538
cuuagagucaggaucuugc

SEQ ID NO: 806540 - RNA, 19 nt, Artificial Sequence
  Description of Artificial Sequence: Synthetic oligonucleotide
  Sense strand starting at position 3471 of SEQ ID NO: 587630
gguuauguguaaccacauu

SEQ ID NO: 806541 - RNA, 19 nt, Artificial Sequence
  Description of Artificial Sequence: Synthetic oligonucleotide
  Antisense strand to SEQ ID NO: 806540
aaugugguuacacauaacc

SEQ ID NO: 806542 - RNA, 19 nt, Artificial Sequence
  Description of Artificial Sequence: Synthetic oligonucleotide
  Sense strand starting at position 3513 of SEQ ID NO: 587630
gaaguauauugacuuugag

SEQ ID NO: 806543 - RNA, 19 nt, Artificial Sequence
  Description of Artificial Sequence: Synthetic oligonucleotide
  Antisense strand to SEQ ID NO: 806542
cucaaagucaauauacuuc

SEQ ID NO: 806544 - RNA, 19 nt, Artificial Sequence
  Description of Artificial Sequence: Synthetic oligonucleotide
  Sense strand starting at position 3516 of SEQ ID NO: 587630
guauauugacuuugagaag

SEQ ID NO: 806545 - RNA, 19 nt, Artificial Sequence
  Description of Artificial Sequence: Synthetic oligonucleotide
  Antisense strand to SEQ ID NO: 806544
cuucucaaagucaauauac

SEQ ID NO: 806546 - RNA, 19 nt, Artificial Sequence
  Description of Artificial Sequence: Synthetic oligonucleotide
  Sense strand starting at position 3578 of SEQ ID NO: 587630
cugugaagcccuggaauag

SEQ ID NO: 806547 - RNA, 19 nt, Artificial Sequence
  Description of Artificial Sequence: Synthetic oligonucleotide
  Antisense strand to SEQ ID NO: 806546
cuauuccagggcuucacag

SEQ ID NO: 806548 - RNA, 19 nt, Artificial Sequence
  Description of Artificial Sequence: Synthetic oligonucleotide
  Sense strand starting at position 3660 of SEQ ID NO: 587630
cugcuugagccucaaucuu

SEQ ID NO: 806549 - RNA, 19 nt, Artificial Sequence
  Description of Artificial Sequence: Synthetic oligonucleotide
  Antisense strand to SEQ ID NO: 806548
aagauugaggcucaagcag

SEQ ID NO: 806550 - RNA, 19 nt, Artificial Sequence
  Description of Artificial Sequence: Synthetic oligonucleotide
  Sense strand starting at position 3969 of SEQ ID NO: 587630
uggccaacucuauggaaua

SEQ ID NO: 806551 - RNA, 19 nt, Artificial Sequence
  Description of Artificial Sequence: Synthetic oligonucleotide
  Antisense strand to SEQ ID NO: 806550
uauuccauagaguuggcca

SEQ ID NO: 806552 - RNA, 19 nt, Artificial Sequence
  Description of Artificial Sequence: Synthetic oligonucleotide
  Sense strand starting at position 100 of SEQ ID NO: 587631
ggcugaugacccugggaaa

SEQ ID NO: 806553 - RNA, 19 nt, Artificial Sequence
  Description of Artificial Sequence: Synthetic oligonucleotide
  Antisense strand to SEQ ID NO: 806552
uuucccagggucaucagcc

SEQ ID NO: 806554 - RNA, 19 nt, Artificial Sequence
  Description of Artificial Sequence: Synthetic oligonucleotide
  Sense strand starting at position 101 of SEQ ID NO: 587631
gcugaugacccugggaaau

SEQ ID NO: 806555 - RNA, 19 nt, Artificial Sequence
  Description of Artificial Sequence: Synthetic oligonucleotide
  Antisense strand to SEQ ID NO: 806554
auuucccagggucaucagc

SEQ ID NO: 806556 - RNA, 19 nt, Artificial Sequence
  Description of Artificial Sequence: Synthetic oligonucleotide
  Sense strand starting at position 150 of SEQ ID NO: 587631
ccgagaacaugguuccuca

SEQ ID NO: 806557 - RNA, 19 nt, Artificial Sequence
  Description of Artificial Sequence: Synthetic oligonucleotide
  Antisense strand to SEQ ID NO: 806556
ugaggaaccauguucucgg

SEQ ID NO: 806558 - RNA, 19 nt, Artificial Sequence
  Description of Artificial Sequence: Synthetic oligonucleotide
  Sense strand starting at position 153 of SEQ ID NO: 587631
agaacaugguuccucaaua

SEQ ID NO: 806559 - RNA, 19 nt, Artificial Sequence
  Description of Artificial Sequence: Synthetic oligonucleotide
  Antisense strand to SEQ ID NO: 806558
uauugaggaaccauguucu

SEQ ID NO: 806560 - RNA, 19 nt, Artificial Sequence
  Description of Artificial Sequence: Synthetic oligonucleotide
  Sense strand starting at position 190 of SEQ ID NO: 587631
gucacuggugcucaugcaa

SEQ ID NO: 806561 - RNA, 19 nt, Artificial Sequence
  Description of Artificial Sequence: Synthetic oligonucleotide
  Antisense strand to SEQ ID NO: 806560
uugcaugagcaccagugac

SEQ ID NO: 806562 - RNA, 19 nt, Artificial Sequence
  Description of Artificial Sequence: Synthetic oligonucleotide
  Sense strand starting at position 228 of SEQ ID NO: 587631
cccucaagcucagugaaga

SEQ ID NO: 806563 - RNA, 19 nt, Artificial Sequence
  Description of Artificial Sequence: Synthetic oligonucleotide
  Antisense strand to SEQ ID NO: 806562
ucuucacugagcuugaggg

SEQ ID NO: 806564 - RNA, 19 nt, Artificial Sequence
  Description of Artificial Sequence: Synthetic oligonucleotide
  Sense strand starting at position 229 of SEQ ID NO: 587631
ccucaagcucagugaagaa

SEQ ID NO: 806565 - RNA, 19 nt, Artificial Sequence
  Description of Artificial Sequence: Synthetic oligonucleotide
  Antisense strand to SEQ ID NO: 806564
uucuucacugagcuugagg

SEQ ID NO: 806566 - RNA, 19 nt, Artificial Sequence
  Description of Artificial Sequence: Synthetic oligonucleotide
  Sense strand starting at position 272 of SEQ ID NO: 587631
aguccauguucucugcaca

SEQ ID NO: 806567 - RNA, 19 nt, Artificial Sequence
  Description of Artificial Sequence: Synthetic oligonucleotide
  Antisense strand to SEQ ID NO: 806566
ugugcagagaacauggacu

SEQ ID NO: 806568 - RNA, 19 nt, Artificial Sequence
  Description of Artificial Sequence: Synthetic oligonucleotide
  Sense strand starting at position 393 of SEQ ID NO: 587631
auaacccagcucugugaaa

SEQ ID NO: 806569 - RNA, 19 nt, Artificial Sequence
  Description of Artificial Sequence: Synthetic oligonucleotide
  Antisense strand to SEQ ID NO: 806568
uuucacagagcuggguuau

SEQ ID NO: 806570 - RNA, 19 nt, Artificial Sequence
  Description of Artificial Sequence: Synthetic oligonucleotide
  Sense strand starting at position 458 of SEQ ID NO: 587631
cucuguggacccugggaaa

SEQ ID NO: 806571 - RNA, 19 nt, Artificial Sequence
  Description of Artificial Sequence: Synthetic oligonucleotide
  Antisense strand to SEQ ID NO: 806570
uuucccaggguccacagag

SEQ ID NO: 806572 - RNA, 19 nt, Artificial Sequence
  Description of Artificial Sequence: Synthetic oligonucleotide
  Sense strand starting at position 492 of SEQ ID NO: 587631
gcaccuguuuccugacaca

SEQ ID NO: 806573 - RNA, 19 nt, Artificial Sequence
  Description of Artificial Sequence: Synthetic oligonucleotide
  Antisense strand to SEQ ID NO: 806572
ugugucaggaaacaggugc

SEQ ID NO: 806574 - RNA, 19 nt, Artificial Sequence
  Description of Artificial Sequence: Synthetic oligonucleotide
  Sense strand starting at position 495 of SEQ ID NO: 587631
ccuguuuccugacacagga

SEQ ID NO: 806575 - RNA, 19 nt, Artificial Sequence
  Description of Artificial Sequence: Synthetic oligonucleotide
  Antisense strand to SEQ ID NO: 806574
uccugugucaggaaacagg

SEQ ID NO: 806576 - RNA, 19 nt, Artificial Sequence
  Description of Artificial Sequence: Synthetic oligonucleotide
  Sense strand starting at position 675 of SEQ ID NO: 587631
accuuagccucaggucauu

SEQ ID NO: 806577 - RNA, 19 nt, Artificial Sequence
  Description of Artificial Sequence: Synthetic oligonucleotide
  Antisense strand to SEQ ID NO: 806576
aaugaccugaggcuaaggu

SEQ ID NO: 806578 - RNA, 19 nt, Artificial Sequence
  Description of Artificial Sequence: Synthetic oligonucleotide
  Sense strand starting at position 688 of SEQ ID NO: 587631
gucauuccacucugacauc

SEQ ID NO: 806579 - RNA, 19 nt, Artificial Sequence
  Description of Artificial Sequence: Synthetic oligonucleotide
  Antisense strand to SEQ ID NO: 806578
gaugucagaguggaaugac

SEQ ID NO: 806580 - RNA, 19 nt, Artificial Sequence
  Description of Artificial Sequence: Synthetic oligonucleotide
  Sense strand starting at position 828 of SEQ ID NO: 587631
cguaccaccuaugaaacau

SEQ ID NO: 806581 - RNA, 19 nt, Artificial Sequence
  Description of Artificial Sequence: Synthetic oligonucleotide
  Antisense strand to SEQ ID NO: 806580
auguuucauaggugguacg

SEQ ID NO: 806582 - RNA, 19 nt, Artificial Sequence
  Description of Artificial Sequence: Synthetic oligonucleotide
  Sense strand starting at position 839 of SEQ ID NO: 587631
ugaaacaugccgcaaacaa

SEQ ID NO: 806583 - RNA, 19 nt, Artificial Sequence
  Description of Artificial Sequence: Synthetic oligonucleotide
  Antisense strand to SEQ ID NO: 806582
uuguuugcggcauguuuca

SEQ ID NO: 806584 - RNA, 19 nt, Artificial Sequence
  Description of Artificial Sequence: Synthetic oligonucleotide
  Sense strand starting at position 899 of SEQ ID NO: 587631
cgaggucuucgggacaucu

SEQ ID NO: 806585 - RNA, 19 nt, Artificial Sequence
  Description of Artificial Sequence: Synthetic oligonucleotide
  Antisense strand to SEQ ID NO: 806584
agaugucccgaagaccucg

SEQ ID NO: 806586 - RNA, 19 nt, Artificial Sequence
  Description of Artificial Sequence: Synthetic oligonucleotide
  Sense strand starting at position 907 of SEQ ID NO: 587631
ucgggacaucuccauccau

SEQ ID NO: 806587 - RNA, 19 nt, Artificial Sequence
  Description of Artificial Sequence: Synthetic oligonucleotide
  Antisense strand to SEQ ID NO: 806586
auggauggagaugucccga

SEQ ID NO: 806588 - RNA, 19 nt, Artificial Sequence
  Description of Artificial Sequence: Synthetic oligonucleotide
  Sense strand starting at position 1140 of SEQ ID NO: 587631
ugcacuugaguuuaugagu

SEQ ID NO: 806589 - RNA, 19 nt, Artificial Sequence
  Description of Artificial Sequence: Synthetic oligonucleotide
  Antisense strand to SEQ ID NO: 806588
acucauaaacucaagugca

SEQ ID NO: 806590 - RNA, 19 nt, Artificial Sequence
  Description of Artificial Sequence: Synthetic oligonucleotide
  Sense strand starting at position 1149 of SEQ ID NO: 587631
guuuaugagucugucccuu

SEQ ID NO: 806591 - RNA, 19 nt, Artificial Sequence
  Description of Artificial Sequence: Synthetic oligonucleotide
  Antisense strand to SEQ ID NO: 806590
aagggacagacucauaaac

SEQ ID NO: 806592 - RNA, 19 nt, Artificial Sequence
  Description of Artificial Sequence: Synthetic oligonucleotide
  Sense strand starting at position 1234 of SEQ ID NO: 587631
agugguuuccucugacccu

SEQ ID NO: 806593 - RNA, 19 nt, Artificial Sequence
  Description of Artificial Sequence: Synthetic oligonucleotide
  Antisense strand to SEQ ID NO: 806592
agggucagaggaaaccacu

SEQ ID NO: 806594 - RNA, 19 nt, Artificial Sequence
  Description of Artificial Sequence: Synthetic oligonucleotide
  Sense strand starting at position 1355 of SEQ ID NO: 587631
gcacgcuaugaccagucau

SEQ ID NO: 806595 - RNA, 19 nt, Artificial Sequence
  Description of Artificial Sequence: Synthetic oligonucleotide
  Antisense strand to SEQ ID NO: 806594
augacuggucauagcgugc

SEQ ID NO: 806596 - RNA, 19 nt, Artificial Sequence
  Description of Artificial Sequence: Synthetic oligonucleotide
  Sense strand starting at position 1365 of SEQ ID NO: 587631
accagucauccucgugacu

SEQ ID NO: 806597 - RNA, 19 nt, Artificial Sequence
  Description of Artificial Sequence: Synthetic oligonucleotide
  Antisense strand to SEQ ID NO: 806596
agucacgaggaugacuggu

SEQ ID NO: 806598 - RNA, 19 nt, Artificial Sequence
  Description of Artificial Sequence: Synthetic oligonucleotide
  Sense strand starting at position 1367 of SEQ ID NO: 587631
cagucauccucgugacuag

SEQ ID NO: 806599 - RNA, 19 nt, Artificial Sequence
  Description of Artificial Sequence: Synthetic oligonucleotide
  Antisense strand to SEQ ID NO: 806598
cuagucacgaggaugacug

SEQ ID NO: 806600 - RNA, 19 nt, Artificial Sequence
  Description of Artificial Sequence: Synthetic oligonucleotide
  Sense strand starting at position 1374 of SEQ ID NO: 587631
ccucgugacuagggacaaa

SEQ ID NO: 806601 - RNA, 19 nt, Artificial Sequence
  Description of Artificial Sequence: Synthetic oligonucleotide
  Antisense strand to SEQ ID NO: 806600
uuugucccuagucacgagg

SEQ ID NO: 806602 - RNA, 19 nt, Artificial Sequence
  Description of Artificial Sequence: Synthetic oligonucleotide
  Sense strand starting at position 1403 of SEQ ID NO: 587631
gcucgcgaucgucagagaa

SEQ ID NO: 806603 - RNA, 19 nt, Artificial Sequence
  Description of Artificial Sequence: Synthetic oligonucleotide
  Antisense strand to SEQ ID NO: 806602
uucucugacgaucgcgagc

SEQ ID NO: 806604 - RNA, 19 nt, Artificial Sequence
  Description of Artificial Sequence: Synthetic oligonucleotide
  Sense strand starting at position 1405 of SEQ ID NO: 587631
ucgcgaucgucagagaaua

SEQ ID NO: 806605 - RNA, 19 nt, Artificial Sequence
  Description of Artificial Sequence: Synthetic oligonucleotide
  Antisense strand to SEQ ID NO: 806604
uauucucugacgaucgcga

SEQ ID NO: 806606 - RNA, 19 nt, Artificial Sequence
  Description of Artificial Sequence: Synthetic oligonucleotide
  Sense strand starting at position 1406 of SEQ ID NO: 587631
cgcgaucgucagagaauac

SEQ ID NO: 806607 - RNA, 19 nt, Artificial Sequence
  Description of Artificial Sequence: Synthetic oligonucleotide
  Antisense strand to SEQ ID NO: 806606
guauucucugacgaucgcg

SEQ ID NO: 806608 - RNA, 19 nt, Artificial Sequence
  Description of Artificial Sequence: Synthetic oligonucleotide
  Sense strand starting at position 2083 of SEQ ID NO: 587631
ccgagcgaucucugcacuu

SEQ ID NO: 806609 - RNA, 19 nt, Artificial Sequence
  Description of Artificial Sequence: Synthetic oligonucleotide
  Antisense strand to SEQ ID NO: 806608
aagugcagagaucgcucgg

SEQ ID NO: 806610 - RNA, 19 nt, Artificial Sequence
  Description of Artificial Sequence: Synthetic oligonucleotide
  Sense strand starting at position 2085 of SEQ ID NO: 587631
gagcgaucucugcacuuau

SEQ ID NO: 806611 - RNA, 19 nt, Artificial Sequence
  Description of Artificial Sequence: Synthetic oligonucleotide
  Antisense strand to SEQ ID NO: 806610
auaagugcagagaucgcuc

SEQ ID NO: 806612 - RNA, 19 nt, Artificial Sequence
  Description of Artificial Sequence: Synthetic oligonucleotide
  Sense strand starting at position 2479 of SEQ ID NO: 587631
cccugcgcucguugggaaa

SEQ ID NO: 806613 - RNA, 19 nt, Artificial Sequence
  Description of Artificial Sequence: Synthetic oligonucleotide
  Antisense strand to SEQ ID NO: 806612
uuucccaacgagcgcaggg

SEQ ID NO: 806614 - RNA, 19 nt, Artificial Sequence
  Description of Artificial Sequence: Synthetic oligonucleotide
  Sense strand starting at position 2530 of SEQ ID NO: 587631
cgcgauaagagcgauguga

SEQ ID NO: 806615 - RNA, 19 nt, Artificial Sequence
  Description of Artificial Sequence: Synthetic oligonucleotide
  Antisense strand to SEQ ID NO: 806614
ucacaucgcucuuaucgcg

SEQ ID NO: 806616 - RNA, 19 nt, Artificial Sequence
  Description of Artificial Sequence: Synthetic oligonucleotide
  Sense strand starting at position 2958 of SEQ ID NO: 587631
gcggauaaucgagacugca

SEQ ID NO: 806617 - RNA, 19 nt, Artificial Sequence
  Description of Artificial Sequence: Synthetic oligonucleotide
  Antisense strand to SEQ ID NO: 806616
ugcagucucgauuauccgc

SEQ ID NO: 806618 - RNA, 19 nt, Artificial Sequence
  Description of Artificial Sequence: Synthetic oligonucleotide
  Sense strand starting at position 3016 of SEQ ID NO: 587631
cagucaucacuuggcuuga

SEQ ID NO: 806619 - RNA, 19 nt, Artificial Sequence
  Description of Artificial Sequence: Synthetic oligonucleotide
  Antisense strand to SEQ ID NO: 806618
ucaagccaagugaugacug

SEQ ID NO: 806620 - RNA, 19 nt, Artificial Sequence
  Description of Artificial Sequence: Synthetic oligonucleotide
  Sense strand starting at position 3018 of SEQ ID NO: 587631
gucaucacuuggcuugaca

SEQ ID NO: 806621 - RNA, 19 nt, Artificial Sequence
  Description of Artificial Sequence: Synthetic oligonucleotide
  Antisense strand to SEQ ID NO: 806620
ugucaagccaagugaugac

SEQ ID NO: 806622 - RNA, 19 nt, Artificial Sequence
  Description of Artificial Sequence: Synthetic oligonucleotide
  Sense strand starting at position 3265 of SEQ ID NO: 587631
gcuuaaauugccuggcgca

SEQ ID NO: 806623 - RNA, 19 nt, Artificial Sequence
  Description of Artificial Sequence: Synthetic oligonucleotide
  Antisense strand to SEQ ID NO: 806622
ugcgccaggcaauuuaagc

SEQ ID NO: 806624 - RNA, 19 nt, Artificial Sequence
  Description of Artificial Sequence: Synthetic oligonucleotide
  Sense strand starting at position 3507 of SEQ ID NO: 587631
aaaggaauguuguaggaga

SEQ ID NO: 806625 - RNA, 19 nt, Artificial Sequence
  Description of Artificial Sequence: Synthetic oligonucleotide
  Antisense strand to SEQ ID NO: 806624
ucuccuacaacauuccuuu

SEQ ID NO: 806626 - RNA, 19 nt, Artificial Sequence
  Description of Artificial Sequence: Synthetic oligonucleotide
  Sense strand starting at position 3723 of SEQ ID NO: 587631
ucuccuagcucagaacuga

SEQ ID NO: 806627 - RNA, 19 nt, Artificial Sequence
  Description of Artificial Sequence: Synthetic oligonucleotide
  Antisense strand to SEQ ID NO: 806626
ucaguucugagcuaggaga

SEQ ID NO: 806628 - RNA, 19 nt, Artificial Sequence
  Description of Artificial Sequence: Synthetic oligonucleotide
  Sense strand starting at position 7 of SEQ ID NO: 587632
ccucuauuuguaggcuaca

SEQ ID NO: 806629 - RNA, 19 nt, Artificial Sequence
  Description of Artificial Sequence: Synthetic oligonucleotide
  Antisense strand to SEQ ID NO: 806628
uguagccuacaaauagagg

SEQ ID NO: 806630 - RNA, 19 nt, Artificial Sequence
  Description of Artificial Sequence: Synthetic oligonucleotide
  Sense strand starting at position 8 of SEQ ID NO: 587632
cucuauuuguaggcuacau

SEQ ID NO: 806631 - RNA, 19 nt, Artificial Sequence
  Description of Artificial Sequence: Synthetic oligonucleotide
  Antisense strand to SEQ ID NO: 806630
auguagccuacaaauagag

SEQ ID NO: 806632 - RNA, 19 nt, Artificial Sequence
  Description of Artificial Sequence: Synthetic oligonucleotide
  Sense strand starting at position 199 of SEQ ID NO: 587632
uacagaugcccucguacua

SEQ ID NO: 806633 - RNA, 19 nt, Artificial Sequence
  Description of Artificial Sequence: Synthetic oligonucleotide
  Antisense strand to SEQ ID NO: 806632
uaguacgagggcaucugua

SEQ ID NO: 806634 - RNA, 19 nt, Artificial Sequence
  Description of Artificial Sequence: Synthetic oligonucleotide
  Sense strand starting at position 266 of SEQ ID NO: 587632
caaucagggcucugguuaa

SEQ ID NO: 806635 - RNA, 19 nt, Artificial Sequence
  Description of Artificial Sequence: Synthetic oligonucleotide
  Antisense strand to SEQ ID NO: 806634
uuaaccagagcccugauug

SEQ ID NO: 806636 - RNA, 19 nt, Artificial Sequence
  Description of Artificial Sequence: Synthetic oligonucleotide
  Sense strand starting at position 270 of SEQ ID NO: 587632
cagggcucugguuaaauua

SEQ ID NO: 806637 - RNA, 19 nt, Artificial Sequence
  Description of Artificial Sequence: Synthetic oligonucleotide
  Antisense strand to SEQ ID NO: 806636
uaauuuaaccagagcccug

SEQ ID NO: 806638 - RNA, 19 nt, Artificial Sequence
  Description of Artificial Sequence: Synthetic oligonucleotide
  Sense strand starting at position 334 of SEQ ID NO: 587632
ggucuucucucccuacaua

SEQ ID NO: 806639 - RNA, 19 nt, Artificial Sequence
  Description of Artificial Sequence: Synthetic oligonucleotide
  Antisense strand to SEQ ID NO: 806638
uauguagggagagaagacc

SEQ ID NO: 806640 - RNA, 19 nt, Artificial Sequence
  Description of Artificial Sequence: Synthetic oligonucleotide
  Sense strand starting at position 352 of SEQ ID NO: 587632
agcacacauuucuguguga

SEQ ID NO: 806641 - RNA, 19 nt, Artificial Sequence
  Description of Artificial Sequence: Synthetic oligonucleotide
  Antisense strand to SEQ ID NO: 806640
ucacacagaaaugugugcu

SEQ ID NO: 806642 - RNA, 19 nt, Artificial Sequence
  Description of Artificial Sequence: Synthetic oligonucleotide
  Sense strand starting at position 353 of SEQ ID NO: 587632
gcacacauuucugugugaa

SEQ ID NO: 806643 - RNA, 19 nt, Artificial Sequence
  Description of Artificial Sequence: Synthetic oligonucleotide
  Antisense strand to SEQ ID NO: 806642
uucacacagaaaugugugc

SEQ ID NO: 806644 - RNA, 19 nt, Artificial Sequence
  Description of Artificial Sequence: Synthetic oligonucleotide
  Sense strand starting at position 357 of SEQ ID NO: 587632
acauuucugugugaaugaa

SEQ ID NO: 806645 - RNA, 19 nt, Artificial Sequence
  Description of Artificial Sequence: Synthetic oligonucleotide
  Antisense strand to SEQ ID NO: 806644
uucauucacacagaaaugu

SEQ ID NO: 806646 - RNA, 19 nt, Artificial Sequence
  Description of Artificial Sequence: Synthetic oligonucleotide
  Sense strand starting at position 439 of SEQ ID NO: 587632
ggcccagaguuccugucuu

SEQ ID NO: 806647 - RNA, 19 nt, Artificial Sequence
  Description of Artificial Sequence: Synthetic oligonucleotide
  Antisense strand to SEQ ID NO: 806646
aagacaggaacucugggcc

SEQ ID NO: 806648 - RNA, 19 nt, Artificial Sequence
  Description of Artificial Sequence: Synthetic oligonucleotide
  Sense strand starting at position 443 of SEQ ID NO: 587632
cagaguuccugucuugaaa

SEQ ID NO: 806649 - RNA, 19 nt, Artificial Sequence
  Description of Artificial Sequence: Synthetic oligonucleotide
  Antisense strand to SEQ ID NO: 806648
uuucaagacaggaacucug

SEQ ID NO: 806650 - RNA, 19 nt, Artificial Sequence
  Description of Artificial Sequence: Synthetic oligonucleotide
  Sense strand starting at position 477 of SEQ ID NO: 587632
aaaguauauggcugccaca

SEQ ID NO: 806651 - RNA, 19 nt, Artificial Sequence
  Description of Artificial Sequence: Synthetic oligonucleotide
  Antisense strand to SEQ ID NO: 806650
uguggcagccauauacuuu

SEQ ID NO: 806652 - RNA, 19 nt, Artificial Sequence
  Description of Artificial Sequence: Synthetic oligonucleotide
  Sense strand starting at position 729 of SEQ ID NO: 587632
ggcugaugacccugggaaa

SEQ ID NO: 806653 - RNA, 19 nt, Artificial Sequence
  Description of Artificial Sequence: Synthetic oligonucleotide
  Antisense strand to SEQ ID NO: 806652
uuucccagggucaucagcc

SEQ ID NO: 806654 - RNA, 19 nt, Artificial Sequence
  Description of Artificial Sequence: Synthetic oligonucleotide
  Sense strand starting at position 730 of SEQ ID NO: 587632
gcugaugacccugggaaau

SEQ ID NO: 806655 - RNA, 19 nt, Artificial Sequence
  Description of Artificial Sequence: Synthetic oligonucleotide
  Antisense strand to SEQ ID NO: 806654
auuucccagggucaucagc

SEQ ID NO: 806656 - RNA, 19 nt, Artificial Sequence
  Description of Artificial Sequence: Synthetic oligonucleotide
  Sense strand starting at position 779 of SEQ ID NO: 587632
ccgagaacaugguuccuca

SEQ ID NO: 806657 - RNA, 19 nt, Artificial Sequence
  Description of Artificial Sequence: Synthetic oligonucleotide
  Antisense strand to SEQ ID NO: 806656
ugaggaaccauguucucgg

SEQ ID NO: 806658 - RNA, 19 nt, Artificial Sequence
  Description of Artificial Sequence: Synthetic oligonucleotide
  Sense strand starting at position 782 of SEQ ID NO: 587632
agaacaugguuccucaaua

SEQ ID NO: 806659 - RNA, 19 nt, Artificial Sequence
  Description of Artificial Sequence: Synthetic oligonucleotide
  Antisense strand to SEQ ID NO: 806658
uauugaggaaccauguucu

SEQ ID NO: 806660 - RNA, 19 nt, Artificial Sequence
  Description of Artificial Sequence: Synthetic oligonucleotide
  Sense strand starting at position 819 of SEQ ID NO: 587632
gucacuggugcucaugcaa

SEQ ID NO: 806661 - RNA, 19 nt, Artificial Sequence
  Description of Artificial Sequence: Synthetic oligonucleotide
  Antisense strand to SEQ ID NO: 806660
uugcaugagcaccagugac

SEQ ID NO: 806662 - RNA, 19 nt, Artificial Sequence
  Description of Artificial Sequence: Synthetic oligonucleotide
  Sense strand starting at position 857 of SEQ ID NO: 587632
cccucaagcucagugaaga

SEQ ID NO: 806663 - RNA, 19 nt, Artificial Sequence
  Description of Artificial Sequence: Synthetic oligonucleotide
  Antisense strand to SEQ ID NO: 806662
ucuucacugagcuugaggg

SEQ ID NO: 806664 - RNA, 19 nt, Artificial Sequence
  Description of Artificial Sequence: Synthetic oligonucleotide
  Sense strand starting at position 858 of SEQ ID NO: 587632
ccucaagcucagugaagaa

SEQ ID NO: 806665 - RNA, 19 nt, Artificial Sequence
  Description of Artificial Sequence: Synthetic oligonucleotide
  Antisense strand to SEQ ID NO: 806664
uucuucacugagcuugagg

SEQ ID NO: 806666 - RNA, 19 nt, Artificial Sequence
  Description of Artificial Sequence: Synthetic oligonucleotide
  Sense strand starting at position 901 of SEQ ID NO: 587632
aguccauguucucugcaca

SEQ ID NO: 806667 - RNA, 19 nt, Artificial Sequence
  Description of Artificial Sequence: Synthetic oligonucleotide
  Antisense strand to SEQ ID NO: 806666
ugugcagagaacauggacu

SEQ ID NO: 806668 - RNA, 19 nt, Artificial Sequence
  Description of Artificial Sequence: Synthetic oligonucleotide
  Sense strand starting at position 1022 of SEQ ID NO: 587632
auaacccagcucugugaaa

SEQ ID NO: 806669 - RNA, 19 nt, Artificial Sequence
  Description of Artificial Sequence: Synthetic oligonucleotide
  Antisense strand to SEQ ID NO: 806668
uuucacagagcuggguuau

SEQ ID NO: 806670 - RNA, 19 nt, Artificial Sequence
  Description of Artificial Sequence: Synthetic oligonucleotide
  Sense strand starting at position 1087 of SEQ ID NO: 587632
cucuguggacccugggaaa

SEQ ID NO: 806671 - RNA, 19 nt, Artificial Sequence
  Description of Artificial Sequence: Synthetic oligonucleotide
  Antisense strand to SEQ ID NO: 806670
uuucccaggguccacagag

SEQ ID NO: 806672 - RNA, 19 nt, Artificial Sequence
  Description of Artificial Sequence: Synthetic oligonucleotide
  Sense strand starting at position 1124 of SEQ ID NO: 587632
ccuguuuccugacacagga

SEQ ID NO: 806673 - RNA, 19 nt, Artificial Sequence
  Description of Artificial Sequence: Synthetic oligonucleotide
  Antisense strand to SEQ ID NO: 806672
uccugugucaggaaacagg

SEQ ID NO: 806674 - RNA, 19 nt, Artificial Sequence
  Description of Artificial Sequence: Synthetic oligonucleotide
  Sense strand starting at position 1317 of SEQ ID NO: 587632
gucauuccacucugacauc

SEQ ID NO: 806675 - RNA, 19 nt, Artificial Sequence
  Description of Artificial Sequence: Synthetic oligonucleotide
  Antisense strand to SEQ ID NO: 806674
gaugucagaguggaaugac

SEQ ID NO: 806676 - RNA, 19 nt, Artificial Sequence
  Description of Artificial Sequence: Synthetic oligonucleotide
  Sense strand starting at position 1468 of SEQ ID NO: 587632
ugaaacaugccgcaaacaa

SEQ ID NO: 806677 - RNA, 19 nt, Artificial Sequence
  Description of Artificial Sequence: Synthetic oligonucleotide
  Antisense strand to SEQ ID NO: 806676
uuguuugcggcauguuuca

SEQ ID NO: 806678 - RNA, 19 nt, Artificial Sequence
  Description of Artificial Sequence: Synthetic oligonucleotide
  Sense strand starting at position 1528 of SEQ ID NO: 587632
cgaggucuucgggacaucu

SEQ ID NO: 806679 - RNA, 19 nt, Artificial Sequence
  Description of Artificial Sequence: Synthetic oligonucleotide
  Antisense strand to SEQ ID NO: 806678
agaugucccgaagaccucg

SEQ ID NO: 806680 - RNA, 19 nt, Artificial Sequence
  Description of Artificial Sequence: Synthetic oligonucleotide
  Sense strand starting at position 1536 of SEQ ID NO: 587632
ucgggacaucuccauccau

SEQ ID NO: 806681 - RNA, 19 nt, Artificial Sequence
  Description of Artificial Sequence: Synthetic oligonucleotide
  Antisense strand to SEQ ID NO: 806680
auggauggagaugucccga

SEQ ID NO: 806682 - RNA, 19 nt, Artificial Sequence
  Description of Artificial Sequence: Synthetic oligonucleotide
  Sense strand starting at position 1769 of SEQ ID NO: 587632
ugcacuugaguuuaugagu

SEQ ID NO: 806683 - RNA, 19 nt, Artificial Sequence
  Description of Artificial Sequence: Synthetic oligonucleotide
  Antisense strand to SEQ ID NO: 806682
acucauaaacucaagugca

SEQ ID NO: 806684 - RNA, 19 nt, Artificial Sequence
  Description of Artificial Sequence: Synthetic oligonucleotide
  Sense strand starting at position 1778 of SEQ ID NO: 587632
guuuaugagucugucccuu

SEQ ID NO: 806685 - RNA, 19 nt, Artificial Sequence
  Description of Artificial Sequence: Synthetic oligonucleotide
  Antisense strand to SEQ ID NO: 806684
aagggacagacucauaaac

SEQ ID NO: 806686 - RNA, 19 nt, Artificial Sequence
  Description of Artificial Sequence: Synthetic oligonucleotide
  Sense strand starting at position 1863 of SEQ ID NO: 587632
agugguuuccucugacccu

SEQ ID NO: 806687 - RNA, 19 nt, Artificial Sequence
  Description of Artificial Sequence: Synthetic oligonucleotide
  Antisense strand to SEQ ID NO: 806686
agggucagaggaaaccacu

SEQ ID NO: 806688 - RNA, 19 nt, Artificial Sequence
  Description of Artificial Sequence: Synthetic oligonucleotide
  Sense strand starting at position 1984 of SEQ ID NO: 587632
gcacgcuaugaccagucau

SEQ ID NO: 806689 - RNA, 19 nt, Artificial Sequence
  Description of Artificial Sequence: Synthetic oligonucleotide
  Antisense strand to SEQ ID NO: 806688
augacuggucauagcgugc

SEQ ID NO: 806690 - RNA, 19 nt, Artificial Sequence
  Description of Artificial Sequence: Synthetic oligonucleotide
  Sense strand starting at position 1994 of SEQ ID NO: 587632
accagucauccucgugacu

SEQ ID NO: 806691 - RNA, 19 nt, Artificial Sequence
  Description of Artificial Sequence: Synthetic oligonucleotide
  Antisense strand to SEQ ID NO: 806690
agucacgaggaugacuggu

SEQ ID NO: 806692 - RNA, 19 nt, Artificial Sequence
  Description of Artificial Sequence: Synthetic oligonucleotide
  Sense strand starting at position 2032 of SEQ ID NO: 587632
gcucgcgaucgucagagaa

SEQ ID NO: 806693 - RNA, 19 nt, Artificial Sequence
  Description of Artificial Sequence: Synthetic oligonucleotide
  Antisense strand to SEQ ID NO: 806692
uucucugacgaucgcgagc

SEQ ID NO: 806694 - RNA, 19 nt, Artificial Sequence
  Description of Artificial Sequence: Synthetic oligonucleotide
  Sense strand starting at position 2035 of SEQ ID NO: 587632
cgcgaucgucagagaauac

SEQ ID NO: 806695 - RNA, 19 nt, Artificial Sequence
  Description of Artificial Sequence: Synthetic oligonucleotide
  Antisense strand to SEQ ID NO: 806694
guauucucugacgaucgcg

SEQ ID NO: 806696 - RNA, 19 nt, Artificial Sequence
  Description of Artificial Sequence: Synthetic oligonucleotide
  Sense strand starting at position 2712 of SEQ ID NO: 587632
ccgagcgaucucugcacuu

SEQ ID NO: 806697 - RNA, 19 nt, Artificial Sequence
  Description of Artificial Sequence: Synthetic oligonucleotide
  Antisense strand to SEQ ID NO: 806696
aagugcagagaucgcucgg

SEQ ID NO: 806698 - RNA, 19 nt, Artificial Sequence
  Description of Artificial Sequence: Synthetic oligonucleotide
  Sense strand starting at position 2714 of SEQ ID NO: 587632
gagcgaucucugcacuuau

SEQ ID NO: 806699 - RNA, 19 nt, Artificial Sequence
  Description of Artificial Sequence: Synthetic oligonucleotide
  Antisense strand to SEQ ID NO: 806698
auaagugcagagaucgcuc

SEQ ID NO: 806700 - RNA, 19 nt, Artificial Sequence
  Description of Artificial Sequence: Synthetic oligonucleotide
  Sense strand starting at position 3159 of SEQ ID NO: 587632
cgcgauaagagcgauguga

SEQ ID NO: 806701 - RNA, 19 nt, Artificial Sequence
  Description of Artificial Sequence: Synthetic oligonucleotide
  Antisense strand to SEQ ID NO: 806700
ucacaucgcucuuaucgcg

SEQ ID NO: 806702 - RNA, 19 nt, Artificial Sequence
  Description of Artificial Sequence: Synthetic oligonucleotide
  Sense strand starting at position 3587 of SEQ ID NO: 587632
gcggauaaucgagacugca

SEQ ID NO: 806703 - RNA, 19 nt, Artificial Sequence
  Description of Artificial Sequence: Synthetic oligonucleotide
  Antisense strand to SEQ ID NO: 806702
ugcagucucgauuauccgc

SEQ ID NO: 806704 - RNA, 19 nt, Artificial Sequence
  Description of Artificial Sequence: Synthetic oligonucleotide
  Sense strand starting at position 3645 of SEQ ID NO: 587632
cagucaucacuuggcuuga

SEQ ID NO: 806705 - RNA, 19 nt, Artificial Sequence
  Description of Artificial Sequence: Synthetic oligonucleotide
  Antisense strand to SEQ ID NO: 806704
ucaagccaagugaugacug

SEQ ID NO: 806706 - RNA, 19 nt, Artificial Sequence
  Description of Artificial Sequence: Synthetic oligonucleotide
  Sense strand starting at position 3647 of SEQ ID NO: 587632
gucaucacuuggcuugaca

SEQ ID NO: 806707 - RNA, 19 nt, Artificial Sequence
  Description of Artificial Sequence: Synthetic oligonucleotide
  Antisense strand to SEQ ID NO: 806706
ugucaagccaagugaugac

SEQ ID NO: 806708 - RNA, 19 nt, Artificial Sequence
  Description of Artificial Sequence: Synthetic oligonucleotide
  Sense strand starting at position 313 of SEQ ID NO: 587633
uggacauggcauugugaca

SEQ ID NO: 806709 - RNA, 19 nt, Artificial Sequence
  Description of Artificial Sequence: Synthetic oligonucleotide
  Antisense strand to SEQ ID NO: 806708
ugucacaaugccaugucca

SEQ ID NO: 806710 - RNA, 19 nt, Artificial Sequence
  Description of Artificial Sequence: Synthetic oligonucleotide
  Sense strand starting at position 543 of SEQ ID NO: 587633
guuggaguugccugagaag

SEQ ID NO: 806711 - RNA, 19 nt, Artificial Sequence
  Description of Artificial Sequence: Synthetic oligonucleotide
  Antisense strand to SEQ ID NO: 806710
cuucucaggcaacuccaac

SEQ ID NO: 806712 - RNA, 19 nt, Artificial Sequence
  Description of Artificial Sequence: Synthetic oligonucleotide
  Sense strand starting at position 561 of SEQ ID NO: 587633
gcugcauuucugcacaucu

SEQ ID NO: 806713 - RNA, 19 nt, Artificial Sequence
  Description of Artificial Sequence: Synthetic oligonucleotide
  Antisense strand to SEQ ID NO: 806712
agaugugcagaaaugcagc

SEQ ID NO: 806714 - RNA, 19 nt, Artificial Sequence
  Description of Artificial Sequence: Synthetic oligonucleotide
  Sense strand starting at position 605 of SEQ ID NO: 587633
gagccuccguccuagauau

SEQ ID NO: 806715 - RNA, 19 nt, Artificial Sequence
  Description of Artificial Sequence: Synthetic oligonucleotide
  Antisense strand to SEQ ID NO: 806714
auaucuaggacggaggcuc

SEQ ID NO: 806716 - RNA, 19 nt, Artificial Sequence
  Description of Artificial Sequence: Synthetic oligonucleotide
  Sense strand starting at position 607 of SEQ ID NO: 587633
gccuccguccuagauauca

SEQ ID NO: 806717 - RNA, 19 nt, Artificial Sequence
  Description of Artificial Sequence: Synthetic oligonucleotide
  Antisense strand to SEQ ID NO: 806716
ugauaucuaggacggaggc

SEQ ID NO: 806718 - RNA, 19 nt, Artificial Sequence
  Description of Artificial Sequence: Synthetic oligonucleotide
  Sense strand starting at position 616 of SEQ ID NO: 587633
cuagauaucacguguucug

SEQ ID NO: 806719 - RNA, 19 nt, Artificial Sequence
  Description of Artificial Sequence: Synthetic oligonucleotide
  Antisense strand to SEQ ID NO: 806718
cagaacacgugauaucuag

SEQ ID NO: 806720 - RNA, 19 nt, Artificial Sequence
  Description of Artificial Sequence: Synthetic oligonucleotide
  Sense strand starting at position 619 of SEQ ID NO: 587633
gauaucacguguucugaca

SEQ ID NO: 806721 - RNA, 19 nt, Artificial Sequence
  Description of Artificial Sequence: Synthetic oligonucleotide
  Antisense strand to SEQ ID NO: 806720
ugucagaacacgugauauc

SEQ ID NO: 806722 - RNA, 19 nt, Artificial Sequence
  Description of Artificial Sequence: Synthetic oligonucleotide
  Sense strand starting at position 632 of SEQ ID NO: 587633
cugacaucuccuggcaucu

SEQ ID NO: 806723 - RNA, 19 nt, Artificial Sequence
  Description of Artificial Sequence: Synthetic oligonucleotide
  Antisense strand to SEQ ID NO: 806722
agaugccaggagaugucag

SEQ ID NO: 806724 - RNA, 19 nt, Artificial Sequence
  Description of Artificial Sequence: Synthetic oligonucleotide
  Sense strand starting at position 953 of SEQ ID NO: 587633
cccuguggcuuccagaguu

SEQ ID NO: 806725 - RNA, 19 nt, Artificial Sequence
  Description of Artificial Sequence: Synthetic oligonucleotide
  Antisense strand to SEQ ID NO: 806724
aacucuggaagccacaggg

SEQ ID NO: 806726 - RNA, 19 nt, Artificial Sequence
  Description of Artificial Sequence: Synthetic oligonucleotide
  Sense strand starting at position 1032 of SEQ ID NO: 587633
gaguacucuuggcuuagca

SEQ ID NO: 806727 - RNA, 19 nt, Artificial Sequence
  Description of Artificial Sequence: Synthetic oligonucleotide
  Antisense strand to SEQ ID NO: 806726
ugcuaagccaagaguacuc

SEQ ID NO: 806728 - RNA, 19 nt, Artificial Sequence
  Description of Artificial Sequence: Synthetic oligonucleotide
  Sense strand starting at position 1110 of SEQ ID NO: 587633
gccggaaauaccugaguuc

SEQ ID NO: 806729 - RNA, 19 nt, Artificial Sequence
  Description of Artificial Sequence: Synthetic oligonucleotide
  Antisense strand to SEQ ID NO: 806728
gaacucagguauuuccggc

SEQ ID NO: 806730 - RNA, 19 nt, Artificial Sequence
  Description of Artificial Sequence: Synthetic oligonucleotide
  Sense strand starting at position 1140 of SEQ ID NO: 587633
ccaagacauuccuggaaca

SEQ ID NO: 806731 - RNA, 19 nt, Artificial Sequence
  Description of Artificial Sequence: Synthetic oligonucleotide
  Antisense strand to SEQ ID NO: 806730
uguuccaggaaugucuugg

SEQ ID NO: 806732 - RNA, 19 nt, Artificial Sequence
  Description of Artificial Sequence: Synthetic oligonucleotide
  Sense strand starting at position 1186 of SEQ ID NO: 587633
agggaauccugcucugaac

SEQ ID NO: 806733 - RNA, 19 nt, Artificial Sequence
  Description of Artificial Sequence: Synthetic oligonucleotide
  Antisense strand to SEQ ID NO: 806732
guucagagcaggauucccu

SEQ ID NO: 806734 - RNA, 19 nt, Artificial Sequence
  Description of Artificial Sequence: Synthetic oligonucleotide
  Sense strand starting at position 1252 of SEQ ID NO: 587633
agcagaaccugcucugagu

SEQ ID NO: 806735 - RNA, 19 nt, Artificial Sequence
  Description of Artificial Sequence: Synthetic oligonucleotide
  Antisense strand to SEQ ID NO: 806734
acucagagcagguucugcu

SEQ ID NO: 806736 - RNA, 19 nt, Artificial Sequence
  Description of Artificial Sequence: Synthetic oligonucleotide
  Sense strand starting at position 1316 of SEQ ID NO: 587633
cucugaccugcguaucaga

SEQ ID NO: 806737 - RNA, 19 nt, Artificial Sequence
  Description of Artificial Sequence: Synthetic oligonucleotide
  Antisense strand to SEQ ID NO: 806736
ucugauacgcaggucagag

SEQ ID NO: 806738 - RNA, 19 nt, Artificial Sequence
  Description of Artificial Sequence: Synthetic oligonucleotide
  Sense strand starting at position 1355 of SEQ ID NO: 587633
cuuugugucuuuccagguu

SEQ ID NO: 806739 - RNA, 19 nt, Artificial Sequence
  Description of Artificial Sequence: Synthetic oligonucleotide
  Antisense strand to SEQ ID NO: 806738
aaccuggaaagacacaaag

SEQ ID NO: 806740 - RNA, 19 nt, Artificial Sequence
  Description of Artificial Sequence: Synthetic oligonucleotide
  Sense strand starting at position 1414 of SEQ ID NO: 587633
ggaggaaccuuccuuuauu

SEQ ID NO: 806741 - RNA, 19 nt, Artificial Sequence
  Description of Artificial Sequence: Synthetic oligonucleotide
  Antisense strand to SEQ ID NO: 806740
aauaaaggaagguuccucc

SEQ ID NO: 806742 - RNA, 19 nt, Artificial Sequence
  Description of Artificial Sequence: Synthetic oligonucleotide
  Sense strand starting at position 1453 of SEQ ID NO: 587633
agaaacucuggcuguggua

SEQ ID NO: 806743 - RNA, 19 nt, Artificial Sequence
  Description of Artificial Sequence: Synthetic oligonucleotide
  Antisense strand to SEQ ID NO: 806742
uaccacagccagaguuucu

SEQ ID NO: 806744 - RNA, 19 nt, Artificial Sequence
  Description of Artificial Sequence: Synthetic oligonucleotide
  Sense strand starting at position 1466 of SEQ ID NO: 587633
gugguaucaucucaauucu

SEQ ID NO: 806745 - RNA, 19 nt, Artificial Sequence
  Description of Artificial Sequence: Synthetic oligonucleotide
  Antisense strand to SEQ ID NO: 806744
agaauugagaugauaccac

SEQ ID NO: 806746 - RNA, 19 nt, Artificial Sequence
  Description of Artificial Sequence: Synthetic oligonucleotide
  Sense strand starting at position 1475 of SEQ ID NO: 587633
ucucaauucugcugaauag

SEQ ID NO: 806747 - RNA, 19 nt, Artificial Sequence
  Description of Artificial Sequence: Synthetic oligonucleotide
  Antisense strand to SEQ ID NO: 806746
cuauucagcagaauugaga

SEQ ID NO: 806748 - RNA, 19 nt, Artificial Sequence
  Description of Artificial Sequence: Synthetic oligonucleotide
  Sense strand starting at position 1476 of SEQ ID NO: 587633
cucaauucugcugaauaga

SEQ ID NO: 806749 - RNA, 19 nt, Artificial Sequence
  Description of Artificial Sequence: Synthetic oligonucleotide
  Antisense strand to SEQ ID NO: 806748
ucuauucagcagaauugag

SEQ ID NO: 806750 - RNA, 19 nt, Artificial Sequence
  Description of Artificial Sequence: Synthetic oligonucleotide
  Sense strand starting at position 1514 of SEQ ID NO: 587633
aggugaacggucuguccau

SEQ ID NO: 806751 - RNA, 19 nt, Artificial Sequence
  Description of Artificial Sequence: Synthetic oligonucleotide
  Antisense strand to SEQ ID NO: 806750
auggacagaccguucaccu

SEQ ID NO: 806752 - RNA, 19 nt, Artificial Sequence
  Description of Artificial Sequence: Synthetic oligonucleotide
  Sense strand starting at position 2228 of SEQ ID NO: 587633
ugggccauuuguuugcuaa

SEQ ID NO: 806753 - RNA, 19 nt, Artificial Sequence
  Description of Artificial Sequence: Synthetic oligonucleotide
  Antisense strand to SEQ ID NO: 806752
uuagcaaacaaauggccca

SEQ ID NO: 806754 - RNA, 19 nt, Artificial Sequence
  Description of Artificial Sequence: Synthetic oligonucleotide
  Sense strand starting at position 2229 of SEQ ID NO: 587633
gggccauuuguuugcuaag

SEQ ID NO: 806755 - RNA, 19 nt, Artificial Sequence
  Description of Artificial Sequence: Synthetic oligonucleotide
  Antisense strand to SEQ ID NO: 806754
cuuagcaaacaaauggccc

SEQ ID NO: 806756 - RNA, 19 nt, Artificial Sequence
  Description of Artificial Sequence: Synthetic oligonucleotide
  Sense strand starting at position 2230 of SEQ ID NO: 587633
ggccauuuguuugcuaagu

SEQ ID NO: 806757 - RNA, 19 nt, Artificial Sequence
  Description of Artificial Sequence: Synthetic oligonucleotide
  Antisense strand to SEQ ID NO: 806756
acuuagcaaacaaauggcc

SEQ ID NO: 806758 - RNA, 19 nt, Artificial Sequence
  Description of Artificial Sequence: Synthetic oligonucleotide
  Sense strand starting at position 2231 of SEQ ID NO: 587633
gccauuuguuugcuaaguc

SEQ ID NO: 806759 - RNA, 19 nt, Artificial Sequence
  Description of Artificial Sequence: Synthetic oligonucleotide
  Antisense strand to SEQ ID NO: 806758
gacuuagcaaacaaauggc

SEQ ID NO: 806760 - RNA, 19 nt, Artificial Sequence
  Description of Artificial Sequence: Synthetic oligonucleotide
  Sense strand starting at position 2763 of SEQ ID NO: 587633
agcaaucagugguggagau

SEQ ID NO: 806761 - RNA, 19 nt, Artificial Sequence
  Description of Artificial Sequence: Synthetic oligonucleotide
  Antisense strand to SEQ ID NO: 806760
aucuccaccacugauugcu

SEQ ID NO: 806762 - RNA, 19 nt, Artificial Sequence
  Description of Artificial Sequence: Synthetic oligonucleotide
  Sense strand starting at position 3173 of SEQ ID NO: 587633
ccugcuguucgccugcaau

SEQ ID NO: 806763 - RNA, 19 nt, Artificial Sequence
  Description of Artificial Sequence: Synthetic oligonucleotide
  Antisense strand to SEQ ID NO: 806762
auugcaggcgaacagcagg

SEQ ID NO: 806764 - RNA, 19 nt, Artificial Sequence
  Description of Artificial Sequence: Synthetic oligonucleotide
  Sense strand starting at position 3175 of SEQ ID NO: 587633
ugcuguucgccugcaauga

SEQ ID NO: 806765 - RNA, 19 nt, Artificial Sequence
  Description of Artificial Sequence: Synthetic oligonucleotide
  Antisense strand to SEQ ID NO: 806764
ucauugcaggcgaacagca

SEQ ID NO: 806766 - RNA, 19 nt, Artificial Sequence
  Description of Artificial Sequence: Synthetic oligonucleotide
  Sense strand starting at position 3292 of SEQ ID NO: 587633
guuugaggcuuugugcagu

SEQ ID NO: 806767 - RNA, 19 nt, Artificial Sequence
  Description of Artificial Sequence: Synthetic oligonucleotide
  Antisense strand to SEQ ID NO: 806766
acugcacaaagccucaaac

SEQ ID NO: 806768 - RNA, 19 nt, Artificial Sequence
  Description of Artificial Sequence: Synthetic oligonucleotide
  Sense strand starting at position 3309 of SEQ ID NO: 587633
gugccuuccuccuggaaug

SEQ ID NO: 806769 - RNA, 19 nt, Artificial Sequence
  Description of Artificial Sequence: Synthetic oligonucleotide
  Antisense strand to SEQ ID NO: 806768
cauuccaggaggaaggcac

SEQ ID NO: 806770 - RNA, 19 nt, Artificial Sequence
  Description of Artificial Sequence: Synthetic oligonucleotide
  Sense strand starting at position 3448 of SEQ ID NO: 587633
auuuauucucgaggcgguu

SEQ ID NO: 806771 - RNA, 19 nt, Artificial Sequence
  Description of Artificial Sequence: Synthetic oligonucleotide
  Antisense strand to SEQ ID NO: 806770
aaccgccucgagaauaaau

SEQ ID NO: 806772 - RNA, 19 nt, Artificial Sequence
  Description of Artificial Sequence: Synthetic oligonucleotide
  Sense strand starting at position 3513 of SEQ ID NO: 587633
gugguuugacuggagguga

SEQ ID NO: 806773 - RNA, 19 nt, Artificial Sequence
  Description of Artificial Sequence: Synthetic oligonucleotide
  Antisense strand to SEQ ID NO: 806772
ucaccuccagucaaaccac

SEQ ID NO: 806774 - RNA, 19 nt, Artificial Sequence
  Description of Artificial Sequence: Synthetic oligonucleotide
  Sense strand starting at position 3606 of SEQ ID NO: 587633
aaggccugacucugugaau

SEQ ID NO: 806775 - RNA, 19 nt, Artificial Sequence
  Description of Artificial Sequence: Synthetic oligonucleotide
  Antisense strand to SEQ ID NO: 806774
auucacagagucaggccuu

SEQ ID NO: 806776 - RNA, 19 nt, Artificial Sequence
  Description of Artificial Sequence: Synthetic oligonucleotide
  Sense strand starting at position 3607 of SEQ ID NO: 587633
aggccugacucugugaauu

SEQ ID NO: 806777 - RNA, 19 nt, Artificial Sequence
  Description of Artificial Sequence: Synthetic oligonucleotide
  Antisense strand to SEQ ID NO: 806776
aauucacagagucaggccu

SEQ ID NO: 806778 - RNA, 19 nt, Artificial Sequence
  Description of Artificial Sequence: Synthetic oligonucleotide
  Sense strand starting at position 3609 of SEQ ID NO: 587633
gccugacucugugaauuuc

SEQ ID NO: 806779 - RNA, 19 nt, Artificial Sequence
  Description of Artificial Sequence: Synthetic oligonucleotide
  Antisense strand to SEQ ID NO: 806778
gaaauucacagagucaggc

SEQ ID NO: 806780 - RNA, 19 nt, Artificial Sequence
  Description of Artificial Sequence: Synthetic oligonucleotide
  Sense strand starting at position 3725 of SEQ ID NO: 587633
gggaaaugcuguuugacau

SEQ ID NO: 806781 - RNA, 19 nt, Artificial Sequence
  Description of Artificial Sequence: Synthetic oligonucleotide
  Antisense strand to SEQ ID NO: 806780
augucaaacagcauuuccc

SEQ ID NO: 806782 - RNA, 19 nt, Artificial Sequence
  Description of Artificial Sequence: Synthetic oligonucleotide
  Sense strand starting at position 3726 of SEQ ID NO: 587633
ggaaaugcuguuugacaug

SEQ ID NO: 806783 - RNA, 19 nt, Artificial Sequence
  Description of Artificial Sequence: Synthetic oligonucleotide
  Antisense strand to SEQ ID NO: 806782
caugucaaacagcauuucc

SEQ ID NO: 806784 - RNA, 19 nt, Artificial Sequence
  Description of Artificial Sequence: Synthetic oligonucleotide
  Sense strand starting at position 3946 of SEQ ID NO: 587633
gcugucacucaauagcaga

SEQ ID NO: 806785 - RNA, 19 nt, Artificial Sequence
  Description of Artificial Sequence: Synthetic oligonucleotide
  Antisense strand to SEQ ID NO: 806784
ucugcuauugagugacagc

SEQ ID NO: 806786 - RNA, 19 nt, Artificial Sequence
  Description of Artificial Sequence: Synthetic oligonucleotide
  Sense strand starting at position 7 of SEQ ID NO: 587634
gggacauuccaggagcagu

SEQ ID NO: 806787 - RNA, 19 nt, Artificial Sequence
  Description of Artificial Sequence: Synthetic oligonucleotide
  Antisense strand to SEQ ID NO: 806786
acugcuccuggaauguccc

SEQ ID NO: 806788 - RNA, 19 nt, Artificial Sequence
  Description of Artificial Sequence: Synthetic oligonucleotide
  Sense strand starting at position 20 of SEQ ID NO: 587634
agcaguuaccuaggugcaa

SEQ ID NO: 806789 - RNA, 19 nt, Artificial Sequence
  Description of Artificial Sequence: Synthetic oligonucleotide
  Antisense strand to SEQ ID NO: 806788
uugcaccuagguaacugcu

SEQ ID NO: 806790 - RNA, 19 nt, Artificial Sequence
  Description of Artificial Sequence: Synthetic oligonucleotide
  Sense strand starting at position 21 of SEQ ID NO: 587634
gcaguuaccuaggugcaaa

SEQ ID NO: 806791 - RNA, 19 nt, Artificial Sequence
  Description of Artificial Sequence: Synthetic oligonucleotide
  Antisense strand to SEQ ID NO: 806790
uuugcaccuagguaacugc

SEQ ID NO: 806792 - RNA, 19 nt, Artificial Sequence
  Description of Artificial Sequence: Synthetic oligonucleotide
  Sense strand starting at position 276 of SEQ ID NO: 587634
guggguguccagggaaugu

SEQ ID NO: 806793 - RNA, 19 nt, Artificial Sequence
  Description of Artificial Sequence: Synthetic oligonucleotide
  Antisense strand to SEQ ID NO: 806792
acauucccuggacacccac

SEQ ID NO: 806794 - RNA, 19 nt, Artificial Sequence
  Description of Artificial Sequence: Synthetic oligonucleotide
  Sense strand starting at position 402 of SEQ ID NO: 587634
ggguuaauugugcagacca

SEQ ID NO: 806795 - RNA, 19 nt, Artificial Sequence
  Description of Artificial Sequence: Synthetic oligonucleotide
  Antisense strand to SEQ ID NO: 806794
uggucugcacaauuaaccc

SEQ ID NO: 806796 - RNA, 19 nt, Artificial Sequence
  Description of Artificial Sequence: Synthetic oligonucleotide
  Sense strand starting at position 404 of SEQ ID NO: 587634
guuaauugugcagaccaca

SEQ ID NO: 806797 - RNA, 19 nt, Artificial Sequence
  Description of Artificial Sequence: Synthetic oligonucleotide
  Antisense strand to SEQ ID NO: 806796
uguggucugcacaauuaac

SEQ ID NO: 806798 - RNA, 19 nt, Artificial Sequence
  Description of Artificial Sequence: Synthetic oligonucleotide
  Sense strand starting at position 490 of SEQ ID NO: 587634
ugaaacaaaccuggcauua

SEQ ID NO: 806799 - RNA, 19 nt, Artificial Sequence
  Description of Artificial Sequence: Synthetic oligonucleotide
  Antisense strand to SEQ ID NO: 806798
uaaugccagguuuguuuca

SEQ ID NO: 806800 - RNA, 19 nt, Artificial Sequence
  Description of Artificial Sequence: Synthetic oligonucleotide
  Sense strand starting at position 1163 of SEQ ID NO: 587634
gcaggagcagccugaagau

SEQ ID NO: 806801 - RNA, 19 nt, Artificial Sequence
  Description of Artificial Sequence: Synthetic oligonucleotide
  Antisense strand to SEQ ID NO: 806800
aucuucaggcugcuccugc

SEQ ID NO: 806802 - RNA, 19 nt, Artificial Sequence
  Description of Artificial Sequence: Synthetic oligonucleotide
  Sense strand starting at position 1883 of SEQ ID NO: 587634
gucagugcugucaggguua

SEQ ID NO: 806803 - RNA, 19 nt, Artificial Sequence
  Description of Artificial Sequence: Synthetic oligonucleotide
  Antisense strand to SEQ ID NO: 806802
uaacccugacagcacugac

SEQ ID NO: 806804 - RNA, 19 nt, Artificial Sequence
  Description of Artificial Sequence: Synthetic oligonucleotide
  Sense strand starting at position 1885 of SEQ ID NO: 587634
cagugcugucaggguuaga

SEQ ID NO: 806805 - RNA, 19 nt, Artificial Sequence
  Description of Artificial Sequence: Synthetic oligonucleotide
  Antisense strand to SEQ ID NO: 806804
ucuaacccugacagcacug

SEQ ID NO: 806806 - RNA, 19 nt, Artificial Sequence
  Description of Artificial Sequence: Synthetic oligonucleotide
  Sense strand starting at position 1996 of SEQ ID NO: 587634
cgaaguugugcccaggacu

SEQ ID NO: 806807 - RNA, 19 nt, Artificial Sequence
  Description of Artificial Sequence: Synthetic oligonucleotide
  Antisense strand to SEQ ID NO: 806806
aguccugggcacaacuucg

SEQ ID NO: 806808 - RNA, 19 nt, Artificial Sequence
  Description of Artificial Sequence: Synthetic oligonucleotide
  Sense strand starting at position 2228 of SEQ ID NO: 587634
cuggcagauccacgaagaa

SEQ ID NO: 806809 - RNA, 19 nt, Artificial Sequence
  Description of Artificial Sequence: Synthetic oligonucleotide
  Antisense strand to SEQ ID NO: 806808
uucuucguggaucugccag

SEQ ID NO: 806810 - RNA, 19 nt, Artificial Sequence
  Description of Artificial Sequence: Synthetic oligonucleotide
  Sense strand starting at position 2361 of SEQ ID NO: 587634
ugagucgaggccugauuca

SEQ ID NO: 806811 - RNA, 19 nt, Artificial Sequence
  Description of Artificial Sequence: Synthetic oligonucleotide
  Antisense strand to SEQ ID NO: 806810
ugaaucaggccucgacuca

SEQ ID NO: 806812 - RNA, 19 nt, Artificial Sequence
  Description of Artificial Sequence: Synthetic oligonucleotide
  Sense strand starting at position 2460 of SEQ ID NO: 587634
gcacgcuggcucugucaga

SEQ ID NO: 806813 - RNA, 19 nt, Artificial Sequence
  Description of Artificial Sequence: Synthetic oligonucleotide
  Antisense strand to SEQ ID NO: 806812
ucugacagagccagcgugc

SEQ ID NO: 806814 - RNA, 19 nt, Artificial Sequence
  Description of Artificial Sequence: Synthetic oligonucleotide
  Sense strand starting at position 2696 of SEQ ID NO: 587634
ugcuguucccaugauaaga

SEQ ID NO: 806815 - RNA, 19 nt, Artificial Sequence
  Description of Artificial Sequence: Synthetic oligonucleotide
  Antisense strand to SEQ ID NO: 806814
ucuuaucaugggaacagca

SEQ ID NO: 806816 - RNA, 19 nt, Artificial Sequence
  Description of Artificial Sequence: Synthetic oligonucleotide
  Sense strand starting at position 2721 of SEQ ID NO: 587634
aagaucugguugucuggaa

SEQ ID NO: 806817 - RNA, 19 nt, Artificial Sequence
  Description of Artificial Sequence: Synthetic oligonucleotide
  Antisense strand to SEQ ID NO: 806816
uuccagacaaccagaucuu

SEQ ID NO: 806818 - RNA, 19 nt, Artificial Sequence
  Description of Artificial Sequence: Synthetic oligonucleotide
  Sense strand starting at position 2798 of SEQ ID NO: 587634
ccaccaagaugguaaguuu

SEQ ID NO: 806819 - RNA, 19 nt, Artificial Sequence
  Description of Artificial Sequence: Synthetic oligonucleotide
  Antisense strand to SEQ ID NO: 806818
aaacuuaccaucuuggugg

SEQ ID NO: 806820 - RNA, 19 nt, Artificial Sequence
  Description of Artificial Sequence: Synthetic oligonucleotide
  Sense strand starting at position 2993 of SEQ ID NO: 587634
ugugguguguucuguccaa

SEQ ID NO: 806821 - RNA, 19 nt, Artificial Sequence
  Description of Artificial Sequence: Synthetic oligonucleotide
  Antisense strand to SEQ ID NO: 806820
uuggacagaacacaccaca

SEQ ID NO: 806822 - RNA, 19 nt, Artificial Sequence
  Description of Artificial Sequence: Synthetic oligonucleotide
  Sense strand starting at position 2997 of SEQ ID NO: 587634
guguguucuguccaaugug

SEQ ID NO: 806823 - RNA, 19 nt, Artificial Sequence
  Description of Artificial Sequence: Synthetic oligonucleotide
  Antisense strand to SEQ ID NO: 806822
cacauuggacagaacacac

SEQ ID NO: 806824 - RNA, 19 nt, Artificial Sequence
  Description of Artificial Sequence: Synthetic oligonucleotide
  Sense strand starting at position 3148 of SEQ ID NO: 587634
gugagcuggucugguggaa

SEQ ID NO: 806825 - RNA, 19 nt, Artificial Sequence
  Description of Artificial Sequence: Synthetic oligonucleotide
  Antisense strand to SEQ ID NO: 806824
uuccaccagaccagcucac

SEQ ID NO: 806826 - RNA, 19 nt, Artificial Sequence
  Description of Artificial Sequence: Synthetic oligonucleotide
  Sense strand starting at position 3160 of SEQ ID NO: 587634
gguggaaugccugggcaga

SEQ ID NO: 806827 - RNA, 19 nt, Artificial Sequence
  Description of Artificial Sequence: Synthetic oligonucleotide
  Antisense strand to SEQ ID NO: 806826
ucugcccaggcauuccacc

SEQ ID NO: 806828 - RNA, 19 nt, Artificial Sequence
  Description of Artificial Sequence: Synthetic oligonucleotide
  Sense strand starting at position 3304 of SEQ ID NO: 587634
ccaagcaguuccucuugaa

SEQ ID NO: 806829 - RNA, 19 nt, Artificial Sequence
  Description of Artificial Sequence: Synthetic oligonucleotide
  Antisense strand to SEQ ID NO: 806828
uucaagaggaacugcuugg

SEQ ID NO: 806830 - RNA, 19 nt, Artificial Sequence
  Description of Artificial Sequence: Synthetic oligonucleotide
  Sense strand starting at position 3307 of SEQ ID NO: 587634
agcaguuccucuugaagcu

SEQ ID NO: 806831 - RNA, 19 nt, Artificial Sequence
  Description of Artificial Sequence: Synthetic oligonucleotide
  Antisense strand to SEQ ID NO: 806830
agcuucaagaggaacugcu

SEQ ID NO: 806832 - RNA, 19 nt, Artificial Sequence
  Description of Artificial Sequence: Synthetic oligonucleotide
  Sense strand starting at position 3434 of SEQ ID NO: 587634
ugagucaucuccuggagcu

SEQ ID NO: 806833 - RNA, 19 nt, Artificial Sequence
  Description of Artificial Sequence: Synthetic oligonucleotide
  Antisense strand to SEQ ID NO: 806832
agcuccaggagaugacuca

SEQ ID NO: 806834 - RNA, 19 nt, Artificial Sequence
  Description of Artificial Sequence: Synthetic oligonucleotide
  Sense strand starting at position 3435 of SEQ ID NO: 587634
gagucaucuccuggagcuu

SEQ ID NO: 806835 - RNA, 19 nt, Artificial Sequence
  Description of Artificial Sequence: Synthetic oligonucleotide
  Antisense strand to SEQ ID NO: 806834
aagcuccaggagaugacuc

SEQ ID NO: 806836 - RNA, 19 nt, Artificial Sequence
  Description of Artificial Sequence: Synthetic oligonucleotide
  Sense strand starting at position 3589 of SEQ ID NO: 587634
gggaguuugagacgucuuc

SEQ ID NO: 806837 - RNA, 19 nt, Artificial Sequence
  Description of Artificial Sequence: Synthetic oligonucleotide
  Antisense strand to SEQ ID NO: 806836
gaagacgucucaaacuccc

SEQ ID NO: 806838 - RNA, 19 nt, Artificial Sequence
  Description of Artificial Sequence: Synthetic oligonucleotide
  Sense strand starting at position 3724 of SEQ ID NO: 587634
aaggaaaggucugcagcaa

SEQ ID NO: 806839 - RNA, 19 nt, Artificial Sequence
  Description of Artificial Sequence: Synthetic oligonucleotide
  Antisense strand to SEQ ID NO: 806838
uugcugcagaccuuuccuu

SEQ ID NO: 806840 - RNA, 19 nt, Artificial Sequence
  Description of Artificial Sequence: Synthetic oligonucleotide
  Sense strand starting at position 3784 of SEQ ID NO: 587634
guggcuuuguaguucuagu

SEQ ID NO: 806841 - RNA, 19 nt, Artificial Sequence
  Description of Artificial Sequence: Synthetic oligonucleotide
  Antisense strand to SEQ ID NO: 806840
acuagaacuacaaagccac

SEQ ID NO: 806842 - RNA, 19 nt, Artificial Sequence
  Description of Artificial Sequence: Synthetic oligonucleotide
  Sense strand starting at position 3792 of SEQ ID NO: 587634
guaguucuagugugggauc

SEQ ID NO: 806843 - RNA, 19 nt, Artificial Sequence
  Description of Artificial Sequence: Synthetic oligonucleotide
  Antisense strand to SEQ ID NO: 806842
gaucccacacuagaacuac

SEQ ID NO: 806844 - RNA, 19 nt, Artificial Sequence
  Description of Artificial Sequence: Synthetic oligonucleotide
  Sense strand starting at position 3795 of SEQ ID NO: 587634
guucuagugugggaucuga

SEQ ID NO: 806845 - RNA, 19 nt, Artificial Sequence
  Description of Artificial Sequence: Synthetic oligonucleotide
  Antisense strand to SEQ ID NO: 806844
ucagaucccacacuagaac

SEQ ID NO: 806846 - RNA, 19 nt, Artificial Sequence
  Description of Artificial Sequence: Synthetic oligonucleotide
  Sense strand starting at position 3899 of SEQ ID NO: 587634
gugcuuucacugggaugca

SEQ ID NO: 806847 - RNA, 19 nt, Artificial Sequence
  Description of Artificial Sequence: Synthetic oligonucleotide
  Antisense strand to SEQ ID NO: 806846
ugcaucccagugaaagcac

SEQ ID NO: 806848 - RNA, 19 nt, Artificial Sequence
  Description of Artificial Sequence: Synthetic oligonucleotide
  Sense strand starting at position 142 of SEQ ID NO: 587635
uccuguuagcaauaugacu

SEQ ID NO: 806849 - RNA, 19 nt, Artificial Sequence
  Description of Artificial Sequence: Synthetic oligonucleotide
  Antisense strand to SEQ ID NO: 806848
agucauauugcuaacagga

SEQ ID NO: 806850 - RNA, 19 nt, Artificial Sequence
  Description of Artificial Sequence: Synthetic oligonucleotide
  Sense strand starting at position 275 of SEQ ID NO: 587635
aguagaagcuguuuaugaa

SEQ ID NO: 806851 - RNA, 19 nt, Artificial Sequence
  Description of Artificial Sequence: Synthetic oligonucleotide
  Antisense strand to SEQ ID NO: 806850
uucauaaacagcuucuacu

SEQ ID NO: 806852 - RNA, 19 nt, Artificial Sequence
  Description of Artificial Sequence: Synthetic oligonucleotide
  Sense strand starting at position 276 of SEQ ID NO: 587635
guagaagcuguuuaugaag

SEQ ID NO: 806853 - RNA, 19 nt, Artificial Sequence
  Description of Artificial Sequence: Synthetic oligonucleotide
  Antisense strand to SEQ ID NO: 806852
cuucauaaacagcuucuac

SEQ ID NO: 806854 - RNA, 19 nt, Artificial Sequence
  Description of Artificial Sequence: Synthetic oligonucleotide
  Sense strand starting at position 311 of SEQ ID NO: 587635
agagauuauuagguacauu

SEQ ID NO: 806855 - RNA, 19 nt, Artificial Sequence
  Description of Artificial Sequence: Synthetic oligonucleotide
  Antisense strand to SEQ ID NO: 806854
aauguaccuaauaaucucu

SEQ ID NO: 806856 - RNA, 19 nt, Artificial Sequence
  Description of Artificial Sequence: Synthetic oligonucleotide
  Sense strand starting at position 491 of SEQ ID NO: 587635
ucaggaauagagcauuguu

SEQ ID NO: 806857 - RNA, 19 nt, Artificial Sequence
  Description of Artificial Sequence: Synthetic oligonucleotide
  Antisense strand to SEQ ID NO: 806856
aacaaugcucuauuccuga

SEQ ID NO: 806858 - RNA, 19 nt, Artificial Sequence
  Description of Artificial Sequence: Synthetic oligonucleotide
  Sense strand starting at position 712 of SEQ ID NO: 587635
uccauuguagacuaauagu

SEQ ID NO: 806859 - RNA, 19 nt, Artificial Sequence
  Description of Artificial Sequence: Synthetic oligonucleotide
  Antisense strand to SEQ ID NO: 806858
acuauuagucuacaaugga

SEQ ID NO: 806860 - RNA, 19 nt, Artificial Sequence
  Description of Artificial Sequence: Synthetic oligonucleotide
  Sense strand starting at position 718 of SEQ ID NO: 587635
guagacuaauaguuugaua

SEQ ID NO: 806861 - RNA, 19 nt, Artificial Sequence
  Description of Artificial Sequence: Synthetic oligonucleotide
  Antisense strand to SEQ ID NO: 806860
uaucaaacuauuagucuac

SEQ ID NO: 806862 - RNA, 19 nt, Artificial Sequence
  Description of Artificial Sequence: Synthetic oligonucleotide
  Sense strand starting at position 720 of SEQ ID NO: 587635
agacuaauaguuugauacu

SEQ ID NO: 806863 - RNA, 19 nt, Artificial Sequence
  Description of Artificial Sequence: Synthetic oligonucleotide
  Antisense strand to SEQ ID NO: 806862
aguaucaaacuauuagucu

SEQ ID NO: 806864 - RNA, 19 nt, Artificial Sequence
  Description of Artificial Sequence: Synthetic oligonucleotide
  Sense strand starting at position 893 of SEQ ID NO: 587635
ugaguugagagucaucuua

SEQ ID NO: 806865 - RNA, 19 nt, Artificial Sequence
  Description of Artificial Sequence: Synthetic oligonucleotide
  Antisense strand to SEQ ID NO: 806864
uaagaugacucucaacuca

SEQ ID NO: 806866 - RNA, 19 nt, Artificial Sequence
  Description of Artificial Sequence: Synthetic oligonucleotide
  Sense strand starting at position 895 of SEQ ID NO: 587635
aguugagagucaucuuaga

SEQ ID NO: 806867 - RNA, 19 nt, Artificial Sequence
  Description of Artificial Sequence: Synthetic oligonucleotide
  Antisense strand to SEQ ID NO: 806866
ucuaagaugacucucaacu

SEQ ID NO: 806868 - RNA, 19 nt, Artificial Sequence
  Description of Artificial Sequence: Synthetic oligonucleotide
  Sense strand starting at position 903 of SEQ ID NO: 587635
gucaucuuagaccgauaua

SEQ ID NO: 806869 - RNA, 19 nt, Artificial Sequence
  Description of Artificial Sequence: Synthetic oligonucleotide
  Antisense strand to SEQ ID NO: 806868
uauaucggucuaagaugac

SEQ ID NO: 806870 - RNA, 19 nt, Artificial Sequence
  Description of Artificial Sequence: Synthetic oligonucleotide
  Sense strand starting at position 975 of SEQ ID NO: 587635
ccuaucucaguugaugaca

SEQ ID NO: 806871 - RNA, 19 nt, Artificial Sequence
  Description of Artificial Sequence: Synthetic oligonucleotide
  Antisense strand to SEQ ID NO: 806870
ugucaucaacugagauagg

SEQ ID NO: 806872 - RNA, 19 nt, Artificial Sequence
  Description of Artificial Sequence: Synthetic oligonucleotide
  Sense strand starting at position 1291 of SEQ ID NO: 587635
uguuacuccguggaucaaa

SEQ ID NO: 806873 - RNA, 19 nt, Artificial Sequence
  Description of Artificial Sequence: Synthetic oligonucleotide
  Antisense strand to SEQ ID NO: 806872
uuugauccacggaguaaca

SEQ ID NO: 806874 - RNA, 19 nt, Artificial Sequence
  Description of Artificial Sequence: Synthetic oligonucleotide
  Sense strand starting at position 1363 of SEQ ID NO: 587635
ccuacaaugcccuauguga

SEQ ID NO: 806875 - RNA, 19 nt, Artificial Sequence
  Description of Artificial Sequence: Synthetic oligonucleotide
  Antisense strand to SEQ ID NO: 806874
ucacauagggcauuguagg

SEQ ID NO: 806876 - RNA, 19 nt, Artificial Sequence
  Description of Artificial Sequence: Synthetic oligonucleotide
  Sense strand starting at position 1586 of SEQ ID NO: 587635
cuuaaucugccggaaccaa

SEQ ID NO: 806877 - RNA, 19 nt, Artificial Sequence
  Description of Artificial Sequence: Synthetic oligonucleotide
  Antisense strand to SEQ ID NO: 806876
uugguuccggcagauuaag

SEQ ID NO: 806878 - RNA, 19 nt, Artificial Sequence
  Description of Artificial Sequence: Synthetic oligonucleotide
  Sense strand starting at position 1610 of SEQ ID NO: 587635
uccuucugccaguauaaug

SEQ ID NO: 806879 - RNA, 19 nt, Artificial Sequence
  Description of Artificial Sequence: Synthetic oligonucleotide
  Antisense strand to SEQ ID NO: 806878
cauuauacuggcagaagga

SEQ ID NO: 806880 - RNA, 19 nt, Artificial Sequence
  Description of Artificial Sequence: Synthetic oligonucleotide
  Sense strand starting at position 1632 of SEQ ID NO: 587635
cccaucaagccauaagagu

SEQ ID NO: 806881 - RNA, 19 nt, Artificial Sequence
  Description of Artificial Sequence: Synthetic oligonucleotide
  Antisense strand to SEQ ID NO: 806880
acucuuauggcuugauggg

SEQ ID NO: 806882 - RNA, 19 nt, Artificial Sequence
  Description of Artificial Sequence: Synthetic oligonucleotide
  Sense strand starting at position 1854 of SEQ ID NO: 587635
ggcagcaauuucgucauga

SEQ ID NO: 806883 - RNA, 19 nt, Artificial Sequence
  Description of Artificial Sequence: Synthetic oligonucleotide
  Antisense strand to SEQ ID NO: 806882
ucaugacgaaauugcugcc

SEQ ID NO: 806884 - RNA, 19 nt, Artificial Sequence
  Description of Artificial Sequence: Synthetic oligonucleotide
  Sense strand starting at position 1855 of SEQ ID NO: 587635
gcagcaauuucgucaugaa

SEQ ID NO: 806885 - RNA, 19 nt, Artificial Sequence
  Description of Artificial Sequence: Synthetic oligonucleotide
  Antisense strand to SEQ ID NO: 806884
uucaugacgaaauugcugc

SEQ ID NO: 806886 - RNA, 19 nt, Artificial Sequence
  Description of Artificial Sequence: Synthetic oligonucleotide
  Sense strand starting at position 2263 of SEQ ID NO: 587635
gagggaucaauauguaguu

SEQ ID NO: 806887 - RNA, 19 nt, Artificial Sequence
  Description of Artificial Sequence: Synthetic oligonucleotide
  Antisense strand to SEQ ID NO: 806886
aacuacauauugaucccuc

SEQ ID NO: 806888 - RNA, 19 nt, Artificial Sequence
  Description of Artificial Sequence: Synthetic oligonucleotide
  Sense strand starting at position 2265 of SEQ ID NO: 587635
gggaucaauauguaguugu

SEQ ID NO: 806889 - RNA, 19 nt, Artificial Sequence
  Description of Artificial Sequence: Synthetic oligonucleotide
  Antisense strand to SEQ ID NO: 806888
acaacuacauauugauccc

SEQ ID NO: 806890 - RNA, 19 nt, Artificial Sequence
  Description of Artificial Sequence: Synthetic oligonucleotide
  Sense strand starting at position 2377 of SEQ ID NO: 587635
gauuccagcccuuagaagu

SEQ ID NO: 806891 - RNA, 19 nt, Artificial Sequence
  Description of Artificial Sequence: Synthetic oligonucleotide
  Antisense strand to SEQ ID NO: 806890
acuucuaagggcuggaauc

SEQ ID NO: 806892 - RNA, 19 nt, Artificial Sequence
  Description of Artificial Sequence: Synthetic oligonucleotide
  Sense strand starting at position 2392 of SEQ ID NO: 587635
aaguucuuggcauaguaaa

SEQ ID NO: 806893 - RNA, 19 nt, Artificial Sequence
  Description of Artificial Sequence: Synthetic oligonucleotide
  Antisense strand to SEQ ID NO: 806892
uuuacuaugccaagaacuu

SEQ ID NO: 806894 - RNA, 19 nt, Artificial Sequence
  Description of Artificial Sequence: Synthetic oligonucleotide
  Sense strand starting at position 2689 of SEQ ID NO: 587635
auguguucauuuguuucga

SEQ ID NO: 806895 - RNA, 19 nt, Artificial Sequence
  Description of Artificial Sequence: Synthetic oligonucleotide
  Antisense strand to SEQ ID NO: 806894
ucgaaacaaaugaacacau

SEQ ID NO: 806896 - RNA, 19 nt, Artificial Sequence
  Description of Artificial Sequence: Synthetic oligonucleotide
  Sense strand starting at position 2804 of SEQ ID NO: 587635
uuugcauucgugcuaacug

SEQ ID NO: 806897 - RNA, 19 nt, Artificial Sequence
  Description of Artificial Sequence: Synthetic oligonucleotide
  Antisense strand to SEQ ID NO: 806896
caguuagcacgaaugcaaa

SEQ ID NO: 806898 - RNA, 19 nt, Artificial Sequence
  Description of Artificial Sequence: Synthetic oligonucleotide
  Sense strand starting at position 2899 of SEQ ID NO: 587635
ucuugagcagcguuuagua

SEQ ID NO: 806899 - RNA, 19 nt, Artificial Sequence
  Description of Artificial Sequence: Synthetic oligonucleotide
  Antisense strand to SEQ ID NO: 806898
uacuaaacgcugcucaaga

SEQ ID NO: 806900 - RNA, 19 nt, Artificial Sequence
  Description of Artificial Sequence: Synthetic oligonucleotide
  Sense strand starting at position 2944 of SEQ ID NO: 587635
agagucucugauggugaaa

SEQ ID NO: 806901 - RNA, 19 nt, Artificial Sequence
  Description of Artificial Sequence: Synthetic oligonucleotide
  Antisense strand to SEQ ID NO: 806900
uuucaccaucagagacucu

SEQ ID NO: 806902 - RNA, 19 nt, Artificial Sequence
  Description of Artificial Sequence: Synthetic oligonucleotide
  Sense strand starting at position 2947 of SEQ ID NO: 587635
gucucugauggugaaauug

SEQ ID NO: 806903 - RNA, 19 nt, Artificial Sequence
  Description of Artificial Sequence: Synthetic oligonucleotide
  Antisense strand to SEQ ID NO: 806902
caauuucaccaucagagac

SEQ ID NO: 806904 - RNA, 19 nt, Artificial Sequence
  Description of Artificial Sequence: Synthetic oligonucleotide
  Sense strand starting at position 3274 of SEQ ID NO: 587635
ucuucuagaugcuugaaua

SEQ ID NO: 806905 - RNA, 19 nt, Artificial Sequence
  Description of Artificial Sequence: Synthetic oligonucleotide
  Antisense strand to SEQ ID NO: 806904
uauucaagcaucuagaaga

SEQ ID NO: 806906 - RNA, 19 nt, Artificial Sequence
  Description of Artificial Sequence: Synthetic oligonucleotide
  Sense strand starting at position 3275 of SEQ ID NO: 587635
cuucuagaugcuugaauau

SEQ ID NO: 806907 - RNA, 19 nt, Artificial Sequence
  Description of Artificial Sequence: Synthetic oligonucleotide
  Antisense strand to SEQ ID NO: 806906
auauucaagcaucuagaag

SEQ ID NO: 806908 - RNA, 19 nt, Artificial Sequence
  Description of Artificial Sequence: Synthetic oligonucleotide
  Sense strand starting at position 3363 of SEQ ID NO: 587635
aucuuaguucuguauaacu

SEQ ID NO: 806909 - RNA, 19 nt, Artificial Sequence
  Description of Artificial Sequence: Synthetic oligonucleotide
  Antisense strand to SEQ ID NO: 806908
aguuauacagaacuaagau

SEQ ID NO: 806910 - RNA, 19 nt, Artificial Sequence
  Description of Artificial Sequence: Synthetic oligonucleotide
  Sense strand starting at position 3365 of SEQ ID NO: 587635
cuuaguucuguauaacuaa

SEQ ID NO: 806911 - RNA, 19 nt, Artificial Sequence
  Description of Artificial Sequence: Synthetic oligonucleotide
  Antisense strand to SEQ ID NO: 806910
uuaguuauacagaacuaag

SEQ ID NO: 806912 - RNA, 19 nt, Artificial Sequence
  Description of Artificial Sequence: Synthetic oligonucleotide
  Sense strand starting at position 3392 of SEQ ID NO: 587635
uggcuuuaugaggaugauu

SEQ ID NO: 806913 - RNA, 19 nt, Artificial Sequence
  Description of Artificial Sequence: Synthetic oligonucleotide
  Antisense strand to SEQ ID NO: 806912
aaucauccucauaaagcca

SEQ ID NO: 806914 - RNA, 19 nt, Artificial Sequence
  Description of Artificial Sequence: Synthetic oligonucleotide
  Sense strand starting at position 3663 of SEQ ID NO: 587635
ugacuuugauaguuaucuu

SEQ ID NO: 806915 - RNA, 19 nt, Artificial Sequence
  Description of Artificial Sequence: Synthetic oligonucleotide
  Antisense strand to SEQ ID NO: 806914
aagauaacuaucaaaguca

SEQ ID NO: 806916 - RNA, 19 nt, Artificial Sequence
  Description of Artificial Sequence: Synthetic oligonucleotide
  Sense strand starting at position 3709 of SEQ ID NO: 587635
acuggagaauguccuuuaa

SEQ ID NO: 806917 - RNA, 19 nt, Artificial Sequence
  Description of Artificial Sequence: Synthetic oligonucleotide
  Antisense strand to SEQ ID NO: 806916
uuaaaggacauucuccagu

SEQ ID NO: 806918 - RNA, 19 nt, Artificial Sequence
  Description of Artificial Sequence: Synthetic oligonucleotide
  Sense strand starting at position 3711 of SEQ ID NO: 587635
uggagaauguccuuuaaac

SEQ ID NO: 806919 - RNA, 19 nt, Artificial Sequence
  Description of Artificial Sequence: Synthetic oligonucleotide
  Antisense strand to SEQ ID NO: 806918
guuuaaaggacauucucca

SEQ ID NO: 806920 - RNA, 19 nt, Artificial Sequence
  Description of Artificial Sequence: Synthetic oligonucleotide
  Sense strand starting at position 3713 of SEQ ID NO: 587635
gagaauguccuuuaaacgu

SEQ ID NO: 806921 - RNA, 19 nt, Artificial Sequence
  Description of Artificial Sequence: Synthetic oligonucleotide
  Antisense strand to SEQ ID NO: 806920
acguuuaaaggacauucuc

SEQ ID NO: 806922 - RNA, 19 nt, Artificial Sequence
  Description of Artificial Sequence: Synthetic oligonucleotide
  Sense strand starting at position 3774 of SEQ ID NO: 587635
gaaggaaguuucuuuccau

SEQ ID NO: 806923 - RNA, 19 nt, Artificial Sequence
  Description of Artificial Sequence: Synthetic oligonucleotide
  Antisense strand to SEQ ID NO: 806922
auggaaagaaacuuccuuc

SEQ ID NO: 806924 - RNA, 19 nt, Artificial Sequence
  Description of Artificial Sequence: Synthetic oligonucleotide
  Sense strand starting at position 3775 of SEQ ID NO: 587635
aaggaaguuucuuuccaug

SEQ ID NO: 806925 - RNA, 19 nt, Artificial Sequence
  Description of Artificial Sequence: Synthetic oligonucleotide
  Antisense strand to SEQ ID NO: 806924
cauggaaagaaacuuccuu

SEQ ID NO: 806926 - RNA, 19 nt, Artificial Sequence
  Description of Artificial Sequence: Synthetic oligonucleotide
  Sense strand starting at position 3909 of SEQ ID NO: 587635
gggaaugauuucuaauaug

SEQ ID NO: 806927 - RNA, 19 nt, Artificial Sequence
  Description of Artificial Sequence: Synthetic oligonucleotide
  Antisense strand to SEQ ID NO: 806926
cauauuagaaaucauuccc

SEQ ID NO: 806928 - RNA, 19 nt, Artificial Sequence
  Description of Artificial Sequence: Synthetic oligonucleotide
  Sense strand starting at position 69 of SEQ ID NO: 587636
cccucuugaguguaacaca

SEQ ID NO: 806929 - RNA, 19 nt, Artificial Sequence
  Description of Artificial Sequence: Synthetic oligonucleotide
  Antisense strand to SEQ ID NO: 806928
uguguuacacucaagaggg

SEQ ID NO: 806930 - RNA, 19 nt, Artificial Sequence
  Description of Artificial Sequence: Synthetic oligonucleotide
  Sense strand starting at position 218 of SEQ ID NO: 587636
uacuauggagcucaaagua

SEQ ID NO: 806931 - RNA, 19 nt, Artificial Sequence
  Description of Artificial Sequence: Synthetic oligonucleotide
  Antisense strand to SEQ ID NO: 806930
uacuuugagcuccauagua

SEQ ID NO: 806932 - RNA, 19 nt, Artificial Sequence
  Description of Artificial Sequence: Synthetic oligonucleotide
  Sense strand starting at position 246 of SEQ ID NO: 587636
guuaucauuuauuagguga

SEQ ID NO: 806933 - RNA, 19 nt, Artificial Sequence
  Description of Artificial Sequence: Synthetic oligonucleotide
  Antisense strand to SEQ ID NO: 806932
ucaccuaauaaaugauaac

SEQ ID NO: 806934 - RNA, 19 nt, Artificial Sequence
  Description of Artificial Sequence: Synthetic oligonucleotide
  Sense strand starting at position 294 of SEQ ID NO: 587636
gucuauuauugcucacucu

SEQ ID NO: 806935 - RNA, 19 nt, Artificial Sequence
  Description of Artificial Sequence: Synthetic oligonucleotide
  Antisense strand to SEQ ID NO: 806934
agagugagcaauaauagac

SEQ ID NO: 806936 - RNA, 19 nt, Artificial Sequence
  Description of Artificial Sequence: Synthetic oligonucleotide
  Sense strand starting at position 320 of SEQ ID NO: 587636
accauuagagcuggcauua

SEQ ID NO: 806937 - RNA, 19 nt, Artificial Sequence
  Description of Artificial Sequence: Synthetic oligonucleotide
  Antisense strand to SEQ ID NO: 806936
uaaugccagcucuaauggu

SEQ ID NO: 806938 - RNA, 19 nt, Artificial Sequence
  Description of Artificial Sequence: Synthetic oligonucleotide
  Sense strand starting at position 387 of SEQ ID NO: 587636
uuuaauaauccaggcaaga

SEQ ID NO: 806939 - RNA, 19 nt, Artificial Sequence
  Description of Artificial Sequence: Synthetic oligonucleotide
  Antisense strand to SEQ ID NO: 806938
ucuugccuggauuauuaaa

SEQ ID NO: 806940 - RNA, 19 nt, Artificial Sequence
  Description of Artificial Sequence: Synthetic oligonucleotide
  Sense strand starting at position 553 of SEQ ID NO: 587636
uuaccuauguccuucguua

SEQ ID NO: 806941 - RNA, 19 nt, Artificial Sequence
  Description of Artificial Sequence: Synthetic oligonucleotide
  Antisense strand to SEQ ID NO: 806940
uaacgaaggacauagguaa

SEQ ID NO: 806942 - RNA, 19 nt, Artificial Sequence
  Description of Artificial Sequence: Synthetic oligonucleotide
  Sense strand starting at position 703 of SEQ ID NO: 587636
ucuucucuccugcaaggaa

SEQ ID NO: 806943 - RNA, 19 nt, Artificial Sequence
  Description of Artificial Sequence: Synthetic oligonucleotide
  Antisense strand to SEQ ID NO: 806942
uuccuugcaggagagaaga

SEQ ID NO: 806944 - RNA, 19 nt, Artificial Sequence
  Description of Artificial Sequence: Synthetic oligonucleotide
  Sense strand starting at position 830 of SEQ ID NO: 587636
uugugucaagcauguccua

SEQ ID NO: 806945 - RNA, 19 nt, Artificial Sequence
  Description of Artificial Sequence: Synthetic oligonucleotide
  Antisense strand to SEQ ID NO: 806944
uaggacaugcuugacacaa

SEQ ID NO: 806946 - RNA, 19 nt, Artificial Sequence
  Description of Artificial Sequence: Synthetic oligonucleotide
  Sense strand starting at position 843 of SEQ ID NO: 587636
guccuaguugcucaaagcu

SEQ ID NO: 806947 - RNA, 19 nt, Artificial Sequence
  Description of Artificial Sequence: Synthetic oligonucleotide
  Antisense strand to SEQ ID NO: 806946
agcuuugagcaacuaggac

SEQ ID NO: 806948 - RNA, 19 nt, Artificial Sequence
  Description of Artificial Sequence: Synthetic oligonucleotide
  Sense strand starting at position 1313 of SEQ ID NO: 587636
acacaaagacuuuguaguu

SEQ ID NO: 806949 - RNA, 19 nt, Artificial Sequence
  Description of Artificial Sequence: Synthetic oligonucleotide
  Antisense strand to SEQ ID NO: 806948
aacuacaaagucuuugugu

SEQ ID NO: 806950 - RNA, 19 nt, Artificial Sequence
  Description of Artificial Sequence: Synthetic oligonucleotide
  Sense strand starting at position 1592 of SEQ ID NO: 587636
auugcuucugggcgacaga

SEQ ID NO: 806951 - RNA, 19 nt, Artificial Sequence
  Description of Artificial Sequence: Synthetic oligonucleotide
  Antisense strand to SEQ ID NO: 806950
ucugucgcccagaagcaau

SEQ ID NO: 806952 - RNA, 19 nt, Artificial Sequence
  Description of Artificial Sequence: Synthetic oligonucleotide
  Sense strand starting at position 1657 of SEQ ID NO: 587636
gggugcacguggaaagauu

SEQ ID NO: 806953 - RNA, 19 nt, Artificial Sequence
  Description of Artificial Sequence: Synthetic oligonucleotide
  Antisense strand to SEQ ID NO: 806952
aaucuuuccacgugcaccc

SEQ ID NO: 806954 - RNA, 19 nt, Artificial Sequence
  Description of Artificial Sequence: Synthetic oligonucleotide
  Sense strand starting at position 2190 of SEQ ID NO: 587636
cuucucuuucgccaaacga

SEQ ID NO: 806955 - RNA, 19 nt, Artificial Sequence
  Description of Artificial Sequence: Synthetic oligonucleotide
  Antisense strand to SEQ ID NO: 806954
ucguuuggcgaaagagaag

SEQ ID NO: 806956 - RNA, 19 nt, Artificial Sequence
  Description of Artificial Sequence: Synthetic oligonucleotide
  Sense strand starting at position 2229 of SEQ ID NO: 587636
gcguuaaauaaaggaucuu

SEQ ID NO: 806957 - RNA, 19 nt, Artificial Sequence
  Description of Artificial Sequence: Synthetic oligonucleotide
  Antisense strand to SEQ ID NO: 806956
aagauccuuuauuuaacgc

SEQ ID NO: 806958 - RNA, 19 nt, Artificial Sequence
  Description of Artificial Sequence: Synthetic oligonucleotide
  Sense strand starting at position 2294 of SEQ ID NO: 587636
cucugaggucaaugcagaa

SEQ ID NO: 806959 - RNA, 19 nt, Artificial Sequence
  Description of Artificial Sequence: Synthetic oligonucleotide
  Antisense strand to SEQ ID NO: 806958
uucugcauugaccucagag

SEQ ID NO: 806960 - RNA, 19 nt, Artificial Sequence
  Description of Artificial Sequence: Synthetic oligonucleotide
  Sense strand starting at position 2323 of SEQ ID NO: 587636
agcaaagugagcugucaau

SEQ ID NO: 806961 - RNA, 19 nt, Artificial Sequence
  Description of Artificial Sequence: Synthetic oligonucleotide
  Antisense strand to SEQ ID NO: 806960
auugacagcucacuuugcu

SEQ ID NO: 806962 - RNA, 19 nt, Artificial Sequence
  Description of Artificial Sequence: Synthetic oligonucleotide
  Sense strand starting at position 2353 of SEQ ID NO: 587636
gagcuugcguaauuauaca

SEQ ID NO: 806963 - RNA, 19 nt, Artificial Sequence
  Description of Artificial Sequence: Synthetic oligonucleotide
  Antisense strand to SEQ ID NO: 806962
uguauaauuacgcaagcuc

SEQ ID NO: 806964 - RNA, 19 nt, Artificial Sequence
  Description of Artificial Sequence: Synthetic oligonucleotide
  Sense strand starting at position 2363 of SEQ ID NO: 587636
aauuauacaccgugaggua

SEQ ID NO: 806965 - RNA, 19 nt, Artificial Sequence
  Description of Artificial Sequence: Synthetic oligonucleotide
  Antisense strand to SEQ ID NO: 806964
uaccucacgguguauaauu

SEQ ID NO: 806966 - RNA, 19 nt, Artificial Sequence
  Description of Artificial Sequence: Synthetic oligonucleotide
  Sense strand starting at position 2461 of SEQ ID NO: 587636
auccgugugcaucuguauu

SEQ ID NO: 806967 - RNA, 19 nt, Artificial Sequence
  Description of Artificial Sequence: Synthetic oligonucleotide
  Antisense strand to SEQ ID NO: 806966
aauacagaugcacacggau

SEQ ID NO: 806968 - RNA, 19 nt, Artificial Sequence
  Description of Artificial Sequence: Synthetic oligonucleotide
  Sense strand starting at position 2487 of SEQ ID NO: 587636
gugaaucgcaguuaguaac

SEQ ID NO: 806969 - RNA, 19 nt, Artificial Sequence
  Description of Artificial Sequence: Synthetic oligonucleotide
  Antisense strand to SEQ ID NO: 806968
guuacuaacugcgauucac

SEQ ID NO: 806970 - RNA, 19 nt, Artificial Sequence
  Description of Artificial Sequence: Synthetic oligonucleotide
  Sense strand starting at position 2531 of SEQ ID NO: 587636
uacugaaugccugguguau

SEQ ID NO: 806971 - RNA, 19 nt, Artificial Sequence
  Description of Artificial Sequence: Synthetic oligonucleotide
  Antisense strand to SEQ ID NO: 806970
auacaccaggcauucagua

SEQ ID NO: 806972 - RNA, 19 nt, Artificial Sequence
  Description of Artificial Sequence: Synthetic oligonucleotide
  Sense strand starting at position 2547 of SEQ ID NO: 587636
uaugccagacgcuguauua

SEQ ID NO: 806973 - RNA, 19 nt, Artificial Sequence
  Description of Artificial Sequence: Synthetic oligonucleotide
  Antisense strand to SEQ ID NO: 806972
uaauacagcgucuggcaua

SEQ ID NO: 806974 - RNA, 19 nt, Artificial Sequence
  Description of Artificial Sequence: Synthetic oligonucleotide
  Sense strand starting at position 2563 of SEQ ID NO: 587636
uuaaauaagccuuacucga

SEQ ID NO: 806975 - RNA, 19 nt, Artificial Sequence
  Description of Artificial Sequence: Synthetic oligonucleotide
  Antisense strand to SEQ ID NO: 806974
ucgaguaaggcuuauuuaa

SEQ ID NO: 806976 - RNA, 19 nt, Artificial Sequence
  Description of Artificial Sequence: Synthetic oligonucleotide
  Sense strand starting at position 2585 of SEQ ID NO: 587636
acagccauucuagagguaa

SEQ ID NO: 806977 - RNA, 19 nt, Artificial Sequence
  Description of Artificial Sequence: Synthetic oligonucleotide
  Antisense strand to SEQ ID NO: 806976
uuaccucuagaauggcugu

SEQ ID NO: 806978 - RNA, 19 nt, Artificial Sequence
  Description of Artificial Sequence: Synthetic oligonucleotide
  Sense strand starting at position 2652 of SEQ ID NO: 587636
ccgauagcuugaccaacuu

SEQ ID NO: 806979 - RNA, 19 nt, Artificial Sequence
  Description of Artificial Sequence: Synthetic oligonucleotide
  Antisense strand to SEQ ID NO: 806978
aaguuggucaagcuaucgg

SEQ ID NO: 806980 - RNA, 19 nt, Artificial Sequence
  Description of Artificial Sequence: Synthetic oligonucleotide
  Sense strand starting at position 2703 of SEQ ID NO: 587636
guacacugcuuccuacuau

SEQ ID NO: 806981 - RNA, 19 nt, Artificial Sequence
  Description of Artificial Sequence: Synthetic oligonucleotide
  Antisense strand to SEQ ID NO: 806980
auaguaggaagcaguguac

SEQ ID NO: 806982 - RNA, 19 nt, Artificial Sequence
  Description of Artificial Sequence: Synthetic oligonucleotide
  Sense strand starting at position 2771 of SEQ ID NO: 587636
cgaacauuauuacucgaaa

SEQ ID NO: 806983 - RNA, 19 nt, Artificial Sequence
  Description of Artificial Sequence: Synthetic oligonucleotide
  Antisense strand to SEQ ID NO: 806982
uuucgaguaauaauguucg

SEQ ID NO: 806984 - RNA, 19 nt, Artificial Sequence
  Description of Artificial Sequence: Synthetic oligonucleotide
  Sense strand starting at position 2861 of SEQ ID NO: 587636
uuaguagugguuugacauu

SEQ ID NO: 806985 - RNA, 19 nt, Artificial Sequence
  Description of Artificial Sequence: Synthetic oligonucleotide
  Antisense strand to SEQ ID NO: 806984
aaugucaaaccacuacuaa

SEQ ID NO: 806986 - RNA, 19 nt, Artificial Sequence
  Description of Artificial Sequence: Synthetic oligonucleotide
  Sense strand starting at position 2928 of SEQ ID NO: 587636
uaaugaaggugagacaauu

SEQ ID NO: 806987 - RNA, 19 nt, Artificial Sequence
  Description of Artificial Sequence: Synthetic oligonucleotide
  Antisense strand to SEQ ID NO: 806986
aauugucucaccuucauua

SEQ ID NO: 806988 - RNA, 19 nt, Artificial Sequence
  Description of Artificial Sequence: Synthetic oligonucleotide
  Sense strand starting at position 2954 of SEQ ID NO: 587636
ggcgucugucucuagguau

SEQ ID NO: 806989 - RNA, 19 nt, Artificial Sequence
  Description of Artificial Sequence: Synthetic oligonucleotide
  Antisense strand to SEQ ID NO: 806988
auaccuagagacagacgcc

SEQ ID NO: 806990 - RNA, 19 nt, Artificial Sequence
  Description of Artificial Sequence: Synthetic oligonucleotide
  Sense strand starting at position 2957 of SEQ ID NO: 587636
gucugucucuagguauaac

SEQ ID NO: 806991 - RNA, 19 nt, Artificial Sequence
  Description of Artificial Sequence: Synthetic oligonucleotide
  Antisense strand to SEQ ID NO: 806990
guuauaccuagagacagac

SEQ ID NO: 806992 - RNA, 19 nt, Artificial Sequence
  Description of Artificial Sequence: Synthetic oligonucleotide
  Sense strand starting at position 3070 of SEQ ID NO: 587636
acugaacuuguuggaaaua

SEQ ID NO: 806993 - RNA, 19 nt, Artificial Sequence
  Description of Artificial Sequence: Synthetic oligonucleotide
  Antisense strand to SEQ ID NO: 806992
uauuuccaacaaguucagu

SEQ ID NO: 806994 - RNA, 19 nt, Artificial Sequence
  Description of Artificial Sequence: Synthetic oligonucleotide
  Sense strand starting at position 3116 of SEQ ID NO: 587636
auucccaaguuguuugaaa

SEQ ID NO: 806995 - RNA, 19 nt, Artificial Sequence
  Description of Artificial Sequence: Synthetic oligonucleotide
  Antisense strand to SEQ ID NO: 806994
uuucaaacaacuugggaau

SEQ ID NO: 806996 - RNA, 19 nt, Artificial Sequence
  Description of Artificial Sequence: Synthetic oligonucleotide
  Sense strand starting at position 3118 of SEQ ID NO: 587636
ucccaaguuguuugaaauc

SEQ ID NO: 806997 - RNA, 19 nt, Artificial Sequence
  Description of Artificial Sequence: Synthetic oligonucleotide
  Antisense strand to SEQ ID NO: 806996
gauuucaaacaacuuggga

SEQ ID NO: 806998 - RNA, 19 nt, Artificial Sequence
  Description of Artificial Sequence: Synthetic oligonucleotide
  Sense strand starting at position 3128 of SEQ ID NO: 587636
uuugaaaucuaguagggaa

SEQ ID NO: 806999 - RNA, 19 nt, Artificial Sequence
  Description of Artificial Sequence: Synthetic oligonucleotide
  Antisense strand to SEQ ID NO: 806998
uucccuacuagauuucaaa

SEQ ID NO: 807000 - RNA, 19 nt, Artificial Sequence
  Description of Artificial Sequence: Synthetic oligonucleotide
  Sense strand starting at position 3502 of SEQ ID NO: 587636
aggccucuuguagacuaau

SEQ ID NO: 807001 - RNA, 19 nt, Artificial Sequence
  Description of Artificial Sequence: Synthetic oligonucleotide
  Antisense strand to SEQ ID NO: 807000
auuagucuacaagaggccu

SEQ ID NO: 807002 - RNA, 19 nt, Artificial Sequence
  Description of Artificial Sequence: Synthetic oligonucleotide
  Sense strand starting at position 3508 of SEQ ID NO: 587636
cuuguagacuaauuagcaa

SEQ ID NO: 807003 - RNA, 19 nt, Artificial Sequence
  Description of Artificial Sequence: Synthetic oligonucleotide
  Antisense strand to SEQ ID NO: 807002
uugcuaauuagucuacaag

SEQ ID NO: 807004 - RNA, 19 nt, Artificial Sequence
  Description of Artificial Sequence: Synthetic oligonucleotide
  Sense strand starting at position 3561 of SEQ ID NO: 587636
ugguaaagucuagacucua

SEQ ID NO: 807005 - RNA, 19 nt, Artificial Sequence
  Description of Artificial Sequence: Synthetic oligonucleotide
  Antisense strand to SEQ ID NO: 807004
uagagucuagacuuuacca

SEQ ID NO: 807006 - RNA, 19 nt, Artificial Sequence
  Description of Artificial Sequence: Synthetic oligonucleotide
  Sense strand starting at position 3955 of SEQ ID NO: 587636
ccagccugccuuuagugau

SEQ ID NO: 807007 - RNA, 19 nt, Artificial Sequence
  Description of Artificial Sequence: Synthetic oligonucleotide
  Antisense strand to SEQ ID NO: 807006
aucacuaaaggcaggcugg

SEQ ID NO: 807008 - RNA, 19 nt, Artificial Sequence
  Description of Artificial Sequence: Synthetic oligonucleotide
  Sense strand starting at position 43 of SEQ ID NO: 587637
agcacugaacucuauguuu

SEQ ID NO: 807009 - RNA, 19 nt, Artificial Sequence
  Description of Artificial Sequence: Synthetic oligonucleotide
  Antisense strand to SEQ ID NO: 807008
aaacauagaguucagugcu

SEQ ID NO: 807010 - RNA, 19 nt, Artificial Sequence
  Description of Artificial Sequence: Synthetic oligonucleotide
  Sense strand starting at position 86 of SEQ ID NO: 587637
auggccuuaccuuaaggau

SEQ ID NO: 807011 - RNA, 19 nt, Artificial Sequence
  Description of Artificial Sequence: Synthetic oligonucleotide
  Antisense strand to SEQ ID NO: 807010
auccuuaagguaaggccau

SEQ ID NO: 807012 - RNA, 19 nt, Artificial Sequence
  Description of Artificial Sequence: Synthetic oligonucleotide
  Sense strand starting at position 133 of SEQ ID NO: 587637
ucaggucaaucaucgcuau

SEQ ID NO: 807013 - RNA, 19 nt, Artificial Sequence
  Description of Artificial Sequence: Synthetic oligonucleotide
  Antisense strand to SEQ ID NO: 807012
auagcgaugauugaccuga

SEQ ID NO: 807014 - RNA, 19 nt, Artificial Sequence
  Description of Artificial Sequence: Synthetic oligonucleotide
  Sense strand starting at position 234 of SEQ ID NO: 587637
ucuagaauuugugaauaug

SEQ ID NO: 807015 - RNA, 19 nt, Artificial Sequence
  Description of Artificial Sequence: Synthetic oligonucleotide
  Antisense strand to SEQ ID NO: 807014
cauauucacaaauucuaga

SEQ ID NO: 807016 - RNA, 19 nt, Artificial Sequence
  Description of Artificial Sequence: Synthetic oligonucleotide
  Sense strand starting at position 271 of SEQ ID NO: 587637
gagaauuaacuuugcaggu

SEQ ID NO: 807017 - RNA, 19 nt, Artificial Sequence
  Description of Artificial Sequence: Synthetic oligonucleotide
  Antisense strand to SEQ ID NO: 807016
accugcaaaguuaauucuc

SEQ ID NO: 807018 - RNA, 19 nt, Artificial Sequence
  Description of Artificial Sequence: Synthetic oligonucleotide
  Sense strand starting at position 275 of SEQ ID NO: 587637
auuaacuuugcagguggaa

SEQ ID NO: 807019 - RNA, 19 nt, Artificial Sequence
  Description of Artificial Sequence: Synthetic oligonucleotide
  Antisense strand to SEQ ID NO: 807018
uuccaccugcaaaguuaau

SEQ ID NO: 807020 - RNA, 19 nt, Artificial Sequence
  Description of Artificial Sequence: Synthetic oligonucleotide
  Sense strand starting at position 420 of SEQ ID NO: 587637
ucacaucugucaucuguaa

SEQ ID NO: 807021 - RNA, 19 nt, Artificial Sequence
  Description of Artificial Sequence: Synthetic oligonucleotide
  Antisense strand to SEQ ID NO: 807020
uuacagaugacagauguga

SEQ ID NO: 807022 - RNA, 19 nt, Artificial Sequence
  Description of Artificial Sequence: Synthetic oligonucleotide
  Sense strand starting at position 547 of SEQ ID NO: 587637
acaauuagcccagaguggu

SEQ ID NO: 807023 - RNA, 19 nt, Artificial Sequence
  Description of Artificial Sequence: Synthetic oligonucleotide
  Antisense strand to SEQ ID NO: 807022
accacucugggcuaauugu

SEQ ID NO: 807024 - RNA, 19 nt, Artificial Sequence
  Description of Artificial Sequence: Synthetic oligonucleotide
  Sense strand starting at position 618 of SEQ ID NO: 587637
ggguuuagcagugaacuga

SEQ ID NO: 807025 - RNA, 19 nt, Artificial Sequence
  Description of Artificial Sequence: Synthetic oligonucleotide
  Antisense strand to SEQ ID NO: 807024
ucaguucacugcuaaaccc

SEQ ID NO: 807026 - RNA, 19 nt, Artificial Sequence
  Description of Artificial Sequence: Synthetic oligonucleotide
  Sense strand starting at position 622 of SEQ ID NO: 587637
uuagcagugaacugagauc

SEQ ID NO: 807027 - RNA, 19 nt, Artificial Sequence
  Description of Artificial Sequence: Synthetic oligonucleotide
  Antisense strand to SEQ ID NO: 807026
gaucucaguucacugcuaa

SEQ ID NO: 807028 - RNA, 19 nt, Artificial Sequence
  Description of Artificial Sequence: Synthetic oligonucleotide
  Sense strand starting at position 831 of SEQ ID NO: 587637
ccgucugacuucucacaac

SEQ ID NO: 807029 - RNA, 19 nt, Artificial Sequence
  Description of Artificial Sequence: Synthetic oligonucleotide
  Antisense strand to SEQ ID NO: 807028
guugugagaagucagacgg

SEQ ID NO: 807030 - RNA, 19 nt, Artificial Sequence
  Description of Artificial Sequence: Synthetic oligonucleotide
  Sense strand starting at position 937 of SEQ ID NO: 587637
uucuucuaguccuuggauu

SEQ ID NO: 807031 - RNA, 19 nt, Artificial Sequence
  Description of Artificial Sequence: Synthetic oligonucleotide
  Antisense strand to SEQ ID NO: 807030
aauccaaggacuagaagaa

SEQ ID NO: 807032 - RNA, 19 nt, Artificial Sequence
  Description of Artificial Sequence: Synthetic oligonucleotide
  Sense strand starting at position 1033 of SEQ ID NO: 587637
ugguacuacucccuaggaa

SEQ ID NO: 807033 - RNA, 19 nt, Artificial Sequence
  Description of Artificial Sequence: Synthetic oligonucleotide
  Antisense strand to SEQ ID NO: 807032
uuccuagggaguaguacca

SEQ ID NO: 807034 - RNA, 19 nt, Artificial Sequence
  Description of Artificial Sequence: Synthetic oligonucleotide
  Sense strand starting at position 1037 of SEQ ID NO: 587637
acuacucccuaggaagaaa

SEQ ID NO: 807035 - RNA, 19 nt, Artificial Sequence
  Description of Artificial Sequence: Synthetic oligonucleotide
  Antisense strand to SEQ ID NO: 807034
uuucuuccuagggaguagu

SEQ ID NO: 807036 - RNA, 19 nt, Artificial Sequence
  Description of Artificial Sequence: Synthetic oligonucleotide
  Sense strand starting at position 1099 of SEQ ID NO: 587637
gucugcugaguuuaauuau

SEQ ID NO: 807037 - RNA, 19 nt, Artificial Sequence
  Description of Artificial Sequence: Synthetic oligonucleotide
  Antisense strand to SEQ ID NO: 807036
auaauuaaacucagcagac

SEQ ID NO: 807038 - RNA, 19 nt, Artificial Sequence
  Description of Artificial Sequence: Synthetic oligonucleotide
  Sense strand starting at position 1252 of SEQ ID NO: 587637
aggugaagcgcugacaagu

SEQ ID NO: 807039 - RNA, 19 nt, Artificial Sequence
  Description of Artificial Sequence: Synthetic oligonucleotide
  Antisense strand to SEQ ID NO: 807038
acuugucagcgcuucaccu

SEQ ID NO: 807040 - RNA, 19 nt, Artificial Sequence
  Description of Artificial Sequence: Synthetic oligonucleotide
  Sense strand starting at position 1723 of SEQ ID NO: 587637
ggcguaauucccgcgacuc

SEQ ID NO: 807041 - RNA, 19 nt, Artificial Sequence
  Description of Artificial Sequence: Synthetic oligonucleotide
  Antisense strand to SEQ ID NO: 807040
gagucgcgggaauuacgcc

SEQ ID NO: 807042 - RNA, 19 nt, Artificial Sequence
  Description of Artificial Sequence: Synthetic oligonucleotide
  Sense strand starting at position 2144 of SEQ ID NO: 587637
ugggcuaaauaguuggaaa

SEQ ID NO: 807043 - RNA, 19 nt, Artificial Sequence
  Description of Artificial Sequence: Synthetic oligonucleotide
  Antisense strand to SEQ ID NO: 807042
uuuccaacuauuuagccca

SEQ ID NO: 807044 - RNA, 19 nt, Artificial Sequence
  Description of Artificial Sequence: Synthetic oligonucleotide
  Sense strand starting at position 2145 of SEQ ID NO: 587637
gggcuaaauaguuggaaag

SEQ ID NO: 807045 - RNA, 19 nt, Artificial Sequence
  Description of Artificial Sequence: Synthetic oligonucleotide
  Antisense strand to SEQ ID NO: 807044
cuuuccaacuauuuagccc

SEQ ID NO: 807046 - RNA, 19 nt, Artificial Sequence
  Description of Artificial Sequence: Synthetic oligonucleotide
  Sense strand starting at position 2180 of SEQ ID NO: 587637
ugcguuagaagugcguuua

SEQ ID NO: 807047 - RNA, 19 nt, Artificial Sequence
  Description of Artificial Sequence: Synthetic oligonucleotide
  Antisense strand to SEQ ID NO: 807046
uaaacgcacuucuaacgca

SEQ ID NO: 807048 - RNA, 19 nt, Artificial Sequence
  Description of Artificial Sequence: Synthetic oligonucleotide
  Sense strand starting at position 2203 of SEQ ID NO: 587637
gcaggaauuucgccuuccu

SEQ ID NO: 807049 - RNA, 19 nt, Artificial Sequence
  Description of Artificial Sequence: Synthetic oligonucleotide
  Antisense strand to SEQ ID NO: 807048
aggaaggcgaaauuccugc

SEQ ID NO: 807050 - RNA, 19 nt, Artificial Sequence
  Description of Artificial Sequence: Synthetic oligonucleotide
  Sense strand starting at position 2237 of SEQ ID NO: 587637
cccauuguacuguaaauuc

SEQ ID NO: 807051 - RNA, 19 nt, Artificial Sequence
  Description of Artificial Sequence: Synthetic oligonucleotide
  Antisense strand to SEQ ID NO: 807050
gaauuuacaguacaauggg

SEQ ID NO: 807052 - RNA, 19 nt, Artificial Sequence
  Description of Artificial Sequence: Synthetic oligonucleotide
  Sense strand starting at position 2336 of SEQ ID NO: 587637
auaugagggucuccuugau

SEQ ID NO: 807053 - RNA, 19 nt, Artificial Sequence
  Description of Artificial Sequence: Synthetic oligonucleotide
  Antisense strand to SEQ ID NO: 807052
aucaaggagacccucauau

SEQ ID NO: 807054 - RNA, 19 nt, Artificial Sequence
  Description of Artificial Sequence: Synthetic oligonucleotide
  Sense strand starting at position 2689 of SEQ ID NO: 587637
uuuggaaugucccuaagua

SEQ ID NO: 807055 - RNA, 19 nt, Artificial Sequence
  Description of Artificial Sequence: Synthetic oligonucleotide
  Antisense strand to SEQ ID NO: 807054
uacuuagggacauuccaaa

SEQ ID NO: 807056 - RNA, 19 nt, Artificial Sequence
  Description of Artificial Sequence: Synthetic oligonucleotide
  Sense strand starting at position 2690 of SEQ ID NO: 587637
uuggaaugucccuaaguau

SEQ ID NO: 807057 - RNA, 19 nt, Artificial Sequence
  Description of Artificial Sequence: Synthetic oligonucleotide
  Antisense strand to SEQ ID NO: 807056
auacuuagggacauuccaa

SEQ ID NO: 807058 - RNA, 19 nt, Artificial Sequence
  Description of Artificial Sequence: Synthetic oligonucleotide
  Sense strand starting at position 2832 of SEQ ID NO: 587637
uuaguuguccgucuaucuu

SEQ ID NO: 807059 - RNA, 19 nt, Artificial Sequence
  Description of Artificial Sequence: Synthetic oligonucleotide
  Antisense strand to SEQ ID NO: 807058
aagauagacggacaacuaa

SEQ ID NO: 807060 - RNA, 19 nt, Artificial Sequence
  Description of Artificial Sequence: Synthetic oligonucleotide
  Sense strand starting at position 2918 of SEQ ID NO: 587637
uugcaaguacuucgagaga

SEQ ID NO: 807061 - RNA, 19 nt, Artificial Sequence
  Description of Artificial Sequence: Synthetic oligonucleotide
  Antisense strand to SEQ ID NO: 807060
ucucucgaaguacuugcaa

SEQ ID NO: 807062 - RNA, 19 nt, Artificial Sequence
  Description of Artificial Sequence: Synthetic oligonucleotide
  Sense strand starting at position 2965 of SEQ ID NO: 587637
uuaagaaugccuugacuau

SEQ ID NO: 807063 - RNA, 19 nt, Artificial Sequence
  Description of Artificial Sequence: Synthetic oligonucleotide
  Antisense strand to SEQ ID NO: 807062
auagucaaggcauucuuaa

SEQ ID NO: 807064 - RNA, 19 nt, Artificial Sequence
  Description of Artificial Sequence: Synthetic oligonucleotide
  Sense strand starting at position 2998 of SEQ ID NO: 587637
ucugaugcucucuaauggu

SEQ ID NO: 807065 - RNA, 19 nt, Artificial Sequence
  Description of Artificial Sequence: Synthetic oligonucleotide
  Antisense strand to SEQ ID NO: 807064
accauuagagagcaucaga

SEQ ID NO: 807066 - RNA, 19 nt, Artificial Sequence
  Description of Artificial Sequence: Synthetic oligonucleotide
  Sense strand starting at position 3024 of SEQ ID NO: 587637
guguuaagaacacgaagua

SEQ ID NO: 807067 - RNA, 19 nt, Artificial Sequence
  Description of Artificial Sequence: Synthetic oligonucleotide
  Antisense strand to SEQ ID NO: 807066
uacuucguguucuuaacac

SEQ ID NO: 807068 - RNA, 19 nt, Artificial Sequence
  Description of Artificial Sequence: Synthetic oligonucleotide
  Sense strand starting at position 3037 of SEQ ID NO: 587637
gaaguacacugaucucaga

SEQ ID NO: 807069 - RNA, 19 nt, Artificial Sequence
  Description of Artificial Sequence: Synthetic oligonucleotide
  Antisense strand to SEQ ID NO: 807068
ucugagaucaguguacuuc

SEQ ID NO: 807070 - RNA, 19 nt, Artificial Sequence
  Description of Artificial Sequence: Synthetic oligonucleotide
  Sense strand starting at position 3060 of SEQ ID NO: 587637
ugcacaauuguaugaauca

SEQ ID NO: 807071 - RNA, 19 nt, Artificial Sequence
  Description of Artificial Sequence: Synthetic oligonucleotide
  Antisense strand to SEQ ID NO: 807070
ugauucauacaauugugca

SEQ ID NO: 807072 - RNA, 19 nt, Artificial Sequence
  Description of Artificial Sequence: Synthetic oligonucleotide
  Sense strand starting at position 3091 of SEQ ID NO: 587637
acuagcuaacuguauggua

SEQ ID NO: 807073 - RNA, 19 nt, Artificial Sequence
  Description of Artificial Sequence: Synthetic oligonucleotide
  Antisense strand to SEQ ID NO: 807072
uaccauacaguuagcuagu

SEQ ID NO: 807074 - RNA, 19 nt, Artificial Sequence
  Description of Artificial Sequence: Synthetic oligonucleotide
  Sense strand starting at position 3125 of SEQ ID NO: 587637
uuaaauucuccaggugagu

SEQ ID NO: 807075 - RNA, 19 nt, Artificial Sequence
  Description of Artificial Sequence: Synthetic oligonucleotide
  Antisense strand to SEQ ID NO: 807074
acucaccuggagaauuuaa

SEQ ID NO: 807076 - RNA, 19 nt, Artificial Sequence
  Description of Artificial Sequence: Synthetic oligonucleotide
  Sense strand starting at position 3166 of SEQ ID NO: 587637
uguuuaucucccgagacua

SEQ ID NO: 807077 - RNA, 19 nt, Artificial Sequence
  Description of Artificial Sequence: Synthetic oligonucleotide
  Antisense strand to SEQ ID NO: 807076
uagucucgggagauaaaca

SEQ ID NO: 807078 - RNA, 19 nt, Artificial Sequence
  Description of Artificial Sequence: Synthetic oligonucleotide
  Sense strand starting at position 3168 of SEQ ID NO: 587637
uuuaucucccgagacuauu

SEQ ID NO: 807079 - RNA, 19 nt, Artificial Sequence
  Description of Artificial Sequence: Synthetic oligonucleotide
  Antisense strand to SEQ ID NO: 807078
aauagucucgggagauaaa

SEQ ID NO: 807080 - RNA, 19 nt, Artificial Sequence
  Description of Artificial Sequence: Synthetic oligonucleotide
  Sense strand starting at position 3189 of SEQ ID NO: 587637
uggacucuugccuagaaca

SEQ ID NO: 807081 - RNA, 19 nt, Artificial Sequence
  Description of Artificial Sequence: Synthetic oligonucleotide
  Antisense strand to SEQ ID NO: 807080
uguucuaggcaagagucca

SEQ ID NO: 807082 - RNA, 19 nt, Artificial Sequence
  Description of Artificial Sequence: Synthetic oligonucleotide
  Sense strand starting at position 3745 of SEQ ID NO: 587637
gaugacacauggcuguaau

SEQ ID NO: 807083 - RNA, 19 nt, Artificial Sequence
  Description of Artificial Sequence: Synthetic oligonucleotide
  Antisense strand to SEQ ID NO: 807082
auuacagccaugugucauc

SEQ ID NO: 807084 - RNA, 19 nt, Artificial Sequence
  Description of Artificial Sequence: Synthetic oligonucleotide
  Sense strand starting at position 3905 of SEQ ID NO: 587637
augaguaaguuuguaucaa

SEQ ID NO: 807085 - RNA, 19 nt, Artificial Sequence
  Description of Artificial Sequence: Synthetic oligonucleotide
  Antisense strand to SEQ ID NO: 807084
uugauacaaacuuacucau

SEQ ID NO: 807086 - RNA, 19 nt, Artificial Sequence
  Description of Artificial Sequence: Synthetic oligonucleotide
  Sense strand starting at position 3943 of SEQ ID NO: 587637
uaguucugucuuugguaga

SEQ ID NO: 807087 - RNA, 19 nt, Artificial Sequence
  Description of Artificial Sequence: Synthetic oligonucleotide
  Antisense strand to SEQ ID NO: 807086
ucuaccaaagacagaacua

SEQ ID NO: 807088 - RNA, 19 nt, Artificial Sequence
  Description of Artificial Sequence: Synthetic oligonucleotide
  Sense strand starting at position 55 of SEQ ID NO: 587638
aggagaauccagcggaaac

SEQ ID NO: 807089 - RNA, 19 nt, Artificial Sequence
  Description of Artificial Sequence: Synthetic oligonucleotide
  Antisense strand to SEQ ID NO: 807088
guuuccgcuggauucuccu

SEQ ID NO: 807090 - RNA, 19 nt, Artificial Sequence
  Description of Artificial Sequence: Synthetic oligonucleotide
  Sense strand starting at position 56 of SEQ ID NO: 587638
ggagaauccagcggaaacu

SEQ ID NO: 807091 - RNA, 19 nt, Artificial Sequence
  Description of Artificial Sequence: Synthetic oligonucleotide
  Antisense strand to SEQ ID NO: 807090
aguuuccgcuggauucucc

SEQ ID NO: 807092 - RNA, 19 nt, Artificial Sequence
  Description of Artificial Sequence: Synthetic oligonucleotide
  Sense strand starting at position 65 of SEQ ID NO: 587638
agcggaaacuucuucccau

SEQ ID NO: 807093 - RNA, 19 nt, Artificial Sequence
  Description of Artificial Sequence: Synthetic oligonucleotide
  Antisense strand to SEQ ID NO: 807092
augggaagaaguuuccgcu

SEQ ID NO: 807094 - RNA, 19 nt, Artificial Sequence
  Description of Artificial Sequence: Synthetic oligonucleotide
  Sense strand starting at position 149 of SEQ ID NO: 587638
ugaguuccaguccgauuua

SEQ ID NO: 807095 - RNA, 19 nt, Artificial Sequence
  Description of Artificial Sequence: Synthetic oligonucleotide
  Antisense strand to SEQ ID NO: 807094
uaaaucggacuggaacuca

SEQ ID NO: 807096 - RNA, 19 nt, Artificial Sequence
  Description of Artificial Sequence: Synthetic oligonucleotide
  Sense strand starting at position 162 of SEQ ID NO: 587638
gauuuaagcggugguucca

SEQ ID NO: 807097 - RNA, 19 nt, Artificial Sequence
  Description of Artificial Sequence: Synthetic oligonucleotide
  Antisense strand to SEQ ID NO: 807096
uggaaccaccgcuuaaauc

SEQ ID NO: 807098 - RNA, 19 nt, Artificial Sequence
  Description of Artificial Sequence: Synthetic oligonucleotide
  Sense strand starting at position 243 of SEQ ID NO: 587638
uggccaugucuguaaauca

SEQ ID NO: 807099 - RNA, 19 nt, Artificial Sequence
  Description of Artificial Sequence: Synthetic oligonucleotide
  Antisense strand to SEQ ID NO: 807098
ugauuuacagacauggcca

SEQ ID NO: 807100 - RNA, 19 nt, Artificial Sequence
  Description of Artificial Sequence: Synthetic oligonucleotide
  Sense strand starting at position 281 of SEQ ID NO: 587638
gagagaaacgauugucuca

SEQ ID NO: 807101 - RNA, 19 nt, Artificial Sequence
  Description of Artificial Sequence: Synthetic oligonucleotide
  Antisense strand to SEQ ID NO: 807100
ugagacaaucguuucucuc

SEQ ID NO: 807102 - RNA, 19 nt, Artificial Sequence
  Description of Artificial Sequence: Synthetic oligonucleotide
  Sense strand starting at position 283 of SEQ ID NO: 587638
gagaaacgauugucucaaa

SEQ ID NO: 807103 - RNA, 19 nt, Artificial Sequence
  Description of Artificial Sequence: Synthetic oligonucleotide
  Antisense strand to SEQ ID NO: 807102
uuugagacaaucguuucuc

SEQ ID NO: 807104 - RNA, 19 nt, Artificial Sequence
  Description of Artificial Sequence: Synthetic oligonucleotide
  Sense strand starting at position 336 of SEQ ID NO: 587638
ccugacuuggaguagcuaa

SEQ ID NO: 807105 - RNA, 19 nt, Artificial Sequence
  Description of Artificial Sequence: Synthetic oligonucleotide
  Antisense strand to SEQ ID NO: 807104
uuagcuacuccaagucagg

SEQ ID NO: 807106 - RNA, 19 nt, Artificial Sequence
  Description of Artificial Sequence: Synthetic oligonucleotide
  Sense strand starting at position 417 of SEQ ID NO: 587638
ggagguugauaauccgaga

SEQ ID NO: 807107 - RNA, 19 nt, Artificial Sequence
  Description of Artificial Sequence: Synthetic oligonucleotide
  Antisense strand to SEQ ID NO: 807106
ucucggauuaucaaccucc

SEQ ID NO: 807108 - RNA, 19 nt, Artificial Sequence
  Description of Artificial Sequence: Synthetic oligonucleotide
  Sense strand starting at position 464 of SEQ ID NO: 587638
ggacuuugcccgcaggaua

SEQ ID NO: 807109 - RNA, 19 nt, Artificial Sequence
  Description of Artificial Sequence: Synthetic oligonucleotide
  Antisense strand to SEQ ID NO: 807108
uauccugcgggcaaagucc

SEQ ID NO: 807110 - RNA, 19 nt, Artificial Sequence
  Description of Artificial Sequence: Synthetic oligonucleotide
  Sense strand starting at position 477 of SEQ ID NO: 587638
aggauaauuuggugaaacu

SEQ ID NO: 807111 - RNA, 19 nt, Artificial Sequence
  Description of Artificial Sequence: Synthetic oligonucleotide
  Antisense strand to SEQ ID NO: 807110
aguuucaccaaauuauccu

SEQ ID NO: 807112 - RNA, 19 nt, Artificial Sequence
  Description of Artificial Sequence: Synthetic oligonucleotide
  Sense strand starting at position 486 of SEQ ID NO: 587638
uggugaaacucaucugacu

SEQ ID NO: 807113 - RNA, 19 nt, Artificial Sequence
  Description of Artificial Sequence: Synthetic oligonucleotide
  Antisense strand to SEQ ID NO: 807112
agucagaugaguuucacca

SEQ ID NO: 807114 - RNA, 19 nt, Artificial Sequence
  Description of Artificial Sequence: Synthetic oligonucleotide
  Sense strand starting at position 494 of SEQ ID NO: 587638
cucaucugacuuugagguu

SEQ ID NO: 807115 - RNA, 19 nt, Artificial Sequence
  Description of Artificial Sequence: Synthetic oligonucleotide
  Antisense strand to SEQ ID NO: 807114
aaccucaaagucagaugag

SEQ ID NO: 807116 - RNA, 19 nt, Artificial Sequence
  Description of Artificial Sequence: Synthetic oligonucleotide
  Sense strand starting at position 506 of SEQ ID NO: 587638
ugagguucugucguuuagu

SEQ ID NO: 807117 - RNA, 19 nt, Artificial Sequence
  Description of Artificial Sequence: Synthetic oligonucleotide
  Antisense strand to SEQ ID NO: 807116
acuaaacgacagaaccuca

SEQ ID NO: 807118 - RNA, 19 nt, Artificial Sequence
  Description of Artificial Sequence: Synthetic oligonucleotide
  Sense strand starting at position 1286 of SEQ ID NO: 587638
uggucuugagccuggagaa

SEQ ID NO: 807119 - RNA, 19 nt, Artificial Sequence
  Description of Artificial Sequence: Synthetic oligonucleotide
  Antisense strand to SEQ ID NO: 807118
uucuccaggcucaagacca

SEQ ID NO: 807120 - RNA, 19 nt, Artificial Sequence
  Description of Artificial Sequence: Synthetic oligonucleotide
  Sense strand starting at position 1287 of SEQ ID NO: 587638
ggucuugagccuggagaag

SEQ ID NO: 807121 - RNA, 19 nt, Artificial Sequence
  Description of Artificial Sequence: Synthetic oligonucleotide
  Antisense strand to SEQ ID NO: 807120
cuucuccaggcucaagacc

SEQ ID NO: 807122 - RNA, 19 nt, Artificial Sequence
  Description of Artificial Sequence: Synthetic oligonucleotide
  Sense strand starting at position 1952 of SEQ ID NO: 587638
aucuguacuccuuggaaca

SEQ ID NO: 807123 - RNA, 19 nt, Artificial Sequence
  Description of Artificial Sequence: Synthetic oligonucleotide
  Antisense strand to SEQ ID NO: 807122
uguuccaaggaguacagau

SEQ ID NO: 807124 - RNA, 19 nt, Artificial Sequence
  Description of Artificial Sequence: Synthetic oligonucleotide
  Sense strand starting at position 1953 of SEQ ID NO: 587638
ucuguacuccuuggaacaa

SEQ ID NO: 807125 - RNA, 19 nt, Artificial Sequence
  Description of Artificial Sequence: Synthetic oligonucleotide
  Antisense strand to SEQ ID NO: 807124
uuguuccaaggaguacaga

SEQ ID NO: 807126 - RNA, 19 nt, Artificial Sequence
  Description of Artificial Sequence: Synthetic oligonucleotide
  Sense strand starting at position 2330 of SEQ ID NO: 587638
caugauguaugauugucua

SEQ ID NO: 807127 - RNA, 19 nt, Artificial Sequence
  Description of Artificial Sequence: Synthetic oligonucleotide
  Antisense strand to SEQ ID NO: 807126
uagacaaucauacaucaug

SEQ ID NO: 807128 - RNA, 19 nt, Artificial Sequence
  Description of Artificial Sequence: Synthetic oligonucleotide
  Sense strand starting at position 2334 of SEQ ID NO: 587638
auguaugauugucuaccca

SEQ ID NO: 807129 - RNA, 19 nt, Artificial Sequence
  Description of Artificial Sequence: Synthetic oligonucleotide
  Antisense strand to SEQ ID NO: 807128
uggguagacaaucauacau

SEQ ID NO: 807130 - RNA, 19 nt, Artificial Sequence
  Description of Artificial Sequence: Synthetic oligonucleotide
  Sense strand starting at position 2553 of SEQ ID NO: 587638
cuagauagacguuaaguaa

SEQ ID NO: 807131 - RNA, 19 nt, Artificial Sequence
  Description of Artificial Sequence: Synthetic oligonucleotide
  Antisense strand to SEQ ID NO: 807130
uuacuuaacgucuaucuag

SEQ ID NO: 807132 - RNA, 19 nt, Artificial Sequence
  Description of Artificial Sequence: Synthetic oligonucleotide
  Sense strand starting at position 2580 of SEQ ID NO: 587638
aacuuauuaggcuaaguag

SEQ ID NO: 807133 - RNA, 19 nt, Artificial Sequence
  Description of Artificial Sequence: Synthetic oligonucleotide
  Antisense strand to SEQ ID NO: 807132
cuacuuagccuaauaaguu

SEQ ID NO: 807134 - RNA, 19 nt, Artificial Sequence
  Description of Artificial Sequence: Synthetic oligonucleotide
  Sense strand starting at position 2583 of SEQ ID NO: 587638
uuauuaggcuaaguagaaa

SEQ ID NO: 807135 - RNA, 19 nt, Artificial Sequence
  Description of Artificial Sequence: Synthetic oligonucleotide
  Antisense strand to SEQ ID NO: 807134
uuucuacuuagccuaauaa

SEQ ID NO: 807136 - RNA, 19 nt, Artificial Sequence
  Description of Artificial Sequence: Synthetic oligonucleotide
  Sense strand starting at position 2638 of SEQ ID NO: 587638
gucgguauucuagucagcu

SEQ ID NO: 807137 - RNA, 19 nt, Artificial Sequence
  Description of Artificial Sequence: Synthetic oligonucleotide
  Antisense strand to SEQ ID NO: 807136
agcugacuagaauaccgac

SEQ ID NO: 807138 - RNA, 19 nt, Artificial Sequence
  Description of Artificial Sequence: Synthetic oligonucleotide
  Sense strand starting at position 2701 of SEQ ID NO: 587638
uuccacuaucuugagaguu

SEQ ID NO: 807139 - RNA, 19 nt, Artificial Sequence
  Description of Artificial Sequence: Synthetic oligonucleotide
  Antisense strand to SEQ ID NO: 807138
aacucucaagauaguggaa

SEQ ID NO: 807140 - RNA, 19 nt, Artificial Sequence
  Description of Artificial Sequence: Synthetic oligonucleotide
  Sense strand starting at position 2799 of SEQ ID NO: 587638
agggaauccuugcuauugu

SEQ ID NO: 807141 - RNA, 19 nt, Artificial Sequence
  Description of Artificial Sequence: Synthetic oligonucleotide
  Antisense strand to SEQ ID NO: 807140
acaauagcaaggauucccu

SEQ ID NO: 807142 - RNA, 19 nt, Artificial Sequence
  Description of Artificial Sequence: Synthetic oligonucleotide
  Sense strand starting at position 2983 of SEQ ID NO: 587638
uuugcagucucauuauuuc

SEQ ID NO: 807143 - RNA, 19 nt, Artificial Sequence
  Description of Artificial Sequence: Synthetic oligonucleotide
  Antisense strand to SEQ ID NO: 807142
gaaauaaugagacugcaaa

SEQ ID NO: 807144 - RNA, 19 nt, Artificial Sequence
  Description of Artificial Sequence: Synthetic oligonucleotide
  Sense strand starting at position 2986 of SEQ ID NO: 587638
gcagucucauuauuuccua

SEQ ID NO: 807145 - RNA, 19 nt, Artificial Sequence
  Description of Artificial Sequence: Synthetic oligonucleotide
  Antisense strand to SEQ ID NO: 807144
uaggaaauaaugagacugc

SEQ ID NO: 807146 - RNA, 19 nt, Artificial Sequence
  Description of Artificial Sequence: Synthetic oligonucleotide
  Sense strand starting at position 3146 of SEQ ID NO: 587638
augaguuuggcauaugguu

SEQ ID NO: 807147 - RNA, 19 nt, Artificial Sequence
  Description of Artificial Sequence: Synthetic oligonucleotide
  Antisense strand to SEQ ID NO: 807146
aaccauaugccaaacucau

SEQ ID NO: 807148 - RNA, 19 nt, Artificial Sequence
  Description of Artificial Sequence: Synthetic oligonucleotide
  Sense strand starting at position 3179 of SEQ ID NO: 587638
ugaugaaacugagucguca

SEQ ID NO: 807149 - RNA, 19 nt, Artificial Sequence
  Description of Artificial Sequence: Synthetic oligonucleotide
  Antisense strand to SEQ ID NO: 807148
ugacgacucaguuucauca

SEQ ID NO: 807150 - RNA, 19 nt, Artificial Sequence
  Description of Artificial Sequence: Synthetic oligonucleotide
  Sense strand starting at position 3181 of SEQ ID NO: 587638
augaaacugagucgucaca

SEQ ID NO: 807151 - RNA, 19 nt, Artificial Sequence
  Description of Artificial Sequence: Synthetic oligonucleotide
  Antisense strand to SEQ ID NO: 807150
ugugacgacucaguuucau

SEQ ID NO: 807152 - RNA, 19 nt, Artificial Sequence
  Description of Artificial Sequence: Synthetic oligonucleotide
  Sense strand starting at position 3183 of SEQ ID NO: 587638
gaaacugagucgucacaca

SEQ ID NO: 807153 - RNA, 19 nt, Artificial Sequence
  Description of Artificial Sequence: Synthetic oligonucleotide
  Antisense strand to SEQ ID NO: 807152
ugugugacgacucaguuuc

SEQ ID NO: 807154 - RNA, 19 nt, Artificial Sequence
  Description of Artificial Sequence: Synthetic oligonucleotide
  Sense strand starting at position 3278 of SEQ ID NO: 587638
ggagucaguccaggacaga

SEQ ID NO: 807155 - RNA, 19 nt, Artificial Sequence
  Description of Artificial Sequence: Synthetic oligonucleotide
  Antisense strand to SEQ ID NO: 807154
ucuguccuggacugacucc

SEQ ID NO: 807156 - RNA, 19 nt, Artificial Sequence
  Description of Artificial Sequence: Synthetic oligonucleotide
  Sense strand starting at position 3638 of SEQ ID NO: 587638
gggaauauuugacagagug

SEQ ID NO: 807157 - RNA, 19 nt, Artificial Sequence
  Description of Artificial Sequence: Synthetic oligonucleotide
  Antisense strand to SEQ ID NO: 807156
cacucugucaaauauuccc

SEQ ID NO: 807158 - RNA, 19 nt, Artificial Sequence
  Description of Artificial Sequence: Synthetic oligonucleotide
  Sense strand starting at position 3660 of SEQ ID NO: 587638
aaaucuuuccuggagcguu

SEQ ID NO: 807159 - RNA, 19 nt, Artificial Sequence
  Description of Artificial Sequence: Synthetic oligonucleotide
  Antisense strand to SEQ ID NO: 807158
aacgcuccaggaaagauuu

SEQ ID NO: 807160 - RNA, 19 nt, Artificial Sequence
  Description of Artificial Sequence: Synthetic oligonucleotide
  Sense strand starting at position 3799 of SEQ ID NO: 587638
ugaagcuaucaguauaaau

SEQ ID NO: 807161 - RNA, 19 nt, Artificial Sequence
  Description of Artificial Sequence: Synthetic oligonucleotide
  Antisense strand to SEQ ID NO: 807160
auuuauacugauagcuuca

SEQ ID NO: 807162 - RNA, 19 nt, Artificial Sequence
  Description of Artificial Sequence: Synthetic oligonucleotide
  Sense strand starting at position 3868 of SEQ ID NO: 587638
uguuuauacaggugcagaa

SEQ ID NO: 807163 - RNA, 19 nt, Artificial Sequence
  Description of Artificial Sequence: Synthetic oligonucleotide
  Antisense strand to SEQ ID NO: 807162
uucugcaccuguauaaaca

SEQ ID NO: 807164 - RNA, 19 nt, Artificial Sequence
  Description of Artificial Sequence: Synthetic oligonucleotide
  Sense strand starting at position 3923 of SEQ ID NO: 587638
agcgcuagauuucucuaaa

SEQ ID NO: 807165 - RNA, 19 nt, Artificial Sequence
  Description of Artificial Sequence: Synthetic oligonucleotide
  Antisense strand to SEQ ID NO: 807164
uuuagagaaaucuagcgcu

SEQ ID NO: 807166 - RNA, 19 nt, Artificial Sequence
  Description of Artificial Sequence: Synthetic oligonucleotide
  Sense strand starting at position 3924 of SEQ ID NO: 587638
gcgcuagauuucucuaaac

SEQ ID NO: 807167 - RNA, 19 nt, Artificial Sequence
  Description of Artificial Sequence: Synthetic oligonucleotide
  Antisense strand to SEQ ID NO: 807166
guuuagagaaaucuagcgc

SEQ ID NO: 807168 - RNA, 19 nt, Artificial Sequence
  Description of Artificial Sequence: Synthetic oligonucleotide
  Sense strand starting at position 226 of SEQ ID NO: 587639
ggcccaucauauucuuaag

SEQ ID NO: 807169 - RNA, 19 nt, Artificial Sequence
  Description of Artificial Sequence: Synthetic oligonucleotide
  Antisense strand to SEQ ID NO: 807168
cuuaagaauaugaugggcc

SEQ ID NO: 807170 - RNA, 19 nt, Artificial Sequence
  Description of Artificial Sequence: Synthetic oligonucleotide
  Sense strand starting at position 284 of SEQ ID NO: 587639
ugugauccuccuuauuaua

SEQ ID NO: 807171 - RNA, 19 nt, Artificial Sequence
  Description of Artificial Sequence: Synthetic oligonucleotide
  Antisense strand to SEQ ID NO: 807170
uauaauaaggaggaucaca

SEQ ID NO: 807172 - RNA, 19 nt, Artificial Sequence
  Description of Artificial Sequence: Synthetic oligonucleotide
  Sense strand starting at position 399 of SEQ ID NO: 587639
aaggaacccgucuguaaga

SEQ ID NO: 807173 - RNA, 19 nt, Artificial Sequence
  Description of Artificial Sequence: Synthetic oligonucleotide
  Antisense strand to SEQ ID NO: 807172
ucuuacagacggguuccuu

SEQ ID NO: 807174 - RNA, 19 nt, Artificial Sequence
  Description of Artificial Sequence: Synthetic oligonucleotide
  Sense strand starting at position 401 of SEQ ID NO: 587639
ggaacccgucuguaagaca

SEQ ID NO: 807175 - RNA, 19 nt, Artificial Sequence
  Description of Artificial Sequence: Synthetic oligonucleotide
  Antisense strand to SEQ ID NO: 807174
ugucuuacagacggguucc

SEQ ID NO: 807176 - RNA, 19 nt, Artificial Sequence
  Description of Artificial Sequence: Synthetic oligonucleotide
  Sense strand starting at position 526 of SEQ ID NO: 587639
uugaguauugacugugaca

SEQ ID NO: 807177 - RNA, 19 nt, Artificial Sequence
  Description of Artificial Sequence: Synthetic oligonucleotide
  Antisense strand to SEQ ID NO: 807176
ugucacagucaauacucaa

SEQ ID NO: 807178 - RNA, 19 nt, Artificial Sequence
  Description of Artificial Sequence: Synthetic oligonucleotide
  Sense strand starting at position 528 of SEQ ID NO: 587639
gaguauugacugugacauc

SEQ ID NO: 807179 - RNA, 19 nt, Artificial Sequence
  Description of Artificial Sequence: Synthetic oligonucleotide
  Antisense strand to SEQ ID NO: 807178
gaugucacagucaauacuc

SEQ ID NO: 807180 - RNA, 19 nt, Artificial Sequence
  Description of Artificial Sequence: Synthetic oligonucleotide
  Sense strand starting at position 544 of SEQ ID NO: 587639
aucauuuagcugugugauc

SEQ ID NO: 807181 - RNA, 19 nt, Artificial Sequence
  Description of Artificial Sequence: Synthetic oligonucleotide
  Antisense strand to SEQ ID NO: 807180
gaucacacagcuaaaugau

SEQ ID NO: 807182 - RNA, 19 nt, Artificial Sequence
  Description of Artificial Sequence: Synthetic oligonucleotide
  Sense strand starting at position 545 of SEQ ID NO: 587639
ucauuuagcugugugaucu

SEQ ID NO: 807183 - RNA, 19 nt, Artificial Sequence
  Description of Artificial Sequence: Synthetic oligonucleotide
  Antisense strand to SEQ ID NO: 807182
agaucacacagcuaaauga

SEQ ID NO: 807184 - RNA, 19 nt, Artificial Sequence
  Description of Artificial Sequence: Synthetic oligonucleotide
  Sense strand starting at position 546 of SEQ ID NO: 587639
cauuuagcugugugaucuu

SEQ ID NO: 807185 - RNA, 19 nt, Artificial Sequence
  Description of Artificial Sequence: Synthetic oligonucleotide
  Antisense strand to SEQ ID NO: 807184
aagaucacacagcuaaaug

SEQ ID NO: 807186 - RNA, 19 nt, Artificial Sequence
  Description of Artificial Sequence: Synthetic oligonucleotide
  Sense strand starting at position 768 of SEQ ID NO: 587639
cggaaucuucaugagguac

SEQ ID NO: 807187 - RNA, 19 nt, Artificial Sequence
  Description of Artificial Sequence: Synthetic oligonucleotide
  Antisense strand to SEQ ID NO: 807186
guaccucaugaagauuccg

SEQ ID NO: 807188 - RNA, 19 nt, Artificial Sequence
  Description of Artificial Sequence: Synthetic oligonucleotide
  Sense strand starting at position 817 of SEQ ID NO: 587639
ggaacugaaauguguaagu

SEQ ID NO: 807189 - RNA, 19 nt, Artificial Sequence
  Description of Artificial Sequence: Synthetic oligonucleotide
  Antisense strand to SEQ ID NO: 807188
acuuacacauuucaguucc

SEQ ID NO: 807190 - RNA, 19 nt, Artificial Sequence
  Description of Artificial Sequence: Synthetic oligonucleotide
  Sense strand starting at position 822 of SEQ ID NO: 587639
ugaaauguguaaguaacua

SEQ ID NO: 807191 - RNA, 19 nt, Artificial Sequence
  Description of Artificial Sequence: Synthetic oligonucleotide
  Antisense strand to SEQ ID NO: 807190
uaguuacuuacacauuuca

SEQ ID NO: 807192 - RNA, 19 nt, Artificial Sequence
  Description of Artificial Sequence: Synthetic oligonucleotide
  Sense strand starting at position 827 of SEQ ID NO: 587639
uguguaaguaacuagucaa

SEQ ID NO: 807193 - RNA, 19 nt, Artificial Sequence
  Description of Artificial Sequence: Synthetic oligonucleotide
  Antisense strand to SEQ ID NO: 807192
uugacuaguuacuuacaca

SEQ ID NO: 807194 - RNA, 19 nt, Artificial Sequence
  Description of Artificial Sequence: Synthetic oligonucleotide
  Sense strand starting at position 898 of SEQ ID NO: 587639
cccagaagauuagcucuua

SEQ ID NO: 807195 - RNA, 19 nt, Artificial Sequence
  Description of Artificial Sequence: Synthetic oligonucleotide
  Antisense strand to SEQ ID NO: 807194
uaagagcuaaucuucuggg

SEQ ID NO: 807196 - RNA, 19 nt, Artificial Sequence
  Description of Artificial Sequence: Synthetic oligonucleotide
  Sense strand starting at position 1069 of SEQ ID NO: 587639
cuagcaucuccaugaagau

SEQ ID NO: 807197 - RNA, 19 nt, Artificial Sequence
  Description of Artificial Sequence: Synthetic oligonucleotide
  Antisense strand to SEQ ID NO: 807196
aucuucauggagaugcuag

SEQ ID NO: 807198 - RNA, 19 nt, Artificial Sequence
  Description of Artificial Sequence: Synthetic oligonucleotide
  Sense strand starting at position 1123 of SEQ ID NO: 587639
uuuggccucgccuauauuu

SEQ ID NO: 807199 - RNA, 19 nt, Artificial Sequence
  Description of Artificial Sequence: Synthetic oligonucleotide
  Antisense strand to SEQ ID NO: 807198
aaauauaggcgaggccaaa

SEQ ID NO: 807200 - RNA, 19 nt, Artificial Sequence
  Description of Artificial Sequence: Synthetic oligonucleotide
  Sense strand starting at position 1212 of SEQ ID NO: 587639
acuuaaggugcucaaauua

SEQ ID NO: 807201 - RNA, 19 nt, Artificial Sequence
  Description of Artificial Sequence: Synthetic oligonucleotide
  Antisense strand to SEQ ID NO: 807200
uaauuugagcaccuuaagu

SEQ ID NO: 807202 - RNA, 19 nt, Artificial Sequence
  Description of Artificial Sequence: Synthetic oligonucleotide
  Sense strand starting at position 1327 of SEQ ID NO: 587639
caaugaagugcauauagua

SEQ ID NO: 807203 - RNA, 19 nt, Artificial Sequence
  Description of Artificial Sequence: Synthetic oligonucleotide
  Antisense strand to SEQ ID NO: 807202
uacuauaugcacuucauug

SEQ ID NO: 807204 - RNA, 19 nt, Artificial Sequence
  Description of Artificial Sequence: Synthetic oligonucleotide
  Sense strand starting at position 1561 of SEQ ID NO: 587639
uguacuugugaacauauau

SEQ ID NO: 807205 - RNA, 19 nt, Artificial Sequence
  Description of Artificial Sequence: Synthetic oligonucleotide
  Antisense strand to SEQ ID NO: 807204
auauauguucacaaguaca

SEQ ID NO: 807206 - RNA, 19 nt, Artificial Sequence
  Description of Artificial Sequence: Synthetic oligonucleotide
  Sense strand starting at position 1893 of SEQ ID NO: 587639
gcaucugguacaugaagaa

SEQ ID NO: 807207 - RNA, 19 nt, Artificial Sequence
  Description of Artificial Sequence: Synthetic oligonucleotide
  Antisense strand to SEQ ID NO: 807206
uucuucauguaccagaugc

SEQ ID NO: 807208 - RNA, 19 nt, Artificial Sequence
  Description of Artificial Sequence: Synthetic oligonucleotide
  Sense strand starting at position 2445 of SEQ ID NO: 587639
cuauaauguugaguaaaga

SEQ ID NO: 807209 - RNA, 19 nt, Artificial Sequence
  Description of Artificial Sequence: Synthetic oligonucleotide
  Antisense strand to SEQ ID NO: 807208
ucuuuacucaacauuauag

SEQ ID NO: 807210 - RNA, 19 nt, Artificial Sequence
  Description of Artificial Sequence: Synthetic oligonucleotide
  Sense strand starting at position 2455 of SEQ ID NO: 587639
gaguaaagacuccauguuu

SEQ ID NO: 807211 - RNA, 19 nt, Artificial Sequence
  Description of Artificial Sequence: Synthetic oligonucleotide
  Antisense strand to SEQ ID NO: 807210
aaacauggagucuuuacuc

SEQ ID NO: 807212 - RNA, 19 nt, Artificial Sequence
  Description of Artificial Sequence: Synthetic oligonucleotide
  Sense strand starting at position 2766 of SEQ ID NO: 587639
aagacuccauguuuagaga

SEQ ID NO: 807213 - RNA, 19 nt, Artificial Sequence
  Description of Artificial Sequence: Synthetic oligonucleotide
  Antisense strand to SEQ ID NO: 807212
ucucuaaacauggagucuu

SEQ ID NO: 807214 - RNA, 19 nt, Artificial Sequence
  Description of Artificial Sequence: Synthetic oligonucleotide
  Sense strand starting at position 2856 of SEQ ID NO: 587639
agaauaugaugccuuagua

SEQ ID NO: 807215 - RNA, 19 nt, Artificial Sequence
  Description of Artificial Sequence: Synthetic oligonucleotide
  Antisense strand to SEQ ID NO: 807214
uacuaaggcaucauauucu

SEQ ID NO: 807216 - RNA, 19 nt, Artificial Sequence
  Description of Artificial Sequence: Synthetic oligonucleotide
  Sense strand starting at position 2860 of SEQ ID NO: 587639
uaugaugccuuaguaagaa

SEQ ID NO: 807217 - RNA, 19 nt, Artificial Sequence
  Description of Artificial Sequence: Synthetic oligonucleotide
  Antisense strand to SEQ ID NO: 807216
uucuuacuaaggcaucaua

SEQ ID NO: 807218 - RNA, 19 nt, Artificial Sequence
  Description of Artificial Sequence: Synthetic oligonucleotide
  Sense strand starting at position 2963 of SEQ ID NO: 587639
uuuccaguaguauaguaga

SEQ ID NO: 807219 - RNA, 19 nt, Artificial Sequence
  Description of Artificial Sequence: Synthetic oligonucleotide
  Antisense strand to SEQ ID NO: 807218
ucuacuauacuacuggaaa

SEQ ID NO: 807220 - RNA, 19 nt, Artificial Sequence
  Description of Artificial Sequence: Synthetic oligonucleotide
  Sense strand starting at position 2988 of SEQ ID NO: 587639
gaaucucaggcauggauca

SEQ ID NO: 807221 - RNA, 19 nt, Artificial Sequence
  Description of Artificial Sequence: Synthetic oligonucleotide
  Antisense strand to SEQ ID NO: 807220
ugauccaugccugagauuc

SEQ ID NO: 807222 - RNA, 19 nt, Artificial Sequence
  Description of Artificial Sequence: Synthetic oligonucleotide
  Sense strand starting at position 3062 of SEQ ID NO: 587639
cuccguuauuuacucacau

SEQ ID NO: 807223 - RNA, 19 nt, Artificial Sequence
  Description of Artificial Sequence: Synthetic oligonucleotide
  Antisense strand to SEQ ID NO: 807222
augugaguaaauaacggag

SEQ ID NO: 807224 - RNA, 19 nt, Artificial Sequence
  Description of Artificial Sequence: Synthetic oligonucleotide
  Sense strand starting at position 3063 of SEQ ID NO: 587639
uccguuauuuacucacauu

SEQ ID NO: 807225 - RNA, 19 nt, Artificial Sequence
  Description of Artificial Sequence: Synthetic oligonucleotide
  Antisense strand to SEQ ID NO: 807224
aaugugaguaaauaacgga

SEQ ID NO: 807226 - RNA, 19 nt, Artificial Sequence
  Description of Artificial Sequence: Synthetic oligonucleotide
  Sense strand starting at position 3121 of SEQ ID NO: 587639
uuacauuaaugagcuaagu

SEQ ID NO: 807227 - RNA, 19 nt, Artificial Sequence
  Description of Artificial Sequence: Synthetic oligonucleotide
  Antisense strand to SEQ ID NO: 807226
acuuagcucauuaauguaa

SEQ ID NO: 807228 - RNA, 19 nt, Artificial Sequence
  Description of Artificial Sequence: Synthetic oligonucleotide
  Sense strand starting at position 3145 of SEQ ID NO: 587639
aacugauauuucugggaga

SEQ ID NO: 807229 - RNA, 19 nt, Artificial Sequence
  Description of Artificial Sequence: Synthetic oligonucleotide
  Antisense strand to SEQ ID NO: 807228
ucucccagaaauaucaguu

SEQ ID NO: 807230 - RNA, 19 nt, Artificial Sequence
  Description of Artificial Sequence: Synthetic oligonucleotide
  Sense strand starting at position 3146 of SEQ ID NO: 587639
acugauauuucugggagaa

SEQ ID NO: 807231 - RNA, 19 nt, Artificial Sequence
  Description of Artificial Sequence: Synthetic oligonucleotide
  Antisense strand to SEQ ID NO: 807230
uucucccagaaauaucagu

SEQ ID NO: 807232 - RNA, 19 nt, Artificial Sequence
  Description of Artificial Sequence: Synthetic oligonucleotide
  Sense strand starting at position 3148 of SEQ ID NO: 587639
ugauauuucugggagaagg

SEQ ID NO: 807233 - RNA, 19 nt, Artificial Sequence
  Description of Artificial Sequence: Synthetic oligonucleotide
  Antisense strand to SEQ ID NO: 807232
ccuucucccagaaauauca

SEQ ID NO: 807234 - RNA, 19 nt, Artificial Sequence
  Description of Artificial Sequence: Synthetic oligonucleotide
  Sense strand starting at position 3159 of SEQ ID NO: 587639
ggagaagguguuuagcuua

SEQ ID NO: 807235 - RNA, 19 nt, Artificial Sequence
  Description of Artificial Sequence: Synthetic oligonucleotide
  Antisense strand to SEQ ID NO: 807234
uaagcuaaacaccuucucc

SEQ ID NO: 807236 - RNA, 19 nt, Artificial Sequence
  Description of Artificial Sequence: Synthetic oligonucleotide
  Sense strand starting at position 3277 of SEQ ID NO: 587639
acaauacgucugcaagaaa

SEQ ID NO: 807237 - RNA, 19 nt, Artificial Sequence
  Description of Artificial Sequence: Synthetic oligonucleotide
  Antisense strand to SEQ ID NO: 807236
uuucuugcagacguauugu

SEQ ID NO: 807238 - RNA, 19 nt, Artificial Sequence
  Description of Artificial Sequence: Synthetic oligonucleotide
  Sense strand starting at position 3280 of SEQ ID NO: 587639
auacgucugcaagaaagua

SEQ ID NO: 807239 - RNA, 19 nt, Artificial Sequence
  Description of Artificial Sequence: Synthetic oligonucleotide
  Antisense strand to SEQ ID NO: 807238
uacuuucuugcagacguau

SEQ ID NO: 807240 - RNA, 19 nt, Artificial Sequence
  Description of Artificial Sequence: Synthetic oligonucleotide
  Sense strand starting at position 3314 of SEQ ID NO: 587639
cggucuuugagagaugcaa

SEQ ID NO: 807241 - RNA, 19 nt, Artificial Sequence
  Description of Artificial Sequence: Synthetic oligonucleotide
  Antisense strand to SEQ ID NO: 807240
uugcaucucucaaagaccg

SEQ ID NO: 807242 - RNA, 19 nt, Artificial Sequence
  Description of Artificial Sequence: Synthetic oligonucleotide
  Sense strand starting at position 3316 of SEQ ID NO: 587639
gucuuugagagaugcaaag

SEQ ID NO: 807243 - RNA, 19 nt, Artificial Sequence
  Description of Artificial Sequence: Synthetic oligonucleotide
  Antisense strand to SEQ ID NO: 807242
cuuugcaucucucaaagac

SEQ ID NO: 807244 - RNA, 19 nt, Artificial Sequence
  Description of Artificial Sequence: Synthetic oligonucleotide
  Sense strand starting at position 3732 of SEQ ID NO: 587639
ucugucagugugcuuuauu

SEQ ID NO: 807245 - RNA, 19 nt, Artificial Sequence
  Description of Artificial Sequence: Synthetic oligonucleotide
  Antisense strand to SEQ ID NO: 807244
aauaaagcacacugacaga

SEQ ID NO: 807246 - RNA, 19 nt, Artificial Sequence
  Description of Artificial Sequence: Synthetic oligonucleotide
  Sense strand starting at position 3795 of SEQ ID NO: 587639
ugaccacuucccuauguga

SEQ ID NO: 807247 - RNA, 19 nt, Artificial Sequence
  Description of Artificial Sequence: Synthetic oligonucleotide
  Antisense strand to SEQ ID NO: 807246
ucacauagggaagugguca

SEQ ID NO: 807248 - RNA, 19 nt, Artificial Sequence
  Description of Artificial Sequence: Synthetic oligonucleotide
  Sense strand starting at position 1 of SEQ ID NO: 587640
cuugaaccaguuuggaaau

SEQ ID NO: 807249 - RNA, 19 nt, Artificial Sequence
  Description of Artificial Sequence: Synthetic oligonucleotide
  Antisense strand to SEQ ID NO: 807248
auuuccaaacugguucaag

SEQ ID NO: 807250 - RNA, 19 nt, Artificial Sequence
  Description of Artificial Sequence: Synthetic oligonucleotide
  Sense strand starting at position 104 of SEQ ID NO: 587640
gugugugaacgggaaguau

SEQ ID NO: 807251 - RNA, 19 nt, Artificial Sequence
  Description of Artificial Sequence: Synthetic oligonucleotide
  Antisense strand to SEQ ID NO: 807250
auacuucccguucacacac

SEQ ID NO: 807252 - RNA, 19 nt, Artificial Sequence
  Description of Artificial Sequence: Synthetic oligonucleotide
  Sense strand starting at position 343 of SEQ ID NO: 587640
cugaguagcaggugaaaug

SEQ ID NO: 807253 - RNA, 19 nt, Artificial Sequence
  Description of Artificial Sequence: Synthetic oligonucleotide
  Antisense strand to SEQ ID NO: 807252
cauuucaccugcuacucag

SEQ ID NO: 807254 - RNA, 19 nt, Artificial Sequence
  Description of Artificial Sequence: Synthetic oligonucleotide
  Sense strand starting at position 380 of SEQ ID NO: 587640
agaaacugcuaauucgauu

SEQ ID NO: 807255 - RNA, 19 nt, Artificial Sequence
  Description of Artificial Sequence: Synthetic oligonucleotide
  Antisense strand to SEQ ID NO: 807254
aaucgaauuagcaguuucu

SEQ ID NO: 807256 - RNA, 19 nt, Artificial Sequence
  Description of Artificial Sequence: Synthetic oligonucleotide
  Sense strand starting at position 470 of SEQ ID NO: 587640
cugauuauucuacgagaug

SEQ ID NO: 807257 - RNA, 19 nt, Artificial Sequence
  Description of Artificial Sequence: Synthetic oligonucleotide
  Antisense strand to SEQ ID NO: 807256
caucucguagaauaaucag

SEQ ID NO: 807258 - RNA, 19 nt, Artificial Sequence
  Description of Artificial Sequence: Synthetic oligonucleotide
  Sense strand starting at position 589 of SEQ ID NO: 587640
uugagccauguguagauua

SEQ ID NO: 807259 - RNA, 19 nt, Artificial Sequence
  Description of Artificial Sequence: Synthetic oligonucleotide
  Antisense strand to SEQ ID NO: 807258
uaaucuacacauggcucaa

SEQ ID NO: 807260 - RNA, 19 nt, Artificial Sequence
  Description of Artificial Sequence: Synthetic oligonucleotide
  Sense strand starting at position 591 of SEQ ID NO: 587640
gagccauguguagauuaaa

SEQ ID NO: 807261 - RNA, 19 nt, Artificial Sequence
  Description of Artificial Sequence: Synthetic oligonucleotide
  Antisense strand to SEQ ID NO: 807260
uuuaaucuacacauggcuc

SEQ ID NO: 807262 - RNA, 19 nt, Artificial Sequence
  Description of Artificial Sequence: Synthetic oligonucleotide
  Sense strand starting at position 594 of SEQ ID NO: 587640
ccauguguagauuaaacau

SEQ ID NO: 807263 - RNA, 19 nt, Artificial Sequence
  Description of Artificial Sequence: Synthetic oligonucleotide
  Antisense strand to SEQ ID NO: 807262
auguuuaaucuacacaugg

SEQ ID NO: 807264 - RNA, 19 nt, Artificial Sequence
  Description of Artificial Sequence: Synthetic oligonucleotide
  Sense strand starting at position 911 of SEQ ID NO: 587640
aucgaagcacgugaacauu

SEQ ID NO: 807265 - RNA, 19 nt, Artificial Sequence
  Description of Artificial Sequence: Synthetic oligonucleotide
  Antisense strand to SEQ ID NO: 807264
aauguucacgugcuucgau

SEQ ID NO: 807266 - RNA, 19 nt, Artificial Sequence
  Description of Artificial Sequence: Synthetic oligonucleotide
  Sense strand starting at position 980 of SEQ ID NO: 587640
cgacuagaaaguuguccaa

SEQ ID NO: 807267 - RNA, 19 nt, Artificial Sequence
  Description of Artificial Sequence: Synthetic oligonucleotide
  Antisense strand to SEQ ID NO: 807266
uuggacaacuuucuagucg

SEQ ID NO: 807268 - RNA, 19 nt, Artificial Sequence
  Description of Artificial Sequence: Synthetic oligonucleotide
  Sense strand starting at position 982 of SEQ ID NO: 587640
acuagaaaguuguccaagu

SEQ ID NO: 807269 - RNA, 19 nt, Artificial Sequence
  Description of Artificial Sequence: Synthetic oligonucleotide
  Antisense strand to SEQ ID NO: 807268
acuuggacaacuuucuagu

SEQ ID NO: 807270 - RNA, 19 nt, Artificial Sequence
  Description of Artificial Sequence: Synthetic oligonucleotide
  Sense strand starting at position 984 of SEQ ID NO: 587640
uagaaaguuguccaaguuu

SEQ ID NO: 807271 - RNA, 19 nt, Artificial Sequence
  Description of Artificial Sequence: Synthetic oligonucleotide
  Antisense strand to SEQ ID NO: 807270
aaacuuggacaacuuucua

SEQ ID NO: 807272 - RNA, 19 nt, Artificial Sequence
  Description of Artificial Sequence: Synthetic oligonucleotide
  Sense strand starting at position 1093 of SEQ ID NO: 587640
gugacucagccagaacacu

SEQ ID NO: 807273 - RNA, 19 nt, Artificial Sequence
  Description of Artificial Sequence: Synthetic oligonucleotide
  Antisense strand to SEQ ID NO: 807272
aguguucuggcugagucac

SEQ ID NO: 807274 - RNA, 19 nt, Artificial Sequence
  Description of Artificial Sequence: Synthetic oligonucleotide
  Sense strand starting at position 1119 of SEQ ID NO: 587640
gacgcaguuccacacuuaa

SEQ ID NO: 807275 - RNA, 19 nt, Artificial Sequence
  Description of Artificial Sequence: Synthetic oligonucleotide
  Antisense strand to SEQ ID NO: 807274
uuaaguguggaacugcguc

SEQ ID NO: 807276 - RNA, 19 nt, Artificial Sequence
  Description of Artificial Sequence: Synthetic oligonucleotide
  Sense strand starting at position 1161 of SEQ ID NO: 587640
ccggcauuucccgggacaa

SEQ ID NO: 807277 - RNA, 19 nt, Artificial Sequence
  Description of Artificial Sequence: Synthetic oligonucleotide
  Antisense strand to SEQ ID NO: 807276
uugucccgggaaaugccgg

SEQ ID NO: 807278 - RNA, 19 nt, Artificial Sequence
  Description of Artificial Sequence: Synthetic oligonucleotide
  Sense strand starting at position 1162 of SEQ ID NO: 587640
cggcauuucccgggacaac

SEQ ID NO: 807279 - RNA, 19 nt, Artificial Sequence
  Description of Artificial Sequence: Synthetic oligonucleotide
  Antisense strand to SEQ ID NO: 807278
guugucccgggaaaugccg

SEQ ID NO: 807280 - RNA, 19 nt, Artificial Sequence
  Description of Artificial Sequence: Synthetic oligonucleotide
  Sense strand starting at position 1347 of SEQ ID NO: 587640
aagugagaccgaugcacua

SEQ ID NO: 807281 - RNA, 19 nt, Artificial Sequence
  Description of Artificial Sequence: Synthetic oligonucleotide
  Antisense strand to SEQ ID NO: 807280
uagugcaucggucucacuu

SEQ ID NO: 807282 - RNA, 19 nt, Artificial Sequence
  Description of Artificial Sequence: Synthetic oligonucleotide
  Sense strand starting at position 1382 of SEQ ID NO: 587640
ccaguuuggcuccagaaga

SEQ ID NO: 807283 - RNA, 19 nt, Artificial Sequence
  Description of Artificial Sequence: Synthetic oligonucleotide
  Antisense strand to SEQ ID NO: 807282
ucuucuggagccaaacugg

SEQ ID NO: 807284 - RNA, 19 nt, Artificial Sequence
  Description of Artificial Sequence: Synthetic oligonucleotide
  Sense strand starting at position 2017 of SEQ ID NO: 587640
gacgaaguucucggacaga

SEQ ID NO: 807285 - RNA, 19 nt, Artificial Sequence
  Description of Artificial Sequence: Synthetic oligonucleotide
  Antisense strand to SEQ ID NO: 807284
ucuguccgagaacuucguc

SEQ ID NO: 807286 - RNA, 19 nt, Artificial Sequence
  Description of Artificial Sequence: Synthetic oligonucleotide
  Sense strand starting at position 2142 of SEQ ID NO: 587640
ccgacuucgcaguuuagca

SEQ ID NO: 807287 - RNA, 19 nt, Artificial Sequence
  Description of Artificial Sequence: Synthetic oligonucleotide
  Antisense strand to SEQ ID NO: 807286
ugcuaaacugcgaagucgg

SEQ ID NO: 807288 - RNA, 19 nt, Artificial Sequence
  Description of Artificial Sequence: Synthetic oligonucleotide
  Sense strand starting at position 2157 of SEQ ID NO: 587640
agcagugcccaguaagaua

SEQ ID NO: 807289 - RNA, 19 nt, Artificial Sequence
  Description of Artificial Sequence: Synthetic oligonucleotide
  Antisense strand to SEQ ID NO: 807288
uaucuuacugggcacugcu

SEQ ID NO: 807290 - RNA, 19 nt, Artificial Sequence
  Description of Artificial Sequence: Synthetic oligonucleotide
  Sense strand starting at position 2228 of SEQ ID NO: 587640
ugucaugacggccaucaga

SEQ ID NO: 807291 - RNA, 19 nt, Artificial Sequence
  Description of Artificial Sequence: Synthetic oligonucleotide
  Antisense strand to SEQ ID NO: 807290
ucugauggccgucaugaca

SEQ ID NO: 807292 - RNA, 19 nt, Artificial Sequence
  Description of Artificial Sequence: Synthetic oligonucleotide
  Sense strand starting at position 2250 of SEQ ID NO: 587640
guugcuauucguccaaagu

SEQ ID NO: 807293 - RNA, 19 nt, Artificial Sequence
  Description of Artificial Sequence: Synthetic oligonucleotide
  Antisense strand to SEQ ID NO: 807292
acuuuggacgaauagcaac

SEQ ID NO: 807294 - RNA, 19 nt, Artificial Sequence
  Description of Artificial Sequence: Synthetic oligonucleotide
  Sense strand starting at position 2516 of SEQ ID NO: 587640
aggugagugacuugggagu

SEQ ID NO: 807295 - RNA, 19 nt, Artificial Sequence
  Description of Artificial Sequence: Synthetic oligonucleotide
  Antisense strand to SEQ ID NO: 807294
acucccaagucacucaccu

SEQ ID NO: 807296 - RNA, 19 nt, Artificial Sequence
  Description of Artificial Sequence: Synthetic oligonucleotide
  Sense strand starting at position 2583 of SEQ ID NO: 587640
ggucgucucagaugaggga

SEQ ID NO: 807297 - RNA, 19 nt, Artificial Sequence
  Description of Artificial Sequence: Synthetic oligonucleotide
  Antisense strand to SEQ ID NO: 807296
ucccucaucugagacgacc

SEQ ID NO: 807298 - RNA, 19 nt, Artificial Sequence
  Description of Artificial Sequence: Synthetic oligonucleotide
  Sense strand starting at position 2643 of SEQ ID NO: 587640
cagcuucuugcauggauuu

SEQ ID NO: 807299 - RNA, 19 nt, Artificial Sequence
  Description of Artificial Sequence: Synthetic oligonucleotide
  Antisense strand to SEQ ID NO: 807298
aaauccaugcaagaagcug

SEQ ID NO: 807300 - RNA, 19 nt, Artificial Sequence
  Description of Artificial Sequence: Synthetic oligonucleotide
  Sense strand starting at position 2644 of SEQ ID NO: 587640
agcuucuugcauggauuua

SEQ ID NO: 807301 - RNA, 19 nt, Artificial Sequence
  Description of Artificial Sequence: Synthetic oligonucleotide
  Antisense strand to SEQ ID NO: 807300
uaaauccaugcaagaagcu

SEQ ID NO: 807302 - RNA, 19 nt, Artificial Sequence
  Description of Artificial Sequence: Synthetic oligonucleotide
  Sense strand starting at position 2678 of SEQ ID NO: 587640
ucauguggucuggacugua

SEQ ID NO: 807303 - RNA, 19 nt, Artificial Sequence
  Description of Artificial Sequence: Synthetic oligonucleotide
  Antisense strand to SEQ ID NO: 807302
uacaguccagaccacauga

SEQ ID NO: 807304 - RNA, 19 nt, Artificial Sequence
  Description of Artificial Sequence: Synthetic oligonucleotide
  Sense strand starting at position 2709 of SEQ ID NO: 587640
ggcuuagcagugcuauagu

SEQ ID NO: 807305 - RNA, 19 nt, Artificial Sequence
  Description of Artificial Sequence: Synthetic oligonucleotide
  Antisense strand to SEQ ID NO: 807304
acuauagcacugcuaagcc

SEQ ID NO: 807306 - RNA, 19 nt, Artificial Sequence
  Description of Artificial Sequence: Synthetic oligonucleotide
  Sense strand starting at position 2717 of SEQ ID NO: 587640
agugcuauaguguagaaug

SEQ ID NO: 807307 - RNA, 19 nt, Artificial Sequence
  Description of Artificial Sequence: Synthetic oligonucleotide
  Antisense strand to SEQ ID NO: 807306
cauucuacacuauagcacu

SEQ ID NO: 807308 - RNA, 19 nt, Artificial Sequence
  Description of Artificial Sequence: Synthetic oligonucleotide
  Sense strand starting at position 2908 of SEQ ID NO: 587640
aaggccuggucacuauuaa

SEQ ID NO: 807309 - RNA, 19 nt, Artificial Sequence
  Description of Artificial Sequence: Synthetic oligonucleotide
  Antisense strand to SEQ ID NO: 807308
uuaauagugaccaggccuu

SEQ ID NO: 807310 - RNA, 19 nt, Artificial Sequence
  Description of Artificial Sequence: Synthetic oligonucleotide
  Sense strand starting at position 2909 of SEQ ID NO: 587640
aggccuggucacuauuaag

SEQ ID NO: 807311 - RNA, 19 nt, Artificial Sequence
  Description of Artificial Sequence: Synthetic oligonucleotide
  Antisense strand to SEQ ID NO: 807310
cuuaauagugaccaggccu

SEQ ID NO: 807312 - RNA, 19 nt, Artificial Sequence
  Description of Artificial Sequence: Synthetic oligonucleotide
  Sense strand starting at position 2916 of SEQ ID NO: 587640
gucacuauuaagggucuga

SEQ ID NO: 807313 - RNA, 19 nt, Artificial Sequence
  Description of Artificial Sequence: Synthetic oligonucleotide
  Antisense strand to SEQ ID NO: 807312
ucagacccuuaauagugac

SEQ ID NO: 807314 - RNA, 19 nt, Artificial Sequence
  Description of Artificial Sequence: Synthetic oligonucleotide
  Sense strand starting at position 3069 of SEQ ID NO: 587640
gaagaauguuuagugugaa

SEQ ID NO: 807315 - RNA, 19 nt, Artificial Sequence
  Description of Artificial Sequence: Synthetic oligonucleotide
  Antisense strand to SEQ ID NO: 807314
uucacacuaaacauucuuc

SEQ ID NO: 807316 - RNA, 19 nt, Artificial Sequence
  Description of Artificial Sequence: Synthetic oligonucleotide
  Sense strand starting at position 3072 of SEQ ID NO: 587640
gaauguuuagugugaagaa

SEQ ID NO: 807317 - RNA, 19 nt, Artificial Sequence
  Description of Artificial Sequence: Synthetic oligonucleotide
  Antisense strand to SEQ ID NO: 807316
uucuucacacuaaacauuc

SEQ ID NO: 807318 - RNA, 19 nt, Artificial Sequence
  Description of Artificial Sequence: Synthetic oligonucleotide
  Sense strand starting at position 3087 of SEQ ID NO: 587640
agaaauaacuuacuuggca

SEQ ID NO: 807319 - RNA, 19 nt, Artificial Sequence
  Description of Artificial Sequence: Synthetic oligonucleotide
  Antisense strand to SEQ ID NO: 807318
ugccaaguaaguuauuucu

SEQ ID NO: 807320 - RNA, 19 nt, Artificial Sequence
  Description of Artificial Sequence: Synthetic oligonucleotide
  Sense strand starting at position 3091 of SEQ ID NO: 587640
auaacuuacuuggcaugau

SEQ ID NO: 807321 - RNA, 19 nt, Artificial Sequence
  Description of Artificial Sequence: Synthetic oligonucleotide
  Antisense strand to SEQ ID NO: 807320
aucaugccaaguaaguuau

SEQ ID NO: 807322 - RNA, 19 nt, Artificial Sequence
  Description of Artificial Sequence: Synthetic oligonucleotide
  Sense strand starting at position 3178 of SEQ ID NO: 587640
agacgccaucuuuaccaaa

SEQ ID NO: 807323 - RNA, 19 nt, Artificial Sequence
  Description of Artificial Sequence: Synthetic oligonucleotide
  Antisense strand to SEQ ID NO: 807322
uuugguaaagauggcgucu

SEQ ID NO: 807324 - RNA, 19 nt, Artificial Sequence
  Description of Artificial Sequence: Synthetic oligonucleotide
  Sense strand starting at position 3213 of SEQ ID NO: 587640
guauuuaaguaguugggca

SEQ ID NO: 807325 - RNA, 19 nt, Artificial Sequence
  Description of Artificial Sequence: Synthetic oligonucleotide
  Antisense strand to SEQ ID NO: 807324
ugcccaacuacuuaaauac

SEQ ID NO: 807326 - RNA, 19 nt, Artificial Sequence
  Description of Artificial Sequence: Synthetic oligonucleotide
  Sense strand starting at position 3432 of SEQ ID NO: 587640
gcguguauacauguaguau

SEQ ID NO: 807327 - RNA, 19 nt, Artificial Sequence
  Description of Artificial Sequence: Synthetic oligonucleotide
  Antisense strand to SEQ ID NO: 807326
auacuacauguauacacgc

SEQ ID NO: 807328 - RNA, 19 nt, Artificial Sequence
  Description of Artificial Sequence: Synthetic oligonucleotide
  Sense strand starting at position 79 of SEQ ID NO: 587641
uuaguauaagcaugaauga

SEQ ID NO: 807329 - RNA, 19 nt, Artificial Sequence
  Description of Artificial Sequence: Synthetic oligonucleotide
  Antisense strand to SEQ ID NO: 807328
ucauucaugcuuauacuaa

SEQ ID NO: 807330 - RNA, 19 nt, Artificial Sequence
  Description of Artificial Sequence: Synthetic oligonucleotide
  Sense strand starting at position 86 of SEQ ID NO: 587641
aagcaugaaugauccugua

SEQ ID NO: 807331 - RNA, 19 nt, Artificial Sequence
  Description of Artificial Sequence: Synthetic oligonucleotide
  Antisense strand to SEQ ID NO: 807330
uacaggaucauucaugcuu

SEQ ID NO: 807332 - RNA, 19 nt, Artificial Sequence
  Description of Artificial Sequence: Synthetic oligonucleotide
  Sense strand starting at position 171 of SEQ ID NO: 587641
ucaugucuuggcguccauu

SEQ ID NO: 807333 - RNA, 19 nt, Artificial Sequence
  Description of Artificial Sequence: Synthetic oligonucleotide
  Antisense strand to SEQ ID NO: 807332
aauggacgccaagacauga

SEQ ID NO: 807334 - RNA, 19 nt, Artificial Sequence
  Description of Artificial Sequence: Synthetic oligonucleotide
  Sense strand starting at position 203 of SEQ ID NO: 587641
cgacguaguguauaaagga

SEQ ID NO: 807335 - RNA, 19 nt, Artificial Sequence
  Description of Artificial Sequence: Synthetic oligonucleotide
  Antisense strand to SEQ ID NO: 807334
uccuuuauacacuacgucg

SEQ ID NO: 807336 - RNA, 19 nt, Artificial Sequence
  Description of Artificial Sequence: Synthetic oligonucleotide
  Sense strand starting at position 456 of SEQ ID NO: 587641
ucauuuaaggcgcgcaaua

SEQ ID NO: 807337 - RNA, 19 nt, Artificial Sequence
  Description of Artificial Sequence: Synthetic oligonucleotide
  Antisense strand to SEQ ID NO: 807336
uauugcgcgccuuaaauga

SEQ ID NO: 807338 - RNA, 19 nt, Artificial Sequence
  Description of Artificial Sequence: Synthetic oligonucleotide
  Sense strand starting at position 458 of SEQ ID NO: 587641
auuuaaggcgcgcaauaau

SEQ ID NO: 807339 - RNA, 19 nt, Artificial Sequence
  Description of Artificial Sequence: Synthetic oligonucleotide
  Antisense strand to SEQ ID NO: 807338
auuauugcgcgccuuaaau

SEQ ID NO: 807340 - RNA, 19 nt, Artificial Sequence
  Description of Artificial Sequence: Synthetic oligonucleotide
  Sense strand starting at position 496 of SEQ ID NO: 587641
uuuauugucgaaggauuaa

SEQ ID NO: 807341 - RNA, 19 nt, Artificial Sequence
  Description of Artificial Sequence: Synthetic oligonucleotide
  Antisense strand to SEQ ID NO: 807340
uuaauccuucgacaauaaa

SEQ ID NO: 807342 - RNA, 19 nt, Artificial Sequence
  Description of Artificial Sequence: Synthetic oligonucleotide
  Sense strand starting at position 584 of SEQ ID NO: 587641
augaguacuuaugugaaua

SEQ ID NO: 807343 - RNA, 19 nt, Artificial Sequence
  Description of Artificial Sequence: Synthetic oligonucleotide
  Antisense strand to SEQ ID NO: 807342
uauucacauaaguacucau

SEQ ID NO: 807344 - RNA, 19 nt, Artificial Sequence
  Description of Artificial Sequence: Synthetic oligonucleotide
  Sense strand starting at position 585 of SEQ ID NO: 587641
ugaguacuuaugugaauag

SEQ ID NO: 807345 - RNA, 19 nt, Artificial Sequence
  Description of Artificial Sequence: Synthetic oligonucleotide
  Antisense strand to SEQ ID NO: 807344
cuauucacauaaguacuca

SEQ ID NO: 807346 - RNA, 19 nt, Artificial Sequence
  Description of Artificial Sequence: Synthetic oligonucleotide
  Sense strand starting at position 617 of SEQ ID NO: 587641
guauucuuucggcauauaa

SEQ ID NO: 807347 - RNA, 19 nt, Artificial Sequence
  Description of Artificial Sequence: Synthetic oligonucleotide
  Antisense strand to SEQ ID NO: 807346
uuauaugccgaaagaauac

SEQ ID NO: 807348 - RNA, 19 nt, Artificial Sequence
  Description of Artificial Sequence: Synthetic oligonucleotide
  Sense strand starting at position 712 of SEQ ID NO: 587641
uuacaaucagggugaucca

SEQ ID NO: 807349 - RNA, 19 nt, Artificial Sequence
  Description of Artificial Sequence: Synthetic oligonucleotide
  Antisense strand to SEQ ID NO: 807348
uggaucacccugauuguaa

SEQ ID NO: 807350 - RNA, 19 nt, Artificial Sequence
  Description of Artificial Sequence: Synthetic oligonucleotide
  Sense strand starting at position 898 of SEQ ID NO: 587641
ucgguaaacuuucuaaauu

SEQ ID NO: 807351 - RNA, 19 nt, Artificial Sequence
  Description of Artificial Sequence: Synthetic oligonucleotide
  Antisense strand to SEQ ID NO: 807350
aauuuagaaaguuuaccga

SEQ ID NO: 807352 - RNA, 19 nt, Artificial Sequence
  Description of Artificial Sequence: Synthetic oligonucleotide
  Sense strand starting at position 2087 of SEQ ID NO: 587641
auguccuuugcggaucaau

SEQ ID NO: 807353 - RNA, 19 nt, Artificial Sequence
  Description of Artificial Sequence: Synthetic oligonucleotide
  Antisense strand to SEQ ID NO: 807352
auugauccgcaaaggacau

SEQ ID NO: 807354 - RNA, 19 nt, Artificial Sequence
  Description of Artificial Sequence: Synthetic oligonucleotide
  Sense strand starting at position 2090 of SEQ ID NO: 587641
uccuuugcggaucaauuaa

SEQ ID NO: 807355 - RNA, 19 nt, Artificial Sequence
  Description of Artificial Sequence: Synthetic oligonucleotide
  Antisense strand to SEQ ID NO: 807354
uuaauugauccgcaaagga

SEQ ID NO: 807356 - RNA, 19 nt, Artificial Sequence
  Description of Artificial Sequence: Synthetic oligonucleotide
  Sense strand starting at position 2097 of SEQ ID NO: 587641
cggaucaauuaauacauuu

SEQ ID NO: 807357 - RNA, 19 nt, Artificial Sequence
  Description of Artificial Sequence: Synthetic oligonucleotide
  Antisense strand to SEQ ID NO: 807356
aaauguauuaauugauccg

SEQ ID NO: 807358 - RNA, 19 nt, Artificial Sequence
  Description of Artificial Sequence: Synthetic oligonucleotide
  Sense strand starting at position 2227 of SEQ ID NO: 587641
auguucccggagcaauaau

SEQ ID NO: 807359 - RNA, 19 nt, Artificial Sequence
  Description of Artificial Sequence: Synthetic oligonucleotide
  Antisense strand to SEQ ID NO: 807358
auuauugcuccgggaacau

SEQ ID NO: 807360 - RNA, 19 nt, Artificial Sequence
  Description of Artificial Sequence: Synthetic oligonucleotide
  Sense strand starting at position 2277 of SEQ ID NO: 587641
uaaggaaucuguucccuag

SEQ ID NO: 807361 - RNA, 19 nt, Artificial Sequence
  Description of Artificial Sequence: Synthetic oligonucleotide
  Antisense strand to SEQ ID NO: 807360
cuagggaacagauuccuua

SEQ ID NO: 807362 - RNA, 19 nt, Artificial Sequence
  Description of Artificial Sequence: Synthetic oligonucleotide
  Sense strand starting at position 2279 of SEQ ID NO: 587641
aggaaucuguucccuagaa

SEQ ID NO: 807363 - RNA, 19 nt, Artificial Sequence
  Description of Artificial Sequence: Synthetic oligonucleotide
  Antisense strand to SEQ ID NO: 807362
uucuagggaacagauuccu

SEQ ID NO: 807364 - RNA, 19 nt, Artificial Sequence
  Description of Artificial Sequence: Synthetic oligonucleotide
  Sense strand starting at position 2280 of SEQ ID NO: 587641
ggaaucuguucccuagaaa

SEQ ID NO: 807365 - RNA, 19 nt, Artificial Sequence
  Description of Artificial Sequence: Synthetic oligonucleotide
  Antisense strand to SEQ ID NO: 807364
uuucuagggaacagauucc

SEQ ID NO: 807366 - RNA, 19 nt, Artificial Sequence
  Description of Artificial Sequence: Synthetic oligonucleotide
  Sense strand starting at position 2283 of SEQ ID NO: 587641
aucuguucccuagaaaugu

SEQ ID NO: 807367 - RNA, 19 nt, Artificial Sequence
  Description of Artificial Sequence: Synthetic oligonucleotide
  Antisense strand to SEQ ID NO: 807366
acauuucuagggaacagau

SEQ ID NO: 807368 - RNA, 19 nt, Artificial Sequence
  Description of Artificial Sequence: Synthetic oligonucleotide
  Sense strand starting at position 2293 of SEQ ID NO: 587641
uagaaauguccauaugcga

SEQ ID NO: 807369 - RNA, 19 nt, Artificial Sequence
  Description of Artificial Sequence: Synthetic oligonucleotide
  Antisense strand to SEQ ID NO: 807368
ucgcauauggacauuucua

SEQ ID NO: 807370 - RNA, 19 nt, Artificial Sequence
  Description of Artificial Sequence: Synthetic oligonucleotide
  Sense strand starting at position 2337 of SEQ ID NO: 587641
aauuucuccugugagaaga

SEQ ID NO: 807371 - RNA, 19 nt, Artificial Sequence
  Description of Artificial Sequence: Synthetic oligonucleotide
  Antisense strand to SEQ ID NO: 807370
ucuucucacaggagaaauu

SEQ ID NO: 807372 - RNA, 19 nt, Artificial Sequence
  Description of Artificial Sequence: Synthetic oligonucleotide
  Sense strand starting at position 2350 of SEQ ID NO: 587641
agaagagauguauguaacu

SEQ ID NO: 807373 - RNA, 19 nt, Artificial Sequence
  Description of Artificial Sequence: Synthetic oligonucleotide
  Antisense strand to SEQ ID NO: 807372
aguuacauacaucucuucu

SEQ ID NO: 807374 - RNA, 19 nt, Artificial Sequence
  Description of Artificial Sequence: Synthetic oligonucleotide
  Sense strand starting at position 2413 of SEQ ID NO: 587641
uuccuuguccugccgcaaa

SEQ ID NO: 807375 - RNA, 19 nt, Artificial Sequence
  Description of Artificial Sequence: Synthetic oligonucleotide
  Antisense strand to SEQ ID NO: 807374
uuugcggcaggacaaggaa

SEQ ID NO: 807376 - RNA, 19 nt, Artificial Sequence
  Description of Artificial Sequence: Synthetic oligonucleotide
  Sense strand starting at position 2429 of SEQ ID NO: 587641
aaagacucaugggagaaua

SEQ ID NO: 807377 - RNA, 19 nt, Artificial Sequence
  Description of Artificial Sequence: Synthetic oligonucleotide
  Antisense strand to SEQ ID NO: 807376
uauucucccaugagucuuu

SEQ ID NO: 807378 - RNA, 19 nt, Artificial Sequence
  Description of Artificial Sequence: Synthetic oligonucleotide
  Sense strand starting at position 2477 of SEQ ID NO: 587641
accguaugcccagaaaugu

SEQ ID NO: 807379 - RNA, 19 nt, Artificial Sequence
  Description of Artificial Sequence: Synthetic oligonucleotide
  Antisense strand to SEQ ID NO: 807378
acauuucugggcauacggu

SEQ ID NO: 807380 - RNA, 19 nt, Artificial Sequence
  Description of Artificial Sequence: Synthetic oligonucleotide
  Sense strand starting at position 2498 of SEQ ID NO: 587641
ugcuuuauccuauggagaa

SEQ ID NO: 807381 - RNA, 19 nt, Artificial Sequence
  Description of Artificial Sequence: Synthetic oligonucleotide
  Antisense strand to SEQ ID NO: 807380
uucuccauaggauaaagca

SEQ ID NO: 807382 - RNA, 19 nt, Artificial Sequence
  Description of Artificial Sequence: Synthetic oligonucleotide
  Sense strand starting at position 2527 of SEQ ID NO: 587641
uuugauugaucugcaacuu

SEQ ID NO: 807383 - RNA, 19 nt, Artificial Sequence
  Description of Artificial Sequence: Synthetic oligonucleotide
  Antisense strand to SEQ ID NO: 807382
aaguugcagaucaaucaaa

SEQ ID NO: 807384 - RNA, 19 nt, Artificial Sequence
  Description of Artificial Sequence: Synthetic oligonucleotide
  Sense strand starting at position 2528 of SEQ ID NO: 587641
uugauugaucugcaacuuu

SEQ ID NO: 807385 - RNA, 19 nt, Artificial Sequence
  Description of Artificial Sequence: Synthetic oligonucleotide
  Antisense strand to SEQ ID NO: 807384
aaaguugcagaucaaucaa

SEQ ID NO: 807386 - RNA, 19 nt, Artificial Sequence
  Description of Artificial Sequence: Synthetic oligonucleotide
  Sense strand starting at position 2838 of SEQ ID NO: 587641
acacuuaccugguuuaaga

SEQ ID NO: 807387 - RNA, 19 nt, Artificial Sequence
  Description of Artificial Sequence: Synthetic oligonucleotide
  Antisense strand to SEQ ID NO: 807386
ucuuaaaccagguaagugu

SEQ ID NO: 807388 - RNA, 19 nt, Artificial Sequence
  Description of Artificial Sequence: Synthetic oligonucleotide
  Sense strand starting at position 2867 of SEQ ID NO: 587641
accuaugaugcuugaacau

SEQ ID NO: 807389 - RNA, 19 nt, Artificial Sequence
  Description of Artificial Sequence: Synthetic oligonucleotide
  Antisense strand to SEQ ID NO: 807388
auguucaagcaucauaggu

SEQ ID NO: 807390 - RNA, 19 nt, Artificial Sequence
  Description of Artificial Sequence: Synthetic oligonucleotide
  Sense strand starting at position 2936 of SEQ ID NO: 587641
agugacuucuaguccuuga

SEQ ID NO: 807391 - RNA, 19 nt, Artificial Sequence
  Description of Artificial Sequence: Synthetic oligonucleotide
  Antisense strand to SEQ ID NO: 807390
ucaaggacuagaagucacu

SEQ ID NO: 807392 - RNA, 19 nt, Artificial Sequence
  Description of Artificial Sequence: Synthetic oligonucleotide
  Sense strand starting at position 3012 of SEQ ID NO: 587641
uccucaguuugcucauuua

SEQ ID NO: 807393 - RNA, 19 nt, Artificial Sequence
  Description of Artificial Sequence: Synthetic oligonucleotide
  Antisense strand to SEQ ID NO: 807392
uaaaugagcaaacugagga

SEQ ID NO: 807394 - RNA, 19 nt, Artificial Sequence
  Description of Artificial Sequence: Synthetic oligonucleotide
  Sense strand starting at position 3015 of SEQ ID NO: 587641
ucaguuugcucauuuacca

SEQ ID NO: 807395 - RNA, 19 nt, Artificial Sequence
  Description of Artificial Sequence: Synthetic oligonucleotide
  Antisense strand to SEQ ID NO: 807394
ugguaaaugagcaaacuga

SEQ ID NO: 807396 - RNA, 19 nt, Artificial Sequence
  Description of Artificial Sequence: Synthetic oligonucleotide
  Sense strand starting at position 3077 of SEQ ID NO: 587641
uacguuuaugcacauagau

SEQ ID NO: 807397 - RNA, 19 nt, Artificial Sequence
  Description of Artificial Sequence: Synthetic oligonucleotide
  Antisense strand to SEQ ID NO: 807396
aucuaugugcauaaacgua

SEQ ID NO: 807398 - RNA, 19 nt, Artificial Sequence
  Description of Artificial Sequence: Synthetic oligonucleotide
  Sense strand starting at position 3130 of SEQ ID NO: 587641
uugugugcuccgccaauca

SEQ ID NO: 807399 - RNA, 19 nt, Artificial Sequence
  Description of Artificial Sequence: Synthetic oligonucleotide
  Antisense strand to SEQ ID NO: 807398
ugauuggcggagcacacaa

SEQ ID NO: 807400 - RNA, 19 nt, Artificial Sequence
  Description of Artificial Sequence: Synthetic oligonucleotide
  Sense strand starting at position 3256 of SEQ ID NO: 587641
aaguuaugggaacggauca

SEQ ID NO: 807401 - RNA, 19 nt, Artificial Sequence
  Description of Artificial Sequence: Synthetic oligonucleotide
  Antisense strand to SEQ ID NO: 807400
ugauccguucccauaacuu

SEQ ID NO: 807402 - RNA, 19 nt, Artificial Sequence
  Description of Artificial Sequence: Synthetic oligonucleotide
  Sense strand starting at position 3489 of SEQ ID NO: 587641
accuguuaauagccaaaga

SEQ ID NO: 807403 - RNA, 19 nt, Artificial Sequence
  Description of Artificial Sequence: Synthetic oligonucleotide
  Antisense strand to SEQ ID NO: 807402
ucuuuggcuauuaacaggu

SEQ ID NO: 807404 - RNA, 19 nt, Artificial Sequence
  Description of Artificial Sequence: Synthetic oligonucleotide
  Sense strand starting at position 3662 of SEQ ID NO: 587641
ccaagaauucuaugucagc

SEQ ID NO: 807405 - RNA, 19 nt, Artificial Sequence
  Description of Artificial Sequence: Synthetic oligonucleotide
  Antisense strand to SEQ ID NO: 807404
gcugacauagaauucuugg

SEQ ID NO: 807406 - RNA, 19 nt, Artificial Sequence
  Description of Artificial Sequence: Synthetic oligonucleotide
  Sense strand starting at position 3826 of SEQ ID NO: 587641
gaagaaauauaggaguaag

SEQ ID NO: 807407 - RNA, 19 nt, Artificial Sequence
  Description of Artificial Sequence: Synthetic oligonucleotide
  Antisense strand to SEQ ID NO: 807406
cuuacuccuauauuucuuc

SEQ ID NO: 807408 - RNA, 19 nt, Artificial Sequence
  Description of Artificial Sequence: Synthetic oligonucleotide
  Sense strand starting at position 49 of SEQ ID NO: 587642
gcuagaguagcauacacau

SEQ ID NO: 807409 - RNA, 19 nt, Artificial Sequence
  Description of Artificial Sequence: Synthetic oligonucleotide
  Antisense strand to SEQ ID NO: 807408
auguguaugcuacucuagc

SEQ ID NO: 807410 - RNA, 19 nt, Artificial Sequence
  Description of Artificial Sequence: Synthetic oligonucleotide
  Sense strand starting at position 109 of SEQ ID NO: 587642
acaagagguucucuaauga

SEQ ID NO: 807411 - RNA, 19 nt, Artificial Sequence
  Description of Artificial Sequence: Synthetic oligonucleotide
  Antisense strand to SEQ ID NO: 807410
ucauuagagaaccucuugu

SEQ ID NO: 807412 - RNA, 19 nt, Artificial Sequence
  Description of Artificial Sequence: Synthetic oligonucleotide
  Sense strand starting at position 133 of SEQ ID NO: 587642
gagaaaggugcagauugua

SEQ ID NO: 807413 - RNA, 19 nt, Artificial Sequence
  Description of Artificial Sequence: Synthetic oligonucleotide
  Antisense strand to SEQ ID NO: 807412
uacaaucugcaccuuucuc

SEQ ID NO: 807414 - RNA, 19 nt, Artificial Sequence
  Description of Artificial Sequence: Synthetic oligonucleotide
  Sense strand starting at position 190 of SEQ ID NO: 587642
ccuuccuugcauggaaaga

SEQ ID NO: 807415 - RNA, 19 nt, Artificial Sequence
  Description of Artificial Sequence: Synthetic oligonucleotide
  Antisense strand to SEQ ID NO: 807414
ucuuuccaugcaaggaagg

SEQ ID NO: 807416 - RNA, 19 nt, Artificial Sequence
  Description of Artificial Sequence: Synthetic oligonucleotide
  Sense strand starting at position 318 of SEQ ID NO: 587642
cuaucaaagucaguaaaug

SEQ ID NO: 807417 - RNA, 19 nt, Artificial Sequence
  Description of Artificial Sequence: Synthetic oligonucleotide
  Antisense strand to SEQ ID NO: 807416
cauuuacugacuuugauag

SEQ ID NO: 807418 - RNA, 19 nt, Artificial Sequence
  Description of Artificial Sequence: Synthetic oligonucleotide
  Sense strand starting at position 477 of SEQ ID NO: 587642
uuaagagaaucagaacaga

SEQ ID NO: 807419 - RNA, 19 nt, Artificial Sequence
  Description of Artificial Sequence: Synthetic oligonucleotide
  Antisense strand to SEQ ID NO: 807418
ucuguucugauucucuuaa

SEQ ID NO: 807420 - RNA, 19 nt, Artificial Sequence
  Description of Artificial Sequence: Synthetic oligonucleotide
  Sense strand starting at position 537 of SEQ ID NO: 587642
uaaggaaauccguguggga

SEQ ID NO: 807421 - RNA, 19 nt, Artificial Sequence
  Description of Artificial Sequence: Synthetic oligonucleotide
  Antisense strand to SEQ ID NO: 807420
ucccacacggauuuccuua

SEQ ID NO: 807422 - RNA, 19 nt, Artificial Sequence
  Description of Artificial Sequence: Synthetic oligonucleotide
  Sense strand starting at position 779 of SEQ ID NO: 587642
guacacagucaagaaguau

SEQ ID NO: 807423 - RNA, 19 nt, Artificial Sequence
  Description of Artificial Sequence: Synthetic oligonucleotide
  Antisense strand to SEQ ID NO: 807422
auacuucuugacuguguac

SEQ ID NO: 807424 - RNA, 19 nt, Artificial Sequence
  Description of Artificial Sequence: Synthetic oligonucleotide
  Sense strand starting at position 807 of SEQ ID NO: 587642
cuccuuaggguccaaauua

SEQ ID NO: 807425 - RNA, 19 nt, Artificial Sequence
  Description of Artificial Sequence: Synthetic oligonucleotide
  Antisense strand to SEQ ID NO: 807424
uaauuuggacccuaaggag

SEQ ID NO: 807426 - RNA, 19 nt, Artificial Sequence
  Description of Artificial Sequence: Synthetic oligonucleotide
  Sense strand starting at position 815 of SEQ ID NO: 587642
gguccaaauuaauuaaguu

SEQ ID NO: 807427 - RNA, 19 nt, Artificial Sequence
  Description of Artificial Sequence: Synthetic oligonucleotide
  Antisense strand to SEQ ID NO: 807426
aacuuaauuaauuuggacc

SEQ ID NO: 807428 - RNA, 19 nt, Artificial Sequence
  Description of Artificial Sequence: Synthetic oligonucleotide
  Sense strand starting at position 877 of SEQ ID NO: 587642
uauacuuaccagggaaagu

SEQ ID NO: 807429 - RNA, 19 nt, Artificial Sequence
  Description of Artificial Sequence: Synthetic oligonucleotide
  Antisense strand to SEQ ID NO: 807428
acuuucccugguaaguaua

SEQ ID NO: 807430 - RNA, 19 nt, Artificial Sequence
  Description of Artificial Sequence: Synthetic oligonucleotide
  Sense strand starting at position 1275 of SEQ ID NO: 587642
gccuguuugaucgaaacaa

SEQ ID NO: 807431 - RNA, 19 nt, Artificial Sequence
  Description of Artificial Sequence: Synthetic oligonucleotide
  Antisense strand to SEQ ID NO: 807430
uuguuucgaucaaacaggc

SEQ ID NO: 807432 - RNA, 19 nt, Artificial Sequence
  Description of Artificial Sequence: Synthetic oligonucleotide
  Sense strand starting at position 1397 of SEQ ID NO: 587642
uuagguuauaugugggaug

SEQ ID NO: 807433 - RNA, 19 nt, Artificial Sequence
  Description of Artificial Sequence: Synthetic oligonucleotide
  Antisense strand to SEQ ID NO: 807432
caucccacauauaaccuaa

SEQ ID NO: 807434 - RNA, 19 nt, Artificial Sequence
  Description of Artificial Sequence: Synthetic oligonucleotide
  Sense strand starting at position 1415 of SEQ ID NO: 587642
gucuccucccauuagaugu

SEQ ID NO: 807435 - RNA, 19 nt, Artificial Sequence
  Description of Artificial Sequence: Synthetic oligonucleotide
  Antisense strand to SEQ ID NO: 807434
acaucuaaugggaggagac

SEQ ID NO: 807436 - RNA, 19 nt, Artificial Sequence
  Description of Artificial Sequence: Synthetic oligonucleotide
  Sense strand starting at position 1426 of SEQ ID NO: 587642
uuagauguaaauuguagga

SEQ ID NO: 807437 - RNA, 19 nt, Artificial Sequence
  Description of Artificial Sequence: Synthetic oligonucleotide
  Antisense strand to SEQ ID NO: 807436
uccuacaauuuacaucuaa

SEQ ID NO: 807438 - RNA, 19 nt, Artificial Sequence
  Description of Artificial Sequence: Synthetic oligonucleotide
  Sense strand starting at position 2015 of SEQ ID NO: 587642
uuaggucggcuggaaauua

SEQ ID NO: 807439 - RNA, 19 nt, Artificial Sequence
  Description of Artificial Sequence: Synthetic oligonucleotide
  Antisense strand to SEQ ID NO: 807438
uaauuuccagccgaccuaa

SEQ ID NO: 807440 - RNA, 19 nt, Artificial Sequence
  Description of Artificial Sequence: Synthetic oligonucleotide
  Sense strand starting at position 2082 of SEQ ID NO: 587642
gggaguuauucccuaaaua

SEQ ID NO: 807441 - RNA, 19 nt, Artificial Sequence
  Description of Artificial Sequence: Synthetic oligonucleotide
  Antisense strand to SEQ ID NO: 807440
uauuuagggaauaacuccc

SEQ ID NO: 807442 - RNA, 19 nt, Artificial Sequence
  Description of Artificial Sequence: Synthetic oligonucleotide
  Sense strand starting at position 2288 of SEQ ID NO: 587642
ccugcuaguagaggaauau

SEQ ID NO: 807443 - RNA, 19 nt, Artificial Sequence
  Description of Artificial Sequence: Synthetic oligonucleotide
  Antisense strand to SEQ ID NO: 807442
auauuccucuacuagcagg

SEQ ID NO: 807444 - RNA, 19 nt, Artificial Sequence
  Description of Artificial Sequence: Synthetic oligonucleotide
  Sense strand starting at position 2298 of SEQ ID NO: 587642
gaggaauaugucgaguuuc

SEQ ID NO: 807445 - RNA, 19 nt, Artificial Sequence
  Description of Artificial Sequence: Synthetic oligonucleotide
  Antisense strand to SEQ ID NO: 807444
gaaacucgacauauuccuc

SEQ ID NO: 807446 - RNA, 19 nt, Artificial Sequence
  Description of Artificial Sequence: Synthetic oligonucleotide
  Sense strand starting at position 2385 of SEQ ID NO: 587642
gcguugguuccggcagauu

SEQ ID NO: 807447 - RNA, 19 nt, Artificial Sequence
  Description of Artificial Sequence: Synthetic oligonucleotide
  Antisense strand to SEQ ID NO: 807446
aaucugccggaaccaacgc

SEQ ID NO: 807448 - RNA, 19 nt, Artificial Sequence
  Description of Artificial Sequence: Synthetic oligonucleotide
  Sense strand starting at position 2585 of SEQ ID NO: 587642
gcagaucggagagguaaua

SEQ ID NO: 807449 - RNA, 19 nt, Artificial Sequence
  Description of Artificial Sequence: Synthetic oligonucleotide
  Antisense strand to SEQ ID NO: 807448
uauuaccucuccgaucugc

SEQ ID NO: 807450 - RNA, 19 nt, Artificial Sequence
  Description of Artificial Sequence: Synthetic oligonucleotide
  Sense strand starting at position 2595 of SEQ ID NO: 587642
gagguaauaagguggauca

SEQ ID NO: 807451 - RNA, 19 nt, Artificial Sequence
  Description of Artificial Sequence: Synthetic oligonucleotide
  Antisense strand to SEQ ID NO: 807450
ugauccaccuuauuaccuc

SEQ ID NO: 807452 - RNA, 19 nt, Artificial Sequence
  Description of Artificial Sequence: Synthetic oligonucleotide
  Sense strand starting at position 2811 of SEQ ID NO: 587642
uacaguaauccaggcgaga

SEQ ID NO: 807453 - RNA, 19 nt, Artificial Sequence
  Description of Artificial Sequence: Synthetic oligonucleotide
  Antisense strand to SEQ ID NO: 807452
ucucgccuggauuacugua

SEQ ID NO: 807454 - RNA, 19 nt, Artificial Sequence
  Description of Artificial Sequence: Synthetic oligonucleotide
  Sense strand starting at position 3069 of SEQ ID NO: 587642
guuauaucggucuaagaug

SEQ ID NO: 807455 - RNA, 19 nt, Artificial Sequence
  Description of Artificial Sequence: Synthetic oligonucleotide
  Antisense strand to SEQ ID NO: 807454
caucuuagaccgauauaac

SEQ ID NO: 807456 - RNA, 19 nt, Artificial Sequence
  Description of Artificial Sequence: Synthetic oligonucleotide
  Sense strand starting at position 3077 of SEQ ID NO: 587642
ggucuaagaugacucucaa

SEQ ID NO: 807457 - RNA, 19 nt, Artificial Sequence
  Description of Artificial Sequence: Synthetic oligonucleotide
  Antisense strand to SEQ ID NO: 807456
uugagagucaucuuagacc

SEQ ID NO: 807458 - RNA, 19 nt, Artificial Sequence
  Description of Artificial Sequence: Synthetic oligonucleotide
  Sense strand starting at position 3133 of SEQ ID NO: 587642
guuuguugccugucuguga

SEQ ID NO: 807459 - RNA, 19 nt, Artificial Sequence
  Description of Artificial Sequence: Synthetic oligonucleotide
  Antisense strand to SEQ ID NO: 807458
ucacagacaggcaacaaac

SEQ ID NO: 807460 - RNA, 19 nt, Artificial Sequence
  Description of Artificial Sequence: Synthetic oligonucleotide
  Sense strand starting at position 3141 of SEQ ID NO: 587642
ccugucugugaugagauaa

SEQ ID NO: 807461 - RNA, 19 nt, Artificial Sequence
  Description of Artificial Sequence: Synthetic oligonucleotide
  Antisense strand to SEQ ID NO: 807460
uuaucucaucacagacagg

SEQ ID NO: 807462 - RNA, 19 nt, Artificial Sequence
  Description of Artificial Sequence: Synthetic oligonucleotide
  Sense strand starting at position 3302 of SEQ ID NO: 587642
uucuuauauguagacuagu

SEQ ID NO: 807463 - RNA, 19 nt, Artificial Sequence
  Description of Artificial Sequence: Synthetic oligonucleotide
  Antisense strand to SEQ ID NO: 807462
acuagucuacauauaagaa

SEQ ID NO: 807464 - RNA, 19 nt, Artificial Sequence
  Description of Artificial Sequence: Synthetic oligonucleotide
  Sense strand starting at position 3353 of SEQ ID NO: 587642
ccagcuagccucguucuau

SEQ ID NO: 807465 - RNA, 19 nt, Artificial Sequence
  Description of Artificial Sequence: Synthetic oligonucleotide
  Antisense strand to SEQ ID NO: 807464
auagaacgaggcuagcugg

SEQ ID NO: 807466 - RNA, 19 nt, Artificial Sequence
  Description of Artificial Sequence: Synthetic oligonucleotide
  Sense strand starting at position 3382 of SEQ ID NO: 587642
uuguuuagccucuugugua

SEQ ID NO: 807467 - RNA, 19 nt, Artificial Sequence
  Description of Artificial Sequence: Synthetic oligonucleotide
  Antisense strand to SEQ ID NO: 807466
uacacaagaggcuaaacaa

SEQ ID NO: 807468 - RNA, 19 nt, Artificial Sequence
  Description of Artificial Sequence: Synthetic oligonucleotide
  Sense strand starting at position 3395 of SEQ ID NO: 587642
uguguauaugcauagagaa

SEQ ID NO: 807469 - RNA, 19 nt, Artificial Sequence
  Description of Artificial Sequence: Synthetic oligonucleotide
  Antisense strand to SEQ ID NO: 807468
uucucuaugcauauacaca

SEQ ID NO: 807470 - RNA, 19 nt, Artificial Sequence
  Description of Artificial Sequence: Synthetic oligonucleotide
  Sense strand starting at position 3415 of SEQ ID NO: 587642
gcaucugguggagaucuuu

SEQ ID NO: 807471 - RNA, 19 nt, Artificial Sequence
  Description of Artificial Sequence: Synthetic oligonucleotide
  Antisense strand to SEQ ID NO: 807470
aaagaucuccaccagaugc

SEQ ID NO: 807472 - RNA, 19 nt, Artificial Sequence
  Description of Artificial Sequence: Synthetic oligonucleotide
  Sense strand starting at position 3426 of SEQ ID NO: 587642
agaucuuucuggccuagaa

SEQ ID NO: 807473 - RNA, 19 nt, Artificial Sequence
  Description of Artificial Sequence: Synthetic oligonucleotide
  Antisense strand to SEQ ID NO: 807472
uucuaggccagaaagaucu

SEQ ID NO: 807474 - RNA, 19 nt, Artificial Sequence
  Description of Artificial Sequence: Synthetic oligonucleotide
  Sense strand starting at position 3428 of SEQ ID NO: 587642
aucuuucuggccuagaauu

SEQ ID NO: 807475 - RNA, 19 nt, Artificial Sequence
  Description of Artificial Sequence: Synthetic oligonucleotide
  Antisense strand to SEQ ID NO: 807474
aauucuaggccagaaagau

SEQ ID NO: 807476 - RNA, 19 nt, Artificial Sequence
  Description of Artificial Sequence: Synthetic oligonucleotide
  Sense strand starting at position 3488 of SEQ ID NO: 587642
ugcucuauuccugaggcaa

SEQ ID NO: 807477 - RNA, 19 nt, Artificial Sequence
  Description of Artificial Sequence: Synthetic oligonucleotide
  Antisense strand to SEQ ID NO: 807476
uugccucaggaauagagca

SEQ ID NO: 807478 - RNA, 19 nt, Artificial Sequence
  Description of Artificial Sequence: Synthetic oligonucleotide
  Sense strand starting at position 3858 of SEQ ID NO: 587642
aaggaauaauuacuguguu

SEQ ID NO: 807479 - RNA, 19 nt, Artificial Sequence
  Description of Artificial Sequence: Synthetic oligonucleotide
  Antisense strand to SEQ ID NO: 807478
aacacaguaauuauuccuu

SEQ ID NO: 807480 - RNA, 19 nt, Artificial Sequence
  Description of Artificial Sequence: Synthetic oligonucleotide
  Sense strand starting at position 3875 of SEQ ID NO: 587642
uuugucuuugcagaaugau

SEQ ID NO: 807481 - RNA, 19 nt, Artificial Sequence
  Description of Artificial Sequence: Synthetic oligonucleotide
  Antisense strand to SEQ ID NO: 807480
aucauucugcaaagacaaa

SEQ ID NO: 807482 - RNA, 19 nt, Artificial Sequence
  Description of Artificial Sequence: Synthetic oligonucleotide
  Sense strand starting at position 3971 of SEQ ID NO: 587642
uguugacauuaauuguaga

SEQ ID NO: 807483 - RNA, 19 nt, Artificial Sequence
  Description of Artificial Sequence: Synthetic oligonucleotide
  Antisense strand to SEQ ID NO: 807482
ucuacaauuaaugucaaca

SEQ ID NO: 807484 - RNA, 19 nt, Artificial Sequence
  Description of Artificial Sequence: Synthetic oligonucleotide
  Sense strand starting at position 3976 of SEQ ID NO: 587642
acauuaauuguagaaacgu

SEQ ID NO: 807485 - RNA, 19 nt, Artificial Sequence
  Description of Artificial Sequence: Synthetic oligonucleotide
  Antisense strand to SEQ ID NO: 807484
acguuucuacaauuaaugu

SEQ ID NO: 807486 - RNA, 19 nt, Artificial Sequence
  Description of Artificial Sequence: Synthetic oligonucleotide
  Sense strand starting at position 3982 of SEQ ID NO: 587642
auuguagaaacgugaugau

SEQ ID NO: 807487 - RNA, 19 nt, Artificial Sequence
  Description of Artificial Sequence: Synthetic oligonucleotide
  Antisense strand to SEQ ID NO: 807486
aucaucacguuucuacaau

SEQ ID NO: 807488 - RNA, 19 nt, Artificial Sequence
  Description of Artificial Sequence: Synthetic oligonucleotide
  Sense strand starting at position 6 of SEQ ID NO: 587643
aaacucuuguuaguuggaa

SEQ ID NO: 807489 - RNA, 19 nt, Artificial Sequence
  Description of Artificial Sequence: Synthetic oligonucleotide
  Antisense strand to SEQ ID NO: 807488
uuccaacuaacaagaguuu

SEQ ID NO: 807490 - RNA, 19 nt, Artificial Sequence
  Description of Artificial Sequence: Synthetic oligonucleotide
  Sense strand starting at position 181 of SEQ ID NO: 587643
cacugacucuacguguaua

SEQ ID NO: 807491 - RNA, 19 nt, Artificial Sequence
  Description of Artificial Sequence: Synthetic oligonucleotide
  Antisense strand to SEQ ID NO: 807490
uauacacguagagucagug

SEQ ID NO: 807492 - RNA, 19 nt, Artificial Sequence
  Description of Artificial Sequence: Synthetic oligonucleotide
  Sense strand starting at position 250 of SEQ ID NO: 587643
uucguacuggcuuacugaa

SEQ ID NO: 807493 - RNA, 19 nt, Artificial Sequence
  Description of Artificial Sequence: Synthetic oligonucleotide
  Antisense strand to SEQ ID NO: 807492
uucaguaagccaguacgaa

SEQ ID NO: 807494 - RNA, 19 nt, Artificial Sequence
  Description of Artificial Sequence: Synthetic oligonucleotide
  Sense strand starting at position 286 of SEQ ID NO: 587643
agaucuuaauucgcuggau

SEQ ID NO: 807495 - RNA, 19 nt, Artificial Sequence
  Description of Artificial Sequence: Synthetic oligonucleotide
  Antisense strand to SEQ ID NO: 807494
auccagcgaauuaagaucu

SEQ ID NO: 807496 - RNA, 19 nt, Artificial Sequence
  Description of Artificial Sequence: Synthetic oligonucleotide
  Sense strand starting at position 287 of SEQ ID NO: 587643
gaucuuaauucgcuggaua

SEQ ID NO: 807497 - RNA, 19 nt, Artificial Sequence
  Description of Artificial Sequence: Synthetic oligonucleotide
  Antisense strand to SEQ ID NO: 807496
uauccagcgaauuaagauc

SEQ ID NO: 807498 - RNA, 19 nt, Artificial Sequence
  Description of Artificial Sequence: Synthetic oligonucleotide
  Sense strand starting at position 288 of SEQ ID NO: 587643
aucuuaauucgcuggauau

SEQ ID NO: 807499 - RNA, 19 nt, Artificial Sequence
  Description of Artificial Sequence: Synthetic oligonucleotide
  Antisense strand to SEQ ID NO: 807498
auauccagcgaauuaagau

SEQ ID NO: 807500 - RNA, 19 nt, Artificial Sequence
  Description of Artificial Sequence: Synthetic oligonucleotide
  Sense strand starting at position 289 of SEQ ID NO: 587643
ucuuaauucgcuggauaua

SEQ ID NO: 807501 - RNA, 19 nt, Artificial Sequence
  Description of Artificial Sequence: Synthetic oligonucleotide
  Antisense strand to SEQ ID NO: 807500
uauauccagcgaauuaaga

SEQ ID NO: 807502 - RNA, 19 nt, Artificial Sequence
  Description of Artificial Sequence: Synthetic oligonucleotide
  Sense strand starting at position 290 of SEQ ID NO: 587643
cuuaauucgcuggauauaa

SEQ ID NO: 807503 - RNA, 19 nt, Artificial Sequence
  Description of Artificial Sequence: Synthetic oligonucleotide
  Antisense strand to SEQ ID NO: 807502
uuauauccagcgaauuaag

SEQ ID NO: 807504 - RNA, 19 nt, Artificial Sequence
  Description of Artificial Sequence: Synthetic oligonucleotide
  Sense strand starting at position 429 of SEQ ID NO: 587643
ggcaauaaagaauguaaac

SEQ ID NO: 807505 - RNA, 19 nt, Artificial Sequence
  Description of Artificial Sequence: Synthetic oligonucleotide
  Antisense strand to SEQ ID NO: 807504
guuuacauucuuuauugcc

SEQ ID NO: 807506 - RNA, 19 nt, Artificial Sequence
  Description of Artificial Sequence: Synthetic oligonucleotide
  Sense strand starting at position 461 of SEQ ID NO: 587643
gccuaagacagacgugaug

SEQ ID NO: 807507 - RNA, 19 nt, Artificial Sequence
  Description of Artificial Sequence: Synthetic oligonucleotide
  Antisense strand to SEQ ID NO: 807506
caucacgucugucuuaggc

SEQ ID NO: 807508 - RNA, 19 nt, Artificial Sequence
  Description of Artificial Sequence: Synthetic oligonucleotide
  Sense strand starting at position 624 of SEQ ID NO: 587643
ucgccuuagcucuuucuca

SEQ ID NO: 807509 - RNA, 19 nt, Artificial Sequence
  Description of Artificial Sequence: Synthetic oligonucleotide
  Antisense strand to SEQ ID NO: 807508
ugagaaagagcuaaggcga

SEQ ID NO: 807510 - RNA, 19 nt, Artificial Sequence
  Description of Artificial Sequence: Synthetic oligonucleotide
  Sense strand starting at position 660 of SEQ ID NO: 587643
aagcguauuagguaaccga

SEQ ID NO: 807511 - RNA, 19 nt, Artificial Sequence
  Description of Artificial Sequence: Synthetic oligonucleotide
  Antisense strand to SEQ ID NO: 807510
ucgguuaccuaauacgcuu

SEQ ID NO: 807512 - RNA, 19 nt, Artificial Sequence
  Description of Artificial Sequence: Synthetic oligonucleotide
  Sense strand starting at position 857 of SEQ ID NO: 587643
gucucaaugugacuugaga

SEQ ID NO: 807513 - RNA, 19 nt, Artificial Sequence
  Description of Artificial Sequence: Synthetic oligonucleotide
  Antisense strand to SEQ ID NO: 807512
ucucaagucacauugagac

SEQ ID NO: 807514 - RNA, 19 nt, Artificial Sequence
  Description of Artificial Sequence: Synthetic oligonucleotide
  Sense strand starting at position 888 of SEQ ID NO: 587643
uuccgagcgcagucuuuau

SEQ ID NO: 807515 - RNA, 19 nt, Artificial Sequence
  Description of Artificial Sequence: Synthetic oligonucleotide
  Antisense strand to SEQ ID NO: 807514
auaaagacugcgcucggaa

SEQ ID NO: 807516 - RNA, 19 nt, Artificial Sequence
  Description of Artificial Sequence: Synthetic oligonucleotide
  Sense strand starting at position 892 of SEQ ID NO: 587643
gagcgcagucuuuauacaa

SEQ ID NO: 807517 - RNA, 19 nt, Artificial Sequence
  Description of Artificial Sequence: Synthetic oligonucleotide
  Antisense strand to SEQ ID NO: 807516
uuguauaaagacugcgcuc

SEQ ID NO: 807518 - RNA, 19 nt, Artificial Sequence
  Description of Artificial Sequence: Synthetic oligonucleotide
  Sense strand starting at position 977 of SEQ ID NO: 587643
ggaugcugugcuuauucua

SEQ ID NO: 807519 - RNA, 19 nt, Artificial Sequence
  Description of Artificial Sequence: Synthetic oligonucleotide
  Antisense strand to SEQ ID NO: 807518
uagaauaagcacagcaucc

SEQ ID NO: 807520 - RNA, 19 nt, Artificial Sequence
  Description of Artificial Sequence: Synthetic oligonucleotide
  Sense strand starting at position 984 of SEQ ID NO: 587643
gugcuuauucuagcgguga

SEQ ID NO: 807521 - RNA, 19 nt, Artificial Sequence
  Description of Artificial Sequence: Synthetic oligonucleotide
  Antisense strand to SEQ ID NO: 807520
ucaccgcuagaauaagcac

SEQ ID NO: 807522 - RNA, 19 nt, Artificial Sequence
  Description of Artificial Sequence: Synthetic oligonucleotide
  Sense strand starting at position 997 of SEQ ID NO: 587643
cggugacgguucccaaaga

SEQ ID NO: 807523 - RNA, 19 nt, Artificial Sequence
  Description of Artificial Sequence: Synthetic oligonucleotide
  Antisense strand to SEQ ID NO: 807522
ucuuugggaaccgucaccg

SEQ ID NO: 807524 - RNA, 19 nt, Artificial Sequence
  Description of Artificial Sequence: Synthetic oligonucleotide
  Sense strand starting at position 1095 of SEQ ID NO: 587643
guccuauacuuccugaguu

SEQ ID NO: 807525 - RNA, 19 nt, Artificial Sequence
  Description of Artificial Sequence: Synthetic oligonucleotide
  Antisense strand to SEQ ID NO: 807524
aacucaggaaguauaggac

SEQ ID NO: 807526 - RNA, 19 nt, Artificial Sequence
  Description of Artificial Sequence: Synthetic oligonucleotide
  Sense strand starting at position 2100 of SEQ ID NO: 587643
aggcgugucagggaagguu

SEQ ID NO: 807527 - RNA, 19 nt, Artificial Sequence
  Description of Artificial Sequence: Synthetic oligonucleotide
  Antisense strand to SEQ ID NO: 807526
aaccuucccugacacgccu

SEQ ID NO: 807528 - RNA, 19 nt, Artificial Sequence
  Description of Artificial Sequence: Synthetic oligonucleotide
  Sense strand starting at position 2387 of SEQ ID NO: 587643
ucuggaguguuauugaggu

SEQ ID NO: 807529 - RNA, 19 nt, Artificial Sequence
  Description of Artificial Sequence: Synthetic oligonucleotide
  Antisense strand to SEQ ID NO: 807528
accucaauaacacuccaga

SEQ ID NO: 807530 - RNA, 19 nt, Artificial Sequence
  Description of Artificial Sequence: Synthetic oligonucleotide
  Sense strand starting at position 2393 of SEQ ID NO: 587643
guguuauugagguggaauc

SEQ ID NO: 807531 - RNA, 19 nt, Artificial Sequence
  Description of Artificial Sequence: Synthetic oligonucleotide
  Antisense strand to SEQ ID NO: 807530
gauuccaccucaauaacac

SEQ ID NO: 807532 - RNA, 19 nt, Artificial Sequence
  Description of Artificial Sequence: Synthetic oligonucleotide
  Sense strand starting at position 2432 of SEQ ID NO: 587643
ccaguuggauccuuccaga

SEQ ID NO: 807533 - RNA, 19 nt, Artificial Sequence
  Description of Artificial Sequence: Synthetic oligonucleotide
  Antisense strand to SEQ ID NO: 807532
ucuggaaggauccaacugg

SEQ ID NO: 807534 - RNA, 19 nt, Artificial Sequence
  Description of Artificial Sequence: Synthetic oligonucleotide
  Sense strand starting at position 2479 of SEQ ID NO: 587643
acuguucuuccgggaccua

SEQ ID NO: 807535 - RNA, 19 nt, Artificial Sequence
  Description of Artificial Sequence: Synthetic oligonucleotide
  Antisense strand to SEQ ID NO: 807534
uaggucccggaagaacagu

SEQ ID NO: 807536 - RNA, 19 nt, Artificial Sequence
  Description of Artificial Sequence: Synthetic oligonucleotide
  Sense strand starting at position 2735 of SEQ ID NO: 587643
guauuuacuuauggaggga

SEQ ID NO: 807537 - RNA, 19 nt, Artificial Sequence
  Description of Artificial Sequence: Synthetic oligonucleotide
  Antisense strand to SEQ ID NO: 807536
ucccuccauaaguaaauac

SEQ ID NO: 807538 - RNA, 19 nt, Artificial Sequence
  Description of Artificial Sequence: Synthetic oligonucleotide
  Sense strand starting at position 2750 of SEQ ID NO: 587643
gggagcuuucucguuacgu

SEQ ID NO: 807539 - RNA, 19 nt, Artificial Sequence
  Description of Artificial Sequence: Synthetic oligonucleotide
  Antisense strand to SEQ ID NO: 807538
acguaacgagaaagcuccc

SEQ ID NO: 807540 - RNA, 19 nt, Artificial Sequence
  Description of Artificial Sequence: Synthetic oligonucleotide
  Sense strand starting at position 2833 of SEQ ID NO: 587643
uguugaccaucucugggau

SEQ ID NO: 807541 - RNA, 19 nt, Artificial Sequence
  Description of Artificial Sequence: Synthetic oligonucleotide
  Antisense strand to SEQ ID NO: 807540
aucccagagauggucaaca

SEQ ID NO: 807542 - RNA, 19 nt, Artificial Sequence
  Description of Artificial Sequence: Synthetic oligonucleotide
  Sense strand starting at position 2836 of SEQ ID NO: 587643
ugaccaucucugggaugca

SEQ ID NO: 807543 - RNA, 19 nt, Artificial Sequence
  Description of Artificial Sequence: Synthetic oligonucleotide
  Antisense strand to SEQ ID NO: 807542
ugcaucccagagaugguca

SEQ ID NO: 807544 - RNA, 19 nt, Artificial Sequence
  Description of Artificial Sequence: Synthetic oligonucleotide
  Sense strand starting at position 2845 of SEQ ID NO: 587643
cugggaugcagcuauagaa

SEQ ID NO: 807545 - RNA, 19 nt, Artificial Sequence
  Description of Artificial Sequence: Synthetic oligonucleotide
  Antisense strand to SEQ ID NO: 807544
uucuauagcugcaucccag

SEQ ID NO: 807546 - RNA, 19 nt, Artificial Sequence
  Description of Artificial Sequence: Synthetic oligonucleotide
  Sense strand starting at position 3271 of SEQ ID NO: 587643
aaaugaucauuagcgugua

SEQ ID NO: 807547 - RNA, 19 nt, Artificial Sequence
  Description of Artificial Sequence: Synthetic oligonucleotide
  Antisense strand to SEQ ID NO: 807546
uacacgcuaaugaucauuu

SEQ ID NO: 807548 - RNA, 19 nt, Artificial Sequence
  Description of Artificial Sequence: Synthetic oligonucleotide
  Sense strand starting at position 3276 of SEQ ID NO: 587643
aucauuagcguguaagcaa

SEQ ID NO: 807549 - RNA, 19 nt, Artificial Sequence
  Description of Artificial Sequence: Synthetic oligonucleotide
  Antisense strand to SEQ ID NO: 807548
uugcuuacacgcuaaugau

SEQ ID NO: 807550 - RNA, 19 nt, Artificial Sequence
  Description of Artificial Sequence: Synthetic oligonucleotide
  Sense strand starting at position 3283 of SEQ ID NO: 587643
gcguguaagcaacugucuu

SEQ ID NO: 807551 - RNA, 19 nt, Artificial Sequence
  Description of Artificial Sequence: Synthetic oligonucleotide
  Antisense strand to SEQ ID NO: 807550
aagacaguugcuuacacgc

SEQ ID NO: 807552 - RNA, 19 nt, Artificial Sequence
  Description of Artificial Sequence: Synthetic oligonucleotide
  Sense strand starting at position 3317 of SEQ ID NO: 587643
aggcuuucucaaggaauac

SEQ ID NO: 807553 - RNA, 19 nt, Artificial Sequence
  Description of Artificial Sequence: Synthetic oligonucleotide
  Antisense strand to SEQ ID NO: 807552
guauuccuugagaaagccu

SEQ ID NO: 807554 - RNA, 19 nt, Artificial Sequence
  Description of Artificial Sequence: Synthetic oligonucleotide
  Sense strand starting at position 3521 of SEQ ID NO: 587643
uagcaaauguuauugggau

SEQ ID NO: 807555 - RNA, 19 nt, Artificial Sequence
  Description of Artificial Sequence: Synthetic oligonucleotide
  Antisense strand to SEQ ID NO: 807554
aucccaauaacauuugcua

SEQ ID NO: 807556 - RNA, 19 nt, Artificial Sequence
  Description of Artificial Sequence: Synthetic oligonucleotide
  Sense strand starting at position 3523 of SEQ ID NO: 587643
gcaaauguuauugggaucu

SEQ ID NO: 807557 - RNA, 19 nt, Artificial Sequence
  Description of Artificial Sequence: Synthetic oligonucleotide
  Antisense strand to SEQ ID NO: 807556
agaucccaauaacauuugc

SEQ ID NO: 807558 - RNA, 19 nt, Artificial Sequence
  Description of Artificial Sequence: Synthetic oligonucleotide
  Sense strand starting at position 3529 of SEQ ID NO: 587643
guuauugggaucugcuuua

SEQ ID NO: 807559 - RNA, 19 nt, Artificial Sequence
  Description of Artificial Sequence: Synthetic oligonucleotide
  Antisense strand to SEQ ID NO: 807558
uaaagcagaucccaauaac

SEQ ID NO: 807560 - RNA, 19 nt, Artificial Sequence
  Description of Artificial Sequence: Synthetic oligonucleotide
  Sense strand starting at position 3585 of SEQ ID NO: 587643
aagauuucugcacguguuu

SEQ ID NO: 807561 - RNA, 19 nt, Artificial Sequence
  Description of Artificial Sequence: Synthetic oligonucleotide
  Antisense strand to SEQ ID NO: 807560
aaacacgugcagaaaucuu

SEQ ID NO: 807562 - RNA, 19 nt, Artificial Sequence
  Description of Artificial Sequence: Synthetic oligonucleotide
  Sense strand starting at position 3602 of SEQ ID NO: 587643
uuugguucuagagauguga

SEQ ID NO: 807563 - RNA, 19 nt, Artificial Sequence
  Description of Artificial Sequence: Synthetic oligonucleotide
  Antisense strand to SEQ ID NO: 807562
ucacaucucuagaaccaaa

SEQ ID NO: 807564 - RNA, 19 nt, Artificial Sequence
  Description of Artificial Sequence: Synthetic oligonucleotide
  Sense strand starting at position 3604 of SEQ ID NO: 587643
ugguucuagagaugugaag

SEQ ID NO: 807565 - RNA, 19 nt, Artificial Sequence
  Description of Artificial Sequence: Synthetic oligonucleotide
  Antisense strand to SEQ ID NO: 807564
cuucacaucucuagaacca

SEQ ID NO: 807566 - RNA, 19 nt, Artificial Sequence
  Description of Artificial Sequence: Synthetic oligonucleotide
  Sense strand starting at position 3610 of SEQ ID NO: 587643
uagagaugugaagggucau

SEQ ID NO: 807567 - RNA, 19 nt, Artificial Sequence
  Description of Artificial Sequence: Synthetic oligonucleotide
  Antisense strand to SEQ ID NO: 807566
augacccuucacaucucua

SEQ ID NO: 807568 - RNA, 19 nt, Artificial Sequence
  Description of Artificial Sequence: Synthetic oligonucleotide
  Sense strand starting at position 177 of SEQ ID NO: 587644
caaauacuugagggucuaa

SEQ ID NO: 807569 - RNA, 19 nt, Artificial Sequence
  Description of Artificial Sequence: Synthetic oligonucleotide
  Antisense strand to SEQ ID NO: 807568
uuagacccucaaguauuug

SEQ ID NO: 807570 - RNA, 19 nt, Artificial Sequence
  Description of Artificial Sequence: Synthetic oligonucleotide
  Sense strand starting at position 636 of SEQ ID NO: 587644
ugggauaggugguuucugu

SEQ ID NO: 807571 - RNA, 19 nt, Artificial Sequence
  Description of Artificial Sequence: Synthetic oligonucleotide
  Antisense strand to SEQ ID NO: 807570
acagaaaccaccuauccca

SEQ ID NO: 807572 - RNA, 19 nt, Artificial Sequence
  Description of Artificial Sequence: Synthetic oligonucleotide
  Sense strand starting at position 643 of SEQ ID NO: 587644
ggugguuucuguuagauuu

SEQ ID NO: 807573 - RNA, 19 nt, Artificial Sequence
  Description of Artificial Sequence: Synthetic oligonucleotide
  Antisense strand to SEQ ID NO: 807572
aaaucuaacagaaaccacc

SEQ ID NO: 807574 - RNA, 19 nt, Artificial Sequence
  Description of Artificial Sequence: Synthetic oligonucleotide
  Sense strand starting at position 728 of SEQ ID NO: 587644
gguagucauaagggcacua

SEQ ID NO: 807575 - RNA, 19 nt, Artificial Sequence
  Description of Artificial Sequence: Synthetic oligonucleotide
  Antisense strand to SEQ ID NO: 807574
uagugcccuuaugacuacc

SEQ ID NO: 807576 - RNA, 19 nt, Artificial Sequence
  Description of Artificial Sequence: Synthetic oligonucleotide
  Sense strand starting at position 755 of SEQ ID NO: 587644
gucagaagaccucgguugu

SEQ ID NO: 807577 - RNA, 19 nt, Artificial Sequence
  Description of Artificial Sequence: Synthetic oligonucleotide
  Antisense strand to SEQ ID NO: 807576
acaaccgaggucuucugac

SEQ ID NO: 807578 - RNA, 19 nt, Artificial Sequence
  Description of Artificial Sequence: Synthetic oligonucleotide
  Sense strand starting at position 759 of SEQ ID NO: 587644
gaagaccucgguugugcua

SEQ ID NO: 807579 - RNA, 19 nt, Artificial Sequence
  Description of Artificial Sequence: Synthetic oligonucleotide
  Antisense strand to SEQ ID NO: 807578
uagcacaaccgaggucuuc

SEQ ID NO: 807580 - RNA, 19 nt, Artificial Sequence
  Description of Artificial Sequence: Synthetic oligonucleotide
  Sense strand starting at position 795 of SEQ ID NO: 587644
cuggcagcagucuaacaaa

SEQ ID NO: 807581 - RNA, 19 nt, Artificial Sequence
  Description of Artificial Sequence: Synthetic oligonucleotide
  Antisense strand to SEQ ID NO: 807580
uuuguuagacugcugccag

SEQ ID NO: 807582 - RNA, 19 nt, Artificial Sequence
  Description of Artificial Sequence: Synthetic oligonucleotide
  Sense strand starting at position 1200 of SEQ ID NO: 587644
ggucucaucccuggaucca

SEQ ID NO: 807583 - RNA, 19 nt, Artificial Sequence
  Description of Artificial Sequence: Synthetic oligonucleotide
  Antisense strand to SEQ ID NO: 807582
uggauccagggaugagacc

SEQ ID NO: 807584 - RNA, 19 nt, Artificial Sequence
  Description of Artificial Sequence: Synthetic oligonucleotide
  Sense strand starting at position 1201 of SEQ ID NO: 587644
gucucaucccuggauccau

SEQ ID NO: 807585 - RNA, 19 nt, Artificial Sequence
  Description of Artificial Sequence: Synthetic oligonucleotide
  Antisense strand to SEQ ID NO: 807584
auggauccagggaugagac

SEQ ID NO: 807586 - RNA, 19 nt, Artificial Sequence
  Description of Artificial Sequence: Synthetic oligonucleotide
  Sense strand starting at position 1253 of SEQ ID NO: 587644
cuuguacugcucuaauguu

SEQ ID NO: 807587 - RNA, 19 nt, Artificial Sequence
  Description of Artificial Sequence: Synthetic oligonucleotide
  Antisense strand to SEQ ID NO: 807586
aacauuagagcaguacaag

SEQ ID NO: 807588 - RNA, 19 nt, Artificial Sequence
  Description of Artificial Sequence: Synthetic oligonucleotide
  Sense strand starting at position 1260 of SEQ ID NO: 587644
ugcucuaauguuugcggaa

SEQ ID NO: 807589 - RNA, 19 nt, Artificial Sequence
  Description of Artificial Sequence: Synthetic oligonucleotide
  Antisense strand to SEQ ID NO: 807588
uuccgcaaacauuagagca

SEQ ID NO: 807590 - RNA, 19 nt, Artificial Sequence
  Description of Artificial Sequence: Synthetic oligonucleotide
  Sense strand starting at position 1261 of SEQ ID NO: 587644
gcucuaauguuugcggaau

SEQ ID NO: 807591 - RNA, 19 nt, Artificial Sequence
  Description of Artificial Sequence: Synthetic oligonucleotide
  Antisense strand to SEQ ID NO: 807590
auuccgcaaacauuagagc

SEQ ID NO: 807592 - RNA, 19 nt, Artificial Sequence
  Description of Artificial Sequence: Synthetic oligonucleotide
  Sense strand starting at position 1267 of SEQ ID NO: 587644
auguuugcggaauggaaau

SEQ ID NO: 807593 - RNA, 19 nt, Artificial Sequence
  Description of Artificial Sequence: Synthetic oligonucleotide
  Antisense strand to SEQ ID NO: 807592
auuuccauuccgcaaacau

SEQ ID NO: 807594 - RNA, 19 nt, Artificial Sequence
  Description of Artificial Sequence: Synthetic oligonucleotide
  Sense strand starting at position 1346 of SEQ ID NO: 587644
augugcagauguguauaaa

SEQ ID NO: 807595 - RNA, 19 nt, Artificial Sequence
  Description of Artificial Sequence: Synthetic oligonucleotide
  Antisense strand to SEQ ID NO: 807594
uuuauacacaucugcacau

SEQ ID NO: 807596 - RNA, 19 nt, Artificial Sequence
  Description of Artificial Sequence: Synthetic oligonucleotide
  Sense strand starting at position 1485 of SEQ ID NO: 587644
ccuagugcuucgcuagaaa

SEQ ID NO: 807597 - RNA, 19 nt, Artificial Sequence
  Description of Artificial Sequence: Synthetic oligonucleotide
  Antisense strand to SEQ ID NO: 807596
uuucuagcgaagcacuagg

SEQ ID NO: 807598 - RNA, 19 nt, Artificial Sequence
  Description of Artificial Sequence: Synthetic oligonucleotide
  Sense strand starting at position 1673 of SEQ ID NO: 587644
uccugaggcuucucacacu

SEQ ID NO: 807599 - RNA, 19 nt, Artificial Sequence
  Description of Artificial Sequence: Synthetic oligonucleotide
  Antisense strand to SEQ ID NO: 807598
agugugagaagccucagga

SEQ ID NO: 807600 - RNA, 19 nt, Artificial Sequence
  Description of Artificial Sequence: Synthetic oligonucleotide
  Sense strand starting at position 1695 of SEQ ID NO: 587644
cuaauuagccagcaugguu

SEQ ID NO: 807601 - RNA, 19 nt, Artificial Sequence
  Description of Artificial Sequence: Synthetic oligonucleotide
  Antisense strand to SEQ ID NO: 807600
aaccaugcuggcuaauuag

SEQ ID NO: 807602 - RNA, 19 nt, Artificial Sequence
  Description of Artificial Sequence: Synthetic oligonucleotide
  Sense strand starting at position 2130 of SEQ ID NO: 587644
gcucgcuauuccucugaag

SEQ ID NO: 807603 - RNA, 19 nt, Artificial Sequence
  Description of Artificial Sequence: Synthetic oligonucleotide
  Antisense strand to SEQ ID NO: 807602
cuucagaggaauagcgagc

SEQ ID NO: 807604 - RNA, 19 nt, Artificial Sequence
  Description of Artificial Sequence: Synthetic oligonucleotide
  Sense strand starting at position 2132 of SEQ ID NO: 587644
ucgcuauuccucugaaguc

SEQ ID NO: 807605 - RNA, 19 nt, Artificial Sequence
  Description of Artificial Sequence: Synthetic oligonucleotide
  Antisense strand to SEQ ID NO: 807604
gacuucagaggaauagcga

SEQ ID NO: 807606 - RNA, 19 nt, Artificial Sequence
  Description of Artificial Sequence: Synthetic oligonucleotide
  Sense strand starting at position 2170 of SEQ ID NO: 587644
aaauuccucgagugguaga

SEQ ID NO: 807607 - RNA, 19 nt, Artificial Sequence
  Description of Artificial Sequence: Synthetic oligonucleotide
  Antisense strand to SEQ ID NO: 807606
ucuaccacucgaggaauuu

SEQ ID NO: 807608 - RNA, 19 nt, Artificial Sequence
  Description of Artificial Sequence: Synthetic oligonucleotide
  Sense strand starting at position 2186 of SEQ ID NO: 587644
agagaugccucagcuagga

SEQ ID NO: 807609 - RNA, 19 nt, Artificial Sequence
  Description of Artificial Sequence: Synthetic oligonucleotide
  Antisense strand to SEQ ID NO: 807608
uccuagcugaggcaucucu

SEQ ID NO: 807610 - RNA, 19 nt, Artificial Sequence
  Description of Artificial Sequence: Synthetic oligonucleotide
  Sense strand starting at position 3082 of SEQ ID NO: 587644
gaucccuuccuguggaacu

SEQ ID NO: 807611 - RNA, 19 nt, Artificial Sequence
  Description of Artificial Sequence: Synthetic oligonucleotide
  Antisense strand to SEQ ID NO: 807610
aguuccacaggaagggauc

SEQ ID NO: 807612 - RNA, 19 nt, Artificial Sequence
  Description of Artificial Sequence: Synthetic oligonucleotide
  Sense strand starting at position 3135 of SEQ ID NO: 587644
ugcacaugugugcugcaua

SEQ ID NO: 807613 - RNA, 19 nt, Artificial Sequence
  Description of Artificial Sequence: Synthetic oligonucleotide
  Antisense strand to SEQ ID NO: 807612
uaugcagcacacaugugca

SEQ ID NO: 807614 - RNA, 19 nt, Artificial Sequence
  Description of Artificial Sequence: Synthetic oligonucleotide
  Sense strand starting at position 3170 of SEQ ID NO: 587644
cagcacuucccguaugcau

SEQ ID NO: 807615 - RNA, 19 nt, Artificial Sequence
  Description of Artificial Sequence: Synthetic oligonucleotide
  Antisense strand to SEQ ID NO: 807614
augcauacgggaagugcug

SEQ ID NO: 807616 - RNA, 19 nt, Artificial Sequence
  Description of Artificial Sequence: Synthetic oligonucleotide
  Sense strand starting at position 3313 of SEQ ID NO: 587644
acccaucaucuguguacau

SEQ ID NO: 807617 - RNA, 19 nt, Artificial Sequence
  Description of Artificial Sequence: Synthetic oligonucleotide
  Antisense strand to SEQ ID NO: 807616
auguacacagaugaugggu

SEQ ID NO: 807618 - RNA, 19 nt, Artificial Sequence
  Description of Artificial Sequence: Synthetic oligonucleotide
  Sense strand starting at position 3393 of SEQ ID NO: 587644
aacauacgugcugaaaugu

SEQ ID NO: 807619 - RNA, 19 nt, Artificial Sequence
  Description of Artificial Sequence: Synthetic oligonucleotide
  Antisense strand to SEQ ID NO: 807618
acauuucagcacguauguu

SEQ ID NO: 807620 - RNA, 19 nt, Artificial Sequence
  Description of Artificial Sequence: Synthetic oligonucleotide
  Sense strand starting at position 3399 of SEQ ID NO: 587644
cgugcugaaaugugaucuu

SEQ ID NO: 807621 - RNA, 19 nt, Artificial Sequence
  Description of Artificial Sequence: Synthetic oligonucleotide
  Antisense strand to SEQ ID NO: 807620
aagaucacauuucagcacg

SEQ ID NO: 807622 - RNA, 19 nt, Artificial Sequence
  Description of Artificial Sequence: Synthetic oligonucleotide
  Sense strand starting at position 3402 of SEQ ID NO: 587644
gcugaaaugugaucuuguc

SEQ ID NO: 807623 - RNA, 19 nt, Artificial Sequence
  Description of Artificial Sequence: Synthetic oligonucleotide
  Antisense strand to SEQ ID NO: 807622
gacaagaucacauuucagc

SEQ ID NO: 807624 - RNA, 19 nt, Artificial Sequence
  Description of Artificial Sequence: Synthetic oligonucleotide
  Sense strand starting at position 3408 of SEQ ID NO: 587644
augugaucuuguccagcaa

SEQ ID NO: 807625 - RNA, 19 nt, Artificial Sequence
  Description of Artificial Sequence: Synthetic oligonucleotide
  Antisense strand to SEQ ID NO: 807624
uugcuggacaagaucacau

SEQ ID NO: 807626 - RNA, 19 nt, Artificial Sequence
  Description of Artificial Sequence: Synthetic oligonucleotide
  Sense strand starting at position 3409 of SEQ ID NO: 587644
ugugaucuuguccagcaau

SEQ ID NO: 807627 - RNA, 19 nt, Artificial Sequence
  Description of Artificial Sequence: Synthetic oligonucleotide
  Antisense strand to SEQ ID NO: 807626
auugcuggacaagaucaca

SEQ ID NO: 807628 - RNA, 19 nt, Artificial Sequence
  Description of Artificial Sequence: Synthetic oligonucleotide
  Sense strand starting at position 3448 of SEQ ID NO: 587644
aguaacugcuguguguuaa

SEQ ID NO: 807629 - RNA, 19 nt, Artificial Sequence
  Description of Artificial Sequence: Synthetic oligonucleotide
  Antisense strand to SEQ ID NO: 807628
uuaacacacagcaguuacu

SEQ ID NO: 807630 - RNA, 19 nt, Artificial Sequence
  Description of Artificial Sequence: Synthetic oligonucleotide
  Sense strand starting at position 3586 of SEQ ID NO: 587644
ucauguuaacucuggcacu

SEQ ID NO: 807631 - RNA, 19 nt, Artificial Sequence
  Description of Artificial Sequence: Synthetic oligonucleotide
  Antisense strand to SEQ ID NO: 807630
agugccagaguuaacauga

SEQ ID NO: 807632 - RNA, 19 nt, Artificial Sequence
  Description of Artificial Sequence: Synthetic oligonucleotide
  Sense strand starting at position 3610 of SEQ ID NO: 587644
uguggcuccucauuccuaa

SEQ ID NO: 807633 - RNA, 19 nt, Artificial Sequence
  Description of Artificial Sequence: Synthetic oligonucleotide
  Antisense strand to SEQ ID NO: 807632
uuaggaaugaggagccaca

SEQ ID NO: 807634 - RNA, 19 nt, Artificial Sequence
  Description of Artificial Sequence: Synthetic oligonucleotide
  Sense strand starting at position 3672 of SEQ ID NO: 587644
cgugguuccuacuuagaau

SEQ ID NO: 807635 - RNA, 19 nt, Artificial Sequence
  Description of Artificial Sequence: Synthetic oligonucleotide
  Antisense strand to SEQ ID NO: 807634
auucuaaguaggaaccacg

SEQ ID NO: 807636 - RNA, 19 nt, Artificial Sequence
  Description of Artificial Sequence: Synthetic oligonucleotide
  Sense strand starting at position 3673 of SEQ ID NO: 587644
gugguuccuacuuagaaug

SEQ ID NO: 807637 - RNA, 19 nt, Artificial Sequence
  Description of Artificial Sequence: Synthetic oligonucleotide
  Antisense strand to SEQ ID NO: 807636
cauucuaaguaggaaccac

SEQ ID NO: 807638 - RNA, 19 nt, Artificial Sequence
  Description of Artificial Sequence: Synthetic oligonucleotide
  Sense strand starting at position 3763 of SEQ ID NO: 587644
gccaacuuagaguagagua

SEQ ID NO: 807639 - RNA, 19 nt, Artificial Sequence
  Description of Artificial Sequence: Synthetic oligonucleotide
  Antisense strand to SEQ ID NO: 807638
uacucuacucuaaguuggc

SEQ ID NO: 807640 - RNA, 19 nt, Artificial Sequence
  Description of Artificial Sequence: Synthetic oligonucleotide
  Sense strand starting at position 3813 of SEQ ID NO: 587644
ggcuguguguccuuaauua

SEQ ID NO: 807641 - RNA, 19 nt, Artificial Sequence
  Description of Artificial Sequence: Synthetic oligonucleotide
  Antisense strand to SEQ ID NO: 807640
uaauuaaggacacacagcc

SEQ ID NO: 807642 - RNA, 19 nt, Artificial Sequence
  Description of Artificial Sequence: Synthetic oligonucleotide
  Sense strand starting at position 3817 of SEQ ID NO: 587644
guguguccuuaauuaaguu

SEQ ID NO: 807643 - RNA, 19 nt, Artificial Sequence
  Description of Artificial Sequence: Synthetic oligonucleotide
  Antisense strand to SEQ ID NO: 807642
aacuuaauuaaggacacac

SEQ ID NO: 807644 - RNA, 19 nt, Artificial Sequence
  Description of Artificial Sequence: Synthetic oligonucleotide
  Sense strand starting at position 3973 of SEQ ID NO: 587644
gucaguuacuucucuccca

SEQ ID NO: 807645 - RNA, 19 nt, Artificial Sequence
  Description of Artificial Sequence: Synthetic oligonucleotide
  Antisense strand to SEQ ID NO: 807644
ugggagagaaguaacugac

SEQ ID NO: 807646 - RNA, 19 nt, Artificial Sequence
  Description of Artificial Sequence: Synthetic oligonucleotide
  Sense strand starting at position 3976 of SEQ ID NO: 587644
aguuacuucucucccagua

SEQ ID NO: 807647 - RNA, 19 nt, Artificial Sequence
  Description of Artificial Sequence: Synthetic oligonucleotide
  Antisense strand to SEQ ID NO: 807646
uacugggagagaaguaacu

SEQ ID NO: 807648 - RNA, 19 nt, Artificial Sequence
  Description of Artificial Sequence: Synthetic oligonucleotide
  Sense strand starting at position 29 of SEQ ID NO: 587645
uucuuauagcaguagcaau

SEQ ID NO: 807649 - RNA, 19 nt, Artificial Sequence
  Description of Artificial Sequence: Synthetic oligonucleotide
  Antisense strand to SEQ ID NO: 807648
auugcuacugcuauaagaa

SEQ ID NO: 807650 - RNA, 19 nt, Artificial Sequence
  Description of Artificial Sequence: Synthetic oligonucleotide
  Sense strand starting at position 109 of SEQ ID NO: 587645
uguuuaaauccaggaccca

SEQ ID NO: 807651 - RNA, 19 nt, Artificial Sequence
  Description of Artificial Sequence: Synthetic oligonucleotide
  Antisense strand to SEQ ID NO: 807650
uggguccuggauuuaaaca

SEQ ID NO: 807652 - RNA, 19 nt, Artificial Sequence
  Description of Artificial Sequence: Synthetic oligonucleotide
  Sense strand starting at position 340 of SEQ ID NO: 587645
agggucuugcucuauucua

SEQ ID NO: 807653 - RNA, 19 nt, Artificial Sequence
  Description of Artificial Sequence: Synthetic oligonucleotide
  Antisense strand to SEQ ID NO: 807652
uagaauagagcaagacccu

SEQ ID NO: 807654 - RNA, 19 nt, Artificial Sequence
  Description of Artificial Sequence: Synthetic oligonucleotide
  Sense strand starting at position 794 of SEQ ID NO: 587645
agauguaaccuuggaaguu

SEQ ID NO: 807655 - RNA, 19 nt, Artificial Sequence
  Description of Artificial Sequence: Synthetic oligonucleotide
  Antisense strand to SEQ ID NO: 807654
aacuuccaagguuacaucu

SEQ ID NO: 807656 - RNA, 19 nt, Artificial Sequence
  Description of Artificial Sequence: Synthetic oligonucleotide
  Sense strand starting at position 887 of SEQ ID NO: 587645
cacagugguccacgucuau

SEQ ID NO: 807657 - RNA, 19 nt, Artificial Sequence
  Description of Artificial Sequence: Synthetic oligonucleotide
  Antisense strand to SEQ ID NO: 807656
auagacguggaccacugug

SEQ ID NO: 807658 - RNA, 19 nt, Artificial Sequence
  Description of Artificial Sequence: Synthetic oligonucleotide
  Sense strand starting at position 1422 of SEQ ID NO: 587645
ucuucuuaucaauaguugu

SEQ ID NO: 807659 - RNA, 19 nt, Artificial Sequence
  Description of Artificial Sequence: Synthetic oligonucleotide
  Antisense strand to SEQ ID NO: 807658
acaacuauugauaagaaga

SEQ ID NO: 807660 - RNA, 19 nt, Artificial Sequence
  Description of Artificial Sequence: Synthetic oligonucleotide
  Sense strand starting at position 1526 of SEQ ID NO: 587645
cauuaagagcgcugucaag

SEQ ID NO: 807661 - RNA, 19 nt, Artificial Sequence
  Description of Artificial Sequence: Synthetic oligonucleotide
  Antisense strand to SEQ ID NO: 807660
cuugacagcgcucuuaaug

SEQ ID NO: 807662 - RNA, 19 nt, Artificial Sequence
  Description of Artificial Sequence: Synthetic oligonucleotide
  Sense strand starting at position 1540 of SEQ ID NO: 587645
ucaaguguuggccaagcau

SEQ ID NO: 807663 - RNA, 19 nt, Artificial Sequence
  Description of Artificial Sequence: Synthetic oligonucleotide
  Antisense strand to SEQ ID NO: 807662
augcuuggccaacacuuga

SEQ ID NO: 807664 - RNA, 19 nt, Artificial Sequence
  Description of Artificial Sequence: Synthetic oligonucleotide
  Sense strand starting at position 1619 of SEQ ID NO: 587645
gcucuuaauggucacauga

SEQ ID NO: 807665 - RNA, 19 nt, Artificial Sequence
  Description of Artificial Sequence: Synthetic oligonucleotide
  Antisense strand to SEQ ID NO: 807664
ucaugugaccauuaagagc

SEQ ID NO: 807666 - RNA, 19 nt, Artificial Sequence
  Description of Artificial Sequence: Synthetic oligonucleotide
  Sense strand starting at position 1757 of SEQ ID NO: 587645
ucaagauguuggucauaua

SEQ ID NO: 807667 - RNA, 19 nt, Artificial Sequence
  Description of Artificial Sequence: Synthetic oligonucleotide
  Antisense strand to SEQ ID NO: 807666
uauaugaccaacaucuuga

SEQ ID NO: 807668 - RNA, 19 nt, Artificial Sequence
  Description of Artificial Sequence: Synthetic oligonucleotide
  Sense strand starting at position 1758 of SEQ ID NO: 587645
caagauguuggucauauau

SEQ ID NO: 807669 - RNA, 19 nt, Artificial Sequence
  Description of Artificial Sequence: Synthetic oligonucleotide
  Antisense strand to SEQ ID NO: 807668
auauaugaccaacaucuug

SEQ ID NO: 807670 - RNA, 19 nt, Artificial Sequence
  Description of Artificial Sequence: Synthetic oligonucleotide
  Sense strand starting at position 1814 of SEQ ID NO: 587645
aucuaaaugucgggauuua

SEQ ID NO: 807671 - RNA, 19 nt, Artificial Sequence
  Description of Artificial Sequence: Synthetic oligonucleotide
  Antisense strand to SEQ ID NO: 807670
uaaaucccgacauuuagau

SEQ ID NO: 807672 - RNA, 19 nt, Artificial Sequence
  Description of Artificial Sequence: Synthetic oligonucleotide
  Sense strand starting at position 2347 of SEQ ID NO: 587645
auuugcuugugaucagcuu

SEQ ID NO: 807673 - RNA, 19 nt, Artificial Sequence
  Description of Artificial Sequence: Synthetic oligonucleotide
  Antisense strand to SEQ ID NO: 807672
aagcugaucacaagcaaau

SEQ ID NO: 807674 - RNA, 19 nt, Artificial Sequence
  Description of Artificial Sequence: Synthetic oligonucleotide
  Sense strand starting at position 2351 of SEQ ID NO: 587645
gcuugugaucagcuugcuu

SEQ ID NO: 807675 - RNA, 19 nt, Artificial Sequence
  Description of Artificial Sequence: Synthetic oligonucleotide
  Antisense strand to SEQ ID NO: 807674
aagcaagcugaucacaagc

SEQ ID NO: 807676 - RNA, 19 nt, Artificial Sequence
  Description of Artificial Sequence: Synthetic oligonucleotide
  Sense strand starting at position 2353 of SEQ ID NO: 587645
uugugaucagcuugcuuaa

SEQ ID NO: 807677 - RNA, 19 nt, Artificial Sequence
  Description of Artificial Sequence: Synthetic oligonucleotide
  Antisense strand to SEQ ID NO: 807676
uuaagcaagcugaucacaa

SEQ ID NO: 807678 - RNA, 19 nt, Artificial Sequence
  Description of Artificial Sequence: Synthetic oligonucleotide
  Sense strand starting at position 2355 of SEQ ID NO: 587645
gugaucagcuugcuuaaag

SEQ ID NO: 807679 - RNA, 19 nt, Artificial Sequence
  Description of Artificial Sequence: Synthetic oligonucleotide
  Antisense strand to SEQ ID NO: 807678
cuuuaagcaagcugaucac

SEQ ID NO: 807680 - RNA, 19 nt, Artificial Sequence
  Description of Artificial Sequence: Synthetic oligonucleotide
  Sense strand starting at position 2356 of SEQ ID NO: 587645
ugaucagcuugcuuaaagu

SEQ ID NO: 807681 - RNA, 19 nt, Artificial Sequence
  Description of Artificial Sequence: Synthetic oligonucleotide
  Antisense strand to SEQ ID NO: 807680
acuuuaagcaagcugauca

SEQ ID NO: 807682 - RNA, 19 nt, Artificial Sequence
  Description of Artificial Sequence: Synthetic oligonucleotide
  Sense strand starting at position 2422 of SEQ ID NO: 587645
ucaguauucuuagcuggaa

SEQ ID NO: 807683 - RNA, 19 nt, Artificial Sequence
  Description of Artificial Sequence: Synthetic oligonucleotide
  Antisense strand to SEQ ID NO: 807682
uuccagcuaagaauacuga

SEQ ID NO: 807684 - RNA, 19 nt, Artificial Sequence
  Description of Artificial Sequence: Synthetic oligonucleotide
  Sense strand starting at position 2423 of SEQ ID NO: 587645
caguauucuuagcuggaag

SEQ ID NO: 807685 - RNA, 19 nt, Artificial Sequence
  Description of Artificial Sequence: Synthetic oligonucleotide
  Antisense strand to SEQ ID NO: 807684
cuuccagcuaagaauacug

SEQ ID NO: 807686 - RNA, 19 nt, Artificial Sequence
  Description of Artificial Sequence: Synthetic oligonucleotide
  Sense strand starting at position 2425 of SEQ ID NO: 587645
guauucuuagcuggaagca

SEQ ID NO: 807687 - RNA, 19 nt, Artificial Sequence
  Description of Artificial Sequence: Synthetic oligonucleotide
  Antisense strand to SEQ ID NO: 807686
ugcuuccagcuaagaauac

SEQ ID NO: 807688 - RNA, 19 nt, Artificial Sequence
  Description of Artificial Sequence: Synthetic oligonucleotide
  Sense strand starting at position 2565 of SEQ ID NO: 587645
cagacuuggcccugggaaa

SEQ ID NO: 807689 - RNA, 19 nt, Artificial Sequence
  Description of Artificial Sequence: Synthetic oligonucleotide
  Antisense strand to SEQ ID NO: 807688
uuucccagggccaagucug

SEQ ID NO: 807690 - RNA, 19 nt, Artificial Sequence
  Description of Artificial Sequence: Synthetic oligonucleotide
  Sense strand starting at position 2655 of SEQ ID NO: 587645
caaagaugcugucuguacu

SEQ ID NO: 807691 - RNA, 19 nt, Artificial Sequence
  Description of Artificial Sequence: Synthetic oligonucleotide
  Antisense strand to SEQ ID NO: 807690
aguacagacagcaucuuug

SEQ ID NO: 807692 - RNA, 19 nt, Artificial Sequence
  Description of Artificial Sequence: Synthetic oligonucleotide
  Sense strand starting at position 2732 of SEQ ID NO: 587645
aagcaaguaccuggcuauu

SEQ ID NO: 807693 - RNA, 19 nt, Artificial Sequence
  Description of Artificial Sequence: Synthetic oligonucleotide
  Antisense strand to SEQ ID NO: 807692
aauagccagguacuugcuu

SEQ ID NO: 807694 - RNA, 19 nt, Artificial Sequence
  Description of Artificial Sequence: Synthetic oligonucleotide
  Sense strand starting at position 2760 of SEQ ID NO: 587645
agguuaagcuucccaccaa

SEQ ID NO: 807695 - RNA, 19 nt, Artificial Sequence
  Description of Artificial Sequence: Synthetic oligonucleotide
  Antisense strand to SEQ ID NO: 807694
uuggugggaagcuuaaccu

SEQ ID NO: 807696 - RNA, 19 nt, Artificial Sequence
  Description of Artificial Sequence: Synthetic oligonucleotide
  Sense strand starting at position 2788 of SEQ ID NO: 587645
aggaaugaauuccagaaau

SEQ ID NO: 807697 - RNA, 19 nt, Artificial Sequence
  Description of Artificial Sequence: Synthetic oligonucleotide
  Antisense strand to SEQ ID NO: 807696
auuucuggaauucauuccu

SEQ ID NO: 807698 - RNA, 19 nt, Artificial Sequence
  Description of Artificial Sequence: Synthetic oligonucleotide
  Sense strand starting at position 2943 of SEQ ID NO: 587645
uguuaacuuguaugguaua

SEQ ID NO: 807699 - RNA, 19 nt, Artificial Sequence
  Description of Artificial Sequence: Synthetic oligonucleotide
  Antisense strand to SEQ ID NO: 807698
uauaccauacaaguuaaca

SEQ ID NO: 807700 - RNA, 19 nt, Artificial Sequence
  Description of Artificial Sequence: Synthetic oligonucleotide
  Sense strand starting at position 2948 of SEQ ID NO: 587645
acuuguaugguauagacga

SEQ ID NO: 807701 - RNA, 19 nt, Artificial Sequence
  Description of Artificial Sequence: Synthetic oligonucleotide
  Antisense strand to SEQ ID NO: 807700
ucgucuauaccauacaagu

SEQ ID NO: 807702 - RNA, 19 nt, Artificial Sequence
  Description of Artificial Sequence: Synthetic oligonucleotide
  Sense strand starting at position 2953 of SEQ ID NO: 587645
uaugguauagacgaguuua

SEQ ID NO: 807703 - RNA, 19 nt, Artificial Sequence
  Description of Artificial Sequence: Synthetic oligonucleotide
  Antisense strand to SEQ ID NO: 807702
uaaacucgucuauaccaua

SEQ ID NO: 807704 - RNA, 19 nt, Artificial Sequence
  Description of Artificial Sequence: Synthetic oligonucleotide
  Sense strand starting at position 2963 of SEQ ID NO: 587645
acgaguuuacuggaagugu

SEQ ID NO: 807705 - RNA, 19 nt, Artificial Sequence
  Description of Artificial Sequence: Synthetic oligonucleotide
  Antisense strand to SEQ ID NO: 807704
acacuuccaguaaacucgu

SEQ ID NO: 807706 - RNA, 19 nt, Artificial Sequence
  Description of Artificial Sequence: Synthetic oligonucleotide
  Sense strand starting at position 2972 of SEQ ID NO: 587645
cuggaaguguuggucucua

SEQ ID NO: 807707 - RNA, 19 nt, Artificial Sequence
  Description of Artificial Sequence: Synthetic oligonucleotide
  Antisense strand to SEQ ID NO: 807706
uagagaccaacacuuccag

SEQ ID NO: 807708 - RNA, 19 nt, Artificial Sequence
  Description of Artificial Sequence: Synthetic oligonucleotide
  Sense strand starting at position 2976 of SEQ ID NO: 587645
aaguguuggucucuaacaa

SEQ ID NO: 807709 - RNA, 19 nt, Artificial Sequence
  Description of Artificial Sequence: Synthetic oligonucleotide
  Antisense strand to SEQ ID NO: 807708
uuguuagagaccaacacuu

SEQ ID NO: 807710 - RNA, 19 nt, Artificial Sequence
  Description of Artificial Sequence: Synthetic oligonucleotide
  Sense strand starting at position 2977 of SEQ ID NO: 587645
aguguuggucucuaacaag

SEQ ID NO: 807711 - RNA, 19 nt, Artificial Sequence
  Description of Artificial Sequence: Synthetic oligonucleotide
  Antisense strand to SEQ ID NO: 807710
cuuguuagagaccaacacu

SEQ ID NO: 807712 - RNA, 19 nt, Artificial Sequence
  Description of Artificial Sequence: Synthetic oligonucleotide
  Sense strand starting at position 3002 of SEQ ID NO: 587645
gaguuugcaccagaacaug

SEQ ID NO: 807713 - RNA, 19 nt, Artificial Sequence
  Description of Artificial Sequence: Synthetic oligonucleotide
  Antisense strand to SEQ ID NO: 807712
cauguucuggugcaaacuc

SEQ ID NO: 807714 - RNA, 19 nt, Artificial Sequence
  Description of Artificial Sequence: Synthetic oligonucleotide
  Sense strand starting at position 3315 of SEQ ID NO: 587645
cagagugacuccgucuuaa

SEQ ID NO: 807715 - RNA, 19 nt, Artificial Sequence
  Description of Artificial Sequence: Synthetic oligonucleotide
  Antisense strand to SEQ ID NO: 807714
uuaagacggagucacucug

SEQ ID NO: 807716 - RNA, 19 nt, Artificial Sequence
  Description of Artificial Sequence: Synthetic oligonucleotide
  Sense strand starting at position 3740 of SEQ ID NO: 587645
guaugcuguaugccauagu

SEQ ID NO: 807717 - RNA, 19 nt, Artificial Sequence
  Description of Artificial Sequence: Synthetic oligonucleotide
  Antisense strand to SEQ ID NO: 807716
acuauggcauacagcauac

SEQ ID NO: 807718 - RNA, 19 nt, Artificial Sequence
  Description of Artificial Sequence: Synthetic oligonucleotide
  Sense strand starting at position 3743 of SEQ ID NO: 587645
ugcuguaugccauaguuga

SEQ ID NO: 807719 - RNA, 19 nt, Artificial Sequence
  Description of Artificial Sequence: Synthetic oligonucleotide
  Antisense strand to SEQ ID NO: 807718
ucaacuauggcauacagca

SEQ ID NO: 807720 - RNA, 19 nt, Artificial Sequence
  Description of Artificial Sequence: Synthetic oligonucleotide
  Sense strand starting at position 3826 of SEQ ID NO: 587645
agaagagcuuuauagauaa

SEQ ID NO: 807721 - RNA, 19 nt, Artificial Sequence
  Description of Artificial Sequence: Synthetic oligonucleotide
  Antisense strand to SEQ ID NO: 807720
uuaucuauaaagcucuucu

SEQ ID NO: 807722 - RNA, 19 nt, Artificial Sequence
  Description of Artificial Sequence: Synthetic oligonucleotide
  Sense strand starting at position 3885 of SEQ ID NO: 587645
ugccaagugcugggugaaa

SEQ ID NO: 807723 - RNA, 19 nt, Artificial Sequence
  Description of Artificial Sequence: Synthetic oligonucleotide
  Antisense strand to SEQ ID NO: 807722
uuucacccagcacuuggca

SEQ ID NO: 807724 - RNA, 19 nt, Artificial Sequence
  Description of Artificial Sequence: Synthetic oligonucleotide
  Sense strand starting at position 3915 of SEQ ID NO: 587645
agagcugggcgcuaaugaa

SEQ ID NO: 807725 - RNA, 19 nt, Artificial Sequence
  Description of Artificial Sequence: Synthetic oligonucleotide
  Antisense strand to SEQ ID NO: 807724
uucauuagcgcccagcucu

SEQ ID NO: 807726 - RNA, 19 nt, Artificial Sequence
  Description of Artificial Sequence: Synthetic oligonucleotide
  Sense strand starting at position 3923 of SEQ ID NO: 587645
gcgcuaaugaaaggaggau

SEQ ID NO: 807727 - RNA, 19 nt, Artificial Sequence
  Description of Artificial Sequence: Synthetic oligonucleotide
  Antisense strand to SEQ ID NO: 807726
auccuccuuucauuagcgc

SEQ ID NO: 807728 - RNA, 19 nt, Artificial Sequence
  Description of Artificial Sequence: Synthetic oligonucleotide
  Sense strand starting at position 46 of SEQ ID NO: 587646
ccaugcaucuggccaagaa

SEQ ID NO: 807729 - RNA, 19 nt, Artificial Sequence
  Description of Artificial Sequence: Synthetic oligonucleotide
  Antisense strand to SEQ ID NO: 807728
uucuuggccagaugcaugg

SEQ ID NO: 807730 - RNA, 19 nt, Artificial Sequence
  Description of Artificial Sequence: Synthetic oligonucleotide
  Sense strand starting at position 50 of SEQ ID NO: 587646
gcaucuggccaagaauaaa

SEQ ID NO: 807731 - RNA, 19 nt, Artificial Sequence
  Description of Artificial Sequence: Synthetic oligonucleotide
  Antisense strand to SEQ ID NO: 807730
uuuauucuuggccagaugc

SEQ ID NO: 807732 - RNA, 19 nt, Artificial Sequence
  Description of Artificial Sequence: Synthetic oligonucleotide
  Sense strand starting at position 81 of SEQ ID NO: 587646
uguauuuguugagcuaugu

SEQ ID NO: 807733 - RNA, 19 nt, Artificial Sequence
  Description of Artificial Sequence: Synthetic oligonucleotide
  Antisense strand to SEQ ID NO: 807732
acauagcucaacaaauaca

SEQ ID NO: 807734 - RNA, 19 nt, Artificial Sequence
  Description of Artificial Sequence: Synthetic oligonucleotide
  Sense strand starting at position 163 of SEQ ID NO: 587646
cucacuauuguuuguauuu

SEQ ID NO: 807735 - RNA, 19 nt, Artificial Sequence
  Description of Artificial Sequence: Synthetic oligonucleotide
  Antisense strand to SEQ ID NO: 807734
aaauacaaacaauagugag

SEQ ID NO: 807736 - RNA, 19 nt, Artificial Sequence
  Description of Artificial Sequence: Synthetic oligonucleotide
  Sense strand starting at position 269 of SEQ ID NO: 587646
cuccuaggacauuguuaca

SEQ ID NO: 807737 - RNA, 19 nt, Artificial Sequence
  Description of Artificial Sequence: Synthetic oligonucleotide
  Antisense strand to SEQ ID NO: 807736
uguaacaauguccuaggag

SEQ ID NO: 807738 - RNA, 19 nt, Artificial Sequence
  Description of Artificial Sequence: Synthetic oligonucleotide
  Sense strand starting at position 295 of SEQ ID NO: 587646
gagcaagaacuuugcaaug

SEQ ID NO: 807739 - RNA, 19 nt, Artificial Sequence
  Description of Artificial Sequence: Synthetic oligonucleotide
  Antisense strand to SEQ ID NO: 807738
cauugcaaaguucuugcuc

SEQ ID NO: 807740 - RNA, 19 nt, Artificial Sequence
  Description of Artificial Sequence: Synthetic oligonucleotide
  Sense strand starting at position 560 of SEQ ID NO: 587646
gagcacuacugucuagauu

SEQ ID NO: 807741 - RNA, 19 nt, Artificial Sequence
  Description of Artificial Sequence: Synthetic oligonucleotide
  Antisense strand to SEQ ID NO: 807740
aaucuagacaguagugcuc

SEQ ID NO: 807742 - RNA, 19 nt, Artificial Sequence
  Description of Artificial Sequence: Synthetic oligonucleotide
  Sense strand starting at position 561 of SEQ ID NO: 587646
agcacuacugucuagauua

SEQ ID NO: 807743 - RNA, 19 nt, Artificial Sequence
  Description of Artificial Sequence: Synthetic oligonucleotide
  Antisense strand to SEQ ID NO: 807742
uaaucuagacaguagugcu

SEQ ID NO: 807744 - RNA, 19 nt, Artificial Sequence
  Description of Artificial Sequence: Synthetic oligonucleotide
  Sense strand starting at position 568 of SEQ ID NO: 587646
cugucuagauuaucuggua

SEQ ID NO: 807745 - RNA, 19 nt, Artificial Sequence
  Description of Artificial Sequence: Synthetic oligonucleotide
  Antisense strand to SEQ ID NO: 807744
uaccagauaaucuagacag

SEQ ID NO: 807746 - RNA, 19 nt, Artificial Sequence
  Description of Artificial Sequence: Synthetic oligonucleotide
  Sense strand starting at position 569 of SEQ ID NO: 587646
ugucuagauuaucugguaa

SEQ ID NO: 807747 - RNA, 19 nt, Artificial Sequence
  Description of Artificial Sequence: Synthetic oligonucleotide
  Antisense strand to SEQ ID NO: 807746
uuaccagauaaucuagaca

SEQ ID NO: 807748 - RNA, 19 nt, Artificial Sequence
  Description of Artificial Sequence: Synthetic oligonucleotide
  Sense strand starting at position 1148 of SEQ ID NO: 587646
acguauugauaauuacuga

SEQ ID NO: 807749 - RNA, 19 nt, Artificial Sequence
  Description of Artificial Sequence: Synthetic oligonucleotide
  Antisense strand to SEQ ID NO: 807748
ucaguaauuaucaauacgu

SEQ ID NO: 807750 - RNA, 19 nt, Artificial Sequence
  Description of Artificial Sequence: Synthetic oligonucleotide
  Sense strand starting at position 1174 of SEQ ID NO: 587646
uaaugaguacagugaauuc

SEQ ID NO: 807751 - RNA, 19 nt, Artificial Sequence
  Description of Artificial Sequence: Synthetic oligonucleotide
  Antisense strand to SEQ ID NO: 807750
gaauucacuguacucauua

SEQ ID NO: 807752 - RNA, 19 nt, Artificial Sequence
  Description of Artificial Sequence: Synthetic oligonucleotide
  Sense strand starting at position 1212 of SEQ ID NO: 587646
uucuccacaguuugaagau

SEQ ID NO: 807753 - RNA, 19 nt, Artificial Sequence
  Description of Artificial Sequence: Synthetic oligonucleotide
  Antisense strand to SEQ ID NO: 807752
aucuucaaacuguggagaa

SEQ ID NO: 807754 - RNA, 19 nt, Artificial Sequence
  Description of Artificial Sequence: Synthetic oligonucleotide
  Sense strand starting at position 1293 of SEQ ID NO: 587646
ccuggucauggucagaaga

SEQ ID NO: 807755 - RNA, 19 nt, Artificial Sequence
  Description of Artificial Sequence: Synthetic oligonucleotide
  Antisense strand to SEQ ID NO: 807754
ucuucugaccaugaccagg

SEQ ID NO: 807756 - RNA, 19 nt, Artificial Sequence
  Description of Artificial Sequence: Synthetic oligonucleotide
  Sense strand starting at position 1320 of SEQ ID NO: 587646
gaaguucuaggaggcgaaa

SEQ ID NO: 807757 - RNA, 19 nt, Artificial Sequence
  Description of Artificial Sequence: Synthetic oligonucleotide
  Antisense strand to SEQ ID NO: 807756
uuucgccuccuagaacuuc

SEQ ID NO: 807758 - RNA, 19 nt, Artificial Sequence
  Description of Artificial Sequence: Synthetic oligonucleotide
  Sense strand starting at position 2223 of SEQ ID NO: 587646
agauguguauuaccuugaa

SEQ ID NO: 807759 - RNA, 19 nt, Artificial Sequence
  Description of Artificial Sequence: Synthetic oligonucleotide
  Antisense strand to SEQ ID NO: 807758
uucaagguaauacacaucu

SEQ ID NO: 807760 - RNA, 19 nt, Artificial Sequence
  Description of Artificial Sequence: Synthetic oligonucleotide
  Sense strand starting at position 2346 of SEQ ID NO: 587646
ccucacauccgagauguuu

SEQ ID NO: 807761 - RNA, 19 nt, Artificial Sequence
  Description of Artificial Sequence: Synthetic oligonucleotide
  Antisense strand to SEQ ID NO: 807760
aaacaucucggaugugagg

SEQ ID NO: 807762 - RNA, 19 nt, Artificial Sequence
  Description of Artificial Sequence: Synthetic oligonucleotide
  Sense strand starting at position 2355 of SEQ ID NO: 587646
cgagauguuucucuuuagg

SEQ ID NO: 807763 - RNA, 19 nt, Artificial Sequence
  Description of Artificial Sequence: Synthetic oligonucleotide
  Antisense strand to SEQ ID NO: 807762
ccuaaagagaaacaucucg

SEQ ID NO: 807764 - RNA, 19 nt, Artificial Sequence
  Description of Artificial Sequence: Synthetic oligonucleotide
  Sense strand starting at position 2394 of SEQ ID NO: 587646
uacaaagugccucauggau

SEQ ID NO: 807765 - RNA, 19 nt, Artificial Sequence
  Description of Artificial Sequence: Synthetic oligonucleotide
  Antisense strand to SEQ ID NO: 807764
auccaugaggcacuuugua

SEQ ID NO: 807766 - RNA, 19 nt, Artificial Sequence
  Description of Artificial Sequence: Synthetic oligonucleotide
  Sense strand starting at position 2400 of SEQ ID NO: 587646
gugccucauggauaaguau

SEQ ID NO: 807767 - RNA, 19 nt, Artificial Sequence
  Description of Artificial Sequence: Synthetic oligonucleotide
  Antisense strand to SEQ ID NO: 807766
auacuuauccaugaggcac

SEQ ID NO: 807768 - RNA, 19 nt, Artificial Sequence
  Description of Artificial Sequence: Synthetic oligonucleotide
  Sense strand starting at position 2443 of SEQ ID NO: 587646
gcgucuguucaguccgauu

SEQ ID NO: 807769 - RNA, 19 nt, Artificial Sequence
  Description of Artificial Sequence: Synthetic oligonucleotide
  Antisense strand to SEQ ID NO: 807768
aaucggacugaacagacgc

SEQ ID NO: 807770 - RNA, 19 nt, Artificial Sequence
  Description of Artificial Sequence: Synthetic oligonucleotide
  Sense strand starting at position 2489 of SEQ ID NO: 587646
uugaauacucuaggacacu

SEQ ID NO: 807771 - RNA, 19 nt, Artificial Sequence
  Description of Artificial Sequence: Synthetic oligonucleotide
  Antisense strand to SEQ ID NO: 807770
aguguccuagaguauucaa

SEQ ID NO: 807772 - RNA, 19 nt, Artificial Sequence
  Description of Artificial Sequence: Synthetic oligonucleotide
  Sense strand starting at position 2558 of SEQ ID NO: 587646
acuuaugcaguguaguaau

SEQ ID NO: 807773 - RNA, 19 nt, Artificial Sequence
  Description of Artificial Sequence: Synthetic oligonucleotide
  Antisense strand to SEQ ID NO: 807772
auuacuacacugcauaagu

SEQ ID NO: 807774 - RNA, 19 nt, Artificial Sequence
  Description of Artificial Sequence: Synthetic oligonucleotide
  Sense strand starting at position 2565 of SEQ ID NO: 587646
caguguaguaaugugcgua

SEQ ID NO: 807775 - RNA, 19 nt, Artificial Sequence
  Description of Artificial Sequence: Synthetic oligonucleotide
  Antisense strand to SEQ ID NO: 807774
uacgcacauuacuacacug

SEQ ID NO: 807776 - RNA, 19 nt, Artificial Sequence
  Description of Artificial Sequence: Synthetic oligonucleotide
  Sense strand starting at position 2580 of SEQ ID NO: 587646
cguaggcgugaugaaagau

SEQ ID NO: 807777 - RNA, 19 nt, Artificial Sequence
  Description of Artificial Sequence: Synthetic oligonucleotide
  Antisense strand to SEQ ID NO: 807776
aucuuucaucacgccuacg

SEQ ID NO: 807778 - RNA, 19 nt, Artificial Sequence
  Description of Artificial Sequence: Synthetic oligonucleotide
  Sense strand starting at position 2589 of SEQ ID NO: 587646
gaugaaagauuccuaugua

SEQ ID NO: 807779 - RNA, 19 nt, Artificial Sequence
  Description of Artificial Sequence: Synthetic oligonucleotide
  Antisense strand to SEQ ID NO: 807778
uacauaggaaucuuucauc

SEQ ID NO: 807780 - RNA, 19 nt, Artificial Sequence
  Description of Artificial Sequence: Synthetic oligonucleotide
  Sense strand starting at position 2593 of SEQ ID NO: 587646
aaagauuccuauguagggu

SEQ ID NO: 807781 - RNA, 19 nt, Artificial Sequence
  Description of Artificial Sequence: Synthetic oligonucleotide
  Antisense strand to SEQ ID NO: 807780
acccuacauaggaaucuuu

SEQ ID NO: 807782 - RNA, 19 nt, Artificial Sequence
  Description of Artificial Sequence: Synthetic oligonucleotide
  Sense strand starting at position 2749 of SEQ ID NO: 587646
acaagucucuuccuaguga

SEQ ID NO: 807783 - RNA, 19 nt, Artificial Sequence
  Description of Artificial Sequence: Synthetic oligonucleotide
  Antisense strand to SEQ ID NO: 807782
ucacuaggaagagacuugu

SEQ ID NO: 807784 - RNA, 19 nt, Artificial Sequence
  Description of Artificial Sequence: Synthetic oligonucleotide
  Sense strand starting at position 3012 of SEQ ID NO: 587646
uugucugaggcugaaugaa

SEQ ID NO: 807785 - RNA, 19 nt, Artificial Sequence
  Description of Artificial Sequence: Synthetic oligonucleotide
  Antisense strand to SEQ ID NO: 807784
uucauucagccucagacaa

SEQ ID NO: 807786 - RNA, 19 nt, Artificial Sequence
  Description of Artificial Sequence: Synthetic oligonucleotide
  Sense strand starting at position 3110 of SEQ ID NO: 587646
gagaucuuuccggagggua

SEQ ID NO: 807787 - RNA, 19 nt, Artificial Sequence
  Description of Artificial Sequence: Synthetic oligonucleotide
  Antisense strand to SEQ ID NO: 807786
uacccuccggaaagaucuc

SEQ ID NO: 807788 - RNA, 19 nt, Artificial Sequence
  Description of Artificial Sequence: Synthetic oligonucleotide
  Sense strand starting at position 3112 of SEQ ID NO: 587646
gaucuuuccggaggguauu

SEQ ID NO: 807789 - RNA, 19 nt, Artificial Sequence
  Description of Artificial Sequence: Synthetic oligonucleotide
  Antisense strand to SEQ ID NO: 807788
aauacccuccggaaagauc

SEQ ID NO: 807790 - RNA, 19 nt, Artificial Sequence
  Description of Artificial Sequence: Synthetic oligonucleotide
  Sense strand starting at position 3212 of SEQ ID NO: 587646
ucgaguuuacgagauuaua

SEQ ID NO: 807791 - RNA, 19 nt, Artificial Sequence
  Description of Artificial Sequence: Synthetic oligonucleotide
  Antisense strand to SEQ ID NO: 807790
uauaaucucguaaacucga

SEQ ID NO: 807792 - RNA, 19 nt, Artificial Sequence
  Description of Artificial Sequence: Synthetic oligonucleotide
  Sense strand starting at position 3215 of SEQ ID NO: 587646
aguuuacgagauuauaugu

SEQ ID NO: 807793 - RNA, 19 nt, Artificial Sequence
  Description of Artificial Sequence: Synthetic oligonucleotide
  Antisense strand to SEQ ID NO: 807792
acauauaaucucguaaacu

SEQ ID NO: 807794 - RNA, 19 nt, Artificial Sequence
  Description of Artificial Sequence: Synthetic oligonucleotide
  Sense strand starting at position 3232 of SEQ ID NO: 587646
guuguuuccuacuuauuua

SEQ ID NO: 807795 - RNA, 19 nt, Artificial Sequence
  Description of Artificial Sequence: Synthetic oligonucleotide
  Antisense strand to SEQ ID NO: 807794
uaaauaaguaggaaacaac

SEQ ID NO: 807796 - RNA, 19 nt, Artificial Sequence
  Description of Artificial Sequence: Synthetic oligonucleotide
  Sense strand starting at position 3278 of SEQ ID NO: 587646
cucaaagaggcauggguua

SEQ ID NO: 807797 - RNA, 19 nt, Artificial Sequence
  Description of Artificial Sequence: Synthetic oligonucleotide
  Antisense strand to SEQ ID NO: 807796
uaacccaugccucuuugag

SEQ ID NO: 807798 - RNA, 19 nt, Artificial Sequence
  Description of Artificial Sequence: Synthetic oligonucleotide
  Sense strand starting at position 3290 of SEQ ID NO: 587646
uggguuaagaccugucuuu

SEQ ID NO: 807799 - RNA, 19 nt, Artificial Sequence
  Description of Artificial Sequence: Synthetic oligonucleotide
  Antisense strand to SEQ ID NO: 807798
aaagacaggucuuaaccca

SEQ ID NO: 807800 - RNA, 19 nt, Artificial Sequence
  Description of Artificial Sequence: Synthetic oligonucleotide
  Sense strand starting at position 3371 of SEQ ID NO: 587646
uggaguggccuuggacauu

SEQ ID NO: 807801 - RNA, 19 nt, Artificial Sequence
  Description of Artificial Sequence: Synthetic oligonucleotide
  Antisense strand to SEQ ID NO: 807800
aauguccaaggccacucca

SEQ ID NO: 807802 - RNA, 19 nt, Artificial Sequence
  Description of Artificial Sequence: Synthetic oligonucleotide
  Sense strand starting at position 3473 of SEQ ID NO: 587646
auuggcuucgagcaagaca

SEQ ID NO: 807803 - RNA, 19 nt, Artificial Sequence
  Description of Artificial Sequence: Synthetic oligonucleotide
  Antisense strand to SEQ ID NO: 807802
ugucuugcucgaagccaau

SEQ ID NO: 807804 - RNA, 19 nt, Artificial Sequence
  Description of Artificial Sequence: Synthetic oligonucleotide
  Sense strand starting at position 3552 of SEQ ID NO: 587646
gaaguauguggcuagugga

SEQ ID NO: 807805 - RNA, 19 nt, Artificial Sequence
  Description of Artificial Sequence: Synthetic oligonucleotide
  Antisense strand to SEQ ID NO: 807804
uccacuagccacauacuuc

SEQ ID NO: 807806 - RNA, 19 nt, Artificial Sequence
  Description of Artificial Sequence: Synthetic oligonucleotide
  Sense strand starting at position 3921 of SEQ ID NO: 587646
ccgaaaugagcggauuauu

SEQ ID NO: 807807 - RNA, 19 nt, Artificial Sequence
  Description of Artificial Sequence: Synthetic oligonucleotide
  Antisense strand to SEQ ID NO: 807806
aauaauccgcucauuucgg

SEQ ID NO: 807808 - RNA, 19 nt, Artificial Sequence
  Description of Artificial Sequence: Synthetic oligonucleotide
  Sense strand starting at position 159 of SEQ ID NO: 587647
cugcuuagaggguauccau

SEQ ID NO: 807809 - RNA, 19 nt, Artificial Sequence
  Description of Artificial Sequence: Synthetic oligonucleotide
  Antisense strand to SEQ ID NO: 807808
auggauacccucuaagcag

SEQ ID NO: 807810 - RNA, 19 nt, Artificial Sequence
  Description of Artificial Sequence: Synthetic oligonucleotide
  Sense strand starting at position 162 of SEQ ID NO: 587647
cuuagaggguauccauaaa

SEQ ID NO: 807811 - RNA, 19 nt, Artificial Sequence
  Description of Artificial Sequence: Synthetic oligonucleotide
  Antisense strand to SEQ ID NO: 807810
uuuauggauacccucuaag

SEQ ID NO: 807812 - RNA, 19 nt, Artificial Sequence
  Description of Artificial Sequence: Synthetic oligonucleotide
  Sense strand starting at position 241 of SEQ ID NO: 587647
gguggcuuuguauauagaa

SEQ ID NO: 807813 - RNA, 19 nt, Artificial Sequence
  Description of Artificial Sequence: Synthetic oligonucleotide
  Antisense strand to SEQ ID NO: 807812
uucuauauacaaagccacc

SEQ ID NO: 807814 - RNA, 19 nt, Artificial Sequence
  Description of Artificial Sequence: Synthetic oligonucleotide
  Sense strand starting at position 397 of SEQ ID NO: 587647
gaagaaugcccuuggcaag

SEQ ID NO: 807815 - RNA, 19 nt, Artificial Sequence
  Description of Artificial Sequence: Synthetic oligonucleotide
  Antisense strand to SEQ ID NO: 807814
cuugccaagggcauucuuc

SEQ ID NO: 807816 - RNA, 19 nt, Artificial Sequence
  Description of Artificial Sequence: Synthetic oligonucleotide
  Sense strand starting at position 416 of SEQ ID NO: 587647
ggcagaguccaugaguuaa

SEQ ID NO: 807817 - RNA, 19 nt, Artificial Sequence
  Description of Artificial Sequence: Synthetic oligonucleotide
  Antisense strand to SEQ ID NO: 807816
uuaacucauggacucugcc

SEQ ID NO: 807818 - RNA, 19 nt, Artificial Sequence
  Description of Artificial Sequence: Synthetic oligonucleotide
  Sense strand starting at position 418 of SEQ ID NO: 587647
cagaguccaugaguuaaau

SEQ ID NO: 807819 - RNA, 19 nt, Artificial Sequence
  Description of Artificial Sequence: Synthetic oligonucleotide
  Antisense strand to SEQ ID NO: 807818
auuuaacucauggacucug

SEQ ID NO: 807820 - RNA, 19 nt, Artificial Sequence
  Description of Artificial Sequence: Synthetic oligonucleotide
  Sense strand starting at position 516 of SEQ ID NO: 587647
gucuucuaaguuuacaauu

SEQ ID NO: 807821 - RNA, 19 nt, Artificial Sequence
  Description of Artificial Sequence: Synthetic oligonucleotide
  Antisense strand to SEQ ID NO: 807820
aauuguaaacuuagaagac

SEQ ID NO: 807822 - RNA, 19 nt, Artificial Sequence
  Description of Artificial Sequence: Synthetic oligonucleotide
  Sense strand starting at position 583 of SEQ ID NO: 587647
auuuaaauuuacugucgga

SEQ ID NO: 807823 - RNA, 19 nt, Artificial Sequence
  Description of Artificial Sequence: Synthetic oligonucleotide
  Antisense strand to SEQ ID NO: 807822
uccgacaguaaauuuaaau

SEQ ID NO: 807824 - RNA, 19 nt, Artificial Sequence
  Description of Artificial Sequence: Synthetic oligonucleotide
  Sense strand starting at position 743 of SEQ ID NO: 587647
cccucuuaaauguguggga

SEQ ID NO: 807825 - RNA, 19 nt, Artificial Sequence
  Description of Artificial Sequence: Synthetic oligonucleotide
  Antisense strand to SEQ ID NO: 807824
ucccacacauuuaagaggg

SEQ ID NO: 807826 - RNA, 19 nt, Artificial Sequence
  Description of Artificial Sequence: Synthetic oligonucleotide
  Sense strand starting at position 744 of SEQ ID NO: 587647
ccucuuaaaugugugggau

SEQ ID NO: 807827 - RNA, 19 nt, Artificial Sequence
  Description of Artificial Sequence: Synthetic oligonucleotide
  Antisense strand to SEQ ID NO: 807826
aucccacacauuuaagagg

SEQ ID NO: 807828 - RNA, 19 nt, Artificial Sequence
  Description of Artificial Sequence: Synthetic oligonucleotide
  Sense strand starting at position 745 of SEQ ID NO: 587647
cucuuaaaugugugggauc

SEQ ID NO: 807829 - RNA, 19 nt, Artificial Sequence
  Description of Artificial Sequence: Synthetic oligonucleotide
  Antisense strand to SEQ ID NO: 807828
gaucccacacauuuaagag

SEQ ID NO: 807830 - RNA, 19 nt, Artificial Sequence
  Description of Artificial Sequence: Synthetic oligonucleotide
  Sense strand starting at position 1034 of SEQ ID NO: 587647
uggagugaucagggaccau

SEQ ID NO: 807831 - RNA, 19 nt, Artificial Sequence
  Description of Artificial Sequence: Synthetic oligonucleotide
  Antisense strand to SEQ ID NO: 807830
auggucccugaucacucca

SEQ ID NO: 807832 - RNA, 19 nt, Artificial Sequence
  Description of Artificial Sequence: Synthetic oligonucleotide
  Sense strand starting at position 1098 of SEQ ID NO: 587647
gugcgugacgaauccguaa

SEQ ID NO: 807833 - RNA, 19 nt, Artificial Sequence
  Description of Artificial Sequence: Synthetic oligonucleotide
  Antisense strand to SEQ ID NO: 807832
uuacggauucgucacgcac

SEQ ID NO: 807834 - RNA, 19 nt, Artificial Sequence
  Description of Artificial Sequence: Synthetic oligonucleotide
  Sense strand starting at position 2070 of SEQ ID NO: 587647
acuguucuccgagacacaa

SEQ ID NO: 807835 - RNA, 19 nt, Artificial Sequence
  Description of Artificial Sequence: Synthetic oligonucleotide
  Antisense strand to SEQ ID NO: 807834
uugugucucggagaacagu

SEQ ID NO: 807836 - RNA, 19 nt, Artificial Sequence
  Description of Artificial Sequence: Synthetic oligonucleotide
  Sense strand starting at position 2326 of SEQ ID NO: 587647
caguguuagcgccuuggua

SEQ ID NO: 807837 - RNA, 19 nt, Artificial Sequence
  Description of Artificial Sequence: Synthetic oligonucleotide
  Antisense strand to SEQ ID NO: 807836
uaccaaggcgcuaacacug

SEQ ID NO: 807838 - RNA, 19 nt, Artificial Sequence
  Description of Artificial Sequence: Synthetic oligonucleotide
  Sense strand starting at position 2327 of SEQ ID NO: 587647
aguguuagcgccuugguaa

SEQ ID NO: 807839 - RNA, 19 nt, Artificial Sequence
  Description of Artificial Sequence: Synthetic oligonucleotide
  Antisense strand to SEQ ID NO: 807838
uuaccaaggcgcuaacacu

SEQ ID NO: 807840 - RNA, 19 nt, Artificial Sequence
  Description of Artificial Sequence: Synthetic oligonucleotide
  Sense strand starting at position 2504 of SEQ ID NO: 587647
uucccuauugaugguauua

SEQ ID NO: 807841 - RNA, 19 nt, Artificial Sequence
  Description of Artificial Sequence: Synthetic oligonucleotide
  Antisense strand to SEQ ID NO: 807840
uaauaccaucaauagggaa

SEQ ID NO: 807842 - RNA, 19 nt, Artificial Sequence
  Description of Artificial Sequence: Synthetic oligonucleotide
  Sense strand starting at position 2624 of SEQ ID NO: 587647
gcuccaccauaagugaaau

SEQ ID NO: 807843 - RNA, 19 nt, Artificial Sequence
  Description of Artificial Sequence: Synthetic oligonucleotide
  Antisense strand to SEQ ID NO: 807842
auuucacuuaugguggagc

SEQ ID NO: 807844 - RNA, 19 nt, Artificial Sequence
  Description of Artificial Sequence: Synthetic oligonucleotide
  Sense strand starting at position 2775 of SEQ ID NO: 587647
gcagccuuccagcaaauaa

SEQ ID NO: 807845 - RNA, 19 nt, Artificial Sequence
  Description of Artificial Sequence: Synthetic oligonucleotide
  Antisense strand to SEQ ID NO: 807844
uuauuugcuggaaggcugc

SEQ ID NO: 807846 - RNA, 19 nt, Artificial Sequence
  Description of Artificial Sequence: Synthetic oligonucleotide
  Sense strand starting at position 2791 of SEQ ID NO: 587647
uaauuaauacgguguugaa

SEQ ID NO: 807847 - RNA, 19 nt, Artificial Sequence
  Description of Artificial Sequence: Synthetic oligonucleotide
  Antisense strand to SEQ ID NO: 807846
uucaacaccguauuaauua

SEQ ID NO: 807848 - RNA, 19 nt, Artificial Sequence
  Description of Artificial Sequence: Synthetic oligonucleotide
  Sense strand starting at position 2999 of SEQ ID NO: 587647
gaacuuuaacgcugaauug

SEQ ID NO: 807849 - RNA, 19 nt, Artificial Sequence
  Description of Artificial Sequence: Synthetic oligonucleotide
  Antisense strand to SEQ ID NO: 807848
caauucagcguuaaaguuc

SEQ ID NO: 807850 - RNA, 19 nt, Artificial Sequence
  Description of Artificial Sequence: Synthetic oligonucleotide
  Sense strand starting at position 3010 of SEQ ID NO: 587647
cugaauugagccuagccua

SEQ ID NO: 807851 - RNA, 19 nt, Artificial Sequence
  Description of Artificial Sequence: Synthetic oligonucleotide
  Antisense strand to SEQ ID NO: 807850
uaggcuaggcucaauucag

SEQ ID NO: 807852 - RNA, 19 nt, Artificial Sequence
  Description of Artificial Sequence: Synthetic oligonucleotide
  Sense strand starting at position 3023 of SEQ ID NO: 587647
agccuauacuauguugaag

SEQ ID NO: 807853 - RNA, 19 nt, Artificial Sequence
  Description of Artificial Sequence: Synthetic oligonucleotide
  Antisense strand to SEQ ID NO: 807852
cuucaacauaguauaggcu

SEQ ID NO: 807854 - RNA, 19 nt, Artificial Sequence
  Description of Artificial Sequence: Synthetic oligonucleotide
  Sense strand starting at position 3046 of SEQ ID NO: 587647
aagggaauuugagagucaa

SEQ ID NO: 807855 - RNA, 19 nt, Artificial Sequence
  Description of Artificial Sequence: Synthetic oligonucleotide
  Antisense strand to SEQ ID NO: 807854
uugacucucaaauucccuu

SEQ ID NO: 807856 - RNA, 19 nt, Artificial Sequence
  Description of Artificial Sequence: Synthetic oligonucleotide
  Sense strand starting at position 3082 of SEQ ID NO: 587647
accuuuguguuugugauuu

SEQ ID NO: 807857 - RNA, 19 nt, Artificial Sequence
  Description of Artificial Sequence: Synthetic oligonucleotide
  Antisense strand to SEQ ID NO: 807856
aaaucacaaacacaaaggu

SEQ ID NO: 807858 - RNA, 19 nt, Artificial Sequence
  Description of Artificial Sequence: Synthetic oligonucleotide
  Sense strand starting at position 3104 of SEQ ID NO: 587647
uaaagagggaguugguaau

SEQ ID NO: 807859 - RNA, 19 nt, Artificial Sequence
  Description of Artificial Sequence: Synthetic oligonucleotide
  Antisense strand to SEQ ID NO: 807858
auuaccaacucccucuuua

SEQ ID NO: 807860 - RNA, 19 nt, Artificial Sequence
  Description of Artificial Sequence: Synthetic oligonucleotide
  Sense strand starting at position 3116 of SEQ ID NO: 587647
ugguaaugccuuuaaagau

SEQ ID NO: 807861 - RNA, 19 nt, Artificial Sequence
  Description of Artificial Sequence: Synthetic oligonucleotide
  Antisense strand to SEQ ID NO: 807860
aucuuuaaaggcauuacca

SEQ ID NO: 807862 - RNA, 19 nt, Artificial Sequence
  Description of Artificial Sequence: Synthetic oligonucleotide
  Sense strand starting at position 3185 of SEQ ID NO: 587647
uaccaaacgucuucuagag

SEQ ID NO: 807863 - RNA, 19 nt, Artificial Sequence
  Description of Artificial Sequence: Synthetic oligonucleotide
  Antisense strand to SEQ ID NO: 807862
cucuagaagacguuuggua

SEQ ID NO: 807864 - RNA, 19 nt, Artificial Sequence
  Description of Artificial Sequence: Synthetic oligonucleotide
  Sense strand starting at position 3189 of SEQ ID NO: 587647
aaacgucuucuagagaauu

SEQ ID NO: 807865 - RNA, 19 nt, Artificial Sequence
  Description of Artificial Sequence: Synthetic oligonucleotide
  Antisense strand to SEQ ID NO: 807864
aauucucuagaagacguuu

SEQ ID NO: 807866 - RNA, 19 nt, Artificial Sequence
  Description of Artificial Sequence: Synthetic oligonucleotide
  Sense strand starting at position 3432 of SEQ ID NO: 587647
aacccuguuuccuuaggga

SEQ ID NO: 807867 - RNA, 19 nt, Artificial Sequence
  Description of Artificial Sequence: Synthetic oligonucleotide
  Antisense strand to SEQ ID NO: 807866
ucccuaaggaaacaggguu

SEQ ID NO: 807868 - RNA, 19 nt, Artificial Sequence
  Description of Artificial Sequence: Synthetic oligonucleotide
  Sense strand starting at position 3437 of SEQ ID NO: 587647
uguuuccuuagggauggua

SEQ ID NO: 807869 - RNA, 19 nt, Artificial Sequence
  Description of Artificial Sequence: Synthetic oligonucleotide
  Antisense strand to SEQ ID NO: 807868
uaccaucccuaaggaaaca

SEQ ID NO: 807870 - RNA, 19 nt, Artificial Sequence
  Description of Artificial Sequence: Synthetic oligonucleotide
  Sense strand starting at position 3439 of SEQ ID NO: 587647
uuuccuuagggaugguauu

SEQ ID NO: 807871 - RNA, 19 nt, Artificial Sequence
  Description of Artificial Sequence: Synthetic oligonucleotide
  Antisense strand to SEQ ID NO: 807870
aauaccaucccuaaggaaa

SEQ ID NO: 807872 - RNA, 19 nt, Artificial Sequence
  Description of Artificial Sequence: Synthetic oligonucleotide
  Sense strand starting at position 3563 of SEQ ID NO: 587647
ucuggagucacucaguaug

SEQ ID NO: 807873 - RNA, 19 nt, Artificial Sequence
  Description of Artificial Sequence: Synthetic oligonucleotide
  Antisense strand to SEQ ID NO: 807872
cauacugagugacuccaga

SEQ ID NO: 807874 - RNA, 19 nt, Artificial Sequence
  Description of Artificial Sequence: Synthetic oligonucleotide
  Sense strand starting at position 3577 of SEQ ID NO: 587647
guaugauagggucagagcu

SEQ ID NO: 807875 - RNA, 19 nt, Artificial Sequence
  Description of Artificial Sequence: Synthetic oligonucleotide
  Antisense strand to SEQ ID NO: 807874
agcucugacccuaucauac

SEQ ID NO: 807876 - RNA, 19 nt, Artificial Sequence
  Description of Artificial Sequence: Synthetic oligonucleotide
  Sense strand starting at position 3648 of SEQ ID NO: 587647
uuaugaacucaaugaugca

SEQ ID NO: 807877 - RNA, 19 nt, Artificial Sequence
  Description of Artificial Sequence: Synthetic oligonucleotide
  Antisense strand to SEQ ID NO: 807876
ugcaucauugaguucauaa

SEQ ID NO: 807878 - RNA, 19 nt, Artificial Sequence
  Description of Artificial Sequence: Synthetic oligonucleotide
  Sense strand starting at position 3684 of SEQ ID NO: 587647
uuggccuugcccuauaaca

SEQ ID NO: 807879 - RNA, 19 nt, Artificial Sequence
  Description of Artificial Sequence: Synthetic oligonucleotide
  Antisense strand to SEQ ID NO: 807878
uguuauagggcaaggccaa

SEQ ID NO: 807880 - RNA, 19 nt, Artificial Sequence
  Description of Artificial Sequence: Synthetic oligonucleotide
  Sense strand starting at position 3686 of SEQ ID NO: 587647
ggccuugcccuauaacaaa

SEQ ID NO: 807881 - RNA, 19 nt, Artificial Sequence
  Description of Artificial Sequence: Synthetic oligonucleotide
  Antisense strand to SEQ ID NO: 807880
uuuguuauagggcaaggcc

SEQ ID NO: 807882 - RNA, 19 nt, Artificial Sequence
  Description of Artificial Sequence: Synthetic oligonucleotide
  Sense strand starting at position 3798 of SEQ ID NO: 587647
uuacucugugaacagucaa

SEQ ID NO: 807883 - RNA, 19 nt, Artificial Sequence
  Description of Artificial Sequence: Synthetic oligonucleotide
  Antisense strand to SEQ ID NO: 807882
uugacuguucacagaguaa

SEQ ID NO: 807884 - RNA, 19 nt, Artificial Sequence
  Description of Artificial Sequence: Synthetic oligonucleotide
  Sense strand starting at position 3844 of SEQ ID NO: 587647
ugugaaacugcuggaauaa

SEQ ID NO: 807885 - RNA, 19 nt, Artificial Sequence
  Description of Artificial Sequence: Synthetic oligonucleotide
  Antisense strand to SEQ ID NO: 807884
uuauuccagcaguuucaca

SEQ ID NO: 807886 - RNA, 19 nt, Artificial Sequence
  Description of Artificial Sequence: Synthetic oligonucleotide
  Sense strand starting at position 3887 of SEQ ID NO: 587647
auuggucuuggcgaggauu

SEQ ID NO: 807887 - RNA, 19 nt, Artificial Sequence
  Description of Artificial Sequence: Synthetic oligonucleotide
  Antisense strand to SEQ ID NO: 807886
aauccucgccaagaccaau

SEQ ID NO: 807888 - RNA, 19 nt, Artificial Sequence
  Description of Artificial Sequence: Synthetic oligonucleotide
  Sense strand starting at position 135 of SEQ ID NO: 587648
guggcuugaggagacuaau

SEQ ID NO: 807889 - RNA, 19 nt, Artificial Sequence
  Description of Artificial Sequence: Synthetic oligonucleotide
  Antisense strand to SEQ ID NO: 807888
auuagucuccucaagccac

SEQ ID NO: 807890 - RNA, 19 nt, Artificial Sequence
  Description of Artificial Sequence: Synthetic oligonucleotide
  Sense strand starting at position 426 of SEQ ID NO: 587648
acagaagaaucgcuagaac

SEQ ID NO: 807891 - RNA, 19 nt, Artificial Sequence
  Description of Artificial Sequence: Synthetic oligonucleotide
  Antisense strand to SEQ ID NO: 807890
guucuagcgauucuucugu

SEQ ID NO: 807892 - RNA, 19 nt, Artificial Sequence
  Description of Artificial Sequence: Synthetic oligonucleotide
  Sense strand starting at position 504 of SEQ ID NO: 587648
cagugagauuucgucucca

SEQ ID NO: 807893 - RNA, 19 nt, Artificial Sequence
  Description of Artificial Sequence: Synthetic oligonucleotide
  Antisense strand to SEQ ID NO: 807892
uggagacgaaaucucacug

SEQ ID NO: 807894 - RNA, 19 nt, Artificial Sequence
  Description of Artificial Sequence: Synthetic oligonucleotide
  Sense strand starting at position 571 of SEQ ID NO: 587648
aggcauauccucuguacga

SEQ ID NO: 807895 - RNA, 19 nt, Artificial Sequence
  Description of Artificial Sequence: Synthetic oligonucleotide
  Antisense strand to SEQ ID NO: 807894
ucguacagaggauaugccu

SEQ ID NO: 807896 - RNA, 19 nt, Artificial Sequence
  Description of Artificial Sequence: Synthetic oligonucleotide
  Sense strand starting at position 572 of SEQ ID NO: 587648
ggcauauccucuguacgaa

SEQ ID NO: 807897 - RNA, 19 nt, Artificial Sequence
  Description of Artificial Sequence: Synthetic oligonucleotide
  Antisense strand to SEQ ID NO: 807896
uucguacagaggauaugcc

SEQ ID NO: 807898 - RNA, 19 nt, Artificial Sequence
  Description of Artificial Sequence: Synthetic oligonucleotide
  Sense strand starting at position 573 of SEQ ID NO: 587648
gcauauccucuguacgaau

SEQ ID NO: 807899 - RNA, 19 nt, Artificial Sequence
  Description of Artificial Sequence: Synthetic oligonucleotide
  Antisense strand to SEQ ID NO: 807898
auucguacagaggauaugc

SEQ ID NO: 807900 - RNA, 19 nt, Artificial Sequence
  Description of Artificial Sequence: Synthetic oligonucleotide
  Sense strand starting at position 582 of SEQ ID NO: 587648
cuguacgaaucuuccuaau

SEQ ID NO: 807901 - RNA, 19 nt, Artificial Sequence
  Description of Artificial Sequence: Synthetic oligonucleotide
  Antisense strand to SEQ ID NO: 807900
auuaggaagauucguacag

SEQ ID NO: 807902 - RNA, 19 nt, Artificial Sequence
  Description of Artificial Sequence: Synthetic oligonucleotide
  Sense strand starting at position 584 of SEQ ID NO: 587648
guacgaaucuuccuaauau

SEQ ID NO: 807903 - RNA, 19 nt, Artificial Sequence
  Description of Artificial Sequence: Synthetic oligonucleotide
  Antisense strand to SEQ ID NO: 807902
auauuaggaagauucguac

SEQ ID NO: 807904 - RNA, 19 nt, Artificial Sequence
  Description of Artificial Sequence: Synthetic oligonucleotide
  Sense strand starting at position 604 of SEQ ID NO: 587648
caaauuauccugugaggca

SEQ ID NO: 807905 - RNA, 19 nt, Artificial Sequence
  Description of Artificial Sequence: Synthetic oligonucleotide
  Antisense strand to SEQ ID NO: 807904
ugccucacaggauaauuug

SEQ ID NO: 807906 - RNA, 19 nt, Artificial Sequence
  Description of Artificial Sequence: Synthetic oligonucleotide
  Sense strand starting at position 721 of SEQ ID NO: 587648
uuugaaugcagaugaaagu

SEQ ID NO: 807907 - RNA, 19 nt, Artificial Sequence
  Description of Artificial Sequence: Synthetic oligonucleotide
  Antisense strand to SEQ ID NO: 807906
acuuucaucugcauucaaa

SEQ ID NO: 807908 - RNA, 19 nt, Artificial Sequence
  Description of Artificial Sequence: Synthetic oligonucleotide
  Sense strand starting at position 852 of SEQ ID NO: 587648
gcaagcagaauugaguaaa

SEQ ID NO: 807909 - RNA, 19 nt, Artificial Sequence
  Description of Artificial Sequence: Synthetic oligonucleotide
  Antisense strand to SEQ ID NO: 807908
uuuacucaauucugcuugc

SEQ ID NO: 807910 - RNA, 19 nt, Artificial Sequence
  Description of Artificial Sequence: Synthetic oligonucleotide
  Sense strand starting at position 885 of SEQ ID NO: 587648
aucagaaucucccuuagug

SEQ ID NO: 807911 - RNA, 19 nt, Artificial Sequence
  Description of Artificial Sequence: Synthetic oligonucleotide
  Antisense strand to SEQ ID NO: 807910
cacuaagggagauucugau

SEQ ID NO: 807912 - RNA, 19 nt, Artificial Sequence
  Description of Artificial Sequence: Synthetic oligonucleotide
  Sense strand starting at position 889 of SEQ ID NO: 587648
gaaucucccuuagugagaa

SEQ ID NO: 807913 - RNA, 19 nt, Artificial Sequence
  Description of Artificial Sequence: Synthetic oligonucleotide
  Antisense strand to SEQ ID NO: 807912
uucucacuaagggagauuc

SEQ ID NO: 807914 - RNA, 19 nt, Artificial Sequence
  Description of Artificial Sequence: Synthetic oligonucleotide
  Sense strand starting at position 922 of SEQ ID NO: 587648
cccagaagguaagaaauaa

SEQ ID NO: 807915 - RNA, 19 nt, Artificial Sequence
  Description of Artificial Sequence: Synthetic oligonucleotide
  Antisense strand to SEQ ID NO: 807914
uuauuucuuaccuucuggg

SEQ ID NO: 807916 - RNA, 19 nt, Artificial Sequence
  Description of Artificial Sequence: Synthetic oligonucleotide
  Sense strand starting at position 1164 of SEQ ID NO: 587648
gguguuacgaaccagaaau

SEQ ID NO: 807917 - RNA, 19 nt, Artificial Sequence
  Description of Artificial Sequence: Synthetic oligonucleotide
  Antisense strand to SEQ ID NO: 807916
auuucugguucguaacacc

SEQ ID NO: 807918 - RNA, 19 nt, Artificial Sequence
  Description of Artificial Sequence: Synthetic oligonucleotide
  Sense strand starting at position 1264 of SEQ ID NO: 587648
ggguuucagcuugguaaau

SEQ ID NO: 807919 - RNA, 19 nt, Artificial Sequence
  Description of Artificial Sequence: Synthetic oligonucleotide
  Antisense strand to SEQ ID NO: 807918
auuuaccaagcugaaaccc

SEQ ID NO: 807920 - RNA, 19 nt, Artificial Sequence
  Description of Artificial Sequence: Synthetic oligonucleotide
  Sense strand starting at position 1274 of SEQ ID NO: 587648
uugguaaauccugauucua

SEQ ID NO: 807921 - RNA, 19 nt, Artificial Sequence
  Description of Artificial Sequence: Synthetic oligonucleotide
  Antisense strand to SEQ ID NO: 807920
uagaaucaggauuuaccaa

SEQ ID NO: 807922 - RNA, 19 nt, Artificial Sequence
  Description of Artificial Sequence: Synthetic oligonucleotide
  Sense strand starting at position 1276 of SEQ ID NO: 587648
gguaaauccugauucuagg

SEQ ID NO: 807923 - RNA, 19 nt, Artificial Sequence
  Description of Artificial Sequence: Synthetic oligonucleotide
  Antisense strand to SEQ ID NO: 807922
ccuagaaucaggauuuacc

SEQ ID NO: 807924 - RNA, 19 nt, Artificial Sequence
  Description of Artificial Sequence: Synthetic oligonucleotide
  Sense strand starting at position 2117 of SEQ ID NO: 587648
uggaaaugccuccggaaac

SEQ ID NO: 807925 - RNA, 19 nt, Artificial Sequence
  Description of Artificial Sequence: Synthetic oligonucleotide
  Antisense strand to SEQ ID NO: 807924
guuuccggaggcauuucca

SEQ ID NO: 807926 - RNA, 19 nt, Artificial Sequence
  Description of Artificial Sequence: Synthetic oligonucleotide
  Sense strand starting at position 2145 of SEQ ID NO: 587648
ccagaagauguguguuccu

SEQ ID NO: 807927 - RNA, 19 nt, Artificial Sequence
  Description of Artificial Sequence: Synthetic oligonucleotide
  Antisense strand to SEQ ID NO: 807926
aggaacacacaucuucugg

SEQ ID NO: 807928 - RNA, 19 nt, Artificial Sequence
  Description of Artificial Sequence: Synthetic oligonucleotide
  Sense strand starting at position 2275 of SEQ ID NO: 587648
gccuuccuccgcuugagua

SEQ ID NO: 807929 - RNA, 19 nt, Artificial Sequence
  Description of Artificial Sequence: Synthetic oligonucleotide
  Antisense strand to SEQ ID NO: 807928
uacucaagcggaggaaggc

SEQ ID NO: 807930 - RNA, 19 nt, Artificial Sequence
  Description of Artificial Sequence: Synthetic oligonucleotide
  Sense strand starting at position 2337 of SEQ ID NO: 587648
uugugauaauuguuaugca

SEQ ID NO: 807931 - RNA, 19 nt, Artificial Sequence
  Description of Artificial Sequence: Synthetic oligonucleotide
  Antisense strand to SEQ ID NO: 807930
ugcauaacaauuaucacaa

SEQ ID NO: 807932 - RNA, 19 nt, Artificial Sequence
  Description of Artificial Sequence: Synthetic oligonucleotide
  Sense strand starting at position 2341 of SEQ ID NO: 587648
gauaauuguuaugcauuag

SEQ ID NO: 807933 - RNA, 19 nt, Artificial Sequence
  Description of Artificial Sequence: Synthetic oligonucleotide
  Antisense strand to SEQ ID NO: 807932
cuaaugcauaacaauuauc

SEQ ID NO: 807934 - RNA, 19 nt, Artificial Sequence
  Description of Artificial Sequence: Synthetic oligonucleotide
  Sense strand starting at position 2351 of SEQ ID NO: 587648
augcauuagcccugaagac

SEQ ID NO: 807935 - RNA, 19 nt, Artificial Sequence
  Description of Artificial Sequence: Synthetic oligonucleotide
  Antisense strand to SEQ ID NO: 807934
gucuucagggcuaaugcau

SEQ ID NO: 807936 - RNA, 19 nt, Artificial Sequence
  Description of Artificial Sequence: Synthetic oligonucleotide
  Sense strand starting at position 2352 of SEQ ID NO: 587648
ugcauuagcccugaagaca

SEQ ID NO: 807937 - RNA, 19 nt, Artificial Sequence
  Description of Artificial Sequence: Synthetic oligonucleotide
  Antisense strand to SEQ ID NO: 807936
ugucuucagggcuaaugca

SEQ ID NO: 807938 - RNA, 19 nt, Artificial Sequence
  Description of Artificial Sequence: Synthetic oligonucleotide
  Sense strand starting at position 2509 of SEQ ID NO: 587648
aggaauaccugugagagga

SEQ ID NO: 807939 - RNA, 19 nt, Artificial Sequence
  Description of Artificial Sequence: Synthetic oligonucleotide
  Antisense strand to SEQ ID NO: 807938
uccucucacagguauuccu

SEQ ID NO: 807940 - RNA, 19 nt, Artificial Sequence
  Description of Artificial Sequence: Synthetic oligonucleotide
  Sense strand starting at position 2583 of SEQ ID NO: 587648
cccguuaaucugcagcaga

SEQ ID NO: 807941 - RNA, 19 nt, Artificial Sequence
  Description of Artificial Sequence: Synthetic oligonucleotide
  Antisense strand to SEQ ID NO: 807940
ucugcugcagauuaacggg

SEQ ID NO: 807942 - RNA, 19 nt, Artificial Sequence
  Description of Artificial Sequence: Synthetic oligonucleotide
  Sense strand starting at position 2612 of SEQ ID NO: 587648
cagucugcaucugugaaac

SEQ ID NO: 807943 - RNA, 19 nt, Artificial Sequence
  Description of Artificial Sequence: Synthetic oligonucleotide
  Antisense strand to SEQ ID NO: 807942
guuucacagaugcagacug

SEQ ID NO: 807944 - RNA, 19 nt, Artificial Sequence
  Description of Artificial Sequence: Synthetic oligonucleotide
  Sense strand starting at position 2778 of SEQ ID NO: 587648
agagaaauauguuugagug

SEQ ID NO: 807945 - RNA, 19 nt, Artificial Sequence
  Description of Artificial Sequence: Synthetic oligonucleotide
  Antisense strand to SEQ ID NO: 807944
cacucaaacauauuucucu

SEQ ID NO: 807946 - RNA, 19 nt, Artificial Sequence
  Description of Artificial Sequence: Synthetic oligonucleotide
  Sense strand starting at position 2779 of SEQ ID NO: 587648
gagaaauauguuugagugc

SEQ ID NO: 807947 - RNA, 19 nt, Artificial Sequence
  Description of Artificial Sequence: Synthetic oligonucleotide
  Antisense strand to SEQ ID NO: 807946
gcacucaaacauauuucuc

SEQ ID NO: 807948 - RNA, 19 nt, Artificial Sequence
  Description of Artificial Sequence: Synthetic oligonucleotide
  Sense strand starting at position 2994 of SEQ ID NO: 587648
uuaagugagauacguaaau

SEQ ID NO: 807949 - RNA, 19 nt, Artificial Sequence
  Description of Artificial Sequence: Synthetic oligonucleotide
  Antisense strand to SEQ ID NO: 807948
auuuacguaucucacuuaa

SEQ ID NO: 807950 - RNA, 19 nt, Artificial Sequence
  Description of Artificial Sequence: Synthetic oligonucleotide
  Sense strand starting at position 3047 of SEQ ID NO: 587648
guuacuguagacugaauaa

SEQ ID NO: 807951 - RNA, 19 nt, Artificial Sequence
  Description of Artificial Sequence: Synthetic oligonucleotide
  Antisense strand to SEQ ID NO: 807950
uuauucagucuacaguaac

SEQ ID NO: 807952 - RNA, 19 nt, Artificial Sequence
  Description of Artificial Sequence: Synthetic oligonucleotide
  Sense strand starting at position 3097 of SEQ ID NO: 587648
auugcuuucguccaaauag

SEQ ID NO: 807953 - RNA, 19 nt, Artificial Sequence
  Description of Artificial Sequence: Synthetic oligonucleotide
  Antisense strand to SEQ ID NO: 807952
cuauuuggacgaaagcaau

SEQ ID NO: 807954 - RNA, 19 nt, Artificial Sequence
  Description of Artificial Sequence: Synthetic oligonucleotide
  Sense strand starting at position 3166 of SEQ ID NO: 587648
acuagcauuccugacagca

SEQ ID NO: 807955 - RNA, 19 nt, Artificial Sequence
  Description of Artificial Sequence: Synthetic oligonucleotide
  Antisense strand to SEQ ID NO: 807954
ugcugucaggaaugcuagu

SEQ ID NO: 807956 - RNA, 19 nt, Artificial Sequence
  Description of Artificial Sequence: Synthetic oligonucleotide
  Sense strand starting at position 3669 of SEQ ID NO: 587648
ggugcauucccacagaaac

SEQ ID NO: 807957 - RNA, 19 nt, Artificial Sequence
  Description of Artificial Sequence: Synthetic oligonucleotide
  Antisense strand to SEQ ID NO: 807956
guuucugugggaaugcacc

SEQ ID NO: 807958 - RNA, 19 nt, Artificial Sequence
  Description of Artificial Sequence: Synthetic oligonucleotide
  Sense strand starting at position 3851 of SEQ ID NO: 587648
caaacugcaucguuuagaa

SEQ ID NO: 807959 - RNA, 19 nt, Artificial Sequence
  Description of Artificial Sequence: Synthetic oligonucleotide
  Antisense strand to SEQ ID NO: 807958
uucuaaacgaugcaguuug

SEQ ID NO: 807960 - RNA, 19 nt, Artificial Sequence
  Description of Artificial Sequence: Synthetic oligonucleotide
  Sense strand starting at position 3887 of SEQ ID NO: 587648
uggaaaccaucccuaguua

SEQ ID NO: 807961 - RNA, 19 nt, Artificial Sequence
  Description of Artificial Sequence: Synthetic oligonucleotide
  Antisense strand to SEQ ID NO: 807960
uaacuagggaugguuucca

SEQ ID NO: 807962 - RNA, 19 nt, Artificial Sequence
  Description of Artificial Sequence: Synthetic oligonucleotide
  Sense strand starting at position 3928 of SEQ ID NO: 587648
gucuaaguacugugaaggu

SEQ ID NO: 807963 - RNA, 19 nt, Artificial Sequence
  Description of Artificial Sequence: Synthetic oligonucleotide
  Antisense strand to SEQ ID NO: 807962
accuucacaguacuuagac

SEQ ID NO: 807964 - RNA, 19 nt, Artificial Sequence
  Description of Artificial Sequence: Synthetic oligonucleotide
  Sense strand starting at position 3972 of SEQ ID NO: 587648
ucgcuuggccacuuuagua

SEQ ID NO: 807965 - RNA, 19 nt, Artificial Sequence
  Description of Artificial Sequence: Synthetic oligonucleotide
  Antisense strand to SEQ ID NO: 807964
uacuaaaguggccaagcga

SEQ ID NO: 807966 - RNA, 19 nt, Artificial Sequence
  Description of Artificial Sequence: Synthetic oligonucleotide
  Sense strand starting at position 3979 of SEQ ID NO: 587648
gccacuuuaguaggaaacu

SEQ ID NO: 807967 - RNA, 19 nt, Artificial Sequence
  Description of Artificial Sequence: Synthetic oligonucleotide
  Antisense strand to SEQ ID NO: 807966
aguuuccuacuaaaguggc

SEQ ID NO: 807968 - RNA, 19 nt, Artificial Sequence
  Description of Artificial Sequence: Synthetic oligonucleotide
  Sense strand starting at position 10 of SEQ ID NO: 587649
gcacgagagcuguagaaag

SEQ ID NO: 807969 - RNA, 19 nt, Artificial Sequence
  Description of Artificial Sequence: Synthetic oligonucleotide
  Antisense strand to SEQ ID NO: 807968
cuuucuacagcucucgugc

SEQ ID NO: 807970 - RNA, 19 nt, Artificial Sequence
  Description of Artificial Sequence: Synthetic oligonucleotide
  Sense strand starting at position 94 of SEQ ID NO: 587649
uugguucugaaagguggaa

SEQ ID NO: 807971 - RNA, 19 nt, Artificial Sequence
  Description of Artificial Sequence: Synthetic oligonucleotide
  Antisense strand to SEQ ID NO: 807970
uuccaccuuucagaaccaa

SEQ ID NO: 807972 - RNA, 19 nt, Artificial Sequence
  Description of Artificial Sequence: Synthetic oligonucleotide
  Sense strand starting at position 321 of SEQ ID NO: 587649
ucuggaucuguugaggcaa

SEQ ID NO: 807973 - RNA, 19 nt, Artificial Sequence
  Description of Artificial Sequence: Synthetic oligonucleotide
  Antisense strand to SEQ ID NO: 807972
uugccucaacagauccaga

SEQ ID NO: 807974 - RNA, 19 nt, Artificial Sequence
  Description of Artificial Sequence: Synthetic oligonucleotide
  Sense strand starting at position 446 of SEQ ID NO: 587649
uuuauuuccucuggaugaa

SEQ ID NO: 807975 - RNA, 19 nt, Artificial Sequence
  Description of Artificial Sequence: Synthetic oligonucleotide
  Antisense strand to SEQ ID NO: 807974
uucauccagaggaaauaaa

SEQ ID NO: 807976 - RNA, 19 nt, Artificial Sequence
  Description of Artificial Sequence: Synthetic oligonucleotide
  Sense strand starting at position 999 of SEQ ID NO: 587649
ggaggaaucagguguccuc

SEQ ID NO: 807977 - RNA, 19 nt, Artificial Sequence
  Description of Artificial Sequence: Synthetic oligonucleotide
  Antisense strand to SEQ ID NO: 807976
gaggacaccugauuccucc

SEQ ID NO: 807978 - RNA, 19 nt, Artificial Sequence
  Description of Artificial Sequence: Synthetic oligonucleotide
  Sense strand starting at position 1377 of SEQ ID NO: 587649
cuucaugucgcugaugaug

SEQ ID NO: 807979 - RNA, 19 nt, Artificial Sequence
  Description of Artificial Sequence: Synthetic oligonucleotide
  Antisense strand to SEQ ID NO: 807978
caucaucagcgacaugaag

SEQ ID NO: 807980 - RNA, 19 nt, Artificial Sequence
  Description of Artificial Sequence: Synthetic oligonucleotide
  Sense strand starting at position 1385 of SEQ ID NO: 587649
cgcugaugauggucuggaa

SEQ ID NO: 807981 - RNA, 19 nt, Artificial Sequence
  Description of Artificial Sequence: Synthetic oligonucleotide
  Antisense strand to SEQ ID NO: 807980
uuccagaccaucaucagcg

SEQ ID NO: 807982 - RNA, 19 nt, Artificial Sequence
  Description of Artificial Sequence: Synthetic oligonucleotide
  Sense strand starting at position 2440 of SEQ ID NO: 587649
ccgaguccugauugcaaau

SEQ ID NO: 807983 - RNA, 19 nt, Artificial Sequence
  Description of Artificial Sequence: Synthetic oligonucleotide
  Antisense strand to SEQ ID NO: 807982
auuugcaaucaggacucgg

SEQ ID NO: 807984 - RNA, 19 nt, Artificial Sequence
  Description of Artificial Sequence: Synthetic oligonucleotide
  Sense strand starting at position 2505 of SEQ ID NO: 587649
ggaugccgaguucgauaaa

SEQ ID NO: 807985 - RNA, 19 nt, Artificial Sequence
  Description of Artificial Sequence: Synthetic oligonucleotide
  Antisense strand to SEQ ID NO: 807984
uuuaucgaacucggcaucc

SEQ ID NO: 807986 - RNA, 19 nt, Artificial Sequence
  Description of Artificial Sequence: Synthetic oligonucleotide
  Sense strand starting at position 2514 of SEQ ID NO: 587649
guucgauaaaguugcagga

SEQ ID NO: 807987 - RNA, 19 nt, Artificial Sequence
  Description of Artificial Sequence: Synthetic oligonucleotide
  Antisense strand to SEQ ID NO: 807986
uccugcaacuuuaucgaac

SEQ ID NO: 807988 - RNA, 19 nt, Artificial Sequence
  Description of Artificial Sequence: Synthetic oligonucleotide
  Sense strand starting at position 2542 of SEQ ID NO: 587649
aguggauugauuugcuguu

SEQ ID NO: 807989 - RNA, 19 nt, Artificial Sequence
  Description of Artificial Sequence: Synthetic oligonucleotide
  Antisense strand to SEQ ID NO: 807988
aacagcaaaucaauccacu

SEQ ID NO: 807990 - RNA, 19 nt, Artificial Sequence
  Description of Artificial Sequence: Synthetic oligonucleotide
  Sense strand starting at position 2579 of SEQ ID NO: 587649
gcguuagagcuucugucca

SEQ ID NO: 807991 - RNA, 19 nt, Artificial Sequence
  Description of Artificial Sequence: Synthetic oligonucleotide
  Antisense strand to SEQ ID NO: 807990
uggacagaagcucuaacgc

SEQ ID NO: 807992 - RNA, 19 nt, Artificial Sequence
  Description of Artificial Sequence: Synthetic oligonucleotide
  Sense strand starting at position 2587 of SEQ ID NO: 587649
gcuucuguccacgauccau

SEQ ID NO: 807993 - RNA, 19 nt, Artificial Sequence
  Description of Artificial Sequence: Synthetic oligonucleotide
  Antisense strand to SEQ ID NO: 807992
auggaucguggacagaagc

SEQ ID NO: 807994 - RNA, 19 nt, Artificial Sequence
  Description of Artificial Sequence: Synthetic oligonucleotide
  Sense strand starting at position 2605 of SEQ ID NO: 587649
ucagucuaucgagauugcu

SEQ ID NO: 807995 - RNA, 19 nt, Artificial Sequence
  Description of Artificial Sequence: Synthetic oligonucleotide
  Antisense strand to SEQ ID NO: 807994
agcaaucucgauagacuga

SEQ ID NO: 807996 - RNA, 19 nt, Artificial Sequence
  Description of Artificial Sequence: Synthetic oligonucleotide
  Sense strand starting at position 2608 of SEQ ID NO: 587649
gucuaucgagauugcugau

SEQ ID NO: 807997 - RNA, 19 nt, Artificial Sequence
  Description of Artificial Sequence: Synthetic oligonucleotide
  Antisense strand to SEQ ID NO: 807996
aucagcaaucucgauagac

SEQ ID NO: 807998 - RNA, 19 nt, Artificial Sequence
  Description of Artificial Sequence: Synthetic oligonucleotide
  Sense strand starting at position 2615 of SEQ ID NO: 587649
gagauugcugauugccuau

SEQ ID NO: 807999 - RNA, 19 nt, Artificial Sequence
  Description of Artificial Sequence: Synthetic oligonucleotide
  Antisense strand to SEQ ID NO: 807998
auaggcaaucagcaaucuc

SEQ ID NO: 808000 - RNA, 19 nt, Artificial Sequence
  Description of Artificial Sequence: Synthetic oligonucleotide
  Sense strand starting at position 2617 of SEQ ID NO: 587649
gauugcugauugccuauga

SEQ ID NO: 808001 - RNA, 19 nt, Artificial Sequence
  Description of Artificial Sequence: Synthetic oligonucleotide
  Antisense strand to SEQ ID NO: 808000
ucauaggcaaucagcaauc

SEQ ID NO: 808002 - RNA, 19 nt, Artificial Sequence
  Description of Artificial Sequence: Synthetic oligonucleotide
  Sense strand starting at position 2621 of SEQ ID NO: 587649
gcugauugccuaugacuug

SEQ ID NO: 808003 - RNA, 19 nt, Artificial Sequence
  Description of Artificial Sequence: Synthetic oligonucleotide
  Antisense strand to SEQ ID NO: 808002
caagucauaggcaaucagc

SEQ ID NO: 808004 - RNA, 19 nt, Artificial Sequence
  Description of Artificial Sequence: Synthetic oligonucleotide
  Sense strand starting at position 2881 of SEQ ID NO: 587649
caccuaacuccggacaguu

SEQ ID NO: 808005 - RNA, 19 nt, Artificial Sequence
  Description of Artificial Sequence: Synthetic oligonucleotide
  Antisense strand to SEQ ID NO: 808004
aacuguccggaguuaggug

SEQ ID NO: 808006 - RNA, 19 nt, Artificial Sequence
  Description of Artificial Sequence: Synthetic oligonucleotide
  Sense strand starting at position 2992 of SEQ ID NO: 587649
cuguacacuugugucagau

SEQ ID NO: 808007 - RNA, 19 nt, Artificial Sequence
  Description of Artificial Sequence: Synthetic oligonucleotide
  Antisense strand to SEQ ID NO: 808006
aucugacacaaguguacag

SEQ ID NO: 808008 - RNA, 19 nt, Artificial Sequence
  Description of Artificial Sequence: Synthetic oligonucleotide
  Sense strand starting at position 3105 of SEQ ID NO: 587649
ccuggaucacucugcccaa

SEQ ID NO: 808009 - RNA, 19 nt, Artificial Sequence
  Description of Artificial Sequence: Synthetic oligonucleotide
  Antisense strand to SEQ ID NO: 808008
uugggcagagugauccagg

SEQ ID NO: 808010 - RNA, 19 nt, Artificial Sequence
  Description of Artificial Sequence: Synthetic oligonucleotide
  Sense strand starting at position 3175 of SEQ ID NO: 587649
ggguguuaccuucaggaag

SEQ ID NO: 808011 - RNA, 19 nt, Artificial Sequence
  Description of Artificial Sequence: Synthetic oligonucleotide
  Antisense strand to SEQ ID NO: 808010
cuuccugaagguaacaccc

SEQ ID NO: 808012 - RNA, 19 nt, Artificial Sequence
  Description of Artificial Sequence: Synthetic oligonucleotide
  Sense strand starting at position 3189 of SEQ ID NO: 587649
ggaaguaacugaucucuug

SEQ ID NO: 808013 - RNA, 19 nt, Artificial Sequence
  Description of Artificial Sequence: Synthetic oligonucleotide
  Antisense strand to SEQ ID NO: 808012
caagagaucaguuacuucc

SEQ ID NO: 808014 - RNA, 19 nt, Artificial Sequence
  Description of Artificial Sequence: Synthetic oligonucleotide
  Sense strand starting at position 3278 of SEQ ID NO: 587649
gggugcuugacacaucguu

SEQ ID NO: 808015 - RNA, 19 nt, Artificial Sequence
  Description of Artificial Sequence: Synthetic oligonucleotide
  Antisense strand to SEQ ID NO: 808014
aacgaugugucaagcaccc

SEQ ID NO: 808016 - RNA, 19 nt, Artificial Sequence
  Description of Artificial Sequence: Synthetic oligonucleotide
  Sense strand starting at position 3300 of SEQ ID NO: 587649
ugccaaucauuauugugau

SEQ ID NO: 808017 - RNA, 19 nt, Artificial Sequence
  Description of Artificial Sequence: Synthetic oligonucleotide
  Antisense strand to SEQ ID NO: 808016
aucacaauaaugauuggca

SEQ ID NO: 808018 - RNA, 19 nt, Artificial Sequence
  Description of Artificial Sequence: Synthetic oligonucleotide
  Sense strand starting at position 3345 of SEQ ID NO: 587649
caagaugacugcuuguaga

SEQ ID NO: 808019 - RNA, 19 nt, Artificial Sequence
  Description of Artificial Sequence: Synthetic oligonucleotide
  Antisense strand to SEQ ID NO: 808018
ucuacaagcagucaucuug

SEQ ID NO: 808020 - RNA, 19 nt, Artificial Sequence
  Description of Artificial Sequence: Synthetic oligonucleotide
  Sense strand starting at position 3472 of SEQ ID NO: 587649
ggauaaugauggcuucuac

SEQ ID NO: 808021 - RNA, 19 nt, Artificial Sequence
  Description of Artificial Sequence: Synthetic oligonucleotide
  Antisense strand to SEQ ID NO: 808020
guagaagccaucauuaucc

SEQ ID NO: 808022 - RNA, 19 nt, Artificial Sequence
  Description of Artificial Sequence: Synthetic oligonucleotide
  Sense strand starting at position 3479 of SEQ ID NO: 587649
gauggcuucuaccugauag

SEQ ID NO: 808023 - RNA, 19 nt, Artificial Sequence
  Description of Artificial Sequence: Synthetic oligonucleotide
  Antisense strand to SEQ ID NO: 808022
cuaucagguagaagccauc

SEQ ID NO: 808024 - RNA, 19 nt, Artificial Sequence
  Description of Artificial Sequence: Synthetic oligonucleotide
  Sense strand starting at position 3498 of SEQ ID NO: 587649
ggcuguucugaacauuaca

SEQ ID NO: 808025 - RNA, 19 nt, Artificial Sequence
  Description of Artificial Sequence: Synthetic oligonucleotide
  Antisense strand to SEQ ID NO: 808024
uguaauguucagaacagcc

SEQ ID NO: 808026 - RNA, 19 nt, Artificial Sequence
  Description of Artificial Sequence: Synthetic oligonucleotide
  Sense strand starting at position 3511 of SEQ ID NO: 587649
auuacaugagcugaucgau

SEQ ID NO: 808027 - RNA, 19 nt, Artificial Sequence
  Description of Artificial Sequence: Synthetic oligonucleotide
  Antisense strand to SEQ ID NO: 808026
aucgaucagcucauguaau

SEQ ID NO: 808028 - RNA, 19 nt, Artificial Sequence
  Description of Artificial Sequence: Synthetic oligonucleotide
  Sense strand starting at position 3514 of SEQ ID NO: 587649
acaugagcugaucgaugaa

SEQ ID NO: 808029 - RNA, 19 nt, Artificial Sequence
  Description of Artificial Sequence: Synthetic oligonucleotide
  Antisense strand to SEQ ID NO: 808028
uucaucgaucagcucaugu

SEQ ID NO: 808030 - RNA, 19 nt, Artificial Sequence
  Description of Artificial Sequence: Synthetic oligonucleotide
  Sense strand starting at position 3557 of SEQ ID NO: 587649
cucguaaguaaucauucga

SEQ ID NO: 808031 - RNA, 19 nt, Artificial Sequence
  Description of Artificial Sequence: Synthetic oligonucleotide
  Antisense strand to SEQ ID NO: 808030
ucgaaugauuacuuacgag

SEQ ID NO: 808032 - RNA, 19 nt, Artificial Sequence
  Description of Artificial Sequence: Synthetic oligonucleotide
  Sense strand starting at position 3564 of SEQ ID NO: 587649
guaaucauucgauaaaucu

SEQ ID NO: 808033 - RNA, 19 nt, Artificial Sequence
  Description of Artificial Sequence: Synthetic oligonucleotide
  Antisense strand to SEQ ID NO: 808032
agauuuaucgaaugauuac

SEQ ID NO: 808034 - RNA, 19 nt, Artificial Sequence
  Description of Artificial Sequence: Synthetic oligonucleotide
  Sense strand starting at position 3573 of SEQ ID NO: 587649
cgauaaaucuuaucaacag

SEQ ID NO: 808035 - RNA, 19 nt, Artificial Sequence
  Description of Artificial Sequence: Synthetic oligonucleotide
  Antisense strand to SEQ ID NO: 808034
cuguugauaagauuuaucg

SEQ ID NO: 808036 - RNA, 19 nt, Artificial Sequence
  Description of Artificial Sequence: Synthetic oligonucleotide
  Sense strand starting at position 3691 of SEQ ID NO: 587649
gugugcauucugggcauuu

SEQ ID NO: 808037 - RNA, 19 nt, Artificial Sequence
  Description of Artificial Sequence: Synthetic oligonucleotide
  Antisense strand to SEQ ID NO: 808036
aaaugcccagaaugcacac

SEQ ID NO: 808038 - RNA, 19 nt, Artificial Sequence
  Description of Artificial Sequence: Synthetic oligonucleotide
  Sense strand starting at position 3713 of SEQ ID NO: 587649
acguauuaugucuacuuga

SEQ ID NO: 808039 - RNA, 19 nt, Artificial Sequence
  Description of Artificial Sequence: Synthetic oligonucleotide
  Antisense strand to SEQ ID NO: 808038
ucaaguagacauaauacgu

SEQ ID NO: 808040 - RNA, 19 nt, Artificial Sequence
  Description of Artificial Sequence: Synthetic oligonucleotide
  Sense strand starting at position 3721 of SEQ ID NO: 587649
ugucuacuugaaggaaauu

SEQ ID NO: 808041 - RNA, 19 nt, Artificial Sequence
  Description of Artificial Sequence: Synthetic oligonucleotide
  Antisense strand to SEQ ID NO: 808040
aauuuccuucaaguagaca

SEQ ID NO: 808042 - RNA, 19 nt, Artificial Sequence
  Description of Artificial Sequence: Synthetic oligonucleotide
  Sense strand starting at position 3732 of SEQ ID NO: 587649
aggaaauuaucauucuggu

SEQ ID NO: 808043 - RNA, 19 nt, Artificial Sequence
  Description of Artificial Sequence: Synthetic oligonucleotide
  Antisense strand to SEQ ID NO: 808042
accagaaugauaauuuccu

SEQ ID NO: 808044 - RNA, 19 nt, Artificial Sequence
  Description of Artificial Sequence: Synthetic oligonucleotide
  Sense strand starting at position 3861 of SEQ ID NO: 587649
ggacacuuggucuagcuuu

SEQ ID NO: 808045 - RNA, 19 nt, Artificial Sequence
  Description of Artificial Sequence: Synthetic oligonucleotide
  Antisense strand to SEQ ID NO: 808044
aaagcuagaccaagugucc

SEQ ID NO: 808046 - RNA, 19 nt, Artificial Sequence
  Description of Artificial Sequence: Synthetic oligonucleotide
  Sense strand starting at position 3922 of SEQ ID NO: 587649
uuagcaauguuugccaaag

SEQ ID NO: 808047 - RNA, 19 nt, Artificial Sequence
  Description of Artificial Sequence: Synthetic oligonucleotide
  Antisense strand to SEQ ID NO: 808046
cuuuggcaaacauugcuaa

SEQ ID NO: 808048 - RNA, 19 nt, Artificial Sequence
  Description of Artificial Sequence: Synthetic oligonucleotide
  Sense strand starting at position 153 of SEQ ID NO: 587650
acaccaguauucucacaga

SEQ ID NO: 808049 - RNA, 19 nt, Artificial Sequence
  Description of Artificial Sequence: Synthetic oligonucleotide
  Antisense strand to SEQ ID NO: 808048
ucugugagaauacuggugu

SEQ ID NO: 808050 - RNA, 19 nt, Artificial Sequence
  Description of Artificial Sequence: Synthetic oligonucleotide
  Sense strand starting at position 207 of SEQ ID NO: 587650
uggaaagcaaauggucaau

SEQ ID NO: 808051 - RNA, 19 nt, Artificial Sequence
  Description of Artificial Sequence: Synthetic oligonucleotide
  Antisense strand to SEQ ID NO: 808050
auugaccauuugcuuucca

SEQ ID NO: 808052 - RNA, 19 nt, Artificial Sequence
  Description of Artificial Sequence: Synthetic oligonucleotide
  Sense strand starting at position 213 of SEQ ID NO: 587650
gcaaauggucaauauguau

SEQ ID NO: 808053 - RNA, 19 nt, Artificial Sequence
  Description of Artificial Sequence: Synthetic oligonucleotide
  Antisense strand to SEQ ID NO: 808052
auacauauugaccauuugc

SEQ ID NO: 808054 - RNA, 19 nt, Artificial Sequence
  Description of Artificial Sequence: Synthetic oligonucleotide
  Sense strand starting at position 219 of SEQ ID NO: 587650
ggucaauauguaugaggag

SEQ ID NO: 808055 - RNA, 19 nt, Artificial Sequence
  Description of Artificial Sequence: Synthetic oligonucleotide
  Antisense strand to SEQ ID NO: 808054
cuccucauacauauugacc

SEQ ID NO: 808056 - RNA, 19 nt, Artificial Sequence
  Description of Artificial Sequence: Synthetic oligonucleotide
  Sense strand starting at position 274 of SEQ ID NO: 587650
ggauauuaacccugcacau

SEQ ID NO: 808057 - RNA, 19 nt, Artificial Sequence
  Description of Artificial Sequence: Synthetic oligonucleotide
  Antisense strand to SEQ ID NO: 808056
augugcaggguuaauaucc

SEQ ID NO: 808058 - RNA, 19 nt, Artificial Sequence
  Description of Artificial Sequence: Synthetic oligonucleotide
  Sense strand starting at position 357 of SEQ ID NO: 587650
uugauacaucuauguaaug

SEQ ID NO: 808059 - RNA, 19 nt, Artificial Sequence
  Description of Artificial Sequence: Synthetic oligonucleotide
  Antisense strand to SEQ ID NO: 808058
cauuacauagauguaucaa

SEQ ID NO: 808060 - RNA, 19 nt, Artificial Sequence
  Description of Artificial Sequence: Synthetic oligonucleotide
  Sense strand starting at position 358 of SEQ ID NO: 587650
ugauacaucuauguaaugu

SEQ ID NO: 808061 - RNA, 19 nt, Artificial Sequence
  Description of Artificial Sequence: Synthetic oligonucleotide
  Antisense strand to SEQ ID NO: 808060
acauuacauagauguauca

SEQ ID NO: 808062 - RNA, 19 nt, Artificial Sequence
  Description of Artificial Sequence: Synthetic oligonucleotide
  Sense strand starting at position 381 of SEQ ID NO: 587650
uuaaguagccacuaagauu

SEQ ID NO: 808063 - RNA, 19 nt, Artificial Sequence
  Description of Artificial Sequence: Synthetic oligonucleotide
  Antisense strand to SEQ ID NO: 808062
aaucuuaguggcuacuuaa

SEQ ID NO: 808064 - RNA, 19 nt, Artificial Sequence
  Description of Artificial Sequence: Synthetic oligonucleotide
  Sense strand starting at position 541 of SEQ ID NO: 587650
ugauuaucuuugcugaaau

SEQ ID NO: 808065 - RNA, 19 nt, Artificial Sequence
  Description of Artificial Sequence: Synthetic oligonucleotide
  Antisense strand to SEQ ID NO: 808064
auuucagcaaagauaauca

SEQ ID NO: 808066 - RNA, 19 nt, Artificial Sequence
  Description of Artificial Sequence: Synthetic oligonucleotide
  Sense strand starting at position 543 of SEQ ID NO: 587650
auuaucuuugcugaaauug

SEQ ID NO: 808067 - RNA, 19 nt, Artificial Sequence
  Description of Artificial Sequence: Synthetic oligonucleotide
  Antisense strand to SEQ ID NO: 808066
caauuucagcaaagauaau

SEQ ID NO: 808068 - RNA, 19 nt, Artificial Sequence
  Description of Artificial Sequence: Synthetic oligonucleotide
  Sense strand starting at position 552 of SEQ ID NO: 587650
gcugaaauugcuuaacuca

SEQ ID NO: 808069 - RNA, 19 nt, Artificial Sequence
  Description of Artificial Sequence: Synthetic oligonucleotide
  Antisense strand to SEQ ID NO: 808068
ugaguuaagcaauuucagc

SEQ ID NO: 808070 - RNA, 19 nt, Artificial Sequence
  Description of Artificial Sequence: Synthetic oligonucleotide
  Sense strand starting at position 673 of SEQ ID NO: 587650
aaugcuugaguguaauaac

SEQ ID NO: 808071 - RNA, 19 nt, Artificial Sequence
  Description of Artificial Sequence: Synthetic oligonucleotide
  Antisense strand to SEQ ID NO: 808070
guuauuacacucaagcauu

SEQ ID NO: 808072 - RNA, 19 nt, Artificial Sequence
  Description of Artificial Sequence: Synthetic oligonucleotide
  Sense strand starting at position 1005 of SEQ ID NO: 587650
uggaauauauugccuauga

SEQ ID NO: 808073 - RNA, 19 nt, Artificial Sequence
  Description of Artificial Sequence: Synthetic oligonucleotide
  Antisense strand to SEQ ID NO: 808072
ucauaggcaauauauucca

SEQ ID NO: 808074 - RNA, 19 nt, Artificial Sequence
  Description of Artificial Sequence: Synthetic oligonucleotide
  Sense strand starting at position 1006 of SEQ ID NO: 587650
ggaauauauugccuaugaa

SEQ ID NO: 808075 - RNA, 19 nt, Artificial Sequence
  Description of Artificial Sequence: Synthetic oligonucleotide
  Antisense strand to SEQ ID NO: 808074
uucauaggcaauauauucc

SEQ ID NO: 808076 - RNA, 19 nt, Artificial Sequence
  Description of Artificial Sequence: Synthetic oligonucleotide
  Sense strand starting at position 1132 of SEQ ID NO: 587650
gcaaacugucuacagaauu

SEQ ID NO: 808077 - RNA, 19 nt, Artificial Sequence
  Description of Artificial Sequence: Synthetic oligonucleotide
  Antisense strand to SEQ ID NO: 808076
aauucuguagacaguuugc

SEQ ID NO: 808078 - RNA, 19 nt, Artificial Sequence
  Description of Artificial Sequence: Synthetic oligonucleotide
  Sense strand starting at position 1335 of SEQ ID NO: 587650
agcgcugugauuuagugau

SEQ ID NO: 808079 - RNA, 19 nt, Artificial Sequence
  Description of Artificial Sequence: Synthetic oligonucleotide
  Antisense strand to SEQ ID NO: 808078
aucacuaaaucacagcgcu

SEQ ID NO: 808080 - RNA, 19 nt, Artificial Sequence
  Description of Artificial Sequence: Synthetic oligonucleotide
  Sense strand starting at position 1337 of SEQ ID NO: 587650
cgcugugauuuagugauga

SEQ ID NO: 808081 - RNA, 19 nt, Artificial Sequence
  Description of Artificial Sequence: Synthetic oligonucleotide
  Antisense strand to SEQ ID NO: 808080
ucaucacuaaaucacagcg

SEQ ID NO: 808082 - RNA, 19 nt, Artificial Sequence
  Description of Artificial Sequence: Synthetic oligonucleotide
  Sense strand starting at position 1345 of SEQ ID NO: 587650
uuuagugaugauugacuuu

SEQ ID NO: 808083 - RNA, 19 nt, Artificial Sequence
  Description of Artificial Sequence: Synthetic oligonucleotide
  Antisense strand to SEQ ID NO: 808082
aaagucaaucaucacuaaa

SEQ ID NO: 808084 - RNA, 19 nt, Artificial Sequence
  Description of Artificial Sequence: Synthetic oligonucleotide
  Sense strand starting at position 1348 of SEQ ID NO: 587650
agugaugauugacuuucga

SEQ ID NO: 808085 - RNA, 19 nt, Artificial Sequence
  Description of Artificial Sequence: Synthetic oligonucleotide
  Antisense strand to SEQ ID NO: 808084
ucgaaagucaaucaucacu

SEQ ID NO: 808086 - RNA, 19 nt, Artificial Sequence
  Description of Artificial Sequence: Synthetic oligonucleotide
  Sense strand starting at position 1494 of SEQ ID NO: 587650
uuuaacagaguauguguaa

SEQ ID NO: 808087 - RNA, 19 nt, Artificial Sequence
  Description of Artificial Sequence: Synthetic oligonucleotide
  Antisense strand to SEQ ID NO: 808086
uuacacauacucuguuaaa

SEQ ID NO: 808088 - RNA, 19 nt, Artificial Sequence
  Description of Artificial Sequence: Synthetic oligonucleotide
  Sense strand starting at position 1497 of SEQ ID NO: 587650
aacagaguauguguaacua

SEQ ID NO: 808089 - RNA, 19 nt, Artificial Sequence
  Description of Artificial Sequence: Synthetic oligonucleotide
  Antisense strand to SEQ ID NO: 808088
uaguuacacauacucuguu

SEQ ID NO: 808090 - RNA, 19 nt, Artificial Sequence
  Description of Artificial Sequence: Synthetic oligonucleotide
  Sense strand starting at position 1653 of SEQ ID NO: 587650
agcacuauagaguagucaa

SEQ ID NO: 808091 - RNA, 19 nt, Artificial Sequence
  Description of Artificial Sequence: Synthetic oligonucleotide
  Antisense strand to SEQ ID NO: 808090
uugacuacucuauagugcu

SEQ ID NO: 808092 - RNA, 19 nt, Artificial Sequence
  Description of Artificial Sequence: Synthetic oligonucleotide
  Sense strand starting at position 1656 of SEQ ID NO: 587650
acuauagaguagucaauaa

SEQ ID NO: 808093 - RNA, 19 nt, Artificial Sequence
  Description of Artificial Sequence: Synthetic oligonucleotide
  Antisense strand to SEQ ID NO: 808092
uuauugacuacucuauagu

SEQ ID NO: 808094 - RNA, 19 nt, Artificial Sequence
  Description of Artificial Sequence: Synthetic oligonucleotide
  Sense strand starting at position 1660 of SEQ ID NO: 587650
uagaguagucaauaagguc

SEQ ID NO: 808095 - RNA, 19 nt, Artificial Sequence
  Description of Artificial Sequence: Synthetic oligonucleotide
  Antisense strand to SEQ ID NO: 808094
gaccuuauugacuacucua

SEQ ID NO: 808096 - RNA, 19 nt, Artificial Sequence
  Description of Artificial Sequence: Synthetic oligonucleotide
  Sense strand starting at position 1666 of SEQ ID NO: 587650
agucaauaaggucaccuua

SEQ ID NO: 808097 - RNA, 19 nt, Artificial Sequence
  Description of Artificial Sequence: Synthetic oligonucleotide
  Antisense strand to SEQ ID NO: 808096
uaaggugaccuuauugacu

SEQ ID NO: 808098 - RNA, 19 nt, Artificial Sequence
  Description of Artificial Sequence: Synthetic oligonucleotide
  Sense strand starting at position 1674 of SEQ ID NO: 587650
aggucaccuuaauuaagau

SEQ ID NO: 808099 - RNA, 19 nt, Artificial Sequence
  Description of Artificial Sequence: Synthetic oligonucleotide
  Antisense strand to SEQ ID NO: 808098
aucuuaauuaaggugaccu

SEQ ID NO: 808100 - RNA, 19 nt, Artificial Sequence
  Description of Artificial Sequence: Synthetic oligonucleotide
  Sense strand starting at position 2916 of SEQ ID NO: 587650
cagaauuaucagggcggaa

SEQ ID NO: 808101 - RNA, 19 nt, Artificial Sequence
  Description of Artificial Sequence: Synthetic oligonucleotide
  Antisense strand to SEQ ID NO: 808100
uuccgcccugauaauucug

SEQ ID NO: 808102 - RNA, 19 nt, Artificial Sequence
  Description of Artificial Sequence: Synthetic oligonucleotide
  Sense strand starting at position 2940 of SEQ ID NO: 587650
caaggaaggagucgugauu

SEQ ID NO: 808103 - RNA, 19 nt, Artificial Sequence
  Description of Artificial Sequence: Synthetic oligonucleotide
  Antisense strand to SEQ ID NO: 808102
aaucacgacuccuuccuug

SEQ ID NO: 808104 - RNA, 19 nt, Artificial Sequence
  Description of Artificial Sequence: Synthetic oligonucleotide
  Sense strand starting at position 2971 of SEQ ID NO: 587650
ggcugauucgcagucugua

SEQ ID NO: 808105 - RNA, 19 nt, Artificial Sequence
  Description of Artificial Sequence: Synthetic oligonucleotide
  Antisense strand to SEQ ID NO: 808104
uacagacugcgaaucagcc

SEQ ID NO: 808106 - RNA, 19 nt, Artificial Sequence
  Description of Artificial Sequence: Synthetic oligonucleotide
  Sense strand starting at position 2972 of SEQ ID NO: 587650
gcugauucgcagucuguau

SEQ ID NO: 808107 - RNA, 19 nt, Artificial Sequence
  Description of Artificial Sequence: Synthetic oligonucleotide
  Antisense strand to SEQ ID NO: 808106
auacagacugcgaaucagc

SEQ ID NO: 808108 - RNA, 19 nt, Artificial Sequence
  Description of Artificial Sequence: Synthetic oligonucleotide
  Sense strand starting at position 3289 of SEQ ID NO: 587650
ugaaccgugaaaugucaga

SEQ ID NO: 808109 - RNA, 19 nt, Artificial Sequence
  Description of Artificial Sequence: Synthetic oligonucleotide
  Antisense strand to SEQ ID NO: 808108
ucugacauuucacgguuca

SEQ ID NO: 808110 - RNA, 19 nt, Artificial Sequence
  Description of Artificial Sequence: Synthetic oligonucleotide
  Sense strand starting at position 3544 of SEQ ID NO: 587650
aggucagauuaucuccauu

SEQ ID NO: 808111 - RNA, 19 nt, Artificial Sequence
  Description of Artificial Sequence: Synthetic oligonucleotide
  Antisense strand to SEQ ID NO: 808110
aauggagauaaucugaccu

SEQ ID NO: 808112 - RNA, 19 nt, Artificial Sequence
  Description of Artificial Sequence: Synthetic oligonucleotide
  Sense strand starting at position 3546 of SEQ ID NO: 587650
gucagauuaucuccauuau

SEQ ID NO: 808113 - RNA, 19 nt, Artificial Sequence
  Description of Artificial Sequence: Synthetic oligonucleotide
  Antisense strand to SEQ ID NO: 808112
auaauggagauaaucugac

SEQ ID NO: 808114 - RNA, 19 nt, Artificial Sequence
  Description of Artificial Sequence: Synthetic oligonucleotide
  Sense strand starting at position 3717 of SEQ ID NO: 587650
guuguaaagauagaugcaa

SEQ ID NO: 808115 - RNA, 19 nt, Artificial Sequence
  Description of Artificial Sequence: Synthetic oligonucleotide
  Antisense strand to SEQ ID NO: 808114
uugcaucuaucuuuacaac

SEQ ID NO: 808116 - RNA, 19 nt, Artificial Sequence
  Description of Artificial Sequence: Synthetic oligonucleotide
  Sense strand starting at position 3754 of SEQ ID NO: 587650
uuaggaaaggcaugugauu

SEQ ID NO: 808117 - RNA, 19 nt, Artificial Sequence
  Description of Artificial Sequence: Synthetic oligonucleotide
  Antisense strand to SEQ ID NO: 808116
aaucacaugccuuuccuaa

SEQ ID NO: 808118 - RNA, 19 nt, Artificial Sequence
  Description of Artificial Sequence: Synthetic oligonucleotide
  Sense strand starting at position 3756 of SEQ ID NO: 587650
aggaaaggcaugugauuaa

SEQ ID NO: 808119 - RNA, 19 nt, Artificial Sequence
  Description of Artificial Sequence: Synthetic oligonucleotide
  Antisense strand to SEQ ID NO: 808118
uuaaucacaugccuuuccu

SEQ ID NO: 808120 - RNA, 19 nt, Artificial Sequence
  Description of Artificial Sequence: Synthetic oligonucleotide
  Sense strand starting at position 3805 of SEQ ID NO: 587650
agaugagucucccucugaa

SEQ ID NO: 808121 - RNA, 19 nt, Artificial Sequence
  Description of Artificial Sequence: Synthetic oligonucleotide
  Antisense strand to SEQ ID NO: 808120
uucagagggagacucaucu

SEQ ID NO: 808122 - RNA, 19 nt, Artificial Sequence
  Description of Artificial Sequence: Synthetic oligonucleotide
  Sense strand starting at position 3869 of SEQ ID NO: 587650
ucacgaggcaauuaugcua

SEQ ID NO: 808123 - RNA, 19 nt, Artificial Sequence
  Description of Artificial Sequence: Synthetic oligonucleotide
  Antisense strand to SEQ ID NO: 808122
uagcauaauugccucguga

SEQ ID NO: 808124 - RNA, 19 nt, Artificial Sequence
  Description of Artificial Sequence: Synthetic oligonucleotide
  Sense strand starting at position 3947 of SEQ ID NO: 587650
ucuuuauaacccugaugug

SEQ ID NO: 808125 - RNA, 19 nt, Artificial Sequence
  Description of Artificial Sequence: Synthetic oligonucleotide
  Antisense strand to SEQ ID NO: 808124
cacaucaggguuauaaaga

SEQ ID NO: 808126 - RNA, 19 nt, Artificial Sequence
  Description of Artificial Sequence: Synthetic oligonucleotide
  Sense strand starting at position 3948 of SEQ ID NO: 587650
cuuuauaacccugauguga

SEQ ID NO: 808127 - RNA, 19 nt, Artificial Sequence
  Description of Artificial Sequence: Synthetic oligonucleotide
  Antisense strand to SEQ ID NO: 808126
ucacaucaggguuauaaag

SEQ ID NO: 808128 - RNA, 19 nt, Artificial Sequence
  Description of Artificial Sequence: Synthetic oligonucleotide
  Sense strand starting at position 380 of SEQ ID NO: 587651
gaaguaaugucuuuggacc

SEQ ID NO: 808129 - RNA, 19 nt, Artificial Sequence
  Description of Artificial Sequence: Synthetic oligonucleotide
  Antisense strand to SEQ ID NO: 808128
gguccaaagacauuacuuc

SEQ ID NO: 808130 - RNA, 19 nt, Artificial Sequence
  Description of Artificial Sequence: Synthetic oligonucleotide
  Sense strand starting at position 381 of SEQ ID NO: 587651
aaguaaugucuuuggaccu

SEQ ID NO: 808131 - RNA, 19 nt, Artificial Sequence
  Description of Artificial Sequence: Synthetic oligonucleotide
  Antisense strand to SEQ ID NO: 808130
agguccaaagacauuacuu

SEQ ID NO: 808132 - RNA, 19 nt, Artificial Sequence
  Description of Artificial Sequence: Synthetic oligonucleotide
  Sense strand starting at position 545 of SEQ ID NO: 587651
gauauuagguaucugagug

SEQ ID NO: 808133 - RNA, 19 nt, Artificial Sequence
  Description of Artificial Sequence: Synthetic oligonucleotide
  Antisense strand to SEQ ID NO: 808132
cacucagauaccuaauauc

SEQ ID NO: 808134 - RNA, 19 nt, Artificial Sequence
  Description of Artificial Sequence: Synthetic oligonucleotide
  Sense strand starting at position 549 of SEQ ID NO: 587651
uuagguaucugagugugaa

SEQ ID NO: 808135 - RNA, 19 nt, Artificial Sequence
  Description of Artificial Sequence: Synthetic oligonucleotide
  Antisense strand to SEQ ID NO: 808134
uucacacucagauaccuaa

SEQ ID NO: 808136 - RNA, 19 nt, Artificial Sequence
  Description of Artificial Sequence: Synthetic oligonucleotide
  Sense strand starting at position 550 of SEQ ID NO: 587651
uagguaucugagugugaaa

SEQ ID NO: 808137 - RNA, 19 nt, Artificial Sequence
  Description of Artificial Sequence: Synthetic oligonucleotide
  Antisense strand to SEQ ID NO: 808136
uuucacacucagauaccua

SEQ ID NO: 808138 - RNA, 19 nt, Artificial Sequence
  Description of Artificial Sequence: Synthetic oligonucleotide
  Sense strand starting at position 552 of SEQ ID NO: 587651
gguaucugagugugaaaga

SEQ ID NO: 808139 - RNA, 19 nt, Artificial Sequence
  Description of Artificial Sequence: Synthetic oligonucleotide
  Antisense strand to SEQ ID NO: 808138
ucuuucacacucagauacc

SEQ ID NO: 808140 - RNA, 19 nt, Artificial Sequence
  Description of Artificial Sequence: Synthetic oligonucleotide
  Sense strand starting at position 597 of SEQ ID NO: 587651
gagcacauuugguauagaa

SEQ ID NO: 808141 - RNA, 19 nt, Artificial Sequence
  Description of Artificial Sequence: Synthetic oligonucleotide
  Antisense strand to SEQ ID NO: 808140
uucuauaccaaaugugcuc

SEQ ID NO: 808142 - RNA, 19 nt, Artificial Sequence
  Description of Artificial Sequence: Synthetic oligonucleotide
  Sense strand starting at position 653 of SEQ ID NO: 587651
ucaagaucguaacuuugaa

SEQ ID NO: 808143 - RNA, 19 nt, Artificial Sequence
  Description of Artificial Sequence: Synthetic oligonucleotide
  Antisense strand to SEQ ID NO: 808142
uucaaaguuacgaucuuga

SEQ ID NO: 808144 - RNA, 19 nt, Artificial Sequence
  Description of Artificial Sequence: Synthetic oligonucleotide
  Sense strand starting at position 977 of SEQ ID NO: 587651
ggaaguuaauucuuaacau

SEQ ID NO: 808145 - RNA, 19 nt, Artificial Sequence
  Description of Artificial Sequence: Synthetic oligonucleotide
  Antisense strand to SEQ ID NO: 808144
auguuaagaauuaacuucc

SEQ ID NO: 808146 - RNA, 19 nt, Artificial Sequence
  Description of Artificial Sequence: Synthetic oligonucleotide
  Sense strand starting at position 1248 of SEQ ID NO: 587651
gugccagaacauuaacgau

SEQ ID NO: 808147 - RNA, 19 nt, Artificial Sequence
  Description of Artificial Sequence: Synthetic oligonucleotide
  Antisense strand to SEQ ID NO: 808146
aucguuaauguucuggcac

SEQ ID NO: 808148 - RNA, 19 nt, Artificial Sequence
  Description of Artificial Sequence: Synthetic oligonucleotide
  Sense strand starting at position 1261 of SEQ ID NO: 587651
aacgaugcugcugaauuau

SEQ ID NO: 808149 - RNA, 19 nt, Artificial Sequence
  Description of Artificial Sequence: Synthetic oligonucleotide
  Antisense strand to SEQ ID NO: 808148
auaauucagcagcaucguu

SEQ ID NO: 808150 - RNA, 19 nt, Artificial Sequence
  Description of Artificial Sequence: Synthetic oligonucleotide
  Sense strand starting at position 1471 of SEQ ID NO: 587651
accagaaaucgucgaccua

SEQ ID NO: 808151 - RNA, 19 nt, Artificial Sequence
  Description of Artificial Sequence: Synthetic oligonucleotide
  Antisense strand to SEQ ID NO: 808150
uaggucgacgauuucuggu

SEQ ID NO: 808152 - RNA, 19 nt, Artificial Sequence
  Description of Artificial Sequence: Synthetic oligonucleotide
  Sense strand starting at position 1472 of SEQ ID NO: 587651
ccagaaaucgucgaccuac

SEQ ID NO: 808153 - RNA, 19 nt, Artificial Sequence
  Description of Artificial Sequence: Synthetic oligonucleotide
  Antisense strand to SEQ ID NO: 808152
guaggucgacgauuucugg

SEQ ID NO: 808154 - RNA, 19 nt, Artificial Sequence
  Description of Artificial Sequence: Synthetic oligonucleotide
  Sense strand starting at position 1501 of SEQ ID NO: 587651
aguaaacguggcuaacaaa

SEQ ID NO: 808155 - RNA, 19 nt, Artificial Sequence
  Description of Artificial Sequence: Synthetic oligonucleotide
  Antisense strand to SEQ ID NO: 808154
uuuguuagccacguuuacu

SEQ ID NO: 808156 - RNA, 19 nt, Artificial Sequence
  Description of Artificial Sequence: Synthetic oligonucleotide
  Sense strand starting at position 1508 of SEQ ID NO: 587651
guggcuaacaaaggaauua

SEQ ID NO: 808157 - RNA, 19 nt, Artificial Sequence
  Description of Artificial Sequence: Synthetic oligonucleotide
  Antisense strand to SEQ ID NO: 808156
uaauuccuuuguuagccac

SEQ ID NO: 808158 - RNA, 19 nt, Artificial Sequence
  Description of Artificial Sequence: Synthetic oligonucleotide
  Sense strand starting at position 1602 of SEQ ID NO: 587651
gggugaguguagaauugau

SEQ ID NO: 808159 - RNA, 19 nt, Artificial Sequence
  Description of Artificial Sequence: Synthetic oligonucleotide
  Antisense strand to SEQ ID NO: 808158
aucaauucuacacucaccc

SEQ ID NO: 808160 - RNA, 19 nt, Artificial Sequence
  Description of Artificial Sequence: Synthetic oligonucleotide
  Sense strand starting at position 1637 of SEQ ID NO: 587651
auaucaguuucuguacaac

SEQ ID NO: 808161 - RNA, 19 nt, Artificial Sequence
  Description of Artificial Sequence: Synthetic oligonucleotide
  Antisense strand to SEQ ID NO: 808160
guuguacagaaacugauau

SEQ ID NO: 808162 - RNA, 19 nt, Artificial Sequence
  Description of Artificial Sequence: Synthetic oligonucleotide
  Sense strand starting at position 1757 of SEQ ID NO: 587651
gugaauucgaauggaggga

SEQ ID NO: 808163 - RNA, 19 nt, Artificial Sequence
  Description of Artificial Sequence: Synthetic oligonucleotide
  Antisense strand to SEQ ID NO: 808162
ucccuccauucgaauucac

SEQ ID NO: 808164 - RNA, 19 nt, Artificial Sequence
  Description of Artificial Sequence: Synthetic oligonucleotide
  Sense strand starting at position 1884 of SEQ ID NO: 587651
ggaacacaucgccacuaga

SEQ ID NO: 808165 - RNA, 19 nt, Artificial Sequence
  Description of Artificial Sequence: Synthetic oligonucleotide
  Antisense strand to SEQ ID NO: 808164
ucuaguggcgauguguucc

SEQ ID NO: 808166 - RNA, 19 nt, Artificial Sequence
  Description of Artificial Sequence: Synthetic oligonucleotide
  Sense strand starting at position 2151 of SEQ ID NO: 587651
auugcuuugcaagacaaag

SEQ ID NO: 808167 - RNA, 19 nt, Artificial Sequence
  Description of Artificial Sequence: Synthetic oligonucleotide
  Antisense strand to SEQ ID NO: 808166
cuuugucuugcaaagcaau

SEQ ID NO: 808168 - RNA, 19 nt, Artificial Sequence
  Description of Artificial Sequence: Synthetic oligonucleotide
  Sense strand starting at position 2180 of SEQ ID NO: 587651
auaauacacgugugaauua

SEQ ID NO: 808169 - RNA, 19 nt, Artificial Sequence
  Description of Artificial Sequence: Synthetic oligonucleotide
  Antisense strand to SEQ ID NO: 808168
uaauucacacguguauuau

SEQ ID NO: 808170 - RNA, 19 nt, Artificial Sequence
  Description of Artificial Sequence: Synthetic oligonucleotide
  Sense strand starting at position 2307 of SEQ ID NO: 587651
aucccaguauuccugaagu

SEQ ID NO: 808171 - RNA, 19 nt, Artificial Sequence
  Description of Artificial Sequence: Synthetic oligonucleotide
  Antisense strand to SEQ ID NO: 808170
acuucaggaauacugggau

SEQ ID NO: 808172 - RNA, 19 nt, Artificial Sequence
  Description of Artificial Sequence: Synthetic oligonucleotide
  Sense strand starting at position 2386 of SEQ ID NO: 587651
cggaaaugugcucauuaau

SEQ ID NO: 808173 - RNA, 19 nt, Artificial Sequence
  Description of Artificial Sequence: Synthetic oligonucleotide
  Antisense strand to SEQ ID NO: 808172
auuaaugagcacauuuccg

SEQ ID NO: 808174 - RNA, 19 nt, Artificial Sequence
  Description of Artificial Sequence: Synthetic oligonucleotide
  Sense strand starting at position 2458 of SEQ ID NO: 587651
cauagcugcugugugauuu

SEQ ID NO: 808175 - RNA, 19 nt, Artificial Sequence
  Description of Artificial Sequence: Synthetic oligonucleotide
  Antisense strand to SEQ ID NO: 808174
aaaucacacagcagcuaug

SEQ ID NO: 808176 - RNA, 19 nt, Artificial Sequence
  Description of Artificial Sequence: Synthetic oligonucleotide
  Sense strand starting at position 2536 of SEQ ID NO: 587651
gcagaaguuaccugagaga

SEQ ID NO: 808177 - RNA, 19 nt, Artificial Sequence
  Description of Artificial Sequence: Synthetic oligonucleotide
  Antisense strand to SEQ ID NO: 808176
ucucucagguaacuucugc

SEQ ID NO: 808178 - RNA, 19 nt, Artificial Sequence
  Description of Artificial Sequence: Synthetic oligonucleotide
  Sense strand starting at position 2606 of SEQ ID NO: 587651
gagccucaugagcauuauu

SEQ ID NO: 808179 - RNA, 19 nt, Artificial Sequence
  Description of Artificial Sequence: Synthetic oligonucleotide
  Antisense strand to SEQ ID NO: 808178
aauaaugcucaugaggcuc

SEQ ID NO: 808180 - RNA, 19 nt, Artificial Sequence
  Description of Artificial Sequence: Synthetic oligonucleotide
  Sense strand starting at position 2727 of SEQ ID NO: 587651
guauucucaucauccauga

SEQ ID NO: 808181 - RNA, 19 nt, Artificial Sequence
  Description of Artificial Sequence: Synthetic oligonucleotide
  Antisense strand to SEQ ID NO: 808180
ucauggaugaugagaauac

SEQ ID NO: 808182 - RNA, 19 nt, Artificial Sequence
  Description of Artificial Sequence: Synthetic oligonucleotide
  Sense strand starting at position 2846 of SEQ ID NO: 587651
ggcacuccaagaugguuua

SEQ ID NO: 808183 - RNA, 19 nt, Artificial Sequence
  Description of Artificial Sequence: Synthetic oligonucleotide
  Antisense strand to SEQ ID NO: 808182
uaaaccaucuuggagugcc

SEQ ID NO: 808184 - RNA, 19 nt, Artificial Sequence
  Description of Artificial Sequence: Synthetic oligonucleotide
  Sense strand starting at position 2849 of SEQ ID NO: 587651
acuccaagaugguuuaaau

SEQ ID NO: 808185 - RNA, 19 nt, Artificial Sequence
  Description of Artificial Sequence: Synthetic oligonucleotide
  Antisense strand to SEQ ID NO: 808184
auuuaaaccaucuuggagu

SEQ ID NO: 808186 - RNA, 19 nt, Artificial Sequence
  Description of Artificial Sequence: Synthetic oligonucleotide
  Sense strand starting at position 2947 of SEQ ID NO: 587651
agagguaucucaguaaauu

SEQ ID NO: 808187 - RNA, 19 nt, Artificial Sequence
  Description of Artificial Sequence: Synthetic oligonucleotide
  Antisense strand to SEQ ID NO: 808186
aauuuacugagauaccucu

SEQ ID NO: 808188 - RNA, 19 nt, Artificial Sequence
  Description of Artificial Sequence: Synthetic oligonucleotide
  Sense strand starting at position 2948 of SEQ ID NO: 587651
gagguaucucaguaaauuc

SEQ ID NO: 808189 - RNA, 19 nt, Artificial Sequence
  Description of Artificial Sequence: Synthetic oligonucleotide
  Antisense strand to SEQ ID NO: 808188
gaauuuacugagauaccuc

SEQ ID NO: 808190 - RNA, 19 nt, Artificial Sequence
  Description of Artificial Sequence: Synthetic oligonucleotide
  Sense strand starting at position 2987 of SEQ ID NO: 587651
uagaacucacguuaacuga

SEQ ID NO: 808191 - RNA, 19 nt, Artificial Sequence
  Description of Artificial Sequence: Synthetic oligonucleotide
  Antisense strand to SEQ ID NO: 808190
ucaguuaacgugaguucua

SEQ ID NO: 808192 - RNA, 19 nt, Artificial Sequence
  Description of Artificial Sequence: Synthetic oligonucleotide
  Sense strand starting at position 3401 of SEQ ID NO: 587651
uguaaugacuguuuccaca

SEQ ID NO: 808193 - RNA, 19 nt, Artificial Sequence
  Description of Artificial Sequence: Synthetic oligonucleotide
  Antisense strand to SEQ ID NO: 808192
uguggaaacagucauuaca

SEQ ID NO: 808194 - RNA, 19 nt, Artificial Sequence
  Description of Artificial Sequence: Synthetic oligonucleotide
  Sense strand starting at position 3425 of SEQ ID NO: 587651
cgaagugugauauaaaguc

SEQ ID NO: 808195 - RNA, 19 nt, Artificial Sequence
  Description of Artificial Sequence: Synthetic oligonucleotide
  Antisense strand to SEQ ID NO: 808194
gacuuuauaucacacuucg

SEQ ID NO: 808196 - RNA, 19 nt, Artificial Sequence
  Description of Artificial Sequence: Synthetic oligonucleotide
  Sense strand starting at position 3431 of SEQ ID NO: 587651
gugauauaaagucgacuua

SEQ ID NO: 808197 - RNA, 19 nt, Artificial Sequence
  Description of Artificial Sequence: Synthetic oligonucleotide
  Antisense strand to SEQ ID NO: 808196
uaagucgacuuuauaucac

SEQ ID NO: 808198 - RNA, 19 nt, Artificial Sequence
  Description of Artificial Sequence: Synthetic oligonucleotide
  Sense strand starting at position 3550 of SEQ ID NO: 587651
uaggaaguggucuaggcaa

SEQ ID NO: 808199 - RNA, 19 nt, Artificial Sequence
  Description of Artificial Sequence: Synthetic oligonucleotide
  Antisense strand to SEQ ID NO: 808198
uugccuagaccacuuccua

SEQ ID NO: 808200 - RNA, 19 nt, Artificial Sequence
  Description of Artificial Sequence: Synthetic oligonucleotide
  Sense strand starting at position 3552 of SEQ ID NO: 587651
ggaaguggucuaggcaaau

SEQ ID NO: 808201 - RNA, 19 nt, Artificial Sequence
  Description of Artificial Sequence: Synthetic oligonucleotide
  Antisense strand to SEQ ID NO: 808200
auuugccuagaccacuucc

SEQ ID NO: 808202 - RNA, 19 nt, Artificial Sequence
  Description of Artificial Sequence: Synthetic oligonucleotide
  Sense strand starting at position 3787 of SEQ ID NO: 587651
uuugaucauuuagaggcaa

SEQ ID NO: 808203 - RNA, 19 nt, Artificial Sequence
  Description of Artificial Sequence: Synthetic oligonucleotide
  Antisense strand to SEQ ID NO: 808202
uugccucuaaaugaucaaa

SEQ ID NO: 808204 - RNA, 19 nt, Artificial Sequence
  Description of Artificial Sequence: Synthetic oligonucleotide
  Sense strand starting at position 3835 of SEQ ID NO: 587651
augagaaguguaggaguaa

SEQ ID NO: 808205 - RNA, 19 nt, Artificial Sequence
  Description of Artificial Sequence: Synthetic oligonucleotide
  Antisense strand to SEQ ID NO: 808204
uuacuccuacacuucucau

SEQ ID NO: 808206 - RNA, 19 nt, Artificial Sequence
  Description of Artificial Sequence: Synthetic oligonucleotide
  Sense strand starting at position 3879 of SEQ ID NO: 587651
acacauguucucugaagga

SEQ ID NO: 808207 - RNA, 19 nt, Artificial Sequence
  Description of Artificial Sequence: Synthetic oligonucleotide
  Antisense strand to SEQ ID NO: 808206
uccuucagagaacaugugu

SEQ ID NO: 808208 - RNA, 19 nt, Artificial Sequence
  Description of Artificial Sequence: Synthetic oligonucleotide
  Sense strand starting at position 26 of SEQ ID NO: 587652
gaaguaaugucuuuggacc

SEQ ID NO: 808209 - RNA, 19 nt, Artificial Sequence
  Description of Artificial Sequence: Synthetic oligonucleotide
  Antisense strand to SEQ ID NO: 808208
gguccaaagacauuacuuc

SEQ ID NO: 808210 - RNA, 19 nt, Artificial Sequence
  Description of Artificial Sequence: Synthetic oligonucleotide
  Sense strand starting at position 27 of SEQ ID NO: 587652
aaguaaugucuuuggaccu

SEQ ID NO: 808211 - RNA, 19 nt, Artificial Sequence
  Description of Artificial Sequence: Synthetic oligonucleotide
  Antisense strand to SEQ ID NO: 808210
agguccaaagacauuacuu

SEQ ID NO: 808212 - RNA, 19 nt, Artificial Sequence
  Description of Artificial Sequence: Synthetic oligonucleotide
  Sense strand starting at position 191 of SEQ ID NO: 587652
gauauuagguaucugagug

SEQ ID NO: 808213 - RNA, 19 nt, Artificial Sequence
  Description of Artificial Sequence: Synthetic oligonucleotide
  Antisense strand to SEQ ID NO: 808212
cacucagauaccuaauauc

SEQ ID NO: 808214 - RNA, 19 nt, Artificial Sequence
  Description of Artificial Sequence: Synthetic oligonucleotide
  Sense strand starting at position 195 of SEQ ID NO: 587652
uuagguaucugagugugaa

SEQ ID NO: 808215 - RNA, 19 nt, Artificial Sequence
  Description of Artificial Sequence: Synthetic oligonucleotide
  Antisense strand to SEQ ID NO: 808214
uucacacucagauaccuaa

SEQ ID NO: 808216 - RNA, 19 nt, Artificial Sequence
  Description of Artificial Sequence: Synthetic oligonucleotide
  Sense strand starting at position 196 of SEQ ID NO: 587652
uagguaucugagugugaaa

SEQ ID NO: 808217 - RNA, 19 nt, Artificial Sequence
  Description of Artificial Sequence: Synthetic oligonucleotide
  Antisense strand to SEQ ID NO: 808216
uuucacacucagauaccua

SEQ ID NO: 808218 - RNA, 19 nt, Artificial Sequence
  Description of Artificial Sequence: Synthetic oligonucleotide
  Sense strand starting at position 198 of SEQ ID NO: 587652
gguaucugagugugaaaga

SEQ ID NO: 808219 - RNA, 19 nt, Artificial Sequence
  Description of Artificial Sequence: Synthetic oligonucleotide
  Antisense strand to SEQ ID NO: 808218
ucuuucacacucagauacc

SEQ ID NO: 808220 - RNA, 19 nt, Artificial Sequence
  Description of Artificial Sequence: Synthetic oligonucleotide
  Sense strand starting at position 243 of SEQ ID NO: 587652
gagcacauuugguauagaa

SEQ ID NO: 808221 - RNA, 19 nt, Artificial Sequence
  Description of Artificial Sequence: Synthetic oligonucleotide
  Antisense strand to SEQ ID NO: 808220
uucuauaccaaaugugcuc

SEQ ID NO: 808222 - RNA, 19 nt, Artificial Sequence
  Description of Artificial Sequence: Synthetic oligonucleotide
  Sense strand starting at position 299 of SEQ ID NO: 587652
ucaagaucguaacuuugaa

SEQ ID NO: 808223 - RNA, 19 nt, Artificial Sequence
  Description of Artificial Sequence: Synthetic oligonucleotide
  Antisense strand to SEQ ID NO: 808222
uucaaaguuacgaucuuga

SEQ ID NO: 808224 - RNA, 19 nt, Artificial Sequence
  Description of Artificial Sequence: Synthetic oligonucleotide
  Sense strand starting at position 623 of SEQ ID NO: 587652
ggaaguuaauucuuaacau

SEQ ID NO: 808225 - RNA, 19 nt, Artificial Sequence
  Description of Artificial Sequence: Synthetic oligonucleotide
  Antisense strand to SEQ ID NO: 808224
auguuaagaauuaacuucc

SEQ ID NO: 808226 - RNA, 19 nt, Artificial Sequence
  Description of Artificial Sequence: Synthetic oligonucleotide
  Sense strand starting at position 894 of SEQ ID NO: 587652
gugccagaacauuaacgau

SEQ ID NO: 808227 - RNA, 19 nt, Artificial Sequence
  Description of Artificial Sequence: Synthetic oligonucleotide
  Antisense strand to SEQ ID NO: 808226
aucguuaauguucuggcac

SEQ ID NO: 808228 - RNA, 19 nt, Artificial Sequence
  Description of Artificial Sequence: Synthetic oligonucleotide
  Sense strand starting at position 907 of SEQ ID NO: 587652
aacgaugcugcugaauuau

SEQ ID NO: 808229 - RNA, 19 nt, Artificial Sequence
  Description of Artificial Sequence: Synthetic oligonucleotide
  Antisense strand to SEQ ID NO: 808228
auaauucagcagcaucguu

SEQ ID NO: 808230 - RNA, 19 nt, Artificial Sequence
  Description of Artificial Sequence: Synthetic oligonucleotide
  Sense strand starting at position 1118 of SEQ ID NO: 587652
ccagaaaucgucgaccuac

SEQ ID NO: 808231 - RNA, 19 nt, Artificial Sequence
  Description of Artificial Sequence: Synthetic oligonucleotide
  Antisense strand to SEQ ID NO: 808230
guaggucgacgauuucugg

SEQ ID NO: 808232 - RNA, 19 nt, Artificial Sequence
  Description of Artificial Sequence: Synthetic oligonucleotide
  Sense strand starting at position 1147 of SEQ ID NO: 587652
aguaaacguggcuaacaaa

SEQ ID NO: 808233 - RNA, 19 nt, Artificial Sequence
  Description of Artificial Sequence: Synthetic oligonucleotide
  Antisense strand to SEQ ID NO: 808232
uuuguuagccacguuuacu

SEQ ID NO: 808234 - RNA, 19 nt, Artificial Sequence
  Description of Artificial Sequence: Synthetic oligonucleotide
  Sense strand starting at position 1154 of SEQ ID NO: 587652
guggcuaacaaaggaauua

SEQ ID NO: 808235 - RNA, 19 nt, Artificial Sequence
  Description of Artificial Sequence: Synthetic oligonucleotide
  Antisense strand to SEQ ID NO: 808234
uaauuccuuuguuagccac

SEQ ID NO: 808236 - RNA, 19 nt, Artificial Sequence
  Description of Artificial Sequence: Synthetic oligonucleotide
  Sense strand starting at position 1248 of SEQ ID NO: 587652
gggugaguguagaauugau

SEQ ID NO: 808237 - RNA, 19 nt, Artificial Sequence
  Description of Artificial Sequence: Synthetic oligonucleotide
  Antisense strand to SEQ ID NO: 808236
aucaauucuacacucaccc

SEQ ID NO: 808238 - RNA, 19 nt, Artificial Sequence
  Description of Artificial Sequence: Synthetic oligonucleotide
  Sense strand starting at position 1283 of SEQ ID NO: 587652
auaucaguuucuguacaac

SEQ ID NO: 808239 - RNA, 19 nt, Artificial Sequence
  Description of Artificial Sequence: Synthetic oligonucleotide
  Antisense strand to SEQ ID NO: 808238
guuguacagaaacugauau

SEQ ID NO: 808240 - RNA, 19 nt, Artificial Sequence
  Description of Artificial Sequence: Synthetic oligonucleotide
  Sense strand starting at position 1403 of SEQ ID NO: 587652
gugaauucgaauggaggga

SEQ ID NO: 808241 - RNA, 19 nt, Artificial Sequence
  Description of Artificial Sequence: Synthetic oligonucleotide
  Antisense strand to SEQ ID NO: 808240
ucccuccauucgaauucac

SEQ ID NO: 808242 - RNA, 19 nt, Artificial Sequence
  Description of Artificial Sequence: Synthetic oligonucleotide
  Sense strand starting at position 1530 of SEQ ID NO: 587652
ggaacacaucgccacuaga

SEQ ID NO: 808243 - RNA, 19 nt, Artificial Sequence
  Description of Artificial Sequence: Synthetic oligonucleotide
  Antisense strand to SEQ ID NO: 808242
ucuaguggcgauguguucc

SEQ ID NO: 808244 - RNA, 19 nt, Artificial Sequence
  Description of Artificial Sequence: Synthetic oligonucleotide
  Sense strand starting at position 1797 of SEQ ID NO: 587652
auugcuuugcaagacaaag

SEQ ID NO: 808245 - RNA, 19 nt, Artificial Sequence
  Description of Artificial Sequence: Synthetic oligonucleotide
  Antisense strand to SEQ ID NO: 808244
cuuugucuugcaaagcaau

SEQ ID NO: 808246 - RNA, 19 nt, Artificial Sequence
  Description of Artificial Sequence: Synthetic oligonucleotide
  Sense strand starting at position 1826 of SEQ ID NO: 587652
auaauacacgugugaauua

SEQ ID NO: 808247 - RNA, 19 nt, Artificial Sequence
  Description of Artificial Sequence: Synthetic oligonucleotide
  Antisense strand to SEQ ID NO: 808246
uaauucacacguguauuau

SEQ ID NO: 808248 - RNA, 19 nt, Artificial Sequence
  Description of Artificial Sequence: Synthetic oligonucleotide
  Sense strand starting at position 2032 of SEQ ID NO: 587652
cggaaaugugcucauuaau

SEQ ID NO: 808249 - RNA, 19 nt, Artificial Sequence
  Description of Artificial Sequence: Synthetic oligonucleotide
  Antisense strand to SEQ ID NO: 808248
auuaaugagcacauuuccg

SEQ ID NO: 808250 - RNA, 19 nt, Artificial Sequence
  Description of Artificial Sequence: Synthetic oligonucleotide
  Sense strand starting at position 2104 of SEQ ID NO: 587652
cauagcugcugugugauuu

SEQ ID NO: 808251 - RNA, 19 nt, Artificial Sequence
  Description of Artificial Sequence: Synthetic oligonucleotide
  Antisense strand to SEQ ID NO: 808250
aaaucacacagcagcuaug

SEQ ID NO: 808252 - RNA, 19 nt, Artificial Sequence
  Description of Artificial Sequence: Synthetic oligonucleotide
  Sense strand starting at position 2182 of SEQ ID NO: 587652
gcagaaguuaccugagaga

SEQ ID NO: 808253 - RNA, 19 nt, Artificial Sequence
  Description of Artificial Sequence: Synthetic oligonucleotide
  Antisense strand to SEQ ID NO: 808252
ucucucagguaacuucugc

SEQ ID NO: 808254 - RNA, 19 nt, Artificial Sequence
  Description of Artificial Sequence: Synthetic oligonucleotide
  Sense strand starting at position 2252 of SEQ ID NO: 587652
gagccucaugagcauuauu

SEQ ID NO: 808255 - RNA, 19 nt, Artificial Sequence
  Description of Artificial Sequence: Synthetic oligonucleotide
  Antisense strand to SEQ ID NO: 808254
aauaaugcucaugaggcuc

SEQ ID NO: 808256 - RNA, 19 nt, Artificial Sequence
  Description of Artificial Sequence: Synthetic oligonucleotide
  Sense strand starting at position 2373 of SEQ ID NO: 587652
guauucucaucauccauga

SEQ ID NO: 808257 - RNA, 19 nt, Artificial Sequence
  Description of Artificial Sequence: Synthetic oligonucleotide
  Antisense strand to SEQ ID NO: 808256
ucauggaugaugagaauac

SEQ ID NO: 808258 - RNA, 19 nt, Artificial Sequence
  Description of Artificial Sequence: Synthetic oligonucleotide
  Sense strand starting at position 2492 of SEQ ID NO: 587652
ggcacuccaagaugguuua

SEQ ID NO: 808259 - RNA, 19 nt, Artificial Sequence
  Description of Artificial Sequence: Synthetic oligonucleotide
  Antisense strand to SEQ ID NO: 808258
uaaaccaucuuggagugcc

SEQ ID NO: 808260 - RNA, 19 nt, Artificial Sequence
  Description of Artificial Sequence: Synthetic oligonucleotide
  Sense strand starting at position 2495 of SEQ ID NO: 587652
acuccaagaugguuuaaau

SEQ ID NO: 808261 - RNA, 19 nt, Artificial Sequence
  Description of Artificial Sequence: Synthetic oligonucleotide
  Antisense strand to SEQ ID NO: 808260
auuuaaaccaucuuggagu

SEQ ID NO: 808262 - RNA, 19 nt, Artificial Sequence
  Description of Artificial Sequence: Synthetic oligonucleotide
  Sense strand starting at position 2593 of SEQ ID NO: 587652
agagguaucucaguaaauu

SEQ ID NO: 808263 - RNA, 19 nt, Artificial Sequence
  Description of Artificial Sequence: Synthetic oligonucleotide
  Antisense strand to SEQ ID NO: 808262
aauuuacugagauaccucu

SEQ ID NO: 808264 - RNA, 19 nt, Artificial Sequence
  Description of Artificial Sequence: Synthetic oligonucleotide
  Sense strand starting at position 2594 of SEQ ID NO: 587652
gagguaucucaguaaauuc

SEQ ID NO: 808265 - RNA, 19 nt, Artificial Sequence
  Description of Artificial Sequence: Synthetic oligonucleotide
  Antisense strand to SEQ ID NO: 808264
gaauuuacugagauaccuc

SEQ ID NO: 808266 - RNA, 19 nt, Artificial Sequence
  Description of Artificial Sequence: Synthetic oligonucleotide
  Sense strand starting at position 2633 of SEQ ID NO: 587652
uagaacucacguuaacuga

SEQ ID NO: 808267 - RNA, 19 nt, Artificial Sequence
  Description of Artificial Sequence: Synthetic oligonucleotide
  Antisense strand to SEQ ID NO: 808266
ucaguuaacgugaguucua

SEQ ID NO: 808268 - RNA, 19 nt, Artificial Sequence
  Description of Artificial Sequence: Synthetic oligonucleotide
  Sense strand starting at position 3047 of SEQ ID NO: 587652
uguaaugacuguuuccaca

SEQ ID NO: 808269 - RNA, 19 nt, Artificial Sequence
  Description of Artificial Sequence: Synthetic oligonucleotide
  Antisense strand to SEQ ID NO: 808268
uguggaaacagucauuaca

SEQ ID NO: 808270 - RNA, 19 nt, Artificial Sequence
  Description of Artificial Sequence: Synthetic oligonucleotide
  Sense strand starting at position 3071 of SEQ ID NO: 587652
cgaagugugauauaaaguc

SEQ ID NO: 808271 - RNA, 19 nt, Artificial Sequence
  Description of Artificial Sequence: Synthetic oligonucleotide
  Antisense strand to SEQ ID NO: 808270
gacuuuauaucacacuucg

SEQ ID NO: 808272 - RNA, 19 nt, Artificial Sequence
  Description of Artificial Sequence: Synthetic oligonucleotide
  Sense strand starting at position 3077 of SEQ ID NO: 587652
gugauauaaagucgacuua

SEQ ID NO: 808273 - RNA, 19 nt, Artificial Sequence
  Description of Artificial Sequence: Synthetic oligonucleotide
  Antisense strand to SEQ ID NO: 808272
uaagucgacuuuauaucac

SEQ ID NO: 808274 - RNA, 19 nt, Artificial Sequence
  Description of Artificial Sequence: Synthetic oligonucleotide
  Sense strand starting at position 3196 of SEQ ID NO: 587652
uaggaaguggucuaggcaa

SEQ ID NO: 808275 - RNA, 19 nt, Artificial Sequence
  Description of Artificial Sequence: Synthetic oligonucleotide
  Antisense strand to SEQ ID NO: 808274
uugccuagaccacuuccua

SEQ ID NO: 808276 - RNA, 19 nt, Artificial Sequence
  Description of Artificial Sequence: Synthetic oligonucleotide
  Sense strand starting at position 3198 of SEQ ID NO: 587652
ggaaguggucuaggcaaau

SEQ ID NO: 808277 - RNA, 19 nt, Artificial Sequence
  Description of Artificial Sequence: Synthetic oligonucleotide
  Antisense strand to SEQ ID NO: 808276
auuugccuagaccacuucc

SEQ ID NO: 808278 - RNA, 19 nt, Artificial Sequence
  Description of Artificial Sequence: Synthetic oligonucleotide
  Sense strand starting at position 3433 of SEQ ID NO: 587652
uuugaucauuuagaggcaa

SEQ ID NO: 808279 - RNA, 19 nt, Artificial Sequence
  Description of Artificial Sequence: Synthetic oligonucleotide
  Antisense strand to SEQ ID NO: 808278
uugccucuaaaugaucaaa

SEQ ID NO: 808280 - RNA, 19 nt, Artificial Sequence
  Description of Artificial Sequence: Synthetic oligonucleotide
  Sense strand starting at position 3481 of SEQ ID NO: 587652
augagaaguguaggaguaa

SEQ ID NO: 808281 - RNA, 19 nt, Artificial Sequence
  Description of Artificial Sequence: Synthetic oligonucleotide
  Antisense strand to SEQ ID NO: 808280
uuacuccuacacuucucau

SEQ ID NO: 808282 - RNA, 19 nt, Artificial Sequence
  Description of Artificial Sequence: Synthetic oligonucleotide
  Sense strand starting at position 3525 of SEQ ID NO: 587652
acacauguucucugaagga

SEQ ID NO: 808283 - RNA, 19 nt, Artificial Sequence
  Description of Artificial Sequence: Synthetic oligonucleotide
  Antisense strand to SEQ ID NO: 808282
uccuucagagaacaugugu

SEQ ID NO: 808284 - RNA, 19 nt, Artificial Sequence
  Description of Artificial Sequence: Synthetic oligonucleotide
  Sense strand starting at position 3760 of SEQ ID NO: 587652
cagaacucacguuaacuga

SEQ ID NO: 808285 - RNA, 19 nt, Artificial Sequence
  Description of Artificial Sequence: Synthetic oligonucleotide
  Antisense strand to SEQ ID NO: 808284
ucaguuaacgugaguucug

SEQ ID NO: 808286 - RNA, 19 nt, Artificial Sequence
  Description of Artificial Sequence: Synthetic oligonucleotide
  Sense strand starting at position 3790 of SEQ ID NO: 587652
aaauucuccugaguggaaa

SEQ ID NO: 808287 - RNA, 19 nt, Artificial Sequence
  Description of Artificial Sequence: Synthetic oligonucleotide
  Antisense strand to SEQ ID NO: 808286
uuuccacucaggagaauuu

SEQ ID NO: 808288 - RNA, 19 nt, Artificial Sequence
  Description of Artificial Sequence: Synthetic oligonucleotide
  Sense strand starting at position 86 of SEQ ID NO: 587653
ugcauagauuuacauguga

SEQ ID NO: 808289 - RNA, 19 nt, Artificial Sequence
  Description of Artificial Sequence: Synthetic oligonucleotide
  Antisense strand to SEQ ID NO: 808288
ucacauguaaaucuaugca

SEQ ID NO: 808290 - RNA, 19 nt, Artificial Sequence
  Description of Artificial Sequence: Synthetic oligonucleotide
  Sense strand starting at position 91 of SEQ ID NO: 587653
agauuuacaugugacugga

SEQ ID NO: 808291 - RNA, 19 nt, Artificial Sequence
  Description of Artificial Sequence: Synthetic oligonucleotide
  Antisense strand to SEQ ID NO: 808290
uccagucacauguaaaucu

SEQ ID NO: 808292 - RNA, 19 nt, Artificial Sequence
  Description of Artificial Sequence: Synthetic oligonucleotide
  Sense strand starting at position 94 of SEQ ID NO: 587653
uuuacaugugacuggaaac

SEQ ID NO: 808293 - RNA, 19 nt, Artificial Sequence
  Description of Artificial Sequence: Synthetic oligonucleotide
  Antisense strand to SEQ ID NO: 808292
guuuccagucacauguaaa

SEQ ID NO: 808294 - RNA, 19 nt, Artificial Sequence
  Description of Artificial Sequence: Synthetic oligonucleotide
  Sense strand starting at position 113 of SEQ ID NO: 587653
gugcaagaacacuaugcaa

SEQ ID NO: 808295 - RNA, 19 nt, Artificial Sequence
  Description of Artificial Sequence: Synthetic oligonucleotide
  Antisense strand to SEQ ID NO: 808294
uugcauaguguucuugcac

SEQ ID NO: 808296 - RNA, 19 nt, Artificial Sequence
  Description of Artificial Sequence: Synthetic oligonucleotide
  Sense strand starting at position 230 of SEQ ID NO: 587653
uaacuuggagcguggauua

SEQ ID NO: 808297 - RNA, 19 nt, Artificial Sequence
  Description of Artificial Sequence: Synthetic oligonucleotide
  Antisense strand to SEQ ID NO: 808296
uaauccacgcuccaaguua

SEQ ID NO: 808298 - RNA, 19 nt, Artificial Sequence
  Description of Artificial Sequence: Synthetic oligonucleotide
  Sense strand starting at position 324 of SEQ ID NO: 587653
uagggcacccuuuguuauu

SEQ ID NO: 808299 - RNA, 19 nt, Artificial Sequence
  Description of Artificial Sequence: Synthetic oligonucleotide
  Antisense strand to SEQ ID NO: 808298
aauaacaaagggugcccua

SEQ ID NO: 808300 - RNA, 19 nt, Artificial Sequence
  Description of Artificial Sequence: Synthetic oligonucleotide
  Sense strand starting at position 535 of SEQ ID NO: 587653
ugagaauucucccacagag

SEQ ID NO: 808301 - RNA, 19 nt, Artificial Sequence
  Description of Artificial Sequence: Synthetic oligonucleotide
  Antisense strand to SEQ ID NO: 808300
cucugugggagaauucuca

SEQ ID NO: 808302 - RNA, 19 nt, Artificial Sequence
  Description of Artificial Sequence: Synthetic oligonucleotide
  Sense strand starting at position 556 of SEQ ID NO: 587653
gggagaugccucugggaaa

SEQ ID NO: 808303 - RNA, 19 nt, Artificial Sequence
  Description of Artificial Sequence: Synthetic oligonucleotide
  Antisense strand to SEQ ID NO: 808302
uuucccagaggcaucuccc

SEQ ID NO: 808304 - RNA, 19 nt, Artificial Sequence
  Description of Artificial Sequence: Synthetic oligonucleotide
  Sense strand starting at position 612 of SEQ ID NO: 587653
agagaugagccacguggaa

SEQ ID NO: 808305 - RNA, 19 nt, Artificial Sequence
  Description of Artificial Sequence: Synthetic oligonucleotide
  Antisense strand to SEQ ID NO: 808304
uuccacguggcucaucucu

SEQ ID NO: 808306 - RNA, 19 nt, Artificial Sequence
  Description of Artificial Sequence: Synthetic oligonucleotide
  Sense strand starting at position 1041 of SEQ ID NO: 587653
uucugucagaaguguuuag

SEQ ID NO: 808307 - RNA, 19 nt, Artificial Sequence
  Description of Artificial Sequence: Synthetic oligonucleotide
  Antisense strand to SEQ ID NO: 808306
cuaaacacuucugacagaa

SEQ ID NO: 808308 - RNA, 19 nt, Artificial Sequence
  Description of Artificial Sequence: Synthetic oligonucleotide
  Sense strand starting at position 1045 of SEQ ID NO: 587653
gucagaaguguuuaguaua

SEQ ID NO: 808309 - RNA, 19 nt, Artificial Sequence
  Description of Artificial Sequence: Synthetic oligonucleotide
  Antisense strand to SEQ ID NO: 808308
uauacuaaacacuucugac

SEQ ID NO: 808310 - RNA, 19 nt, Artificial Sequence
  Description of Artificial Sequence: Synthetic oligonucleotide
  Sense strand starting at position 1050 of SEQ ID NO: 587653
aaguguuuaguauacagaa

SEQ ID NO: 808311 - RNA, 19 nt, Artificial Sequence
  Description of Artificial Sequence: Synthetic oligonucleotide
  Antisense strand to SEQ ID NO: 808310
uucuguauacuaaacacuu

SEQ ID NO: 808312 - RNA, 19 nt, Artificial Sequence
  Description of Artificial Sequence: Synthetic oligonucleotide
  Sense strand starting at position 1052 of SEQ ID NO: 587653
guguuuaguauacagaaau

SEQ ID NO: 808313 - RNA, 19 nt, Artificial Sequence
  Description of Artificial Sequence: Synthetic oligonucleotide
  Antisense strand to SEQ ID NO: 808312
auuucuguauacuaaacac

SEQ ID NO: 808314 - RNA, 19 nt, Artificial Sequence
  Description of Artificial Sequence: Synthetic oligonucleotide
  Sense strand starting at position 1093 of SEQ ID NO: 587653
ugucaaaucugacugagaa

SEQ ID NO: 808315 - RNA, 19 nt, Artificial Sequence
  Description of Artificial Sequence: Synthetic oligonucleotide
  Antisense strand to SEQ ID NO: 808314
uucucagucagauuugaca

SEQ ID NO: 808316 - RNA, 19 nt, Artificial Sequence
  Description of Artificial Sequence: Synthetic oligonucleotide
  Sense strand starting at position 1130 of SEQ ID NO: 587653
augggaaccuucucaucua

SEQ ID NO: 808317 - RNA, 19 nt, Artificial Sequence
  Description of Artificial Sequence: Synthetic oligonucleotide
  Antisense strand to SEQ ID NO: 808316
uagaugagaagguucccau

SEQ ID NO: 808318 - RNA, 19 nt, Artificial Sequence
  Description of Artificial Sequence: Synthetic oligonucleotide
  Sense strand starting at position 1243 of SEQ ID NO: 587653
acauuuggcuggugaugga

SEQ ID NO: 808319 - RNA, 19 nt, Artificial Sequence
  Description of Artificial Sequence: Synthetic oligonucleotide
  Antisense strand to SEQ ID NO: 808318
uccaucaccagccaaaugu

SEQ ID NO: 808320 - RNA, 19 nt, Artificial Sequence
  Description of Artificial Sequence: Synthetic oligonucleotide
  Sense strand starting at position 1347 of SEQ ID NO: 587653
ugcacuugugcugaagcaa

SEQ ID NO: 808321 - RNA, 19 nt, Artificial Sequence
  Description of Artificial Sequence: Synthetic oligonucleotide
  Antisense strand to SEQ ID NO: 808320
uugcuucagcacaagugca

SEQ ID NO: 808322 - RNA, 19 nt, Artificial Sequence
  Description of Artificial Sequence: Synthetic oligonucleotide
  Sense strand starting at position 1425 of SEQ ID NO: 587653
uuaucugucuccuuggaaa

SEQ ID NO: 808323 - RNA, 19 nt, Artificial Sequence
  Description of Artificial Sequence: Synthetic oligonucleotide
  Antisense strand to SEQ ID NO: 808322
uuuccaaggagacagauaa

SEQ ID NO: 808324 - RNA, 19 nt, Artificial Sequence
  Description of Artificial Sequence: Synthetic oligonucleotide
  Sense strand starting at position 1496 of SEQ ID NO: 587653
aacagagaucuaugcgaga

SEQ ID NO: 808325 - RNA, 19 nt, Artificial Sequence
  Description of Artificial Sequence: Synthetic oligonucleotide
  Antisense strand to SEQ ID NO: 808324
ucucgcauagaucucuguu

SEQ ID NO: 808326 - RNA, 19 nt, Artificial Sequence
  Description of Artificial Sequence: Synthetic oligonucleotide
  Sense strand starting at position 1511 of SEQ ID NO: 587653
gagacagaccuguguggaa

SEQ ID NO: 808327 - RNA, 19 nt, Artificial Sequence
  Description of Artificial Sequence: Synthetic oligonucleotide
  Antisense strand to SEQ ID NO: 808326
uuccacacaggucugucuc

SEQ ID NO: 808328 - RNA, 19 nt, Artificial Sequence
  Description of Artificial Sequence: Synthetic oligonucleotide
  Sense strand starting at position 1595 of SEQ ID NO: 587653
gucguaugugaauggugga

SEQ ID NO: 808329 - RNA, 19 nt, Artificial Sequence
  Description of Artificial Sequence: Synthetic oligonucleotide
  Antisense strand to SEQ ID NO: 808328
uccaccauucacauacgac

SEQ ID NO: 808330 - RNA, 19 nt, Artificial Sequence
  Description of Artificial Sequence: Synthetic oligonucleotide
  Sense strand starting at position 1596 of SEQ ID NO: 587653
ucguaugugaaugguggau

SEQ ID NO: 808331 - RNA, 19 nt, Artificial Sequence
  Description of Artificial Sequence: Synthetic oligonucleotide
  Antisense strand to SEQ ID NO: 808330
auccaccauucacauacga

SEQ ID NO: 808332 - RNA, 19 nt, Artificial Sequence
  Description of Artificial Sequence: Synthetic oligonucleotide
  Sense strand starting at position 1634 of SEQ ID NO: 587653
acaacaugucuucggagca

SEQ ID NO: 808333 - RNA, 19 nt, Artificial Sequence
  Description of Artificial Sequence: Synthetic oligonucleotide
  Antisense strand to SEQ ID NO: 808332
ugcuccgaagacauguugu

SEQ ID NO: 808334 - RNA, 19 nt, Artificial Sequence
  Description of Artificial Sequence: Synthetic oligonucleotide
  Sense strand starting at position 1734 of SEQ ID NO: 587653
gaaauacagucagaggaaa

SEQ ID NO: 808335 - RNA, 19 nt, Artificial Sequence
  Description of Artificial Sequence: Synthetic oligonucleotide
  Antisense strand to SEQ ID NO: 808334
uuuccucugacuguauuuc

SEQ ID NO: 808336 - RNA, 19 nt, Artificial Sequence
  Description of Artificial Sequence: Synthetic oligonucleotide
  Sense strand starting at position 1863 of SEQ ID NO: 587653
ugaugcucuuccucugaau

SEQ ID NO: 808337 - RNA, 19 nt, Artificial Sequence
  Description of Artificial Sequence: Synthetic oligonucleotide
  Antisense strand to SEQ ID NO: 808336
auucagaggaagagcauca

SEQ ID NO: 808338 - RNA, 19 nt, Artificial Sequence
  Description of Artificial Sequence: Synthetic oligonucleotide
  Sense strand starting at position 2127 of SEQ ID NO: 587653
aaaguaaacuguguccuga

SEQ ID NO: 808339 - RNA, 19 nt, Artificial Sequence
  Description of Artificial Sequence: Synthetic oligonucleotide
  Antisense strand to SEQ ID NO: 808338
ucaggacacaguuuacuuu

SEQ ID NO: 808340 - RNA, 19 nt, Artificial Sequence
  Description of Artificial Sequence: Synthetic oligonucleotide
  Sense strand starting at position 2129 of SEQ ID NO: 587653
aguaaacuguguccugauu

SEQ ID NO: 808341 - RNA, 19 nt, Artificial Sequence
  Description of Artificial Sequence: Synthetic oligonucleotide
  Antisense strand to SEQ ID NO: 808340
aaucaggacacaguuuacu

SEQ ID NO: 808342 - RNA, 19 nt, Artificial Sequence
  Description of Artificial Sequence: Synthetic oligonucleotide
  Sense strand starting at position 2268 of SEQ ID NO: 587653
ggcaauaaauguucucaac

SEQ ID NO: 808343 - RNA, 19 nt, Artificial Sequence
  Description of Artificial Sequence: Synthetic oligonucleotide
  Antisense strand to SEQ ID NO: 808342
guugagaacauuuauugcc

SEQ ID NO: 808344 - RNA, 19 nt, Artificial Sequence
  Description of Artificial Sequence: Synthetic oligonucleotide
  Sense strand starting at position 2451 of SEQ ID NO: 587653
uccaucagauaggcauauu

SEQ ID NO: 808345 - RNA, 19 nt, Artificial Sequence
  Description of Artificial Sequence: Synthetic oligonucleotide
  Antisense strand to SEQ ID NO: 808344
aauaugccuaucugaugga

SEQ ID NO: 808346 - RNA, 19 nt, Artificial Sequence
  Description of Artificial Sequence: Synthetic oligonucleotide
  Sense strand starting at position 2482 of SEQ ID NO: 587653
uuuauugcaugaguaauug

SEQ ID NO: 808347 - RNA, 19 nt, Artificial Sequence
  Description of Artificial Sequence: Synthetic oligonucleotide
  Antisense strand to SEQ ID NO: 808346
caauuacucaugcaauaaa

SEQ ID NO: 808348 - RNA, 19 nt, Artificial Sequence
  Description of Artificial Sequence: Synthetic oligonucleotide
  Sense strand starting at position 2486 of SEQ ID NO: 587653
uugcaugaguaauugcauu

SEQ ID NO: 808349 - RNA, 19 nt, Artificial Sequence
  Description of Artificial Sequence: Synthetic oligonucleotide
  Antisense strand to SEQ ID NO: 808348
aaugcaauuacucaugcaa

SEQ ID NO: 808350 - RNA, 19 nt, Artificial Sequence
  Description of Artificial Sequence: Synthetic oligonucleotide
  Sense strand starting at position 2521 of SEQ ID NO: 587653
gucucuuauaguggucuuu

SEQ ID NO: 808351 - RNA, 19 nt, Artificial Sequence
  Description of Artificial Sequence: Synthetic oligonucleotide
  Antisense strand to SEQ ID NO: 808350
aaagaccacuauaagagac

SEQ ID NO: 808352 - RNA, 19 nt, Artificial Sequence
  Description of Artificial Sequence: Synthetic oligonucleotide
  Sense strand starting at position 2607 of SEQ ID NO: 587653
ucaguagaguggcuuguaa

SEQ ID NO: 808353 - RNA, 19 nt, Artificial Sequence
  Description of Artificial Sequence: Synthetic oligonucleotide
  Antisense strand to SEQ ID NO: 808352
uuacaagccacucuacuga

SEQ ID NO: 808354 - RNA, 19 nt, Artificial Sequence
  Description of Artificial Sequence: Synthetic oligonucleotide
  Sense strand starting at position 2734 of SEQ ID NO: 587653
cgaauagccugagcucuua

SEQ ID NO: 808355 - RNA, 19 nt, Artificial Sequence
  Description of Artificial Sequence: Synthetic oligonucleotide
  Antisense strand to SEQ ID NO: 808354
uaagagcucaggcuauucg

SEQ ID NO: 808356 - RNA, 19 nt, Artificial Sequence
  Description of Artificial Sequence: Synthetic oligonucleotide
  Sense strand starting at position 2798 of SEQ ID NO: 587653
cuaugccuguuuccaagau

SEQ ID NO: 808357 - RNA, 19 nt, Artificial Sequence
  Description of Artificial Sequence: Synthetic oligonucleotide
  Antisense strand to SEQ ID NO: 808356
aucuuggaaacaggcauag

SEQ ID NO: 808358 - RNA, 19 nt, Artificial Sequence
  Description of Artificial Sequence: Synthetic oligonucleotide
  Sense strand starting at position 2846 of SEQ ID NO: 587653
gcagaauuguuaccauaaa

SEQ ID NO: 808359 - RNA, 19 nt, Artificial Sequence
  Description of Artificial Sequence: Synthetic oligonucleotide
  Antisense strand to SEQ ID NO: 808358
uuuaugguaacaauucugc

SEQ ID NO: 808360 - RNA, 19 nt, Artificial Sequence
  Description of Artificial Sequence: Synthetic oligonucleotide
  Sense strand starting at position 3029 of SEQ ID NO: 587653
agagguugucagcaagaga

SEQ ID NO: 808361 - RNA, 19 nt, Artificial Sequence
  Description of Artificial Sequence: Synthetic oligonucleotide
  Antisense strand to SEQ ID NO: 808360
ucucuugcugacaaccucu

SEQ ID NO: 808362 - RNA, 19 nt, Artificial Sequence
  Description of Artificial Sequence: Synthetic oligonucleotide
  Sense strand starting at position 3384 of SEQ ID NO: 587653
gccaccacuccauauagua

SEQ ID NO: 808363 - RNA, 19 nt, Artificial Sequence
  Description of Artificial Sequence: Synthetic oligonucleotide
  Antisense strand to SEQ ID NO: 808362
uacuauauggagugguggc

SEQ ID NO: 808364 - RNA, 19 nt, Artificial Sequence
  Description of Artificial Sequence: Synthetic oligonucleotide
  Sense strand starting at position 3795 of SEQ ID NO: 587653
aagggaaguucuuuagacu

SEQ ID NO: 808365 - RNA, 19 nt, Artificial Sequence
  Description of Artificial Sequence: Synthetic oligonucleotide
  Antisense strand to SEQ ID NO: 808364
agucuaaagaacuucccuu

SEQ ID NO: 808366 - RNA, 19 nt, Artificial Sequence
  Description of Artificial Sequence: Synthetic oligonucleotide
  Sense strand starting at position 3839 of SEQ ID NO: 587653
aucaucgauuaaucagauu

SEQ ID NO: 808367 - RNA, 19 nt, Artificial Sequence
  Description of Artificial Sequence: Synthetic oligonucleotide
  Antisense strand to SEQ ID NO: 808366
aaucugauuaaucgaugau

SEQ ID NO: 808368 - RNA, 19 nt, Artificial Sequence
  Description of Artificial Sequence: Synthetic oligonucleotide
  Sense strand starting at position 15 of SEQ ID NO: 587654
acuuguuauugaguuaaca

SEQ ID NO: 808369 - RNA, 19 nt, Artificial Sequence
  Description of Artificial Sequence: Synthetic oligonucleotide
  Antisense strand to SEQ ID NO: 808368
uguuaacucaauaacaagu

SEQ ID NO: 808370 - RNA, 19 nt, Artificial Sequence
  Description of Artificial Sequence: Synthetic oligonucleotide
  Sense strand starting at position 155 of SEQ ID NO: 587654
uuaauuggguccuugaagu

SEQ ID NO: 808371 - RNA, 19 nt, Artificial Sequence
  Description of Artificial Sequence: Synthetic oligonucleotide
  Antisense strand to SEQ ID NO: 808370
acuucaaggacccaauuaa

SEQ ID NO: 808372 - RNA, 19 nt, Artificial Sequence
  Description of Artificial Sequence: Synthetic oligonucleotide
  Sense strand starting at position 166 of SEQ ID NO: 587654
cuugaaguucuagaagggu

SEQ ID NO: 808373 - RNA, 19 nt, Artificial Sequence
  Description of Artificial Sequence: Synthetic oligonucleotide
  Antisense strand to SEQ ID NO: 808372
acccuucuagaacuucaag

SEQ ID NO: 808374 - RNA, 19 nt, Artificial Sequence
  Description of Artificial Sequence: Synthetic oligonucleotide
  Sense strand starting at position 186 of SEQ ID NO: 587654
guucuuuccugggugauuu

SEQ ID NO: 808375 - RNA, 19 nt, Artificial Sequence
  Description of Artificial Sequence: Synthetic oligonucleotide
  Antisense strand to SEQ ID NO: 808374
aaaucacccaggaaagaac

SEQ ID NO: 808376 - RNA, 19 nt, Artificial Sequence
  Description of Artificial Sequence: Synthetic oligonucleotide
  Sense strand starting at position 245 of SEQ ID NO: 587654
uacugucaugacugaggga

SEQ ID NO: 808377 - RNA, 19 nt, Artificial Sequence
  Description of Artificial Sequence: Synthetic oligonucleotide
  Antisense strand to SEQ ID NO: 808376
ucccucagucaugacagua

SEQ ID NO: 808378 - RNA, 19 nt, Artificial Sequence
  Description of Artificial Sequence: Synthetic oligonucleotide
  Sense strand starting at position 259 of SEQ ID NO: 587654
agggaaguggaguguuacu

SEQ ID NO: 808379 - RNA, 19 nt, Artificial Sequence
  Description of Artificial Sequence: Synthetic oligonucleotide
  Antisense strand to SEQ ID NO: 808378
aguaacacuccacuucccu

SEQ ID NO: 808380 - RNA, 19 nt, Artificial Sequence
  Description of Artificial Sequence: Synthetic oligonucleotide
  Sense strand starting at position 276 of SEQ ID NO: 587654
cuaucucuacuggguagaa

SEQ ID NO: 808381 - RNA, 19 nt, Artificial Sequence
  Description of Artificial Sequence: Synthetic oligonucleotide
  Antisense strand to SEQ ID NO: 808380
uucuacccaguagagauag

SEQ ID NO: 808382 - RNA, 19 nt, Artificial Sequence
  Description of Artificial Sequence: Synthetic oligonucleotide
  Sense strand starting at position 342 of SEQ ID NO: 587654
ccaagaugucaauagugca

SEQ ID NO: 808383 - RNA, 19 nt, Artificial Sequence
  Description of Artificial Sequence: Synthetic oligonucleotide
  Antisense strand to SEQ ID NO: 808382
ugcacuauugacaucuugg

SEQ ID NO: 808384 - RNA, 19 nt, Artificial Sequence
  Description of Artificial Sequence: Synthetic oligonucleotide
  Sense strand starting at position 409 of SEQ ID NO: 587654
ucaagaguuuguccuauaa

SEQ ID NO: 808385 - RNA, 19 nt, Artificial Sequence
  Description of Artificial Sequence: Synthetic oligonucleotide
  Antisense strand to SEQ ID NO: 808384
uuauaggacaaacucuuga

SEQ ID NO: 808386 - RNA, 19 nt, Artificial Sequence
  Description of Artificial Sequence: Synthetic oligonucleotide
  Sense strand starting at position 488 of SEQ ID NO: 587654
acagcagaugcuuaacaga

SEQ ID NO: 808387 - RNA, 19 nt, Artificial Sequence
  Description of Artificial Sequence: Synthetic oligonucleotide
  Antisense strand to SEQ ID NO: 808386
ucuguuaagcaucugcugu

SEQ ID NO: 808388 - RNA, 19 nt, Artificial Sequence
  Description of Artificial Sequence: Synthetic oligonucleotide
  Sense strand starting at position 550 of SEQ ID NO: 587654
agcagaacucugcaaugaa

SEQ ID NO: 808389 - RNA, 19 nt, Artificial Sequence
  Description of Artificial Sequence: Synthetic oligonucleotide
  Antisense strand to SEQ ID NO: 808388
uucauugcagaguucugcu

SEQ ID NO: 808390 - RNA, 19 nt, Artificial Sequence
  Description of Artificial Sequence: Synthetic oligonucleotide
  Sense strand starting at position 553 of SEQ ID NO: 587654
agaacucugcaaugaauga

SEQ ID NO: 808391 - RNA, 19 nt, Artificial Sequence
  Description of Artificial Sequence: Synthetic oligonucleotide
  Antisense strand to SEQ ID NO: 808390
ucauucauugcagaguucu

SEQ ID NO: 808392 - RNA, 19 nt, Artificial Sequence
  Description of Artificial Sequence: Synthetic oligonucleotide
  Sense strand starting at position 596 of SEQ ID NO: 587654
ggaaauacaucucuaguua

SEQ ID NO: 808393 - RNA, 19 nt, Artificial Sequence
  Description of Artificial Sequence: Synthetic oligonucleotide
  Antisense strand to SEQ ID NO: 808392
uaacuagagauguauuucc

SEQ ID NO: 808394 - RNA, 19 nt, Artificial Sequence
  Description of Artificial Sequence: Synthetic oligonucleotide
  Sense strand starting at position 674 of SEQ ID NO: 587654
ucagguuuauuugauaaug

SEQ ID NO: 808395 - RNA, 19 nt, Artificial Sequence
  Description of Artificial Sequence: Synthetic oligonucleotide
  Antisense strand to SEQ ID NO: 808394
cauuaucaaauaaaccuga

SEQ ID NO: 808396 - RNA, 19 nt, Artificial Sequence
  Description of Artificial Sequence: Synthetic oligonucleotide
  Sense strand starting at position 763 of SEQ ID NO: 587654
uguaauggcauguaaacga

SEQ ID NO: 808397 - RNA, 19 nt, Artificial Sequence
  Description of Artificial Sequence: Synthetic oligonucleotide
  Antisense strand to SEQ ID NO: 808396
ucguuuacaugccauuaca

SEQ ID NO: 808398 - RNA, 19 nt, Artificial Sequence
  Description of Artificial Sequence: Synthetic oligonucleotide
  Sense strand starting at position 1271 of SEQ ID NO: 587654
agaaaccugccucgaagaa

SEQ ID NO: 808399 - RNA, 19 nt, Artificial Sequence
  Description of Artificial Sequence: Synthetic oligonucleotide
  Antisense strand to SEQ ID NO: 808398
uucuucgaggcagguuucu

SEQ ID NO: 808400 - RNA, 19 nt, Artificial Sequence
  Description of Artificial Sequence: Synthetic oligonucleotide
  Sense strand starting at position 1293 of SEQ ID NO: 587654
gcagcaugaggucagaaau

SEQ ID NO: 808401 - RNA, 19 nt, Artificial Sequence
  Description of Artificial Sequence: Synthetic oligonucleotide
  Antisense strand to SEQ ID NO: 808400
auuucugaccucaugcugc

SEQ ID NO: 808402 - RNA, 19 nt, Artificial Sequence
  Description of Artificial Sequence: Synthetic oligonucleotide
  Sense strand starting at position 1338 of SEQ ID NO: 587654
ccgagaaaccugggcaucu

SEQ ID NO: 808403 - RNA, 19 nt, Artificial Sequence
  Description of Artificial Sequence: Synthetic oligonucleotide
  Antisense strand to SEQ ID NO: 808402
agaugcccagguuucucgg

SEQ ID NO: 808404 - RNA, 19 nt, Artificial Sequence
  Description of Artificial Sequence: Synthetic oligonucleotide
  Sense strand starting at position 1513 of SEQ ID NO: 587654
aagagaaucugagccgaga

SEQ ID NO: 808405 - RNA, 19 nt, Artificial Sequence
  Description of Artificial Sequence: Synthetic oligonucleotide
  Antisense strand to SEQ ID NO: 808404
ucucggcucagauucucuu

SEQ ID NO: 808406 - RNA, 19 nt, Artificial Sequence
  Description of Artificial Sequence: Synthetic oligonucleotide
  Sense strand starting at position 2393 of SEQ ID NO: 587654
aaauucuuagggugagcga

SEQ ID NO: 808407 - RNA, 19 nt, Artificial Sequence
  Description of Artificial Sequence: Synthetic oligonucleotide
  Antisense strand to SEQ ID NO: 808406
ucgcucacccuaagaauuu

SEQ ID NO: 808408 - RNA, 19 nt, Artificial Sequence
  Description of Artificial Sequence: Synthetic oligonucleotide
  Sense strand starting at position 2500 of SEQ ID NO: 587654
ggugucuuccgccucacua

SEQ ID NO: 808409 - RNA, 19 nt, Artificial Sequence
  Description of Artificial Sequence: Synthetic oligonucleotide
  Antisense strand to SEQ ID NO: 808408
uagugaggcggaagacacc

SEQ ID NO: 808410 - RNA, 19 nt, Artificial Sequence
  Description of Artificial Sequence: Synthetic oligonucleotide
  Sense strand starting at position 2736 of SEQ ID NO: 587654
ggagauaaucugugucuac

SEQ ID NO: 808411 - RNA, 19 nt, Artificial Sequence
  Description of Artificial Sequence: Synthetic oligonucleotide
  Antisense strand to SEQ ID NO: 808410
guagacacagauuaucucc

SEQ ID NO: 808412 - RNA, 19 nt, Artificial Sequence
  Description of Artificial Sequence: Synthetic oligonucleotide
  Sense strand starting at position 2737 of SEQ ID NO: 587654
gagauaaucugugucuacc

SEQ ID NO: 808413 - RNA, 19 nt, Artificial Sequence
  Description of Artificial Sequence: Synthetic oligonucleotide
  Antisense strand to SEQ ID NO: 808412
gguagacacagauuaucuc

SEQ ID NO: 808414 - RNA, 19 nt, Artificial Sequence
  Description of Artificial Sequence: Synthetic oligonucleotide
  Sense strand starting at position 2784 of SEQ ID NO: 587654
cccgcucuacaggaaauaa

SEQ ID NO: 808415 - RNA, 19 nt, Artificial Sequence
  Description of Artificial Sequence: Synthetic oligonucleotide
  Antisense strand to SEQ ID NO: 808414
uuauuuccuguagagcggg

SEQ ID NO: 808416 - RNA, 19 nt, Artificial Sequence
  Description of Artificial Sequence: Synthetic oligonucleotide
  Sense strand starting at position 2817 of SEQ ID NO: 587654
gagcccuguccuggagaau

SEQ ID NO: 808417 - RNA, 19 nt, Artificial Sequence
  Description of Artificial Sequence: Synthetic oligonucleotide
  Antisense strand to SEQ ID NO: 808416
auucuccaggacagggcuc

SEQ ID NO: 808418 - RNA, 19 nt, Artificial Sequence
  Description of Artificial Sequence: Synthetic oligonucleotide
  Sense strand starting at position 2818 of SEQ ID NO: 587654
agcccuguccuggagaaua

SEQ ID NO: 808419 - RNA, 19 nt, Artificial Sequence
  Description of Artificial Sequence: Synthetic oligonucleotide
  Antisense strand to SEQ ID NO: 808418
uauucuccaggacagggcu

SEQ ID NO: 808420 - RNA, 19 nt, Artificial Sequence
  Description of Artificial Sequence: Synthetic oligonucleotide
  Sense strand starting at position 2828 of SEQ ID NO: 587654
uggagaauaacgcgugaag

SEQ ID NO: 808421 - RNA, 19 nt, Artificial Sequence
  Description of Artificial Sequence: Synthetic oligonucleotide
  Antisense strand to SEQ ID NO: 808420
cuucacgcguuauucucca

SEQ ID NO: 808422 - RNA, 19 nt, Artificial Sequence
  Description of Artificial Sequence: Synthetic oligonucleotide
  Sense strand starting at position 2830 of SEQ ID NO: 587654
gagaauaacgcgugaagaa

SEQ ID NO: 808423 - RNA, 19 nt, Artificial Sequence
  Description of Artificial Sequence: Synthetic oligonucleotide
  Antisense strand to SEQ ID NO: 808422
uucuucacgcguuauucuc

SEQ ID NO: 808424 - RNA, 19 nt, Artificial Sequence
  Description of Artificial Sequence: Synthetic oligonucleotide
  Sense strand starting at position 2831 of SEQ ID NO: 587654
agaauaacgcgugaagaag

SEQ ID NO: 808425 - RNA, 19 nt, Artificial Sequence
  Description of Artificial Sequence: Synthetic oligonucleotide
  Antisense strand to SEQ ID NO: 808424
cuucuucacgcguuauucu

SEQ ID NO: 808426 - RNA, 19 nt, Artificial Sequence
  Description of Artificial Sequence: Synthetic oligonucleotide
  Sense strand starting at position 2858 of SEQ ID NO: 587654
cugggcauuucguccagau

SEQ ID NO: 808427 - RNA, 19 nt, Artificial Sequence
  Description of Artificial Sequence: Synthetic oligonucleotide
  Antisense strand to SEQ ID NO: 808426
aucuggacgaaaugcccag

SEQ ID NO: 808428 - RNA, 19 nt, Artificial Sequence
  Description of Artificial Sequence: Synthetic oligonucleotide
  Sense strand starting at position 2874 of SEQ ID NO: 587654
gaugaaugagcaugguagu

SEQ ID NO: 808429 - RNA, 19 nt, Artificial Sequence
  Description of Artificial Sequence: Synthetic oligonucleotide
  Antisense strand to SEQ ID NO: 808428
acuaccaugcucauucauc

SEQ ID NO: 808430 - RNA, 19 nt, Artificial Sequence
  Description of Artificial Sequence: Synthetic oligonucleotide
  Sense strand starting at position 2875 of SEQ ID NO: 587654
augaaugagcaugguaguu

SEQ ID NO: 808431 - RNA, 19 nt, Artificial Sequence
  Description of Artificial Sequence: Synthetic oligonucleotide
  Antisense strand to SEQ ID NO: 808430
aacuaccaugcucauucau

SEQ ID NO: 808432 - RNA, 19 nt, Artificial Sequence
  Description of Artificial Sequence: Synthetic oligonucleotide
  Sense strand starting at position 2885 of SEQ ID NO: 587654
augguaguuaaguguagaa

SEQ ID NO: 808433 - RNA, 19 nt, Artificial Sequence
  Description of Artificial Sequence: Synthetic oligonucleotide
  Antisense strand to SEQ ID NO: 808432
uucuacacuuaacuaccau

SEQ ID NO: 808434 - RNA, 19 nt, Artificial Sequence
  Description of Artificial Sequence: Synthetic oligonucleotide
  Sense strand starting at position 2978 of SEQ ID NO: 587654
gagguuccagucuaauaac

SEQ ID NO: 808435 - RNA, 19 nt, Artificial Sequence
  Description of Artificial Sequence: Synthetic oligonucleotide
  Antisense strand to SEQ ID NO: 808434
guuauuagacuggaaccuc

SEQ ID NO: 808436 - RNA, 19 nt, Artificial Sequence
  Description of Artificial Sequence: Synthetic oligonucleotide
  Sense strand starting at position 3082 of SEQ ID NO: 587654
uggucuauugcauagagca

SEQ ID NO: 808437 - RNA, 19 nt, Artificial Sequence
  Description of Artificial Sequence: Synthetic oligonucleotide
  Antisense strand to SEQ ID NO: 808436
ugcucuaugcaauagacca

SEQ ID NO: 808438 - RNA, 19 nt, Artificial Sequence
  Description of Artificial Sequence: Synthetic oligonucleotide
  Sense strand starting at position 3097 of SEQ ID NO: 587654
agcacugagccacauguua

SEQ ID NO: 808439 - RNA, 19 nt, Artificial Sequence
  Description of Artificial Sequence: Synthetic oligonucleotide
  Antisense strand to SEQ ID NO: 808438
uaacauguggcucagugcu

SEQ ID NO: 808440 - RNA, 19 nt, Artificial Sequence
  Description of Artificial Sequence: Synthetic oligonucleotide
  Sense strand starting at position 3108 of SEQ ID NO: 587654
acauguuaacacuguaaca

SEQ ID NO: 808441 - RNA, 19 nt, Artificial Sequence
  Description of Artificial Sequence: Synthetic oligonucleotide
  Antisense strand to SEQ ID NO: 808440
uguuacaguguuaacaugu

SEQ ID NO: 808442 - RNA, 19 nt, Artificial Sequence
  Description of Artificial Sequence: Synthetic oligonucleotide
  Sense strand starting at position 3670 of SEQ ID NO: 587654
auuuauaucuaacaggaag

SEQ ID NO: 808443 - RNA, 19 nt, Artificial Sequence
  Description of Artificial Sequence: Synthetic oligonucleotide
  Antisense strand to SEQ ID NO: 808442
cuuccuguuagauauaaau

SEQ ID NO: 808444 - RNA, 19 nt, Artificial Sequence
  Description of Artificial Sequence: Synthetic oligonucleotide
  Sense strand starting at position 3869 of SEQ ID NO: 587654
gggcaaaguguggaauuaa

SEQ ID NO: 808445 - RNA, 19 nt, Artificial Sequence
  Description of Artificial Sequence: Synthetic oligonucleotide
  Antisense strand to SEQ ID NO: 808444
uuaauuccacacuuugccc

SEQ ID NO: 808446 - RNA, 19 nt, Artificial Sequence
  Description of Artificial Sequence: Synthetic oligonucleotide
  Sense strand starting at position 3952 of SEQ ID NO: 587654
uaagcaaacguuuagagau

SEQ ID NO: 808447 - RNA, 19 nt, Artificial Sequence
  Description of Artificial Sequence: Synthetic oligonucleotide
  Antisense strand to SEQ ID NO: 808446
aucucuaaacguuugcuua

SEQ ID NO: 808448 - RNA, 19 nt, Artificial Sequence
  Description of Artificial Sequence: Synthetic oligonucleotide
  Sense strand starting at position 20 of SEQ ID NO: 587655
cggagacgcacuuagugaa

SEQ ID NO: 808449 - RNA, 19 nt, Artificial Sequence
  Description of Artificial Sequence: Synthetic oligonucleotide
  Antisense strand to SEQ ID NO: 808448
uucacuaagugcgucuccg

SEQ ID NO: 808450 - RNA, 19 nt, Artificial Sequence
  Description of Artificial Sequence: Synthetic oligonucleotide
  Sense strand starting at position 1035 of SEQ ID NO: 587655
gcgauaugcggucccuacu

SEQ ID NO: 808451 - RNA, 19 nt, Artificial Sequence
  Description of Artificial Sequence: Synthetic oligonucleotide
  Antisense strand to SEQ ID NO: 808450
aguagggaccgcauaucgc

SEQ ID NO: 808452 - RNA, 19 nt, Artificial Sequence
  Description of Artificial Sequence: Synthetic oligonucleotide
  Sense strand starting at position 1162 of SEQ ID NO: 587655
gggagucagcgugaauaua

SEQ ID NO: 808453 - RNA, 19 nt, Artificial Sequence
  Description of Artificial Sequence: Synthetic oligonucleotide
  Antisense strand to SEQ ID NO: 808452
uauauucacgcugacuccc

SEQ ID NO: 808454 - RNA, 19 nt, Artificial Sequence
  Description of Artificial Sequence: Synthetic oligonucleotide
  Sense strand starting at position 1192 of SEQ ID NO: 587655
gaaaucucgaaaggguagu

SEQ ID NO: 808455 - RNA, 19 nt, Artificial Sequence
  Description of Artificial Sequence: Synthetic oligonucleotide
  Antisense strand to SEQ ID NO: 808454
acuacccuuucgagauuuc

SEQ ID NO: 808456 - RNA, 19 nt, Artificial Sequence
  Description of Artificial Sequence: Synthetic oligonucleotide
  Sense strand starting at position 1198 of SEQ ID NO: 587655
ucgaaaggguagucuuaaa

SEQ ID NO: 808457 - RNA, 19 nt, Artificial Sequence
  Description of Artificial Sequence: Synthetic oligonucleotide
  Antisense strand to SEQ ID NO: 808456
uuuaagacuacccuuucga

SEQ ID NO: 808458 - RNA, 19 nt, Artificial Sequence
  Description of Artificial Sequence: Synthetic oligonucleotide
  Sense strand starting at position 1335 of SEQ ID NO: 587655
gugucaauagcgcaggaau

SEQ ID NO: 808459 - RNA, 19 nt, Artificial Sequence
  Description of Artificial Sequence: Synthetic oligonucleotide
  Antisense strand to SEQ ID NO: 808458
auuccugcgcuauugacac

SEQ ID NO: 808460 - RNA, 19 nt, Artificial Sequence
  Description of Artificial Sequence: Synthetic oligonucleotide
  Sense strand starting at position 1382 of SEQ ID NO: 587655
cgacucaucucagcauuaa

SEQ ID NO: 808461 - RNA, 19 nt, Artificial Sequence
  Description of Artificial Sequence: Synthetic oligonucleotide
  Antisense strand to SEQ ID NO: 808460
uuaaugcugagaugagucg

SEQ ID NO: 808462 - RNA, 19 nt, Artificial Sequence
  Description of Artificial Sequence: Synthetic oligonucleotide
  Sense strand starting at position 2173 of SEQ ID NO: 587655
acucuagcucuaggaugua

SEQ ID NO: 808463 - RNA, 19 nt, Artificial Sequence
  Description of Artificial Sequence: Synthetic oligonucleotide
  Antisense strand to SEQ ID NO: 808462
uacauccuagagcuagagu

SEQ ID NO: 808464 - RNA, 19 nt, Artificial Sequence
  Description of Artificial Sequence: Synthetic oligonucleotide
  Sense strand starting at position 2198 of SEQ ID NO: 587655
guaagagagccgcaugaau

SEQ ID NO: 808465 - RNA, 19 nt, Artificial Sequence
  Description of Artificial Sequence: Synthetic oligonucleotide
  Antisense strand to SEQ ID NO: 808464
auucaugcggcucucuuac

SEQ ID NO: 808466 - RNA, 19 nt, Artificial Sequence
  Description of Artificial Sequence: Synthetic oligonucleotide
  Sense strand starting at position 2200 of SEQ ID NO: 587655
aagagagccgcaugaauua

SEQ ID NO: 808467 - RNA, 19 nt, Artificial Sequence
  Description of Artificial Sequence: Synthetic oligonucleotide
  Antisense strand to SEQ ID NO: 808466
uaauucaugcggcucucuu

SEQ ID NO: 808468 - RNA, 19 nt, Artificial Sequence
  Description of Artificial Sequence: Synthetic oligonucleotide
  Sense strand starting at position 2313 of SEQ ID NO: 587655
cuuguccugugaguauaaa

SEQ ID NO: 808469 - RNA, 19 nt, Artificial Sequence
  Description of Artificial Sequence: Synthetic oligonucleotide
  Antisense strand to SEQ ID NO: 808468
uuuauacucacaggacaag

SEQ ID NO: 808470 - RNA, 19 nt, Artificial Sequence
  Description of Artificial Sequence: Synthetic oligonucleotide
  Sense strand starting at position 2314 of SEQ ID NO: 587655
uuguccugugaguauaaau

SEQ ID NO: 808471 - RNA, 19 nt, Artificial Sequence
  Description of Artificial Sequence: Synthetic oligonucleotide
  Antisense strand to SEQ ID NO: 808470
auuuauacucacaggacaa

SEQ ID NO: 808472 - RNA, 19 nt, Artificial Sequence
  Description of Artificial Sequence: Synthetic oligonucleotide
  Sense strand starting at position 2321 of SEQ ID NO: 587655
gugaguauaaaucaucgca

SEQ ID NO: 808473 - RNA, 19 nt, Artificial Sequence
  Description of Artificial Sequence: Synthetic oligonucleotide
  Antisense strand to SEQ ID NO: 808472
ugcgaugauuuauacucac

SEQ ID NO: 808474 - RNA, 19 nt, Artificial Sequence
  Description of Artificial Sequence: Synthetic oligonucleotide
  Sense strand starting at position 2561 of SEQ ID NO: 587655
cgaugccuagaaugauuaa

SEQ ID NO: 808475 - RNA, 19 nt, Artificial Sequence
  Description of Artificial Sequence: Synthetic oligonucleotide
  Antisense strand to SEQ ID NO: 808474
uuaaucauucuaggcaucg

SEQ ID NO: 808476 - RNA, 19 nt, Artificial Sequence
  Description of Artificial Sequence: Synthetic oligonucleotide
  Sense strand starting at position 2592 of SEQ ID NO: 587655
acgcauugccacguauacu

SEQ ID NO: 808477 - RNA, 19 nt, Artificial Sequence
  Description of Artificial Sequence: Synthetic oligonucleotide
  Antisense strand to SEQ ID NO: 808476
aguauacguggcaaugcgu

SEQ ID NO: 808478 - RNA, 19 nt, Artificial Sequence
  Description of Artificial Sequence: Synthetic oligonucleotide
  Sense strand starting at position 2611 of SEQ ID NO: 587655
uggagagcgcguuaugaau

SEQ ID NO: 808479 - RNA, 19 nt, Artificial Sequence
  Description of Artificial Sequence: Synthetic oligonucleotide
  Antisense strand to SEQ ID NO: 808478
auucauaacgcgcucucca

SEQ ID NO: 808480 - RNA, 19 nt, Artificial Sequence
  Description of Artificial Sequence: Synthetic oligonucleotide
  Sense strand starting at position 2793 of SEQ ID NO: 587655
ugcgggaggcgucuguuua

SEQ ID NO: 808481 - RNA, 19 nt, Artificial Sequence
  Description of Artificial Sequence: Synthetic oligonucleotide
  Antisense strand to SEQ ID NO: 808480
uaaacagacgccucccgca

SEQ ID NO: 808482 - RNA, 19 nt, Artificial Sequence
  Description of Artificial Sequence: Synthetic oligonucleotide
  Sense strand starting at position 2804 of SEQ ID NO: 587655
ucuguuuagcccugagaug

SEQ ID NO: 808483 - RNA, 19 nt, Artificial Sequence
  Description of Artificial Sequence: Synthetic oligonucleotide
  Antisense strand to SEQ ID NO: 808482
caucucagggcuaaacaga

SEQ ID NO: 808484 - RNA, 19 nt, Artificial Sequence
  Description of Artificial Sequence: Synthetic oligonucleotide
  Sense strand starting at position 2805 of SEQ ID NO: 587655
cuguuuagcccugagaugu

SEQ ID NO: 808485 - RNA, 19 nt, Artificial Sequence
  Description of Artificial Sequence: Synthetic oligonucleotide
  Antisense strand to SEQ ID NO: 808484
acaucucagggcuaaacag

SEQ ID NO: 808486 - RNA, 19 nt, Artificial Sequence
  Description of Artificial Sequence: Synthetic oligonucleotide
  Sense strand starting at position 3012 of SEQ ID NO: 587655
ggagaaaucaaaggugcua

SEQ ID NO: 808487 - RNA, 19 nt, Artificial Sequence
  Description of Artificial Sequence: Synthetic oligonucleotide
  Antisense strand to SEQ ID NO: 808486
uagcaccuuugauuucucc

SEQ ID NO: 808488 - RNA, 19 nt, Artificial Sequence
  Description of Artificial Sequence: Synthetic oligonucleotide
  Sense strand starting at position 3014 of SEQ ID NO: 587655
agaaaucaaaggugcuaga

SEQ ID NO: 808489 - RNA, 19 nt, Artificial Sequence
  Description of Artificial Sequence: Synthetic oligonucleotide
  Antisense strand to SEQ ID NO: 808488
ucuagcaccuuugauuucu

SEQ ID NO: 808490 - RNA, 19 nt, Artificial Sequence
  Description of Artificial Sequence: Synthetic oligonucleotide
  Sense strand starting at position 3024 of SEQ ID NO: 587655
ggugcuagacgggagaaua

SEQ ID NO: 808491 - RNA, 19 nt, Artificial Sequence
  Description of Artificial Sequence: Synthetic oligonucleotide
  Antisense strand to SEQ ID NO: 808490
uauucucccgucuagcacc

SEQ ID NO: 808492 - RNA, 19 nt, Artificial Sequence
  Description of Artificial Sequence: Synthetic oligonucleotide
  Sense strand starting at position 3129 of SEQ ID NO: 587655
agcagagacccuugugaaa

SEQ ID NO: 808493 - RNA, 19 nt, Artificial Sequence
  Description of Artificial Sequence: Synthetic oligonucleotide
  Antisense strand to SEQ ID NO: 808492
uuucacaagggucucugcu

SEQ ID NO: 808494 - RNA, 19 nt, Artificial Sequence
  Description of Artificial Sequence: Synthetic oligonucleotide
  Sense strand starting at position 3172 of SEQ ID NO: 587655
ggacaaaccggacguuuaa

SEQ ID NO: 808495 - RNA, 19 nt, Artificial Sequence
  Description of Artificial Sequence: Synthetic oligonucleotide
  Antisense strand to SEQ ID NO: 808494
uuaaacguccgguuugucc

SEQ ID NO: 808496 - RNA, 19 nt, Artificial Sequence
  Description of Artificial Sequence: Synthetic oligonucleotide
  Sense strand starting at position 3313 of SEQ ID NO: 587655
ggagucuugagcuaauuaa

SEQ ID NO: 808497 - RNA, 19 nt, Artificial Sequence
  Description of Artificial Sequence: Synthetic oligonucleotide
  Antisense strand to SEQ ID NO: 808496
uuaauuagcucaagacucc

SEQ ID NO: 808498 - RNA, 19 nt, Artificial Sequence
  Description of Artificial Sequence: Synthetic oligonucleotide
  Sense strand starting at position 3349 of SEQ ID NO: 587655
ggcauuaauuuccuaguuc

SEQ ID NO: 808499 - RNA, 19 nt, Artificial Sequence
  Description of Artificial Sequence: Synthetic oligonucleotide
  Antisense strand to SEQ ID NO: 808498
gaacuaggaaauuaaugcc

SEQ ID NO: 808500 - RNA, 19 nt, Artificial Sequence
  Description of Artificial Sequence: Synthetic oligonucleotide
  Sense strand starting at position 3398 of SEQ ID NO: 587655
gaaagugcacuguauguaa

SEQ ID NO: 808501 - RNA, 19 nt, Artificial Sequence
  Description of Artificial Sequence: Synthetic oligonucleotide
  Antisense strand to SEQ ID NO: 808500
uuacauacagugcacuuuc

SEQ ID NO: 808502 - RNA, 19 nt, Artificial Sequence
  Description of Artificial Sequence: Synthetic oligonucleotide
  Sense strand starting at position 3439 of SEQ ID NO: 587655
uuauuuacgcuucgacuua

SEQ ID NO: 808503 - RNA, 19 nt, Artificial Sequence
  Description of Artificial Sequence: Synthetic oligonucleotide
  Antisense strand to SEQ ID NO: 808502
uaagucgaagcguaaauaa

SEQ ID NO: 808504 - RNA, 19 nt, Artificial Sequence
  Description of Artificial Sequence: Synthetic oligonucleotide
  Sense strand starting at position 3480 of SEQ ID NO: 587655
ugauuuguuugcucccuga

SEQ ID NO: 808505 - RNA, 19 nt, Artificial Sequence
  Description of Artificial Sequence: Synthetic oligonucleotide
  Antisense strand to SEQ ID NO: 808504
ucagggagcaaacaaauca

SEQ ID NO: 808506 - RNA, 19 nt, Artificial Sequence
  Description of Artificial Sequence: Synthetic oligonucleotide
  Sense strand starting at position 3484 of SEQ ID NO: 587655
uuguuugcucccugaaaug

SEQ ID NO: 808507 - RNA, 19 nt, Artificial Sequence
  Description of Artificial Sequence: Synthetic oligonucleotide
  Antisense strand to SEQ ID NO: 808506
cauuucagggagcaaacaa

SEQ ID NO: 808508 - RNA, 19 nt, Artificial Sequence
  Description of Artificial Sequence: Synthetic oligonucleotide
  Sense strand starting at position 3520 of SEQ ID NO: 587655
aauguauauucccucggga

SEQ ID NO: 808509 - RNA, 19 nt, Artificial Sequence
  Description of Artificial Sequence: Synthetic oligonucleotide
  Antisense strand to SEQ ID NO: 808508
ucccgagggaauauacauu

SEQ ID NO: 808510 - RNA, 19 nt, Artificial Sequence
  Description of Artificial Sequence: Synthetic oligonucleotide
  Sense strand starting at position 3522 of SEQ ID NO: 587655
uguauauucccucgggauu

SEQ ID NO: 808511 - RNA, 19 nt, Artificial Sequence
  Description of Artificial Sequence: Synthetic oligonucleotide
  Antisense strand to SEQ ID NO: 808510
aaucccgagggaauauaca

SEQ ID NO: 808512 - RNA, 19 nt, Artificial Sequence
  Description of Artificial Sequence: Synthetic oligonucleotide
  Sense strand starting at position 3552 of SEQ ID NO: 587655
guuauuccacggcaugaaa

SEQ ID NO: 808513 - RNA, 19 nt, Artificial Sequence
  Description of Artificial Sequence: Synthetic oligonucleotide
  Antisense strand to SEQ ID NO: 808512
uuucaugccguggaauaac

SEQ ID NO: 808514 - RNA, 19 nt, Artificial Sequence
  Description of Artificial Sequence: Synthetic oligonucleotide
  Sense strand starting at position 3697 of SEQ ID NO: 587655
gcuguucaagauggguuau

SEQ ID NO: 808515 - RNA, 19 nt, Artificial Sequence
  Description of Artificial Sequence: Synthetic oligonucleotide
  Antisense strand to SEQ ID NO: 808514
auaacccaucuugaacagc

SEQ ID NO: 808516 - RNA, 19 nt, Artificial Sequence
  Description of Artificial Sequence: Synthetic oligonucleotide
  Sense strand starting at position 3707 of SEQ ID NO: 587655
auggguuauuacccguuga

SEQ ID NO: 808517 - RNA, 19 nt, Artificial Sequence
  Description of Artificial Sequence: Synthetic oligonucleotide
  Antisense strand to SEQ ID NO: 808516
ucaacggguaauaacccau

SEQ ID NO: 808518 - RNA, 19 nt, Artificial Sequence
  Description of Artificial Sequence: Synthetic oligonucleotide
  Sense strand starting at position 3708 of SEQ ID NO: 587655
uggguuauuacccguugag

SEQ ID NO: 808519 - RNA, 19 nt, Artificial Sequence
  Description of Artificial Sequence: Synthetic oligonucleotide
  Antisense strand to SEQ ID NO: 808518
cucaacggguaauaaccca

SEQ ID NO: 808520 - RNA, 19 nt, Artificial Sequence
  Description of Artificial Sequence: Synthetic oligonucleotide
  Sense strand starting at position 3746 of SEQ ID NO: 587655
guguuaagugaauauagua

SEQ ID NO: 808521 - RNA, 19 nt, Artificial Sequence
  Description of Artificial Sequence: Synthetic oligonucleotide
  Antisense strand to SEQ ID NO: 808520
uacuauauucacuuaacac

SEQ ID NO: 808522 - RNA, 19 nt, Artificial Sequence
  Description of Artificial Sequence: Synthetic oligonucleotide
  Sense strand starting at position 3754 of SEQ ID NO: 587655
ugaauauaguagcuuccaa

SEQ ID NO: 808523 - RNA, 19 nt, Artificial Sequence
  Description of Artificial Sequence: Synthetic oligonucleotide
  Antisense strand to SEQ ID NO: 808522
uuggaagcuacuauauuca

SEQ ID NO: 808524 - RNA, 19 nt, Artificial Sequence
  Description of Artificial Sequence: Synthetic oligonucleotide
  Sense strand starting at position 3794 of SEQ ID NO: 587655
agcuuuaaggauugcaaau

SEQ ID NO: 808525 - RNA, 19 nt, Artificial Sequence
  Description of Artificial Sequence: Synthetic oligonucleotide
  Antisense strand to SEQ ID NO: 808524
auuugcaauccuuaaagcu

SEQ ID NO: 808526 - RNA, 19 nt, Artificial Sequence
  Description of Artificial Sequence: Synthetic oligonucleotide
  Sense strand starting at position 3917 of SEQ ID NO: 587655
ccgcguucagguuugcgaa

SEQ ID NO: 808527 - RNA, 19 nt, Artificial Sequence
  Description of Artificial Sequence: Synthetic oligonucleotide
  Antisense strand to SEQ ID NO: 808526
uucgcaaaccugaacgcgg

SEQ ID NO: 808528 - RNA, 19 nt, Artificial Sequence
  Description of Artificial Sequence: Synthetic oligonucleotide
  Sense strand starting at position 23 of SEQ ID NO: 587656
acuugagaugcucauguaa

SEQ ID NO: 808529 - RNA, 19 nt, Artificial Sequence
  Description of Artificial Sequence: Synthetic oligonucleotide
  Antisense strand to SEQ ID NO: 808528
uuacaugagcaucucaagu

SEQ ID NO: 808530 - RNA, 19 nt, Artificial Sequence
  Description of Artificial Sequence: Synthetic oligonucleotide
  Sense strand starting at position 133 of SEQ ID NO: 587656
uguacuauuuaugacacua

SEQ ID NO: 808531 - RNA, 19 nt, Artificial Sequence
  Description of Artificial Sequence: Synthetic oligonucleotide
  Antisense strand to SEQ ID NO: 808530
uagugucauaaauaguaca

SEQ ID NO: 808532 - RNA, 19 nt, Artificial Sequence
  Description of Artificial Sequence: Synthetic oligonucleotide
  Sense strand starting at position 489 of SEQ ID NO: 587656
acagccuguguguagauaa

SEQ ID NO: 808533 - RNA, 19 nt, Artificial Sequence
  Description of Artificial Sequence: Synthetic oligonucleotide
  Antisense strand to SEQ ID NO: 808532
uuaucuacacacaggcugu

SEQ ID NO: 808534 - RNA, 19 nt, Artificial Sequence
  Description of Artificial Sequence: Synthetic oligonucleotide
  Sense strand starting at position 664 of SEQ ID NO: 587656
cggaaugcuccugacacgu

SEQ ID NO: 808535 - RNA, 19 nt, Artificial Sequence
  Description of Artificial Sequence: Synthetic oligonucleotide
  Antisense strand to SEQ ID NO: 808534
acgugucaggagcauuccg

SEQ ID NO: 808536 - RNA, 19 nt, Artificial Sequence
  Description of Artificial Sequence: Synthetic oligonucleotide
  Sense strand starting at position 672 of SEQ ID NO: 587656
uccugacacguuuaggaau

SEQ ID NO: 808537 - RNA, 19 nt, Artificial Sequence
  Description of Artificial Sequence: Synthetic oligonucleotide
  Antisense strand to SEQ ID NO: 808536
auuccuaaacgugucagga

SEQ ID NO: 808538 - RNA, 19 nt, Artificial Sequence
  Description of Artificial Sequence: Synthetic oligonucleotide
  Sense strand starting at position 732 of SEQ ID NO: 587656
gggaccacgugucugauau

SEQ ID NO: 808539 - RNA, 19 nt, Artificial Sequence
  Description of Artificial Sequence: Synthetic oligonucleotide
  Antisense strand to SEQ ID NO: 808538
auaucagacacgugguccc

SEQ ID NO: 808540 - RNA, 19 nt, Artificial Sequence
  Description of Artificial Sequence: Synthetic oligonucleotide
  Sense strand starting at position 733 of SEQ ID NO: 587656
ggaccacgugucugauauc

SEQ ID NO: 808541 - RNA, 19 nt, Artificial Sequence
  Description of Artificial Sequence: Synthetic oligonucleotide
  Antisense strand to SEQ ID NO: 808540
gauaucagacacguggucc

SEQ ID NO: 808542 - RNA, 19 nt, Artificial Sequence
  Description of Artificial Sequence: Synthetic oligonucleotide
  Sense strand starting at position 864 of SEQ ID NO: 587656
gaaggaaauuguuuguaca

SEQ ID NO: 808543 - RNA, 19 nt, Artificial Sequence
  Description of Artificial Sequence: Synthetic oligonucleotide
  Antisense strand to SEQ ID NO: 808542
uguacaaacaauuuccuuc

SEQ ID NO: 808544 - RNA, 19 nt, Artificial Sequence
  Description of Artificial Sequence: Synthetic oligonucleotide
  Sense strand starting at position 865 of SEQ ID NO: 587656
aaggaaauuguuuguacag

SEQ ID NO: 808545 - RNA, 19 nt, Artificial Sequence
  Description of Artificial Sequence: Synthetic oligonucleotide
  Antisense strand to SEQ ID NO: 808544
cuguacaaacaauuuccuu

SEQ ID NO: 808546 - RNA, 19 nt, Artificial Sequence
  Description of Artificial Sequence: Synthetic oligonucleotide
  Sense strand starting at position 866 of SEQ ID NO: 587656
aggaaauuguuuguacagu

SEQ ID NO: 808547 - RNA, 19 nt, Artificial Sequence
  Description of Artificial Sequence: Synthetic oligonucleotide
  Antisense strand to SEQ ID NO: 808546
acuguacaaacaauuuccu

SEQ ID NO: 808548 - RNA, 19 nt, Artificial Sequence
  Description of Artificial Sequence: Synthetic oligonucleotide
  Sense strand starting at position 1014 of SEQ ID NO: 587656
ggacuugguuuauuaaaua

SEQ ID NO: 808549 - RNA, 19 nt, Artificial Sequence
  Description of Artificial Sequence: Synthetic oligonucleotide
  Antisense strand to SEQ ID NO: 808548
uauuuaauaaaccaagucc

SEQ ID NO: 808550 - RNA, 19 nt, Artificial Sequence
  Description of Artificial Sequence: Synthetic oligonucleotide
  Sense strand starting at position 1129 of SEQ ID NO: 587656
gguguucccagugauggca

SEQ ID NO: 808551 - RNA, 19 nt, Artificial Sequence
  Description of Artificial Sequence: Synthetic oligonucleotide
  Antisense strand to SEQ ID NO: 808550
ugccaucacugggaacacc

SEQ ID NO: 808552 - RNA, 19 nt, Artificial Sequence
  Description of Artificial Sequence: Synthetic oligonucleotide
  Sense strand starting at position 1327 of SEQ ID NO: 587656
gccguaagaacgcugucau

SEQ ID NO: 808553 - RNA, 19 nt, Artificial Sequence
  Description of Artificial Sequence: Synthetic oligonucleotide
  Antisense strand to SEQ ID NO: 808552
augacagcguucuuacggc

SEQ ID NO: 808554 - RNA, 19 nt, Artificial Sequence
  Description of Artificial Sequence: Synthetic oligonucleotide
  Sense strand starting at position 1365 of SEQ ID NO: 587656
aguccugacaaggauuguu

SEQ ID NO: 808555 - RNA, 19 nt, Artificial Sequence
  Description of Artificial Sequence: Synthetic oligonucleotide
  Antisense strand to SEQ ID NO: 808554
aacaauccuugucaggacu

SEQ ID NO: 808556 - RNA, 19 nt, Artificial Sequence
  Description of Artificial Sequence: Synthetic oligonucleotide
  Sense strand starting at position 1370 of SEQ ID NO: 587656
ugacaaggauuguucucuu

SEQ ID NO: 808557 - RNA, 19 nt, Artificial Sequence
  Description of Artificial Sequence: Synthetic oligonucleotide
  Antisense strand to SEQ ID NO: 808556
aagagaacaauccuuguca

SEQ ID NO: 808558 - RNA, 19 nt, Artificial Sequence
  Description of Artificial Sequence: Synthetic oligonucleotide
  Sense strand starting at position 1387 of SEQ ID NO: 587656
uuucccauaccguggauaa

SEQ ID NO: 808559 - RNA, 19 nt, Artificial Sequence
  Description of Artificial Sequence: Synthetic oligonucleotide
  Antisense strand to SEQ ID NO: 808558
uuauccacgguaugggaaa

SEQ ID NO: 808560 - RNA, 19 nt, Artificial Sequence
  Description of Artificial Sequence: Synthetic oligonucleotide
  Sense strand starting at position 1388 of SEQ ID NO: 587656
uucccauaccguggauaau

SEQ ID NO: 808561 - RNA, 19 nt, Artificial Sequence
  Description of Artificial Sequence: Synthetic oligonucleotide
  Antisense strand to SEQ ID NO: 808560
auuauccacgguaugggaa

SEQ ID NO: 808562 - RNA, 19 nt, Artificial Sequence
  Description of Artificial Sequence: Synthetic oligonucleotide
  Sense strand starting at position 1389 of SEQ ID NO: 587656
ucccauaccguggauaaua

SEQ ID NO: 808563 - RNA, 19 nt, Artificial Sequence
  Description of Artificial Sequence: Synthetic oligonucleotide
  Antisense strand to SEQ ID NO: 808562
uauuauccacgguauggga

SEQ ID NO: 808564 - RNA, 19 nt, Artificial Sequence
  Description of Artificial Sequence: Synthetic oligonucleotide
  Sense strand starting at position 1391 of SEQ ID NO: 587656
ccauaccguggauaauaua

SEQ ID NO: 808565 - RNA, 19 nt, Artificial Sequence
  Description of Artificial Sequence: Synthetic oligonucleotide
  Antisense strand to SEQ ID NO: 808564
uauauuauccacgguaugg

SEQ ID NO: 808566 - RNA, 19 nt, Artificial Sequence
  Description of Artificial Sequence: Synthetic oligonucleotide
  Sense strand starting at position 1403 of SEQ ID NO: 587656
uaauauaggcuaggucuaa

SEQ ID NO: 808567 - RNA, 19 nt, Artificial Sequence
  Description of Artificial Sequence: Synthetic oligonucleotide
  Antisense strand to SEQ ID NO: 808566
uuagaccuagccuauauua

SEQ ID NO: 808568 - RNA, 19 nt, Artificial Sequence
  Description of Artificial Sequence: Synthetic oligonucleotide
  Sense strand starting at position 1412 of SEQ ID NO: 587656
cuaggucuaagcugaauga

SEQ ID NO: 808569 - RNA, 19 nt, Artificial Sequence
  Description of Artificial Sequence: Synthetic oligonucleotide
  Antisense strand to SEQ ID NO: 808568
ucauucagcuuagaccuag

SEQ ID NO: 808570 - RNA, 19 nt, Artificial Sequence
  Description of Artificial Sequence: Synthetic oligonucleotide
  Sense strand starting at position 1582 of SEQ ID NO: 587656
cgaugagaccagggcuaaa

SEQ ID NO: 808571 - RNA, 19 nt, Artificial Sequence
  Description of Artificial Sequence: Synthetic oligonucleotide
  Antisense strand to SEQ ID NO: 808570
uuuagcccuggucucaucg

SEQ ID NO: 808572 - RNA, 19 nt, Artificial Sequence
  Description of Artificial Sequence: Synthetic oligonucleotide
  Sense strand starting at position 1665 of SEQ ID NO: 587656
aauguuaguugagcauaaa

SEQ ID NO: 808573 - RNA, 19 nt, Artificial Sequence
  Description of Artificial Sequence: Synthetic oligonucleotide
  Antisense strand to SEQ ID NO: 808572
uuuaugcucaacuaacauu

SEQ ID NO: 808574 - RNA, 19 nt, Artificial Sequence
  Description of Artificial Sequence: Synthetic oligonucleotide
  Sense strand starting at position 1709 of SEQ ID NO: 587656
agaacuaauugcucuguuu

SEQ ID NO: 808575 - RNA, 19 nt, Artificial Sequence
  Description of Artificial Sequence: Synthetic oligonucleotide
  Antisense strand to SEQ ID NO: 808574
aaacagagcaauuaguucu

SEQ ID NO: 808576 - RNA, 19 nt, Artificial Sequence
  Description of Artificial Sequence: Synthetic oligonucleotide
  Sense strand starting at position 1769 of SEQ ID NO: 587656
ucuucuugacccugaagua

SEQ ID NO: 808577 - RNA, 19 nt, Artificial Sequence
  Description of Artificial Sequence: Synthetic oligonucleotide
  Antisense strand to SEQ ID NO: 808576
uacuucagggucaagaaga

SEQ ID NO: 808578 - RNA, 19 nt, Artificial Sequence
  Description of Artificial Sequence: Synthetic oligonucleotide
  Sense strand starting at position 2262 of SEQ ID NO: 587656
gcaacucuccuccaugagu

SEQ ID NO: 808579 - RNA, 19 nt, Artificial Sequence
  Description of Artificial Sequence: Synthetic oligonucleotide
  Antisense strand to SEQ ID NO: 808578
acucauggaggagaguugc

SEQ ID NO: 808580 - RNA, 19 nt, Artificial Sequence
  Description of Artificial Sequence: Synthetic oligonucleotide
  Sense strand starting at position 2291 of SEQ ID NO: 587656
acgugugaauucucagaca

SEQ ID NO: 808581 - RNA, 19 nt, Artificial Sequence
  Description of Artificial Sequence: Synthetic oligonucleotide
  Antisense strand to SEQ ID NO: 808580
ugucugagaauucacacgu

SEQ ID NO: 808582 - RNA, 19 nt, Artificial Sequence
  Description of Artificial Sequence: Synthetic oligonucleotide
  Sense strand starting at position 2357 of SEQ ID NO: 587656
acuccugaaugagucuuua

SEQ ID NO: 808583 - RNA, 19 nt, Artificial Sequence
  Description of Artificial Sequence: Synthetic oligonucleotide
  Antisense strand to SEQ ID NO: 808582
uaaagacucauucaggagu

SEQ ID NO: 808584 - RNA, 19 nt, Artificial Sequence
  Description of Artificial Sequence: Synthetic oligonucleotide
  Sense strand starting at position 2361 of SEQ ID NO: 587656
cugaaugagucuuuaauaa

SEQ ID NO: 808585 - RNA, 19 nt, Artificial Sequence
  Description of Artificial Sequence: Synthetic oligonucleotide
  Antisense strand to SEQ ID NO: 808584
uuauuaaagacucauucag

SEQ ID NO: 808586 - RNA, 19 nt, Artificial Sequence
  Description of Artificial Sequence: Synthetic oligonucleotide
  Sense strand starting at position 2577 of SEQ ID NO: 587656
gcaagaacugccuacccaa

SEQ ID NO: 808587 - RNA, 19 nt, Artificial Sequence
  Description of Artificial Sequence: Synthetic oligonucleotide
  Antisense strand to SEQ ID NO: 808586
uuggguaggcaguucuugc

SEQ ID NO: 808588 - RNA, 19 nt, Artificial Sequence
  Description of Artificial Sequence: Synthetic oligonucleotide
  Sense strand starting at position 2927 of SEQ ID NO: 587656
uguugugacaaguagagaa

SEQ ID NO: 808589 - RNA, 19 nt, Artificial Sequence
  Description of Artificial Sequence: Synthetic oligonucleotide
  Antisense strand to SEQ ID NO: 808588
uucucuacuugucacaaca

SEQ ID NO: 808590 - RNA, 19 nt, Artificial Sequence
  Description of Artificial Sequence: Synthetic oligonucleotide
  Sense strand starting at position 3166 of SEQ ID NO: 587656
uuaauuaguguuuguugag

SEQ ID NO: 808591 - RNA, 19 nt, Artificial Sequence
  Description of Artificial Sequence: Synthetic oligonucleotide
  Antisense strand to SEQ ID NO: 808590
cucaacaaacacuaauuaa

SEQ ID NO: 808592 - RNA, 19 nt, Artificial Sequence
  Description of Artificial Sequence: Synthetic oligonucleotide
  Sense strand starting at position 3172 of SEQ ID NO: 587656
aguguuuguugagugauuu

SEQ ID NO: 808593 - RNA, 19 nt, Artificial Sequence
  Description of Artificial Sequence: Synthetic oligonucleotide
  Antisense strand to SEQ ID NO: 808592
aaaucacucaacaaacacu

SEQ ID NO: 808594 - RNA, 19 nt, Artificial Sequence
  Description of Artificial Sequence: Synthetic oligonucleotide
  Sense strand starting at position 3173 of SEQ ID NO: 587656
guguuuguugagugauuuc

SEQ ID NO: 808595 - RNA, 19 nt, Artificial Sequence
  Description of Artificial Sequence: Synthetic oligonucleotide
  Antisense strand to SEQ ID NO: 808594
gaaaucacucaacaaacac

SEQ ID NO: 808596 - RNA, 19 nt, Artificial Sequence
  Description of Artificial Sequence: Synthetic oligonucleotide
  Sense strand starting at position 3184 of SEQ ID NO: 587656
gugauuucuuagucuauuc

SEQ ID NO: 808597 - RNA, 19 nt, Artificial Sequence
  Description of Artificial Sequence: Synthetic oligonucleotide
  Antisense strand to SEQ ID NO: 808596
gaauagacuaagaaaucac

SEQ ID NO: 808598 - RNA, 19 nt, Artificial Sequence
  Description of Artificial Sequence: Synthetic oligonucleotide
  Sense strand starting at position 3346 of SEQ ID NO: 587656
gucccugaguccucaccaa

SEQ ID NO: 808599 - RNA, 19 nt, Artificial Sequence
  Description of Artificial Sequence: Synthetic oligonucleotide
  Antisense strand to SEQ ID NO: 808598
uuggugaggacucagggac

SEQ ID NO: 808600 - RNA, 19 nt, Artificial Sequence
  Description of Artificial Sequence: Synthetic oligonucleotide
  Sense strand starting at position 3350 of SEQ ID NO: 587656
cugaguccucaccaaguca

SEQ ID NO: 808601 - RNA, 19 nt, Artificial Sequence
  Description of Artificial Sequence: Synthetic oligonucleotide
  Antisense strand to SEQ ID NO: 808600
ugacuuggugaggacucag

SEQ ID NO: 808602 - RNA, 19 nt, Artificial Sequence
  Description of Artificial Sequence: Synthetic oligonucleotide
  Sense strand starting at position 3399 of SEQ ID NO: 587656
ugaggauacugaucccacu

SEQ ID NO: 808603 - RNA, 19 nt, Artificial Sequence
  Description of Artificial Sequence: Synthetic oligonucleotide
  Antisense strand to SEQ ID NO: 808602
agugggaucaguauccuca

SEQ ID NO: 808604 - RNA, 19 nt, Artificial Sequence
  Description of Artificial Sequence: Synthetic oligonucleotide
  Sense strand starting at position 3877 of SEQ ID NO: 587656
uccagugcugcgucuaaga

SEQ ID NO: 808605 - RNA, 19 nt, Artificial Sequence
  Description of Artificial Sequence: Synthetic oligonucleotide
  Antisense strand to SEQ ID NO: 808604
ucuuagacgcagcacugga

SEQ ID NO: 808606 - RNA, 19 nt, Artificial Sequence
  Description of Artificial Sequence: Synthetic oligonucleotide
  Sense strand starting at position 3890 of SEQ ID NO: 587656
cuaagaaagccuggaucuu

SEQ ID NO: 808607 - RNA, 19 nt, Artificial Sequence
  Description of Artificial Sequence: Synthetic oligonucleotide
  Antisense strand to SEQ ID NO: 808606
aagauccaggcuuucuuag

SEQ ID NO: 808608 - RNA, 19 nt, Artificial Sequence
  Description of Artificial Sequence: Synthetic oligonucleotide
  Sense strand starting at position 94 of SEQ ID NO: 587657
cucggaagaccuugcggau

SEQ ID NO: 808609 - RNA, 19 nt, Artificial Sequence
  Description of Artificial Sequence: Synthetic oligonucleotide
  Antisense strand to SEQ ID NO: 808608
auccgcaaggucuuccgag

SEQ ID NO: 808610 - RNA, 19 nt, Artificial Sequence
  Description of Artificial Sequence: Synthetic oligonucleotide
  Sense strand starting at position 190 of SEQ ID NO: 587657
gggcgacugcuaggaaguu

SEQ ID NO: 808611 - RNA, 19 nt, Artificial Sequence
  Description of Artificial Sequence: Synthetic oligonucleotide
  Antisense strand to SEQ ID NO: 808610
aacuuccuagcagucgccc

SEQ ID NO: 808612 - RNA, 19 nt, Artificial Sequence
  Description of Artificial Sequence: Synthetic oligonucleotide
  Sense strand starting at position 211 of SEQ ID NO: 587657
ggagaccacuccugcagaa

SEQ ID NO: 808613 - RNA, 19 nt, Artificial Sequence
  Description of Artificial Sequence: Synthetic oligonucleotide
  Antisense strand to SEQ ID NO: 808612
uucugcaggaguggucucc

SEQ ID NO: 808614 - RNA, 19 nt, Artificial Sequence
  Description of Artificial Sequence: Synthetic oligonucleotide
  Sense strand starting at position 483 of SEQ ID NO: 587657
cgccaacaucuguggaaca

SEQ ID NO: 808615 - RNA, 19 nt, Artificial Sequence
  Description of Artificial Sequence: Synthetic oligonucleotide
  Antisense strand to SEQ ID NO: 808614
uguuccacagauguuggcg

SEQ ID NO: 808616 - RNA, 19 nt, Artificial Sequence
  Description of Artificial Sequence: Synthetic oligonucleotide
  Sense strand starting at position 496 of SEQ ID NO: 587657
ggaacagagucggugaaga

SEQ ID NO: 808617 - RNA, 19 nt, Artificial Sequence
  Description of Artificial Sequence: Synthetic oligonucleotide
  Antisense strand to SEQ ID NO: 808616
ucuucaccgacucuguucc

SEQ ID NO: 808618 - RNA, 19 nt, Artificial Sequence
  Description of Artificial Sequence: Synthetic oligonucleotide
  Sense strand starting at position 555 of SEQ ID NO: 587657
gggacacccuaguuugaga

SEQ ID NO: 808619 - RNA, 19 nt, Artificial Sequence
  Description of Artificial Sequence: Synthetic oligonucleotide
  Antisense strand to SEQ ID NO: 808618
ucucaaacuaggguguccc

SEQ ID NO: 808620 - RNA, 19 nt, Artificial Sequence
  Description of Artificial Sequence: Synthetic oligonucleotide
  Sense strand starting at position 560 of SEQ ID NO: 587657
acccuaguuugagagcaaa

SEQ ID NO: 808621 - RNA, 19 nt, Artificial Sequence
  Description of Artificial Sequence: Synthetic oligonucleotide
  Antisense strand to SEQ ID NO: 808620
uuugcucucaaacuagggu

SEQ ID NO: 808622 - RNA, 19 nt, Artificial Sequence
  Description of Artificial Sequence: Synthetic oligonucleotide
  Sense strand starting at position 563 of SEQ ID NO: 587657
cuaguuugagagcaaaggu

SEQ ID NO: 808623 - RNA, 19 nt, Artificial Sequence
  Description of Artificial Sequence: Synthetic oligonucleotide
  Antisense strand to SEQ ID NO: 808622
accuuugcucucaaacuag

SEQ ID NO: 808624 - RNA, 19 nt, Artificial Sequence
  Description of Artificial Sequence: Synthetic oligonucleotide
  Sense strand starting at position 1164 of SEQ ID NO: 587657
uccuuacacccugaagagu

SEQ ID NO: 808625 - RNA, 19 nt, Artificial Sequence
  Description of Artificial Sequence: Synthetic oligonucleotide
  Antisense strand to SEQ ID NO: 808624
acucuucaggguguaagga

SEQ ID NO: 808626 - RNA, 19 nt, Artificial Sequence
  Description of Artificial Sequence: Synthetic oligonucleotide
  Sense strand starting at position 1527 of SEQ ID NO: 587657
cccgaaggugcucgaagaa

SEQ ID NO: 808627 - RNA, 19 nt, Artificial Sequence
  Description of Artificial Sequence: Synthetic oligonucleotide
  Antisense strand to SEQ ID NO: 808626
uucuucgagcaccuucggg

SEQ ID NO: 808628 - RNA, 19 nt, Artificial Sequence
  Description of Artificial Sequence: Synthetic oligonucleotide
  Sense strand starting at position 1600 of SEQ ID NO: 587657
cgagguaacugcgcugaga

SEQ ID NO: 808629 - RNA, 19 nt, Artificial Sequence
  Description of Artificial Sequence: Synthetic oligonucleotide
  Antisense strand to SEQ ID NO: 808628
ucucagcgcaguuaccucg

SEQ ID NO: 808630 - RNA, 19 nt, Artificial Sequence
  Description of Artificial Sequence: Synthetic oligonucleotide
  Sense strand starting at position 2223 of SEQ ID NO: 587657
ggucuuggucaccagaggu

SEQ ID NO: 808631 - RNA, 19 nt, Artificial Sequence
  Description of Artificial Sequence: Synthetic oligonucleotide
  Antisense strand to SEQ ID NO: 808630
accucuggugaccaagacc

SEQ ID NO: 808632 - RNA, 19 nt, Artificial Sequence
  Description of Artificial Sequence: Synthetic oligonucleotide
  Sense strand starting at position 2470 of SEQ ID NO: 587657
acgcaaaugucgcuuggaa

SEQ ID NO: 808633 - RNA, 19 nt, Artificial Sequence
  Description of Artificial Sequence: Synthetic oligonucleotide
  Antisense strand to SEQ ID NO: 808632
uuccaagcgacauuugcgu

SEQ ID NO: 808634 - RNA, 19 nt, Artificial Sequence
  Description of Artificial Sequence: Synthetic oligonucleotide
  Sense strand starting at position 2472 of SEQ ID NO: 587657
gcaaaugucgcuuggaaag

SEQ ID NO: 808635 - RNA, 19 nt, Artificial Sequence
  Description of Artificial Sequence: Synthetic oligonucleotide
  Antisense strand to SEQ ID NO: 808634
cuuuccaagcgacauuugc

SEQ ID NO: 808636 - RNA, 19 nt, Artificial Sequence
  Description of Artificial Sequence: Synthetic oligonucleotide
  Sense strand starting at position 2668 of SEQ ID NO: 587657
gccacuacccagggagaau

SEQ ID NO: 808637 - RNA, 19 nt, Artificial Sequence
  Description of Artificial Sequence: Synthetic oligonucleotide
  Antisense strand to SEQ ID NO: 808636
auucucccuggguaguggc

SEQ ID NO: 808638 - RNA, 19 nt, Artificial Sequence
  Description of Artificial Sequence: Synthetic oligonucleotide
  Sense strand starting at position 3009 of SEQ ID NO: 587657
gggacuucuuuccuggaca

SEQ ID NO: 808639 - RNA, 19 nt, Artificial Sequence
  Description of Artificial Sequence: Synthetic oligonucleotide
  Antisense strand to SEQ ID NO: 808638
uguccaggaaagaaguccc

SEQ ID NO: 808640 - RNA, 19 nt, Artificial Sequence
  Description of Artificial Sequence: Synthetic oligonucleotide
  Sense strand starting at position 3010 of SEQ ID NO: 587657
ggacuucuuuccuggacaa

SEQ ID NO: 808641 - RNA, 19 nt, Artificial Sequence
  Description of Artificial Sequence: Synthetic oligonucleotide
  Antisense strand to SEQ ID NO: 808640
uuguccaggaaagaagucc

SEQ ID NO: 808642 - RNA, 19 nt, Artificial Sequence
  Description of Artificial Sequence: Synthetic oligonucleotide
  Sense strand starting at position 3099 of SEQ ID NO: 587657
uccagauagugaccuaaca

SEQ ID NO: 808643 - RNA, 19 nt, Artificial Sequence
  Description of Artificial Sequence: Synthetic oligonucleotide
  Antisense strand to SEQ ID NO: 808642
uguuaggucacuaucugga

SEQ ID NO: 808644 - RNA, 19 nt, Artificial Sequence
  Description of Artificial Sequence: Synthetic oligonucleotide
  Sense strand starting at position 3380 of SEQ ID NO: 587657
ggucucagucuuuaaucgu

SEQ ID NO: 808645 - RNA, 19 nt, Artificial Sequence
  Description of Artificial Sequence: Synthetic oligonucleotide
  Antisense strand to SEQ ID NO: 808644
acgauuaaagacugagacc

SEQ ID NO: 808646 - RNA, 19 nt, Artificial Sequence
  Description of Artificial Sequence: Synthetic oligonucleotide
  Sense strand starting at position 3935 of SEQ ID NO: 587657
accacuguguguccacaau

SEQ ID NO: 808647 - RNA, 19 nt, Artificial Sequence
  Description of Artificial Sequence: Synthetic oligonucleotide
  Antisense strand to SEQ ID NO: 808646
auuguggacacacaguggu

SEQ ID NO: 808648 - RNA, 19 nt, Artificial Sequence
  Description of Artificial Sequence: Synthetic oligonucleotide
  Sense strand starting at position 82 of SEQ ID NO: 587658
agcaguuuaacccagaggu

SEQ ID NO: 808649 - RNA, 19 nt, Artificial Sequence
  Description of Artificial Sequence: Synthetic oligonucleotide
  Antisense strand to SEQ ID NO: 808648
accucuggguuaaacugcu

SEQ ID NO: 808650 - RNA, 19 nt, Artificial Sequence
  Description of Artificial Sequence: Synthetic oligonucleotide
  Sense strand starting at position 96 of SEQ ID NO: 587658
gagguagucugccuaugag

SEQ ID NO: 808651 - RNA, 19 nt, Artificial Sequence
  Description of Artificial Sequence: Synthetic oligonucleotide
  Antisense strand to SEQ ID NO: 808650
cucauaggcagacuaccuc

SEQ ID NO: 808652 - RNA, 19 nt, Artificial Sequence
  Description of Artificial Sequence: Synthetic oligonucleotide
  Sense strand starting at position 193 of SEQ ID NO: 587658
auagauuucuggcauuaau

SEQ ID NO: 808653 - RNA, 19 nt, Artificial Sequence
  Description of Artificial Sequence: Synthetic oligonucleotide
  Antisense strand to SEQ ID NO: 808652
auuaaugccagaaaucuau

SEQ ID NO: 808654 - RNA, 19 nt, Artificial Sequence
  Description of Artificial Sequence: Synthetic oligonucleotide
  Sense strand starting at position 202 of SEQ ID NO: 587658
uggcauuaaugauuagaag

SEQ ID NO: 808655 - RNA, 19 nt, Artificial Sequence
  Description of Artificial Sequence: Synthetic oligonucleotide
  Antisense strand to SEQ ID NO: 808654
cuucuaaucauuaaugcca

SEQ ID NO: 808656 - RNA, 19 nt, Artificial Sequence
  Description of Artificial Sequence: Synthetic oligonucleotide
  Sense strand starting at position 696 of SEQ ID NO: 587658
gagcaaacaguaugucuga

SEQ ID NO: 808657 - RNA, 19 nt, Artificial Sequence
  Description of Artificial Sequence: Synthetic oligonucleotide
  Antisense strand to SEQ ID NO: 808656
ucagacauacuguuugcuc

SEQ ID NO: 808658 - RNA, 19 nt, Artificial Sequence
  Description of Artificial Sequence: Synthetic oligonucleotide
  Sense strand starting at position 753 of SEQ ID NO: 587658
caaguauaccauuguagug

SEQ ID NO: 808659 - RNA, 19 nt, Artificial Sequence
  Description of Artificial Sequence: Synthetic oligonucleotide
  Antisense strand to SEQ ID NO: 808658
cacuacaaugguauacuug

SEQ ID NO: 808660 - RNA, 19 nt, Artificial Sequence
  Description of Artificial Sequence: Synthetic oligonucleotide
  Sense strand starting at position 954 of SEQ ID NO: 587658
uggagacccucuccaguaa

SEQ ID NO: 808661 - RNA, 19 nt, Artificial Sequence
  Description of Artificial Sequence: Synthetic oligonucleotide
  Antisense strand to SEQ ID NO: 808660
uuacuggagagggucucca

SEQ ID NO: 808662 - RNA, 19 nt, Artificial Sequence
  Description of Artificial Sequence: Synthetic oligonucleotide
  Sense strand starting at position 975 of SEQ ID NO: 587658
guccuucggccauaauaaa

SEQ ID NO: 808663 - RNA, 19 nt, Artificial Sequence
  Description of Artificial Sequence: Synthetic oligonucleotide
  Antisense strand to SEQ ID NO: 808662
uuuauuauggccgaaggac

SEQ ID NO: 808664 - RNA, 19 nt, Artificial Sequence
  Description of Artificial Sequence: Synthetic oligonucleotide
  Sense strand starting at position 1332 of SEQ ID NO: 587658
cuggaauucccauaggcau

SEQ ID NO: 808665 - RNA, 19 nt, Artificial Sequence
  Description of Artificial Sequence: Synthetic oligonucleotide
  Antisense strand to SEQ ID NO: 808664
augccuaugggaauuccag

SEQ ID NO: 808666 - RNA, 19 nt, Artificial Sequence
  Description of Artificial Sequence: Synthetic oligonucleotide
  Sense strand starting at position 1374 of SEQ ID NO: 587658
ccuggacauccaggaucau

SEQ ID NO: 808667 - RNA, 19 nt, Artificial Sequence
  Description of Artificial Sequence: Synthetic oligonucleotide
  Antisense strand to SEQ ID NO: 808666
augauccuggauguccagg

SEQ ID NO: 808668 - RNA, 19 nt, Artificial Sequence
  Description of Artificial Sequence: Synthetic oligonucleotide
  Sense strand starting at position 1453 of SEQ ID NO: 587658
aggauuaacuggguccuuu

SEQ ID NO: 808669 - RNA, 19 nt, Artificial Sequence
  Description of Artificial Sequence: Synthetic oligonucleotide
  Antisense strand to SEQ ID NO: 808668
aaaggacccaguuaauccu

SEQ ID NO: 808670 - RNA, 19 nt, Artificial Sequence
  Description of Artificial Sequence: Synthetic oligonucleotide
  Sense strand starting at position 1541 of SEQ ID NO: 587658
uugagaaaguugccuuaaa

SEQ ID NO: 808671 - RNA, 19 nt, Artificial Sequence
  Description of Artificial Sequence: Synthetic oligonucleotide
  Antisense strand to SEQ ID NO: 808670
uuuaaggcaacuuucucaa

SEQ ID NO: 808672 - RNA, 19 nt, Artificial Sequence
  Description of Artificial Sequence: Synthetic oligonucleotide
  Sense strand starting at position 1542 of SEQ ID NO: 587658
ugagaaaguugccuuaaac

SEQ ID NO: 808673 - RNA, 19 nt, Artificial Sequence
  Description of Artificial Sequence: Synthetic oligonucleotide
  Antisense strand to SEQ ID NO: 808672
guuuaaggcaacuuucuca

SEQ ID NO: 808674 - RNA, 19 nt, Artificial Sequence
  Description of Artificial Sequence: Synthetic oligonucleotide
  Sense strand starting at position 1575 of SEQ ID NO: 587658
uuaauacacguauguaauc

SEQ ID NO: 808675 - RNA, 19 nt, Artificial Sequence
  Description of Artificial Sequence: Synthetic oligonucleotide
  Antisense strand to SEQ ID NO: 808674
gauuacauacguguauuaa

SEQ ID NO: 808676 - RNA, 19 nt, Artificial Sequence
  Description of Artificial Sequence: Synthetic oligonucleotide
  Sense strand starting at position 1617 of SEQ ID NO: 587658
gcaguacucguagcuccau

SEQ ID NO: 808677 - RNA, 19 nt, Artificial Sequence
  Description of Artificial Sequence: Synthetic oligonucleotide
  Antisense strand to SEQ ID NO: 808676
auggagcuacgaguacugc

SEQ ID NO: 808678 - RNA, 19 nt, Artificial Sequence
  Description of Artificial Sequence: Synthetic oligonucleotide
  Sense strand starting at position 1726 of SEQ ID NO: 587658
guuugaaucaaggaccugu

SEQ ID NO: 808679 - RNA, 19 nt, Artificial Sequence
  Description of Artificial Sequence: Synthetic oligonucleotide
  Antisense strand to SEQ ID NO: 808678
acagguccuugauucaaac

SEQ ID NO: 808680 - RNA, 19 nt, Artificial Sequence
  Description of Artificial Sequence: Synthetic oligonucleotide
  Sense strand starting at position 1741 of SEQ ID NO: 587658
cuguaacugucaccacuaa

SEQ ID NO: 808681 - RNA, 19 nt, Artificial Sequence
  Description of Artificial Sequence: Synthetic oligonucleotide
  Antisense strand to SEQ ID NO: 808680
uuaguggugacaguuacag

SEQ ID NO: 808682 - RNA, 19 nt, Artificial Sequence
  Description of Artificial Sequence: Synthetic oligonucleotide
  Sense strand starting at position 1752 of SEQ ID NO: 587658
accacuaagcuguggagua

SEQ ID NO: 808683 - RNA, 19 nt, Artificial Sequence
  Description of Artificial Sequence: Synthetic oligonucleotide
  Antisense strand to SEQ ID NO: 808682
uacuccacagcuuaguggu

SEQ ID NO: 808684 - RNA, 19 nt, Artificial Sequence
  Description of Artificial Sequence: Synthetic oligonucleotide
  Sense strand starting at position 1914 of SEQ ID NO: 587658
uuccacuuaccagguuauu

SEQ ID NO: 808685 - RNA, 19 nt, Artificial Sequence
  Description of Artificial Sequence: Synthetic oligonucleotide
  Antisense strand to SEQ ID NO: 808684
aauaaccugguaaguggaa

SEQ ID NO: 808686 - RNA, 19 nt, Artificial Sequence
  Description of Artificial Sequence: Synthetic oligonucleotide
  Sense strand starting at position 2391 of SEQ ID NO: 587658
aucaguucccauuagacuu

SEQ ID NO: 808687 - RNA, 19 nt, Artificial Sequence
  Description of Artificial Sequence: Synthetic oligonucleotide
  Antisense strand to SEQ ID NO: 808686
aagucuaaugggaacugau

SEQ ID NO: 808688 - RNA, 19 nt, Artificial Sequence
  Description of Artificial Sequence: Synthetic oligonucleotide
  Sense strand starting at position 2477 of SEQ ID NO: 587658
ugggcaaugugucugaaag

SEQ ID NO: 808689 - RNA, 19 nt, Artificial Sequence
  Description of Artificial Sequence: Synthetic oligonucleotide
  Antisense strand to SEQ ID NO: 808688
cuuucagacacauugccca

SEQ ID NO: 808690 - RNA, 19 nt, Artificial Sequence
  Description of Artificial Sequence: Synthetic oligonucleotide
  Sense strand starting at position 2478 of SEQ ID NO: 587658
gggcaaugugucugaaaga

SEQ ID NO: 808691 - RNA, 19 nt, Artificial Sequence
  Description of Artificial Sequence: Synthetic oligonucleotide
  Antisense strand to SEQ ID NO: 808690
ucuuucagacacauugccc

SEQ ID NO: 808692 - RNA, 19 nt, Artificial Sequence
  Description of Artificial Sequence: Synthetic oligonucleotide
  Sense strand starting at position 2508 of SEQ ID NO: 587658
gugguaugagggugauaua

SEQ ID NO: 808693 - RNA, 19 nt, Artificial Sequence
  Description of Artificial Sequence: Synthetic oligonucleotide
  Antisense strand to SEQ ID NO: 808692
uauaucacccucauaccac

SEQ ID NO: 808694 - RNA, 19 nt, Artificial Sequence
  Description of Artificial Sequence: Synthetic oligonucleotide
  Sense strand starting at position 2515 of SEQ ID NO: 587658
gagggugauauaugucaua

SEQ ID NO: 808695 - RNA, 19 nt, Artificial Sequence
  Description of Artificial Sequence: Synthetic oligonucleotide
  Antisense strand to SEQ ID NO: 808694
uaugacauauaucacccuc

SEQ ID NO: 808696 - RNA, 19 nt, Artificial Sequence
  Description of Artificial Sequence: Synthetic oligonucleotide
  Sense strand starting at position 2572 of SEQ ID NO: 587658
gguauugaucuacaacucu

SEQ ID NO: 808697 - RNA, 19 nt, Artificial Sequence
  Description of Artificial Sequence: Synthetic oligonucleotide
  Antisense strand to SEQ ID NO: 808696
agaguuguagaucaauacc

SEQ ID NO: 808698 - RNA, 19 nt, Artificial Sequence
  Description of Artificial Sequence: Synthetic oligonucleotide
  Sense strand starting at position 2653 of SEQ ID NO: 587658
acauguuuacaggguacaa

SEQ ID NO: 808699 - RNA, 19 nt, Artificial Sequence
  Description of Artificial Sequence: Synthetic oligonucleotide
  Antisense strand to SEQ ID NO: 808698
uuguacccuguaaacaugu

SEQ ID NO: 808700 - RNA, 19 nt, Artificial Sequence
  Description of Artificial Sequence: Synthetic oligonucleotide
  Sense strand starting at position 2686 of SEQ ID NO: 587658
acauacauacauuguguaa

SEQ ID NO: 808701 - RNA, 19 nt, Artificial Sequence
  Description of Artificial Sequence: Synthetic oligonucleotide
  Antisense strand to SEQ ID NO: 808700
uuacacaauguauguaugu

SEQ ID NO: 808702 - RNA, 19 nt, Artificial Sequence
  Description of Artificial Sequence: Synthetic oligonucleotide
  Sense strand starting at position 2782 of SEQ ID NO: 587658
gaguguuuccuugugcugu

SEQ ID NO: 808703 - RNA, 19 nt, Artificial Sequence
  Description of Artificial Sequence: Synthetic oligonucleotide
  Antisense strand to SEQ ID NO: 808702
acagcacaaggaaacacuc

SEQ ID NO: 808704 - RNA, 19 nt, Artificial Sequence
  Description of Artificial Sequence: Synthetic oligonucleotide
  Sense strand starting at position 2807 of SEQ ID NO: 587658
ggcaccuacuguucuagaa

SEQ ID NO: 808705 - RNA, 19 nt, Artificial Sequence
  Description of Artificial Sequence: Synthetic oligonucleotide
  Antisense strand to SEQ ID NO: 808704
uucuagaacaguaggugcc

SEQ ID NO: 808706 - RNA, 19 nt, Artificial Sequence
  Description of Artificial Sequence: Synthetic oligonucleotide
  Sense strand starting at position 2811 of SEQ ID NO: 587658
ccuacuguucuagaacaug

SEQ ID NO: 808707 - RNA, 19 nt, Artificial Sequence
  Description of Artificial Sequence: Synthetic oligonucleotide
  Antisense strand to SEQ ID NO: 808706
cauguucuagaacaguagg

SEQ ID NO: 808708 - RNA, 19 nt, Artificial Sequence
  Description of Artificial Sequence: Synthetic oligonucleotide
  Sense strand starting at position 2846 of SEQ ID NO: 587658
acgugaacucgggacucua

SEQ ID NO: 808709 - RNA, 19 nt, Artificial Sequence
  Description of Artificial Sequence: Synthetic oligonucleotide
  Antisense strand to SEQ ID NO: 808708
uagagucccgaguucacgu

SEQ ID NO: 808710 - RNA, 19 nt, Artificial Sequence
  Description of Artificial Sequence: Synthetic oligonucleotide
  Sense strand starting at position 2954 of SEQ ID NO: 587658
ggaguuggaggccacauau

SEQ ID NO: 808711 - RNA, 19 nt, Artificial Sequence
  Description of Artificial Sequence: Synthetic oligonucleotide
  Antisense strand to SEQ ID NO: 808710
auauguggccuccaacucc

SEQ ID NO: 808712 - RNA, 19 nt, Artificial Sequence
  Description of Artificial Sequence: Synthetic oligonucleotide
  Sense strand starting at position 2995 of SEQ ID NO: 587658
uggaauuacccuuaggcuu

SEQ ID NO: 808713 - RNA, 19 nt, Artificial Sequence
  Description of Artificial Sequence: Synthetic oligonucleotide
  Antisense strand to SEQ ID NO: 808712
aagccuaaggguaauucca

SEQ ID NO: 808714 - RNA, 19 nt, Artificial Sequence
  Description of Artificial Sequence: Synthetic oligonucleotide
  Sense strand starting at position 3033 of SEQ ID NO: 587658
uguuguccaguggaauuau

SEQ ID NO: 808715 - RNA, 19 nt, Artificial Sequence
  Description of Artificial Sequence: Synthetic oligonucleotide
  Antisense strand to SEQ ID NO: 808714
auaauuccacuggacaaca

SEQ ID NO: 808716 - RNA, 19 nt, Artificial Sequence
  Description of Artificial Sequence: Synthetic oligonucleotide
  Sense strand starting at position 3143 of SEQ ID NO: 587658
cugguacguccuuaaauca

SEQ ID NO: 808717 - RNA, 19 nt, Artificial Sequence
  Description of Artificial Sequence: Synthetic oligonucleotide
  Antisense strand to SEQ ID NO: 808716
ugauuuaaggacguaccag

SEQ ID NO: 808718 - RNA, 19 nt, Artificial Sequence
  Description of Artificial Sequence: Synthetic oligonucleotide
  Sense strand starting at position 3363 of SEQ ID NO: 587658
ugcuguguuccacugcagu

SEQ ID NO: 808719 - RNA, 19 nt, Artificial Sequence
  Description of Artificial Sequence: Synthetic oligonucleotide
  Antisense strand to SEQ ID NO: 808718
acugcaguggaacacagca

SEQ ID NO: 808720 - RNA, 19 nt, Artificial Sequence
  Description of Artificial Sequence: Synthetic oligonucleotide
  Sense strand starting at position 3518 of SEQ ID NO: 587658
ugaguacuggaagguucua

SEQ ID NO: 808721 - RNA, 19 nt, Artificial Sequence
  Description of Artificial Sequence: Synthetic oligonucleotide
  Antisense strand to SEQ ID NO: 808720
uagaaccuuccaguacuca

SEQ ID NO: 808722 - RNA, 19 nt, Artificial Sequence
  Description of Artificial Sequence: Synthetic oligonucleotide
  Sense strand starting at position 3577 of SEQ ID NO: 587658
ugcuauuaugauggauugu

SEQ ID NO: 808723 - RNA, 19 nt, Artificial Sequence
  Description of Artificial Sequence: Synthetic oligonucleotide
  Antisense strand to SEQ ID NO: 808722
acaauccaucauaauagca

SEQ ID NO: 808724 - RNA, 19 nt, Artificial Sequence
  Description of Artificial Sequence: Synthetic oligonucleotide
  Sense strand starting at position 3617 of SEQ ID NO: 587658
gauagaucauuacuggugu

SEQ ID NO: 808725 - RNA, 19 nt, Artificial Sequence
  Description of Artificial Sequence: Synthetic oligonucleotide
  Antisense strand to SEQ ID NO: 808724
acaccaguaaugaucuauc

SEQ ID NO: 808726 - RNA, 19 nt, Artificial Sequence
  Description of Artificial Sequence: Synthetic oligonucleotide
  Sense strand starting at position 3855 of SEQ ID NO: 587658
agguuuauuacguagguca

SEQ ID NO: 808727 - RNA, 19 nt, Artificial Sequence
  Description of Artificial Sequence: Synthetic oligonucleotide
  Antisense strand to SEQ ID NO: 808726
ugaccuacguaauaaaccu

SEQ ID NO: 808728 - RNA, 19 nt, Artificial Sequence
  Description of Artificial Sequence: Synthetic oligonucleotide
  Sense strand starting at position 1991 of SEQ ID NO: 587659
ugcaauagaguguauagua

SEQ ID NO: 808729 - RNA, 19 nt, Artificial Sequence
  Description of Artificial Sequence: Synthetic oligonucleotide
  Antisense strand to SEQ ID NO: 808728
uacuauacacucuauugca

SEQ ID NO: 808730 - RNA, 19 nt, Artificial Sequence
  Description of Artificial Sequence: Synthetic oligonucleotide
  Sense strand starting at position 2041 of SEQ ID NO: 587659
uuagcugagccuuauacaa

SEQ ID NO: 808731 - RNA, 19 nt, Artificial Sequence
  Description of Artificial Sequence: Synthetic oligonucleotide
  Antisense strand to SEQ ID NO: 808730
uuguauaaggcucagcuaa

SEQ ID NO: 808732 - RNA, 19 nt, Artificial Sequence
  Description of Artificial Sequence: Synthetic oligonucleotide
  Sense strand starting at position 2154 of SEQ ID NO: 587659
guucuagugcuugcuuacu

SEQ ID NO: 808733 - RNA, 19 nt, Artificial Sequence
  Description of Artificial Sequence: Synthetic oligonucleotide
  Antisense strand to SEQ ID NO: 808732
aguaagcaagcacuagaac

SEQ ID NO: 808734 - RNA, 19 nt, Artificial Sequence
  Description of Artificial Sequence: Synthetic oligonucleotide
  Sense strand starting at position 2259 of SEQ ID NO: 587659
uaguaagugcccugggaaa

SEQ ID NO: 808735 - RNA, 19 nt, Artificial Sequence
  Description of Artificial Sequence: Synthetic oligonucleotide
  Antisense strand to SEQ ID NO: 808734
uuucccagggcacuuacua

SEQ ID NO: 808736 - RNA, 19 nt, Artificial Sequence
  Description of Artificial Sequence: Synthetic oligonucleotide
  Sense strand starting at position 2376 of SEQ ID NO: 587659
ucgcuaagauuugaaggau

SEQ ID NO: 808737 - RNA, 19 nt, Artificial Sequence
  Description of Artificial Sequence: Synthetic oligonucleotide
  Antisense strand to SEQ ID NO: 808736
auccuucaaaucuuagcga

SEQ ID NO: 808738 - RNA, 19 nt, Artificial Sequence
  Description of Artificial Sequence: Synthetic oligonucleotide
  Sense strand starting at position 2411 of SEQ ID NO: 587659
uaaggauaugcgugaggag

SEQ ID NO: 808739 - RNA, 19 nt, Artificial Sequence
  Description of Artificial Sequence: Synthetic oligonucleotide
  Antisense strand to SEQ ID NO: 808738
cuccucacgcauauccuua

SEQ ID NO: 808740 - RNA, 19 nt, Artificial Sequence
  Description of Artificial Sequence: Synthetic oligonucleotide
  Sense strand starting at position 2462 of SEQ ID NO: 587659
aggccuuaagcuggaaacu

SEQ ID NO: 808741 - RNA, 19 nt, Artificial Sequence
  Description of Artificial Sequence: Synthetic oligonucleotide
  Antisense strand to SEQ ID NO: 808740
aguuuccagcuuaaggccu

SEQ ID NO: 808742 - RNA, 19 nt, Artificial Sequence
  Description of Artificial Sequence: Synthetic oligonucleotide
  Sense strand starting at position 2503 of SEQ ID NO: 587659
ucaggaagcaaggguaauu

SEQ ID NO: 808743 - RNA, 19 nt, Artificial Sequence
  Description of Artificial Sequence: Synthetic oligonucleotide
  Antisense strand to SEQ ID NO: 808742
aauuacccuugcuuccuga

SEQ ID NO: 808744 - RNA, 19 nt, Artificial Sequence
  Description of Artificial Sequence: Synthetic oligonucleotide
  Sense strand starting at position 2516 of SEQ ID NO: 587659
guaauuggagcacaugagu

SEQ ID NO: 808745 - RNA, 19 nt, Artificial Sequence
  Description of Artificial Sequence: Synthetic oligonucleotide
  Antisense strand to SEQ ID NO: 808744
acucaugugcuccaauuac

SEQ ID NO: 808746 - RNA, 19 nt, Artificial Sequence
  Description of Artificial Sequence: Synthetic oligonucleotide
  Sense strand starting at position 2556 of SEQ ID NO: 587659
ugagaucugacaggcaacu

SEQ ID NO: 808747 - RNA, 19 nt, Artificial Sequence
  Description of Artificial Sequence: Synthetic oligonucleotide
  Antisense strand to SEQ ID NO: 808746
aguugccugucagaucuca

SEQ ID NO: 808748 - RNA, 19 nt, Artificial Sequence
  Description of Artificial Sequence: Synthetic oligonucleotide
  Sense strand starting at position 2644 of SEQ ID NO: 587659
gccugagagaaggguugua

SEQ ID NO: 808749 - RNA, 19 nt, Artificial Sequence
  Description of Artificial Sequence: Synthetic oligonucleotide
  Antisense strand to SEQ ID NO: 808748
uacaacccuucucucaggc

SEQ ID NO: 808750 - RNA, 19 nt, Artificial Sequence
  Description of Artificial Sequence: Synthetic oligonucleotide
  Sense strand starting at position 2654 of SEQ ID NO: 587659
aggguuguaauugagcaau

SEQ ID NO: 808751 - RNA, 19 nt, Artificial Sequence
  Description of Artificial Sequence: Synthetic oligonucleotide
  Antisense strand to SEQ ID NO: 808750
auugcucaauuacaacccu

SEQ ID NO: 808752 - RNA, 19 nt, Artificial Sequence
  Description of Artificial Sequence: Synthetic oligonucleotide
  Sense strand starting at position 2657 of SEQ ID NO: 587659
guuguaauugagcaauguu

SEQ ID NO: 808753 - RNA, 19 nt, Artificial Sequence
  Description of Artificial Sequence: Synthetic oligonucleotide
  Antisense strand to SEQ ID NO: 808752
aacauugcucaauuacaac

SEQ ID NO: 808754 - RNA, 19 nt, Artificial Sequence
  Description of Artificial Sequence: Synthetic oligonucleotide
  Sense strand starting at position 2697 of SEQ ID NO: 587659
ucuggauacuguguagaga

SEQ ID NO: 808755 - RNA, 19 nt, Artificial Sequence
  Description of Artificial Sequence: Synthetic oligonucleotide
  Antisense strand to SEQ ID NO: 808754
ucucuacacaguauccaga

SEQ ID NO: 808756 - RNA, 19 nt, Artificial Sequence
  Description of Artificial Sequence: Synthetic oligonucleotide
  Sense strand starting at position 2726 of SEQ ID NO: 587659
cauauugcgccuuauggau

SEQ ID NO: 808757 - RNA, 19 nt, Artificial Sequence
  Description of Artificial Sequence: Synthetic oligonucleotide
  Antisense strand to SEQ ID NO: 808756
auccauaaggcgcaauaug

SEQ ID NO: 808758 - RNA, 19 nt, Artificial Sequence
  Description of Artificial Sequence: Synthetic oligonucleotide
  Sense strand starting at position 2740 of SEQ ID NO: 587659
uggauagucacauggacua

SEQ ID NO: 808759 - RNA, 19 nt, Artificial Sequence
  Description of Artificial Sequence: Synthetic oligonucleotide
  Antisense strand to SEQ ID NO: 808758
uaguccaugugacuaucca

SEQ ID NO: 808760 - RNA, 19 nt, Artificial Sequence
  Description of Artificial Sequence: Synthetic oligonucleotide
  Sense strand starting at position 2793 of SEQ ID NO: 587659
cagugcuuggcucauggau

SEQ ID NO: 808761 - RNA, 19 nt, Artificial Sequence
  Description of Artificial Sequence: Synthetic oligonucleotide
  Antisense strand to SEQ ID NO: 808760
auccaugagccaagcacug

SEQ ID NO: 808762 - RNA, 19 nt, Artificial Sequence
  Description of Artificial Sequence: Synthetic oligonucleotide
  Sense strand starting at position 2866 of SEQ ID NO: 587659
aagcguguacauucugcua

SEQ ID NO: 808763 - RNA, 19 nt, Artificial Sequence
  Description of Artificial Sequence: Synthetic oligonucleotide
  Antisense strand to SEQ ID NO: 808762
uagcagaauguacacgcuu

SEQ ID NO: 808764 - RNA, 19 nt, Artificial Sequence
  Description of Artificial Sequence: Synthetic oligonucleotide
  Sense strand starting at position 2914 of SEQ ID NO: 587659
aaagcuauuggugaguaga

SEQ ID NO: 808765 - RNA, 19 nt, Artificial Sequence
  Description of Artificial Sequence: Synthetic oligonucleotide
  Antisense strand to SEQ ID NO: 808764
ucuacucaccaauagcuuu

SEQ ID NO: 808766 - RNA, 19 nt, Artificial Sequence
  Description of Artificial Sequence: Synthetic oligonucleotide
  Sense strand starting at position 2916 of SEQ ID NO: 587659
agcuauuggugaguagaag

SEQ ID NO: 808767 - RNA, 19 nt, Artificial Sequence
  Description of Artificial Sequence: Synthetic oligonucleotide
  Antisense strand to SEQ ID NO: 808766
cuucuacucaccaauagcu

SEQ ID NO: 808768 - RNA, 19 nt, Artificial Sequence
  Description of Artificial Sequence: Synthetic oligonucleotide
  Sense strand starting at position 3179 of SEQ ID NO: 587659
uugagacuaugauuguaac

SEQ ID NO: 808769 - RNA, 19 nt, Artificial Sequence
  Description of Artificial Sequence: Synthetic oligonucleotide
  Antisense strand to SEQ ID NO: 808768
guuacaaucauagucucaa

SEQ ID NO: 808770 - RNA, 19 nt, Artificial Sequence
  Description of Artificial Sequence: Synthetic oligonucleotide
  Sense strand starting at position 3180 of SEQ ID NO: 587659
ugagacuaugauuguaaca

SEQ ID NO: 808771 - RNA, 19 nt, Artificial Sequence
  Description of Artificial Sequence: Synthetic oligonucleotide
  Antisense strand to SEQ ID NO: 808770
uguuacaaucauagucuca

SEQ ID NO: 808772 - RNA, 19 nt, Artificial Sequence
  Description of Artificial Sequence: Synthetic oligonucleotide
  Sense strand starting at position 3233 of SEQ ID NO: 587659
ugugguauggccugaggau

SEQ ID NO: 808773 - RNA, 19 nt, Artificial Sequence
  Description of Artificial Sequence: Synthetic oligonucleotide
  Antisense strand to SEQ ID NO: 808772
auccucaggccauaccaca

SEQ ID NO: 808774 - RNA, 19 nt, Artificial Sequence
  Description of Artificial Sequence: Synthetic oligonucleotide
  Sense strand starting at position 3234 of SEQ ID NO: 587659
gugguauggccugaggaug

SEQ ID NO: 808775 - RNA, 19 nt, Artificial Sequence
  Description of Artificial Sequence: Synthetic oligonucleotide
  Antisense strand to SEQ ID NO: 808774
cauccucaggccauaccac

SEQ ID NO: 808776 - RNA, 19 nt, Artificial Sequence
  Description of Artificial Sequence: Synthetic oligonucleotide
  Sense strand starting at position 3245 of SEQ ID NO: 587659
ugaggaugaccuuguacaa

SEQ ID NO: 808777 - RNA, 19 nt, Artificial Sequence
  Description of Artificial Sequence: Synthetic oligonucleotide
  Antisense strand to SEQ ID NO: 808776
uuguacaaggucauccuca

SEQ ID NO: 808778 - RNA, 19 nt, Artificial Sequence
  Description of Artificial Sequence: Synthetic oligonucleotide
  Sense strand starting at position 3401 of SEQ ID NO: 587659
guucuuggugucuacaaca

SEQ ID NO: 808779 - RNA, 19 nt, Artificial Sequence
  Description of Artificial Sequence: Synthetic oligonucleotide
  Antisense strand to SEQ ID NO: 808778
uguuguagacaccaagaac

SEQ ID NO: 808780 - RNA, 19 nt, Artificial Sequence
  Description of Artificial Sequence: Synthetic oligonucleotide
  Sense strand starting at position 3406 of SEQ ID NO: 587659
uggugucuacaacaucauu

SEQ ID NO: 808781 - RNA, 19 nt, Artificial Sequence
  Description of Artificial Sequence: Synthetic oligonucleotide
  Antisense strand to SEQ ID NO: 808780
aaugauguuguagacacca

SEQ ID NO: 808782 - RNA, 19 nt, Artificial Sequence
  Description of Artificial Sequence: Synthetic oligonucleotide
  Sense strand starting at position 3481 of SEQ ID NO: 587659
cguaacauuuggucaagcu

SEQ ID NO: 808783 - RNA, 19 nt, Artificial Sequence
  Description of Artificial Sequence: Synthetic oligonucleotide
  Antisense strand to SEQ ID NO: 808782
agcuugaccaaauguuacg

SEQ ID NO: 808784 - RNA, 19 nt, Artificial Sequence
  Description of Artificial Sequence: Synthetic oligonucleotide
  Sense strand starting at position 3489 of SEQ ID NO: 587659
uuggucaagcucuaaaguu

SEQ ID NO: 808785 - RNA, 19 nt, Artificial Sequence
  Description of Artificial Sequence: Synthetic oligonucleotide
  Antisense strand to SEQ ID NO: 808784
aacuuuagagcuugaccaa

SEQ ID NO: 808786 - RNA, 19 nt, Artificial Sequence
  Description of Artificial Sequence: Synthetic oligonucleotide
  Sense strand starting at position 3532 of SEQ ID NO: 587659
uguauuuagucagacaaug

SEQ ID NO: 808787 - RNA, 19 nt, Artificial Sequence
  Description of Artificial Sequence: Synthetic oligonucleotide
  Antisense strand to SEQ ID NO: 808786
cauugucugacuaaauaca

SEQ ID NO: 808788 - RNA, 19 nt, Artificial Sequence
  Description of Artificial Sequence: Synthetic oligonucleotide
  Sense strand starting at position 3582 of SEQ ID NO: 587659
uguacugaguauguaaaga

SEQ ID NO: 808789 - RNA, 19 nt, Artificial Sequence
  Description of Artificial Sequence: Synthetic oligonucleotide
  Antisense strand to SEQ ID NO: 808788
ucuuuacauacucaguaca

SEQ ID NO: 808790 - RNA, 19 nt, Artificial Sequence
  Description of Artificial Sequence: Synthetic oligonucleotide
  Sense strand starting at position 3634 of SEQ ID NO: 587659
guuuauacauaccuggaua

SEQ ID NO: 808791 - RNA, 19 nt, Artificial Sequence
  Description of Artificial Sequence: Synthetic oligonucleotide
  Antisense strand to SEQ ID NO: 808790
uauccagguauguauaaac

SEQ ID NO: 808792 - RNA, 19 nt, Artificial Sequence
  Description of Artificial Sequence: Synthetic oligonucleotide
  Sense strand starting at position 3654 of SEQ ID NO: 587659
uugauucuugcuuagaaua

SEQ ID NO: 808793 - RNA, 19 nt, Artificial Sequence
  Description of Artificial Sequence: Synthetic oligonucleotide
  Antisense strand to SEQ ID NO: 808792
uauucuaagcaagaaucaa

SEQ ID NO: 808794 - RNA, 19 nt, Artificial Sequence
  Description of Artificial Sequence: Synthetic oligonucleotide
  Sense strand starting at position 3714 of SEQ ID NO: 587659
ugguuuaacuuguuuacaa

SEQ ID NO: 808795 - RNA, 19 nt, Artificial Sequence
  Description of Artificial Sequence: Synthetic oligonucleotide
  Antisense strand to SEQ ID NO: 808794
uuguaaacaaguuaaacca

SEQ ID NO: 808796 - RNA, 19 nt, Artificial Sequence
  Description of Artificial Sequence: Synthetic oligonucleotide
  Sense strand starting at position 3715 of SEQ ID NO: 587659
gguuuaacuuguuuacaag

SEQ ID NO: 808797 - RNA, 19 nt, Artificial Sequence
  Description of Artificial Sequence: Synthetic oligonucleotide
  Antisense strand to SEQ ID NO: 808796
cuuguaaacaaguuaaacc

SEQ ID NO: 808798 - RNA, 19 nt, Artificial Sequence
  Description of Artificial Sequence: Synthetic oligonucleotide
  Sense strand starting at position 3850 of SEQ ID NO: 587659
gcaaguccauuugaaagaa

SEQ ID NO: 808799 - RNA, 19 nt, Artificial Sequence
  Description of Artificial Sequence: Synthetic oligonucleotide
  Antisense strand to SEQ ID NO: 808798
uucuuucaaauggacuugc

SEQ ID NO: 808800 - RNA, 19 nt, Artificial Sequence
  Description of Artificial Sequence: Synthetic oligonucleotide
  Sense strand starting at position 3924 of SEQ ID NO: 587659
aacauucuguggcugaaca

SEQ ID NO: 808801 - RNA, 19 nt, Artificial Sequence
  Description of Artificial Sequence: Synthetic oligonucleotide
  Antisense strand to SEQ ID NO: 808800
uguucagccacagaauguu

SEQ ID NO: 808802 - RNA, 19 nt, Artificial Sequence
  Description of Artificial Sequence: Synthetic oligonucleotide
  Sense strand starting at position 3925 of SEQ ID NO: 587659
acauucuguggcugaacau

SEQ ID NO: 808803 - RNA, 19 nt, Artificial Sequence
  Description of Artificial Sequence: Synthetic oligonucleotide
  Antisense strand to SEQ ID NO: 808802
auguucagccacagaaugu

SEQ ID NO: 808804 - RNA, 19 nt, Artificial Sequence
  Description of Artificial Sequence: Synthetic oligonucleotide
  Sense strand starting at position 3926 of SEQ ID NO: 587659
cauucuguggcugaacaua

SEQ ID NO: 808805 - RNA, 19 nt, Artificial Sequence
  Description of Artificial Sequence: Synthetic oligonucleotide
  Antisense strand to SEQ ID NO: 808804
uauguucagccacagaaug

SEQ ID NO: 808806 - RNA, 19 nt, Artificial Sequence
  Description of Artificial Sequence: Synthetic oligonucleotide
  Sense strand starting at position 3954 of SEQ ID NO: 587659
gcauuauuaacguugugcu

SEQ ID NO: 808807 - RNA, 19 nt, Artificial Sequence
  Description of Artificial Sequence: Synthetic oligonucleotide
  Antisense strand to SEQ ID NO: 808806
agcacaacguuaauaaugc

SEQ ID NO: 808808 - RNA, 19 nt, Artificial Sequence
  Description of Artificial Sequence: Synthetic oligonucleotide
  Sense strand starting at position 46 of SEQ ID NO: 587660
uagugaucagaaggucacu

SEQ ID NO: 808809 - RNA, 19 nt, Artificial Sequence
  Description of Artificial Sequence: Synthetic oligonucleotide
  Antisense strand to SEQ ID NO: 808808
agugaccuucugaucacua

SEQ ID NO: 808810 - RNA, 19 nt, Artificial Sequence
  Description of Artificial Sequence: Synthetic oligonucleotide
  Sense strand starting at position 92 of SEQ ID NO: 587660
gaagcagugugaucagaag

SEQ ID NO: 808811 - RNA, 19 nt, Artificial Sequence
  Description of Artificial Sequence: Synthetic oligonucleotide
  Antisense strand to SEQ ID NO: 808810
cuucugaucacacugcuuc

SEQ ID NO: 808812 - RNA, 19 nt, Artificial Sequence
  Description of Artificial Sequence: Synthetic oligonucleotide
  Sense strand starting at position 153 of SEQ ID NO: 587660
gguagaagcaguuaaaugu

SEQ ID NO: 808813 - RNA, 19 nt, Artificial Sequence
  Description of Artificial Sequence: Synthetic oligonucleotide
  Antisense strand to SEQ ID NO: 808812
acauuuaacugcuucuacc

SEQ ID NO: 808814 - RNA, 19 nt, Artificial Sequence
  Description of Artificial Sequence: Synthetic oligonucleotide
  Sense strand starting at position 163 of SEQ ID NO: 587660
guuaaaugucaacagucuu

SEQ ID NO: 808815 - RNA, 19 nt, Artificial Sequence
  Description of Artificial Sequence: Synthetic oligonucleotide
  Antisense strand to SEQ ID NO: 808814
aagacuguugacauuuaac

SEQ ID NO: 808816 - RNA, 19 nt, Artificial Sequence
  Description of Artificial Sequence: Synthetic oligonucleotide
  Sense strand starting at position 281 of SEQ ID NO: 587660
uuaacucccgauuagcuaa

SEQ ID NO: 808817 - RNA, 19 nt, Artificial Sequence
  Description of Artificial Sequence: Synthetic oligonucleotide
  Antisense strand to SEQ ID NO: 808816
uuagcuaaucgggaguuaa

SEQ ID NO: 808818 - RNA, 19 nt, Artificial Sequence
  Description of Artificial Sequence: Synthetic oligonucleotide
  Sense strand starting at position 289 of SEQ ID NO: 587660
cgauuagcuaauggagaau

SEQ ID NO: 808819 - RNA, 19 nt, Artificial Sequence
  Description of Artificial Sequence: Synthetic oligonucleotide
  Antisense strand to SEQ ID NO: 808818
auucuccauuagcuaaucg

SEQ ID NO: 808820 - RNA, 19 nt, Artificial Sequence
  Description of Artificial Sequence: Synthetic oligonucleotide
  Sense strand starting at position 385 of SEQ ID NO: 587660
guaguagagcaggaggauu

SEQ ID NO: 808821 - RNA, 19 nt, Artificial Sequence
  Description of Artificial Sequence: Synthetic oligonucleotide
  Antisense strand to SEQ ID NO: 808820
aauccuccugcucuacuac

SEQ ID NO: 808822 - RNA, 19 nt, Artificial Sequence
  Description of Artificial Sequence: Synthetic oligonucleotide
  Sense strand starting at position 474 of SEQ ID NO: 587660
gcugaaagacagugaguua

SEQ ID NO: 808823 - RNA, 19 nt, Artificial Sequence
  Description of Artificial Sequence: Synthetic oligonucleotide
  Antisense strand to SEQ ID NO: 808822
uaacucacugucuuucagc

SEQ ID NO: 808824 - RNA, 19 nt, Artificial Sequence
  Description of Artificial Sequence: Synthetic oligonucleotide
  Sense strand starting at position 485 of SEQ ID NO: 587660
gugaguuagaauggaauuc

SEQ ID NO: 808825 - RNA, 19 nt, Artificial Sequence
  Description of Artificial Sequence: Synthetic oligonucleotide
  Antisense strand to SEQ ID NO: 808824
gaauuccauucuaacucac

SEQ ID NO: 808826 - RNA, 19 nt, Artificial Sequence
  Description of Artificial Sequence: Synthetic oligonucleotide
  Sense strand starting at position 505 of SEQ ID NO: 587660
agaggcuuuccauagcaug

SEQ ID NO: 808827 - RNA, 19 nt, Artificial Sequence
  Description of Artificial Sequence: Synthetic oligonucleotide
  Antisense strand to SEQ ID NO: 808826
caugcuauggaaagccucu

SEQ ID NO: 808828 - RNA, 19 nt, Artificial Sequence
  Description of Artificial Sequence: Synthetic oligonucleotide
  Sense strand starting at position 561 of SEQ ID NO: 587660
agagaagaucgcuaccagu

SEQ ID NO: 808829 - RNA, 19 nt, Artificial Sequence
  Description of Artificial Sequence: Synthetic oligonucleotide
  Antisense strand to SEQ ID NO: 808828
acugguagcgaucuucucu

SEQ ID NO: 808830 - RNA, 19 nt, Artificial Sequence
  Description of Artificial Sequence: Synthetic oligonucleotide
  Sense strand starting at position 638 of SEQ ID NO: 587660
aauugcaggcuauaaguua

SEQ ID NO: 808831 - RNA, 19 nt, Artificial Sequence
  Description of Artificial Sequence: Synthetic oligonucleotide
  Antisense strand to SEQ ID NO: 808830
uaacuuauagccugcaauu

SEQ ID NO: 808832 - RNA, 19 nt, Artificial Sequence
  Description of Artificial Sequence: Synthetic oligonucleotide
  Sense strand starting at position 701 of SEQ ID NO: 587660
agcucagaauguuccacaa

SEQ ID NO: 808833 - RNA, 19 nt, Artificial Sequence
  Description of Artificial Sequence: Synthetic oligonucleotide
  Antisense strand to SEQ ID NO: 808832
uuguggaacauucugagcu

SEQ ID NO: 808834 - RNA, 19 nt, Artificial Sequence
  Description of Artificial Sequence: Synthetic oligonucleotide
  Sense strand starting at position 761 of SEQ ID NO: 587660
ugcagaauuguguaacaga

SEQ ID NO: 808835 - RNA, 19 nt, Artificial Sequence
  Description of Artificial Sequence: Synthetic oligonucleotide
  Antisense strand to SEQ ID NO: 808834
ucuguuacacaauucugca

SEQ ID NO: 808836 - RNA, 19 nt, Artificial Sequence
  Description of Artificial Sequence: Synthetic oligonucleotide
  Sense strand starting at position 845 of SEQ ID NO: 587660
gcagaaauaccuuagcuau

SEQ ID NO: 808837 - RNA, 19 nt, Artificial Sequence
  Description of Artificial Sequence: Synthetic oligonucleotide
  Antisense strand to SEQ ID NO: 808836
auagcuaagguauuucugc

SEQ ID NO: 808838 - RNA, 19 nt, Artificial Sequence
  Description of Artificial Sequence: Synthetic oligonucleotide
  Sense strand starting at position 986 of SEQ ID NO: 587660
gguuaauucggucaaacug

SEQ ID NO: 808839 - RNA, 19 nt, Artificial Sequence
  Description of Artificial Sequence: Synthetic oligonucleotide
  Antisense strand to SEQ ID NO: 808838
caguuugaccgaauuaacc

SEQ ID NO: 808840 - RNA, 19 nt, Artificial Sequence
  Description of Artificial Sequence: Synthetic oligonucleotide
  Sense strand starting at position 1077 of SEQ ID NO: 587660
ggaggcaauuuggauuaau

SEQ ID NO: 808841 - RNA, 19 nt, Artificial Sequence
  Description of Artificial Sequence: Synthetic oligonucleotide
  Antisense strand to SEQ ID NO: 808840
auuaauccaaauugccucc

SEQ ID NO: 808842 - RNA, 19 nt, Artificial Sequence
  Description of Artificial Sequence: Synthetic oligonucleotide
  Sense strand starting at position 1177 of SEQ ID NO: 587660
cugaauaugccucacaagu

SEQ ID NO: 808843 - RNA, 19 nt, Artificial Sequence
  Description of Artificial Sequence: Synthetic oligonucleotide
  Antisense strand to SEQ ID NO: 808842
acuugugaggcauauucag

SEQ ID NO: 808844 - RNA, 19 nt, Artificial Sequence
  Description of Artificial Sequence: Synthetic oligonucleotide
  Sense strand starting at position 1347 of SEQ ID NO: 587660
cugucaugauucucaaaug

SEQ ID NO: 808845 - RNA, 19 nt, Artificial Sequence
  Description of Artificial Sequence: Synthetic oligonucleotide
  Antisense strand to SEQ ID NO: 808844
cauuugagaaucaugacag

SEQ ID NO: 808846 - RNA, 19 nt, Artificial Sequence
  Description of Artificial Sequence: Synthetic oligonucleotide
  Sense strand starting at position 1426 of SEQ ID NO: 587660
ggccuuuaacuggauccaa

SEQ ID NO: 808847 - RNA, 19 nt, Artificial Sequence
  Description of Artificial Sequence: Synthetic oligonucleotide
  Antisense strand to SEQ ID NO: 808846
uuggauccaguuaaaggcc

SEQ ID NO: 808848 - RNA, 19 nt, Artificial Sequence
  Description of Artificial Sequence: Synthetic oligonucleotide
  Sense strand starting at position 1585 of SEQ ID NO: 587660
gaacaaaggucgcugagau

SEQ ID NO: 808849 - RNA, 19 nt, Artificial Sequence
  Description of Artificial Sequence: Synthetic oligonucleotide
  Antisense strand to SEQ ID NO: 808848
aucucagcgaccuuuguuc

SEQ ID NO: 808850 - RNA, 19 nt, Artificial Sequence
  Description of Artificial Sequence: Synthetic oligonucleotide
  Sense strand starting at position 1586 of SEQ ID NO: 587660
aacaaaggucgcugagaua

SEQ ID NO: 808851 - RNA, 19 nt, Artificial Sequence
  Description of Artificial Sequence: Synthetic oligonucleotide
  Antisense strand to SEQ ID NO: 808850
uaucucagcgaccuuuguu

SEQ ID NO: 808852 - RNA, 19 nt, Artificial Sequence
  Description of Artificial Sequence: Synthetic oligonucleotide
  Sense strand starting at position 1684 of SEQ ID NO: 587660
aagagaucccugggcucaa

SEQ ID NO: 808853 - RNA, 19 nt, Artificial Sequence
  Description of Artificial Sequence: Synthetic oligonucleotide
  Antisense strand to SEQ ID NO: 808852
uugagcccagggaucucuu

SEQ ID NO: 808854 - RNA, 19 nt, Artificial Sequence
  Description of Artificial Sequence: Synthetic oligonucleotide
  Sense strand starting at position 1685 of SEQ ID NO: 587660
agagaucccugggcucaau

SEQ ID NO: 808855 - RNA, 19 nt, Artificial Sequence
  Description of Artificial Sequence: Synthetic oligonucleotide
  Antisense strand to SEQ ID NO: 808854
auugagcccagggaucucu

SEQ ID NO: 808856 - RNA, 19 nt, Artificial Sequence
  Description of Artificial Sequence: Synthetic oligonucleotide
  Sense strand starting at position 1775 of SEQ ID NO: 587660
cugggucaaucuguuaaag

SEQ ID NO: 808857 - RNA, 19 nt, Artificial Sequence
  Description of Artificial Sequence: Synthetic oligonucleotide
  Antisense strand to SEQ ID NO: 808856
cuuuaacagauugacccag

SEQ ID NO: 808858 - RNA, 19 nt, Artificial Sequence
  Description of Artificial Sequence: Synthetic oligonucleotide
  Sense strand starting at position 1860 of SEQ ID NO: 587660
agcccucuacacugaagau

SEQ ID NO: 808859 - RNA, 19 nt, Artificial Sequence
  Description of Artificial Sequence: Synthetic oligonucleotide
  Antisense strand to SEQ ID NO: 808858
aucuucaguguagagggcu

SEQ ID NO: 808860 - RNA, 19 nt, Artificial Sequence
  Description of Artificial Sequence: Synthetic oligonucleotide
  Sense strand starting at position 2012 of SEQ ID NO: 587660
cugggaucacuugguuaca

SEQ ID NO: 808861 - RNA, 19 nt, Artificial Sequence
  Description of Artificial Sequence: Synthetic oligonucleotide
  Antisense strand to SEQ ID NO: 808860
uguaaccaagugaucccag

SEQ ID NO: 808862 - RNA, 19 nt, Artificial Sequence
  Description of Artificial Sequence: Synthetic oligonucleotide
  Sense strand starting at position 2013 of SEQ ID NO: 587660
ugggaucacuugguuacaa

SEQ ID NO: 808863 - RNA, 19 nt, Artificial Sequence
  Description of Artificial Sequence: Synthetic oligonucleotide
  Antisense strand to SEQ ID NO: 808862
uuguaaccaagugauccca

SEQ ID NO: 808864 - RNA, 19 nt, Artificial Sequence
  Description of Artificial Sequence: Synthetic oligonucleotide
  Sense strand starting at position 2014 of SEQ ID NO: 587660
gggaucacuugguuacaaa

SEQ ID NO: 808865 - RNA, 19 nt, Artificial Sequence
  Description of Artificial Sequence: Synthetic oligonucleotide
  Antisense strand to SEQ ID NO: 808864
uuuguaaccaagugauccc

SEQ ID NO: 808866 - RNA, 19 nt, Artificial Sequence
  Description of Artificial Sequence: Synthetic oligonucleotide
  Sense strand starting at position 2398 of SEQ ID NO: 587660
ccuucugucuaauugagac

SEQ ID NO: 808867 - RNA, 19 nt, Artificial Sequence
  Description of Artificial Sequence: Synthetic oligonucleotide
  Antisense strand to SEQ ID NO: 808866
gucucaauuagacagaagg

SEQ ID NO: 808868 - RNA, 19 nt, Artificial Sequence
  Description of Artificial Sequence: Synthetic oligonucleotide
  Sense strand starting at position 2530 of SEQ ID NO: 587660
gugagaauuugcuauuugu

SEQ ID NO: 808869 - RNA, 19 nt, Artificial Sequence
  Description of Artificial Sequence: Synthetic oligonucleotide
  Antisense strand to SEQ ID NO: 808868
acaaauagcaaauucucac

SEQ ID NO: 808870 - RNA, 19 nt, Artificial Sequence
  Description of Artificial Sequence: Synthetic oligonucleotide
  Sense strand starting at position 2697 of SEQ ID NO: 587660
augacauaacuuggugaau

SEQ ID NO: 808871 - RNA, 19 nt, Artificial Sequence
  Description of Artificial Sequence: Synthetic oligonucleotide
  Antisense strand to SEQ ID NO: 808870
auucaccaaguuaugucau

SEQ ID NO: 808872 - RNA, 19 nt, Artificial Sequence
  Description of Artificial Sequence: Synthetic oligonucleotide
  Sense strand starting at position 2698 of SEQ ID NO: 587660
ugacauaacuuggugaaug

SEQ ID NO: 808873 - RNA, 19 nt, Artificial Sequence
  Description of Artificial Sequence: Synthetic oligonucleotide
  Antisense strand to SEQ ID NO: 808872
cauucaccaaguuauguca

SEQ ID NO: 808874 - RNA, 19 nt, Artificial Sequence
  Description of Artificial Sequence: Synthetic oligonucleotide
  Sense strand starting at position 2746 of SEQ ID NO: 587660
guggacaucucuuugauaa

SEQ ID NO: 808875 - RNA, 19 nt, Artificial Sequence
  Description of Artificial Sequence: Synthetic oligonucleotide
  Antisense strand to SEQ ID NO: 808874
uuaucaaagagauguccac

SEQ ID NO: 808876 - RNA, 19 nt, Artificial Sequence
  Description of Artificial Sequence: Synthetic oligonucleotide
  Sense strand starting at position 2747 of SEQ ID NO: 587660
uggacaucucuuugauaaa

SEQ ID NO: 808877 - RNA, 19 nt, Artificial Sequence
  Description of Artificial Sequence: Synthetic oligonucleotide
  Antisense strand to SEQ ID NO: 808876
uuuaucaaagagaugucca

SEQ ID NO: 808878 - RNA, 19 nt, Artificial Sequence
  Description of Artificial Sequence: Synthetic oligonucleotide
  Sense strand starting at position 2771 of SEQ ID NO: 587660
uuuaaucuucuggguaaau

SEQ ID NO: 808879 - RNA, 19 nt, Artificial Sequence
  Description of Artificial Sequence: Synthetic oligonucleotide
  Antisense strand to SEQ ID NO: 808878
auuuacccagaagauuaaa

SEQ ID NO: 808880 - RNA, 19 nt, Artificial Sequence
  Description of Artificial Sequence: Synthetic oligonucleotide
  Sense strand starting at position 2772 of SEQ ID NO: 587660
uuaaucuucuggguaaaua

SEQ ID NO: 808881 - RNA, 19 nt, Artificial Sequence
  Description of Artificial Sequence: Synthetic oligonucleotide
  Antisense strand to SEQ ID NO: 808880
uauuuacccagaagauuaa

SEQ ID NO: 808882 - RNA, 19 nt, Artificial Sequence
  Description of Artificial Sequence: Synthetic oligonucleotide
  Sense strand starting at position 2960 of SEQ ID NO: 587660
uuauaauagugauucugac

SEQ ID NO: 808883 - RNA, 19 nt, Artificial Sequence
  Description of Artificial Sequence: Synthetic oligonucleotide
  Antisense strand to SEQ ID NO: 808882
gucagaaucacuauuauaa

SEQ ID NO: 808884 - RNA, 19 nt, Artificial Sequence
  Description of Artificial Sequence: Synthetic oligonucleotide
  Sense strand starting at position 3450 of SEQ ID NO: 587660
uuauauauggcaugagaua

SEQ ID NO: 808885 - RNA, 19 nt, Artificial Sequence
  Description of Artificial Sequence: Synthetic oligonucleotide
  Antisense strand to SEQ ID NO: 808884
uaucucaugccauauauaa

SEQ ID NO: 808886 - RNA, 19 nt, Artificial Sequence
  Description of Artificial Sequence: Synthetic oligonucleotide
  Sense strand starting at position 3522 of SEQ ID NO: 587660
gauugaagagauuguccuu

SEQ ID NO: 808887 - RNA, 19 nt, Artificial Sequence
  Description of Artificial Sequence: Synthetic oligonucleotide
  Antisense strand to SEQ ID NO: 808886
aaggacaaucucuucaauc

SEQ ID NO: 808888 - RNA, 19 nt, Artificial Sequence
  Description of Artificial Sequence: Synthetic oligonucleotide
  Sense strand starting at position 145 of SEQ ID NO: 587661
aaugguuuccacuggccaa

SEQ ID NO: 808889 - RNA, 19 nt, Artificial Sequence
  Description of Artificial Sequence: Synthetic oligonucleotide
  Antisense strand to SEQ ID NO: 808888
uuggccaguggaaaccauu

SEQ ID NO: 808890 - RNA, 19 nt, Artificial Sequence
  Description of Artificial Sequence: Synthetic oligonucleotide
  Sense strand starting at position 203 of SEQ ID NO: 587661
aaauuugcgucuguggaca

SEQ ID NO: 808891 - RNA, 19 nt, Artificial Sequence
  Description of Artificial Sequence: Synthetic oligonucleotide
  Antisense strand to SEQ ID NO: 808890
uguccacagacgcaaauuu

SEQ ID NO: 808892 - RNA, 19 nt, Artificial Sequence
  Description of Artificial Sequence: Synthetic oligonucleotide
  Sense strand starting at position 214 of SEQ ID NO: 587661
uguggacaauguccauuaa

SEQ ID NO: 808893 - RNA, 19 nt, Artificial Sequence
  Description of Artificial Sequence: Synthetic oligonucleotide
  Antisense strand to SEQ ID NO: 808892
uuaauggacauuguccaca

SEQ ID NO: 808894 - RNA, 19 nt, Artificial Sequence
  Description of Artificial Sequence: Synthetic oligonucleotide
  Sense strand starting at position 215 of SEQ ID NO: 587661
guggacaauguccauuaau

SEQ ID NO: 808895 - RNA, 19 nt, Artificial Sequence
  Description of Artificial Sequence: Synthetic oligonucleotide
  Antisense strand to SEQ ID NO: 808894
auuaauggacauuguccac

SEQ ID NO: 808896 - RNA, 19 nt, Artificial Sequence
  Description of Artificial Sequence: Synthetic oligonucleotide
  Sense strand starting at position 345 of SEQ ID NO: 587661
aagguucgucuacauaaca

SEQ ID NO: 808897 - RNA, 19 nt, Artificial Sequence
  Description of Artificial Sequence: Synthetic oligonucleotide
  Antisense strand to SEQ ID NO: 808896
uguuauguagacgaaccuu

SEQ ID NO: 808898 - RNA, 19 nt, Artificial Sequence
  Description of Artificial Sequence: Synthetic oligonucleotide
  Sense strand starting at position 473 of SEQ ID NO: 587661
guggccucggaauaauaca

SEQ ID NO: 808899 - RNA, 19 nt, Artificial Sequence
  Description of Artificial Sequence: Synthetic oligonucleotide
  Antisense strand to SEQ ID NO: 808898
uguauuauuccgaggccac

SEQ ID NO: 808900 - RNA, 19 nt, Artificial Sequence
  Description of Artificial Sequence: Synthetic oligonucleotide
  Sense strand starting at position 480 of SEQ ID NO: 587661
cggaauaauacaugaguuu

SEQ ID NO: 808901 - RNA, 19 nt, Artificial Sequence
  Description of Artificial Sequence: Synthetic oligonucleotide
  Antisense strand to SEQ ID NO: 808900
aaacucauguauuauuccg

SEQ ID NO: 808902 - RNA, 19 nt, Artificial Sequence
  Description of Artificial Sequence: Synthetic oligonucleotide
  Sense strand starting at position 487 of SEQ ID NO: 587661
auacaugaguuucuguaac

SEQ ID NO: 808903 - RNA, 19 nt, Artificial Sequence
  Description of Artificial Sequence: Synthetic oligonucleotide
  Antisense strand to SEQ ID NO: 808902
guuacagaaacucauguau

SEQ ID NO: 808904 - RNA, 19 nt, Artificial Sequence
  Description of Artificial Sequence: Synthetic oligonucleotide
  Sense strand starting at position 489 of SEQ ID NO: 587661
acaugaguuucuguaacuu

SEQ ID NO: 808905 - RNA, 19 nt, Artificial Sequence
  Description of Artificial Sequence: Synthetic oligonucleotide
  Antisense strand to SEQ ID NO: 808904
aaguuacagaaacucaugu

SEQ ID NO: 808906 - RNA, 19 nt, Artificial Sequence
  Description of Artificial Sequence: Synthetic oligonucleotide
  Sense strand starting at position 497 of SEQ ID NO: 587661
uucuguaacuuacugggaa

SEQ ID NO: 808907 - RNA, 19 nt, Artificial Sequence
  Description of Artificial Sequence: Synthetic oligonucleotide
  Antisense strand to SEQ ID NO: 808906
uucccaguaaguuacagaa

SEQ ID NO: 808908 - RNA, 19 nt, Artificial Sequence
  Description of Artificial Sequence: Synthetic oligonucleotide
  Sense strand starting at position 499 of SEQ ID NO: 587661
cuguaacuuacugggaagu

SEQ ID NO: 808909 - RNA, 19 nt, Artificial Sequence
  Description of Artificial Sequence: Synthetic oligonucleotide
  Antisense strand to SEQ ID NO: 808908
acuucccaguaaguuacag

SEQ ID NO: 808910 - RNA, 19 nt, Artificial Sequence
  Description of Artificial Sequence: Synthetic oligonucleotide
  Sense strand starting at position 500 of SEQ ID NO: 587661
uguaacuuacugggaaguu

SEQ ID NO: 808911 - RNA, 19 nt, Artificial Sequence
  Description of Artificial Sequence: Synthetic oligonucleotide
  Antisense strand to SEQ ID NO: 808910
aacuucccaguaaguuaca

SEQ ID NO: 808912 - RNA, 19 nt, Artificial Sequence
  Description of Artificial Sequence: Synthetic oligonucleotide
  Sense strand starting at position 969 of SEQ ID NO: 587661
gugaucaugugacucacua

SEQ ID NO: 808913 - RNA, 19 nt, Artificial Sequence
  Description of Artificial Sequence: Synthetic oligonucleotide
  Antisense strand to SEQ ID NO: 808912
uagugagucacaugaucac

SEQ ID NO: 808914 - RNA, 19 nt, Artificial Sequence
  Description of Artificial Sequence: Synthetic oligonucleotide
  Sense strand starting at position 1052 of SEQ ID NO: 587661
uggcuaauagaccauguau

SEQ ID NO: 808915 - RNA, 19 nt, Artificial Sequence
  Description of Artificial Sequence: Synthetic oligonucleotide
  Antisense strand to SEQ ID NO: 808914
auacauggucuauuagcca

SEQ ID NO: 808916 - RNA, 19 nt, Artificial Sequence
  Description of Artificial Sequence: Synthetic oligonucleotide
  Sense strand starting at position 1054 of SEQ ID NO: 587661
gcuaauagaccauguauau

SEQ ID NO: 808917 - RNA, 19 nt, Artificial Sequence
  Description of Artificial Sequence: Synthetic oligonucleotide
  Antisense strand to SEQ ID NO: 808916
auauacauggucuauuagc

SEQ ID NO: 808918 - RNA, 19 nt, Artificial Sequence
  Description of Artificial Sequence: Synthetic oligonucleotide
  Sense strand starting at position 1116 of SEQ ID NO: 587661
gucacaugacagugacuuu

SEQ ID NO: 808919 - RNA, 19 nt, Artificial Sequence
  Description of Artificial Sequence: Synthetic oligonucleotide
  Antisense strand to SEQ ID NO: 808918
aaagucacugucaugugac

SEQ ID NO: 808920 - RNA, 19 nt, Artificial Sequence
  Description of Artificial Sequence: Synthetic oligonucleotide
  Sense strand starting at position 1294 of SEQ ID NO: 587661
aagacuugcggucaguaca

SEQ ID NO: 808921 - RNA, 19 nt, Artificial Sequence
  Description of Artificial Sequence: Synthetic oligonucleotide
  Antisense strand to SEQ ID NO: 808920
uguacugaccgcaagucuu

SEQ ID NO: 808922 - RNA, 19 nt, Artificial Sequence
  Description of Artificial Sequence: Synthetic oligonucleotide
  Sense strand starting at position 1310 of SEQ ID NO: 587661
acaauuaaaugcuugaguu

SEQ ID NO: 808923 - RNA, 19 nt, Artificial Sequence
  Description of Artificial Sequence: Synthetic oligonucleotide
  Antisense strand to SEQ ID NO: 808922
aacucaagcauuuaauugu

SEQ ID NO: 808924 - RNA, 19 nt, Artificial Sequence
  Description of Artificial Sequence: Synthetic oligonucleotide
  Sense strand starting at position 1342 of SEQ ID NO: 587661
ggaaccaugguuuauguca

SEQ ID NO: 808925 - RNA, 19 nt, Artificial Sequence
  Description of Artificial Sequence: Synthetic oligonucleotide
  Antisense strand to SEQ ID NO: 808924
ugacauaaaccaugguucc

SEQ ID NO: 808926 - RNA, 19 nt, Artificial Sequence
  Description of Artificial Sequence: Synthetic oligonucleotide
  Sense strand starting at position 1351 of SEQ ID NO: 587661
guuuaugucauguagauga

SEQ ID NO: 808927 - RNA, 19 nt, Artificial Sequence
  Description of Artificial Sequence: Synthetic oligonucleotide
  Antisense strand to SEQ ID NO: 808926
ucaucuacaugacauaaac

SEQ ID NO: 808928 - RNA, 19 nt, Artificial Sequence
  Description of Artificial Sequence: Synthetic oligonucleotide
  Sense strand starting at position 1746 of SEQ ID NO: 587661
uuuccauuauggccuggaa

SEQ ID NO: 808929 - RNA, 19 nt, Artificial Sequence
  Description of Artificial Sequence: Synthetic oligonucleotide
  Antisense strand to SEQ ID NO: 808928
uuccaggccauaauggaaa

SEQ ID NO: 808930 - RNA, 19 nt, Artificial Sequence
  Description of Artificial Sequence: Synthetic oligonucleotide
  Sense strand starting at position 1748 of SEQ ID NO: 587661
uccauuauggccuggaauu

SEQ ID NO: 808931 - RNA, 19 nt, Artificial Sequence
  Description of Artificial Sequence: Synthetic oligonucleotide
  Antisense strand to SEQ ID NO: 808930
aauuccaggccauaaugga

SEQ ID NO: 808932 - RNA, 19 nt, Artificial Sequence
  Description of Artificial Sequence: Synthetic oligonucleotide
  Sense strand starting at position 1991 of SEQ ID NO: 587661
aagugaucucacuggaauu

SEQ ID NO: 808933 - RNA, 19 nt, Artificial Sequence
  Description of Artificial Sequence: Synthetic oligonucleotide
  Antisense strand to SEQ ID NO: 808932
aauuccagugagaucacuu

SEQ ID NO: 808934 - RNA, 19 nt, Artificial Sequence
  Description of Artificial Sequence: Synthetic oligonucleotide
  Sense strand starting at position 2025 of SEQ ID NO: 587661
accagagucuaguuaggau

SEQ ID NO: 808935 - RNA, 19 nt, Artificial Sequence
  Description of Artificial Sequence: Synthetic oligonucleotide
  Antisense strand to SEQ ID NO: 808934
auccuaacuagacucuggu

SEQ ID NO: 808936 - RNA, 19 nt, Artificial Sequence
  Description of Artificial Sequence: Synthetic oligonucleotide
  Sense strand starting at position 2127 of SEQ ID NO: 587661
ugguguggauaauuauauu

SEQ ID NO: 808937 - RNA, 19 nt, Artificial Sequence
  Description of Artificial Sequence: Synthetic oligonucleotide
  Antisense strand to SEQ ID NO: 808936
aauauaauuauccacacca

SEQ ID NO: 808938 - RNA, 19 nt, Artificial Sequence
  Description of Artificial Sequence: Synthetic oligonucleotide
  Sense strand starting at position 2149 of SEQ ID NO: 587661
ugaugauacccaugccaca

SEQ ID NO: 808939 - RNA, 19 nt, Artificial Sequence
  Description of Artificial Sequence: Synthetic oligonucleotide
  Antisense strand to SEQ ID NO: 808938
uguggcauggguaucauca

SEQ ID NO: 808940 - RNA, 19 nt, Artificial Sequence
  Description of Artificial Sequence: Synthetic oligonucleotide
  Sense strand starting at position 2229 of SEQ ID NO: 587661
gacuucccaugugugauau

SEQ ID NO: 808941 - RNA, 19 nt, Artificial Sequence
  Description of Artificial Sequence: Synthetic oligonucleotide
  Antisense strand to SEQ ID NO: 808940
auaucacacaugggaaguc

SEQ ID NO: 808942 - RNA, 19 nt, Artificial Sequence
  Description of Artificial Sequence: Synthetic oligonucleotide
  Sense strand starting at position 2230 of SEQ ID NO: 587661
acuucccaugugugauaua

SEQ ID NO: 808943 - RNA, 19 nt, Artificial Sequence
  Description of Artificial Sequence: Synthetic oligonucleotide
  Antisense strand to SEQ ID NO: 808942
uauaucacacaugggaagu

SEQ ID NO: 808944 - RNA, 19 nt, Artificial Sequence
  Description of Artificial Sequence: Synthetic oligonucleotide
  Sense strand starting at position 2240 of SEQ ID NO: 587661
ugugauauagaaggugaga

SEQ ID NO: 808945 - RNA, 19 nt, Artificial Sequence
  Description of Artificial Sequence: Synthetic oligonucleotide
  Antisense strand to SEQ ID NO: 808944
ucucaccuucuauaucaca

SEQ ID NO: 808946 - RNA, 19 nt, Artificial Sequence
  Description of Artificial Sequence: Synthetic oligonucleotide
  Sense strand starting at position 2445 of SEQ ID NO: 587661
acacaaugugucugaaaua

SEQ ID NO: 808947 - RNA, 19 nt, Artificial Sequence
  Description of Artificial Sequence: Synthetic oligonucleotide
  Antisense strand to SEQ ID NO: 808946
uauuucagacacauugugu

SEQ ID NO: 808948 - RNA, 19 nt, Artificial Sequence
  Description of Artificial Sequence: Synthetic oligonucleotide
  Sense strand starting at position 2730 of SEQ ID NO: 587661
acaugcagacauuguguaa

SEQ ID NO: 808949 - RNA, 19 nt, Artificial Sequence
  Description of Artificial Sequence: Synthetic oligonucleotide
  Antisense strand to SEQ ID NO: 808948
uuacacaaugucugcaugu

SEQ ID NO: 808950 - RNA, 19 nt, Artificial Sequence
  Description of Artificial Sequence: Synthetic oligonucleotide
  Sense strand starting at position 2733 of SEQ ID NO: 587661
ugcagacauuguguaaaga

SEQ ID NO: 808951 - RNA, 19 nt, Artificial Sequence
  Description of Artificial Sequence: Synthetic oligonucleotide
  Antisense strand to SEQ ID NO: 808950
ucuuuacacaaugucugca

SEQ ID NO: 808952 - RNA, 19 nt, Artificial Sequence
  Description of Artificial Sequence: Synthetic oligonucleotide
  Sense strand starting at position 2734 of SEQ ID NO: 587661
gcagacauuguguaaagau

SEQ ID NO: 808953 - RNA, 19 nt, Artificial Sequence
  Description of Artificial Sequence: Synthetic oligonucleotide
  Antisense strand to SEQ ID NO: 808952
aucuuuacacaaugucugc

SEQ ID NO: 808954 - RNA, 19 nt, Artificial Sequence
  Description of Artificial Sequence: Synthetic oligonucleotide
  Sense strand starting at position 2797 of SEQ ID NO: 587661
ucucuuugucaugagaaca

SEQ ID NO: 808955 - RNA, 19 nt, Artificial Sequence
  Description of Artificial Sequence: Synthetic oligonucleotide
  Antisense strand to SEQ ID NO: 808954
uguucucaugacaaagaga

SEQ ID NO: 808956 - RNA, 19 nt, Artificial Sequence
  Description of Artificial Sequence: Synthetic oligonucleotide
  Sense strand starting at position 3316 of SEQ ID NO: 587661
acuggugauuccuuaaauc

SEQ ID NO: 808957 - RNA, 19 nt, Artificial Sequence
  Description of Artificial Sequence: Synthetic oligonucleotide
  Antisense strand to SEQ ID NO: 808956
gauuuaaggaaucaccagu

SEQ ID NO: 808958 - RNA, 19 nt, Artificial Sequence
  Description of Artificial Sequence: Synthetic oligonucleotide
  Sense strand starting at position 3604 of SEQ ID NO: 587661
agauuucuguccucuugua

SEQ ID NO: 808959 - RNA, 19 nt, Artificial Sequence
  Description of Artificial Sequence: Synthetic oligonucleotide
  Antisense strand to SEQ ID NO: 808958
uacaagaggacagaaaucu

SEQ ID NO: 808960 - RNA, 19 nt, Artificial Sequence
  Description of Artificial Sequence: Synthetic oligonucleotide
  Sense strand starting at position 3611 of SEQ ID NO: 587661
uguccucuuguauagaaga

SEQ ID NO: 808961 - RNA, 19 nt, Artificial Sequence
  Description of Artificial Sequence: Synthetic oligonucleotide
  Antisense strand to SEQ ID NO: 808960
ucuucuauacaagaggaca

SEQ ID NO: 808962 - RNA, 19 nt, Artificial Sequence
  Description of Artificial Sequence: Synthetic oligonucleotide
  Sense strand starting at position 3740 of SEQ ID NO: 587661
ucugauucccagugaauac

SEQ ID NO: 808963 - RNA, 19 nt, Artificial Sequence
  Description of Artificial Sequence: Synthetic oligonucleotide
  Antisense strand to SEQ ID NO: 808962
guauucacugggaaucaga

SEQ ID NO: 808964 - RNA, 19 nt, Artificial Sequence
  Description of Artificial Sequence: Synthetic oligonucleotide
  Sense strand starting at position 3750 of SEQ ID NO: 587661
agugaauacgggugaauag

SEQ ID NO: 808965 - RNA, 19 nt, Artificial Sequence
  Description of Artificial Sequence: Synthetic oligonucleotide
  Antisense strand to SEQ ID NO: 808964
cuauucacccguauucacu

SEQ ID NO: 808966 - RNA, 19 nt, Artificial Sequence
  Description of Artificial Sequence: Synthetic oligonucleotide
  Sense strand starting at position 3868 of SEQ ID NO: 587661
ggcgaagagagauggauua

SEQ ID NO: 808967 - RNA, 19 nt, Artificial Sequence
  Description of Artificial Sequence: Synthetic oligonucleotide
  Antisense strand to SEQ ID NO: 808966
uaauccaucucucuucgcc

SEQ ID NO: 808968 - RNA, 19 nt, Artificial Sequence
  Description of Artificial Sequence: Synthetic oligonucleotide
  Sense strand starting at position 86 of SEQ ID NO: 587662
caugauuucggcugaucga

SEQ ID NO: 808969 - RNA, 19 nt, Artificial Sequence
  Description of Artificial Sequence: Synthetic oligonucleotide
  Antisense strand to SEQ ID NO: 808968
ucgaucagccgaaaucaug

SEQ ID NO: 808970 - RNA, 19 nt, Artificial Sequence
  Description of Artificial Sequence: Synthetic oligonucleotide
  Sense strand starting at position 95 of SEQ ID NO: 587662
ggcugaucgacugaucauu

SEQ ID NO: 808971 - RNA, 19 nt, Artificial Sequence
  Description of Artificial Sequence: Synthetic oligonucleotide
  Antisense strand to SEQ ID NO: 808970
aaugaucagucgaucagcc

SEQ ID NO: 808972 - RNA, 19 nt, Artificial Sequence
  Description of Artificial Sequence: Synthetic oligonucleotide
  Sense strand starting at position 172 of SEQ ID NO: 587662
cuguaugguucuccugaga

SEQ ID NO: 808973 - RNA, 19 nt, Artificial Sequence
  Description of Artificial Sequence: Synthetic oligonucleotide
  Antisense strand to SEQ ID NO: 808972
ucucaggagaaccauacag

SEQ ID NO: 808974 - RNA, 19 nt, Artificial Sequence
  Description of Artificial Sequence: Synthetic oligonucleotide
  Sense strand starting at position 255 of SEQ ID NO: 587662
cauguaaguguauaugaua

SEQ ID NO: 808975 - RNA, 19 nt, Artificial Sequence
  Description of Artificial Sequence: Synthetic oligonucleotide
  Antisense strand to SEQ ID NO: 808974
uaucauauacacuuacaug

SEQ ID NO: 808976 - RNA, 19 nt, Artificial Sequence
  Description of Artificial Sequence: Synthetic oligonucleotide
  Sense strand starting at position 262 of SEQ ID NO: 587662
guguauaugauauagguau

SEQ ID NO: 808977 - RNA, 19 nt, Artificial Sequence
  Description of Artificial Sequence: Synthetic oligonucleotide
  Antisense strand to SEQ ID NO: 808976
auaccuauaucauauacac

SEQ ID NO: 808978 - RNA, 19 nt, Artificial Sequence
  Description of Artificial Sequence: Synthetic oligonucleotide
  Sense strand starting at position 317 of SEQ ID NO: 587662
guuagucaacuuuacauau

SEQ ID NO: 808979 - RNA, 19 nt, Artificial Sequence
  Description of Artificial Sequence: Synthetic oligonucleotide
  Antisense strand to SEQ ID NO: 808978
auauguaaaguugacuaac

SEQ ID NO: 808980 - RNA, 19 nt, Artificial Sequence
  Description of Artificial Sequence: Synthetic oligonucleotide
  Sense strand starting at position 351 of SEQ ID NO: 587662
ucaguaaagccucacugaa

SEQ ID NO: 808981 - RNA, 19 nt, Artificial Sequence
  Description of Artificial Sequence: Synthetic oligonucleotide
  Antisense strand to SEQ ID NO: 808980
uucagugaggcuuuacuga

SEQ ID NO: 808982 - RNA, 19 nt, Artificial Sequence
  Description of Artificial Sequence: Synthetic oligonucleotide
  Sense strand starting at position 371 of SEQ ID NO: 587662
gcuaucaaagguuaucuaa

SEQ ID NO: 808983 - RNA, 19 nt, Artificial Sequence
  Description of Artificial Sequence: Synthetic oligonucleotide
  Antisense strand to SEQ ID NO: 808982
uuagauaaccuuugauagc

SEQ ID NO: 808984 - RNA, 19 nt, Artificial Sequence
  Description of Artificial Sequence: Synthetic oligonucleotide
  Sense strand starting at position 378 of SEQ ID NO: 587662
aagguuaucuaacuauggu

SEQ ID NO: 808985 - RNA, 19 nt, Artificial Sequence
  Description of Artificial Sequence: Synthetic oligonucleotide
  Antisense strand to SEQ ID NO: 808984
accauaguuagauaaccuu

SEQ ID NO: 808986 - RNA, 19 nt, Artificial Sequence
  Description of Artificial Sequence: Synthetic oligonucleotide
  Sense strand starting at position 507 of SEQ ID NO: 587662
gcugaaaggagucaauguu

SEQ ID NO: 808987 - RNA, 19 nt, Artificial Sequence
  Description of Artificial Sequence: Synthetic oligonucleotide
  Antisense strand to SEQ ID NO: 808986
aacauugacuccuuucagc

SEQ ID NO: 808988 - RNA, 19 nt, Artificial Sequence
  Description of Artificial Sequence: Synthetic oligonucleotide
  Sense strand starting at position 516 of SEQ ID NO: 587662
agucaauguucccucaaau

SEQ ID NO: 808989 - RNA, 19 nt, Artificial Sequence
  Description of Artificial Sequence: Synthetic oligonucleotide
  Antisense strand to SEQ ID NO: 808988
auuugagggaacauugacu

SEQ ID NO: 808990 - RNA, 19 nt, Artificial Sequence
  Description of Artificial Sequence: Synthetic oligonucleotide
  Sense strand starting at position 569 of SEQ ID NO: 587662
ucacaauauuauguuugga

SEQ ID NO: 808991 - RNA, 19 nt, Artificial Sequence
  Description of Artificial Sequence: Synthetic oligonucleotide
  Antisense strand to SEQ ID NO: 808990
uccaaacauaauauuguga

SEQ ID NO: 808992 - RNA, 19 nt, Artificial Sequence
  Description of Artificial Sequence: Synthetic oligonucleotide
  Sense strand starting at position 571 of SEQ ID NO: 587662
acaauauuauguuuggaac

SEQ ID NO: 808993 - RNA, 19 nt, Artificial Sequence
  Description of Artificial Sequence: Synthetic oligonucleotide
  Antisense strand to SEQ ID NO: 808992
guuccaaacauaauauugu

SEQ ID NO: 808994 - RNA, 19 nt, Artificial Sequence
  Description of Artificial Sequence: Synthetic oligonucleotide
  Sense strand starting at position 801 of SEQ ID NO: 587662
aggagcuugcccuaccaga

SEQ ID NO: 808995 - RNA, 19 nt, Artificial Sequence
  Description of Artificial Sequence: Synthetic oligonucleotide
  Antisense strand to SEQ ID NO: 808994
ucugguagggcaagcuccu

SEQ ID NO: 808996 - RNA, 19 nt, Artificial Sequence
  Description of Artificial Sequence: Synthetic oligonucleotide
  Sense strand starting at position 850 of SEQ ID NO: 587662
gguacuggaccaugaguaa

SEQ ID NO: 808997 - RNA, 19 nt, Artificial Sequence
  Description of Artificial Sequence: Synthetic oligonucleotide
  Antisense strand to SEQ ID NO: 808996
uuacucaugguccaguacc

SEQ ID NO: 808998 - RNA, 19 nt, Artificial Sequence
  Description of Artificial Sequence: Synthetic oligonucleotide
  Sense strand starting at position 951 of SEQ ID NO: 587662
aucuccaaucagugggaaa

SEQ ID NO: 808999 - RNA, 19 nt, Artificial Sequence
  Description of Artificial Sequence: Synthetic oligonucleotide
  Antisense strand to SEQ ID NO: 808998
uuucccacugauuggagau

SEQ ID NO: 809000 - RNA, 19 nt, Artificial Sequence
  Description of Artificial Sequence: Synthetic oligonucleotide
  Sense strand starting at position 952 of SEQ ID NO: 587662
ucuccaaucagugggaaag

SEQ ID NO: 809001 - RNA, 19 nt, Artificial Sequence
  Description of Artificial Sequence: Synthetic oligonucleotide
  Antisense strand to SEQ ID NO: 809000
cuuucccacugauuggaga

SEQ ID NO: 809002 - RNA, 19 nt, Artificial Sequence
  Description of Artificial Sequence: Synthetic oligonucleotide
  Sense strand starting at position 962 of SEQ ID NO: 587662
gugggaaaggguuaucagu

SEQ ID NO: 809003 - RNA, 19 nt, Artificial Sequence
  Description of Artificial Sequence: Synthetic oligonucleotide
  Antisense strand to SEQ ID NO: 809002
acugauaacccuuucccac

SEQ ID NO: 809004 - RNA, 19 nt, Artificial Sequence
  Description of Artificial Sequence: Synthetic oligonucleotide
  Sense strand starting at position 964 of SEQ ID NO: 587662
gggaaaggguuaucaguuu

SEQ ID NO: 809005 - RNA, 19 nt, Artificial Sequence
  Description of Artificial Sequence: Synthetic oligonucleotide
  Antisense strand to SEQ ID NO: 809004
aaacugauaacccuuuccc

SEQ ID NO: 809006 - RNA, 19 nt, Artificial Sequence
  Description of Artificial Sequence: Synthetic oligonucleotide
  Sense strand starting at position 1000 of SEQ ID NO: 587662
aaucauaaguuguuggagu

SEQ ID NO: 809007 - RNA, 19 nt, Artificial Sequence
  Description of Artificial Sequence: Synthetic oligonucleotide
  Antisense strand to SEQ ID NO: 809006
acuccaacaacuuaugauu

SEQ ID NO: 809008 - RNA, 19 nt, Artificial Sequence
  Description of Artificial Sequence: Synthetic oligonucleotide
  Sense strand starting at position 1002 of SEQ ID NO: 587662
ucauaaguuguuggaguaa

SEQ ID NO: 809009 - RNA, 19 nt, Artificial Sequence
  Description of Artificial Sequence: Synthetic oligonucleotide
  Antisense strand to SEQ ID NO: 809008
uuacuccaacaacuuauga

SEQ ID NO: 809010 - RNA, 19 nt, Artificial Sequence
  Description of Artificial Sequence: Synthetic oligonucleotide
  Sense strand starting at position 1049 of SEQ ID NO: 587662
ugagucugggagcauaauu

SEQ ID NO: 809011 - RNA, 19 nt, Artificial Sequence
  Description of Artificial Sequence: Synthetic oligonucleotide
  Antisense strand to SEQ ID NO: 809010
aauuaugcucccagacuca

SEQ ID NO: 809012 - RNA, 19 nt, Artificial Sequence
  Description of Artificial Sequence: Synthetic oligonucleotide
  Sense strand starting at position 1075 of SEQ ID NO: 587662
ccgaguggcagggagauua

SEQ ID NO: 809013 - RNA, 19 nt, Artificial Sequence
  Description of Artificial Sequence: Synthetic oligonucleotide
  Antisense strand to SEQ ID NO: 809012
uaaucucccugccacucgg

SEQ ID NO: 809014 - RNA, 19 nt, Artificial Sequence
  Description of Artificial Sequence: Synthetic oligonucleotide
  Sense strand starting at position 1178 of SEQ ID NO: 587662
uaguuuggcgcucuccaua

SEQ ID NO: 809015 - RNA, 19 nt, Artificial Sequence
  Description of Artificial Sequence: Synthetic oligonucleotide
  Antisense strand to SEQ ID NO: 809014
uauggagagcgccaaacua

SEQ ID NO: 809016 - RNA, 19 nt, Artificial Sequence
  Description of Artificial Sequence: Synthetic oligonucleotide
  Sense strand starting at position 1249 of SEQ ID NO: 587662
cauguaaacuucccgagga

SEQ ID NO: 809017 - RNA, 19 nt, Artificial Sequence
  Description of Artificial Sequence: Synthetic oligonucleotide
  Antisense strand to SEQ ID NO: 809016
uccucgggaaguuuacaug

SEQ ID NO: 809018 - RNA, 19 nt, Artificial Sequence
  Description of Artificial Sequence: Synthetic oligonucleotide
  Sense strand starting at position 1251 of SEQ ID NO: 587662
uguaaacuucccgaggaca

SEQ ID NO: 809019 - RNA, 19 nt, Artificial Sequence
  Description of Artificial Sequence: Synthetic oligonucleotide
  Antisense strand to SEQ ID NO: 809018
uguccucgggaaguuuaca

SEQ ID NO: 809020 - RNA, 19 nt, Artificial Sequence
  Description of Artificial Sequence: Synthetic oligonucleotide
  Sense strand starting at position 1363 of SEQ ID NO: 587662
uucugaugacauuguggaa

SEQ ID NO: 809021 - RNA, 19 nt, Artificial Sequence
  Description of Artificial Sequence: Synthetic oligonucleotide
  Antisense strand to SEQ ID NO: 809020
uuccacaaugucaucagaa

SEQ ID NO: 809022 - RNA, 19 nt, Artificial Sequence
  Description of Artificial Sequence: Synthetic oligonucleotide
  Sense strand starting at position 2094 of SEQ ID NO: 587662
uauugaaaugugcugcguu

SEQ ID NO: 809023 - RNA, 19 nt, Artificial Sequence
  Description of Artificial Sequence: Synthetic oligonucleotide
  Antisense strand to SEQ ID NO: 809022
aacgcagcacauuucaaua

SEQ ID NO: 809024 - RNA, 19 nt, Artificial Sequence
  Description of Artificial Sequence: Synthetic oligonucleotide
  Sense strand starting at position 2115 of SEQ ID NO: 587662
aaggguauguuucuaaggu

SEQ ID NO: 809025 - RNA, 19 nt, Artificial Sequence
  Description of Artificial Sequence: Synthetic oligonucleotide
  Antisense strand to SEQ ID NO: 809024
accuuagaaacauacccuu

SEQ ID NO: 809026 - RNA, 19 nt, Artificial Sequence
  Description of Artificial Sequence: Synthetic oligonucleotide
  Sense strand starting at position 2149 of SEQ ID NO: 587662
guuacuaccuuuccugauu

SEQ ID NO: 809027 - RNA, 19 nt, Artificial Sequence
  Description of Artificial Sequence: Synthetic oligonucleotide
  Antisense strand to SEQ ID NO: 809026
aaucaggaaagguaguaac

SEQ ID NO: 809028 - RNA, 19 nt, Artificial Sequence
  Description of Artificial Sequence: Synthetic oligonucleotide
  Sense strand starting at position 2261 of SEQ ID NO: 587662
gugcguuugcaguuucuua

SEQ ID NO: 809029 - RNA, 19 nt, Artificial Sequence
  Description of Artificial Sequence: Synthetic oligonucleotide
  Antisense strand to SEQ ID NO: 809028
uaagaaacugcaaacgcac

SEQ ID NO: 809030 - RNA, 19 nt, Artificial Sequence
  Description of Artificial Sequence: Synthetic oligonucleotide
  Sense strand starting at position 2262 of SEQ ID NO: 587662
ugcguuugcaguuucuuaa

SEQ ID NO: 809031 - RNA, 19 nt, Artificial Sequence
  Description of Artificial Sequence: Synthetic oligonucleotide
  Antisense strand to SEQ ID NO: 809030
uuaagaaacugcaaacgca

SEQ ID NO: 809032 - RNA, 19 nt, Artificial Sequence
  Description of Artificial Sequence: Synthetic oligonucleotide
  Sense strand starting at position 2263 of SEQ ID NO: 587662
gcguuugcaguuucuuaaa

SEQ ID NO: 809033 - RNA, 19 nt, Artificial Sequence
  Description of Artificial Sequence: Synthetic oligonucleotide
  Antisense strand to SEQ ID NO: 809032
uuuaagaaacugcaaacgc

SEQ ID NO: 809034 - RNA, 19 nt, Artificial Sequence
  Description of Artificial Sequence: Synthetic oligonucleotide
  Sense strand starting at position 2285 of SEQ ID NO: 587662
cagguauuccuuuggaauc

SEQ ID NO: 809035 - RNA, 19 nt, Artificial Sequence
  Description of Artificial Sequence: Synthetic oligonucleotide
  Antisense strand to SEQ ID NO: 809034
gauuccaaaggaauaccug

SEQ ID NO: 809036 - RNA, 19 nt, Artificial Sequence
  Description of Artificial Sequence: Synthetic oligonucleotide
  Sense strand starting at position 2392 of SEQ ID NO: 587662
gucuuaacgucuuuauuuc

SEQ ID NO: 809037 - RNA, 19 nt, Artificial Sequence
  Description of Artificial Sequence: Synthetic oligonucleotide
  Antisense strand to SEQ ID NO: 809036
gaaauaaagacguuaagac

SEQ ID NO: 809038 - RNA, 19 nt, Artificial Sequence
  Description of Artificial Sequence: Synthetic oligonucleotide
  Sense strand starting at position 2834 of SEQ ID NO: 587662
ggugccaugcuccuguauu

SEQ ID NO: 809039 - RNA, 19 nt, Artificial Sequence
  Description of Artificial Sequence: Synthetic oligonucleotide
  Antisense strand to SEQ ID NO: 809038
aauacaggagcauggcacc

SEQ ID NO: 809040 - RNA, 19 nt, Artificial Sequence
  Description of Artificial Sequence: Synthetic oligonucleotide
  Sense strand starting at position 3606 of SEQ ID NO: 587662
uguauaccuuuauuccaga

SEQ ID NO: 809041 - RNA, 19 nt, Artificial Sequence
  Description of Artificial Sequence: Synthetic oligonucleotide
  Antisense strand to SEQ ID NO: 809040
ucuggaauaaagguauaca

SEQ ID NO: 809042 - RNA, 19 nt, Artificial Sequence
  Description of Artificial Sequence: Synthetic oligonucleotide
  Sense strand starting at position 3679 of SEQ ID NO: 587662
uugguaauacaucgaucaa

SEQ ID NO: 809043 - RNA, 19 nt, Artificial Sequence
  Description of Artificial Sequence: Synthetic oligonucleotide
  Antisense strand to SEQ ID NO: 809042
uugaucgauguauuaccaa

SEQ ID NO: 809044 - RNA, 19 nt, Artificial Sequence
  Description of Artificial Sequence: Synthetic oligonucleotide
  Sense strand starting at position 3690 of SEQ ID NO: 587662
ucgaucaaacuauguaaua

SEQ ID NO: 809045 - RNA, 19 nt, Artificial Sequence
  Description of Artificial Sequence: Synthetic oligonucleotide
  Antisense strand to SEQ ID NO: 809044
uauuacauaguuugaucga

SEQ ID NO: 809046 - RNA, 19 nt, Artificial Sequence
  Description of Artificial Sequence: Synthetic oligonucleotide
  Sense strand starting at position 3691 of SEQ ID NO: 587662
cgaucaaacuauguaauac

SEQ ID NO: 809047 - RNA, 19 nt, Artificial Sequence
  Description of Artificial Sequence: Synthetic oligonucleotide
  Antisense strand to SEQ ID NO: 809046
guauuacauaguuugaucg

SEQ ID NO: 809048 - RNA, 19 nt, Artificial Sequence
  Description of Artificial Sequence: Synthetic oligonucleotide
  Sense strand starting at position 38 of SEQ ID NO: 587663
cagaaugacuggcuuagau

SEQ ID NO: 809049 - RNA, 19 nt, Artificial Sequence
  Description of Artificial Sequence: Synthetic oligonucleotide
  Antisense strand to SEQ ID NO: 809048
aucuaagccagucauucug

SEQ ID NO: 809050 - RNA, 19 nt, Artificial Sequence
  Description of Artificial Sequence: Synthetic oligonucleotide
  Sense strand starting at position 66 of SEQ ID NO: 587663
uggaaugaguguccacagu

SEQ ID NO: 809051 - RNA, 19 nt, Artificial Sequence
  Description of Artificial Sequence: Synthetic oligonucleotide
  Antisense strand to SEQ ID NO: 809050
acuguggacacucauucca

SEQ ID NO: 809052 - RNA, 19 nt, Artificial Sequence
  Description of Artificial Sequence: Synthetic oligonucleotide
  Sense strand starting at position 156 of SEQ ID NO: 587663
gcaagaagugcugagaaua

SEQ ID NO: 809053 - RNA, 19 nt, Artificial Sequence
  Description of Artificial Sequence: Synthetic oligonucleotide
  Antisense strand to SEQ ID NO: 809052
uauucucagcacuucuugc

SEQ ID NO: 809054 - RNA, 19 nt, Artificial Sequence
  Description of Artificial Sequence: Synthetic oligonucleotide
  Sense strand starting at position 164 of SEQ ID NO: 587663
ugcugagaauaugaacuaa

SEQ ID NO: 809055 - RNA, 19 nt, Artificial Sequence
  Description of Artificial Sequence: Synthetic oligonucleotide
  Antisense strand to SEQ ID NO: 809054
uuaguucauauucucagca

SEQ ID NO: 809056 - RNA, 19 nt, Artificial Sequence
  Description of Artificial Sequence: Synthetic oligonucleotide
  Sense strand starting at position 283 of SEQ ID NO: 587663
uagugcuuucuggguauua

SEQ ID NO: 809057 - RNA, 19 nt, Artificial Sequence
  Description of Artificial Sequence: Synthetic oligonucleotide
  Antisense strand to SEQ ID NO: 809056
uaauacccagaaagcacua

SEQ ID NO: 809058 - RNA, 19 nt, Artificial Sequence
  Description of Artificial Sequence: Synthetic oligonucleotide
  Sense strand starting at position 285 of SEQ ID NO: 587663
gugcuuucuggguauuaac

SEQ ID NO: 809059 - RNA, 19 nt, Artificial Sequence
  Description of Artificial Sequence: Synthetic oligonucleotide
  Antisense strand to SEQ ID NO: 809058
guuaauacccagaaagcac

SEQ ID NO: 809060 - RNA, 19 nt, Artificial Sequence
  Description of Artificial Sequence: Synthetic oligonucleotide
  Sense strand starting at position 326 of SEQ ID NO: 587663
cugagauagcuuuguuauc

SEQ ID NO: 809061 - RNA, 19 nt, Artificial Sequence
  Description of Artificial Sequence: Synthetic oligonucleotide
  Antisense strand to SEQ ID NO: 809060
gauaacaaagcuaucucag

SEQ ID NO: 809062 - RNA, 19 nt, Artificial Sequence
  Description of Artificial Sequence: Synthetic oligonucleotide
  Sense strand starting at position 327 of SEQ ID NO: 587663
ugagauagcuuuguuaucu

SEQ ID NO: 809063 - RNA, 19 nt, Artificial Sequence
  Description of Artificial Sequence: Synthetic oligonucleotide
  Antisense strand to SEQ ID NO: 809062
agauaacaaagcuaucuca

SEQ ID NO: 809064 - RNA, 19 nt, Artificial Sequence
  Description of Artificial Sequence: Synthetic oligonucleotide
  Sense strand starting at position 328 of SEQ ID NO: 587663
gagauagcuuuguuaucua

SEQ ID NO: 809065 - RNA, 19 nt, Artificial Sequence
  Description of Artificial Sequence: Synthetic oligonucleotide
  Antisense strand to SEQ ID NO: 809064
uagauaacaaagcuaucuc

SEQ ID NO: 809066 - RNA, 19 nt, Artificial Sequence
  Description of Artificial Sequence: Synthetic oligonucleotide
  Sense strand starting at position 407 of SEQ ID NO: 587663
ccaggagcuauugacgaau

SEQ ID NO: 809067 - RNA, 19 nt, Artificial Sequence
  Description of Artificial Sequence: Synthetic oligonucleotide
  Antisense strand to SEQ ID NO: 809066
auucgucaauagcuccugg

SEQ ID NO: 809068 - RNA, 19 nt, Artificial Sequence
  Description of Artificial Sequence: Synthetic oligonucleotide
  Sense strand starting at position 771 of SEQ ID NO: 587663
uccacuuaggucugagaaa

SEQ ID NO: 809069 - RNA, 19 nt, Artificial Sequence
  Description of Artificial Sequence: Synthetic oligonucleotide
  Antisense strand to SEQ ID NO: 809068
uuucucagaccuaagugga

SEQ ID NO: 809070 - RNA, 19 nt, Artificial Sequence
  Description of Artificial Sequence: Synthetic oligonucleotide
  Sense strand starting at position 812 of SEQ ID NO: 587663
uugguaauacaguggcuua

SEQ ID NO: 809071 - RNA, 19 nt, Artificial Sequence
  Description of Artificial Sequence: Synthetic oligonucleotide
  Antisense strand to SEQ ID NO: 809070
uaagccacuguauuaccaa

SEQ ID NO: 809072 - RNA, 19 nt, Artificial Sequence
  Description of Artificial Sequence: Synthetic oligonucleotide
  Sense strand starting at position 824 of SEQ ID NO: 587663
uggcuuaggucuguuauuu

SEQ ID NO: 809073 - RNA, 19 nt, Artificial Sequence
  Description of Artificial Sequence: Synthetic oligonucleotide
  Antisense strand to SEQ ID NO: 809072
aaauaacagaccuaagcca

SEQ ID NO: 809074 - RNA, 19 nt, Artificial Sequence
  Description of Artificial Sequence: Synthetic oligonucleotide
  Sense strand starting at position 1077 of SEQ ID NO: 587663
ggcauucuuucuccaugca

SEQ ID NO: 809075 - RNA, 19 nt, Artificial Sequence
  Description of Artificial Sequence: Synthetic oligonucleotide
  Antisense strand to SEQ ID NO: 809074
ugcauggagaaagaaugcc

SEQ ID NO: 809076 - RNA, 19 nt, Artificial Sequence
  Description of Artificial Sequence: Synthetic oligonucleotide
  Sense strand starting at position 1146 of SEQ ID NO: 587663
guguauuuccugcggacag

SEQ ID NO: 809077 - RNA, 19 nt, Artificial Sequence
  Description of Artificial Sequence: Synthetic oligonucleotide
  Antisense strand to SEQ ID NO: 809076
cuguccgcaggaaauacac

SEQ ID NO: 809078 - RNA, 19 nt, Artificial Sequence
  Description of Artificial Sequence: Synthetic oligonucleotide
  Sense strand starting at position 1211 of SEQ ID NO: 587663
ccugcuucucugggagcua

SEQ ID NO: 809079 - RNA, 19 nt, Artificial Sequence
  Description of Artificial Sequence: Synthetic oligonucleotide
  Antisense strand to SEQ ID NO: 809078
uagcucccagagaagcagg

SEQ ID NO: 809080 - RNA, 19 nt, Artificial Sequence
  Description of Artificial Sequence: Synthetic oligonucleotide
  Sense strand starting at position 1640 of SEQ ID NO: 587663
acccucaaggucuguaauu

SEQ ID NO: 809081 - RNA, 19 nt, Artificial Sequence
  Description of Artificial Sequence: Synthetic oligonucleotide
  Antisense strand to SEQ ID NO: 809080
aauuacagaccuugagggu

SEQ ID NO: 809082 - RNA, 19 nt, Artificial Sequence
  Description of Artificial Sequence: Synthetic oligonucleotide
  Sense strand starting at position 2335 of SEQ ID NO: 587663
cuuccaagcuucgauuuga

SEQ ID NO: 809083 - RNA, 19 nt, Artificial Sequence
  Description of Artificial Sequence: Synthetic oligonucleotide
  Antisense strand to SEQ ID NO: 809082
ucaaaucgaagcuuggaag

SEQ ID NO: 809084 - RNA, 19 nt, Artificial Sequence
  Description of Artificial Sequence: Synthetic oligonucleotide
  Sense strand starting at position 2512 of SEQ ID NO: 587663
ucuguaaacugucuaggaa

SEQ ID NO: 809085 - RNA, 19 nt, Artificial Sequence
  Description of Artificial Sequence: Synthetic oligonucleotide
  Antisense strand to SEQ ID NO: 809084
uuccuagacaguuuacaga

SEQ ID NO: 809086 - RNA, 19 nt, Artificial Sequence
  Description of Artificial Sequence: Synthetic oligonucleotide
  Sense strand starting at position 2603 of SEQ ID NO: 587663
uuucaucucguguggagau

SEQ ID NO: 809087 - RNA, 19 nt, Artificial Sequence
  Description of Artificial Sequence: Synthetic oligonucleotide
  Antisense strand to SEQ ID NO: 809086
aucuccacacgagaugaaa

SEQ ID NO: 809088 - RNA, 19 nt, Artificial Sequence
  Description of Artificial Sequence: Synthetic oligonucleotide
  Sense strand starting at position 2605 of SEQ ID NO: 587663
ucaucucguguggagauaa

SEQ ID NO: 809089 - RNA, 19 nt, Artificial Sequence
  Description of Artificial Sequence: Synthetic oligonucleotide
  Antisense strand to SEQ ID NO: 809088
uuaucuccacacgagauga

SEQ ID NO: 809090 - RNA, 19 nt, Artificial Sequence
  Description of Artificial Sequence: Synthetic oligonucleotide
  Sense strand starting at position 2615 of SEQ ID NO: 587663
uggagauaaugagaagcaa

SEQ ID NO: 809091 - RNA, 19 nt, Artificial Sequence
  Description of Artificial Sequence: Synthetic oligonucleotide
  Antisense strand to SEQ ID NO: 809090
uugcuucucauuaucucca

SEQ ID NO: 809092 - RNA, 19 nt, Artificial Sequence
  Description of Artificial Sequence: Synthetic oligonucleotide
  Sense strand starting at position 2873 of SEQ ID NO: 587663
cuggccuuccucguuguaa

SEQ ID NO: 809093 - RNA, 19 nt, Artificial Sequence
  Description of Artificial Sequence: Synthetic oligonucleotide
  Antisense strand to SEQ ID NO: 809092
uuacaacgaggaaggccag

SEQ ID NO: 809094 - RNA, 19 nt, Artificial Sequence
  Description of Artificial Sequence: Synthetic oligonucleotide
  Sense strand starting at position 2882 of SEQ ID NO: 587663
cucguuguaauguuugcaa

SEQ ID NO: 809095 - RNA, 19 nt, Artificial Sequence
  Description of Artificial Sequence: Synthetic oligonucleotide
  Antisense strand to SEQ ID NO: 809094
uugcaaacauuacaacgag

SEQ ID NO: 809096 - RNA, 19 nt, Artificial Sequence
  Description of Artificial Sequence: Synthetic oligonucleotide
  Sense strand starting at position 2908 of SEQ ID NO: 587663
uaacaugacugguuauaga

SEQ ID NO: 809097 - RNA, 19 nt, Artificial Sequence
  Description of Artificial Sequence: Synthetic oligonucleotide
  Antisense strand to SEQ ID NO: 809096
ucuauaaccagucauguua

SEQ ID NO: 809098 - RNA, 19 nt, Artificial Sequence
  Description of Artificial Sequence: Synthetic oligonucleotide
  Sense strand starting at position 2911 of SEQ ID NO: 587663
caugacugguuauagaaag

SEQ ID NO: 809099 - RNA, 19 nt, Artificial Sequence
  Description of Artificial Sequence: Synthetic oligonucleotide
  Antisense strand to SEQ ID NO: 809098
cuuucuauaaccagucaug

SEQ ID NO: 809100 - RNA, 19 nt, Artificial Sequence
  Description of Artificial Sequence: Synthetic oligonucleotide
  Sense strand starting at position 2917 of SEQ ID NO: 587663
ugguuauagaaaggacagu

SEQ ID NO: 809101 - RNA, 19 nt, Artificial Sequence
  Description of Artificial Sequence: Synthetic oligonucleotide
  Antisense strand to SEQ ID NO: 809100
acuguccuuucuauaacca

SEQ ID NO: 809102 - RNA, 19 nt, Artificial Sequence
  Description of Artificial Sequence: Synthetic oligonucleotide
  Sense strand starting at position 2953 of SEQ ID NO: 587663
agcugccaacucugauuua

SEQ ID NO: 809103 - RNA, 19 nt, Artificial Sequence
  Description of Artificial Sequence: Synthetic oligonucleotide
  Antisense strand to SEQ ID NO: 809102
uaaaucagaguuggcagcu

SEQ ID NO: 809104 - RNA, 19 nt, Artificial Sequence
  Description of Artificial Sequence: Synthetic oligonucleotide
  Sense strand starting at position 2954 of SEQ ID NO: 587663
gcugccaacucugauuuaa

SEQ ID NO: 809105 - RNA, 19 nt, Artificial Sequence
  Description of Artificial Sequence: Synthetic oligonucleotide
  Antisense strand to SEQ ID NO: 809104
uuaaaucagaguuggcagc

SEQ ID NO: 809106 - RNA, 19 nt, Artificial Sequence
  Description of Artificial Sequence: Synthetic oligonucleotide
  Sense strand starting at position 3051 of SEQ ID NO: 587663
uaucuaggaggcuguuaaa

SEQ ID NO: 809107 - RNA, 19 nt, Artificial Sequence
  Description of Artificial Sequence: Synthetic oligonucleotide
  Antisense strand to SEQ ID NO: 809106
uuuaacagccuccuagaua

SEQ ID NO: 809108 - RNA, 19 nt, Artificial Sequence
  Description of Artificial Sequence: Synthetic oligonucleotide
  Sense strand starting at position 3188 of SEQ ID NO: 587663
aaauuugcauuggaaaguu

SEQ ID NO: 809109 - RNA, 19 nt, Artificial Sequence
  Description of Artificial Sequence: Synthetic oligonucleotide
  Antisense strand to SEQ ID NO: 809108
aacuuuccaaugcaaauuu

SEQ ID NO: 809110 - RNA, 19 nt, Artificial Sequence
  Description of Artificial Sequence: Synthetic oligonucleotide
  Sense strand starting at position 3312 of SEQ ID NO: 587663
uccagcuuuguauggguau

SEQ ID NO: 809111 - RNA, 19 nt, Artificial Sequence
  Description of Artificial Sequence: Synthetic oligonucleotide
  Antisense strand to SEQ ID NO: 809110
auacccauacaaagcugga

SEQ ID NO: 809112 - RNA, 19 nt, Artificial Sequence
  Description of Artificial Sequence: Synthetic oligonucleotide
  Sense strand starting at position 3465 of SEQ ID NO: 587663
cucaaaugucccugaagga

SEQ ID NO: 809113 - RNA, 19 nt, Artificial Sequence
  Description of Artificial Sequence: Synthetic oligonucleotide
  Antisense strand to SEQ ID NO: 809112
uccuucagggacauuugag

SEQ ID NO: 809114 - RNA, 19 nt, Artificial Sequence
  Description of Artificial Sequence: Synthetic oligonucleotide
  Sense strand starting at position 3501 of SEQ ID NO: 587663
gaaguaacuuaagugguua

SEQ ID NO: 809115 - RNA, 19 nt, Artificial Sequence
  Description of Artificial Sequence: Synthetic oligonucleotide
  Antisense strand to SEQ ID NO: 809114
uaaccacuuaaguuacuuc

SEQ ID NO: 809116 - RNA, 19 nt, Artificial Sequence
  Description of Artificial Sequence: Synthetic oligonucleotide
  Sense strand starting at position 3512 of SEQ ID NO: 587663
agugguuauacagggacaa

SEQ ID NO: 809117 - RNA, 19 nt, Artificial Sequence
  Description of Artificial Sequence: Synthetic oligonucleotide
  Antisense strand to SEQ ID NO: 809116
uugucccuguauaaccacu

SEQ ID NO: 809118 - RNA, 19 nt, Artificial Sequence
  Description of Artificial Sequence: Synthetic oligonucleotide
  Sense strand starting at position 3513 of SEQ ID NO: 587663
gugguuauacagggacaaa

SEQ ID NO: 809119 - RNA, 19 nt, Artificial Sequence
  Description of Artificial Sequence: Synthetic oligonucleotide
  Antisense strand to SEQ ID NO: 809118
uuugucccuguauaaccac

SEQ ID NO: 809120 - RNA, 19 nt, Artificial Sequence
  Description of Artificial Sequence: Synthetic oligonucleotide
  Sense strand starting at position 3823 of SEQ ID NO: 587663
accuguagucuggacagau

SEQ ID NO: 809121 - RNA, 19 nt, Artificial Sequence
  Description of Artificial Sequence: Synthetic oligonucleotide
  Antisense strand to SEQ ID NO: 809120
aucuguccagacuacaggu

SEQ ID NO: 809122 - RNA, 19 nt, Artificial Sequence
  Description of Artificial Sequence: Synthetic oligonucleotide
  Sense strand starting at position 3833 of SEQ ID NO: 587663
uggacagauucugugcaua

SEQ ID NO: 809123 - RNA, 19 nt, Artificial Sequence
  Description of Artificial Sequence: Synthetic oligonucleotide
  Antisense strand to SEQ ID NO: 809122
uaugcacagaaucugucca

SEQ ID NO: 809124 - RNA, 19 nt, Artificial Sequence
  Description of Artificial Sequence: Synthetic oligonucleotide
  Sense strand starting at position 3835 of SEQ ID NO: 587663
gacagauucugugcauagg

SEQ ID NO: 809125 - RNA, 19 nt, Artificial Sequence
  Description of Artificial Sequence: Synthetic oligonucleotide
  Antisense strand to SEQ ID NO: 809124
ccuaugcacagaaucuguc

SEQ ID NO: 809126 - RNA, 19 nt, Artificial Sequence
  Description of Artificial Sequence: Synthetic oligonucleotide
  Sense strand starting at position 3836 of SEQ ID NO: 587663
acagauucugugcauagga

SEQ ID NO: 809127 - RNA, 19 nt, Artificial Sequence
  Description of Artificial Sequence: Synthetic oligonucleotide
  Antisense strand to SEQ ID NO: 809126
uccuaugcacagaaucugu

SEQ ID NO: 809128 - RNA, 19 nt, Artificial Sequence
  Description of Artificial Sequence: Synthetic oligonucleotide
  Sense strand starting at position 198 of SEQ ID NO: 587664
uccacuuaggucugagaaa

SEQ ID NO: 809129 - RNA, 19 nt, Artificial Sequence
  Description of Artificial Sequence: Synthetic oligonucleotide
  Antisense strand to SEQ ID NO: 809128
uuucucagaccuaagugga

SEQ ID NO: 809130 - RNA, 19 nt, Artificial Sequence
  Description of Artificial Sequence: Synthetic oligonucleotide
  Sense strand starting at position 239 of SEQ ID NO: 587664
uugguaauacaguggcuua

SEQ ID NO: 809131 - RNA, 19 nt, Artificial Sequence
  Description of Artificial Sequence: Synthetic oligonucleotide
  Antisense strand to SEQ ID NO: 809130
uaagccacuguauuaccaa

SEQ ID NO: 809132 - RNA, 19 nt, Artificial Sequence
  Description of Artificial Sequence: Synthetic oligonucleotide
  Sense strand starting at position 251 of SEQ ID NO: 587664
uggcuuaggucuguuauuu

SEQ ID NO: 809133 - RNA, 19 nt, Artificial Sequence
  Description of Artificial Sequence: Synthetic oligonucleotide
  Antisense strand to SEQ ID NO: 809132
aaauaacagaccuaagcca

SEQ ID NO: 809134 - RNA, 19 nt, Artificial Sequence
  Description of Artificial Sequence: Synthetic oligonucleotide
  Sense strand starting at position 504 of SEQ ID NO: 587664
ggcauucuuucuccaugca

SEQ ID NO: 809135 - RNA, 19 nt, Artificial Sequence
  Description of Artificial Sequence: Synthetic oligonucleotide
  Antisense strand to SEQ ID NO: 809134
ugcauggagaaagaaugcc

SEQ ID NO: 809136 - RNA, 19 nt, Artificial Sequence
  Description of Artificial Sequence: Synthetic oligonucleotide
  Sense strand starting at position 573 of SEQ ID NO: 587664
guguauuuccugcggacag

SEQ ID NO: 809137 - RNA, 19 nt, Artificial Sequence
  Description of Artificial Sequence: Synthetic oligonucleotide
  Antisense strand to SEQ ID NO: 809136
cuguccgcaggaaauacac

SEQ ID NO: 809138 - RNA, 19 nt, Artificial Sequence
  Description of Artificial Sequence: Synthetic oligonucleotide
  Sense strand starting at position 638 of SEQ ID NO: 587664
ccugcuucucugggagcua

SEQ ID NO: 809139 - RNA, 19 nt, Artificial Sequence
  Description of Artificial Sequence: Synthetic oligonucleotide
  Antisense strand to SEQ ID NO: 809138
uagcucccagagaagcagg

SEQ ID NO: 809140 - RNA, 19 nt, Artificial Sequence
  Description of Artificial Sequence: Synthetic oligonucleotide
  Sense strand starting at position 1067 of SEQ ID NO: 587664
acccucaaggucuguaauu

SEQ ID NO: 809141 - RNA, 19 nt, Artificial Sequence
  Description of Artificial Sequence: Synthetic oligonucleotide
  Antisense strand to SEQ ID NO: 809140
aauuacagaccuugagggu

SEQ ID NO: 809142 - RNA, 19 nt, Artificial Sequence
  Description of Artificial Sequence: Synthetic oligonucleotide
  Sense strand starting at position 1762 of SEQ ID NO: 587664
cuuccaagcuucgauuuga

SEQ ID NO: 809143 - RNA, 19 nt, Artificial Sequence
  Description of Artificial Sequence: Synthetic oligonucleotide
  Antisense strand to SEQ ID NO: 809142
ucaaaucgaagcuuggaag

SEQ ID NO: 809144 - RNA, 19 nt, Artificial Sequence
  Description of Artificial Sequence: Synthetic oligonucleotide
  Sense strand starting at position 1939 of SEQ ID NO: 587664
ucuguaaacugucuaggaa

SEQ ID NO: 809145 - RNA, 19 nt, Artificial Sequence
  Description of Artificial Sequence: Synthetic oligonucleotide
  Antisense strand to SEQ ID NO: 809144
uuccuagacaguuuacaga

SEQ ID NO: 809146 - RNA, 19 nt, Artificial Sequence
  Description of Artificial Sequence: Synthetic oligonucleotide
  Sense strand starting at position 2030 of SEQ ID NO: 587664
uuucaucucguguggagau

SEQ ID NO: 809147 - RNA, 19 nt, Artificial Sequence
  Description of Artificial Sequence: Synthetic oligonucleotide
  Antisense strand to SEQ ID NO: 809146
aucuccacacgagaugaaa

SEQ ID NO: 809148 - RNA, 19 nt, Artificial Sequence
  Description of Artificial Sequence: Synthetic oligonucleotide
  Sense strand starting at position 2032 of SEQ ID NO: 587664
ucaucucguguggagauaa

SEQ ID NO: 809149 - RNA, 19 nt, Artificial Sequence
  Description of Artificial Sequence: Synthetic oligonucleotide
  Antisense strand to SEQ ID NO: 809148
uuaucuccacacgagauga

SEQ ID NO: 809150 - RNA, 19 nt, Artificial Sequence
  Description of Artificial Sequence: Synthetic oligonucleotide
  Sense strand starting at position 2042 of SEQ ID NO: 587664
uggagauaaugagaagcaa

SEQ ID NO: 809151 - RNA, 19 nt, Artificial Sequence
  Description of Artificial Sequence: Synthetic oligonucleotide
  Antisense strand to SEQ ID NO: 809150
uugcuucucauuaucucca

SEQ ID NO: 809152 - RNA, 19 nt, Artificial Sequence
  Description of Artificial Sequence: Synthetic oligonucleotide
  Sense strand starting at position 2300 of SEQ ID NO: 587664
cuggccuuccucguuguaa

SEQ ID NO: 809153 - RNA, 19 nt, Artificial Sequence
  Description of Artificial Sequence: Synthetic oligonucleotide
  Antisense strand to SEQ ID NO: 809152
uuacaacgaggaaggccag

SEQ ID NO: 809154 - RNA, 19 nt, Artificial Sequence
  Description of Artificial Sequence: Synthetic oligonucleotide
  Sense strand starting at position 2309 of SEQ ID NO: 587664
cucguuguaauguuugcaa

SEQ ID NO: 809155 - RNA, 19 nt, Artificial Sequence
  Description of Artificial Sequence: Synthetic oligonucleotide
  Antisense strand to SEQ ID NO: 809154
uugcaaacauuacaacgag

SEQ ID NO: 809156 - RNA, 19 nt, Artificial Sequence
  Description of Artificial Sequence: Synthetic oligonucleotide
  Sense strand starting at position 2335 of SEQ ID NO: 587664
uaacaugacugguuauaga

SEQ ID NO: 809157 - RNA, 19 nt, Artificial Sequence
  Description of Artificial Sequence: Synthetic oligonucleotide
  Antisense strand to SEQ ID NO: 809156
ucuauaaccagucauguua

SEQ ID NO: 809158 - RNA, 19 nt, Artificial Sequence
  Description of Artificial Sequence: Synthetic oligonucleotide
  Sense strand starting at position 2338 of SEQ ID NO: 587664
caugacugguuauagaaag

SEQ ID NO: 809159 - RNA, 19 nt, Artificial Sequence
  Description of Artificial Sequence: Synthetic oligonucleotide
  Antisense strand to SEQ ID NO: 809158
cuuucuauaaccagucaug

SEQ ID NO: 809160 - RNA, 19 nt, Artificial Sequence
  Description of Artificial Sequence: Synthetic oligonucleotide
  Sense strand starting at position 2344 of SEQ ID NO: 587664
ugguuauagaaaggacagu

SEQ ID NO: 809161 - RNA, 19 nt, Artificial Sequence
  Description of Artificial Sequence: Synthetic oligonucleotide
  Antisense strand to SEQ ID NO: 809160
acuguccuuucuauaacca

SEQ ID NO: 809162 - RNA, 19 nt, Artificial Sequence
  Description of Artificial Sequence: Synthetic oligonucleotide
  Sense strand starting at position 2380 of SEQ ID NO: 587664
agcugccaacucugauuua

SEQ ID NO: 809163 - RNA, 19 nt, Artificial Sequence
  Description of Artificial Sequence: Synthetic oligonucleotide
  Antisense strand to SEQ ID NO: 809162
uaaaucagaguuggcagcu

SEQ ID NO: 809164 - RNA, 19 nt, Artificial Sequence
  Description of Artificial Sequence: Synthetic oligonucleotide
  Sense strand starting at position 2381 of SEQ ID NO: 587664
gcugccaacucugauuuaa

SEQ ID NO: 809165 - RNA, 19 nt, Artificial Sequence
  Description of Artificial Sequence: Synthetic oligonucleotide
  Antisense strand to SEQ ID NO: 809164
uuaaaucagaguuggcagc

SEQ ID NO: 809166 - RNA, 19 nt, Artificial Sequence
  Description of Artificial Sequence: Synthetic oligonucleotide
  Sense strand starting at position 2478 of SEQ ID NO: 587664
uaucuaggaggcuguuaaa

SEQ ID NO: 809167 - RNA, 19 nt, Artificial Sequence
  Description of Artificial Sequence: Synthetic oligonucleotide
  Antisense strand to SEQ ID NO: 809166
uuuaacagccuccuagaua

SEQ ID NO: 809168 - RNA, 19 nt, Artificial Sequence
  Description of Artificial Sequence: Synthetic oligonucleotide
  Sense strand starting at position 2615 of SEQ ID NO: 587664
aaauuugcauuggaaaguu

SEQ ID NO: 809169 - RNA, 19 nt, Artificial Sequence
  Description of Artificial Sequence: Synthetic oligonucleotide
  Antisense strand to SEQ ID NO: 809168
aacuuuccaaugcaaauuu

SEQ ID NO: 809170 - RNA, 19 nt, Artificial Sequence
  Description of Artificial Sequence: Synthetic oligonucleotide
  Sense strand starting at position 2739 of SEQ ID NO: 587664
uccagcuuuguauggguau

SEQ ID NO: 809171 - RNA, 19 nt, Artificial Sequence
  Description of Artificial Sequence: Synthetic oligonucleotide
  Antisense strand to SEQ ID NO: 809170
auacccauacaaagcugga

SEQ ID NO: 809172 - RNA, 19 nt, Artificial Sequence
  Description of Artificial Sequence: Synthetic oligonucleotide
  Sense strand starting at position 2892 of SEQ ID NO: 587664
cucaaaugucccugaagga

SEQ ID NO: 809173 - RNA, 19 nt, Artificial Sequence
  Description of Artificial Sequence: Synthetic oligonucleotide
  Antisense strand to SEQ ID NO: 809172
uccuucagggacauuugag

SEQ ID NO: 809174 - RNA, 19 nt, Artificial Sequence
  Description of Artificial Sequence: Synthetic oligonucleotide
  Sense strand starting at position 2928 of SEQ ID NO: 587664
gaaguaacuuaagugguua

SEQ ID NO: 809175 - RNA, 19 nt, Artificial Sequence
  Description of Artificial Sequence: Synthetic oligonucleotide
  Antisense strand to SEQ ID NO: 809174
uaaccacuuaaguuacuuc

SEQ ID NO: 809176 - RNA, 19 nt, Artificial Sequence
  Description of Artificial Sequence: Synthetic oligonucleotide
  Sense strand starting at position 2939 of SEQ ID NO: 587664
agugguuauacagggacaa

SEQ ID NO: 809177 - RNA, 19 nt, Artificial Sequence
  Description of Artificial Sequence: Synthetic oligonucleotide
  Antisense strand to SEQ ID NO: 809176
uugucccuguauaaccacu

SEQ ID NO: 809178 - RNA, 19 nt, Artificial Sequence
  Description of Artificial Sequence: Synthetic oligonucleotide
  Sense strand starting at position 2940 of SEQ ID NO: 587664
gugguuauacagggacaaa

SEQ ID NO: 809179 - RNA, 19 nt, Artificial Sequence
  Description of Artificial Sequence: Synthetic oligonucleotide
  Antisense strand to SEQ ID NO: 809178
uuugucccuguauaaccac

SEQ ID NO: 809180 - RNA, 19 nt, Artificial Sequence
  Description of Artificial Sequence: Synthetic oligonucleotide
  Sense strand starting at position 3250 of SEQ ID NO: 587664
accuguagucuggacagau

SEQ ID NO: 809181 - RNA, 19 nt, Artificial Sequence
  Description of Artificial Sequence: Synthetic oligonucleotide
  Antisense strand to SEQ ID NO: 809180
aucuguccagacuacaggu

SEQ ID NO: 809182 - RNA, 19 nt, Artificial Sequence
  Description of Artificial Sequence: Synthetic oligonucleotide
  Sense strand starting at position 3260 of SEQ ID NO: 587664
uggacagauucugugcaua

SEQ ID NO: 809183 - RNA, 19 nt, Artificial Sequence
  Description of Artificial Sequence: Synthetic oligonucleotide
  Antisense strand to SEQ ID NO: 809182
uaugcacagaaucugucca

SEQ ID NO: 809184 - RNA, 19 nt, Artificial Sequence
  Description of Artificial Sequence: Synthetic oligonucleotide
  Sense strand starting at position 3262 of SEQ ID NO: 587664
gacagauucugugcauagg

SEQ ID NO: 809185 - RNA, 19 nt, Artificial Sequence
  Description of Artificial Sequence: Synthetic oligonucleotide
  Antisense strand to SEQ ID NO: 809184
ccuaugcacagaaucuguc

SEQ ID NO: 809186 - RNA, 19 nt, Artificial Sequence
  Description of Artificial Sequence: Synthetic oligonucleotide
  Sense strand starting at position 3263 of SEQ ID NO: 587664
acagauucugugcauagga

SEQ ID NO: 809187 - RNA, 19 nt, Artificial Sequence
  Description of Artificial Sequence: Synthetic oligonucleotide
  Antisense strand to SEQ ID NO: 809186
uccuaugcacagaaucugu

SEQ ID NO: 809188 - RNA, 19 nt, Artificial Sequence
  Description of Artificial Sequence: Synthetic oligonucleotide
  Sense strand starting at position 3742 of SEQ ID NO: 587664
aguacuuuguuccucuuua

SEQ ID NO: 809189 - RNA, 19 nt, Artificial Sequence
  Description of Artificial Sequence: Synthetic oligonucleotide
  Antisense strand to SEQ ID NO: 809188
uaaagaggaacaaaguacu

SEQ ID NO: 809190 - RNA, 19 nt, Artificial Sequence
  Description of Artificial Sequence: Synthetic oligonucleotide
  Sense strand starting at position 3743 of SEQ ID NO: 587664
guacuuuguuccucuuuau

SEQ ID NO: 809191 - RNA, 19 nt, Artificial Sequence
  Description of Artificial Sequence: Synthetic oligonucleotide
  Antisense strand to SEQ ID NO: 809190
auaaagaggaacaaaguac

SEQ ID NO: 809192 - RNA, 19 nt, Artificial Sequence
  Description of Artificial Sequence: Synthetic oligonucleotide
  Sense strand starting at position 3760 of SEQ ID NO: 587664
augaacaaacgaugucauu

SEQ ID NO: 809193 - RNA, 19 nt, Artificial Sequence
  Description of Artificial Sequence: Synthetic oligonucleotide
  Antisense strand to SEQ ID NO: 809192
aaugacaucguuuguucau

SEQ ID NO: 809194 - RNA, 19 nt, Artificial Sequence
  Description of Artificial Sequence: Synthetic oligonucleotide
  Sense strand starting at position 3766 of SEQ ID NO: 587664
aaacgaugucauuguauag

SEQ ID NO: 809195 - RNA, 19 nt, Artificial Sequence
  Description of Artificial Sequence: Synthetic oligonucleotide
  Antisense strand to SEQ ID NO: 809194
cuauacaaugacaucguuu

SEQ ID NO: 809196 - RNA, 19 nt, Artificial Sequence
  Description of Artificial Sequence: Synthetic oligonucleotide
  Sense strand starting at position 3776 of SEQ ID NO: 587664
auuguauagcucuaucaca

SEQ ID NO: 809197 - RNA, 19 nt, Artificial Sequence
  Description of Artificial Sequence: Synthetic oligonucleotide
  Antisense strand to SEQ ID NO: 809196
ugugauagagcuauacaau

SEQ ID NO: 809198 - RNA, 19 nt, Artificial Sequence
  Description of Artificial Sequence: Synthetic oligonucleotide
  Sense strand starting at position 3870 of SEQ ID NO: 587664
gaacauuucuguucgaguu

SEQ ID NO: 809199 - RNA, 19 nt, Artificial Sequence
  Description of Artificial Sequence: Synthetic oligonucleotide
  Antisense strand to SEQ ID NO: 809198
aacucgaacagaaauguuc

SEQ ID NO: 809200 - RNA, 19 nt, Artificial Sequence
  Description of Artificial Sequence: Synthetic oligonucleotide
  Sense strand starting at position 3871 of SEQ ID NO: 587664
aacauuucuguucgaguuu

SEQ ID NO: 809201 - RNA, 19 nt, Artificial Sequence
  Description of Artificial Sequence: Synthetic oligonucleotide
  Antisense strand to SEQ ID NO: 809200
aaacucgaacagaaauguu

SEQ ID NO: 809202 - RNA, 19 nt, Artificial Sequence
  Description of Artificial Sequence: Synthetic oligonucleotide
  Sense strand starting at position 3936 of SEQ ID NO: 587664
gccagaucacaugguaacu

SEQ ID NO: 809203 - RNA, 19 nt, Artificial Sequence
  Description of Artificial Sequence: Synthetic oligonucleotide
  Antisense strand to SEQ ID NO: 809202
aguuaccaugugaucuggc

SEQ ID NO: 809204 - RNA, 19 nt, Artificial Sequence
  Description of Artificial Sequence: Synthetic oligonucleotide
  Sense strand starting at position 3946 of SEQ ID NO: 587664
augguaacuccacguugaa

SEQ ID NO: 809205 - RNA, 19 nt, Artificial Sequence
  Description of Artificial Sequence: Synthetic oligonucleotide
  Antisense strand to SEQ ID NO: 809204
uucaacguggaguuaccau

SEQ ID NO: 809206 - RNA, 19 nt, Artificial Sequence
  Description of Artificial Sequence: Synthetic oligonucleotide
  Sense strand starting at position 3949 of SEQ ID NO: 587664
guaacuccacguugaacau

SEQ ID NO: 809207 - RNA, 19 nt, Artificial Sequence
  Description of Artificial Sequence: Synthetic oligonucleotide
  Antisense strand to SEQ ID NO: 809206
auguucaacguggaguuac

SEQ ID NO: 809208 - RNA, 19 nt, Artificial Sequence
  Description of Artificial Sequence: Synthetic oligonucleotide
  Sense strand starting at position 5 of SEQ ID NO: 587665
cuuaucugugcucaacuga

SEQ ID NO: 809209 - RNA, 19 nt, Artificial Sequence
  Description of Artificial Sequence: Synthetic oligonucleotide
  Antisense strand to SEQ ID NO: 809208
ucaguugagcacagauaag

SEQ ID NO: 809210 - RNA, 19 nt, Artificial Sequence
  Description of Artificial Sequence: Synthetic oligonucleotide
  Sense strand starting at position 63 of SEQ ID NO: 587665
gaauauggccucuggguua

SEQ ID NO: 809211 - RNA, 19 nt, Artificial Sequence
  Description of Artificial Sequence: Synthetic oligonucleotide
  Antisense strand to SEQ ID NO: 809210
uaacccagaggccauauuc

SEQ ID NO: 809212 - RNA, 19 nt, Artificial Sequence
  Description of Artificial Sequence: Synthetic oligonucleotide
  Sense strand starting at position 68 of SEQ ID NO: 587665
uggccucuggguuauuaua

SEQ ID NO: 809213 - RNA, 19 nt, Artificial Sequence
  Description of Artificial Sequence: Synthetic oligonucleotide
  Antisense strand to SEQ ID NO: 809212
uauaauaacccagaggcca

SEQ ID NO: 809214 - RNA, 19 nt, Artificial Sequence
  Description of Artificial Sequence: Synthetic oligonucleotide
  Sense strand starting at position 70 of SEQ ID NO: 587665
gccucuggguuauuauaau

SEQ ID NO: 809215 - RNA, 19 nt, Artificial Sequence
  Description of Artificial Sequence: Synthetic oligonucleotide
  Antisense strand to SEQ ID NO: 809214
auuauaauaacccagaggc

SEQ ID NO: 809216 - RNA, 19 nt, Artificial Sequence
  Description of Artificial Sequence: Synthetic oligonucleotide
  Sense strand starting at position 107 of SEQ ID NO: 587665
augagauuaugucucagua

SEQ ID NO: 809217 - RNA, 19 nt, Artificial Sequence
  Description of Artificial Sequence: Synthetic oligonucleotide
  Antisense strand to SEQ ID NO: 809216
uacugagacauaaucucau

SEQ ID NO: 809218 - RNA, 19 nt, Artificial Sequence
  Description of Artificial Sequence: Synthetic oligonucleotide
  Sense strand starting at position 111 of SEQ ID NO: 587665
gauuaugucucaguagaug

SEQ ID NO: 809219 - RNA, 19 nt, Artificial Sequence
  Description of Artificial Sequence: Synthetic oligonucleotide
  Antisense strand to SEQ ID NO: 809218
caucuacugagacauaauc

SEQ ID NO: 809220 - RNA, 19 nt, Artificial Sequence
  Description of Artificial Sequence: Synthetic oligonucleotide
  Sense strand starting at position 122 of SEQ ID NO: 587665
aguagaugugccuggaaug

SEQ ID NO: 809221 - RNA, 19 nt, Artificial Sequence
  Description of Artificial Sequence: Synthetic oligonucleotide
  Antisense strand to SEQ ID NO: 809220
cauuccaggcacaucuacu

SEQ ID NO: 809222 - RNA, 19 nt, Artificial Sequence
  Description of Artificial Sequence: Synthetic oligonucleotide
  Sense strand starting at position 123 of SEQ ID NO: 587665
guagaugugccuggaauga

SEQ ID NO: 809223 - RNA, 19 nt, Artificial Sequence
  Description of Artificial Sequence: Synthetic oligonucleotide
  Antisense strand to SEQ ID NO: 809222
ucauuccaggcacaucuac

SEQ ID NO: 809224 - RNA, 19 nt, Artificial Sequence
  Description of Artificial Sequence: Synthetic oligonucleotide
  Sense strand starting at position 198 of SEQ ID NO: 587665
gucaaaugccagcaaguua

SEQ ID NO: 809225 - RNA, 19 nt, Artificial Sequence
  Description of Artificial Sequence: Synthetic oligonucleotide
  Antisense strand to SEQ ID NO: 809224
uaacuugcuggcauuugac

SEQ ID NO: 809226 - RNA, 19 nt, Artificial Sequence
  Description of Artificial Sequence: Synthetic oligonucleotide
  Sense strand starting at position 534 of SEQ ID NO: 587665
uuagacaccugguuauaaa

SEQ ID NO: 809227 - RNA, 19 nt, Artificial Sequence
  Description of Artificial Sequence: Synthetic oligonucleotide
  Antisense strand to SEQ ID NO: 809226
uuuauaaccaggugucuaa

SEQ ID NO: 809228 - RNA, 19 nt, Artificial Sequence
  Description of Artificial Sequence: Synthetic oligonucleotide
  Sense strand starting at position 553 of SEQ ID NO: 587665
ucuagacuuuggcuaacuu

SEQ ID NO: 809229 - RNA, 19 nt, Artificial Sequence
  Description of Artificial Sequence: Synthetic oligonucleotide
  Antisense strand to SEQ ID NO: 809228
aaguuagccaaagucuaga

SEQ ID NO: 809230 - RNA, 19 nt, Artificial Sequence
  Description of Artificial Sequence: Synthetic oligonucleotide
  Sense strand starting at position 647 of SEQ ID NO: 587665
uacuaaacuugggaaggaa

SEQ ID NO: 809231 - RNA, 19 nt, Artificial Sequence
  Description of Artificial Sequence: Synthetic oligonucleotide
  Antisense strand to SEQ ID NO: 809230
uuccuucccaaguuuagua

SEQ ID NO: 809232 - RNA, 19 nt, Artificial Sequence
  Description of Artificial Sequence: Synthetic oligonucleotide
  Sense strand starting at position 773 of SEQ ID NO: 587665
agcaaauugugagugacua

SEQ ID NO: 809233 - RNA, 19 nt, Artificial Sequence
  Description of Artificial Sequence: Synthetic oligonucleotide
  Antisense strand to SEQ ID NO: 809232
uagucacucacaauuugcu

SEQ ID NO: 809234 - RNA, 19 nt, Artificial Sequence
  Description of Artificial Sequence: Synthetic oligonucleotide
  Sense strand starting at position 774 of SEQ ID NO: 587665
gcaaauugugagugacuac

SEQ ID NO: 809235 - RNA, 19 nt, Artificial Sequence
  Description of Artificial Sequence: Synthetic oligonucleotide
  Antisense strand to SEQ ID NO: 809234
guagucacucacaauuugc

SEQ ID NO: 809236 - RNA, 19 nt, Artificial Sequence
  Description of Artificial Sequence: Synthetic oligonucleotide
  Sense strand starting at position 781 of SEQ ID NO: 587665
gugagugacuacuucuauc

SEQ ID NO: 809237 - RNA, 19 nt, Artificial Sequence
  Description of Artificial Sequence: Synthetic oligonucleotide
  Antisense strand to SEQ ID NO: 809236
gauagaaguagucacucac

SEQ ID NO: 809238 - RNA, 19 nt, Artificial Sequence
  Description of Artificial Sequence: Synthetic oligonucleotide
  Sense strand starting at position 797 of SEQ ID NO: 587665
aucuguguuugaguuaaag

SEQ ID NO: 809239 - RNA, 19 nt, Artificial Sequence
  Description of Artificial Sequence: Synthetic oligonucleotide
  Antisense strand to SEQ ID NO: 809238
cuuuaacucaaacacagau

SEQ ID NO: 809240 - RNA, 19 nt, Artificial Sequence
  Description of Artificial Sequence: Synthetic oligonucleotide
  Sense strand starting at position 799 of SEQ ID NO: 587665
cuguguuugaguuaaagua

SEQ ID NO: 809241 - RNA, 19 nt, Artificial Sequence
  Description of Artificial Sequence: Synthetic oligonucleotide
  Antisense strand to SEQ ID NO: 809240
uacuuuaacucaaacacag

SEQ ID NO: 809242 - RNA, 19 nt, Artificial Sequence
  Description of Artificial Sequence: Synthetic oligonucleotide
  Sense strand starting at position 814 of SEQ ID NO: 587665
aguagaacuugugucaaug

SEQ ID NO: 809243 - RNA, 19 nt, Artificial Sequence
  Description of Artificial Sequence: Synthetic oligonucleotide
  Antisense strand to SEQ ID NO: 809242
cauugacacaaguucuacu

SEQ ID NO: 809244 - RNA, 19 nt, Artificial Sequence
  Description of Artificial Sequence: Synthetic oligonucleotide
  Sense strand starting at position 1048 of SEQ ID NO: 587665
uggcauauucccgauuauu

SEQ ID NO: 809245 - RNA, 19 nt, Artificial Sequence
  Description of Artificial Sequence: Synthetic oligonucleotide
  Antisense strand to SEQ ID NO: 809244
aauaaucgggaauaugcca

SEQ ID NO: 809246 - RNA, 19 nt, Artificial Sequence
  Description of Artificial Sequence: Synthetic oligonucleotide
  Sense strand starting at position 1359 of SEQ ID NO: 587665
gagagaauauuuggcucaa

SEQ ID NO: 809247 - RNA, 19 nt, Artificial Sequence
  Description of Artificial Sequence: Synthetic oligonucleotide
  Antisense strand to SEQ ID NO: 809246
uugagccaaauauucucuc

SEQ ID NO: 809248 - RNA, 19 nt, Artificial Sequence
  Description of Artificial Sequence: Synthetic oligonucleotide
  Sense strand starting at position 1489 of SEQ ID NO: 587665
agagaaccugccugaaauu

SEQ ID NO: 809249 - RNA, 19 nt, Artificial Sequence
  Description of Artificial Sequence: Synthetic oligonucleotide
  Antisense strand to SEQ ID NO: 809248
aauuucaggcagguucucu

SEQ ID NO: 809250 - RNA, 19 nt, Artificial Sequence
  Description of Artificial Sequence: Synthetic oligonucleotide
  Sense strand starting at position 1831 of SEQ ID NO: 587665
ccaagagaucauugguugu

SEQ ID NO: 809251 - RNA, 19 nt, Artificial Sequence
  Description of Artificial Sequence: Synthetic oligonucleotide
  Antisense strand to SEQ ID NO: 809250
acaaccaaugaucucuugg

SEQ ID NO: 809252 - RNA, 19 nt, Artificial Sequence
  Description of Artificial Sequence: Synthetic oligonucleotide
  Sense strand starting at position 1860 of SEQ ID NO: 587665
acagaccggcucugaaauu

SEQ ID NO: 809253 - RNA, 19 nt, Artificial Sequence
  Description of Artificial Sequence: Synthetic oligonucleotide
  Antisense strand to SEQ ID NO: 809252
aauuucagagccggucugu

SEQ ID NO: 809254 - RNA, 19 nt, Artificial Sequence
  Description of Artificial Sequence: Synthetic oligonucleotide
  Sense strand starting at position 1959 of SEQ ID NO: 587665
acggacagcuccuugacaa

SEQ ID NO: 809255 - RNA, 19 nt, Artificial Sequence
  Description of Artificial Sequence: Synthetic oligonucleotide
  Antisense strand to SEQ ID NO: 809254
uugucaaggagcuguccgu

SEQ ID NO: 809256 - RNA, 19 nt, Artificial Sequence
  Description of Artificial Sequence: Synthetic oligonucleotide
  Sense strand starting at position 1960 of SEQ ID NO: 587665
cggacagcuccuugacaac

SEQ ID NO: 809257 - RNA, 19 nt, Artificial Sequence
  Description of Artificial Sequence: Synthetic oligonucleotide
  Antisense strand to SEQ ID NO: 809256
guugucaaggagcuguccg

SEQ ID NO: 809258 - RNA, 19 nt, Artificial Sequence
  Description of Artificial Sequence: Synthetic oligonucleotide
  Sense strand starting at position 2273 of SEQ ID NO: 587665
cagagucuacauggauaua

SEQ ID NO: 809259 - RNA, 19 nt, Artificial Sequence
  Description of Artificial Sequence: Synthetic oligonucleotide
  Antisense strand to SEQ ID NO: 809258
uauauccauguagacucug

SEQ ID NO: 809260 - RNA, 19 nt, Artificial Sequence
  Description of Artificial Sequence: Synthetic oligonucleotide
  Sense strand starting at position 2292 of SEQ ID NO: 587665
cugagaccaugcuugugau

SEQ ID NO: 809261 - RNA, 19 nt, Artificial Sequence
  Description of Artificial Sequence: Synthetic oligonucleotide
  Antisense strand to SEQ ID NO: 809260
aucacaagcauggucucag

SEQ ID NO: 809262 - RNA, 19 nt, Artificial Sequence
  Description of Artificial Sequence: Synthetic oligonucleotide
  Sense strand starting at position 2299 of SEQ ID NO: 587665
caugcuugugauggaaaga

SEQ ID NO: 809263 - RNA, 19 nt, Artificial Sequence
  Description of Artificial Sequence: Synthetic oligonucleotide
  Antisense strand to SEQ ID NO: 809262
ucuuuccaucacaagcaug

SEQ ID NO: 809264 - RNA, 19 nt, Artificial Sequence
  Description of Artificial Sequence: Synthetic oligonucleotide
  Sense strand starting at position 2331 of SEQ ID NO: 587665
guggcuuggguucaugaca

SEQ ID NO: 809265 - RNA, 19 nt, Artificial Sequence
  Description of Artificial Sequence: Synthetic oligonucleotide
  Antisense strand to SEQ ID NO: 809264
ugucaugaacccaagccac

SEQ ID NO: 809266 - RNA, 19 nt, Artificial Sequence
  Description of Artificial Sequence: Synthetic oligonucleotide
  Sense strand starting at position 2344 of SEQ ID NO: 587665
augacaguggcuuaugacu

SEQ ID NO: 809267 - RNA, 19 nt, Artificial Sequence
  Description of Artificial Sequence: Synthetic oligonucleotide
  Antisense strand to SEQ ID NO: 809266
agucauaagccacugucau

SEQ ID NO: 809268 - RNA, 19 nt, Artificial Sequence
  Description of Artificial Sequence: Synthetic oligonucleotide
  Sense strand starting at position 2430 of SEQ ID NO: 587665
ucaggauuccuguacugua

SEQ ID NO: 809269 - RNA, 19 nt, Artificial Sequence
  Description of Artificial Sequence: Synthetic oligonucleotide
  Antisense strand to SEQ ID NO: 809268
uacaguacaggaauccuga

SEQ ID NO: 809270 - RNA, 19 nt, Artificial Sequence
  Description of Artificial Sequence: Synthetic oligonucleotide
  Sense strand starting at position 2508 of SEQ ID NO: 587665
ccaugugaguaagcugaaa

SEQ ID NO: 809271 - RNA, 19 nt, Artificial Sequence
  Description of Artificial Sequence: Synthetic oligonucleotide
  Antisense strand to SEQ ID NO: 809270
uuucagcuuacucacaugg

SEQ ID NO: 809272 - RNA, 19 nt, Artificial Sequence
  Description of Artificial Sequence: Synthetic oligonucleotide
  Sense strand starting at position 2620 of SEQ ID NO: 587665
gccaguguuccacaaacac

SEQ ID NO: 809273 - RNA, 19 nt, Artificial Sequence
  Description of Artificial Sequence: Synthetic oligonucleotide
  Antisense strand to SEQ ID NO: 809272
guguuuguggaacacuggc

SEQ ID NO: 809274 - RNA, 19 nt, Artificial Sequence
  Description of Artificial Sequence: Synthetic oligonucleotide
  Sense strand starting at position 2668 of SEQ ID NO: 587665
augaaaggguuaucucaca

SEQ ID NO: 809275 - RNA, 19 nt, Artificial Sequence
  Description of Artificial Sequence: Synthetic oligonucleotide
  Antisense strand to SEQ ID NO: 809274
ugugagauaacccuuucau

SEQ ID NO: 809276 - RNA, 19 nt, Artificial Sequence
  Description of Artificial Sequence: Synthetic oligonucleotide
  Sense strand starting at position 2701 of SEQ ID NO: 587665
agcuuuauuuccuuuacga

SEQ ID NO: 809277 - RNA, 19 nt, Artificial Sequence
  Description of Artificial Sequence: Synthetic oligonucleotide
  Antisense strand to SEQ ID NO: 809276
ucguaaaggaaauaaagcu

SEQ ID NO: 809278 - RNA, 19 nt, Artificial Sequence
  Description of Artificial Sequence: Synthetic oligonucleotide
  Sense strand starting at position 3306 of SEQ ID NO: 587665
aaugacagcugggaauuua

SEQ ID NO: 809279 - RNA, 19 nt, Artificial Sequence
  Description of Artificial Sequence: Synthetic oligonucleotide
  Antisense strand to SEQ ID NO: 809278
uaaauucccagcugucauu

SEQ ID NO: 809280 - RNA, 19 nt, Artificial Sequence
  Description of Artificial Sequence: Synthetic oligonucleotide
  Sense strand starting at position 3326 of SEQ ID NO: 587665
cuguuugaacaaggacaau

SEQ ID NO: 809281 - RNA, 19 nt, Artificial Sequence
  Description of Artificial Sequence: Synthetic oligonucleotide
  Antisense strand to SEQ ID NO: 809280
auuguccuuguucaaacag

SEQ ID NO: 809282 - RNA, 19 nt, Artificial Sequence
  Description of Artificial Sequence: Synthetic oligonucleotide
  Sense strand starting at position 3604 of SEQ ID NO: 587665
uuuagcauuuaagagagaa

SEQ ID NO: 809283 - RNA, 19 nt, Artificial Sequence
  Description of Artificial Sequence: Synthetic oligonucleotide
  Antisense strand to SEQ ID NO: 809282
uucucucuuaaaugcuaaa

SEQ ID NO: 809284 - RNA, 19 nt, Artificial Sequence
  Description of Artificial Sequence: Synthetic oligonucleotide
  Sense strand starting at position 3762 of SEQ ID NO: 587665
cuuugacugguuuagcauu

SEQ ID NO: 809285 - RNA, 19 nt, Artificial Sequence
  Description of Artificial Sequence: Synthetic oligonucleotide
  Antisense strand to SEQ ID NO: 809284
aaugcuaaaccagucaaag

SEQ ID NO: 809286 - RNA, 19 nt, Artificial Sequence
  Description of Artificial Sequence: Synthetic oligonucleotide
  Sense strand starting at position 3805 of SEQ ID NO: 587665
ugccuugggcaguauuaaa

SEQ ID NO: 809287 - RNA, 19 nt, Artificial Sequence
  Description of Artificial Sequence: Synthetic oligonucleotide
  Antisense strand to SEQ ID NO: 809286
uuuaauacugcccaaggca

SEQ ID NO: 809288 - RNA, 19 nt, Artificial Sequence
  Description of Artificial Sequence: Synthetic oligonucleotide
  Sense strand starting at position 104 of SEQ ID NO: 587666
auccuaaaguggcuuuaga

SEQ ID NO: 809289 - RNA, 19 nt, Artificial Sequence
  Description of Artificial Sequence: Synthetic oligonucleotide
  Antisense strand to SEQ ID NO: 809288
ucuaaagccacuuuaggau

SEQ ID NO: 809290 - RNA, 19 nt, Artificial Sequence
  Description of Artificial Sequence: Synthetic oligonucleotide
  Sense strand starting at position 118 of SEQ ID NO: 587666
uuagacuucgucgugucua

SEQ ID NO: 809291 - RNA, 19 nt, Artificial Sequence
  Description of Artificial Sequence: Synthetic oligonucleotide
  Antisense strand to SEQ ID NO: 809290
uagacacgacgaagucuaa

SEQ ID NO: 809292 - RNA, 19 nt, Artificial Sequence
  Description of Artificial Sequence: Synthetic oligonucleotide
  Sense strand starting at position 131 of SEQ ID NO: 587666
ugucuaagacaacgucuau

SEQ ID NO: 809293 - RNA, 19 nt, Artificial Sequence
  Description of Artificial Sequence: Synthetic oligonucleotide
  Antisense strand to SEQ ID NO: 809292
auagacguugucuuagaca

SEQ ID NO: 809294 - RNA, 19 nt, Artificial Sequence
  Description of Artificial Sequence: Synthetic oligonucleotide
  Sense strand starting at position 138 of SEQ ID NO: 587666
gacaacgucuauuucggua

SEQ ID NO: 809295 - RNA, 19 nt, Artificial Sequence
  Description of Artificial Sequence: Synthetic oligonucleotide
  Antisense strand to SEQ ID NO: 809294
uaccgaaauagacguuguc

SEQ ID NO: 809296 - RNA, 19 nt, Artificial Sequence
  Description of Artificial Sequence: Synthetic oligonucleotide
  Sense strand starting at position 142 of SEQ ID NO: 587666
acgucuauuucgguacgaa

SEQ ID NO: 809297 - RNA, 19 nt, Artificial Sequence
  Description of Artificial Sequence: Synthetic oligonucleotide
  Antisense strand to SEQ ID NO: 809296
uucguaccgaaauagacgu

SEQ ID NO: 809298 - RNA, 19 nt, Artificial Sequence
  Description of Artificial Sequence: Synthetic oligonucleotide
  Sense strand starting at position 143 of SEQ ID NO: 587666
cgucuauuucgguacgaaa

SEQ ID NO: 809299 - RNA, 19 nt, Artificial Sequence
  Description of Artificial Sequence: Synthetic oligonucleotide
  Antisense strand to SEQ ID NO: 809298
uuucguaccgaaauagacg

SEQ ID NO: 809300 - RNA, 19 nt, Artificial Sequence
  Description of Artificial Sequence: Synthetic oligonucleotide
  Sense strand starting at position 316 of SEQ ID NO: 587666
gcucuaacuggucaggaga

SEQ ID NO: 809301 - RNA, 19 nt, Artificial Sequence
  Description of Artificial Sequence: Synthetic oligonucleotide
  Antisense strand to SEQ ID NO: 809300
ucuccugaccaguuagagc

SEQ ID NO: 809302 - RNA, 19 nt, Artificial Sequence
  Description of Artificial Sequence: Synthetic oligonucleotide
  Sense strand starting at position 532 of SEQ ID NO: 587666
cggucucugguuugggaaa

SEQ ID NO: 809303 - RNA, 19 nt, Artificial Sequence
  Description of Artificial Sequence: Synthetic oligonucleotide
  Antisense strand to SEQ ID NO: 809302
uuucccaaaccagagaccg

SEQ ID NO: 809304 - RNA, 19 nt, Artificial Sequence
  Description of Artificial Sequence: Synthetic oligonucleotide
  Sense strand starting at position 1997 of SEQ ID NO: 587666
cgccauguucccguguuaa

SEQ ID NO: 809305 - RNA, 19 nt, Artificial Sequence
  Description of Artificial Sequence: Synthetic oligonucleotide
  Antisense strand to SEQ ID NO: 809304
uuaacacgggaacauggcg

SEQ ID NO: 809306 - RNA, 19 nt, Artificial Sequence
  Description of Artificial Sequence: Synthetic oligonucleotide
  Sense strand starting at position 2202 of SEQ ID NO: 587666
aaguccugucaccgggaaa

SEQ ID NO: 809307 - RNA, 19 nt, Artificial Sequence
  Description of Artificial Sequence: Synthetic oligonucleotide
  Antisense strand to SEQ ID NO: 809306
uuucccggugacaggacuu

SEQ ID NO: 809308 - RNA, 19 nt, Artificial Sequence
  Description of Artificial Sequence: Synthetic oligonucleotide
  Sense strand starting at position 2328 of SEQ ID NO: 587666
ggcagaguccucugagaag

SEQ ID NO: 809309 - RNA, 19 nt, Artificial Sequence
  Description of Artificial Sequence: Synthetic oligonucleotide
  Antisense strand to SEQ ID NO: 809308
cuucucagaggacucugcc

SEQ ID NO: 809310 - RNA, 19 nt, Artificial Sequence
  Description of Artificial Sequence: Synthetic oligonucleotide
  Sense strand starting at position 2760 of SEQ ID NO: 587666
gggagaggcuucucccauu

SEQ ID NO: 809311 - RNA, 19 nt, Artificial Sequence
  Description of Artificial Sequence: Synthetic oligonucleotide
  Antisense strand to SEQ ID NO: 809310
aaugggagaagccucuccc

SEQ ID NO: 809312 - RNA, 19 nt, Artificial Sequence
  Description of Artificial Sequence: Synthetic oligonucleotide
  Sense strand starting at position 2840 of SEQ ID NO: 587666
cggcaauugcgggauaaag

SEQ ID NO: 809313 - RNA, 19 nt, Artificial Sequence
  Description of Artificial Sequence: Synthetic oligonucleotide
  Antisense strand to SEQ ID NO: 809312
cuuuaucccgcaauugccg

SEQ ID NO: 809314 - RNA, 19 nt, Artificial Sequence
  Description of Artificial Sequence: Synthetic oligonucleotide
  Sense strand starting at position 2842 of SEQ ID NO: 587666
gcaauugcgggauaaagca

SEQ ID NO: 809315 - RNA, 19 nt, Artificial Sequence
  Description of Artificial Sequence: Synthetic oligonucleotide
  Antisense strand to SEQ ID NO: 809314
ugcuuuaucccgcaauugc

SEQ ID NO: 809316 - RNA, 19 nt, Artificial Sequence
  Description of Artificial Sequence: Synthetic oligonucleotide
  Sense strand starting at position 2877 of SEQ ID NO: 587666
ugugaaacuuaaccugguu

SEQ ID NO: 809317 - RNA, 19 nt, Artificial Sequence
  Description of Artificial Sequence: Synthetic oligonucleotide
  Antisense strand to SEQ ID NO: 809316
aaccagguuaaguuucaca

SEQ ID NO: 809318 - RNA, 19 nt, Artificial Sequence
  Description of Artificial Sequence: Synthetic oligonucleotide
  Sense strand starting at position 2883 of SEQ ID NO: 587666
acuuaaccugguugagaau

SEQ ID NO: 809319 - RNA, 19 nt, Artificial Sequence
  Description of Artificial Sequence: Synthetic oligonucleotide
  Antisense strand to SEQ ID NO: 809318
auucucaaccagguuaagu

SEQ ID NO: 809320 - RNA, 19 nt, Artificial Sequence
  Description of Artificial Sequence: Synthetic oligonucleotide
  Sense strand starting at position 2948 of SEQ ID NO: 587666
ucuagacauccgugaacaa

SEQ ID NO: 809321 - RNA, 19 nt, Artificial Sequence
  Description of Artificial Sequence: Synthetic oligonucleotide
  Antisense strand to SEQ ID NO: 809320
uuguucacggaugucuaga

SEQ ID NO: 809322 - RNA, 19 nt, Artificial Sequence
  Description of Artificial Sequence: Synthetic oligonucleotide
  Sense strand starting at position 2952 of SEQ ID NO: 587666
gacauccgugaacaaagua

SEQ ID NO: 809323 - RNA, 19 nt, Artificial Sequence
  Description of Artificial Sequence: Synthetic oligonucleotide
  Antisense strand to SEQ ID NO: 809322
uacuuuguucacggauguc

SEQ ID NO: 809324 - RNA, 19 nt, Artificial Sequence
  Description of Artificial Sequence: Synthetic oligonucleotide
  Sense strand starting at position 3072 of SEQ ID NO: 587666
caacuuauacgguaauuag

SEQ ID NO: 809325 - RNA, 19 nt, Artificial Sequence
  Description of Artificial Sequence: Synthetic oligonucleotide
  Antisense strand to SEQ ID NO: 809324
cuaauuaccguauaaguug

SEQ ID NO: 809326 - RNA, 19 nt, Artificial Sequence
  Description of Artificial Sequence: Synthetic oligonucleotide
  Sense strand starting at position 3121 of SEQ ID NO: 587666
uuaucaaacuaugagagga

SEQ ID NO: 809327 - RNA, 19 nt, Artificial Sequence
  Description of Artificial Sequence: Synthetic oligonucleotide
  Antisense strand to SEQ ID NO: 809326
uccucucauaguuugauaa

SEQ ID NO: 809328 - RNA, 19 nt, Artificial Sequence
  Description of Artificial Sequence: Synthetic oligonucleotide
  Sense strand starting at position 3174 of SEQ ID NO: 587666
ggucacuugcgguagacaa

SEQ ID NO: 809329 - RNA, 19 nt, Artificial Sequence
  Description of Artificial Sequence: Synthetic oligonucleotide
  Antisense strand to SEQ ID NO: 809328
uugucuaccgcaagugacc

SEQ ID NO: 809330 - RNA, 19 nt, Artificial Sequence
  Description of Artificial Sequence: Synthetic oligonucleotide
  Sense strand starting at position 3176 of SEQ ID NO: 587666
ucacuugcgguagacaaua

SEQ ID NO: 809331 - RNA, 19 nt, Artificial Sequence
  Description of Artificial Sequence: Synthetic oligonucleotide
  Antisense strand to SEQ ID NO: 809330
uauugucuaccgcaaguga

SEQ ID NO: 809332 - RNA, 19 nt, Artificial Sequence
  Description of Artificial Sequence: Synthetic oligonucleotide
  Sense strand starting at position 3187 of SEQ ID NO: 587666
agacaauaagaguguuuau

SEQ ID NO: 809333 - RNA, 19 nt, Artificial Sequence
  Description of Artificial Sequence: Synthetic oligonucleotide
  Antisense strand to SEQ ID NO: 809332
auaaacacucuuauugucu

SEQ ID NO: 809334 - RNA, 19 nt, Artificial Sequence
  Description of Artificial Sequence: Synthetic oligonucleotide
  Sense strand starting at position 3190 of SEQ ID NO: 587666
caauaagaguguuuauuga

SEQ ID NO: 809335 - RNA, 19 nt, Artificial Sequence
  Description of Artificial Sequence: Synthetic oligonucleotide
  Antisense strand to SEQ ID NO: 809334
ucaauaaacacucuuauug

SEQ ID NO: 809336 - RNA, 19 nt, Artificial Sequence
  Description of Artificial Sequence: Synthetic oligonucleotide
  Sense strand starting at position 3204 of SEQ ID NO: 587666
auugaacacuuacugugaa

SEQ ID NO: 809337 - RNA, 19 nt, Artificial Sequence
  Description of Artificial Sequence: Synthetic oligonucleotide
  Antisense strand to SEQ ID NO: 809336
uucacaguaaguguucaau

SEQ ID NO: 809338 - RNA, 19 nt, Artificial Sequence
  Description of Artificial Sequence: Synthetic oligonucleotide
  Sense strand starting at position 3235 of SEQ ID NO: 587666
aggugauguauauaugcua

SEQ ID NO: 809339 - RNA, 19 nt, Artificial Sequence
  Description of Artificial Sequence: Synthetic oligonucleotide
  Antisense strand to SEQ ID NO: 809338
uagcauauauacaucaccu

SEQ ID NO: 809340 - RNA, 19 nt, Artificial Sequence
  Description of Artificial Sequence: Synthetic oligonucleotide
  Sense strand starting at position 3548 of SEQ ID NO: 587666
gaguguaagaaguggguga

SEQ ID NO: 809341 - RNA, 19 nt, Artificial Sequence
  Description of Artificial Sequence: Synthetic oligonucleotide
  Antisense strand to SEQ ID NO: 809340
ucacccacuucuuacacuc

SEQ ID NO: 809342 - RNA, 19 nt, Artificial Sequence
  Description of Artificial Sequence: Synthetic oligonucleotide
  Sense strand starting at position 3549 of SEQ ID NO: 587666
aguguaagaagugggugau

SEQ ID NO: 809343 - RNA, 19 nt, Artificial Sequence
  Description of Artificial Sequence: Synthetic oligonucleotide
  Antisense strand to SEQ ID NO: 809342
aucacccacuucuuacacu

SEQ ID NO: 809344 - RNA, 19 nt, Artificial Sequence
  Description of Artificial Sequence: Synthetic oligonucleotide
  Sense strand starting at position 3597 of SEQ ID NO: 587666
cuaucuaauguuugaaaug

SEQ ID NO: 809345 - RNA, 19 nt, Artificial Sequence
  Description of Artificial Sequence: Synthetic oligonucleotide
  Antisense strand to SEQ ID NO: 809344
cauuucaaacauuagauag

SEQ ID NO: 809346 - RNA, 19 nt, Artificial Sequence
  Description of Artificial Sequence: Synthetic oligonucleotide
  Sense strand starting at position 3607 of SEQ ID NO: 587666
uuugaaauguuugcauuga

SEQ ID NO: 809347 - RNA, 19 nt, Artificial Sequence
  Description of Artificial Sequence: Synthetic oligonucleotide
  Antisense strand to SEQ ID NO: 809346
ucaaugcaaacauuucaaa

SEQ ID NO: 809348 - RNA, 19 nt, Artificial Sequence
  Description of Artificial Sequence: Synthetic oligonucleotide
  Sense strand starting at position 3615 of SEQ ID NO: 587666
guuugcauugacuauguau

SEQ ID NO: 809349 - RNA, 19 nt, Artificial Sequence
  Description of Artificial Sequence: Synthetic oligonucleotide
  Antisense strand to SEQ ID NO: 809348
auacauagucaaugcaaac

SEQ ID NO: 809350 - RNA, 19 nt, Artificial Sequence
  Description of Artificial Sequence: Synthetic oligonucleotide
  Sense strand starting at position 3618 of SEQ ID NO: 587666
ugcauugacuauguauuaa

SEQ ID NO: 809351 - RNA, 19 nt, Artificial Sequence
  Description of Artificial Sequence: Synthetic oligonucleotide
  Antisense strand to SEQ ID NO: 809350
uuaauacauagucaaugca

SEQ ID NO: 809352 - RNA, 19 nt, Artificial Sequence
  Description of Artificial Sequence: Synthetic oligonucleotide
  Sense strand starting at position 3680 of SEQ ID NO: 587666
uuuagcuagcuggaauaau

SEQ ID NO: 809353 - RNA, 19 nt, Artificial Sequence
  Description of Artificial Sequence: Synthetic oligonucleotide
  Antisense strand to SEQ ID NO: 809352
auuauuccagcuagcuaaa

SEQ ID NO: 809354 - RNA, 19 nt, Artificial Sequence
  Description of Artificial Sequence: Synthetic oligonucleotide
  Sense strand starting at position 3699 of SEQ ID NO: 587666
agaauuauguucccaaagc

SEQ ID NO: 809355 - RNA, 19 nt, Artificial Sequence
  Description of Artificial Sequence: Synthetic oligonucleotide
  Antisense strand to SEQ ID NO: 809354
gcuuugggaacauaauucu

SEQ ID NO: 809356 - RNA, 19 nt, Artificial Sequence
  Description of Artificial Sequence: Synthetic oligonucleotide
  Sense strand starting at position 3728 of SEQ ID NO: 587666
aauggagaguuuguuuaug

SEQ ID NO: 809357 - RNA, 19 nt, Artificial Sequence
  Description of Artificial Sequence: Synthetic oligonucleotide
  Antisense strand to SEQ ID NO: 809356
cauaaacaaacucuccauu

SEQ ID NO: 809358 - RNA, 19 nt, Artificial Sequence
  Description of Artificial Sequence: Synthetic oligonucleotide
  Sense strand starting at position 3798 of SEQ ID NO: 587666
ucaccugagguuugucaca

SEQ ID NO: 809359 - RNA, 19 nt, Artificial Sequence
  Description of Artificial Sequence: Synthetic oligonucleotide
  Antisense strand to SEQ ID NO: 809358
ugugacaaaccucagguga

SEQ ID NO: 809360 - RNA, 19 nt, Artificial Sequence
  Description of Artificial Sequence: Synthetic oligonucleotide
  Sense strand starting at position 3800 of SEQ ID NO: 587666
accugagguuugucacaau

SEQ ID NO: 809361 - RNA, 19 nt, Artificial Sequence
  Description of Artificial Sequence: Synthetic oligonucleotide
  Antisense strand to SEQ ID NO: 809360
auugugacaaaccucaggu

SEQ ID NO: 809362 - RNA, 19 nt, Artificial Sequence
  Description of Artificial Sequence: Synthetic oligonucleotide
  Sense strand starting at position 3859 of SEQ ID NO: 587666
gugaguuaucaggaguugu

SEQ ID NO: 809363 - RNA, 19 nt, Artificial Sequence
  Description of Artificial Sequence: Synthetic oligonucleotide
  Antisense strand to SEQ ID NO: 809362
acaacuccugauaacucac

SEQ ID NO: 809364 - RNA, 19 nt, Artificial Sequence
  Description of Artificial Sequence: Synthetic oligonucleotide
  Sense strand starting at position 3863 of SEQ ID NO: 587666
guuaucaggaguugugaua

SEQ ID NO: 809365 - RNA, 19 nt, Artificial Sequence
  Description of Artificial Sequence: Synthetic oligonucleotide
  Antisense strand to SEQ ID NO: 809364
uaucacaacuccugauaac

SEQ ID NO: 809366 - RNA, 19 nt, Artificial Sequence
  Description of Artificial Sequence: Synthetic oligonucleotide
  Sense strand starting at position 3950 of SEQ ID NO: 587666
ggcagaaguccagagucua

SEQ ID NO: 809367 - RNA, 19 nt, Artificial Sequence
  Description of Artificial Sequence: Synthetic oligonucleotide
  Antisense strand to SEQ ID NO: 809366
uagacucuggacuucugcc

SEQ ID NO: 809368 - RNA, 19 nt, Artificial Sequence
  Description of Artificial Sequence: Synthetic oligonucleotide
  Sense strand starting at position 325 of SEQ ID NO: 587667
gccagaauuucucaacagg

SEQ ID NO: 809369 - RNA, 19 nt, Artificial Sequence
  Description of Artificial Sequence: Synthetic oligonucleotide
  Antisense strand to SEQ ID NO: 809368
ccuguugagaaauucuggc

SEQ ID NO: 809370 - RNA, 19 nt, Artificial Sequence
  Description of Artificial Sequence: Synthetic oligonucleotide
  Sense strand starting at position 450 of SEQ ID NO: 587667
gcagcugauggguauuaua

SEQ ID NO: 809371 - RNA, 19 nt, Artificial Sequence
  Description of Artificial Sequence: Synthetic oligonucleotide
  Antisense strand to SEQ ID NO: 809370
uauaauacccaucagcugc

SEQ ID NO: 809372 - RNA, 19 nt, Artificial Sequence
  Description of Artificial Sequence: Synthetic oligonucleotide
  Sense strand starting at position 459 of SEQ ID NO: 587667
ggguauuauaaggaugucu

SEQ ID NO: 809373 - RNA, 19 nt, Artificial Sequence
  Description of Artificial Sequence: Synthetic oligonucleotide
  Antisense strand to SEQ ID NO: 809372
agacauccuuauaauaccc

SEQ ID NO: 809374 - RNA, 19 nt, Artificial Sequence
  Description of Artificial Sequence: Synthetic oligonucleotide
  Sense strand starting at position 461 of SEQ ID NO: 587667
guauuauaaggaugucuac

SEQ ID NO: 809375 - RNA, 19 nt, Artificial Sequence
  Description of Artificial Sequence: Synthetic oligonucleotide
  Antisense strand to SEQ ID NO: 809374
guagacauccuuauaauac

SEQ ID NO: 809376 - RNA, 19 nt, Artificial Sequence
  Description of Artificial Sequence: Synthetic oligonucleotide
  Sense strand starting at position 498 of SEQ ID NO: 587667
cuggcugacuucugaauau

SEQ ID NO: 809377 - RNA, 19 nt, Artificial Sequence
  Description of Artificial Sequence: Synthetic oligonucleotide
  Antisense strand to SEQ ID NO: 809376
auauucagaagucagccag

SEQ ID NO: 809378 - RNA, 19 nt, Artificial Sequence
  Description of Artificial Sequence: Synthetic oligonucleotide
  Sense strand starting at position 524 of SEQ ID NO: 587667
uucccaguagcuuaaagaa

SEQ ID NO: 809379 - RNA, 19 nt, Artificial Sequence
  Description of Artificial Sequence: Synthetic oligonucleotide
  Antisense strand to SEQ ID NO: 809378
uucuuuaagcuacugggaa

SEQ ID NO: 809380 - RNA, 19 nt, Artificial Sequence
  Description of Artificial Sequence: Synthetic oligonucleotide
  Sense strand starting at position 583 of SEQ ID NO: 587667
gguguucuuggaugggcau

SEQ ID NO: 809381 - RNA, 19 nt, Artificial Sequence
  Description of Artificial Sequence: Synthetic oligonucleotide
  Antisense strand to SEQ ID NO: 809380
augcccauccaagaacacc

SEQ ID NO: 809382 - RNA, 19 nt, Artificial Sequence
  Description of Artificial Sequence: Synthetic oligonucleotide
  Sense strand starting at position 1019 of SEQ ID NO: 587667
ccgccaaauguccgcgaga

SEQ ID NO: 809383 - RNA, 19 nt, Artificial Sequence
  Description of Artificial Sequence: Synthetic oligonucleotide
  Antisense strand to SEQ ID NO: 809382
ucucgcggacauuuggcgg

SEQ ID NO: 809384 - RNA, 19 nt, Artificial Sequence
  Description of Artificial Sequence: Synthetic oligonucleotide
  Sense strand starting at position 1144 of SEQ ID NO: 587667
cguguugcacugugacaca

SEQ ID NO: 809385 - RNA, 19 nt, Artificial Sequence
  Description of Artificial Sequence: Synthetic oligonucleotide
  Antisense strand to SEQ ID NO: 809384
ugugucacagugcaacacg

SEQ ID NO: 809386 - RNA, 19 nt, Artificial Sequence
  Description of Artificial Sequence: Synthetic oligonucleotide
  Sense strand starting at position 1505 of SEQ ID NO: 587667
aggaaacgcuauccuggua

SEQ ID NO: 809387 - RNA, 19 nt, Artificial Sequence
  Description of Artificial Sequence: Synthetic oligonucleotide
  Antisense strand to SEQ ID NO: 809386
uaccaggauagcguuuccu

SEQ ID NO: 809388 - RNA, 19 nt, Artificial Sequence
  Description of Artificial Sequence: Synthetic oligonucleotide
  Sense strand starting at position 1508 of SEQ ID NO: 587667
aaacgcuauccugguauuu

SEQ ID NO: 809389 - RNA, 19 nt, Artificial Sequence
  Description of Artificial Sequence: Synthetic oligonucleotide
  Antisense strand to SEQ ID NO: 809388
aaauaccaggauagcguuu

SEQ ID NO: 809390 - RNA, 19 nt, Artificial Sequence
  Description of Artificial Sequence: Synthetic oligonucleotide
  Sense strand starting at position 1614 of SEQ ID NO: 587667
ccucccuuuccguaauuga

SEQ ID NO: 809391 - RNA, 19 nt, Artificial Sequence
  Description of Artificial Sequence: Synthetic oligonucleotide
  Antisense strand to SEQ ID NO: 809390
ucaauuacggaaagggagg

SEQ ID NO: 809392 - RNA, 19 nt, Artificial Sequence
  Description of Artificial Sequence: Synthetic oligonucleotide
  Sense strand starting at position 1712 of SEQ ID NO: 587667
ggcgcuuacuccuggagua

SEQ ID NO: 809393 - RNA, 19 nt, Artificial Sequence
  Description of Artificial Sequence: Synthetic oligonucleotide
  Antisense strand to SEQ ID NO: 809392
uacuccaggaguaagcgcc

SEQ ID NO: 809394 - RNA, 19 nt, Artificial Sequence
  Description of Artificial Sequence: Synthetic oligonucleotide
  Sense strand starting at position 1713 of SEQ ID NO: 587667
gcgcuuacuccuggaguac

SEQ ID NO: 809395 - RNA, 19 nt, Artificial Sequence
  Description of Artificial Sequence: Synthetic oligonucleotide
  Antisense strand to SEQ ID NO: 809394
guacuccaggaguaagcgc

SEQ ID NO: 809396 - RNA, 19 nt, Artificial Sequence
  Description of Artificial Sequence: Synthetic oligonucleotide
  Sense strand starting at position 1938 of SEQ ID NO: 587667
aggcgagguuuguuuacgu

SEQ ID NO: 809397 - RNA, 19 nt, Artificial Sequence
  Description of Artificial Sequence: Synthetic oligonucleotide
  Antisense strand to SEQ ID NO: 809396
acguaaacaaaccucgccu

SEQ ID NO: 809398 - RNA, 19 nt, Artificial Sequence
  Description of Artificial Sequence: Synthetic oligonucleotide
  Sense strand starting at position 2280 of SEQ ID NO: 587667
ugugcuugugcguguucau

SEQ ID NO: 809399 - RNA, 19 nt, Artificial Sequence
  Description of Artificial Sequence: Synthetic oligonucleotide
  Antisense strand to SEQ ID NO: 809398
augaacacgcacaagcaca

SEQ ID NO: 809400 - RNA, 19 nt, Artificial Sequence
  Description of Artificial Sequence: Synthetic oligonucleotide
  Sense strand starting at position 2358 of SEQ ID NO: 587667
ccaucucugccucagaguu

SEQ ID NO: 809401 - RNA, 19 nt, Artificial Sequence
  Description of Artificial Sequence: Synthetic oligonucleotide
  Antisense strand to SEQ ID NO: 809400
aacucugaggcagagaugg

SEQ ID NO: 809402 - RNA, 19 nt, Artificial Sequence
  Description of Artificial Sequence: Synthetic oligonucleotide
  Sense strand starting at position 2366 of SEQ ID NO: 587667
gccucagaguuucuucuaa

SEQ ID NO: 809403 - RNA, 19 nt, Artificial Sequence
  Description of Artificial Sequence: Synthetic oligonucleotide
  Antisense strand to SEQ ID NO: 809402
uuagaagaaacucugaggc

SEQ ID NO: 809404 - RNA, 19 nt, Artificial Sequence
  Description of Artificial Sequence: Synthetic oligonucleotide
  Sense strand starting at position 2368 of SEQ ID NO: 587667
cucagaguuucuucuaaga

SEQ ID NO: 809405 - RNA, 19 nt, Artificial Sequence
  Description of Artificial Sequence: Synthetic oligonucleotide
  Antisense strand to SEQ ID NO: 809404
ucuuagaagaaacucugag

SEQ ID NO: 809406 - RNA, 19 nt, Artificial Sequence
  Description of Artificial Sequence: Synthetic oligonucleotide
  Sense strand starting at position 2370 of SEQ ID NO: 587667
cagaguuucuucuaagagu

SEQ ID NO: 809407 - RNA, 19 nt, Artificial Sequence
  Description of Artificial Sequence: Synthetic oligonucleotide
  Antisense strand to SEQ ID NO: 809406
acucuuagaagaaacucug

SEQ ID NO: 809408 - RNA, 19 nt, Artificial Sequence
  Description of Artificial Sequence: Synthetic oligonucleotide
  Sense strand starting at position 2550 of SEQ ID NO: 587667
auccucgcucccguuuaau

SEQ ID NO: 809409 - RNA, 19 nt, Artificial Sequence
  Description of Artificial Sequence: Synthetic oligonucleotide
  Antisense strand to SEQ ID NO: 809408
auuaaacgggagcgaggau

SEQ ID NO: 809410 - RNA, 19 nt, Artificial Sequence
  Description of Artificial Sequence: Synthetic oligonucleotide
  Sense strand starting at position 2559 of SEQ ID NO: 587667
cccguuuaaucucguccau

SEQ ID NO: 809411 - RNA, 19 nt, Artificial Sequence
  Description of Artificial Sequence: Synthetic oligonucleotide
  Antisense strand to SEQ ID NO: 809410
auggacgagauuaaacggg

SEQ ID NO: 809412 - RNA, 19 nt, Artificial Sequence
  Description of Artificial Sequence: Synthetic oligonucleotide
  Sense strand starting at position 2561 of SEQ ID NO: 587667
cguuuaaucucguccaucu

SEQ ID NO: 809413 - RNA, 19 nt, Artificial Sequence
  Description of Artificial Sequence: Synthetic oligonucleotide
  Antisense strand to SEQ ID NO: 809412
agauggacgagauuaaacg

SEQ ID NO: 809414 - RNA, 19 nt, Artificial Sequence
  Description of Artificial Sequence: Synthetic oligonucleotide
  Sense strand starting at position 2772 of SEQ ID NO: 587667
cucuguuugugcguaacua

SEQ ID NO: 809415 - RNA, 19 nt, Artificial Sequence
  Description of Artificial Sequence: Synthetic oligonucleotide
  Antisense strand to SEQ ID NO: 809414
uaguuacgcacaaacagag

SEQ ID NO: 809416 - RNA, 19 nt, Artificial Sequence
  Description of Artificial Sequence: Synthetic oligonucleotide
  Sense strand starting at position 2773 of SEQ ID NO: 587667
ucuguuugugcguaacuau

SEQ ID NO: 809417 - RNA, 19 nt, Artificial Sequence
  Description of Artificial Sequence: Synthetic oligonucleotide
  Antisense strand to SEQ ID NO: 809416
auaguuacgcacaaacaga

SEQ ID NO: 809418 - RNA, 19 nt, Artificial Sequence
  Description of Artificial Sequence: Synthetic oligonucleotide
  Sense strand starting at position 2785 of SEQ ID NO: 587667
uaacuauuggccugcaugu

SEQ ID NO: 809419 - RNA, 19 nt, Artificial Sequence
  Description of Artificial Sequence: Synthetic oligonucleotide
  Antisense strand to SEQ ID NO: 809418
acaugcaggccaauaguua

SEQ ID NO: 809420 - RNA, 19 nt, Artificial Sequence
  Description of Artificial Sequence: Synthetic oligonucleotide
  Sense strand starting at position 2803 of SEQ ID NO: 587667
uucccaucuggccaaagaa

SEQ ID NO: 809421 - RNA, 19 nt, Artificial Sequence
  Description of Artificial Sequence: Synthetic oligonucleotide
  Antisense strand to SEQ ID NO: 809420
uucuuuggccagaugggaa

SEQ ID NO: 809422 - RNA, 19 nt, Artificial Sequence
  Description of Artificial Sequence: Synthetic oligonucleotide
  Sense strand starting at position 3379 of SEQ ID NO: 587667
aggccugucuuugacacua

SEQ ID NO: 809423 - RNA, 19 nt, Artificial Sequence
  Description of Artificial Sequence: Synthetic oligonucleotide
  Antisense strand to SEQ ID NO: 809422
uagugucaaagacaggccu

SEQ ID NO: 809424 - RNA, 19 nt, Artificial Sequence
  Description of Artificial Sequence: Synthetic oligonucleotide
  Sense strand starting at position 3384 of SEQ ID NO: 587667
ugucuuugacacuaucgau

SEQ ID NO: 809425 - RNA, 19 nt, Artificial Sequence
  Description of Artificial Sequence: Synthetic oligonucleotide
  Antisense strand to SEQ ID NO: 809424
aucgauagugucaaagaca

SEQ ID NO: 809426 - RNA, 19 nt, Artificial Sequence
  Description of Artificial Sequence: Synthetic oligonucleotide
  Sense strand starting at position 3445 of SEQ ID NO: 587667
gggagaggauuagauucaa

SEQ ID NO: 809427 - RNA, 19 nt, Artificial Sequence
  Description of Artificial Sequence: Synthetic oligonucleotide
  Antisense strand to SEQ ID NO: 809426
uugaaucuaauccucuccc

SEQ ID NO: 809428 - RNA, 19 nt, Artificial Sequence
  Description of Artificial Sequence: Synthetic oligonucleotide
  Sense strand starting at position 3477 of SEQ ID NO: 587667
ccuaucuagugcuaaagcu

SEQ ID NO: 809429 - RNA, 19 nt, Artificial Sequence
  Description of Artificial Sequence: Synthetic oligonucleotide
  Antisense strand to SEQ ID NO: 809428
agcuuuagcacuagauagg

SEQ ID NO: 809430 - RNA, 19 nt, Artificial Sequence
  Description of Artificial Sequence: Synthetic oligonucleotide
  Sense strand starting at position 3509 of SEQ ID NO: 587667
acaaaugaccagugugaag

SEQ ID NO: 809431 - RNA, 19 nt, Artificial Sequence
  Description of Artificial Sequence: Synthetic oligonucleotide
  Antisense strand to SEQ ID NO: 809430
cuucacacuggucauuugu

SEQ ID NO: 809432 - RNA, 19 nt, Artificial Sequence
  Description of Artificial Sequence: Synthetic oligonucleotide
  Sense strand starting at position 3582 of SEQ ID NO: 587667
aaguuuggcuauuagcuau

SEQ ID NO: 809433 - RNA, 19 nt, Artificial Sequence
  Description of Artificial Sequence: Synthetic oligonucleotide
  Antisense strand to SEQ ID NO: 809432
auagcuaauagccaaacuu

SEQ ID NO: 809434 - RNA, 19 nt, Artificial Sequence
  Description of Artificial Sequence: Synthetic oligonucleotide
  Sense strand starting at position 3585 of SEQ ID NO: 587667
uuuggcuauuagcuaugaa

SEQ ID NO: 809435 - RNA, 19 nt, Artificial Sequence
  Description of Artificial Sequence: Synthetic oligonucleotide
  Antisense strand to SEQ ID NO: 809434
uucauagcuaauagccaaa

SEQ ID NO: 809436 - RNA, 19 nt, Artificial Sequence
  Description of Artificial Sequence: Synthetic oligonucleotide
  Sense strand starting at position 3586 of SEQ ID NO: 587667
uuggcuauuagcuaugaag

SEQ ID NO: 809437 - RNA, 19 nt, Artificial Sequence
  Description of Artificial Sequence: Synthetic oligonucleotide
  Antisense strand to SEQ ID NO: 809436
cuucauagcuaauagccaa

SEQ ID NO: 809438 - RNA, 19 nt, Artificial Sequence
  Description of Artificial Sequence: Synthetic oligonucleotide
  Sense strand starting at position 3588 of SEQ ID NO: 587667
ggcuauuagcuaugaaguu

SEQ ID NO: 809439 - RNA, 19 nt, Artificial Sequence
  Description of Artificial Sequence: Synthetic oligonucleotide
  Antisense strand to SEQ ID NO: 809438
aacuucauagcuaauagcc

SEQ ID NO: 809440 - RNA, 19 nt, Artificial Sequence
  Description of Artificial Sequence: Synthetic oligonucleotide
  Sense strand starting at position 3589 of SEQ ID NO: 587667
gcuauuagcuaugaaguuu

SEQ ID NO: 809441 - RNA, 19 nt, Artificial Sequence
  Description of Artificial Sequence: Synthetic oligonucleotide
  Antisense strand to SEQ ID NO: 809440
aaacuucauagcuaauagc

SEQ ID NO: 809442 - RNA, 19 nt, Artificial Sequence
  Description of Artificial Sequence: Synthetic oligonucleotide
  Sense strand starting at position 3615 of SEQ ID NO: 587667
cuacaaaguuuggcuacau

SEQ ID NO: 809443 - RNA, 19 nt, Artificial Sequence
  Description of Artificial Sequence: Synthetic oligonucleotide
  Antisense strand to SEQ ID NO: 809442
auguagccaaacuuuguag

SEQ ID NO: 809444 - RNA, 19 nt, Artificial Sequence
  Description of Artificial Sequence: Synthetic oligonucleotide
  Sense strand starting at position 3634 of SEQ ID NO: 587667
ucaagaaugccuugaaugu

SEQ ID NO: 809445 - RNA, 19 nt, Artificial Sequence
  Description of Artificial Sequence: Synthetic oligonucleotide
  Antisense strand to SEQ ID NO: 809444
acauucaaggcauucuuga

SEQ ID NO: 809446 - RNA, 19 nt, Artificial Sequence
  Description of Artificial Sequence: Synthetic oligonucleotide
  Sense strand starting at position 3760 of SEQ ID NO: 587667
cagcauucccagugaggga

SEQ ID NO: 809447 - RNA, 19 nt, Artificial Sequence
  Description of Artificial Sequence: Synthetic oligonucleotide
  Antisense strand to SEQ ID NO: 809446
ucccucacugggaaugcug

SEQ ID NO: 809448 - RNA, 19 nt, Artificial Sequence
  Description of Artificial Sequence: Synthetic oligonucleotide
  Sense strand starting at position 278 of SEQ ID NO: 587668
agugauuaucucugcaaag

SEQ ID NO: 809449 - RNA, 19 nt, Artificial Sequence
  Description of Artificial Sequence: Synthetic oligonucleotide
  Antisense strand to SEQ ID NO: 809448
cuuugcagagauaaucacu

SEQ ID NO: 809450 - RNA, 19 nt, Artificial Sequence
  Description of Artificial Sequence: Synthetic oligonucleotide
  Sense strand starting at position 279 of SEQ ID NO: 587668
gugauuaucucugcaaagu

SEQ ID NO: 809451 - RNA, 19 nt, Artificial Sequence
  Description of Artificial Sequence: Synthetic oligonucleotide
  Antisense strand to SEQ ID NO: 809450
acuuugcagagauaaucac

SEQ ID NO: 809452 - RNA, 19 nt, Artificial Sequence
  Description of Artificial Sequence: Synthetic oligonucleotide
  Sense strand starting at position 280 of SEQ ID NO: 587668
ugauuaucucugcaaaguu

SEQ ID NO: 809453 - RNA, 19 nt, Artificial Sequence
  Description of Artificial Sequence: Synthetic oligonucleotide
  Antisense strand to SEQ ID NO: 809452
aacuuugcagagauaauca

SEQ ID NO: 809454 - RNA, 19 nt, Artificial Sequence
  Description of Artificial Sequence: Synthetic oligonucleotide
  Sense strand starting at position 318 of SEQ ID NO: 587668
ggugguauacucuggcaac

SEQ ID NO: 809455 - RNA, 19 nt, Artificial Sequence
  Description of Artificial Sequence: Synthetic oligonucleotide
  Antisense strand to SEQ ID NO: 809454
guugccagaguauaccacc

SEQ ID NO: 809456 - RNA, 19 nt, Artificial Sequence
  Description of Artificial Sequence: Synthetic oligonucleotide
  Sense strand starting at position 947 of SEQ ID NO: 587668
uuugguaaguccuugagac

SEQ ID NO: 809457 - RNA, 19 nt, Artificial Sequence
  Description of Artificial Sequence: Synthetic oligonucleotide
  Antisense strand to SEQ ID NO: 809456
gucucaaggacuuaccaaa

SEQ ID NO: 809458 - RNA, 19 nt, Artificial Sequence
  Description of Artificial Sequence: Synthetic oligonucleotide
  Sense strand starting at position 948 of SEQ ID NO: 587668
uugguaaguccuugagacc

SEQ ID NO: 809459 - RNA, 19 nt, Artificial Sequence
  Description of Artificial Sequence: Synthetic oligonucleotide
  Antisense strand to SEQ ID NO: 809458
ggucucaaggacuuaccaa

SEQ ID NO: 809460 - RNA, 19 nt, Artificial Sequence
  Description of Artificial Sequence: Synthetic oligonucleotide
  Sense strand starting at position 949 of SEQ ID NO: 587668
ugguaaguccuugagacca

SEQ ID NO: 809461 - RNA, 19 nt, Artificial Sequence
  Description of Artificial Sequence: Synthetic oligonucleotide
  Antisense strand to SEQ ID NO: 809460
uggucucaaggacuuacca

SEQ ID NO: 809462 - RNA, 19 nt, Artificial Sequence
  Description of Artificial Sequence: Synthetic oligonucleotide
  Sense strand starting at position 1085 of SEQ ID NO: 587668
aggugaccugauugaucca

SEQ ID NO: 809463 - RNA, 19 nt, Artificial Sequence
  Description of Artificial Sequence: Synthetic oligonucleotide
  Antisense strand to SEQ ID NO: 809462
uggaucaaucaggucaccu

SEQ ID NO: 809464 - RNA, 19 nt, Artificial Sequence
  Description of Artificial Sequence: Synthetic oligonucleotide
  Sense strand starting at position 1193 of SEQ ID NO: 587668
acuuuaugaggcuauucuu

SEQ ID NO: 809465 - RNA, 19 nt, Artificial Sequence
  Description of Artificial Sequence: Synthetic oligonucleotide
  Antisense strand to SEQ ID NO: 809464
aagaauagccucauaaagu

SEQ ID NO: 809466 - RNA, 19 nt, Artificial Sequence
  Description of Artificial Sequence: Synthetic oligonucleotide
  Sense strand starting at position 1220 of SEQ ID NO: 587668
guggcaaauucucuaauca

SEQ ID NO: 809467 - RNA, 19 nt, Artificial Sequence
  Description of Artificial Sequence: Synthetic oligonucleotide
  Antisense strand to SEQ ID NO: 809466
ugauuagagaauuugccac

SEQ ID NO: 809468 - RNA, 19 nt, Artificial Sequence
  Description of Artificial Sequence: Synthetic oligonucleotide
  Sense strand starting at position 1248 of SEQ ID NO: 587668
ccaguuuccuugucuguua

SEQ ID NO: 809469 - RNA, 19 nt, Artificial Sequence
  Description of Artificial Sequence: Synthetic oligonucleotide
  Antisense strand to SEQ ID NO: 809468
uaacagacaaggaaacugg

SEQ ID NO: 809470 - RNA, 19 nt, Artificial Sequence
  Description of Artificial Sequence: Synthetic oligonucleotide
  Sense strand starting at position 1346 of SEQ ID NO: 587668
cuuaaaugauaggucuaca

SEQ ID NO: 809471 - RNA, 19 nt, Artificial Sequence
  Description of Artificial Sequence: Synthetic oligonucleotide
  Antisense strand to SEQ ID NO: 809470
uguagaccuaucauuuaag

SEQ ID NO: 809472 - RNA, 19 nt, Artificial Sequence
  Description of Artificial Sequence: Synthetic oligonucleotide
  Sense strand starting at position 1360 of SEQ ID NO: 587668
cuacauuuguccgucgcaa

SEQ ID NO: 809473 - RNA, 19 nt, Artificial Sequence
  Description of Artificial Sequence: Synthetic oligonucleotide
  Antisense strand to SEQ ID NO: 809472
uugcgacggacaaauguag

SEQ ID NO: 809474 - RNA, 19 nt, Artificial Sequence
  Description of Artificial Sequence: Synthetic oligonucleotide
  Sense strand starting at position 1362 of SEQ ID NO: 587668
acauuuguccgucgcaacu

SEQ ID NO: 809475 - RNA, 19 nt, Artificial Sequence
  Description of Artificial Sequence: Synthetic oligonucleotide
  Antisense strand to SEQ ID NO: 809474
aguugcgacggacaaaugu

SEQ ID NO: 809476 - RNA, 19 nt, Artificial Sequence
  Description of Artificial Sequence: Synthetic oligonucleotide
  Sense strand starting at position 1368 of SEQ ID NO: 587668
guccgucgcaacuuguaau

SEQ ID NO: 809477 - RNA, 19 nt, Artificial Sequence
  Description of Artificial Sequence: Synthetic oligonucleotide
  Antisense strand to SEQ ID NO: 809476
auuacaaguugcgacggac

SEQ ID NO: 809478 - RNA, 19 nt, Artificial Sequence
  Description of Artificial Sequence: Synthetic oligonucleotide
  Sense strand starting at position 1402 of SEQ ID NO: 587668
guaaucugcuuugcauaau

SEQ ID NO: 809479 - RNA, 19 nt, Artificial Sequence
  Description of Artificial Sequence: Synthetic oligonucleotide
  Antisense strand to SEQ ID NO: 809478
auuaugcaaagcagauuac

SEQ ID NO: 809480 - RNA, 19 nt, Artificial Sequence
  Description of Artificial Sequence: Synthetic oligonucleotide
  Sense strand starting at position 1471 of SEQ ID NO: 587668
aauagacguucugugaaua

SEQ ID NO: 809481 - RNA, 19 nt, Artificial Sequence
  Description of Artificial Sequence: Synthetic oligonucleotide
  Antisense strand to SEQ ID NO: 809480
uauucacagaacgucuauu

SEQ ID NO: 809482 - RNA, 19 nt, Artificial Sequence
  Description of Artificial Sequence: Synthetic oligonucleotide
  Sense strand starting at position 1472 of SEQ ID NO: 587668
auagacguucugugaauaa

SEQ ID NO: 809483 - RNA, 19 nt, Artificial Sequence
  Description of Artificial Sequence: Synthetic oligonucleotide
  Antisense strand to SEQ ID NO: 809482
uuauucacagaacgucuau

SEQ ID NO: 809484 - RNA, 19 nt, Artificial Sequence
  Description of Artificial Sequence: Synthetic oligonucleotide
  Sense strand starting at position 1476 of SEQ ID NO: 587668
acguucugugaauaacaaa

SEQ ID NO: 809485 - RNA, 19 nt, Artificial Sequence
  Description of Artificial Sequence: Synthetic oligonucleotide
  Antisense strand to SEQ ID NO: 809484
uuuguuauucacagaacgu

SEQ ID NO: 809486 - RNA, 19 nt, Artificial Sequence
  Description of Artificial Sequence: Synthetic oligonucleotide
  Sense strand starting at position 1585 of SEQ ID NO: 587668
uugugacccaugugaaugu

SEQ ID NO: 809487 - RNA, 19 nt, Artificial Sequence
  Description of Artificial Sequence: Synthetic oligonucleotide
  Antisense strand to SEQ ID NO: 809486
acauucacaugggucacaa

SEQ ID NO: 809488 - RNA, 19 nt, Artificial Sequence
  Description of Artificial Sequence: Synthetic oligonucleotide
  Sense strand starting at position 2160 of SEQ ID NO: 587668
gccuucguuccaggaaaga

SEQ ID NO: 809489 - RNA, 19 nt, Artificial Sequence
  Description of Artificial Sequence: Synthetic oligonucleotide
  Antisense strand to SEQ ID NO: 809488
ucuuuccuggaacgaaggc

SEQ ID NO: 809490 - RNA, 19 nt, Artificial Sequence
  Description of Artificial Sequence: Synthetic oligonucleotide
  Sense strand starting at position 2418 of SEQ ID NO: 587668
ggaaguuugcaauagguga

SEQ ID NO: 809491 - RNA, 19 nt, Artificial Sequence
  Description of Artificial Sequence: Synthetic oligonucleotide
  Antisense strand to SEQ ID NO: 809490
ucaccuauugcaaacuucc

SEQ ID NO: 809492 - RNA, 19 nt, Artificial Sequence
  Description of Artificial Sequence: Synthetic oligonucleotide
  Sense strand starting at position 2443 of SEQ ID NO: 587668
agucuuggugaccaccaaa

SEQ ID NO: 809493 - RNA, 19 nt, Artificial Sequence
  Description of Artificial Sequence: Synthetic oligonucleotide
  Antisense strand to SEQ ID NO: 809492
uuugguggucaccaagacu

SEQ ID NO: 809494 - RNA, 19 nt, Artificial Sequence
  Description of Artificial Sequence: Synthetic oligonucleotide
  Sense strand starting at position 2474 of SEQ ID NO: 587668
accaaaggccucuggaaau

SEQ ID NO: 809495 - RNA, 19 nt, Artificial Sequence
  Description of Artificial Sequence: Synthetic oligonucleotide
  Antisense strand to SEQ ID NO: 809494
auuuccagaggccuuuggu

SEQ ID NO: 809496 - RNA, 19 nt, Artificial Sequence
  Description of Artificial Sequence: Synthetic oligonucleotide
  Sense strand starting at position 2485 of SEQ ID NO: 587668
cuggaaaugucgcccuguu

SEQ ID NO: 809497 - RNA, 19 nt, Artificial Sequence
  Description of Artificial Sequence: Synthetic oligonucleotide
  Antisense strand to SEQ ID NO: 809496
aacagggcgacauuuccag

SEQ ID NO: 809498 - RNA, 19 nt, Artificial Sequence
  Description of Artificial Sequence: Synthetic oligonucleotide
  Sense strand starting at position 2732 of SEQ ID NO: 587668
aauaguaaguagucgggua

SEQ ID NO: 809499 - RNA, 19 nt, Artificial Sequence
  Description of Artificial Sequence: Synthetic oligonucleotide
  Antisense strand to SEQ ID NO: 809498
uacccgacuacuuacuauu

SEQ ID NO: 809500 - RNA, 19 nt, Artificial Sequence
  Description of Artificial Sequence: Synthetic oligonucleotide
  Sense strand starting at position 2733 of SEQ ID NO: 587668
auaguaaguagucggguaa

SEQ ID NO: 809501 - RNA, 19 nt, Artificial Sequence
  Description of Artificial Sequence: Synthetic oligonucleotide
  Antisense strand to SEQ ID NO: 809500
uuacccgacuacuuacuau

SEQ ID NO: 809502 - RNA, 19 nt, Artificial Sequence
  Description of Artificial Sequence: Synthetic oligonucleotide
  Sense strand starting at position 2737 of SEQ ID NO: 587668
uaaguagucggguaagauc

SEQ ID NO: 809503 - RNA, 19 nt, Artificial Sequence
  Description of Artificial Sequence: Synthetic oligonucleotide
  Antisense strand to SEQ ID NO: 809502
gaucuuacccgacuacuua

SEQ ID NO: 809504 - RNA, 19 nt, Artificial Sequence
  Description of Artificial Sequence: Synthetic oligonucleotide
  Sense strand starting at position 2768 of SEQ ID NO: 587668
auaucuguguuauuccaca

SEQ ID NO: 809505 - RNA, 19 nt, Artificial Sequence
  Description of Artificial Sequence: Synthetic oligonucleotide
  Antisense strand to SEQ ID NO: 809504
uguggaauaacacagauau

SEQ ID NO: 809506 - RNA, 19 nt, Artificial Sequence
  Description of Artificial Sequence: Synthetic oligonucleotide
  Sense strand starting at position 2773 of SEQ ID NO: 587668
uguguuauuccacaaucuu

SEQ ID NO: 809507 - RNA, 19 nt, Artificial Sequence
  Description of Artificial Sequence: Synthetic oligonucleotide
  Antisense strand to SEQ ID NO: 809506
aagauuguggaauaacaca

SEQ ID NO: 809508 - RNA, 19 nt, Artificial Sequence
  Description of Artificial Sequence: Synthetic oligonucleotide
  Sense strand starting at position 2910 of SEQ ID NO: 587668
gguccuuaggaagauguau

SEQ ID NO: 809509 - RNA, 19 nt, Artificial Sequence
  Description of Artificial Sequence: Synthetic oligonucleotide
  Antisense strand to SEQ ID NO: 809508
auacaucuuccuaaggacc

SEQ ID NO: 809510 - RNA, 19 nt, Artificial Sequence
  Description of Artificial Sequence: Synthetic oligonucleotide
  Sense strand starting at position 2921 of SEQ ID NO: 587668
agauguauuuaucaaggca

SEQ ID NO: 809511 - RNA, 19 nt, Artificial Sequence
  Description of Artificial Sequence: Synthetic oligonucleotide
  Antisense strand to SEQ ID NO: 809510
ugccuugauaaauacaucu

SEQ ID NO: 809512 - RNA, 19 nt, Artificial Sequence
  Description of Artificial Sequence: Synthetic oligonucleotide
  Sense strand starting at position 3242 of SEQ ID NO: 587668
gggauuaacuuugaauauu

SEQ ID NO: 809513 - RNA, 19 nt, Artificial Sequence
  Description of Artificial Sequence: Synthetic oligonucleotide
  Antisense strand to SEQ ID NO: 809512
aauauucaaaguuaauccc

SEQ ID NO: 809514 - RNA, 19 nt, Artificial Sequence
  Description of Artificial Sequence: Synthetic oligonucleotide
  Sense strand starting at position 3313 of SEQ ID NO: 587668
aauauuagaggugggucua

SEQ ID NO: 809515 - RNA, 19 nt, Artificial Sequence
  Description of Artificial Sequence: Synthetic oligonucleotide
  Antisense strand to SEQ ID NO: 809514
uagacccaccucuaauauu

SEQ ID NO: 809516 - RNA, 19 nt, Artificial Sequence
  Description of Artificial Sequence: Synthetic oligonucleotide
  Sense strand starting at position 3421 of SEQ ID NO: 587668
ccagacugguucuuucuaa

SEQ ID NO: 809517 - RNA, 19 nt, Artificial Sequence
  Description of Artificial Sequence: Synthetic oligonucleotide
  Antisense strand to SEQ ID NO: 809516
uuagaaagaaccagucugg

SEQ ID NO: 809518 - RNA, 19 nt, Artificial Sequence
  Description of Artificial Sequence: Synthetic oligonucleotide
  Sense strand starting at position 3474 of SEQ ID NO: 587668
cagcauuuacuguguguua

SEQ ID NO: 809519 - RNA, 19 nt, Artificial Sequence
  Description of Artificial Sequence: Synthetic oligonucleotide
  Antisense strand to SEQ ID NO: 809518
uaacacacaguaaaugcug

SEQ ID NO: 809520 - RNA, 19 nt, Artificial Sequence
  Description of Artificial Sequence: Synthetic oligonucleotide
  Sense strand starting at position 3476 of SEQ ID NO: 587668
gcauuuacuguguguuaua

SEQ ID NO: 809521 - RNA, 19 nt, Artificial Sequence
  Description of Artificial Sequence: Synthetic oligonucleotide
  Antisense strand to SEQ ID NO: 809520
uauaacacacaguaaaugc

SEQ ID NO: 809522 - RNA, 19 nt, Artificial Sequence
  Description of Artificial Sequence: Synthetic oligonucleotide
  Sense strand starting at position 3477 of SEQ ID NO: 587668
cauuuacuguguguuauau

SEQ ID NO: 809523 - RNA, 19 nt, Artificial Sequence
  Description of Artificial Sequence: Synthetic oligonucleotide
  Antisense strand to SEQ ID NO: 809522
auauaacacacaguaaaug

SEQ ID NO: 809524 - RNA, 19 nt, Artificial Sequence
  Description of Artificial Sequence: Synthetic oligonucleotide
  Sense strand starting at position 3727 of SEQ ID NO: 587668
gugacugguccaggacagu

SEQ ID NO: 809525 - RNA, 19 nt, Artificial Sequence
  Description of Artificial Sequence: Synthetic oligonucleotide
  Antisense strand to SEQ ID NO: 809524
acuguccuggaccagucac

SEQ ID NO: 809526 - RNA, 19 nt, Artificial Sequence
  Description of Artificial Sequence: Synthetic oligonucleotide
  Sense strand starting at position 3744 of SEQ ID NO: 587668
gugcauauuucccugaucu

SEQ ID NO: 809527 - RNA, 19 nt, Artificial Sequence
  Description of Artificial Sequence: Synthetic oligonucleotide
  Antisense strand to SEQ ID NO: 809526
agaucagggaaauaugcac

SEQ ID NO: 809528 - RNA, 19 nt, Artificial Sequence
  Description of Artificial Sequence: Synthetic oligonucleotide
  Sense strand starting at position 217 of SEQ ID NO: 587669
acagucgugaucuaacaag

SEQ ID NO: 809529 - RNA, 19 nt, Artificial Sequence
  Description of Artificial Sequence: Synthetic oligonucleotide
  Antisense strand to SEQ ID NO: 809528
cuuguuagaucacgacugu

SEQ ID NO: 809530 - RNA, 19 nt, Artificial Sequence
  Description of Artificial Sequence: Synthetic oligonucleotide
  Sense strand starting at position 317 of SEQ ID NO: 587669
acaguaugccuaggaugga

SEQ ID NO: 809531 - RNA, 19 nt, Artificial Sequence
  Description of Artificial Sequence: Synthetic oligonucleotide
  Antisense strand to SEQ ID NO: 809530
uccauccuaggcauacugu

SEQ ID NO: 809532 - RNA, 19 nt, Artificial Sequence
  Description of Artificial Sequence: Synthetic oligonucleotide
  Sense strand starting at position 458 of SEQ ID NO: 587669
ccucuagaacuauggacuu

SEQ ID NO: 809533 - RNA, 19 nt, Artificial Sequence
  Description of Artificial Sequence: Synthetic oligonucleotide
  Antisense strand to SEQ ID NO: 809532
aaguccauaguucuagagg

SEQ ID NO: 809534 - RNA, 19 nt, Artificial Sequence
  Description of Artificial Sequence: Synthetic oligonucleotide
  Sense strand starting at position 496 of SEQ ID NO: 587669
ucaguauugcuugaauucu

SEQ ID NO: 809535 - RNA, 19 nt, Artificial Sequence
  Description of Artificial Sequence: Synthetic oligonucleotide
  Antisense strand to SEQ ID NO: 809534
agaauucaagcaauacuga

SEQ ID NO: 809536 - RNA, 19 nt, Artificial Sequence
  Description of Artificial Sequence: Synthetic oligonucleotide
  Sense strand starting at position 899 of SEQ ID NO: 587669
ucaagagaaguaugucagu

SEQ ID NO: 809537 - RNA, 19 nt, Artificial Sequence
  Description of Artificial Sequence: Synthetic oligonucleotide
  Antisense strand to SEQ ID NO: 809536
acugacauacuucucuuga

SEQ ID NO: 809538 - RNA, 19 nt, Artificial Sequence
  Description of Artificial Sequence: Synthetic oligonucleotide
  Sense strand starting at position 955 of SEQ ID NO: 587669
gaggguacccucuguaauu

SEQ ID NO: 809539 - RNA, 19 nt, Artificial Sequence
  Description of Artificial Sequence: Synthetic oligonucleotide
  Antisense strand to SEQ ID NO: 809538
aauuacagaggguacccuc

SEQ ID NO: 809540 - RNA, 19 nt, Artificial Sequence
  Description of Artificial Sequence: Synthetic oligonucleotide
  Sense strand starting at position 956 of SEQ ID NO: 587669
aggguacccucuguaauuc

SEQ ID NO: 809541 - RNA, 19 nt, Artificial Sequence
  Description of Artificial Sequence: Synthetic oligonucleotide
  Antisense strand to SEQ ID NO: 809540
gaauuacagaggguacccu

SEQ ID NO: 809542 - RNA, 19 nt, Artificial Sequence
  Description of Artificial Sequence: Synthetic oligonucleotide
  Sense strand starting at position 1032 of SEQ ID NO: 587669
cuacguuuggagagucgua

SEQ ID NO: 809543 - RNA, 19 nt, Artificial Sequence
  Description of Artificial Sequence: Synthetic oligonucleotide
  Antisense strand to SEQ ID NO: 809542
uacgacucuccaaacguag

SEQ ID NO: 809544 - RNA, 19 nt, Artificial Sequence
  Description of Artificial Sequence: Synthetic oligonucleotide
  Sense strand starting at position 1075 of SEQ ID NO: 587669
cacacaucuuggguuguua

SEQ ID NO: 809545 - RNA, 19 nt, Artificial Sequence
  Description of Artificial Sequence: Synthetic oligonucleotide
  Antisense strand to SEQ ID NO: 809544
uaacaacccaagaugugug

SEQ ID NO: 809546 - RNA, 19 nt, Artificial Sequence
  Description of Artificial Sequence: Synthetic oligonucleotide
  Sense strand starting at position 1147 of SEQ ID NO: 587669
uucucagacuagucucaga

SEQ ID NO: 809547 - RNA, 19 nt, Artificial Sequence
  Description of Artificial Sequence: Synthetic oligonucleotide
  Antisense strand to SEQ ID NO: 809546
ucugagacuagucugagaa

SEQ ID NO: 809548 - RNA, 19 nt, Artificial Sequence
  Description of Artificial Sequence: Synthetic oligonucleotide
  Sense strand starting at position 1155 of SEQ ID NO: 587669
cuagucucagacggauaga

SEQ ID NO: 809549 - RNA, 19 nt, Artificial Sequence
  Description of Artificial Sequence: Synthetic oligonucleotide
  Antisense strand to SEQ ID NO: 809548
ucuauccgucugagacuag

SEQ ID NO: 809550 - RNA, 19 nt, Artificial Sequence
  Description of Artificial Sequence: Synthetic oligonucleotide
  Sense strand starting at position 1165 of SEQ ID NO: 587669
acggauagaggucgaaaga

SEQ ID NO: 809551 - RNA, 19 nt, Artificial Sequence
  Description of Artificial Sequence: Synthetic oligonucleotide
  Antisense strand to SEQ ID NO: 809550
ucuuucgaccucuauccgu

SEQ ID NO: 809552 - RNA, 19 nt, Artificial Sequence
  Description of Artificial Sequence: Synthetic oligonucleotide
  Sense strand starting at position 1271 of SEQ ID NO: 587669
gaaugaugaugcuuuggag

SEQ ID NO: 809553 - RNA, 19 nt, Artificial Sequence
  Description of Artificial Sequence: Synthetic oligonucleotide
  Antisense strand to SEQ ID NO: 809552
cuccaaagcaucaucauuc

SEQ ID NO: 809554 - RNA, 19 nt, Artificial Sequence
  Description of Artificial Sequence: Synthetic oligonucleotide
  Sense strand starting at position 1669 of SEQ ID NO: 587669
ccgggucuaccauaggauu

SEQ ID NO: 809555 - RNA, 19 nt, Artificial Sequence
  Description of Artificial Sequence: Synthetic oligonucleotide
  Antisense strand to SEQ ID NO: 809554
aauccuaugguagacccgg

SEQ ID NO: 809556 - RNA, 19 nt, Artificial Sequence
  Description of Artificial Sequence: Synthetic oligonucleotide
  Sense strand starting at position 2067 of SEQ ID NO: 587669
ucaaguuuaucgguaagag

SEQ ID NO: 809557 - RNA, 19 nt, Artificial Sequence
  Description of Artificial Sequence: Synthetic oligonucleotide
  Antisense strand to SEQ ID NO: 809556
cucuuaccgauaaacuuga

SEQ ID NO: 809558 - RNA, 19 nt, Artificial Sequence
  Description of Artificial Sequence: Synthetic oligonucleotide
  Sense strand starting at position 2068 of SEQ ID NO: 587669
caaguuuaucgguaagagg

SEQ ID NO: 809559 - RNA, 19 nt, Artificial Sequence
  Description of Artificial Sequence: Synthetic oligonucleotide
  Antisense strand to SEQ ID NO: 809558
ccucuuaccgauaaacuug

SEQ ID NO: 809560 - RNA, 19 nt, Artificial Sequence
  Description of Artificial Sequence: Synthetic oligonucleotide
  Sense strand starting at position 2261 of SEQ ID NO: 587669
uggauucacgaggguguau

SEQ ID NO: 809561 - RNA, 19 nt, Artificial Sequence
  Description of Artificial Sequence: Synthetic oligonucleotide
  Antisense strand to SEQ ID NO: 809560
auacacccucgugaaucca

SEQ ID NO: 809562 - RNA, 19 nt, Artificial Sequence
  Description of Artificial Sequence: Synthetic oligonucleotide
  Sense strand starting at position 2498 of SEQ ID NO: 587669
guuagugagcgccucaagu

SEQ ID NO: 809563 - RNA, 19 nt, Artificial Sequence
  Description of Artificial Sequence: Synthetic oligonucleotide
  Antisense strand to SEQ ID NO: 809562
acuugaggcgcucacuaac

SEQ ID NO: 809564 - RNA, 19 nt, Artificial Sequence
  Description of Artificial Sequence: Synthetic oligonucleotide
  Sense strand starting at position 2571 of SEQ ID NO: 587669
ucaccaucugguggagaaa

SEQ ID NO: 809565 - RNA, 19 nt, Artificial Sequence
  Description of Artificial Sequence: Synthetic oligonucleotide
  Antisense strand to SEQ ID NO: 809564
uuucuccaccagaugguga

SEQ ID NO: 809566 - RNA, 19 nt, Artificial Sequence
  Description of Artificial Sequence: Synthetic oligonucleotide
  Sense strand starting at position 2765 of SEQ ID NO: 587669
uuagcaagguaauccugau

SEQ ID NO: 809567 - RNA, 19 nt, Artificial Sequence
  Description of Artificial Sequence: Synthetic oligonucleotide
  Antisense strand to SEQ ID NO: 809566
aucaggauuaccuugcuaa

SEQ ID NO: 809568 - RNA, 19 nt, Artificial Sequence
  Description of Artificial Sequence: Synthetic oligonucleotide
  Sense strand starting at position 2769 of SEQ ID NO: 587669
caagguaauccugauagcu

SEQ ID NO: 809569 - RNA, 19 nt, Artificial Sequence
  Description of Artificial Sequence: Synthetic oligonucleotide
  Antisense strand to SEQ ID NO: 809568
agcuaucaggauuaccuug

SEQ ID NO: 809570 - RNA, 19 nt, Artificial Sequence
  Description of Artificial Sequence: Synthetic oligonucleotide
  Sense strand starting at position 2836 of SEQ ID NO: 587669
gagcuuaaacuaggguaau

SEQ ID NO: 809571 - RNA, 19 nt, Artificial Sequence
  Description of Artificial Sequence: Synthetic oligonucleotide
  Antisense strand to SEQ ID NO: 809570
auuacccuaguuuaagcuc

SEQ ID NO: 809572 - RNA, 19 nt, Artificial Sequence
  Description of Artificial Sequence: Synthetic oligonucleotide
  Sense strand starting at position 2874 of SEQ ID NO: 587669
aagagaugugugcagcauu

SEQ ID NO: 809573 - RNA, 19 nt, Artificial Sequence
  Description of Artificial Sequence: Synthetic oligonucleotide
  Antisense strand to SEQ ID NO: 809572
aaugcugcacacaucucuu

SEQ ID NO: 809574 - RNA, 19 nt, Artificial Sequence
  Description of Artificial Sequence: Synthetic oligonucleotide
  Sense strand starting at position 2915 of SEQ ID NO: 587669
gguaguagagagugaacaa

SEQ ID NO: 809575 - RNA, 19 nt, Artificial Sequence
  Description of Artificial Sequence: Synthetic oligonucleotide
  Antisense strand to SEQ ID NO: 809574
uuguucacucucuacuacc

SEQ ID NO: 809576 - RNA, 19 nt, Artificial Sequence
  Description of Artificial Sequence: Synthetic oligonucleotide
  Sense strand starting at position 2984 of SEQ ID NO: 587669
uaguuuggcggugaagaga

SEQ ID NO: 809577 - RNA, 19 nt, Artificial Sequence
  Description of Artificial Sequence: Synthetic oligonucleotide
  Antisense strand to SEQ ID NO: 809576
ucucuucaccgccaaacua

SEQ ID NO: 809578 - RNA, 19 nt, Artificial Sequence
  Description of Artificial Sequence: Synthetic oligonucleotide
  Sense strand starting at position 3017 of SEQ ID NO: 587669
uuuggauuagguuaaguuu

SEQ ID NO: 809579 - RNA, 19 nt, Artificial Sequence
  Description of Artificial Sequence: Synthetic oligonucleotide
  Antisense strand to SEQ ID NO: 809578
aaacuuaaccuaauccaaa

SEQ ID NO: 809580 - RNA, 19 nt, Artificial Sequence
  Description of Artificial Sequence: Synthetic oligonucleotide
  Sense strand starting at position 3023 of SEQ ID NO: 587669
uuagguuaaguuugagaua

SEQ ID NO: 809581 - RNA, 19 nt, Artificial Sequence
  Description of Artificial Sequence: Synthetic oligonucleotide
  Antisense strand to SEQ ID NO: 809580
uaucucaaacuuaaccuaa

SEQ ID NO: 809582 - RNA, 19 nt, Artificial Sequence
  Description of Artificial Sequence: Synthetic oligonucleotide
  Sense strand starting at position 3057 of SEQ ID NO: 587669
gguagagauaucugggcaa

SEQ ID NO: 809583 - RNA, 19 nt, Artificial Sequence
  Description of Artificial Sequence: Synthetic oligonucleotide
  Antisense strand to SEQ ID NO: 809582
uugcccagauaucucuacc

SEQ ID NO: 809584 - RNA, 19 nt, Artificial Sequence
  Description of Artificial Sequence: Synthetic oligonucleotide
  Sense strand starting at position 3059 of SEQ ID NO: 587669
uagagauaucugggcaauu

SEQ ID NO: 809585 - RNA, 19 nt, Artificial Sequence
  Description of Artificial Sequence: Synthetic oligonucleotide
  Antisense strand to SEQ ID NO: 809584
aauugcccagauaucucua

SEQ ID NO: 809586 - RNA, 19 nt, Artificial Sequence
  Description of Artificial Sequence: Synthetic oligonucleotide
  Sense strand starting at position 3114 of SEQ ID NO: 587669
acauuuagaucugagaguu

SEQ ID NO: 809587 - RNA, 19 nt, Artificial Sequence
  Description of Artificial Sequence: Synthetic oligonucleotide
  Antisense strand to SEQ ID NO: 809586
aacucucagaucuaaaugu

SEQ ID NO: 809588 - RNA, 19 nt, Artificial Sequence
  Description of Artificial Sequence: Synthetic oligonucleotide
  Sense strand starting at position 3228 of SEQ ID NO: 587669
cuauguacuguacagucaa

SEQ ID NO: 809589 - RNA, 19 nt, Artificial Sequence
  Description of Artificial Sequence: Synthetic oligonucleotide
  Antisense strand to SEQ ID NO: 809588
uugacuguacaguacauag

SEQ ID NO: 809590 - RNA, 19 nt, Artificial Sequence
  Description of Artificial Sequence: Synthetic oligonucleotide
  Sense strand starting at position 3291 of SEQ ID NO: 587669
uugaaauugcugugggaaa

SEQ ID NO: 809591 - RNA, 19 nt, Artificial Sequence
  Description of Artificial Sequence: Synthetic oligonucleotide
  Antisense strand to SEQ ID NO: 809590
uuucccacagcaauuucaa

SEQ ID NO: 809592 - RNA, 19 nt, Artificial Sequence
  Description of Artificial Sequence: Synthetic oligonucleotide
  Sense strand starting at position 3355 of SEQ ID NO: 587669
cgugucuuagccuuuccau

SEQ ID NO: 809593 - RNA, 19 nt, Artificial Sequence
  Description of Artificial Sequence: Synthetic oligonucleotide
  Antisense strand to SEQ ID NO: 809592
auggaaaggcuaagacacg

SEQ ID NO: 809594 - RNA, 19 nt, Artificial Sequence
  Description of Artificial Sequence: Synthetic oligonucleotide
  Sense strand starting at position 3417 of SEQ ID NO: 587669
caugaaguacuccguaaag

SEQ ID NO: 809595 - RNA, 19 nt, Artificial Sequence
  Description of Artificial Sequence: Synthetic oligonucleotide
  Antisense strand to SEQ ID NO: 809594
cuuuacggaguacuucaug

SEQ ID NO: 809596 - RNA, 19 nt, Artificial Sequence
  Description of Artificial Sequence: Synthetic oligonucleotide
  Sense strand starting at position 3419 of SEQ ID NO: 587669
ugaaguacuccguaaagaa

SEQ ID NO: 809597 - RNA, 19 nt, Artificial Sequence
  Description of Artificial Sequence: Synthetic oligonucleotide
  Antisense strand to SEQ ID NO: 809596
uucuuuacggaguacuuca

SEQ ID NO: 809598 - RNA, 19 nt, Artificial Sequence
  Description of Artificial Sequence: Synthetic oligonucleotide
  Sense strand starting at position 3586 of SEQ ID NO: 587669
cauuuacgcuccucaggau

SEQ ID NO: 809599 - RNA, 19 nt, Artificial Sequence
  Description of Artificial Sequence: Synthetic oligonucleotide
  Antisense strand to SEQ ID NO: 809598
auccugaggagcguaaaug

SEQ ID NO: 809600 - RNA, 19 nt, Artificial Sequence
  Description of Artificial Sequence: Synthetic oligonucleotide
  Sense strand starting at position 3694 of SEQ ID NO: 587669
uugugcaugcuguuuguua

SEQ ID NO: 809601 - RNA, 19 nt, Artificial Sequence
  Description of Artificial Sequence: Synthetic oligonucleotide
  Antisense strand to SEQ ID NO: 809600
uaacaaacagcaugcacaa

SEQ ID NO: 809602 - RNA, 19 nt, Artificial Sequence
  Description of Artificial Sequence: Synthetic oligonucleotide
  Sense strand starting at position 3871 of SEQ ID NO: 587669
cagauacugguaugguauu

SEQ ID NO: 809603 - RNA, 19 nt, Artificial Sequence
  Description of Artificial Sequence: Synthetic oligonucleotide
  Antisense strand to SEQ ID NO: 809602
aauaccauaccaguaucug

SEQ ID NO: 809604 - RNA, 19 nt, Artificial Sequence
  Description of Artificial Sequence: Synthetic oligonucleotide
  Sense strand starting at position 3914 of SEQ ID NO: 587669
uacaaugacuguuugggaa

SEQ ID NO: 809605 - RNA, 19 nt, Artificial Sequence
  Description of Artificial Sequence: Synthetic oligonucleotide
  Antisense strand to SEQ ID NO: 809604
uucccaaacagucauugua

SEQ ID NO: 809606 - RNA, 19 nt, Artificial Sequence
  Description of Artificial Sequence: Synthetic oligonucleotide
  Sense strand starting at position 3951 of SEQ ID NO: 587669
uagugcuaaggugauaaga

SEQ ID NO: 809607 - RNA, 19 nt, Artificial Sequence
  Description of Artificial Sequence: Synthetic oligonucleotide
  Antisense strand to SEQ ID NO: 809606
ucuuaucaccuuagcacua

SEQ ID NO: 809608 - RNA, 19 nt, Artificial Sequence
  Description of Artificial Sequence: Synthetic oligonucleotide
  Sense strand starting at position 176 of SEQ ID NO: 587670
agccaugagcaccaauaau

SEQ ID NO: 809609 - RNA, 19 nt, Artificial Sequence
  Description of Artificial Sequence: Synthetic oligonucleotide
  Antisense strand to SEQ ID NO: 809608
auuauuggugcucauggcu

SEQ ID NO: 809610 - RNA, 19 nt, Artificial Sequence
  Description of Artificial Sequence: Synthetic oligonucleotide
  Sense strand starting at position 217 of SEQ ID NO: 587670
ggcagagauaaaugcucau

SEQ ID NO: 809611 - RNA, 19 nt, Artificial Sequence
  Description of Artificial Sequence: Synthetic oligonucleotide
  Antisense strand to SEQ ID NO: 809610
augagcauuuaucucugcc

SEQ ID NO: 809612 - RNA, 19 nt, Artificial Sequence
  Description of Artificial Sequence: Synthetic oligonucleotide
  Sense strand starting at position 258 of SEQ ID NO: 587670
cugauuggguggcugaaua

SEQ ID NO: 809613 - RNA, 19 nt, Artificial Sequence
  Description of Artificial Sequence: Synthetic oligonucleotide
  Antisense strand to SEQ ID NO: 809612
uauucagccacccaaucag

SEQ ID NO: 809614 - RNA, 19 nt, Artificial Sequence
  Description of Artificial Sequence: Synthetic oligonucleotide
  Sense strand starting at position 343 of SEQ ID NO: 587670
ggagccaccaggugauaaa

SEQ ID NO: 809615 - RNA, 19 nt, Artificial Sequence
  Description of Artificial Sequence: Synthetic oligonucleotide
  Antisense strand to SEQ ID NO: 809614
uuuaucaccugguggcucc

SEQ ID NO: 809616 - RNA, 19 nt, Artificial Sequence
  Description of Artificial Sequence: Synthetic oligonucleotide
  Sense strand starting at position 418 of SEQ ID NO: 587670
caguuugaauuauugauag

SEQ ID NO: 809617 - RNA, 19 nt, Artificial Sequence
  Description of Artificial Sequence: Synthetic oligonucleotide
  Antisense strand to SEQ ID NO: 809616
cuaucaauaauucaaacug

SEQ ID NO: 809618 - RNA, 19 nt, Artificial Sequence
  Description of Artificial Sequence: Synthetic oligonucleotide
  Sense strand starting at position 433 of SEQ ID NO: 587670
auaggaguuucuuucccua

SEQ ID NO: 809619 - RNA, 19 nt, Artificial Sequence
  Description of Artificial Sequence: Synthetic oligonucleotide
  Antisense strand to SEQ ID NO: 809618
uagggaaagaaacuccuau

SEQ ID NO: 809620 - RNA, 19 nt, Artificial Sequence
  Description of Artificial Sequence: Synthetic oligonucleotide
  Sense strand starting at position 435 of SEQ ID NO: 587670
aggaguuucuuucccuaga

SEQ ID NO: 809621 - RNA, 19 nt, Artificial Sequence
  Description of Artificial Sequence: Synthetic oligonucleotide
  Antisense strand to SEQ ID NO: 809620
ucuagggaaagaaacuccu

SEQ ID NO: 809622 - RNA, 19 nt, Artificial Sequence
  Description of Artificial Sequence: Synthetic oligonucleotide
  Sense strand starting at position 436 of SEQ ID NO: 587670
ggaguuucuuucccuagaa

SEQ ID NO: 809623 - RNA, 19 nt, Artificial Sequence
  Description of Artificial Sequence: Synthetic oligonucleotide
  Antisense strand to SEQ ID NO: 809622
uucuagggaaagaaacucc

SEQ ID NO: 809624 - RNA, 19 nt, Artificial Sequence
  Description of Artificial Sequence: Synthetic oligonucleotide
  Sense strand starting at position 1028 of SEQ ID NO: 587670
ucgauaccgaagugagaaa

SEQ ID NO: 809625 - RNA, 19 nt, Artificial Sequence
  Description of Artificial Sequence: Synthetic oligonucleotide
  Antisense strand to SEQ ID NO: 809624
uuucucacuucgguaucga

SEQ ID NO: 809626 - RNA, 19 nt, Artificial Sequence
  Description of Artificial Sequence: Synthetic oligonucleotide
  Sense strand starting at position 1073 of SEQ ID NO: 587670
gcuagaauucauggaggug

SEQ ID NO: 809627 - RNA, 19 nt, Artificial Sequence
  Description of Artificial Sequence: Synthetic oligonucleotide
  Antisense strand to SEQ ID NO: 809626
caccuccaugaauucuagc

SEQ ID NO: 809628 - RNA, 19 nt, Artificial Sequence
  Description of Artificial Sequence: Synthetic oligonucleotide
  Sense strand starting at position 1188 of SEQ ID NO: 587670
gauauuucccaccgcugua

SEQ ID NO: 809629 - RNA, 19 nt, Artificial Sequence
  Description of Artificial Sequence: Synthetic oligonucleotide
  Antisense strand to SEQ ID NO: 809628
uacagcggugggaaauauc

SEQ ID NO: 809630 - RNA, 19 nt, Artificial Sequence
  Description of Artificial Sequence: Synthetic oligonucleotide
  Sense strand starting at position 1431 of SEQ ID NO: 587670
gucuguuguauuugcaaua

SEQ ID NO: 809631 - RNA, 19 nt, Artificial Sequence
  Description of Artificial Sequence: Synthetic oligonucleotide
  Antisense strand to SEQ ID NO: 809630
uauugcaaauacaacagac

SEQ ID NO: 809632 - RNA, 19 nt, Artificial Sequence
  Description of Artificial Sequence: Synthetic oligonucleotide
  Sense strand starting at position 1584 of SEQ ID NO: 587670
gguaguucucgccuguguu

SEQ ID NO: 809633 - RNA, 19 nt, Artificial Sequence
  Description of Artificial Sequence: Synthetic oligonucleotide
  Antisense strand to SEQ ID NO: 809632
aacacaggcgagaacuacc

SEQ ID NO: 809634 - RNA, 19 nt, Artificial Sequence
  Description of Artificial Sequence: Synthetic oligonucleotide
  Sense strand starting at position 1702 of SEQ ID NO: 587670
uacuuacgucgaggaagau

SEQ ID NO: 809635 - RNA, 19 nt, Artificial Sequence
  Description of Artificial Sequence: Synthetic oligonucleotide
  Antisense strand to SEQ ID NO: 809634
aucuuccucgacguaagua

SEQ ID NO: 809636 - RNA, 19 nt, Artificial Sequence
  Description of Artificial Sequence: Synthetic oligonucleotide
  Sense strand starting at position 2442 of SEQ ID NO: 587670
uguuaucuugcgcucgaag

SEQ ID NO: 809637 - RNA, 19 nt, Artificial Sequence
  Description of Artificial Sequence: Synthetic oligonucleotide
  Antisense strand to SEQ ID NO: 809636
cuucgagcgcaagauaaca

SEQ ID NO: 809638 - RNA, 19 nt, Artificial Sequence
  Description of Artificial Sequence: Synthetic oligonucleotide
  Sense strand starting at position 2460 of SEQ ID NO: 587670
ggacuuaaccuguaagccu

SEQ ID NO: 809639 - RNA, 19 nt, Artificial Sequence
  Description of Artificial Sequence: Synthetic oligonucleotide
  Antisense strand to SEQ ID NO: 809638
aggcuuacagguuaagucc

SEQ ID NO: 809640 - RNA, 19 nt, Artificial Sequence
  Description of Artificial Sequence: Synthetic oligonucleotide
  Sense strand starting at position 2525 of SEQ ID NO: 587670
gguucugaggcuuaccuau

SEQ ID NO: 809641 - RNA, 19 nt, Artificial Sequence
  Description of Artificial Sequence: Synthetic oligonucleotide
  Antisense strand to SEQ ID NO: 809640
auagguaagccucagaacc

SEQ ID NO: 809642 - RNA, 19 nt, Artificial Sequence
  Description of Artificial Sequence: Synthetic oligonucleotide
  Sense strand starting at position 2571 of SEQ ID NO: 587670
augaacucugccuagagua

SEQ ID NO: 809643 - RNA, 19 nt, Artificial Sequence
  Description of Artificial Sequence: Synthetic oligonucleotide
  Antisense strand to SEQ ID NO: 809642
uacucuaggcagaguucau

SEQ ID NO: 809644 - RNA, 19 nt, Artificial Sequence
  Description of Artificial Sequence: Synthetic oligonucleotide
  Sense strand starting at position 2590 of SEQ ID NO: 587670
ggcuucgaaacguuugcua

SEQ ID NO: 809645 - RNA, 19 nt, Artificial Sequence
  Description of Artificial Sequence: Synthetic oligonucleotide
  Antisense strand to SEQ ID NO: 809644
uagcaaacguuucgaagcc

SEQ ID NO: 809646 - RNA, 19 nt, Artificial Sequence
  Description of Artificial Sequence: Synthetic oligonucleotide
  Sense strand starting at position 2611 of SEQ ID NO: 587670
gggcaaggauuguuaggua

SEQ ID NO: 809647 - RNA, 19 nt, Artificial Sequence
  Description of Artificial Sequence: Synthetic oligonucleotide
  Antisense strand to SEQ ID NO: 809646
uaccuaacaauccuugccc

SEQ ID NO: 809648 - RNA, 19 nt, Artificial Sequence
  Description of Artificial Sequence: Synthetic oligonucleotide
  Sense strand starting at position 2615 of SEQ ID NO: 587670
aaggauuguuagguaaugu

SEQ ID NO: 809649 - RNA, 19 nt, Artificial Sequence
  Description of Artificial Sequence: Synthetic oligonucleotide
  Antisense strand to SEQ ID NO: 809648
acauuaccuaacaauccuu

SEQ ID NO: 809650 - RNA, 19 nt, Artificial Sequence
  Description of Artificial Sequence: Synthetic oligonucleotide
  Sense strand starting at position 2616 of SEQ ID NO: 587670
aggauuguuagguaauguu

SEQ ID NO: 809651 - RNA, 19 nt, Artificial Sequence
  Description of Artificial Sequence: Synthetic oligonucleotide
  Antisense strand to SEQ ID NO: 809650
aacauuaccuaacaauccu

SEQ ID NO: 809652 - RNA, 19 nt, Artificial Sequence
  Description of Artificial Sequence: Synthetic oligonucleotide
  Sense strand starting at position 2638 of SEQ ID NO: 587670
auaugaaguuucccaaagu

SEQ ID NO: 809653 - RNA, 19 nt, Artificial Sequence
  Description of Artificial Sequence: Synthetic oligonucleotide
  Antisense strand to SEQ ID NO: 809652
acuuugggaaacuucauau

SEQ ID NO: 809654 - RNA, 19 nt, Artificial Sequence
  Description of Artificial Sequence: Synthetic oligonucleotide
  Sense strand starting at position 2661 of SEQ ID NO: 587670
agacgaaguccuuaucugu

SEQ ID NO: 809655 - RNA, 19 nt, Artificial Sequence
  Description of Artificial Sequence: Synthetic oligonucleotide
  Antisense strand to SEQ ID NO: 809654
acagauaaggacuucgucu

SEQ ID NO: 809656 - RNA, 19 nt, Artificial Sequence
  Description of Artificial Sequence: Synthetic oligonucleotide
  Sense strand starting at position 2674 of SEQ ID NO: 587670
aucuguguuuaagcauuua

SEQ ID NO: 809657 - RNA, 19 nt, Artificial Sequence
  Description of Artificial Sequence: Synthetic oligonucleotide
  Antisense strand to SEQ ID NO: 809656
uaaaugcuuaaacacagau

SEQ ID NO: 809658 - RNA, 19 nt, Artificial Sequence
  Description of Artificial Sequence: Synthetic oligonucleotide
  Sense strand starting at position 2780 of SEQ ID NO: 587670
caguuuauugggcaucuaa

SEQ ID NO: 809659 - RNA, 19 nt, Artificial Sequence
  Description of Artificial Sequence: Synthetic oligonucleotide
  Antisense strand to SEQ ID NO: 809658
uuagaugcccaauaaacug

SEQ ID NO: 809660 - RNA, 19 nt, Artificial Sequence
  Description of Artificial Sequence: Synthetic oligonucleotide
  Sense strand starting at position 2813 of SEQ ID NO: 587670
gguuacaaacuugagcuau

SEQ ID NO: 809661 - RNA, 19 nt, Artificial Sequence
  Description of Artificial Sequence: Synthetic oligonucleotide
  Antisense strand to SEQ ID NO: 809660
auagcucaaguuuguaacc

SEQ ID NO: 809662 - RNA, 19 nt, Artificial Sequence
  Description of Artificial Sequence: Synthetic oligonucleotide
  Sense strand starting at position 2856 of SEQ ID NO: 587670
gagggaaccuugucuaaac

SEQ ID NO: 809663 - RNA, 19 nt, Artificial Sequence
  Description of Artificial Sequence: Synthetic oligonucleotide
  Antisense strand to SEQ ID NO: 809662
guuuagacaagguucccuc

SEQ ID NO: 809664 - RNA, 19 nt, Artificial Sequence
  Description of Artificial Sequence: Synthetic oligonucleotide
  Sense strand starting at position 2857 of SEQ ID NO: 587670
agggaaccuugucuaaaca

SEQ ID NO: 809665 - RNA, 19 nt, Artificial Sequence
  Description of Artificial Sequence: Synthetic oligonucleotide
  Antisense strand to SEQ ID NO: 809664
uguuuagacaagguucccu

SEQ ID NO: 809666 - RNA, 19 nt, Artificial Sequence
  Description of Artificial Sequence: Synthetic oligonucleotide
  Sense strand starting at position 2999 of SEQ ID NO: 587670
acaugugagugucuuaaag

SEQ ID NO: 809667 - RNA, 19 nt, Artificial Sequence
  Description of Artificial Sequence: Synthetic oligonucleotide
  Antisense strand to SEQ ID NO: 809666
cuuuaagacacucacaugu

SEQ ID NO: 809668 - RNA, 19 nt, Artificial Sequence
  Description of Artificial Sequence: Synthetic oligonucleotide
  Sense strand starting at position 3089 of SEQ ID NO: 587670
ugaugaaagaagcgguaua

SEQ ID NO: 809669 - RNA, 19 nt, Artificial Sequence
  Description of Artificial Sequence: Synthetic oligonucleotide
  Antisense strand to SEQ ID NO: 809668
uauaccgcuucuuucauca

SEQ ID NO: 809670 - RNA, 19 nt, Artificial Sequence
  Description of Artificial Sequence: Synthetic oligonucleotide
  Sense strand starting at position 3090 of SEQ ID NO: 587670
gaugaaagaagcgguauau

SEQ ID NO: 809671 - RNA, 19 nt, Artificial Sequence
  Description of Artificial Sequence: Synthetic oligonucleotide
  Antisense strand to SEQ ID NO: 809670
auauaccgcuucuuucauc

SEQ ID NO: 809672 - RNA, 19 nt, Artificial Sequence
  Description of Artificial Sequence: Synthetic oligonucleotide
  Sense strand starting at position 3102 of SEQ ID NO: 587670
gguauaugaaauggaccuu

SEQ ID NO: 809673 - RNA, 19 nt, Artificial Sequence
  Description of Artificial Sequence: Synthetic oligonucleotide
  Antisense strand to SEQ ID NO: 809672
aagguccauuucauauacc

SEQ ID NO: 809674 - RNA, 19 nt, Artificial Sequence
  Description of Artificial Sequence: Synthetic oligonucleotide
  Sense strand starting at position 3133 of SEQ ID NO: 587670
auacuccaugcuugauaga

SEQ ID NO: 809675 - RNA, 19 nt, Artificial Sequence
  Description of Artificial Sequence: Synthetic oligonucleotide
  Antisense strand to SEQ ID NO: 809674
ucuaucaagcauggaguau

SEQ ID NO: 809676 - RNA, 19 nt, Artificial Sequence
  Description of Artificial Sequence: Synthetic oligonucleotide
  Sense strand starting at position 3534 of SEQ ID NO: 587670
guagaugggugcuuacaaa

SEQ ID NO: 809677 - RNA, 19 nt, Artificial Sequence
  Description of Artificial Sequence: Synthetic oligonucleotide
  Antisense strand to SEQ ID NO: 809676
uuuguaagcacccaucuac

SEQ ID NO: 809678 - RNA, 19 nt, Artificial Sequence
  Description of Artificial Sequence: Synthetic oligonucleotide
  Sense strand starting at position 3689 of SEQ ID NO: 587670
gaaagauugugacugcuac

SEQ ID NO: 809679 - RNA, 19 nt, Artificial Sequence
  Description of Artificial Sequence: Synthetic oligonucleotide
  Antisense strand to SEQ ID NO: 809678
guagcagucacaaucuuuc

SEQ ID NO: 809680 - RNA, 19 nt, Artificial Sequence
  Description of Artificial Sequence: Synthetic oligonucleotide
  Sense strand starting at position 3690 of SEQ ID NO: 587670
aaagauugugacugcuaca

SEQ ID NO: 809681 - RNA, 19 nt, Artificial Sequence
  Description of Artificial Sequence: Synthetic oligonucleotide
  Antisense strand to SEQ ID NO: 809680
uguagcagucacaaucuuu

SEQ ID NO: 809682 - RNA, 19 nt, Artificial Sequence
  Description of Artificial Sequence: Synthetic oligonucleotide
  Sense strand starting at position 3695 of SEQ ID NO: 587670
uugugacugcuacaaugaa

SEQ ID NO: 809683 - RNA, 19 nt, Artificial Sequence
  Description of Artificial Sequence: Synthetic oligonucleotide
  Antisense strand to SEQ ID NO: 809682
uucauuguagcagucacaa

SEQ ID NO: 809684 - RNA, 19 nt, Artificial Sequence
  Description of Artificial Sequence: Synthetic oligonucleotide
  Sense strand starting at position 3809 of SEQ ID NO: 587670
cuugaacuuccguauagga

SEQ ID NO: 809685 - RNA, 19 nt, Artificial Sequence
  Description of Artificial Sequence: Synthetic oligonucleotide
  Antisense strand to SEQ ID NO: 809684
uccuauacggaaguucaag

SEQ ID NO: 809686 - RNA, 19 nt, Artificial Sequence
  Description of Artificial Sequence: Synthetic oligonucleotide
  Sense strand starting at position 3898 of SEQ ID NO: 587670
ggcuuacagguauagcuaa

SEQ ID NO: 809687 - RNA, 19 nt, Artificial Sequence
  Description of Artificial Sequence: Synthetic oligonucleotide
  Antisense strand to SEQ ID NO: 809686
uuagcuauaccuguaagcc

SEQ ID NO: 809688 - RNA, 19 nt, Artificial Sequence
  Description of Artificial Sequence: Synthetic oligonucleotide
  Sense strand starting at position 235 of SEQ ID NO: 587671
uuaacuagaugauccgaua

SEQ ID NO: 809689 - RNA, 19 nt, Artificial Sequence
  Description of Artificial Sequence: Synthetic oligonucleotide
  Antisense strand to SEQ ID NO: 809688
uaucggaucaucuaguuaa

SEQ ID NO: 809690 - RNA, 19 nt, Artificial Sequence
  Description of Artificial Sequence: Synthetic oligonucleotide
  Sense strand starting at position 265 of SEQ ID NO: 587671
guaacuugugguuaaugca

SEQ ID NO: 809691 - RNA, 19 nt, Artificial Sequence
  Description of Artificial Sequence: Synthetic oligonucleotide
  Antisense strand to SEQ ID NO: 809690
ugcauuaaccacaaguuac

SEQ ID NO: 809692 - RNA, 19 nt, Artificial Sequence
  Description of Artificial Sequence: Synthetic oligonucleotide
  Sense strand starting at position 686 of SEQ ID NO: 587671
cuucgauuuccagggucuu

SEQ ID NO: 809693 - RNA, 19 nt, Artificial Sequence
  Description of Artificial Sequence: Synthetic oligonucleotide
  Antisense strand to SEQ ID NO: 809692
aagacccuggaaaucgaag

SEQ ID NO: 809694 - RNA, 19 nt, Artificial Sequence
  Description of Artificial Sequence: Synthetic oligonucleotide
  Sense strand starting at position 699 of SEQ ID NO: 587671
ggucuuggccuugagcaga

SEQ ID NO: 809695 - RNA, 19 nt, Artificial Sequence
  Description of Artificial Sequence: Synthetic oligonucleotide
  Antisense strand to SEQ ID NO: 809694
ucugcucaaggccaagacc

SEQ ID NO: 809696 - RNA, 19 nt, Artificial Sequence
  Description of Artificial Sequence: Synthetic oligonucleotide
  Sense strand starting at position 902 of SEQ ID NO: 587671
cguccaucuccacggagau

SEQ ID NO: 809697 - RNA, 19 nt, Artificial Sequence
  Description of Artificial Sequence: Synthetic oligonucleotide
  Antisense strand to SEQ ID NO: 809696
aucuccguggagauggacg

SEQ ID NO: 809698 - RNA, 19 nt, Artificial Sequence
  Description of Artificial Sequence: Synthetic oligonucleotide
  Sense strand starting at position 1430 of SEQ ID NO: 587671
ggucgagguucuccagacu

SEQ ID NO: 809699 - RNA, 19 nt, Artificial Sequence
  Description of Artificial Sequence: Synthetic oligonucleotide
  Antisense strand to SEQ ID NO: 809698
agucuggagaaccucgacc

SEQ ID NO: 809700 - RNA, 19 nt, Artificial Sequence
  Description of Artificial Sequence: Synthetic oligonucleotide
  Sense strand starting at position 1613 of SEQ ID NO: 587671
ucgaguaguacggcucgua

SEQ ID NO: 809701 - RNA, 19 nt, Artificial Sequence
  Description of Artificial Sequence: Synthetic oligonucleotide
  Antisense strand to SEQ ID NO: 809700
uacgagccguacuacucga

SEQ ID NO: 809702 - RNA, 19 nt, Artificial Sequence
  Description of Artificial Sequence: Synthetic oligonucleotide
  Sense strand starting at position 2035 of SEQ ID NO: 587671
acacuuggauccuuaaguu

SEQ ID NO: 809703 - RNA, 19 nt, Artificial Sequence
  Description of Artificial Sequence: Synthetic oligonucleotide
  Antisense strand to SEQ ID NO: 809702
aacuuaaggauccaagugu

SEQ ID NO: 809704 - RNA, 19 nt, Artificial Sequence
  Description of Artificial Sequence: Synthetic oligonucleotide
  Sense strand starting at position 2235 of SEQ ID NO: 587671
auguguaugcaguauguau

SEQ ID NO: 809705 - RNA, 19 nt, Artificial Sequence
  Description of Artificial Sequence: Synthetic oligonucleotide
  Antisense strand to SEQ ID NO: 809704
auacauacugcauacacau

SEQ ID NO: 809706 - RNA, 19 nt, Artificial Sequence
  Description of Artificial Sequence: Synthetic oligonucleotide
  Sense strand starting at position 2243 of SEQ ID NO: 587671
gcaguauguauggagaaga

SEQ ID NO: 809707 - RNA, 19 nt, Artificial Sequence
  Description of Artificial Sequence: Synthetic oligonucleotide
  Antisense strand to SEQ ID NO: 809706
ucuucuccauacauacugc

SEQ ID NO: 809708 - RNA, 19 nt, Artificial Sequence
  Description of Artificial Sequence: Synthetic oligonucleotide
  Sense strand starting at position 2440 of SEQ ID NO: 587671
cagguauugguuuagcauu

SEQ ID NO: 809709 - RNA, 19 nt, Artificial Sequence
  Description of Artificial Sequence: Synthetic oligonucleotide
  Antisense strand to SEQ ID NO: 809708
aaugcuaaaccaauaccug

SEQ ID NO: 809710 - RNA, 19 nt, Artificial Sequence
  Description of Artificial Sequence: Synthetic oligonucleotide
  Sense strand starting at position 2473 of SEQ ID NO: 587671
gcaguuaauccgccuguua

SEQ ID NO: 809711 - RNA, 19 nt, Artificial Sequence
  Description of Artificial Sequence: Synthetic oligonucleotide
  Antisense strand to SEQ ID NO: 809710
uaacaggcggauuaacugc

SEQ ID NO: 809712 - RNA, 19 nt, Artificial Sequence
  Description of Artificial Sequence: Synthetic oligonucleotide
  Sense strand starting at position 2482 of SEQ ID NO: 587671
ccgccuguuaguguuucua

SEQ ID NO: 809713 - RNA, 19 nt, Artificial Sequence
  Description of Artificial Sequence: Synthetic oligonucleotide
  Antisense strand to SEQ ID NO: 809712
uagaaacacuaacaggcgg

SEQ ID NO: 809714 - RNA, 19 nt, Artificial Sequence
  Description of Artificial Sequence: Synthetic oligonucleotide
  Sense strand starting at position 2511 of SEQ ID NO: 587671
uuucuuaacugagaaugaa

SEQ ID NO: 809715 - RNA, 19 nt, Artificial Sequence
  Description of Artificial Sequence: Synthetic oligonucleotide
  Antisense strand to SEQ ID NO: 809714
uucauucucaguuaagaaa

SEQ ID NO: 809716 - RNA, 19 nt, Artificial Sequence
  Description of Artificial Sequence: Synthetic oligonucleotide
  Sense strand starting at position 2539 of SEQ ID NO: 587671
ggcuuuaacguguugcagu

SEQ ID NO: 809717 - RNA, 19 nt, Artificial Sequence
  Description of Artificial Sequence: Synthetic oligonucleotide
  Antisense strand to SEQ ID NO: 809716
acugcaacacguuaaagcc

SEQ ID NO: 809718 - RNA, 19 nt, Artificial Sequence
  Description of Artificial Sequence: Synthetic oligonucleotide
  Sense strand starting at position 2736 of SEQ ID NO: 587671
agcacacgaccugaugauu

SEQ ID NO: 809719 - RNA, 19 nt, Artificial Sequence
  Description of Artificial Sequence: Synthetic oligonucleotide
  Antisense strand to SEQ ID NO: 809718
aaucaucaggucgugugcu

SEQ ID NO: 809720 - RNA, 19 nt, Artificial Sequence
  Description of Artificial Sequence: Synthetic oligonucleotide
  Sense strand starting at position 2744 of SEQ ID NO: 587671
accugaugauuucgauaag

SEQ ID NO: 809721 - RNA, 19 nt, Artificial Sequence
  Description of Artificial Sequence: Synthetic oligonucleotide
  Antisense strand to SEQ ID NO: 809720
cuuaucgaaaucaucaggu

SEQ ID NO: 809722 - RNA, 19 nt, Artificial Sequence
  Description of Artificial Sequence: Synthetic oligonucleotide
  Sense strand starting at position 3077 of SEQ ID NO: 587671
ugcagagauuuacacgaaa

SEQ ID NO: 809723 - RNA, 19 nt, Artificial Sequence
  Description of Artificial Sequence: Synthetic oligonucleotide
  Antisense strand to SEQ ID NO: 809722
uuucguguaaaucucugca

SEQ ID NO: 809724 - RNA, 19 nt, Artificial Sequence
  Description of Artificial Sequence: Synthetic oligonucleotide
  Sense strand starting at position 3091 of SEQ ID NO: 587671
cgaaacaccuaagauuuau

SEQ ID NO: 809725 - RNA, 19 nt, Artificial Sequence
  Description of Artificial Sequence: Synthetic oligonucleotide
  Antisense strand to SEQ ID NO: 809724
auaaaucuuagguguuucg

SEQ ID NO: 809726 - RNA, 19 nt, Artificial Sequence
  Description of Artificial Sequence: Synthetic oligonucleotide
  Sense strand starting at position 3139 of SEQ ID NO: 587671
uguauaucgcagcauuuga

SEQ ID NO: 809727 - RNA, 19 nt, Artificial Sequence
  Description of Artificial Sequence: Synthetic oligonucleotide
  Antisense strand to SEQ ID NO: 809726
ucaaaugcugcgauauaca

SEQ ID NO: 809728 - RNA, 19 nt, Artificial Sequence
  Description of Artificial Sequence: Synthetic oligonucleotide
  Sense strand starting at position 3149 of SEQ ID NO: 587671
agcauuugaugugcaacuu

SEQ ID NO: 809729 - RNA, 19 nt, Artificial Sequence
  Description of Artificial Sequence: Synthetic oligonucleotide
  Antisense strand to SEQ ID NO: 809728
aaguugcacaucaaaugcu

SEQ ID NO: 809730 - RNA, 19 nt, Artificial Sequence
  Description of Artificial Sequence: Synthetic oligonucleotide
  Sense strand starting at position 3243 of SEQ ID NO: 587671
ugugauacuuggaggguga

SEQ ID NO: 809731 - RNA, 19 nt, Artificial Sequence
  Description of Artificial Sequence: Synthetic oligonucleotide
  Antisense strand to SEQ ID NO: 809730
ucacccuccaaguaucaca

SEQ ID NO: 809732 - RNA, 19 nt, Artificial Sequence
  Description of Artificial Sequence: Synthetic oligonucleotide
  Sense strand starting at position 3244 of SEQ ID NO: 587671
gugauacuuggagggugaa

SEQ ID NO: 809733 - RNA, 19 nt, Artificial Sequence
  Description of Artificial Sequence: Synthetic oligonucleotide
  Antisense strand to SEQ ID NO: 809732
uucacccuccaaguaucac

SEQ ID NO: 809734 - RNA, 19 nt, Artificial Sequence
  Description of Artificial Sequence: Synthetic oligonucleotide
  Sense strand starting at position 3247 of SEQ ID NO: 587671
auacuuggagggugaagua

SEQ ID NO: 809735 - RNA, 19 nt, Artificial Sequence
  Description of Artificial Sequence: Synthetic oligonucleotide
  Antisense strand to SEQ ID NO: 809734
uacuucacccuccaaguau

SEQ ID NO: 809736 - RNA, 19 nt, Artificial Sequence
  Description of Artificial Sequence: Synthetic oligonucleotide
  Sense strand starting at position 3261 of SEQ ID NO: 587671
aaguauuugcaguggugca

SEQ ID NO: 809737 - RNA, 19 nt, Artificial Sequence
  Description of Artificial Sequence: Synthetic oligonucleotide
  Antisense strand to SEQ ID NO: 809736
ugcaccacugcaaauacuu

SEQ ID NO: 809738 - RNA, 19 nt, Artificial Sequence
  Description of Artificial Sequence: Synthetic oligonucleotide
  Sense strand starting at position 3371 of SEQ ID NO: 587671
aaauaccugugauugugau

SEQ ID NO: 809739 - RNA, 19 nt, Artificial Sequence
  Description of Artificial Sequence: Synthetic oligonucleotide
  Antisense strand to SEQ ID NO: 809738
aucacaaucacagguauuu

SEQ ID NO: 809740 - RNA, 19 nt, Artificial Sequence
  Description of Artificial Sequence: Synthetic oligonucleotide
  Sense strand starting at position 3372 of SEQ ID NO: 587671
aauaccugugauugugaua

SEQ ID NO: 809741 - RNA, 19 nt, Artificial Sequence
  Description of Artificial Sequence: Synthetic oligonucleotide
  Antisense strand to SEQ ID NO: 809740
uaucacaaucacagguauu

SEQ ID NO: 809742 - RNA, 19 nt, Artificial Sequence
  Description of Artificial Sequence: Synthetic oligonucleotide
  Sense strand starting at position 3391 of SEQ ID NO: 587671
gcccaccguccucaugaua

SEQ ID NO: 809743 - RNA, 19 nt, Artificial Sequence
  Description of Artificial Sequence: Synthetic oligonucleotide
  Antisense strand to SEQ ID NO: 809742
uaucaugaggacggugggc

SEQ ID NO: 809744 - RNA, 19 nt, Artificial Sequence
  Description of Artificial Sequence: Synthetic oligonucleotide
  Sense strand starting at position 3419 of SEQ ID NO: 587671
agauaacuuuccucggguu

SEQ ID NO: 809745 - RNA, 19 nt, Artificial Sequence
  Description of Artificial Sequence: Synthetic oligonucleotide
  Antisense strand to SEQ ID NO: 809744
aacccgaggaaaguuaucu

SEQ ID NO: 809746 - RNA, 19 nt, Artificial Sequence
  Description of Artificial Sequence: Synthetic oligonucleotide
  Sense strand starting at position 3420 of SEQ ID NO: 587671
gauaacuuuccucggguuu

SEQ ID NO: 809747 - RNA, 19 nt, Artificial Sequence
  Description of Artificial Sequence: Synthetic oligonucleotide
  Antisense strand to SEQ ID NO: 809746
aaacccgaggaaaguuauc

SEQ ID NO: 809748 - RNA, 19 nt, Artificial Sequence
  Description of Artificial Sequence: Synthetic oligonucleotide
  Sense strand starting at position 3514 of SEQ ID NO: 587671
agugaucucagaggaccau

SEQ ID NO: 809749 - RNA, 19 nt, Artificial Sequence
  Description of Artificial Sequence: Synthetic oligonucleotide
  Antisense strand to SEQ ID NO: 809748
augguccucugagaucacu

SEQ ID NO: 809750 - RNA, 19 nt, Artificial Sequence
  Description of Artificial Sequence: Synthetic oligonucleotide
  Sense strand starting at position 3567 of SEQ ID NO: 587671
ucaugaggcuguccugaau

SEQ ID NO: 809751 - RNA, 19 nt, Artificial Sequence
  Description of Artificial Sequence: Synthetic oligonucleotide
  Antisense strand to SEQ ID NO: 809750
auucaggacagccucauga

SEQ ID NO: 809752 - RNA, 19 nt, Artificial Sequence
  Description of Artificial Sequence: Synthetic oligonucleotide
  Sense strand starting at position 3570 of SEQ ID NO: 587671
ugaggcuguccugaauauu

SEQ ID NO: 809753 - RNA, 19 nt, Artificial Sequence
  Description of Artificial Sequence: Synthetic oligonucleotide
  Antisense strand to SEQ ID NO: 809752
aauauucaggacagccuca

SEQ ID NO: 809754 - RNA, 19 nt, Artificial Sequence
  Description of Artificial Sequence: Synthetic oligonucleotide
  Sense strand starting at position 3573 of SEQ ID NO: 587671
ggcuguccugaauauuguu

SEQ ID NO: 809755 - RNA, 19 nt, Artificial Sequence
  Description of Artificial Sequence: Synthetic oligonucleotide
  Antisense strand to SEQ ID NO: 809754
aacaauauucaggacagcc

SEQ ID NO: 809756 - RNA, 19 nt, Artificial Sequence
  Description of Artificial Sequence: Synthetic oligonucleotide
  Sense strand starting at position 3613 of SEQ ID NO: 587671
gguacuuacucuguugacu

SEQ ID NO: 809757 - RNA, 19 nt, Artificial Sequence
  Description of Artificial Sequence: Synthetic oligonucleotide
  Antisense strand to SEQ ID NO: 809756
agucaacagaguaaguacc

SEQ ID NO: 809758 - RNA, 19 nt, Artificial Sequence
  Description of Artificial Sequence: Synthetic oligonucleotide
  Sense strand starting at position 3681 of SEQ ID NO: 587671
ggaauaggcuucucuggag

SEQ ID NO: 809759 - RNA, 19 nt, Artificial Sequence
  Description of Artificial Sequence: Synthetic oligonucleotide
  Antisense strand to SEQ ID NO: 809758
cuccagagaagccuauucc

SEQ ID NO: 809760 - RNA, 19 nt, Artificial Sequence
  Description of Artificial Sequence: Synthetic oligonucleotide
  Sense strand starting at position 3720 of SEQ ID NO: 587671
ccagauaagccauagaguu

SEQ ID NO: 809761 - RNA, 19 nt, Artificial Sequence
  Description of Artificial Sequence: Synthetic oligonucleotide
  Antisense strand to SEQ ID NO: 809760
aacucuauggcuuaucugg

SEQ ID NO: 809762 - RNA, 19 nt, Artificial Sequence
  Description of Artificial Sequence: Synthetic oligonucleotide
  Sense strand starting at position 3722 of SEQ ID NO: 587671
agauaagccauagaguugu

SEQ ID NO: 809763 - RNA, 19 nt, Artificial Sequence
  Description of Artificial Sequence: Synthetic oligonucleotide
  Antisense strand to SEQ ID NO: 809762
acaacucuauggcuuaucu

SEQ ID NO: 809764 - RNA, 19 nt, Artificial Sequence
  Description of Artificial Sequence: Synthetic oligonucleotide
  Sense strand starting at position 3733 of SEQ ID NO: 587671
agaguugucuccucccaau

SEQ ID NO: 809765 - RNA, 19 nt, Artificial Sequence
  Description of Artificial Sequence: Synthetic oligonucleotide
  Antisense strand to SEQ ID NO: 809764
auugggaggagacaacucu

SEQ ID NO: 809766 - RNA, 19 nt, Artificial Sequence
  Description of Artificial Sequence: Synthetic oligonucleotide
  Sense strand starting at position 3761 of SEQ ID NO: 587671
guagaugaagcauggcaga

SEQ ID NO: 809767 - RNA, 19 nt, Artificial Sequence
  Description of Artificial Sequence: Synthetic oligonucleotide
  Antisense strand to SEQ ID NO: 809766
ucugccaugcuucaucuac

SEQ ID NO: 809768 - RNA, 19 nt, Artificial Sequence
  Description of Artificial Sequence: Synthetic oligonucleotide
  Sense strand starting at position 46 of SEQ ID NO: 587672
auuacauuauacucaguga

SEQ ID NO: 809769 - RNA, 19 nt, Artificial Sequence
  Description of Artificial Sequence: Synthetic oligonucleotide
  Antisense strand to SEQ ID NO: 809768
ucacugaguauaauguaau

SEQ ID NO: 809770 - RNA, 19 nt, Artificial Sequence
  Description of Artificial Sequence: Synthetic oligonucleotide
  Sense strand starting at position 49 of SEQ ID NO: 587672
acauuauacucagugacag

SEQ ID NO: 809771 - RNA, 19 nt, Artificial Sequence
  Description of Artificial Sequence: Synthetic oligonucleotide
  Antisense strand to SEQ ID NO: 809770
cugucacugaguauaaugu

SEQ ID NO: 809772 - RNA, 19 nt, Artificial Sequence
  Description of Artificial Sequence: Synthetic oligonucleotide
  Sense strand starting at position 53 of SEQ ID NO: 587672
uauacucagugacagagaa

SEQ ID NO: 809773 - RNA, 19 nt, Artificial Sequence
  Description of Artificial Sequence: Synthetic oligonucleotide
  Antisense strand to SEQ ID NO: 809772
uucucugucacugaguaua

SEQ ID NO: 809774 - RNA, 19 nt, Artificial Sequence
  Description of Artificial Sequence: Synthetic oligonucleotide
  Sense strand starting at position 69 of SEQ ID NO: 587672
gaaagauucuccuggacug

SEQ ID NO: 809775 - RNA, 19 nt, Artificial Sequence
  Description of Artificial Sequence: Synthetic oligonucleotide
  Antisense strand to SEQ ID NO: 809774
caguccaggagaaucuuuc

SEQ ID NO: 809776 - RNA, 19 nt, Artificial Sequence
  Description of Artificial Sequence: Synthetic oligonucleotide
  Sense strand starting at position 152 of SEQ ID NO: 587672
aagucuuggcccugcagua

SEQ ID NO: 809777 - RNA, 19 nt, Artificial Sequence
  Description of Artificial Sequence: Synthetic oligonucleotide
  Antisense strand to SEQ ID NO: 809776
uacugcagggccaagacuu

SEQ ID NO: 809778 - RNA, 19 nt, Artificial Sequence
  Description of Artificial Sequence: Synthetic oligonucleotide
  Sense strand starting at position 170 of SEQ ID NO: 587672
agagauccauuagguacaa

SEQ ID NO: 809779 - RNA, 19 nt, Artificial Sequence
  Description of Artificial Sequence: Synthetic oligonucleotide
  Antisense strand to SEQ ID NO: 809778
uuguaccuaauggaucucu

SEQ ID NO: 809780 - RNA, 19 nt, Artificial Sequence
  Description of Artificial Sequence: Synthetic oligonucleotide
  Sense strand starting at position 206 of SEQ ID NO: 587672
acuuguuaguggccaaaua

SEQ ID NO: 809781 - RNA, 19 nt, Artificial Sequence
  Description of Artificial Sequence: Synthetic oligonucleotide
  Antisense strand to SEQ ID NO: 809780
uauuuggccacuaacaagu

SEQ ID NO: 809782 - RNA, 19 nt, Artificial Sequence
  Description of Artificial Sequence: Synthetic oligonucleotide
  Sense strand starting at position 293 of SEQ ID NO: 587672
aacagccuuucugagagua

SEQ ID NO: 809783 - RNA, 19 nt, Artificial Sequence
  Description of Artificial Sequence: Synthetic oligonucleotide
  Antisense strand to SEQ ID NO: 809782
uacucucagaaaggcuguu

SEQ ID NO: 809784 - RNA, 19 nt, Artificial Sequence
  Description of Artificial Sequence: Synthetic oligonucleotide
  Sense strand starting at position 301 of SEQ ID NO: 587672
uucugagaguagucacuuu

SEQ ID NO: 809785 - RNA, 19 nt, Artificial Sequence
  Description of Artificial Sequence: Synthetic oligonucleotide
  Antisense strand to SEQ ID NO: 809784
aaagugacuacucucagaa

SEQ ID NO: 809786 - RNA, 19 nt, Artificial Sequence
  Description of Artificial Sequence: Synthetic oligonucleotide
  Sense strand starting at position 308 of SEQ ID NO: 587672
aguagucacuuucuuaaac

SEQ ID NO: 809787 - RNA, 19 nt, Artificial Sequence
  Description of Artificial Sequence: Synthetic oligonucleotide
  Antisense strand to SEQ ID NO: 809786
guuuaagaaagugacuacu

SEQ ID NO: 809788 - RNA, 19 nt, Artificial Sequence
  Description of Artificial Sequence: Synthetic oligonucleotide
  Sense strand starting at position 340 of SEQ ID NO: 587672
gguguaucgaguuauaaau

SEQ ID NO: 809789 - RNA, 19 nt, Artificial Sequence
  Description of Artificial Sequence: Synthetic oligonucleotide
  Antisense strand to SEQ ID NO: 809788
auuuauaacucgauacacc

SEQ ID NO: 809790 - RNA, 19 nt, Artificial Sequence
  Description of Artificial Sequence: Synthetic oligonucleotide
  Sense strand starting at position 419 of SEQ ID NO: 587672
gagagauagcucuguaaau

SEQ ID NO: 809791 - RNA, 19 nt, Artificial Sequence
  Description of Artificial Sequence: Synthetic oligonucleotide
  Antisense strand to SEQ ID NO: 809790
auuuacagagcuaucucuc

SEQ ID NO: 809792 - RNA, 19 nt, Artificial Sequence
  Description of Artificial Sequence: Synthetic oligonucleotide
  Sense strand starting at position 420 of SEQ ID NO: 587672
agagauagcucuguaaaug

SEQ ID NO: 809793 - RNA, 19 nt, Artificial Sequence
  Description of Artificial Sequence: Synthetic oligonucleotide
  Antisense strand to SEQ ID NO: 809792
cauuuacagagcuaucucu

SEQ ID NO: 809794 - RNA, 19 nt, Artificial Sequence
  Description of Artificial Sequence: Synthetic oligonucleotide
  Sense strand starting at position 421 of SEQ ID NO: 587672
gagauagcucuguaaaugc

SEQ ID NO: 809795 - RNA, 19 nt, Artificial Sequence
  Description of Artificial Sequence: Synthetic oligonucleotide
  Antisense strand to SEQ ID NO: 809794
gcauuuacagagcuaucuc

SEQ ID NO: 809796 - RNA, 19 nt, Artificial Sequence
  Description of Artificial Sequence: Synthetic oligonucleotide
  Sense strand starting at position 437 of SEQ ID NO: 587672
ugcaauuuauucucguuau

SEQ ID NO: 809797 - RNA, 19 nt, Artificial Sequence
  Description of Artificial Sequence: Synthetic oligonucleotide
  Antisense strand to SEQ ID NO: 809796
auaacgagaauaaauugca

SEQ ID NO: 809798 - RNA, 19 nt, Artificial Sequence
  Description of Artificial Sequence: Synthetic oligonucleotide
  Sense strand starting at position 438 of SEQ ID NO: 587672
gcaauuuauucucguuaua

SEQ ID NO: 809799 - RNA, 19 nt, Artificial Sequence
  Description of Artificial Sequence: Synthetic oligonucleotide
  Antisense strand to SEQ ID NO: 809798
uauaacgagaauaaauugc

SEQ ID NO: 809800 - RNA, 19 nt, Artificial Sequence
  Description of Artificial Sequence: Synthetic oligonucleotide
  Sense strand starting at position 463 of SEQ ID NO: 587672
cuaccuuauugguagcaga

SEQ ID NO: 809801 - RNA, 19 nt, Artificial Sequence
  Description of Artificial Sequence: Synthetic oligonucleotide
  Antisense strand to SEQ ID NO: 809800
ucugcuaccaauaagguag

SEQ ID NO: 809802 - RNA, 19 nt, Artificial Sequence
  Description of Artificial Sequence: Synthetic oligonucleotide
  Sense strand starting at position 502 of SEQ ID NO: 587672
uguccuuugcgcuuaguca

SEQ ID NO: 809803 - RNA, 19 nt, Artificial Sequence
  Description of Artificial Sequence: Synthetic oligonucleotide
  Antisense strand to SEQ ID NO: 809802
ugacuaagcgcaaaggaca

SEQ ID NO: 809804 - RNA, 19 nt, Artificial Sequence
  Description of Artificial Sequence: Synthetic oligonucleotide
  Sense strand starting at position 503 of SEQ ID NO: 587672
guccuuugcgcuuagucaa

SEQ ID NO: 809805 - RNA, 19 nt, Artificial Sequence
  Description of Artificial Sequence: Synthetic oligonucleotide
  Antisense strand to SEQ ID NO: 809804
uugacuaagcgcaaaggac

SEQ ID NO: 809806 - RNA, 19 nt, Artificial Sequence
  Description of Artificial Sequence: Synthetic oligonucleotide
  Sense strand starting at position 590 of SEQ ID NO: 587672
gugucuauauaucuagauu

SEQ ID NO: 809807 - RNA, 19 nt, Artificial Sequence
  Description of Artificial Sequence: Synthetic oligonucleotide
  Antisense strand to SEQ ID NO: 809806
aaucuagauauauagacac

SEQ ID NO: 809808 - RNA, 19 nt, Artificial Sequence
  Description of Artificial Sequence: Synthetic oligonucleotide
  Sense strand starting at position 619 of SEQ ID NO: 587672
ugcacauauguguaucuau

SEQ ID NO: 809809 - RNA, 19 nt, Artificial Sequence
  Description of Artificial Sequence: Synthetic oligonucleotide
  Antisense strand to SEQ ID NO: 809808
auagauacacauaugugca

SEQ ID NO: 809810 - RNA, 19 nt, Artificial Sequence
  Description of Artificial Sequence: Synthetic oligonucleotide
  Sense strand starting at position 764 of SEQ ID NO: 587672
uauucucagccagaugaug

SEQ ID NO: 809811 - RNA, 19 nt, Artificial Sequence
  Description of Artificial Sequence: Synthetic oligonucleotide
  Antisense strand to SEQ ID NO: 809810
caucaucuggcugagaaua

SEQ ID NO: 809812 - RNA, 19 nt, Artificial Sequence
  Description of Artificial Sequence: Synthetic oligonucleotide
  Sense strand starting at position 770 of SEQ ID NO: 587672
cagccagaugauggcaaua

SEQ ID NO: 809813 - RNA, 19 nt, Artificial Sequence
  Description of Artificial Sequence: Synthetic oligonucleotide
  Antisense strand to SEQ ID NO: 809812
uauugccaucaucuggcug

SEQ ID NO: 809814 - RNA, 19 nt, Artificial Sequence
  Description of Artificial Sequence: Synthetic oligonucleotide
  Sense strand starting at position 781 of SEQ ID NO: 587672
uggcaauaguaagcuauau

SEQ ID NO: 809815 - RNA, 19 nt, Artificial Sequence
  Description of Artificial Sequence: Synthetic oligonucleotide
  Antisense strand to SEQ ID NO: 809814
auauagcuuacuauugcca

SEQ ID NO: 809816 - RNA, 19 nt, Artificial Sequence
  Description of Artificial Sequence: Synthetic oligonucleotide
  Sense strand starting at position 817 of SEQ ID NO: 587672
auagaacguccugguguuu

SEQ ID NO: 809817 - RNA, 19 nt, Artificial Sequence
  Description of Artificial Sequence: Synthetic oligonucleotide
  Antisense strand to SEQ ID NO: 809816
aaacaccaggacguucuau

SEQ ID NO: 809818 - RNA, 19 nt, Artificial Sequence
  Description of Artificial Sequence: Synthetic oligonucleotide
  Sense strand starting at position 828 of SEQ ID NO: 587672
ugguguuuguccuugacau

SEQ ID NO: 809819 - RNA, 19 nt, Artificial Sequence
  Description of Artificial Sequence: Synthetic oligonucleotide
  Antisense strand to SEQ ID NO: 809818
augucaaggacaaacacca

SEQ ID NO: 809820 - RNA, 19 nt, Artificial Sequence
  Description of Artificial Sequence: Synthetic oligonucleotide
  Sense strand starting at position 829 of SEQ ID NO: 587672
gguguuuguccuugacauu

SEQ ID NO: 809821 - RNA, 19 nt, Artificial Sequence
  Description of Artificial Sequence: Synthetic oligonucleotide
  Antisense strand to SEQ ID NO: 809820
aaugucaaggacaaacacc

SEQ ID NO: 809822 - RNA, 19 nt, Artificial Sequence
  Description of Artificial Sequence: Synthetic oligonucleotide
  Sense strand starting at position 830 of SEQ ID NO: 587672
guguuuguccuugacauua

SEQ ID NO: 809823 - RNA, 19 nt, Artificial Sequence
  Description of Artificial Sequence: Synthetic oligonucleotide
  Antisense strand to SEQ ID NO: 809822
uaaugucaaggacaaacac

SEQ ID NO: 809824 - RNA, 19 nt, Artificial Sequence
  Description of Artificial Sequence: Synthetic oligonucleotide
  Sense strand starting at position 835 of SEQ ID NO: 587672
uguccuugacauuauacau

SEQ ID NO: 809825 - RNA, 19 nt, Artificial Sequence
  Description of Artificial Sequence: Synthetic oligonucleotide
  Antisense strand to SEQ ID NO: 809824
auguauaaugucaaggaca

SEQ ID NO: 809826 - RNA, 19 nt, Artificial Sequence
  Description of Artificial Sequence: Synthetic oligonucleotide
  Sense strand starting at position 937 of SEQ ID NO: 587672
aaaguuuaagcaugugcau

SEQ ID NO: 809827 - RNA, 19 nt, Artificial Sequence
  Description of Artificial Sequence: Synthetic oligonucleotide
  Antisense strand to SEQ ID NO: 809826
augcacaugcuuaaacuuu

SEQ ID NO: 809828 - RNA, 19 nt, Artificial Sequence
  Description of Artificial Sequence: Synthetic oligonucleotide
  Sense strand starting at position 944 of SEQ ID NO: 587672
aagcaugugcauugagauu

SEQ ID NO: 809829 - RNA, 19 nt, Artificial Sequence
  Description of Artificial Sequence: Synthetic oligonucleotide
  Antisense strand to SEQ ID NO: 809828
aaucucaaugcacaugcuu

SEQ ID NO: 809830 - RNA, 19 nt, Artificial Sequence
  Description of Artificial Sequence: Synthetic oligonucleotide
  Sense strand starting at position 950 of SEQ ID NO: 587672
gugcauugagauuaaucug

SEQ ID NO: 809831 - RNA, 19 nt, Artificial Sequence
  Description of Artificial Sequence: Synthetic oligonucleotide
  Antisense strand to SEQ ID NO: 809830
cagauuaaucucaaugcac

SEQ ID NO: 809832 - RNA, 19 nt, Artificial Sequence
  Description of Artificial Sequence: Synthetic oligonucleotide
  Sense strand starting at position 966 of SEQ ID NO: 587672
cugcaccuccuuuguguaa

SEQ ID NO: 809833 - RNA, 19 nt, Artificial Sequence
  Description of Artificial Sequence: Synthetic oligonucleotide
  Antisense strand to SEQ ID NO: 809832
uuacacaaaggaggugcag

SEQ ID NO: 809834 - RNA, 19 nt, Artificial Sequence
  Description of Artificial Sequence: Synthetic oligonucleotide
  Sense strand starting at position 1194 of SEQ ID NO: 587672
gcacguaguaagcaucgua

SEQ ID NO: 809835 - RNA, 19 nt, Artificial Sequence
  Description of Artificial Sequence: Synthetic oligonucleotide
  Antisense strand to SEQ ID NO: 809834
uacgaugcuuacuacgugc

SEQ ID NO: 809836 - RNA, 19 nt, Artificial Sequence
  Description of Artificial Sequence: Synthetic oligonucleotide
  Sense strand starting at position 1326 of SEQ ID NO: 587672
gcuggaugguguccugaaa

SEQ ID NO: 809837 - RNA, 19 nt, Artificial Sequence
  Description of Artificial Sequence: Synthetic oligonucleotide
  Antisense strand to SEQ ID NO: 809836
uuucaggacaccauccagc

SEQ ID NO: 809838 - RNA, 19 nt, Artificial Sequence
  Description of Artificial Sequence: Synthetic oligonucleotide
  Sense strand starting at position 1509 of SEQ ID NO: 587672
cuaagcgauucucaaauga

SEQ ID NO: 809839 - RNA, 19 nt, Artificial Sequence
  Description of Artificial Sequence: Synthetic oligonucleotide
  Antisense strand to SEQ ID NO: 809838
ucauuugagaaucgcuuag

SEQ ID NO: 809840 - RNA, 19 nt, Artificial Sequence
  Description of Artificial Sequence: Synthetic oligonucleotide
  Sense strand starting at position 1552 of SEQ ID NO: 587672
ggacacuuccugggcacau

SEQ ID NO: 809841 - RNA, 19 nt, Artificial Sequence
  Description of Artificial Sequence: Synthetic oligonucleotide
  Antisense strand to SEQ ID NO: 809840
augugcccaggaagugucc

SEQ ID NO: 809842 - RNA, 19 nt, Artificial Sequence
  Description of Artificial Sequence: Synthetic oligonucleotide
  Sense strand starting at position 1588 of SEQ ID NO: 587672
ggacuuagaacacgucuca

SEQ ID NO: 809843 - RNA, 19 nt, Artificial Sequence
  Description of Artificial Sequence: Synthetic oligonucleotide
  Antisense strand to SEQ ID NO: 809842
ugagacguguucuaagucc

SEQ ID NO: 809844 - RNA, 19 nt, Artificial Sequence
  Description of Artificial Sequence: Synthetic oligonucleotide
  Sense strand starting at position 3310 of SEQ ID NO: 587672
gcggcugaacggugauuca

SEQ ID NO: 809845 - RNA, 19 nt, Artificial Sequence
  Description of Artificial Sequence: Synthetic oligonucleotide
  Antisense strand to SEQ ID NO: 809844
ugaaucaccguucagccgc

SEQ ID NO: 809846 - RNA, 19 nt, Artificial Sequence
  Description of Artificial Sequence: Synthetic oligonucleotide
  Sense strand starting at position 3477 of SEQ ID NO: 587672
gcacccuuggugcgaauau

SEQ ID NO: 809847 - RNA, 19 nt, Artificial Sequence
  Description of Artificial Sequence: Synthetic oligonucleotide
  Antisense strand to SEQ ID NO: 809846
auauucgcaccaagggugc

SEQ ID NO: 809848 - RNA, 19 nt, Artificial Sequence
  Description of Artificial Sequence: Synthetic oligonucleotide
  Sense strand starting at position 13 of SEQ ID NO: 587673
gcacguaguaagcaucgua

SEQ ID NO: 809849 - RNA, 19 nt, Artificial Sequence
  Description of Artificial Sequence: Synthetic oligonucleotide
  Antisense strand to SEQ ID NO: 809848
uacgaugcuuacuacgugc

SEQ ID NO: 809850 - RNA, 19 nt, Artificial Sequence
  Description of Artificial Sequence: Synthetic oligonucleotide
  Sense strand starting at position 145 of SEQ ID NO: 587673
gcuggaugguguccugaaa

SEQ ID NO: 809851 - RNA, 19 nt, Artificial Sequence
  Description of Artificial Sequence: Synthetic oligonucleotide
  Antisense strand to SEQ ID NO: 809850
uuucaggacaccauccagc

SEQ ID NO: 809852 - RNA, 19 nt, Artificial Sequence
  Description of Artificial Sequence: Synthetic oligonucleotide
  Sense strand starting at position 328 of SEQ ID NO: 587673
cuaagcgauucucaaauga

SEQ ID NO: 809853 - RNA, 19 nt, Artificial Sequence
  Description of Artificial Sequence: Synthetic oligonucleotide
  Antisense strand to SEQ ID NO: 809852
ucauuugagaaucgcuuag

SEQ ID NO: 809854 - RNA, 19 nt, Artificial Sequence
  Description of Artificial Sequence: Synthetic oligonucleotide
  Sense strand starting at position 371 of SEQ ID NO: 587673
ggacacuuccugggcacau

SEQ ID NO: 809855 - RNA, 19 nt, Artificial Sequence
  Description of Artificial Sequence: Synthetic oligonucleotide
  Antisense strand to SEQ ID NO: 809854
augugcccaggaagugucc

SEQ ID NO: 809856 - RNA, 19 nt, Artificial Sequence
  Description of Artificial Sequence: Synthetic oligonucleotide
  Sense strand starting at position 407 of SEQ ID NO: 587673
ggacuuagaacacgucuca

SEQ ID NO: 809857 - RNA, 19 nt, Artificial Sequence
  Description of Artificial Sequence: Synthetic oligonucleotide
  Antisense strand to SEQ ID NO: 809856
ugagacguguucuaagucc

SEQ ID NO: 809858 - RNA, 19 nt, Artificial Sequence
  Description of Artificial Sequence: Synthetic oligonucleotide
  Sense strand starting at position 2129 of SEQ ID NO: 587673
gcggcugaacggugauuca

SEQ ID NO: 809859 - RNA, 19 nt, Artificial Sequence
  Description of Artificial Sequence: Synthetic oligonucleotide
  Antisense strand to SEQ ID NO: 809858
ugaaucaccguucagccgc

SEQ ID NO: 809860 - RNA, 19 nt, Artificial Sequence
  Description of Artificial Sequence: Synthetic oligonucleotide
  Sense strand starting at position 2296 of SEQ ID NO: 587673
gcacccuuggugcgaauau

SEQ ID NO: 809861 - RNA, 19 nt, Artificial Sequence
  Description of Artificial Sequence: Synthetic oligonucleotide
  Antisense strand to SEQ ID NO: 809860
auauucgcaccaagggugc

SEQ ID NO: 809862 - RNA, 19 nt, Artificial Sequence
  Description of Artificial Sequence: Synthetic oligonucleotide
  Sense strand starting at position 3025 of SEQ ID NO: 587673
cccucuucucuccgaguaa

SEQ ID NO: 809863 - RNA, 19 nt, Artificial Sequence
  Description of Artificial Sequence: Synthetic oligonucleotide
  Antisense strand to SEQ ID NO: 809862
uuacucggagagaagaggg

SEQ ID NO: 809864 - RNA, 19 nt, Artificial Sequence
  Description of Artificial Sequence: Synthetic oligonucleotide
  Sense strand starting at position 3026 of SEQ ID NO: 587673
ccucuucucuccgaguaaa

SEQ ID NO: 809865 - RNA, 19 nt, Artificial Sequence
  Description of Artificial Sequence: Synthetic oligonucleotide
  Antisense strand to SEQ ID NO: 809864
uuuacucggagagaagagg

SEQ ID NO: 809866 - RNA, 19 nt, Artificial Sequence
  Description of Artificial Sequence: Synthetic oligonucleotide
  Sense strand starting at position 3029 of SEQ ID NO: 587673
cuucucuccgaguaaauac

SEQ ID NO: 809867 - RNA, 19 nt, Artificial Sequence
  Description of Artificial Sequence: Synthetic oligonucleotide
  Antisense strand to SEQ ID NO: 809866
guauuuacucggagagaag

SEQ ID NO: 809868 - RNA, 19 nt, Artificial Sequence
  Description of Artificial Sequence: Synthetic oligonucleotide
  Sense strand starting at position 3059 of SEQ ID NO: 587673
gccuguagugacuaucuuu

SEQ ID NO: 809869 - RNA, 19 nt, Artificial Sequence
  Description of Artificial Sequence: Synthetic oligonucleotide
  Antisense strand to SEQ ID NO: 809868
aaagauagucacuacaggc

SEQ ID NO: 809870 - RNA, 19 nt, Artificial Sequence
  Description of Artificial Sequence: Synthetic oligonucleotide
  Sense strand starting at position 3062 of SEQ ID NO: 587673
uguagugacuaucuuugca

SEQ ID NO: 809871 - RNA, 19 nt, Artificial Sequence
  Description of Artificial Sequence: Synthetic oligonucleotide
  Antisense strand to SEQ ID NO: 809870
ugcaaagauagucacuaca

SEQ ID NO: 809872 - RNA, 19 nt, Artificial Sequence
  Description of Artificial Sequence: Synthetic oligonucleotide
  Sense strand starting at position 3070 of SEQ ID NO: 587673
cuaucuuugcaggagcgaa

SEQ ID NO: 809873 - RNA, 19 nt, Artificial Sequence
  Description of Artificial Sequence: Synthetic oligonucleotide
  Antisense strand to SEQ ID NO: 809872
uucgcuccugcaaagauag

SEQ ID NO: 809874 - RNA, 19 nt, Artificial Sequence
  Description of Artificial Sequence: Synthetic oligonucleotide
  Sense strand starting at position 3101 of SEQ ID NO: 587673
ggcuaagacuucccugcaa

SEQ ID NO: 809875 - RNA, 19 nt, Artificial Sequence
  Description of Artificial Sequence: Synthetic oligonucleotide
  Antisense strand to SEQ ID NO: 809874
uugcagggaagucuuagcc

SEQ ID NO: 809876 - RNA, 19 nt, Artificial Sequence
  Description of Artificial Sequence: Synthetic oligonucleotide
  Sense strand starting at position 3103 of SEQ ID NO: 587673
cuaagacuucccugcaaug

SEQ ID NO: 809877 - RNA, 19 nt, Artificial Sequence
  Description of Artificial Sequence: Synthetic oligonucleotide
  Antisense strand to SEQ ID NO: 809876
cauugcagggaagucuuag

SEQ ID NO: 809878 - RNA, 19 nt, Artificial Sequence
  Description of Artificial Sequence: Synthetic oligonucleotide
  Sense strand starting at position 3135 of SEQ ID NO: 587673
auggacagaucgcagauuu

SEQ ID NO: 809879 - RNA, 19 nt, Artificial Sequence
  Description of Artificial Sequence: Synthetic oligonucleotide
  Antisense strand to SEQ ID NO: 809878
aaaucugcgaucuguccau

SEQ ID NO: 809880 - RNA, 19 nt, Artificial Sequence
  Description of Artificial Sequence: Synthetic oligonucleotide
  Sense strand starting at position 3170 of SEQ ID NO: 587673
ucauuaaagucaguuaaca

SEQ ID NO: 809881 - RNA, 19 nt, Artificial Sequence
  Description of Artificial Sequence: Synthetic oligonucleotide
  Antisense strand to SEQ ID NO: 809880
uguuaacugacuuuaauga

SEQ ID NO: 809882 - RNA, 19 nt, Artificial Sequence
  Description of Artificial Sequence: Synthetic oligonucleotide
  Sense strand starting at position 3220 of SEQ ID NO: 587673
ucuaacauauggugguaua

SEQ ID NO: 809883 - RNA, 19 nt, Artificial Sequence
  Description of Artificial Sequence: Synthetic oligonucleotide
  Antisense strand to SEQ ID NO: 809882
uauaccaccauauguuaga

SEQ ID NO: 809884 - RNA, 19 nt, Artificial Sequence
  Description of Artificial Sequence: Synthetic oligonucleotide
  Sense strand starting at position 3223 of SEQ ID NO: 587673
aacauauggugguauagga

SEQ ID NO: 809885 - RNA, 19 nt, Artificial Sequence
  Description of Artificial Sequence: Synthetic oligonucleotide
  Antisense strand to SEQ ID NO: 809884
uccuauaccaccauauguu

SEQ ID NO: 809886 - RNA, 19 nt, Artificial Sequence
  Description of Artificial Sequence: Synthetic oligonucleotide
  Sense strand starting at position 3260 of SEQ ID NO: 587673
cugaaaugugaaggucaaa

SEQ ID NO: 809887 - RNA, 19 nt, Artificial Sequence
  Description of Artificial Sequence: Synthetic oligonucleotide
  Antisense strand to SEQ ID NO: 809886
uuugaccuucacauuucag

SEQ ID NO: 809888 - RNA, 19 nt, Artificial Sequence
  Description of Artificial Sequence: Synthetic oligonucleotide
  Sense strand starting at position 3273 of SEQ ID NO: 587673
gucaaauacuccuuggaaa

SEQ ID NO: 809889 - RNA, 19 nt, Artificial Sequence
  Description of Artificial Sequence: Synthetic oligonucleotide
  Antisense strand to SEQ ID NO: 809888
uuuccaaggaguauuugac

SEQ ID NO: 809890 - RNA, 19 nt, Artificial Sequence
  Description of Artificial Sequence: Synthetic oligonucleotide
  Sense strand starting at position 3298 of SEQ ID NO: 587673
uuugaaaucuguugggaug

SEQ ID NO: 809891 - RNA, 19 nt, Artificial Sequence
  Description of Artificial Sequence: Synthetic oligonucleotide
  Antisense strand to SEQ ID NO: 809890
caucccaacagauuucaaa

SEQ ID NO: 809892 - RNA, 19 nt, Artificial Sequence
  Description of Artificial Sequence: Synthetic oligonucleotide
  Sense strand starting at position 3299 of SEQ ID NO: 587673
uugaaaucuguugggauga

SEQ ID NO: 809893 - RNA, 19 nt, Artificial Sequence
  Description of Artificial Sequence: Synthetic oligonucleotide
  Antisense strand to SEQ ID NO: 809892
ucaucccaacagauuucaa

SEQ ID NO: 809894 - RNA, 19 nt, Artificial Sequence
  Description of Artificial Sequence: Synthetic oligonucleotide
  Sense strand starting at position 3300 of SEQ ID NO: 587673
ugaaaucuguugggaugaa

SEQ ID NO: 809895 - RNA, 19 nt, Artificial Sequence
  Description of Artificial Sequence: Synthetic oligonucleotide
  Antisense strand to SEQ ID NO: 809894
uucaucccaacagauuuca

SEQ ID NO: 809896 - RNA, 19 nt, Artificial Sequence
  Description of Artificial Sequence: Synthetic oligonucleotide
  Sense strand starting at position 3301 of SEQ ID NO: 587673
gaaaucuguugggaugaaa

SEQ ID NO: 809897 - RNA, 19 nt, Artificial Sequence
  Description of Artificial Sequence: Synthetic oligonucleotide
  Antisense strand to SEQ ID NO: 809896
uuucaucccaacagauuuc

SEQ ID NO: 809898 - RNA, 19 nt, Artificial Sequence
  Description of Artificial Sequence: Synthetic oligonucleotide
  Sense strand starting at position 3339 of SEQ ID NO: 587673
uuucuuaaguuuggacaca

SEQ ID NO: 809899 - RNA, 19 nt, Artificial Sequence
  Description of Artificial Sequence: Synthetic oligonucleotide
  Antisense strand to SEQ ID NO: 809898
uguguccaaacuuaagaaa

SEQ ID NO: 809900 - RNA, 19 nt, Artificial Sequence
  Description of Artificial Sequence: Synthetic oligonucleotide
  Sense strand starting at position 3357 of SEQ ID NO: 587673
agacaauugccuugucauc

SEQ ID NO: 809901 - RNA, 19 nt, Artificial Sequence
  Description of Artificial Sequence: Synthetic oligonucleotide
  Antisense strand to SEQ ID NO: 809900
gaugacaaggcaauugucu

SEQ ID NO: 809902 - RNA, 19 nt, Artificial Sequence
  Description of Artificial Sequence: Synthetic oligonucleotide
  Sense strand starting at position 3369 of SEQ ID NO: 587673
ugucaucuuucgguucagu

SEQ ID NO: 809903 - RNA, 19 nt, Artificial Sequence
  Description of Artificial Sequence: Synthetic oligonucleotide
  Antisense strand to SEQ ID NO: 809902
acugaaccgaaagaugaca

SEQ ID NO: 809904 - RNA, 19 nt, Artificial Sequence
  Description of Artificial Sequence: Synthetic oligonucleotide
  Sense strand starting at position 3391 of SEQ ID NO: 587673
cccuauguguaacugcaau

SEQ ID NO: 809905 - RNA, 19 nt, Artificial Sequence
  Description of Artificial Sequence: Synthetic oligonucleotide
  Antisense strand to SEQ ID NO: 809904
auugcaguuacacauaggg

SEQ ID NO: 809906 - RNA, 19 nt, Artificial Sequence
  Description of Artificial Sequence: Synthetic oligonucleotide
  Sense strand starting at position 3750 of SEQ ID NO: 587673
gguacaagugacugaaugu

SEQ ID NO: 809907 - RNA, 19 nt, Artificial Sequence
  Description of Artificial Sequence: Synthetic oligonucleotide
  Antisense strand to SEQ ID NO: 809906
acauucagucacuuguacc

SEQ ID NO: 809908 - RNA, 19 nt, Artificial Sequence
  Description of Artificial Sequence: Synthetic oligonucleotide
  Sense strand starting at position 3772 of SEQ ID NO: 587673
acgcuugcuaugggugaga

SEQ ID NO: 809909 - RNA, 19 nt, Artificial Sequence
  Description of Artificial Sequence: Synthetic oligonucleotide
  Antisense strand to SEQ ID NO: 809908
ucucacccauagcaagcgu

SEQ ID NO: 809910 - RNA, 19 nt, Artificial Sequence
  Description of Artificial Sequence: Synthetic oligonucleotide
  Sense strand starting at position 3774 of SEQ ID NO: 587673
gcuugcuaugggugagaag

SEQ ID NO: 809911 - RNA, 19 nt, Artificial Sequence
  Description of Artificial Sequence: Synthetic oligonucleotide
  Antisense strand to SEQ ID NO: 809910
cuucucacccauagcaagc

SEQ ID NO: 809912 - RNA, 19 nt, Artificial Sequence
  Description of Artificial Sequence: Synthetic oligonucleotide
  Sense strand starting at position 3775 of SEQ ID NO: 587673
cuugcuaugggugagaaga

SEQ ID NO: 809913 - RNA, 19 nt, Artificial Sequence
  Description of Artificial Sequence: Synthetic oligonucleotide
  Antisense strand to SEQ ID NO: 809912
ucuucucacccauagcaag

SEQ ID NO: 809914 - RNA, 19 nt, Artificial Sequence
  Description of Artificial Sequence: Synthetic oligonucleotide
  Sense strand starting at position 3777 of SEQ ID NO: 587673
ugcuaugggugagaagaaa

SEQ ID NO: 809915 - RNA, 19 nt, Artificial Sequence
  Description of Artificial Sequence: Synthetic oligonucleotide
  Antisense strand to SEQ ID NO: 809914
uuucuucucacccauagca

SEQ ID NO: 809916 - RNA, 19 nt, Artificial Sequence
  Description of Artificial Sequence: Synthetic oligonucleotide
  Sense strand starting at position 3788 of SEQ ID NO: 587673
agaagaaacuacugcuuau

SEQ ID NO: 809917 - RNA, 19 nt, Artificial Sequence
  Description of Artificial Sequence: Synthetic oligonucleotide
  Antisense strand to SEQ ID NO: 809916
auaagcaguaguuucuucu

SEQ ID NO: 809918 - RNA, 19 nt, Artificial Sequence
  Description of Artificial Sequence: Synthetic oligonucleotide
  Sense strand starting at position 3844 of SEQ ID NO: 587673
acagcauguuuccuuaagu

SEQ ID NO: 809919 - RNA, 19 nt, Artificial Sequence
  Description of Artificial Sequence: Synthetic oligonucleotide
  Antisense strand to SEQ ID NO: 809918
acuuaaggaaacaugcugu

SEQ ID NO: 809920 - RNA, 19 nt, Artificial Sequence
  Description of Artificial Sequence: Synthetic oligonucleotide
  Sense strand starting at position 3959 of SEQ ID NO: 587673
uuggcccaucuguauuaaa

SEQ ID NO: 809921 - RNA, 19 nt, Artificial Sequence
  Description of Artificial Sequence: Synthetic oligonucleotide
  Antisense strand to SEQ ID NO: 809920
uuuaauacagaugggccaa

SEQ ID NO: 809922 - RNA, 19 nt, Artificial Sequence
  Description of Artificial Sequence: Synthetic oligonucleotide
  Sense strand starting at position 214 of SEQ ID NO: 587674
caucccugugggcagaaau

SEQ ID NO: 809923 - RNA, 19 nt, Artificial Sequence
  Description of Artificial Sequence: Synthetic oligonucleotide
  Antisense strand to SEQ ID NO: 809922
auuucugcccacagggaug

SEQ ID NO: 809924 - RNA, 19 nt, Artificial Sequence
  Description of Artificial Sequence: Synthetic oligonucleotide
  Sense strand starting at position 249 of SEQ ID NO: 587674
cgacuuagcucauuuaucu

SEQ ID NO: 809925 - RNA, 19 nt, Artificial Sequence
  Description of Artificial Sequence: Synthetic oligonucleotide
  Antisense strand to SEQ ID NO: 809924
agauaaaugagcuaagucg

SEQ ID NO: 809926 - RNA, 19 nt, Artificial Sequence
  Description of Artificial Sequence: Synthetic oligonucleotide
  Sense strand starting at position 717 of SEQ ID NO: 587674
ggaggugugcaugaaacga

SEQ ID NO: 809927 - RNA, 19 nt, Artificial Sequence
  Description of Artificial Sequence: Synthetic oligonucleotide
  Antisense strand to SEQ ID NO: 809926
ucguuucaugcacaccucc

SEQ ID NO: 809928 - RNA, 19 nt, Artificial Sequence
  Description of Artificial Sequence: Synthetic oligonucleotide
  Sense strand starting at position 804 of SEQ ID NO: 587674
acagacaguuaucucugau

SEQ ID NO: 809929 - RNA, 19 nt, Artificial Sequence
  Description of Artificial Sequence: Synthetic oligonucleotide
  Antisense strand to SEQ ID NO: 809928
aucagagauaacugucugu

SEQ ID NO: 809930 - RNA, 19 nt, Artificial Sequence
  Description of Artificial Sequence: Synthetic oligonucleotide
  Sense strand starting at position 825 of SEQ ID NO: 587674
ccgagaaacagcugugguu

SEQ ID NO: 809931 - RNA, 19 nt, Artificial Sequence
  Description of Artificial Sequence: Synthetic oligonucleotide
  Antisense strand to SEQ ID NO: 809930
aaccacagcuguuucucgg

SEQ ID NO: 809932 - RNA, 19 nt, Artificial Sequence
  Description of Artificial Sequence: Synthetic oligonucleotide
  Sense strand starting at position 1025 of SEQ ID NO: 587674
gccucucuauaaguuauga

SEQ ID NO: 809933 - RNA, 19 nt, Artificial Sequence
  Description of Artificial Sequence: Synthetic oligonucleotide
  Antisense strand to SEQ ID NO: 809932
ucauaacuuauagagaggc

SEQ ID NO: 809934 - RNA, 19 nt, Artificial Sequence
  Description of Artificial Sequence: Synthetic oligonucleotide
  Sense strand starting at position 1220 of SEQ ID NO: 587674
gccgauucgcugagaugua

SEQ ID NO: 809935 - RNA, 19 nt, Artificial Sequence
  Description of Artificial Sequence: Synthetic oligonucleotide
  Antisense strand to SEQ ID NO: 809934
uacaucucagcgaaucggc

SEQ ID NO: 809936 - RNA, 19 nt, Artificial Sequence
  Description of Artificial Sequence: Synthetic oligonucleotide
  Sense strand starting at position 1225 of SEQ ID NO: 587674
uucgcugagauguacuauu

SEQ ID NO: 809937 - RNA, 19 nt, Artificial Sequence
  Description of Artificial Sequence: Synthetic oligonucleotide
  Antisense strand to SEQ ID NO: 809936
aauaguacaucucagcgaa

SEQ ID NO: 809938 - RNA, 19 nt, Artificial Sequence
  Description of Artificial Sequence: Synthetic oligonucleotide
  Sense strand starting at position 1249 of SEQ ID NO: 587674
ucaucaggcuuuccagaca

SEQ ID NO: 809939 - RNA, 19 nt, Artificial Sequence
  Description of Artificial Sequence: Synthetic oligonucleotide
  Antisense strand to SEQ ID NO: 809938
ugucuggaaagccugauga

SEQ ID NO: 809940 - RNA, 19 nt, Artificial Sequence
  Description of Artificial Sequence: Synthetic oligonucleotide
  Sense strand starting at position 2083 of SEQ ID NO: 587674
agggcucauucccuggaaa

SEQ ID NO: 809941 - RNA, 19 nt, Artificial Sequence
  Description of Artificial Sequence: Synthetic oligonucleotide
  Antisense strand to SEQ ID NO: 809940
uuuccagggaaugagcccu

SEQ ID NO: 809942 - RNA, 19 nt, Artificial Sequence
  Description of Artificial Sequence: Synthetic oligonucleotide
  Sense strand starting at position 2084 of SEQ ID NO: 587674
gggcucauucccuggaaag

SEQ ID NO: 809943 - RNA, 19 nt, Artificial Sequence
  Description of Artificial Sequence: Synthetic oligonucleotide
  Antisense strand to SEQ ID NO: 809942
cuuuccagggaaugagccc

SEQ ID NO: 809944 - RNA, 19 nt, Artificial Sequence
  Description of Artificial Sequence: Synthetic oligonucleotide
  Sense strand starting at position 2085 of SEQ ID NO: 587674
ggcucauucccuggaaagu

SEQ ID NO: 809945 - RNA, 19 nt, Artificial Sequence
  Description of Artificial Sequence: Synthetic oligonucleotide
  Antisense strand to SEQ ID NO: 809944
acuuuccagggaaugagcc

SEQ ID NO: 809946 - RNA, 19 nt, Artificial Sequence
  Description of Artificial Sequence: Synthetic oligonucleotide
  Sense strand starting at position 2086 of SEQ ID NO: 587674
gcucauucccuggaaagug

SEQ ID NO: 809947 - RNA, 19 nt, Artificial Sequence
  Description of Artificial Sequence: Synthetic oligonucleotide
  Antisense strand to SEQ ID NO: 809946
cacuuuccagggaaugagc

SEQ ID NO: 809948 - RNA, 19 nt, Artificial Sequence
  Description of Artificial Sequence: Synthetic oligonucleotide
  Sense strand starting at position 2218 of SEQ ID NO: 587674
gcaggcugggacuaacauu

SEQ ID NO: 809949 - RNA, 19 nt, Artificial Sequence
  Description of Artificial Sequence: Synthetic oligonucleotide
  Antisense strand to SEQ ID NO: 809948
aauguuagucccagccugc

SEQ ID NO: 809950 - RNA, 19 nt, Artificial Sequence
  Description of Artificial Sequence: Synthetic oligonucleotide
  Sense strand starting at position 2566 of SEQ ID NO: 587674
aggagacaguuauagggaa

SEQ ID NO: 809951 - RNA, 19 nt, Artificial Sequence
  Description of Artificial Sequence: Synthetic oligonucleotide
  Antisense strand to SEQ ID NO: 809950
uucccuauaacugucuccu

SEQ ID NO: 809952 - RNA, 19 nt, Artificial Sequence
  Description of Artificial Sequence: Synthetic oligonucleotide
  Sense strand starting at position 2586 of SEQ ID NO: 587674
agucaaugggugugugaau

SEQ ID NO: 809953 - RNA, 19 nt, Artificial Sequence
  Description of Artificial Sequence: Synthetic oligonucleotide
  Antisense strand to SEQ ID NO: 809952
auucacacacccauugacu

SEQ ID NO: 809954 - RNA, 19 nt, Artificial Sequence
  Description of Artificial Sequence: Synthetic oligonucleotide
  Sense strand starting at position 2702 of SEQ ID NO: 587674
agacucgugaaauguugaa

SEQ ID NO: 809955 - RNA, 19 nt, Artificial Sequence
  Description of Artificial Sequence: Synthetic oligonucleotide
  Antisense strand to SEQ ID NO: 809954
uucaacauuucacgagucu

SEQ ID NO: 809956 - RNA, 19 nt, Artificial Sequence
  Description of Artificial Sequence: Synthetic oligonucleotide
  Sense strand starting at position 2788 of SEQ ID NO: 587674
ugcuuaaaguauuugugua

SEQ ID NO: 809957 - RNA, 19 nt, Artificial Sequence
  Description of Artificial Sequence: Synthetic oligonucleotide
  Antisense strand to SEQ ID NO: 809956
uacacaaauacuuuaagca

SEQ ID NO: 809958 - RNA, 19 nt, Artificial Sequence
  Description of Artificial Sequence: Synthetic oligonucleotide
  Sense strand starting at position 2789 of SEQ ID NO: 587674
gcuuaaaguauuuguguau

SEQ ID NO: 809959 - RNA, 19 nt, Artificial Sequence
  Description of Artificial Sequence: Synthetic oligonucleotide
  Antisense strand to SEQ ID NO: 809958
auacacaaauacuuuaagc

SEQ ID NO: 809960 - RNA, 19 nt, Artificial Sequence
  Description of Artificial Sequence: Synthetic oligonucleotide
  Sense strand starting at position 2842 of SEQ ID NO: 587674
acaauaggcuguuuaaaga

SEQ ID NO: 809961 - RNA, 19 nt, Artificial Sequence
  Description of Artificial Sequence: Synthetic oligonucleotide
  Antisense strand to SEQ ID NO: 809960
ucuuuaaacagccuauugu

SEQ ID NO: 809962 - RNA, 19 nt, Artificial Sequence
  Description of Artificial Sequence: Synthetic oligonucleotide
  Sense strand starting at position 2877 of SEQ ID NO: 587674
ucuuuaguucucgaaggag

SEQ ID NO: 809963 - RNA, 19 nt, Artificial Sequence
  Description of Artificial Sequence: Synthetic oligonucleotide
  Antisense strand to SEQ ID NO: 809962
cuccuucgagaacuaaaga

SEQ ID NO: 809964 - RNA, 19 nt, Artificial Sequence
  Description of Artificial Sequence: Synthetic oligonucleotide
  Sense strand starting at position 2880 of SEQ ID NO: 587674
uuaguucucgaaggaggau

SEQ ID NO: 809965 - RNA, 19 nt, Artificial Sequence
  Description of Artificial Sequence: Synthetic oligonucleotide
  Antisense strand to SEQ ID NO: 809964
auccuccuucgagaacuaa

SEQ ID NO: 809966 - RNA, 19 nt, Artificial Sequence
  Description of Artificial Sequence: Synthetic oligonucleotide
  Sense strand starting at position 2906 of SEQ ID NO: 587674
cagcacuuuccaggaaguu

SEQ ID NO: 809967 - RNA, 19 nt, Artificial Sequence
  Description of Artificial Sequence: Synthetic oligonucleotide
  Antisense strand to SEQ ID NO: 809966
aacuuccuggaaagugcug

SEQ ID NO: 809968 - RNA, 19 nt, Artificial Sequence
  Description of Artificial Sequence: Synthetic oligonucleotide
  Sense strand starting at position 2948 of SEQ ID NO: 587674
ccagcagguguucaggaaa

SEQ ID NO: 809969 - RNA, 19 nt, Artificial Sequence
  Description of Artificial Sequence: Synthetic oligonucleotide
  Antisense strand to SEQ ID NO: 809968
uuuccugaacaccugcugg

SEQ ID NO: 809970 - RNA, 19 nt, Artificial Sequence
  Description of Artificial Sequence: Synthetic oligonucleotide
  Sense strand starting at position 2951 of SEQ ID NO: 587674
gcagguguucaggaaauag

SEQ ID NO: 809971 - RNA, 19 nt, Artificial Sequence
  Description of Artificial Sequence: Synthetic oligonucleotide
  Antisense strand to SEQ ID NO: 809970
cuauuuccugaacaccugc

SEQ ID NO: 809972 - RNA, 19 nt, Artificial Sequence
  Description of Artificial Sequence: Synthetic oligonucleotide
  Sense strand starting at position 3069 of SEQ ID NO: 587674
guguccuacugauugagag

SEQ ID NO: 809973 - RNA, 19 nt, Artificial Sequence
  Description of Artificial Sequence: Synthetic oligonucleotide
  Antisense strand to SEQ ID NO: 809972
cucucaaucaguaggacac

SEQ ID NO: 809974 - RNA, 19 nt, Artificial Sequence
  Description of Artificial Sequence: Synthetic oligonucleotide
  Sense strand starting at position 3175 of SEQ ID NO: 587674
gguauaggguccucaucua

SEQ ID NO: 809975 - RNA, 19 nt, Artificial Sequence
  Description of Artificial Sequence: Synthetic oligonucleotide
  Antisense strand to SEQ ID NO: 809974
uagaugaggacccuauacc

SEQ ID NO: 809976 - RNA, 19 nt, Artificial Sequence
  Description of Artificial Sequence: Synthetic oligonucleotide
  Sense strand starting at position 3245 of SEQ ID NO: 587674
ggaggcaucccuugaagag

SEQ ID NO: 809977 - RNA, 19 nt, Artificial Sequence
  Description of Artificial Sequence: Synthetic oligonucleotide
  Antisense strand to SEQ ID NO: 809976
cucuucaagggaugccucc

SEQ ID NO: 809978 - RNA, 19 nt, Artificial Sequence
  Description of Artificial Sequence: Synthetic oligonucleotide
  Sense strand starting at position 3342 of SEQ ID NO: 587674
ggaucaggcucaccacaau

SEQ ID NO: 809979 - RNA, 19 nt, Artificial Sequence
  Description of Artificial Sequence: Synthetic oligonucleotide
  Antisense strand to SEQ ID NO: 809978
auuguggugagccugaucc

SEQ ID NO: 809980 - RNA, 19 nt, Artificial Sequence
  Description of Artificial Sequence: Synthetic oligonucleotide
  Sense strand starting at position 3377 of SEQ ID NO: 587674
ccuaguuucucuuucugua

SEQ ID NO: 809981 - RNA, 19 nt, Artificial Sequence
  Description of Artificial Sequence: Synthetic oligonucleotide
  Antisense strand to SEQ ID NO: 809980
uacagaaagagaaacuagg

SEQ ID NO: 809982 - RNA, 19 nt, Artificial Sequence
  Description of Artificial Sequence: Synthetic oligonucleotide
  Sense strand starting at position 3527 of SEQ ID NO: 587674
ggcucugucauugauuguu

SEQ ID NO: 809983 - RNA, 19 nt, Artificial Sequence
  Description of Artificial Sequence: Synthetic oligonucleotide
  Antisense strand to SEQ ID NO: 809982
aacaaucaaugacagagcc

SEQ ID NO: 809984 - RNA, 19 nt, Artificial Sequence
  Description of Artificial Sequence: Synthetic oligonucleotide
  Sense strand starting at position 3529 of SEQ ID NO: 587674
cucugucauugauuguuau

SEQ ID NO: 809985 - RNA, 19 nt, Artificial Sequence
  Description of Artificial Sequence: Synthetic oligonucleotide
  Antisense strand to SEQ ID NO: 809984
auaacaaucaaugacagag

SEQ ID NO: 809986 - RNA, 19 nt, Artificial Sequence
  Description of Artificial Sequence: Synthetic oligonucleotide
  Sense strand starting at position 3530 of SEQ ID NO: 587674
ucugucauugauuguuauu

SEQ ID NO: 809987 - RNA, 19 nt, Artificial Sequence
  Description of Artificial Sequence: Synthetic oligonucleotide
  Antisense strand to SEQ ID NO: 809986
aauaacaaucaaugacaga

SEQ ID NO: 809988 - RNA, 19 nt, Artificial Sequence
  Description of Artificial Sequence: Synthetic oligonucleotide
  Sense strand starting at position 3532 of SEQ ID NO: 587674
ugucauugauuguuauugu

SEQ ID NO: 809989 - RNA, 19 nt, Artificial Sequence
  Description of Artificial Sequence: Synthetic oligonucleotide
  Antisense strand to SEQ ID NO: 809988
acaauaacaaucaaugaca

SEQ ID NO: 809990 - RNA, 19 nt, Artificial Sequence
  Description of Artificial Sequence: Synthetic oligonucleotide
  Sense strand starting at position 3548 of SEQ ID NO: 587674
uguuuauugagcgcguacu

SEQ ID NO: 809991 - RNA, 19 nt, Artificial Sequence
  Description of Artificial Sequence: Synthetic oligonucleotide
  Antisense strand to SEQ ID NO: 809990
aguacgcgcucaauaaaca

SEQ ID NO: 809992 - RNA, 19 nt, Artificial Sequence
  Description of Artificial Sequence: Synthetic oligonucleotide
  Sense strand starting at position 3580 of SEQ ID NO: 587674
uguugugagcucuuugcau

SEQ ID NO: 809993 - RNA, 19 nt, Artificial Sequence
  Description of Artificial Sequence: Synthetic oligonucleotide
  Antisense strand to SEQ ID NO: 809992
augcaaagagcucacaaca

SEQ ID NO: 809994 - RNA, 19 nt, Artificial Sequence
  Description of Artificial Sequence: Synthetic oligonucleotide
  Sense strand starting at position 3586 of SEQ ID NO: 587674
gagcucuuugcauauauug

SEQ ID NO: 809995 - RNA, 19 nt, Artificial Sequence
  Description of Artificial Sequence: Synthetic oligonucleotide
  Antisense strand to SEQ ID NO: 809994
caauauaugcaaagagcuc

SEQ ID NO: 809996 - RNA, 19 nt, Artificial Sequence
  Description of Artificial Sequence: Synthetic oligonucleotide
  Sense strand starting at position 3635 of SEQ ID NO: 587674
gucacaguaucucugacuu

SEQ ID NO: 809997 - RNA, 19 nt, Artificial Sequence
  Description of Artificial Sequence: Synthetic oligonucleotide
  Antisense strand to SEQ ID NO: 809996
aagucagagauacugugac

SEQ ID NO: 809998 - RNA, 19 nt, Artificial Sequence
  Description of Artificial Sequence: Synthetic oligonucleotide
  Sense strand starting at position 3665 of SEQ ID NO: 587674
ugggauaucuauuaaaugg

SEQ ID NO: 809999 - RNA, 19 nt, Artificial Sequence
  Description of Artificial Sequence: Synthetic oligonucleotide
  Antisense strand to SEQ ID NO: 809998
ccauuuaauagauauccca

SEQ ID NO: 810000 - RNA, 19 nt, Artificial Sequence
  Description of Artificial Sequence: Synthetic oligonucleotide
  Sense strand starting at position 3786 of SEQ ID NO: 587674
ccaagauguugccuuucca

SEQ ID NO: 810001 - RNA, 19 nt, Artificial Sequence
  Description of Artificial Sequence: Synthetic oligonucleotide
  Antisense strand to SEQ ID NO: 810000
uggaaaggcaacaucuugg

SEQ ID NO: 810002 - RNA, 19 nt, Artificial Sequence
  Description of Artificial Sequence: Synthetic oligonucleotide
  Sense strand starting at position 70 of SEQ ID NO: 587675
gaugucagcucaguaauuu

SEQ ID NO: 810003 - RNA, 19 nt, Artificial Sequence
  Description of Artificial Sequence: Synthetic oligonucleotide
  Antisense strand to SEQ ID NO: 810002
aaauuacugagcugacauc

SEQ ID NO: 810004 - RNA, 19 nt, Artificial Sequence
  Description of Artificial Sequence: Synthetic oligonucleotide
  Sense strand starting at position 182 of SEQ ID NO: 587675
acauuuaugucacaugaua

SEQ ID NO: 810005 - RNA, 19 nt, Artificial Sequence
  Description of Artificial Sequence: Synthetic oligonucleotide
  Antisense strand to SEQ ID NO: 810004
uaucaugugacauaaaugu

SEQ ID NO: 810006 - RNA, 19 nt, Artificial Sequence
  Description of Artificial Sequence: Synthetic oligonucleotide
  Sense strand starting at position 193 of SEQ ID NO: 587675
acaugauaaucuguguuug

SEQ ID NO: 810007 - RNA, 19 nt, Artificial Sequence
  Description of Artificial Sequence: Synthetic oligonucleotide
  Antisense strand to SEQ ID NO: 810006
caaacacagauuaucaugu

SEQ ID NO: 810008 - RNA, 19 nt, Artificial Sequence
  Description of Artificial Sequence: Synthetic oligonucleotide
  Sense strand starting at position 195 of SEQ ID NO: 587675
augauaaucuguguuugga

SEQ ID NO: 810009 - RNA, 19 nt, Artificial Sequence
  Description of Artificial Sequence: Synthetic oligonucleotide
  Antisense strand to SEQ ID NO: 810008
uccaaacacagauuaucau

SEQ ID NO: 810010 - RNA, 19 nt, Artificial Sequence
  Description of Artificial Sequence: Synthetic oligonucleotide
  Sense strand starting at position 273 of SEQ ID NO: 587675
agagguuuccacugugaaa

SEQ ID NO: 810011 - RNA, 19 nt, Artificial Sequence
  Description of Artificial Sequence: Synthetic oligonucleotide
  Antisense strand to SEQ ID NO: 810010
uuucacaguggaaaccucu

SEQ ID NO: 810012 - RNA, 19 nt, Artificial Sequence
  Description of Artificial Sequence: Synthetic oligonucleotide
  Sense strand starting at position 708 of SEQ ID NO: 587675
gaucuuugauaauugguua

SEQ ID NO: 810013 - RNA, 19 nt, Artificial Sequence
  Description of Artificial Sequence: Synthetic oligonucleotide
  Antisense strand to SEQ ID NO: 810012
uaaccaauuaucaaagauc

SEQ ID NO: 810014 - RNA, 19 nt, Artificial Sequence
  Description of Artificial Sequence: Synthetic oligonucleotide
  Sense strand starting at position 711 of SEQ ID NO: 587675
cuuugauaauugguuaaac

SEQ ID NO: 810015 - RNA, 19 nt, Artificial Sequence
  Description of Artificial Sequence: Synthetic oligonucleotide
  Antisense strand to SEQ ID NO: 810014
guuuaaccaauuaucaaag

SEQ ID NO: 810016 - RNA, 19 nt, Artificial Sequence
  Description of Artificial Sequence: Synthetic oligonucleotide
  Sense strand starting at position 763 of SEQ ID NO: 587675
cugauuauauuguugcaaa

SEQ ID NO: 810017 - RNA, 19 nt, Artificial Sequence
  Description of Artificial Sequence: Synthetic oligonucleotide
  Antisense strand to SEQ ID NO: 810016
uuugcaacaauauaaucag

SEQ ID NO: 810018 - RNA, 19 nt, Artificial Sequence
  Description of Artificial Sequence: Synthetic oligonucleotide
  Sense strand starting at position 851 of SEQ ID NO: 587675
ccuggaauccaccgugaua

SEQ ID NO: 810019 - RNA, 19 nt, Artificial Sequence
  Description of Artificial Sequence: Synthetic oligonucleotide
  Antisense strand to SEQ ID NO: 810018
uaucacgguggauuccagg

SEQ ID NO: 810020 - RNA, 19 nt, Artificial Sequence
  Description of Artificial Sequence: Synthetic oligonucleotide
  Sense strand starting at position 853 of SEQ ID NO: 587675
uggaauccaccgugauaaa

SEQ ID NO: 810021 - RNA, 19 nt, Artificial Sequence
  Description of Artificial Sequence: Synthetic oligonucleotide
  Antisense strand to SEQ ID NO: 810020
uuuaucacgguggauucca

SEQ ID NO: 810022 - RNA, 19 nt, Artificial Sequence
  Description of Artificial Sequence: Synthetic oligonucleotide
  Sense strand starting at position 995 of SEQ ID NO: 587675
guguaaacuggcguuguuu

SEQ ID NO: 810023 - RNA, 19 nt, Artificial Sequence
  Description of Artificial Sequence: Synthetic oligonucleotide
  Antisense strand to SEQ ID NO: 810022
aaacaacgccaguuuacac

SEQ ID NO: 810024 - RNA, 19 nt, Artificial Sequence
  Description of Artificial Sequence: Synthetic oligonucleotide
  Sense strand starting at position 1273 of SEQ ID NO: 587675
agauuccuuccgggagaag

SEQ ID NO: 810025 - RNA, 19 nt, Artificial Sequence
  Description of Artificial Sequence: Synthetic oligonucleotide
  Antisense strand to SEQ ID NO: 810024
cuucucccggaaggaaucu

SEQ ID NO: 810026 - RNA, 19 nt, Artificial Sequence
  Description of Artificial Sequence: Synthetic oligonucleotide
  Sense strand starting at position 1449 of SEQ ID NO: 587675
aggucaaugcgggaaacau

SEQ ID NO: 810027 - RNA, 19 nt, Artificial Sequence
  Description of Artificial Sequence: Synthetic oligonucleotide
  Antisense strand to SEQ ID NO: 810026
auguuucccgcauugaccu

SEQ ID NO: 810028 - RNA, 19 nt, Artificial Sequence
  Description of Artificial Sequence: Synthetic oligonucleotide
  Sense strand starting at position 1669 of SEQ ID NO: 587675
acgugaaauucagugacag

SEQ ID NO: 810029 - RNA, 19 nt, Artificial Sequence
  Description of Artificial Sequence: Synthetic oligonucleotide
  Antisense strand to SEQ ID NO: 810028
cugucacugaauuucacgu

SEQ ID NO: 810030 - RNA, 19 nt, Artificial Sequence
  Description of Artificial Sequence: Synthetic oligonucleotide
  Sense strand starting at position 2280 of SEQ ID NO: 587675
agucaugaguucccagaaa

SEQ ID NO: 810031 - RNA, 19 nt, Artificial Sequence
  Description of Artificial Sequence: Synthetic oligonucleotide
  Antisense strand to SEQ ID NO: 810030
uuucugggaacucaugacu

SEQ ID NO: 810032 - RNA, 19 nt, Artificial Sequence
  Description of Artificial Sequence: Synthetic oligonucleotide
  Sense strand starting at position 2321 of SEQ ID NO: 587675
aaagauccgagcgauugaa

SEQ ID NO: 810033 - RNA, 19 nt, Artificial Sequence
  Description of Artificial Sequence: Synthetic oligonucleotide
  Antisense strand to SEQ ID NO: 810032
uucaaucgcucggaucuuu

SEQ ID NO: 810034 - RNA, 19 nt, Artificial Sequence
  Description of Artificial Sequence: Synthetic oligonucleotide
  Sense strand starting at position 2354 of SEQ ID NO: 587675
cuugauagauccuuaguaa

SEQ ID NO: 810035 - RNA, 19 nt, Artificial Sequence
  Description of Artificial Sequence: Synthetic oligonucleotide
  Antisense strand to SEQ ID NO: 810034
uuacuaaggaucuaucaag

SEQ ID NO: 810036 - RNA, 19 nt, Artificial Sequence
  Description of Artificial Sequence: Synthetic oligonucleotide
  Sense strand starting at position 2380 of SEQ ID NO: 587675
uugaaugaggaauguggua

SEQ ID NO: 810037 - RNA, 19 nt, Artificial Sequence
  Description of Artificial Sequence: Synthetic oligonucleotide
  Antisense strand to SEQ ID NO: 810036
uaccacauuccucauucaa

SEQ ID NO: 810038 - RNA, 19 nt, Artificial Sequence
  Description of Artificial Sequence: Synthetic oligonucleotide
  Sense strand starting at position 2389 of SEQ ID NO: 587675
gaaugugguagccauagga

SEQ ID NO: 810039 - RNA, 19 nt, Artificial Sequence
  Description of Artificial Sequence: Synthetic oligonucleotide
  Antisense strand to SEQ ID NO: 810038
uccuauggcuaccacauuc

SEQ ID NO: 810040 - RNA, 19 nt, Artificial Sequence
  Description of Artificial Sequence: Synthetic oligonucleotide
  Sense strand starting at position 2474 of SEQ ID NO: 587675
ccagcuacuguauauauga

SEQ ID NO: 810041 - RNA, 19 nt, Artificial Sequence
  Description of Artificial Sequence: Synthetic oligonucleotide
  Antisense strand to SEQ ID NO: 810040
ucauauauacaguagcugg

SEQ ID NO: 810042 - RNA, 19 nt, Artificial Sequence
  Description of Artificial Sequence: Synthetic oligonucleotide
  Sense strand starting at position 2530 of SEQ ID NO: 587675
gaacucuaacgagauguuc

SEQ ID NO: 810043 - RNA, 19 nt, Artificial Sequence
  Description of Artificial Sequence: Synthetic oligonucleotide
  Antisense strand to SEQ ID NO: 810042
gaacaucucguuagaguuc

SEQ ID NO: 810044 - RNA, 19 nt, Artificial Sequence
  Description of Artificial Sequence: Synthetic oligonucleotide
  Sense strand starting at position 2570 of SEQ ID NO: 587675
ucuaaugugugaccacaaa

SEQ ID NO: 810045 - RNA, 19 nt, Artificial Sequence
  Description of Artificial Sequence: Synthetic oligonucleotide
  Antisense strand to SEQ ID NO: 810044
uuuguggucacacauuaga

SEQ ID NO: 810046 - RNA, 19 nt, Artificial Sequence
  Description of Artificial Sequence: Synthetic oligonucleotide
  Sense strand starting at position 2583 of SEQ ID NO: 587675
cacaaaugaucuguagggu

SEQ ID NO: 810047 - RNA, 19 nt, Artificial Sequence
  Description of Artificial Sequence: Synthetic oligonucleotide
  Antisense strand to SEQ ID NO: 810046
acccuacagaucauuugug

SEQ ID NO: 810048 - RNA, 19 nt, Artificial Sequence
  Description of Artificial Sequence: Synthetic oligonucleotide
  Sense strand starting at position 2586 of SEQ ID NO: 587675
aaaugaucuguaggguauu

SEQ ID NO: 810049 - RNA, 19 nt, Artificial Sequence
  Description of Artificial Sequence: Synthetic oligonucleotide
  Antisense strand to SEQ ID NO: 810048
aauacccuacagaucauuu

SEQ ID NO: 810050 - RNA, 19 nt, Artificial Sequence
  Description of Artificial Sequence: Synthetic oligonucleotide
  Sense strand starting at position 2692 of SEQ ID NO: 587675
uagauaaugugcuuugacu

SEQ ID NO: 810051 - RNA, 19 nt, Artificial Sequence
  Description of Artificial Sequence: Synthetic oligonucleotide
  Antisense strand to SEQ ID NO: 810050
agucaaagcacauuaucua

SEQ ID NO: 810052 - RNA, 19 nt, Artificial Sequence
  Description of Artificial Sequence: Synthetic oligonucleotide
  Sense strand starting at position 2746 of SEQ ID NO: 587675
gagaauugcugccuagaag

SEQ ID NO: 810053 - RNA, 19 nt, Artificial Sequence
  Description of Artificial Sequence: Synthetic oligonucleotide
  Antisense strand to SEQ ID NO: 810052
cuucuaggcagcaauucuc

SEQ ID NO: 810054 - RNA, 19 nt, Artificial Sequence
  Description of Artificial Sequence: Synthetic oligonucleotide
  Sense strand starting at position 2867 of SEQ ID NO: 587675
ucagaaauuguguaguuuc

SEQ ID NO: 810055 - RNA, 19 nt, Artificial Sequence
  Description of Artificial Sequence: Synthetic oligonucleotide
  Antisense strand to SEQ ID NO: 810054
gaaacuacacaauuucuga

SEQ ID NO: 810056 - RNA, 19 nt, Artificial Sequence
  Description of Artificial Sequence: Synthetic oligonucleotide
  Sense strand starting at position 2896 of SEQ ID NO: 587675
acucgagauguucagugaa

SEQ ID NO: 810057 - RNA, 19 nt, Artificial Sequence
  Description of Artificial Sequence: Synthetic oligonucleotide
  Antisense strand to SEQ ID NO: 810056
uucacugaacaucucgagu

SEQ ID NO: 810058 - RNA, 19 nt, Artificial Sequence
  Description of Artificial Sequence: Synthetic oligonucleotide
  Sense strand starting at position 2898 of SEQ ID NO: 587675
ucgagauguucagugaaca

SEQ ID NO: 810059 - RNA, 19 nt, Artificial Sequence
  Description of Artificial Sequence: Synthetic oligonucleotide
  Antisense strand to SEQ ID NO: 810058
uguucacugaacaucucga

SEQ ID NO: 810060 - RNA, 19 nt, Artificial Sequence
  Description of Artificial Sequence: Synthetic oligonucleotide
  Sense strand starting at position 2899 of SEQ ID NO: 587675
cgagauguucagugaacag

SEQ ID NO: 810061 - RNA, 19 nt, Artificial Sequence
  Description of Artificial Sequence: Synthetic oligonucleotide
  Antisense strand to SEQ ID NO: 810060
cuguucacugaacaucucg

SEQ ID NO: 810062 - RNA, 19 nt, Artificial Sequence
  Description of Artificial Sequence: Synthetic oligonucleotide
  Sense strand starting at position 2918 of SEQ ID NO: 587675
cuaacaauuguagguaacu

SEQ ID NO: 810063 - RNA, 19 nt, Artificial Sequence
  Description of Artificial Sequence: Synthetic oligonucleotide
  Antisense strand to SEQ ID NO: 810062
aguuaccuacaauuguuag

SEQ ID NO: 810064 - RNA, 19 nt, Artificial Sequence
  Description of Artificial Sequence: Synthetic oligonucleotide
  Sense strand starting at position 2927 of SEQ ID NO: 587675
guagguaacuauucccaau

SEQ ID NO: 810065 - RNA, 19 nt, Artificial Sequence
  Description of Artificial Sequence: Synthetic oligonucleotide
  Antisense strand to SEQ ID NO: 810064
auugggaauaguuaccuac

SEQ ID NO: 810066 - RNA, 19 nt, Artificial Sequence
  Description of Artificial Sequence: Synthetic oligonucleotide
  Sense strand starting at position 2989 of SEQ ID NO: 587675
ggucucuauuuguuauauu

SEQ ID NO: 810067 - RNA, 19 nt, Artificial Sequence
  Description of Artificial Sequence: Synthetic oligonucleotide
  Antisense strand to SEQ ID NO: 810066
aauauaacaaauagagacc

SEQ ID NO: 810068 - RNA, 19 nt, Artificial Sequence
  Description of Artificial Sequence: Synthetic oligonucleotide
  Sense strand starting at position 3685 of SEQ ID NO: 587675
guaacagaguauccaaaua

SEQ ID NO: 810069 - RNA, 19 nt, Artificial Sequence
  Description of Artificial Sequence: Synthetic oligonucleotide
  Antisense strand to SEQ ID NO: 810068
uauuuggauacucuguuac

SEQ ID NO: 810070 - RNA, 19 nt, Artificial Sequence
  Description of Artificial Sequence: Synthetic oligonucleotide
  Sense strand starting at position 3725 of SEQ ID NO: 587675
aucugcuaucuccagagga

SEQ ID NO: 810071 - RNA, 19 nt, Artificial Sequence
  Description of Artificial Sequence: Synthetic oligonucleotide
  Antisense strand to SEQ ID NO: 810070
uccucuggagauagcagau

SEQ ID NO: 810072 - RNA, 19 nt, Artificial Sequence
  Description of Artificial Sequence: Synthetic oligonucleotide
  Sense strand starting at position 3727 of SEQ ID NO: 587675
cugcuaucuccagaggaau

SEQ ID NO: 810073 - RNA, 19 nt, Artificial Sequence
  Description of Artificial Sequence: Synthetic oligonucleotide
  Antisense strand to SEQ ID NO: 810072
auuccucuggagauagcag

SEQ ID NO: 810074 - RNA, 19 nt, Artificial Sequence
  Description of Artificial Sequence: Synthetic oligonucleotide
  Sense strand starting at position 3729 of SEQ ID NO: 587675
gcuaucuccagaggaaugu

SEQ ID NO: 810075 - RNA, 19 nt, Artificial Sequence
  Description of Artificial Sequence: Synthetic oligonucleotide
  Antisense strand to SEQ ID NO: 810074
acauuccucuggagauagc

SEQ ID NO: 810076 - RNA, 19 nt, Artificial Sequence
  Description of Artificial Sequence: Synthetic oligonucleotide
  Sense strand starting at position 3738 of SEQ ID NO: 587675
agaggaaugugucucuaug

SEQ ID NO: 810077 - RNA, 19 nt, Artificial Sequence
  Description of Artificial Sequence: Synthetic oligonucleotide
  Antisense strand to SEQ ID NO: 810076
cauagagacacauuccucu

SEQ ID NO: 810078 - RNA, 19 nt, Artificial Sequence
  Description of Artificial Sequence: Synthetic oligonucleotide
  Sense strand starting at position 3811 of SEQ ID NO: 587675
ggucuuguccauugaggga

SEQ ID NO: 810079 - RNA, 19 nt, Artificial Sequence
  Description of Artificial Sequence: Synthetic oligonucleotide
  Antisense strand to SEQ ID NO: 810078
ucccucaauggacaagacc

SEQ ID NO: 810080 - RNA, 19 nt, Artificial Sequence
  Description of Artificial Sequence: Synthetic oligonucleotide
  Sense strand starting at position 3961 of SEQ ID NO: 587675
agagguaagcucuaccaac

SEQ ID NO: 810081 - RNA, 19 nt, Artificial Sequence
  Description of Artificial Sequence: Synthetic oligonucleotide
  Antisense strand to SEQ ID NO: 810080
guugguagagcuuaccucu

SEQ ID NO: 810082 - RNA, 19 nt, Artificial Sequence
  Description of Artificial Sequence: Synthetic oligonucleotide
  Sense strand starting at position 193 of SEQ ID NO: 587676
uuggcugauggaugaaauc

SEQ ID NO: 810083 - RNA, 19 nt, Artificial Sequence
  Description of Artificial Sequence: Synthetic oligonucleotide
  Antisense strand to SEQ ID NO: 810082
gauuucauccaucagccaa

SEQ ID NO: 810084 - RNA, 19 nt, Artificial Sequence
  Description of Artificial Sequence: Synthetic oligonucleotide
  Sense strand starting at position 316 of SEQ ID NO: 587676
ggcauuauagauuaugcaa

SEQ ID NO: 810085 - RNA, 19 nt, Artificial Sequence
  Description of Artificial Sequence: Synthetic oligonucleotide
  Antisense strand to SEQ ID NO: 810084
uugcauaaucuauaaugcc

SEQ ID NO: 810086 - RNA, 19 nt, Artificial Sequence
  Description of Artificial Sequence: Synthetic oligonucleotide
  Sense strand starting at position 363 of SEQ ID NO: 587676
ugaaucaaggguugacuca

SEQ ID NO: 810087 - RNA, 19 nt, Artificial Sequence
  Description of Artificial Sequence: Synthetic oligonucleotide
  Antisense strand to SEQ ID NO: 810086
ugagucaacccuugauuca

SEQ ID NO: 810088 - RNA, 19 nt, Artificial Sequence
  Description of Artificial Sequence: Synthetic oligonucleotide
  Sense strand starting at position 558 of SEQ ID NO: 587676
ggcacuauccaauaggcuu

SEQ ID NO: 810089 - RNA, 19 nt, Artificial Sequence
  Description of Artificial Sequence: Synthetic oligonucleotide
  Antisense strand to SEQ ID NO: 810088
aagccuauuggauagugcc

SEQ ID NO: 810090 - RNA, 19 nt, Artificial Sequence
  Description of Artificial Sequence: Synthetic oligonucleotide
  Sense strand starting at position 613 of SEQ ID NO: 587676
uuaugcaugcauuauguga

SEQ ID NO: 810091 - RNA, 19 nt, Artificial Sequence
  Description of Artificial Sequence: Synthetic oligonucleotide
  Antisense strand to SEQ ID NO: 810090
ucacauaaugcaugcauaa

SEQ ID NO: 810092 - RNA, 19 nt, Artificial Sequence
  Description of Artificial Sequence: Synthetic oligonucleotide
  Sense strand starting at position 768 of SEQ ID NO: 587676
uaagucuugcaagggauga

SEQ ID NO: 810093 - RNA, 19 nt, Artificial Sequence
  Description of Artificial Sequence: Synthetic oligonucleotide
  Antisense strand to SEQ ID NO: 810092
ucaucccuugcaagacuua

SEQ ID NO: 810094 - RNA, 19 nt, Artificial Sequence
  Description of Artificial Sequence: Synthetic oligonucleotide
  Sense strand starting at position 772 of SEQ ID NO: 587676
ucuugcaagggaugacauu

SEQ ID NO: 810095 - RNA, 19 nt, Artificial Sequence
  Description of Artificial Sequence: Synthetic oligonucleotide
  Antisense strand to SEQ ID NO: 810094
aaugucaucccuugcaaga

SEQ ID NO: 810096 - RNA, 19 nt, Artificial Sequence
  Description of Artificial Sequence: Synthetic oligonucleotide
  Sense strand starting at position 784 of SEQ ID NO: 587676
ugacauuacuaaguaaagu

SEQ ID NO: 810097 - RNA, 19 nt, Artificial Sequence
  Description of Artificial Sequence: Synthetic oligonucleotide
  Antisense strand to SEQ ID NO: 810096
acuuuacuuaguaauguca

SEQ ID NO: 810098 - RNA, 19 nt, Artificial Sequence
  Description of Artificial Sequence: Synthetic oligonucleotide
  Sense strand starting at position 900 of SEQ ID NO: 587676
cucagaaucugucugaagu

SEQ ID NO: 810099 - RNA, 19 nt, Artificial Sequence
  Description of Artificial Sequence: Synthetic oligonucleotide
  Antisense strand to SEQ ID NO: 810098
acuucagacagauucugag

SEQ ID NO: 810100 - RNA, 19 nt, Artificial Sequence
  Description of Artificial Sequence: Synthetic oligonucleotide
  Sense strand starting at position 922 of SEQ ID NO: 587676
acgcaagggagaugucuau

SEQ ID NO: 810101 - RNA, 19 nt, Artificial Sequence
  Description of Artificial Sequence: Synthetic oligonucleotide
  Antisense strand to SEQ ID NO: 810100
auagacaucucccuugcgu

SEQ ID NO: 810102 - RNA, 19 nt, Artificial Sequence
  Description of Artificial Sequence: Synthetic oligonucleotide
  Sense strand starting at position 1154 of SEQ ID NO: 587676
uguucucuccuugaugaca

SEQ ID NO: 810103 - RNA, 19 nt, Artificial Sequence
  Description of Artificial Sequence: Synthetic oligonucleotide
  Antisense strand to SEQ ID NO: 810102
ugucaucaaggagagaaca

SEQ ID NO: 810104 - RNA, 19 nt, Artificial Sequence
  Description of Artificial Sequence: Synthetic oligonucleotide
  Sense strand starting at position 1380 of SEQ ID NO: 587676
auucccacacaguguaauu

SEQ ID NO: 810105 - RNA, 19 nt, Artificial Sequence
  Description of Artificial Sequence: Synthetic oligonucleotide
  Antisense strand to SEQ ID NO: 810104
aauuacacugugugggaau

SEQ ID NO: 810106 - RNA, 19 nt, Artificial Sequence
  Description of Artificial Sequence: Synthetic oligonucleotide
  Sense strand starting at position 1382 of SEQ ID NO: 587676
ucccacacaguguaauuaa

SEQ ID NO: 810107 - RNA, 19 nt, Artificial Sequence
  Description of Artificial Sequence: Synthetic oligonucleotide
  Antisense strand to SEQ ID NO: 810106
uuaauuacacuguguggga

SEQ ID NO: 810108 - RNA, 19 nt, Artificial Sequence
  Description of Artificial Sequence: Synthetic oligonucleotide
  Sense strand starting at position 1400 of SEQ ID NO: 587676
agcaacauuccuggaaauc

SEQ ID NO: 810109 - RNA, 19 nt, Artificial Sequence
  Description of Artificial Sequence: Synthetic oligonucleotide
  Antisense strand to SEQ ID NO: 810108
gauuuccaggaauguugcu

SEQ ID NO: 810110 - RNA, 19 nt, Artificial Sequence
  Description of Artificial Sequence: Synthetic oligonucleotide
  Sense strand starting at position 2186 of SEQ ID NO: 587676
gggugaaugucuguuuagg

SEQ ID NO: 810111 - RNA, 19 nt, Artificial Sequence
  Description of Artificial Sequence: Synthetic oligonucleotide
  Antisense strand to SEQ ID NO: 810110
ccuaaacagacauucaccc

SEQ ID NO: 810112 - RNA, 19 nt, Artificial Sequence
  Description of Artificial Sequence: Synthetic oligonucleotide
  Sense strand starting at position 2389 of SEQ ID NO: 587676
gaauaugaaugagcgugaa

SEQ ID NO: 810113 - RNA, 19 nt, Artificial Sequence
  Description of Artificial Sequence: Synthetic oligonucleotide
  Antisense strand to SEQ ID NO: 810112
uucacgcucauucauauuc

SEQ ID NO: 810114 - RNA, 19 nt, Artificial Sequence
  Description of Artificial Sequence: Synthetic oligonucleotide
  Sense strand starting at position 2392 of SEQ ID NO: 587676
uaugaaugagcgugaauua

SEQ ID NO: 810115 - RNA, 19 nt, Artificial Sequence
  Description of Artificial Sequence: Synthetic oligonucleotide
  Antisense strand to SEQ ID NO: 810114
uaauucacgcucauucaua

SEQ ID NO: 810116 - RNA, 19 nt, Artificial Sequence
  Description of Artificial Sequence: Synthetic oligonucleotide
  Sense strand starting at position 2393 of SEQ ID NO: 587676
augaaugagcgugaauuag

SEQ ID NO: 810117 - RNA, 19 nt, Artificial Sequence
  Description of Artificial Sequence: Synthetic oligonucleotide
  Antisense strand to SEQ ID NO: 810116
cuaauucacgcucauucau

SEQ ID NO: 810118 - RNA, 19 nt, Artificial Sequence
  Description of Artificial Sequence: Synthetic oligonucleotide
  Sense strand starting at position 2905 of SEQ ID NO: 587676
ggagaccuggcuuaagguu

SEQ ID NO: 810119 - RNA, 19 nt, Artificial Sequence
  Description of Artificial Sequence: Synthetic oligonucleotide
  Antisense strand to SEQ ID NO: 810118
aaccuuaagccaggucucc

SEQ ID NO: 810120 - RNA, 19 nt, Artificial Sequence
  Description of Artificial Sequence: Synthetic oligonucleotide
  Sense strand starting at position 2982 of SEQ ID NO: 587676
gaagaagaugcguagcuuu

SEQ ID NO: 810121 - RNA, 19 nt, Artificial Sequence
  Description of Artificial Sequence: Synthetic oligonucleotide
  Antisense strand to SEQ ID NO: 810120
aaagcuacgcaucuucuuc

SEQ ID NO: 810122 - RNA, 19 nt, Artificial Sequence
  Description of Artificial Sequence: Synthetic oligonucleotide
  Sense strand starting at position 3010 of SEQ ID NO: 587676
uggagaagguuuccggaau

SEQ ID NO: 810123 - RNA, 19 nt, Artificial Sequence
  Description of Artificial Sequence: Synthetic oligonucleotide
  Antisense strand to SEQ ID NO: 810122
auuccggaaaccuucucca

SEQ ID NO: 810124 - RNA, 19 nt, Artificial Sequence
  Description of Artificial Sequence: Synthetic oligonucleotide
  Sense strand starting at position 3016 of SEQ ID NO: 587676
agguuuccggaauagguau

SEQ ID NO: 810125 - RNA, 19 nt, Artificial Sequence
  Description of Artificial Sequence: Synthetic oligonucleotide
  Antisense strand to SEQ ID NO: 810124
auaccuauuccggaaaccu

SEQ ID NO: 810126 - RNA, 19 nt, Artificial Sequence
  Description of Artificial Sequence: Synthetic oligonucleotide
  Sense strand starting at position 3050 of SEQ ID NO: 587676
gaaauaaauugagaaggau

SEQ ID NO: 810127 - RNA, 19 nt, Artificial Sequence
  Description of Artificial Sequence: Synthetic oligonucleotide
  Antisense strand to SEQ ID NO: 810126
auccuucucaauuuauuuc

SEQ ID NO: 810128 - RNA, 19 nt, Artificial Sequence
  Description of Artificial Sequence: Synthetic oligonucleotide
  Sense strand starting at position 3059 of SEQ ID NO: 587676
ugagaaggauuuggaaaga

SEQ ID NO: 810129 - RNA, 19 nt, Artificial Sequence
  Description of Artificial Sequence: Synthetic oligonucleotide
  Antisense strand to SEQ ID NO: 810128
ucuuuccaaauccuucuca

SEQ ID NO: 810130 - RNA, 19 nt, Artificial Sequence
  Description of Artificial Sequence: Synthetic oligonucleotide
  Sense strand starting at position 3073 of SEQ ID NO: 587676
aaagaagaucucggauagu

SEQ ID NO: 810131 - RNA, 19 nt, Artificial Sequence
  Description of Artificial Sequence: Synthetic oligonucleotide
  Antisense strand to SEQ ID NO: 810130
acuauccgagaucuucuuu

SEQ ID NO: 810132 - RNA, 19 nt, Artificial Sequence
  Description of Artificial Sequence: Synthetic oligonucleotide
  Sense strand starting at position 3079 of SEQ ID NO: 587676
gaucucggauaguuaagau

SEQ ID NO: 810133 - RNA, 19 nt, Artificial Sequence
  Description of Artificial Sequence: Synthetic oligonucleotide
  Antisense strand to SEQ ID NO: 810132
aucuuaacuauccgagauc

SEQ ID NO: 810134 - RNA, 19 nt, Artificial Sequence
  Description of Artificial Sequence: Synthetic oligonucleotide
  Sense strand starting at position 3087 of SEQ ID NO: 587676
auaguuaagauacggacaa

SEQ ID NO: 810135 - RNA, 19 nt, Artificial Sequence
  Description of Artificial Sequence: Synthetic oligonucleotide
  Antisense strand to SEQ ID NO: 810134
uuguccguaucuuaacuau

SEQ ID NO: 810136 - RNA, 19 nt, Artificial Sequence
  Description of Artificial Sequence: Synthetic oligonucleotide
  Sense strand starting at position 3111 of SEQ ID NO: 587676
cucugaauccuguggaaac

SEQ ID NO: 810137 - RNA, 19 nt, Artificial Sequence
  Description of Artificial Sequence: Synthetic oligonucleotide
  Antisense strand to SEQ ID NO: 810136
guuuccacaggauucagag

SEQ ID NO: 810138 - RNA, 19 nt, Artificial Sequence
  Description of Artificial Sequence: Synthetic oligonucleotide
  Sense strand starting at position 3166 of SEQ ID NO: 587676
ggcguucugcagaggauga

SEQ ID NO: 810139 - RNA, 19 nt, Artificial Sequence
  Description of Artificial Sequence: Synthetic oligonucleotide
  Antisense strand to SEQ ID NO: 810138
ucauccucugcagaacgcc

SEQ ID NO: 810140 - RNA, 19 nt, Artificial Sequence
  Description of Artificial Sequence: Synthetic oligonucleotide
  Sense strand starting at position 3168 of SEQ ID NO: 587676
cguucugcagaggaugaaa

SEQ ID NO: 810141 - RNA, 19 nt, Artificial Sequence
  Description of Artificial Sequence: Synthetic oligonucleotide
  Antisense strand to SEQ ID NO: 810140
uuucauccucugcagaacg

SEQ ID NO: 810142 - RNA, 19 nt, Artificial Sequence
  Description of Artificial Sequence: Synthetic oligonucleotide
  Sense strand starting at position 3222 of SEQ ID NO: 587676
auuuguuguaccuggugga

SEQ ID NO: 810143 - RNA, 19 nt, Artificial Sequence
  Description of Artificial Sequence: Synthetic oligonucleotide
  Antisense strand to SEQ ID NO: 810142
uccaccagguacaacaaau

SEQ ID NO: 810144 - RNA, 19 nt, Artificial Sequence
  Description of Artificial Sequence: Synthetic oligonucleotide
  Sense strand starting at position 3449 of SEQ ID NO: 587676
ccguuaguucaggcguuaa

SEQ ID NO: 810145 - RNA, 19 nt, Artificial Sequence
  Description of Artificial Sequence: Synthetic oligonucleotide
  Antisense strand to SEQ ID NO: 810144
uuaacgccugaacuaacgg

SEQ ID NO: 810146 - RNA, 19 nt, Artificial Sequence
  Description of Artificial Sequence: Synthetic oligonucleotide
  Sense strand starting at position 3536 of SEQ ID NO: 587676
cgguuaucauucccaagga

SEQ ID NO: 810147 - RNA, 19 nt, Artificial Sequence
  Description of Artificial Sequence: Synthetic oligonucleotide
  Antisense strand to SEQ ID NO: 810146
uccuugggaaugauaaccg

SEQ ID NO: 810148 - RNA, 19 nt, Artificial Sequence
  Description of Artificial Sequence: Synthetic oligonucleotide
  Sense strand starting at position 3556 of SEQ ID NO: 587676
gucugcacaucuuugaaau

SEQ ID NO: 810149 - RNA, 19 nt, Artificial Sequence
  Description of Artificial Sequence: Synthetic oligonucleotide
  Antisense strand to SEQ ID NO: 810148
auuucaaagaugugcagac

SEQ ID NO: 810150 - RNA, 19 nt, Artificial Sequence
  Description of Artificial Sequence: Synthetic oligonucleotide
  Sense strand starting at position 3590 of SEQ ID NO: 587676
ugaauaaccucaggauuug

SEQ ID NO: 810151 - RNA, 19 nt, Artificial Sequence
  Description of Artificial Sequence: Synthetic oligonucleotide
  Antisense strand to SEQ ID NO: 810150
caaauccugagguuauuca

SEQ ID NO: 810152 - RNA, 19 nt, Artificial Sequence
  Description of Artificial Sequence: Synthetic oligonucleotide
  Sense strand starting at position 3714 of SEQ ID NO: 587676
gcguuaagacaucagugau

SEQ ID NO: 810153 - RNA, 19 nt, Artificial Sequence
  Description of Artificial Sequence: Synthetic oligonucleotide
  Antisense strand to SEQ ID NO: 810152
aucacugaugucuuaacgc

SEQ ID NO: 810154 - RNA, 19 nt, Artificial Sequence
  Description of Artificial Sequence: Synthetic oligonucleotide
  Sense strand starting at position 3724 of SEQ ID NO: 587676
aucagugaucaaggaucau

SEQ ID NO: 810155 - RNA, 19 nt, Artificial Sequence
  Description of Artificial Sequence: Synthetic oligonucleotide
  Antisense strand to SEQ ID NO: 810154
augauccuugaucacugau

SEQ ID NO: 810156 - RNA, 19 nt, Artificial Sequence
  Description of Artificial Sequence: Synthetic oligonucleotide
  Sense strand starting at position 3779 of SEQ ID NO: 587676
gucaucauucuuuauggau

SEQ ID NO: 810157 - RNA, 19 nt, Artificial Sequence
  Description of Artificial Sequence: Synthetic oligonucleotide
  Antisense strand to SEQ ID NO: 810156
auccauaaagaaugaugac

SEQ ID NO: 810158 - RNA, 19 nt, Artificial Sequence
  Description of Artificial Sequence: Synthetic oligonucleotide
  Sense strand starting at position 3825 of SEQ ID NO: 587676
acaaauaaguaguuuagca

SEQ ID NO: 810159 - RNA, 19 nt, Artificial Sequence
  Description of Artificial Sequence: Synthetic oligonucleotide
  Antisense strand to SEQ ID NO: 810158
ugcuaaacuacuuauuugu

SEQ ID NO: 810160 - RNA, 19 nt, Artificial Sequence
  Description of Artificial Sequence: Synthetic oligonucleotide
  Sense strand starting at position 3982 of SEQ ID NO: 587676
gacugugaugaaugauggu

SEQ ID NO: 810161 - RNA, 19 nt, Artificial Sequence
  Description of Artificial Sequence: Synthetic oligonucleotide
  Antisense strand to SEQ ID NO: 810160
accaucauucaucacaguc

SEQ ID NO: 810162 - RNA, 19 nt, Artificial Sequence
  Description of Artificial Sequence: Synthetic oligonucleotide
  Sense strand starting at position 22 of SEQ ID NO: 587677
gauggagcuguuugguaug

SEQ ID NO: 810163 - RNA, 19 nt, Artificial Sequence
  Description of Artificial Sequence: Synthetic oligonucleotide
  Antisense strand to SEQ ID NO: 810162
cauaccaaacagcuccauc

SEQ ID NO: 810164 - RNA, 19 nt, Artificial Sequence
  Description of Artificial Sequence: Synthetic oligonucleotide
  Sense strand starting at position 24 of SEQ ID NO: 587677
uggagcuguuugguaugua

SEQ ID NO: 810165 - RNA, 19 nt, Artificial Sequence
  Description of Artificial Sequence: Synthetic oligonucleotide
  Antisense strand to SEQ ID NO: 810164
uacauaccaaacagcucca

SEQ ID NO: 810166 - RNA, 19 nt, Artificial Sequence
  Description of Artificial Sequence: Synthetic oligonucleotide
  Sense strand starting at position 28 of SEQ ID NO: 587677
gcuguuugguauguaaagu

SEQ ID NO: 810167 - RNA, 19 nt, Artificial Sequence
  Description of Artificial Sequence: Synthetic oligonucleotide
  Antisense strand to SEQ ID NO: 810166
acuuuacauaccaaacagc

SEQ ID NO: 810168 - RNA, 19 nt, Artificial Sequence
  Description of Artificial Sequence: Synthetic oligonucleotide
  Sense strand starting at position 29 of SEQ ID NO: 587677
cuguuugguauguaaaguu

SEQ ID NO: 810169 - RNA, 19 nt, Artificial Sequence
  Description of Artificial Sequence: Synthetic oligonucleotide
  Antisense strand to SEQ ID NO: 810168
aacuuuacauaccaaacag

SEQ ID NO: 810170 - RNA, 19 nt, Artificial Sequence
  Description of Artificial Sequence: Synthetic oligonucleotide
  Sense strand starting at position 36 of SEQ ID NO: 587677
guauguaaaguuugaggac

SEQ ID NO: 810171 - RNA, 19 nt, Artificial Sequence
  Description of Artificial Sequence: Synthetic oligonucleotide
  Antisense strand to SEQ ID NO: 810170
guccucaaacuuuacauac

SEQ ID NO: 810172 - RNA, 19 nt, Artificial Sequence
  Description of Artificial Sequence: Synthetic oligonucleotide
  Sense strand starting at position 70 of SEQ ID NO: 587677
agagacgucugugcucaga

SEQ ID NO: 810173 - RNA, 19 nt, Artificial Sequence
  Description of Artificial Sequence: Synthetic oligonucleotide
  Antisense strand to SEQ ID NO: 810172
ucugagcacagacgucucu

SEQ ID NO: 810174 - RNA, 19 nt, Artificial Sequence
  Description of Artificial Sequence: Synthetic oligonucleotide
  Sense strand starting at position 72 of SEQ ID NO: 587677
agacgucugugcucagaua

SEQ ID NO: 810175 - RNA, 19 nt, Artificial Sequence
  Description of Artificial Sequence: Synthetic oligonucleotide
  Antisense strand to SEQ ID NO: 810174
uaucugagcacagacgucu

SEQ ID NO: 810176 - RNA, 19 nt, Artificial Sequence
  Description of Artificial Sequence: Synthetic oligonucleotide
  Sense strand starting at position 73 of SEQ ID NO: 587677
gacgucugugcucagauaa

SEQ ID NO: 810177 - RNA, 19 nt, Artificial Sequence
  Description of Artificial Sequence: Synthetic oligonucleotide
  Antisense strand to SEQ ID NO: 810176
uuaucugagcacagacguc

SEQ ID NO: 810178 - RNA, 19 nt, Artificial Sequence
  Description of Artificial Sequence: Synthetic oligonucleotide
  Sense strand starting at position 474 of SEQ ID NO: 587677
uuugguuuccagugggaga

SEQ ID NO: 810179 - RNA, 19 nt, Artificial Sequence
  Description of Artificial Sequence: Synthetic oligonucleotide
  Antisense strand to SEQ ID NO: 810178
ucucccacuggaaaccaaa

SEQ ID NO: 810180 - RNA, 19 nt, Artificial Sequence
  Description of Artificial Sequence: Synthetic oligonucleotide
  Sense strand starting at position 475 of SEQ ID NO: 587677
uugguuuccagugggagaa

SEQ ID NO: 810181 - RNA, 19 nt, Artificial Sequence
  Description of Artificial Sequence: Synthetic oligonucleotide
  Antisense strand to SEQ ID NO: 810180
uucucccacuggaaaccaa

SEQ ID NO: 810182 - RNA, 19 nt, Artificial Sequence
  Description of Artificial Sequence: Synthetic oligonucleotide
  Sense strand starting at position 572 of SEQ ID NO: 587677
gccgaagugaucgccgagu

SEQ ID NO: 810183 - RNA, 19 nt, Artificial Sequence
  Description of Artificial Sequence: Synthetic oligonucleotide
  Antisense strand to SEQ ID NO: 810182
acucggcgaucacuucggc

SEQ ID NO: 810184 - RNA, 19 nt, Artificial Sequence
  Description of Artificial Sequence: Synthetic oligonucleotide
  Sense strand starting at position 613 of SEQ ID NO: 587677
uuuagaauccgcugcagaa

SEQ ID NO: 810185 - RNA, 19 nt, Artificial Sequence
  Description of Artificial Sequence: Synthetic oligonucleotide
  Antisense strand to SEQ ID NO: 810184
uucugcagcggauucuaaa

SEQ ID NO: 810186 - RNA, 19 nt, Artificial Sequence
  Description of Artificial Sequence: Synthetic oligonucleotide
  Sense strand starting at position 659 of SEQ ID NO: 587677
cagguaauguucuuaggcu

SEQ ID NO: 810187 - RNA, 19 nt, Artificial Sequence
  Description of Artificial Sequence: Synthetic oligonucleotide
  Antisense strand to SEQ ID NO: 810186
agccuaagaacauuaccug

SEQ ID NO: 810188 - RNA, 19 nt, Artificial Sequence
  Description of Artificial Sequence: Synthetic oligonucleotide
  Sense strand starting at position 700 of SEQ ID NO: 587677
ccugcaggccgguaaauaa

SEQ ID NO: 810189 - RNA, 19 nt, Artificial Sequence
  Description of Artificial Sequence: Synthetic oligonucleotide
  Antisense strand to SEQ ID NO: 810188
uuauuuaccggccugcagg

SEQ ID NO: 810190 - RNA, 19 nt, Artificial Sequence
  Description of Artificial Sequence: Synthetic oligonucleotide
  Sense strand starting at position 710 of SEQ ID NO: 587677
gguaaauaacuccgaucua

SEQ ID NO: 810191 - RNA, 19 nt, Artificial Sequence
  Description of Artificial Sequence: Synthetic oligonucleotide
  Antisense strand to SEQ ID NO: 810190
uagaucggaguuauuuacc

SEQ ID NO: 810192 - RNA, 19 nt, Artificial Sequence
  Description of Artificial Sequence: Synthetic oligonucleotide
  Sense strand starting at position 746 of SEQ ID NO: 587677
uuucguucgcgccuugaau

SEQ ID NO: 810193 - RNA, 19 nt, Artificial Sequence
  Description of Artificial Sequence: Synthetic oligonucleotide
  Antisense strand to SEQ ID NO: 810192
auucaaggcgcgaacgaaa

SEQ ID NO: 810194 - RNA, 19 nt, Artificial Sequence
  Description of Artificial Sequence: Synthetic oligonucleotide
  Sense strand starting at position 842 of SEQ ID NO: 587677
gagugaggugcugagguuu

SEQ ID NO: 810195 - RNA, 19 nt, Artificial Sequence
  Description of Artificial Sequence: Synthetic oligonucleotide
  Antisense strand to SEQ ID NO: 810194
aaaccucagcaccucacuc

SEQ ID NO: 810196 - RNA, 19 nt, Artificial Sequence
  Description of Artificial Sequence: Synthetic oligonucleotide
  Sense strand starting at position 1028 of SEQ ID NO: 587677
acgguugcgccuuuggaua

SEQ ID NO: 810197 - RNA, 19 nt, Artificial Sequence
  Description of Artificial Sequence: Synthetic oligonucleotide
  Antisense strand to SEQ ID NO: 810196
uauccaaaggcgcaaccgu

SEQ ID NO: 810198 - RNA, 19 nt, Artificial Sequence
  Description of Artificial Sequence: Synthetic oligonucleotide
  Sense strand starting at position 1101 of SEQ ID NO: 587677
ccuuuaacguucucccuga

SEQ ID NO: 810199 - RNA, 19 nt, Artificial Sequence
  Description of Artificial Sequence: Synthetic oligonucleotide
  Antisense strand to SEQ ID NO: 810198
ucagggagaacguuaaagg

SEQ ID NO: 810200 - RNA, 19 nt, Artificial Sequence
  Description of Artificial Sequence: Synthetic oligonucleotide
  Sense strand starting at position 1122 of SEQ ID NO: 587677
cggagaauccugcgccaac

SEQ ID NO: 810201 - RNA, 19 nt, Artificial Sequence
  Description of Artificial Sequence: Synthetic oligonucleotide
  Antisense strand to SEQ ID NO: 810200
guuggcgcaggauucuccg

SEQ ID NO: 810202 - RNA, 19 nt, Artificial Sequence
  Description of Artificial Sequence: Synthetic oligonucleotide
  Sense strand starting at position 1186 of SEQ ID NO: 587677
uuucgucuuccagaagaaa

SEQ ID NO: 810203 - RNA, 19 nt, Artificial Sequence
  Description of Artificial Sequence: Synthetic oligonucleotide
  Antisense strand to SEQ ID NO: 810202
uuucuucuggaagacgaaa

SEQ ID NO: 810204 - RNA, 19 nt, Artificial Sequence
  Description of Artificial Sequence: Synthetic oligonucleotide
  Sense strand starting at position 1396 of SEQ ID NO: 587677
aggguuucgcuguggagau

SEQ ID NO: 810205 - RNA, 19 nt, Artificial Sequence
  Description of Artificial Sequence: Synthetic oligonucleotide
  Antisense strand to SEQ ID NO: 810204
aucuccacagcgaaacccu

SEQ ID NO: 810206 - RNA, 19 nt, Artificial Sequence
  Description of Artificial Sequence: Synthetic oligonucleotide
  Sense strand starting at position 1949 of SEQ ID NO: 587677
gcaggauguccuugaccga

SEQ ID NO: 810207 - RNA, 19 nt, Artificial Sequence
  Description of Artificial Sequence: Synthetic oligonucleotide
  Antisense strand to SEQ ID NO: 810206
ucggucaaggacauccugc

SEQ ID NO: 810208 - RNA, 19 nt, Artificial Sequence
  Description of Artificial Sequence: Synthetic oligonucleotide
  Sense strand starting at position 1952 of SEQ ID NO: 587677
ggauguccuugaccgagaa

SEQ ID NO: 810209 - RNA, 19 nt, Artificial Sequence
  Description of Artificial Sequence: Synthetic oligonucleotide
  Antisense strand to SEQ ID NO: 810208
uucucggucaaggacaucc

SEQ ID NO: 810210 - RNA, 19 nt, Artificial Sequence
  Description of Artificial Sequence: Synthetic oligonucleotide
  Sense strand starting at position 2195 of SEQ ID NO: 587677
uugguucucgcagaaacca

SEQ ID NO: 810211 - RNA, 19 nt, Artificial Sequence
  Description of Artificial Sequence: Synthetic oligonucleotide
  Antisense strand to SEQ ID NO: 810210
ugguuucugcgagaaccaa

SEQ ID NO: 810212 - RNA, 19 nt, Artificial Sequence
  Description of Artificial Sequence: Synthetic oligonucleotide
  Sense strand starting at position 2292 of SEQ ID NO: 587677
cugggagguuugguucgua

SEQ ID NO: 810213 - RNA, 19 nt, Artificial Sequence
  Description of Artificial Sequence: Synthetic oligonucleotide
  Antisense strand to SEQ ID NO: 810212
uacgaaccaaaccucccag

SEQ ID NO: 810214 - RNA, 19 nt, Artificial Sequence
  Description of Artificial Sequence: Synthetic oligonucleotide
  Sense strand starting at position 2293 of SEQ ID NO: 587677
ugggagguuugguucguau

SEQ ID NO: 810215 - RNA, 19 nt, Artificial Sequence
  Description of Artificial Sequence: Synthetic oligonucleotide
  Antisense strand to SEQ ID NO: 810214
auacgaaccaaaccuccca

SEQ ID NO: 810216 - RNA, 19 nt, Artificial Sequence
  Description of Artificial Sequence: Synthetic oligonucleotide
  Sense strand starting at position 2295 of SEQ ID NO: 587677
ggagguuugguucguauug

SEQ ID NO: 810217 - RNA, 19 nt, Artificial Sequence
  Description of Artificial Sequence: Synthetic oligonucleotide
  Antisense strand to SEQ ID NO: 810216
caauacgaaccaaaccucc

SEQ ID NO: 810218 - RNA, 19 nt, Artificial Sequence
  Description of Artificial Sequence: Synthetic oligonucleotide
  Sense strand starting at position 2296 of SEQ ID NO: 587677
gagguuugguucguauuga

SEQ ID NO: 810219 - RNA, 19 nt, Artificial Sequence
  Description of Artificial Sequence: Synthetic oligonucleotide
  Antisense strand to SEQ ID NO: 810218
ucaauacgaaccaaaccuc

SEQ ID NO: 810220 - RNA, 19 nt, Artificial Sequence
  Description of Artificial Sequence: Synthetic oligonucleotide
  Sense strand starting at position 2513 of SEQ ID NO: 587677
cauucuuauggcggaggaa

SEQ ID NO: 810221 - RNA, 19 nt, Artificial Sequence
  Description of Artificial Sequence: Synthetic oligonucleotide
  Antisense strand to SEQ ID NO: 810220
uuccuccgccauaagaaug

SEQ ID NO: 810222 - RNA, 19 nt, Artificial Sequence
  Description of Artificial Sequence: Synthetic oligonucleotide
  Sense strand starting at position 2637 of SEQ ID NO: 587677
ggccuauauugagauggaa

SEQ ID NO: 810223 - RNA, 19 nt, Artificial Sequence
  Description of Artificial Sequence: Synthetic oligonucleotide
  Antisense strand to SEQ ID NO: 810222
uuccaucucaauauaggcc

SEQ ID NO: 810224 - RNA, 19 nt, Artificial Sequence
  Description of Artificial Sequence: Synthetic oligonucleotide
  Sense strand starting at position 2778 of SEQ ID NO: 587677
cuuaaagggcuccgcgaau

SEQ ID NO: 810225 - RNA, 19 nt, Artificial Sequence
  Description of Artificial Sequence: Synthetic oligonucleotide
  Antisense strand to SEQ ID NO: 810224
auucgcggagcccuuuaag

SEQ ID NO: 810226 - RNA, 19 nt, Artificial Sequence
  Description of Artificial Sequence: Synthetic oligonucleotide
  Sense strand starting at position 2956 of SEQ ID NO: 587677
gcuugugugcgcguauaaa

SEQ ID NO: 810227 - RNA, 19 nt, Artificial Sequence
  Description of Artificial Sequence: Synthetic oligonucleotide
  Antisense strand to SEQ ID NO: 810226
uuuauacgcgcacacaagc

SEQ ID NO: 810228 - RNA, 19 nt, Artificial Sequence
  Description of Artificial Sequence: Synthetic oligonucleotide
  Sense strand starting at position 3000 of SEQ ID NO: 587677
agauuugacucgcauuaga

SEQ ID NO: 810229 - RNA, 19 nt, Artificial Sequence
  Description of Artificial Sequence: Synthetic oligonucleotide
  Antisense strand to SEQ ID NO: 810228
ucuaaugcgagucaaaucu

SEQ ID NO: 810230 - RNA, 19 nt, Artificial Sequence
  Description of Artificial Sequence: Synthetic oligonucleotide
  Sense strand starting at position 3010 of SEQ ID NO: 587677
cgcauuagaucuccagaaa

SEQ ID NO: 810231 - RNA, 19 nt, Artificial Sequence
  Description of Artificial Sequence: Synthetic oligonucleotide
  Antisense strand to SEQ ID NO: 810230
uuucuggagaucuaaugcg

SEQ ID NO: 810232 - RNA, 19 nt, Artificial Sequence
  Description of Artificial Sequence: Synthetic oligonucleotide
  Sense strand starting at position 3090 of SEQ ID NO: 587677
cggagauagcgccaacaga

SEQ ID NO: 810233 - RNA, 19 nt, Artificial Sequence
  Description of Artificial Sequence: Synthetic oligonucleotide
  Antisense strand to SEQ ID NO: 810232
ucuguuggcgcuaucuccg

SEQ ID NO: 810234 - RNA, 19 nt, Artificial Sequence
  Description of Artificial Sequence: Synthetic oligonucleotide
  Sense strand starting at position 3134 of SEQ ID NO: 587677
ggaucagggaaacgugauu

SEQ ID NO: 810235 - RNA, 19 nt, Artificial Sequence
  Description of Artificial Sequence: Synthetic oligonucleotide
  Antisense strand to SEQ ID NO: 810234
aaucacguuucccugaucc

SEQ ID NO: 810236 - RNA, 19 nt, Artificial Sequence
  Description of Artificial Sequence: Synthetic oligonucleotide
  Sense strand starting at position 3482 of SEQ ID NO: 587677
gccacuaagccuggcuauu

SEQ ID NO: 810237 - RNA, 19 nt, Artificial Sequence
  Description of Artificial Sequence: Synthetic oligonucleotide
  Antisense strand to SEQ ID NO: 810236
aauagccaggcuuaguggc

SEQ ID NO: 810238 - RNA, 19 nt, Artificial Sequence
  Description of Artificial Sequence: Synthetic oligonucleotide
  Sense strand starting at position 3678 of SEQ ID NO: 587677
acaacagcuguuugaauau

SEQ ID NO: 810239 - RNA, 19 nt, Artificial Sequence
  Description of Artificial Sequence: Synthetic oligonucleotide
  Antisense strand to SEQ ID NO: 810238
auauucaaacagcuguugu

SEQ ID NO: 810240 - RNA, 19 nt, Artificial Sequence
  Description of Artificial Sequence: Synthetic oligonucleotide
  Sense strand starting at position 3687 of SEQ ID NO: 587677
guuugaauaugauuaucuc

SEQ ID NO: 810241 - RNA, 19 nt, Artificial Sequence
  Description of Artificial Sequence: Synthetic oligonucleotide
  Antisense strand to SEQ ID NO: 810240
gagauaaucauauucaaac

SEQ ID NO: 810242 - RNA, 19 nt, Artificial Sequence
  Description of Artificial Sequence: Synthetic oligonucleotide
  Sense strand starting at position 3 of SEQ ID NO: 587678
aacagaauccuugggugua

SEQ ID NO: 810243 - RNA, 19 nt, Artificial Sequence
  Description of Artificial Sequence: Synthetic oligonucleotide
  Antisense strand to SEQ ID NO: 810242
uacacccaaggauucuguu

SEQ ID NO: 810244 - RNA, 19 nt, Artificial Sequence
  Description of Artificial Sequence: Synthetic oligonucleotide
  Sense strand starting at position 5 of SEQ ID NO: 587678
cagaauccuuggguguaca

SEQ ID NO: 810245 - RNA, 19 nt, Artificial Sequence
  Description of Artificial Sequence: Synthetic oligonucleotide
  Antisense strand to SEQ ID NO: 810244
uguacacccaaggauucug

SEQ ID NO: 810246 - RNA, 19 nt, Artificial Sequence
  Description of Artificial Sequence: Synthetic oligonucleotide
  Sense strand starting at position 6 of SEQ ID NO: 587678
agaauccuuggguguacaa

SEQ ID NO: 810247 - RNA, 19 nt, Artificial Sequence
  Description of Artificial Sequence: Synthetic oligonucleotide
  Antisense strand to SEQ ID NO: 810246
uuguacacccaaggauucu

SEQ ID NO: 810248 - RNA, 19 nt, Artificial Sequence
  Description of Artificial Sequence: Synthetic oligonucleotide
  Sense strand starting at position 117 of SEQ ID NO: 587678
acaguaugcacuggaggaa

SEQ ID NO: 810249 - RNA, 19 nt, Artificial Sequence
  Description of Artificial Sequence: Synthetic oligonucleotide
  Antisense strand to SEQ ID NO: 810248
uuccuccagugcauacugu

SEQ ID NO: 810250 - RNA, 19 nt, Artificial Sequence
  Description of Artificial Sequence: Synthetic oligonucleotide
  Sense strand starting at position 176 of SEQ ID NO: 587678
uugucucaccagugaagaa

SEQ ID NO: 810251 - RNA, 19 nt, Artificial Sequence
  Description of Artificial Sequence: Synthetic oligonucleotide
  Antisense strand to SEQ ID NO: 810250
uucuucacuggugagacaa

SEQ ID NO: 810252 - RNA, 19 nt, Artificial Sequence
  Description of Artificial Sequence: Synthetic oligonucleotide
  Sense strand starting at position 186 of SEQ ID NO: 587678
agugaagaaucugagauuu

SEQ ID NO: 810253 - RNA, 19 nt, Artificial Sequence
  Description of Artificial Sequence: Synthetic oligonucleotide
  Antisense strand to SEQ ID NO: 810252
aaaucucagauucuucacu

SEQ ID NO: 810254 - RNA, 19 nt, Artificial Sequence
  Description of Artificial Sequence: Synthetic oligonucleotide
  Sense strand starting at position 321 of SEQ ID NO: 587678
cugagcuggcauuaccaaa

SEQ ID NO: 810255 - RNA, 19 nt, Artificial Sequence
  Description of Artificial Sequence: Synthetic oligonucleotide
  Antisense strand to SEQ ID NO: 810254
uuugguaaugccagcucag

SEQ ID NO: 810256 - RNA, 19 nt, Artificial Sequence
  Description of Artificial Sequence: Synthetic oligonucleotide
  Sense strand starting at position 378 of SEQ ID NO: 587678
uaguaaggauagcuguuau

SEQ ID NO: 810257 - RNA, 19 nt, Artificial Sequence
  Description of Artificial Sequence: Synthetic oligonucleotide
  Antisense strand to SEQ ID NO: 810256
auaacagcuauccuuacua

SEQ ID NO: 810258 - RNA, 19 nt, Artificial Sequence
  Description of Artificial Sequence: Synthetic oligonucleotide
  Sense strand starting at position 390 of SEQ ID NO: 587678
cuguuauacacggagacca

SEQ ID NO: 810259 - RNA, 19 nt, Artificial Sequence
  Description of Artificial Sequence: Synthetic oligonucleotide
  Antisense strand to SEQ ID NO: 810258
uggucuccguguauaacag

SEQ ID NO: 810260 - RNA, 19 nt, Artificial Sequence
  Description of Artificial Sequence: Synthetic oligonucleotide
  Sense strand starting at position 501 of SEQ ID NO: 587678
gucuuauagcgucuguucu

SEQ ID NO: 810261 - RNA, 19 nt, Artificial Sequence
  Description of Artificial Sequence: Synthetic oligonucleotide
  Antisense strand to SEQ ID NO: 810260
agaacagacgcuauaagac

SEQ ID NO: 810262 - RNA, 19 nt, Artificial Sequence
  Description of Artificial Sequence: Synthetic oligonucleotide
  Sense strand starting at position 592 of SEQ ID NO: 587678
gguacuucugauggcugaa

SEQ ID NO: 810263 - RNA, 19 nt, Artificial Sequence
  Description of Artificial Sequence: Synthetic oligonucleotide
  Antisense strand to SEQ ID NO: 810262
uucagccaucagaaguacc

SEQ ID NO: 810264 - RNA, 19 nt, Artificial Sequence
  Description of Artificial Sequence: Synthetic oligonucleotide
  Sense strand starting at position 595 of SEQ ID NO: 587678
acuucugauggcugaacuu

SEQ ID NO: 810265 - RNA, 19 nt, Artificial Sequence
  Description of Artificial Sequence: Synthetic oligonucleotide
  Antisense strand to SEQ ID NO: 810264
aaguucagccaucagaagu

SEQ ID NO: 810266 - RNA, 19 nt, Artificial Sequence
  Description of Artificial Sequence: Synthetic oligonucleotide
  Sense strand starting at position 604 of SEQ ID NO: 587678
ggcugaacuuccucuccaa

SEQ ID NO: 810267 - RNA, 19 nt, Artificial Sequence
  Description of Artificial Sequence: Synthetic oligonucleotide
  Antisense strand to SEQ ID NO: 810266
uuggagaggaaguucagcc

SEQ ID NO: 810268 - RNA, 19 nt, Artificial Sequence
  Description of Artificial Sequence: Synthetic oligonucleotide
  Sense strand starting at position 739 of SEQ ID NO: 587678
ccaagugccuuucuggaaa

SEQ ID NO: 810269 - RNA, 19 nt, Artificial Sequence
  Description of Artificial Sequence: Synthetic oligonucleotide
  Antisense strand to SEQ ID NO: 810268
uuuccagaaaggcacuugg

SEQ ID NO: 810270 - RNA, 19 nt, Artificial Sequence
  Description of Artificial Sequence: Synthetic oligonucleotide
  Sense strand starting at position 742 of SEQ ID NO: 587678
agugccuuucuggaaagga

SEQ ID NO: 810271 - RNA, 19 nt, Artificial Sequence
  Description of Artificial Sequence: Synthetic oligonucleotide
  Antisense strand to SEQ ID NO: 810270
uccuuuccagaaaggcacu

SEQ ID NO: 810272 - RNA, 19 nt, Artificial Sequence
  Description of Artificial Sequence: Synthetic oligonucleotide
  Sense strand starting at position 828 of SEQ ID NO: 587678
acccuuaucucuuuaguga

SEQ ID NO: 810273 - RNA, 19 nt, Artificial Sequence
  Description of Artificial Sequence: Synthetic oligonucleotide
  Antisense strand to SEQ ID NO: 810272
ucacuaaagagauaagggu

SEQ ID NO: 810274 - RNA, 19 nt, Artificial Sequence
  Description of Artificial Sequence: Synthetic oligonucleotide
  Sense strand starting at position 829 of SEQ ID NO: 587678
cccuuaucucuuuagugag

SEQ ID NO: 810275 - RNA, 19 nt, Artificial Sequence
  Description of Artificial Sequence: Synthetic oligonucleotide
  Antisense strand to SEQ ID NO: 810274
cucacuaaagagauaaggg

SEQ ID NO: 810276 - RNA, 19 nt, Artificial Sequence
  Description of Artificial Sequence: Synthetic oligonucleotide
  Sense strand starting at position 835 of SEQ ID NO: 587678
ucucuuuagugagugaaca

SEQ ID NO: 810277 - RNA, 19 nt, Artificial Sequence
  Description of Artificial Sequence: Synthetic oligonucleotide
  Antisense strand to SEQ ID NO: 810276
uguucacucacuaaagaga

SEQ ID NO: 810278 - RNA, 19 nt, Artificial Sequence
  Description of Artificial Sequence: Synthetic oligonucleotide
  Sense strand starting at position 836 of SEQ ID NO: 587678
cucuuuagugagugaacaa

SEQ ID NO: 810279 - RNA, 19 nt, Artificial Sequence
  Description of Artificial Sequence: Synthetic oligonucleotide
  Antisense strand to SEQ ID NO: 810278
uuguucacucacuaaagag

SEQ ID NO: 810280 - RNA, 19 nt, Artificial Sequence
  Description of Artificial Sequence: Synthetic oligonucleotide
  Sense strand starting at position 861 of SEQ ID NO: 587678
cacugucaucguggauaca

SEQ ID NO: 810281 - RNA, 19 nt, Artificial Sequence
  Description of Artificial Sequence: Synthetic oligonucleotide
  Antisense strand to SEQ ID NO: 810280
uguauccacgaugacagug

SEQ ID NO: 810282 - RNA, 19 nt, Artificial Sequence
  Description of Artificial Sequence: Synthetic oligonucleotide
  Sense strand starting at position 862 of SEQ ID NO: 587678
acugucaucguggauacau

SEQ ID NO: 810283 - RNA, 19 nt, Artificial Sequence
  Description of Artificial Sequence: Synthetic oligonucleotide
  Antisense strand to SEQ ID NO: 810282
auguauccacgaugacagu

SEQ ID NO: 810284 - RNA, 19 nt, Artificial Sequence
  Description of Artificial Sequence: Synthetic oligonucleotide
  Sense strand starting at position 902 of SEQ ID NO: 587678
aggagcucuccggagugaa

SEQ ID NO: 810285 - RNA, 19 nt, Artificial Sequence
  Description of Artificial Sequence: Synthetic oligonucleotide
  Antisense strand to SEQ ID NO: 810284
uucacuccggagagcuccu

SEQ ID NO: 810286 - RNA, 19 nt, Artificial Sequence
  Description of Artificial Sequence: Synthetic oligonucleotide
  Sense strand starting at position 912 of SEQ ID NO: 587678
cggagugaagagugaguaa

SEQ ID NO: 810287 - RNA, 19 nt, Artificial Sequence
  Description of Artificial Sequence: Synthetic oligonucleotide
  Antisense strand to SEQ ID NO: 810286
uuacucacucuucacuccg

SEQ ID NO: 810288 - RNA, 19 nt, Artificial Sequence
  Description of Artificial Sequence: Synthetic oligonucleotide
  Sense strand starting at position 915 of SEQ ID NO: 587678
agugaagagugaguaaaua

SEQ ID NO: 810289 - RNA, 19 nt, Artificial Sequence
  Description of Artificial Sequence: Synthetic oligonucleotide
  Antisense strand to SEQ ID NO: 810288
uauuuacucacucuucacu

SEQ ID NO: 810290 - RNA, 19 nt, Artificial Sequence
  Description of Artificial Sequence: Synthetic oligonucleotide
  Sense strand starting at position 972 of SEQ ID NO: 587678
cccaaaguuagagacguuu

SEQ ID NO: 810291 - RNA, 19 nt, Artificial Sequence
  Description of Artificial Sequence: Synthetic oligonucleotide
  Antisense strand to SEQ ID NO: 810290
aaacgucucuaacuuuggg

SEQ ID NO: 810292 - RNA, 19 nt, Artificial Sequence
  Description of Artificial Sequence: Synthetic oligonucleotide
  Sense strand starting at position 978 of SEQ ID NO: 587678
guuagagacguuucguggu

SEQ ID NO: 810293 - RNA, 19 nt, Artificial Sequence
  Description of Artificial Sequence: Synthetic oligonucleotide
  Antisense strand to SEQ ID NO: 810292
accacgaaacgucucuaac

SEQ ID NO: 810294 - RNA, 19 nt, Artificial Sequence
  Description of Artificial Sequence: Synthetic oligonucleotide
  Sense strand starting at position 1005 of SEQ ID NO: 587678
cucccuacugucuaguaga

SEQ ID NO: 810295 - RNA, 19 nt, Artificial Sequence
  Description of Artificial Sequence: Synthetic oligonucleotide
  Antisense strand to SEQ ID NO: 810294
ucuacuagacaguagggag

SEQ ID NO: 810296 - RNA, 19 nt, Artificial Sequence
  Description of Artificial Sequence: Synthetic oligonucleotide
  Sense strand starting at position 1895 of SEQ ID NO: 587678
gcaggauguccuggaugag

SEQ ID NO: 810297 - RNA, 19 nt, Artificial Sequence
  Description of Artificial Sequence: Synthetic oligonucleotide
  Antisense strand to SEQ ID NO: 810296
cucauccaggacauccugc

SEQ ID NO: 810298 - RNA, 19 nt, Artificial Sequence
  Description of Artificial Sequence: Synthetic oligonucleotide
  Sense strand starting at position 2845 of SEQ ID NO: 587678
uuggcuaaacaauggguua

SEQ ID NO: 810299 - RNA, 19 nt, Artificial Sequence
  Description of Artificial Sequence: Synthetic oligonucleotide
  Antisense strand to SEQ ID NO: 810298
uaacccauuguuuagccaa

SEQ ID NO: 810300 - RNA, 19 nt, Artificial Sequence
  Description of Artificial Sequence: Synthetic oligonucleotide
  Sense strand starting at position 2856 of SEQ ID NO: 587678
auggguuagccagauuggu

SEQ ID NO: 810301 - RNA, 19 nt, Artificial Sequence
  Description of Artificial Sequence: Synthetic oligonucleotide
  Antisense strand to SEQ ID NO: 810300
accaaucuggcuaacccau

SEQ ID NO: 810302 - RNA, 19 nt, Artificial Sequence
  Description of Artificial Sequence: Synthetic oligonucleotide
  Sense strand starting at position 3124 of SEQ ID NO: 587678
ggucgaugauggaaguauu

SEQ ID NO: 810303 - RNA, 19 nt, Artificial Sequence
  Description of Artificial Sequence: Synthetic oligonucleotide
  Antisense strand to SEQ ID NO: 810302
aauacuuccaucaucgacc

SEQ ID NO: 810304 - RNA, 19 nt, Artificial Sequence
  Description of Artificial Sequence: Synthetic oligonucleotide
  Sense strand starting at position 3160 of SEQ ID NO: 587678
acugaaauugcacauugua

SEQ ID NO: 810305 - RNA, 19 nt, Artificial Sequence
  Description of Artificial Sequence: Synthetic oligonucleotide
  Antisense strand to SEQ ID NO: 810304
uacaaugugcaauuucagu

SEQ ID NO: 810306 - RNA, 19 nt, Artificial Sequence
  Description of Artificial Sequence: Synthetic oligonucleotide
  Sense strand starting at position 3238 of SEQ ID NO: 587678
gcacaagauuuaugaaacu

SEQ ID NO: 810307 - RNA, 19 nt, Artificial Sequence
  Description of Artificial Sequence: Synthetic oligonucleotide
  Antisense strand to SEQ ID NO: 810306
aguuucauaaaucuugugc

SEQ ID NO: 810308 - RNA, 19 nt, Artificial Sequence
  Description of Artificial Sequence: Synthetic oligonucleotide
  Sense strand starting at position 3304 of SEQ ID NO: 587678
ccauaaagccgauggguua

SEQ ID NO: 810309 - RNA, 19 nt, Artificial Sequence
  Description of Artificial Sequence: Synthetic oligonucleotide
  Antisense strand to SEQ ID NO: 810308
uaacccaucggcuuuaugg

SEQ ID NO: 810310 - RNA, 19 nt, Artificial Sequence
  Description of Artificial Sequence: Synthetic oligonucleotide
  Sense strand starting at position 3329 of SEQ ID NO: 587678
aacaguugguaaucuggaa

SEQ ID NO: 810311 - RNA, 19 nt, Artificial Sequence
  Description of Artificial Sequence: Synthetic oligonucleotide
  Antisense strand to SEQ ID NO: 810310
uuccagauuaccaacuguu

SEQ ID NO: 810312 - RNA, 19 nt, Artificial Sequence
  Description of Artificial Sequence: Synthetic oligonucleotide
  Sense strand starting at position 3477 of SEQ ID NO: 587678
gaaaguuaauagguuauug

SEQ ID NO: 810313 - RNA, 19 nt, Artificial Sequence
  Description of Artificial Sequence: Synthetic oligonucleotide
  Antisense strand to SEQ ID NO: 810312
caauaaccuauuaacuuuc

SEQ ID NO: 810314 - RNA, 19 nt, Artificial Sequence
  Description of Artificial Sequence: Synthetic oligonucleotide
  Sense strand starting at position 3481 of SEQ ID NO: 587678
guuaauagguuauugcuga

SEQ ID NO: 810315 - RNA, 19 nt, Artificial Sequence
  Description of Artificial Sequence: Synthetic oligonucleotide
  Antisense strand to SEQ ID NO: 810314
ucagcaauaaccuauuaac

SEQ ID NO: 810316 - RNA, 19 nt, Artificial Sequence
  Description of Artificial Sequence: Synthetic oligonucleotide
  Sense strand starting at position 3486 of SEQ ID NO: 587678
uagguuauugcugauaaag

SEQ ID NO: 810317 - RNA, 19 nt, Artificial Sequence
  Description of Artificial Sequence: Synthetic oligonucleotide
  Antisense strand to SEQ ID NO: 810316
cuuuaucagcaauaaccua

SEQ ID NO: 810318 - RNA, 19 nt, Artificial Sequence
  Description of Artificial Sequence: Synthetic oligonucleotide
  Sense strand starting at position 3533 of SEQ ID NO: 587678
cgggaaagacuuuggcaaa

SEQ ID NO: 810319 - RNA, 19 nt, Artificial Sequence
  Description of Artificial Sequence: Synthetic oligonucleotide
  Antisense strand to SEQ ID NO: 810318
uuugccaaagucuuucccg

SEQ ID NO: 810320 - RNA, 19 nt, Artificial Sequence
  Description of Artificial Sequence: Synthetic oligonucleotide
  Sense strand starting at position 3712 of SEQ ID NO: 587678
aauuuacguugggacauua

SEQ ID NO: 810321 - RNA, 19 nt, Artificial Sequence
  Description of Artificial Sequence: Synthetic oligonucleotide
  Antisense strand to SEQ ID NO: 810320
uaaugucccaacguaaauu

SEQ ID NO: 810322 - RNA, 19 nt, Artificial Sequence
  Description of Artificial Sequence: Synthetic oligonucleotide
  Sense strand starting at position 69 of SEQ ID NO: 587679
acaguaugcacuggaggaa

SEQ ID NO: 810323 - RNA, 19 nt, Artificial Sequence
  Description of Artificial Sequence: Synthetic oligonucleotide
  Antisense strand to SEQ ID NO: 810322
uuccuccagugcauacugu

SEQ ID NO: 810324 - RNA, 19 nt, Artificial Sequence
  Description of Artificial Sequence: Synthetic oligonucleotide
  Sense strand starting at position 128 of SEQ ID NO: 587679
uugucucaccagugaagaa

SEQ ID NO: 810325 - RNA, 19 nt, Artificial Sequence
  Description of Artificial Sequence: Synthetic oligonucleotide
  Antisense strand to SEQ ID NO: 810324
uucuucacuggugagacaa

SEQ ID NO: 810326 - RNA, 19 nt, Artificial Sequence
  Description of Artificial Sequence: Synthetic oligonucleotide
  Sense strand starting at position 138 of SEQ ID NO: 587679
agugaagaaucugagauuu

SEQ ID NO: 810327 - RNA, 19 nt, Artificial Sequence
  Description of Artificial Sequence: Synthetic oligonucleotide
  Antisense strand to SEQ ID NO: 810326
aaaucucagauucuucacu

SEQ ID NO: 810328 - RNA, 19 nt, Artificial Sequence
  Description of Artificial Sequence: Synthetic oligonucleotide
  Sense strand starting at position 273 of SEQ ID NO: 587679
cugagcuggcauuaccaaa

SEQ ID NO: 810329 - RNA, 19 nt, Artificial Sequence
  Description of Artificial Sequence: Synthetic oligonucleotide
  Antisense strand to SEQ ID NO: 810328
uuugguaaugccagcucag

SEQ ID NO: 810330 - RNA, 19 nt, Artificial Sequence
  Description of Artificial Sequence: Synthetic oligonucleotide
  Sense strand starting at position 330 of SEQ ID NO: 587679
uaguaaggauagcuguuau

SEQ ID NO: 810331 - RNA, 19 nt, Artificial Sequence
  Description of Artificial Sequence: Synthetic oligonucleotide
  Antisense strand to SEQ ID NO: 810330
auaacagcuauccuuacua

SEQ ID NO: 810332 - RNA, 19 nt, Artificial Sequence
  Description of Artificial Sequence: Synthetic oligonucleotide
  Sense strand starting at position 342 of SEQ ID NO: 587679
cuguuauacacggagacca

SEQ ID NO: 810333 - RNA, 19 nt, Artificial Sequence
  Description of Artificial Sequence: Synthetic oligonucleotide
  Antisense strand to SEQ ID NO: 810332
uggucuccguguauaacag

SEQ ID NO: 810334 - RNA, 19 nt, Artificial Sequence
  Description of Artificial Sequence: Synthetic oligonucleotide
  Sense strand starting at position 453 of SEQ ID NO: 587679
gucuuauagcgucuguucu

SEQ ID NO: 810335 - RNA, 19 nt, Artificial Sequence
  Description of Artificial Sequence: Synthetic oligonucleotide
  Antisense strand to SEQ ID NO: 810334
agaacagacgcuauaagac

SEQ ID NO: 810336 - RNA, 19 nt, Artificial Sequence
  Description of Artificial Sequence: Synthetic oligonucleotide
  Sense strand starting at position 544 of SEQ ID NO: 587679
gguacuucugauggcugaa

SEQ ID NO: 810337 - RNA, 19 nt, Artificial Sequence
  Description of Artificial Sequence: Synthetic oligonucleotide
  Antisense strand to SEQ ID NO: 810336
uucagccaucagaaguacc

SEQ ID NO: 810338 - RNA, 19 nt, Artificial Sequence
  Description of Artificial Sequence: Synthetic oligonucleotide
  Sense strand starting at position 547 of SEQ ID NO: 587679
acuucugauggcugaacuu

SEQ ID NO: 810339 - RNA, 19 nt, Artificial Sequence
  Description of Artificial Sequence: Synthetic oligonucleotide
  Antisense strand to SEQ ID NO: 810338
aaguucagccaucagaagu

SEQ ID NO: 810340 - RNA, 19 nt, Artificial Sequence
  Description of Artificial Sequence: Synthetic oligonucleotide
  Sense strand starting at position 556 of SEQ ID NO: 587679
ggcugaacuuccucuccaa

SEQ ID NO: 810341 - RNA, 19 nt, Artificial Sequence
  Description of Artificial Sequence: Synthetic oligonucleotide
  Antisense strand to SEQ ID NO: 810340
uuggagaggaaguucagcc

SEQ ID NO: 810342 - RNA, 19 nt, Artificial Sequence
  Description of Artificial Sequence: Synthetic oligonucleotide
  Sense strand starting at position 691 of SEQ ID NO: 587679
ccaagugccuuucuggaaa

SEQ ID NO: 810343 - RNA, 19 nt, Artificial Sequence
  Description of Artificial Sequence: Synthetic oligonucleotide
  Antisense strand to SEQ ID NO: 810342
uuuccagaaaggcacuugg

SEQ ID NO: 810344 - RNA, 19 nt, Artificial Sequence
  Description of Artificial Sequence: Synthetic oligonucleotide
  Sense strand starting at position 694 of SEQ ID NO: 587679
agugccuuucuggaaagga

SEQ ID NO: 810345 - RNA, 19 nt, Artificial Sequence
  Description of Artificial Sequence: Synthetic oligonucleotide
  Antisense strand to SEQ ID NO: 810344
uccuuuccagaaaggcacu

SEQ ID NO: 810346 - RNA, 19 nt, Artificial Sequence
  Description of Artificial Sequence: Synthetic oligonucleotide
  Sense strand starting at position 780 of SEQ ID NO: 587679
acccuuaucucuuuaguga

SEQ ID NO: 810347 - RNA, 19 nt, Artificial Sequence
  Description of Artificial Sequence: Synthetic oligonucleotide
  Antisense strand to SEQ ID NO: 810346
ucacuaaagagauaagggu

SEQ ID NO: 810348 - RNA, 19 nt, Artificial Sequence
  Description of Artificial Sequence: Synthetic oligonucleotide
  Sense strand starting at position 781 of SEQ ID NO: 587679
cccuuaucucuuuagugag

SEQ ID NO: 810349 - RNA, 19 nt, Artificial Sequence
  Description of Artificial Sequence: Synthetic oligonucleotide
  Antisense strand to SEQ ID NO: 810348
cucacuaaagagauaaggg

SEQ ID NO: 810350 - RNA, 19 nt, Artificial Sequence
  Description of Artificial Sequence: Synthetic oligonucleotide
  Sense strand starting at position 787 of SEQ ID NO: 587679
ucucuuuagugagugaaca

SEQ ID NO: 810351 - RNA, 19 nt, Artificial Sequence
  Description of Artificial Sequence: Synthetic oligonucleotide
  Antisense strand to SEQ ID NO: 810350
uguucacucacuaaagaga

SEQ ID NO: 810352 - RNA, 19 nt, Artificial Sequence
  Description of Artificial Sequence: Synthetic oligonucleotide
  Sense strand starting at position 788 of SEQ ID NO: 587679
cucuuuagugagugaacaa

SEQ ID NO: 810353 - RNA, 19 nt, Artificial Sequence
  Description of Artificial Sequence: Synthetic oligonucleotide
  Antisense strand to SEQ ID NO: 810352
uuguucacucacuaaagag

SEQ ID NO: 810354 - RNA, 19 nt, Artificial Sequence
  Description of Artificial Sequence: Synthetic oligonucleotide
  Sense strand starting at position 813 of SEQ ID NO: 587679
cacugucaucguggauaca

SEQ ID NO: 810355 - RNA, 19 nt, Artificial Sequence
  Description of Artificial Sequence: Synthetic oligonucleotide
  Antisense strand to SEQ ID NO: 810354
uguauccacgaugacagug

SEQ ID NO: 810356 - RNA, 19 nt, Artificial Sequence
  Description of Artificial Sequence: Synthetic oligonucleotide
  Sense strand starting at position 814 of SEQ ID NO: 587679
acugucaucguggauacau

SEQ ID NO: 810357 - RNA, 19 nt, Artificial Sequence
  Description of Artificial Sequence: Synthetic oligonucleotide
  Antisense strand to SEQ ID NO: 810356
auguauccacgaugacagu

SEQ ID NO: 810358 - RNA, 19 nt, Artificial Sequence
  Description of Artificial Sequence: Synthetic oligonucleotide
  Sense strand starting at position 854 of SEQ ID NO: 587679
aggagcucuccggagugaa

SEQ ID NO: 810359 - RNA, 19 nt, Artificial Sequence
  Description of Artificial Sequence: Synthetic oligonucleotide
  Antisense strand to SEQ ID NO: 810358
uucacuccggagagcuccu

SEQ ID NO: 810360 - RNA, 19 nt, Artificial Sequence
  Description of Artificial Sequence: Synthetic oligonucleotide
  Sense strand starting at position 864 of SEQ ID NO: 587679
cggagugaagagugaguaa

SEQ ID NO: 810361 - RNA, 19 nt, Artificial Sequence
  Description of Artificial Sequence: Synthetic oligonucleotide
  Antisense strand to SEQ ID NO: 810360
uuacucacucuucacuccg

SEQ ID NO: 810362 - RNA, 19 nt, Artificial Sequence
  Description of Artificial Sequence: Synthetic oligonucleotide
  Sense strand starting at position 867 of SEQ ID NO: 587679
agugaagagugaguaaaua

SEQ ID NO: 810363 - RNA, 19 nt, Artificial Sequence
  Description of Artificial Sequence: Synthetic oligonucleotide
  Antisense strand to SEQ ID NO: 810362
uauuuacucacucuucacu

SEQ ID NO: 810364 - RNA, 19 nt, Artificial Sequence
  Description of Artificial Sequence: Synthetic oligonucleotide
  Sense strand starting at position 924 of SEQ ID NO: 587679
cccaaaguuagagacguuu

SEQ ID NO: 810365 - RNA, 19 nt, Artificial Sequence
  Description of Artificial Sequence: Synthetic oligonucleotide
  Antisense strand to SEQ ID NO: 810364
aaacgucucuaacuuuggg

SEQ ID NO: 810366 - RNA, 19 nt, Artificial Sequence
  Description of Artificial Sequence: Synthetic oligonucleotide
  Sense strand starting at position 930 of SEQ ID NO: 587679
guuagagacguuucguggu

SEQ ID NO: 810367 - RNA, 19 nt, Artificial Sequence
  Description of Artificial Sequence: Synthetic oligonucleotide
  Antisense strand to SEQ ID NO: 810366
accacgaaacgucucuaac

SEQ ID NO: 810368 - RNA, 19 nt, Artificial Sequence
  Description of Artificial Sequence: Synthetic oligonucleotide
  Sense strand starting at position 957 of SEQ ID NO: 587679
cucccuacugucuaguaga

SEQ ID NO: 810369 - RNA, 19 nt, Artificial Sequence
  Description of Artificial Sequence: Synthetic oligonucleotide
  Antisense strand to SEQ ID NO: 810368
ucuacuagacaguagggag

SEQ ID NO: 810370 - RNA, 19 nt, Artificial Sequence
  Description of Artificial Sequence: Synthetic oligonucleotide
  Sense strand starting at position 1137 of SEQ ID NO: 587679
ggcucauucugggcuuuaa

SEQ ID NO: 810371 - RNA, 19 nt, Artificial Sequence
  Description of Artificial Sequence: Synthetic oligonucleotide
  Antisense strand to SEQ ID NO: 810370
uuaaagcccagaaugagcc

SEQ ID NO: 810372 - RNA, 19 nt, Artificial Sequence
  Description of Artificial Sequence: Synthetic oligonucleotide
  Sense strand starting at position 1156 of SEQ ID NO: 587679
uucccucuucgcuaaacga

SEQ ID NO: 810373 - RNA, 19 nt, Artificial Sequence
  Description of Artificial Sequence: Synthetic oligonucleotide
  Antisense strand to SEQ ID NO: 810372
ucguuuagcgaagagggaa

SEQ ID NO: 810374 - RNA, 19 nt, Artificial Sequence
  Description of Artificial Sequence: Synthetic oligonucleotide
  Sense strand starting at position 1847 of SEQ ID NO: 587679
gcaggauguccuggaugag

SEQ ID NO: 810375 - RNA, 19 nt, Artificial Sequence
  Description of Artificial Sequence: Synthetic oligonucleotide
  Antisense strand to SEQ ID NO: 810374
cucauccaggacauccugc

SEQ ID NO: 810376 - RNA, 19 nt, Artificial Sequence
  Description of Artificial Sequence: Synthetic oligonucleotide
  Sense strand starting at position 2797 of SEQ ID NO: 587679
uuggcuaaacaauggguua

SEQ ID NO: 810377 - RNA, 19 nt, Artificial Sequence
  Description of Artificial Sequence: Synthetic oligonucleotide
  Antisense strand to SEQ ID NO: 810376
uaacccauuguuuagccaa

SEQ ID NO: 810378 - RNA, 19 nt, Artificial Sequence
  Description of Artificial Sequence: Synthetic oligonucleotide
  Sense strand starting at position 2808 of SEQ ID NO: 587679
auggguuagccagauuggu

SEQ ID NO: 810379 - RNA, 19 nt, Artificial Sequence
  Description of Artificial Sequence: Synthetic oligonucleotide
  Antisense strand to SEQ ID NO: 810378
accaaucuggcuaacccau

SEQ ID NO: 810380 - RNA, 19 nt, Artificial Sequence
  Description of Artificial Sequence: Synthetic oligonucleotide
  Sense strand starting at position 3070 of SEQ ID NO: 587679
gugucaggucgaugaugga

SEQ ID NO: 810381 - RNA, 19 nt, Artificial Sequence
  Description of Artificial Sequence: Synthetic oligonucleotide
  Antisense strand to SEQ ID NO: 810380
uccaucaucgaccugacac

SEQ ID NO: 810382 - RNA, 19 nt, Artificial Sequence
  Description of Artificial Sequence: Synthetic oligonucleotide
  Sense strand starting at position 3076 of SEQ ID NO: 587679
ggucgaugauggaaguauu

SEQ ID NO: 810383 - RNA, 19 nt, Artificial Sequence
  Description of Artificial Sequence: Synthetic oligonucleotide
  Antisense strand to SEQ ID NO: 810382
aauacuuccaucaucgacc

SEQ ID NO: 810384 - RNA, 19 nt, Artificial Sequence
  Description of Artificial Sequence: Synthetic oligonucleotide
  Sense strand starting at position 3112 of SEQ ID NO: 587679
acugaaauugcacauugua

SEQ ID NO: 810385 - RNA, 19 nt, Artificial Sequence
  Description of Artificial Sequence: Synthetic oligonucleotide
  Antisense strand to SEQ ID NO: 810384
uacaaugugcaauuucagu

SEQ ID NO: 810386 - RNA, 19 nt, Artificial Sequence
  Description of Artificial Sequence: Synthetic oligonucleotide
  Sense strand starting at position 3190 of SEQ ID NO: 587679
gcacaagauuuaugaaacu

SEQ ID NO: 810387 - RNA, 19 nt, Artificial Sequence
  Description of Artificial Sequence: Synthetic oligonucleotide
  Antisense strand to SEQ ID NO: 810386
aguuucauaaaucuugugc

SEQ ID NO: 810388 - RNA, 19 nt, Artificial Sequence
  Description of Artificial Sequence: Synthetic oligonucleotide
  Sense strand starting at position 3256 of SEQ ID NO: 587679
ccauaaagccgauggguua

SEQ ID NO: 810389 - RNA, 19 nt, Artificial Sequence
  Description of Artificial Sequence: Synthetic oligonucleotide
  Antisense strand to SEQ ID NO: 810388
uaacccaucggcuuuaugg

SEQ ID NO: 810390 - RNA, 19 nt, Artificial Sequence
  Description of Artificial Sequence: Synthetic oligonucleotide
  Sense strand starting at position 3281 of SEQ ID NO: 587679
aacaguugguaaucuggaa

SEQ ID NO: 810391 - RNA, 19 nt, Artificial Sequence
  Description of Artificial Sequence: Synthetic oligonucleotide
  Antisense strand to SEQ ID NO: 810390
uuccagauuaccaacuguu

SEQ ID NO: 810392 - RNA, 19 nt, Artificial Sequence
  Description of Artificial Sequence: Synthetic oligonucleotide
  Sense strand starting at position 3429 of SEQ ID NO: 587679
gaaaguuaauagguuauug

SEQ ID NO: 810393 - RNA, 19 nt, Artificial Sequence
  Description of Artificial Sequence: Synthetic oligonucleotide
  Antisense strand to SEQ ID NO: 810392
caauaaccuauuaacuuuc

SEQ ID NO: 810394 - RNA, 19 nt, Artificial Sequence
  Description of Artificial Sequence: Synthetic oligonucleotide
  Sense strand starting at position 3433 of SEQ ID NO: 587679
guuaauagguuauugcuga

SEQ ID NO: 810395 - RNA, 19 nt, Artificial Sequence
  Description of Artificial Sequence: Synthetic oligonucleotide
  Antisense strand to SEQ ID NO: 810394
ucagcaauaaccuauuaac

SEQ ID NO: 810396 - RNA, 19 nt, Artificial Sequence
  Description of Artificial Sequence: Synthetic oligonucleotide
  Sense strand starting at position 3438 of SEQ ID NO: 587679
uagguuauugcugauaaag

SEQ ID NO: 810397 - RNA, 19 nt, Artificial Sequence
  Description of Artificial Sequence: Synthetic oligonucleotide
  Antisense strand to SEQ ID NO: 810396
cuuuaucagcaauaaccua

SEQ ID NO: 810398 - RNA, 19 nt, Artificial Sequence
  Description of Artificial Sequence: Synthetic oligonucleotide
  Sense strand starting at position 3485 of SEQ ID NO: 587679
cgggaaagacuuuggcaaa

SEQ ID NO: 810399 - RNA, 19 nt, Artificial Sequence
  Description of Artificial Sequence: Synthetic oligonucleotide
  Antisense strand to SEQ ID NO: 810398
uuugccaaagucuuucccg

SEQ ID NO: 810400 - RNA, 19 nt, Artificial Sequence
  Description of Artificial Sequence: Synthetic oligonucleotide
  Sense strand starting at position 3664 of SEQ ID NO: 587679
aauuuacguugggacauua

SEQ ID NO: 810401 - RNA, 19 nt, Artificial Sequence
  Description of Artificial Sequence: Synthetic oligonucleotide
  Antisense strand to SEQ ID NO: 810400
uaaugucccaacguaaauu

SEQ ID NO: 810402 - RNA, 19 nt, Artificial Sequence
  Description of Artificial Sequence: Synthetic oligonucleotide
  Sense strand starting at position 221 of SEQ ID NO: 587680
ugggccuguccuuauauca

SEQ ID NO: 810403 - RNA, 19 nt, Artificial Sequence
  Description of Artificial Sequence: Synthetic oligonucleotide
  Antisense strand to SEQ ID NO: 810402
ugauauaaggacaggccca

SEQ ID NO: 810404 - RNA, 19 nt, Artificial Sequence
  Description of Artificial Sequence: Synthetic oligonucleotide
  Sense strand starting at position 354 of SEQ ID NO: 587680
agguauugacccugagggu

SEQ ID NO: 810405 - RNA, 19 nt, Artificial Sequence
  Description of Artificial Sequence: Synthetic oligonucleotide
  Antisense strand to SEQ ID NO: 810404
acccucagggucaauaccu

SEQ ID NO: 810406 - RNA, 19 nt, Artificial Sequence
  Description of Artificial Sequence: Synthetic oligonucleotide
  Sense strand starting at position 355 of SEQ ID NO: 587680
gguauugacccugagggua

SEQ ID NO: 810407 - RNA, 19 nt, Artificial Sequence
  Description of Artificial Sequence: Synthetic oligonucleotide
  Antisense strand to SEQ ID NO: 810406
uacccucagggucaauacc

SEQ ID NO: 810408 - RNA, 19 nt, Artificial Sequence
  Description of Artificial Sequence: Synthetic oligonucleotide
  Sense strand starting at position 357 of SEQ ID NO: 587680
uauugacccugaggguaaa

SEQ ID NO: 810409 - RNA, 19 nt, Artificial Sequence
  Description of Artificial Sequence: Synthetic oligonucleotide
  Antisense strand to SEQ ID NO: 810408
uuuacccucagggucaaua

SEQ ID NO: 810410 - RNA, 19 nt, Artificial Sequence
  Description of Artificial Sequence: Synthetic oligonucleotide
  Sense strand starting at position 367 of SEQ ID NO: 587680
gaggguaaaucggagaaag

SEQ ID NO: 810411 - RNA, 19 nt, Artificial Sequence
  Description of Artificial Sequence: Synthetic oligonucleotide
  Antisense strand to SEQ ID NO: 810410
cuuucuccgauuuacccuc

SEQ ID NO: 810412 - RNA, 19 nt, Artificial Sequence
  Description of Artificial Sequence: Synthetic oligonucleotide
  Sense strand starting at position 725 of SEQ ID NO: 587680
ccaguuucuuggcugcaga

SEQ ID NO: 810413 - RNA, 19 nt, Artificial Sequence
  Description of Artificial Sequence: Synthetic oligonucleotide
  Antisense strand to SEQ ID NO: 810412
ucugcagccaagaaacugg

SEQ ID NO: 810414 - RNA, 19 nt, Artificial Sequence
  Description of Artificial Sequence: Synthetic oligonucleotide
  Sense strand starting at position 736 of SEQ ID NO: 587680
gcugcagagccuggucauu

SEQ ID NO: 810415 - RNA, 19 nt, Artificial Sequence
  Description of Artificial Sequence: Synthetic oligonucleotide
  Antisense strand to SEQ ID NO: 810414
aaugaccaggcucugcagc

SEQ ID NO: 810416 - RNA, 19 nt, Artificial Sequence
  Description of Artificial Sequence: Synthetic oligonucleotide
  Sense strand starting at position 769 of SEQ ID NO: 587680
acuugugaaucugcagaac

SEQ ID NO: 810417 - RNA, 19 nt, Artificial Sequence
  Description of Artificial Sequence: Synthetic oligonucleotide
  Antisense strand to SEQ ID NO: 810416
guucugcagauucacaagu

SEQ ID NO: 810418 - RNA, 19 nt, Artificial Sequence
  Description of Artificial Sequence: Synthetic oligonucleotide
  Sense strand starting at position 1155 of SEQ ID NO: 587680
ggaucuucucgucguccga

SEQ ID NO: 810419 - RNA, 19 nt, Artificial Sequence
  Description of Artificial Sequence: Synthetic oligonucleotide
  Antisense strand to SEQ ID NO: 810418
ucggacgacgagaagaucc

SEQ ID NO: 810420 - RNA, 19 nt, Artificial Sequence
  Description of Artificial Sequence: Synthetic oligonucleotide
  Sense strand starting at position 1330 of SEQ ID NO: 587680
ccacaccugcgaugagaaa

SEQ ID NO: 810421 - RNA, 19 nt, Artificial Sequence
  Description of Artificial Sequence: Synthetic oligonucleotide
  Antisense strand to SEQ ID NO: 810420
uuucucaucgcaggugugg

SEQ ID NO: 810422 - RNA, 19 nt, Artificial Sequence
  Description of Artificial Sequence: Synthetic oligonucleotide
  Sense strand starting at position 1639 of SEQ ID NO: 587680
cugggaacucgguggaaga

SEQ ID NO: 810423 - RNA, 19 nt, Artificial Sequence
  Description of Artificial Sequence: Synthetic oligonucleotide
  Antisense strand to SEQ ID NO: 810422
ucuuccaccgaguucccag

SEQ ID NO: 810424 - RNA, 19 nt, Artificial Sequence
  Description of Artificial Sequence: Synthetic oligonucleotide
  Sense strand starting at position 1640 of SEQ ID NO: 587680
ugggaacucgguggaagau

SEQ ID NO: 810425 - RNA, 19 nt, Artificial Sequence
  Description of Artificial Sequence: Synthetic oligonucleotide
  Antisense strand to SEQ ID NO: 810424
aucuuccaccgaguuccca

SEQ ID NO: 810426 - RNA, 19 nt, Artificial Sequence
  Description of Artificial Sequence: Synthetic oligonucleotide
  Sense strand starting at position 1794 of SEQ ID NO: 587680
agguccauugcuugggaua

SEQ ID NO: 810427 - RNA, 19 nt, Artificial Sequence
  Description of Artificial Sequence: Synthetic oligonucleotide
  Antisense strand to SEQ ID NO: 810426
uaucccaagcaauggaccu

SEQ ID NO: 810428 - RNA, 19 nt, Artificial Sequence
  Description of Artificial Sequence: Synthetic oligonucleotide
  Sense strand starting at position 1795 of SEQ ID NO: 587680
gguccauugcuugggauag

SEQ ID NO: 810429 - RNA, 19 nt, Artificial Sequence
  Description of Artificial Sequence: Synthetic oligonucleotide
  Antisense strand to SEQ ID NO: 810428
cuaucccaagcaauggacc

SEQ ID NO: 810430 - RNA, 19 nt, Artificial Sequence
  Description of Artificial Sequence: Synthetic oligonucleotide
  Sense strand starting at position 1799 of SEQ ID NO: 587680
cauugcuugggauaguuga

SEQ ID NO: 810431 - RNA, 19 nt, Artificial Sequence
  Description of Artificial Sequence: Synthetic oligonucleotide
  Antisense strand to SEQ ID NO: 810430
ucaacuaucccaagcaaug

SEQ ID NO: 810432 - RNA, 19 nt, Artificial Sequence
  Description of Artificial Sequence: Synthetic oligonucleotide
  Sense strand starting at position 1854 of SEQ ID NO: 587680
gcaggagugucugcuucuu

SEQ ID NO: 810433 - RNA, 19 nt, Artificial Sequence
  Description of Artificial Sequence: Synthetic oligonucleotide
  Antisense strand to SEQ ID NO: 810432
aagaagcagacacuccugc

SEQ ID NO: 810434 - RNA, 19 nt, Artificial Sequence
  Description of Artificial Sequence: Synthetic oligonucleotide
  Sense strand starting at position 2191 of SEQ ID NO: 587680
aucugauccugcuuaguag

SEQ ID NO: 810435 - RNA, 19 nt, Artificial Sequence
  Description of Artificial Sequence: Synthetic oligonucleotide
  Antisense strand to SEQ ID NO: 810434
cuacuaagcaggaucagau

SEQ ID NO: 810436 - RNA, 19 nt, Artificial Sequence
  Description of Artificial Sequence: Synthetic oligonucleotide
  Sense strand starting at position 2192 of SEQ ID NO: 587680
ucugauccugcuuaguaga

SEQ ID NO: 810437 - RNA, 19 nt, Artificial Sequence
  Description of Artificial Sequence: Synthetic oligonucleotide
  Antisense strand to SEQ ID NO: 810436
ucuacuaagcaggaucaga

SEQ ID NO: 810438 - RNA, 19 nt, Artificial Sequence
  Description of Artificial Sequence: Synthetic oligonucleotide
  Sense strand starting at position 2211 of SEQ ID NO: 587680
aggagacguugucuucauc

SEQ ID NO: 810439 - RNA, 19 nt, Artificial Sequence
  Description of Artificial Sequence: Synthetic oligonucleotide
  Antisense strand to SEQ ID NO: 810438
gaugaagacaacgucuccu

SEQ ID NO: 810440 - RNA, 19 nt, Artificial Sequence
  Description of Artificial Sequence: Synthetic oligonucleotide
  Sense strand starting at position 2226 of SEQ ID NO: 587680
caucuuaaggauugguaaa

SEQ ID NO: 810441 - RNA, 19 nt, Artificial Sequence
  Description of Artificial Sequence: Synthetic oligonucleotide
  Antisense strand to SEQ ID NO: 810440
uuuaccaauccuuaagaug

SEQ ID NO: 810442 - RNA, 19 nt, Artificial Sequence
  Description of Artificial Sequence: Synthetic oligonucleotide
  Sense strand starting at position 2228 of SEQ ID NO: 587680
ucuuaaggauugguaaacu

SEQ ID NO: 810443 - RNA, 19 nt, Artificial Sequence
  Description of Artificial Sequence: Synthetic oligonucleotide
  Antisense strand to SEQ ID NO: 810442
aguuuaccaauccuuaaga

SEQ ID NO: 810444 - RNA, 19 nt, Artificial Sequence
  Description of Artificial Sequence: Synthetic oligonucleotide
  Sense strand starting at position 2280 of SEQ ID NO: 587680
gcaugaaucugggccagag

SEQ ID NO: 810445 - RNA, 19 nt, Artificial Sequence
  Description of Artificial Sequence: Synthetic oligonucleotide
  Antisense strand to SEQ ID NO: 810444
cucuggcccagauucaugc

SEQ ID NO: 810446 - RNA, 19 nt, Artificial Sequence
  Description of Artificial Sequence: Synthetic oligonucleotide
  Sense strand starting at position 2438 of SEQ ID NO: 587680
cugcgaaaugggugaugau

SEQ ID NO: 810447 - RNA, 19 nt, Artificial Sequence
  Description of Artificial Sequence: Synthetic oligonucleotide
  Antisense strand to SEQ ID NO: 810446
aucaucacccauuucgcag

SEQ ID NO: 810448 - RNA, 19 nt, Artificial Sequence
  Description of Artificial Sequence: Synthetic oligonucleotide
  Sense strand starting at position 2439 of SEQ ID NO: 587680
ugcgaaaugggugaugaua

SEQ ID NO: 810449 - RNA, 19 nt, Artificial Sequence
  Description of Artificial Sequence: Synthetic oligonucleotide
  Antisense strand to SEQ ID NO: 810448
uaucaucacccauuucgca

SEQ ID NO: 810450 - RNA, 19 nt, Artificial Sequence
  Description of Artificial Sequence: Synthetic oligonucleotide
  Sense strand starting at position 2499 of SEQ ID NO: 587680
acauaaggcucugagaaug

SEQ ID NO: 810451 - RNA, 19 nt, Artificial Sequence
  Description of Artificial Sequence: Synthetic oligonucleotide
  Antisense strand to SEQ ID NO: 810450
cauucucagagccuuaugu

SEQ ID NO: 810452 - RNA, 19 nt, Artificial Sequence
  Description of Artificial Sequence: Synthetic oligonucleotide
  Sense strand starting at position 2722 of SEQ ID NO: 587680
ggucaugcccagugaguau

SEQ ID NO: 810453 - RNA, 19 nt, Artificial Sequence
  Description of Artificial Sequence: Synthetic oligonucleotide
  Antisense strand to SEQ ID NO: 810452
auacucacugggcaugacc

SEQ ID NO: 810454 - RNA, 19 nt, Artificial Sequence
  Description of Artificial Sequence: Synthetic oligonucleotide
  Sense strand starting at position 2768 of SEQ ID NO: 587680
aaguacuuggucugcucaa

SEQ ID NO: 810455 - RNA, 19 nt, Artificial Sequence
  Description of Artificial Sequence: Synthetic oligonucleotide
  Antisense strand to SEQ ID NO: 810454
uugagcagaccaaguacuu

SEQ ID NO: 810456 - RNA, 19 nt, Artificial Sequence
  Description of Artificial Sequence: Synthetic oligonucleotide
  Sense strand starting at position 2769 of SEQ ID NO: 587680
aguacuuggucugcucaaa

SEQ ID NO: 810457 - RNA, 19 nt, Artificial Sequence
  Description of Artificial Sequence: Synthetic oligonucleotide
  Antisense strand to SEQ ID NO: 810456
uuugagcagaccaaguacu

SEQ ID NO: 810458 - RNA, 19 nt, Artificial Sequence
  Description of Artificial Sequence: Synthetic oligonucleotide
  Sense strand starting at position 2976 of SEQ ID NO: 587680
ugcagagguuuccaggaca

SEQ ID NO: 810459 - RNA, 19 nt, Artificial Sequence
  Description of Artificial Sequence: Synthetic oligonucleotide
  Antisense strand to SEQ ID NO: 810458
uguccuggaaaccucugca

SEQ ID NO: 810460 - RNA, 19 nt, Artificial Sequence
  Description of Artificial Sequence: Synthetic oligonucleotide
  Sense strand starting at position 3012 of SEQ ID NO: 587680
ugagcagcauucuugauau

SEQ ID NO: 810461 - RNA, 19 nt, Artificial Sequence
  Description of Artificial Sequence: Synthetic oligonucleotide
  Antisense strand to SEQ ID NO: 810460
auaucaagaaugcugcuca

SEQ ID NO: 810462 - RNA, 19 nt, Artificial Sequence
  Description of Artificial Sequence: Synthetic oligonucleotide
  Sense strand starting at position 3086 of SEQ ID NO: 587680
gcagcugcccuaguguaau

SEQ ID NO: 810463 - RNA, 19 nt, Artificial Sequence
  Description of Artificial Sequence: Synthetic oligonucleotide
  Antisense strand to SEQ ID NO: 810462
auuacacuagggcagcugc

SEQ ID NO: 810464 - RNA, 19 nt, Artificial Sequence
  Description of Artificial Sequence: Synthetic oligonucleotide
  Sense strand starting at position 3094 of SEQ ID NO: 587680
ccuaguguaaugggacuua

SEQ ID NO: 810465 - RNA, 19 nt, Artificial Sequence
  Description of Artificial Sequence: Synthetic oligonucleotide
  Antisense strand to SEQ ID NO: 810464
uaagucccauuacacuagg

SEQ ID NO: 810466 - RNA, 19 nt, Artificial Sequence
  Description of Artificial Sequence: Synthetic oligonucleotide
  Sense strand starting at position 3130 of SEQ ID NO: 587680
ugccucucugucuaaaguu

SEQ ID NO: 810467 - RNA, 19 nt, Artificial Sequence
  Description of Artificial Sequence: Synthetic oligonucleotide
  Antisense strand to SEQ ID NO: 810466
aacuuuagacagagaggca

SEQ ID NO: 810468 - RNA, 19 nt, Artificial Sequence
  Description of Artificial Sequence: Synthetic oligonucleotide
  Sense strand starting at position 3138 of SEQ ID NO: 587680
ugucuaaaguucucaauac

SEQ ID NO: 810469 - RNA, 19 nt, Artificial Sequence
  Description of Artificial Sequence: Synthetic oligonucleotide
  Antisense strand to SEQ ID NO: 810468
guauugagaacuuuagaca

SEQ ID NO: 810470 - RNA, 19 nt, Artificial Sequence
  Description of Artificial Sequence: Synthetic oligonucleotide
  Sense strand starting at position 3139 of SEQ ID NO: 587680
gucuaaaguucucaauacu

SEQ ID NO: 810471 - RNA, 19 nt, Artificial Sequence
  Description of Artificial Sequence: Synthetic oligonucleotide
  Antisense strand to SEQ ID NO: 810470
aguauugagaacuuuagac

SEQ ID NO: 810472 - RNA, 19 nt, Artificial Sequence
  Description of Artificial Sequence: Synthetic oligonucleotide
  Sense strand starting at position 3148 of SEQ ID NO: 587680
ucucaauacucgcugaugu

SEQ ID NO: 810473 - RNA, 19 nt, Artificial Sequence
  Description of Artificial Sequence: Synthetic oligonucleotide
  Antisense strand to SEQ ID NO: 810472
acaucagcgaguauugaga

SEQ ID NO: 810474 - RNA, 19 nt, Artificial Sequence
  Description of Artificial Sequence: Synthetic oligonucleotide
  Sense strand starting at position 3149 of SEQ ID NO: 587680
cucaauacucgcugauguu

SEQ ID NO: 810475 - RNA, 19 nt, Artificial Sequence
  Description of Artificial Sequence: Synthetic oligonucleotide
  Antisense strand to SEQ ID NO: 810474
aacaucagcgaguauugag

SEQ ID NO: 810476 - RNA, 19 nt, Artificial Sequence
  Description of Artificial Sequence: Synthetic oligonucleotide
  Sense strand starting at position 3292 of SEQ ID NO: 587680
ccuugcucuugagacucaa

SEQ ID NO: 810477 - RNA, 19 nt, Artificial Sequence
  Description of Artificial Sequence: Synthetic oligonucleotide
  Antisense strand to SEQ ID NO: 810476
uugagucucaagagcaagg

SEQ ID NO: 810478 - RNA, 19 nt, Artificial Sequence
  Description of Artificial Sequence: Synthetic oligonucleotide
  Sense strand starting at position 3513 of SEQ ID NO: 587680
cguucugugcagucugaca

SEQ ID NO: 810479 - RNA, 19 nt, Artificial Sequence
  Description of Artificial Sequence: Synthetic oligonucleotide
  Antisense strand to SEQ ID NO: 810478
ugucagacugcacagaacg

SEQ ID NO: 810480 - RNA, 19 nt, Artificial Sequence
  Description of Artificial Sequence: Synthetic oligonucleotide
  Sense strand starting at position 3574 of SEQ ID NO: 587680
gagcccuccugagagauca

SEQ ID NO: 810481 - RNA, 19 nt, Artificial Sequence
  Description of Artificial Sequence: Synthetic oligonucleotide
  Antisense strand to SEQ ID NO: 810480
ugaucucucaggagggcuc

SEQ ID NO: 810482 - RNA, 19 nt, Artificial Sequence
  Description of Artificial Sequence: Synthetic oligonucleotide
  Sense strand starting at position 245 of SEQ ID NO: 587681
ucccucuaccgcuagaaua

SEQ ID NO: 810483 - RNA, 19 nt, Artificial Sequence
  Description of Artificial Sequence: Synthetic oligonucleotide
  Antisense strand to SEQ ID NO: 810482
uauucuagcgguagaggga

SEQ ID NO: 810484 - RNA, 19 nt, Artificial Sequence
  Description of Artificial Sequence: Synthetic oligonucleotide
  Sense strand starting at position 247 of SEQ ID NO: 587681
ccucuaccgcuagaauauu

SEQ ID NO: 810485 - RNA, 19 nt, Artificial Sequence
  Description of Artificial Sequence: Synthetic oligonucleotide
  Antisense strand to SEQ ID NO: 810484
aauauucuagcgguagagg

SEQ ID NO: 810486 - RNA, 19 nt, Artificial Sequence
  Description of Artificial Sequence: Synthetic oligonucleotide
  Sense strand starting at position 320 of SEQ ID NO: 587681
ugaagaagcuauguaagau

SEQ ID NO: 810487 - RNA, 19 nt, Artificial Sequence
  Description of Artificial Sequence: Synthetic oligonucleotide
  Antisense strand to SEQ ID NO: 810486
aucuuacauagcuucuuca

SEQ ID NO: 810488 - RNA, 19 nt, Artificial Sequence
  Description of Artificial Sequence: Synthetic oligonucleotide
  Sense strand starting at position 398 of SEQ ID NO: 587681
guaucuacuguagagugau

SEQ ID NO: 810489 - RNA, 19 nt, Artificial Sequence
  Description of Artificial Sequence: Synthetic oligonucleotide
  Antisense strand to SEQ ID NO: 810488
aucacucuacaguagauac

SEQ ID NO: 810490 - RNA, 19 nt, Artificial Sequence
  Description of Artificial Sequence: Synthetic oligonucleotide
  Sense strand starting at position 410 of SEQ ID NO: 587681
gagugauguccucauggag

SEQ ID NO: 810491 - RNA, 19 nt, Artificial Sequence
  Description of Artificial Sequence: Synthetic oligonucleotide
  Antisense strand to SEQ ID NO: 810490
cuccaugaggacaucacuc

SEQ ID NO: 810492 - RNA, 19 nt, Artificial Sequence
  Description of Artificial Sequence: Synthetic oligonucleotide
  Sense strand starting at position 565 of SEQ ID NO: 587681
cgagaaccuccuuagaguu

SEQ ID NO: 810493 - RNA, 19 nt, Artificial Sequence
  Description of Artificial Sequence: Synthetic oligonucleotide
  Antisense strand to SEQ ID NO: 810492
aacucuaaggagguucucg

SEQ ID NO: 810494 - RNA, 19 nt, Artificial Sequence
  Description of Artificial Sequence: Synthetic oligonucleotide
  Sense strand starting at position 640 of SEQ ID NO: 587681
cagguuagcugaucaaauu

SEQ ID NO: 810495 - RNA, 19 nt, Artificial Sequence
  Description of Artificial Sequence: Synthetic oligonucleotide
  Antisense strand to SEQ ID NO: 810494
aauuugaucagcuaaccug

SEQ ID NO: 810496 - RNA, 19 nt, Artificial Sequence
  Description of Artificial Sequence: Synthetic oligonucleotide
  Sense strand starting at position 641 of SEQ ID NO: 587681
agguuagcugaucaaauug

SEQ ID NO: 810497 - RNA, 19 nt, Artificial Sequence
  Description of Artificial Sequence: Synthetic oligonucleotide
  Antisense strand to SEQ ID NO: 810496
caauuugaucagcuaaccu

SEQ ID NO: 810498 - RNA, 19 nt, Artificial Sequence
  Description of Artificial Sequence: Synthetic oligonucleotide
  Sense strand starting at position 666 of SEQ ID NO: 587681
gcauuaagauuccuugaca

SEQ ID NO: 810499 - RNA, 19 nt, Artificial Sequence
  Description of Artificial Sequence: Synthetic oligonucleotide
  Antisense strand to SEQ ID NO: 810498
ugucaaggaaucuuaaugc

SEQ ID NO: 810500 - RNA, 19 nt, Artificial Sequence
  Description of Artificial Sequence: Synthetic oligonucleotide
  Sense strand starting at position 701 of SEQ ID NO: 587681
ucaucaguagcuuagagaa

SEQ ID NO: 810501 - RNA, 19 nt, Artificial Sequence
  Description of Artificial Sequence: Synthetic oligonucleotide
  Antisense strand to SEQ ID NO: 810500
uucucuaagcuacugauga

SEQ ID NO: 810502 - RNA, 19 nt, Artificial Sequence
  Description of Artificial Sequence: Synthetic oligonucleotide
  Sense strand starting at position 870 of SEQ ID NO: 587681
uuacauaguuaucccagga

SEQ ID NO: 810503 - RNA, 19 nt, Artificial Sequence
  Description of Artificial Sequence: Synthetic oligonucleotide
  Antisense strand to SEQ ID NO: 810502
uccugggauaacuauguaa

SEQ ID NO: 810504 - RNA, 19 nt, Artificial Sequence
  Description of Artificial Sequence: Synthetic oligonucleotide
  Sense strand starting at position 874 of SEQ ID NO: 587681
auaguuaucccaggagacu

SEQ ID NO: 810505 - RNA, 19 nt, Artificial Sequence
  Description of Artificial Sequence: Synthetic oligonucleotide
  Antisense strand to SEQ ID NO: 810504
agucuccugggauaacuau

SEQ ID NO: 810506 - RNA, 19 nt, Artificial Sequence
  Description of Artificial Sequence: Synthetic oligonucleotide
  Sense strand starting at position 914 of SEQ ID NO: 587681
gggacaauuacagguguga

SEQ ID NO: 810507 - RNA, 19 nt, Artificial Sequence
  Description of Artificial Sequence: Synthetic oligonucleotide
  Antisense strand to SEQ ID NO: 810506
ucacaccuguaauuguccc

SEQ ID NO: 810508 - RNA, 19 nt, Artificial Sequence
  Description of Artificial Sequence: Synthetic oligonucleotide
  Sense strand starting at position 1022 of SEQ ID NO: 587681
ccuagaaguguccgaagga

SEQ ID NO: 810509 - RNA, 19 nt, Artificial Sequence
  Description of Artificial Sequence: Synthetic oligonucleotide
  Antisense strand to SEQ ID NO: 810508
uccuucggacacuucuagg

SEQ ID NO: 810510 - RNA, 19 nt, Artificial Sequence
  Description of Artificial Sequence: Synthetic oligonucleotide
  Sense strand starting at position 1083 of SEQ ID NO: 587681
cuuagauucuugucuagga

SEQ ID NO: 810511 - RNA, 19 nt, Artificial Sequence
  Description of Artificial Sequence: Synthetic oligonucleotide
  Antisense strand to SEQ ID NO: 810510
uccuagacaagaaucuaag

SEQ ID NO: 810512 - RNA, 19 nt, Artificial Sequence
  Description of Artificial Sequence: Synthetic oligonucleotide
  Sense strand starting at position 1084 of SEQ ID NO: 587681
uuagauucuugucuaggaa

SEQ ID NO: 810513 - RNA, 19 nt, Artificial Sequence
  Description of Artificial Sequence: Synthetic oligonucleotide
  Antisense strand to SEQ ID NO: 810512
uuccuagacaagaaucuaa

SEQ ID NO: 810514 - RNA, 19 nt, Artificial Sequence
  Description of Artificial Sequence: Synthetic oligonucleotide
  Sense strand starting at position 1693 of SEQ ID NO: 587681
uuaccugucccaggagaug

SEQ ID NO: 810515 - RNA, 19 nt, Artificial Sequence
  Description of Artificial Sequence: Synthetic oligonucleotide
  Antisense strand to SEQ ID NO: 810514
caucuccugggacagguaa

SEQ ID NO: 810516 - RNA, 19 nt, Artificial Sequence
  Description of Artificial Sequence: Synthetic oligonucleotide
  Sense strand starting at position 2321 of SEQ ID NO: 587681
uuuagucaugagggaagca

SEQ ID NO: 810517 - RNA, 19 nt, Artificial Sequence
  Description of Artificial Sequence: Synthetic oligonucleotide
  Antisense strand to SEQ ID NO: 810516
ugcuucccucaugacuaaa

SEQ ID NO: 810518 - RNA, 19 nt, Artificial Sequence
  Description of Artificial Sequence: Synthetic oligonucleotide
  Sense strand starting at position 2367 of SEQ ID NO: 587681
cucauugaauguguugaga

SEQ ID NO: 810519 - RNA, 19 nt, Artificial Sequence
  Description of Artificial Sequence: Synthetic oligonucleotide
  Antisense strand to SEQ ID NO: 810518
ucucaacacauucaaugag

SEQ ID NO: 810520 - RNA, 19 nt, Artificial Sequence
  Description of Artificial Sequence: Synthetic oligonucleotide
  Sense strand starting at position 2371 of SEQ ID NO: 587681
uugaauguguugagaggga

SEQ ID NO: 810521 - RNA, 19 nt, Artificial Sequence
  Description of Artificial Sequence: Synthetic oligonucleotide
  Antisense strand to SEQ ID NO: 810520
ucccucucaacacauucaa

SEQ ID NO: 810522 - RNA, 19 nt, Artificial Sequence
  Description of Artificial Sequence: Synthetic oligonucleotide
  Sense strand starting at position 2512 of SEQ ID NO: 587681
gggaaugcuauuggccaaa

SEQ ID NO: 810523 - RNA, 19 nt, Artificial Sequence
  Description of Artificial Sequence: Synthetic oligonucleotide
  Antisense strand to SEQ ID NO: 810522
uuuggccaauagcauuccc

SEQ ID NO: 810524 - RNA, 19 nt, Artificial Sequence
  Description of Artificial Sequence: Synthetic oligonucleotide
  Sense strand starting at position 2588 of SEQ ID NO: 587681
uccacagguuuguuagaaa

SEQ ID NO: 810525 - RNA, 19 nt, Artificial Sequence
  Description of Artificial Sequence: Synthetic oligonucleotide
  Antisense strand to SEQ ID NO: 810524
uuucuaacaaaccugugga

SEQ ID NO: 810526 - RNA, 19 nt, Artificial Sequence
  Description of Artificial Sequence: Synthetic oligonucleotide
  Sense strand starting at position 2697 of SEQ ID NO: 587681
agaagaaagccuugaagca

SEQ ID NO: 810527 - RNA, 19 nt, Artificial Sequence
  Description of Artificial Sequence: Synthetic oligonucleotide
  Antisense strand to SEQ ID NO: 810526
ugcuucaaggcuuucuucu

SEQ ID NO: 810528 - RNA, 19 nt, Artificial Sequence
  Description of Artificial Sequence: Synthetic oligonucleotide
  Sense strand starting at position 2757 of SEQ ID NO: 587681
uccagaaaccuuugacagu

SEQ ID NO: 810529 - RNA, 19 nt, Artificial Sequence
  Description of Artificial Sequence: Synthetic oligonucleotide
  Antisense strand to SEQ ID NO: 810528
acugucaaagguuucugga

SEQ ID NO: 810530 - RNA, 19 nt, Artificial Sequence
  Description of Artificial Sequence: Synthetic oligonucleotide
  Sense strand starting at position 2841 of SEQ ID NO: 587681
ggaagaaacuggcuuaacu

SEQ ID NO: 810531 - RNA, 19 nt, Artificial Sequence
  Description of Artificial Sequence: Synthetic oligonucleotide
  Antisense strand to SEQ ID NO: 810530
aguuaagccaguuucuucc

SEQ ID NO: 810532 - RNA, 19 nt, Artificial Sequence
  Description of Artificial Sequence: Synthetic oligonucleotide
  Sense strand starting at position 2979 of SEQ ID NO: 587681
ggugacauuguuugaagga

SEQ ID NO: 810533 - RNA, 19 nt, Artificial Sequence
  Description of Artificial Sequence: Synthetic oligonucleotide
  Antisense strand to SEQ ID NO: 810532
uccuucaaacaaugucacc

SEQ ID NO: 810534 - RNA, 19 nt, Artificial Sequence
  Description of Artificial Sequence: Synthetic oligonucleotide
  Sense strand starting at position 3065 of SEQ ID NO: 587681
ugaggauaguugcuuugga

SEQ ID NO: 810535 - RNA, 19 nt, Artificial Sequence
  Description of Artificial Sequence: Synthetic oligonucleotide
  Antisense strand to SEQ ID NO: 810534
uccaaagcaacuauccuca

SEQ ID NO: 810536 - RNA, 19 nt, Artificial Sequence
  Description of Artificial Sequence: Synthetic oligonucleotide
  Sense strand starting at position 3066 of SEQ ID NO: 587681
gaggauaguugcuuuggaa

SEQ ID NO: 810537 - RNA, 19 nt, Artificial Sequence
  Description of Artificial Sequence: Synthetic oligonucleotide
  Antisense strand to SEQ ID NO: 810536
uuccaaagcaacuauccuc

SEQ ID NO: 810538 - RNA, 19 nt, Artificial Sequence
  Description of Artificial Sequence: Synthetic oligonucleotide
  Sense strand starting at position 3127 of SEQ ID NO: 587681
gauguaauucuagaguuua

SEQ ID NO: 810539 - RNA, 19 nt, Artificial Sequence
  Description of Artificial Sequence: Synthetic oligonucleotide
  Antisense strand to SEQ ID NO: 810538
uaaacucuagaauuacauc

SEQ ID NO: 810540 - RNA, 19 nt, Artificial Sequence
  Description of Artificial Sequence: Synthetic oligonucleotide
  Sense strand starting at position 3336 of SEQ ID NO: 587681
cuuugagguaaaugagacu

SEQ ID NO: 810541 - RNA, 19 nt, Artificial Sequence
  Description of Artificial Sequence: Synthetic oligonucleotide
  Antisense strand to SEQ ID NO: 810540
agucucauuuaccucaaag

SEQ ID NO: 810542 - RNA, 19 nt, Artificial Sequence
  Description of Artificial Sequence: Synthetic oligonucleotide
  Sense strand starting at position 3342 of SEQ ID NO: 587681
gguaaaugagacugaguag

SEQ ID NO: 810543 - RNA, 19 nt, Artificial Sequence
  Description of Artificial Sequence: Synthetic oligonucleotide
  Antisense strand to SEQ ID NO: 810542
cuacucagucucauuuacc

SEQ ID NO: 810544 - RNA, 19 nt, Artificial Sequence
  Description of Artificial Sequence: Synthetic oligonucleotide
  Sense strand starting at position 3343 of SEQ ID NO: 587681
guaaaugagacugaguagu

SEQ ID NO: 810545 - RNA, 19 nt, Artificial Sequence
  Description of Artificial Sequence: Synthetic oligonucleotide
  Antisense strand to SEQ ID NO: 810544
acuacucagucucauuuac

SEQ ID NO: 810546 - RNA, 19 nt, Artificial Sequence
  Description of Artificial Sequence: Synthetic oligonucleotide
  Sense strand starting at position 3395 of SEQ ID NO: 587681
ugcacucuugaguaggaca

SEQ ID NO: 810547 - RNA, 19 nt, Artificial Sequence
  Description of Artificial Sequence: Synthetic oligonucleotide
  Antisense strand to SEQ ID NO: 810546
uguccuacucaagagugca

SEQ ID NO: 810548 - RNA, 19 nt, Artificial Sequence
  Description of Artificial Sequence: Synthetic oligonucleotide
  Sense strand starting at position 3397 of SEQ ID NO: 587681
cacucuugaguaggacauu

SEQ ID NO: 810549 - RNA, 19 nt, Artificial Sequence
  Description of Artificial Sequence: Synthetic oligonucleotide
  Antisense strand to SEQ ID NO: 810548
aauguccuacucaagagug

SEQ ID NO: 810550 - RNA, 19 nt, Artificial Sequence
  Description of Artificial Sequence: Synthetic oligonucleotide
  Sense strand starting at position 3398 of SEQ ID NO: 587681
acucuugaguaggacauuu

SEQ ID NO: 810551 - RNA, 19 nt, Artificial Sequence
  Description of Artificial Sequence: Synthetic oligonucleotide
  Antisense strand to SEQ ID NO: 810550
aaauguccuacucaagagu

SEQ ID NO: 810552 - RNA, 19 nt, Artificial Sequence
  Description of Artificial Sequence: Synthetic oligonucleotide
  Sense strand starting at position 3691 of SEQ ID NO: 587681
cgaaucaaccagcauguau

SEQ ID NO: 810553 - RNA, 19 nt, Artificial Sequence
  Description of Artificial Sequence: Synthetic oligonucleotide
  Antisense strand to SEQ ID NO: 810552
auacaugcugguugauucg

SEQ ID NO: 810554 - RNA, 19 nt, Artificial Sequence
  Description of Artificial Sequence: Synthetic oligonucleotide
  Sense strand starting at position 3797 of SEQ ID NO: 587681
uguacuuugaaauggagca

SEQ ID NO: 810555 - RNA, 19 nt, Artificial Sequence
  Description of Artificial Sequence: Synthetic oligonucleotide
  Antisense strand to SEQ ID NO: 810554
ugcuccauuucaaaguaca

SEQ ID NO: 810556 - RNA, 19 nt, Artificial Sequence
  Description of Artificial Sequence: Synthetic oligonucleotide
  Sense strand starting at position 3798 of SEQ ID NO: 587681
guacuuugaaauggagcaa

SEQ ID NO: 810557 - RNA, 19 nt, Artificial Sequence
  Description of Artificial Sequence: Synthetic oligonucleotide
  Antisense strand to SEQ ID NO: 810556
uugcuccauuucaaaguac

SEQ ID NO: 810558 - RNA, 19 nt, Artificial Sequence
  Description of Artificial Sequence: Synthetic oligonucleotide
  Sense strand starting at position 3859 of SEQ ID NO: 587681
uguuccaagcaugaauaga

SEQ ID NO: 810559 - RNA, 19 nt, Artificial Sequence
  Description of Artificial Sequence: Synthetic oligonucleotide
  Antisense strand to SEQ ID NO: 810558
ucuauucaugcuuggaaca

SEQ ID NO: 810560 - RNA, 19 nt, Artificial Sequence
  Description of Artificial Sequence: Synthetic oligonucleotide
  Sense strand starting at position 3919 of SEQ ID NO: 587681
cuagcucuucuuggaaaga

SEQ ID NO: 810561 - RNA, 19 nt, Artificial Sequence
  Description of Artificial Sequence: Synthetic oligonucleotide
  Antisense strand to SEQ ID NO: 810560
ucuuuccaagaagagcuag

SEQ ID NO: 810562 - RNA, 19 nt, Artificial Sequence
  Description of Artificial Sequence: Synthetic oligonucleotide
  Sense strand starting at position 4 of SEQ ID NO: 587682
uggcauccucuauaagcaa

SEQ ID NO: 810563 - RNA, 19 nt, Artificial Sequence
  Description of Artificial Sequence: Synthetic oligonucleotide
  Antisense strand to SEQ ID NO: 810562
uugcuuauagaggaugcca

SEQ ID NO: 810564 - RNA, 19 nt, Artificial Sequence
  Description of Artificial Sequence: Synthetic oligonucleotide
  Sense strand starting at position 61 of SEQ ID NO: 587682
gccggagugcuccaccaca

SEQ ID NO: 810565 - RNA, 19 nt, Artificial Sequence
  Description of Artificial Sequence: Synthetic oligonucleotide
  Antisense strand to SEQ ID NO: 810564
ugugguggagcacuccggc

SEQ ID NO: 810566 - RNA, 19 nt, Artificial Sequence
  Description of Artificial Sequence: Synthetic oligonucleotide
  Sense strand starting at position 255 of SEQ ID NO: 587682
ggaucacuauucguaucau

SEQ ID NO: 810567 - RNA, 19 nt, Artificial Sequence
  Description of Artificial Sequence: Synthetic oligonucleotide
  Antisense strand to SEQ ID NO: 810566
augauacgaauagugaucc

SEQ ID NO: 810568 - RNA, 19 nt, Artificial Sequence
  Description of Artificial Sequence: Synthetic oligonucleotide
  Sense strand starting at position 261 of SEQ ID NO: 587682
cuauucguaucauauucua

SEQ ID NO: 810569 - RNA, 19 nt, Artificial Sequence
  Description of Artificial Sequence: Synthetic oligonucleotide
  Antisense strand to SEQ ID NO: 810568
uagaauaugauacgaauag

SEQ ID NO: 810570 - RNA, 19 nt, Artificial Sequence
  Description of Artificial Sequence: Synthetic oligonucleotide
  Sense strand starting at position 269 of SEQ ID NO: 587682
aucauauucuaggcaguca

SEQ ID NO: 810571 - RNA, 19 nt, Artificial Sequence
  Description of Artificial Sequence: Synthetic oligonucleotide
  Antisense strand to SEQ ID NO: 810570
ugacugccuagaauaugau

SEQ ID NO: 810572 - RNA, 19 nt, Artificial Sequence
  Description of Artificial Sequence: Synthetic oligonucleotide
  Sense strand starting at position 866 of SEQ ID NO: 587682
cagcgcuuccgaucugcua

SEQ ID NO: 810573 - RNA, 19 nt, Artificial Sequence
  Description of Artificial Sequence: Synthetic oligonucleotide
  Antisense strand to SEQ ID NO: 810572
uagcagaucggaagcgcug

SEQ ID NO: 810574 - RNA, 19 nt, Artificial Sequence
  Description of Artificial Sequence: Synthetic oligonucleotide
  Sense strand starting at position 2221 of SEQ ID NO: 587682
uagguuaguucgucgacgu

SEQ ID NO: 810575 - RNA, 19 nt, Artificial Sequence
  Description of Artificial Sequence: Synthetic oligonucleotide
  Antisense strand to SEQ ID NO: 810574
acgucgacgaacuaaccua

SEQ ID NO: 810576 - RNA, 19 nt, Artificial Sequence
  Description of Artificial Sequence: Synthetic oligonucleotide
  Sense strand starting at position 2223 of SEQ ID NO: 587682
gguuaguucgucgacgugu

SEQ ID NO: 810577 - RNA, 19 nt, Artificial Sequence
  Description of Artificial Sequence: Synthetic oligonucleotide
  Antisense strand to SEQ ID NO: 810576
acacgucgacgaacuaacc

SEQ ID NO: 810578 - RNA, 19 nt, Artificial Sequence
  Description of Artificial Sequence: Synthetic oligonucleotide
  Sense strand starting at position 2224 of SEQ ID NO: 587682
guuaguucgucgacgugua

SEQ ID NO: 810579 - RNA, 19 nt, Artificial Sequence
  Description of Artificial Sequence: Synthetic oligonucleotide
  Antisense strand to SEQ ID NO: 810578
uacacgucgacgaacuaac

SEQ ID NO: 810580 - RNA, 19 nt, Artificial Sequence
  Description of Artificial Sequence: Synthetic oligonucleotide
  Sense strand starting at position 2225 of SEQ ID NO: 587682
uuaguucgucgacguguaa

SEQ ID NO: 810581 - RNA, 19 nt, Artificial Sequence
  Description of Artificial Sequence: Synthetic oligonucleotide
  Antisense strand to SEQ ID NO: 810580
uuacacgucgacgaacuaa

SEQ ID NO: 810582 - RNA, 19 nt, Artificial Sequence
  Description of Artificial Sequence: Synthetic oligonucleotide
  Sense strand starting at position 2228 of SEQ ID NO: 587682
guucgucgacguguaacuu

SEQ ID NO: 810583 - RNA, 19 nt, Artificial Sequence
  Description of Artificial Sequence: Synthetic oligonucleotide
  Antisense strand to SEQ ID NO: 810582
aaguuacacgucgacgaac

SEQ ID NO: 810584 - RNA, 19 nt, Artificial Sequence
  Description of Artificial Sequence: Synthetic oligonucleotide
  Sense strand starting at position 2232 of SEQ ID NO: 587682
gucgacguguaacuuuaga

SEQ ID NO: 810585 - RNA, 19 nt, Artificial Sequence
  Description of Artificial Sequence: Synthetic oligonucleotide
  Antisense strand to SEQ ID NO: 810584
ucuaaaguuacacgucgac

SEQ ID NO: 810586 - RNA, 19 nt, Artificial Sequence
  Description of Artificial Sequence: Synthetic oligonucleotide
  Sense strand starting at position 2237 of SEQ ID NO: 587682
cguguaacuuuagaaauag

SEQ ID NO: 810587 - RNA, 19 nt, Artificial Sequence
  Description of Artificial Sequence: Synthetic oligonucleotide
  Antisense strand to SEQ ID NO: 810586
cuauuucuaaaguuacacg

SEQ ID NO: 810588 - RNA, 19 nt, Artificial Sequence
  Description of Artificial Sequence: Synthetic oligonucleotide
  Sense strand starting at position 2309 of SEQ ID NO: 587682
acgugagcgcucucugcua

SEQ ID NO: 810589 - RNA, 19 nt, Artificial Sequence
  Description of Artificial Sequence: Synthetic oligonucleotide
  Antisense strand to SEQ ID NO: 810588
uagcagagagcgcucacgu

SEQ ID NO: 810590 - RNA, 19 nt, Artificial Sequence
  Description of Artificial Sequence: Synthetic oligonucleotide
  Sense strand starting at position 2321 of SEQ ID NO: 587682
ucugcuaccuguugaaauc

SEQ ID NO: 810591 - RNA, 19 nt, Artificial Sequence
  Description of Artificial Sequence: Synthetic oligonucleotide
  Antisense strand to SEQ ID NO: 810590
gauuucaacagguagcaga

SEQ ID NO: 810592 - RNA, 19 nt, Artificial Sequence
  Description of Artificial Sequence: Synthetic oligonucleotide
  Sense strand starting at position 2494 of SEQ ID NO: 587682
gucugugcgcccucaguaa

SEQ ID NO: 810593 - RNA, 19 nt, Artificial Sequence
  Description of Artificial Sequence: Synthetic oligonucleotide
  Antisense strand to SEQ ID NO: 810592
uuacugagggcgcacagac

SEQ ID NO: 810594 - RNA, 19 nt, Artificial Sequence
  Description of Artificial Sequence: Synthetic oligonucleotide
  Sense strand starting at position 2881 of SEQ ID NO: 587682
auagaaagcucuccuguua

SEQ ID NO: 810595 - RNA, 19 nt, Artificial Sequence
  Description of Artificial Sequence: Synthetic oligonucleotide
  Antisense strand to SEQ ID NO: 810594
uaacaggagagcuuucuau

SEQ ID NO: 810596 - RNA, 19 nt, Artificial Sequence
  Description of Artificial Sequence: Synthetic oligonucleotide
  Sense strand starting at position 2921 of SEQ ID NO: 587682
aaaguuaggguguaaguga

SEQ ID NO: 810597 - RNA, 19 nt, Artificial Sequence
  Description of Artificial Sequence: Synthetic oligonucleotide
  Antisense strand to SEQ ID NO: 810596
ucacuuacacccuaacuuu

SEQ ID NO: 810598 - RNA, 19 nt, Artificial Sequence
  Description of Artificial Sequence: Synthetic oligonucleotide
  Sense strand starting at position 2926 of SEQ ID NO: 587682
uaggguguaagugaucuau

SEQ ID NO: 810599 - RNA, 19 nt, Artificial Sequence
  Description of Artificial Sequence: Synthetic oligonucleotide
  Antisense strand to SEQ ID NO: 810598
auagaucacuuacacccua

SEQ ID NO: 810600 - RNA, 19 nt, Artificial Sequence
  Description of Artificial Sequence: Synthetic oligonucleotide
  Sense strand starting at position 3007 of SEQ ID NO: 587682
aggcuaauguaaugugaaa

SEQ ID NO: 810601 - RNA, 19 nt, Artificial Sequence
  Description of Artificial Sequence: Synthetic oligonucleotide
  Antisense strand to SEQ ID NO: 810600
uuucacauuacauuagccu

SEQ ID NO: 810602 - RNA, 19 nt, Artificial Sequence
  Description of Artificial Sequence: Synthetic oligonucleotide
  Sense strand starting at position 3098 of SEQ ID NO: 587682
gggauagaagauuguuagu

SEQ ID NO: 810603 - RNA, 19 nt, Artificial Sequence
  Description of Artificial Sequence: Synthetic oligonucleotide
  Antisense strand to SEQ ID NO: 810602
acuaacaaucuucuauccc

SEQ ID NO: 810604 - RNA, 19 nt, Artificial Sequence
  Description of Artificial Sequence: Synthetic oligonucleotide
  Sense strand starting at position 3100 of SEQ ID NO: 587682
gauagaagauuguuaguau

SEQ ID NO: 810605 - RNA, 19 nt, Artificial Sequence
  Description of Artificial Sequence: Synthetic oligonucleotide
  Antisense strand to SEQ ID NO: 810604
auacuaacaaucuucuauc

SEQ ID NO: 810606 - RNA, 19 nt, Artificial Sequence
  Description of Artificial Sequence: Synthetic oligonucleotide
  Sense strand starting at position 3101 of SEQ ID NO: 587682
auagaagauuguuaguaug

SEQ ID NO: 810607 - RNA, 19 nt, Artificial Sequence
  Description of Artificial Sequence: Synthetic oligonucleotide
  Antisense strand to SEQ ID NO: 810606
cauacuaacaaucuucuau

SEQ ID NO: 810608 - RNA, 19 nt, Artificial Sequence
  Description of Artificial Sequence: Synthetic oligonucleotide
  Sense strand starting at position 3103 of SEQ ID NO: 587682
agaagauuguuaguauguu

SEQ ID NO: 810609 - RNA, 19 nt, Artificial Sequence
  Description of Artificial Sequence: Synthetic oligonucleotide
  Antisense strand to SEQ ID NO: 810608
aacauacuaacaaucuucu

SEQ ID NO: 810610 - RNA, 19 nt, Artificial Sequence
  Description of Artificial Sequence: Synthetic oligonucleotide
  Sense strand starting at position 3104 of SEQ ID NO: 587682
gaagauuguuaguauguuu

SEQ ID NO: 810611 - RNA, 19 nt, Artificial Sequence
  Description of Artificial Sequence: Synthetic oligonucleotide
  Antisense strand to SEQ ID NO: 810610
aaacauacuaacaaucuuc

SEQ ID NO: 810612 - RNA, 19 nt, Artificial Sequence
  Description of Artificial Sequence: Synthetic oligonucleotide
  Sense strand starting at position 3160 of SEQ ID NO: 587682
agacuugauuaguaaagac

SEQ ID NO: 810613 - RNA, 19 nt, Artificial Sequence
  Description of Artificial Sequence: Synthetic oligonucleotide
  Antisense strand to SEQ ID NO: 810612
gucuuuacuaaucaagucu

SEQ ID NO: 810614 - RNA, 19 nt, Artificial Sequence
  Description of Artificial Sequence: Synthetic oligonucleotide
  Sense strand starting at position 3205 of SEQ ID NO: 587682
gaaccaugacaaugcguau

SEQ ID NO: 810615 - RNA, 19 nt, Artificial Sequence
  Description of Artificial Sequence: Synthetic oligonucleotide
  Antisense strand to SEQ ID NO: 810614
auacgcauugucaugguuc

SEQ ID NO: 810616 - RNA, 19 nt, Artificial Sequence
  Description of Artificial Sequence: Synthetic oligonucleotide
  Sense strand starting at position 3289 of SEQ ID NO: 587682
gcuaaugagagcuauccug

SEQ ID NO: 810617 - RNA, 19 nt, Artificial Sequence
  Description of Artificial Sequence: Synthetic oligonucleotide
  Antisense strand to SEQ ID NO: 810616
caggauagcucucauuagc

SEQ ID NO: 810618 - RNA, 19 nt, Artificial Sequence
  Description of Artificial Sequence: Synthetic oligonucleotide
  Sense strand starting at position 3366 of SEQ ID NO: 587682
ucgcuauuucccuggacuu

SEQ ID NO: 810619 - RNA, 19 nt, Artificial Sequence
  Description of Artificial Sequence: Synthetic oligonucleotide
  Antisense strand to SEQ ID NO: 810618
aaguccagggaaauagcga

SEQ ID NO: 810620 - RNA, 19 nt, Artificial Sequence
  Description of Artificial Sequence: Synthetic oligonucleotide
  Sense strand starting at position 3367 of SEQ ID NO: 587682
cgcuauuucccuggacuuu

SEQ ID NO: 810621 - RNA, 19 nt, Artificial Sequence
  Description of Artificial Sequence: Synthetic oligonucleotide
  Antisense strand to SEQ ID NO: 810620
aaaguccagggaaauagcg

SEQ ID NO: 810622 - RNA, 19 nt, Artificial Sequence
  Description of Artificial Sequence: Synthetic oligonucleotide
  Sense strand starting at position 3384 of SEQ ID NO: 587682
uuggauucuuucucuagga

SEQ ID NO: 810623 - RNA, 19 nt, Artificial Sequence
  Description of Artificial Sequence: Synthetic oligonucleotide
  Antisense strand to SEQ ID NO: 810622
uccuagagaaagaauccaa

SEQ ID NO: 810624 - RNA, 19 nt, Artificial Sequence
  Description of Artificial Sequence: Synthetic oligonucleotide
  Sense strand starting at position 3385 of SEQ ID NO: 587682
uggauucuuucucuaggaa

SEQ ID NO: 810625 - RNA, 19 nt, Artificial Sequence
  Description of Artificial Sequence: Synthetic oligonucleotide
  Antisense strand to SEQ ID NO: 810624
uuccuagagaaagaaucca

SEQ ID NO: 810626 - RNA, 19 nt, Artificial Sequence
  Description of Artificial Sequence: Synthetic oligonucleotide
  Sense strand starting at position 3501 of SEQ ID NO: 587682
acauuuccuuuaggagaga

SEQ ID NO: 810627 - RNA, 19 nt, Artificial Sequence
  Description of Artificial Sequence: Synthetic oligonucleotide
  Antisense strand to SEQ ID NO: 810626
ucucuccuaaaggaaaugu

SEQ ID NO: 810628 - RNA, 19 nt, Artificial Sequence
  Description of Artificial Sequence: Synthetic oligonucleotide
  Sense strand starting at position 3534 of SEQ ID NO: 587682
acgagauuauauccucuag

SEQ ID NO: 810629 - RNA, 19 nt, Artificial Sequence
  Description of Artificial Sequence: Synthetic oligonucleotide
  Antisense strand to SEQ ID NO: 810628
cuagaggauauaaucucgu

SEQ ID NO: 810630 - RNA, 19 nt, Artificial Sequence
  Description of Artificial Sequence: Synthetic oligonucleotide
  Sense strand starting at position 3610 of SEQ ID NO: 587682
uaggaugcaucuuagagaa

SEQ ID NO: 810631 - RNA, 19 nt, Artificial Sequence
  Description of Artificial Sequence: Synthetic oligonucleotide
  Antisense strand to SEQ ID NO: 810630
uucucuaagaugcauccua

SEQ ID NO: 810632 - RNA, 19 nt, Artificial Sequence
  Description of Artificial Sequence: Synthetic oligonucleotide
  Sense strand starting at position 3768 of SEQ ID NO: 587682
ggucaaugggaacauguuu

SEQ ID NO: 810633 - RNA, 19 nt, Artificial Sequence
  Description of Artificial Sequence: Synthetic oligonucleotide
  Antisense strand to SEQ ID NO: 810632
aaacauguucccauugacc

SEQ ID NO: 810634 - RNA, 19 nt, Artificial Sequence
  Description of Artificial Sequence: Synthetic oligonucleotide
  Sense strand starting at position 3773 of SEQ ID NO: 587682
augggaacauguuucuguu

SEQ ID NO: 810635 - RNA, 19 nt, Artificial Sequence
  Description of Artificial Sequence: Synthetic oligonucleotide
  Antisense strand to SEQ ID NO: 810634
aacagaaacauguucccau

SEQ ID NO: 810636 - RNA, 19 nt, Artificial Sequence
  Description of Artificial Sequence: Synthetic oligonucleotide
  Sense strand starting at position 3776 of SEQ ID NO: 587682
ggaacauguuucuguucuu

SEQ ID NO: 810637 - RNA, 19 nt, Artificial Sequence
  Description of Artificial Sequence: Synthetic oligonucleotide
  Antisense strand to SEQ ID NO: 810636
aagaacagaaacauguucc

SEQ ID NO: 810638 - RNA, 19 nt, Artificial Sequence
  Description of Artificial Sequence: Synthetic oligonucleotide
  Sense strand starting at position 3779 of SEQ ID NO: 587682
acauguuucuguucuucca

SEQ ID NO: 810639 - RNA, 19 nt, Artificial Sequence
  Description of Artificial Sequence: Synthetic oligonucleotide
  Antisense strand to SEQ ID NO: 810638
uggaagaacagaaacaugu

SEQ ID NO: 810640 - RNA, 19 nt, Artificial Sequence
  Description of Artificial Sequence: Synthetic oligonucleotide
  Sense strand starting at position 3872 of SEQ ID NO: 587682
uuuaguagaucuuggcaac

SEQ ID NO: 810641 - RNA, 19 nt, Artificial Sequence
  Description of Artificial Sequence: Synthetic oligonucleotide
  Antisense strand to SEQ ID NO: 810640
guugccaagaucuacuaaa

SEQ ID NO: 810642 - RNA, 19 nt, Artificial Sequence
  Description of Artificial Sequence: Synthetic oligonucleotide
  Sense strand starting at position 239 of SEQ ID NO: 587683
ucauuucuguagggugaau

SEQ ID NO: 810643 - RNA, 19 nt, Artificial Sequence
  Description of Artificial Sequence: Synthetic oligonucleotide
  Antisense strand to SEQ ID NO: 810642
auucacccuacagaaauga

SEQ ID NO: 810644 - RNA, 19 nt, Artificial Sequence
  Description of Artificial Sequence: Synthetic oligonucleotide
  Sense strand starting at position 539 of SEQ ID NO: 587683
accagaaaguucccggaca

SEQ ID NO: 810645 - RNA, 19 nt, Artificial Sequence
  Description of Artificial Sequence: Synthetic oligonucleotide
  Antisense strand to SEQ ID NO: 810644
uguccgggaacuuucuggu

SEQ ID NO: 810646 - RNA, 19 nt, Artificial Sequence
  Description of Artificial Sequence: Synthetic oligonucleotide
  Sense strand starting at position 708 of SEQ ID NO: 587683
uccauucguucccaaagga

SEQ ID NO: 810647 - RNA, 19 nt, Artificial Sequence
  Description of Artificial Sequence: Synthetic oligonucleotide
  Antisense strand to SEQ ID NO: 810646
uccuuugggaacgaaugga

SEQ ID NO: 810648 - RNA, 19 nt, Artificial Sequence
  Description of Artificial Sequence: Synthetic oligonucleotide
  Sense strand starting at position 768 of SEQ ID NO: 587683
ggcgugucucugggaagga

SEQ ID NO: 810649 - RNA, 19 nt, Artificial Sequence
  Description of Artificial Sequence: Synthetic oligonucleotide
  Antisense strand to SEQ ID NO: 810648
uccuucccagagacacgcc

SEQ ID NO: 810650 - RNA, 19 nt, Artificial Sequence
  Description of Artificial Sequence: Synthetic oligonucleotide
  Sense strand starting at position 1399 of SEQ ID NO: 587683
aagggcagguguccaauua

SEQ ID NO: 810651 - RNA, 19 nt, Artificial Sequence
  Description of Artificial Sequence: Synthetic oligonucleotide
  Antisense strand to SEQ ID NO: 810650
uaauuggacaccugcccuu

SEQ ID NO: 810652 - RNA, 19 nt, Artificial Sequence
  Description of Artificial Sequence: Synthetic oligonucleotide
  Sense strand starting at position 1407 of SEQ ID NO: 587683
guguccaauuagucgcaaa

SEQ ID NO: 810653 - RNA, 19 nt, Artificial Sequence
  Description of Artificial Sequence: Synthetic oligonucleotide
  Antisense strand to SEQ ID NO: 810652
uuugcgacuaauuggacac

SEQ ID NO: 810654 - RNA, 19 nt, Artificial Sequence
  Description of Artificial Sequence: Synthetic oligonucleotide
  Sense strand starting at position 1410 of SEQ ID NO: 587683
uccaauuagucgcaaagaa

SEQ ID NO: 810655 - RNA, 19 nt, Artificial Sequence
  Description of Artificial Sequence: Synthetic oligonucleotide
  Antisense strand to SEQ ID NO: 810654
uucuuugcgacuaauugga

SEQ ID NO: 810656 - RNA, 19 nt, Artificial Sequence
  Description of Artificial Sequence: Synthetic oligonucleotide
  Sense strand starting at position 2070 of SEQ ID NO: 587683
cggauauacccuggagaca

SEQ ID NO: 810657 - RNA, 19 nt, Artificial Sequence
  Description of Artificial Sequence: Synthetic oligonucleotide
  Antisense strand to SEQ ID NO: 810656
ugucuccaggguauauccg

SEQ ID NO: 810658 - RNA, 19 nt, Artificial Sequence
  Description of Artificial Sequence: Synthetic oligonucleotide
  Sense strand starting at position 2176 of SEQ ID NO: 587683
gggucagccucccugugaa

SEQ ID NO: 810659 - RNA, 19 nt, Artificial Sequence
  Description of Artificial Sequence: Synthetic oligonucleotide
  Antisense strand to SEQ ID NO: 810658
uucacagggaggcugaccc

SEQ ID NO: 810660 - RNA, 19 nt, Artificial Sequence
  Description of Artificial Sequence: Synthetic oligonucleotide
  Sense strand starting at position 2188 of SEQ ID NO: 587683
cugugaauuggccaggaca

SEQ ID NO: 810661 - RNA, 19 nt, Artificial Sequence
  Description of Artificial Sequence: Synthetic oligonucleotide
  Antisense strand to SEQ ID NO: 810660
uguccuggccaauucacag

SEQ ID NO: 810662 - RNA, 19 nt, Artificial Sequence
  Description of Artificial Sequence: Synthetic oligonucleotide
  Sense strand starting at position 2190 of SEQ ID NO: 587683
gugaauuggccaggacaac

SEQ ID NO: 810663 - RNA, 19 nt, Artificial Sequence
  Description of Artificial Sequence: Synthetic oligonucleotide
  Antisense strand to SEQ ID NO: 810662
guuguccuggccaauucac

SEQ ID NO: 810664 - RNA, 19 nt, Artificial Sequence
  Description of Artificial Sequence: Synthetic oligonucleotide
  Sense strand starting at position 2312 of SEQ ID NO: 587683
gcgccuauugaaggugaca

SEQ ID NO: 810665 - RNA, 19 nt, Artificial Sequence
  Description of Artificial Sequence: Synthetic oligonucleotide
  Antisense strand to SEQ ID NO: 810664
ugucaccuucaauaggcgc

SEQ ID NO: 810666 - RNA, 19 nt, Artificial Sequence
  Description of Artificial Sequence: Synthetic oligonucleotide
  Sense strand starting at position 2338 of SEQ ID NO: 587683
cagccaagugugugguaaa

SEQ ID NO: 810667 - RNA, 19 nt, Artificial Sequence
  Description of Artificial Sequence: Synthetic oligonucleotide
  Antisense strand to SEQ ID NO: 810666
uuuaccacacacuuggcug

SEQ ID NO: 810668 - RNA, 19 nt, Artificial Sequence
  Description of Artificial Sequence: Synthetic oligonucleotide
  Sense strand starting at position 2339 of SEQ ID NO: 587683
agccaagugugugguaaag

SEQ ID NO: 810669 - RNA, 19 nt, Artificial Sequence
  Description of Artificial Sequence: Synthetic oligonucleotide
  Antisense strand to SEQ ID NO: 810668
cuuuaccacacacuuggcu

SEQ ID NO: 810670 - RNA, 19 nt, Artificial Sequence
  Description of Artificial Sequence: Synthetic oligonucleotide
  Sense strand starting at position 2341 of SEQ ID NO: 587683
ccaagugugugguaaagau

SEQ ID NO: 810671 - RNA, 19 nt, Artificial Sequence
  Description of Artificial Sequence: Synthetic oligonucleotide
  Antisense strand to SEQ ID NO: 810670
aucuuuaccacacacuugg

SEQ ID NO: 810672 - RNA, 19 nt, Artificial Sequence
  Description of Artificial Sequence: Synthetic oligonucleotide
  Sense strand starting at position 2416 of SEQ ID NO: 587683
aacggugauuccgccaauu

SEQ ID NO: 810673 - RNA, 19 nt, Artificial Sequence
  Description of Artificial Sequence: Synthetic oligonucleotide
  Antisense strand to SEQ ID NO: 810672
aauuggcggaaucaccguu

SEQ ID NO: 810674 - RNA, 19 nt, Artificial Sequence
  Description of Artificial Sequence: Synthetic oligonucleotide
  Sense strand starting at position 2445 of SEQ ID NO: 587683
ugggcaucccgcggugaau

SEQ ID NO: 810675 - RNA, 19 nt, Artificial Sequence
  Description of Artificial Sequence: Synthetic oligonucleotide
  Antisense strand to SEQ ID NO: 810674
auucaccgcgggaugccca

SEQ ID NO: 810676 - RNA, 19 nt, Artificial Sequence
  Description of Artificial Sequence: Synthetic oligonucleotide
  Sense strand starting at position 2483 of SEQ ID NO: 587683
cuuccagccucauuggaga

SEQ ID NO: 810677 - RNA, 19 nt, Artificial Sequence
  Description of Artificial Sequence: Synthetic oligonucleotide
  Antisense strand to SEQ ID NO: 810676
ucuccaaugaggcuggaag

SEQ ID NO: 810678 - RNA, 19 nt, Artificial Sequence
  Description of Artificial Sequence: Synthetic oligonucleotide
  Sense strand starting at position 2498 of SEQ ID NO: 587683
gagagcagugcucaaagca

SEQ ID NO: 810679 - RNA, 19 nt, Artificial Sequence
  Description of Artificial Sequence: Synthetic oligonucleotide
  Antisense strand to SEQ ID NO: 810678
ugcuuugagcacugcucuc

SEQ ID NO: 810680 - RNA, 19 nt, Artificial Sequence
  Description of Artificial Sequence: Synthetic oligonucleotide
  Sense strand starting at position 2550 of SEQ ID NO: 587683
cgugaauaaucacacugau

SEQ ID NO: 810681 - RNA, 19 nt, Artificial Sequence
  Description of Artificial Sequence: Synthetic oligonucleotide
  Antisense strand to SEQ ID NO: 810680
aucagugugauuauucacg

SEQ ID NO: 810682 - RNA, 19 nt, Artificial Sequence
  Description of Artificial Sequence: Synthetic oligonucleotide
  Sense strand starting at position 2747 of SEQ ID NO: 587683
gcuaaaugaggcuauaaua

SEQ ID NO: 810683 - RNA, 19 nt, Artificial Sequence
  Description of Artificial Sequence: Synthetic oligonucleotide
  Antisense strand to SEQ ID NO: 810682
uauuauagccucauuuagc

SEQ ID NO: 810684 - RNA, 19 nt, Artificial Sequence
  Description of Artificial Sequence: Synthetic oligonucleotide
  Sense strand starting at position 2757 of SEQ ID NO: 587683
gcuauaauauugguaccau

SEQ ID NO: 810685 - RNA, 19 nt, Artificial Sequence
  Description of Artificial Sequence: Synthetic oligonucleotide
  Antisense strand to SEQ ID NO: 810684
augguaccaauauuauagc

SEQ ID NO: 810686 - RNA, 19 nt, Artificial Sequence
  Description of Artificial Sequence: Synthetic oligonucleotide
  Sense strand starting at position 2766 of SEQ ID NO: 587683
uugguaccaucgucauuaa

SEQ ID NO: 810687 - RNA, 19 nt, Artificial Sequence
  Description of Artificial Sequence: Synthetic oligonucleotide
  Antisense strand to SEQ ID NO: 810686
uuaaugacgaugguaccaa

SEQ ID NO: 810688 - RNA, 19 nt, Artificial Sequence
  Description of Artificial Sequence: Synthetic oligonucleotide
  Sense strand starting at position 2769 of SEQ ID NO: 587683
guaccaucgucauuaacuu

SEQ ID NO: 810689 - RNA, 19 nt, Artificial Sequence
  Description of Artificial Sequence: Synthetic oligonucleotide
  Antisense strand to SEQ ID NO: 810688
aaguuaaugacgaugguac

SEQ ID NO: 810690 - RNA, 19 nt, Artificial Sequence
  Description of Artificial Sequence: Synthetic oligonucleotide
  Sense strand starting at position 2851 of SEQ ID NO: 587683
cacaauguguaaugagcaa

SEQ ID NO: 810691 - RNA, 19 nt, Artificial Sequence
  Description of Artificial Sequence: Synthetic oligonucleotide
  Antisense strand to SEQ ID NO: 810690
uugcucauuacacauugug

SEQ ID NO: 810692 - RNA, 19 nt, Artificial Sequence
  Description of Artificial Sequence: Synthetic oligonucleotide
  Sense strand starting at position 3712 of SEQ ID NO: 587683
uuggaauagugcugcagua

SEQ ID NO: 810693 - RNA, 19 nt, Artificial Sequence
  Description of Artificial Sequence: Synthetic oligonucleotide
  Antisense strand to SEQ ID NO: 810692
uacugcagcacuauuccaa

SEQ ID NO: 810694 - RNA, 19 nt, Artificial Sequence
  Description of Artificial Sequence: Synthetic oligonucleotide
  Sense strand starting at position 3771 of SEQ ID NO: 587683
gauuuccauuacggagaga

SEQ ID NO: 810695 - RNA, 19 nt, Artificial Sequence
  Description of Artificial Sequence: Synthetic oligonucleotide
  Antisense strand to SEQ ID NO: 810694
ucucuccguaauggaaauc

SEQ ID NO: 810696 - RNA, 19 nt, Artificial Sequence
  Description of Artificial Sequence: Synthetic oligonucleotide
  Sense strand starting at position 3882 of SEQ ID NO: 587683
gguaccgauucccuaggaa

SEQ ID NO: 810697 - RNA, 19 nt, Artificial Sequence
  Description of Artificial Sequence: Synthetic oligonucleotide
  Antisense strand to SEQ ID NO: 810696
uuccuagggaaucgguacc

SEQ ID NO: 810698 - RNA, 19 nt, Artificial Sequence
  Description of Artificial Sequence: Synthetic oligonucleotide
  Sense strand starting at position 3885 of SEQ ID NO: 587683
accgauucccuaggaauca

SEQ ID NO: 810699 - RNA, 19 nt, Artificial Sequence
  Description of Artificial Sequence: Synthetic oligonucleotide
  Antisense strand to SEQ ID NO: 810698
ugauuccuagggaaucggu

SEQ ID NO: 810700 - RNA, 19 nt, Artificial Sequence
  Description of Artificial Sequence: Synthetic oligonucleotide
  Sense strand starting at position 3902 of SEQ ID NO: 587683
caggauuucuaggguuauu

SEQ ID NO: 810701 - RNA, 19 nt, Artificial Sequence
  Description of Artificial Sequence: Synthetic oligonucleotide
  Antisense strand to SEQ ID NO: 810700
aauaacccuagaaauccug

SEQ ID NO: 810702 - RNA, 19 nt, Artificial Sequence
  Description of Artificial Sequence: Synthetic oligonucleotide
  Sense strand starting at position 3914 of SEQ ID NO: 587683
gguuauuuaucccaguagu

SEQ ID NO: 810703 - RNA, 19 nt, Artificial Sequence
  Description of Artificial Sequence: Synthetic oligonucleotide
  Antisense strand to SEQ ID NO: 810702
acuacugggauaaauaacc

SEQ ID NO: 810704 - RNA, 19 nt, Artificial Sequence
  Description of Artificial Sequence: Synthetic oligonucleotide
  Sense strand starting at position 3930 of SEQ ID NO: 587683
aguggaacuguuugaauca

SEQ ID NO: 810705 - RNA, 19 nt, Artificial Sequence
  Description of Artificial Sequence: Synthetic oligonucleotide
  Antisense strand to SEQ ID NO: 810704
ugauucaaacaguuccacu

SEQ ID NO: 810706 - RNA, 19 nt, Artificial Sequence
  Description of Artificial Sequence: Synthetic oligonucleotide
  Sense strand starting at position 3931 of SEQ ID NO: 587683
guggaacuguuugaaucau

SEQ ID NO: 810707 - RNA, 19 nt, Artificial Sequence
  Description of Artificial Sequence: Synthetic oligonucleotide
  Antisense strand to SEQ ID NO: 810706
augauucaaacaguuccac

SEQ ID NO: 810708 - RNA, 19 nt, Artificial Sequence
  Description of Artificial Sequence: Synthetic oligonucleotide
  Sense strand starting at position 3937 of SEQ ID NO: 587683
cuguuugaaucaugugaua

SEQ ID NO: 810709 - RNA, 19 nt, Artificial Sequence
  Description of Artificial Sequence: Synthetic oligonucleotide
  Antisense strand to SEQ ID NO: 810708
uaucacaugauucaaacag

SEQ ID NO: 810710 - RNA, 19 nt, Artificial Sequence
  Description of Artificial Sequence: Synthetic oligonucleotide
  Sense strand starting at position 3939 of SEQ ID NO: 587683
guuugaaucaugugauagu

SEQ ID NO: 810711 - RNA, 19 nt, Artificial Sequence
  Description of Artificial Sequence: Synthetic oligonucleotide
  Antisense strand to SEQ ID NO: 810710
acuaucacaugauucaaac

SEQ ID NO: 810712 - RNA, 19 nt, Artificial Sequence
  Description of Artificial Sequence: Synthetic oligonucleotide
  Sense strand starting at position 3940 of SEQ ID NO: 587683
uuugaaucaugugauaguu

SEQ ID NO: 810713 - RNA, 19 nt, Artificial Sequence
  Description of Artificial Sequence: Synthetic oligonucleotide
  Antisense strand to SEQ ID NO: 810712
aacuaucacaugauucaaa

SEQ ID NO: 810714 - RNA, 19 nt, Artificial Sequence
  Description of Artificial Sequence: Synthetic oligonucleotide
  Sense strand starting at position 450 of SEQ ID NO: 587684
uagagaauuucuggaugca

SEQ ID NO: 810715 - RNA, 19 nt, Artificial Sequence
  Description of Artificial Sequence: Synthetic oligonucleotide
  Antisense strand to SEQ ID NO: 810714
ugcauccagaaauucucua

SEQ ID NO: 810716 - RNA, 19 nt, Artificial Sequence
  Description of Artificial Sequence: Synthetic oligonucleotide
  Sense strand starting at position 473 of SEQ ID NO: 587684
caauauguagaucgaccau

SEQ ID NO: 810717 - RNA, 19 nt, Artificial Sequence
  Description of Artificial Sequence: Synthetic oligonucleotide
  Antisense strand to SEQ ID NO: 810716
auggucgaucuacauauug

SEQ ID NO: 810718 - RNA, 19 nt, Artificial Sequence
  Description of Artificial Sequence: Synthetic oligonucleotide
  Sense strand starting at position 485 of SEQ ID NO: 587684
cgaccauguuccugucacu

SEQ ID NO: 810719 - RNA, 19 nt, Artificial Sequence
  Description of Artificial Sequence: Synthetic oligonucleotide
  Antisense strand to SEQ ID NO: 810718
agugacaggaacauggucg

SEQ ID NO: 810720 - RNA, 19 nt, Artificial Sequence
  Description of Artificial Sequence: Synthetic oligonucleotide
  Sense strand starting at position 501 of SEQ ID NO: 587684
acuagcagugaaugguuua

SEQ ID NO: 810721 - RNA, 19 nt, Artificial Sequence
  Description of Artificial Sequence: Synthetic oligonucleotide
  Antisense strand to SEQ ID NO: 810720
uaaaccauucacugcuagu

SEQ ID NO: 810722 - RNA, 19 nt, Artificial Sequence
  Description of Artificial Sequence: Synthetic oligonucleotide
  Sense strand starting at position 502 of SEQ ID NO: 587684
cuagcagugaaugguuuaa

SEQ ID NO: 810723 - RNA, 19 nt, Artificial Sequence
  Description of Artificial Sequence: Synthetic oligonucleotide
  Antisense strand to SEQ ID NO: 810722
uuaaaccauucacugcuag

SEQ ID NO: 810724 - RNA, 19 nt, Artificial Sequence
  Description of Artificial Sequence: Synthetic oligonucleotide
  Sense strand starting at position 504 of SEQ ID NO: 587684
agcagugaaugguuuaaag

SEQ ID NO: 810725 - RNA, 19 nt, Artificial Sequence
  Description of Artificial Sequence: Synthetic oligonucleotide
  Antisense strand to SEQ ID NO: 810724
cuuuaaaccauucacugcu

SEQ ID NO: 810726 - RNA, 19 nt, Artificial Sequence
  Description of Artificial Sequence: Synthetic oligonucleotide
  Sense strand starting at position 506 of SEQ ID NO: 587684
cagugaaugguuuaaagca

SEQ ID NO: 810727 - RNA, 19 nt, Artificial Sequence
  Description of Artificial Sequence: Synthetic oligonucleotide
  Antisense strand to SEQ ID NO: 810726
ugcuuuaaaccauucacug

SEQ ID NO: 810728 - RNA, 19 nt, Artificial Sequence
  Description of Artificial Sequence: Synthetic oligonucleotide
  Sense strand starting at position 521 of SEQ ID NO: 587684
agcagcagucuccaaucau

SEQ ID NO: 810729 - RNA, 19 nt, Artificial Sequence
  Description of Artificial Sequence: Synthetic oligonucleotide
  Antisense strand to SEQ ID NO: 810728
augauuggagacugcugcu

SEQ ID NO: 810730 - RNA, 19 nt, Artificial Sequence
  Description of Artificial Sequence: Synthetic oligonucleotide
  Sense strand starting at position 528 of SEQ ID NO: 587684
gucuccaaucauuguggaa

SEQ ID NO: 810731 - RNA, 19 nt, Artificial Sequence
  Description of Artificial Sequence: Synthetic oligonucleotide
  Antisense strand to SEQ ID NO: 810730
uuccacaaugauuggagac

SEQ ID NO: 810732 - RNA, 19 nt, Artificial Sequence
  Description of Artificial Sequence: Synthetic oligonucleotide
  Sense strand starting at position 550 of SEQ ID NO: 587684
gggaaugguuuccuggaag

SEQ ID NO: 810733 - RNA, 19 nt, Artificial Sequence
  Description of Artificial Sequence: Synthetic oligonucleotide
  Antisense strand to SEQ ID NO: 810732
cuuccaggaaaccauuccc

SEQ ID NO: 810734 - RNA, 19 nt, Artificial Sequence
  Description of Artificial Sequence: Synthetic oligonucleotide
  Sense strand starting at position 972 of SEQ ID NO: 587684
ucauuucuguagggugaau

SEQ ID NO: 810735 - RNA, 19 nt, Artificial Sequence
  Description of Artificial Sequence: Synthetic oligonucleotide
  Antisense strand to SEQ ID NO: 810734
auucacccuacagaaauga

SEQ ID NO: 810736 - RNA, 19 nt, Artificial Sequence
  Description of Artificial Sequence: Synthetic oligonucleotide
  Sense strand starting at position 1272 of SEQ ID NO: 587684
accagaaaguucccggaca

SEQ ID NO: 810737 - RNA, 19 nt, Artificial Sequence
  Description of Artificial Sequence: Synthetic oligonucleotide
  Antisense strand to SEQ ID NO: 810736
uguccgggaacuuucuggu

SEQ ID NO: 810738 - RNA, 19 nt, Artificial Sequence
  Description of Artificial Sequence: Synthetic oligonucleotide
  Sense strand starting at position 1441 of SEQ ID NO: 587684
uccauucguucccaaagga

SEQ ID NO: 810739 - RNA, 19 nt, Artificial Sequence
  Description of Artificial Sequence: Synthetic oligonucleotide
  Antisense strand to SEQ ID NO: 810738
uccuuugggaacgaaugga

SEQ ID NO: 810740 - RNA, 19 nt, Artificial Sequence
  Description of Artificial Sequence: Synthetic oligonucleotide
  Sense strand starting at position 1501 of SEQ ID NO: 587684
ggcgugucucugggaagga

SEQ ID NO: 810741 - RNA, 19 nt, Artificial Sequence
  Description of Artificial Sequence: Synthetic oligonucleotide
  Antisense strand to SEQ ID NO: 810740
uccuucccagagacacgcc

SEQ ID NO: 810742 - RNA, 19 nt, Artificial Sequence
  Description of Artificial Sequence: Synthetic oligonucleotide
  Sense strand starting at position 2132 of SEQ ID NO: 587684
aagggcagguguccaauua

SEQ ID NO: 810743 - RNA, 19 nt, Artificial Sequence
  Description of Artificial Sequence: Synthetic oligonucleotide
  Antisense strand to SEQ ID NO: 810742
uaauuggacaccugcccuu

SEQ ID NO: 810744 - RNA, 19 nt, Artificial Sequence
  Description of Artificial Sequence: Synthetic oligonucleotide
  Sense strand starting at position 2140 of SEQ ID NO: 587684
guguccaauuagucgcaaa

SEQ ID NO: 810745 - RNA, 19 nt, Artificial Sequence
  Description of Artificial Sequence: Synthetic oligonucleotide
  Antisense strand to SEQ ID NO: 810744
uuugcgacuaauuggacac

SEQ ID NO: 810746 - RNA, 19 nt, Artificial Sequence
  Description of Artificial Sequence: Synthetic oligonucleotide
  Sense strand starting at position 2143 of SEQ ID NO: 587684
uccaauuagucgcaaagaa

SEQ ID NO: 810747 - RNA, 19 nt, Artificial Sequence
  Description of Artificial Sequence: Synthetic oligonucleotide
  Antisense strand to SEQ ID NO: 810746
uucuuugcgacuaauugga

SEQ ID NO: 810748 - RNA, 19 nt, Artificial Sequence
  Description of Artificial Sequence: Synthetic oligonucleotide
  Sense strand starting at position 2803 of SEQ ID NO: 587684
cggauauacccuggagaca

SEQ ID NO: 810749 - RNA, 19 nt, Artificial Sequence
  Description of Artificial Sequence: Synthetic oligonucleotide
  Antisense strand to SEQ ID NO: 810748
ugucuccaggguauauccg

SEQ ID NO: 810750 - RNA, 19 nt, Artificial Sequence
  Description of Artificial Sequence: Synthetic oligonucleotide
  Sense strand starting at position 2909 of SEQ ID NO: 587684
gggucagccucccugugaa

SEQ ID NO: 810751 - RNA, 19 nt, Artificial Sequence
  Description of Artificial Sequence: Synthetic oligonucleotide
  Antisense strand to SEQ ID NO: 810750
uucacagggaggcugaccc

SEQ ID NO: 810752 - RNA, 19 nt, Artificial Sequence
  Description of Artificial Sequence: Synthetic oligonucleotide
  Sense strand starting at position 2921 of SEQ ID NO: 587684
cugugaauuggccaggaca

SEQ ID NO: 810753 - RNA, 19 nt, Artificial Sequence
  Description of Artificial Sequence: Synthetic oligonucleotide
  Antisense strand to SEQ ID NO: 810752
uguccuggccaauucacag

SEQ ID NO: 810754 - RNA, 19 nt, Artificial Sequence
  Description of Artificial Sequence: Synthetic oligonucleotide
  Sense strand starting at position 2923 of SEQ ID NO: 587684
gugaauuggccaggacaac

SEQ ID NO: 810755 - RNA, 19 nt, Artificial Sequence
  Description of Artificial Sequence: Synthetic oligonucleotide
  Antisense strand to SEQ ID NO: 810754
guuguccuggccaauucac

SEQ ID NO: 810756 - RNA, 19 nt, Artificial Sequence
  Description of Artificial Sequence: Synthetic oligonucleotide
  Sense strand starting at position 3045 of SEQ ID NO: 587684
gcgccuauugaaggugaca

SEQ ID NO: 810757 - RNA, 19 nt, Artificial Sequence
  Description of Artificial Sequence: Synthetic oligonucleotide
  Antisense strand to SEQ ID NO: 810756
ugucaccuucaauaggcgc

SEQ ID NO: 810758 - RNA, 19 nt, Artificial Sequence
  Description of Artificial Sequence: Synthetic oligonucleotide
  Sense strand starting at position 3071 of SEQ ID NO: 587684
cagccaagugugugguaaa

SEQ ID NO: 810759 - RNA, 19 nt, Artificial Sequence
  Description of Artificial Sequence: Synthetic oligonucleotide
  Antisense strand to SEQ ID NO: 810758
uuuaccacacacuuggcug

SEQ ID NO: 810760 - RNA, 19 nt, Artificial Sequence
  Description of Artificial Sequence: Synthetic oligonucleotide
  Sense strand starting at position 3072 of SEQ ID NO: 587684
agccaagugugugguaaag

SEQ ID NO: 810761 - RNA, 19 nt, Artificial Sequence
  Description of Artificial Sequence: Synthetic oligonucleotide
  Antisense strand to SEQ ID NO: 810760
cuuuaccacacacuuggcu

SEQ ID NO: 810762 - RNA, 19 nt, Artificial Sequence
  Description of Artificial Sequence: Synthetic oligonucleotide
  Sense strand starting at position 3074 of SEQ ID NO: 587684
ccaagugugugguaaagau

SEQ ID NO: 810763 - RNA, 19 nt, Artificial Sequence
  Description of Artificial Sequence: Synthetic oligonucleotide
  Antisense strand to SEQ ID NO: 810762
aucuuuaccacacacuugg

SEQ ID NO: 810764 - RNA, 19 nt, Artificial Sequence
  Description of Artificial Sequence: Synthetic oligonucleotide
  Sense strand starting at position 3149 of SEQ ID NO: 587684
aacggugauuccgccaauu

SEQ ID NO: 810765 - RNA, 19 nt, Artificial Sequence
  Description of Artificial Sequence: Synthetic oligonucleotide
  Antisense strand to SEQ ID NO: 810764
aauuggcggaaucaccguu

SEQ ID NO: 810766 - RNA, 19 nt, Artificial Sequence
  Description of Artificial Sequence: Synthetic oligonucleotide
  Sense strand starting at position 3178 of SEQ ID NO: 587684
ugggcaucccgcggugaau

SEQ ID NO: 810767 - RNA, 19 nt, Artificial Sequence
  Description of Artificial Sequence: Synthetic oligonucleotide
  Antisense strand to SEQ ID NO: 810766
auucaccgcgggaugccca

SEQ ID NO: 810768 - RNA, 19 nt, Artificial Sequence
  Description of Artificial Sequence: Synthetic oligonucleotide
  Sense strand starting at position 3216 of SEQ ID NO: 587684
cuuccagccucauuggaga

SEQ ID NO: 810769 - RNA, 19 nt, Artificial Sequence
  Description of Artificial Sequence: Synthetic oligonucleotide
  Antisense strand to SEQ ID NO: 810768
ucuccaaugaggcuggaag

SEQ ID NO: 810770 - RNA, 19 nt, Artificial Sequence
  Description of Artificial Sequence: Synthetic oligonucleotide
  Sense strand starting at position 3231 of SEQ ID NO: 587684
gagagcagugcucaaagca

SEQ ID NO: 810771 - RNA, 19 nt, Artificial Sequence
  Description of Artificial Sequence: Synthetic oligonucleotide
  Antisense strand to SEQ ID NO: 810770
ugcuuugagcacugcucuc

SEQ ID NO: 810772 - RNA, 19 nt, Artificial Sequence
  Description of Artificial Sequence: Synthetic oligonucleotide
  Sense strand starting at position 3283 of SEQ ID NO: 587684
cgugaauaaucacacugau

SEQ ID NO: 810773 - RNA, 19 nt, Artificial Sequence
  Description of Artificial Sequence: Synthetic oligonucleotide
  Antisense strand to SEQ ID NO: 810772
aucagugugauuauucacg

SEQ ID NO: 810774 - RNA, 19 nt, Artificial Sequence
  Description of Artificial Sequence: Synthetic oligonucleotide
  Sense strand starting at position 3480 of SEQ ID NO: 587684
gcuaaaugaggcuauaaua

SEQ ID NO: 810775 - RNA, 19 nt, Artificial Sequence
  Description of Artificial Sequence: Synthetic oligonucleotide
  Antisense strand to SEQ ID NO: 810774
uauuauagccucauuuagc

SEQ ID NO: 810776 - RNA, 19 nt, Artificial Sequence
  Description of Artificial Sequence: Synthetic oligonucleotide
  Sense strand starting at position 3490 of SEQ ID NO: 587684
gcuauaauauugguaccau

SEQ ID NO: 810777 - RNA, 19 nt, Artificial Sequence
  Description of Artificial Sequence: Synthetic oligonucleotide
  Antisense strand to SEQ ID NO: 810776
augguaccaauauuauagc

SEQ ID NO: 810778 - RNA, 19 nt, Artificial Sequence
  Description of Artificial Sequence: Synthetic oligonucleotide
  Sense strand starting at position 3499 of SEQ ID NO: 587684
uugguaccaucgucauuaa

SEQ ID NO: 810779 - RNA, 19 nt, Artificial Sequence
  Description of Artificial Sequence: Synthetic oligonucleotide
  Antisense strand to SEQ ID NO: 810778
uuaaugacgaugguaccaa

SEQ ID NO: 810780 - RNA, 19 nt, Artificial Sequence
  Description of Artificial Sequence: Synthetic oligonucleotide
  Sense strand starting at position 3502 of SEQ ID NO: 587684
guaccaucgucauuaacuu

SEQ ID NO: 810781 - RNA, 19 nt, Artificial Sequence
  Description of Artificial Sequence: Synthetic oligonucleotide
  Antisense strand to SEQ ID NO: 810780
aaguuaaugacgaugguac

SEQ ID NO: 810782 - RNA, 19 nt, Artificial Sequence
  Description of Artificial Sequence: Synthetic oligonucleotide
  Sense strand starting at position 3584 of SEQ ID NO: 587684
cacaauguguaaugagcaa

SEQ ID NO: 810783 - RNA, 19 nt, Artificial Sequence
  Description of Artificial Sequence: Synthetic oligonucleotide
  Antisense strand to SEQ ID NO: 810782
uugcucauuacacauugug

SEQ ID NO: 810784 - RNA, 19 nt, Artificial Sequence
  Description of Artificial Sequence: Synthetic oligonucleotide
  Sense strand starting at position 108 of SEQ ID NO: 587685
cggagaucaucuggaagug

SEQ ID NO: 810785 - RNA, 19 nt, Artificial Sequence
  Description of Artificial Sequence: Synthetic oligonucleotide
  Antisense strand to SEQ ID NO: 810784
cacuuccagaugaucuccg

SEQ ID NO: 810786 - RNA, 19 nt, Artificial Sequence
  Description of Artificial Sequence: Synthetic oligonucleotide
  Sense strand starting at position 189 of SEQ ID NO: 587685
cgcacuuaccauuggagaa

SEQ ID NO: 810787 - RNA, 19 nt, Artificial Sequence
  Description of Artificial Sequence: Synthetic oligonucleotide
  Antisense strand to SEQ ID NO: 810786
uucuccaaugguaagugcg

SEQ ID NO: 810788 - RNA, 19 nt, Artificial Sequence
  Description of Artificial Sequence: Synthetic oligonucleotide
  Sense strand starting at position 190 of SEQ ID NO: 587685
gcacuuaccauuggagaag

SEQ ID NO: 810789 - RNA, 19 nt, Artificial Sequence
  Description of Artificial Sequence: Synthetic oligonucleotide
  Antisense strand to SEQ ID NO: 810788
cuucuccaaugguaagugc

SEQ ID NO: 810790 - RNA, 19 nt, Artificial Sequence
  Description of Artificial Sequence: Synthetic oligonucleotide
  Sense strand starting at position 358 of SEQ ID NO: 587685
ggccguugugcugaaugaa

SEQ ID NO: 810791 - RNA, 19 nt, Artificial Sequence
  Description of Artificial Sequence: Synthetic oligonucleotide
  Antisense strand to SEQ ID NO: 810790
uucauucagcacaacggcc

SEQ ID NO: 810792 - RNA, 19 nt, Artificial Sequence
  Description of Artificial Sequence: Synthetic oligonucleotide
  Sense strand starting at position 361 of SEQ ID NO: 587685
cguugugcugaaugaagau

SEQ ID NO: 810793 - RNA, 19 nt, Artificial Sequence
  Description of Artificial Sequence: Synthetic oligonucleotide
  Antisense strand to SEQ ID NO: 810792
aucuucauucagcacaacg

SEQ ID NO: 810794 - RNA, 19 nt, Artificial Sequence
  Description of Artificial Sequence: Synthetic oligonucleotide
  Sense strand starting at position 388 of SEQ ID NO: 587685
uggucagguucccguggau

SEQ ID NO: 810795 - RNA, 19 nt, Artificial Sequence
  Description of Artificial Sequence: Synthetic oligonucleotide
  Antisense strand to SEQ ID NO: 810794
auccacgggaaccugacca

SEQ ID NO: 810796 - RNA, 19 nt, Artificial Sequence
  Description of Artificial Sequence: Synthetic oligonucleotide
  Sense strand starting at position 391 of SEQ ID NO: 587685
ucagguucccguggaugau

SEQ ID NO: 810797 - RNA, 19 nt, Artificial Sequence
  Description of Artificial Sequence: Synthetic oligonucleotide
  Antisense strand to SEQ ID NO: 810796
aucauccacgggaaccuga

SEQ ID NO: 810798 - RNA, 19 nt, Artificial Sequence
  Description of Artificial Sequence: Synthetic oligonucleotide
  Sense strand starting at position 392 of SEQ ID NO: 587685
cagguucccguggaugauu

SEQ ID NO: 810799 - RNA, 19 nt, Artificial Sequence
  Description of Artificial Sequence: Synthetic oligonucleotide
  Antisense strand to SEQ ID NO: 810798
aaucauccacgggaaccug

SEQ ID NO: 810800 - RNA, 19 nt, Artificial Sequence
  Description of Artificial Sequence: Synthetic oligonucleotide
  Sense strand starting at position 800 of SEQ ID NO: 587685
ugaggaauugcuugaggcu

SEQ ID NO: 810801 - RNA, 19 nt, Artificial Sequence
  Description of Artificial Sequence: Synthetic oligonucleotide
  Antisense strand to SEQ ID NO: 810800
agccucaagcaauuccuca

SEQ ID NO: 810802 - RNA, 19 nt, Artificial Sequence
  Description of Artificial Sequence: Synthetic oligonucleotide
  Sense strand starting at position 823 of SEQ ID NO: 587685
gaugacacguacucuguga

SEQ ID NO: 810803 - RNA, 19 nt, Artificial Sequence
  Description of Artificial Sequence: Synthetic oligonucleotide
  Antisense strand to SEQ ID NO: 810802
ucacagaguacgugucauc

SEQ ID NO: 810804 - RNA, 19 nt, Artificial Sequence
  Description of Artificial Sequence: Synthetic oligonucleotide
  Sense strand starting at position 827 of SEQ ID NO: 587685
acacguacucugugaugaa

SEQ ID NO: 810805 - RNA, 19 nt, Artificial Sequence
  Description of Artificial Sequence: Synthetic oligonucleotide
  Antisense strand to SEQ ID NO: 810804
uucaucacagaguacgugu

SEQ ID NO: 810806 - RNA, 19 nt, Artificial Sequence
  Description of Artificial Sequence: Synthetic oligonucleotide
  Sense strand starting at position 828 of SEQ ID NO: 587685
cacguacucugugaugaag

SEQ ID NO: 810807 - RNA, 19 nt, Artificial Sequence
  Description of Artificial Sequence: Synthetic oligonucleotide
  Antisense strand to SEQ ID NO: 810806
cuucaucacagaguacgug

SEQ ID NO: 810808 - RNA, 19 nt, Artificial Sequence
  Description of Artificial Sequence: Synthetic oligonucleotide
  Sense strand starting at position 830 of SEQ ID NO: 587685
cguacucugugaugaagau

SEQ ID NO: 810809 - RNA, 19 nt, Artificial Sequence
  Description of Artificial Sequence: Synthetic oligonucleotide
  Antisense strand to SEQ ID NO: 810808
aucuucaucacagaguacg

SEQ ID NO: 810810 - RNA, 19 nt, Artificial Sequence
  Description of Artificial Sequence: Synthetic oligonucleotide
  Sense strand starting at position 831 of SEQ ID NO: 587685
guacucugugaugaagaug

SEQ ID NO: 810811 - RNA, 19 nt, Artificial Sequence
  Description of Artificial Sequence: Synthetic oligonucleotide
  Antisense strand to SEQ ID NO: 810810
caucuucaucacagaguac

SEQ ID NO: 810812 - RNA, 19 nt, Artificial Sequence
  Description of Artificial Sequence: Synthetic oligonucleotide
  Sense strand starting at position 981 of SEQ ID NO: 587685
gccaguacuugugcaacuu

SEQ ID NO: 810813 - RNA, 19 nt, Artificial Sequence
  Description of Artificial Sequence: Synthetic oligonucleotide
  Antisense strand to SEQ ID NO: 810812
aaguugcacaaguacuggc

SEQ ID NO: 810814 - RNA, 19 nt, Artificial Sequence
  Description of Artificial Sequence: Synthetic oligonucleotide
  Sense strand starting at position 1260 of SEQ ID NO: 587685
gggugaauaaaggguuaug

SEQ ID NO: 810815 - RNA, 19 nt, Artificial Sequence
  Description of Artificial Sequence: Synthetic oligonucleotide
  Antisense strand to SEQ ID NO: 810814
cauaacccuuuauucaccc

SEQ ID NO: 810816 - RNA, 19 nt, Artificial Sequence
  Description of Artificial Sequence: Synthetic oligonucleotide
  Sense strand starting at position 1263 of SEQ ID NO: 587685
ugaauaaaggguuaugugu

SEQ ID NO: 810817 - RNA, 19 nt, Artificial Sequence
  Description of Artificial Sequence: Synthetic oligonucleotide
  Antisense strand to SEQ ID NO: 810816
acacauaacccuuuauuca

SEQ ID NO: 810818 - RNA, 19 nt, Artificial Sequence
  Description of Artificial Sequence: Synthetic oligonucleotide
  Sense strand starting at position 1296 of SEQ ID NO: 587685
caggguugugggugaggau

SEQ ID NO: 810819 - RNA, 19 nt, Artificial Sequence
  Description of Artificial Sequence: Synthetic oligonucleotide
  Antisense strand to SEQ ID NO: 810818
auccucacccacaacccug

SEQ ID NO: 810820 - RNA, 19 nt, Artificial Sequence
  Description of Artificial Sequence: Synthetic oligonucleotide
  Sense strand starting at position 1297 of SEQ ID NO: 587685
aggguugugggugaggauu

SEQ ID NO: 810821 - RNA, 19 nt, Artificial Sequence
  Description of Artificial Sequence: Synthetic oligonucleotide
  Antisense strand to SEQ ID NO: 810820
aauccucacccacaacccu

SEQ ID NO: 810822 - RNA, 19 nt, Artificial Sequence
  Description of Artificial Sequence: Synthetic oligonucleotide
  Sense strand starting at position 2698 of SEQ ID NO: 587685
ggcugacuuugaucgguga

SEQ ID NO: 810823 - RNA, 19 nt, Artificial Sequence
  Description of Artificial Sequence: Synthetic oligonucleotide
  Antisense strand to SEQ ID NO: 810822
ucaccgaucaaagucagcc

SEQ ID NO: 810824 - RNA, 19 nt, Artificial Sequence
  Description of Artificial Sequence: Synthetic oligonucleotide
  Sense strand starting at position 2701 of SEQ ID NO: 587685
ugacuuugaucggugacca

SEQ ID NO: 810825 - RNA, 19 nt, Artificial Sequence
  Description of Artificial Sequence: Synthetic oligonucleotide
  Antisense strand to SEQ ID NO: 810824
uggucaccgaucaaaguca

SEQ ID NO: 810826 - RNA, 19 nt, Artificial Sequence
  Description of Artificial Sequence: Synthetic oligonucleotide
  Sense strand starting at position 2702 of SEQ ID NO: 587685
gacuuugaucggugaccac

SEQ ID NO: 810827 - RNA, 19 nt, Artificial Sequence
  Description of Artificial Sequence: Synthetic oligonucleotide
  Antisense strand to SEQ ID NO: 810826
guggucaccgaucaaaguc

SEQ ID NO: 810828 - RNA, 19 nt, Artificial Sequence
  Description of Artificial Sequence: Synthetic oligonucleotide
  Sense strand starting at position 3208 of SEQ ID NO: 587685
gugugugguuuccaccaau

SEQ ID NO: 810829 - RNA, 19 nt, Artificial Sequence
  Description of Artificial Sequence: Synthetic oligonucleotide
  Antisense strand to SEQ ID NO: 810828
auugguggaaaccacacac

SEQ ID NO: 810830 - RNA, 19 nt, Artificial Sequence
  Description of Artificial Sequence: Synthetic oligonucleotide
  Sense strand starting at position 3338 of SEQ ID NO: 587685
uguucugccugauuugaau

SEQ ID NO: 810831 - RNA, 19 nt, Artificial Sequence
  Description of Artificial Sequence: Synthetic oligonucleotide
  Antisense strand to SEQ ID NO: 810830
auucaaaucaggcagaaca

SEQ ID NO: 810832 - RNA, 19 nt, Artificial Sequence
  Description of Artificial Sequence: Synthetic oligonucleotide
  Sense strand starting at position 3344 of SEQ ID NO: 587685
gccugauuugaaugucugu

SEQ ID NO: 810833 - RNA, 19 nt, Artificial Sequence
  Description of Artificial Sequence: Synthetic oligonucleotide
  Antisense strand to SEQ ID NO: 810832
acagacauucaaaucaggc

SEQ ID NO: 810834 - RNA, 19 nt, Artificial Sequence
  Description of Artificial Sequence: Synthetic oligonucleotide
  Sense strand starting at position 3347 of SEQ ID NO: 587685
ugauuugaaugucuguguu

SEQ ID NO: 810835 - RNA, 19 nt, Artificial Sequence
  Description of Artificial Sequence: Synthetic oligonucleotide
  Antisense strand to SEQ ID NO: 810834
aacacagacauucaaauca

SEQ ID NO: 810836 - RNA, 19 nt, Artificial Sequence
  Description of Artificial Sequence: Synthetic oligonucleotide
  Sense strand starting at position 3349 of SEQ ID NO: 587685
auuugaaugucuguguuua

SEQ ID NO: 810837 - RNA, 19 nt, Artificial Sequence
  Description of Artificial Sequence: Synthetic oligonucleotide
  Antisense strand to SEQ ID NO: 810836
uaaacacagacauucaaau

SEQ ID NO: 810838 - RNA, 19 nt, Artificial Sequence
  Description of Artificial Sequence: Synthetic oligonucleotide
  Sense strand starting at position 3350 of SEQ ID NO: 587685
uuugaaugucuguguuuac

SEQ ID NO: 810839 - RNA, 19 nt, Artificial Sequence
  Description of Artificial Sequence: Synthetic oligonucleotide
  Antisense strand to SEQ ID NO: 810838
guaaacacagacauucaaa

SEQ ID NO: 810840 - RNA, 19 nt, Artificial Sequence
  Description of Artificial Sequence: Synthetic oligonucleotide
  Sense strand starting at position 3360 of SEQ ID NO: 587685
uguguuuaccucggccaca

SEQ ID NO: 810841 - RNA, 19 nt, Artificial Sequence
  Description of Artificial Sequence: Synthetic oligonucleotide
  Antisense strand to SEQ ID NO: 810840
uguggccgagguaaacaca

SEQ ID NO: 810842 - RNA, 19 nt, Artificial Sequence
  Description of Artificial Sequence: Synthetic oligonucleotide
  Sense strand starting at position 3386 of SEQ ID NO: 587685
cuaugcuaagcuuguccaa

SEQ ID NO: 810843 - RNA, 19 nt, Artificial Sequence
  Description of Artificial Sequence: Synthetic oligonucleotide
  Antisense strand to SEQ ID NO: 810842
uuggacaagcuuagcauag

SEQ ID NO: 810844 - RNA, 19 nt, Artificial Sequence
  Description of Artificial Sequence: Synthetic oligonucleotide
  Sense strand starting at position 3506 of SEQ ID NO: 587685
uguuguuaguguuaagugu

SEQ ID NO: 810845 - RNA, 19 nt, Artificial Sequence
  Description of Artificial Sequence: Synthetic oligonucleotide
  Antisense strand to SEQ ID NO: 810844
acacuuaacacuaacaaca

SEQ ID NO: 810846 - RNA, 19 nt, Artificial Sequence
  Description of Artificial Sequence: Synthetic oligonucleotide
  Sense strand starting at position 3510 of SEQ ID NO: 587685
guuaguguuaaguguauuu

SEQ ID NO: 810847 - RNA, 19 nt, Artificial Sequence
  Description of Artificial Sequence: Synthetic oligonucleotide
  Antisense strand to SEQ ID NO: 810846
aaauacacuuaacacuaac

SEQ ID NO: 810848 - RNA, 19 nt, Artificial Sequence
  Description of Artificial Sequence: Synthetic oligonucleotide
  Sense strand starting at position 3536 of SEQ ID NO: 587685
ggguauugcccaggacaau

SEQ ID NO: 810849 - RNA, 19 nt, Artificial Sequence
  Description of Artificial Sequence: Synthetic oligonucleotide
  Antisense strand to SEQ ID NO: 810848
auuguccugggcaauaccc

SEQ ID NO: 810850 - RNA, 19 nt, Artificial Sequence
  Description of Artificial Sequence: Synthetic oligonucleotide
  Sense strand starting at position 3537 of SEQ ID NO: 587685
gguauugcccaggacaauu

SEQ ID NO: 810851 - RNA, 19 nt, Artificial Sequence
  Description of Artificial Sequence: Synthetic oligonucleotide
  Antisense strand to SEQ ID NO: 810850
aauuguccugggcaauacc

SEQ ID NO: 810852 - RNA, 19 nt, Artificial Sequence
  Description of Artificial Sequence: Synthetic oligonucleotide
  Sense strand starting at position 3558 of SEQ ID NO: 587685
uccaaugugugccaggaaa

SEQ ID NO: 810853 - RNA, 19 nt, Artificial Sequence
  Description of Artificial Sequence: Synthetic oligonucleotide
  Antisense strand to SEQ ID NO: 810852
uuuccuggcacacauugga

SEQ ID NO: 810854 - RNA, 19 nt, Artificial Sequence
  Description of Artificial Sequence: Synthetic oligonucleotide
  Sense strand starting at position 3595 of SEQ ID NO: 587685
ccuggucugugcuaacaau

SEQ ID NO: 810855 - RNA, 19 nt, Artificial Sequence
  Description of Artificial Sequence: Synthetic oligonucleotide
  Antisense strand to SEQ ID NO: 810854
auuguuagcacagaccagg

SEQ ID NO: 810856 - RNA, 19 nt, Artificial Sequence
  Description of Artificial Sequence: Synthetic oligonucleotide
  Sense strand starting at position 3766 of SEQ ID NO: 587685
cugacaugcugugcucauu

SEQ ID NO: 810857 - RNA, 19 nt, Artificial Sequence
  Description of Artificial Sequence: Synthetic oligonucleotide
  Antisense strand to SEQ ID NO: 810856
aaugagcacagcaugucag

SEQ ID NO: 810858 - RNA, 19 nt, Artificial Sequence
  Description of Artificial Sequence: Synthetic oligonucleotide
  Sense strand starting at position 3772 of SEQ ID NO: 587685
ugcugugcucauugucaca

SEQ ID NO: 810859 - RNA, 19 nt, Artificial Sequence
  Description of Artificial Sequence: Synthetic oligonucleotide
  Antisense strand to SEQ ID NO: 810858
ugugacaaugagcacagca

SEQ ID NO: 810860 - RNA, 19 nt, Artificial Sequence
  Description of Artificial Sequence: Synthetic oligonucleotide
  Sense strand starting at position 3869 of SEQ ID NO: 587685
uggguucuguucugugagu

SEQ ID NO: 810861 - RNA, 19 nt, Artificial Sequence
  Description of Artificial Sequence: Synthetic oligonucleotide
  Antisense strand to SEQ ID NO: 810860
acucacagaacagaaccca

SEQ ID NO: 810862 - RNA, 19 nt, Artificial Sequence
  Description of Artificial Sequence: Synthetic oligonucleotide
  Sense strand starting at position 3908 of SEQ ID NO: 587685
acgcauccauugcuguaau

SEQ ID NO: 810863 - RNA, 19 nt, Artificial Sequence
  Description of Artificial Sequence: Synthetic oligonucleotide
  Antisense strand to SEQ ID NO: 810862
auuacagcaauggaugcgu

SEQ ID NO: 810864 - RNA, 19 nt, Artificial Sequence
  Description of Artificial Sequence: Synthetic oligonucleotide
  Sense strand starting at position 127 of SEQ ID NO: 587686
cucacugagucucuuacua

SEQ ID NO: 810865 - RNA, 19 nt, Artificial Sequence
  Description of Artificial Sequence: Synthetic oligonucleotide
  Antisense strand to SEQ ID NO: 810864
uaguaagagacucagugag

SEQ ID NO: 810866 - RNA, 19 nt, Artificial Sequence
  Description of Artificial Sequence: Synthetic oligonucleotide
  Sense strand starting at position 145 of SEQ ID NO: 587686
aguuauaugacuugaggca

SEQ ID NO: 810867 - RNA, 19 nt, Artificial Sequence
  Description of Artificial Sequence: Synthetic oligonucleotide
  Antisense strand to SEQ ID NO: 810866
ugccucaagucauauaacu

SEQ ID NO: 810868 - RNA, 19 nt, Artificial Sequence
  Description of Artificial Sequence: Synthetic oligonucleotide
  Sense strand starting at position 146 of SEQ ID NO: 587686
guuauaugacuugaggcaa

SEQ ID NO: 810869 - RNA, 19 nt, Artificial Sequence
  Description of Artificial Sequence: Synthetic oligonucleotide
  Antisense strand to SEQ ID NO: 810868
uugccucaagucauauaac

SEQ ID NO: 810870 - RNA, 19 nt, Artificial Sequence
  Description of Artificial Sequence: Synthetic oligonucleotide
  Sense strand starting at position 291 of SEQ ID NO: 587686
gucucuuuacaguauuaua

SEQ ID NO: 810871 - RNA, 19 nt, Artificial Sequence
  Description of Artificial Sequence: Synthetic oligonucleotide
  Antisense strand to SEQ ID NO: 810870
uauaauacuguaaagagac

SEQ ID NO: 810872 - RNA, 19 nt, Artificial Sequence
  Description of Artificial Sequence: Synthetic oligonucleotide
  Sense strand starting at position 334 of SEQ ID NO: 587686
gcugcagaaagugauacaa

SEQ ID NO: 810873 - RNA, 19 nt, Artificial Sequence
  Description of Artificial Sequence: Synthetic oligonucleotide
  Antisense strand to SEQ ID NO: 810872
uuguaucacuuucugcagc

SEQ ID NO: 810874 - RNA, 19 nt, Artificial Sequence
  Description of Artificial Sequence: Synthetic oligonucleotide
  Sense strand starting at position 588 of SEQ ID NO: 587686
auaggagauuguucuguug

SEQ ID NO: 810875 - RNA, 19 nt, Artificial Sequence
  Description of Artificial Sequence: Synthetic oligonucleotide
  Antisense strand to SEQ ID NO: 810874
caacagaacaaucuccuau

SEQ ID NO: 810876 - RNA, 19 nt, Artificial Sequence
  Description of Artificial Sequence: Synthetic oligonucleotide
  Sense strand starting at position 597 of SEQ ID NO: 587686
uguucuguugcuucuguua

SEQ ID NO: 810877 - RNA, 19 nt, Artificial Sequence
  Description of Artificial Sequence: Synthetic oligonucleotide
  Antisense strand to SEQ ID NO: 810876
uaacagaagcaacagaaca

SEQ ID NO: 810878 - RNA, 19 nt, Artificial Sequence
  Description of Artificial Sequence: Synthetic oligonucleotide
  Sense strand starting at position 632 of SEQ ID NO: 587686
acuggaacccugugagaug

SEQ ID NO: 810879 - RNA, 19 nt, Artificial Sequence
  Description of Artificial Sequence: Synthetic oligonucleotide
  Antisense strand to SEQ ID NO: 810878
caucucacaggguuccagu

SEQ ID NO: 810880 - RNA, 19 nt, Artificial Sequence
  Description of Artificial Sequence: Synthetic oligonucleotide
  Sense strand starting at position 664 of SEQ ID NO: 587686
uaucaucuuugaguuugga

SEQ ID NO: 810881 - RNA, 19 nt, Artificial Sequence
  Description of Artificial Sequence: Synthetic oligonucleotide
  Antisense strand to SEQ ID NO: 810880
uccaaacucaaagaugaua

SEQ ID NO: 810882 - RNA, 19 nt, Artificial Sequence
  Description of Artificial Sequence: Synthetic oligonucleotide
  Sense strand starting at position 802 of SEQ ID NO: 587686
ggaaguaaauaagaaugaa

SEQ ID NO: 810883 - RNA, 19 nt, Artificial Sequence
  Description of Artificial Sequence: Synthetic oligonucleotide
  Antisense strand to SEQ ID NO: 810882
uucauucuuauuuacuucc

SEQ ID NO: 810884 - RNA, 19 nt, Artificial Sequence
  Description of Artificial Sequence: Synthetic oligonucleotide
  Sense strand starting at position 867 of SEQ ID NO: 587686
ugcauccaccaagauguua

SEQ ID NO: 810885 - RNA, 19 nt, Artificial Sequence
  Description of Artificial Sequence: Synthetic oligonucleotide
  Antisense strand to SEQ ID NO: 810884
uaacaucuugguggaugca

SEQ ID NO: 810886 - RNA, 19 nt, Artificial Sequence
  Description of Artificial Sequence: Synthetic oligonucleotide
  Sense strand starting at position 1123 of SEQ ID NO: 587686
ugagcuuuacaaugaaguu

SEQ ID NO: 810887 - RNA, 19 nt, Artificial Sequence
  Description of Artificial Sequence: Synthetic oligonucleotide
  Antisense strand to SEQ ID NO: 810886
aacuucauuguaaagcuca

SEQ ID NO: 810888 - RNA, 19 nt, Artificial Sequence
  Description of Artificial Sequence: Synthetic oligonucleotide
  Sense strand starting at position 1159 of SEQ ID NO: 587686
aggcacugguacucuaaau

SEQ ID NO: 810889 - RNA, 19 nt, Artificial Sequence
  Description of Artificial Sequence: Synthetic oligonucleotide
  Antisense strand to SEQ ID NO: 810888
auuuagaguaccagugccu

SEQ ID NO: 810890 - RNA, 19 nt, Artificial Sequence
  Description of Artificial Sequence: Synthetic oligonucleotide
  Sense strand starting at position 1180 of SEQ ID NO: 587686
ucauaugcauuugucuuau

SEQ ID NO: 810891 - RNA, 19 nt, Artificial Sequence
  Description of Artificial Sequence: Synthetic oligonucleotide
  Antisense strand to SEQ ID NO: 810890
auaagacaaaugcauauga

SEQ ID NO: 810892 - RNA, 19 nt, Artificial Sequence
  Description of Artificial Sequence: Synthetic oligonucleotide
  Sense strand starting at position 1650 of SEQ ID NO: 587686
agaauucuugccuauguga

SEQ ID NO: 810893 - RNA, 19 nt, Artificial Sequence
  Description of Artificial Sequence: Synthetic oligonucleotide
  Antisense strand to SEQ ID NO: 810892
ucacauaggcaagaauucu

SEQ ID NO: 810894 - RNA, 19 nt, Artificial Sequence
  Description of Artificial Sequence: Synthetic oligonucleotide
  Sense strand starting at position 1717 of SEQ ID NO: 587686
ucuauuauguuucugauag

SEQ ID NO: 810895 - RNA, 19 nt, Artificial Sequence
  Description of Artificial Sequence: Synthetic oligonucleotide
  Antisense strand to SEQ ID NO: 810894
cuaucagaaacauaauaga

SEQ ID NO: 810896 - RNA, 19 nt, Artificial Sequence
  Description of Artificial Sequence: Synthetic oligonucleotide
  Sense strand starting at position 1751 of SEQ ID NO: 587686
gggucuaaauaacauuuau

SEQ ID NO: 810897 - RNA, 19 nt, Artificial Sequence
  Description of Artificial Sequence: Synthetic oligonucleotide
  Antisense strand to SEQ ID NO: 810896
auaaauguuauuuagaccc

SEQ ID NO: 810898 - RNA, 19 nt, Artificial Sequence
  Description of Artificial Sequence: Synthetic oligonucleotide
  Sense strand starting at position 2070 of SEQ ID NO: 587686
uggaguuagccugaucaag

SEQ ID NO: 810899 - RNA, 19 nt, Artificial Sequence
  Description of Artificial Sequence: Synthetic oligonucleotide
  Antisense strand to SEQ ID NO: 810898
cuugaucaggcuaacucca

SEQ ID NO: 810900 - RNA, 19 nt, Artificial Sequence
  Description of Artificial Sequence: Synthetic oligonucleotide
  Sense strand starting at position 2254 of SEQ ID NO: 587686
agcuuuauauucucugaug

SEQ ID NO: 810901 - RNA, 19 nt, Artificial Sequence
  Description of Artificial Sequence: Synthetic oligonucleotide
  Antisense strand to SEQ ID NO: 810900
caucagagaauauaaagcu

SEQ ID NO: 810902 - RNA, 19 nt, Artificial Sequence
  Description of Artificial Sequence: Synthetic oligonucleotide
  Sense strand starting at position 2265 of SEQ ID NO: 587686
cucugaugccauuaagaau

SEQ ID NO: 810903 - RNA, 19 nt, Artificial Sequence
  Description of Artificial Sequence: Synthetic oligonucleotide
  Antisense strand to SEQ ID NO: 810902
auucuuaauggcaucagag

SEQ ID NO: 810904 - RNA, 19 nt, Artificial Sequence
  Description of Artificial Sequence: Synthetic oligonucleotide
  Sense strand starting at position 2660 of SEQ ID NO: 587686
auguaaccgggccauuauu

SEQ ID NO: 810905 - RNA, 19 nt, Artificial Sequence
  Description of Artificial Sequence: Synthetic oligonucleotide
  Antisense strand to SEQ ID NO: 810904
aauaauggcccgguuacau

SEQ ID NO: 810906 - RNA, 19 nt, Artificial Sequence
  Description of Artificial Sequence: Synthetic oligonucleotide
  Sense strand starting at position 2697 of SEQ ID NO: 587686
cccaaaucacaguguauca

SEQ ID NO: 810907 - RNA, 19 nt, Artificial Sequence
  Description of Artificial Sequence: Synthetic oligonucleotide
  Antisense strand to SEQ ID NO: 810906
ugauacacugugauuuggg

SEQ ID NO: 810908 - RNA, 19 nt, Artificial Sequence
  Description of Artificial Sequence: Synthetic oligonucleotide
  Sense strand starting at position 2712 of SEQ ID NO: 587686
aucacaguacugugaauag

SEQ ID NO: 810909 - RNA, 19 nt, Artificial Sequence
  Description of Artificial Sequence: Synthetic oligonucleotide
  Antisense strand to SEQ ID NO: 810908
cuauucacaguacugugau

SEQ ID NO: 810910 - RNA, 19 nt, Artificial Sequence
  Description of Artificial Sequence: Synthetic oligonucleotide
  Sense strand starting at position 2779 of SEQ ID NO: 587686
gagauaaguaaguggcuga

SEQ ID NO: 810911 - RNA, 19 nt, Artificial Sequence
  Description of Artificial Sequence: Synthetic oligonucleotide
  Antisense strand to SEQ ID NO: 810910
ucagccacuuacuuaucuc

SEQ ID NO: 810912 - RNA, 19 nt, Artificial Sequence
  Description of Artificial Sequence: Synthetic oligonucleotide
  Sense strand starting at position 2784 of SEQ ID NO: 587686
aaguaaguggcugacuuua

SEQ ID NO: 810913 - RNA, 19 nt, Artificial Sequence
  Description of Artificial Sequence: Synthetic oligonucleotide
  Antisense strand to SEQ ID NO: 810912
uaaagucagccacuuacuu

SEQ ID NO: 810914 - RNA, 19 nt, Artificial Sequence
  Description of Artificial Sequence: Synthetic oligonucleotide
  Sense strand starting at position 2795 of SEQ ID NO: 587686
ugacuuuauccaugguuac

SEQ ID NO: 810915 - RNA, 19 nt, Artificial Sequence
  Description of Artificial Sequence: Synthetic oligonucleotide
  Antisense strand to SEQ ID NO: 810914
guaaccauggauaaaguca

SEQ ID NO: 810916 - RNA, 19 nt, Artificial Sequence
  Description of Artificial Sequence: Synthetic oligonucleotide
  Sense strand starting at position 2922 of SEQ ID NO: 587686
acagaaauucucugaugcu

SEQ ID NO: 810917 - RNA, 19 nt, Artificial Sequence
  Description of Artificial Sequence: Synthetic oligonucleotide
  Antisense strand to SEQ ID NO: 810916
agcaucagagaauuucugu

SEQ ID NO: 810918 - RNA, 19 nt, Artificial Sequence
  Description of Artificial Sequence: Synthetic oligonucleotide
  Sense strand starting at position 3023 of SEQ ID NO: 587686
uucucucuuugauuggauu

SEQ ID NO: 810919 - RNA, 19 nt, Artificial Sequence
  Description of Artificial Sequence: Synthetic oligonucleotide
  Antisense strand to SEQ ID NO: 810918
aauccaaucaaagagagaa

SEQ ID NO: 810920 - RNA, 19 nt, Artificial Sequence
  Description of Artificial Sequence: Synthetic oligonucleotide
  Sense strand starting at position 3064 of SEQ ID NO: 587686
cagagacugugaguacuua

SEQ ID NO: 810921 - RNA, 19 nt, Artificial Sequence
  Description of Artificial Sequence: Synthetic oligonucleotide
  Antisense strand to SEQ ID NO: 810920
uaaguacucacagucucug

SEQ ID NO: 810922 - RNA, 19 nt, Artificial Sequence
  Description of Artificial Sequence: Synthetic oligonucleotide
  Sense strand starting at position 3086 of SEQ ID NO: 587686
uaugcauuagcuuggagaa

SEQ ID NO: 810923 - RNA, 19 nt, Artificial Sequence
  Description of Artificial Sequence: Synthetic oligonucleotide
  Antisense strand to SEQ ID NO: 810922
uucuccaagcuaaugcaua

SEQ ID NO: 810924 - RNA, 19 nt, Artificial Sequence
  Description of Artificial Sequence: Synthetic oligonucleotide
  Sense strand starting at position 3087 of SEQ ID NO: 587686
augcauuagcuuggagaau

SEQ ID NO: 810925 - RNA, 19 nt, Artificial Sequence
  Description of Artificial Sequence: Synthetic oligonucleotide
  Antisense strand to SEQ ID NO: 810924
auucuccaagcuaaugcau

SEQ ID NO: 810926 - RNA, 19 nt, Artificial Sequence
  Description of Artificial Sequence: Synthetic oligonucleotide
  Sense strand starting at position 3182 of SEQ ID NO: 587686
auguuacaauauccgagau

SEQ ID NO: 810927 - RNA, 19 nt, Artificial Sequence
  Description of Artificial Sequence: Synthetic oligonucleotide
  Antisense strand to SEQ ID NO: 810926
aucucggauauuguaacau

SEQ ID NO: 810928 - RNA, 19 nt, Artificial Sequence
  Description of Artificial Sequence: Synthetic oligonucleotide
  Sense strand starting at position 3212 of SEQ ID NO: 587686
uaauaugguggugggaaau

SEQ ID NO: 810929 - RNA, 19 nt, Artificial Sequence
  Description of Artificial Sequence: Synthetic oligonucleotide
  Antisense strand to SEQ ID NO: 810928
auuucccaccaccauauua

SEQ ID NO: 810930 - RNA, 19 nt, Artificial Sequence
  Description of Artificial Sequence: Synthetic oligonucleotide
  Sense strand starting at position 3265 of SEQ ID NO: 587686
agcugauaacuguggaaac

SEQ ID NO: 810931 - RNA, 19 nt, Artificial Sequence
  Description of Artificial Sequence: Synthetic oligonucleotide
  Antisense strand to SEQ ID NO: 810930
guuuccacaguuaucagcu

SEQ ID NO: 810932 - RNA, 19 nt, Artificial Sequence
  Description of Artificial Sequence: Synthetic oligonucleotide
  Sense strand starting at position 3537 of SEQ ID NO: 587686
ccaggcaaaugagucuaua

SEQ ID NO: 810933 - RNA, 19 nt, Artificial Sequence
  Description of Artificial Sequence: Synthetic oligonucleotide
  Antisense strand to SEQ ID NO: 810932
uauagacucauuugccugg

SEQ ID NO: 810934 - RNA, 19 nt, Artificial Sequence
  Description of Artificial Sequence: Synthetic oligonucleotide
  Sense strand starting at position 3540 of SEQ ID NO: 587686
ggcaaaugagucuauaccu

SEQ ID NO: 810935 - RNA, 19 nt, Artificial Sequence
  Description of Artificial Sequence: Synthetic oligonucleotide
  Antisense strand to SEQ ID NO: 810934
agguauagacucauuugcc

SEQ ID NO: 810936 - RNA, 19 nt, Artificial Sequence
  Description of Artificial Sequence: Synthetic oligonucleotide
  Sense strand starting at position 3650 of SEQ ID NO: 587686
gaccuuuccuacucaggga

SEQ ID NO: 810937 - RNA, 19 nt, Artificial Sequence
  Description of Artificial Sequence: Synthetic oligonucleotide
  Antisense strand to SEQ ID NO: 810936
ucccugaguaggaaagguc

SEQ ID NO: 810938 - RNA, 19 nt, Artificial Sequence
  Description of Artificial Sequence: Synthetic oligonucleotide
  Sense strand starting at position 3774 of SEQ ID NO: 587686
ugcugugauuucuuagcag

SEQ ID NO: 810939 - RNA, 19 nt, Artificial Sequence
  Description of Artificial Sequence: Synthetic oligonucleotide
  Antisense strand to SEQ ID NO: 810938
cugcuaagaaaucacagca

SEQ ID NO: 810940 - RNA, 19 nt, Artificial Sequence
  Description of Artificial Sequence: Synthetic oligonucleotide
  Sense strand starting at position 3777 of SEQ ID NO: 587686
ugugauuucuuagcaguac

SEQ ID NO: 810941 - RNA, 19 nt, Artificial Sequence
  Description of Artificial Sequence: Synthetic oligonucleotide
  Antisense strand to SEQ ID NO: 810940
guacugcuaagaaaucaca

SEQ ID NO: 810942 - RNA, 19 nt, Artificial Sequence
  Description of Artificial Sequence: Synthetic oligonucleotide
  Sense strand starting at position 3921 of SEQ ID NO: 587686
agcccuugauaccugaaua

SEQ ID NO: 810943 - RNA, 19 nt, Artificial Sequence
  Description of Artificial Sequence: Synthetic oligonucleotide
  Antisense strand to SEQ ID NO: 810942
uauucagguaucaagggcu

SEQ ID NO: 810944 - RNA, 19 nt, Artificial Sequence
  Description of Artificial Sequence: Synthetic oligonucleotide
  Sense strand starting at position 453 of SEQ ID NO: 587687
guuuauuaugugcaagaca

SEQ ID NO: 810945 - RNA, 19 nt, Artificial Sequence
  Description of Artificial Sequence: Synthetic oligonucleotide
  Antisense strand to SEQ ID NO: 810944
ugucuugcacauaauaaac

SEQ ID NO: 810946 - RNA, 19 nt, Artificial Sequence
  Description of Artificial Sequence: Synthetic oligonucleotide
  Sense strand starting at position 627 of SEQ ID NO: 587687
ugggacuucucucuaucua

SEQ ID NO: 810947 - RNA, 19 nt, Artificial Sequence
  Description of Artificial Sequence: Synthetic oligonucleotide
  Antisense strand to SEQ ID NO: 810946
uagauagagagaaguccca

SEQ ID NO: 810948 - RNA, 19 nt, Artificial Sequence
  Description of Artificial Sequence: Synthetic oligonucleotide
  Sense strand starting at position 628 of SEQ ID NO: 587687
gggacuucucucuaucuac

SEQ ID NO: 810949 - RNA, 19 nt, Artificial Sequence
  Description of Artificial Sequence: Synthetic oligonucleotide
  Antisense strand to SEQ ID NO: 810948
guagauagagagaaguccc

SEQ ID NO: 810950 - RNA, 19 nt, Artificial Sequence
  Description of Artificial Sequence: Synthetic oligonucleotide
  Sense strand starting at position 842 of SEQ ID NO: 587687
aauaguuguuucuuaggaa

SEQ ID NO: 810951 - RNA, 19 nt, Artificial Sequence
  Description of Artificial Sequence: Synthetic oligonucleotide
  Antisense strand to SEQ ID NO: 810950
uuccuaagaaacaacuauu

SEQ ID NO: 810952 - RNA, 19 nt, Artificial Sequence
  Description of Artificial Sequence: Synthetic oligonucleotide
  Sense strand starting at position 856 of SEQ ID NO: 587687
aggaaauuauucuucugca

SEQ ID NO: 810953 - RNA, 19 nt, Artificial Sequence
  Description of Artificial Sequence: Synthetic oligonucleotide
  Antisense strand to SEQ ID NO: 810952
ugcagaagaauaauuuccu

SEQ ID NO: 810954 - RNA, 19 nt, Artificial Sequence
  Description of Artificial Sequence: Synthetic oligonucleotide
  Sense strand starting at position 857 of SEQ ID NO: 587687
ggaaauuauucuucugcaa

SEQ ID NO: 810955 - RNA, 19 nt, Artificial Sequence
  Description of Artificial Sequence: Synthetic oligonucleotide
  Antisense strand to SEQ ID NO: 810954
uugcagaagaauaauuucc

SEQ ID NO: 810956 - RNA, 19 nt, Artificial Sequence
  Description of Artificial Sequence: Synthetic oligonucleotide
  Sense strand starting at position 902 of SEQ ID NO: 587687
gagugacaaucauugagug

SEQ ID NO: 810957 - RNA, 19 nt, Artificial Sequence
  Description of Artificial Sequence: Synthetic oligonucleotide
  Antisense strand to SEQ ID NO: 810956
cacucaaugauugucacuc

SEQ ID NO: 810958 - RNA, 19 nt, Artificial Sequence
  Description of Artificial Sequence: Synthetic oligonucleotide
  Sense strand starting at position 903 of SEQ ID NO: 587687
agugacaaucauugaguga

SEQ ID NO: 810959 - RNA, 19 nt, Artificial Sequence
  Description of Artificial Sequence: Synthetic oligonucleotide
  Antisense strand to SEQ ID NO: 810958
ucacucaaugauugucacu

SEQ ID NO: 810960 - RNA, 19 nt, Artificial Sequence
  Description of Artificial Sequence: Synthetic oligonucleotide
  Sense strand starting at position 906 of SEQ ID NO: 587687
gacaaucauugagugauua

SEQ ID NO: 810961 - RNA, 19 nt, Artificial Sequence
  Description of Artificial Sequence: Synthetic oligonucleotide
  Antisense strand to SEQ ID NO: 810960
uaaucacucaaugauuguc

SEQ ID NO: 810962 - RNA, 19 nt, Artificial Sequence
  Description of Artificial Sequence: Synthetic oligonucleotide
  Sense strand starting at position 907 of SEQ ID NO: 587687
acaaucauugagugauuau

SEQ ID NO: 810963 - RNA, 19 nt, Artificial Sequence
  Description of Artificial Sequence: Synthetic oligonucleotide
  Antisense strand to SEQ ID NO: 810962
auaaucacucaaugauugu

SEQ ID NO: 810964 - RNA, 19 nt, Artificial Sequence
  Description of Artificial Sequence: Synthetic oligonucleotide
  Sense strand starting at position 1043 of SEQ ID NO: 587687
aucauaaaugcaggauuau

SEQ ID NO: 810965 - RNA, 19 nt, Artificial Sequence
  Description of Artificial Sequence: Synthetic oligonucleotide
  Antisense strand to SEQ ID NO: 810964
auaauccugcauuuaugau

SEQ ID NO: 810966 - RNA, 19 nt, Artificial Sequence
  Description of Artificial Sequence: Synthetic oligonucleotide
  Sense strand starting at position 1209 of SEQ ID NO: 587687
gcauguagacuguaauaua

SEQ ID NO: 810967 - RNA, 19 nt, Artificial Sequence
  Description of Artificial Sequence: Synthetic oligonucleotide
  Antisense strand to SEQ ID NO: 810966
uauauuacagucuacaugc

SEQ ID NO: 810968 - RNA, 19 nt, Artificial Sequence
  Description of Artificial Sequence: Synthetic oligonucleotide
  Sense strand starting at position 1546 of SEQ ID NO: 587687
ugacaauuagcaggaauua

SEQ ID NO: 810969 - RNA, 19 nt, Artificial Sequence
  Description of Artificial Sequence: Synthetic oligonucleotide
  Antisense strand to SEQ ID NO: 810968
uaauuccugcuaauuguca

SEQ ID NO: 810970 - RNA, 19 nt, Artificial Sequence
  Description of Artificial Sequence: Synthetic oligonucleotide
  Sense strand starting at position 1556 of SEQ ID NO: 587687
caggaauuagcaugaguau

SEQ ID NO: 810971 - RNA, 19 nt, Artificial Sequence
  Description of Artificial Sequence: Synthetic oligonucleotide
  Antisense strand to SEQ ID NO: 810970
auacucaugcuaauuccug

SEQ ID NO: 810972 - RNA, 19 nt, Artificial Sequence
  Description of Artificial Sequence: Synthetic oligonucleotide
  Sense strand starting at position 1559 of SEQ ID NO: 587687
gaauuagcaugaguauaca

SEQ ID NO: 810973 - RNA, 19 nt, Artificial Sequence
  Description of Artificial Sequence: Synthetic oligonucleotide
  Antisense strand to SEQ ID NO: 810972
uguauacucaugcuaauuc

SEQ ID NO: 810974 - RNA, 19 nt, Artificial Sequence
  Description of Artificial Sequence: Synthetic oligonucleotide
  Sense strand starting at position 1569 of SEQ ID NO: 587687
gaguauacaguguauauau

SEQ ID NO: 810975 - RNA, 19 nt, Artificial Sequence
  Description of Artificial Sequence: Synthetic oligonucleotide
  Antisense strand to SEQ ID NO: 810974
auauauacacuguauacuc

SEQ ID NO: 810976 - RNA, 19 nt, Artificial Sequence
  Description of Artificial Sequence: Synthetic oligonucleotide
  Sense strand starting at position 1611 of SEQ ID NO: 587687
ccuguuucccuugaaugaa

SEQ ID NO: 810977 - RNA, 19 nt, Artificial Sequence
  Description of Artificial Sequence: Synthetic oligonucleotide
  Antisense strand to SEQ ID NO: 810976
uucauucaagggaaacagg

SEQ ID NO: 810978 - RNA, 19 nt, Artificial Sequence
  Description of Artificial Sequence: Synthetic oligonucleotide
  Sense strand starting at position 1614 of SEQ ID NO: 587687
guuucccuugaaugaauua

SEQ ID NO: 810979 - RNA, 19 nt, Artificial Sequence
  Description of Artificial Sequence: Synthetic oligonucleotide
  Antisense strand to SEQ ID NO: 810978
uaauucauucaagggaaac

SEQ ID NO: 810980 - RNA, 19 nt, Artificial Sequence
  Description of Artificial Sequence: Synthetic oligonucleotide
  Sense strand starting at position 1650 of SEQ ID NO: 587687
uuaggacaauucuuuacga

SEQ ID NO: 810981 - RNA, 19 nt, Artificial Sequence
  Description of Artificial Sequence: Synthetic oligonucleotide
  Antisense strand to SEQ ID NO: 810980
ucguaaagaauuguccuaa

SEQ ID NO: 810982 - RNA, 19 nt, Artificial Sequence
  Description of Artificial Sequence: Synthetic oligonucleotide
  Sense strand starting at position 1652 of SEQ ID NO: 587687
aggacaauucuuuacgagu

SEQ ID NO: 810983 - RNA, 19 nt, Artificial Sequence
  Description of Artificial Sequence: Synthetic oligonucleotide
  Antisense strand to SEQ ID NO: 810982
acucguaaagaauuguccu

SEQ ID NO: 810984 - RNA, 19 nt, Artificial Sequence
  Description of Artificial Sequence: Synthetic oligonucleotide
  Sense strand starting at position 1699 of SEQ ID NO: 587687
cuacgccauuugcuuaaua

SEQ ID NO: 810985 - RNA, 19 nt, Artificial Sequence
  Description of Artificial Sequence: Synthetic oligonucleotide
  Antisense strand to SEQ ID NO: 810984
uauuaagcaaauggcguag

SEQ ID NO: 810986 - RNA, 19 nt, Artificial Sequence
  Description of Artificial Sequence: Synthetic oligonucleotide
  Sense strand starting at position 2148 of SEQ ID NO: 587687
uccuuugcugaauagcaaa

SEQ ID NO: 810987 - RNA, 19 nt, Artificial Sequence
  Description of Artificial Sequence: Synthetic oligonucleotide
  Antisense strand to SEQ ID NO: 810986
uuugcuauucagcaaagga

SEQ ID NO: 810988 - RNA, 19 nt, Artificial Sequence
  Description of Artificial Sequence: Synthetic oligonucleotide
  Sense strand starting at position 2246 of SEQ ID NO: 587687
agugacuggaaguaaugua

SEQ ID NO: 810989 - RNA, 19 nt, Artificial Sequence
  Description of Artificial Sequence: Synthetic oligonucleotide
  Antisense strand to SEQ ID NO: 810988
uacauuacuuccagucacu

SEQ ID NO: 810990 - RNA, 19 nt, Artificial Sequence
  Description of Artificial Sequence: Synthetic oligonucleotide
  Sense strand starting at position 2274 of SEQ ID NO: 587687
uugaccucuccuugacuga

SEQ ID NO: 810991 - RNA, 19 nt, Artificial Sequence
  Description of Artificial Sequence: Synthetic oligonucleotide
  Antisense strand to SEQ ID NO: 810990
ucagucaaggagaggucaa

SEQ ID NO: 810992 - RNA, 19 nt, Artificial Sequence
  Description of Artificial Sequence: Synthetic oligonucleotide
  Sense strand starting at position 2288 of SEQ ID NO: 587687
acugaacucugcucaagaa

SEQ ID NO: 810993 - RNA, 19 nt, Artificial Sequence
  Description of Artificial Sequence: Synthetic oligonucleotide
  Antisense strand to SEQ ID NO: 810992
uucuugagcagaguucagu

SEQ ID NO: 810994 - RNA, 19 nt, Artificial Sequence
  Description of Artificial Sequence: Synthetic oligonucleotide
  Sense strand starting at position 2367 of SEQ ID NO: 587687
gcagaauuagggcauccaa

SEQ ID NO: 810995 - RNA, 19 nt, Artificial Sequence
  Description of Artificial Sequence: Synthetic oligonucleotide
  Antisense strand to SEQ ID NO: 810994
uuggaugcccuaauucugc

SEQ ID NO: 810996 - RNA, 19 nt, Artificial Sequence
  Description of Artificial Sequence: Synthetic oligonucleotide
  Sense strand starting at position 2433 of SEQ ID NO: 587687
uuuguagacuuccuacaag

SEQ ID NO: 810997 - RNA, 19 nt, Artificial Sequence
  Description of Artificial Sequence: Synthetic oligonucleotide
  Antisense strand to SEQ ID NO: 810996
cuuguaggaagucuacaaa

SEQ ID NO: 810998 - RNA, 19 nt, Artificial Sequence
  Description of Artificial Sequence: Synthetic oligonucleotide
  Sense strand starting at position 2450 of SEQ ID NO: 587687
aggugacacuuuguccaaa

SEQ ID NO: 810999 - RNA, 19 nt, Artificial Sequence
  Description of Artificial Sequence: Synthetic oligonucleotide
  Antisense strand to SEQ ID NO: 810998
uuuggacaaagugucaccu

SEQ ID NO: 811000 - RNA, 19 nt, Artificial Sequence
  Description of Artificial Sequence: Synthetic oligonucleotide
  Sense strand starting at position 2452 of SEQ ID NO: 587687
gugacacuuuguccaaaga

SEQ ID NO: 811001 - RNA, 19 nt, Artificial Sequence
  Description of Artificial Sequence: Synthetic oligonucleotide
  Antisense strand to SEQ ID NO: 811000
ucuuuggacaaagugucac

SEQ ID NO: 811002 - RNA, 19 nt, Artificial Sequence
  Description of Artificial Sequence: Synthetic oligonucleotide
  Sense strand starting at position 2493 of SEQ ID NO: 587687
uggagauuaacugguuuaa

SEQ ID NO: 811003 - RNA, 19 nt, Artificial Sequence
  Description of Artificial Sequence: Synthetic oligonucleotide
  Antisense strand to SEQ ID NO: 811002
uuaaaccaguuaaucucca

SEQ ID NO: 811004 - RNA, 19 nt, Artificial Sequence
  Description of Artificial Sequence: Synthetic oligonucleotide
  Sense strand starting at position 2495 of SEQ ID NO: 587687
gagauuaacugguuuaacu

SEQ ID NO: 811005 - RNA, 19 nt, Artificial Sequence
  Description of Artificial Sequence: Synthetic oligonucleotide
  Antisense strand to SEQ ID NO: 811004
aguuaaaccaguuaaucuc

SEQ ID NO: 811006 - RNA, 19 nt, Artificial Sequence
  Description of Artificial Sequence: Synthetic oligonucleotide
  Sense strand starting at position 2703 of SEQ ID NO: 587687
aaggucacauaagugaauu

SEQ ID NO: 811007 - RNA, 19 nt, Artificial Sequence
  Description of Artificial Sequence: Synthetic oligonucleotide
  Antisense strand to SEQ ID NO: 811006
aauucacuuaugugaccuu

SEQ ID NO: 811008 - RNA, 19 nt, Artificial Sequence
  Description of Artificial Sequence: Synthetic oligonucleotide
  Sense strand starting at position 2731 of SEQ ID NO: 587687
uuccuaaguggguaagauu

SEQ ID NO: 811009 - RNA, 19 nt, Artificial Sequence
  Description of Artificial Sequence: Synthetic oligonucleotide
  Antisense strand to SEQ ID NO: 811008
aaucuuacccacuuaggaa

SEQ ID NO: 811010 - RNA, 19 nt, Artificial Sequence
  Description of Artificial Sequence: Synthetic oligonucleotide
  Sense strand starting at position 2871 of SEQ ID NO: 587687
cugaucucauuuguagcua

SEQ ID NO: 811011 - RNA, 19 nt, Artificial Sequence
  Description of Artificial Sequence: Synthetic oligonucleotide
  Antisense strand to SEQ ID NO: 811010
uagcuacaaaugagaucag

SEQ ID NO: 811012 - RNA, 19 nt, Artificial Sequence
  Description of Artificial Sequence: Synthetic oligonucleotide
  Sense strand starting at position 3113 of SEQ ID NO: 587687
uaccauggaggaugucaua

SEQ ID NO: 811013 - RNA, 19 nt, Artificial Sequence
  Description of Artificial Sequence: Synthetic oligonucleotide
  Antisense strand to SEQ ID NO: 811012
uaugacauccuccauggua

SEQ ID NO: 811014 - RNA, 19 nt, Artificial Sequence
  Description of Artificial Sequence: Synthetic oligonucleotide
  Sense strand starting at position 3153 of SEQ ID NO: 587687
aguaucuucccauagugga

SEQ ID NO: 811015 - RNA, 19 nt, Artificial Sequence
  Description of Artificial Sequence: Synthetic oligonucleotide
  Antisense strand to SEQ ID NO: 811014
uccacuaugggaagauacu

SEQ ID NO: 811016 - RNA, 19 nt, Artificial Sequence
  Description of Artificial Sequence: Synthetic oligonucleotide
  Sense strand starting at position 3158 of SEQ ID NO: 587687
cuucccauaguggauaauu

SEQ ID NO: 811017 - RNA, 19 nt, Artificial Sequence
  Description of Artificial Sequence: Synthetic oligonucleotide
  Antisense strand to SEQ ID NO: 811016
aauuauccacuaugggaag

SEQ ID NO: 811018 - RNA, 19 nt, Artificial Sequence
  Description of Artificial Sequence: Synthetic oligonucleotide
  Sense strand starting at position 3543 of SEQ ID NO: 587687
aggucaagucaauguagaa

SEQ ID NO: 811019 - RNA, 19 nt, Artificial Sequence
  Description of Artificial Sequence: Synthetic oligonucleotide
  Antisense strand to SEQ ID NO: 811018
uucuacauugacuugaccu

SEQ ID NO: 811020 - RNA, 19 nt, Artificial Sequence
  Description of Artificial Sequence: Synthetic oligonucleotide
  Sense strand starting at position 3678 of SEQ ID NO: 587687
cugaaauuaccaugugaca

SEQ ID NO: 811021 - RNA, 19 nt, Artificial Sequence
  Description of Artificial Sequence: Synthetic oligonucleotide
  Antisense strand to SEQ ID NO: 811020
ugucacaugguaauuucag

SEQ ID NO: 811022 - RNA, 19 nt, Artificial Sequence
  Description of Artificial Sequence: Synthetic oligonucleotide
  Sense strand starting at position 3869 of SEQ ID NO: 587687
cgaaucaaccuuugaugaa

SEQ ID NO: 811023 - RNA, 19 nt, Artificial Sequence
  Description of Artificial Sequence: Synthetic oligonucleotide
  Antisense strand to SEQ ID NO: 811022
uucaucaaagguugauucg

SEQ ID NO: 811024 - RNA, 19 nt, Artificial Sequence
  Description of Artificial Sequence: Synthetic oligonucleotide
  Sense strand starting at position 6 of SEQ ID NO: 587688
ugaauaugaucagcaggau

SEQ ID NO: 811025 - RNA, 19 nt, Artificial Sequence
  Description of Artificial Sequence: Synthetic oligonucleotide
  Antisense strand to SEQ ID NO: 811024
auccugcugaucauauuca

SEQ ID NO: 811026 - RNA, 19 nt, Artificial Sequence
  Description of Artificial Sequence: Synthetic oligonucleotide
  Sense strand starting at position 9 of SEQ ID NO: 587688
auaugaucagcaggaucuu

SEQ ID NO: 811027 - RNA, 19 nt, Artificial Sequence
  Description of Artificial Sequence: Synthetic oligonucleotide
  Antisense strand to SEQ ID NO: 811026
aagauccugcugaucauau

SEQ ID NO: 811028 - RNA, 19 nt, Artificial Sequence
  Description of Artificial Sequence: Synthetic oligonucleotide
  Sense strand starting at position 45 of SEQ ID NO: 587688
aagaauggccaguggugaa

SEQ ID NO: 811029 - RNA, 19 nt, Artificial Sequence
  Description of Artificial Sequence: Synthetic oligonucleotide
  Antisense strand to SEQ ID NO: 811028
uucaccacuggccauucuu

SEQ ID NO: 811030 - RNA, 19 nt, Artificial Sequence
  Description of Artificial Sequence: Synthetic oligonucleotide
  Sense strand starting at position 250 of SEQ ID NO: 587688
ugaauuaauucugcagaag

SEQ ID NO: 811031 - RNA, 19 nt, Artificial Sequence
  Description of Artificial Sequence: Synthetic oligonucleotide
  Antisense strand to SEQ ID NO: 811030
cuucugcagaauuaauuca

SEQ ID NO: 811032 - RNA, 19 nt, Artificial Sequence
  Description of Artificial Sequence: Synthetic oligonucleotide
  Sense strand starting at position 448 of SEQ ID NO: 587688
caagguaauguccaaagca

SEQ ID NO: 811033 - RNA, 19 nt, Artificial Sequence
  Description of Artificial Sequence: Synthetic oligonucleotide
  Antisense strand to SEQ ID NO: 811032
ugcuuuggacauuaccuug

SEQ ID NO: 811034 - RNA, 19 nt, Artificial Sequence
  Description of Artificial Sequence: Synthetic oligonucleotide
  Sense strand starting at position 472 of SEQ ID NO: 587688
gcuuccuagggacaucuaa

SEQ ID NO: 811035 - RNA, 19 nt, Artificial Sequence
  Description of Artificial Sequence: Synthetic oligonucleotide
  Antisense strand to SEQ ID NO: 811034
uuagaugucccuaggaagc

SEQ ID NO: 811036 - RNA, 19 nt, Artificial Sequence
  Description of Artificial Sequence: Synthetic oligonucleotide
  Sense strand starting at position 503 of SEQ ID NO: 587688
guucaugcucguguucuga

SEQ ID NO: 811037 - RNA, 19 nt, Artificial Sequence
  Description of Artificial Sequence: Synthetic oligonucleotide
  Antisense strand to SEQ ID NO: 811036
ucagaacacgagcaugaac

SEQ ID NO: 811038 - RNA, 19 nt, Artificial Sequence
  Description of Artificial Sequence: Synthetic oligonucleotide
  Sense strand starting at position 511 of SEQ ID NO: 587688
ucguguucugaugaugaaa

SEQ ID NO: 811039 - RNA, 19 nt, Artificial Sequence
  Description of Artificial Sequence: Synthetic oligonucleotide
  Antisense strand to SEQ ID NO: 811038
uuucaucaucagaacacga

SEQ ID NO: 811040 - RNA, 19 nt, Artificial Sequence
  Description of Artificial Sequence: Synthetic oligonucleotide
  Sense strand starting at position 533 of SEQ ID NO: 587688
aagauuuguuucuagaaag

SEQ ID NO: 811041 - RNA, 19 nt, Artificial Sequence
  Description of Artificial Sequence: Synthetic oligonucleotide
  Antisense strand to SEQ ID NO: 811040
cuuucuagaaacaaaucuu

SEQ ID NO: 811042 - RNA, 19 nt, Artificial Sequence
  Description of Artificial Sequence: Synthetic oligonucleotide
  Sense strand starting at position 625 of SEQ ID NO: 587688
cuuacaucucuugggaaag

SEQ ID NO: 811043 - RNA, 19 nt, Artificial Sequence
  Description of Artificial Sequence: Synthetic oligonucleotide
  Antisense strand to SEQ ID NO: 811042
cuuucccaagagauguaag

SEQ ID NO: 811044 - RNA, 19 nt, Artificial Sequence
  Description of Artificial Sequence: Synthetic oligonucleotide
  Sense strand starting at position 652 of SEQ ID NO: 587688
ccauauuuaucacagaggu

SEQ ID NO: 811045 - RNA, 19 nt, Artificial Sequence
  Description of Artificial Sequence: Synthetic oligonucleotide
  Antisense strand to SEQ ID NO: 811044
accucugugauaaauaugg

SEQ ID NO: 811046 - RNA, 19 nt, Artificial Sequence
  Description of Artificial Sequence: Synthetic oligonucleotide
  Sense strand starting at position 727 of SEQ ID NO: 587688
gauuccugacacuggacua

SEQ ID NO: 811047 - RNA, 19 nt, Artificial Sequence
  Description of Artificial Sequence: Synthetic oligonucleotide
  Antisense strand to SEQ ID NO: 811046
uaguccagugucaggaauc

SEQ ID NO: 811048 - RNA, 19 nt, Artificial Sequence
  Description of Artificial Sequence: Synthetic oligonucleotide
  Sense strand starting at position 758 of SEQ ID NO: 587688
uucgcugaccuuuaggaau

SEQ ID NO: 811049 - RNA, 19 nt, Artificial Sequence
  Description of Artificial Sequence: Synthetic oligonucleotide
  Antisense strand to SEQ ID NO: 811048
auuccuaaaggucagcgaa

SEQ ID NO: 811050 - RNA, 19 nt, Artificial Sequence
  Description of Artificial Sequence: Synthetic oligonucleotide
  Sense strand starting at position 2393 of SEQ ID NO: 587688
guggcuuucccagaagagu

SEQ ID NO: 811051 - RNA, 19 nt, Artificial Sequence
  Description of Artificial Sequence: Synthetic oligonucleotide
  Antisense strand to SEQ ID NO: 811050
acucuucugggaaagccac

SEQ ID NO: 811052 - RNA, 19 nt, Artificial Sequence
  Description of Artificial Sequence: Synthetic oligonucleotide
  Sense strand starting at position 2528 of SEQ ID NO: 587688
cuaagcgaaccuuaaagau

SEQ ID NO: 811053 - RNA, 19 nt, Artificial Sequence
  Description of Artificial Sequence: Synthetic oligonucleotide
  Antisense strand to SEQ ID NO: 811052
aucuuuaagguucgcuuag

SEQ ID NO: 811054 - RNA, 19 nt, Artificial Sequence
  Description of Artificial Sequence: Synthetic oligonucleotide
  Sense strand starting at position 2750 of SEQ ID NO: 587688
cggagcacgacucagaaua

SEQ ID NO: 811055 - RNA, 19 nt, Artificial Sequence
  Description of Artificial Sequence: Synthetic oligonucleotide
  Antisense strand to SEQ ID NO: 811054
uauucugagucgugcuccg

SEQ ID NO: 811056 - RNA, 19 nt, Artificial Sequence
  Description of Artificial Sequence: Synthetic oligonucleotide
  Sense strand starting at position 2855 of SEQ ID NO: 587688
ggagauccuuaauucguga

SEQ ID NO: 811057 - RNA, 19 nt, Artificial Sequence
  Description of Artificial Sequence: Synthetic oligonucleotide
  Antisense strand to SEQ ID NO: 811056
ucacgaauuaaggaucucc

SEQ ID NO: 811058 - RNA, 19 nt, Artificial Sequence
  Description of Artificial Sequence: Synthetic oligonucleotide
  Sense strand starting at position 2858 of SEQ ID NO: 587688
gauccuuaauucgugaaug

SEQ ID NO: 811059 - RNA, 19 nt, Artificial Sequence
  Description of Artificial Sequence: Synthetic oligonucleotide
  Antisense strand to SEQ ID NO: 811058
cauucacgaauuaaggauc

SEQ ID NO: 811060 - RNA, 19 nt, Artificial Sequence
  Description of Artificial Sequence: Synthetic oligonucleotide
  Sense strand starting at position 2939 of SEQ ID NO: 587688
cucccucugguggagaauu

SEQ ID NO: 811061 - RNA, 19 nt, Artificial Sequence
  Description of Artificial Sequence: Synthetic oligonucleotide
  Antisense strand to SEQ ID NO: 811060
aauucuccaccagagggag

SEQ ID NO: 811062 - RNA, 19 nt, Artificial Sequence
  Description of Artificial Sequence: Synthetic oligonucleotide
  Sense strand starting at position 3045 of SEQ ID NO: 587688
uccagaauugucuacaugu

SEQ ID NO: 811063 - RNA, 19 nt, Artificial Sequence
  Description of Artificial Sequence: Synthetic oligonucleotide
  Antisense strand to SEQ ID NO: 811062
acauguagacaauucugga

SEQ ID NO: 811064 - RNA, 19 nt, Artificial Sequence
  Description of Artificial Sequence: Synthetic oligonucleotide
  Sense strand starting at position 3047 of SEQ ID NO: 587688
cagaauugucuacauguag

SEQ ID NO: 811065 - RNA, 19 nt, Artificial Sequence
  Description of Artificial Sequence: Synthetic oligonucleotide
  Antisense strand to SEQ ID NO: 811064
cuacauguagacaauucug

SEQ ID NO: 811066 - RNA, 19 nt, Artificial Sequence
  Description of Artificial Sequence: Synthetic oligonucleotide
  Sense strand starting at position 3079 of SEQ ID NO: 587688
agaguuauaccacagcugu

SEQ ID NO: 811067 - RNA, 19 nt, Artificial Sequence
  Description of Artificial Sequence: Synthetic oligonucleotide
  Antisense strand to SEQ ID NO: 811066
acagcugugguauaacucu

SEQ ID NO: 811068 - RNA, 19 nt, Artificial Sequence
  Description of Artificial Sequence: Synthetic oligonucleotide
  Sense strand starting at position 3089 of SEQ ID NO: 587688
cacagcugugguuaacuua

SEQ ID NO: 811069 - RNA, 19 nt, Artificial Sequence
  Description of Artificial Sequence: Synthetic oligonucleotide
  Antisense strand to SEQ ID NO: 811068
uaaguuaaccacagcugug

SEQ ID NO: 811070 - RNA, 19 nt, Artificial Sequence
  Description of Artificial Sequence: Synthetic oligonucleotide
  Sense strand starting at position 3147 of SEQ ID NO: 587688
gggaaguggugaguuggaa

SEQ ID NO: 811071 - RNA, 19 nt, Artificial Sequence
  Description of Artificial Sequence: Synthetic oligonucleotide
  Antisense strand to SEQ ID NO: 811070
uuccaacucaccacuuccc

SEQ ID NO: 811072 - RNA, 19 nt, Artificial Sequence
  Description of Artificial Sequence: Synthetic oligonucleotide
  Sense strand starting at position 3263 of SEQ ID NO: 587688
cuaccuucucacgguauuu

SEQ ID NO: 811073 - RNA, 19 nt, Artificial Sequence
  Description of Artificial Sequence: Synthetic oligonucleotide
  Antisense strand to SEQ ID NO: 811072
aaauaccgugagaagguag

SEQ ID NO: 811074 - RNA, 19 nt, Artificial Sequence
  Description of Artificial Sequence: Synthetic oligonucleotide
  Sense strand starting at position 3417 of SEQ ID NO: 587688
cugucauaagaacgaaacu

SEQ ID NO: 811075 - RNA, 19 nt, Artificial Sequence
  Description of Artificial Sequence: Synthetic oligonucleotide
  Antisense strand to SEQ ID NO: 811074
aguuucguucuuaugacag

SEQ ID NO: 811076 - RNA, 19 nt, Artificial Sequence
  Description of Artificial Sequence: Synthetic oligonucleotide
  Sense strand starting at position 3426 of SEQ ID NO: 587688
gaacgaaacucuguugaau

SEQ ID NO: 811077 - RNA, 19 nt, Artificial Sequence
  Description of Artificial Sequence: Synthetic oligonucleotide
  Antisense strand to SEQ ID NO: 811076
auucaacagaguuucguuc

SEQ ID NO: 811078 - RNA, 19 nt, Artificial Sequence
  Description of Artificial Sequence: Synthetic oligonucleotide
  Sense strand starting at position 3438 of SEQ ID NO: 587688
guugaauggguuuaacugu

SEQ ID NO: 811079 - RNA, 19 nt, Artificial Sequence
  Description of Artificial Sequence: Synthetic oligonucleotide
  Antisense strand to SEQ ID NO: 811078
acaguuaaacccauucaac

SEQ ID NO: 811080 - RNA, 19 nt, Artificial Sequence
  Description of Artificial Sequence: Synthetic oligonucleotide
  Sense strand starting at position 3444 of SEQ ID NO: 587688
uggguuuaacuguggaaag

SEQ ID NO: 811081 - RNA, 19 nt, Artificial Sequence
  Description of Artificial Sequence: Synthetic oligonucleotide
  Antisense strand to SEQ ID NO: 811080
cuuuccacaguuaaaccca

SEQ ID NO: 811082 - RNA, 19 nt, Artificial Sequence
  Description of Artificial Sequence: Synthetic oligonucleotide
  Sense strand starting at position 3455 of SEQ ID NO: 587688
guggaaagauauccuagca

SEQ ID NO: 811083 - RNA, 19 nt, Artificial Sequence
  Description of Artificial Sequence: Synthetic oligonucleotide
  Antisense strand to SEQ ID NO: 811082
ugcuaggauaucuuuccac

SEQ ID NO: 811084 - RNA, 19 nt, Artificial Sequence
  Description of Artificial Sequence: Synthetic oligonucleotide
  Sense strand starting at position 3501 of SEQ ID NO: 587688
aaguuugauguccaaguag

SEQ ID NO: 811085 - RNA, 19 nt, Artificial Sequence
  Description of Artificial Sequence: Synthetic oligonucleotide
  Antisense strand to SEQ ID NO: 811084
cuacuuggacaucaaacuu

SEQ ID NO: 811086 - RNA, 19 nt, Artificial Sequence
  Description of Artificial Sequence: Synthetic oligonucleotide
  Sense strand starting at position 3594 of SEQ ID NO: 587688
ugaugaauauaucucagua

SEQ ID NO: 811087 - RNA, 19 nt, Artificial Sequence
  Description of Artificial Sequence: Synthetic oligonucleotide
  Antisense strand to SEQ ID NO: 811086
uacugagauauauucauca

SEQ ID NO: 811088 - RNA, 19 nt, Artificial Sequence
  Description of Artificial Sequence: Synthetic oligonucleotide
  Sense strand starting at position 3626 of SEQ ID NO: 587688
uccacagagacguaugcaa

SEQ ID NO: 811089 - RNA, 19 nt, Artificial Sequence
  Description of Artificial Sequence: Synthetic oligonucleotide
  Antisense strand to SEQ ID NO: 811088
uugcauacgucucugugga

SEQ ID NO: 811090 - RNA, 19 nt, Artificial Sequence
  Description of Artificial Sequence: Synthetic oligonucleotide
  Sense strand starting at position 3628 of SEQ ID NO: 587688
cacagagacguaugcaaga

SEQ ID NO: 811091 - RNA, 19 nt, Artificial Sequence
  Description of Artificial Sequence: Synthetic oligonucleotide
  Antisense strand to SEQ ID NO: 811090
ucuugcauacgucucugug

SEQ ID NO: 811092 - RNA, 19 nt, Artificial Sequence
  Description of Artificial Sequence: Synthetic oligonucleotide
  Sense strand starting at position 3652 of SEQ ID NO: 587688
ucugaacacuggcugaaau

SEQ ID NO: 811093 - RNA, 19 nt, Artificial Sequence
  Description of Artificial Sequence: Synthetic oligonucleotide
  Antisense strand to SEQ ID NO: 811092
auuucagccaguguucaga

SEQ ID NO: 811094 - RNA, 19 nt, Artificial Sequence
  Description of Artificial Sequence: Synthetic oligonucleotide
  Sense strand starting at position 3653 of SEQ ID NO: 587688
cugaacacuggcugaaaua

SEQ ID NO: 811095 - RNA, 19 nt, Artificial Sequence
  Description of Artificial Sequence: Synthetic oligonucleotide
  Antisense strand to SEQ ID NO: 811094
uauuucagccaguguucag

SEQ ID NO: 811096 - RNA, 19 nt, Artificial Sequence
  Description of Artificial Sequence: Synthetic oligonucleotide
  Sense strand starting at position 3755 of SEQ ID NO: 587688
gucccaaggaugugagaca

SEQ ID NO: 811097 - RNA, 19 nt, Artificial Sequence
  Description of Artificial Sequence: Synthetic oligonucleotide
  Antisense strand to SEQ ID NO: 811096
ugucucacauccuugggac

SEQ ID NO: 811098 - RNA, 19 nt, Artificial Sequence
  Description of Artificial Sequence: Synthetic oligonucleotide
  Sense strand starting at position 3773 of SEQ ID NO: 587688
agcauaagggcuuaguaua

SEQ ID NO: 811099 - RNA, 19 nt, Artificial Sequence
  Description of Artificial Sequence: Synthetic oligonucleotide
  Antisense strand to SEQ ID NO: 811098
uauacuaagcccuuaugcu

SEQ ID NO: 811100 - RNA, 19 nt, Artificial Sequence
  Description of Artificial Sequence: Synthetic oligonucleotide
  Sense strand starting at position 3808 of SEQ ID NO: 587688
cuaacauggcauuauguua

SEQ ID NO: 811101 - RNA, 19 nt, Artificial Sequence
  Description of Artificial Sequence: Synthetic oligonucleotide
  Antisense strand to SEQ ID NO: 811100
uaacauaaugccauguuag

SEQ ID NO: 811102 - RNA, 19 nt, Artificial Sequence
  Description of Artificial Sequence: Synthetic oligonucleotide
  Sense strand starting at position 3848 of SEQ ID NO: 587688
agauguauucugggauucu

SEQ ID NO: 811103 - RNA, 19 nt, Artificial Sequence
  Description of Artificial Sequence: Synthetic oligonucleotide
  Antisense strand to SEQ ID NO: 811102
agaaucccagaauacaucu

SEQ ID NO: 811104 - RNA, 19 nt, Artificial Sequence
  Description of Artificial Sequence: Synthetic oligonucleotide
  Sense strand starting at position 9 of SEQ ID NO: 587689
aagagauggcgugauguuu

SEQ ID NO: 811105 - RNA, 19 nt, Artificial Sequence
  Description of Artificial Sequence: Synthetic oligonucleotide
  Antisense strand to SEQ ID NO: 811104
aaacaucacgccaucucuu

SEQ ID NO: 811106 - RNA, 19 nt, Artificial Sequence
  Description of Artificial Sequence: Synthetic oligonucleotide
  Sense strand starting at position 167 of SEQ ID NO: 587689
cggaguuugcaagaucauu

SEQ ID NO: 811107 - RNA, 19 nt, Artificial Sequence
  Description of Artificial Sequence: Synthetic oligonucleotide
  Antisense strand to SEQ ID NO: 811106
aaugaucuugcaaacuccg

SEQ ID NO: 811108 - RNA, 19 nt, Artificial Sequence
  Description of Artificial Sequence: Synthetic oligonucleotide
  Sense strand starting at position 224 of SEQ ID NO: 587689
auaggcuuugcuuaaacaa

SEQ ID NO: 811109 - RNA, 19 nt, Artificial Sequence
  Description of Artificial Sequence: Synthetic oligonucleotide
  Antisense strand to SEQ ID NO: 811108
uuguuuaagcaaagccuau

SEQ ID NO: 811110 - RNA, 19 nt, Artificial Sequence
  Description of Artificial Sequence: Synthetic oligonucleotide
  Sense strand starting at position 2126 of SEQ ID NO: 587689
gagaaagccagcgaucgau

SEQ ID NO: 811111 - RNA, 19 nt, Artificial Sequence
  Description of Artificial Sequence: Synthetic oligonucleotide
  Antisense strand to SEQ ID NO: 811110
aucgaucgcuggcuuucuc

SEQ ID NO: 811112 - RNA, 19 nt, Artificial Sequence
  Description of Artificial Sequence: Synthetic oligonucleotide
  Sense strand starting at position 2236 of SEQ ID NO: 587689
ucugauuccucccuagaga

SEQ ID NO: 811113 - RNA, 19 nt, Artificial Sequence
  Description of Artificial Sequence: Synthetic oligonucleotide
  Antisense strand to SEQ ID NO: 811112
ucucuagggaggaaucaga

SEQ ID NO: 811114 - RNA, 19 nt, Artificial Sequence
  Description of Artificial Sequence: Synthetic oligonucleotide
  Sense strand starting at position 2245 of SEQ ID NO: 587689
ucccuagagagguaagcuu

SEQ ID NO: 811115 - RNA, 19 nt, Artificial Sequence
  Description of Artificial Sequence: Synthetic oligonucleotide
  Antisense strand to SEQ ID NO: 811114
aagcuuaccucucuaggga

SEQ ID NO: 811116 - RNA, 19 nt, Artificial Sequence
  Description of Artificial Sequence: Synthetic oligonucleotide
  Sense strand starting at position 2282 of SEQ ID NO: 587689
cugccugcugcugagagau

SEQ ID NO: 811117 - RNA, 19 nt, Artificial Sequence
  Description of Artificial Sequence: Synthetic oligonucleotide
  Antisense strand to SEQ ID NO: 811116
aucucucagcagcaggcag

SEQ ID NO: 811118 - RNA, 19 nt, Artificial Sequence
  Description of Artificial Sequence: Synthetic oligonucleotide
  Sense strand starting at position 2288 of SEQ ID NO: 587689
gcugcugagagauagcauu

SEQ ID NO: 811119 - RNA, 19 nt, Artificial Sequence
  Description of Artificial Sequence: Synthetic oligonucleotide
  Antisense strand to SEQ ID NO: 811118
aaugcuaucucucagcagc

SEQ ID NO: 811120 - RNA, 19 nt, Artificial Sequence
  Description of Artificial Sequence: Synthetic oligonucleotide
  Sense strand starting at position 2336 of SEQ ID NO: 587689
cacuaagaggacuguuauu

SEQ ID NO: 811121 - RNA, 19 nt, Artificial Sequence
  Description of Artificial Sequence: Synthetic oligonucleotide
  Antisense strand to SEQ ID NO: 811120
aauaacaguccucuuagug

SEQ ID NO: 811122 - RNA, 19 nt, Artificial Sequence
  Description of Artificial Sequence: Synthetic oligonucleotide
  Sense strand starting at position 2423 of SEQ ID NO: 587689
uugcaaugacuauguaaga

SEQ ID NO: 811123 - RNA, 19 nt, Artificial Sequence
  Description of Artificial Sequence: Synthetic oligonucleotide
  Antisense strand to SEQ ID NO: 811122
ucuuacauagucauugcaa

SEQ ID NO: 811124 - RNA, 19 nt, Artificial Sequence
  Description of Artificial Sequence: Synthetic oligonucleotide
  Sense strand starting at position 2436 of SEQ ID NO: 587689
guaagacuuuguuugucau

SEQ ID NO: 811125 - RNA, 19 nt, Artificial Sequence
  Description of Artificial Sequence: Synthetic oligonucleotide
  Antisense strand to SEQ ID NO: 811124
augacaaacaaagucuuac

SEQ ID NO: 811126 - RNA, 19 nt, Artificial Sequence
  Description of Artificial Sequence: Synthetic oligonucleotide
  Sense strand starting at position 2448 of SEQ ID NO: 587689
uugucaugcccagggagaa

SEQ ID NO: 811127 - RNA, 19 nt, Artificial Sequence
  Description of Artificial Sequence: Synthetic oligonucleotide
  Antisense strand to SEQ ID NO: 811126
uucucccugggcaugacaa

SEQ ID NO: 811128 - RNA, 19 nt, Artificial Sequence
  Description of Artificial Sequence: Synthetic oligonucleotide
  Sense strand starting at position 2449 of SEQ ID NO: 587689
ugucaugcccagggagaaa

SEQ ID NO: 811129 - RNA, 19 nt, Artificial Sequence
  Description of Artificial Sequence: Synthetic oligonucleotide
  Antisense strand to SEQ ID NO: 811128
uuucucccugggcaugaca

SEQ ID NO: 811130 - RNA, 19 nt, Artificial Sequence
  Description of Artificial Sequence: Synthetic oligonucleotide
  Sense strand starting at position 2618 of SEQ ID NO: 587689
agaguuaugaugcgagcaa

SEQ ID NO: 811131 - RNA, 19 nt, Artificial Sequence
  Description of Artificial Sequence: Synthetic oligonucleotide
  Antisense strand to SEQ ID NO: 811130
uugcucgcaucauaacucu

SEQ ID NO: 811132 - RNA, 19 nt, Artificial Sequence
  Description of Artificial Sequence: Synthetic oligonucleotide
  Sense strand starting at position 2622 of SEQ ID NO: 587689
uuaugaugcgagcaaagcu

SEQ ID NO: 811133 - RNA, 19 nt, Artificial Sequence
  Description of Artificial Sequence: Synthetic oligonucleotide
  Antisense strand to SEQ ID NO: 811132
agcuuugcucgcaucauaa

SEQ ID NO: 811134 - RNA, 19 nt, Artificial Sequence
  Description of Artificial Sequence: Synthetic oligonucleotide
  Sense strand starting at position 2696 of SEQ ID NO: 587689
auucccuggcacuguaaua

SEQ ID NO: 811135 - RNA, 19 nt, Artificial Sequence
  Description of Artificial Sequence: Synthetic oligonucleotide
  Antisense strand to SEQ ID NO: 811134
uauuacagugccagggaau

SEQ ID NO: 811136 - RNA, 19 nt, Artificial Sequence
  Description of Artificial Sequence: Synthetic oligonucleotide
  Sense strand starting at position 2718 of SEQ ID NO: 587689
accacauguccucagcuau

SEQ ID NO: 811137 - RNA, 19 nt, Artificial Sequence
  Description of Artificial Sequence: Synthetic oligonucleotide
  Antisense strand to SEQ ID NO: 811136
auagcugaggacauguggu

SEQ ID NO: 811138 - RNA, 19 nt, Artificial Sequence
  Description of Artificial Sequence: Synthetic oligonucleotide
  Sense strand starting at position 2870 of SEQ ID NO: 587689
gaagaaaugcacuguucuu

SEQ ID NO: 811139 - RNA, 19 nt, Artificial Sequence
  Description of Artificial Sequence: Synthetic oligonucleotide
  Antisense strand to SEQ ID NO: 811138
aagaacagugcauuucuuc

SEQ ID NO: 811140 - RNA, 19 nt, Artificial Sequence
  Description of Artificial Sequence: Synthetic oligonucleotide
  Sense strand starting at position 2964 of SEQ ID NO: 587689
cacuuacugugauuggaca

SEQ ID NO: 811141 - RNA, 19 nt, Artificial Sequence
  Description of Artificial Sequence: Synthetic oligonucleotide
  Antisense strand to SEQ ID NO: 811140
uguccaaucacaguaagug

SEQ ID NO: 811142 - RNA, 19 nt, Artificial Sequence
  Description of Artificial Sequence: Synthetic oligonucleotide
  Sense strand starting at position 2965 of SEQ ID NO: 587689
acuuacugugauuggacau

SEQ ID NO: 811143 - RNA, 19 nt, Artificial Sequence
  Description of Artificial Sequence: Synthetic oligonucleotide
  Antisense strand to SEQ ID NO: 811142
auguccaaucacaguaagu

SEQ ID NO: 811144 - RNA, 19 nt, Artificial Sequence
  Description of Artificial Sequence: Synthetic oligonucleotide
  Sense strand starting at position 2988 of SEQ ID NO: 587689
acgguuuccaaggaaccau

SEQ ID NO: 811145 - RNA, 19 nt, Artificial Sequence
  Description of Artificial Sequence: Synthetic oligonucleotide
  Antisense strand to SEQ ID NO: 811144
augguuccuuggaaaccgu

SEQ ID NO: 811146 - RNA, 19 nt, Artificial Sequence
  Description of Artificial Sequence: Synthetic oligonucleotide
  Sense strand starting at position 3013 of SEQ ID NO: 587689
cacuuaugucaauaggagu

SEQ ID NO: 811147 - RNA, 19 nt, Artificial Sequence
  Description of Artificial Sequence: Synthetic oligonucleotide
  Antisense strand to SEQ ID NO: 811146
acuccuauugacauaagug

SEQ ID NO: 811148 - RNA, 19 nt, Artificial Sequence
  Description of Artificial Sequence: Synthetic oligonucleotide
  Sense strand starting at position 3070 of SEQ ID NO: 587689
auaugagucccugaagcag

SEQ ID NO: 811149 - RNA, 19 nt, Artificial Sequence
  Description of Artificial Sequence: Synthetic oligonucleotide
  Antisense strand to SEQ ID NO: 811148
cugcuucagggacucauau

SEQ ID NO: 811150 - RNA, 19 nt, Artificial Sequence
  Description of Artificial Sequence: Synthetic oligonucleotide
  Sense strand starting at position 3119 of SEQ ID NO: 587689
ccgcuuuaagcacauuaua

SEQ ID NO: 811151 - RNA, 19 nt, Artificial Sequence
  Description of Artificial Sequence: Synthetic oligonucleotide
  Antisense strand to SEQ ID NO: 811150
uauaaugugcuuaaagcgg

SEQ ID NO: 811152 - RNA, 19 nt, Artificial Sequence
  Description of Artificial Sequence: Synthetic oligonucleotide
  Sense strand starting at position 3153 of SEQ ID NO: 587689
ucuccacuacuuugaggua

SEQ ID NO: 811153 - RNA, 19 nt, Artificial Sequence
  Description of Artificial Sequence: Synthetic oligonucleotide
  Antisense strand to SEQ ID NO: 811152
uaccucaaaguaguggaga

SEQ ID NO: 811154 - RNA, 19 nt, Artificial Sequence
  Description of Artificial Sequence: Synthetic oligonucleotide
  Sense strand starting at position 3268 of SEQ ID NO: 587689
aucuuaaacuguguuugca

SEQ ID NO: 811155 - RNA, 19 nt, Artificial Sequence
  Description of Artificial Sequence: Synthetic oligonucleotide
  Antisense strand to SEQ ID NO: 811154
ugcaaacacaguuuaagau

SEQ ID NO: 811156 - RNA, 19 nt, Artificial Sequence
  Description of Artificial Sequence: Synthetic oligonucleotide
  Sense strand starting at position 3276 of SEQ ID NO: 587689
cuguguuugcaguacuaua

SEQ ID NO: 811157 - RNA, 19 nt, Artificial Sequence
  Description of Artificial Sequence: Synthetic oligonucleotide
  Antisense strand to SEQ ID NO: 811156
uauaguacugcaaacacag

SEQ ID NO: 811158 - RNA, 19 nt, Artificial Sequence
  Description of Artificial Sequence: Synthetic oligonucleotide
  Sense strand starting at position 3348 of SEQ ID NO: 587689
acaaguuuaugagcaacau

SEQ ID NO: 811159 - RNA, 19 nt, Artificial Sequence
  Description of Artificial Sequence: Synthetic oligonucleotide
  Antisense strand to SEQ ID NO: 811158
auguugcucauaaacuugu

SEQ ID NO: 811160 - RNA, 19 nt, Artificial Sequence
  Description of Artificial Sequence: Synthetic oligonucleotide
  Sense strand starting at position 3349 of SEQ ID NO: 587689
caaguuuaugagcaacaug

SEQ ID NO: 811161 - RNA, 19 nt, Artificial Sequence
  Description of Artificial Sequence: Synthetic oligonucleotide
  Antisense strand to SEQ ID NO: 811160
cauguugcucauaaacuug

SEQ ID NO: 811162 - RNA, 19 nt, Artificial Sequence
  Description of Artificial Sequence: Synthetic oligonucleotide
  Sense strand starting at position 3352 of SEQ ID NO: 587689
guuuaugagcaacaugagu

SEQ ID NO: 811163 - RNA, 19 nt, Artificial Sequence
  Description of Artificial Sequence: Synthetic oligonucleotide
  Antisense strand to SEQ ID NO: 811162
acucauguugcucauaaac

SEQ ID NO: 811164 - RNA, 19 nt, Artificial Sequence
  Description of Artificial Sequence: Synthetic oligonucleotide
  Sense strand starting at position 3365 of SEQ ID NO: 587689
augaguuauccuugaguuc

SEQ ID NO: 811165 - RNA, 19 nt, Artificial Sequence
  Description of Artificial Sequence: Synthetic oligonucleotide
  Antisense strand to SEQ ID NO: 811164
gaacucaaggauaacucau

SEQ ID NO: 811166 - RNA, 19 nt, Artificial Sequence
  Description of Artificial Sequence: Synthetic oligonucleotide
  Sense strand starting at position 3466 of SEQ ID NO: 587689
ugagaccucucuuacaaag

SEQ ID NO: 811167 - RNA, 19 nt, Artificial Sequence
  Description of Artificial Sequence: Synthetic oligonucleotide
  Antisense strand to SEQ ID NO: 811166
cuuuguaagagaggucuca

SEQ ID NO: 811168 - RNA, 19 nt, Artificial Sequence
  Description of Artificial Sequence: Synthetic oligonucleotide
  Sense strand starting at position 3551 of SEQ ID NO: 587689
auugaaagauaguaagauc

SEQ ID NO: 811169 - RNA, 19 nt, Artificial Sequence
  Description of Artificial Sequence: Synthetic oligonucleotide
  Antisense strand to SEQ ID NO: 811168
gaucuuacuaucuuucaau

SEQ ID NO: 811170 - RNA, 19 nt, Artificial Sequence
  Description of Artificial Sequence: Synthetic oligonucleotide
  Sense strand starting at position 3554 of SEQ ID NO: 587689
gaaagauaguaagaucuca

SEQ ID NO: 811171 - RNA, 19 nt, Artificial Sequence
  Description of Artificial Sequence: Synthetic oligonucleotide
  Antisense strand to SEQ ID NO: 811170
ugagaucuuacuaucuuuc

SEQ ID NO: 811172 - RNA, 19 nt, Artificial Sequence
  Description of Artificial Sequence: Synthetic oligonucleotide
  Sense strand starting at position 3559 of SEQ ID NO: 587689
auaguaagaucucaaugau

SEQ ID NO: 811173 - RNA, 19 nt, Artificial Sequence
  Description of Artificial Sequence: Synthetic oligonucleotide
  Antisense strand to SEQ ID NO: 811172
aucauugagaucuuacuau

SEQ ID NO: 811174 - RNA, 19 nt, Artificial Sequence
  Description of Artificial Sequence: Synthetic oligonucleotide
  Sense strand starting at position 3602 of SEQ ID NO: 587689
acaauaucagcagguguuu

SEQ ID NO: 811175 - RNA, 19 nt, Artificial Sequence
  Description of Artificial Sequence: Synthetic oligonucleotide
  Antisense strand to SEQ ID NO: 811174
aaacaccugcugauauugu

SEQ ID NO: 811176 - RNA, 19 nt, Artificial Sequence
  Description of Artificial Sequence: Synthetic oligonucleotide
  Sense strand starting at position 3611 of SEQ ID NO: 587689
gcagguguuuaugcuaaac

SEQ ID NO: 811177 - RNA, 19 nt, Artificial Sequence
  Description of Artificial Sequence: Synthetic oligonucleotide
  Antisense strand to SEQ ID NO: 811176
guuuagcauaaacaccugc

SEQ ID NO: 811178 - RNA, 19 nt, Artificial Sequence
  Description of Artificial Sequence: Synthetic oligonucleotide
  Sense strand starting at position 3630 of SEQ ID NO: 587689
uaggguaauuuaugauuuc

SEQ ID NO: 811179 - RNA, 19 nt, Artificial Sequence
  Description of Artificial Sequence: Synthetic oligonucleotide
  Antisense strand to SEQ ID NO: 811178
gaaaucauaaauuacccua

SEQ ID NO: 811180 - RNA, 19 nt, Artificial Sequence
  Description of Artificial Sequence: Synthetic oligonucleotide
  Sense strand starting at position 3743 of SEQ ID NO: 587689
aggccaaggucagcuaaau

SEQ ID NO: 811181 - RNA, 19 nt, Artificial Sequence
  Description of Artificial Sequence: Synthetic oligonucleotide
  Antisense strand to SEQ ID NO: 811180
auuuagcugaccuuggccu

SEQ ID NO: 811182 - RNA, 19 nt, Artificial Sequence
  Description of Artificial Sequence: Synthetic oligonucleotide
  Sense strand starting at position 3939 of SEQ ID NO: 587689
ggcauugcucuagcuguua

SEQ ID NO: 811183 - RNA, 19 nt, Artificial Sequence
  Description of Artificial Sequence: Synthetic oligonucleotide
  Antisense strand to SEQ ID NO: 811182
uaacagcuagagcaaugcc

SEQ ID NO: 811184 - RNA, 19 nt, Artificial Sequence
  Description of Artificial Sequence: Synthetic oligonucleotide
  Sense strand starting at position 18 of SEQ ID NO: 587690
auuugugauguguaaucgu

SEQ ID NO: 811185 - RNA, 19 nt, Artificial Sequence
  Description of Artificial Sequence: Synthetic oligonucleotide
  Antisense strand to SEQ ID NO: 811184
acgauuacacaucacaaau

SEQ ID NO: 811186 - RNA, 19 nt, Artificial Sequence
  Description of Artificial Sequence: Synthetic oligonucleotide
  Sense strand starting at position 40 of SEQ ID NO: 587690
aauuuacuguuugagaaga

SEQ ID NO: 811187 - RNA, 19 nt, Artificial Sequence
  Description of Artificial Sequence: Synthetic oligonucleotide
  Antisense strand to SEQ ID NO: 811186
ucuucucaaacaguaaauu

SEQ ID NO: 811188 - RNA, 19 nt, Artificial Sequence
  Description of Artificial Sequence: Synthetic oligonucleotide
  Sense strand starting at position 66 of SEQ ID NO: 587690
cuauguguuagugauuaua

SEQ ID NO: 811189 - RNA, 19 nt, Artificial Sequence
  Description of Artificial Sequence: Synthetic oligonucleotide
  Antisense strand to SEQ ID NO: 811188
uauaaucacuaacacauag

SEQ ID NO: 811190 - RNA, 19 nt, Artificial Sequence
  Description of Artificial Sequence: Synthetic oligonucleotide
  Sense strand starting at position 69 of SEQ ID NO: 587690
uguguuagugauuauauag

SEQ ID NO: 811191 - RNA, 19 nt, Artificial Sequence
  Description of Artificial Sequence: Synthetic oligonucleotide
  Antisense strand to SEQ ID NO: 811190
cuauauaaucacuaacaca

SEQ ID NO: 811192 - RNA, 19 nt, Artificial Sequence
  Description of Artificial Sequence: Synthetic oligonucleotide
  Sense strand starting at position 125 of SEQ ID NO: 587690
uuaguuuaugaauggcaua

SEQ ID NO: 811193 - RNA, 19 nt, Artificial Sequence
  Description of Artificial Sequence: Synthetic oligonucleotide
  Antisense strand to SEQ ID NO: 811192
uaugccauucauaaacuaa

SEQ ID NO: 811194 - RNA, 19 nt, Artificial Sequence
  Description of Artificial Sequence: Synthetic oligonucleotide
  Sense strand starting at position 169 of SEQ ID NO: 587690
augagauaaucagcuaauu

SEQ ID NO: 811195 - RNA, 19 nt, Artificial Sequence
  Description of Artificial Sequence: Synthetic oligonucleotide
  Antisense strand to SEQ ID NO: 811194
aauuagcugauuaucucau

SEQ ID NO: 811196 - RNA, 19 nt, Artificial Sequence
  Description of Artificial Sequence: Synthetic oligonucleotide
  Sense strand starting at position 293 of SEQ ID NO: 587690
agggccuacaugugauauu

SEQ ID NO: 811197 - RNA, 19 nt, Artificial Sequence
  Description of Artificial Sequence: Synthetic oligonucleotide
  Antisense strand to SEQ ID NO: 811196
aauaucacauguaggcccu

SEQ ID NO: 811198 - RNA, 19 nt, Artificial Sequence
  Description of Artificial Sequence: Synthetic oligonucleotide
  Sense strand starting at position 327 of SEQ ID NO: 587690
ucuguucugaugcagugaa

SEQ ID NO: 811199 - RNA, 19 nt, Artificial Sequence
  Description of Artificial Sequence: Synthetic oligonucleotide
  Antisense strand to SEQ ID NO: 811198
uucacugcaucagaacaga

SEQ ID NO: 811200 - RNA, 19 nt, Artificial Sequence
  Description of Artificial Sequence: Synthetic oligonucleotide
  Sense strand starting at position 392 of SEQ ID NO: 587690
uugagaugacuuggccaaa

SEQ ID NO: 811201 - RNA, 19 nt, Artificial Sequence
  Description of Artificial Sequence: Synthetic oligonucleotide
  Antisense strand to SEQ ID NO: 811200
uuuggccaagucaucucaa

SEQ ID NO: 811202 - RNA, 19 nt, Artificial Sequence
  Description of Artificial Sequence: Synthetic oligonucleotide
  Sense strand starting at position 491 of SEQ ID NO: 587690
uggacauugaguugccaaa

SEQ ID NO: 811203 - RNA, 19 nt, Artificial Sequence
  Description of Artificial Sequence: Synthetic oligonucleotide
  Antisense strand to SEQ ID NO: 811202
uuuggcaacucaaugucca

SEQ ID NO: 811204 - RNA, 19 nt, Artificial Sequence
  Description of Artificial Sequence: Synthetic oligonucleotide
  Sense strand starting at position 869 of SEQ ID NO: 587690
cucugaggaucgcugagaa

SEQ ID NO: 811205 - RNA, 19 nt, Artificial Sequence
  Description of Artificial Sequence: Synthetic oligonucleotide
  Antisense strand to SEQ ID NO: 811204
uucucagcgauccucagag

SEQ ID NO: 811206 - RNA, 19 nt, Artificial Sequence
  Description of Artificial Sequence: Synthetic oligonucleotide
  Sense strand starting at position 2249 of SEQ ID NO: 587690
cggaguugcgugccuggaa

SEQ ID NO: 811207 - RNA, 19 nt, Artificial Sequence
  Description of Artificial Sequence: Synthetic oligonucleotide
  Antisense strand to SEQ ID NO: 811206
uuccaggcacgcaacuccg

SEQ ID NO: 811208 - RNA, 19 nt, Artificial Sequence
  Description of Artificial Sequence: Synthetic oligonucleotide
  Sense strand starting at position 2688 of SEQ ID NO: 587690
gcgacaagcagcgauuaaa

SEQ ID NO: 811209 - RNA, 19 nt, Artificial Sequence
  Description of Artificial Sequence: Synthetic oligonucleotide
  Antisense strand to SEQ ID NO: 811208
uuuaaucgcugcuugucgc

SEQ ID NO: 811210 - RNA, 19 nt, Artificial Sequence
  Description of Artificial Sequence: Synthetic oligonucleotide
  Sense strand starting at position 2856 of SEQ ID NO: 587690
cuuuaugacauguguggua

SEQ ID NO: 811211 - RNA, 19 nt, Artificial Sequence
  Description of Artificial Sequence: Synthetic oligonucleotide
  Antisense strand to SEQ ID NO: 811210
uaccacacaugucauaaag

SEQ ID NO: 811212 - RNA, 19 nt, Artificial Sequence
  Description of Artificial Sequence: Synthetic oligonucleotide
  Sense strand starting at position 2858 of SEQ ID NO: 587690
uuaugacaugugugguacu

SEQ ID NO: 811213 - RNA, 19 nt, Artificial Sequence
  Description of Artificial Sequence: Synthetic oligonucleotide
  Antisense strand to SEQ ID NO: 811212
aguaccacacaugucauaa

SEQ ID NO: 811214 - RNA, 19 nt, Artificial Sequence
  Description of Artificial Sequence: Synthetic oligonucleotide
  Sense strand starting at position 2868 of SEQ ID NO: 587690
ugugguacugcugauagga

SEQ ID NO: 811215 - RNA, 19 nt, Artificial Sequence
  Description of Artificial Sequence: Synthetic oligonucleotide
  Antisense strand to SEQ ID NO: 811214
uccuaucagcaguaccaca

SEQ ID NO: 811216 - RNA, 19 nt, Artificial Sequence
  Description of Artificial Sequence: Synthetic oligonucleotide
  Sense strand starting at position 2881 of SEQ ID NO: 587690
auaggagcauaguuugaau

SEQ ID NO: 811217 - RNA, 19 nt, Artificial Sequence
  Description of Artificial Sequence: Synthetic oligonucleotide
  Antisense strand to SEQ ID NO: 811216
auucaaacuaugcuccuau

SEQ ID NO: 811218 - RNA, 19 nt, Artificial Sequence
  Description of Artificial Sequence: Synthetic oligonucleotide
  Sense strand starting at position 2883 of SEQ ID NO: 587690
aggagcauaguuugaauaa

SEQ ID NO: 811219 - RNA, 19 nt, Artificial Sequence
  Description of Artificial Sequence: Synthetic oligonucleotide
  Antisense strand to SEQ ID NO: 811218
uuauucaaacuaugcuccu

SEQ ID NO: 811220 - RNA, 19 nt, Artificial Sequence
  Description of Artificial Sequence: Synthetic oligonucleotide
  Sense strand starting at position 3030 of SEQ ID NO: 587690
ggcauaaggaguuguaggu

SEQ ID NO: 811221 - RNA, 19 nt, Artificial Sequence
  Description of Artificial Sequence: Synthetic oligonucleotide
  Antisense strand to SEQ ID NO: 811220
accuacaacuccuuaugcc

SEQ ID NO: 811222 - RNA, 19 nt, Artificial Sequence
  Description of Artificial Sequence: Synthetic oligonucleotide
  Sense strand starting at position 3141 of SEQ ID NO: 587690
uuuaaagagcuaugucuaa

SEQ ID NO: 811223 - RNA, 19 nt, Artificial Sequence
  Description of Artificial Sequence: Synthetic oligonucleotide
  Antisense strand to SEQ ID NO: 811222
uuagacauagcucuuuaaa

SEQ ID NO: 811224 - RNA, 19 nt, Artificial Sequence
  Description of Artificial Sequence: Synthetic oligonucleotide
  Sense strand starting at position 3169 of SEQ ID NO: 587690
ccauccucucccgggauau

SEQ ID NO: 811225 - RNA, 19 nt, Artificial Sequence
  Description of Artificial Sequence: Synthetic oligonucleotide
  Antisense strand to SEQ ID NO: 811224
auaucccgggagaggaugg

SEQ ID NO: 811226 - RNA, 19 nt, Artificial Sequence
  Description of Artificial Sequence: Synthetic oligonucleotide
  Sense strand starting at position 3170 of SEQ ID NO: 587690
cauccucucccgggauauu

SEQ ID NO: 811227 - RNA, 19 nt, Artificial Sequence
  Description of Artificial Sequence: Synthetic oligonucleotide
  Antisense strand to SEQ ID NO: 811226
aauaucccgggagaggaug

SEQ ID NO: 811228 - RNA, 19 nt, Artificial Sequence
  Description of Artificial Sequence: Synthetic oligonucleotide
  Sense strand starting at position 3324 of SEQ ID NO: 587690
gcgauagauccacacugug

SEQ ID NO: 811229 - RNA, 19 nt, Artificial Sequence
  Description of Artificial Sequence: Synthetic oligonucleotide
  Antisense strand to SEQ ID NO: 811228
cacaguguggaucuaucgc

SEQ ID NO: 811230 - RNA, 19 nt, Artificial Sequence
  Description of Artificial Sequence: Synthetic oligonucleotide
  Sense strand starting at position 3327 of SEQ ID NO: 587690
auagauccacacugugaga

SEQ ID NO: 811231 - RNA, 19 nt, Artificial Sequence
  Description of Artificial Sequence: Synthetic oligonucleotide
  Antisense strand to SEQ ID NO: 811230
ucucacaguguggaucuau

SEQ ID NO: 811232 - RNA, 19 nt, Artificial Sequence
  Description of Artificial Sequence: Synthetic oligonucleotide
  Sense strand starting at position 3378 of SEQ ID NO: 587690
auaucuuuacucugggauu

SEQ ID NO: 811233 - RNA, 19 nt, Artificial Sequence
  Description of Artificial Sequence: Synthetic oligonucleotide
  Antisense strand to SEQ ID NO: 811232
aaucccagaguaaagauau

SEQ ID NO: 811234 - RNA, 19 nt, Artificial Sequence
  Description of Artificial Sequence: Synthetic oligonucleotide
  Sense strand starting at position 3380 of SEQ ID NO: 587690
aucuuuacucugggauucu

SEQ ID NO: 811235 - RNA, 19 nt, Artificial Sequence
  Description of Artificial Sequence: Synthetic oligonucleotide
  Antisense strand to SEQ ID NO: 811234
agaaucccagaguaaagau

SEQ ID NO: 811236 - RNA, 19 nt, Artificial Sequence
  Description of Artificial Sequence: Synthetic oligonucleotide
  Sense strand starting at position 3397 of SEQ ID NO: 587690
cuacguguugccucuagca

SEQ ID NO: 811237 - RNA, 19 nt, Artificial Sequence
  Description of Artificial Sequence: Synthetic oligonucleotide
  Antisense strand to SEQ ID NO: 811236
ugcuagaggcaacacguag

SEQ ID NO: 811238 - RNA, 19 nt, Artificial Sequence
  Description of Artificial Sequence: Synthetic oligonucleotide
  Sense strand starting at position 3416 of SEQ ID NO: 587690
guuucuugaaaguauguca

SEQ ID NO: 811239 - RNA, 19 nt, Artificial Sequence
  Description of Artificial Sequence: Synthetic oligonucleotide
  Antisense strand to SEQ ID NO: 811238
ugacauacuuucaagaaac

SEQ ID NO: 811240 - RNA, 19 nt, Artificial Sequence
  Description of Artificial Sequence: Synthetic oligonucleotide
  Sense strand starting at position 3419 of SEQ ID NO: 587690
ucuugaaaguaugucauag

SEQ ID NO: 811241 - RNA, 19 nt, Artificial Sequence
  Description of Artificial Sequence: Synthetic oligonucleotide
  Antisense strand to SEQ ID NO: 811240
cuaugacauacuuucaaga

SEQ ID NO: 811242 - RNA, 19 nt, Artificial Sequence
  Description of Artificial Sequence: Synthetic oligonucleotide
  Sense strand starting at position 3494 of SEQ ID NO: 587690
uuguucuuggcauaauaua

SEQ ID NO: 811243 - RNA, 19 nt, Artificial Sequence
  Description of Artificial Sequence: Synthetic oligonucleotide
  Antisense strand to SEQ ID NO: 811242
uauauuaugccaagaacaa

SEQ ID NO: 811244 - RNA, 19 nt, Artificial Sequence
  Description of Artificial Sequence: Synthetic oligonucleotide
  Sense strand starting at position 3502 of SEQ ID NO: 587690
ggcauaauauaguuggcua

SEQ ID NO: 811245 - RNA, 19 nt, Artificial Sequence
  Description of Artificial Sequence: Synthetic oligonucleotide
  Antisense strand to SEQ ID NO: 811244
uagccaacuauauuaugcc

SEQ ID NO: 811246 - RNA, 19 nt, Artificial Sequence
  Description of Artificial Sequence: Synthetic oligonucleotide
  Sense strand starting at position 3505 of SEQ ID NO: 587690
auaauauaguuggcuacaa

SEQ ID NO: 811247 - RNA, 19 nt, Artificial Sequence
  Description of Artificial Sequence: Synthetic oligonucleotide
  Antisense strand to SEQ ID NO: 811246
uuguagccaacuauauuau

SEQ ID NO: 811248 - RNA, 19 nt, Artificial Sequence
  Description of Artificial Sequence: Synthetic oligonucleotide
  Sense strand starting at position 3608 of SEQ ID NO: 587690
uuacucauacccugaugga

SEQ ID NO: 811249 - RNA, 19 nt, Artificial Sequence
  Description of Artificial Sequence: Synthetic oligonucleotide
  Antisense strand to SEQ ID NO: 811248
uccaucaggguaugaguaa

SEQ ID NO: 811250 - RNA, 19 nt, Artificial Sequence
  Description of Artificial Sequence: Synthetic oligonucleotide
  Sense strand starting at position 3668 of SEQ ID NO: 587690
aggucuggccuccaguaua

SEQ ID NO: 811251 - RNA, 19 nt, Artificial Sequence
  Description of Artificial Sequence: Synthetic oligonucleotide
  Antisense strand to SEQ ID NO: 811250
uauacuggaggccagaccu

SEQ ID NO: 811252 - RNA, 19 nt, Artificial Sequence
  Description of Artificial Sequence: Synthetic oligonucleotide
  Sense strand starting at position 3707 of SEQ ID NO: 587690
ggugcuucuagcgauuuac

SEQ ID NO: 811253 - RNA, 19 nt, Artificial Sequence
  Description of Artificial Sequence: Synthetic oligonucleotide
  Antisense strand to SEQ ID NO: 811252
guaaaucgcuagaagcacc

SEQ ID NO: 811254 - RNA, 19 nt, Artificial Sequence
  Description of Artificial Sequence: Synthetic oligonucleotide
  Sense strand starting at position 3787 of SEQ ID NO: 587690
ucccauauuucugacucga

SEQ ID NO: 811255 - RNA, 19 nt, Artificial Sequence
  Description of Artificial Sequence: Synthetic oligonucleotide
  Antisense strand to SEQ ID NO: 811254
ucgagucagaaauauggga

SEQ ID NO: 811256 - RNA, 19 nt, Artificial Sequence
  Description of Artificial Sequence: Synthetic oligonucleotide
  Sense strand starting at position 3817 of SEQ ID NO: 587690
guacaacucuggccuagaa

SEQ ID NO: 811257 - RNA, 19 nt, Artificial Sequence
  Description of Artificial Sequence: Synthetic oligonucleotide
  Antisense strand to SEQ ID NO: 811256
uucuaggccagaguuguac

SEQ ID NO: 811258 - RNA, 19 nt, Artificial Sequence
  Description of Artificial Sequence: Synthetic oligonucleotide
  Sense strand starting at position 3870 of SEQ ID NO: 587690
aguuaucugucacuauaug

SEQ ID NO: 811259 - RNA, 19 nt, Artificial Sequence
  Description of Artificial Sequence: Synthetic oligonucleotide
  Antisense strand to SEQ ID NO: 811258
cauauagugacagauaacu

SEQ ID NO: 811260 - RNA, 19 nt, Artificial Sequence
  Description of Artificial Sequence: Synthetic oligonucleotide
  Sense strand starting at position 3871 of SEQ ID NO: 587690
guuaucugucacuauauga

SEQ ID NO: 811261 - RNA, 19 nt, Artificial Sequence
  Description of Artificial Sequence: Synthetic oligonucleotide
  Antisense strand to SEQ ID NO: 811260
ucauauagugacagauaac

SEQ ID NO: 811262 - RNA, 19 nt, Artificial Sequence
  Description of Artificial Sequence: Synthetic oligonucleotide
  Sense strand starting at position 3983 of SEQ ID NO: 587690
uucuguugaccucauugau

SEQ ID NO: 811263 - RNA, 19 nt, Artificial Sequence
  Description of Artificial Sequence: Synthetic oligonucleotide
  Antisense strand to SEQ ID NO: 811262
aucaaugaggucaacagaa

SEQ ID NO: 811264 - RNA, 19 nt, Artificial Sequence
  Description of Artificial Sequence: Synthetic oligonucleotide
  Sense strand starting at position 56 of SEQ ID NO: 587691
gcuaauuuguguuuauuga

SEQ ID NO: 811265 - RNA, 19 nt, Artificial Sequence
  Description of Artificial Sequence: Synthetic oligonucleotide
  Antisense strand to SEQ ID NO: 811264
ucaauaaacacaaauuagc

SEQ ID NO: 811266 - RNA, 19 nt, Artificial Sequence
  Description of Artificial Sequence: Synthetic oligonucleotide
  Sense strand starting at position 185 of SEQ ID NO: 587691
gagacuccuugauuccagu

SEQ ID NO: 811267 - RNA, 19 nt, Artificial Sequence
  Description of Artificial Sequence: Synthetic oligonucleotide
  Antisense strand to SEQ ID NO: 811266
acuggaaucaaggagucuc

SEQ ID NO: 811268 - RNA, 19 nt, Artificial Sequence
  Description of Artificial Sequence: Synthetic oligonucleotide
  Sense strand starting at position 200 of SEQ ID NO: 587691
cagugcauaccugauguga

SEQ ID NO: 811269 - RNA, 19 nt, Artificial Sequence
  Description of Artificial Sequence: Synthetic oligonucleotide
  Antisense strand to SEQ ID NO: 811268
ucacaucagguaugcacug

SEQ ID NO: 811270 - RNA, 19 nt, Artificial Sequence
  Description of Artificial Sequence: Synthetic oligonucleotide
  Sense strand starting at position 204 of SEQ ID NO: 587691
gcauaccugaugugagaca

SEQ ID NO: 811271 - RNA, 19 nt, Artificial Sequence
  Description of Artificial Sequence: Synthetic oligonucleotide
  Antisense strand to SEQ ID NO: 811270
ugucucacaucagguaugc

SEQ ID NO: 811272 - RNA, 19 nt, Artificial Sequence
  Description of Artificial Sequence: Synthetic oligonucleotide
  Sense strand starting at position 216 of SEQ ID NO: 587691
ugagacagauuccugucau

SEQ ID NO: 811273 - RNA, 19 nt, Artificial Sequence
  Description of Artificial Sequence: Synthetic oligonucleotide
  Antisense strand to SEQ ID NO: 811272
augacaggaaucugucuca

SEQ ID NO: 811274 - RNA, 19 nt, Artificial Sequence
  Description of Artificial Sequence: Synthetic oligonucleotide
  Sense strand starting at position 248 of SEQ ID NO: 587691
cuaugcauugaauggagua

SEQ ID NO: 811275 - RNA, 19 nt, Artificial Sequence
  Description of Artificial Sequence: Synthetic oligonucleotide
  Antisense strand to SEQ ID NO: 811274
uacuccauucaaugcauag

SEQ ID NO: 811276 - RNA, 19 nt, Artificial Sequence
  Description of Artificial Sequence: Synthetic oligonucleotide
  Sense strand starting at position 375 of SEQ ID NO: 587691
gaugacugaugcucaggaa

SEQ ID NO: 811277 - RNA, 19 nt, Artificial Sequence
  Description of Artificial Sequence: Synthetic oligonucleotide
  Antisense strand to SEQ ID NO: 811276
uuccugagcaucagucauc

SEQ ID NO: 811278 - RNA, 19 nt, Artificial Sequence
  Description of Artificial Sequence: Synthetic oligonucleotide
  Sense strand starting at position 399 of SEQ ID NO: 587691
gaugccuccugacuggaua

SEQ ID NO: 811279 - RNA, 19 nt, Artificial Sequence
  Description of Artificial Sequence: Synthetic oligonucleotide
  Antisense strand to SEQ ID NO: 811278
uauccagucaggaggcauc

SEQ ID NO: 811280 - RNA, 19 nt, Artificial Sequence
  Description of Artificial Sequence: Synthetic oligonucleotide
  Sense strand starting at position 402 of SEQ ID NO: 587691
gccuccugacuggauagau

SEQ ID NO: 811281 - RNA, 19 nt, Artificial Sequence
  Description of Artificial Sequence: Synthetic oligonucleotide
  Antisense strand to SEQ ID NO: 811280
aucuauccagucaggaggc

SEQ ID NO: 811282 - RNA, 19 nt, Artificial Sequence
  Description of Artificial Sequence: Synthetic oligonucleotide
  Sense strand starting at position 439 of SEQ ID NO: 587691
gagcuagaguucucucuga

SEQ ID NO: 811283 - RNA, 19 nt, Artificial Sequence
  Description of Artificial Sequence: Synthetic oligonucleotide
  Antisense strand to SEQ ID NO: 811282
ucagagagaacucuagcuc

SEQ ID NO: 811284 - RNA, 19 nt, Artificial Sequence
  Description of Artificial Sequence: Synthetic oligonucleotide
  Sense strand starting at position 565 of SEQ ID NO: 587691
guaugagcuagccaaauug

SEQ ID NO: 811285 - RNA, 19 nt, Artificial Sequence
  Description of Artificial Sequence: Synthetic oligonucleotide
  Antisense strand to SEQ ID NO: 811284
caauuuggcuagcucauac

SEQ ID NO: 811286 - RNA, 19 nt, Artificial Sequence
  Description of Artificial Sequence: Synthetic oligonucleotide
  Sense strand starting at position 630 of SEQ ID NO: 587691
cguuucccuguauaucaaa

SEQ ID NO: 811287 - RNA, 19 nt, Artificial Sequence
  Description of Artificial Sequence: Synthetic oligonucleotide
  Antisense strand to SEQ ID NO: 811286
uuugauauacagggaaacg

SEQ ID NO: 811288 - RNA, 19 nt, Artificial Sequence
  Description of Artificial Sequence: Synthetic oligonucleotide
  Sense strand starting at position 656 of SEQ ID NO: 587691
auaugaguauuggcacgaa

SEQ ID NO: 811289 - RNA, 19 nt, Artificial Sequence
  Description of Artificial Sequence: Synthetic oligonucleotide
  Antisense strand to SEQ ID NO: 811288
uucgugccaauacucauau

SEQ ID NO: 811290 - RNA, 19 nt, Artificial Sequence
  Description of Artificial Sequence: Synthetic oligonucleotide
  Sense strand starting at position 659 of SEQ ID NO: 587691
ugaguauuggcacgaauga

SEQ ID NO: 811291 - RNA, 19 nt, Artificial Sequence
  Description of Artificial Sequence: Synthetic oligonucleotide
  Antisense strand to SEQ ID NO: 811290
ucauucgugccaauacuca

SEQ ID NO: 811292 - RNA, 19 nt, Artificial Sequence
  Description of Artificial Sequence: Synthetic oligonucleotide
  Sense strand starting at position 660 of SEQ ID NO: 587691
gaguauuggcacgaaugac

SEQ ID NO: 811293 - RNA, 19 nt, Artificial Sequence
  Description of Artificial Sequence: Synthetic oligonucleotide
  Antisense strand to SEQ ID NO: 811292
gucauucgugccaauacuc

SEQ ID NO: 811294 - RNA, 19 nt, Artificial Sequence
  Description of Artificial Sequence: Synthetic oligonucleotide
  Sense strand starting at position 773 of SEQ ID NO: 587691
cuuaauauuguugguacua

SEQ ID NO: 811295 - RNA, 19 nt, Artificial Sequence
  Description of Artificial Sequence: Synthetic oligonucleotide
  Antisense strand to SEQ ID NO: 811294
uaguaccaacaauauuaag

SEQ ID NO: 811296 - RNA, 19 nt, Artificial Sequence
  Description of Artificial Sequence: Synthetic oligonucleotide
  Sense strand starting at position 861 of SEQ ID NO: 587691
ccaagugugaguuacauag

SEQ ID NO: 811297 - RNA, 19 nt, Artificial Sequence
  Description of Artificial Sequence: Synthetic oligonucleotide
  Antisense strand to SEQ ID NO: 811296
cuauguaacucacacuugg

SEQ ID NO: 811298 - RNA, 19 nt, Artificial Sequence
  Description of Artificial Sequence: Synthetic oligonucleotide
  Sense strand starting at position 865 of SEQ ID NO: 587691
gugugaguuacauaguuag

SEQ ID NO: 811299 - RNA, 19 nt, Artificial Sequence
  Description of Artificial Sequence: Synthetic oligonucleotide
  Antisense strand to SEQ ID NO: 811298
cuaacuauguaacucacac

SEQ ID NO: 811300 - RNA, 19 nt, Artificial Sequence
  Description of Artificial Sequence: Synthetic oligonucleotide
  Sense strand starting at position 876 of SEQ ID NO: 587691
auaguuagggcucaguuau

SEQ ID NO: 811301 - RNA, 19 nt, Artificial Sequence
  Description of Artificial Sequence: Synthetic oligonucleotide
  Antisense strand to SEQ ID NO: 811300
auaacugagcccuaacuau

SEQ ID NO: 811302 - RNA, 19 nt, Artificial Sequence
  Description of Artificial Sequence: Synthetic oligonucleotide
  Sense strand starting at position 976 of SEQ ID NO: 587691
cuguguaucguaucuucuu

SEQ ID NO: 811303 - RNA, 19 nt, Artificial Sequence
  Description of Artificial Sequence: Synthetic oligonucleotide
  Antisense strand to SEQ ID NO: 811302
aagaagauacgauacacag

SEQ ID NO: 811304 - RNA, 19 nt, Artificial Sequence
  Description of Artificial Sequence: Synthetic oligonucleotide
  Sense strand starting at position 988 of SEQ ID NO: 587691
ucuucuucucuacaguaga

SEQ ID NO: 811305 - RNA, 19 nt, Artificial Sequence
  Description of Artificial Sequence: Synthetic oligonucleotide
  Antisense strand to SEQ ID NO: 811304
ucuacuguagagaagaaga

SEQ ID NO: 811306 - RNA, 19 nt, Artificial Sequence
  Description of Artificial Sequence: Synthetic oligonucleotide
  Sense strand starting at position 1163 of SEQ ID NO: 587691
gcugguauucacugaugag

SEQ ID NO: 811307 - RNA, 19 nt, Artificial Sequence
  Description of Artificial Sequence: Synthetic oligonucleotide
  Antisense strand to SEQ ID NO: 811306
cucaucagugaauaccagc

SEQ ID NO: 811308 - RNA, 19 nt, Artificial Sequence
  Description of Artificial Sequence: Synthetic oligonucleotide
  Sense strand starting at position 1344 of SEQ ID NO: 587691
aagugagcuuucuuaugag

SEQ ID NO: 811309 - RNA, 19 nt, Artificial Sequence
  Description of Artificial Sequence: Synthetic oligonucleotide
  Antisense strand to SEQ ID NO: 811308
cucauaagaaagcucacuu

SEQ ID NO: 811310 - RNA, 19 nt, Artificial Sequence
  Description of Artificial Sequence: Synthetic oligonucleotide
  Sense strand starting at position 1432 of SEQ ID NO: 587691
cccaaauccuuacugggau

SEQ ID NO: 811311 - RNA, 19 nt, Artificial Sequence
  Description of Artificial Sequence: Synthetic oligonucleotide
  Antisense strand to SEQ ID NO: 811310
aucccaguaaggauuuggg

SEQ ID NO: 811312 - RNA, 19 nt, Artificial Sequence
  Description of Artificial Sequence: Synthetic oligonucleotide
  Sense strand starting at position 1482 of SEQ ID NO: 587691
cgcgauuucgacugcaaag

SEQ ID NO: 811313 - RNA, 19 nt, Artificial Sequence
  Description of Artificial Sequence: Synthetic oligonucleotide
  Antisense strand to SEQ ID NO: 811312
cuuugcagucgaaaucgcg

SEQ ID NO: 811314 - RNA, 19 nt, Artificial Sequence
  Description of Artificial Sequence: Synthetic oligonucleotide
  Sense strand starting at position 1550 of SEQ ID NO: 587691
gaccuuggcuuuccucaga

SEQ ID NO: 811315 - RNA, 19 nt, Artificial Sequence
  Description of Artificial Sequence: Synthetic oligonucleotide
  Antisense strand to SEQ ID NO: 811314
ucugaggaaagccaagguc

SEQ ID NO: 811316 - RNA, 19 nt, Artificial Sequence
  Description of Artificial Sequence: Synthetic oligonucleotide
  Sense strand starting at position 1553 of SEQ ID NO: 587691
cuuggcuuuccucagaauc

SEQ ID NO: 811317 - RNA, 19 nt, Artificial Sequence
  Description of Artificial Sequence: Synthetic oligonucleotide
  Antisense strand to SEQ ID NO: 811316
gauucugaggaaagccaag

SEQ ID NO: 811318 - RNA, 19 nt, Artificial Sequence
  Description of Artificial Sequence: Synthetic oligonucleotide
  Sense strand starting at position 1617 of SEQ ID NO: 587691
uaguccugugucuaaagga

SEQ ID NO: 811319 - RNA, 19 nt, Artificial Sequence
  Description of Artificial Sequence: Synthetic oligonucleotide
  Antisense strand to SEQ ID NO: 811318
uccuuuagacacaggacua

SEQ ID NO: 811320 - RNA, 19 nt, Artificial Sequence
  Description of Artificial Sequence: Synthetic oligonucleotide
  Sense strand starting at position 2201 of SEQ ID NO: 587691
cugcuucuuccggauaaac

SEQ ID NO: 811321 - RNA, 19 nt, Artificial Sequence
  Description of Artificial Sequence: Synthetic oligonucleotide
  Antisense strand to SEQ ID NO: 811320
guuuauccggaagaagcag

SEQ ID NO: 811322 - RNA, 19 nt, Artificial Sequence
  Description of Artificial Sequence: Synthetic oligonucleotide
  Sense strand starting at position 2615 of SEQ ID NO: 587691
aagggaugcuggcccauaa

SEQ ID NO: 811323 - RNA, 19 nt, Artificial Sequence
  Description of Artificial Sequence: Synthetic oligonucleotide
  Antisense strand to SEQ ID NO: 811322
uuaugggccagcaucccuu

SEQ ID NO: 811324 - RNA, 19 nt, Artificial Sequence
  Description of Artificial Sequence: Synthetic oligonucleotide
  Sense strand starting at position 2638 of SEQ ID NO: 587691
ccaaucuguuggccacaaa

SEQ ID NO: 811325 - RNA, 19 nt, Artificial Sequence
  Description of Artificial Sequence: Synthetic oligonucleotide
  Antisense strand to SEQ ID NO: 811324
uuuguggccaacagauugg

SEQ ID NO: 811326 - RNA, 19 nt, Artificial Sequence
  Description of Artificial Sequence: Synthetic oligonucleotide
  Sense strand starting at position 2791 of SEQ ID NO: 587691
aggagcagguguucggaaa

SEQ ID NO: 811327 - RNA, 19 nt, Artificial Sequence
  Description of Artificial Sequence: Synthetic oligonucleotide
  Antisense strand to SEQ ID NO: 811326
uuuccgaacaccugcuccu

SEQ ID NO: 811328 - RNA, 19 nt, Artificial Sequence
  Description of Artificial Sequence: Synthetic oligonucleotide
  Sense strand starting at position 2837 of SEQ ID NO: 587691
gggaaauucuggcugaacc

SEQ ID NO: 811329 - RNA, 19 nt, Artificial Sequence
  Description of Artificial Sequence: Synthetic oligonucleotide
  Antisense strand to SEQ ID NO: 811328
gguucagccagaauuuccc

SEQ ID NO: 811330 - RNA, 19 nt, Artificial Sequence
  Description of Artificial Sequence: Synthetic oligonucleotide
  Sense strand starting at position 2838 of SEQ ID NO: 587691
ggaaauucuggcugaacca

SEQ ID NO: 811331 - RNA, 19 nt, Artificial Sequence
  Description of Artificial Sequence: Synthetic oligonucleotide
  Antisense strand to SEQ ID NO: 811330
ugguucagccagaauuucc

SEQ ID NO: 811332 - RNA, 19 nt, Artificial Sequence
  Description of Artificial Sequence: Synthetic oligonucleotide
  Sense strand starting at position 3070 of SEQ ID NO: 587691
acagucucuugauuguuga

SEQ ID NO: 811333 - RNA, 19 nt, Artificial Sequence
  Description of Artificial Sequence: Synthetic oligonucleotide
  Antisense strand to SEQ ID NO: 811332
ucaacaaucaagagacugu

SEQ ID NO: 811334 - RNA, 19 nt, Artificial Sequence
  Description of Artificial Sequence: Synthetic oligonucleotide
  Sense strand starting at position 3453 of SEQ ID NO: 587691
cauguaucuguacaguacu

SEQ ID NO: 811335 - RNA, 19 nt, Artificial Sequence
  Description of Artificial Sequence: Synthetic oligonucleotide
  Antisense strand to SEQ ID NO: 811334
aguacuguacagauacaug

SEQ ID NO: 811336 - RNA, 19 nt, Artificial Sequence
  Description of Artificial Sequence: Synthetic oligonucleotide
  Sense strand starting at position 3479 of SEQ ID NO: 587691
uuuagauugcuggagcaua

SEQ ID NO: 811337 - RNA, 19 nt, Artificial Sequence
  Description of Artificial Sequence: Synthetic oligonucleotide
  Antisense strand to SEQ ID NO: 811336
uaugcuccagcaaucuaaa

SEQ ID NO: 811338 - RNA, 19 nt, Artificial Sequence
  Description of Artificial Sequence: Synthetic oligonucleotide
  Sense strand starting at position 3617 of SEQ ID NO: 587691
guuuccauuucuguugagu

SEQ ID NO: 811339 - RNA, 19 nt, Artificial Sequence
  Description of Artificial Sequence: Synthetic oligonucleotide
  Antisense strand to SEQ ID NO: 811338
acucaacagaaauggaaac

SEQ ID NO: 811340 - RNA, 19 nt, Artificial Sequence
  Description of Artificial Sequence: Synthetic oligonucleotide
  Sense strand starting at position 3788 of SEQ ID NO: 587691
guaucuacccaguauguuc

SEQ ID NO: 811341 - RNA, 19 nt, Artificial Sequence
  Description of Artificial Sequence: Synthetic oligonucleotide
  Antisense strand to SEQ ID NO: 811340
gaacauacuggguagauac

SEQ ID NO: 811342 - RNA, 19 nt, Artificial Sequence
  Description of Artificial Sequence: Synthetic oligonucleotide
  Sense strand starting at position 3952 of SEQ ID NO: 587691
gcuggaggauuccuugaag

SEQ ID NO: 811343 - RNA, 19 nt, Artificial Sequence
  Description of Artificial Sequence: Synthetic oligonucleotide
  Antisense strand to SEQ ID NO: 811342
cuucaaggaauccuccagc

SEQ ID NO: 811344 - RNA, 19 nt, Artificial Sequence
  Description of Artificial Sequence: Synthetic oligonucleotide
  Sense strand starting at position 1 of SEQ ID NO: 587692
gagcuagaguucucucuga

SEQ ID NO: 811345 - RNA, 19 nt, Artificial Sequence
  Description of Artificial Sequence: Synthetic oligonucleotide
  Antisense strand to SEQ ID NO: 811344
ucagagagaacucuagcuc

SEQ ID NO: 811346 - RNA, 19 nt, Artificial Sequence
  Description of Artificial Sequence: Synthetic oligonucleotide
  Sense strand starting at position 35 of SEQ ID NO: 587692
cacguuguugucuaaucaa

SEQ ID NO: 811347 - RNA, 19 nt, Artificial Sequence
  Description of Artificial Sequence: Synthetic oligonucleotide
  Antisense strand to SEQ ID NO: 811346
uugauuagacaacaacgug

SEQ ID NO: 811348 - RNA, 19 nt, Artificial Sequence
  Description of Artificial Sequence: Synthetic oligonucleotide
  Sense strand starting at position 38 of SEQ ID NO: 587692
guuguugucuaaucaauga

SEQ ID NO: 811349 - RNA, 19 nt, Artificial Sequence
  Description of Artificial Sequence: Synthetic oligonucleotide
  Antisense strand to SEQ ID NO: 811348
ucauugauuagacaacaac

SEQ ID NO: 811350 - RNA, 19 nt, Artificial Sequence
  Description of Artificial Sequence: Synthetic oligonucleotide
  Sense strand starting at position 123 of SEQ ID NO: 587692
agcuguaugagcuagccaa

SEQ ID NO: 811351 - RNA, 19 nt, Artificial Sequence
  Description of Artificial Sequence: Synthetic oligonucleotide
  Antisense strand to SEQ ID NO: 811350
uuggcuagcucauacagcu

SEQ ID NO: 811352 - RNA, 19 nt, Artificial Sequence
  Description of Artificial Sequence: Synthetic oligonucleotide
  Sense strand starting at position 127 of SEQ ID NO: 587692
guaugagcuagccaaauug

SEQ ID NO: 811353 - RNA, 19 nt, Artificial Sequence
  Description of Artificial Sequence: Synthetic oligonucleotide
  Antisense strand to SEQ ID NO: 811352
caauuuggcuagcucauac

SEQ ID NO: 811354 - RNA, 19 nt, Artificial Sequence
  Description of Artificial Sequence: Synthetic oligonucleotide
  Sense strand starting at position 192 of SEQ ID NO: 587692
cguuucccuguauaucaaa

SEQ ID NO: 811355 - RNA, 19 nt, Artificial Sequence
  Description of Artificial Sequence: Synthetic oligonucleotide
  Antisense strand to SEQ ID NO: 811354
uuugauauacagggaaacg

SEQ ID NO: 811356 - RNA, 19 nt, Artificial Sequence
  Description of Artificial Sequence: Synthetic oligonucleotide
  Sense strand starting at position 218 of SEQ ID NO: 587692
auaugaguauuggcacgaa

SEQ ID NO: 811357 - RNA, 19 nt, Artificial Sequence
  Description of Artificial Sequence: Synthetic oligonucleotide
  Antisense strand to SEQ ID NO: 811356
uucgugccaauacucauau

SEQ ID NO: 811358 - RNA, 19 nt, Artificial Sequence
  Description of Artificial Sequence: Synthetic oligonucleotide
  Sense strand starting at position 221 of SEQ ID NO: 587692
ugaguauuggcacgaauga

SEQ ID NO: 811359 - RNA, 19 nt, Artificial Sequence
  Description of Artificial Sequence: Synthetic oligonucleotide
  Antisense strand to SEQ ID NO: 811358
ucauucgugccaauacuca

SEQ ID NO: 811360 - RNA, 19 nt, Artificial Sequence
  Description of Artificial Sequence: Synthetic oligonucleotide
  Sense strand starting at position 222 of SEQ ID NO: 587692
gaguauuggcacgaaugac

SEQ ID NO: 811361 - RNA, 19 nt, Artificial Sequence
  Description of Artificial Sequence: Synthetic oligonucleotide
  Antisense strand to SEQ ID NO: 811360
gucauucgugccaauacuc

SEQ ID NO: 811362 - RNA, 19 nt, Artificial Sequence
  Description of Artificial Sequence: Synthetic oligonucleotide
  Sense strand starting at position 272 of SEQ ID NO: 587692
gugucaaaguucucacaau

SEQ ID NO: 811363 - RNA, 19 nt, Artificial Sequence
  Description of Artificial Sequence: Synthetic oligonucleotide
  Antisense strand to SEQ ID NO: 811362
auugugagaacuuugacac

SEQ ID NO: 811364 - RNA, 19 nt, Artificial Sequence
  Description of Artificial Sequence: Synthetic oligonucleotide
  Sense strand starting at position 335 of SEQ ID NO: 587692
cuuaauauuguugguacua

SEQ ID NO: 811365 - RNA, 19 nt, Artificial Sequence
  Description of Artificial Sequence: Synthetic oligonucleotide
  Antisense strand to SEQ ID NO: 811364
uaguaccaacaauauuaag

SEQ ID NO: 811366 - RNA, 19 nt, Artificial Sequence
  Description of Artificial Sequence: Synthetic oligonucleotide
  Sense strand starting at position 423 of SEQ ID NO: 587692
ccaagugugaguuacauag

SEQ ID NO: 811367 - RNA, 19 nt, Artificial Sequence
  Description of Artificial Sequence: Synthetic oligonucleotide
  Antisense strand to SEQ ID NO: 811366
cuauguaacucacacuugg

SEQ ID NO: 811368 - RNA, 19 nt, Artificial Sequence
  Description of Artificial Sequence: Synthetic oligonucleotide
  Sense strand starting at position 427 of SEQ ID NO: 587692
gugugaguuacauaguuag

SEQ ID NO: 811369 - RNA, 19 nt, Artificial Sequence
  Description of Artificial Sequence: Synthetic oligonucleotide
  Antisense strand to SEQ ID NO: 811368
cuaacuauguaacucacac

SEQ ID NO: 811370 - RNA, 19 nt, Artificial Sequence
  Description of Artificial Sequence: Synthetic oligonucleotide
  Sense strand starting at position 438 of SEQ ID NO: 587692
auaguuagggcucaguuau

SEQ ID NO: 811371 - RNA, 19 nt, Artificial Sequence
  Description of Artificial Sequence: Synthetic oligonucleotide
  Antisense strand to SEQ ID NO: 811370
auaacugagcccuaacuau

SEQ ID NO: 811372 - RNA, 19 nt, Artificial Sequence
  Description of Artificial Sequence: Synthetic oligonucleotide
  Sense strand starting at position 538 of SEQ ID NO: 587692
cuguguaucguaucuucuu

SEQ ID NO: 811373 - RNA, 19 nt, Artificial Sequence
  Description of Artificial Sequence: Synthetic oligonucleotide
  Antisense strand to SEQ ID NO: 811372
aagaagauacgauacacag

SEQ ID NO: 811374 - RNA, 19 nt, Artificial Sequence
  Description of Artificial Sequence: Synthetic oligonucleotide
  Sense strand starting at position 550 of SEQ ID NO: 587692
ucuucuucucuacaguaga

SEQ ID NO: 811375 - RNA, 19 nt, Artificial Sequence
  Description of Artificial Sequence: Synthetic oligonucleotide
  Antisense strand to SEQ ID NO: 811374
ucuacuguagagaagaaga

SEQ ID NO: 811376 - RNA, 19 nt, Artificial Sequence
  Description of Artificial Sequence: Synthetic oligonucleotide
  Sense strand starting at position 725 of SEQ ID NO: 587692
gcugguauucacugaugag

SEQ ID NO: 811377 - RNA, 19 nt, Artificial Sequence
  Description of Artificial Sequence: Synthetic oligonucleotide
  Antisense strand to SEQ ID NO: 811376
cucaucagugaauaccagc

SEQ ID NO: 811378 - RNA, 19 nt, Artificial Sequence
  Description of Artificial Sequence: Synthetic oligonucleotide
  Sense strand starting at position 906 of SEQ ID NO: 587692
aagugagcuuucuuaugag

SEQ ID NO: 811379 - RNA, 19 nt, Artificial Sequence
  Description of Artificial Sequence: Synthetic oligonucleotide
  Antisense strand to SEQ ID NO: 811378
cucauaagaaagcucacuu

SEQ ID NO: 811380 - RNA, 19 nt, Artificial Sequence
  Description of Artificial Sequence: Synthetic oligonucleotide
  Sense strand starting at position 994 of SEQ ID NO: 587692
cccaaauccuuacugggau

SEQ ID NO: 811381 - RNA, 19 nt, Artificial Sequence
  Description of Artificial Sequence: Synthetic oligonucleotide
  Antisense strand to SEQ ID NO: 811380
aucccaguaaggauuuggg

SEQ ID NO: 811382 - RNA, 19 nt, Artificial Sequence
  Description of Artificial Sequence: Synthetic oligonucleotide
  Sense strand starting at position 1044 of SEQ ID NO: 587692
cgcgauuucgacugcaaag

SEQ ID NO: 811383 - RNA, 19 nt, Artificial Sequence
  Description of Artificial Sequence: Synthetic oligonucleotide
  Antisense strand to SEQ ID NO: 811382
cuuugcagucgaaaucgcg

SEQ ID NO: 811384 - RNA, 19 nt, Artificial Sequence
  Description of Artificial Sequence: Synthetic oligonucleotide
  Sense strand starting at position 1112 of SEQ ID NO: 587692
gaccuuggcuuuccucaga

SEQ ID NO: 811385 - RNA, 19 nt, Artificial Sequence
  Description of Artificial Sequence: Synthetic oligonucleotide
  Antisense strand to SEQ ID NO: 811384
ucugaggaaagccaagguc

SEQ ID NO: 811386 - RNA, 19 nt, Artificial Sequence
  Description of Artificial Sequence: Synthetic oligonucleotide
  Sense strand starting at position 1115 of SEQ ID NO: 587692
cuuggcuuuccucagaauc

SEQ ID NO: 811387 - RNA, 19 nt, Artificial Sequence
  Description of Artificial Sequence: Synthetic oligonucleotide
  Antisense strand to SEQ ID NO: 811386
gauucugaggaaagccaag

SEQ ID NO: 811388 - RNA, 19 nt, Artificial Sequence
  Description of Artificial Sequence: Synthetic oligonucleotide
  Sense strand starting at position 1179 of SEQ ID NO: 587692
uaguccugugucuaaagga

SEQ ID NO: 811389 - RNA, 19 nt, Artificial Sequence
  Description of Artificial Sequence: Synthetic oligonucleotide
  Antisense strand to SEQ ID NO: 811388
uccuuuagacacaggacua

SEQ ID NO: 811390 - RNA, 19 nt, Artificial Sequence
  Description of Artificial Sequence: Synthetic oligonucleotide
  Sense strand starting at position 1763 of SEQ ID NO: 587692
cugcuucuuccggauaaac

SEQ ID NO: 811391 - RNA, 19 nt, Artificial Sequence
  Description of Artificial Sequence: Synthetic oligonucleotide
  Antisense strand to SEQ ID NO: 811390
guuuauccggaagaagcag

SEQ ID NO: 811392 - RNA, 19 nt, Artificial Sequence
  Description of Artificial Sequence: Synthetic oligonucleotide
  Sense strand starting at position 2177 of SEQ ID NO: 587692
aagggaugcuggcccauaa

SEQ ID NO: 811393 - RNA, 19 nt, Artificial Sequence
  Description of Artificial Sequence: Synthetic oligonucleotide
  Antisense strand to SEQ ID NO: 811392
uuaugggccagcaucccuu

SEQ ID NO: 811394 - RNA, 19 nt, Artificial Sequence
  Description of Artificial Sequence: Synthetic oligonucleotide
  Sense strand starting at position 2200 of SEQ ID NO: 587692
ccaaucuguuggccacaaa

SEQ ID NO: 811395 - RNA, 19 nt, Artificial Sequence
  Description of Artificial Sequence: Synthetic oligonucleotide
  Antisense strand to SEQ ID NO: 811394
uuuguggccaacagauugg

SEQ ID NO: 811396 - RNA, 19 nt, Artificial Sequence
  Description of Artificial Sequence: Synthetic oligonucleotide
  Sense strand starting at position 2286 of SEQ ID NO: 587692
gaaggcaacucagucguaa

SEQ ID NO: 811397 - RNA, 19 nt, Artificial Sequence
  Description of Artificial Sequence: Synthetic oligonucleotide
  Antisense strand to SEQ ID NO: 811396
uuacgacugaguugccuuc

SEQ ID NO: 811398 - RNA, 19 nt, Artificial Sequence
  Description of Artificial Sequence: Synthetic oligonucleotide
  Sense strand starting at position 2297 of SEQ ID NO: 587692
agucguaacuauuccaaau

SEQ ID NO: 811399 - RNA, 19 nt, Artificial Sequence
  Description of Artificial Sequence: Synthetic oligonucleotide
  Antisense strand to SEQ ID NO: 811398
auuuggaauaguuacgacu

SEQ ID NO: 811400 - RNA, 19 nt, Artificial Sequence
  Description of Artificial Sequence: Synthetic oligonucleotide
  Sense strand starting at position 2353 of SEQ ID NO: 587692
aggagcagguguucggaaa

SEQ ID NO: 811401 - RNA, 19 nt, Artificial Sequence
  Description of Artificial Sequence: Synthetic oligonucleotide
  Antisense strand to SEQ ID NO: 811400
uuuccgaacaccugcuccu

SEQ ID NO: 811402 - RNA, 19 nt, Artificial Sequence
  Description of Artificial Sequence: Synthetic oligonucleotide
  Sense strand starting at position 2399 of SEQ ID NO: 587692
gggaaauucuggcugaacc

SEQ ID NO: 811403 - RNA, 19 nt, Artificial Sequence
  Description of Artificial Sequence: Synthetic oligonucleotide
  Antisense strand to SEQ ID NO: 811402
gguucagccagaauuuccc

SEQ ID NO: 811404 - RNA, 19 nt, Artificial Sequence
  Description of Artificial Sequence: Synthetic oligonucleotide
  Sense strand starting at position 2400 of SEQ ID NO: 587692
ggaaauucuggcugaacca

SEQ ID NO: 811405 - RNA, 19 nt, Artificial Sequence
  Description of Artificial Sequence: Synthetic oligonucleotide
  Antisense strand to SEQ ID NO: 811404
ugguucagccagaauuucc

SEQ ID NO: 811406 - RNA, 19 nt, Artificial Sequence
  Description of Artificial Sequence: Synthetic oligonucleotide
  Sense strand starting at position 2632 of SEQ ID NO: 587692
acagucucuugauuguuga

SEQ ID NO: 811407 - RNA, 19 nt, Artificial Sequence
  Description of Artificial Sequence: Synthetic oligonucleotide
  Antisense strand to SEQ ID NO: 811406
ucaacaaucaagagacugu

SEQ ID NO: 811408 - RNA, 19 nt, Artificial Sequence
  Description of Artificial Sequence: Synthetic oligonucleotide
  Sense strand starting at position 2635 of SEQ ID NO: 587692
gucucuugauuguugagau

SEQ ID NO: 811409 - RNA, 19 nt, Artificial Sequence
  Description of Artificial Sequence: Synthetic oligonucleotide
  Antisense strand to SEQ ID NO: 811408
aucucaacaaucaagagac

SEQ ID NO: 811410 - RNA, 19 nt, Artificial Sequence
  Description of Artificial Sequence: Synthetic oligonucleotide
  Sense strand starting at position 2649 of SEQ ID NO: 587692
gagauaauugcucgcauga

SEQ ID NO: 811411 - RNA, 19 nt, Artificial Sequence
  Description of Artificial Sequence: Synthetic oligonucleotide
  Antisense strand to SEQ ID NO: 811410
ucaugcgagcaauuaucuc

SEQ ID NO: 811412 - RNA, 19 nt, Artificial Sequence
  Description of Artificial Sequence: Synthetic oligonucleotide
  Sense strand starting at position 3015 of SEQ ID NO: 587692
cauguaucuguacaguacu

SEQ ID NO: 811413 - RNA, 19 nt, Artificial Sequence
  Description of Artificial Sequence: Synthetic oligonucleotide
  Antisense strand to SEQ ID NO: 811412
aguacuguacagauacaug

SEQ ID NO: 811414 - RNA, 19 nt, Artificial Sequence
  Description of Artificial Sequence: Synthetic oligonucleotide
  Sense strand starting at position 3041 of SEQ ID NO: 587692
uuuagauugcuggagcaua

SEQ ID NO: 811415 - RNA, 19 nt, Artificial Sequence
  Description of Artificial Sequence: Synthetic oligonucleotide
  Antisense strand to SEQ ID NO: 811414
uaugcuccagcaaucuaaa

SEQ ID NO: 811416 - RNA, 19 nt, Artificial Sequence
  Description of Artificial Sequence: Synthetic oligonucleotide
  Sense strand starting at position 3179 of SEQ ID NO: 587692
guuuccauuucuguugagu

SEQ ID NO: 811417 - RNA, 19 nt, Artificial Sequence
  Description of Artificial Sequence: Synthetic oligonucleotide
  Antisense strand to SEQ ID NO: 811416
acucaacagaaauggaaac

SEQ ID NO: 811418 - RNA, 19 nt, Artificial Sequence
  Description of Artificial Sequence: Synthetic oligonucleotide
  Sense strand starting at position 3350 of SEQ ID NO: 587692
guaucuacccaguauguuc

SEQ ID NO: 811419 - RNA, 19 nt, Artificial Sequence
  Description of Artificial Sequence: Synthetic oligonucleotide
  Antisense strand to SEQ ID NO: 811418
gaacauacuggguagauac

SEQ ID NO: 811420 - RNA, 19 nt, Artificial Sequence
  Description of Artificial Sequence: Synthetic oligonucleotide
  Sense strand starting at position 3514 of SEQ ID NO: 587692
gcuggaggauuccuugaag

SEQ ID NO: 811421 - RNA, 19 nt, Artificial Sequence
  Description of Artificial Sequence: Synthetic oligonucleotide
  Antisense strand to SEQ ID NO: 811420
cuucaaggaauccuccagc

SEQ ID NO: 811422 - RNA, 19 nt, Artificial Sequence
  Description of Artificial Sequence: Synthetic oligonucleotide
  Sense strand starting at position 3928 of SEQ ID NO: 587692
ggguuaauagcacagcaau

SEQ ID NO: 811423 - RNA, 19 nt, Artificial Sequence
  Description of Artificial Sequence: Synthetic oligonucleotide
  Antisense strand to SEQ ID NO: 811422
auugcugugcuauuaaccc

SEQ ID NO: 811424 - RNA, 19 nt, Artificial Sequence
  Description of Artificial Sequence: Synthetic oligonucleotide
  Sense strand starting at position 59 of SEQ ID NO: 587693
cugcucccaccaugagaaa

SEQ ID NO: 811425 - RNA, 19 nt, Artificial Sequence
  Description of Artificial Sequence: Synthetic oligonucleotide
  Antisense strand to SEQ ID NO: 811424
uuucucauggugggagcag

SEQ ID NO: 811426 - RNA, 19 nt, Artificial Sequence
  Description of Artificial Sequence: Synthetic oligonucleotide
  Sense strand starting at position 472 of SEQ ID NO: 587693
uaugcuaaagucugaaugu

SEQ ID NO: 811427 - RNA, 19 nt, Artificial Sequence
  Description of Artificial Sequence: Synthetic oligonucleotide
  Antisense strand to SEQ ID NO: 811426
acauucagacuuuagcaua

SEQ ID NO: 811428 - RNA, 19 nt, Artificial Sequence
  Description of Artificial Sequence: Synthetic oligonucleotide
  Sense strand starting at position 792 of SEQ ID NO: 587693
ugguuuaagugguucucaa

SEQ ID NO: 811429 - RNA, 19 nt, Artificial Sequence
  Description of Artificial Sequence: Synthetic oligonucleotide
  Antisense strand to SEQ ID NO: 811428
uugagaaccacuuaaacca

SEQ ID NO: 811430 - RNA, 19 nt, Artificial Sequence
  Description of Artificial Sequence: Synthetic oligonucleotide
  Sense strand starting at position 846 of SEQ ID NO: 587693
uuagcaguaucuguagacu

SEQ ID NO: 811431 - RNA, 19 nt, Artificial Sequence
  Description of Artificial Sequence: Synthetic oligonucleotide
  Antisense strand to SEQ ID NO: 811430
agucuacagauacugcuaa

SEQ ID NO: 811432 - RNA, 19 nt, Artificial Sequence
  Description of Artificial Sequence: Synthetic oligonucleotide
  Sense strand starting at position 975 of SEQ ID NO: 587693
ucaauagugcaucaguuga

SEQ ID NO: 811433 - RNA, 19 nt, Artificial Sequence
  Description of Artificial Sequence: Synthetic oligonucleotide
  Antisense strand to SEQ ID NO: 811432
ucaacugaugcacuauuga

SEQ ID NO: 811434 - RNA, 19 nt, Artificial Sequence
  Description of Artificial Sequence: Synthetic oligonucleotide
  Sense strand starting at position 977 of SEQ ID NO: 587693
aauagugcaucaguugaga

SEQ ID NO: 811435 - RNA, 19 nt, Artificial Sequence
  Description of Artificial Sequence: Synthetic oligonucleotide
  Antisense strand to SEQ ID NO: 811434
ucucaacugaugcacuauu

SEQ ID NO: 811436 - RNA, 19 nt, Artificial Sequence
  Description of Artificial Sequence: Synthetic oligonucleotide
  Sense strand starting at position 980 of SEQ ID NO: 587693
agugcaucaguugagaaua

SEQ ID NO: 811437 - RNA, 19 nt, Artificial Sequence
  Description of Artificial Sequence: Synthetic oligonucleotide
  Antisense strand to SEQ ID NO: 811436
uauucucaacugaugcacu

SEQ ID NO: 811438 - RNA, 19 nt, Artificial Sequence
  Description of Artificial Sequence: Synthetic oligonucleotide
  Sense strand starting at position 988 of SEQ ID NO: 587693
aguugagaauaacugguuu

SEQ ID NO: 811439 - RNA, 19 nt, Artificial Sequence
  Description of Artificial Sequence: Synthetic oligonucleotide
  Antisense strand to SEQ ID NO: 811438
aaaccaguuauucucaacu

SEQ ID NO: 811440 - RNA, 19 nt, Artificial Sequence
  Description of Artificial Sequence: Synthetic oligonucleotide
  Sense strand starting at position 1122 of SEQ ID NO: 587693
gcauguuauuuauagacaa

SEQ ID NO: 811441 - RNA, 19 nt, Artificial Sequence
  Description of Artificial Sequence: Synthetic oligonucleotide
  Antisense strand to SEQ ID NO: 811440
uugucuauaaauaacaugc

SEQ ID NO: 811442 - RNA, 19 nt, Artificial Sequence
  Description of Artificial Sequence: Synthetic oligonucleotide
  Sense strand starting at position 2483 of SEQ ID NO: 587693
ccaaguuuccgggaacacu

SEQ ID NO: 811443 - RNA, 19 nt, Artificial Sequence
  Description of Artificial Sequence: Synthetic oligonucleotide
  Antisense strand to SEQ ID NO: 811442
aguguucccggaaacuugg

SEQ ID NO: 811444 - RNA, 19 nt, Artificial Sequence
  Description of Artificial Sequence: Synthetic oligonucleotide
  Sense strand starting at position 2494 of SEQ ID NO: 587693
ggaacacugcuguauggau

SEQ ID NO: 811445 - RNA, 19 nt, Artificial Sequence
  Description of Artificial Sequence: Synthetic oligonucleotide
  Antisense strand to SEQ ID NO: 811444
auccauacagcaguguucc

SEQ ID NO: 811446 - RNA, 19 nt, Artificial Sequence
  Description of Artificial Sequence: Synthetic oligonucleotide
  Sense strand starting at position 2509 of SEQ ID NO: 587693
ggaugucgucguuauuucu

SEQ ID NO: 811447 - RNA, 19 nt, Artificial Sequence
  Description of Artificial Sequence: Synthetic oligonucleotide
  Antisense strand to SEQ ID NO: 811446
agaaauaacgacgacaucc

SEQ ID NO: 811448 - RNA, 19 nt, Artificial Sequence
  Description of Artificial Sequence: Synthetic oligonucleotide
  Sense strand starting at position 2516 of SEQ ID NO: 587693
gucguuauuucucuuugcu

SEQ ID NO: 811449 - RNA, 19 nt, Artificial Sequence
  Description of Artificial Sequence: Synthetic oligonucleotide
  Antisense strand to SEQ ID NO: 811448
agcaaagagaaauaacgac

SEQ ID NO: 811450 - RNA, 19 nt, Artificial Sequence
  Description of Artificial Sequence: Synthetic oligonucleotide
  Sense strand starting at position 2518 of SEQ ID NO: 587693
cguuauuucucuuugcuuu

SEQ ID NO: 811451 - RNA, 19 nt, Artificial Sequence
  Description of Artificial Sequence: Synthetic oligonucleotide
  Antisense strand to SEQ ID NO: 811450
aaagcaaagagaaauaacg

SEQ ID NO: 811452 - RNA, 19 nt, Artificial Sequence
  Description of Artificial Sequence: Synthetic oligonucleotide
  Sense strand starting at position 2745 of SEQ ID NO: 587693
ucaggauuaugaucggaca

SEQ ID NO: 811453 - RNA, 19 nt, Artificial Sequence
  Description of Artificial Sequence: Synthetic oligonucleotide
  Antisense strand to SEQ ID NO: 811452
uguccgaucauaauccuga

SEQ ID NO: 811454 - RNA, 19 nt, Artificial Sequence
  Description of Artificial Sequence: Synthetic oligonucleotide
  Sense strand starting at position 2885 of SEQ ID NO: 587693
agggacaccuucucuaauu

SEQ ID NO: 811455 - RNA, 19 nt, Artificial Sequence
  Description of Artificial Sequence: Synthetic oligonucleotide
  Antisense strand to SEQ ID NO: 811454
aauuagagaaggugucccu

SEQ ID NO: 811456 - RNA, 19 nt, Artificial Sequence
  Description of Artificial Sequence: Synthetic oligonucleotide
  Sense strand starting at position 2886 of SEQ ID NO: 587693
gggacaccuucucuaauug

SEQ ID NO: 811457 - RNA, 19 nt, Artificial Sequence
  Description of Artificial Sequence: Synthetic oligonucleotide
  Antisense strand to SEQ ID NO: 811456
caauuagagaagguguccc

SEQ ID NO: 811458 - RNA, 19 nt, Artificial Sequence
  Description of Artificial Sequence: Synthetic oligonucleotide
  Sense strand starting at position 2887 of SEQ ID NO: 587693
ggacaccuucucuaauugu

SEQ ID NO: 811459 - RNA, 19 nt, Artificial Sequence
  Description of Artificial Sequence: Synthetic oligonucleotide
  Antisense strand to SEQ ID NO: 811458
acaauuagagaaggugucc

SEQ ID NO: 811460 - RNA, 19 nt, Artificial Sequence
  Description of Artificial Sequence: Synthetic oligonucleotide
  Sense strand starting at position 3044 of SEQ ID NO: 587693
ccuuuauggaacugagguu

SEQ ID NO: 811461 - RNA, 19 nt, Artificial Sequence
  Description of Artificial Sequence: Synthetic oligonucleotide
  Antisense strand to SEQ ID NO: 811460
aaccucaguuccauaaagg

SEQ ID NO: 811462 - RNA, 19 nt, Artificial Sequence
  Description of Artificial Sequence: Synthetic oligonucleotide
  Sense strand starting at position 3108 of SEQ ID NO: 587693
aggguaaacuguuugucca

SEQ ID NO: 811463 - RNA, 19 nt, Artificial Sequence
  Description of Artificial Sequence: Synthetic oligonucleotide
  Antisense strand to SEQ ID NO: 811462
uggacaaacaguuuacccu

SEQ ID NO: 811464 - RNA, 19 nt, Artificial Sequence
  Description of Artificial Sequence: Synthetic oligonucleotide
  Sense strand starting at position 3109 of SEQ ID NO: 587693
ggguaaacuguuuguccac

SEQ ID NO: 811465 - RNA, 19 nt, Artificial Sequence
  Description of Artificial Sequence: Synthetic oligonucleotide
  Antisense strand to SEQ ID NO: 811464
guggacaaacaguuuaccc

SEQ ID NO: 811466 - RNA, 19 nt, Artificial Sequence
  Description of Artificial Sequence: Synthetic oligonucleotide
  Sense strand starting at position 3115 of SEQ ID NO: 587693
acuguuuguccacgacaau

SEQ ID NO: 811467 - RNA, 19 nt, Artificial Sequence
  Description of Artificial Sequence: Synthetic oligonucleotide
  Antisense strand to SEQ ID NO: 811466
auugucguggacaaacagu

SEQ ID NO: 811468 - RNA, 19 nt, Artificial Sequence
  Description of Artificial Sequence: Synthetic oligonucleotide
  Sense strand starting at position 3116 of SEQ ID NO: 587693
cuguuuguccacgacaauu

SEQ ID NO: 811469 - RNA, 19 nt, Artificial Sequence
  Description of Artificial Sequence: Synthetic oligonucleotide
  Antisense strand to SEQ ID NO: 811468
aauugucguggacaaacag

SEQ ID NO: 811470 - RNA, 19 nt, Artificial Sequence
  Description of Artificial Sequence: Synthetic oligonucleotide
  Sense strand starting at position 3135 of SEQ ID NO: 587693
cgauuuccuuaagaaauau

SEQ ID NO: 811471 - RNA, 19 nt, Artificial Sequence
  Description of Artificial Sequence: Synthetic oligonucleotide
  Antisense strand to SEQ ID NO: 811470
auauuucuuaaggaaaucg

SEQ ID NO: 811472 - RNA, 19 nt, Artificial Sequence
  Description of Artificial Sequence: Synthetic oligonucleotide
  Sense strand starting at position 3156 of SEQ ID NO: 587693
uucuguacucaggguaauu

SEQ ID NO: 811473 - RNA, 19 nt, Artificial Sequence
  Description of Artificial Sequence: Synthetic oligonucleotide
  Antisense strand to SEQ ID NO: 811472
aauuacccugaguacagaa

SEQ ID NO: 811474 - RNA, 19 nt, Artificial Sequence
  Description of Artificial Sequence: Synthetic oligonucleotide
  Sense strand starting at position 3167 of SEQ ID NO: 587693
ggguaauugguguaaggau

SEQ ID NO: 811475 - RNA, 19 nt, Artificial Sequence
  Description of Artificial Sequence: Synthetic oligonucleotide
  Antisense strand to SEQ ID NO: 811474
auccuuacaccaauuaccc

SEQ ID NO: 811476 - RNA, 19 nt, Artificial Sequence
  Description of Artificial Sequence: Synthetic oligonucleotide
  Sense strand starting at position 3190 of SEQ ID NO: 587693
ugccuuauucuugaaagca

SEQ ID NO: 811477 - RNA, 19 nt, Artificial Sequence
  Description of Artificial Sequence: Synthetic oligonucleotide
  Antisense strand to SEQ ID NO: 811476
ugcuuucaagaauaaggca

SEQ ID NO: 811478 - RNA, 19 nt, Artificial Sequence
  Description of Artificial Sequence: Synthetic oligonucleotide
  Sense strand starting at position 3243 of SEQ ID NO: 587693
aucacaguuccacgccaaa

SEQ ID NO: 811479 - RNA, 19 nt, Artificial Sequence
  Description of Artificial Sequence: Synthetic oligonucleotide
  Antisense strand to SEQ ID NO: 811478
uuuggcguggaacugugau

SEQ ID NO: 811480 - RNA, 19 nt, Artificial Sequence
  Description of Artificial Sequence: Synthetic oligonucleotide
  Sense strand starting at position 3246 of SEQ ID NO: 587693
acaguuccacgccaaauua

SEQ ID NO: 811481 - RNA, 19 nt, Artificial Sequence
  Description of Artificial Sequence: Synthetic oligonucleotide
  Antisense strand to SEQ ID NO: 811480
uaauuuggcguggaacugu

SEQ ID NO: 811482 - RNA, 19 nt, Artificial Sequence
  Description of Artificial Sequence: Synthetic oligonucleotide
  Sense strand starting at position 3395 of SEQ ID NO: 587693
aagagaaccucugaaagga

SEQ ID NO: 811483 - RNA, 19 nt, Artificial Sequence
  Description of Artificial Sequence: Synthetic oligonucleotide
  Antisense strand to SEQ ID NO: 811482
uccuuucagagguucucuu

SEQ ID NO: 811484 - RNA, 19 nt, Artificial Sequence
  Description of Artificial Sequence: Synthetic oligonucleotide
  Sense strand starting at position 3410 of SEQ ID NO: 587693
aggauaauuuaacauagcu

SEQ ID NO: 811485 - RNA, 19 nt, Artificial Sequence
  Description of Artificial Sequence: Synthetic oligonucleotide
  Antisense strand to SEQ ID NO: 811484
agcuauguuaaauuauccu

SEQ ID NO: 811486 - RNA, 19 nt, Artificial Sequence
  Description of Artificial Sequence: Synthetic oligonucleotide
  Sense strand starting at position 3437 of SEQ ID NO: 587693
aguguuuauuuggaccuaa

SEQ ID NO: 811487 - RNA, 19 nt, Artificial Sequence
  Description of Artificial Sequence: Synthetic oligonucleotide
  Antisense strand to SEQ ID NO: 811486
uuagguccaaauaaacacu

SEQ ID NO: 811488 - RNA, 19 nt, Artificial Sequence
  Description of Artificial Sequence: Synthetic oligonucleotide
  Sense strand starting at position 3474 of SEQ ID NO: 587693
agacuuagcugagucuuaa

SEQ ID NO: 811489 - RNA, 19 nt, Artificial Sequence
  Description of Artificial Sequence: Synthetic oligonucleotide
  Antisense strand to SEQ ID NO: 811488
uuaagacucagcuaagucu

SEQ ID NO: 811490 - RNA, 19 nt, Artificial Sequence
  Description of Artificial Sequence: Synthetic oligonucleotide
  Sense strand starting at position 3486 of SEQ ID NO: 587693
gucuuaacacuuuguaaag

SEQ ID NO: 811491 - RNA, 19 nt, Artificial Sequence
  Description of Artificial Sequence: Synthetic oligonucleotide
  Antisense strand to SEQ ID NO: 811490
cuuuacaaaguguuaagac

SEQ ID NO: 811492 - RNA, 19 nt, Artificial Sequence
  Description of Artificial Sequence: Synthetic oligonucleotide
  Sense strand starting at position 3546 of SEQ ID NO: 587693
uaaugaugguucuuagauu

SEQ ID NO: 811493 - RNA, 19 nt, Artificial Sequence
  Description of Artificial Sequence: Synthetic oligonucleotide
  Antisense strand to SEQ ID NO: 811492
aaucuaagaaccaucauua

SEQ ID NO: 811494 - RNA, 19 nt, Artificial Sequence
  Description of Artificial Sequence: Synthetic oligonucleotide
  Sense strand starting at position 3651 of SEQ ID NO: 587693
uuccauuuguuacauggaa

SEQ ID NO: 811495 - RNA, 19 nt, Artificial Sequence
  Description of Artificial Sequence: Synthetic oligonucleotide
  Antisense strand to SEQ ID NO: 811494
uuccauguaacaaauggaa

SEQ ID NO: 811496 - RNA, 19 nt, Artificial Sequence
  Description of Artificial Sequence: Synthetic oligonucleotide
  Sense strand starting at position 3671 of SEQ ID NO: 587693
auauaacuaguccggguua

SEQ ID NO: 811497 - RNA, 19 nt, Artificial Sequence
  Description of Artificial Sequence: Synthetic oligonucleotide
  Antisense strand to SEQ ID NO: 811496
uaacccggacuaguuauau

SEQ ID NO: 811498 - RNA, 19 nt, Artificial Sequence
  Description of Artificial Sequence: Synthetic oligonucleotide
  Sense strand starting at position 3779 of SEQ ID NO: 587693
agaugcuugcauuauuaga

SEQ ID NO: 811499 - RNA, 19 nt, Artificial Sequence
  Description of Artificial Sequence: Synthetic oligonucleotide
  Antisense strand to SEQ ID NO: 811498
ucuaauaaugcaagcaucu

SEQ ID NO: 811500 - RNA, 19 nt, Artificial Sequence
  Description of Artificial Sequence: Synthetic oligonucleotide
  Sense strand starting at position 3975 of SEQ ID NO: 587693
uuuacuauugccgaacaua

SEQ ID NO: 811501 - RNA, 19 nt, Artificial Sequence
  Description of Artificial Sequence: Synthetic oligonucleotide
  Antisense strand to SEQ ID NO: 811500
uauguucggcaauaguaaa

SEQ ID NO: 811502 - RNA, 19 nt, Artificial Sequence
  Description of Artificial Sequence: Synthetic oligonucleotide
  Sense strand starting at position 3983 of SEQ ID NO: 587693
ugccgaacauauuugguua

SEQ ID NO: 811503 - RNA, 19 nt, Artificial Sequence
  Description of Artificial Sequence: Synthetic oligonucleotide
  Antisense strand to SEQ ID NO: 811502
uaaccaaauauguucggca

SEQ ID NO: 811504 - RNA, 19 nt, Artificial Sequence
  Description of Artificial Sequence: Synthetic oligonucleotide
  Sense strand starting at position 344 of SEQ ID NO: 587694
uuaacuguaguguaaaucu

SEQ ID NO: 811505 - RNA, 19 nt, Artificial Sequence
  Description of Artificial Sequence: Synthetic oligonucleotide
  Antisense strand to SEQ ID NO: 811504
agauuuacacuacaguuaa

SEQ ID NO: 811506 - RNA, 19 nt, Artificial Sequence
  Description of Artificial Sequence: Synthetic oligonucleotide
  Sense strand starting at position 406 of SEQ ID NO: 587694
agaguacuuguaugcagag

SEQ ID NO: 811507 - RNA, 19 nt, Artificial Sequence
  Description of Artificial Sequence: Synthetic oligonucleotide
  Antisense strand to SEQ ID NO: 811506
cucugcauacaaguacucu

SEQ ID NO: 811508 - RNA, 19 nt, Artificial Sequence
  Description of Artificial Sequence: Synthetic oligonucleotide
  Sense strand starting at position 461 of SEQ ID NO: 587694
acuacucugucauuagaca

SEQ ID NO: 811509 - RNA, 19 nt, Artificial Sequence
  Description of Artificial Sequence: Synthetic oligonucleotide
  Antisense strand to SEQ ID NO: 811508
ugucuaaugacagaguagu

SEQ ID NO: 811510 - RNA, 19 nt, Artificial Sequence
  Description of Artificial Sequence: Synthetic oligonucleotide
  Sense strand starting at position 511 of SEQ ID NO: 587694
agcccagagaucugagagu

SEQ ID NO: 811511 - RNA, 19 nt, Artificial Sequence
  Description of Artificial Sequence: Synthetic oligonucleotide
  Antisense strand to SEQ ID NO: 811510
acucucagaucucugggcu

SEQ ID NO: 811512 - RNA, 19 nt, Artificial Sequence
  Description of Artificial Sequence: Synthetic oligonucleotide
  Sense strand starting at position 524 of SEQ ID NO: 587694
gagagucugccucaaguac

SEQ ID NO: 811513 - RNA, 19 nt, Artificial Sequence
  Description of Artificial Sequence: Synthetic oligonucleotide
  Antisense strand to SEQ ID NO: 811512
guacuugaggcagacucuc

SEQ ID NO: 811514 - RNA, 19 nt, Artificial Sequence
  Description of Artificial Sequence: Synthetic oligonucleotide
  Sense strand starting at position 535 of SEQ ID NO: 587694
ucaaguacucaagaguacu

SEQ ID NO: 811515 - RNA, 19 nt, Artificial Sequence
  Description of Artificial Sequence: Synthetic oligonucleotide
  Antisense strand to SEQ ID NO: 811514
aguacucuugaguacuuga

SEQ ID NO: 811516 - RNA, 19 nt, Artificial Sequence
  Description of Artificial Sequence: Synthetic oligonucleotide
  Sense strand starting at position 613 of SEQ ID NO: 587694
aagagaaauccugggcacu

SEQ ID NO: 811517 - RNA, 19 nt, Artificial Sequence
  Description of Artificial Sequence: Synthetic oligonucleotide
  Antisense strand to SEQ ID NO: 811516
agugcccaggauuucucuu

SEQ ID NO: 811518 - RNA, 19 nt, Artificial Sequence
  Description of Artificial Sequence: Synthetic oligonucleotide
  Sense strand starting at position 614 of SEQ ID NO: 587694
agagaaauccugggcacuc

SEQ ID NO: 811519 - RNA, 19 nt, Artificial Sequence
  Description of Artificial Sequence: Synthetic oligonucleotide
  Antisense strand to SEQ ID NO: 811518
gagugcccaggauuucucu

SEQ ID NO: 811520 - RNA, 19 nt, Artificial Sequence
  Description of Artificial Sequence: Synthetic oligonucleotide
  Sense strand starting at position 615 of SEQ ID NO: 587694
gagaaauccugggcacuca

SEQ ID NO: 811521 - RNA, 19 nt, Artificial Sequence
  Description of Artificial Sequence: Synthetic oligonucleotide
  Antisense strand to SEQ ID NO: 811520
ugagugcccaggauuucuc

SEQ ID NO: 811522 - RNA, 19 nt, Artificial Sequence
  Description of Artificial Sequence: Synthetic oligonucleotide
  Sense strand starting at position 693 of SEQ ID NO: 587694
ugggauacuggguagugua

SEQ ID NO: 811523 - RNA, 19 nt, Artificial Sequence
  Description of Artificial Sequence: Synthetic oligonucleotide
  Antisense strand to SEQ ID NO: 811522
uacacuacccaguauccca

SEQ ID NO: 811524 - RNA, 19 nt, Artificial Sequence
  Description of Artificial Sequence: Synthetic oligonucleotide
  Sense strand starting at position 802 of SEQ ID NO: 587694
uggaauuaaucuguuucca

SEQ ID NO: 811525 - RNA, 19 nt, Artificial Sequence
  Description of Artificial Sequence: Synthetic oligonucleotide
  Antisense strand to SEQ ID NO: 811524
uggaaacagauuaauucca

SEQ ID NO: 811526 - RNA, 19 nt, Artificial Sequence
  Description of Artificial Sequence: Synthetic oligonucleotide
  Sense strand starting at position 806 of SEQ ID NO: 587694
auuaaucuguuuccaagua

SEQ ID NO: 811527 - RNA, 19 nt, Artificial Sequence
  Description of Artificial Sequence: Synthetic oligonucleotide
  Antisense strand to SEQ ID NO: 811526
uacuuggaaacagauuaau

SEQ ID NO: 811528 - RNA, 19 nt, Artificial Sequence
  Description of Artificial Sequence: Synthetic oligonucleotide
  Sense strand starting at position 1055 of SEQ ID NO: 587694
cuacauguacuccauguau

SEQ ID NO: 811529 - RNA, 19 nt, Artificial Sequence
  Description of Artificial Sequence: Synthetic oligonucleotide
  Antisense strand to SEQ ID NO: 811528
auacauggaguacauguag

SEQ ID NO: 811530 - RNA, 19 nt, Artificial Sequence
  Description of Artificial Sequence: Synthetic oligonucleotide
  Sense strand starting at position 1284 of SEQ ID NO: 587694
gggcauucaugagcugaga

SEQ ID NO: 811531 - RNA, 19 nt, Artificial Sequence
  Description of Artificial Sequence: Synthetic oligonucleotide
  Antisense strand to SEQ ID NO: 811530
ucucagcucaugaaugccc

SEQ ID NO: 811532 - RNA, 19 nt, Artificial Sequence
  Description of Artificial Sequence: Synthetic oligonucleotide
  Sense strand starting at position 1300 of SEQ ID NO: 587694
agaccaacuucugugaucu

SEQ ID NO: 811533 - RNA, 19 nt, Artificial Sequence
  Description of Artificial Sequence: Synthetic oligonucleotide
  Antisense strand to SEQ ID NO: 811532
agaucacagaaguuggucu

SEQ ID NO: 811534 - RNA, 19 nt, Artificial Sequence
  Description of Artificial Sequence: Synthetic oligonucleotide
  Sense strand starting at position 1542 of SEQ ID NO: 587694
aaggcauguuauguauaga

SEQ ID NO: 811535 - RNA, 19 nt, Artificial Sequence
  Description of Artificial Sequence: Synthetic oligonucleotide
  Antisense strand to SEQ ID NO: 811534
ucuauacauaacaugccuu

SEQ ID NO: 811536 - RNA, 19 nt, Artificial Sequence
  Description of Artificial Sequence: Synthetic oligonucleotide
  Sense strand starting at position 1543 of SEQ ID NO: 587694
aggcauguuauguauagag

SEQ ID NO: 811537 - RNA, 19 nt, Artificial Sequence
  Description of Artificial Sequence: Synthetic oligonucleotide
  Antisense strand to SEQ ID NO: 811536
cucuauacauaacaugccu

SEQ ID NO: 811538 - RNA, 19 nt, Artificial Sequence
  Description of Artificial Sequence: Synthetic oligonucleotide
  Sense strand starting at position 1570 of SEQ ID NO: 587694
auaggauaaugugagauuu

SEQ ID NO: 811539 - RNA, 19 nt, Artificial Sequence
  Description of Artificial Sequence: Synthetic oligonucleotide
  Antisense strand to SEQ ID NO: 811538
aaaucucacauuauccuau

SEQ ID NO: 811540 - RNA, 19 nt, Artificial Sequence
  Description of Artificial Sequence: Synthetic oligonucleotide
  Sense strand starting at position 1572 of SEQ ID NO: 587694
aggauaaugugagauuucu

SEQ ID NO: 811541 - RNA, 19 nt, Artificial Sequence
  Description of Artificial Sequence: Synthetic oligonucleotide
  Antisense strand to SEQ ID NO: 811540
agaaaucucacauuauccu

SEQ ID NO: 811542 - RNA, 19 nt, Artificial Sequence
  Description of Artificial Sequence: Synthetic oligonucleotide
  Sense strand starting at position 1617 of SEQ ID NO: 587694
aggcuauaacuuuaaagca

SEQ ID NO: 811543 - RNA, 19 nt, Artificial Sequence
  Description of Artificial Sequence: Synthetic oligonucleotide
  Antisense strand to SEQ ID NO: 811542
ugcuuuaaaguuauagccu

SEQ ID NO: 811544 - RNA, 19 nt, Artificial Sequence
  Description of Artificial Sequence: Synthetic oligonucleotide
  Sense strand starting at position 1709 of SEQ ID NO: 587694
ugggaaugauagcuaaguu

SEQ ID NO: 811545 - RNA, 19 nt, Artificial Sequence
  Description of Artificial Sequence: Synthetic oligonucleotide
  Antisense strand to SEQ ID NO: 811544
aacuuagcuaucauuccca

SEQ ID NO: 811546 - RNA, 19 nt, Artificial Sequence
  Description of Artificial Sequence: Synthetic oligonucleotide
  Sense strand starting at position 1748 of SEQ ID NO: 587694
ugauuucacggguguauac

SEQ ID NO: 811547 - RNA, 19 nt, Artificial Sequence
  Description of Artificial Sequence: Synthetic oligonucleotide
  Antisense strand to SEQ ID NO: 811546
guauacacccgugaaauca

SEQ ID NO: 811548 - RNA, 19 nt, Artificial Sequence
  Description of Artificial Sequence: Synthetic oligonucleotide
  Sense strand starting at position 1834 of SEQ ID NO: 587694
gcuguuuaauuugugagac

SEQ ID NO: 811549 - RNA, 19 nt, Artificial Sequence
  Description of Artificial Sequence: Synthetic oligonucleotide
  Antisense strand to SEQ ID NO: 811548
gucucacaaauuaaacagc

SEQ ID NO: 811550 - RNA, 19 nt, Artificial Sequence
  Description of Artificial Sequence: Synthetic oligonucleotide
  Sense strand starting at position 1878 of SEQ ID NO: 587694
ugcuccaacccuggagaua

SEQ ID NO: 811551 - RNA, 19 nt, Artificial Sequence
  Description of Artificial Sequence: Synthetic oligonucleotide
  Antisense strand to SEQ ID NO: 811550
uaucuccaggguuggagca

SEQ ID NO: 811552 - RNA, 19 nt, Artificial Sequence
  Description of Artificial Sequence: Synthetic oligonucleotide
  Sense strand starting at position 1969 of SEQ ID NO: 587694
ugcuacgaaguaugauaaa

SEQ ID NO: 811553 - RNA, 19 nt, Artificial Sequence
  Description of Artificial Sequence: Synthetic oligonucleotide
  Antisense strand to SEQ ID NO: 811552
uuuaucauacuucguagca

SEQ ID NO: 811554 - RNA, 19 nt, Artificial Sequence
  Description of Artificial Sequence: Synthetic oligonucleotide
  Sense strand starting at position 2037 of SEQ ID NO: 587694
uguagauucugacuaguca

SEQ ID NO: 811555 - RNA, 19 nt, Artificial Sequence
  Description of Artificial Sequence: Synthetic oligonucleotide
  Antisense strand to SEQ ID NO: 811554
ugacuagucagaaucuaca

SEQ ID NO: 811556 - RNA, 19 nt, Artificial Sequence
  Description of Artificial Sequence: Synthetic oligonucleotide
  Sense strand starting at position 2038 of SEQ ID NO: 587694
guagauucugacuagucaa

SEQ ID NO: 811557 - RNA, 19 nt, Artificial Sequence
  Description of Artificial Sequence: Synthetic oligonucleotide
  Antisense strand to SEQ ID NO: 811556
uugacuagucagaaucuac

SEQ ID NO: 811558 - RNA, 19 nt, Artificial Sequence
  Description of Artificial Sequence: Synthetic oligonucleotide
  Sense strand starting at position 2041 of SEQ ID NO: 587694
gauucugacuagucaagaa

SEQ ID NO: 811559 - RNA, 19 nt, Artificial Sequence
  Description of Artificial Sequence: Synthetic oligonucleotide
  Antisense strand to SEQ ID NO: 811558
uucuugacuagucagaauc

SEQ ID NO: 811560 - RNA, 19 nt, Artificial Sequence
  Description of Artificial Sequence: Synthetic oligonucleotide
  Sense strand starting at position 2072 of SEQ ID NO: 587694
ggaaguaacauguaagcca

SEQ ID NO: 811561 - RNA, 19 nt, Artificial Sequence
  Description of Artificial Sequence: Synthetic oligonucleotide
  Antisense strand to SEQ ID NO: 811560
uggcuuacauguuacuucc

SEQ ID NO: 811562 - RNA, 19 nt, Artificial Sequence
  Description of Artificial Sequence: Synthetic oligonucleotide
  Sense strand starting at position 2106 of SEQ ID NO: 587694
guaugaauuagcuagguga

SEQ ID NO: 811563 - RNA, 19 nt, Artificial Sequence
  Description of Artificial Sequence: Synthetic oligonucleotide
  Antisense strand to SEQ ID NO: 811562
ucaccuagcuaauucauac

SEQ ID NO: 811564 - RNA, 19 nt, Artificial Sequence
  Description of Artificial Sequence: Synthetic oligonucleotide
  Sense strand starting at position 2108 of SEQ ID NO: 587694
augaauuagcuaggugaaa

SEQ ID NO: 811565 - RNA, 19 nt, Artificial Sequence
  Description of Artificial Sequence: Synthetic oligonucleotide
  Antisense strand to SEQ ID NO: 811564
uuucaccuagcuaauucau

SEQ ID NO: 811566 - RNA, 19 nt, Artificial Sequence
  Description of Artificial Sequence: Synthetic oligonucleotide
  Sense strand starting at position 2109 of SEQ ID NO: 587694
ugaauuagcuaggugaaau

SEQ ID NO: 811567 - RNA, 19 nt, Artificial Sequence
  Description of Artificial Sequence: Synthetic oligonucleotide
  Antisense strand to SEQ ID NO: 811566
auuucaccuagcuaauuca

SEQ ID NO: 811568 - RNA, 19 nt, Artificial Sequence
  Description of Artificial Sequence: Synthetic oligonucleotide
  Sense strand starting at position 2120 of SEQ ID NO: 587694
ggugaaauauagcugggaa

SEQ ID NO: 811569 - RNA, 19 nt, Artificial Sequence
  Description of Artificial Sequence: Synthetic oligonucleotide
  Antisense strand to SEQ ID NO: 811568
uucccagcuauauuucacc

SEQ ID NO: 811570 - RNA, 19 nt, Artificial Sequence
  Description of Artificial Sequence: Synthetic oligonucleotide
  Sense strand starting at position 2121 of SEQ ID NO: 587694
gugaaauauagcugggaaa

SEQ ID NO: 811571 - RNA, 19 nt, Artificial Sequence
  Description of Artificial Sequence: Synthetic oligonucleotide
  Antisense strand to SEQ ID NO: 811570
uuucccagcuauauuucac

SEQ ID NO: 811572 - RNA, 19 nt, Artificial Sequence
  Description of Artificial Sequence: Synthetic oligonucleotide
  Sense strand starting at position 2211 of SEQ ID NO: 587694
aaggaaauugccggaucaa

SEQ ID NO: 811573 - RNA, 19 nt, Artificial Sequence
  Description of Artificial Sequence: Synthetic oligonucleotide
  Antisense strand to SEQ ID NO: 811572
uugauccggcaauuuccuu

SEQ ID NO: 811574 - RNA, 19 nt, Artificial Sequence
  Description of Artificial Sequence: Synthetic oligonucleotide
  Sense strand starting at position 2449 of SEQ ID NO: 587694
ccaucaaagguuuguggaa

SEQ ID NO: 811575 - RNA, 19 nt, Artificial Sequence
  Description of Artificial Sequence: Synthetic oligonucleotide
  Antisense strand to SEQ ID NO: 811574
uuccacaaaccuuugaugg

SEQ ID NO: 811576 - RNA, 19 nt, Artificial Sequence
  Description of Artificial Sequence: Synthetic oligonucleotide
  Sense strand starting at position 2681 of SEQ ID NO: 587694
cagagucugagguaagcuu

SEQ ID NO: 811577 - RNA, 19 nt, Artificial Sequence
  Description of Artificial Sequence: Synthetic oligonucleotide
  Antisense strand to SEQ ID NO: 811576
aagcuuaccucagacucug

SEQ ID NO: 811578 - RNA, 19 nt, Artificial Sequence
  Description of Artificial Sequence: Synthetic oligonucleotide
  Sense strand starting at position 3211 of SEQ ID NO: 587694
cagcuuggccaagauagua

SEQ ID NO: 811579 - RNA, 19 nt, Artificial Sequence
  Description of Artificial Sequence: Synthetic oligonucleotide
  Antisense strand to SEQ ID NO: 811578
uacuaucuuggccaagcug

SEQ ID NO: 811580 - RNA, 19 nt, Artificial Sequence
  Description of Artificial Sequence: Synthetic oligonucleotide
  Sense strand starting at position 3657 of SEQ ID NO: 587694
uaagauuaacgcugaugaa

SEQ ID NO: 811581 - RNA, 19 nt, Artificial Sequence
  Description of Artificial Sequence: Synthetic oligonucleotide
  Antisense strand to SEQ ID NO: 811580
uucaucagcguuaaucuua

SEQ ID NO: 811582 - RNA, 19 nt, Artificial Sequence
  Description of Artificial Sequence: Synthetic oligonucleotide
  Sense strand starting at position 3889 of SEQ ID NO: 587694
auuguaauggcucaauaca

SEQ ID NO: 811583 - RNA, 19 nt, Artificial Sequence
  Description of Artificial Sequence: Synthetic oligonucleotide
  Antisense strand to SEQ ID NO: 811582
uguauugagccauuacaau

SEQ ID NO: 811584 - RNA, 19 nt, Artificial Sequence
  Description of Artificial Sequence: Synthetic oligonucleotide
  Sense strand starting at position 77 of SEQ ID NO: 587695
guacgucuuauggagaaug

SEQ ID NO: 811585 - RNA, 19 nt, Artificial Sequence
  Description of Artificial Sequence: Synthetic oligonucleotide
  Antisense strand to SEQ ID NO: 811584
cauucuccauaagacguac

SEQ ID NO: 811586 - RNA, 19 nt, Artificial Sequence
  Description of Artificial Sequence: Synthetic oligonucleotide
  Sense strand starting at position 79 of SEQ ID NO: 587695
acgucuuauggagaaugca

SEQ ID NO: 811587 - RNA, 19 nt, Artificial Sequence
  Description of Artificial Sequence: Synthetic oligonucleotide
  Antisense strand to SEQ ID NO: 811586
ugcauucuccauaagacgu

SEQ ID NO: 811588 - RNA, 19 nt, Artificial Sequence
  Description of Artificial Sequence: Synthetic oligonucleotide
  Sense strand starting at position 87 of SEQ ID NO: 587695
uggagaaugcaaugacgaa

SEQ ID NO: 811589 - RNA, 19 nt, Artificial Sequence
  Description of Artificial Sequence: Synthetic oligonucleotide
  Antisense strand to SEQ ID NO: 811588
uucgucauugcauucucca

SEQ ID NO: 811590 - RNA, 19 nt, Artificial Sequence
  Description of Artificial Sequence: Synthetic oligonucleotide
  Sense strand starting at position 259 of SEQ ID NO: 587695
cccaaaugacucuggcaca

SEQ ID NO: 811591 - RNA, 19 nt, Artificial Sequence
  Description of Artificial Sequence: Synthetic oligonucleotide
  Antisense strand to SEQ ID NO: 811590
ugugccagagucauuuggg

SEQ ID NO: 811592 - RNA, 19 nt, Artificial Sequence
  Description of Artificial Sequence: Synthetic oligonucleotide
  Sense strand starting at position 304 of SEQ ID NO: 587695
agucuagucggcuaaagga

SEQ ID NO: 811593 - RNA, 19 nt, Artificial Sequence
  Description of Artificial Sequence: Synthetic oligonucleotide
  Antisense strand to SEQ ID NO: 811592
uccuuuagccgacuagacu

SEQ ID NO: 811594 - RNA, 19 nt, Artificial Sequence
  Description of Artificial Sequence: Synthetic oligonucleotide
  Sense strand starting at position 375 of SEQ ID NO: 587695
acaagcuuauagucugaga

SEQ ID NO: 811595 - RNA, 19 nt, Artificial Sequence
  Description of Artificial Sequence: Synthetic oligonucleotide
  Antisense strand to SEQ ID NO: 811594
ucucagacuauaagcuugu

SEQ ID NO: 811596 - RNA, 19 nt, Artificial Sequence
  Description of Artificial Sequence: Synthetic oligonucleotide
  Sense strand starting at position 452 of SEQ ID NO: 587695
gcagauccauuacugaaca

SEQ ID NO: 811597 - RNA, 19 nt, Artificial Sequence
  Description of Artificial Sequence: Synthetic oligonucleotide
  Antisense strand to SEQ ID NO: 811596
uguucaguaauggaucugc

SEQ ID NO: 811598 - RNA, 19 nt, Artificial Sequence
  Description of Artificial Sequence: Synthetic oligonucleotide
  Sense strand starting at position 511 of SEQ ID NO: 587695
ucagcugacccguagacuu

SEQ ID NO: 811599 - RNA, 19 nt, Artificial Sequence
  Description of Artificial Sequence: Synthetic oligonucleotide
  Antisense strand to SEQ ID NO: 811598
aagucuacgggucagcuga

SEQ ID NO: 811600 - RNA, 19 nt, Artificial Sequence
  Description of Artificial Sequence: Synthetic oligonucleotide
  Sense strand starting at position 526 of SEQ ID NO: 587695
acuugugagcaauaauaac

SEQ ID NO: 811601 - RNA, 19 nt, Artificial Sequence
  Description of Artificial Sequence: Synthetic oligonucleotide
  Antisense strand to SEQ ID NO: 811600
guuauuauugcucacaagu

SEQ ID NO: 811602 - RNA, 19 nt, Artificial Sequence
  Description of Artificial Sequence: Synthetic oligonucleotide
  Sense strand starting at position 934 of SEQ ID NO: 587695
auauuaucaggacguaaca

SEQ ID NO: 811603 - RNA, 19 nt, Artificial Sequence
  Description of Artificial Sequence: Synthetic oligonucleotide
  Antisense strand to SEQ ID NO: 811602
uguuacguccugauaauau

SEQ ID NO: 811604 - RNA, 19 nt, Artificial Sequence
  Description of Artificial Sequence: Synthetic oligonucleotide
  Sense strand starting at position 957 of SEQ ID NO: 587695
acagguacucgguaaauau

SEQ ID NO: 811605 - RNA, 19 nt, Artificial Sequence
  Description of Artificial Sequence: Synthetic oligonucleotide
  Antisense strand to SEQ ID NO: 811604
auauuuaccgaguaccugu

SEQ ID NO: 811606 - RNA, 19 nt, Artificial Sequence
  Description of Artificial Sequence: Synthetic oligonucleotide
  Sense strand starting at position 1058 of SEQ ID NO: 587695
cucaaagugugaucucuga

SEQ ID NO: 811607 - RNA, 19 nt, Artificial Sequence
  Description of Artificial Sequence: Synthetic oligonucleotide
  Antisense strand to SEQ ID NO: 811606
ucagagaucacacuuugag

SEQ ID NO: 811608 - RNA, 19 nt, Artificial Sequence
  Description of Artificial Sequence: Synthetic oligonucleotide
  Sense strand starting at position 1121 of SEQ ID NO: 587695
aucucugggcucuaucaua

SEQ ID NO: 811609 - RNA, 19 nt, Artificial Sequence
  Description of Artificial Sequence: Synthetic oligonucleotide
  Antisense strand to SEQ ID NO: 811608
uaugauagagcccagagau

SEQ ID NO: 811610 - RNA, 19 nt, Artificial Sequence
  Description of Artificial Sequence: Synthetic oligonucleotide
  Sense strand starting at position 1169 of SEQ ID NO: 587695
gaguaaggauauucuacca

SEQ ID NO: 811611 - RNA, 19 nt, Artificial Sequence
  Description of Artificial Sequence: Synthetic oligonucleotide
  Antisense strand to SEQ ID NO: 811610
ugguagaauauccuuacuc

SEQ ID NO: 811612 - RNA, 19 nt, Artificial Sequence
  Description of Artificial Sequence: Synthetic oligonucleotide
  Sense strand starting at position 1248 of SEQ ID NO: 587695
uagagauguucucuaccag

SEQ ID NO: 811613 - RNA, 19 nt, Artificial Sequence
  Description of Artificial Sequence: Synthetic oligonucleotide
  Antisense strand to SEQ ID NO: 811612
cugguagagaacaucucua

SEQ ID NO: 811614 - RNA, 19 nt, Artificial Sequence
  Description of Artificial Sequence: Synthetic oligonucleotide
  Sense strand starting at position 1260 of SEQ ID NO: 587695
cuaccagaguucuuaaugu

SEQ ID NO: 811615 - RNA, 19 nt, Artificial Sequence
  Description of Artificial Sequence: Synthetic oligonucleotide
  Antisense strand to SEQ ID NO: 811614
acauuaagaacucugguag

SEQ ID NO: 811616 - RNA, 19 nt, Artificial Sequence
  Description of Artificial Sequence: Synthetic oligonucleotide
  Sense strand starting at position 1277 of SEQ ID NO: 587695
gugccaggaacugaguaau

SEQ ID NO: 811617 - RNA, 19 nt, Artificial Sequence
  Description of Artificial Sequence: Synthetic oligonucleotide
  Antisense strand to SEQ ID NO: 811616
auuacucaguuccuggcac

SEQ ID NO: 811618 - RNA, 19 nt, Artificial Sequence
  Description of Artificial Sequence: Synthetic oligonucleotide
  Sense strand starting at position 1301 of SEQ ID NO: 587695
augcuaugacuggaaugua

SEQ ID NO: 811619 - RNA, 19 nt, Artificial Sequence
  Description of Artificial Sequence: Synthetic oligonucleotide
  Antisense strand to SEQ ID NO: 811618
uacauuccagucauagcau

SEQ ID NO: 811620 - RNA, 19 nt, Artificial Sequence
  Description of Artificial Sequence: Synthetic oligonucleotide
  Sense strand starting at position 1304 of SEQ ID NO: 587695
cuaugacuggaauguaguu

SEQ ID NO: 811621 - RNA, 19 nt, Artificial Sequence
  Description of Artificial Sequence: Synthetic oligonucleotide
  Antisense strand to SEQ ID NO: 811620
aacuacauuccagucauag

SEQ ID NO: 811622 - RNA, 19 nt, Artificial Sequence
  Description of Artificial Sequence: Synthetic oligonucleotide
  Sense strand starting at position 1410 of SEQ ID NO: 587695
agcgaugcuccaggaggaa

SEQ ID NO: 811623 - RNA, 19 nt, Artificial Sequence
  Description of Artificial Sequence: Synthetic oligonucleotide
  Antisense strand to SEQ ID NO: 811622
uuccuccuggagcaucgcu

SEQ ID NO: 811624 - RNA, 19 nt, Artificial Sequence
  Description of Artificial Sequence: Synthetic oligonucleotide
  Sense strand starting at position 1900 of SEQ ID NO: 587695
ggccgcagcgugagaauua

SEQ ID NO: 811625 - RNA, 19 nt, Artificial Sequence
  Description of Artificial Sequence: Synthetic oligonucleotide
  Antisense strand to SEQ ID NO: 811624
uaauucucacgcugcggcc

SEQ ID NO: 811626 - RNA, 19 nt, Artificial Sequence
  Description of Artificial Sequence: Synthetic oligonucleotide
  Sense strand starting at position 2344 of SEQ ID NO: 587695
ggugaugguggugagcuau

SEQ ID NO: 811627 - RNA, 19 nt, Artificial Sequence
  Description of Artificial Sequence: Synthetic oligonucleotide
  Antisense strand to SEQ ID NO: 811626
auagcucaccaccaucacc

SEQ ID NO: 811628 - RNA, 19 nt, Artificial Sequence
  Description of Artificial Sequence: Synthetic oligonucleotide
  Sense strand starting at position 2410 of SEQ ID NO: 587695
cgauguacugucuuucguu

SEQ ID NO: 811629 - RNA, 19 nt, Artificial Sequence
  Description of Artificial Sequence: Synthetic oligonucleotide
  Antisense strand to SEQ ID NO: 811628
aacgaaagacaguacaucg

SEQ ID NO: 811630 - RNA, 19 nt, Artificial Sequence
  Description of Artificial Sequence: Synthetic oligonucleotide
  Sense strand starting at position 2484 of SEQ ID NO: 587695
cggaguuggccugaaacca

SEQ ID NO: 811631 - RNA, 19 nt, Artificial Sequence
  Description of Artificial Sequence: Synthetic oligonucleotide
  Antisense strand to SEQ ID NO: 811630
ugguuucaggccaacuccg

SEQ ID NO: 811632 - RNA, 19 nt, Artificial Sequence
  Description of Artificial Sequence: Synthetic oligonucleotide
  Sense strand starting at position 2569 of SEQ ID NO: 587695
cccuaagaaugucugaacu

SEQ ID NO: 811633 - RNA, 19 nt, Artificial Sequence
  Description of Artificial Sequence: Synthetic oligonucleotide
  Antisense strand to SEQ ID NO: 811632
aguucagacauucuuaggg

SEQ ID NO: 811634 - RNA, 19 nt, Artificial Sequence
  Description of Artificial Sequence: Synthetic oligonucleotide
  Sense strand starting at position 2702 of SEQ ID NO: 587695
ucaauauuccaggaguggu

SEQ ID NO: 811635 - RNA, 19 nt, Artificial Sequence
  Description of Artificial Sequence: Synthetic oligonucleotide
  Antisense strand to SEQ ID NO: 811634
accacuccuggaauauuga

SEQ ID NO: 811636 - RNA, 19 nt, Artificial Sequence
  Description of Artificial Sequence: Synthetic oligonucleotide
  Sense strand starting at position 2722 of SEQ ID NO: 587695
cugacuagaccuuguaguu

SEQ ID NO: 811637 - RNA, 19 nt, Artificial Sequence
  Description of Artificial Sequence: Synthetic oligonucleotide
  Antisense strand to SEQ ID NO: 811636
aacuacaaggucuagucag

SEQ ID NO: 811638 - RNA, 19 nt, Artificial Sequence
  Description of Artificial Sequence: Synthetic oligonucleotide
  Sense strand starting at position 3053 of SEQ ID NO: 587695
aauugaggacuuuguaagu

SEQ ID NO: 811639 - RNA, 19 nt, Artificial Sequence
  Description of Artificial Sequence: Synthetic oligonucleotide
  Antisense strand to SEQ ID NO: 811638
acuuacaaaguccucaauu

SEQ ID NO: 811640 - RNA, 19 nt, Artificial Sequence
  Description of Artificial Sequence: Synthetic oligonucleotide
  Sense strand starting at position 3058 of SEQ ID NO: 587695
aggacuuuguaaguuagga

SEQ ID NO: 811641 - RNA, 19 nt, Artificial Sequence
  Description of Artificial Sequence: Synthetic oligonucleotide
  Antisense strand to SEQ ID NO: 811640
uccuaacuuacaaaguccu

SEQ ID NO: 811642 - RNA, 19 nt, Artificial Sequence
  Description of Artificial Sequence: Synthetic oligonucleotide
  Sense strand starting at position 3072 of SEQ ID NO: 587695
uaggaauuaguuugagauu

SEQ ID NO: 811643 - RNA, 19 nt, Artificial Sequence
  Description of Artificial Sequence: Synthetic oligonucleotide
  Antisense strand to SEQ ID NO: 811642
aaucucaaacuaauuccua

SEQ ID NO: 811644 - RNA, 19 nt, Artificial Sequence
  Description of Artificial Sequence: Synthetic oligonucleotide
  Sense strand starting at position 3073 of SEQ ID NO: 587695
aggaauuaguuugagauuu

SEQ ID NO: 811645 - RNA, 19 nt, Artificial Sequence
  Description of Artificial Sequence: Synthetic oligonucleotide
  Antisense strand to SEQ ID NO: 811644
aaaucucaaacuaauuccu

SEQ ID NO: 811646 - RNA, 19 nt, Artificial Sequence
  Description of Artificial Sequence: Synthetic oligonucleotide
  Sense strand starting at position 3200 of SEQ ID NO: 587695
cuuagagccuuaucuagua

SEQ ID NO: 811647 - RNA, 19 nt, Artificial Sequence
  Description of Artificial Sequence: Synthetic oligonucleotide
  Antisense strand to SEQ ID NO: 811646
uacuagauaaggcucuaag

SEQ ID NO: 811648 - RNA, 19 nt, Artificial Sequence
  Description of Artificial Sequence: Synthetic oligonucleotide
  Sense strand starting at position 3583 of SEQ ID NO: 587695
auguuuaguauguaugacu

SEQ ID NO: 811649 - RNA, 19 nt, Artificial Sequence
  Description of Artificial Sequence: Synthetic oligonucleotide
  Antisense strand to SEQ ID NO: 811648
agucauacauacuaaacau

SEQ ID NO: 811650 - RNA, 19 nt, Artificial Sequence
  Description of Artificial Sequence: Synthetic oligonucleotide
  Sense strand starting at position 3630 of SEQ ID NO: 587695
agaagugaucggcaguuau

SEQ ID NO: 811651 - RNA, 19 nt, Artificial Sequence
  Description of Artificial Sequence: Synthetic oligonucleotide
  Antisense strand to SEQ ID NO: 811650
auaacugccgaucacuucu

SEQ ID NO: 811652 - RNA, 19 nt, Artificial Sequence
  Description of Artificial Sequence: Synthetic oligonucleotide
  Sense strand starting at position 3669 of SEQ ID NO: 587695
gggucaaaguacuugaguu

SEQ ID NO: 811653 - RNA, 19 nt, Artificial Sequence
  Description of Artificial Sequence: Synthetic oligonucleotide
  Antisense strand to SEQ ID NO: 811652
aacucaaguacuuugaccc

SEQ ID NO: 811654 - RNA, 19 nt, Artificial Sequence
  Description of Artificial Sequence: Synthetic oligonucleotide
  Sense strand starting at position 3774 of SEQ ID NO: 587695
caauacguucugggaauua

SEQ ID NO: 811655 - RNA, 19 nt, Artificial Sequence
  Description of Artificial Sequence: Synthetic oligonucleotide
  Antisense strand to SEQ ID NO: 811654
uaauucccagaacguauug

SEQ ID NO: 811656 - RNA, 19 nt, Artificial Sequence
  Description of Artificial Sequence: Synthetic oligonucleotide
  Sense strand starting at position 3779 of SEQ ID NO: 587695
cguucugggaauuaaaugu

SEQ ID NO: 811657 - RNA, 19 nt, Artificial Sequence
  Description of Artificial Sequence: Synthetic oligonucleotide
  Antisense strand to SEQ ID NO: 811656
acauuuaauucccagaacg

SEQ ID NO: 811658 - RNA, 19 nt, Artificial Sequence
  Description of Artificial Sequence: Synthetic oligonucleotide
  Sense strand starting at position 3785 of SEQ ID NO: 587695
gggaauuaaaugugauguu

SEQ ID NO: 811659 - RNA, 19 nt, Artificial Sequence
  Description of Artificial Sequence: Synthetic oligonucleotide
  Antisense strand to SEQ ID NO: 811658
aacaucacauuuaauuccc

SEQ ID NO: 811660 - RNA, 19 nt, Artificial Sequence
  Description of Artificial Sequence: Synthetic oligonucleotide
  Sense strand starting at position 3933 of SEQ ID NO: 587695
gaugccugccuagaggauu

SEQ ID NO: 811661 - RNA, 19 nt, Artificial Sequence
  Description of Artificial Sequence: Synthetic oligonucleotide
  Antisense strand to SEQ ID NO: 811660
aauccucuaggcaggcauc

SEQ ID NO: 811662 - RNA, 19 nt, Artificial Sequence
  Description of Artificial Sequence: Synthetic oligonucleotide
  Sense strand starting at position 3968 of SEQ ID NO: 587695
guaaauguucuauaucuga

SEQ ID NO: 811663 - RNA, 19 nt, Artificial Sequence
  Description of Artificial Sequence: Synthetic oligonucleotide
  Antisense strand to SEQ ID NO: 811662
ucagauauagaacauuuac

SEQ ID NO: 811664 - RNA, 19 nt, Artificial Sequence
  Description of Artificial Sequence: Synthetic oligonucleotide
  Sense strand starting at position 508 of SEQ ID NO: 587696
ggucuguguggagagaagu

SEQ ID NO: 811665 - RNA, 19 nt, Artificial Sequence
  Description of Artificial Sequence: Synthetic oligonucleotide
  Antisense strand to SEQ ID NO: 811664
acuucucuccacacagacc

SEQ ID NO: 811666 - RNA, 19 nt, Artificial Sequence
  Description of Artificial Sequence: Synthetic oligonucleotide
  Sense strand starting at position 527 of SEQ ID NO: 587696
gcagcucuggcagagucaa

SEQ ID NO: 811667 - RNA, 19 nt, Artificial Sequence
  Description of Artificial Sequence: Synthetic oligonucleotide
  Antisense strand to SEQ ID NO: 811666
uugacucugccagagcugc

SEQ ID NO: 811668 - RNA, 19 nt, Artificial Sequence
  Description of Artificial Sequence: Synthetic oligonucleotide
  Sense strand starting at position 606 of SEQ ID NO: 587696
ggcugugccagccauaaca

SEQ ID NO: 811669 - RNA, 19 nt, Artificial Sequence
  Description of Artificial Sequence: Synthetic oligonucleotide
  Antisense strand to SEQ ID NO: 811668
uguuauggcuggcacagcc

SEQ ID NO: 811670 - RNA, 19 nt, Artificial Sequence
  Description of Artificial Sequence: Synthetic oligonucleotide
  Sense strand starting at position 920 of SEQ ID NO: 587696
accucauccugagaggaga

SEQ ID NO: 811671 - RNA, 19 nt, Artificial Sequence
  Description of Artificial Sequence: Synthetic oligonucleotide
  Antisense strand to SEQ ID NO: 811670
ucuccucucaggaugaggu

SEQ ID NO: 811672 - RNA, 19 nt, Artificial Sequence
  Description of Artificial Sequence: Synthetic oligonucleotide
  Sense strand starting at position 1146 of SEQ ID NO: 587696
ggcugagauuccuggaagc

SEQ ID NO: 811673 - RNA, 19 nt, Artificial Sequence
  Description of Artificial Sequence: Synthetic oligonucleotide
  Antisense strand to SEQ ID NO: 811672
gcuuccaggaaucucagcc

SEQ ID NO: 811674 - RNA, 19 nt, Artificial Sequence
  Description of Artificial Sequence: Synthetic oligonucleotide
  Sense strand starting at position 1212 of SEQ ID NO: 587696
ucugucugucuuggauuga

SEQ ID NO: 811675 - RNA, 19 nt, Artificial Sequence
  Description of Artificial Sequence: Synthetic oligonucleotide
  Antisense strand to SEQ ID NO: 811674
ucaauccaagacagacaga

SEQ ID NO: 811676 - RNA, 19 nt, Artificial Sequence
  Description of Artificial Sequence: Synthetic oligonucleotide
  Sense strand starting at position 1213 of SEQ ID NO: 587696
cugucugucuuggauugau

SEQ ID NO: 811677 - RNA, 19 nt, Artificial Sequence
  Description of Artificial Sequence: Synthetic oligonucleotide
  Antisense strand to SEQ ID NO: 811676
aucaauccaagacagacag

SEQ ID NO: 811678 - RNA, 19 nt, Artificial Sequence
  Description of Artificial Sequence: Synthetic oligonucleotide
  Sense strand starting at position 1221 of SEQ ID NO: 587696
cuuggauugauuugcgucu

SEQ ID NO: 811679 - RNA, 19 nt, Artificial Sequence
  Description of Artificial Sequence: Synthetic oligonucleotide
  Antisense strand to SEQ ID NO: 811678
agacgcaaaucaauccaag

SEQ ID NO: 811680 - RNA, 19 nt, Artificial Sequence
  Description of Artificial Sequence: Synthetic oligonucleotide
  Sense strand starting at position 1223 of SEQ ID NO: 587696
uggauugauuugcgucugu

SEQ ID NO: 811681 - RNA, 19 nt, Artificial Sequence
  Description of Artificial Sequence: Synthetic oligonucleotide
  Antisense strand to SEQ ID NO: 811680
acagacgcaaaucaaucca

SEQ ID NO: 811682 - RNA, 19 nt, Artificial Sequence
  Description of Artificial Sequence: Synthetic oligonucleotide
  Sense strand starting at position 1252 of SEQ ID NO: 587696
guguaucucucgccuccaa

SEQ ID NO: 811683 - RNA, 19 nt, Artificial Sequence
  Description of Artificial Sequence: Synthetic oligonucleotide
  Antisense strand to SEQ ID NO: 811682
uuggaggcgagagauacac

SEQ ID NO: 811684 - RNA, 19 nt, Artificial Sequence
  Description of Artificial Sequence: Synthetic oligonucleotide
  Sense strand starting at position 1288 of SEQ ID NO: 587696
ugugauggguccucacacu

SEQ ID NO: 811685 - RNA, 19 nt, Artificial Sequence
  Description of Artificial Sequence: Synthetic oligonucleotide
  Antisense strand to SEQ ID NO: 811684
agugugaggacccaucaca

SEQ ID NO: 811686 - RNA, 19 nt, Artificial Sequence
  Description of Artificial Sequence: Synthetic oligonucleotide
  Sense strand starting at position 1381 of SEQ ID NO: 587696
gucauuacaucgcccacua

SEQ ID NO: 811687 - RNA, 19 nt, Artificial Sequence
  Description of Artificial Sequence: Synthetic oligonucleotide
  Antisense strand to SEQ ID NO: 811686
uagugggcgauguaaugac

SEQ ID NO: 811688 - RNA, 19 nt, Artificial Sequence
  Description of Artificial Sequence: Synthetic oligonucleotide
  Sense strand starting at position 1422 of SEQ ID NO: 587696
gaagguaagccgggauuga

SEQ ID NO: 811689 - RNA, 19 nt, Artificial Sequence
  Description of Artificial Sequence: Synthetic oligonucleotide
  Antisense strand to SEQ ID NO: 811688
ucaaucccggcuuaccuuc

SEQ ID NO: 811690 - RNA, 19 nt, Artificial Sequence
  Description of Artificial Sequence: Synthetic oligonucleotide
  Sense strand starting at position 1499 of SEQ ID NO: 587696
gaggccuagucggaugaga

SEQ ID NO: 811691 - RNA, 19 nt, Artificial Sequence
  Description of Artificial Sequence: Synthetic oligonucleotide
  Antisense strand to SEQ ID NO: 811690
ucucauccgacuaggccuc

SEQ ID NO: 811692 - RNA, 19 nt, Artificial Sequence
  Description of Artificial Sequence: Synthetic oligonucleotide
  Sense strand starting at position 1501 of SEQ ID NO: 587696
ggccuagucggaugagaca

SEQ ID NO: 811693 - RNA, 19 nt, Artificial Sequence
  Description of Artificial Sequence: Synthetic oligonucleotide
  Antisense strand to SEQ ID NO: 811692
ugucucauccgacuaggcc

SEQ ID NO: 811694 - RNA, 19 nt, Artificial Sequence
  Description of Artificial Sequence: Synthetic oligonucleotide
  Sense strand starting at position 1535 of SEQ ID NO: 587696
ucaguuuccucuucugcau

SEQ ID NO: 811695 - RNA, 19 nt, Artificial Sequence
  Description of Artificial Sequence: Synthetic oligonucleotide
  Antisense strand to SEQ ID NO: 811694
augcagaagaggaaacuga

SEQ ID NO: 811696 - RNA, 19 nt, Artificial Sequence
  Description of Artificial Sequence: Synthetic oligonucleotide
  Sense strand starting at position 1716 of SEQ ID NO: 587696
ucaccugcucgcugaggaa

SEQ ID NO: 811697 - RNA, 19 nt, Artificial Sequence
  Description of Artificial Sequence: Synthetic oligonucleotide
  Antisense strand to SEQ ID NO: 811696
uuccucagcgagcagguga

SEQ ID NO: 811698 - RNA, 19 nt, Artificial Sequence
  Description of Artificial Sequence: Synthetic oligonucleotide
  Sense strand starting at position 2035 of SEQ ID NO: 587696
cgagcucuggccgcugaua

SEQ ID NO: 811699 - RNA, 19 nt, Artificial Sequence
  Description of Artificial Sequence: Synthetic oligonucleotide
  Antisense strand to SEQ ID NO: 811698
uaucagcggccagagcucg

SEQ ID NO: 811700 - RNA, 19 nt, Artificial Sequence
  Description of Artificial Sequence: Synthetic oligonucleotide
  Sense strand starting at position 2408 of SEQ ID NO: 587696
auggcauugccggaguuga

SEQ ID NO: 811701 - RNA, 19 nt, Artificial Sequence
  Description of Artificial Sequence: Synthetic oligonucleotide
  Antisense strand to SEQ ID NO: 811700
ucaacuccggcaaugccau

SEQ ID NO: 811702 - RNA, 19 nt, Artificial Sequence
  Description of Artificial Sequence: Synthetic oligonucleotide
  Sense strand starting at position 2409 of SEQ ID NO: 587696
uggcauugccggaguugau

SEQ ID NO: 811703 - RNA, 19 nt, Artificial Sequence
  Description of Artificial Sequence: Synthetic oligonucleotide
  Antisense strand to SEQ ID NO: 811702
aucaacuccggcaaugcca

SEQ ID NO: 811704 - RNA, 19 nt, Artificial Sequence
  Description of Artificial Sequence: Synthetic oligonucleotide
  Sense strand starting at position 2418 of SEQ ID NO: 587696
cggaguugaucauauccca

SEQ ID NO: 811705 - RNA, 19 nt, Artificial Sequence
  Description of Artificial Sequence: Synthetic oligonucleotide
  Antisense strand to SEQ ID NO: 811704
ugggauaugaucaacuccg

SEQ ID NO: 811706 - RNA, 19 nt, Artificial Sequence
  Description of Artificial Sequence: Synthetic oligonucleotide
  Sense strand starting at position 2457 of SEQ ID NO: 587696
accaaagaguuauaaaugu

SEQ ID NO: 811707 - RNA, 19 nt, Artificial Sequence
  Description of Artificial Sequence: Synthetic oligonucleotide
  Antisense strand to SEQ ID NO: 811706
acauuuauaacucuuuggu

SEQ ID NO: 811708 - RNA, 19 nt, Artificial Sequence
  Description of Artificial Sequence: Synthetic oligonucleotide
  Sense strand starting at position 2524 of SEQ ID NO: 587696
ucugcaauaguuggagaga

SEQ ID NO: 811709 - RNA, 19 nt, Artificial Sequence
  Description of Artificial Sequence: Synthetic oligonucleotide
  Antisense strand to SEQ ID NO: 811708
ucucuccaacuauugcaga

SEQ ID NO: 811710 - RNA, 19 nt, Artificial Sequence
  Description of Artificial Sequence: Synthetic oligonucleotide
  Sense strand starting at position 2525 of SEQ ID NO: 587696
cugcaauaguuggagagau

SEQ ID NO: 811711 - RNA, 19 nt, Artificial Sequence
  Description of Artificial Sequence: Synthetic oligonucleotide
  Antisense strand to SEQ ID NO: 811710
aucucuccaacuauugcag

SEQ ID NO: 811712 - RNA, 19 nt, Artificial Sequence
  Description of Artificial Sequence: Synthetic oligonucleotide
  Sense strand starting at position 3009 of SEQ ID NO: 587696
uuccucugccucugauagu

SEQ ID NO: 811713 - RNA, 19 nt, Artificial Sequence
  Description of Artificial Sequence: Synthetic oligonucleotide
  Antisense strand to SEQ ID NO: 811712
acuaucagaggcagaggaa

SEQ ID NO: 811714 - RNA, 19 nt, Artificial Sequence
  Description of Artificial Sequence: Synthetic oligonucleotide
  Sense strand starting at position 3162 of SEQ ID NO: 587696
uuuguagagcaggaucaua

SEQ ID NO: 811715 - RNA, 19 nt, Artificial Sequence
  Description of Artificial Sequence: Synthetic oligonucleotide
  Antisense strand to SEQ ID NO: 811714
uaugauccugcucuacaaa

SEQ ID NO: 811716 - RNA, 19 nt, Artificial Sequence
  Description of Artificial Sequence: Synthetic oligonucleotide
  Sense strand starting at position 3167 of SEQ ID NO: 587696
agagcaggaucauagcaau

SEQ ID NO: 811717 - RNA, 19 nt, Artificial Sequence
  Description of Artificial Sequence: Synthetic oligonucleotide
  Antisense strand to SEQ ID NO: 811716
auugcuaugauccugcucu

SEQ ID NO: 811718 - RNA, 19 nt, Artificial Sequence
  Description of Artificial Sequence: Synthetic oligonucleotide
  Sense strand starting at position 3170 of SEQ ID NO: 587696
gcaggaucauagcaauucu

SEQ ID NO: 811719 - RNA, 19 nt, Artificial Sequence
  Description of Artificial Sequence: Synthetic oligonucleotide
  Antisense strand to SEQ ID NO: 811718
agaauugcuaugauccugc

SEQ ID NO: 811720 - RNA, 19 nt, Artificial Sequence
  Description of Artificial Sequence: Synthetic oligonucleotide
  Sense strand starting at position 3429 of SEQ ID NO: 587696
cagacuugaucucuuggau

SEQ ID NO: 811721 - RNA, 19 nt, Artificial Sequence
  Description of Artificial Sequence: Synthetic oligonucleotide
  Antisense strand to SEQ ID NO: 811720
auccaagagaucaagucug

SEQ ID NO: 811722 - RNA, 19 nt, Artificial Sequence
  Description of Artificial Sequence: Synthetic oligonucleotide
  Sense strand starting at position 3433 of SEQ ID NO: 587696
cuugaucucuuggauucga

SEQ ID NO: 811723 - RNA, 19 nt, Artificial Sequence
  Description of Artificial Sequence: Synthetic oligonucleotide
  Antisense strand to SEQ ID NO: 811722
ucgaauccaagagaucaag

SEQ ID NO: 811724 - RNA, 19 nt, Artificial Sequence
  Description of Artificial Sequence: Synthetic oligonucleotide
  Sense strand starting at position 3437 of SEQ ID NO: 587696
aucucuuggauucgaguca

SEQ ID NO: 811725 - RNA, 19 nt, Artificial Sequence
  Description of Artificial Sequence: Synthetic oligonucleotide
  Antisense strand to SEQ ID NO: 811724
ugacucgaauccaagagau

SEQ ID NO: 811726 - RNA, 19 nt, Artificial Sequence
  Description of Artificial Sequence: Synthetic oligonucleotide
  Sense strand starting at position 3438 of SEQ ID NO: 587696
ucucuuggauucgagucau

SEQ ID NO: 811727 - RNA, 19 nt, Artificial Sequence
  Description of Artificial Sequence: Synthetic oligonucleotide
  Antisense strand to SEQ ID NO: 811726
augacucgaauccaagaga

SEQ ID NO: 811728 - RNA, 19 nt, Artificial Sequence
  Description of Artificial Sequence: Synthetic oligonucleotide
  Sense strand starting at position 3530 of SEQ ID NO: 587696
uaauucuuuguagaaacga

SEQ ID NO: 811729 - RNA, 19 nt, Artificial Sequence
  Description of Artificial Sequence: Synthetic oligonucleotide
  Antisense strand to SEQ ID NO: 811728
ucguuucuacaaagaauua

SEQ ID NO: 811730 - RNA, 19 nt, Artificial Sequence
  Description of Artificial Sequence: Synthetic oligonucleotide
  Sense strand starting at position 3654 of SEQ ID NO: 587696
ggcgaaaugugccuguaga

SEQ ID NO: 811731 - RNA, 19 nt, Artificial Sequence
  Description of Artificial Sequence: Synthetic oligonucleotide
  Antisense strand to SEQ ID NO: 811730
ucuacaggcacauuucgcc

SEQ ID NO: 811732 - RNA, 19 nt, Artificial Sequence
  Description of Artificial Sequence: Synthetic oligonucleotide
  Sense strand starting at position 3655 of SEQ ID NO: 587696
gcgaaaugugccuguagag

SEQ ID NO: 811733 - RNA, 19 nt, Artificial Sequence
  Description of Artificial Sequence: Synthetic oligonucleotide
  Antisense strand to SEQ ID NO: 811732
cucuacaggcacauuucgc

SEQ ID NO: 811734 - RNA, 19 nt, Artificial Sequence
  Description of Artificial Sequence: Synthetic oligonucleotide
  Sense strand starting at position 3711 of SEQ ID NO: 587696
ggaugcaucucuuuaggcu

SEQ ID NO: 811735 - RNA, 19 nt, Artificial Sequence
  Description of Artificial Sequence: Synthetic oligonucleotide
  Antisense strand to SEQ ID NO: 811734
agccuaaagagaugcaucc

SEQ ID NO: 811736 - RNA, 19 nt, Artificial Sequence
  Description of Artificial Sequence: Synthetic oligonucleotide
  Sense strand starting at position 3765 of SEQ ID NO: 587696
gaggcagggcccuguguua

SEQ ID NO: 811737 - RNA, 19 nt, Artificial Sequence
  Description of Artificial Sequence: Synthetic oligonucleotide
  Antisense strand to SEQ ID NO: 811736
uaacacagggcccugccuc

SEQ ID NO: 811738 - RNA, 19 nt, Artificial Sequence
  Description of Artificial Sequence: Synthetic oligonucleotide
  Sense strand starting at position 3777 of SEQ ID NO: 587696
uguguuaggcugugggaua

SEQ ID NO: 811739 - RNA, 19 nt, Artificial Sequence
  Description of Artificial Sequence: Synthetic oligonucleotide
  Antisense strand to SEQ ID NO: 811738
uaucccacagccuaacaca

SEQ ID NO: 811740 - RNA, 19 nt, Artificial Sequence
  Description of Artificial Sequence: Synthetic oligonucleotide
  Sense strand starting at position 3906 of SEQ ID NO: 587696
agagcaacuugucaacaua

SEQ ID NO: 811741 - RNA, 19 nt, Artificial Sequence
  Description of Artificial Sequence: Synthetic oligonucleotide
  Antisense strand to SEQ ID NO: 811740
uauguugacaaguugcucu

SEQ ID NO: 811742 - RNA, 19 nt, Artificial Sequence
  Description of Artificial Sequence: Synthetic oligonucleotide
  Sense strand starting at position 3971 of SEQ ID NO: 587696
gugugucuugcggcacaca

SEQ ID NO: 811743 - RNA, 19 nt, Artificial Sequence
  Description of Artificial Sequence: Synthetic oligonucleotide
  Antisense strand to SEQ ID NO: 811742
ugugugccgcaagacacac

SEQ ID NO: 811744 - RNA, 19 nt, Artificial Sequence
  Description of Artificial Sequence: Synthetic oligonucleotide
  Sense strand starting at position 20 of SEQ ID NO: 587697
acaaucuuuggucaaguuu

SEQ ID NO: 811745 - RNA, 19 nt, Artificial Sequence
  Description of Artificial Sequence: Synthetic oligonucleotide
  Antisense strand to SEQ ID NO: 811744
aaacuugaccaaagauugu

SEQ ID NO: 811746 - RNA, 19 nt, Artificial Sequence
  Description of Artificial Sequence: Synthetic oligonucleotide
  Sense strand starting at position 155 of SEQ ID NO: 587697
uggguuuagguuuaaguaa

SEQ ID NO: 811747 - RNA, 19 nt, Artificial Sequence
  Description of Artificial Sequence: Synthetic oligonucleotide
  Antisense strand to SEQ ID NO: 811746
uuacuuaaaccuaaaccca

SEQ ID NO: 811748 - RNA, 19 nt, Artificial Sequence
  Description of Artificial Sequence: Synthetic oligonucleotide
  Sense strand starting at position 398 of SEQ ID NO: 587697
gaggcuuuaggaugacaug

SEQ ID NO: 811749 - RNA, 19 nt, Artificial Sequence
  Description of Artificial Sequence: Synthetic oligonucleotide
  Antisense strand to SEQ ID NO: 811748
caugucauccuaaagccuc

SEQ ID NO: 811750 - RNA, 19 nt, Artificial Sequence
  Description of Artificial Sequence: Synthetic oligonucleotide
  Sense strand starting at position 428 of SEQ ID NO: 587697
cuuucuucccuagguaaag

SEQ ID NO: 811751 - RNA, 19 nt, Artificial Sequence
  Description of Artificial Sequence: Synthetic oligonucleotide
  Antisense strand to SEQ ID NO: 811750
cuuuaccuagggaagaaag

SEQ ID NO: 811752 - RNA, 19 nt, Artificial Sequence
  Description of Artificial Sequence: Synthetic oligonucleotide
  Sense strand starting at position 429 of SEQ ID NO: 587697
uuucuucccuagguaaaga

SEQ ID NO: 811753 - RNA, 19 nt, Artificial Sequence
  Description of Artificial Sequence: Synthetic oligonucleotide
  Antisense strand to SEQ ID NO: 811752
ucuuuaccuagggaagaaa

SEQ ID NO: 811754 - RNA, 19 nt, Artificial Sequence
  Description of Artificial Sequence: Synthetic oligonucleotide
  Sense strand starting at position 478 of SEQ ID NO: 587697
cguacuuuagcagauucua

SEQ ID NO: 811755 - RNA, 19 nt, Artificial Sequence
  Description of Artificial Sequence: Synthetic oligonucleotide
  Antisense strand to SEQ ID NO: 811754
uagaaucugcuaaaguacg

SEQ ID NO: 811756 - RNA, 19 nt, Artificial Sequence
  Description of Artificial Sequence: Synthetic oligonucleotide
  Sense strand starting at position 487 of SEQ ID NO: 587697
gcagauucuagcgaaacga

SEQ ID NO: 811757 - RNA, 19 nt, Artificial Sequence
  Description of Artificial Sequence: Synthetic oligonucleotide
  Antisense strand to SEQ ID NO: 811756
ucguuucgcuagaaucugc

SEQ ID NO: 811758 - RNA, 19 nt, Artificial Sequence
  Description of Artificial Sequence: Synthetic oligonucleotide
  Sense strand starting at position 535 of SEQ ID NO: 587697
gcuuguuaaagcuaaugag

SEQ ID NO: 811759 - RNA, 19 nt, Artificial Sequence
  Description of Artificial Sequence: Synthetic oligonucleotide
  Antisense strand to SEQ ID NO: 811758
cucauuagcuuuaacaagc

SEQ ID NO: 811760 - RNA, 19 nt, Artificial Sequence
  Description of Artificial Sequence: Synthetic oligonucleotide
  Sense strand starting at position 639 of SEQ ID NO: 587697
auuaaugacuugccuaaga

SEQ ID NO: 811761 - RNA, 19 nt, Artificial Sequence
  Description of Artificial Sequence: Synthetic oligonucleotide
  Antisense strand to SEQ ID NO: 811760
ucuuaggcaagucauuaau

SEQ ID NO: 811762 - RNA, 19 nt, Artificial Sequence
  Description of Artificial Sequence: Synthetic oligonucleotide
  Sense strand starting at position 655 of SEQ ID NO: 587697
agaucacacuguucuguaa

SEQ ID NO: 811763 - RNA, 19 nt, Artificial Sequence
  Description of Artificial Sequence: Synthetic oligonucleotide
  Antisense strand to SEQ ID NO: 811762
uuacagaacagugugaucu

SEQ ID NO: 811764 - RNA, 19 nt, Artificial Sequence
  Description of Artificial Sequence: Synthetic oligonucleotide
  Sense strand starting at position 1098 of SEQ ID NO: 587697
agaaauaacuugcuuuaag

SEQ ID NO: 811765 - RNA, 19 nt, Artificial Sequence
  Description of Artificial Sequence: Synthetic oligonucleotide
  Antisense strand to SEQ ID NO: 811764
cuuaaagcaaguuauuucu

SEQ ID NO: 811766 - RNA, 19 nt, Artificial Sequence
  Description of Artificial Sequence: Synthetic oligonucleotide
  Sense strand starting at position 1242 of SEQ ID NO: 587697
agcagcuucuuuccaaaga

SEQ ID NO: 811767 - RNA, 19 nt, Artificial Sequence
  Description of Artificial Sequence: Synthetic oligonucleotide
  Antisense strand to SEQ ID NO: 811766
ucuuuggaaagaagcugcu

SEQ ID NO: 811768 - RNA, 19 nt, Artificial Sequence
  Description of Artificial Sequence: Synthetic oligonucleotide
  Sense strand starting at position 1408 of SEQ ID NO: 587697
gcacuuuaacucugggacu

SEQ ID NO: 811769 - RNA, 19 nt, Artificial Sequence
  Description of Artificial Sequence: Synthetic oligonucleotide
  Antisense strand to SEQ ID NO: 811768
agucccagaguuaaagugc

SEQ ID NO: 811770 - RNA, 19 nt, Artificial Sequence
  Description of Artificial Sequence: Synthetic oligonucleotide
  Sense strand starting at position 1548 of SEQ ID NO: 587697
aggaaagucugagaaacaa

SEQ ID NO: 811771 - RNA, 19 nt, Artificial Sequence
  Description of Artificial Sequence: Synthetic oligonucleotide
  Antisense strand to SEQ ID NO: 811770
uuguuucucagacuuuccu

SEQ ID NO: 811772 - RNA, 19 nt, Artificial Sequence
  Description of Artificial Sequence: Synthetic oligonucleotide
  Sense strand starting at position 1609 of SEQ ID NO: 587697
augugcuauccugauagga

SEQ ID NO: 811773 - RNA, 19 nt, Artificial Sequence
  Description of Artificial Sequence: Synthetic oligonucleotide
  Antisense strand to SEQ ID NO: 811772
uccuaucaggauagcacau

SEQ ID NO: 811774 - RNA, 19 nt, Artificial Sequence
  Description of Artificial Sequence: Synthetic oligonucleotide
  Sense strand starting at position 1635 of SEQ ID NO: 587697
guagaaagcagacguuaga

SEQ ID NO: 811775 - RNA, 19 nt, Artificial Sequence
  Description of Artificial Sequence: Synthetic oligonucleotide
  Antisense strand to SEQ ID NO: 811774
ucuaacgucugcuuucuac

SEQ ID NO: 811776 - RNA, 19 nt, Artificial Sequence
  Description of Artificial Sequence: Synthetic oligonucleotide
  Sense strand starting at position 1758 of SEQ ID NO: 587697
gggaaguugggugggaauu

SEQ ID NO: 811777 - RNA, 19 nt, Artificial Sequence
  Description of Artificial Sequence: Synthetic oligonucleotide
  Antisense strand to SEQ ID NO: 811776
aauucccacccaacuuccc

SEQ ID NO: 811778 - RNA, 19 nt, Artificial Sequence
  Description of Artificial Sequence: Synthetic oligonucleotide
  Sense strand starting at position 1759 of SEQ ID NO: 587697
ggaaguugggugggaauua

SEQ ID NO: 811779 - RNA, 19 nt, Artificial Sequence
  Description of Artificial Sequence: Synthetic oligonucleotide
  Antisense strand to SEQ ID NO: 811778
uaauucccacccaacuucc

SEQ ID NO: 811780 - RNA, 19 nt, Artificial Sequence
  Description of Artificial Sequence: Synthetic oligonucleotide
  Sense strand starting at position 1902 of SEQ ID NO: 587697
accagaugucacugaacag

SEQ ID NO: 811781 - RNA, 19 nt, Artificial Sequence
  Description of Artificial Sequence: Synthetic oligonucleotide
  Antisense strand to SEQ ID NO: 811780
cuguucagugacaucuggu

SEQ ID NO: 811782 - RNA, 19 nt, Artificial Sequence
  Description of Artificial Sequence: Synthetic oligonucleotide
  Sense strand starting at position 2574 of SEQ ID NO: 587697
uuucucugagggugaacaa

SEQ ID NO: 811783 - RNA, 19 nt, Artificial Sequence
  Description of Artificial Sequence: Synthetic oligonucleotide
  Antisense strand to SEQ ID NO: 811782
uuguucacccucagagaaa

SEQ ID NO: 811784 - RNA, 19 nt, Artificial Sequence
  Description of Artificial Sequence: Synthetic oligonucleotide
  Sense strand starting at position 2603 of SEQ ID NO: 587697
acugguucacuggagcaga

SEQ ID NO: 811785 - RNA, 19 nt, Artificial Sequence
  Description of Artificial Sequence: Synthetic oligonucleotide
  Antisense strand to SEQ ID NO: 811784
ucugcuccagugaaccagu

SEQ ID NO: 811786 - RNA, 19 nt, Artificial Sequence
  Description of Artificial Sequence: Synthetic oligonucleotide
  Sense strand starting at position 2682 of SEQ ID NO: 587697
agacaugacugggagagau

SEQ ID NO: 811787 - RNA, 19 nt, Artificial Sequence
  Description of Artificial Sequence: Synthetic oligonucleotide
  Antisense strand to SEQ ID NO: 811786
aucucucccagucaugucu

SEQ ID NO: 811788 - RNA, 19 nt, Artificial Sequence
  Description of Artificial Sequence: Synthetic oligonucleotide
  Sense strand starting at position 2698 of SEQ ID NO: 587697
gauggaggauaugagauaa

SEQ ID NO: 811789 - RNA, 19 nt, Artificial Sequence
  Description of Artificial Sequence: Synthetic oligonucleotide
  Antisense strand to SEQ ID NO: 811788
uuaucucauauccuccauc

SEQ ID NO: 811790 - RNA, 19 nt, Artificial Sequence
  Description of Artificial Sequence: Synthetic oligonucleotide
  Sense strand starting at position 2726 of SEQ ID NO: 587697
aguuauucuugacccaaag

SEQ ID NO: 811791 - RNA, 19 nt, Artificial Sequence
  Description of Artificial Sequence: Synthetic oligonucleotide
  Antisense strand to SEQ ID NO: 811790
cuuugggucaagaauaacu

SEQ ID NO: 811792 - RNA, 19 nt, Artificial Sequence
  Description of Artificial Sequence: Synthetic oligonucleotide
  Sense strand starting at position 2784 of SEQ ID NO: 587697
acaacauuggauuguuuga

SEQ ID NO: 811793 - RNA, 19 nt, Artificial Sequence
  Description of Artificial Sequence: Synthetic oligonucleotide
  Antisense strand to SEQ ID NO: 811792
ucaaacaauccaauguugu

SEQ ID NO: 811794 - RNA, 19 nt, Artificial Sequence
  Description of Artificial Sequence: Synthetic oligonucleotide
  Sense strand starting at position 2786 of SEQ ID NO: 587697
aacauuggauuguuugagu

SEQ ID NO: 811795 - RNA, 19 nt, Artificial Sequence
  Description of Artificial Sequence: Synthetic oligonucleotide
  Antisense strand to SEQ ID NO: 811794
acucaaacaauccaauguu

SEQ ID NO: 811796 - RNA, 19 nt, Artificial Sequence
  Description of Artificial Sequence: Synthetic oligonucleotide
  Sense strand starting at position 2791 of SEQ ID NO: 587697
uggauuguuugaguguaga

SEQ ID NO: 811797 - RNA, 19 nt, Artificial Sequence
  Description of Artificial Sequence: Synthetic oligonucleotide
  Antisense strand to SEQ ID NO: 811796
ucuacacucaaacaaucca

SEQ ID NO: 811798 - RNA, 19 nt, Artificial Sequence
  Description of Artificial Sequence: Synthetic oligonucleotide
  Sense strand starting at position 2794 of SEQ ID NO: 587697
auuguuugaguguagaaau

SEQ ID NO: 811799 - RNA, 19 nt, Artificial Sequence
  Description of Artificial Sequence: Synthetic oligonucleotide
  Antisense strand to SEQ ID NO: 811798
auuucuacacucaaacaau

SEQ ID NO: 811800 - RNA, 19 nt, Artificial Sequence
  Description of Artificial Sequence: Synthetic oligonucleotide
  Sense strand starting at position 2804 of SEQ ID NO: 587697
uguagaaaugagugauaua

SEQ ID NO: 811801 - RNA, 19 nt, Artificial Sequence
  Description of Artificial Sequence: Synthetic oligonucleotide
  Antisense strand to SEQ ID NO: 811800
uauaucacucauuucuaca

SEQ ID NO: 811802 - RNA, 19 nt, Artificial Sequence
  Description of Artificial Sequence: Synthetic oligonucleotide
  Sense strand starting at position 3080 of SEQ ID NO: 587697
gaaagugcuguccaggaga

SEQ ID NO: 811803 - RNA, 19 nt, Artificial Sequence
  Description of Artificial Sequence: Synthetic oligonucleotide
  Antisense strand to SEQ ID NO: 811802
ucuccuggacagcacuuuc

SEQ ID NO: 811804 - RNA, 19 nt, Artificial Sequence
  Description of Artificial Sequence: Synthetic oligonucleotide
  Sense strand starting at position 3082 of SEQ ID NO: 587697
aagugcuguccaggagaga

SEQ ID NO: 811805 - RNA, 19 nt, Artificial Sequence
  Description of Artificial Sequence: Synthetic oligonucleotide
  Antisense strand to SEQ ID NO: 811804
ucucuccuggacagcacuu

SEQ ID NO: 811806 - RNA, 19 nt, Artificial Sequence
  Description of Artificial Sequence: Synthetic oligonucleotide
  Sense strand starting at position 3505 of SEQ ID NO: 587697
gggccaaggguguauguua

SEQ ID NO: 811807 - RNA, 19 nt, Artificial Sequence
  Description of Artificial Sequence: Synthetic oligonucleotide
  Antisense strand to SEQ ID NO: 811806
uaacauacacccuuggccc

SEQ ID NO: 811808 - RNA, 19 nt, Artificial Sequence
  Description of Artificial Sequence: Synthetic oligonucleotide
  Sense strand starting at position 3513 of SEQ ID NO: 587697
gguguauguuaccuuuaaa

SEQ ID NO: 811809 - RNA, 19 nt, Artificial Sequence
  Description of Artificial Sequence: Synthetic oligonucleotide
  Antisense strand to SEQ ID NO: 811808
uuuaaagguaacauacacc

SEQ ID NO: 811810 - RNA, 19 nt, Artificial Sequence
  Description of Artificial Sequence: Synthetic oligonucleotide
  Sense strand starting at position 3558 of SEQ ID NO: 587697
cccucaguacucuagguau

SEQ ID NO: 811811 - RNA, 19 nt, Artificial Sequence
  Description of Artificial Sequence: Synthetic oligonucleotide
  Antisense strand to SEQ ID NO: 811810
auaccuagaguacugaggg

SEQ ID NO: 811812 - RNA, 19 nt, Artificial Sequence
  Description of Artificial Sequence: Synthetic oligonucleotide
  Sense strand starting at position 3561 of SEQ ID NO: 587697
ucaguacucuagguaugua

SEQ ID NO: 811813 - RNA, 19 nt, Artificial Sequence
  Description of Artificial Sequence: Synthetic oligonucleotide
  Antisense strand to SEQ ID NO: 811812
uacauaccuagaguacuga

SEQ ID NO: 811814 - RNA, 19 nt, Artificial Sequence
  Description of Artificial Sequence: Synthetic oligonucleotide
  Sense strand starting at position 3564 of SEQ ID NO: 587697
guacucuagguauguauuu

SEQ ID NO: 811815 - RNA, 19 nt, Artificial Sequence
  Description of Artificial Sequence: Synthetic oligonucleotide
  Antisense strand to SEQ ID NO: 811814
aaauacauaccuagaguac

SEQ ID NO: 811816 - RNA, 19 nt, Artificial Sequence
  Description of Artificial Sequence: Synthetic oligonucleotide
  Sense strand starting at position 3569 of SEQ ID NO: 587697
cuagguauguauuuagucu

SEQ ID NO: 811817 - RNA, 19 nt, Artificial Sequence
  Description of Artificial Sequence: Synthetic oligonucleotide
  Antisense strand to SEQ ID NO: 811816
agacuaaauacauaccuag

SEQ ID NO: 811818 - RNA, 19 nt, Artificial Sequence
  Description of Artificial Sequence: Synthetic oligonucleotide
  Sense strand starting at position 3576 of SEQ ID NO: 587697
uguauuuagucugaagagg

SEQ ID NO: 811819 - RNA, 19 nt, Artificial Sequence
  Description of Artificial Sequence: Synthetic oligonucleotide
  Antisense strand to SEQ ID NO: 811818
ccucuucagacuaaauaca

SEQ ID NO: 811820 - RNA, 19 nt, Artificial Sequence
  Description of Artificial Sequence: Synthetic oligonucleotide
  Sense strand starting at position 3645 of SEQ ID NO: 587697
uuuagacuguggucuuaaa

SEQ ID NO: 811821 - RNA, 19 nt, Artificial Sequence
  Description of Artificial Sequence: Synthetic oligonucleotide
  Antisense strand to SEQ ID NO: 811820
uuuaagaccacagucuaaa

SEQ ID NO: 811822 - RNA, 19 nt, Artificial Sequence
  Description of Artificial Sequence: Synthetic oligonucleotide
  Sense strand starting at position 3778 of SEQ ID NO: 587697
gucuuauacugaucucucu

SEQ ID NO: 811823 - RNA, 19 nt, Artificial Sequence
  Description of Artificial Sequence: Synthetic oligonucleotide
  Antisense strand to SEQ ID NO: 811822
agagagaucaguauaagac

SEQ ID NO: 811824 - RNA, 19 nt, Artificial Sequence
  Description of Artificial Sequence: Synthetic oligonucleotide
  Sense strand starting at position 20 of SEQ ID NO: 587698
gaaacauguugcuugaaug

SEQ ID NO: 811825 - RNA, 19 nt, Artificial Sequence
  Description of Artificial Sequence: Synthetic oligonucleotide
  Antisense strand to SEQ ID NO: 811824
cauucaagcaacauguuuc

SEQ ID NO: 811826 - RNA, 19 nt, Artificial Sequence
  Description of Artificial Sequence: Synthetic oligonucleotide
  Sense strand starting at position 27 of SEQ ID NO: 587698
guugcuugaaugcaaauga

SEQ ID NO: 811827 - RNA, 19 nt, Artificial Sequence
  Description of Artificial Sequence: Synthetic oligonucleotide
  Antisense strand to SEQ ID NO: 811826
ucauuugcauucaagcaac

SEQ ID NO: 811828 - RNA, 19 nt, Artificial Sequence
  Description of Artificial Sequence: Synthetic oligonucleotide
  Sense strand starting at position 250 of SEQ ID NO: 587698
ggcugacauggucaauauu

SEQ ID NO: 811829 - RNA, 19 nt, Artificial Sequence
  Description of Artificial Sequence: Synthetic oligonucleotide
  Antisense strand to SEQ ID NO: 811828
aauauugaccaugucagcc

SEQ ID NO: 811830 - RNA, 19 nt, Artificial Sequence
  Description of Artificial Sequence: Synthetic oligonucleotide
  Sense strand starting at position 343 of SEQ ID NO: 587698
cauggauuaggucauucuu

SEQ ID NO: 811831 - RNA, 19 nt, Artificial Sequence
  Description of Artificial Sequence: Synthetic oligonucleotide
  Antisense strand to SEQ ID NO: 811830
aagaaugaccuaauccaug

SEQ ID NO: 811832 - RNA, 19 nt, Artificial Sequence
  Description of Artificial Sequence: Synthetic oligonucleotide
  Sense strand starting at position 414 of SEQ ID NO: 587698
ccaagacuuuggcuaucaa

SEQ ID NO: 811833 - RNA, 19 nt, Artificial Sequence
  Description of Artificial Sequence: Synthetic oligonucleotide
  Antisense strand to SEQ ID NO: 811832
uugauagccaaagucuugg

SEQ ID NO: 811834 - RNA, 19 nt, Artificial Sequence
  Description of Artificial Sequence: Synthetic oligonucleotide
  Sense strand starting at position 442 of SEQ ID NO: 587698
cuuucuagaccaggaaacu

SEQ ID NO: 811835 - RNA, 19 nt, Artificial Sequence
  Description of Artificial Sequence: Synthetic oligonucleotide
  Antisense strand to SEQ ID NO: 811834
aguuuccuggucuagaaag

SEQ ID NO: 811836 - RNA, 19 nt, Artificial Sequence
  Description of Artificial Sequence: Synthetic oligonucleotide
  Sense strand starting at position 601 of SEQ ID NO: 587698
uaagcauuccagugaugac

SEQ ID NO: 811837 - RNA, 19 nt, Artificial Sequence
  Description of Artificial Sequence: Synthetic oligonucleotide
  Antisense strand to SEQ ID NO: 811836
gucaucacuggaaugcuua

SEQ ID NO: 811838 - RNA, 19 nt, Artificial Sequence
  Description of Artificial Sequence: Synthetic oligonucleotide
  Sense strand starting at position 635 of SEQ ID NO: 587698
cacaauuaucgguaguacu

SEQ ID NO: 811839 - RNA, 19 nt, Artificial Sequence
  Description of Artificial Sequence: Synthetic oligonucleotide
  Antisense strand to SEQ ID NO: 811838
aguacuaccgauaauugug

SEQ ID NO: 811840 - RNA, 19 nt, Artificial Sequence
  Description of Artificial Sequence: Synthetic oligonucleotide
  Sense strand starting at position 647 of SEQ ID NO: 587698
uaguacuugcuugggaaga

SEQ ID NO: 811841 - RNA, 19 nt, Artificial Sequence
  Description of Artificial Sequence: Synthetic oligonucleotide
  Antisense strand to SEQ ID NO: 811840
ucuucccaagcaaguacua

SEQ ID NO: 811842 - RNA, 19 nt, Artificial Sequence
  Description of Artificial Sequence: Synthetic oligonucleotide
  Sense strand starting at position 922 of SEQ ID NO: 587698
cugugucuaccuggaggaa

SEQ ID NO: 811843 - RNA, 19 nt, Artificial Sequence
  Description of Artificial Sequence: Synthetic oligonucleotide
  Antisense strand to SEQ ID NO: 811842
uuccuccagguagacacag

SEQ ID NO: 811844 - RNA, 19 nt, Artificial Sequence
  Description of Artificial Sequence: Synthetic oligonucleotide
  Sense strand starting at position 923 of SEQ ID NO: 587698
ugugucuaccuggaggaaa

SEQ ID NO: 811845 - RNA, 19 nt, Artificial Sequence
  Description of Artificial Sequence: Synthetic oligonucleotide
  Antisense strand to SEQ ID NO: 811844
uuuccuccagguagacaca

SEQ ID NO: 811846 - RNA, 19 nt, Artificial Sequence
  Description of Artificial Sequence: Synthetic oligonucleotide
  Sense strand starting at position 1216 of SEQ ID NO: 587698
acugaagaugccuggaacu

SEQ ID NO: 811847 - RNA, 19 nt, Artificial Sequence
  Description of Artificial Sequence: Synthetic oligonucleotide
  Antisense strand to SEQ ID NO: 811846
aguuccaggcaucuucagu

SEQ ID NO: 811848 - RNA, 19 nt, Artificial Sequence
  Description of Artificial Sequence: Synthetic oligonucleotide
  Sense strand starting at position 1247 of SEQ ID NO: 587698
cagcgaaaugcauauaaug

SEQ ID NO: 811849 - RNA, 19 nt, Artificial Sequence
  Description of Artificial Sequence: Synthetic oligonucleotide
  Antisense strand to SEQ ID NO: 811848
cauuauaugcauuucgcug

SEQ ID NO: 811850 - RNA, 19 nt, Artificial Sequence
  Description of Artificial Sequence: Synthetic oligonucleotide
  Sense strand starting at position 1293 of SEQ ID NO: 587698
guuaaaucugaugagucuu

SEQ ID NO: 811851 - RNA, 19 nt, Artificial Sequence
  Description of Artificial Sequence: Synthetic oligonucleotide
  Antisense strand to SEQ ID NO: 811850
aagacucaucagauuuaac

SEQ ID NO: 811852 - RNA, 19 nt, Artificial Sequence
  Description of Artificial Sequence: Synthetic oligonucleotide
  Sense strand starting at position 1429 of SEQ ID NO: 587698
guaggauccucacuaaugu

SEQ ID NO: 811853 - RNA, 19 nt, Artificial Sequence
  Description of Artificial Sequence: Synthetic oligonucleotide
  Antisense strand to SEQ ID NO: 811852
acauuagugaggauccuac

SEQ ID NO: 811854 - RNA, 19 nt, Artificial Sequence
  Description of Artificial Sequence: Synthetic oligonucleotide
  Sense strand starting at position 1543 of SEQ ID NO: 587698
agcuauauccuggagcaac

SEQ ID NO: 811855 - RNA, 19 nt, Artificial Sequence
  Description of Artificial Sequence: Synthetic oligonucleotide
  Antisense strand to SEQ ID NO: 811854
guugcuccaggauauagcu

SEQ ID NO: 811856 - RNA, 19 nt, Artificial Sequence
  Description of Artificial Sequence: Synthetic oligonucleotide
  Sense strand starting at position 1555 of SEQ ID NO: 587698
gagcaacauccaggucuca

SEQ ID NO: 811857 - RNA, 19 nt, Artificial Sequence
  Description of Artificial Sequence: Synthetic oligonucleotide
  Antisense strand to SEQ ID NO: 811856
ugagaccuggauguugcuc

SEQ ID NO: 811858 - RNA, 19 nt, Artificial Sequence
  Description of Artificial Sequence: Synthetic oligonucleotide
  Sense strand starting at position 2145 of SEQ ID NO: 587698
auaauacuauagcuuggaa

SEQ ID NO: 811859 - RNA, 19 nt, Artificial Sequence
  Description of Artificial Sequence: Synthetic oligonucleotide
  Antisense strand to SEQ ID NO: 811858
uuccaagcuauaguauuau

SEQ ID NO: 811860 - RNA, 19 nt, Artificial Sequence
  Description of Artificial Sequence: Synthetic oligonucleotide
  Sense strand starting at position 2165 of SEQ ID NO: 587698
aggugaaggcuccauauua

SEQ ID NO: 811861 - RNA, 19 nt, Artificial Sequence
  Description of Artificial Sequence: Synthetic oligonucleotide
  Antisense strand to SEQ ID NO: 811860
uaauauggagccuucaccu

SEQ ID NO: 811862 - RNA, 19 nt, Artificial Sequence
  Description of Artificial Sequence: Synthetic oligonucleotide
  Sense strand starting at position 2272 of SEQ ID NO: 587698
cuaggaggcccauggauua

SEQ ID NO: 811863 - RNA, 19 nt, Artificial Sequence
  Description of Artificial Sequence: Synthetic oligonucleotide
  Antisense strand to SEQ ID NO: 811862
uaauccaugggccuccuag

SEQ ID NO: 811864 - RNA, 19 nt, Artificial Sequence
  Description of Artificial Sequence: Synthetic oligonucleotide
  Sense strand starting at position 2296 of SEQ ID NO: 587698
cagggucaucaugggaacu

SEQ ID NO: 811865 - RNA, 19 nt, Artificial Sequence
  Description of Artificial Sequence: Synthetic oligonucleotide
  Antisense strand to SEQ ID NO: 811864
aguucccaugaugacccug

SEQ ID NO: 811866 - RNA, 19 nt, Artificial Sequence
  Description of Artificial Sequence: Synthetic oligonucleotide
  Sense strand starting at position 2346 of SEQ ID NO: 587698
ugggcucuccugcaagaua

SEQ ID NO: 811867 - RNA, 19 nt, Artificial Sequence
  Description of Artificial Sequence: Synthetic oligonucleotide
  Antisense strand to SEQ ID NO: 811866
uaucuugcaggagagccca

SEQ ID NO: 811868 - RNA, 19 nt, Artificial Sequence
  Description of Artificial Sequence: Synthetic oligonucleotide
  Sense strand starting at position 2400 of SEQ ID NO: 587698
gcaagaggauuucuagcgu

SEQ ID NO: 811869 - RNA, 19 nt, Artificial Sequence
  Description of Artificial Sequence: Synthetic oligonucleotide
  Antisense strand to SEQ ID NO: 811868
acgcuagaaauccucuugc

SEQ ID NO: 811870 - RNA, 19 nt, Artificial Sequence
  Description of Artificial Sequence: Synthetic oligonucleotide
  Sense strand starting at position 2406 of SEQ ID NO: 587698
ggauuucuagcgugauucu

SEQ ID NO: 811871 - RNA, 19 nt, Artificial Sequence
  Description of Artificial Sequence: Synthetic oligonucleotide
  Antisense strand to SEQ ID NO: 811870
agaaucacgcuagaaaucc

SEQ ID NO: 811872 - RNA, 19 nt, Artificial Sequence
  Description of Artificial Sequence: Synthetic oligonucleotide
  Sense strand starting at position 2613 of SEQ ID NO: 587698
guuaaaugggcuuaauccu

SEQ ID NO: 811873 - RNA, 19 nt, Artificial Sequence
  Description of Artificial Sequence: Synthetic oligonucleotide
  Antisense strand to SEQ ID NO: 811872
aggauuaagcccauuuaac

SEQ ID NO: 811874 - RNA, 19 nt, Artificial Sequence
  Description of Artificial Sequence: Synthetic oligonucleotide
  Sense strand starting at position 2764 of SEQ ID NO: 587698
gcauuuauugaguacgugu

SEQ ID NO: 811875 - RNA, 19 nt, Artificial Sequence
  Description of Artificial Sequence: Synthetic oligonucleotide
  Antisense strand to SEQ ID NO: 811874
acacguacucaauaaaugc

SEQ ID NO: 811876 - RNA, 19 nt, Artificial Sequence
  Description of Artificial Sequence: Synthetic oligonucleotide
  Sense strand starting at position 2766 of SEQ ID NO: 587698
auuuauugaguacguguaa

SEQ ID NO: 811877 - RNA, 19 nt, Artificial Sequence
  Description of Artificial Sequence: Synthetic oligonucleotide
  Antisense strand to SEQ ID NO: 811876
uuacacguacucaauaaau

SEQ ID NO: 811878 - RNA, 19 nt, Artificial Sequence
  Description of Artificial Sequence: Synthetic oligonucleotide
  Sense strand starting at position 2931 of SEQ ID NO: 587698
gaagcucacguguaaugga

SEQ ID NO: 811879 - RNA, 19 nt, Artificial Sequence
  Description of Artificial Sequence: Synthetic oligonucleotide
  Antisense strand to SEQ ID NO: 811878
uccauuacacgugagcuuc

SEQ ID NO: 811880 - RNA, 19 nt, Artificial Sequence
  Description of Artificial Sequence: Synthetic oligonucleotide
  Sense strand starting at position 2947 of SEQ ID NO: 587698
ggaagcauucuggaaugca

SEQ ID NO: 811881 - RNA, 19 nt, Artificial Sequence
  Description of Artificial Sequence: Synthetic oligonucleotide
  Antisense strand to SEQ ID NO: 811880
ugcauuccagaaugcuucc

SEQ ID NO: 811882 - RNA, 19 nt, Artificial Sequence
  Description of Artificial Sequence: Synthetic oligonucleotide
  Sense strand starting at position 3038 of SEQ ID NO: 587698
cgauuaaaucagggcacaa

SEQ ID NO: 811883 - RNA, 19 nt, Artificial Sequence
  Description of Artificial Sequence: Synthetic oligonucleotide
  Antisense strand to SEQ ID NO: 811882
uugugcccugauuuaaucg

SEQ ID NO: 811884 - RNA, 19 nt, Artificial Sequence
  Description of Artificial Sequence: Synthetic oligonucleotide
  Sense strand starting at position 3127 of SEQ ID NO: 587698
guguuuguagaucauuaac

SEQ ID NO: 811885 - RNA, 19 nt, Artificial Sequence
  Description of Artificial Sequence: Synthetic oligonucleotide
  Antisense strand to SEQ ID NO: 811884
guuaaugaucuacaaacac

SEQ ID NO: 811886 - RNA, 19 nt, Artificial Sequence
  Description of Artificial Sequence: Synthetic oligonucleotide
  Sense strand starting at position 3129 of SEQ ID NO: 587698
guuuguagaucauuaacua

SEQ ID NO: 811887 - RNA, 19 nt, Artificial Sequence
  Description of Artificial Sequence: Synthetic oligonucleotide
  Antisense strand to SEQ ID NO: 811886
uaguuaaugaucuacaaac

SEQ ID NO: 811888 - RNA, 19 nt, Artificial Sequence
  Description of Artificial Sequence: Synthetic oligonucleotide
  Sense strand starting at position 3285 of SEQ ID NO: 587698
ucagcaucucaagagcaua

SEQ ID NO: 811889 - RNA, 19 nt, Artificial Sequence
  Description of Artificial Sequence: Synthetic oligonucleotide
  Antisense strand to SEQ ID NO: 811888
uaugcucuugagaugcuga

SEQ ID NO: 811890 - RNA, 19 nt, Artificial Sequence
  Description of Artificial Sequence: Synthetic oligonucleotide
  Sense strand starting at position 3505 of SEQ ID NO: 587698
ggaguugucccgagcauug

SEQ ID NO: 811891 - RNA, 19 nt, Artificial Sequence
  Description of Artificial Sequence: Synthetic oligonucleotide
  Antisense strand to SEQ ID NO: 811890
caaugcucgggacaacucc

SEQ ID NO: 811892 - RNA, 19 nt, Artificial Sequence
  Description of Artificial Sequence: Synthetic oligonucleotide
  Sense strand starting at position 3684 of SEQ ID NO: 587698
cauucuguugguggaauaa

SEQ ID NO: 811893 - RNA, 19 nt, Artificial Sequence
  Description of Artificial Sequence: Synthetic oligonucleotide
  Antisense strand to SEQ ID NO: 811892
uuauuccaccaacagaaug

SEQ ID NO: 811894 - RNA, 19 nt, Artificial Sequence
  Description of Artificial Sequence: Synthetic oligonucleotide
  Sense strand starting at position 3693 of SEQ ID NO: 587698
gguggaauaaagugagagu

SEQ ID NO: 811895 - RNA, 19 nt, Artificial Sequence
  Description of Artificial Sequence: Synthetic oligonucleotide
  Antisense strand to SEQ ID NO: 811894
acucucacuuuauuccacc

SEQ ID NO: 811896 - RNA, 19 nt, Artificial Sequence
  Description of Artificial Sequence: Synthetic oligonucleotide
  Sense strand starting at position 3700 of SEQ ID NO: 587698
uaaagugagagugaaguuu

SEQ ID NO: 811897 - RNA, 19 nt, Artificial Sequence
  Description of Artificial Sequence: Synthetic oligonucleotide
  Antisense strand to SEQ ID NO: 811896
aaacuucacucucacuuua

SEQ ID NO: 811898 - RNA, 19 nt, Artificial Sequence
  Description of Artificial Sequence: Synthetic oligonucleotide
  Sense strand starting at position 3739 of SEQ ID NO: 587698
gaggauaaagucuguucua

SEQ ID NO: 811899 - RNA, 19 nt, Artificial Sequence
  Description of Artificial Sequence: Synthetic oligonucleotide
  Antisense strand to SEQ ID NO: 811898
uagaacagacuuuauccuc

SEQ ID NO: 811900 - RNA, 19 nt, Artificial Sequence
  Description of Artificial Sequence: Synthetic oligonucleotide
  Sense strand starting at position 3740 of SEQ ID NO: 587698
aggauaaagucuguucuaa

SEQ ID NO: 811901 - RNA, 19 nt, Artificial Sequence
  Description of Artificial Sequence: Synthetic oligonucleotide
  Antisense strand to SEQ ID NO: 811900
uuagaacagacuuuauccu

SEQ ID NO: 811902 - RNA, 19 nt, Artificial Sequence
  Description of Artificial Sequence: Synthetic oligonucleotide
  Sense strand starting at position 3777 of SEQ ID NO: 587698
agauuuaauuaugacagca

SEQ ID NO: 811903 - RNA, 19 nt, Artificial Sequence
  Description of Artificial Sequence: Synthetic oligonucleotide
  Antisense strand to SEQ ID NO: 811902
ugcugucauaauuaaaucu

SEQ ID NO: 811904 - RNA, 19 nt, Artificial Sequence
  Description of Artificial Sequence: Synthetic oligonucleotide
  Sense strand starting at position 8 of SEQ ID NO: 587699
ggauacugaucugcucaca

SEQ ID NO: 811905 - RNA, 19 nt, Artificial Sequence
  Description of Artificial Sequence: Synthetic oligonucleotide
  Antisense strand to SEQ ID NO: 811904
ugugagcagaucaguaucc

SEQ ID NO: 811906 - RNA, 19 nt, Artificial Sequence
  Description of Artificial Sequence: Synthetic oligonucleotide
  Sense strand starting at position 71 of SEQ ID NO: 587699
cucacagugugagcaauuu

SEQ ID NO: 811907 - RNA, 19 nt, Artificial Sequence
  Description of Artificial Sequence: Synthetic oligonucleotide
  Antisense strand to SEQ ID NO: 811906
aaauugcucacacugugag

SEQ ID NO: 811908 - RNA, 19 nt, Artificial Sequence
  Description of Artificial Sequence: Synthetic oligonucleotide
  Sense strand starting at position 92 of SEQ ID NO: 587699
gugacuugaugcccuaaga

SEQ ID NO: 811909 - RNA, 19 nt, Artificial Sequence
  Description of Artificial Sequence: Synthetic oligonucleotide
  Antisense strand to SEQ ID NO: 811908
ucuuagggcaucaagucac

SEQ ID NO: 811910 - RNA, 19 nt, Artificial Sequence
  Description of Artificial Sequence: Synthetic oligonucleotide
  Sense strand starting at position 202 of SEQ ID NO: 587699
gcuggugaccuagacaaua

SEQ ID NO: 811911 - RNA, 19 nt, Artificial Sequence
  Description of Artificial Sequence: Synthetic oligonucleotide
  Antisense strand to SEQ ID NO: 811910
uauugucuaggucaccagc

SEQ ID NO: 811912 - RNA, 19 nt, Artificial Sequence
  Description of Artificial Sequence: Synthetic oligonucleotide
  Sense strand starting at position 573 of SEQ ID NO: 587699
cacuguugucaagagacuc

SEQ ID NO: 811913 - RNA, 19 nt, Artificial Sequence
  Description of Artificial Sequence: Synthetic oligonucleotide
  Antisense strand to SEQ ID NO: 811912
gagucucuugacaacagug

SEQ ID NO: 811914 - RNA, 19 nt, Artificial Sequence
  Description of Artificial Sequence: Synthetic oligonucleotide
  Sense strand starting at position 733 of SEQ ID NO: 587699
uuauuauuccagugcauga

SEQ ID NO: 811915 - RNA, 19 nt, Artificial Sequence
  Description of Artificial Sequence: Synthetic oligonucleotide
  Antisense strand to SEQ ID NO: 811914
ucaugcacuggaauaauaa

SEQ ID NO: 811916 - RNA, 19 nt, Artificial Sequence
  Description of Artificial Sequence: Synthetic oligonucleotide
  Sense strand starting at position 735 of SEQ ID NO: 587699
auuauuccagugcaugaau

SEQ ID NO: 811917 - RNA, 19 nt, Artificial Sequence
  Description of Artificial Sequence: Synthetic oligonucleotide
  Antisense strand to SEQ ID NO: 811916
auucaugcacuggaauaau

SEQ ID NO: 811918 - RNA, 19 nt, Artificial Sequence
  Description of Artificial Sequence: Synthetic oligonucleotide
  Sense strand starting at position 970 of SEQ ID NO: 587699
ugccauaguuuauuugcaa

SEQ ID NO: 811919 - RNA, 19 nt, Artificial Sequence
  Description of Artificial Sequence: Synthetic oligonucleotide
  Antisense strand to SEQ ID NO: 811918
uugcaaauaaacuauggca

SEQ ID NO: 811920 - RNA, 19 nt, Artificial Sequence
  Description of Artificial Sequence: Synthetic oligonucleotide
  Sense strand starting at position 971 of SEQ ID NO: 587699
gccauaguuuauuugcaag

SEQ ID NO: 811921 - RNA, 19 nt, Artificial Sequence
  Description of Artificial Sequence: Synthetic oligonucleotide
  Antisense strand to SEQ ID NO: 811920
cuugcaaauaaacuauggc

SEQ ID NO: 811922 - RNA, 19 nt, Artificial Sequence
  Description of Artificial Sequence: Synthetic oligonucleotide
  Sense strand starting at position 983 of SEQ ID NO: 587699
uugcaagaccuuugcuaga

SEQ ID NO: 811923 - RNA, 19 nt, Artificial Sequence
  Description of Artificial Sequence: Synthetic oligonucleotide
  Antisense strand to SEQ ID NO: 811922
ucuagcaaaggucuugcaa

SEQ ID NO: 811924 - RNA, 19 nt, Artificial Sequence
  Description of Artificial Sequence: Synthetic oligonucleotide
  Sense strand starting at position 988 of SEQ ID NO: 587699
agaccuuugcuagaguuag

SEQ ID NO: 811925 - RNA, 19 nt, Artificial Sequence
  Description of Artificial Sequence: Synthetic oligonucleotide
  Antisense strand to SEQ ID NO: 811924
cuaacucuagcaaaggucu

SEQ ID NO: 811926 - RNA, 19 nt, Artificial Sequence
  Description of Artificial Sequence: Synthetic oligonucleotide
  Sense strand starting at position 1099 of SEQ ID NO: 587699
aggcaaugccucuacuguu

SEQ ID NO: 811927 - RNA, 19 nt, Artificial Sequence
  Description of Artificial Sequence: Synthetic oligonucleotide
  Antisense strand to SEQ ID NO: 811926
aacaguagaggcauugccu

SEQ ID NO: 811928 - RNA, 19 nt, Artificial Sequence
  Description of Artificial Sequence: Synthetic oligonucleotide
  Sense strand starting at position 1177 of SEQ ID NO: 587699
uuacuucuccuguagucau

SEQ ID NO: 811929 - RNA, 19 nt, Artificial Sequence
  Description of Artificial Sequence: Synthetic oligonucleotide
  Antisense strand to SEQ ID NO: 811928
augacuacaggagaaguaa

SEQ ID NO: 811930 - RNA, 19 nt, Artificial Sequence
  Description of Artificial Sequence: Synthetic oligonucleotide
  Sense strand starting at position 1188 of SEQ ID NO: 587699
guagucauuucuguaaguc

SEQ ID NO: 811931 - RNA, 19 nt, Artificial Sequence
  Description of Artificial Sequence: Synthetic oligonucleotide
  Antisense strand to SEQ ID NO: 811930
gacuuacagaaaugacuac

SEQ ID NO: 811932 - RNA, 19 nt, Artificial Sequence
  Description of Artificial Sequence: Synthetic oligonucleotide
  Sense strand starting at position 1300 of SEQ ID NO: 587699
ucauuaaagccgcauuauu

SEQ ID NO: 811933 - RNA, 19 nt, Artificial Sequence
  Description of Artificial Sequence: Synthetic oligonucleotide
  Antisense strand to SEQ ID NO: 811932
aauaaugcggcuuuaauga

SEQ ID NO: 811934 - RNA, 19 nt, Artificial Sequence
  Description of Artificial Sequence: Synthetic oligonucleotide
  Sense strand starting at position 1356 of SEQ ID NO: 587699
cuugccaaucgacaucauu

SEQ ID NO: 811935 - RNA, 19 nt, Artificial Sequence
  Description of Artificial Sequence: Synthetic oligonucleotide
  Antisense strand to SEQ ID NO: 811934
aaugaugucgauuggcaag

SEQ ID NO: 811936 - RNA, 19 nt, Artificial Sequence
  Description of Artificial Sequence: Synthetic oligonucleotide
  Sense strand starting at position 1359 of SEQ ID NO: 587699
gccaaucgacaucauuaca

SEQ ID NO: 811937 - RNA, 19 nt, Artificial Sequence
  Description of Artificial Sequence: Synthetic oligonucleotide
  Antisense strand to SEQ ID NO: 811936
uguaaugaugucgauuggc

SEQ ID NO: 811938 - RNA, 19 nt, Artificial Sequence
  Description of Artificial Sequence: Synthetic oligonucleotide
  Sense strand starting at position 1443 of SEQ ID NO: 587699
cuaagucaccagggucauu

SEQ ID NO: 811939 - RNA, 19 nt, Artificial Sequence
  Description of Artificial Sequence: Synthetic oligonucleotide
  Antisense strand to SEQ ID NO: 811938
aaugacccuggugacuuag

SEQ ID NO: 811940 - RNA, 19 nt, Artificial Sequence
  Description of Artificial Sequence: Synthetic oligonucleotide
  Sense strand starting at position 1455 of SEQ ID NO: 587699
ggucauuauccugaacccu

SEQ ID NO: 811941 - RNA, 19 nt, Artificial Sequence
  Description of Artificial Sequence: Synthetic oligonucleotide
  Antisense strand to SEQ ID NO: 811940
aggguucaggauaaugacc

SEQ ID NO: 811942 - RNA, 19 nt, Artificial Sequence
  Description of Artificial Sequence: Synthetic oligonucleotide
  Sense strand starting at position 2045 of SEQ ID NO: 587699
ccuucugaaguaugucaua

SEQ ID NO: 811943 - RNA, 19 nt, Artificial Sequence
  Description of Artificial Sequence: Synthetic oligonucleotide
  Antisense strand to SEQ ID NO: 811942
uaugacauacuucagaagg

SEQ ID NO: 811944 - RNA, 19 nt, Artificial Sequence
  Description of Artificial Sequence: Synthetic oligonucleotide
  Sense strand starting at position 2061 of SEQ ID NO: 587699
auagucuucugguuaccau

SEQ ID NO: 811945 - RNA, 19 nt, Artificial Sequence
  Description of Artificial Sequence: Synthetic oligonucleotide
  Antisense strand to SEQ ID NO: 811944
augguaaccagaagacuau

SEQ ID NO: 811946 - RNA, 19 nt, Artificial Sequence
  Description of Artificial Sequence: Synthetic oligonucleotide
  Sense strand starting at position 2080 of SEQ ID NO: 587699
gugaacuguacacagucau

SEQ ID NO: 811947 - RNA, 19 nt, Artificial Sequence
  Description of Artificial Sequence: Synthetic oligonucleotide
  Antisense strand to SEQ ID NO: 811946
augacuguguacaguucac

SEQ ID NO: 811948 - RNA, 19 nt, Artificial Sequence
  Description of Artificial Sequence: Synthetic oligonucleotide
  Sense strand starting at position 2092 of SEQ ID NO: 587699
cagucauggucuccagaga

SEQ ID NO: 811949 - RNA, 19 nt, Artificial Sequence
  Description of Artificial Sequence: Synthetic oligonucleotide
  Antisense strand to SEQ ID NO: 811948
ucucuggagaccaugacug

SEQ ID NO: 811950 - RNA, 19 nt, Artificial Sequence
  Description of Artificial Sequence: Synthetic oligonucleotide
  Sense strand starting at position 2345 of SEQ ID NO: 587699
agcucuagccuugauugga

SEQ ID NO: 811951 - RNA, 19 nt, Artificial Sequence
  Description of Artificial Sequence: Synthetic oligonucleotide
  Antisense strand to SEQ ID NO: 811950
uccaaucaaggcuagagcu

SEQ ID NO: 811952 - RNA, 19 nt, Artificial Sequence
  Description of Artificial Sequence: Synthetic oligonucleotide
  Sense strand starting at position 2450 of SEQ ID NO: 587699
ccaagucauccucaaguca

SEQ ID NO: 811953 - RNA, 19 nt, Artificial Sequence
  Description of Artificial Sequence: Synthetic oligonucleotide
  Antisense strand to SEQ ID NO: 811952
ugacuugaggaugacuugg

SEQ ID NO: 811954 - RNA, 19 nt, Artificial Sequence
  Description of Artificial Sequence: Synthetic oligonucleotide
  Sense strand starting at position 2479 of SEQ ID NO: 587699
uugaccuucugaguuacaa

SEQ ID NO: 811955 - RNA, 19 nt, Artificial Sequence
  Description of Artificial Sequence: Synthetic oligonucleotide
  Antisense strand to SEQ ID NO: 811954
uuguaacucagaaggucaa

SEQ ID NO: 811956 - RNA, 19 nt, Artificial Sequence
  Description of Artificial Sequence: Synthetic oligonucleotide
  Sense strand starting at position 2692 of SEQ ID NO: 587699
cccaaauguuggucuuuga

SEQ ID NO: 811957 - RNA, 19 nt, Artificial Sequence
  Description of Artificial Sequence: Synthetic oligonucleotide
  Antisense strand to SEQ ID NO: 811956
ucaaagaccaacauuuggg

SEQ ID NO: 811958 - RNA, 19 nt, Artificial Sequence
  Description of Artificial Sequence: Synthetic oligonucleotide
  Sense strand starting at position 2891 of SEQ ID NO: 587699
gucucccuuguaugaacua

SEQ ID NO: 811959 - RNA, 19 nt, Artificial Sequence
  Description of Artificial Sequence: Synthetic oligonucleotide
  Antisense strand to SEQ ID NO: 811958
uaguucauacaagggagac

SEQ ID NO: 811960 - RNA, 19 nt, Artificial Sequence
  Description of Artificial Sequence: Synthetic oligonucleotide
  Sense strand starting at position 2903 of SEQ ID NO: 587699
ugaacuagagcucagguau

SEQ ID NO: 811961 - RNA, 19 nt, Artificial Sequence
  Description of Artificial Sequence: Synthetic oligonucleotide
  Antisense strand to SEQ ID NO: 811960
auaccugagcucuaguuca

SEQ ID NO: 811962 - RNA, 19 nt, Artificial Sequence
  Description of Artificial Sequence: Synthetic oligonucleotide
  Sense strand starting at position 2911 of SEQ ID NO: 587699
agcucagguauugaugaca

SEQ ID NO: 811963 - RNA, 19 nt, Artificial Sequence
  Description of Artificial Sequence: Synthetic oligonucleotide
  Antisense strand to SEQ ID NO: 811962
ugucaucaauaccugagcu

SEQ ID NO: 811964 - RNA, 19 nt, Artificial Sequence
  Description of Artificial Sequence: Synthetic oligonucleotide
  Sense strand starting at position 2930 of SEQ ID NO: 587699
agugguuggaugugacacu

SEQ ID NO: 811965 - RNA, 19 nt, Artificial Sequence
  Description of Artificial Sequence: Synthetic oligonucleotide
  Antisense strand to SEQ ID NO: 811964
agugucacauccaaccacu

SEQ ID NO: 811966 - RNA, 19 nt, Artificial Sequence
  Description of Artificial Sequence: Synthetic oligonucleotide
  Sense strand starting at position 3483 of SEQ ID NO: 587699
uccuuagucccuugaagga

SEQ ID NO: 811967 - RNA, 19 nt, Artificial Sequence
  Description of Artificial Sequence: Synthetic oligonucleotide
  Antisense strand to SEQ ID NO: 811966
uccuucaagggacuaagga

SEQ ID NO: 811968 - RNA, 19 nt, Artificial Sequence
  Description of Artificial Sequence: Synthetic oligonucleotide
  Sense strand starting at position 3728 of SEQ ID NO: 587699
gggcaaggaccuugucuau

SEQ ID NO: 811969 - RNA, 19 nt, Artificial Sequence
  Description of Artificial Sequence: Synthetic oligonucleotide
  Antisense strand to SEQ ID NO: 811968
auagacaagguccuugccc

SEQ ID NO: 811970 - RNA, 19 nt, Artificial Sequence
  Description of Artificial Sequence: Synthetic oligonucleotide
  Sense strand starting at position 3785 of SEQ ID NO: 587699
cauagcaggugcuugaaau

SEQ ID NO: 811971 - RNA, 19 nt, Artificial Sequence
  Description of Artificial Sequence: Synthetic oligonucleotide
  Antisense strand to SEQ ID NO: 811970
auuucaagcaccugcuaug

SEQ ID NO: 811972 - RNA, 19 nt, Artificial Sequence
  Description of Artificial Sequence: Synthetic oligonucleotide
  Sense strand starting at position 3786 of SEQ ID NO: 587699
auagcaggugcuugaaaug

SEQ ID NO: 811973 - RNA, 19 nt, Artificial Sequence
  Description of Artificial Sequence: Synthetic oligonucleotide
  Antisense strand to SEQ ID NO: 811972
cauuucaagcaccugcuau

SEQ ID NO: 811974 - RNA, 19 nt, Artificial Sequence
  Description of Artificial Sequence: Synthetic oligonucleotide
  Sense strand starting at position 3796 of SEQ ID NO: 587699
cuugaaauguacucacuga

SEQ ID NO: 811975 - RNA, 19 nt, Artificial Sequence
  Description of Artificial Sequence: Synthetic oligonucleotide
  Antisense strand to SEQ ID NO: 811974
ucagugaguacauuucaag

SEQ ID NO: 811976 - RNA, 19 nt, Artificial Sequence
  Description of Artificial Sequence: Synthetic oligonucleotide
  Sense strand starting at position 3815 of SEQ ID NO: 587699
augaccaucugggugaauu

SEQ ID NO: 811977 - RNA, 19 nt, Artificial Sequence
  Description of Artificial Sequence: Synthetic oligonucleotide
  Antisense strand to SEQ ID NO: 811976
aauucacccagauggucau

SEQ ID NO: 811978 - RNA, 19 nt, Artificial Sequence
  Description of Artificial Sequence: Synthetic oligonucleotide
  Sense strand starting at position 3816 of SEQ ID NO: 587699
ugaccaucugggugaauuc

SEQ ID NO: 811979 - RNA, 19 nt, Artificial Sequence
  Description of Artificial Sequence: Synthetic oligonucleotide
  Antisense strand to SEQ ID NO: 811978
gaauucacccagaugguca

SEQ ID NO: 811980 - RNA, 19 nt, Artificial Sequence
  Description of Artificial Sequence: Synthetic oligonucleotide
  Sense strand starting at position 3871 of SEQ ID NO: 587699
ggaggaaucaguggugacu

SEQ ID NO: 811981 - RNA, 19 nt, Artificial Sequence
  Description of Artificial Sequence: Synthetic oligonucleotide
  Antisense strand to SEQ ID NO: 811980
agucaccacugauuccucc

SEQ ID NO: 811982 - RNA, 19 nt, Artificial Sequence
  Description of Artificial Sequence: Synthetic oligonucleotide
  Sense strand starting at position 3914 of SEQ ID NO: 587699
cuuggugccacugagauaa

SEQ ID NO: 811983 - RNA, 19 nt, Artificial Sequence
  Description of Artificial Sequence: Synthetic oligonucleotide
  Antisense strand to SEQ ID NO: 811982
uuaucucaguggcaccaag

SEQ ID NO: 811984 - RNA, 19 nt, Artificial Sequence
  Description of Artificial Sequence: Synthetic oligonucleotide
  Sense strand starting at position 101 of SEQ ID NO: 587700
ugcggaugccucgagauag

SEQ ID NO: 811985 - RNA, 19 nt, Artificial Sequence
  Description of Artificial Sequence: Synthetic oligonucleotide
  Antisense strand to SEQ ID NO: 811984
cuaucucgaggcauccgca

SEQ ID NO: 811986 - RNA, 19 nt, Artificial Sequence
  Description of Artificial Sequence: Synthetic oligonucleotide
  Sense strand starting at position 102 of SEQ ID NO: 587700
gcggaugccucgagauagc

SEQ ID NO: 811987 - RNA, 19 nt, Artificial Sequence
  Description of Artificial Sequence: Synthetic oligonucleotide
  Antisense strand to SEQ ID NO: 811986
gcuaucucgaggcauccgc

SEQ ID NO: 811988 - RNA, 19 nt, Artificial Sequence
  Description of Artificial Sequence: Synthetic oligonucleotide
  Sense strand starting at position 886 of SEQ ID NO: 587700
uggagcucaccaggucaaa

SEQ ID NO: 811989 - RNA, 19 nt, Artificial Sequence
  Description of Artificial Sequence: Synthetic oligonucleotide
  Antisense strand to SEQ ID NO: 811988
uuugaccuggugagcucca

SEQ ID NO: 811990 - RNA, 19 nt, Artificial Sequence
  Description of Artificial Sequence: Synthetic oligonucleotide
  Sense strand starting at position 1025 of SEQ ID NO: 587700
gcggaugcuggcgauauga

SEQ ID NO: 811991 - RNA, 19 nt, Artificial Sequence
  Description of Artificial Sequence: Synthetic oligonucleotide
  Antisense strand to SEQ ID NO: 811990
ucauaucgccagcauccgc

SEQ ID NO: 811992 - RNA, 19 nt, Artificial Sequence
  Description of Artificial Sequence: Synthetic oligonucleotide
  Sense strand starting at position 1027 of SEQ ID NO: 587700
ggaugcuggcgauaugacu

SEQ ID NO: 811993 - RNA, 19 nt, Artificial Sequence
  Description of Artificial Sequence: Synthetic oligonucleotide
  Antisense strand to SEQ ID NO: 811992
agucauaucgccagcaucc

SEQ ID NO: 811994 - RNA, 19 nt, Artificial Sequence
  Description of Artificial Sequence: Synthetic oligonucleotide
  Sense strand starting at position 1035 of SEQ ID NO: 587700
gcgauaugacuggagucca

SEQ ID NO: 811995 - RNA, 19 nt, Artificial Sequence
  Description of Artificial Sequence: Synthetic oligonucleotide
  Antisense strand to SEQ ID NO: 811994
uggacuccagucauaucgc

SEQ ID NO: 811996 - RNA, 19 nt, Artificial Sequence
  Description of Artificial Sequence: Synthetic oligonucleotide
  Sense strand starting at position 1261 of SEQ ID NO: 587700
ggcaaagacgucugugaag

SEQ ID NO: 811997 - RNA, 19 nt, Artificial Sequence
  Description of Artificial Sequence: Synthetic oligonucleotide
  Antisense strand to SEQ ID NO: 811996
cuucacagacgucuuugcc

SEQ ID NO: 811998 - RNA, 19 nt, Artificial Sequence
  Description of Artificial Sequence: Synthetic oligonucleotide
  Sense strand starting at position 1263 of SEQ ID NO: 587700
caaagacgucugugaaggu

SEQ ID NO: 811999 - RNA, 19 nt, Artificial Sequence
  Description of Artificial Sequence: Synthetic oligonucleotide
  Antisense strand to SEQ ID NO: 811998
accuucacagacgucuuug

SEQ ID NO: 812000 - RNA, 19 nt, Artificial Sequence
  Description of Artificial Sequence: Synthetic oligonucleotide
  Sense strand starting at position 1264 of SEQ ID NO: 587700
aaagacgucugugaaggua

SEQ ID NO: 812001 - RNA, 19 nt, Artificial Sequence
  Description of Artificial Sequence: Synthetic oligonucleotide
  Antisense strand to SEQ ID NO: 812000
uaccuucacagacgucuuu

SEQ ID NO: 812002 - RNA, 19 nt, Artificial Sequence
  Description of Artificial Sequence: Synthetic oligonucleotide
  Sense strand starting at position 1352 of SEQ ID NO: 587700
aggagcucuucagcuggua

SEQ ID NO: 812003 - RNA, 19 nt, Artificial Sequence
  Description of Artificial Sequence: Synthetic oligonucleotide
  Antisense strand to SEQ ID NO: 812002
uaccagcugaagagcuccu

SEQ ID NO: 812004 - RNA, 19 nt, Artificial Sequence
  Description of Artificial Sequence: Synthetic oligonucleotide
  Sense strand starting at position 2528 of SEQ ID NO: 587700
gcugcacucccggacgauu

SEQ ID NO: 812005 - RNA, 19 nt, Artificial Sequence
  Description of Artificial Sequence: Synthetic oligonucleotide
  Antisense strand to SEQ ID NO: 812004
aaucguccgggagugcagc

SEQ ID NO: 812006 - RNA, 19 nt, Artificial Sequence
  Description of Artificial Sequence: Synthetic oligonucleotide
  Sense strand starting at position 2531 of SEQ ID NO: 587700
gcacucccggacgauuaau

SEQ ID NO: 812007 - RNA, 19 nt, Artificial Sequence
  Description of Artificial Sequence: Synthetic oligonucleotide
  Antisense strand to SEQ ID NO: 812006
auuaaucguccgggagugc

SEQ ID NO: 812008 - RNA, 19 nt, Artificial Sequence
  Description of Artificial Sequence: Synthetic oligonucleotide
  Sense strand starting at position 2539 of SEQ ID NO: 587700
ggacgauuaaugcauucua

SEQ ID NO: 812009 - RNA, 19 nt, Artificial Sequence
  Description of Artificial Sequence: Synthetic oligonucleotide
  Antisense strand to SEQ ID NO: 812008
uagaaugcauuaaucgucc

SEQ ID NO: 812010 - RNA, 19 nt, Artificial Sequence
  Description of Artificial Sequence: Synthetic oligonucleotide
  Sense strand starting at position 2942 of SEQ ID NO: 587700
gcacgaaguuacccuauau

SEQ ID NO: 812011 - RNA, 19 nt, Artificial Sequence
  Description of Artificial Sequence: Synthetic oligonucleotide
  Antisense strand to SEQ ID NO: 812010
auauaggguaacuucgugc

SEQ ID NO: 812012 - RNA, 19 nt, Artificial Sequence
  Description of Artificial Sequence: Synthetic oligonucleotide
  Sense strand starting at position 2996 of SEQ ID NO: 587700
cguuuagcauaucaucaga

SEQ ID NO: 812013 - RNA, 19 nt, Artificial Sequence
  Description of Artificial Sequence: Synthetic oligonucleotide
  Antisense strand to SEQ ID NO: 812012
ucugaugauaugcuaaacg

SEQ ID NO: 812014 - RNA, 19 nt, Artificial Sequence
  Description of Artificial Sequence: Synthetic oligonucleotide
  Sense strand starting at position 3371 of SEQ ID NO: 587700
ggguaaccauucuuuauuc

SEQ ID NO: 812015 - RNA, 19 nt, Artificial Sequence
  Description of Artificial Sequence: Synthetic oligonucleotide
  Antisense strand to SEQ ID NO: 812014
gaauaaagaaugguuaccc

SEQ ID NO: 812016 - RNA, 19 nt, Artificial Sequence
  Description of Artificial Sequence: Synthetic oligonucleotide
  Sense strand starting at position 3495 of SEQ ID NO: 587700
ccuguaacauuugugccaa

SEQ ID NO: 812017 - RNA, 19 nt, Artificial Sequence
  Description of Artificial Sequence: Synthetic oligonucleotide
  Antisense strand to SEQ ID NO: 812016
uuggcacaaauguuacagg

SEQ ID NO: 812018 - RNA, 19 nt, Artificial Sequence
  Description of Artificial Sequence: Synthetic oligonucleotide
  Sense strand starting at position 3594 of SEQ ID NO: 587700
gcugcucauguccagauga

SEQ ID NO: 812019 - RNA, 19 nt, Artificial Sequence
  Description of Artificial Sequence: Synthetic oligonucleotide
  Antisense strand to SEQ ID NO: 812018
ucaucuggacaugagcagc

SEQ ID NO: 812020 - RNA, 19 nt, Artificial Sequence
  Description of Artificial Sequence: Synthetic oligonucleotide
  Sense strand starting at position 3596 of SEQ ID NO: 587700
ugcucauguccagaugacu

SEQ ID NO: 812021 - RNA, 19 nt, Artificial Sequence
  Description of Artificial Sequence: Synthetic oligonucleotide
  Antisense strand to SEQ ID NO: 812020
agucaucuggacaugagca

SEQ ID NO: 812022 - RNA, 19 nt, Artificial Sequence
  Description of Artificial Sequence: Synthetic oligonucleotide
  Sense strand starting at position 3605 of SEQ ID NO: 587700
ccagaugacugcccuguaa

SEQ ID NO: 812023 - RNA, 19 nt, Artificial Sequence
  Description of Artificial Sequence: Synthetic oligonucleotide
  Antisense strand to SEQ ID NO: 812022
uuacagggcagucaucugg

SEQ ID NO: 812024 - RNA, 19 nt, Artificial Sequence
  Description of Artificial Sequence: Synthetic oligonucleotide
  Sense strand starting at position 3607 of SEQ ID NO: 587700
agaugacugcccuguaagu

SEQ ID NO: 812025 - RNA, 19 nt, Artificial Sequence
  Description of Artificial Sequence: Synthetic oligonucleotide
  Antisense strand to SEQ ID NO: 812024
acuuacagggcagucaucu

SEQ ID NO: 812026 - RNA, 19 nt, Artificial Sequence
  Description of Artificial Sequence: Synthetic oligonucleotide
  Sense strand starting at position 3916 of SEQ ID NO: 587700
cugucagcccaggaucuau

SEQ ID NO: 812027 - RNA, 19 nt, Artificial Sequence
  Description of Artificial Sequence: Synthetic oligonucleotide
  Antisense strand to SEQ ID NO: 812026
auagauccugggcugacag

SEQ ID NO: 812028 - RNA, 19 nt, Artificial Sequence
  Description of Artificial Sequence: Synthetic oligonucleotide
  Sense strand starting at position 3925 of SEQ ID NO: 587700
caggaucuaucaggagaga

SEQ ID NO: 812029 - RNA, 19 nt, Artificial Sequence
  Description of Artificial Sequence: Synthetic oligonucleotide
  Antisense strand to SEQ ID NO: 812028
ucucuccugauagauccug

SEQ ID NO: 812030 - RNA, 19 nt, Artificial Sequence
  Description of Artificial Sequence: Synthetic oligonucleotide
  Sense strand starting at position 70 of SEQ ID NO: 587701
ucaugauaugguuguuaaa

SEQ ID NO: 812031 - RNA, 19 nt, Artificial Sequence
  Description of Artificial Sequence: Synthetic oligonucleotide
  Antisense strand to SEQ ID NO: 812030
uuuaacaaccauaucauga

SEQ ID NO: 812032 - RNA, 19 nt, Artificial Sequence
  Description of Artificial Sequence: Synthetic oligonucleotide
  Sense strand starting at position 72 of SEQ ID NO: 587701
augauaugguuguuaaagu

SEQ ID NO: 812033 - RNA, 19 nt, Artificial Sequence
  Description of Artificial Sequence: Synthetic oligonucleotide
  Antisense strand to SEQ ID NO: 812032
acuuuaacaaccauaucau

SEQ ID NO: 812034 - RNA, 19 nt, Artificial Sequence
  Description of Artificial Sequence: Synthetic oligonucleotide
  Sense strand starting at position 306 of SEQ ID NO: 587701
gcagaacaaaguuagguuu

SEQ ID NO: 812035 - RNA, 19 nt, Artificial Sequence
  Description of Artificial Sequence: Synthetic oligonucleotide
  Antisense strand to SEQ ID NO: 812034
aaaccuaacuuuguucugc

SEQ ID NO: 812036 - RNA, 19 nt, Artificial Sequence
  Description of Artificial Sequence: Synthetic oligonucleotide
  Sense strand starting at position 377 of SEQ ID NO: 587701
auuagcauauauguggaua

SEQ ID NO: 812037 - RNA, 19 nt, Artificial Sequence
  Description of Artificial Sequence: Synthetic oligonucleotide
  Antisense strand to SEQ ID NO: 812036
uauccacauauaugcuaau

SEQ ID NO: 812038 - RNA, 19 nt, Artificial Sequence
  Description of Artificial Sequence: Synthetic oligonucleotide
  Sense strand starting at position 397 of SEQ ID NO: 587701
ugggauacuuauuauugga

SEQ ID NO: 812039 - RNA, 19 nt, Artificial Sequence
  Description of Artificial Sequence: Synthetic oligonucleotide
  Antisense strand to SEQ ID NO: 812038
uccaauaauaaguauccca

SEQ ID NO: 812040 - RNA, 19 nt, Artificial Sequence
  Description of Artificial Sequence: Synthetic oligonucleotide
  Sense strand starting at position 785 of SEQ ID NO: 587701
uggauuaguuccuuuacca

SEQ ID NO: 812041 - RNA, 19 nt, Artificial Sequence
  Description of Artificial Sequence: Synthetic oligonucleotide
  Antisense strand to SEQ ID NO: 812040
ugguaaaggaacuaaucca

SEQ ID NO: 812042 - RNA, 19 nt, Artificial Sequence
  Description of Artificial Sequence: Synthetic oligonucleotide
  Sense strand starting at position 1771 of SEQ ID NO: 587701
cggagcucuaccuagaacu

SEQ ID NO: 812043 - RNA, 19 nt, Artificial Sequence
  Description of Artificial Sequence: Synthetic oligonucleotide
  Antisense strand to SEQ ID NO: 812042
aguucuagguagagcuccg

SEQ ID NO: 812044 - RNA, 19 nt, Artificial Sequence
  Description of Artificial Sequence: Synthetic oligonucleotide
  Sense strand starting at position 1811 of SEQ ID NO: 587701
uaccuaugguucccagaga

SEQ ID NO: 812045 - RNA, 19 nt, Artificial Sequence
  Description of Artificial Sequence: Synthetic oligonucleotide
  Antisense strand to SEQ ID NO: 812044
ucucugggaaccauaggua

SEQ ID NO: 812046 - RNA, 19 nt, Artificial Sequence
  Description of Artificial Sequence: Synthetic oligonucleotide
  Sense strand starting at position 2313 of SEQ ID NO: 587701
gccuauuuagugcaaguau

SEQ ID NO: 812047 - RNA, 19 nt, Artificial Sequence
  Description of Artificial Sequence: Synthetic oligonucleotide
  Antisense strand to SEQ ID NO: 812046
auacuugcacuaaauaggc

SEQ ID NO: 812048 - RNA, 19 nt, Artificial Sequence
  Description of Artificial Sequence: Synthetic oligonucleotide
  Sense strand starting at position 2344 of SEQ ID NO: 587701
ucauauugugucuagaacu

SEQ ID NO: 812049 - RNA, 19 nt, Artificial Sequence
  Description of Artificial Sequence: Synthetic oligonucleotide
  Antisense strand to SEQ ID NO: 812048
aguucuagacacaauauga

SEQ ID NO: 812050 - RNA, 19 nt, Artificial Sequence
  Description of Artificial Sequence: Synthetic oligonucleotide
  Sense strand starting at position 2360 of SEQ ID NO: 587701
acuucuuaucugcauaguu

SEQ ID NO: 812051 - RNA, 19 nt, Artificial Sequence
  Description of Artificial Sequence: Synthetic oligonucleotide
  Antisense strand to SEQ ID NO: 812050
aacuaugcagauaagaagu

SEQ ID NO: 812052 - RNA, 19 nt, Artificial Sequence
  Description of Artificial Sequence: Synthetic oligonucleotide
  Sense strand starting at position 2386 of SEQ ID NO: 587701
aggaacuacgcuuauuaga

SEQ ID NO: 812053 - RNA, 19 nt, Artificial Sequence
  Description of Artificial Sequence: Synthetic oligonucleotide
  Antisense strand to SEQ ID NO: 812052
ucuaauaagcguaguuccu

SEQ ID NO: 812054 - RNA, 19 nt, Artificial Sequence
  Description of Artificial Sequence: Synthetic oligonucleotide
  Sense strand starting at position 2486 of SEQ ID NO: 587701
auagaauauuuccuugcgu

SEQ ID NO: 812055 - RNA, 19 nt, Artificial Sequence
  Description of Artificial Sequence: Synthetic oligonucleotide
  Antisense strand to SEQ ID NO: 812054
acgcaaggaaauauucuau

SEQ ID NO: 812056 - RNA, 19 nt, Artificial Sequence
  Description of Artificial Sequence: Synthetic oligonucleotide
  Sense strand starting at position 2487 of SEQ ID NO: 587701
uagaauauuuccuugcguu

SEQ ID NO: 812057 - RNA, 19 nt, Artificial Sequence
  Description of Artificial Sequence: Synthetic oligonucleotide
  Antisense strand to SEQ ID NO: 812056
aacgcaaggaaauauucua

SEQ ID NO: 812058 - RNA, 19 nt, Artificial Sequence
  Description of Artificial Sequence: Synthetic oligonucleotide
  Sense strand starting at position 2488 of SEQ ID NO: 587701
agaauauuuccuugcguuc

SEQ ID NO: 812059 - RNA, 19 nt, Artificial Sequence
  Description of Artificial Sequence: Synthetic oligonucleotide
  Antisense strand to SEQ ID NO: 812058
gaacgcaaggaaauauucu

SEQ ID NO: 812060 - RNA, 19 nt, Artificial Sequence
  Description of Artificial Sequence: Synthetic oligonucleotide
  Sense strand starting at position 2497 of SEQ ID NO: 587701
ccuugcguucucuuccauu

SEQ ID NO: 812061 - RNA, 19 nt, Artificial Sequence
  Description of Artificial Sequence: Synthetic oligonucleotide
  Antisense strand to SEQ ID NO: 812060
aauggaagagaacgcaagg

SEQ ID NO: 812062 - RNA, 19 nt, Artificial Sequence
  Description of Artificial Sequence: Synthetic oligonucleotide
  Sense strand starting at position 2562 of SEQ ID NO: 587701
acggguauuaccugaauug

SEQ ID NO: 812063 - RNA, 19 nt, Artificial Sequence
  Description of Artificial Sequence: Synthetic oligonucleotide
  Antisense strand to SEQ ID NO: 812062
caauucagguaauacccgu

SEQ ID NO: 812064 - RNA, 19 nt, Artificial Sequence
  Description of Artificial Sequence: Synthetic oligonucleotide
  Sense strand starting at position 2571 of SEQ ID NO: 587701
accugaauugcugauagua

SEQ ID NO: 812065 - RNA, 19 nt, Artificial Sequence
  Description of Artificial Sequence: Synthetic oligonucleotide
  Antisense strand to SEQ ID NO: 812064
uacuaucagcaauucaggu

SEQ ID NO: 812066 - RNA, 19 nt, Artificial Sequence
  Description of Artificial Sequence: Synthetic oligonucleotide
  Sense strand starting at position 2579 of SEQ ID NO: 587701
ugcugauaguaucugagaa

SEQ ID NO: 812067 - RNA, 19 nt, Artificial Sequence
  Description of Artificial Sequence: Synthetic oligonucleotide
  Antisense strand to SEQ ID NO: 812066
uucucagauacuaucagca

SEQ ID NO: 812068 - RNA, 19 nt, Artificial Sequence
  Description of Artificial Sequence: Synthetic oligonucleotide
  Sense strand starting at position 2580 of SEQ ID NO: 587701
gcugauaguaucugagaag

SEQ ID NO: 812069 - RNA, 19 nt, Artificial Sequence
  Description of Artificial Sequence: Synthetic oligonucleotide
  Antisense strand to SEQ ID NO: 812068
cuucucagauacuaucagc

SEQ ID NO: 812070 - RNA, 19 nt, Artificial Sequence
  Description of Artificial Sequence: Synthetic oligonucleotide
  Sense strand starting at position 2710 of SEQ ID NO: 587701
uagggcugccuccauuaua

SEQ ID NO: 812071 - RNA, 19 nt, Artificial Sequence
  Description of Artificial Sequence: Synthetic oligonucleotide
  Antisense strand to SEQ ID NO: 812070
uauaauggaggcagcccua

SEQ ID NO: 812072 - RNA, 19 nt, Artificial Sequence
  Description of Artificial Sequence: Synthetic oligonucleotide
  Sense strand starting at position 2735 of SEQ ID NO: 587701
cgaaucugagcguccguaa

SEQ ID NO: 812073 - RNA, 19 nt, Artificial Sequence
  Description of Artificial Sequence: Synthetic oligonucleotide
  Antisense strand to SEQ ID NO: 812072
uuacggacgcucagauucg

SEQ ID NO: 812074 - RNA, 19 nt, Artificial Sequence
  Description of Artificial Sequence: Synthetic oligonucleotide
  Sense strand starting at position 2810 of SEQ ID NO: 587701
gauccugcugagugagaga

SEQ ID NO: 812075 - RNA, 19 nt, Artificial Sequence
  Description of Artificial Sequence: Synthetic oligonucleotide
  Antisense strand to SEQ ID NO: 812074
ucucucacucagcaggauc

SEQ ID NO: 812076 - RNA, 19 nt, Artificial Sequence
  Description of Artificial Sequence: Synthetic oligonucleotide
  Sense strand starting at position 2825 of SEQ ID NO: 587701
gagacauucucuucucagg

SEQ ID NO: 812077 - RNA, 19 nt, Artificial Sequence
  Description of Artificial Sequence: Synthetic oligonucleotide
  Antisense strand to SEQ ID NO: 812076
ccugagaagagaaugucuc

SEQ ID NO: 812078 - RNA, 19 nt, Artificial Sequence
  Description of Artificial Sequence: Synthetic oligonucleotide
  Sense strand starting at position 3040 of SEQ ID NO: 587701
agcuaauguccaugccaca

SEQ ID NO: 812079 - RNA, 19 nt, Artificial Sequence
  Description of Artificial Sequence: Synthetic oligonucleotide
  Antisense strand to SEQ ID NO: 812078
uguggcauggacauuagcu

SEQ ID NO: 812080 - RNA, 19 nt, Artificial Sequence
  Description of Artificial Sequence: Synthetic oligonucleotide
  Sense strand starting at position 3168 of SEQ ID NO: 587701
gcgucuugccgccuggaga

SEQ ID NO: 812081 - RNA, 19 nt, Artificial Sequence
  Description of Artificial Sequence: Synthetic oligonucleotide
  Antisense strand to SEQ ID NO: 812080
ucuccaggcggcaagacgc

SEQ ID NO: 812082 - RNA, 19 nt, Artificial Sequence
  Description of Artificial Sequence: Synthetic oligonucleotide
  Sense strand starting at position 3206 of SEQ ID NO: 587701
guguaauaugaagagcaua

SEQ ID NO: 812083 - RNA, 19 nt, Artificial Sequence
  Description of Artificial Sequence: Synthetic oligonucleotide
  Antisense strand to SEQ ID NO: 812082
uaugcucuucauauuacac

SEQ ID NO: 812084 - RNA, 19 nt, Artificial Sequence
  Description of Artificial Sequence: Synthetic oligonucleotide
  Sense strand starting at position 3225 of SEQ ID NO: 587701
aggaaaucuucccuuuguu

SEQ ID NO: 812085 - RNA, 19 nt, Artificial Sequence
  Description of Artificial Sequence: Synthetic oligonucleotide
  Antisense strand to SEQ ID NO: 812084
aacaaagggaagauuuccu

SEQ ID NO: 812086 - RNA, 19 nt, Artificial Sequence
  Description of Artificial Sequence: Synthetic oligonucleotide
  Sense strand starting at position 3319 of SEQ ID NO: 587701
gcaaacugucauugaagga

SEQ ID NO: 812087 - RNA, 19 nt, Artificial Sequence
  Description of Artificial Sequence: Synthetic oligonucleotide
  Antisense strand to SEQ ID NO: 812086
uccuucaaugacaguuugc

SEQ ID NO: 812088 - RNA, 19 nt, Artificial Sequence
  Description of Artificial Sequence: Synthetic oligonucleotide
  Sense strand starting at position 3524 of SEQ ID NO: 587701
ucucuaaauccaggaagua

SEQ ID NO: 812089 - RNA, 19 nt, Artificial Sequence
  Description of Artificial Sequence: Synthetic oligonucleotide
  Antisense strand to SEQ ID NO: 812088
uacuuccuggauuuagaga

SEQ ID NO: 812090 - RNA, 19 nt, Artificial Sequence
  Description of Artificial Sequence: Synthetic oligonucleotide
  Sense strand starting at position 3563 of SEQ ID NO: 587701
ugcucuuaggaguaugcaa

SEQ ID NO: 812091 - RNA, 19 nt, Artificial Sequence
  Description of Artificial Sequence: Synthetic oligonucleotide
  Antisense strand to SEQ ID NO: 812090
uugcauacuccuaagagca

SEQ ID NO: 812092 - RNA, 19 nt, Artificial Sequence
  Description of Artificial Sequence: Synthetic oligonucleotide
  Sense strand starting at position 3565 of SEQ ID NO: 587701
cucuuaggaguaugcaauu

SEQ ID NO: 812093 - RNA, 19 nt, Artificial Sequence
  Description of Artificial Sequence: Synthetic oligonucleotide
  Antisense strand to SEQ ID NO: 812092
aauugcauacuccuaagag

SEQ ID NO: 812094 - RNA, 19 nt, Artificial Sequence
  Description of Artificial Sequence: Synthetic oligonucleotide
  Sense strand starting at position 3649 of SEQ ID NO: 587701
acuguuacacacugauaua

SEQ ID NO: 812095 - RNA, 19 nt, Artificial Sequence
  Description of Artificial Sequence: Synthetic oligonucleotide
  Antisense strand to SEQ ID NO: 812094
uauaucaguguguaacagu

SEQ ID NO: 812096 - RNA, 19 nt, Artificial Sequence
  Description of Artificial Sequence: Synthetic oligonucleotide
  Sense strand starting at position 3669 of SEQ ID NO: 587701
agcacaugugguuauacuu

SEQ ID NO: 812097 - RNA, 19 nt, Artificial Sequence
  Description of Artificial Sequence: Synthetic oligonucleotide
  Antisense strand to SEQ ID NO: 812096
aaguauaaccacaugugcu

SEQ ID NO: 812098 - RNA, 19 nt, Artificial Sequence
  Description of Artificial Sequence: Synthetic oligonucleotide
  Sense strand starting at position 3675 of SEQ ID NO: 587701
ugugguuauacuuggccau

SEQ ID NO: 812099 - RNA, 19 nt, Artificial Sequence
  Description of Artificial Sequence: Synthetic oligonucleotide
  Antisense strand to SEQ ID NO: 812098
auggccaaguauaaccaca

SEQ ID NO: 812100 - RNA, 19 nt, Artificial Sequence
  Description of Artificial Sequence: Synthetic oligonucleotide
  Sense strand starting at position 3676 of SEQ ID NO: 587701
gugguuauacuuggccauu

SEQ ID NO: 812101 - RNA, 19 nt, Artificial Sequence
  Description of Artificial Sequence: Synthetic oligonucleotide
  Antisense strand to SEQ ID NO: 812100
aauggccaaguauaaccac

SEQ ID NO: 812102 - RNA, 19 nt, Artificial Sequence
  Description of Artificial Sequence: Synthetic oligonucleotide
  Sense strand starting at position 3678 of SEQ ID NO: 587701
gguuauacuuggccauucu

SEQ ID NO: 812103 - RNA, 19 nt, Artificial Sequence
  Description of Artificial Sequence: Synthetic oligonucleotide
  Antisense strand to SEQ ID NO: 812102
agaauggccaaguauaacc

SEQ ID NO: 812104 - RNA, 19 nt, Artificial Sequence
  Description of Artificial Sequence: Synthetic oligonucleotide
  Sense strand starting at position 3679 of SEQ ID NO: 587701
guuauacuuggccauucua

SEQ ID NO: 812105 - RNA, 19 nt, Artificial Sequence
  Description of Artificial Sequence: Synthetic oligonucleotide
  Antisense strand to SEQ ID NO: 812104
uagaauggccaaguauaac

SEQ ID NO: 812106 - RNA, 19 nt, Artificial Sequence
  Description of Artificial Sequence: Synthetic oligonucleotide
  Sense strand starting at position 3894 of SEQ ID NO: 587701
agauauuguugugcagcaa

SEQ ID NO: 812107 - RNA, 19 nt, Artificial Sequence
  Description of Artificial Sequence: Synthetic oligonucleotide
  Antisense strand to SEQ ID NO: 812106
uugcugcacaacaauaucu

SEQ ID NO: 812108 - RNA, 19 nt, Artificial Sequence
  Description of Artificial Sequence: Synthetic oligonucleotide
  Sense strand starting at position 3895 of SEQ ID NO: 587701
gauauuguugugcagcaau

SEQ ID NO: 812109 - RNA, 19 nt, Artificial Sequence
  Description of Artificial Sequence: Synthetic oligonucleotide
  Antisense strand to SEQ ID NO: 812108
auugcugcacaacaauauc

SEQ ID NO: 812110 - RNA, 19 nt, Artificial Sequence
  Description of Artificial Sequence: Synthetic oligonucleotide
  Sense strand starting at position 7 of SEQ ID NO: 587702
ucaugauaugguuguuaaa

SEQ ID NO: 812111 - RNA, 19 nt, Artificial Sequence
  Description of Artificial Sequence: Synthetic oligonucleotide
  Antisense strand to SEQ ID NO: 812110
uuuaacaaccauaucauga

SEQ ID NO: 812112 - RNA, 19 nt, Artificial Sequence
  Description of Artificial Sequence: Synthetic oligonucleotide
  Sense strand starting at position 9 of SEQ ID NO: 587702
augauaugguuguuaaagu

SEQ ID NO: 812113 - RNA, 19 nt, Artificial Sequence
  Description of Artificial Sequence: Synthetic oligonucleotide
  Antisense strand to SEQ ID NO: 812112
acuuuaacaaccauaucau

SEQ ID NO: 812114 - RNA, 19 nt, Artificial Sequence
  Description of Artificial Sequence: Synthetic oligonucleotide
  Sense strand starting at position 243 of SEQ ID NO: 587702
gcagaacaaaguuagguuu

SEQ ID NO: 812115 - RNA, 19 nt, Artificial Sequence
  Description of Artificial Sequence: Synthetic oligonucleotide
  Antisense strand to SEQ ID NO: 812114
aaaccuaacuuuguucugc

SEQ ID NO: 812116 - RNA, 19 nt, Artificial Sequence
  Description of Artificial Sequence: Synthetic oligonucleotide
  Sense strand starting at position 314 of SEQ ID NO: 587702
auuagcauauauguggaua

SEQ ID NO: 812117 - RNA, 19 nt, Artificial Sequence
  Description of Artificial Sequence: Synthetic oligonucleotide
  Antisense strand to SEQ ID NO: 812116
uauccacauauaugcuaau

SEQ ID NO: 812118 - RNA, 19 nt, Artificial Sequence
  Description of Artificial Sequence: Synthetic oligonucleotide
  Sense strand starting at position 722 of SEQ ID NO: 587702
uggauuaguuccuuuacca

SEQ ID NO: 812119 - RNA, 19 nt, Artificial Sequence
  Description of Artificial Sequence: Synthetic oligonucleotide
  Antisense strand to SEQ ID NO: 812118
ugguaaaggaacuaaucca

SEQ ID NO: 812120 - RNA, 19 nt, Artificial Sequence
  Description of Artificial Sequence: Synthetic oligonucleotide
  Sense strand starting at position 1708 of SEQ ID NO: 587702
cggagcucuaccuagaacu

SEQ ID NO: 812121 - RNA, 19 nt, Artificial Sequence
  Description of Artificial Sequence: Synthetic oligonucleotide
  Antisense strand to SEQ ID NO: 812120
aguucuagguagagcuccg

SEQ ID NO: 812122 - RNA, 19 nt, Artificial Sequence
  Description of Artificial Sequence: Synthetic oligonucleotide
  Sense strand starting at position 1748 of SEQ ID NO: 587702
uaccuaugguucccagaga

SEQ ID NO: 812123 - RNA, 19 nt, Artificial Sequence
  Description of Artificial Sequence: Synthetic oligonucleotide
  Antisense strand to SEQ ID NO: 812122
ucucugggaaccauaggua

SEQ ID NO: 812124 - RNA, 19 nt, Artificial Sequence
  Description of Artificial Sequence: Synthetic oligonucleotide
  Sense strand starting at position 2250 of SEQ ID NO: 587702
gccuauuuagugcaaguau

SEQ ID NO: 812125 - RNA, 19 nt, Artificial Sequence
  Description of Artificial Sequence: Synthetic oligonucleotide
  Antisense strand to SEQ ID NO: 812124
auacuugcacuaaauaggc

SEQ ID NO: 812126 - RNA, 19 nt, Artificial Sequence
  Description of Artificial Sequence: Synthetic oligonucleotide
  Sense strand starting at position 2281 of SEQ ID NO: 587702
ucauauugugucuagaacu

SEQ ID NO: 812127 - RNA, 19 nt, Artificial Sequence
  Description of Artificial Sequence: Synthetic oligonucleotide
  Antisense strand to SEQ ID NO: 812126
aguucuagacacaauauga

SEQ ID NO: 812128 - RNA, 19 nt, Artificial Sequence
  Description of Artificial Sequence: Synthetic oligonucleotide
  Sense strand starting at position 2297 of SEQ ID NO: 587702
acuucuuaucugcauaguu

SEQ ID NO: 812129 - RNA, 19 nt, Artificial Sequence
  Description of Artificial Sequence: Synthetic oligonucleotide
  Antisense strand to SEQ ID NO: 812128
aacuaugcagauaagaagu

SEQ ID NO: 812130 - RNA, 19 nt, Artificial Sequence
  Description of Artificial Sequence: Synthetic oligonucleotide
  Sense strand starting at position 2323 of SEQ ID NO: 587702
aggaacuacgcuuauuaga

SEQ ID NO: 812131 - RNA, 19 nt, Artificial Sequence
  Description of Artificial Sequence: Synthetic oligonucleotide
  Antisense strand to SEQ ID NO: 812130
ucuaauaagcguaguuccu

SEQ ID NO: 812132 - RNA, 19 nt, Artificial Sequence
  Description of Artificial Sequence: Synthetic oligonucleotide
  Sense strand starting at position 2423 of SEQ ID NO: 587702
auagaauauuuccuugcgu

SEQ ID NO: 812133 - RNA, 19 nt, Artificial Sequence
  Description of Artificial Sequence: Synthetic oligonucleotide
  Antisense strand to SEQ ID NO: 812132
acgcaaggaaauauucuau

SEQ ID NO: 812134 - RNA, 19 nt, Artificial Sequence
  Description of Artificial Sequence: Synthetic oligonucleotide
  Sense strand starting at position 2424 of SEQ ID NO: 587702
uagaauauuuccuugcguu

SEQ ID NO: 812135 - RNA, 19 nt, Artificial Sequence
  Description of Artificial Sequence: Synthetic oligonucleotide
  Antisense strand to SEQ ID NO: 812134
aacgcaaggaaauauucua

SEQ ID NO: 812136 - RNA, 19 nt, Artificial Sequence
  Description of Artificial Sequence: Synthetic oligonucleotide
  Sense strand starting at position 2425 of SEQ ID NO: 587702
agaauauuuccuugcguuc

SEQ ID NO: 812137 - RNA, 19 nt, Artificial Sequence
  Description of Artificial Sequence: Synthetic oligonucleotide
  Antisense strand to SEQ ID NO: 812136
gaacgcaaggaaauauucu

SEQ ID NO: 812138 - RNA, 19 nt, Artificial Sequence
  Description of Artificial Sequence: Synthetic oligonucleotide
  Sense strand starting at position 2434 of SEQ ID NO: 587702
ccuugcguucucuuccauu

SEQ ID NO: 812139 - RNA, 19 nt, Artificial Sequence
  Description of Artificial Sequence: Synthetic oligonucleotide
  Antisense strand to SEQ ID NO: 812138
aauggaagagaacgcaagg

SEQ ID NO: 812140 - RNA, 19 nt, Artificial Sequence
  Description of Artificial Sequence: Synthetic oligonucleotide
  Sense strand starting at position 2499 of SEQ ID NO: 587702
acggguauuaccugaauug

SEQ ID NO: 812141 - RNA, 19 nt, Artificial Sequence
  Description of Artificial Sequence: Synthetic oligonucleotide
  Antisense strand to SEQ ID NO: 812140
caauucagguaauacccgu

SEQ ID NO: 812142 - RNA, 19 nt, Artificial Sequence
  Description of Artificial Sequence: Synthetic oligonucleotide
  Sense strand starting at position 2508 of SEQ ID NO: 587702
accugaauugcugauagua

SEQ ID NO: 812143 - RNA, 19 nt, Artificial Sequence
  Description of Artificial Sequence: Synthetic oligonucleotide
  Antisense strand to SEQ ID NO: 812142
uacuaucagcaauucaggu

SEQ ID NO: 812144 - RNA, 19 nt, Artificial Sequence
  Description of Artificial Sequence: Synthetic oligonucleotide
  Sense strand starting at position 2516 of SEQ ID NO: 587702
ugcugauaguaucugagaa

SEQ ID NO: 812145 - RNA, 19 nt, Artificial Sequence
  Description of Artificial Sequence: Synthetic oligonucleotide
  Antisense strand to SEQ ID NO: 812144
uucucagauacuaucagca

SEQ ID NO: 812146 - RNA, 19 nt, Artificial Sequence
  Description of Artificial Sequence: Synthetic oligonucleotide
  Sense strand starting at position 2517 of SEQ ID NO: 587702
gcugauaguaucugagaag

SEQ ID NO: 812147 - RNA, 19 nt, Artificial Sequence
  Description of Artificial Sequence: Synthetic oligonucleotide
  Antisense strand to SEQ ID NO: 812146
cuucucagauacuaucagc

SEQ ID NO: 812148 - RNA, 19 nt, Artificial Sequence
  Description of Artificial Sequence: Synthetic oligonucleotide
  Sense strand starting at position 2647 of SEQ ID NO: 587702
uagggcugccuccauuaua

SEQ ID NO: 812149 - RNA, 19 nt, Artificial Sequence
  Description of Artificial Sequence: Synthetic oligonucleotide
  Antisense strand to SEQ ID NO: 812148
uauaauggaggcagcccua

SEQ ID NO: 812150 - RNA, 19 nt, Artificial Sequence
  Description of Artificial Sequence: Synthetic oligonucleotide
  Sense strand starting at position 2672 of SEQ ID NO: 587702
cgaaucugagcguccguaa

SEQ ID NO: 812151 - RNA, 19 nt, Artificial Sequence
  Description of Artificial Sequence: Synthetic oligonucleotide
  Antisense strand to SEQ ID NO: 812150
uuacggacgcucagauucg

SEQ ID NO: 812152 - RNA, 19 nt, Artificial Sequence
  Description of Artificial Sequence: Synthetic oligonucleotide
  Sense strand starting at position 2747 of SEQ ID NO: 587702
gauccugcugagugagaga

SEQ ID NO: 812153 - RNA, 19 nt, Artificial Sequence
  Description of Artificial Sequence: Synthetic oligonucleotide
  Antisense strand to SEQ ID NO: 812152
ucucucacucagcaggauc

SEQ ID NO: 812154 - RNA, 19 nt, Artificial Sequence
  Description of Artificial Sequence: Synthetic oligonucleotide
  Sense strand starting at position 2762 of SEQ ID NO: 587702
gagacauucucuucucagg

SEQ ID NO: 812155 - RNA, 19 nt, Artificial Sequence
  Description of Artificial Sequence: Synthetic oligonucleotide
  Antisense strand to SEQ ID NO: 812154
ccugagaagagaaugucuc

SEQ ID NO: 812156 - RNA, 19 nt, Artificial Sequence
  Description of Artificial Sequence: Synthetic oligonucleotide
  Sense strand starting at position 2977 of SEQ ID NO: 587702
agcuaauguccaugccaca

SEQ ID NO: 812157 - RNA, 19 nt, Artificial Sequence
  Description of Artificial Sequence: Synthetic oligonucleotide
  Antisense strand to SEQ ID NO: 812156
uguggcauggacauuagcu

SEQ ID NO: 812158 - RNA, 19 nt, Artificial Sequence
  Description of Artificial Sequence: Synthetic oligonucleotide
  Sense strand starting at position 3105 of SEQ ID NO: 587702
gcgucuugccgccuggaga

SEQ ID NO: 812159 - RNA, 19 nt, Artificial Sequence
  Description of Artificial Sequence: Synthetic oligonucleotide
  Antisense strand to SEQ ID NO: 812158
ucuccaggcggcaagacgc

SEQ ID NO: 812160 - RNA, 19 nt, Artificial Sequence
  Description of Artificial Sequence: Synthetic oligonucleotide
  Sense strand starting at position 3143 of SEQ ID NO: 587702
guguaauaugaagagcaua

SEQ ID NO: 812161 - RNA, 19 nt, Artificial Sequence
  Description of Artificial Sequence: Synthetic oligonucleotide
  Antisense strand to SEQ ID NO: 812160
uaugcucuucauauuacac

SEQ ID NO: 812162 - RNA, 19 nt, Artificial Sequence
  Description of Artificial Sequence: Synthetic oligonucleotide
  Sense strand starting at position 3162 of SEQ ID NO: 587702
aggaaaucuucccuuuguu

SEQ ID NO: 812163 - RNA, 19 nt, Artificial Sequence
  Description of Artificial Sequence: Synthetic oligonucleotide
  Antisense strand to SEQ ID NO: 812162
aacaaagggaagauuuccu

SEQ ID NO: 812164 - RNA, 19 nt, Artificial Sequence
  Description of Artificial Sequence: Synthetic oligonucleotide
  Sense strand starting at position 3256 of SEQ ID NO: 587702
gcaaacugucauugaagga

SEQ ID NO: 812165 - RNA, 19 nt, Artificial Sequence
  Description of Artificial Sequence: Synthetic oligonucleotide
  Antisense strand to SEQ ID NO: 812164
uccuucaaugacaguuugc

SEQ ID NO: 812166 - RNA, 19 nt, Artificial Sequence
  Description of Artificial Sequence: Synthetic oligonucleotide
  Sense strand starting at position 3461 of SEQ ID NO: 587702
ucucuaaauccaggaagua

SEQ ID NO: 812167 - RNA, 19 nt, Artificial Sequence
  Description of Artificial Sequence: Synthetic oligonucleotide
  Antisense strand to SEQ ID NO: 812166
uacuuccuggauuuagaga

SEQ ID NO: 812168 - RNA, 19 nt, Artificial Sequence
  Description of Artificial Sequence: Synthetic oligonucleotide
  Sense strand starting at position 3500 of SEQ ID NO: 587702
ugcucuuaggaguaugcaa

SEQ ID NO: 812169 - RNA, 19 nt, Artificial Sequence
  Description of Artificial Sequence: Synthetic oligonucleotide
  Antisense strand to SEQ ID NO: 812168
uugcauacuccuaagagca

SEQ ID NO: 812170 - RNA, 19 nt, Artificial Sequence
  Description of Artificial Sequence: Synthetic oligonucleotide
  Sense strand starting at position 3502 of SEQ ID NO: 587702
cucuuaggaguaugcaauu

SEQ ID NO: 812171 - RNA, 19 nt, Artificial Sequence
  Description of Artificial Sequence: Synthetic oligonucleotide
  Antisense strand to SEQ ID NO: 812170
aauugcauacuccuaagag

SEQ ID NO: 812172 - RNA, 19 nt, Artificial Sequence
  Description of Artificial Sequence: Synthetic oligonucleotide
  Sense strand starting at position 3586 of SEQ ID NO: 587702
acuguuacacacugauaua

SEQ ID NO: 812173 - RNA, 19 nt, Artificial Sequence
  Description of Artificial Sequence: Synthetic oligonucleotide
  Antisense strand to SEQ ID NO: 812172
uauaucaguguguaacagu

SEQ ID NO: 812174 - RNA, 19 nt, Artificial Sequence
  Description of Artificial Sequence: Synthetic oligonucleotide
  Sense strand starting at position 3606 of SEQ ID NO: 587702
agcacaugugguuauacuu

SEQ ID NO: 812175 - RNA, 19 nt, Artificial Sequence
  Description of Artificial Sequence: Synthetic oligonucleotide
  Antisense strand to SEQ ID NO: 812174
aaguauaaccacaugugcu

SEQ ID NO: 812176 - RNA, 19 nt, Artificial Sequence
  Description of Artificial Sequence: Synthetic oligonucleotide
  Sense strand starting at position 3612 of SEQ ID NO: 587702
ugugguuauacuuggccau

SEQ ID NO: 812177 - RNA, 19 nt, Artificial Sequence
  Description of Artificial Sequence: Synthetic oligonucleotide
  Antisense strand to SEQ ID NO: 812176
auggccaaguauaaccaca

SEQ ID NO: 812178 - RNA, 19 nt, Artificial Sequence
  Description of Artificial Sequence: Synthetic oligonucleotide
  Sense strand starting at position 3613 of SEQ ID NO: 587702
gugguuauacuuggccauu

SEQ ID NO: 812179 - RNA, 19 nt, Artificial Sequence
  Description of Artificial Sequence: Synthetic oligonucleotide
  Antisense strand to SEQ ID NO: 812178
aauggccaaguauaaccac

SEQ ID NO: 812180 - RNA, 19 nt, Artificial Sequence
  Description of Artificial Sequence: Synthetic oligonucleotide
  Sense strand starting at position 3615 of SEQ ID NO: 587702
gguuauacuuggccauucu

SEQ ID NO: 812181 - RNA, 19 nt, Artificial Sequence
  Description of Artificial Sequence: Synthetic oligonucleotide
  Antisense strand to SEQ ID NO: 812180
agaauggccaaguauaacc

SEQ ID NO: 812182 - RNA, 19 nt, Artificial Sequence
  Description of Artificial Sequence: Synthetic oligonucleotide
  Sense strand starting at position 3616 of SEQ ID NO: 587702
guuauacuuggccauucua

SEQ ID NO: 812183 - RNA, 19 nt, Artificial Sequence
  Description of Artificial Sequence: Synthetic oligonucleotide
  Antisense strand to SEQ ID NO: 812182
uagaauggccaaguauaac

SEQ ID NO: 812184 - RNA, 19 nt, Artificial Sequence
  Description of Artificial Sequence: Synthetic oligonucleotide
  Sense strand starting at position 3831 of SEQ ID NO: 587702
agauauuguugugcagcaa

SEQ ID NO: 812185 - RNA, 19 nt, Artificial Sequence
  Description of Artificial Sequence: Synthetic oligonucleotide
  Antisense strand to SEQ ID NO: 812184
uugcugcacaacaauaucu

SEQ ID NO: 812186 - RNA, 19 nt, Artificial Sequence
  Description of Artificial Sequence: Synthetic oligonucleotide
  Sense strand starting at position 3832 of SEQ ID NO: 587702
gauauuguugugcagcaau

SEQ ID NO: 812187 - RNA, 19 nt, Artificial Sequence
  Description of Artificial Sequence: Synthetic oligonucleotide
  Antisense strand to SEQ ID NO: 812186
auugcugcacaacaauauc

SEQ ID NO: 812188 - RNA, 19 nt, Artificial Sequence
  Description of Artificial Sequence: Synthetic oligonucleotide
  Sense strand starting at position 3954 of SEQ ID NO: 587702
gcagauauugcagaguauc

SEQ ID NO: 812189 - RNA, 19 nt, Artificial Sequence
  Description of Artificial Sequence: Synthetic oligonucleotide
  Antisense strand to SEQ ID NO: 812188
gauacucugcaauaucugc

SEQ ID NO: 812190 - RNA, 19 nt, Artificial Sequence
  Description of Artificial Sequence: Synthetic oligonucleotide
  Sense strand starting at position 160 of SEQ ID NO: 587703
uagauuuacuuacggguaa

SEQ ID NO: 812191 - RNA, 19 nt, Artificial Sequence
  Description of Artificial Sequence: Synthetic oligonucleotide
  Antisense strand to SEQ ID NO: 812190
uuacccguaaguaaaucua

SEQ ID NO: 812192 - RNA, 19 nt, Artificial Sequence
  Description of Artificial Sequence: Synthetic oligonucleotide
  Sense strand starting at position 161 of SEQ ID NO: 587703
agauuuacuuacggguaac

SEQ ID NO: 812193 - RNA, 19 nt, Artificial Sequence
  Description of Artificial Sequence: Synthetic oligonucleotide
  Antisense strand to SEQ ID NO: 812192
guuacccguaaguaaaucu

SEQ ID NO: 812194 - RNA, 19 nt, Artificial Sequence
  Description of Artificial Sequence: Synthetic oligonucleotide
  Sense strand starting at position 164 of SEQ ID NO: 587703
uuuacuuacggguaacuua

SEQ ID NO: 812195 - RNA, 19 nt, Artificial Sequence
  Description of Artificial Sequence: Synthetic oligonucleotide
  Antisense strand to SEQ ID NO: 812194
uaaguuacccguaaguaaa

SEQ ID NO: 812196 - RNA, 19 nt, Artificial Sequence
  Description of Artificial Sequence: Synthetic oligonucleotide
  Sense strand starting at position 171 of SEQ ID NO: 587703
acggguaacuuaugggaaa

SEQ ID NO: 812197 - RNA, 19 nt, Artificial Sequence
  Description of Artificial Sequence: Synthetic oligonucleotide
  Antisense strand to SEQ ID NO: 812196
uuucccauaaguuacccgu

SEQ ID NO: 812198 - RNA, 19 nt, Artificial Sequence
  Description of Artificial Sequence: Synthetic oligonucleotide
  Sense strand starting at position 1865 of SEQ ID NO: 587703
caaugaagauguuuccagu

SEQ ID NO: 812199 - RNA, 19 nt, Artificial Sequence
  Description of Artificial Sequence: Synthetic oligonucleotide
  Antisense strand to SEQ ID NO: 812198
acuggaaacaucuucauug

SEQ ID NO: 812200 - RNA, 19 nt, Artificial Sequence
  Description of Artificial Sequence: Synthetic oligonucleotide
  Sense strand starting at position 1868 of SEQ ID NO: 587703
ugaagauguuuccaguaau

SEQ ID NO: 812201 - RNA, 19 nt, Artificial Sequence
  Description of Artificial Sequence: Synthetic oligonucleotide
  Antisense strand to SEQ ID NO: 812200
auuacuggaaacaucuuca

SEQ ID NO: 812202 - RNA, 19 nt, Artificial Sequence
  Description of Artificial Sequence: Synthetic oligonucleotide
  Sense strand starting at position 1871 of SEQ ID NO: 587703
agauguuuccaguaaugcu

SEQ ID NO: 812203 - RNA, 19 nt, Artificial Sequence
  Description of Artificial Sequence: Synthetic oligonucleotide
  Antisense strand to SEQ ID NO: 812202
agcauuacuggaaacaucu

SEQ ID NO: 812204 - RNA, 19 nt, Artificial Sequence
  Description of Artificial Sequence: Synthetic oligonucleotide
  Sense strand starting at position 42 of SEQ ID NO: 587704
aagugugguuuauuaauca

SEQ ID NO: 812205 - RNA, 19 nt, Artificial Sequence
  Description of Artificial Sequence: Synthetic oligonucleotide
  Antisense strand to SEQ ID NO: 812204
ugauuaauaaaccacacuu

SEQ ID NO: 812206 - RNA, 19 nt, Artificial Sequence
  Description of Artificial Sequence: Synthetic oligonucleotide
  Sense strand starting at position 164 of SEQ ID NO: 587704
gcaggaagcaaaugguauu

SEQ ID NO: 812207 - RNA, 19 nt, Artificial Sequence
  Description of Artificial Sequence: Synthetic oligonucleotide
  Antisense strand to SEQ ID NO: 812206
aauaccauuugcuuccugc

SEQ ID NO: 812208 - RNA, 19 nt, Artificial Sequence
  Description of Artificial Sequence: Synthetic oligonucleotide
  Sense strand starting at position 261 of SEQ ID NO: 587704
uucugaaaggcauguuaga

SEQ ID NO: 812209 - RNA, 19 nt, Artificial Sequence
  Description of Artificial Sequence: Synthetic oligonucleotide
  Antisense strand to SEQ ID NO: 812208
ucuaacaugccuuucagaa

SEQ ID NO: 812210 - RNA, 19 nt, Artificial Sequence
  Description of Artificial Sequence: Synthetic oligonucleotide
  Sense strand starting at position 369 of SEQ ID NO: 587704
cugucucaguagucaacaa

SEQ ID NO: 812211 - RNA, 19 nt, Artificial Sequence
  Description of Artificial Sequence: Synthetic oligonucleotide
  Antisense strand to SEQ ID NO: 812210
uuguugacuacugagacag

SEQ ID NO: 812212 - RNA, 19 nt, Artificial Sequence
  Description of Artificial Sequence: Synthetic oligonucleotide
  Sense strand starting at position 482 of SEQ ID NO: 587704
guuagacaagcuuggauua

SEQ ID NO: 812213 - RNA, 19 nt, Artificial Sequence
  Description of Artificial Sequence: Synthetic oligonucleotide
  Antisense strand to SEQ ID NO: 812212
uaauccaagcuugucuaac

SEQ ID NO: 812214 - RNA, 19 nt, Artificial Sequence
  Description of Artificial Sequence: Synthetic oligonucleotide
  Sense strand starting at position 483 of SEQ ID NO: 587704
uuagacaagcuuggauuau

SEQ ID NO: 812215 - RNA, 19 nt, Artificial Sequence
  Description of Artificial Sequence: Synthetic oligonucleotide
  Antisense strand to SEQ ID NO: 812214
auaauccaagcuugucuaa

SEQ ID NO: 812216 - RNA, 19 nt, Artificial Sequence
  Description of Artificial Sequence: Synthetic oligonucleotide
  Sense strand starting at position 493 of SEQ ID NO: 587704
uuggauuaucgcuguuaca

SEQ ID NO: 812217 - RNA, 19 nt, Artificial Sequence
  Description of Artificial Sequence: Synthetic oligonucleotide
  Antisense strand to SEQ ID NO: 812216
uguaacagcgauaauccaa

SEQ ID NO: 812218 - RNA, 19 nt, Artificial Sequence
  Description of Artificial Sequence: Synthetic oligonucleotide
  Sense strand starting at position 558 of SEQ ID NO: 587704
ggaugacgcuucuuaaccu

SEQ ID NO: 812219 - RNA, 19 nt, Artificial Sequence
  Description of Artificial Sequence: Synthetic oligonucleotide
  Antisense strand to SEQ ID NO: 812218
agguuaagaagcgucaucc

SEQ ID NO: 812220 - RNA, 19 nt, Artificial Sequence
  Description of Artificial Sequence: Synthetic oligonucleotide
  Sense strand starting at position 668 of SEQ ID NO: 587704
ugugcuucucuguugcauu

SEQ ID NO: 812221 - RNA, 19 nt, Artificial Sequence
  Description of Artificial Sequence: Synthetic oligonucleotide
  Antisense strand to SEQ ID NO: 812220
aaugcaacagagaagcaca

SEQ ID NO: 812222 - RNA, 19 nt, Artificial Sequence
  Description of Artificial Sequence: Synthetic oligonucleotide
  Sense strand starting at position 697 of SEQ ID NO: 587704
agugauguguuacuauaau

SEQ ID NO: 812223 - RNA, 19 nt, Artificial Sequence
  Description of Artificial Sequence: Synthetic oligonucleotide
  Antisense strand to SEQ ID NO: 812222
auuauaguaacacaucacu

SEQ ID NO: 812224 - RNA, 19 nt, Artificial Sequence
  Description of Artificial Sequence: Synthetic oligonucleotide
  Sense strand starting at position 798 of SEQ ID NO: 587704
agauacuacugugauuugu

SEQ ID NO: 812225 - RNA, 19 nt, Artificial Sequence
  Description of Artificial Sequence: Synthetic oligonucleotide
  Antisense strand to SEQ ID NO: 812224
acaaaucacaguaguaucu

SEQ ID NO: 812226 - RNA, 19 nt, Artificial Sequence
  Description of Artificial Sequence: Synthetic oligonucleotide
  Sense strand starting at position 804 of SEQ ID NO: 587704
uacugugauuuguugcuua

SEQ ID NO: 812227 - RNA, 19 nt, Artificial Sequence
  Description of Artificial Sequence: Synthetic oligonucleotide
  Antisense strand to SEQ ID NO: 812226
uaagcaacaaaucacagua

SEQ ID NO: 812228 - RNA, 19 nt, Artificial Sequence
  Description of Artificial Sequence: Synthetic oligonucleotide
  Sense strand starting at position 807 of SEQ ID NO: 587704
ugugauuuguugcuuauau

SEQ ID NO: 812229 - RNA, 19 nt, Artificial Sequence
  Description of Artificial Sequence: Synthetic oligonucleotide
  Antisense strand to SEQ ID NO: 812228
auauaagcaacaaaucaca

SEQ ID NO: 812230 - RNA, 19 nt, Artificial Sequence
  Description of Artificial Sequence: Synthetic oligonucleotide
  Sense strand starting at position 808 of SEQ ID NO: 587704
gugauuuguugcuuauauu

SEQ ID NO: 812231 - RNA, 19 nt, Artificial Sequence
  Description of Artificial Sequence: Synthetic oligonucleotide
  Antisense strand to SEQ ID NO: 812230
aauauaagcaacaaaucac

SEQ ID NO: 812232 - RNA, 19 nt, Artificial Sequence
  Description of Artificial Sequence: Synthetic oligonucleotide
  Sense strand starting at position 981 of SEQ ID NO: 587704
ucuggaacaucaguauaug

SEQ ID NO: 812233 - RNA, 19 nt, Artificial Sequence
  Description of Artificial Sequence: Synthetic oligonucleotide
  Antisense strand to SEQ ID NO: 812232
cauauacugauguuccaga

SEQ ID NO: 812234 - RNA, 19 nt, Artificial Sequence
  Description of Artificial Sequence: Synthetic oligonucleotide
  Sense strand starting at position 982 of SEQ ID NO: 587704
cuggaacaucaguauaugu

SEQ ID NO: 812235 - RNA, 19 nt, Artificial Sequence
  Description of Artificial Sequence: Synthetic oligonucleotide
  Antisense strand to SEQ ID NO: 812234
acauauacugauguuccag

SEQ ID NO: 812236 - RNA, 19 nt, Artificial Sequence
  Description of Artificial Sequence: Synthetic oligonucleotide
  Sense strand starting at position 993 of SEQ ID NO: 587704
guauauguaaagcaaggua

SEQ ID NO: 812237 - RNA, 19 nt, Artificial Sequence
  Description of Artificial Sequence: Synthetic oligonucleotide
  Antisense strand to SEQ ID NO: 812236
uaccuugcuuuacauauac

SEQ ID NO: 812238 - RNA, 19 nt, Artificial Sequence
  Description of Artificial Sequence: Synthetic oligonucleotide
  Sense strand starting at position 1009 of SEQ ID NO: 587704
guacuaaaguauucccuau

SEQ ID NO: 812239 - RNA, 19 nt, Artificial Sequence
  Description of Artificial Sequence: Synthetic oligonucleotide
  Antisense strand to SEQ ID NO: 812238
auagggaauacuuuaguac

SEQ ID NO: 812240 - RNA, 19 nt, Artificial Sequence
  Description of Artificial Sequence: Synthetic oligonucleotide
  Sense strand starting at position 1092 of SEQ ID NO: 587704
ugagguguugaccaaaugu

SEQ ID NO: 812241 - RNA, 19 nt, Artificial Sequence
  Description of Artificial Sequence: Synthetic oligonucleotide
  Antisense strand to SEQ ID NO: 812240
acauuuggucaacaccuca

SEQ ID NO: 812242 - RNA, 19 nt, Artificial Sequence
  Description of Artificial Sequence: Synthetic oligonucleotide
  Sense strand starting at position 1103 of SEQ ID NO: 587704
ccaaaugugcuagaucuag

SEQ ID NO: 812243 - RNA, 19 nt, Artificial Sequence
  Description of Artificial Sequence: Synthetic oligonucleotide
  Antisense strand to SEQ ID NO: 812242
cuagaucuagcacauuugg

SEQ ID NO: 812244 - RNA, 19 nt, Artificial Sequence
  Description of Artificial Sequence: Synthetic oligonucleotide
  Sense strand starting at position 1177 of SEQ ID NO: 587704
cccauaaggugauuguaaa

SEQ ID NO: 812245 - RNA, 19 nt, Artificial Sequence
  Description of Artificial Sequence: Synthetic oligonucleotide
  Antisense strand to SEQ ID NO: 812244
uuuacaaucaccuuauggg

SEQ ID NO: 812246 - RNA, 19 nt, Artificial Sequence
  Description of Artificial Sequence: Synthetic oligonucleotide
  Sense strand starting at position 1227 of SEQ ID NO: 587704
cacgucuuaccauggcuaa

SEQ ID NO: 812247 - RNA, 19 nt, Artificial Sequence
  Description of Artificial Sequence: Synthetic oligonucleotide
  Antisense strand to SEQ ID NO: 812246
uuagccaugguaagacgug

SEQ ID NO: 812248 - RNA, 19 nt, Artificial Sequence
  Description of Artificial Sequence: Synthetic oligonucleotide
  Sense strand starting at position 1230 of SEQ ID NO: 587704
gucuuaccauggcuaacau

SEQ ID NO: 812249 - RNA, 19 nt, Artificial Sequence
  Description of Artificial Sequence: Synthetic oligonucleotide
  Antisense strand to SEQ ID NO: 812248
auguuagccaugguaagac

SEQ ID NO: 812250 - RNA, 19 nt, Artificial Sequence
  Description of Artificial Sequence: Synthetic oligonucleotide
  Sense strand starting at position 1260 of SEQ ID NO: 587704
agaaucuauuugugauuag

SEQ ID NO: 812251 - RNA, 19 nt, Artificial Sequence
  Description of Artificial Sequence: Synthetic oligonucleotide
  Antisense strand to SEQ ID NO: 812250
cuaaucacaaauagauucu

SEQ ID NO: 812252 - RNA, 19 nt, Artificial Sequence
  Description of Artificial Sequence: Synthetic oligonucleotide
  Sense strand starting at position 1261 of SEQ ID NO: 587704
gaaucuauuugugauuaga

SEQ ID NO: 812253 - RNA, 19 nt, Artificial Sequence
  Description of Artificial Sequence: Synthetic oligonucleotide
  Antisense strand to SEQ ID NO: 812252
ucuaaucacaaauagauuc

SEQ ID NO: 812254 - RNA, 19 nt, Artificial Sequence
  Description of Artificial Sequence: Synthetic oligonucleotide
  Sense strand starting at position 1271 of SEQ ID NO: 587704
gugauuagaugacacugaa

SEQ ID NO: 812255 - RNA, 19 nt, Artificial Sequence
  Description of Artificial Sequence: Synthetic oligonucleotide
  Antisense strand to SEQ ID NO: 812254
uucagugucaucuaaucac

SEQ ID NO: 812256 - RNA, 19 nt, Artificial Sequence
  Description of Artificial Sequence: Synthetic oligonucleotide
  Sense strand starting at position 1284 of SEQ ID NO: 587704
acugaaauguaguucccua

SEQ ID NO: 812257 - RNA, 19 nt, Artificial Sequence
  Description of Artificial Sequence: Synthetic oligonucleotide
  Antisense strand to SEQ ID NO: 812256
uagggaacuacauuucagu

SEQ ID NO: 812258 - RNA, 19 nt, Artificial Sequence
  Description of Artificial Sequence: Synthetic oligonucleotide
  Sense strand starting at position 2073 of SEQ ID NO: 587704
gaagucugcgauuggugga

SEQ ID NO: 812259 - RNA, 19 nt, Artificial Sequence
  Description of Artificial Sequence: Synthetic oligonucleotide
  Antisense strand to SEQ ID NO: 812258
uccaccaaucgcagacuuc

SEQ ID NO: 812260 - RNA, 19 nt, Artificial Sequence
  Description of Artificial Sequence: Synthetic oligonucleotide
  Sense strand starting at position 2774 of SEQ ID NO: 587704
gucguuauucgguuuguca

SEQ ID NO: 812261 - RNA, 19 nt, Artificial Sequence
  Description of Artificial Sequence: Synthetic oligonucleotide
  Antisense strand to SEQ ID NO: 812260
ugacaaaccgaauaacgac

SEQ ID NO: 812262 - RNA, 19 nt, Artificial Sequence
  Description of Artificial Sequence: Synthetic oligonucleotide
  Sense strand starting at position 2775 of SEQ ID NO: 587704
ucguuauucgguuugucaa

SEQ ID NO: 812263 - RNA, 19 nt, Artificial Sequence
  Description of Artificial Sequence: Synthetic oligonucleotide
  Antisense strand to SEQ ID NO: 812262
uugacaaaccgaauaacga

SEQ ID NO: 812264 - RNA, 19 nt, Artificial Sequence
  Description of Artificial Sequence: Synthetic oligonucleotide
  Sense strand starting at position 2821 of SEQ ID NO: 587704
aggagagauugauugcauc

SEQ ID NO: 812265 - RNA, 19 nt, Artificial Sequence
  Description of Artificial Sequence: Synthetic oligonucleotide
  Antisense strand to SEQ ID NO: 812264
gaugcaaucaaucucuccu

SEQ ID NO: 812266 - RNA, 19 nt, Artificial Sequence
  Description of Artificial Sequence: Synthetic oligonucleotide
  Sense strand starting at position 2960 of SEQ ID NO: 587704
uacugaauguugucacuga

SEQ ID NO: 812267 - RNA, 19 nt, Artificial Sequence
  Description of Artificial Sequence: Synthetic oligonucleotide
  Antisense strand to SEQ ID NO: 812266
ucagugacaacauucagua

SEQ ID NO: 812268 - RNA, 19 nt, Artificial Sequence
  Description of Artificial Sequence: Synthetic oligonucleotide
  Sense strand starting at position 2964 of SEQ ID NO: 587704
gaauguugucacugaacaa

SEQ ID NO: 812269 - RNA, 19 nt, Artificial Sequence
  Description of Artificial Sequence: Synthetic oligonucleotide
  Antisense strand to SEQ ID NO: 812268
uuguucagugacaacauuc

SEQ ID NO: 812270 - RNA, 19 nt, Artificial Sequence
  Description of Artificial Sequence: Synthetic oligonucleotide
  Sense strand starting at position 2983 of SEQ ID NO: 587704
acuugugaugagcagguau

SEQ ID NO: 812271 - RNA, 19 nt, Artificial Sequence
  Description of Artificial Sequence: Synthetic oligonucleotide
  Antisense strand to SEQ ID NO: 812270
auaccugcucaucacaagu

SEQ ID NO: 812272 - RNA, 19 nt, Artificial Sequence
  Description of Artificial Sequence: Synthetic oligonucleotide
  Sense strand starting at position 3059 of SEQ ID NO: 587704
gcaaucuaagaguauauua

SEQ ID NO: 812273 - RNA, 19 nt, Artificial Sequence
  Description of Artificial Sequence: Synthetic oligonucleotide
  Antisense strand to SEQ ID NO: 812272
uaauauacucuuagauugc

SEQ ID NO: 812274 - RNA, 19 nt, Artificial Sequence
  Description of Artificial Sequence: Synthetic oligonucleotide
  Sense strand starting at position 3144 of SEQ ID NO: 587704
uuugaauguugguucugaa

SEQ ID NO: 812275 - RNA, 19 nt, Artificial Sequence
  Description of Artificial Sequence: Synthetic oligonucleotide
  Antisense strand to SEQ ID NO: 812274
uucagaaccaacauucaaa

SEQ ID NO: 812276 - RNA, 19 nt, Artificial Sequence
  Description of Artificial Sequence: Synthetic oligonucleotide
  Sense strand starting at position 3165 of SEQ ID NO: 587704
ugaagcauguaguuacuuu

SEQ ID NO: 812277 - RNA, 19 nt, Artificial Sequence
  Description of Artificial Sequence: Synthetic oligonucleotide
  Antisense strand to SEQ ID NO: 812276
aaaguaacuacaugcuuca

SEQ ID NO: 812278 - RNA, 19 nt, Artificial Sequence
  Description of Artificial Sequence: Synthetic oligonucleotide
  Sense strand starting at position 3712 of SEQ ID NO: 587704
ugcuuaauucugcagcaca

SEQ ID NO: 812279 - RNA, 19 nt, Artificial Sequence
  Description of Artificial Sequence: Synthetic oligonucleotide
  Antisense strand to SEQ ID NO: 812278
ugugcugcagaauuaagca

SEQ ID NO: 812280 - RNA, 19 nt, Artificial Sequence
  Description of Artificial Sequence: Synthetic oligonucleotide
  Sense strand starting at position 3867 of SEQ ID NO: 587704
uccugaaagcuaugccagu

SEQ ID NO: 812281 - RNA, 19 nt, Artificial Sequence
  Description of Artificial Sequence: Synthetic oligonucleotide
  Antisense strand to SEQ ID NO: 812280
acuggcauagcuuucagga

SEQ ID NO: 812282 - RNA, 19 nt, Artificial Sequence
  Description of Artificial Sequence: Synthetic oligonucleotide
  Sense strand starting at position 3925 of SEQ ID NO: 587704
uugugaguacaugguauau

SEQ ID NO: 812283 - RNA, 19 nt, Artificial Sequence
  Description of Artificial Sequence: Synthetic oligonucleotide
  Antisense strand to SEQ ID NO: 812282
auauaccauguacucacaa

SEQ ID NO: 812284 - RNA, 19 nt, Artificial Sequence
  Description of Artificial Sequence: Synthetic oligonucleotide
  Sense strand starting at position 2 of SEQ ID NO: 587705
ugugcuucucuguugcauu

SEQ ID NO: 812285 - RNA, 19 nt, Artificial Sequence
  Description of Artificial Sequence: Synthetic oligonucleotide
  Antisense strand to SEQ ID NO: 812284
aaugcaacagagaagcaca

SEQ ID NO: 812286 - RNA, 19 nt, Artificial Sequence
  Description of Artificial Sequence: Synthetic oligonucleotide
  Sense strand starting at position 31 of SEQ ID NO: 587705
agugauguguuacuauaau

SEQ ID NO: 812287 - RNA, 19 nt, Artificial Sequence
  Description of Artificial Sequence: Synthetic oligonucleotide
  Antisense strand to SEQ ID NO: 812286
auuauaguaacacaucacu

SEQ ID NO: 812288 - RNA, 19 nt, Artificial Sequence
  Description of Artificial Sequence: Synthetic oligonucleotide
  Sense strand starting at position 132 of SEQ ID NO: 587705
agauacuacugugauuugu

SEQ ID NO: 812289 - RNA, 19 nt, Artificial Sequence
  Description of Artificial Sequence: Synthetic oligonucleotide
  Antisense strand to SEQ ID NO: 812288
acaaaucacaguaguaucu

SEQ ID NO: 812290 - RNA, 19 nt, Artificial Sequence
  Description of Artificial Sequence: Synthetic oligonucleotide
  Sense strand starting at position 138 of SEQ ID NO: 587705
uacugugauuuguugcuua

SEQ ID NO: 812291 - RNA, 19 nt, Artificial Sequence
  Description of Artificial Sequence: Synthetic oligonucleotide
  Antisense strand to SEQ ID NO: 812290
uaagcaacaaaucacagua

SEQ ID NO: 812292 - RNA, 19 nt, Artificial Sequence
  Description of Artificial Sequence: Synthetic oligonucleotide
  Sense strand starting at position 141 of SEQ ID NO: 587705
ugugauuuguugcuuauau

SEQ ID NO: 812293 - RNA, 19 nt, Artificial Sequence
  Description of Artificial Sequence: Synthetic oligonucleotide
  Antisense strand to SEQ ID NO: 812292
auauaagcaacaaaucaca

SEQ ID NO: 812294 - RNA, 19 nt, Artificial Sequence
  Description of Artificial Sequence: Synthetic oligonucleotide
  Sense strand starting at position 142 of SEQ ID NO: 587705
gugauuuguugcuuauauu

SEQ ID NO: 812295 - RNA, 19 nt, Artificial Sequence
  Description of Artificial Sequence: Synthetic oligonucleotide
  Antisense strand to SEQ ID NO: 812294
aauauaagcaacaaaucac

SEQ ID NO: 812296 - RNA, 19 nt, Artificial Sequence
  Description of Artificial Sequence: Synthetic oligonucleotide
  Sense strand starting at position 315 of SEQ ID NO: 587705
ucuggaacaucaguauaug

SEQ ID NO: 812297 - RNA, 19 nt, Artificial Sequence
  Description of Artificial Sequence: Synthetic oligonucleotide
  Antisense strand to SEQ ID NO: 812296
cauauacugauguuccaga

SEQ ID NO: 812298 - RNA, 19 nt, Artificial Sequence
  Description of Artificial Sequence: Synthetic oligonucleotide
  Sense strand starting at position 316 of SEQ ID NO: 587705
cuggaacaucaguauaugu

SEQ ID NO: 812299 - RNA, 19 nt, Artificial Sequence
  Description of Artificial Sequence: Synthetic oligonucleotide
  Antisense strand to SEQ ID NO: 812298
acauauacugauguuccag

SEQ ID NO: 812300 - RNA, 19 nt, Artificial Sequence
  Description of Artificial Sequence: Synthetic oligonucleotide
  Sense strand starting at position 327 of SEQ ID NO: 587705
guauauguaaagcaaggua

SEQ ID NO: 812301 - RNA, 19 nt, Artificial Sequence
  Description of Artificial Sequence: Synthetic oligonucleotide
  Antisense strand to SEQ ID NO: 812300
uaccuugcuuuacauauac

SEQ ID NO: 812302 - RNA, 19 nt, Artificial Sequence
  Description of Artificial Sequence: Synthetic oligonucleotide
  Sense strand starting at position 343 of SEQ ID NO: 587705
guacuaaaguauucccuau

SEQ ID NO: 812303 - RNA, 19 nt, Artificial Sequence
  Description of Artificial Sequence: Synthetic oligonucleotide
  Antisense strand to SEQ ID NO: 812302
auagggaauacuuuaguac

SEQ ID NO: 812304 - RNA, 19 nt, Artificial Sequence
  Description of Artificial Sequence: Synthetic oligonucleotide
  Sense strand starting at position 426 of SEQ ID NO: 587705
ugagguguugaccaaaugu

SEQ ID NO: 812305 - RNA, 19 nt, Artificial Sequence
  Description of Artificial Sequence: Synthetic oligonucleotide
  Antisense strand to SEQ ID NO: 812304
acauuuggucaacaccuca

SEQ ID NO: 812306 - RNA, 19 nt, Artificial Sequence
  Description of Artificial Sequence: Synthetic oligonucleotide
  Sense strand starting at position 437 of SEQ ID NO: 587705
ccaaaugugcuagaucuag

SEQ ID NO: 812307 - RNA, 19 nt, Artificial Sequence
  Description of Artificial Sequence: Synthetic oligonucleotide
  Antisense strand to SEQ ID NO: 812306
cuagaucuagcacauuugg

SEQ ID NO: 812308 - RNA, 19 nt, Artificial Sequence
  Description of Artificial Sequence: Synthetic oligonucleotide
  Sense strand starting at position 511 of SEQ ID NO: 587705
cccauaaggugauuguaaa

SEQ ID NO: 812309 - RNA, 19 nt, Artificial Sequence
  Description of Artificial Sequence: Synthetic oligonucleotide
  Antisense strand to SEQ ID NO: 812308
uuuacaaucaccuuauggg

SEQ ID NO: 812310 - RNA, 19 nt, Artificial Sequence
  Description of Artificial Sequence: Synthetic oligonucleotide
  Sense strand starting at position 564 of SEQ ID NO: 587705
gucuuaccauggcuaacau

SEQ ID NO: 812311 - RNA, 19 nt, Artificial Sequence
  Description of Artificial Sequence: Synthetic oligonucleotide
  Antisense strand to SEQ ID NO: 812310
auguuagccaugguaagac

SEQ ID NO: 812312 - RNA, 19 nt, Artificial Sequence
  Description of Artificial Sequence: Synthetic oligonucleotide
  Sense strand starting at position 594 of SEQ ID NO: 587705
agaaucuauuugugauuag

SEQ ID NO: 812313 - RNA, 19 nt, Artificial Sequence
  Description of Artificial Sequence: Synthetic oligonucleotide
  Antisense strand to SEQ ID NO: 812312
cuaaucacaaauagauucu

SEQ ID NO: 812314 - RNA, 19 nt, Artificial Sequence
  Description of Artificial Sequence: Synthetic oligonucleotide
  Sense strand starting at position 595 of SEQ ID NO: 587705
gaaucuauuugugauuaga

SEQ ID NO: 812315 - RNA, 19 nt, Artificial Sequence
  Description of Artificial Sequence: Synthetic oligonucleotide
  Antisense strand to SEQ ID NO: 812314
ucuaaucacaaauagauuc

SEQ ID NO: 812316 - RNA, 19 nt, Artificial Sequence
  Description of Artificial Sequence: Synthetic oligonucleotide
  Sense strand starting at position 618 of SEQ ID NO: 587705
acugaaauguaguucccua

SEQ ID NO: 812317 - RNA, 19 nt, Artificial Sequence
  Description of Artificial Sequence: Synthetic oligonucleotide
  Antisense strand to SEQ ID NO: 812316
uagggaacuacauuucagu

SEQ ID NO: 812318 - RNA, 19 nt, Artificial Sequence
  Description of Artificial Sequence: Synthetic oligonucleotide
  Sense strand starting at position 2108 of SEQ ID NO: 587705
gucguuauucgguuuguca

SEQ ID NO: 812319 - RNA, 19 nt, Artificial Sequence
  Description of Artificial Sequence: Synthetic oligonucleotide
  Antisense strand to SEQ ID NO: 812318
ugacaaaccgaauaacgac

SEQ ID NO: 812320 - RNA, 19 nt, Artificial Sequence
  Description of Artificial Sequence: Synthetic oligonucleotide
  Sense strand starting at position 2109 of SEQ ID NO: 587705
ucguuauucgguuugucaa

SEQ ID NO: 812321 - RNA, 19 nt, Artificial Sequence
  Description of Artificial Sequence: Synthetic oligonucleotide
  Antisense strand to SEQ ID NO: 812320
uugacaaaccgaauaacga

SEQ ID NO: 812322 - RNA, 19 nt, Artificial Sequence
  Description of Artificial Sequence: Synthetic oligonucleotide
  Sense strand starting at position 2155 of SEQ ID NO: 587705
aggagagauugauugcauc

SEQ ID NO: 812323 - RNA, 19 nt, Artificial Sequence
  Description of Artificial Sequence: Synthetic oligonucleotide
  Antisense strand to SEQ ID NO: 812322
gaugcaaucaaucucuccu

SEQ ID NO: 812324 - RNA, 19 nt, Artificial Sequence
  Description of Artificial Sequence: Synthetic oligonucleotide
  Sense strand starting at position 2294 of SEQ ID NO: 587705
uacugaauguugucacuga

SEQ ID NO: 812325 - RNA, 19 nt, Artificial Sequence
  Description of Artificial Sequence: Synthetic oligonucleotide
  Antisense strand to SEQ ID NO: 812324
ucagugacaacauucagua

SEQ ID NO: 812326 - RNA, 19 nt, Artificial Sequence
  Description of Artificial Sequence: Synthetic oligonucleotide
  Sense strand starting at position 2298 of SEQ ID NO: 587705
gaauguugucacugaacaa

SEQ ID NO: 812327 - RNA, 19 nt, Artificial Sequence
  Description of Artificial Sequence: Synthetic oligonucleotide
  Antisense strand to SEQ ID NO: 812326
uuguucagugacaacauuc

SEQ ID NO: 812328 - RNA, 19 nt, Artificial Sequence
  Description of Artificial Sequence: Synthetic oligonucleotide
  Sense strand starting at position 2317 of SEQ ID NO: 587705
acuugugaugagcagguau

SEQ ID NO: 812329 - RNA, 19 nt, Artificial Sequence
  Description of Artificial Sequence: Synthetic oligonucleotide
  Antisense strand to SEQ ID NO: 812328
auaccugcucaucacaagu

SEQ ID NO: 812330 - RNA, 19 nt, Artificial Sequence
  Description of Artificial Sequence: Synthetic oligonucleotide
  Sense strand starting at position 2393 of SEQ ID NO: 587705
gcaaucuaagaguauauua

SEQ ID NO: 812331 - RNA, 19 nt, Artificial Sequence
  Description of Artificial Sequence: Synthetic oligonucleotide
  Antisense strand to SEQ ID NO: 812330
uaauauacucuuagauugc

SEQ ID NO: 812332 - RNA, 19 nt, Artificial Sequence
  Description of Artificial Sequence: Synthetic oligonucleotide
  Sense strand starting at position 2478 of SEQ ID NO: 587705
uuugaauguugguucugaa

SEQ ID NO: 812333 - RNA, 19 nt, Artificial Sequence
  Description of Artificial Sequence: Synthetic oligonucleotide
  Antisense strand to SEQ ID NO: 812332
uucagaaccaacauucaaa

SEQ ID NO: 812334 - RNA, 19 nt, Artificial Sequence
  Description of Artificial Sequence: Synthetic oligonucleotide
  Sense strand starting at position 2499 of SEQ ID NO: 587705
ugaagcauguaguuacuuu

SEQ ID NO: 812335 - RNA, 19 nt, Artificial Sequence
  Description of Artificial Sequence: Synthetic oligonucleotide
  Antisense strand to SEQ ID NO: 812334
aaaguaacuacaugcuuca

SEQ ID NO: 812336 - RNA, 19 nt, Artificial Sequence
  Description of Artificial Sequence: Synthetic oligonucleotide
  Sense strand starting at position 3046 of SEQ ID NO: 587705
ugcuuaauucugcagcaca

SEQ ID NO: 812337 - RNA, 19 nt, Artificial Sequence
  Description of Artificial Sequence: Synthetic oligonucleotide
  Antisense strand to SEQ ID NO: 812336
ugugcugcagaauuaagca

SEQ ID NO: 812338 - RNA, 19 nt, Artificial Sequence
  Description of Artificial Sequence: Synthetic oligonucleotide
  Sense strand starting at position 3259 of SEQ ID NO: 587705
uugugaguacaugguauau

SEQ ID NO: 812339 - RNA, 19 nt, Artificial Sequence
  Description of Artificial Sequence: Synthetic oligonucleotide
  Antisense strand to SEQ ID NO: 812338
auauaccauguacucacaa

SEQ ID NO: 812340 - RNA, 19 nt, Artificial Sequence
  Description of Artificial Sequence: Synthetic oligonucleotide
  Sense strand starting at position 3336 of SEQ ID NO: 587705
ggguacauggaguauccau

SEQ ID NO: 812341 - RNA, 19 nt, Artificial Sequence
  Description of Artificial Sequence: Synthetic oligonucleotide
  Antisense strand to SEQ ID NO: 812340
auggauacuccauguaccc

SEQ ID NO: 812342 - RNA, 19 nt, Artificial Sequence
  Description of Artificial Sequence: Synthetic oligonucleotide
  Sense strand starting at position 3424 of SEQ ID NO: 587705
aaugaauuaucguugacua

SEQ ID NO: 812343 - RNA, 19 nt, Artificial Sequence
  Description of Artificial Sequence: Synthetic oligonucleotide
  Antisense strand to SEQ ID NO: 812342
uagucaacgauaauucauu

SEQ ID NO: 812344 - RNA, 19 nt, Artificial Sequence
  Description of Artificial Sequence: Synthetic oligonucleotide
  Sense strand starting at position 3425 of SEQ ID NO: 587705
augaauuaucguugacuag

SEQ ID NO: 812345 - RNA, 19 nt, Artificial Sequence
  Description of Artificial Sequence: Synthetic oligonucleotide
  Antisense strand to SEQ ID NO: 812344
cuagucaacgauaauucau

SEQ ID NO: 812346 - RNA, 19 nt, Artificial Sequence
  Description of Artificial Sequence: Synthetic oligonucleotide
  Sense strand starting at position 3426 of SEQ ID NO: 587705
ugaauuaucguugacuagu

SEQ ID NO: 812347 - RNA, 19 nt, Artificial Sequence
  Description of Artificial Sequence: Synthetic oligonucleotide
  Antisense strand to SEQ ID NO: 812346
acuagucaacgauaauuca

SEQ ID NO: 812348 - RNA, 19 nt, Artificial Sequence
  Description of Artificial Sequence: Synthetic oligonucleotide
  Sense strand starting at position 3428 of SEQ ID NO: 587705
aauuaucguugacuaguca

SEQ ID NO: 812349 - RNA, 19 nt, Artificial Sequence
  Description of Artificial Sequence: Synthetic oligonucleotide
  Antisense strand to SEQ ID NO: 812348
ugacuagucaacgauaauu

SEQ ID NO: 812350 - RNA, 19 nt, Artificial Sequence
  Description of Artificial Sequence: Synthetic oligonucleotide
  Sense strand starting at position 3443 of SEQ ID NO: 587705
gucacucucgugcugucaa

SEQ ID NO: 812351 - RNA, 19 nt, Artificial Sequence
  Description of Artificial Sequence: Synthetic oligonucleotide
  Antisense strand to SEQ ID NO: 812350
uugacagcacgagagugac

SEQ ID NO: 812352 - RNA, 19 nt, Artificial Sequence
  Description of Artificial Sequence: Synthetic oligonucleotide
  Sense strand starting at position 3451 of SEQ ID NO: 587705
cgugcugucaaauacuaga

SEQ ID NO: 812353 - RNA, 19 nt, Artificial Sequence
  Description of Artificial Sequence: Synthetic oligonucleotide
  Antisense strand to SEQ ID NO: 812352
ucuaguauuugacagcacg

SEQ ID NO: 812354 - RNA, 19 nt, Artificial Sequence
  Description of Artificial Sequence: Synthetic oligonucleotide
  Sense strand starting at position 3614 of SEQ ID NO: 587705
acaugcagaguuugucauu

SEQ ID NO: 812355 - RNA, 19 nt, Artificial Sequence
  Description of Artificial Sequence: Synthetic oligonucleotide
  Antisense strand to SEQ ID NO: 812354
aaugacaaacucugcaugu

SEQ ID NO: 812356 - RNA, 19 nt, Artificial Sequence
  Description of Artificial Sequence: Synthetic oligonucleotide
  Sense strand starting at position 3619 of SEQ ID NO: 587705
cagaguuugucauucugua

SEQ ID NO: 812357 - RNA, 19 nt, Artificial Sequence
  Description of Artificial Sequence: Synthetic oligonucleotide
  Antisense strand to SEQ ID NO: 812356
uacagaaugacaaacucug

SEQ ID NO: 812358 - RNA, 19 nt, Artificial Sequence
  Description of Artificial Sequence: Synthetic oligonucleotide
  Sense strand starting at position 3726 of SEQ ID NO: 587705
uacuacguuguguacauaa

SEQ ID NO: 812359 - RNA, 19 nt, Artificial Sequence
  Description of Artificial Sequence: Synthetic oligonucleotide
  Antisense strand to SEQ ID NO: 812358
uuauguacacaacguagua

SEQ ID NO: 812360 - RNA, 19 nt, Artificial Sequence
  Description of Artificial Sequence: Synthetic oligonucleotide
  Sense strand starting at position 3728 of SEQ ID NO: 587705
cuacguuguguacauaaac

SEQ ID NO: 812361 - RNA, 19 nt, Artificial Sequence
  Description of Artificial Sequence: Synthetic oligonucleotide
  Antisense strand to SEQ ID NO: 812360
guuuauguacacaacguag

SEQ ID NO: 812362 - RNA, 19 nt, Artificial Sequence
  Description of Artificial Sequence: Synthetic oligonucleotide
  Sense strand starting at position 3833 of SEQ ID NO: 587705
gugcaaguauaucuuagga

SEQ ID NO: 812363 - RNA, 19 nt, Artificial Sequence
  Description of Artificial Sequence: Synthetic oligonucleotide
  Antisense strand to SEQ ID NO: 812362
uccuaagauauacuugcac

SEQ ID NO: 812364 - RNA, 19 nt, Artificial Sequence
  Description of Artificial Sequence: Synthetic oligonucleotide
  Sense strand starting at position 9 of SEQ ID NO: 587706
cauugaguugcuggaaaug

SEQ ID NO: 812365 - RNA, 19 nt, Artificial Sequence
  Description of Artificial Sequence: Synthetic oligonucleotide
  Antisense strand to SEQ ID NO: 812364
cauuuccagcaacucaaug

SEQ ID NO: 812366 - RNA, 19 nt, Artificial Sequence
  Description of Artificial Sequence: Synthetic oligonucleotide
  Sense strand starting at position 18 of SEQ ID NO: 587706
gcuggaaauguaugucaaa

SEQ ID NO: 812367 - RNA, 19 nt, Artificial Sequence
  Description of Artificial Sequence: Synthetic oligonucleotide
  Antisense strand to SEQ ID NO: 812366
uuugacauacauuuccagc

SEQ ID NO: 812368 - RNA, 19 nt, Artificial Sequence
  Description of Artificial Sequence: Synthetic oligonucleotide
  Sense strand starting at position 121 of SEQ ID NO: 587706
aggaaauaacagcgaucau

SEQ ID NO: 812369 - RNA, 19 nt, Artificial Sequence
  Description of Artificial Sequence: Synthetic oligonucleotide
  Antisense strand to SEQ ID NO: 812368
augaucgcuguuauuuccu

SEQ ID NO: 812370 - RNA, 19 nt, Artificial Sequence
  Description of Artificial Sequence: Synthetic oligonucleotide
  Sense strand starting at position 188 of SEQ ID NO: 587706
uuaaucuugcaaggaaaga

SEQ ID NO: 812371 - RNA, 19 nt, Artificial Sequence
  Description of Artificial Sequence: Synthetic oligonucleotide
  Antisense strand to SEQ ID NO: 812370
ucuuuccuugcaagauuaa

SEQ ID NO: 812372 - RNA, 19 nt, Artificial Sequence
  Description of Artificial Sequence: Synthetic oligonucleotide
  Sense strand starting at position 326 of SEQ ID NO: 587706
ggcugucaccaaggaagau

SEQ ID NO: 812373 - RNA, 19 nt, Artificial Sequence
  Description of Artificial Sequence: Synthetic oligonucleotide
  Antisense strand to SEQ ID NO: 812372
aucuuccuuggugacagcc

SEQ ID NO: 812374 - RNA, 19 nt, Artificial Sequence
  Description of Artificial Sequence: Synthetic oligonucleotide
  Sense strand starting at position 335 of SEQ ID NO: 587706
caaggaagauguguacaca

SEQ ID NO: 812375 - RNA, 19 nt, Artificial Sequence
  Description of Artificial Sequence: Synthetic oligonucleotide
  Antisense strand to SEQ ID NO: 812374
uguguacacaucuuccuug

SEQ ID NO: 812376 - RNA, 19 nt, Artificial Sequence
  Description of Artificial Sequence: Synthetic oligonucleotide
  Sense strand starting at position 498 of SEQ ID NO: 587706
ugugcacugguauaugaga

SEQ ID NO: 812377 - RNA, 19 nt, Artificial Sequence
  Description of Artificial Sequence: Synthetic oligonucleotide
  Antisense strand to SEQ ID NO: 812376
ucucauauaccagugcaca

SEQ ID NO: 812378 - RNA, 19 nt, Artificial Sequence
  Description of Artificial Sequence: Synthetic oligonucleotide
  Sense strand starting at position 500 of SEQ ID NO: 587706
ugcacugguauaugagaua

SEQ ID NO: 812379 - RNA, 19 nt, Artificial Sequence
  Description of Artificial Sequence: Synthetic oligonucleotide
  Antisense strand to SEQ ID NO: 812378
uaucucauauaccagugca

SEQ ID NO: 812380 - RNA, 19 nt, Artificial Sequence
  Description of Artificial Sequence: Synthetic oligonucleotide
  Sense strand starting at position 519 of SEQ ID NO: 587706
aaugacugauggucggaua

SEQ ID NO: 812381 - RNA, 19 nt, Artificial Sequence
  Description of Artificial Sequence: Synthetic oligonucleotide
  Antisense strand to SEQ ID NO: 812380
uauccgaccaucagucauu

SEQ ID NO: 812382 - RNA, 19 nt, Artificial Sequence
  Description of Artificial Sequence: Synthetic oligonucleotide
  Sense strand starting at position 594 of SEQ ID NO: 587706
gcuauagacuaaguagauc

SEQ ID NO: 812383 - RNA, 19 nt, Artificial Sequence
  Description of Artificial Sequence: Synthetic oligonucleotide
  Antisense strand to SEQ ID NO: 812382
gaucuacuuagucuauagc

SEQ ID NO: 812384 - RNA, 19 nt, Artificial Sequence
  Description of Artificial Sequence: Synthetic oligonucleotide
  Sense strand starting at position 667 of SEQ ID NO: 587706
gacuguaucaggugaauag

SEQ ID NO: 812385 - RNA, 19 nt, Artificial Sequence
  Description of Artificial Sequence: Synthetic oligonucleotide
  Antisense strand to SEQ ID NO: 812384
cuauucaccugauacaguc

SEQ ID NO: 812386 - RNA, 19 nt, Artificial Sequence
  Description of Artificial Sequence: Synthetic oligonucleotide
  Sense strand starting at position 820 of SEQ ID NO: 587706
ucuuguucugcccaggacu

SEQ ID NO: 812387 - RNA, 19 nt, Artificial Sequence
  Description of Artificial Sequence: Synthetic oligonucleotide
  Antisense strand to SEQ ID NO: 812386
aguccugggcagaacaaga

SEQ ID NO: 812388 - RNA, 19 nt, Artificial Sequence
  Description of Artificial Sequence: Synthetic oligonucleotide
  Sense strand starting at position 871 of SEQ ID NO: 587706
cgcccuuucgcuucgggaa

SEQ ID NO: 812389 - RNA, 19 nt, Artificial Sequence
  Description of Artificial Sequence: Synthetic oligonucleotide
  Antisense strand to SEQ ID NO: 812388
uucccgaagcgaaagggcg

SEQ ID NO: 812390 - RNA, 19 nt, Artificial Sequence
  Description of Artificial Sequence: Synthetic oligonucleotide
  Sense strand starting at position 1143 of SEQ ID NO: 587706
ugaaaugugccuucagcgu

SEQ ID NO: 812391 - RNA, 19 nt, Artificial Sequence
  Description of Artificial Sequence: Synthetic oligonucleotide
  Antisense strand to SEQ ID NO: 812390
acgcugaaggcacauuuca

SEQ ID NO: 812392 - RNA, 19 nt, Artificial Sequence
  Description of Artificial Sequence: Synthetic oligonucleotide
  Sense strand starting at position 1256 of SEQ ID NO: 587706
gcagaaacaccaugggauu

SEQ ID NO: 812393 - RNA, 19 nt, Artificial Sequence
  Description of Artificial Sequence: Synthetic oligonucleotide
  Antisense strand to SEQ ID NO: 812392
aaucccaugguguuucugc

SEQ ID NO: 812394 - RNA, 19 nt, Artificial Sequence
  Description of Artificial Sequence: Synthetic oligonucleotide
  Sense strand starting at position 1434 of SEQ ID NO: 587706
aauacagugcccugggauu

SEQ ID NO: 812395 - RNA, 19 nt, Artificial Sequence
  Description of Artificial Sequence: Synthetic oligonucleotide
  Antisense strand to SEQ ID NO: 812394
aaucccagggcacuguauu

SEQ ID NO: 812396 - RNA, 19 nt, Artificial Sequence
  Description of Artificial Sequence: Synthetic oligonucleotide
  Sense strand starting at position 2093 of SEQ ID NO: 587706
guuuacuucuguuuggaua

SEQ ID NO: 812397 - RNA, 19 nt, Artificial Sequence
  Description of Artificial Sequence: Synthetic oligonucleotide
  Antisense strand to SEQ ID NO: 812396
uauccaaacagaaguaaac

SEQ ID NO: 812398 - RNA, 19 nt, Artificial Sequence
  Description of Artificial Sequence: Synthetic oligonucleotide
  Sense strand starting at position 2108 of SEQ ID NO: 587706
gauagcaacugagucuuaa

SEQ ID NO: 812399 - RNA, 19 nt, Artificial Sequence
  Description of Artificial Sequence: Synthetic oligonucleotide
  Antisense strand to SEQ ID NO: 812398
uuaagacucaguugcuauc

SEQ ID NO: 812400 - RNA, 19 nt, Artificial Sequence
  Description of Artificial Sequence: Synthetic oligonucleotide
  Sense strand starting at position 2471 of SEQ ID NO: 587706
ggucaauuaugacuacaug

SEQ ID NO: 812401 - RNA, 19 nt, Artificial Sequence
  Description of Artificial Sequence: Synthetic oligonucleotide
  Antisense strand to SEQ ID NO: 812400
cauguagucauaauugacc

SEQ ID NO: 812402 - RNA, 19 nt, Artificial Sequence
  Description of Artificial Sequence: Synthetic oligonucleotide
  Sense strand starting at position 2472 of SEQ ID NO: 587706
gucaauuaugacuacaugu

SEQ ID NO: 812403 - RNA, 19 nt, Artificial Sequence
  Description of Artificial Sequence: Synthetic oligonucleotide
  Antisense strand to SEQ ID NO: 812402
acauguagucauaauugac

SEQ ID NO: 812404 - RNA, 19 nt, Artificial Sequence
  Description of Artificial Sequence: Synthetic oligonucleotide
  Sense strand starting at position 2519 of SEQ ID NO: 587706
aacgaaguuuguuuacaga

SEQ ID NO: 812405 - RNA, 19 nt, Artificial Sequence
  Description of Artificial Sequence: Synthetic oligonucleotide
  Antisense strand to SEQ ID NO: 812404
ucuguaaacaaacuucguu

SEQ ID NO: 812406 - RNA, 19 nt, Artificial Sequence
  Description of Artificial Sequence: Synthetic oligonucleotide
  Sense strand starting at position 2528 of SEQ ID NO: 587706
uguuuacagagguggcaau

SEQ ID NO: 812407 - RNA, 19 nt, Artificial Sequence
  Description of Artificial Sequence: Synthetic oligonucleotide
  Antisense strand to SEQ ID NO: 812406
auugccaccucuguaaaca

SEQ ID NO: 812408 - RNA, 19 nt, Artificial Sequence
  Description of Artificial Sequence: Synthetic oligonucleotide
  Sense strand starting at position 2535 of SEQ ID NO: 587706
agagguggcaauugacuaa

SEQ ID NO: 812409 - RNA, 19 nt, Artificial Sequence
  Description of Artificial Sequence: Synthetic oligonucleotide
  Antisense strand to SEQ ID NO: 812408
uuagucaauugccaccucu

SEQ ID NO: 812410 - RNA, 19 nt, Artificial Sequence
  Description of Artificial Sequence: Synthetic oligonucleotide
  Sense strand starting at position 2612 of SEQ ID NO: 587706
aagcuuuaaucggcaaaug

SEQ ID NO: 812411 - RNA, 19 nt, Artificial Sequence
  Description of Artificial Sequence: Synthetic oligonucleotide
  Antisense strand to SEQ ID NO: 812410
cauuugccgauuaaagcuu

SEQ ID NO: 812412 - RNA, 19 nt, Artificial Sequence
  Description of Artificial Sequence: Synthetic oligonucleotide
  Sense strand starting at position 2646 of SEQ ID NO: 587706
guaaaccaacuugguuaaa

SEQ ID NO: 812413 - RNA, 19 nt, Artificial Sequence
  Description of Artificial Sequence: Synthetic oligonucleotide
  Antisense strand to SEQ ID NO: 812412
uuuaaccaaguugguuuac

SEQ ID NO: 812414 - RNA, 19 nt, Artificial Sequence
  Description of Artificial Sequence: Synthetic oligonucleotide
  Sense strand starting at position 2879 of SEQ ID NO: 587706
uggucuugugugaguguaa

SEQ ID NO: 812415 - RNA, 19 nt, Artificial Sequence
  Description of Artificial Sequence: Synthetic oligonucleotide
  Antisense strand to SEQ ID NO: 812414
uuacacucacacaagacca

SEQ ID NO: 812416 - RNA, 19 nt, Artificial Sequence
  Description of Artificial Sequence: Synthetic oligonucleotide
  Sense strand starting at position 2985 of SEQ ID NO: 587706
ucagaugugauuugcguga

SEQ ID NO: 812417 - RNA, 19 nt, Artificial Sequence
  Description of Artificial Sequence: Synthetic oligonucleotide
  Antisense strand to SEQ ID NO: 812416
ucacgcaaaucacaucuga

SEQ ID NO: 812418 - RNA, 19 nt, Artificial Sequence
  Description of Artificial Sequence: Synthetic oligonucleotide
  Sense strand starting at position 2989 of SEQ ID NO: 587706
augugauuugcgugaucaa

SEQ ID NO: 812419 - RNA, 19 nt, Artificial Sequence
  Description of Artificial Sequence: Synthetic oligonucleotide
  Antisense strand to SEQ ID NO: 812418
uugaucacgcaaaucacau

SEQ ID NO: 812420 - RNA, 19 nt, Artificial Sequence
  Description of Artificial Sequence: Synthetic oligonucleotide
  Sense strand starting at position 2990 of SEQ ID NO: 587706
ugugauuugcgugaucaac

SEQ ID NO: 812421 - RNA, 19 nt, Artificial Sequence
  Description of Artificial Sequence: Synthetic oligonucleotide
  Antisense strand to SEQ ID NO: 812420
guugaucacgcaaaucaca

SEQ ID NO: 812422 - RNA, 19 nt, Artificial Sequence
  Description of Artificial Sequence: Synthetic oligonucleotide
  Sense strand starting at position 2992 of SEQ ID NO: 587706
ugauuugcgugaucaacac

SEQ ID NO: 812423 - RNA, 19 nt, Artificial Sequence
  Description of Artificial Sequence: Synthetic oligonucleotide
  Antisense strand to SEQ ID NO: 812422
guguugaucacgcaaauca

SEQ ID NO: 812424 - RNA, 19 nt, Artificial Sequence
  Description of Artificial Sequence: Synthetic oligonucleotide
  Sense strand starting at position 2996 of SEQ ID NO: 587706
uugcgugaucaacacuaag

SEQ ID NO: 812425 - RNA, 19 nt, Artificial Sequence
  Description of Artificial Sequence: Synthetic oligonucleotide
  Antisense strand to SEQ ID NO: 812424
cuuaguguugaucacgcaa

SEQ ID NO: 812426 - RNA, 19 nt, Artificial Sequence
  Description of Artificial Sequence: Synthetic oligonucleotide
  Sense strand starting at position 2999 of SEQ ID NO: 587706
cgugaucaacacuaagcaa

SEQ ID NO: 812427 - RNA, 19 nt, Artificial Sequence
  Description of Artificial Sequence: Synthetic oligonucleotide
  Antisense strand to SEQ ID NO: 812426
uugcuuaguguugaucacg

SEQ ID NO: 812428 - RNA, 19 nt, Artificial Sequence
  Description of Artificial Sequence: Synthetic oligonucleotide
  Sense strand starting at position 3078 of SEQ ID NO: 587706
gcacuuugaggacguagau

SEQ ID NO: 812429 - RNA, 19 nt, Artificial Sequence
  Description of Artificial Sequence: Synthetic oligonucleotide
  Antisense strand to SEQ ID NO: 812428
aucuacguccucaaagugc

SEQ ID NO: 812430 - RNA, 19 nt, Artificial Sequence
  Description of Artificial Sequence: Synthetic oligonucleotide
  Sense strand starting at position 3124 of SEQ ID NO: 587706
aaguguuccgucgaaagau

SEQ ID NO: 812431 - RNA, 19 nt, Artificial Sequence
  Description of Artificial Sequence: Synthetic oligonucleotide
  Antisense strand to SEQ ID NO: 812430
aucuuucgacggaacacuu

SEQ ID NO: 812432 - RNA, 19 nt, Artificial Sequence
  Description of Artificial Sequence: Synthetic oligonucleotide
  Sense strand starting at position 3416 of SEQ ID NO: 587706
ugagcuugaaacggagauu

SEQ ID NO: 812433 - RNA, 19 nt, Artificial Sequence
  Description of Artificial Sequence: Synthetic oligonucleotide
  Antisense strand to SEQ ID NO: 812432
aaucuccguuucaagcuca

SEQ ID NO: 812434 - RNA, 19 nt, Artificial Sequence
  Description of Artificial Sequence: Synthetic oligonucleotide
  Sense strand starting at position 3419 of SEQ ID NO: 587706
gcuugaaacggagauucga

SEQ ID NO: 812435 - RNA, 19 nt, Artificial Sequence
  Description of Artificial Sequence: Synthetic oligonucleotide
  Antisense strand to SEQ ID NO: 812434
ucgaaucuccguuucaagc

SEQ ID NO: 812436 - RNA, 19 nt, Artificial Sequence
  Description of Artificial Sequence: Synthetic oligonucleotide
  Sense strand starting at position 3430 of SEQ ID NO: 587706
agauucgaguguuuaauau

SEQ ID NO: 812437 - RNA, 19 nt, Artificial Sequence
  Description of Artificial Sequence: Synthetic oligonucleotide
  Antisense strand to SEQ ID NO: 812436
auauuaaacacucgaaucu

SEQ ID NO: 812438 - RNA, 19 nt, Artificial Sequence
  Description of Artificial Sequence: Synthetic oligonucleotide
  Sense strand starting at position 3653 of SEQ ID NO: 587706
uucucaguuugggagauuu

SEQ ID NO: 812439 - RNA, 19 nt, Artificial Sequence
  Description of Artificial Sequence: Synthetic oligonucleotide
  Antisense strand to SEQ ID NO: 812438
aaaucucccaaacugagaa

SEQ ID NO: 812440 - RNA, 19 nt, Artificial Sequence
  Description of Artificial Sequence: Synthetic oligonucleotide
  Sense strand starting at position 3926 of SEQ ID NO: 587706
uuccauaaauguguuuacu

SEQ ID NO: 812441 - RNA, 19 nt, Artificial Sequence
  Description of Artificial Sequence: Synthetic oligonucleotide
  Antisense strand to SEQ ID NO: 812440
aguaaacacauuuauggaa

SEQ ID NO: 812442 - RNA, 19 nt, Artificial Sequence
  Description of Artificial Sequence: Synthetic oligonucleotide
  Sense strand starting at position 3928 of SEQ ID NO: 587706
ccauaaauguguuuacuuc

SEQ ID NO: 812443 - RNA, 19 nt, Artificial Sequence
  Description of Artificial Sequence: Synthetic oligonucleotide
  Antisense strand to SEQ ID NO: 812442
gaaguaaacacauuuaugg

SEQ ID NO: 812444 - RNA, 19 nt, Artificial Sequence
  Description of Artificial Sequence: Synthetic oligonucleotide
  Sense strand starting at position 215 of SEQ ID NO: 587707
gugcuuagaguguagaaau

SEQ ID NO: 812445 - RNA, 19 nt, Artificial Sequence
  Description of Artificial Sequence: Synthetic oligonucleotide
  Antisense strand to SEQ ID NO: 812444
auuucuacacucuaagcac

SEQ ID NO: 812446 - RNA, 19 nt, Artificial Sequence
  Description of Artificial Sequence: Synthetic oligonucleotide
  Sense strand starting at position 226 of SEQ ID NO: 587707
guagaaauauuuguaucgu

SEQ ID NO: 812447 - RNA, 19 nt, Artificial Sequence
  Description of Artificial Sequence: Synthetic oligonucleotide
  Antisense strand to SEQ ID NO: 812446
acgauacaaauauuucuac

SEQ ID NO: 812448 - RNA, 19 nt, Artificial Sequence
  Description of Artificial Sequence: Synthetic oligonucleotide
  Sense strand starting at position 242 of SEQ ID NO: 587707
cguauuauauaugugggaa

SEQ ID NO: 812449 - RNA, 19 nt, Artificial Sequence
  Description of Artificial Sequence: Synthetic oligonucleotide
  Antisense strand to SEQ ID NO: 812448
uucccacauauauaauacg

SEQ ID NO: 812450 - RNA, 19 nt, Artificial Sequence
  Description of Artificial Sequence: Synthetic oligonucleotide
  Sense strand starting at position 377 of SEQ ID NO: 587707
gcaaguaaauagguaaaga

SEQ ID NO: 812451 - RNA, 19 nt, Artificial Sequence
  Description of Artificial Sequence: Synthetic oligonucleotide
  Antisense strand to SEQ ID NO: 812450
ucuuuaccuauuuacuugc

SEQ ID NO: 812452 - RNA, 19 nt, Artificial Sequence
  Description of Artificial Sequence: Synthetic oligonucleotide
  Sense strand starting at position 388 of SEQ ID NO: 587707
gguaaagaaguauagcacu

SEQ ID NO: 812453 - RNA, 19 nt, Artificial Sequence
  Description of Artificial Sequence: Synthetic oligonucleotide
  Antisense strand to SEQ ID NO: 812452
agugcuauacuucuuuacc

SEQ ID NO: 812454 - RNA, 19 nt, Artificial Sequence
  Description of Artificial Sequence: Synthetic oligonucleotide
  Sense strand starting at position 413 of SEQ ID NO: 587707
gccgaucucccuuauagaa

SEQ ID NO: 812455 - RNA, 19 nt, Artificial Sequence
  Description of Artificial Sequence: Synthetic oligonucleotide
  Antisense strand to SEQ ID NO: 812454
uucuauaagggagaucggc

SEQ ID NO: 812456 - RNA, 19 nt, Artificial Sequence
  Description of Artificial Sequence: Synthetic oligonucleotide
  Sense strand starting at position 440 of SEQ ID NO: 587707
cccuguaaacuuggucaca

SEQ ID NO: 812457 - RNA, 19 nt, Artificial Sequence
  Description of Artificial Sequence: Synthetic oligonucleotide
  Antisense strand to SEQ ID NO: 812456
ugugaccaaguuuacaggg

SEQ ID NO: 812458 - RNA, 19 nt, Artificial Sequence
  Description of Artificial Sequence: Synthetic oligonucleotide
  Sense strand starting at position 441 of SEQ ID NO: 587707
ccuguaaacuuggucacaa

SEQ ID NO: 812459 - RNA, 19 nt, Artificial Sequence
  Description of Artificial Sequence: Synthetic oligonucleotide
  Antisense strand to SEQ ID NO: 812458
uugugaccaaguuuacagg

SEQ ID NO: 812460 - RNA, 19 nt, Artificial Sequence
  Description of Artificial Sequence: Synthetic oligonucleotide
  Sense strand starting at position 442 of SEQ ID NO: 587707
cuguaaacuuggucacaaa

SEQ ID NO: 812461 - RNA, 19 nt, Artificial Sequence
  Description of Artificial Sequence: Synthetic oligonucleotide
  Antisense strand to SEQ ID NO: 812460
uuugugaccaaguuuacag

SEQ ID NO: 812462 - RNA, 19 nt, Artificial Sequence
  Description of Artificial Sequence: Synthetic oligonucleotide
  Sense strand starting at position 464 of SEQ ID NO: 587707
auuaaugagaagugaugca

SEQ ID NO: 812463 - RNA, 19 nt, Artificial Sequence
  Description of Artificial Sequence: Synthetic oligonucleotide
  Antisense strand to SEQ ID NO: 812462
ugcaucacuucucauuaau

SEQ ID NO: 812464 - RNA, 19 nt, Artificial Sequence
  Description of Artificial Sequence: Synthetic oligonucleotide
  Sense strand starting at position 471 of SEQ ID NO: 587707
agaagugaugcaugagcau

SEQ ID NO: 812465 - RNA, 19 nt, Artificial Sequence
  Description of Artificial Sequence: Synthetic oligonucleotide
  Antisense strand to SEQ ID NO: 812464
augcucaugcaucacuucu

SEQ ID NO: 812466 - RNA, 19 nt, Artificial Sequence
  Description of Artificial Sequence: Synthetic oligonucleotide
  Sense strand starting at position 1172 of SEQ ID NO: 587707
aagaaagagucaucacgua

SEQ ID NO: 812467 - RNA, 19 nt, Artificial Sequence
  Description of Artificial Sequence: Synthetic oligonucleotide
  Antisense strand to SEQ ID NO: 812466
uacgugaugacucuuucuu

SEQ ID NO: 812468 - RNA, 19 nt, Artificial Sequence
  Description of Artificial Sequence: Synthetic oligonucleotide
  Sense strand starting at position 1206 of SEQ ID NO: 587707
gagagaagaucccagauaa

SEQ ID NO: 812469 - RNA, 19 nt, Artificial Sequence
  Description of Artificial Sequence: Synthetic oligonucleotide
  Antisense strand to SEQ ID NO: 812468
uuaucugggaucuucucuc

SEQ ID NO: 812470 - RNA, 19 nt, Artificial Sequence
  Description of Artificial Sequence: Synthetic oligonucleotide
  Sense strand starting at position 1279 of SEQ ID NO: 587707
guuguuuggcgagauaaga

SEQ ID NO: 812471 - RNA, 19 nt, Artificial Sequence
  Description of Artificial Sequence: Synthetic oligonucleotide
  Antisense strand to SEQ ID NO: 812470
ucuuaucucgccaaacaac

SEQ ID NO: 812472 - RNA, 19 nt, Artificial Sequence
  Description of Artificial Sequence: Synthetic oligonucleotide
  Sense strand starting at position 1395 of SEQ ID NO: 587707
gggacaaguaucgguaacu

SEQ ID NO: 812473 - RNA, 19 nt, Artificial Sequence
  Description of Artificial Sequence: Synthetic oligonucleotide
  Antisense strand to SEQ ID NO: 812472
aguuaccgauacuuguccc

SEQ ID NO: 812474 - RNA, 19 nt, Artificial Sequence
  Description of Artificial Sequence: Synthetic oligonucleotide
  Sense strand starting at position 1396 of SEQ ID NO: 587707
ggacaaguaucgguaacug

SEQ ID NO: 812475 - RNA, 19 nt, Artificial Sequence
  Description of Artificial Sequence: Synthetic oligonucleotide
  Antisense strand to SEQ ID NO: 812474
caguuaccgauacuugucc

SEQ ID NO: 812476 - RNA, 19 nt, Artificial Sequence
  Description of Artificial Sequence: Synthetic oligonucleotide
  Sense strand starting at position 1617 of SEQ ID NO: 587707
ggaagucuagggugaucca

SEQ ID NO: 812477 - RNA, 19 nt, Artificial Sequence
  Description of Artificial Sequence: Synthetic oligonucleotide
  Antisense strand to SEQ ID NO: 812476
uggaucacccuagacuucc

SEQ ID NO: 812478 - RNA, 19 nt, Artificial Sequence
  Description of Artificial Sequence: Synthetic oligonucleotide
  Sense strand starting at position 1620 of SEQ ID NO: 587707
agucuagggugauccagau

SEQ ID NO: 812479 - RNA, 19 nt, Artificial Sequence
  Description of Artificial Sequence: Synthetic oligonucleotide
  Antisense strand to SEQ ID NO: 812478
aucuggaucacccuagacu

SEQ ID NO: 812480 - RNA, 19 nt, Artificial Sequence
  Description of Artificial Sequence: Synthetic oligonucleotide
  Sense strand starting at position 2102 of SEQ ID NO: 587707
agccgagucagccauaaag

SEQ ID NO: 812481 - RNA, 19 nt, Artificial Sequence
  Description of Artificial Sequence: Synthetic oligonucleotide
  Antisense strand to SEQ ID NO: 812480
cuuuauggcugacucggcu

SEQ ID NO: 812482 - RNA, 19 nt, Artificial Sequence
  Description of Artificial Sequence: Synthetic oligonucleotide
  Sense strand starting at position 2212 of SEQ ID NO: 587707
ggaccucuuuaaucuuuga

SEQ ID NO: 812483 - RNA, 19 nt, Artificial Sequence
  Description of Artificial Sequence: Synthetic oligonucleotide
  Antisense strand to SEQ ID NO: 812482
ucaaagauuaaagaggucc

SEQ ID NO: 812484 - RNA, 19 nt, Artificial Sequence
  Description of Artificial Sequence: Synthetic oligonucleotide
  Sense strand starting at position 2234 of SEQ ID NO: 587707
uggucccuguuucuaagaa

SEQ ID NO: 812485 - RNA, 19 nt, Artificial Sequence
  Description of Artificial Sequence: Synthetic oligonucleotide
  Antisense strand to SEQ ID NO: 812484
uucuuagaaacagggacca

SEQ ID NO: 812486 - RNA, 19 nt, Artificial Sequence
  Description of Artificial Sequence: Synthetic oligonucleotide
  Sense strand starting at position 2292 of SEQ ID NO: 587707
aauaaagccgucgauaauu

SEQ ID NO: 812487 - RNA, 19 nt, Artificial Sequence
  Description of Artificial Sequence: Synthetic oligonucleotide
  Antisense strand to SEQ ID NO: 812486
aauuaucgacggcuuuauu

SEQ ID NO: 812488 - RNA, 19 nt, Artificial Sequence
  Description of Artificial Sequence: Synthetic oligonucleotide
  Sense strand starting at position 2294 of SEQ ID NO: 587707
uaaagccgucgauaauuau

SEQ ID NO: 812489 - RNA, 19 nt, Artificial Sequence
  Description of Artificial Sequence: Synthetic oligonucleotide
  Antisense strand to SEQ ID NO: 812488
auaauuaucgacggcuuua

SEQ ID NO: 812490 - RNA, 19 nt, Artificial Sequence
  Description of Artificial Sequence: Synthetic oligonucleotide
  Sense strand starting at position 2629 of SEQ ID NO: 587707
aacgacaaauugucacaga

SEQ ID NO: 812491 - RNA, 19 nt, Artificial Sequence
  Description of Artificial Sequence: Synthetic oligonucleotide
  Antisense strand to SEQ ID NO: 812490
ucugugacaauuugucguu

SEQ ID NO: 812492 - RNA, 19 nt, Artificial Sequence
  Description of Artificial Sequence: Synthetic oligonucleotide
  Sense strand starting at position 2882 of SEQ ID NO: 587707
ucuagacauauccggguga

SEQ ID NO: 812493 - RNA, 19 nt, Artificial Sequence
  Description of Artificial Sequence: Synthetic oligonucleotide
  Antisense strand to SEQ ID NO: 812492
ucacccggauaugucuaga

SEQ ID NO: 812494 - RNA, 19 nt, Artificial Sequence
  Description of Artificial Sequence: Synthetic oligonucleotide
  Sense strand starting at position 3027 of SEQ ID NO: 587707
guggaacaauaucuagagu

SEQ ID NO: 812495 - RNA, 19 nt, Artificial Sequence
  Description of Artificial Sequence: Synthetic oligonucleotide
  Antisense strand to SEQ ID NO: 812494
acucuagauauuguuccac

SEQ ID NO: 812496 - RNA, 19 nt, Artificial Sequence
  Description of Artificial Sequence: Synthetic oligonucleotide
  Sense strand starting at position 3033 of SEQ ID NO: 587707
caauaucuagaguguuaag

SEQ ID NO: 812497 - RNA, 19 nt, Artificial Sequence
  Description of Artificial Sequence: Synthetic oligonucleotide
  Antisense strand to SEQ ID NO: 812496
cuuaacacucuagauauug

SEQ ID NO: 812498 - RNA, 19 nt, Artificial Sequence
  Description of Artificial Sequence: Synthetic oligonucleotide
  Sense strand starting at position 3232 of SEQ ID NO: 587707
uagggaggcaauuguauga

SEQ ID NO: 812499 - RNA, 19 nt, Artificial Sequence
  Description of Artificial Sequence: Synthetic oligonucleotide
  Antisense strand to SEQ ID NO: 812498
ucauacaauugccucccua

SEQ ID NO: 812500 - RNA, 19 nt, Artificial Sequence
  Description of Artificial Sequence: Synthetic oligonucleotide
  Sense strand starting at position 3236 of SEQ ID NO: 587707
gaggcaauuguaugaaaga

SEQ ID NO: 812501 - RNA, 19 nt, Artificial Sequence
  Description of Artificial Sequence: Synthetic oligonucleotide
  Antisense strand to SEQ ID NO: 812500
ucuuucauacaauugccuc

SEQ ID NO: 812502 - RNA, 19 nt, Artificial Sequence
  Description of Artificial Sequence: Synthetic oligonucleotide
  Sense strand starting at position 3245 of SEQ ID NO: 587707
guaugaaagaacugauggu

SEQ ID NO: 812503 - RNA, 19 nt, Artificial Sequence
  Description of Artificial Sequence: Synthetic oligonucleotide
  Antisense strand to SEQ ID NO: 812502
accaucaguucuuucauac

SEQ ID NO: 812504 - RNA, 19 nt, Artificial Sequence
  Description of Artificial Sequence: Synthetic oligonucleotide
  Sense strand starting at position 3254 of SEQ ID NO: 587707
aacugaugguaugcauuaa

SEQ ID NO: 812505 - RNA, 19 nt, Artificial Sequence
  Description of Artificial Sequence: Synthetic oligonucleotide
  Antisense strand to SEQ ID NO: 812504
uuaaugcauaccaucaguu

SEQ ID NO: 812506 - RNA, 19 nt, Artificial Sequence
  Description of Artificial Sequence: Synthetic oligonucleotide
  Sense strand starting at position 3284 of SEQ ID NO: 587707
gagcauuaaguuuaaauug

SEQ ID NO: 812507 - RNA, 19 nt, Artificial Sequence
  Description of Artificial Sequence: Synthetic oligonucleotide
  Antisense strand to SEQ ID NO: 812506
caauuuaaacuuaaugcuc

SEQ ID NO: 812508 - RNA, 19 nt, Artificial Sequence
  Description of Artificial Sequence: Synthetic oligonucleotide
  Sense strand starting at position 3298 of SEQ ID NO: 587707
aauuguuauguauagggca

SEQ ID NO: 812509 - RNA, 19 nt, Artificial Sequence
  Description of Artificial Sequence: Synthetic oligonucleotide
  Antisense strand to SEQ ID NO: 812508
ugcccuauacauaacaauu

SEQ ID NO: 812510 - RNA, 19 nt, Artificial Sequence
  Description of Artificial Sequence: Synthetic oligonucleotide
  Sense strand starting at position 3303 of SEQ ID NO: 587707
uuauguauagggcauuaaa

SEQ ID NO: 812511 - RNA, 19 nt, Artificial Sequence
  Description of Artificial Sequence: Synthetic oligonucleotide
  Antisense strand to SEQ ID NO: 812510
uuuaaugcccuauacauaa

SEQ ID NO: 812512 - RNA, 19 nt, Artificial Sequence
  Description of Artificial Sequence: Synthetic oligonucleotide
  Sense strand starting at position 3338 of SEQ ID NO: 587707
gaaacauaagcugggugua

SEQ ID NO: 812513 - RNA, 19 nt, Artificial Sequence
  Description of Artificial Sequence: Synthetic oligonucleotide
  Antisense strand to SEQ ID NO: 812512
uacacccagcuuauguuuc

SEQ ID NO: 812514 - RNA, 19 nt, Artificial Sequence
  Description of Artificial Sequence: Synthetic oligonucleotide
  Sense strand starting at position 3339 of SEQ ID NO: 587707
aaacauaagcuggguguaa

SEQ ID NO: 812515 - RNA, 19 nt, Artificial Sequence
  Description of Artificial Sequence: Synthetic oligonucleotide
  Antisense strand to SEQ ID NO: 812514
uuacacccagcuuauguuu

SEQ ID NO: 812516 - RNA, 19 nt, Artificial Sequence
  Description of Artificial Sequence: Synthetic oligonucleotide
  Sense strand starting at position 3340 of SEQ ID NO: 587707
aacauaagcuggguguaaa

SEQ ID NO: 812517 - RNA, 19 nt, Artificial Sequence
  Description of Artificial Sequence: Synthetic oligonucleotide
  Antisense strand to SEQ ID NO: 812516
uuuacacccagcuuauguu

SEQ ID NO: 812518 - RNA, 19 nt, Artificial Sequence
  Description of Artificial Sequence: Synthetic oligonucleotide
  Sense strand starting at position 3435 of SEQ ID NO: 587707
uguaguauuguagauacaa

SEQ ID NO: 812519 - RNA, 19 nt, Artificial Sequence
  Description of Artificial Sequence: Synthetic oligonucleotide
  Antisense strand to SEQ ID NO: 812518
uuguaucuacaauacuaca

SEQ ID NO: 812520 - RNA, 19 nt, Artificial Sequence
  Description of Artificial Sequence: Synthetic oligonucleotide
  Sense strand starting at position 3638 of SEQ ID NO: 587707
ccaaaucacugguuuggga

SEQ ID NO: 812521 - RNA, 19 nt, Artificial Sequence
  Description of Artificial Sequence: Synthetic oligonucleotide
  Antisense strand to SEQ ID NO: 812520
ucccaaaccagugauuugg

SEQ ID NO: 812522 - RNA, 19 nt, Artificial Sequence
  Description of Artificial Sequence: Synthetic oligonucleotide
  Sense strand starting at position 3798 of SEQ ID NO: 587707
acauuccaauguuuggaaa

SEQ ID NO: 812523 - RNA, 19 nt, Artificial Sequence
  Description of Artificial Sequence: Synthetic oligonucleotide
  Antisense strand to SEQ ID NO: 812522
uuuccaaacauuggaaugu

SEQ ID NO: 812524 - RNA, 19 nt, Artificial Sequence
  Description of Artificial Sequence: Synthetic oligonucleotide
  Sense strand starting at position 39 of SEQ ID NO: 587708
ucuccaugcccagagagua

SEQ ID NO: 812525 - RNA, 19 nt, Artificial Sequence
  Description of Artificial Sequence: Synthetic oligonucleotide
  Antisense strand to SEQ ID NO: 812524
uacucucugggcauggaga

SEQ ID NO: 812526 - RNA, 19 nt, Artificial Sequence
  Description of Artificial Sequence: Synthetic oligonucleotide
  Sense strand starting at position 240 of SEQ ID NO: 587708
caaguaauuugggauugga

SEQ ID NO: 812527 - RNA, 19 nt, Artificial Sequence
  Description of Artificial Sequence: Synthetic oligonucleotide
  Antisense strand to SEQ ID NO: 812526
uccaaucccaaauuacuug

SEQ ID NO: 812528 - RNA, 19 nt, Artificial Sequence
  Description of Artificial Sequence: Synthetic oligonucleotide
  Sense strand starting at position 333 of SEQ ID NO: 587708
gcuggauaauuugcuuacu

SEQ ID NO: 812529 - RNA, 19 nt, Artificial Sequence
  Description of Artificial Sequence: Synthetic oligonucleotide
  Antisense strand to SEQ ID NO: 812528
aguaagcaaauuauccagc

SEQ ID NO: 812530 - RNA, 19 nt, Artificial Sequence
  Description of Artificial Sequence: Synthetic oligonucleotide
  Sense strand starting at position 422 of SEQ ID NO: 587708
ugaugaugccguuaacaca

SEQ ID NO: 812531 - RNA, 19 nt, Artificial Sequence
  Description of Artificial Sequence: Synthetic oligonucleotide
  Antisense strand to SEQ ID NO: 812530
uguguuaacggcaucauca

SEQ ID NO: 812532 - RNA, 19 nt, Artificial Sequence
  Description of Artificial Sequence: Synthetic oligonucleotide
  Sense strand starting at position 477 of SEQ ID NO: 587708
acaauaacuuuggcuuuga

SEQ ID NO: 812533 - RNA, 19 nt, Artificial Sequence
  Description of Artificial Sequence: Synthetic oligonucleotide
  Antisense strand to SEQ ID NO: 812532
ucaaagccaaaguuauugu

SEQ ID NO: 812534 - RNA, 19 nt, Artificial Sequence
  Description of Artificial Sequence: Synthetic oligonucleotide
  Sense strand starting at position 530 of SEQ ID NO: 587708
aggaauaacuugcugaggu

SEQ ID NO: 812535 - RNA, 19 nt, Artificial Sequence
  Description of Artificial Sequence: Synthetic oligonucleotide
  Antisense strand to SEQ ID NO: 812534
accucagcaaguuauuccu

SEQ ID NO: 812536 - RNA, 19 nt, Artificial Sequence
  Description of Artificial Sequence: Synthetic oligonucleotide
  Sense strand starting at position 532 of SEQ ID NO: 587708
gaauaacuugcugagguuu

SEQ ID NO: 812537 - RNA, 19 nt, Artificial Sequence
  Description of Artificial Sequence: Synthetic oligonucleotide
  Antisense strand to SEQ ID NO: 812536
aaaccucagcaaguuauuc

SEQ ID NO: 812538 - RNA, 19 nt, Artificial Sequence
  Description of Artificial Sequence: Synthetic oligonucleotide
  Sense strand starting at position 564 of SEQ ID NO: 587708
ugguucugugacuaaacca

SEQ ID NO: 812539 - RNA, 19 nt, Artificial Sequence
  Description of Artificial Sequence: Synthetic oligonucleotide
  Antisense strand to SEQ ID NO: 812538
ugguuuagucacagaacca

SEQ ID NO: 812540 - RNA, 19 nt, Artificial Sequence
  Description of Artificial Sequence: Synthetic oligonucleotide
  Sense strand starting at position 733 of SEQ ID NO: 587708
ggagguuaauucuuaacaa

SEQ ID NO: 812541 - RNA, 19 nt, Artificial Sequence
  Description of Artificial Sequence: Synthetic oligonucleotide
  Antisense strand to SEQ ID NO: 812540
uuguuaagaauuaaccucc

SEQ ID NO: 812542 - RNA, 19 nt, Artificial Sequence
  Description of Artificial Sequence: Synthetic oligonucleotide
  Sense strand starting at position 828 of SEQ ID NO: 587708
ucuggcuuccaagaugcaa

SEQ ID NO: 812543 - RNA, 19 nt, Artificial Sequence
  Description of Artificial Sequence: Synthetic oligonucleotide
  Antisense strand to SEQ ID NO: 812542
uugcaucuuggaagccaga

SEQ ID NO: 812544 - RNA, 19 nt, Artificial Sequence
  Description of Artificial Sequence: Synthetic oligonucleotide
  Sense strand starting at position 890 of SEQ ID NO: 587708
cuaauuaaguaaucugguu

SEQ ID NO: 812545 - RNA, 19 nt, Artificial Sequence
  Description of Artificial Sequence: Synthetic oligonucleotide
  Antisense strand to SEQ ID NO: 812544
aaccagauuacuuaauuag

SEQ ID NO: 812546 - RNA, 19 nt, Artificial Sequence
  Description of Artificial Sequence: Synthetic oligonucleotide
  Sense strand starting at position 896 of SEQ ID NO: 587708
aaguaaucugguuaaguac

SEQ ID NO: 812547 - RNA, 19 nt, Artificial Sequence
  Description of Artificial Sequence: Synthetic oligonucleotide
  Antisense strand to SEQ ID NO: 812546
guacuuaaccagauuacuu

SEQ ID NO: 812548 - RNA, 19 nt, Artificial Sequence
  Description of Artificial Sequence: Synthetic oligonucleotide
  Sense strand starting at position 1041 of SEQ ID NO: 587708
ugauguuaucuauaccuga

SEQ ID NO: 812549 - RNA, 19 nt, Artificial Sequence
  Description of Artificial Sequence: Synthetic oligonucleotide
  Antisense strand to SEQ ID NO: 812548
ucagguauagauaacauca

SEQ ID NO: 812550 - RNA, 19 nt, Artificial Sequence
  Description of Artificial Sequence: Synthetic oligonucleotide
  Sense strand starting at position 1139 of SEQ ID NO: 587708
ggugguagauuucugcacu

SEQ ID NO: 812551 - RNA, 19 nt, Artificial Sequence
  Description of Artificial Sequence: Synthetic oligonucleotide
  Antisense strand to SEQ ID NO: 812550
agugcagaaaucuaccacc

SEQ ID NO: 812552 - RNA, 19 nt, Artificial Sequence
  Description of Artificial Sequence: Synthetic oligonucleotide
  Sense strand starting at position 1212 of SEQ ID NO: 587708
ggccuauuccuguaaugag

SEQ ID NO: 812553 - RNA, 19 nt, Artificial Sequence
  Description of Artificial Sequence: Synthetic oligonucleotide
  Antisense strand to SEQ ID NO: 812552
cucauuacaggaauaggcc

SEQ ID NO: 812554 - RNA, 19 nt, Artificial Sequence
  Description of Artificial Sequence: Synthetic oligonucleotide
  Sense strand starting at position 1238 of SEQ ID NO: 587708
ccgguaacaacugaaagua

SEQ ID NO: 812555 - RNA, 19 nt, Artificial Sequence
  Description of Artificial Sequence: Synthetic oligonucleotide
  Antisense strand to SEQ ID NO: 812554
uacuuucaguuguuaccgg

SEQ ID NO: 812556 - RNA, 19 nt, Artificial Sequence
  Description of Artificial Sequence: Synthetic oligonucleotide
  Sense strand starting at position 1310 of SEQ ID NO: 587708
aauauuaagugguugaaac

SEQ ID NO: 812557 - RNA, 19 nt, Artificial Sequence
  Description of Artificial Sequence: Synthetic oligonucleotide
  Antisense strand to SEQ ID NO: 812556
guuucaaccacuuaauauu

SEQ ID NO: 812558 - RNA, 19 nt, Artificial Sequence
  Description of Artificial Sequence: Synthetic oligonucleotide
  Sense strand starting at position 1311 of SEQ ID NO: 587708
auauuaagugguugaaacu

SEQ ID NO: 812559 - RNA, 19 nt, Artificial Sequence
  Description of Artificial Sequence: Synthetic oligonucleotide
  Antisense strand to SEQ ID NO: 812558
aguuucaaccacuuaauau

SEQ ID NO: 812560 - RNA, 19 nt, Artificial Sequence
  Description of Artificial Sequence: Synthetic oligonucleotide
  Sense strand starting at position 1429 of SEQ ID NO: 587708
acugaaauauaugugcuua

SEQ ID NO: 812561 - RNA, 19 nt, Artificial Sequence
  Description of Artificial Sequence: Synthetic oligonucleotide
  Antisense strand to SEQ ID NO: 812560
uaagcacauauauuucagu

SEQ ID NO: 812562 - RNA, 19 nt, Artificial Sequence
  Description of Artificial Sequence: Synthetic oligonucleotide
  Sense strand starting at position 1603 of SEQ ID NO: 587708
aagggaucguaugcaauga

SEQ ID NO: 812563 - RNA, 19 nt, Artificial Sequence
  Description of Artificial Sequence: Synthetic oligonucleotide
  Antisense strand to SEQ ID NO: 812562
ucauugcauacgaucccuu

SEQ ID NO: 812564 - RNA, 19 nt, Artificial Sequence
  Description of Artificial Sequence: Synthetic oligonucleotide
  Sense strand starting at position 1604 of SEQ ID NO: 587708
agggaucguaugcaaugaa

SEQ ID NO: 812565 - RNA, 19 nt, Artificial Sequence
  Description of Artificial Sequence: Synthetic oligonucleotide
  Antisense strand to SEQ ID NO: 812564
uucauugcauacgaucccu

SEQ ID NO: 812566 - RNA, 19 nt, Artificial Sequence
  Description of Artificial Sequence: Synthetic oligonucleotide
  Sense strand starting at position 2118 of SEQ ID NO: 587708
agaauaugccguucggugu

SEQ ID NO: 812567 - RNA, 19 nt, Artificial Sequence
  Description of Artificial Sequence: Synthetic oligonucleotide
  Antisense strand to SEQ ID NO: 812566
acaccgaacggcauauucu

SEQ ID NO: 812568 - RNA, 19 nt, Artificial Sequence
  Description of Artificial Sequence: Synthetic oligonucleotide
  Sense strand starting at position 2172 of SEQ ID NO: 587708
ucagauauguaugugagaa

SEQ ID NO: 812569 - RNA, 19 nt, Artificial Sequence
  Description of Artificial Sequence: Synthetic oligonucleotide
  Antisense strand to SEQ ID NO: 812568
uucucacauacauaucuga

SEQ ID NO: 812570 - RNA, 19 nt, Artificial Sequence
  Description of Artificial Sequence: Synthetic oligonucleotide
  Sense strand starting at position 2214 of SEQ ID NO: 587708
cuuuguaugcuacaaggaa

SEQ ID NO: 812571 - RNA, 19 nt, Artificial Sequence
  Description of Artificial Sequence: Synthetic oligonucleotide
  Antisense strand to SEQ ID NO: 812570
uuccuuguagcauacaaag

SEQ ID NO: 812572 - RNA, 19 nt, Artificial Sequence
  Description of Artificial Sequence: Synthetic oligonucleotide
  Sense strand starting at position 2249 of SEQ ID NO: 587708
agagauagugcccauuauc

SEQ ID NO: 812573 - RNA, 19 nt, Artificial Sequence
  Description of Artificial Sequence: Synthetic oligonucleotide
  Antisense strand to SEQ ID NO: 812572
gauaaugggcacuaucucu

SEQ ID NO: 812574 - RNA, 19 nt, Artificial Sequence
  Description of Artificial Sequence: Synthetic oligonucleotide
  Sense strand starting at position 2252 of SEQ ID NO: 587708
gauagugcccauuaucaga

SEQ ID NO: 812575 - RNA, 19 nt, Artificial Sequence
  Description of Artificial Sequence: Synthetic oligonucleotide
  Antisense strand to SEQ ID NO: 812574
ucugauaaugggcacuauc

SEQ ID NO: 812576 - RNA, 19 nt, Artificial Sequence
  Description of Artificial Sequence: Synthetic oligonucleotide
  Sense strand starting at position 2406 of SEQ ID NO: 587708
ggaggugcuauucguauuu

SEQ ID NO: 812577 - RNA, 19 nt, Artificial Sequence
  Description of Artificial Sequence: Synthetic oligonucleotide
  Antisense strand to SEQ ID NO: 812576
aaauacgaauagcaccucc

SEQ ID NO: 812578 - RNA, 19 nt, Artificial Sequence
  Description of Artificial Sequence: Synthetic oligonucleotide
  Sense strand starting at position 2417 of SEQ ID NO: 587708
ucguauuuccaucgaucag

SEQ ID NO: 812579 - RNA, 19 nt, Artificial Sequence
  Description of Artificial Sequence: Synthetic oligonucleotide
  Antisense strand to SEQ ID NO: 812578
cugaucgauggaaauacga

SEQ ID NO: 812580 - RNA, 19 nt, Artificial Sequence
  Description of Artificial Sequence: Synthetic oligonucleotide
  Sense strand starting at position 2476 of SEQ ID NO: 587708
acgguuacauaacuaguaa

SEQ ID NO: 812581 - RNA, 19 nt, Artificial Sequence
  Description of Artificial Sequence: Synthetic oligonucleotide
  Antisense strand to SEQ ID NO: 812580
uuacuaguuauguaaccgu

SEQ ID NO: 812582 - RNA, 19 nt, Artificial Sequence
  Description of Artificial Sequence: Synthetic oligonucleotide
  Sense strand starting at position 2477 of SEQ ID NO: 587708
cgguuacauaacuaguaag

SEQ ID NO: 812583 - RNA, 19 nt, Artificial Sequence
  Description of Artificial Sequence: Synthetic oligonucleotide
  Antisense strand to SEQ ID NO: 812582
cuuacuaguuauguaaccg

SEQ ID NO: 812584 - RNA, 19 nt, Artificial Sequence
  Description of Artificial Sequence: Synthetic oligonucleotide
  Sense strand starting at position 2680 of SEQ ID NO: 587708
aauagagauuagccucagu

SEQ ID NO: 812585 - RNA, 19 nt, Artificial Sequence
  Description of Artificial Sequence: Synthetic oligonucleotide
  Antisense strand to SEQ ID NO: 812584
acugaggcuaaucucuauu

SEQ ID NO: 812586 - RNA, 19 nt, Artificial Sequence
  Description of Artificial Sequence: Synthetic oligonucleotide
  Sense strand starting at position 2683 of SEQ ID NO: 587708
agagauuagccucaguuac

SEQ ID NO: 812587 - RNA, 19 nt, Artificial Sequence
  Description of Artificial Sequence: Synthetic oligonucleotide
  Antisense strand to SEQ ID NO: 812586
guaacugaggcuaaucucu

SEQ ID NO: 812588 - RNA, 19 nt, Artificial Sequence
  Description of Artificial Sequence: Synthetic oligonucleotide
  Sense strand starting at position 2734 of SEQ ID NO: 587708
uugagaugcccucaaagua

SEQ ID NO: 812589 - RNA, 19 nt, Artificial Sequence
  Description of Artificial Sequence: Synthetic oligonucleotide
  Antisense strand to SEQ ID NO: 812588
uacuuugagggcaucucaa

SEQ ID NO: 812590 - RNA, 19 nt, Artificial Sequence
  Description of Artificial Sequence: Synthetic oligonucleotide
  Sense strand starting at position 2896 of SEQ ID NO: 587708
auauguugaaggugggaua

SEQ ID NO: 812591 - RNA, 19 nt, Artificial Sequence
  Description of Artificial Sequence: Synthetic oligonucleotide
  Antisense strand to SEQ ID NO: 812590
uaucccaccuucaacauau

SEQ ID NO: 812592 - RNA, 19 nt, Artificial Sequence
  Description of Artificial Sequence: Synthetic oligonucleotide
  Sense strand starting at position 2897 of SEQ ID NO: 587708
uauguugaaggugggauaa

SEQ ID NO: 812593 - RNA, 19 nt, Artificial Sequence
  Description of Artificial Sequence: Synthetic oligonucleotide
  Antisense strand to SEQ ID NO: 812592
uuaucccaccuucaacaua

SEQ ID NO: 812594 - RNA, 19 nt, Artificial Sequence
  Description of Artificial Sequence: Synthetic oligonucleotide
  Sense strand starting at position 3608 of SEQ ID NO: 587708
uggagaaguucccugugga

SEQ ID NO: 812595 - RNA, 19 nt, Artificial Sequence
  Description of Artificial Sequence: Synthetic oligonucleotide
  Antisense strand to SEQ ID NO: 812594
uccacagggaacuucucca

SEQ ID NO: 812596 - RNA, 19 nt, Artificial Sequence
  Description of Artificial Sequence: Synthetic oligonucleotide
  Sense strand starting at position 3609 of SEQ ID NO: 587708
ggagaaguucccuguggau

SEQ ID NO: 812597 - RNA, 19 nt, Artificial Sequence
  Description of Artificial Sequence: Synthetic oligonucleotide
  Antisense strand to SEQ ID NO: 812596
auccacagggaacuucucc

SEQ ID NO: 812598 - RNA, 19 nt, Artificial Sequence
  Description of Artificial Sequence: Synthetic oligonucleotide
  Sense strand starting at position 3690 of SEQ ID NO: 587708
guagaagugaguuacagca

SEQ ID NO: 812599 - RNA, 19 nt, Artificial Sequence
  Description of Artificial Sequence: Synthetic oligonucleotide
  Antisense strand to SEQ ID NO: 812598
ugcuguaacucacuucuac

SEQ ID NO: 812600 - RNA, 19 nt, Artificial Sequence
  Description of Artificial Sequence: Synthetic oligonucleotide
  Sense strand starting at position 3709 of SEQ ID NO: 587708
auguucuuagacuacaagu

SEQ ID NO: 812601 - RNA, 19 nt, Artificial Sequence
  Description of Artificial Sequence: Synthetic oligonucleotide
  Antisense strand to SEQ ID NO: 812600
acuuguagucuaagaacau

SEQ ID NO: 812602 - RNA, 19 nt, Artificial Sequence
  Description of Artificial Sequence: Synthetic oligonucleotide
  Sense strand starting at position 3711 of SEQ ID NO: 587708
guucuuagacuacaaguuu

SEQ ID NO: 812603 - RNA, 19 nt, Artificial Sequence
  Description of Artificial Sequence: Synthetic oligonucleotide
  Antisense strand to SEQ ID NO: 812602
aaacuuguagucuaagaac

SEQ ID NO: 812604 - RNA, 19 nt, Artificial Sequence
  Description of Artificial Sequence: Synthetic oligonucleotide
  Sense strand starting at position 39 of SEQ ID NO: 587709
uuaggacguguuuauucua

SEQ ID NO: 812605 - RNA, 19 nt, Artificial Sequence
  Description of Artificial Sequence: Synthetic oligonucleotide
  Antisense strand to SEQ ID NO: 812604
uagaauaaacacguccuaa

SEQ ID NO: 812606 - RNA, 19 nt, Artificial Sequence
  Description of Artificial Sequence: Synthetic oligonucleotide
  Sense strand starting at position 84 of SEQ ID NO: 587709
auauuuacauguggagaac

SEQ ID NO: 812607 - RNA, 19 nt, Artificial Sequence
  Description of Artificial Sequence: Synthetic oligonucleotide
  Antisense strand to SEQ ID NO: 812606
guucuccacauguaaauau

SEQ ID NO: 812608 - RNA, 19 nt, Artificial Sequence
  Description of Artificial Sequence: Synthetic oligonucleotide
  Sense strand starting at position 257 of SEQ ID NO: 587709
gagugacgccuuggagaug

SEQ ID NO: 812609 - RNA, 19 nt, Artificial Sequence
  Description of Artificial Sequence: Synthetic oligonucleotide
  Antisense strand to SEQ ID NO: 812608
caucuccaaggcgucacuc

SEQ ID NO: 812610 - RNA, 19 nt, Artificial Sequence
  Description of Artificial Sequence: Synthetic oligonucleotide
  Sense strand starting at position 364 of SEQ ID NO: 587709
cugaguccuccuuagagug

SEQ ID NO: 812611 - RNA, 19 nt, Artificial Sequence
  Description of Artificial Sequence: Synthetic oligonucleotide
  Antisense strand to SEQ ID NO: 812610
cacucuaaggaggacucag

SEQ ID NO: 812612 - RNA, 19 nt, Artificial Sequence
  Description of Artificial Sequence: Synthetic oligonucleotide
  Sense strand starting at position 404 of SEQ ID NO: 587709
ucagguuugggauguaagu

SEQ ID NO: 812613 - RNA, 19 nt, Artificial Sequence
  Description of Artificial Sequence: Synthetic oligonucleotide
  Antisense strand to SEQ ID NO: 812612
acuuacaucccaaaccuga

SEQ ID NO: 812614 - RNA, 19 nt, Artificial Sequence
  Description of Artificial Sequence: Synthetic oligonucleotide
  Sense strand starting at position 445 of SEQ ID NO: 587709
ggcaucauuggauaagcaa

SEQ ID NO: 812615 - RNA, 19 nt, Artificial Sequence
  Description of Artificial Sequence: Synthetic oligonucleotide
  Antisense strand to SEQ ID NO: 812614
uugcuuauccaaugaugcc

SEQ ID NO: 812616 - RNA, 19 nt, Artificial Sequence
  Description of Artificial Sequence: Synthetic oligonucleotide
  Sense strand starting at position 550 of SEQ ID NO: 587709
uggaucuucuugucacgga

SEQ ID NO: 812617 - RNA, 19 nt, Artificial Sequence
  Description of Artificial Sequence: Synthetic oligonucleotide
  Antisense strand to SEQ ID NO: 812616
uccgugacaagaagaucca

SEQ ID NO: 812618 - RNA, 19 nt, Artificial Sequence
  Description of Artificial Sequence: Synthetic oligonucleotide
  Sense strand starting at position 554 of SEQ ID NO: 587709
ucuucuugucacggagaca

SEQ ID NO: 812619 - RNA, 19 nt, Artificial Sequence
  Description of Artificial Sequence: Synthetic oligonucleotide
  Antisense strand to SEQ ID NO: 812618
ugucuccgugacaagaaga

SEQ ID NO: 812620 - RNA, 19 nt, Artificial Sequence
  Description of Artificial Sequence: Synthetic oligonucleotide
  Sense strand starting at position 648 of SEQ ID NO: 587709
gcgaguugcacgcugcaga

SEQ ID NO: 812621 - RNA, 19 nt, Artificial Sequence
  Description of Artificial Sequence: Synthetic oligonucleotide
  Antisense strand to SEQ ID NO: 812620
ucugcagcgugcaacucgc

SEQ ID NO: 812622 - RNA, 19 nt, Artificial Sequence
  Description of Artificial Sequence: Synthetic oligonucleotide
  Sense strand starting at position 718 of SEQ ID NO: 587709
gaauuccuguggccuagaa

SEQ ID NO: 812623 - RNA, 19 nt, Artificial Sequence
  Description of Artificial Sequence: Synthetic oligonucleotide
  Antisense strand to SEQ ID NO: 812622
uucuaggccacaggaauuc

SEQ ID NO: 812624 - RNA, 19 nt, Artificial Sequence
  Description of Artificial Sequence: Synthetic oligonucleotide
  Sense strand starting at position 720 of SEQ ID NO: 587709
auuccuguggccuagaacu

SEQ ID NO: 812625 - RNA, 19 nt, Artificial Sequence
  Description of Artificial Sequence: Synthetic oligonucleotide
  Antisense strand to SEQ ID NO: 812624
aguucuaggccacaggaau

SEQ ID NO: 812626 - RNA, 19 nt, Artificial Sequence
  Description of Artificial Sequence: Synthetic oligonucleotide
  Sense strand starting at position 1090 of SEQ ID NO: 587709
acccaaaucccucagcgau

SEQ ID NO: 812627 - RNA, 19 nt, Artificial Sequence
  Description of Artificial Sequence: Synthetic oligonucleotide
  Antisense strand to SEQ ID NO: 812626
aucgcugagggauuugggu

SEQ ID NO: 812628 - RNA, 19 nt, Artificial Sequence
  Description of Artificial Sequence: Synthetic oligonucleotide
  Sense strand starting at position 1206 of SEQ ID NO: 587709
ggcugacuccaucaugaug

SEQ ID NO: 812629 - RNA, 19 nt, Artificial Sequence
  Description of Artificial Sequence: Synthetic oligonucleotide
  Antisense strand to SEQ ID NO: 812628
caucaugauggagucagcc

SEQ ID NO: 812630 - RNA, 19 nt, Artificial Sequence
  Description of Artificial Sequence: Synthetic oligonucleotide
  Sense strand starting at position 2320 of SEQ ID NO: 587709
acucgaauagccuggacua

SEQ ID NO: 812631 - RNA, 19 nt, Artificial Sequence
  Description of Artificial Sequence: Synthetic oligonucleotide
  Antisense strand to SEQ ID NO: 812630
uaguccaggcuauucgagu

SEQ ID NO: 812632 - RNA, 19 nt, Artificial Sequence
  Description of Artificial Sequence: Synthetic oligonucleotide
  Sense strand starting at position 2321 of SEQ ID NO: 587709
cucgaauagccuggacuaa

SEQ ID NO: 812633 - RNA, 19 nt, Artificial Sequence
  Description of Artificial Sequence: Synthetic oligonucleotide
  Antisense strand to SEQ ID NO: 812632
uuaguccaggcuauucgag

SEQ ID NO: 812634 - RNA, 19 nt, Artificial Sequence
  Description of Artificial Sequence: Synthetic oligonucleotide
  Sense strand starting at position 2389 of SEQ ID NO: 587709
cuaggcucucccuagagaa

SEQ ID NO: 812635 - RNA, 19 nt, Artificial Sequence
  Description of Artificial Sequence: Synthetic oligonucleotide
  Antisense strand to SEQ ID NO: 812634
uucucuagggagagccuag

SEQ ID NO: 812636 - RNA, 19 nt, Artificial Sequence
  Description of Artificial Sequence: Synthetic oligonucleotide
  Sense strand starting at position 2638 of SEQ ID NO: 587709
gcguuugugacuccucauu

SEQ ID NO: 812637 - RNA, 19 nt, Artificial Sequence
  Description of Artificial Sequence: Synthetic oligonucleotide
  Antisense strand to SEQ ID NO: 812636
aaugaggagucacaaacgc

SEQ ID NO: 812638 - RNA, 19 nt, Artificial Sequence
  Description of Artificial Sequence: Synthetic oligonucleotide
  Sense strand starting at position 2688 of SEQ ID NO: 587709
cacccugaccuuggagauu

SEQ ID NO: 812639 - RNA, 19 nt, Artificial Sequence
  Description of Artificial Sequence: Synthetic oligonucleotide
  Antisense strand to SEQ ID NO: 812638
aaucuccaaggucagggug

SEQ ID NO: 812640 - RNA, 19 nt, Artificial Sequence
  Description of Artificial Sequence: Synthetic oligonucleotide
  Sense strand starting at position 2730 of SEQ ID NO: 587709
guaauuuacuuucuccgca

SEQ ID NO: 812641 - RNA, 19 nt, Artificial Sequence
  Description of Artificial Sequence: Synthetic oligonucleotide
  Antisense strand to SEQ ID NO: 812640
ugcggagaaaguaaauuac

SEQ ID NO: 812642 - RNA, 19 nt, Artificial Sequence
  Description of Artificial Sequence: Synthetic oligonucleotide
  Sense strand starting at position 2843 of SEQ ID NO: 587709
gaaccuggcuguucuguaa

SEQ ID NO: 812643 - RNA, 19 nt, Artificial Sequence
  Description of Artificial Sequence: Synthetic oligonucleotide
  Antisense strand to SEQ ID NO: 812642
uuacagaacagccagguuc

SEQ ID NO: 812644 - RNA, 19 nt, Artificial Sequence
  Description of Artificial Sequence: Synthetic oligonucleotide
  Sense strand starting at position 2976 of SEQ ID NO: 587709
gcuauuucccgcuauuagu

SEQ ID NO: 812645 - RNA, 19 nt, Artificial Sequence
  Description of Artificial Sequence: Synthetic oligonucleotide
  Antisense strand to SEQ ID NO: 812644
acuaauagcgggaaauagc

SEQ ID NO: 812646 - RNA, 19 nt, Artificial Sequence
  Description of Artificial Sequence: Synthetic oligonucleotide
  Sense strand starting at position 3081 of SEQ ID NO: 587709
ggucaaauuuccgucuugu

SEQ ID NO: 812647 - RNA, 19 nt, Artificial Sequence
  Description of Artificial Sequence: Synthetic oligonucleotide
  Antisense strand to SEQ ID NO: 812646
acaagacggaaauuugacc

SEQ ID NO: 812648 - RNA, 19 nt, Artificial Sequence
  Description of Artificial Sequence: Synthetic oligonucleotide
  Sense strand starting at position 3189 of SEQ ID NO: 587709
aucgcuugucuggaauaau

SEQ ID NO: 812649 - RNA, 19 nt, Artificial Sequence
  Description of Artificial Sequence: Synthetic oligonucleotide
  Antisense strand to SEQ ID NO: 812648
auuauuccagacaagcgau

SEQ ID NO: 812650 - RNA, 19 nt, Artificial Sequence
  Description of Artificial Sequence: Synthetic oligonucleotide
  Sense strand starting at position 3192 of SEQ ID NO: 587709
gcuugucuggaauaauaga

SEQ ID NO: 812651 - RNA, 19 nt, Artificial Sequence
  Description of Artificial Sequence: Synthetic oligonucleotide
  Antisense strand to SEQ ID NO: 812650
ucuauuauuccagacaagc

SEQ ID NO: 812652 - RNA, 19 nt, Artificial Sequence
  Description of Artificial Sequence: Synthetic oligonucleotide
  Sense strand starting at position 3247 of SEQ ID NO: 587709
augguuuccgcauaaccua

SEQ ID NO: 812653 - RNA, 19 nt, Artificial Sequence
  Description of Artificial Sequence: Synthetic oligonucleotide
  Antisense strand to SEQ ID NO: 812652
uagguuaugcggaaaccau

SEQ ID NO: 812654 - RNA, 19 nt, Artificial Sequence
  Description of Artificial Sequence: Synthetic oligonucleotide
  Sense strand starting at position 3274 of SEQ ID NO: 587709
agucaauagcuuuaccuga

SEQ ID NO: 812655 - RNA, 19 nt, Artificial Sequence
  Description of Artificial Sequence: Synthetic oligonucleotide
  Antisense strand to SEQ ID NO: 812654
ucagguaaagcuauugacu

SEQ ID NO: 812656 - RNA, 19 nt, Artificial Sequence
  Description of Artificial Sequence: Synthetic oligonucleotide
  Sense strand starting at position 3276 of SEQ ID NO: 587709
ucaauagcuuuaccugaga

SEQ ID NO: 812657 - RNA, 19 nt, Artificial Sequence
  Description of Artificial Sequence: Synthetic oligonucleotide
  Antisense strand to SEQ ID NO: 812656
ucucagguaaagcuauuga

SEQ ID NO: 812658 - RNA, 19 nt, Artificial Sequence
  Description of Artificial Sequence: Synthetic oligonucleotide
  Sense strand starting at position 3310 of SEQ ID NO: 587709
auuagauacuauucugagu

SEQ ID NO: 812659 - RNA, 19 nt, Artificial Sequence
  Description of Artificial Sequence: Synthetic oligonucleotide
  Antisense strand to SEQ ID NO: 812658
acucagaauaguaucuaau

SEQ ID NO: 812660 - RNA, 19 nt, Artificial Sequence
  Description of Artificial Sequence: Synthetic oligonucleotide
  Sense strand starting at position 3331 of SEQ ID NO: 587709
cguggcgugucaacaguaa

SEQ ID NO: 812661 - RNA, 19 nt, Artificial Sequence
  Description of Artificial Sequence: Synthetic oligonucleotide
  Antisense strand to SEQ ID NO: 812660
uuacuguugacacgccacg

SEQ ID NO: 812662 - RNA, 19 nt, Artificial Sequence
  Description of Artificial Sequence: Synthetic oligonucleotide
  Sense strand starting at position 3344 of SEQ ID NO: 587709
caguaagccgauugauaag

SEQ ID NO: 812663 - RNA, 19 nt, Artificial Sequence
  Description of Artificial Sequence: Synthetic oligonucleotide
  Antisense strand to SEQ ID NO: 812662
cuuaucaaucggcuuacug

SEQ ID NO: 812664 - RNA, 19 nt, Artificial Sequence
  Description of Artificial Sequence: Synthetic oligonucleotide
  Sense strand starting at position 3411 of SEQ ID NO: 587709
gcauucgcagcuuaaauuu

SEQ ID NO: 812665 - RNA, 19 nt, Artificial Sequence
  Description of Artificial Sequence: Synthetic oligonucleotide
  Antisense strand to SEQ ID NO: 812664
aaauuuaagcugcgaaugc

SEQ ID NO: 812666 - RNA, 19 nt, Artificial Sequence
  Description of Artificial Sequence: Synthetic oligonucleotide
  Sense strand starting at position 3505 of SEQ ID NO: 587709
uguauagacuagguaugua

SEQ ID NO: 812667 - RNA, 19 nt, Artificial Sequence
  Description of Artificial Sequence: Synthetic oligonucleotide
  Antisense strand to SEQ ID NO: 812666
uacauaccuagucuauaca

SEQ ID NO: 812668 - RNA, 19 nt, Artificial Sequence
  Description of Artificial Sequence: Synthetic oligonucleotide
  Sense strand starting at position 3552 of SEQ ID NO: 587709
ugauaaagcuacuuuguuu

SEQ ID NO: 812669 - RNA, 19 nt, Artificial Sequence
  Description of Artificial Sequence: Synthetic oligonucleotide
  Antisense strand to SEQ ID NO: 812668
aaacaaaguagcuuuauca

SEQ ID NO: 812670 - RNA, 19 nt, Artificial Sequence
  Description of Artificial Sequence: Synthetic oligonucleotide
  Sense strand starting at position 3586 of SEQ ID NO: 587709
uuaguuagacuuugcuaac

SEQ ID NO: 812671 - RNA, 19 nt, Artificial Sequence
  Description of Artificial Sequence: Synthetic oligonucleotide
  Antisense strand to SEQ ID NO: 812670
guuagcaaagucuaacuaa

SEQ ID NO: 812672 - RNA, 19 nt, Artificial Sequence
  Description of Artificial Sequence: Synthetic oligonucleotide
  Sense strand starting at position 3609 of SEQ ID NO: 587709
cuaaguaauguacauguga

SEQ ID NO: 812673 - RNA, 19 nt, Artificial Sequence
  Description of Artificial Sequence: Synthetic oligonucleotide
  Antisense strand to SEQ ID NO: 812672
ucacauguacauuacuuag

SEQ ID NO: 812674 - RNA, 19 nt, Artificial Sequence
  Description of Artificial Sequence: Synthetic oligonucleotide
  Sense strand starting at position 3642 of SEQ ID NO: 587709
uguaguggaaucugucuau

SEQ ID NO: 812675 - RNA, 19 nt, Artificial Sequence
  Description of Artificial Sequence: Synthetic oligonucleotide
  Antisense strand to SEQ ID NO: 812674
auagacagauuccacuaca

SEQ ID NO: 812676 - RNA, 19 nt, Artificial Sequence
  Description of Artificial Sequence: Synthetic oligonucleotide
  Sense strand starting at position 3749 of SEQ ID NO: 587709
ucaauuaagguuugaucuu

SEQ ID NO: 812677 - RNA, 19 nt, Artificial Sequence
  Description of Artificial Sequence: Synthetic oligonucleotide
  Antisense strand to SEQ ID NO: 812676
aagaucaaaccuuaauuga

SEQ ID NO: 812678 - RNA, 19 nt, Artificial Sequence
  Description of Artificial Sequence: Synthetic oligonucleotide
  Sense strand starting at position 3908 of SEQ ID NO: 587709
uccuuucuaucagugguga

SEQ ID NO: 812679 - RNA, 19 nt, Artificial Sequence
  Description of Artificial Sequence: Synthetic oligonucleotide
  Antisense strand to SEQ ID NO: 812678
ucaccacugauagaaagga

SEQ ID NO: 812680 - RNA, 19 nt, Artificial Sequence
  Description of Artificial Sequence: Synthetic oligonucleotide
  Sense strand starting at position 3909 of SEQ ID NO: 587709
ccuuucuaucaguggugaa

SEQ ID NO: 812681 - RNA, 19 nt, Artificial Sequence
  Description of Artificial Sequence: Synthetic oligonucleotide
  Antisense strand to SEQ ID NO: 812680
uucaccacugauagaaagg

SEQ ID NO: 812682 - RNA, 19 nt, Artificial Sequence
  Description of Artificial Sequence: Synthetic oligonucleotide
  Sense strand starting at position 3910 of SEQ ID NO: 587709
cuuucuaucaguggugaag

SEQ ID NO: 812683 - RNA, 19 nt, Artificial Sequence
  Description of Artificial Sequence: Synthetic oligonucleotide
  Antisense strand to SEQ ID NO: 812682
cuucaccacugauagaaag

SEQ ID NO: 812684 - RNA, 19 nt, Artificial Sequence
  Description of Artificial Sequence: Synthetic oligonucleotide
  Sense strand starting at position 119 of SEQ ID NO: 587710
caaagucauccuggugaac

SEQ ID NO: 812685 - RNA, 19 nt, Artificial Sequence
  Description of Artificial Sequence: Synthetic oligonucleotide
  Antisense strand to SEQ ID NO: 812684
guucaccaggaugacuuug

SEQ ID NO: 812686 - RNA, 19 nt, Artificial Sequence
  Description of Artificial Sequence: Synthetic oligonucleotide
  Sense strand starting at position 140 of SEQ ID NO: 587710
caauaugugcuagggucaa

SEQ ID NO: 812687 - RNA, 19 nt, Artificial Sequence
  Description of Artificial Sequence: Synthetic oligonucleotide
  Antisense strand to SEQ ID NO: 812686
uugacccuagcacauauug

SEQ ID NO: 812688 - RNA, 19 nt, Artificial Sequence
  Description of Artificial Sequence: Synthetic oligonucleotide
  Sense strand starting at position 162 of SEQ ID NO: 587710
gucucuguacuacaugaca

SEQ ID NO: 812689 - RNA, 19 nt, Artificial Sequence
  Description of Artificial Sequence: Synthetic oligonucleotide
  Antisense strand to SEQ ID NO: 812688
ugucauguaguacagagac

SEQ ID NO: 812690 - RNA, 19 nt, Artificial Sequence
  Description of Artificial Sequence: Synthetic oligonucleotide
  Sense strand starting at position 225 of SEQ ID NO: 587710
gggaaauaauucuacuaaa

SEQ ID NO: 812691 - RNA, 19 nt, Artificial Sequence
  Description of Artificial Sequence: Synthetic oligonucleotide
  Antisense strand to SEQ ID NO: 812690
uuuaguagaauuauuuccc

SEQ ID NO: 812692 - RNA, 19 nt, Artificial Sequence
  Description of Artificial Sequence: Synthetic oligonucleotide
  Sense strand starting at position 251 of SEQ ID NO: 587710
gguuacugugaggguucaa

SEQ ID NO: 812693 - RNA, 19 nt, Artificial Sequence
  Description of Artificial Sequence: Synthetic oligonucleotide
  Antisense strand to SEQ ID NO: 812692
uugaacccucacaguaacc

SEQ ID NO: 812694 - RNA, 19 nt, Artificial Sequence
  Description of Artificial Sequence: Synthetic oligonucleotide
  Sense strand starting at position 282 of SEQ ID NO: 587710
uauguaugggcagagcuaa

SEQ ID NO: 812695 - RNA, 19 nt, Artificial Sequence
  Description of Artificial Sequence: Synthetic oligonucleotide
  Antisense strand to SEQ ID NO: 812694
uuagcucugcccauacaua

SEQ ID NO: 812696 - RNA, 19 nt, Artificial Sequence
  Description of Artificial Sequence: Synthetic oligonucleotide
  Sense strand starting at position 296 of SEQ ID NO: 587710
gcuaaugaccaaugaguag

SEQ ID NO: 812697 - RNA, 19 nt, Artificial Sequence
  Description of Artificial Sequence: Synthetic oligonucleotide
  Antisense strand to SEQ ID NO: 812696
cuacucauuggucauuagc

SEQ ID NO: 812698 - RNA, 19 nt, Artificial Sequence
  Description of Artificial Sequence: Synthetic oligonucleotide
  Sense strand starting at position 323 of SEQ ID NO: 587710
cuugcucaggcaugaaaua

SEQ ID NO: 812699 - RNA, 19 nt, Artificial Sequence
  Description of Artificial Sequence: Synthetic oligonucleotide
  Antisense strand to SEQ ID NO: 812698
uauuucaugccugagcaag

SEQ ID NO: 812700 - RNA, 19 nt, Artificial Sequence
  Description of Artificial Sequence: Synthetic oligonucleotide
  Sense strand starting at position 324 of SEQ ID NO: 587710
uugcucaggcaugaaauaa

SEQ ID NO: 812701 - RNA, 19 nt, Artificial Sequence
  Description of Artificial Sequence: Synthetic oligonucleotide
  Antisense strand to SEQ ID NO: 812700
uuauuucaugccugagcaa

SEQ ID NO: 812702 - RNA, 19 nt, Artificial Sequence
  Description of Artificial Sequence: Synthetic oligonucleotide
  Sense strand starting at position 438 of SEQ ID NO: 587710
gguagaucuccugagcuga

SEQ ID NO: 812703 - RNA, 19 nt, Artificial Sequence
  Description of Artificial Sequence: Synthetic oligonucleotide
  Antisense strand to SEQ ID NO: 812702
ucagcucaggagaucuacc

SEQ ID NO: 812704 - RNA, 19 nt, Artificial Sequence
  Description of Artificial Sequence: Synthetic oligonucleotide
  Sense strand starting at position 708 of SEQ ID NO: 587710
ggacguggugacuguaaua

SEQ ID NO: 812705 - RNA, 19 nt, Artificial Sequence
  Description of Artificial Sequence: Synthetic oligonucleotide
  Antisense strand to SEQ ID NO: 812704
uauuacagucaccacgucc

SEQ ID NO: 812706 - RNA, 19 nt, Artificial Sequence
  Description of Artificial Sequence: Synthetic oligonucleotide
  Sense strand starting at position 816 of SEQ ID NO: 587710
auugaagucuuugcaaacu

SEQ ID NO: 812707 - RNA, 19 nt, Artificial Sequence
  Description of Artificial Sequence: Synthetic oligonucleotide
  Antisense strand to SEQ ID NO: 812706
aguuugcaaagacuucaau

SEQ ID NO: 812708 - RNA, 19 nt, Artificial Sequence
  Description of Artificial Sequence: Synthetic oligonucleotide
  Sense strand starting at position 924 of SEQ ID NO: 587710
ugauuuaucugguaaaucu

SEQ ID NO: 812709 - RNA, 19 nt, Artificial Sequence
  Description of Artificial Sequence: Synthetic oligonucleotide
  Antisense strand to SEQ ID NO: 812708
agauuuaccagauaaauca

SEQ ID NO: 812710 - RNA, 19 nt, Artificial Sequence
  Description of Artificial Sequence: Synthetic oligonucleotide
  Sense strand starting at position 984 of SEQ ID NO: 587710
ucccucugugcugauguaa

SEQ ID NO: 812711 - RNA, 19 nt, Artificial Sequence
  Description of Artificial Sequence: Synthetic oligonucleotide
  Antisense strand to SEQ ID NO: 812710
uuacaucagcacagaggga

SEQ ID NO: 812712 - RNA, 19 nt, Artificial Sequence
  Description of Artificial Sequence: Synthetic oligonucleotide
  Sense strand starting at position 1266 of SEQ ID NO: 587710
uaguaugguugacugaauu

SEQ ID NO: 812713 - RNA, 19 nt, Artificial Sequence
  Description of Artificial Sequence: Synthetic oligonucleotide
  Antisense strand to SEQ ID NO: 812712
aauucagucaaccauacua

SEQ ID NO: 812714 - RNA, 19 nt, Artificial Sequence
  Description of Artificial Sequence: Synthetic oligonucleotide
  Sense strand starting at position 1292 of SEQ ID NO: 587710
uaggauaucguuugaagau

SEQ ID NO: 812715 - RNA, 19 nt, Artificial Sequence
  Description of Artificial Sequence: Synthetic oligonucleotide
  Antisense strand to SEQ ID NO: 812714
aucuucaaacgauauccua

SEQ ID NO: 812716 - RNA, 19 nt, Artificial Sequence
  Description of Artificial Sequence: Synthetic oligonucleotide
  Sense strand starting at position 1305 of SEQ ID NO: 587710
gaagauuuguauuagguag

SEQ ID NO: 812717 - RNA, 19 nt, Artificial Sequence
  Description of Artificial Sequence: Synthetic oligonucleotide
  Antisense strand to SEQ ID NO: 812716
cuaccuaauacaaaucuuc

SEQ ID NO: 812718 - RNA, 19 nt, Artificial Sequence
  Description of Artificial Sequence: Synthetic oligonucleotide
  Sense strand starting at position 1317 of SEQ ID NO: 587710
uagguagcauugccugaaa

SEQ ID NO: 812719 - RNA, 19 nt, Artificial Sequence
  Description of Artificial Sequence: Synthetic oligonucleotide
  Antisense strand to SEQ ID NO: 812718
uuucaggcaaugcuaccua

SEQ ID NO: 812720 - RNA, 19 nt, Artificial Sequence
  Description of Artificial Sequence: Synthetic oligonucleotide
  Sense strand starting at position 1415 of SEQ ID NO: 587710
ugguuugagauccagucaa

SEQ ID NO: 812721 - RNA, 19 nt, Artificial Sequence
  Description of Artificial Sequence: Synthetic oligonucleotide
  Antisense strand to SEQ ID NO: 812720
uugacuggaucucaaacca

SEQ ID NO: 812722 - RNA, 19 nt, Artificial Sequence
  Description of Artificial Sequence: Synthetic oligonucleotide
  Sense strand starting at position 1531 of SEQ ID NO: 587710
ggcaacaauuaagauuuga

SEQ ID NO: 812723 - RNA, 19 nt, Artificial Sequence
  Description of Artificial Sequence: Synthetic oligonucleotide
  Antisense strand to SEQ ID NO: 812722
ucaaaucuuaauuguugcc

SEQ ID NO: 812724 - RNA, 19 nt, Artificial Sequence
  Description of Artificial Sequence: Synthetic oligonucleotide
  Sense strand starting at position 1556 of SEQ ID NO: 587710
ccuguugguguagaacaua

SEQ ID NO: 812725 - RNA, 19 nt, Artificial Sequence
  Description of Artificial Sequence: Synthetic oligonucleotide
  Antisense strand to SEQ ID NO: 812724
uauguucuacaccaacagg

SEQ ID NO: 812726 - RNA, 19 nt, Artificial Sequence
  Description of Artificial Sequence: Synthetic oligonucleotide
  Sense strand starting at position 1659 of SEQ ID NO: 587710
agguacuuuguacaaucau

SEQ ID NO: 812727 - RNA, 19 nt, Artificial Sequence
  Description of Artificial Sequence: Synthetic oligonucleotide
  Antisense strand to SEQ ID NO: 812726
augauuguacaaaguaccu

SEQ ID NO: 812728 - RNA, 19 nt, Artificial Sequence
  Description of Artificial Sequence: Synthetic oligonucleotide
  Sense strand starting at position 2015 of SEQ ID NO: 587710
gagagcuaaucacuaagua

SEQ ID NO: 812729 - RNA, 19 nt, Artificial Sequence
  Description of Artificial Sequence: Synthetic oligonucleotide
  Antisense strand to SEQ ID NO: 812728
uacuuagugauuagcucuc

SEQ ID NO: 812730 - RNA, 19 nt, Artificial Sequence
  Description of Artificial Sequence: Synthetic oligonucleotide
  Sense strand starting at position 2019 of SEQ ID NO: 587710
gcuaaucacuaaguaguau

SEQ ID NO: 812731 - RNA, 19 nt, Artificial Sequence
  Description of Artificial Sequence: Synthetic oligonucleotide
  Antisense strand to SEQ ID NO: 812730
auacuacuuagugauuagc

SEQ ID NO: 812732 - RNA, 19 nt, Artificial Sequence
  Description of Artificial Sequence: Synthetic oligonucleotide
  Sense strand starting at position 2237 of SEQ ID NO: 587710
uuuccagagucucuuaaag

SEQ ID NO: 812733 - RNA, 19 nt, Artificial Sequence
  Description of Artificial Sequence: Synthetic oligonucleotide
  Antisense strand to SEQ ID NO: 812732
cuuuaagagacucuggaaa

SEQ ID NO: 812734 - RNA, 19 nt, Artificial Sequence
  Description of Artificial Sequence: Synthetic oligonucleotide
  Sense strand starting at position 2333 of SEQ ID NO: 587710
guacuauaagauuguaucu

SEQ ID NO: 812735 - RNA, 19 nt, Artificial Sequence
  Description of Artificial Sequence: Synthetic oligonucleotide
  Antisense strand to SEQ ID NO: 812734
agauacaaucuuauaguac

SEQ ID NO: 812736 - RNA, 19 nt, Artificial Sequence
  Description of Artificial Sequence: Synthetic oligonucleotide
  Sense strand starting at position 2768 of SEQ ID NO: 587710
guuguaugcacacaugaug

SEQ ID NO: 812737 - RNA, 19 nt, Artificial Sequence
  Description of Artificial Sequence: Synthetic oligonucleotide
  Antisense strand to SEQ ID NO: 812736
caucaugugugcauacaac

SEQ ID NO: 812738 - RNA, 19 nt, Artificial Sequence
  Description of Artificial Sequence: Synthetic oligonucleotide
  Sense strand starting at position 3029 of SEQ ID NO: 587710
ccaggaaaguucucuucua

SEQ ID NO: 812739 - RNA, 19 nt, Artificial Sequence
  Description of Artificial Sequence: Synthetic oligonucleotide
  Antisense strand to SEQ ID NO: 812738
uagaagagaacuuuccugg

SEQ ID NO: 812740 - RNA, 19 nt, Artificial Sequence
  Description of Artificial Sequence: Synthetic oligonucleotide
  Sense strand starting at position 3354 of SEQ ID NO: 587710
agccauguguuucugagga

SEQ ID NO: 812741 - RNA, 19 nt, Artificial Sequence
  Description of Artificial Sequence: Synthetic oligonucleotide
  Antisense strand to SEQ ID NO: 812740
uccucagaaacacauggcu

SEQ ID NO: 812742 - RNA, 19 nt, Artificial Sequence
  Description of Artificial Sequence: Synthetic oligonucleotide
  Sense strand starting at position 3410 of SEQ ID NO: 587710
gaccuaaaucaguggcuuu

SEQ ID NO: 812743 - RNA, 19 nt, Artificial Sequence
  Description of Artificial Sequence: Synthetic oligonucleotide
  Antisense strand to SEQ ID NO: 812742
aaagccacugauuuagguc

SEQ ID NO: 812744 - RNA, 19 nt, Artificial Sequence
  Description of Artificial Sequence: Synthetic oligonucleotide
  Sense strand starting at position 3445 of SEQ ID NO: 587710
ucaauaucaccuggaguau

SEQ ID NO: 812745 - RNA, 19 nt, Artificial Sequence
  Description of Artificial Sequence: Synthetic oligonucleotide
  Antisense strand to SEQ ID NO: 812744
auacuccaggugauauuga

SEQ ID NO: 812746 - RNA, 19 nt, Artificial Sequence
  Description of Artificial Sequence: Synthetic oligonucleotide
  Sense strand starting at position 3458 of SEQ ID NO: 587710
gaguauuuguuauaccaga

SEQ ID NO: 812747 - RNA, 19 nt, Artificial Sequence
  Description of Artificial Sequence: Synthetic oligonucleotide
  Antisense strand to SEQ ID NO: 812746
ucugguauaacaaauacuc

SEQ ID NO: 812748 - RNA, 19 nt, Artificial Sequence
  Description of Artificial Sequence: Synthetic oligonucleotide
  Sense strand starting at position 3463 of SEQ ID NO: 587710
uuuguuauaccagaaugcu

SEQ ID NO: 812749 - RNA, 19 nt, Artificial Sequence
  Description of Artificial Sequence: Synthetic oligonucleotide
  Antisense strand to SEQ ID NO: 812748
agcauucugguauaacaaa

SEQ ID NO: 812750 - RNA, 19 nt, Artificial Sequence
  Description of Artificial Sequence: Synthetic oligonucleotide
  Sense strand starting at position 3472 of SEQ ID NO: 587710
ccagaaugcugggcuccaa

SEQ ID NO: 812751 - RNA, 19 nt, Artificial Sequence
  Description of Artificial Sequence: Synthetic oligonucleotide
  Antisense strand to SEQ ID NO: 812750
uuggagcccagcauucugg

SEQ ID NO: 812752 - RNA, 19 nt, Artificial Sequence
  Description of Artificial Sequence: Synthetic oligonucleotide
  Sense strand starting at position 3567 of SEQ ID NO: 587710
gcugauggucugggaacua

SEQ ID NO: 812753 - RNA, 19 nt, Artificial Sequence
  Description of Artificial Sequence: Synthetic oligonucleotide
  Antisense strand to SEQ ID NO: 812752
uaguucccagaccaucagc

SEQ ID NO: 812754 - RNA, 19 nt, Artificial Sequence
  Description of Artificial Sequence: Synthetic oligonucleotide
  Sense strand starting at position 3591 of SEQ ID NO: 587710
cgagaaacaacagguuuaa

SEQ ID NO: 812755 - RNA, 19 nt, Artificial Sequence
  Description of Artificial Sequence: Synthetic oligonucleotide
  Antisense strand to SEQ ID NO: 812754
uuaaaccuguuguuucucg

SEQ ID NO: 812756 - RNA, 19 nt, Artificial Sequence
  Description of Artificial Sequence: Synthetic oligonucleotide
  Sense strand starting at position 3680 of SEQ ID NO: 587710
aaaugagcucaguaagucu

SEQ ID NO: 812757 - RNA, 19 nt, Artificial Sequence
  Description of Artificial Sequence: Synthetic oligonucleotide
  Antisense strand to SEQ ID NO: 812756
agacuuacugagcucauuu

SEQ ID NO: 812758 - RNA, 19 nt, Artificial Sequence
  Description of Artificial Sequence: Synthetic oligonucleotide
  Sense strand starting at position 3758 of SEQ ID NO: 587710
uugccuagauauccaagaa

SEQ ID NO: 812759 - RNA, 19 nt, Artificial Sequence
  Description of Artificial Sequence: Synthetic oligonucleotide
  Antisense strand to SEQ ID NO: 812758
uucuuggauaucuaggcaa

SEQ ID NO: 812760 - RNA, 19 nt, Artificial Sequence
  Description of Artificial Sequence: Synthetic oligonucleotide
  Sense strand starting at position 3805 of SEQ ID NO: 587710
auaacaugaugggauauaa

SEQ ID NO: 812761 - RNA, 19 nt, Artificial Sequence
  Description of Artificial Sequence: Synthetic oligonucleotide
  Antisense strand to SEQ ID NO: 812760
uuauaucccaucauguuau

SEQ ID NO: 812762 - RNA, 19 nt, Artificial Sequence
  Description of Artificial Sequence: Synthetic oligonucleotide
  Sense strand starting at position 3964 of SEQ ID NO: 587710
ugaguugggaaugguauga

SEQ ID NO: 812763 - RNA, 19 nt, Artificial Sequence
  Description of Artificial Sequence: Synthetic oligonucleotide
  Antisense strand to SEQ ID NO: 812762
ucauaccauucccaacuca

SEQ ID NO: 812764 - RNA, 19 nt, Artificial Sequence
  Description of Artificial Sequence: Synthetic oligonucleotide
  Sense strand starting at position 108 of SEQ ID NO: 587711
cguguuuggccauauuuau

SEQ ID NO: 812765 - RNA, 19 nt, Artificial Sequence
  Description of Artificial Sequence: Synthetic oligonucleotide
  Antisense strand to SEQ ID NO: 812764
auaaauauggccaaacacg

SEQ ID NO: 812766 - RNA, 19 nt, Artificial Sequence
  Description of Artificial Sequence: Synthetic oligonucleotide
  Sense strand starting at position 319 of SEQ ID NO: 587711
ugguuaacguccuucagag

SEQ ID NO: 812767 - RNA, 19 nt, Artificial Sequence
  Description of Artificial Sequence: Synthetic oligonucleotide
  Antisense strand to SEQ ID NO: 812766
cucugaaggacguuaacca

SEQ ID NO: 812768 - RNA, 19 nt, Artificial Sequence
  Description of Artificial Sequence: Synthetic oligonucleotide
  Sense strand starting at position 436 of SEQ ID NO: 587711
uuuaaagggcuaugcuaaa

SEQ ID NO: 812769 - RNA, 19 nt, Artificial Sequence
  Description of Artificial Sequence: Synthetic oligonucleotide
  Antisense strand to SEQ ID NO: 812768
uuuagcauagcccuuuaaa

SEQ ID NO: 812770 - RNA, 19 nt, Artificial Sequence
  Description of Artificial Sequence: Synthetic oligonucleotide
  Sense strand starting at position 842 of SEQ ID NO: 587711
gaugucugcuaccuguuaa

SEQ ID NO: 812771 - RNA, 19 nt, Artificial Sequence
  Description of Artificial Sequence: Synthetic oligonucleotide
  Antisense strand to SEQ ID NO: 812770
uuaacagguagcagacauc

SEQ ID NO: 812772 - RNA, 19 nt, Artificial Sequence
  Description of Artificial Sequence: Synthetic oligonucleotide
  Sense strand starting at position 944 of SEQ ID NO: 587711
auaucaugucgcuacaaau

SEQ ID NO: 812773 - RNA, 19 nt, Artificial Sequence
  Description of Artificial Sequence: Synthetic oligonucleotide
  Antisense strand to SEQ ID NO: 812772
auuuguagcgacaugauau

SEQ ID NO: 812774 - RNA, 19 nt, Artificial Sequence
  Description of Artificial Sequence: Synthetic oligonucleotide
  Sense strand starting at position 1036 of SEQ ID NO: 587711
cugagaaaguuucuagguu

SEQ ID NO: 812775 - RNA, 19 nt, Artificial Sequence
  Description of Artificial Sequence: Synthetic oligonucleotide
  Antisense strand to SEQ ID NO: 812774
aaccuagaaacuuucucag

SEQ ID NO: 812776 - RNA, 19 nt, Artificial Sequence
  Description of Artificial Sequence: Synthetic oligonucleotide
  Sense strand starting at position 1198 of SEQ ID NO: 587711
gagaaauauuaaggaaaga

SEQ ID NO: 812777 - RNA, 19 nt, Artificial Sequence
  Description of Artificial Sequence: Synthetic oligonucleotide
  Antisense strand to SEQ ID NO: 812776
ucuuuccuuaauauuucuc

SEQ ID NO: 812778 - RNA, 19 nt, Artificial Sequence
  Description of Artificial Sequence: Synthetic oligonucleotide
  Sense strand starting at position 2083 of SEQ ID NO: 587711
ggcagaacuuagcuuguca

SEQ ID NO: 812779 - RNA, 19 nt, Artificial Sequence
  Description of Artificial Sequence: Synthetic oligonucleotide
  Antisense strand to SEQ ID NO: 812778
ugacaagcuaaguucugcc

SEQ ID NO: 812780 - RNA, 19 nt, Artificial Sequence
  Description of Artificial Sequence: Synthetic oligonucleotide
  Sense strand starting at position 2098 of SEQ ID NO: 587711
gucacauagguguauucuu

SEQ ID NO: 812781 - RNA, 19 nt, Artificial Sequence
  Description of Artificial Sequence: Synthetic oligonucleotide
  Antisense strand to SEQ ID NO: 812780
aagaauacaccuaugugac

SEQ ID NO: 812782 - RNA, 19 nt, Artificial Sequence
  Description of Artificial Sequence: Synthetic oligonucleotide
  Sense strand starting at position 2106 of SEQ ID NO: 587711
gguguauucuuccuggaac

SEQ ID NO: 812783 - RNA, 19 nt, Artificial Sequence
  Description of Artificial Sequence: Synthetic oligonucleotide
  Antisense strand to SEQ ID NO: 812782
guuccaggaagaauacacc

SEQ ID NO: 812784 - RNA, 19 nt, Artificial Sequence
  Description of Artificial Sequence: Synthetic oligonucleotide
  Sense strand starting at position 2109 of SEQ ID NO: 587711
guauucuuccuggaaccga

SEQ ID NO: 812785 - RNA, 19 nt, Artificial Sequence
  Description of Artificial Sequence: Synthetic oligonucleotide
  Antisense strand to SEQ ID NO: 812784
ucgguuccaggaagaauac

SEQ ID NO: 812786 - RNA, 19 nt, Artificial Sequence
  Description of Artificial Sequence: Synthetic oligonucleotide
  Sense strand starting at position 2437 of SEQ ID NO: 587711
gguggagugcauuacauaa

SEQ ID NO: 812787 - RNA, 19 nt, Artificial Sequence
  Description of Artificial Sequence: Synthetic oligonucleotide
  Antisense strand to SEQ ID NO: 812786
uuauguaaugcacuccacc

SEQ ID NO: 812788 - RNA, 19 nt, Artificial Sequence
  Description of Artificial Sequence: Synthetic oligonucleotide
  Sense strand starting at position 2505 of SEQ ID NO: 587711
cggagauaccuucaacgua

SEQ ID NO: 812789 - RNA, 19 nt, Artificial Sequence
  Description of Artificial Sequence: Synthetic oligonucleotide
  Antisense strand to SEQ ID NO: 812788
uacguugaagguaucuccg

SEQ ID NO: 812790 - RNA, 19 nt, Artificial Sequence
  Description of Artificial Sequence: Synthetic oligonucleotide
  Sense strand starting at position 2563 of SEQ ID NO: 587711
aaguucguugugccauuau

SEQ ID NO: 812791 - RNA, 19 nt, Artificial Sequence
  Description of Artificial Sequence: Synthetic oligonucleotide
  Antisense strand to SEQ ID NO: 812790
auaauggcacaacgaacuu

SEQ ID NO: 812792 - RNA, 19 nt, Artificial Sequence
  Description of Artificial Sequence: Synthetic oligonucleotide
  Sense strand starting at position 2587 of SEQ ID NO: 587711
cauguuaguguuggacauu

SEQ ID NO: 812793 - RNA, 19 nt, Artificial Sequence
  Description of Artificial Sequence: Synthetic oligonucleotide
  Antisense strand to SEQ ID NO: 812792
aauguccaacacuaacaug

SEQ ID NO: 812794 - RNA, 19 nt, Artificial Sequence
  Description of Artificial Sequence: Synthetic oligonucleotide
  Sense strand starting at position 2590 of SEQ ID NO: 587711
guuaguguuggacauucua

SEQ ID NO: 812795 - RNA, 19 nt, Artificial Sequence
  Description of Artificial Sequence: Synthetic oligonucleotide
  Antisense strand to SEQ ID NO: 812794
uagaauguccaacacuaac

SEQ ID NO: 812796 - RNA, 19 nt, Artificial Sequence
  Description of Artificial Sequence: Synthetic oligonucleotide
  Sense strand starting at position 2613 of SEQ ID NO: 587711
cccaguccuguuuaggcaa

SEQ ID NO: 812797 - RNA, 19 nt, Artificial Sequence
  Description of Artificial Sequence: Synthetic oligonucleotide
  Antisense strand to SEQ ID NO: 812796
uugccuaaacaggacuggg

SEQ ID NO: 812798 - RNA, 19 nt, Artificial Sequence
  Description of Artificial Sequence: Synthetic oligonucleotide
  Sense strand starting at position 2641 of SEQ ID NO: 587711
gggauuuaguuugcggauc

SEQ ID NO: 812799 - RNA, 19 nt, Artificial Sequence
  Description of Artificial Sequence: Synthetic oligonucleotide
  Antisense strand to SEQ ID NO: 812798
gauccgcaaacuaaauccc

SEQ ID NO: 812800 - RNA, 19 nt, Artificial Sequence
  Description of Artificial Sequence: Synthetic oligonucleotide
  Sense strand starting at position 2723 of SEQ ID NO: 587711
uccugugagaugugguuau

SEQ ID NO: 812801 - RNA, 19 nt, Artificial Sequence
  Description of Artificial Sequence: Synthetic oligonucleotide
  Antisense strand to SEQ ID NO: 812800
auaaccacaucucacagga

SEQ ID NO: 812802 - RNA, 19 nt, Artificial Sequence
  Description of Artificial Sequence: Synthetic oligonucleotide
  Sense strand starting at position 2727 of SEQ ID NO: 587711
gugagaugugguuauucuc

SEQ ID NO: 812803 - RNA, 19 nt, Artificial Sequence
  Description of Artificial Sequence: Synthetic oligonucleotide
  Antisense strand to SEQ ID NO: 812802
gagaauaaccacaucucac

SEQ ID NO: 812804 - RNA, 19 nt, Artificial Sequence
  Description of Artificial Sequence: Synthetic oligonucleotide
  Sense strand starting at position 3029 of SEQ ID NO: 587711
uuuagauucuuacuaggug

SEQ ID NO: 812805 - RNA, 19 nt, Artificial Sequence
  Description of Artificial Sequence: Synthetic oligonucleotide
  Antisense strand to SEQ ID NO: 812804
caccuaguaagaaucuaaa

SEQ ID NO: 812806 - RNA, 19 nt, Artificial Sequence
  Description of Artificial Sequence: Synthetic oligonucleotide
  Sense strand starting at position 3032 of SEQ ID NO: 587711
agauucuuacuagguggga

SEQ ID NO: 812807 - RNA, 19 nt, Artificial Sequence
  Description of Artificial Sequence: Synthetic oligonucleotide
  Antisense strand to SEQ ID NO: 812806
ucccaccuaguaagaaucu

SEQ ID NO: 812808 - RNA, 19 nt, Artificial Sequence
  Description of Artificial Sequence: Synthetic oligonucleotide
  Sense strand starting at position 3033 of SEQ ID NO: 587711
gauucuuacuaggugggau

SEQ ID NO: 812809 - RNA, 19 nt, Artificial Sequence
  Description of Artificial Sequence: Synthetic oligonucleotide
  Antisense strand to SEQ ID NO: 812808
aucccaccuaguaagaauc

SEQ ID NO: 812810 - RNA, 19 nt, Artificial Sequence
  Description of Artificial Sequence: Synthetic oligonucleotide
  Sense strand starting at position 3034 of SEQ ID NO: 587711
auucuuacuaggugggaua

SEQ ID NO: 812811 - RNA, 19 nt, Artificial Sequence
  Description of Artificial Sequence: Synthetic oligonucleotide
  Antisense strand to SEQ ID NO: 812810
uaucccaccuaguaagaau

SEQ ID NO: 812812 - RNA, 19 nt, Artificial Sequence
  Description of Artificial Sequence: Synthetic oligonucleotide
  Sense strand starting at position 3035 of SEQ ID NO: 587711
uucuuacuaggugggauaa

SEQ ID NO: 812813 - RNA, 19 nt, Artificial Sequence
  Description of Artificial Sequence: Synthetic oligonucleotide
  Antisense strand to SEQ ID NO: 812812
uuaucccaccuaguaagaa

SEQ ID NO: 812814 - RNA, 19 nt, Artificial Sequence
  Description of Artificial Sequence: Synthetic oligonucleotide
  Sense strand starting at position 3036 of SEQ ID NO: 587711
ucuuacuaggugggauaaa

SEQ ID NO: 812815 - RNA, 19 nt, Artificial Sequence
  Description of Artificial Sequence: Synthetic oligonucleotide
  Antisense strand to SEQ ID NO: 812814
uuuaucccaccuaguaaga

SEQ ID NO: 812816 - RNA, 19 nt, Artificial Sequence
  Description of Artificial Sequence: Synthetic oligonucleotide
  Sense strand starting at position 3079 of SEQ ID NO: 587711
caccauuaugccuggugaa

SEQ ID NO: 812817 - RNA, 19 nt, Artificial Sequence
  Description of Artificial Sequence: Synthetic oligonucleotide
  Antisense strand to SEQ ID NO: 812816
uucaccaggcauaauggug

SEQ ID NO: 812818 - RNA, 19 nt, Artificial Sequence
  Description of Artificial Sequence: Synthetic oligonucleotide
  Sense strand starting at position 3080 of SEQ ID NO: 587711
accauuaugccuggugaaa

SEQ ID NO: 812819 - RNA, 19 nt, Artificial Sequence
  Description of Artificial Sequence: Synthetic oligonucleotide
  Antisense strand to SEQ ID NO: 812818
uuucaccaggcauaauggu

SEQ ID NO: 812820 - RNA, 19 nt, Artificial Sequence
  Description of Artificial Sequence: Synthetic oligonucleotide
  Sense strand starting at position 3103 of SEQ ID NO: 587711
cagaaugucugggcugcau

SEQ ID NO: 812821 - RNA, 19 nt, Artificial Sequence
  Description of Artificial Sequence: Synthetic oligonucleotide
  Antisense strand to SEQ ID NO: 812820
augcagcccagacauucug

SEQ ID NO: 812822 - RNA, 19 nt, Artificial Sequence
  Description of Artificial Sequence: Synthetic oligonucleotide
  Sense strand starting at position 3196 of SEQ ID NO: 587711
aggguuguggcuugggaaa

SEQ ID NO: 812823 - RNA, 19 nt, Artificial Sequence
  Description of Artificial Sequence: Synthetic oligonucleotide
  Antisense strand to SEQ ID NO: 812822
uuucccaagccacaacccu

SEQ ID NO: 812824 - RNA, 19 nt, Artificial Sequence
  Description of Artificial Sequence: Synthetic oligonucleotide
  Sense strand starting at position 3207 of SEQ ID NO: 587711
uugggaaagaacuguucca

SEQ ID NO: 812825 - RNA, 19 nt, Artificial Sequence
  Description of Artificial Sequence: Synthetic oligonucleotide
  Antisense strand to SEQ ID NO: 812824
uggaacaguucuuucccaa

SEQ ID NO: 812826 - RNA, 19 nt, Artificial Sequence
  Description of Artificial Sequence: Synthetic oligonucleotide
  Sense strand starting at position 3214 of SEQ ID NO: 587711
agaacuguuccagacuucu

SEQ ID NO: 812827 - RNA, 19 nt, Artificial Sequence
  Description of Artificial Sequence: Synthetic oligonucleotide
  Antisense strand to SEQ ID NO: 812826
agaagucuggaacaguucu

SEQ ID NO: 812828 - RNA, 19 nt, Artificial Sequence
  Description of Artificial Sequence: Synthetic oligonucleotide
  Sense strand starting at position 3416 of SEQ ID NO: 587711
gagagcugucuccaucuuu

SEQ ID NO: 812829 - RNA, 19 nt, Artificial Sequence
  Description of Artificial Sequence: Synthetic oligonucleotide
  Antisense strand to SEQ ID NO: 812828
aaagauggagacagcucuc

SEQ ID NO: 812830 - RNA, 19 nt, Artificial Sequence
  Description of Artificial Sequence: Synthetic oligonucleotide
  Sense strand starting at position 3687 of SEQ ID NO: 587711
aagagaggcucgguaaguu

SEQ ID NO: 812831 - RNA, 19 nt, Artificial Sequence
  Description of Artificial Sequence: Synthetic oligonucleotide
  Antisense strand to SEQ ID NO: 812830
aacuuaccgagccucucuu

SEQ ID NO: 812832 - RNA, 19 nt, Artificial Sequence
  Description of Artificial Sequence: Synthetic oligonucleotide
  Sense strand starting at position 3790 of SEQ ID NO: 587711
aauuuaccgguuuguuaua

SEQ ID NO: 812833 - RNA, 19 nt, Artificial Sequence
  Description of Artificial Sequence: Synthetic oligonucleotide
  Antisense strand to SEQ ID NO: 812832
uauaacaaaccgguaaauu

SEQ ID NO: 812834 - RNA, 19 nt, Artificial Sequence
  Description of Artificial Sequence: Synthetic oligonucleotide
  Sense strand starting at position 3791 of SEQ ID NO: 587711
auuuaccgguuuguuauaa

SEQ ID NO: 812835 - RNA, 19 nt, Artificial Sequence
  Description of Artificial Sequence: Synthetic oligonucleotide
  Antisense strand to SEQ ID NO: 812834
uuauaacaaaccgguaaau

SEQ ID NO: 812836 - RNA, 19 nt, Artificial Sequence
  Description of Artificial Sequence: Synthetic oligonucleotide
  Sense strand starting at position 3815 of SEQ ID NO: 587711
uccaauuaaugcuugagau

SEQ ID NO: 812837 - RNA, 19 nt, Artificial Sequence
  Description of Artificial Sequence: Synthetic oligonucleotide
  Antisense strand to SEQ ID NO: 812836
aucucaagcauuaauugga

SEQ ID NO: 812838 - RNA, 19 nt, Artificial Sequence
  Description of Artificial Sequence: Synthetic oligonucleotide
  Sense strand starting at position 3816 of SEQ ID NO: 587711
ccaauuaaugcuugagauu

SEQ ID NO: 812839 - RNA, 19 nt, Artificial Sequence
  Description of Artificial Sequence: Synthetic oligonucleotide
  Antisense strand to SEQ ID NO: 812838
aaucucaagcauuaauugg

SEQ ID NO: 812840 - RNA, 19 nt, Artificial Sequence
  Description of Artificial Sequence: Synthetic oligonucleotide
  Sense strand starting at position 3839 of SEQ ID NO: 587711
cugauuagaucugcacuuu

SEQ ID NO: 812841 - RNA, 19 nt, Artificial Sequence
  Description of Artificial Sequence: Synthetic oligonucleotide
  Antisense strand to SEQ ID NO: 812840
aaagugcagaucuaaucag

SEQ ID NO: 812842 - RNA, 19 nt, Artificial Sequence
  Description of Artificial Sequence: Synthetic oligonucleotide
  Sense strand starting at position 3964 of SEQ ID NO: 587711
gcuagagcugcuggagaaa

SEQ ID NO: 812843 - RNA, 19 nt, Artificial Sequence
  Description of Artificial Sequence: Synthetic oligonucleotide
  Antisense strand to SEQ ID NO: 812842
uuucuccagcagcucuagc

SEQ ID NO: 812844 - RNA, 19 nt, Artificial Sequence
  Description of Artificial Sequence: Synthetic oligonucleotide
  Sense strand starting at position 33 of SEQ ID NO: 587712
uuucgauuauuugacaugu

SEQ ID NO: 812845 - RNA, 19 nt, Artificial Sequence
  Description of Artificial Sequence: Synthetic oligonucleotide
  Antisense strand to SEQ ID NO: 812844
acaugucaaauaaucgaaa

SEQ ID NO: 812846 - RNA, 19 nt, Artificial Sequence
  Description of Artificial Sequence: Synthetic oligonucleotide
  Sense strand starting at position 35 of SEQ ID NO: 587712
ucgauuauuugacauguau

SEQ ID NO: 812847 - RNA, 19 nt, Artificial Sequence
  Description of Artificial Sequence: Synthetic oligonucleotide
  Antisense strand to SEQ ID NO: 812846
auacaugucaaauaaucga

SEQ ID NO: 812848 - RNA, 19 nt, Artificial Sequence
  Description of Artificial Sequence: Synthetic oligonucleotide
  Sense strand starting at position 194 of SEQ ID NO: 587712
uguuucuguuaacuguuua

SEQ ID NO: 812849 - RNA, 19 nt, Artificial Sequence
  Description of Artificial Sequence: Synthetic oligonucleotide
  Antisense strand to SEQ ID NO: 812848
uaaacaguuaacagaaaca

SEQ ID NO: 812850 - RNA, 19 nt, Artificial Sequence
  Description of Artificial Sequence: Synthetic oligonucleotide
  Sense strand starting at position 227 of SEQ ID NO: 587712
gcacaaaguuagcugcauu

SEQ ID NO: 812851 - RNA, 19 nt, Artificial Sequence
  Description of Artificial Sequence: Synthetic oligonucleotide
  Antisense strand to SEQ ID NO: 812850
aaugcagcuaacuuugugc

SEQ ID NO: 812852 - RNA, 19 nt, Artificial Sequence
  Description of Artificial Sequence: Synthetic oligonucleotide
  Sense strand starting at position 300 of SEQ ID NO: 587712
ucccaagauuuacagguau

SEQ ID NO: 812853 - RNA, 19 nt, Artificial Sequence
  Description of Artificial Sequence: Synthetic oligonucleotide
  Antisense strand to SEQ ID NO: 812852
auaccuguaaaucuuggga

SEQ ID NO: 812854 - RNA, 19 nt, Artificial Sequence
  Description of Artificial Sequence: Synthetic oligonucleotide
  Sense strand starting at position 357 of SEQ ID NO: 587712
ucuugcaugcuacagauaa

SEQ ID NO: 812855 - RNA, 19 nt, Artificial Sequence
  Description of Artificial Sequence: Synthetic oligonucleotide
  Antisense strand to SEQ ID NO: 812854
uuaucuguagcaugcaaga

SEQ ID NO: 812856 - RNA, 19 nt, Artificial Sequence
  Description of Artificial Sequence: Synthetic oligonucleotide
  Sense strand starting at position 370 of SEQ ID NO: 587712
agauaagacugguccaguu

SEQ ID NO: 812857 - RNA, 19 nt, Artificial Sequence
  Description of Artificial Sequence: Synthetic oligonucleotide
  Antisense strand to SEQ ID NO: 812856
aacuggaccagucuuaucu

SEQ ID NO: 812858 - RNA, 19 nt, Artificial Sequence
  Description of Artificial Sequence: Synthetic oligonucleotide
  Sense strand starting at position 377 of SEQ ID NO: 587712
acugguccaguuggaauua

SEQ ID NO: 812859 - RNA, 19 nt, Artificial Sequence
  Description of Artificial Sequence: Synthetic oligonucleotide
  Antisense strand to SEQ ID NO: 812858
uaauuccaacuggaccagu

SEQ ID NO: 812860 - RNA, 19 nt, Artificial Sequence
  Description of Artificial Sequence: Synthetic oligonucleotide
  Sense strand starting at position 497 of SEQ ID NO: 587712
ccaccaguacugugaaucu

SEQ ID NO: 812861 - RNA, 19 nt, Artificial Sequence
  Description of Artificial Sequence: Synthetic oligonucleotide
  Antisense strand to SEQ ID NO: 812860
agauucacaguacuggugg

SEQ ID NO: 812862 - RNA, 19 nt, Artificial Sequence
  Description of Artificial Sequence: Synthetic oligonucleotide
  Sense strand starting at position 537 of SEQ ID NO: 587712
uggucuaaguugccugaga

SEQ ID NO: 812863 - RNA, 19 nt, Artificial Sequence
  Description of Artificial Sequence: Synthetic oligonucleotide
  Antisense strand to SEQ ID NO: 812862
ucucaggcaacuuagacca

SEQ ID NO: 812864 - RNA, 19 nt, Artificial Sequence
  Description of Artificial Sequence: Synthetic oligonucleotide
  Sense strand starting at position 538 of SEQ ID NO: 587712
ggucuaaguugccugagaa

SEQ ID NO: 812865 - RNA, 19 nt, Artificial Sequence
  Description of Artificial Sequence: Synthetic oligonucleotide
  Antisense strand to SEQ ID NO: 812864
uucucaggcaacuuagacc

SEQ ID NO: 812866 - RNA, 19 nt, Artificial Sequence
  Description of Artificial Sequence: Synthetic oligonucleotide
  Sense strand starting at position 539 of SEQ ID NO: 587712
gucuaaguugccugagaaa

SEQ ID NO: 812867 - RNA, 19 nt, Artificial Sequence
  Description of Artificial Sequence: Synthetic oligonucleotide
  Antisense strand to SEQ ID NO: 812866
uuucucaggcaacuuagac

SEQ ID NO: 812868 - RNA, 19 nt, Artificial Sequence
  Description of Artificial Sequence: Synthetic oligonucleotide
  Sense strand starting at position 613 of SEQ ID NO: 587712
auguuagagaaaugcuuga

SEQ ID NO: 812869 - RNA, 19 nt, Artificial Sequence
  Description of Artificial Sequence: Synthetic oligonucleotide
  Antisense strand to SEQ ID NO: 812868
ucaagcauuucucuaacau

SEQ ID NO: 812870 - RNA, 19 nt, Artificial Sequence
  Description of Artificial Sequence: Synthetic oligonucleotide
  Sense strand starting at position 647 of SEQ ID NO: 587712
aaaugcaugucuccgguaa

SEQ ID NO: 812871 - RNA, 19 nt, Artificial Sequence
  Description of Artificial Sequence: Synthetic oligonucleotide
  Antisense strand to SEQ ID NO: 812870
uuaccggagacaugcauuu

SEQ ID NO: 812872 - RNA, 19 nt, Artificial Sequence
  Description of Artificial Sequence: Synthetic oligonucleotide
  Sense strand starting at position 648 of SEQ ID NO: 587712
aaugcaugucuccgguaaa

SEQ ID NO: 812873 - RNA, 19 nt, Artificial Sequence
  Description of Artificial Sequence: Synthetic oligonucleotide
  Antisense strand to SEQ ID NO: 812872
uuuaccggagacaugcauu

SEQ ID NO: 812874 - RNA, 19 nt, Artificial Sequence
  Description of Artificial Sequence: Synthetic oligonucleotide
  Sense strand starting at position 651 of SEQ ID NO: 587712
gcaugucuccgguaaauuc

SEQ ID NO: 812875 - RNA, 19 nt, Artificial Sequence
  Description of Artificial Sequence: Synthetic oligonucleotide
  Antisense strand to SEQ ID NO: 812874
gaauuuaccggagacaugc

SEQ ID NO: 812876 - RNA, 19 nt, Artificial Sequence
  Description of Artificial Sequence: Synthetic oligonucleotide
  Sense strand starting at position 679 of SEQ ID NO: 587712
auccaucagucacugauga

SEQ ID NO: 812877 - RNA, 19 nt, Artificial Sequence
  Description of Artificial Sequence: Synthetic oligonucleotide
  Antisense strand to SEQ ID NO: 812876
ucaucagugacugauggau

SEQ ID NO: 812878 - RNA, 19 nt, Artificial Sequence
  Description of Artificial Sequence: Synthetic oligonucleotide
  Sense strand starting at position 692 of SEQ ID NO: 587712
ugaugaguucugggaagug

SEQ ID NO: 812879 - RNA, 19 nt, Artificial Sequence
  Description of Artificial Sequence: Synthetic oligonucleotide
  Antisense strand to SEQ ID NO: 812878
cacuucccagaacucauca

SEQ ID NO: 812880 - RNA, 19 nt, Artificial Sequence
  Description of Artificial Sequence: Synthetic oligonucleotide
  Sense strand starting at position 843 of SEQ ID NO: 587712
gguucaacacgugguauuu

SEQ ID NO: 812881 - RNA, 19 nt, Artificial Sequence
  Description of Artificial Sequence: Synthetic oligonucleotide
  Antisense strand to SEQ ID NO: 812880
aaauaccacguguugaacc

SEQ ID NO: 812882 - RNA, 19 nt, Artificial Sequence
  Description of Artificial Sequence: Synthetic oligonucleotide
  Sense strand starting at position 1035 of SEQ ID NO: 587712
gcgucaucacccuaaaguu

SEQ ID NO: 812883 - RNA, 19 nt, Artificial Sequence
  Description of Artificial Sequence: Synthetic oligonucleotide
  Antisense strand to SEQ ID NO: 812882
aacuuuagggugaugacgc

SEQ ID NO: 812884 - RNA, 19 nt, Artificial Sequence
  Description of Artificial Sequence: Synthetic oligonucleotide
  Sense strand starting at position 1352 of SEQ ID NO: 587712
gggugaucaugucccugca

SEQ ID NO: 812885 - RNA, 19 nt, Artificial Sequence
  Description of Artificial Sequence: Synthetic oligonucleotide
  Antisense strand to SEQ ID NO: 812884
ugcagggacaugaucaccc

SEQ ID NO: 812886 - RNA, 19 nt, Artificial Sequence
  Description of Artificial Sequence: Synthetic oligonucleotide
  Sense strand starting at position 1354 of SEQ ID NO: 587712
gugaucaugucccugcaga

SEQ ID NO: 812887 - RNA, 19 nt, Artificial Sequence
  Description of Artificial Sequence: Synthetic oligonucleotide
  Antisense strand to SEQ ID NO: 812886
ucugcagggacaugaucac

SEQ ID NO: 812888 - RNA, 19 nt, Artificial Sequence
  Description of Artificial Sequence: Synthetic oligonucleotide
  Sense strand starting at position 1529 of SEQ ID NO: 587712
cgaccuuuccgugagagga

SEQ ID NO: 812889 - RNA, 19 nt, Artificial Sequence
  Description of Artificial Sequence: Synthetic oligonucleotide
  Antisense strand to SEQ ID NO: 812888
uccucucacggaaaggucg

SEQ ID NO: 812890 - RNA, 19 nt, Artificial Sequence
  Description of Artificial Sequence: Synthetic oligonucleotide
  Sense strand starting at position 2909 of SEQ ID NO: 587712
uggucaaaguggcuuuaau

SEQ ID NO: 812891 - RNA, 19 nt, Artificial Sequence
  Description of Artificial Sequence: Synthetic oligonucleotide
  Antisense strand to SEQ ID NO: 812890
auuaaagccacuuugacca

SEQ ID NO: 812892 - RNA, 19 nt, Artificial Sequence
  Description of Artificial Sequence: Synthetic oligonucleotide
  Sense strand starting at position 2920 of SEQ ID NO: 587712
gcuuuaauuugggauagcu

SEQ ID NO: 812893 - RNA, 19 nt, Artificial Sequence
  Description of Artificial Sequence: Synthetic oligonucleotide
  Antisense strand to SEQ ID NO: 812892
agcuaucccaaauuaaagc

SEQ ID NO: 812894 - RNA, 19 nt, Artificial Sequence
  Description of Artificial Sequence: Synthetic oligonucleotide
  Sense strand starting at position 2947 of SEQ ID NO: 587712
ggucuuuggucacuucuua

SEQ ID NO: 812895 - RNA, 19 nt, Artificial Sequence
  Description of Artificial Sequence: Synthetic oligonucleotide
  Antisense strand to SEQ ID NO: 812894
uaagaagugaccaaagacc

SEQ ID NO: 812896 - RNA, 19 nt, Artificial Sequence
  Description of Artificial Sequence: Synthetic oligonucleotide
  Sense strand starting at position 2972 of SEQ ID NO: 587712
ggugcuaggcuggaaucau

SEQ ID NO: 812897 - RNA, 19 nt, Artificial Sequence
  Description of Artificial Sequence: Synthetic oligonucleotide
  Antisense strand to SEQ ID NO: 812896
augauuccagccuagcacc

SEQ ID NO: 812898 - RNA, 19 nt, Artificial Sequence
  Description of Artificial Sequence: Synthetic oligonucleotide
  Sense strand starting at position 3008 of SEQ ID NO: 587712
gccagacauuucuuggcga

SEQ ID NO: 812899 - RNA, 19 nt, Artificial Sequence
  Description of Artificial Sequence: Synthetic oligonucleotide
  Antisense strand to SEQ ID NO: 812898
ucgccaagaaaugucuggc

SEQ ID NO: 812900 - RNA, 19 nt, Artificial Sequence
  Description of Artificial Sequence: Synthetic oligonucleotide
  Sense strand starting at position 3012 of SEQ ID NO: 587712
gacauuucuuggcgauaga

SEQ ID NO: 812901 - RNA, 19 nt, Artificial Sequence
  Description of Artificial Sequence: Synthetic oligonucleotide
  Antisense strand to SEQ ID NO: 812900
ucuaucgccaagaaauguc

SEQ ID NO: 812902 - RNA, 19 nt, Artificial Sequence
  Description of Artificial Sequence: Synthetic oligonucleotide
  Sense strand starting at position 3201 of SEQ ID NO: 587712
ugcuaaauuuaacgaauug

SEQ ID NO: 812903 - RNA, 19 nt, Artificial Sequence
  Description of Artificial Sequence: Synthetic oligonucleotide
  Antisense strand to SEQ ID NO: 812902
caauucguuaaauuuagca

SEQ ID NO: 812904 - RNA, 19 nt, Artificial Sequence
  Description of Artificial Sequence: Synthetic oligonucleotide
  Sense strand starting at position 3234 of SEQ ID NO: 587712
cggcucuaggaaugacauu

SEQ ID NO: 812905 - RNA, 19 nt, Artificial Sequence
  Description of Artificial Sequence: Synthetic oligonucleotide
  Antisense strand to SEQ ID NO: 812904
aaugucauuccuagagccg

SEQ ID NO: 812906 - RNA, 19 nt, Artificial Sequence
  Description of Artificial Sequence: Synthetic oligonucleotide
  Sense strand starting at position 3305 of SEQ ID NO: 587712
aaagcacucgcguaaacau

SEQ ID NO: 812907 - RNA, 19 nt, Artificial Sequence
  Description of Artificial Sequence: Synthetic oligonucleotide
  Antisense strand to SEQ ID NO: 812906
auguuuacgcgagugcuuu

SEQ ID NO: 812908 - RNA, 19 nt, Artificial Sequence
  Description of Artificial Sequence: Synthetic oligonucleotide
  Sense strand starting at position 3330 of SEQ ID NO: 587712
auuuguuccugagagcaau

SEQ ID NO: 812909 - RNA, 19 nt, Artificial Sequence
  Description of Artificial Sequence: Synthetic oligonucleotide
  Antisense strand to SEQ ID NO: 812908
auugcucucaggaacaaau

SEQ ID NO: 812910 - RNA, 19 nt, Artificial Sequence
  Description of Artificial Sequence: Synthetic oligonucleotide
  Sense strand starting at position 3415 of SEQ ID NO: 587712
guuaaaugauugcccaauu

SEQ ID NO: 812911 - RNA, 19 nt, Artificial Sequence
  Description of Artificial Sequence: Synthetic oligonucleotide
  Antisense strand to SEQ ID NO: 812910
aauugggcaaucauuuaac

SEQ ID NO: 812912 - RNA, 19 nt, Artificial Sequence
  Description of Artificial Sequence: Synthetic oligonucleotide
  Sense strand starting at position 3458 of SEQ ID NO: 587712
auggaugucaacuguauug

SEQ ID NO: 812913 - RNA, 19 nt, Artificial Sequence
  Description of Artificial Sequence: Synthetic oligonucleotide
  Antisense strand to SEQ ID NO: 812912
caauacaguugacauccau

SEQ ID NO: 812914 - RNA, 19 nt, Artificial Sequence
  Description of Artificial Sequence: Synthetic oligonucleotide
  Sense strand starting at position 3460 of SEQ ID NO: 587712
ggaugucaacuguauugcu

SEQ ID NO: 812915 - RNA, 19 nt, Artificial Sequence
  Description of Artificial Sequence: Synthetic oligonucleotide
  Antisense strand to SEQ ID NO: 812914
agcaauacaguugacaucc

SEQ ID NO: 812916 - RNA, 19 nt, Artificial Sequence
  Description of Artificial Sequence: Synthetic oligonucleotide
  Sense strand starting at position 3469 of SEQ ID NO: 587712
cuguauugcuaggugugga

SEQ ID NO: 812917 - RNA, 19 nt, Artificial Sequence
  Description of Artificial Sequence: Synthetic oligonucleotide
  Antisense strand to SEQ ID NO: 812916
uccacaccuagcaauacag

SEQ ID NO: 812918 - RNA, 19 nt, Artificial Sequence
  Description of Artificial Sequence: Synthetic oligonucleotide
  Sense strand starting at position 3470 of SEQ ID NO: 587712
uguauugcuagguguggaa

SEQ ID NO: 812919 - RNA, 19 nt, Artificial Sequence
  Description of Artificial Sequence: Synthetic oligonucleotide
  Antisense strand to SEQ ID NO: 812918
uuccacaccuagcaauaca

SEQ ID NO: 812920 - RNA, 19 nt, Artificial Sequence
  Description of Artificial Sequence: Synthetic oligonucleotide
  Sense strand starting at position 3472 of SEQ ID NO: 587712
uauugcuagguguggaauu

SEQ ID NO: 812921 - RNA, 19 nt, Artificial Sequence
  Description of Artificial Sequence: Synthetic oligonucleotide
  Antisense strand to SEQ ID NO: 812920
aauuccacaccuagcaaua

SEQ ID NO: 812922 - RNA, 19 nt, Artificial Sequence
  Description of Artificial Sequence: Synthetic oligonucleotide
  Sense strand starting at position 3474 of SEQ ID NO: 587712
uugcuagguguggaauuaa

SEQ ID NO: 812923 - RNA, 19 nt, Artificial Sequence
  Description of Artificial Sequence: Synthetic oligonucleotide
  Antisense strand to SEQ ID NO: 812922
uuaauuccacaccuagcaa

SEQ ID NO: 812924 - RNA, 19 nt, Artificial Sequence
  Description of Artificial Sequence: Synthetic oligonucleotide
  Sense strand starting at position 117 of SEQ ID NO: 587713
cccugagcuuugguuuaaa

SEQ ID NO: 812925 - RNA, 19 nt, Artificial Sequence
  Description of Artificial Sequence: Synthetic oligonucleotide
  Antisense strand to SEQ ID NO: 812924
uuuaaaccaaagcucaggg

SEQ ID NO: 812926 - RNA, 19 nt, Artificial Sequence
  Description of Artificial Sequence: Synthetic oligonucleotide
  Sense strand starting at position 120 of SEQ ID NO: 587713
ugagcuuugguuuaaacaa

SEQ ID NO: 812927 - RNA, 19 nt, Artificial Sequence
  Description of Artificial Sequence: Synthetic oligonucleotide
  Antisense strand to SEQ ID NO: 812926
uuguuuaaaccaaagcuca

SEQ ID NO: 812928 - RNA, 19 nt, Artificial Sequence
  Description of Artificial Sequence: Synthetic oligonucleotide
  Sense strand starting at position 488 of SEQ ID NO: 587713
gauaauuaggcccaucagu

SEQ ID NO: 812929 - RNA, 19 nt, Artificial Sequence
  Description of Artificial Sequence: Synthetic oligonucleotide
  Antisense strand to SEQ ID NO: 812928
acugaugggccuaauuauc

SEQ ID NO: 812930 - RNA, 19 nt, Artificial Sequence
  Description of Artificial Sequence: Synthetic oligonucleotide
  Sense strand starting at position 530 of SEQ ID NO: 587713
auugucuggcaugaacaau

SEQ ID NO: 812931 - RNA, 19 nt, Artificial Sequence
  Description of Artificial Sequence: Synthetic oligonucleotide
  Antisense strand to SEQ ID NO: 812930
auuguucaugccagacaau

SEQ ID NO: 812932 - RNA, 19 nt, Artificial Sequence
  Description of Artificial Sequence: Synthetic oligonucleotide
  Sense strand starting at position 642 of SEQ ID NO: 587713
ggucuaauuccuggagcug

SEQ ID NO: 812933 - RNA, 19 nt, Artificial Sequence
  Description of Artificial Sequence: Synthetic oligonucleotide
  Antisense strand to SEQ ID NO: 812932
cagcuccaggaauuagacc

SEQ ID NO: 812934 - RNA, 19 nt, Artificial Sequence
  Description of Artificial Sequence: Synthetic oligonucleotide
  Sense strand starting at position 870 of SEQ ID NO: 587713
auaagaggugcaggacaau

SEQ ID NO: 812935 - RNA, 19 nt, Artificial Sequence
  Description of Artificial Sequence: Synthetic oligonucleotide
  Antisense strand to SEQ ID NO: 812934
auuguccugcaccucuuau

SEQ ID NO: 812936 - RNA, 19 nt, Artificial Sequence
  Description of Artificial Sequence: Synthetic oligonucleotide
  Sense strand starting at position 926 of SEQ ID NO: 587713
ucuugagacuugccuacau

SEQ ID NO: 812937 - RNA, 19 nt, Artificial Sequence
  Description of Artificial Sequence: Synthetic oligonucleotide
  Antisense strand to SEQ ID NO: 812936
auguaggcaagucucaaga

SEQ ID NO: 812938 - RNA, 19 nt, Artificial Sequence
  Description of Artificial Sequence: Synthetic oligonucleotide
  Sense strand starting at position 928 of SEQ ID NO: 587713
uugagacuugccuacauuc

SEQ ID NO: 812939 - RNA, 19 nt, Artificial Sequence
  Description of Artificial Sequence: Synthetic oligonucleotide
  Antisense strand to SEQ ID NO: 812938
gaauguaggcaagucucaa

SEQ ID NO: 812940 - RNA, 19 nt, Artificial Sequence
  Description of Artificial Sequence: Synthetic oligonucleotide
  Sense strand starting at position 945 of SEQ ID NO: 587713
ucuuaaaguguaugaauuc

SEQ ID NO: 812941 - RNA, 19 nt, Artificial Sequence
  Description of Artificial Sequence: Synthetic oligonucleotide
  Antisense strand to SEQ ID NO: 812940
gaauucauacacuuuaaga

SEQ ID NO: 812942 - RNA, 19 nt, Artificial Sequence
  Description of Artificial Sequence: Synthetic oligonucleotide
  Sense strand starting at position 1123 of SEQ ID NO: 587713
aaagaaauggcucgcccaa

SEQ ID NO: 812943 - RNA, 19 nt, Artificial Sequence
  Description of Artificial Sequence: Synthetic oligonucleotide
  Antisense strand to SEQ ID NO: 812942
uugggcgagccauuucuuu

SEQ ID NO: 812944 - RNA, 19 nt, Artificial Sequence
  Description of Artificial Sequence: Synthetic oligonucleotide
  Sense strand starting at position 1271 of SEQ ID NO: 587713
gucgaaaugcccuaggagu

SEQ ID NO: 812945 - RNA, 19 nt, Artificial Sequence
  Description of Artificial Sequence: Synthetic oligonucleotide
  Antisense strand to SEQ ID NO: 812944
acuccuagggcauuucgac

SEQ ID NO: 812946 - RNA, 19 nt, Artificial Sequence
  Description of Artificial Sequence: Synthetic oligonucleotide
  Sense strand starting at position 2233 of SEQ ID NO: 587713
gguugaacuugucccagga

SEQ ID NO: 812947 - RNA, 19 nt, Artificial Sequence
  Description of Artificial Sequence: Synthetic oligonucleotide
  Antisense strand to SEQ ID NO: 812946
uccugggacaaguucaacc

SEQ ID NO: 812948 - RNA, 19 nt, Artificial Sequence
  Description of Artificial Sequence: Synthetic oligonucleotide
  Sense strand starting at position 2273 of SEQ ID NO: 587713
accguuuaagcgguccuua

SEQ ID NO: 812949 - RNA, 19 nt, Artificial Sequence
  Description of Artificial Sequence: Synthetic oligonucleotide
  Antisense strand to SEQ ID NO: 812948
uaaggaccgcuuaaacggu

SEQ ID NO: 812950 - RNA, 19 nt, Artificial Sequence
  Description of Artificial Sequence: Synthetic oligonucleotide
  Sense strand starting at position 2274 of SEQ ID NO: 587713
ccguuuaagcgguccuuaa

SEQ ID NO: 812951 - RNA, 19 nt, Artificial Sequence
  Description of Artificial Sequence: Synthetic oligonucleotide
  Antisense strand to SEQ ID NO: 812950
uuaaggaccgcuuaaacgg

SEQ ID NO: 812952 - RNA, 19 nt, Artificial Sequence
  Description of Artificial Sequence: Synthetic oligonucleotide
  Sense strand starting at position 2481 of SEQ ID NO: 587713
agguaucaguagguaucua

SEQ ID NO: 812953 - RNA, 19 nt, Artificial Sequence
  Description of Artificial Sequence: Synthetic oligonucleotide
  Antisense strand to SEQ ID NO: 812952
uagauaccuacugauaccu

SEQ ID NO: 812954 - RNA, 19 nt, Artificial Sequence
  Description of Artificial Sequence: Synthetic oligonucleotide
  Sense strand starting at position 2482 of SEQ ID NO: 587713
gguaucaguagguaucuaa

SEQ ID NO: 812955 - RNA, 19 nt, Artificial Sequence
  Description of Artificial Sequence: Synthetic oligonucleotide
  Antisense strand to SEQ ID NO: 812954
uuagauaccuacugauacc

SEQ ID NO: 812956 - RNA, 19 nt, Artificial Sequence
  Description of Artificial Sequence: Synthetic oligonucleotide
  Sense strand starting at position 2485 of SEQ ID NO: 587713
aucaguagguaucuaaaga

SEQ ID NO: 812957 - RNA, 19 nt, Artificial Sequence
  Description of Artificial Sequence: Synthetic oligonucleotide
  Antisense strand to SEQ ID NO: 812956
ucuuuagauaccuacugau

SEQ ID NO: 812958 - RNA, 19 nt, Artificial Sequence
  Description of Artificial Sequence: Synthetic oligonucleotide
  Sense strand starting at position 2585 of SEQ ID NO: 587713
uucaguaggccugggauaa

SEQ ID NO: 812959 - RNA, 19 nt, Artificial Sequence
  Description of Artificial Sequence: Synthetic oligonucleotide
  Antisense strand to SEQ ID NO: 812958
uuaucccaggccuacugaa

SEQ ID NO: 812960 - RNA, 19 nt, Artificial Sequence
  Description of Artificial Sequence: Synthetic oligonucleotide
  Sense strand starting at position 2586 of SEQ ID NO: 587713
ucaguaggccugggauaau

SEQ ID NO: 812961 - RNA, 19 nt, Artificial Sequence
  Description of Artificial Sequence: Synthetic oligonucleotide
  Antisense strand to SEQ ID NO: 812960
auuaucccaggccuacuga

SEQ ID NO: 812962 - RNA, 19 nt, Artificial Sequence
  Description of Artificial Sequence: Synthetic oligonucleotide
  Sense strand starting at position 2622 of SEQ ID NO: 587713
uaacaagcucucggaggau

SEQ ID NO: 812963 - RNA, 19 nt, Artificial Sequence
  Description of Artificial Sequence: Synthetic oligonucleotide
  Antisense strand to SEQ ID NO: 812962
auccuccgagagcuuguua

SEQ ID NO: 812964 - RNA, 19 nt, Artificial Sequence
  Description of Artificial Sequence: Synthetic oligonucleotide
  Sense strand starting at position 2970 of SEQ ID NO: 587713
gacaucugacuuugaguca

SEQ ID NO: 812965 - RNA, 19 nt, Artificial Sequence
  Description of Artificial Sequence: Synthetic oligonucleotide
  Antisense strand to SEQ ID NO: 812964
ugacucaaagucagauguc

SEQ ID NO: 812966 - RNA, 19 nt, Artificial Sequence
  Description of Artificial Sequence: Synthetic oligonucleotide
  Sense strand starting at position 3005 of SEQ ID NO: 587713
gggugcuuuaucugacuag

SEQ ID NO: 812967 - RNA, 19 nt, Artificial Sequence
  Description of Artificial Sequence: Synthetic oligonucleotide
  Antisense strand to SEQ ID NO: 812966
cuagucagauaaagcaccc

SEQ ID NO: 812968 - RNA, 19 nt, Artificial Sequence
  Description of Artificial Sequence: Synthetic oligonucleotide
  Sense strand starting at position 3045 of SEQ ID NO: 587713
augcauuacuuagcaagaa

SEQ ID NO: 812969 - RNA, 19 nt, Artificial Sequence
  Description of Artificial Sequence: Synthetic oligonucleotide
  Antisense strand to SEQ ID NO: 812968
uucuugcuaaguaaugcau

SEQ ID NO: 812970 - RNA, 19 nt, Artificial Sequence
  Description of Artificial Sequence: Synthetic oligonucleotide
  Sense strand starting at position 3104 of SEQ ID NO: 587713
auugaacacucguuacaca

SEQ ID NO: 812971 - RNA, 19 nt, Artificial Sequence
  Description of Artificial Sequence: Synthetic oligonucleotide
  Antisense strand to SEQ ID NO: 812970
uguguaacgaguguucaau

SEQ ID NO: 812972 - RNA, 19 nt, Artificial Sequence
  Description of Artificial Sequence: Synthetic oligonucleotide
  Sense strand starting at position 3105 of SEQ ID NO: 587713
uugaacacucguuacacau

SEQ ID NO: 812973 - RNA, 19 nt, Artificial Sequence
  Description of Artificial Sequence: Synthetic oligonucleotide
  Antisense strand to SEQ ID NO: 812972
auguguaacgaguguucaa

SEQ ID NO: 812974 - RNA, 19 nt, Artificial Sequence
  Description of Artificial Sequence: Synthetic oligonucleotide
  Sense strand starting at position 3192 of SEQ ID NO: 587713
uggaguaagggauguuguu

SEQ ID NO: 812975 - RNA, 19 nt, Artificial Sequence
  Description of Artificial Sequence: Synthetic oligonucleotide
  Antisense strand to SEQ ID NO: 812974
aacaacaucccuuacucca

SEQ ID NO: 812976 - RNA, 19 nt, Artificial Sequence
  Description of Artificial Sequence: Synthetic oligonucleotide
  Sense strand starting at position 3205 of SEQ ID NO: 587713
guuguuagugugucgcaga

SEQ ID NO: 812977 - RNA, 19 nt, Artificial Sequence
  Description of Artificial Sequence: Synthetic oligonucleotide
  Antisense strand to SEQ ID NO: 812976
ucugcgacacacuaacaac

SEQ ID NO: 812978 - RNA, 19 nt, Artificial Sequence
  Description of Artificial Sequence: Synthetic oligonucleotide
  Sense strand starting at position 3210 of SEQ ID NO: 587713
uagugugucgcagagggaa

SEQ ID NO: 812979 - RNA, 19 nt, Artificial Sequence
  Description of Artificial Sequence: Synthetic oligonucleotide
  Antisense strand to SEQ ID NO: 812978
uucccucugcgacacacua

SEQ ID NO: 812980 - RNA, 19 nt, Artificial Sequence
  Description of Artificial Sequence: Synthetic oligonucleotide
  Sense strand starting at position 3247 of SEQ ID NO: 587713
aguuuagacucagccuaca

SEQ ID NO: 812981 - RNA, 19 nt, Artificial Sequence
  Description of Artificial Sequence: Synthetic oligonucleotide
  Antisense strand to SEQ ID NO: 812980
uguaggcugagucuaaacu

SEQ ID NO: 812982 - RNA, 19 nt, Artificial Sequence
  Description of Artificial Sequence: Synthetic oligonucleotide
  Sense strand starting at position 3336 of SEQ ID NO: 587713
aaacucagguguuuaagaa

SEQ ID NO: 812983 - RNA, 19 nt, Artificial Sequence
  Description of Artificial Sequence: Synthetic oligonucleotide
  Antisense strand to SEQ ID NO: 812982
uucuuaaacaccugaguuu

SEQ ID NO: 812984 - RNA, 19 nt, Artificial Sequence
  Description of Artificial Sequence: Synthetic oligonucleotide
  Sense strand starting at position 3379 of SEQ ID NO: 587713
acguuaccucacugaaauu

SEQ ID NO: 812985 - RNA, 19 nt, Artificial Sequence
  Description of Artificial Sequence: Synthetic oligonucleotide
  Antisense strand to SEQ ID NO: 812984
aauuucagugagguaacgu

SEQ ID NO: 812986 - RNA, 19 nt, Artificial Sequence
  Description of Artificial Sequence: Synthetic oligonucleotide
  Sense strand starting at position 3406 of SEQ ID NO: 587713
gucucuuaaguugaauaau

SEQ ID NO: 812987 - RNA, 19 nt, Artificial Sequence
  Description of Artificial Sequence: Synthetic oligonucleotide
  Antisense strand to SEQ ID NO: 812986
auuauucaacuuaagagac

SEQ ID NO: 812988 - RNA, 19 nt, Artificial Sequence
  Description of Artificial Sequence: Synthetic oligonucleotide
  Sense strand starting at position 3468 of SEQ ID NO: 587713
cuggacaugaguugacuaa

SEQ ID NO: 812989 - RNA, 19 nt, Artificial Sequence
  Description of Artificial Sequence: Synthetic oligonucleotide
  Antisense strand to SEQ ID NO: 812988
uuagucaacucauguccag

SEQ ID NO: 812990 - RNA, 19 nt, Artificial Sequence
  Description of Artificial Sequence: Synthetic oligonucleotide
  Sense strand starting at position 3531 of SEQ ID NO: 587713
cuucuacaacucuggagaa

SEQ ID NO: 812991 - RNA, 19 nt, Artificial Sequence
  Description of Artificial Sequence: Synthetic oligonucleotide
  Antisense strand to SEQ ID NO: 812990
uucuccagaguuguagaag

SEQ ID NO: 812992 - RNA, 19 nt, Artificial Sequence
  Description of Artificial Sequence: Synthetic oligonucleotide
  Sense strand starting at position 3698 of SEQ ID NO: 587713
aggauacacuuagaacaaa

SEQ ID NO: 812993 - RNA, 19 nt, Artificial Sequence
  Description of Artificial Sequence: Synthetic oligonucleotide
  Antisense strand to SEQ ID NO: 812992
uuuguucuaaguguauccu

SEQ ID NO: 812994 - RNA, 19 nt, Artificial Sequence
  Description of Artificial Sequence: Synthetic oligonucleotide
  Sense strand starting at position 3775 of SEQ ID NO: 587713
aggaguuugaagggcaaua

SEQ ID NO: 812995 - RNA, 19 nt, Artificial Sequence
  Description of Artificial Sequence: Synthetic oligonucleotide
  Antisense strand to SEQ ID NO: 812994
uauugcccuucaaacuccu

SEQ ID NO: 812996 - RNA, 19 nt, Artificial Sequence
  Description of Artificial Sequence: Synthetic oligonucleotide
  Sense strand starting at position 3797 of SEQ ID NO: 587713
acguuaucuggugacaagu

SEQ ID NO: 812997 - RNA, 19 nt, Artificial Sequence
  Description of Artificial Sequence: Synthetic oligonucleotide
  Antisense strand to SEQ ID NO: 812996
acuugucaccagauaacgu

SEQ ID NO: 812998 - RNA, 19 nt, Artificial Sequence
  Description of Artificial Sequence: Synthetic oligonucleotide
  Sense strand starting at position 3803 of SEQ ID NO: 587713
ucuggugacaaguguaauu

SEQ ID NO: 812999 - RNA, 19 nt, Artificial Sequence
  Description of Artificial Sequence: Synthetic oligonucleotide
  Antisense strand to SEQ ID NO: 812998
aauuacacuugucaccaga

SEQ ID NO: 813000 - RNA, 19 nt, Artificial Sequence
  Description of Artificial Sequence: Synthetic oligonucleotide
  Sense strand starting at position 3808 of SEQ ID NO: 587713
ugacaaguguaauuaccau

SEQ ID NO: 813001 - RNA, 19 nt, Artificial Sequence
  Description of Artificial Sequence: Synthetic oligonucleotide
  Antisense strand to SEQ ID NO: 813000
augguaauuacacuuguca

SEQ ID NO: 813002 - RNA, 19 nt, Artificial Sequence
  Description of Artificial Sequence: Synthetic oligonucleotide
  Sense strand starting at position 3851 of SEQ ID NO: 587713
cuaagugauuuagacaaau

SEQ ID NO: 813003 - RNA, 19 nt, Artificial Sequence
  Description of Artificial Sequence: Synthetic oligonucleotide
  Antisense strand to SEQ ID NO: 813002
auuugucuaaaucacuuag

SEQ ID NO: 813004 - RNA, 19 nt, Artificial Sequence
  Description of Artificial Sequence: Synthetic oligonucleotide
  Sense strand starting at position 7 of SEQ ID NO: 587714
caggaaagguacuuugagu

SEQ ID NO: 813005 - RNA, 19 nt, Artificial Sequence
  Description of Artificial Sequence: Synthetic oligonucleotide
  Antisense strand to SEQ ID NO: 813004
acucaaaguaccuuuccug

SEQ ID NO: 813006 - RNA, 19 nt, Artificial Sequence
  Description of Artificial Sequence: Synthetic oligonucleotide
  Sense strand starting at position 84 of SEQ ID NO: 587714
ccagucauauccgguccuu

SEQ ID NO: 813007 - RNA, 19 nt, Artificial Sequence
  Description of Artificial Sequence: Synthetic oligonucleotide
  Antisense strand to SEQ ID NO: 813006
aaggaccggauaugacugg

SEQ ID NO: 813008 - RNA, 19 nt, Artificial Sequence
  Description of Artificial Sequence: Synthetic oligonucleotide
  Sense strand starting at position 135 of SEQ ID NO: 587714
gcaagaagguccucauggu

SEQ ID NO: 813009 - RNA, 19 nt, Artificial Sequence
  Description of Artificial Sequence: Synthetic oligonucleotide
  Antisense strand to SEQ ID NO: 813008
accaugaggaccuucuugc

SEQ ID NO: 813010 - RNA, 19 nt, Artificial Sequence
  Description of Artificial Sequence: Synthetic oligonucleotide
  Sense strand starting at position 311 of SEQ ID NO: 587714
uggugaguccauggcaauu

SEQ ID NO: 813011 - RNA, 19 nt, Artificial Sequence
  Description of Artificial Sequence: Synthetic oligonucleotide
  Antisense strand to SEQ ID NO: 813010
aauugccauggacucacca

SEQ ID NO: 813012 - RNA, 19 nt, Artificial Sequence
  Description of Artificial Sequence: Synthetic oligonucleotide
  Sense strand starting at position 560 of SEQ ID NO: 587714
gccagagccuguugucaua

SEQ ID NO: 813013 - RNA, 19 nt, Artificial Sequence
  Description of Artificial Sequence: Synthetic oligonucleotide
  Antisense strand to SEQ ID NO: 813012
uaugacaacaggcucuggc

SEQ ID NO: 813014 - RNA, 19 nt, Artificial Sequence
  Description of Artificial Sequence: Synthetic oligonucleotide
  Sense strand starting at position 562 of SEQ ID NO: 587714
cagagccuguugucauaau

SEQ ID NO: 813015 - RNA, 19 nt, Artificial Sequence
  Description of Artificial Sequence: Synthetic oligonucleotide
  Antisense strand to SEQ ID NO: 813014
auuaugacaacaggcucug

SEQ ID NO: 813016 - RNA, 19 nt, Artificial Sequence
  Description of Artificial Sequence: Synthetic oligonucleotide
  Sense strand starting at position 641 of SEQ ID NO: 587714
gccagagcccauugucaca

SEQ ID NO: 813017 - RNA, 19 nt, Artificial Sequence
  Description of Artificial Sequence: Synthetic oligonucleotide
  Antisense strand to SEQ ID NO: 813016
ugugacaaugggcucuggc

SEQ ID NO: 813018 - RNA, 19 nt, Artificial Sequence
  Description of Artificial Sequence: Synthetic oligonucleotide
  Sense strand starting at position 881 of SEQ ID NO: 587714
cagaaagccugucagauuu

SEQ ID NO: 813019 - RNA, 19 nt, Artificial Sequence
  Description of Artificial Sequence: Synthetic oligonucleotide
  Antisense strand to SEQ ID NO: 813018
aaaucugacaggcuuucug

SEQ ID NO: 813020 - RNA, 19 nt, Artificial Sequence
  Description of Artificial Sequence: Synthetic oligonucleotide
  Sense strand starting at position 883 of SEQ ID NO: 587714
gaaagccugucagauuucu

SEQ ID NO: 813021 - RNA, 19 nt, Artificial Sequence
  Description of Artificial Sequence: Synthetic oligonucleotide
  Antisense strand to SEQ ID NO: 813020
agaaaucugacaggcuuuc

SEQ ID NO: 813022 - RNA, 19 nt, Artificial Sequence
  Description of Artificial Sequence: Synthetic oligonucleotide
  Sense strand starting at position 889 of SEQ ID NO: 587714
cugucagauuucugcagga

SEQ ID NO: 813023 - RNA, 19 nt, Artificial Sequence
  Description of Artificial Sequence: Synthetic oligonucleotide
  Antisense strand to SEQ ID NO: 813022
uccugcagaaaucugacag

SEQ ID NO: 813024 - RNA, 19 nt, Artificial Sequence
  Description of Artificial Sequence: Synthetic oligonucleotide
  Sense strand starting at position 1029 of SEQ ID NO: 587714
gcucauucuccagguacaa

SEQ ID NO: 813025 - RNA, 19 nt, Artificial Sequence
  Description of Artificial Sequence: Synthetic oligonucleotide
  Antisense strand to SEQ ID NO: 813024
uuguaccuggagaaugagc

SEQ ID NO: 813026 - RNA, 19 nt, Artificial Sequence
  Description of Artificial Sequence: Synthetic oligonucleotide
  Sense strand starting at position 1466 of SEQ ID NO: 587714
ccauguaguucgugaucug

SEQ ID NO: 813027 - RNA, 19 nt, Artificial Sequence
  Description of Artificial Sequence: Synthetic oligonucleotide
  Antisense strand to SEQ ID NO: 813026
cagaucacgaacuacaugg

SEQ ID NO: 813028 - RNA, 19 nt, Artificial Sequence
  Description of Artificial Sequence: Synthetic oligonucleotide
  Sense strand starting at position 2478 of SEQ ID NO: 587714
acccuuggucuccaagaau

SEQ ID NO: 813029 - RNA, 19 nt, Artificial Sequence
  Description of Artificial Sequence: Synthetic oligonucleotide
  Antisense strand to SEQ ID NO: 813028
auucuuggagaccaagggu

SEQ ID NO: 813030 - RNA, 19 nt, Artificial Sequence
  Description of Artificial Sequence: Synthetic oligonucleotide
  Sense strand starting at position 2587 of SEQ ID NO: 587714
caucauuggcaucgucaca

SEQ ID NO: 813031 - RNA, 19 nt, Artificial Sequence
  Description of Artificial Sequence: Synthetic oligonucleotide
  Antisense strand to SEQ ID NO: 813030
ugugacgaugccaaugaug

SEQ ID NO: 813032 - RNA, 19 nt, Artificial Sequence
  Description of Artificial Sequence: Synthetic oligonucleotide
  Sense strand starting at position 2592 of SEQ ID NO: 587714
uuggcaucgucacaaguaa

SEQ ID NO: 813033 - RNA, 19 nt, Artificial Sequence
  Description of Artificial Sequence: Synthetic oligonucleotide
  Antisense strand to SEQ ID NO: 813032
uuacuugugacgaugccaa

SEQ ID NO: 813034 - RNA, 19 nt, Artificial Sequence
  Description of Artificial Sequence: Synthetic oligonucleotide
  Sense strand starting at position 2656 of SEQ ID NO: 587714
cgcuaauccucaccacaga

SEQ ID NO: 813035 - RNA, 19 nt, Artificial Sequence
  Description of Artificial Sequence: Synthetic oligonucleotide
  Antisense strand to SEQ ID NO: 813034
ucuguggugaggauuagcg

SEQ ID NO: 813036 - RNA, 19 nt, Artificial Sequence
  Description of Artificial Sequence: Synthetic oligonucleotide
  Sense strand starting at position 2983 of SEQ ID NO: 587714
cagcaucucucgcuaggua

SEQ ID NO: 813037 - RNA, 19 nt, Artificial Sequence
  Description of Artificial Sequence: Synthetic oligonucleotide
  Antisense strand to SEQ ID NO: 813036
uaccuagcgagagaugcug

SEQ ID NO: 813038 - RNA, 19 nt, Artificial Sequence
  Description of Artificial Sequence: Synthetic oligonucleotide
  Sense strand starting at position 3005 of SEQ ID NO: 587714
aggcuaaccucuuaacuag

SEQ ID NO: 813039 - RNA, 19 nt, Artificial Sequence
  Description of Artificial Sequence: Synthetic oligonucleotide
  Antisense strand to SEQ ID NO: 813038
cuaguuaagagguuagccu

SEQ ID NO: 813040 - RNA, 19 nt, Artificial Sequence
  Description of Artificial Sequence: Synthetic oligonucleotide
  Sense strand starting at position 10 of SEQ ID NO: 587715
uugaguuuaaaguggucaa

SEQ ID NO: 813041 - RNA, 19 nt, Artificial Sequence
  Description of Artificial Sequence: Synthetic oligonucleotide
  Antisense strand to SEQ ID NO: 813040
uugaccacuuuaaacucaa

SEQ ID NO: 813042 - RNA, 19 nt, Artificial Sequence
  Description of Artificial Sequence: Synthetic oligonucleotide
  Sense strand starting at position 11 of SEQ ID NO: 587715
ugaguuuaaaguggucaag

SEQ ID NO: 813043 - RNA, 19 nt, Artificial Sequence
  Description of Artificial Sequence: Synthetic oligonucleotide
  Antisense strand to SEQ ID NO: 813042
cuugaccacuuuaaacuca

SEQ ID NO: 813044 - RNA, 19 nt, Artificial Sequence
  Description of Artificial Sequence: Synthetic oligonucleotide
  Sense strand starting at position 13 of SEQ ID NO: 587715
aguuuaaaguggucaagaa

SEQ ID NO: 813045 - RNA, 19 nt, Artificial Sequence
  Description of Artificial Sequence: Synthetic oligonucleotide
  Antisense strand to SEQ ID NO: 813044
uucuugaccacuuuaaacu

SEQ ID NO: 813046 - RNA, 19 nt, Artificial Sequence
  Description of Artificial Sequence: Synthetic oligonucleotide
  Sense strand starting at position 26 of SEQ ID NO: 587715
caagaaaggucuccuugag

SEQ ID NO: 813047 - RNA, 19 nt, Artificial Sequence
  Description of Artificial Sequence: Synthetic oligonucleotide
  Antisense strand to SEQ ID NO: 813046
cucaaggagaccuuucuug

SEQ ID NO: 813048 - RNA, 19 nt, Artificial Sequence
  Description of Artificial Sequence: Synthetic oligonucleotide
  Sense strand starting at position 89 of SEQ ID NO: 587715
uagugaaagucuuccagag

SEQ ID NO: 813049 - RNA, 19 nt, Artificial Sequence
  Description of Artificial Sequence: Synthetic oligonucleotide
  Antisense strand to SEQ ID NO: 813048
cucuggaagacuuucacua

SEQ ID NO: 813050 - RNA, 19 nt, Artificial Sequence
  Description of Artificial Sequence: Synthetic oligonucleotide
  Sense strand starting at position 211 of SEQ ID NO: 587715
gcaagucaaguagagcauu

SEQ ID NO: 813051 - RNA, 19 nt, Artificial Sequence
  Description of Artificial Sequence: Synthetic oligonucleotide
  Antisense strand to SEQ ID NO: 813050
aaugcucuacuugacuugc

SEQ ID NO: 813052 - RNA, 19 nt, Artificial Sequence
  Description of Artificial Sequence: Synthetic oligonucleotide
  Sense strand starting at position 214 of SEQ ID NO: 587715
agucaaguagagcauugua

SEQ ID NO: 813053 - RNA, 19 nt, Artificial Sequence
  Description of Artificial Sequence: Synthetic oligonucleotide
  Antisense strand to SEQ ID NO: 813052
uacaaugcucuacuugacu

SEQ ID NO: 813054 - RNA, 19 nt, Artificial Sequence
  Description of Artificial Sequence: Synthetic oligonucleotide
  Sense strand starting at position 260 of SEQ ID NO: 587715
uguagucacagucaagauu

SEQ ID NO: 813055 - RNA, 19 nt, Artificial Sequence
  Description of Artificial Sequence: Synthetic oligonucleotide
  Antisense strand to SEQ ID NO: 813054
aaucuugacugugacuaca

SEQ ID NO: 813056 - RNA, 19 nt, Artificial Sequence
  Description of Artificial Sequence: Synthetic oligonucleotide
  Sense strand starting at position 297 of SEQ ID NO: 587715
cagaaagcuguuggagagu

SEQ ID NO: 813057 - RNA, 19 nt, Artificial Sequence
  Description of Artificial Sequence: Synthetic oligonucleotide
  Antisense strand to SEQ ID NO: 813056
acucuccaacagcuuucug

SEQ ID NO: 813058 - RNA, 19 nt, Artificial Sequence
  Description of Artificial Sequence: Synthetic oligonucleotide
  Sense strand starting at position 328 of SEQ ID NO: 587715
ucaaauagguggguggaua

SEQ ID NO: 813059 - RNA, 19 nt, Artificial Sequence
  Description of Artificial Sequence: Synthetic oligonucleotide
  Antisense strand to SEQ ID NO: 813058
uauccacccaccuauuuga

SEQ ID NO: 813060 - RNA, 19 nt, Artificial Sequence
  Description of Artificial Sequence: Synthetic oligonucleotide
  Sense strand starting at position 400 of SEQ ID NO: 587715
cguuauuaaagccaagaga

SEQ ID NO: 813061 - RNA, 19 nt, Artificial Sequence
  Description of Artificial Sequence: Synthetic oligonucleotide
  Antisense strand to SEQ ID NO: 813060
ucucuuggcuuuaauaacg

SEQ ID NO: 813062 - RNA, 19 nt, Artificial Sequence
  Description of Artificial Sequence: Synthetic oligonucleotide
  Sense strand starting at position 472 of SEQ ID NO: 587715
ggcauccaagcaugagaaa

SEQ ID NO: 813063 - RNA, 19 nt, Artificial Sequence
  Description of Artificial Sequence: Synthetic oligonucleotide
  Antisense strand to SEQ ID NO: 813062
uuucucaugcuuggaugcc

SEQ ID NO: 813064 - RNA, 19 nt, Artificial Sequence
  Description of Artificial Sequence: Synthetic oligonucleotide
  Sense strand starting at position 473 of SEQ ID NO: 587715
gcauccaagcaugagaaau

SEQ ID NO: 813065 - RNA, 19 nt, Artificial Sequence
  Description of Artificial Sequence: Synthetic oligonucleotide
  Antisense strand to SEQ ID NO: 813064
auuucucaugcuuggaugc

SEQ ID NO: 813066 - RNA, 19 nt, Artificial Sequence
  Description of Artificial Sequence: Synthetic oligonucleotide
  Sense strand starting at position 565 of SEQ ID NO: 587715
aucuuaugaugagccuuau

SEQ ID NO: 813067 - RNA, 19 nt, Artificial Sequence
  Description of Artificial Sequence: Synthetic oligonucleotide
  Antisense strand to SEQ ID NO: 813066
auaaggcucaucauaagau

SEQ ID NO: 813068 - RNA, 19 nt, Artificial Sequence
  Description of Artificial Sequence: Synthetic oligonucleotide
  Sense strand starting at position 569 of SEQ ID NO: 587715
uaugaugagccuuaugagu

SEQ ID NO: 813069 - RNA, 19 nt, Artificial Sequence
  Description of Artificial Sequence: Synthetic oligonucleotide
  Antisense strand to SEQ ID NO: 813068
acucauaaggcucaucaua

SEQ ID NO: 813070 - RNA, 19 nt, Artificial Sequence
  Description of Artificial Sequence: Synthetic oligonucleotide
  Sense strand starting at position 604 of SEQ ID NO: 587715
gcucacucuacggaggauu

SEQ ID NO: 813071 - RNA, 19 nt, Artificial Sequence
  Description of Artificial Sequence: Synthetic oligonucleotide
  Antisense strand to SEQ ID NO: 813070
aauccuccguagagugagc

SEQ ID NO: 813072 - RNA, 19 nt, Artificial Sequence
  Description of Artificial Sequence: Synthetic oligonucleotide
  Sense strand starting at position 830 of SEQ ID NO: 587715
gcauuaacugcugacagau

SEQ ID NO: 813073 - RNA, 19 nt, Artificial Sequence
  Description of Artificial Sequence: Synthetic oligonucleotide
  Antisense strand to SEQ ID NO: 813072
aucugucagcaguuaaugc

SEQ ID NO: 813074 - RNA, 19 nt, Artificial Sequence
  Description of Artificial Sequence: Synthetic oligonucleotide
  Sense strand starting at position 945 of SEQ ID NO: 587715
aucacaagguucucaugaa

SEQ ID NO: 813075 - RNA, 19 nt, Artificial Sequence
  Description of Artificial Sequence: Synthetic oligonucleotide
  Antisense strand to SEQ ID NO: 813074
uucaugagaaccuugugau

SEQ ID NO: 813076 - RNA, 19 nt, Artificial Sequence
  Description of Artificial Sequence: Synthetic oligonucleotide
  Sense strand starting at position 1021 of SEQ ID NO: 587715
ggaugaccgugagcagaau

SEQ ID NO: 813077 - RNA, 19 nt, Artificial Sequence
  Description of Artificial Sequence: Synthetic oligonucleotide
  Antisense strand to SEQ ID NO: 813076
auucugcucacggucaucc

SEQ ID NO: 813078 - RNA, 19 nt, Artificial Sequence
  Description of Artificial Sequence: Synthetic oligonucleotide
  Sense strand starting at position 1022 of SEQ ID NO: 587715
gaugaccgugagcagaauu

SEQ ID NO: 813079 - RNA, 19 nt, Artificial Sequence
  Description of Artificial Sequence: Synthetic oligonucleotide
  Antisense strand to SEQ ID NO: 813078
aauucugcucacggucauc

SEQ ID NO: 813080 - RNA, 19 nt, Artificial Sequence
  Description of Artificial Sequence: Synthetic oligonucleotide
  Sense strand starting at position 1051 of SEQ ID NO: 587715
uggaauacguaagauauuu

SEQ ID NO: 813081 - RNA, 19 nt, Artificial Sequence
  Description of Artificial Sequence: Synthetic oligonucleotide
  Antisense strand to SEQ ID NO: 813080
aaauaucuuacguauucca

SEQ ID NO: 813082 - RNA, 19 nt, Artificial Sequence
  Description of Artificial Sequence: Synthetic oligonucleotide
  Sense strand starting at position 1577 of SEQ ID NO: 587715
ggaaaggucggaggugaaa

SEQ ID NO: 813083 - RNA, 19 nt, Artificial Sequence
  Description of Artificial Sequence: Synthetic oligonucleotide
  Antisense strand to SEQ ID NO: 813082
uuucaccuccgaccuuucc

SEQ ID NO: 813084 - RNA, 19 nt, Artificial Sequence
  Description of Artificial Sequence: Synthetic oligonucleotide
  Sense strand starting at position 1979 of SEQ ID NO: 587715
guguugaaugugucgugau

SEQ ID NO: 813085 - RNA, 19 nt, Artificial Sequence
  Description of Artificial Sequence: Synthetic oligonucleotide
  Antisense strand to SEQ ID NO: 813084
aucacgacacauucaacac

SEQ ID NO: 813086 - RNA, 19 nt, Artificial Sequence
  Description of Artificial Sequence: Synthetic oligonucleotide
  Sense strand starting at position 2045 of SEQ ID NO: 587715
aagacaaaugcguagcuua

SEQ ID NO: 813087 - RNA, 19 nt, Artificial Sequence
  Description of Artificial Sequence: Synthetic oligonucleotide
  Antisense strand to SEQ ID NO: 813086
uaagcuacgcauuugucuu

SEQ ID NO: 813088 - RNA, 19 nt, Artificial Sequence
  Description of Artificial Sequence: Synthetic oligonucleotide
  Sense strand starting at position 2072 of SEQ ID NO: 587715
ucaucuuuagccgagggaa

SEQ ID NO: 813089 - RNA, 19 nt, Artificial Sequence
  Description of Artificial Sequence: Synthetic oligonucleotide
  Antisense strand to SEQ ID NO: 813088
uucccucggcuaaagauga

SEQ ID NO: 813090 - RNA, 19 nt, Artificial Sequence
  Description of Artificial Sequence: Synthetic oligonucleotide
  Sense strand starting at position 2102 of SEQ ID NO: 587715
uuagaaauguugcuaacuc

SEQ ID NO: 813091 - RNA, 19 nt, Artificial Sequence
  Description of Artificial Sequence: Synthetic oligonucleotide
  Antisense strand to SEQ ID NO: 813090
gaguuagcaacauuucuaa

SEQ ID NO: 813092 - RNA, 19 nt, Artificial Sequence
  Description of Artificial Sequence: Synthetic oligonucleotide
  Sense strand starting at position 2163 of SEQ ID NO: 587715
acgauuauuuaggaacauc

SEQ ID NO: 813093 - RNA, 19 nt, Artificial Sequence
  Description of Artificial Sequence: Synthetic oligonucleotide
  Antisense strand to SEQ ID NO: 813092
gauguuccuaaauaaucgu

SEQ ID NO: 813094 - RNA, 19 nt, Artificial Sequence
  Description of Artificial Sequence: Synthetic oligonucleotide
  Sense strand starting at position 2339 of SEQ ID NO: 587715
uccauuaauguaggugaca

SEQ ID NO: 813095 - RNA, 19 nt, Artificial Sequence
  Description of Artificial Sequence: Synthetic oligonucleotide
  Antisense strand to SEQ ID NO: 813094
ugucaccuacauuaaugga

SEQ ID NO: 813096 - RNA, 19 nt, Artificial Sequence
  Description of Artificial Sequence: Synthetic oligonucleotide
  Sense strand starting at position 2340 of SEQ ID NO: 587715
ccauuaauguaggugacaa

SEQ ID NO: 813097 - RNA, 19 nt, Artificial Sequence
  Description of Artificial Sequence: Synthetic oligonucleotide
  Antisense strand to SEQ ID NO: 813096
uugucaccuacauuaaugg

SEQ ID NO: 813098 - RNA, 19 nt, Artificial Sequence
  Description of Artificial Sequence: Synthetic oligonucleotide
  Sense strand starting at position 2459 of SEQ ID NO: 587715
ugagccaagacguauaaau

SEQ ID NO: 813099 - RNA, 19 nt, Artificial Sequence
  Description of Artificial Sequence: Synthetic oligonucleotide
  Antisense strand to SEQ ID NO: 813098
auuuauacgucuuggcuca

SEQ ID NO: 813100 - RNA, 19 nt, Artificial Sequence
  Description of Artificial Sequence: Synthetic oligonucleotide
  Sense strand starting at position 2461 of SEQ ID NO: 587715
agccaagacguauaaauca

SEQ ID NO: 813101 - RNA, 19 nt, Artificial Sequence
  Description of Artificial Sequence: Synthetic oligonucleotide
  Antisense strand to SEQ ID NO: 813100
ugauuuauacgucuuggcu

SEQ ID NO: 813102 - RNA, 19 nt, Artificial Sequence
  Description of Artificial Sequence: Synthetic oligonucleotide
  Sense strand starting at position 2510 of SEQ ID NO: 587715
cacaguucuggaugaugca

SEQ ID NO: 813103 - RNA, 19 nt, Artificial Sequence
  Description of Artificial Sequence: Synthetic oligonucleotide
  Antisense strand to SEQ ID NO: 813102
ugcaucauccagaacugug

SEQ ID NO: 813104 - RNA, 19 nt, Artificial Sequence
  Description of Artificial Sequence: Synthetic oligonucleotide
  Sense strand starting at position 2926 of SEQ ID NO: 587715
ucuugaucauaugcuagau

SEQ ID NO: 813105 - RNA, 19 nt, Artificial Sequence
  Description of Artificial Sequence: Synthetic oligonucleotide
  Antisense strand to SEQ ID NO: 813104
aucuagcauaugaucaaga

SEQ ID NO: 813106 - RNA, 19 nt, Artificial Sequence
  Description of Artificial Sequence: Synthetic oligonucleotide
  Sense strand starting at position 3112 of SEQ ID NO: 587715
auaauuagccuguaaugag

SEQ ID NO: 813107 - RNA, 19 nt, Artificial Sequence
  Description of Artificial Sequence: Synthetic oligonucleotide
  Antisense strand to SEQ ID NO: 813106
cucauuacaggcuaauuau

SEQ ID NO: 813108 - RNA, 19 nt, Artificial Sequence
  Description of Artificial Sequence: Synthetic oligonucleotide
  Sense strand starting at position 3146 of SEQ ID NO: 587715
gaggucauccacuagugga

SEQ ID NO: 813109 - RNA, 19 nt, Artificial Sequence
  Description of Artificial Sequence: Synthetic oligonucleotide
  Antisense strand to SEQ ID NO: 813108
uccacuaguggaugaccuc

SEQ ID NO: 813110 - RNA, 19 nt, Artificial Sequence
  Description of Artificial Sequence: Synthetic oligonucleotide
  Sense strand starting at position 3380 of SEQ ID NO: 587715
aggcuuaagucuuuacaga

SEQ ID NO: 813111 - RNA, 19 nt, Artificial Sequence
  Description of Artificial Sequence: Synthetic oligonucleotide
  Antisense strand to SEQ ID NO: 813110
ucuguaaagacuuaagccu

SEQ ID NO: 813112 - RNA, 19 nt, Artificial Sequence
  Description of Artificial Sequence: Synthetic oligonucleotide
  Sense strand starting at position 3381 of SEQ ID NO: 587715
ggcuuaagucuuuacagaa

SEQ ID NO: 813113 - RNA, 19 nt, Artificial Sequence
  Description of Artificial Sequence: Synthetic oligonucleotide
  Antisense strand to SEQ ID NO: 813112
uucuguaaagacuuaagcc

SEQ ID NO: 813114 - RNA, 19 nt, Artificial Sequence
  Description of Artificial Sequence: Synthetic oligonucleotide
  Sense strand starting at position 3435 of SEQ ID NO: 587715
ccaugauaucagugggcca

SEQ ID NO: 813115 - RNA, 19 nt, Artificial Sequence
  Description of Artificial Sequence: Synthetic oligonucleotide
  Antisense strand to SEQ ID NO: 813114
uggcccacugauaucaugg

SEQ ID NO: 813116 - RNA, 19 nt, Artificial Sequence
  Description of Artificial Sequence: Synthetic oligonucleotide
  Sense strand starting at position 3788 of SEQ ID NO: 587715
gggugugauuuaguguguu

SEQ ID NO: 813117 - RNA, 19 nt, Artificial Sequence
  Description of Artificial Sequence: Synthetic oligonucleotide
  Antisense strand to SEQ ID NO: 813116
aacacacuaaaucacaccc

SEQ ID NO: 813118 - RNA, 19 nt, Artificial Sequence
  Description of Artificial Sequence: Synthetic oligonucleotide
  Sense strand starting at position 3969 of SEQ ID NO: 587715
gugaacacccugcauuauu

SEQ ID NO: 813119 - RNA, 19 nt, Artificial Sequence
  Description of Artificial Sequence: Synthetic oligonucleotide
  Antisense strand to SEQ ID NO: 813118
aauaaugcaggguguucac

SEQ ID NO: 813120 - RNA, 19 nt, Artificial Sequence
  Description of Artificial Sequence: Synthetic oligonucleotide
  Sense strand starting at position 5 of SEQ ID NO: 587716
gacagcaguguccaccaua

SEQ ID NO: 813121 - RNA, 19 nt, Artificial Sequence
  Description of Artificial Sequence: Synthetic oligonucleotide
  Antisense strand to SEQ ID NO: 813120
uaugguggacacugcuguc

SEQ ID NO: 813122 - RNA, 19 nt, Artificial Sequence
  Description of Artificial Sequence: Synthetic oligonucleotide
  Sense strand starting at position 66 of SEQ ID NO: 587716
augucaaauuaccuguuua

SEQ ID NO: 813123 - RNA, 19 nt, Artificial Sequence
  Description of Artificial Sequence: Synthetic oligonucleotide
  Antisense strand to SEQ ID NO: 813122
uaaacagguaauuugacau

SEQ ID NO: 813124 - RNA, 19 nt, Artificial Sequence
  Description of Artificial Sequence: Synthetic oligonucleotide
  Sense strand starting at position 182 of SEQ ID NO: 587716
uuacuuacgcuaugaaaua

SEQ ID NO: 813125 - RNA, 19 nt, Artificial Sequence
  Description of Artificial Sequence: Synthetic oligonucleotide
  Antisense strand to SEQ ID NO: 813124
uauuucauagcguaaguaa

SEQ ID NO: 813126 - RNA, 19 nt, Artificial Sequence
  Description of Artificial Sequence: Synthetic oligonucleotide
  Sense strand starting at position 225 of SEQ ID NO: 587716
ggucuaaaguauguuuaga

SEQ ID NO: 813127 - RNA, 19 nt, Artificial Sequence
  Description of Artificial Sequence: Synthetic oligonucleotide
  Antisense strand to SEQ ID NO: 813126
ucuaaacauacuuuagacc

SEQ ID NO: 813128 - RNA, 19 nt, Artificial Sequence
  Description of Artificial Sequence: Synthetic oligonucleotide
  Sense strand starting at position 388 of SEQ ID NO: 587716
uucggaacaguguaacaaa

SEQ ID NO: 813129 - RNA, 19 nt, Artificial Sequence
  Description of Artificial Sequence: Synthetic oligonucleotide
  Antisense strand to SEQ ID NO: 813128
uuuguuacacuguuccgaa

SEQ ID NO: 813130 - RNA, 19 nt, Artificial Sequence
  Description of Artificial Sequence: Synthetic oligonucleotide
  Sense strand starting at position 403 of SEQ ID NO: 587716
caaagaugguuagcccuaa

SEQ ID NO: 813131 - RNA, 19 nt, Artificial Sequence
  Description of Artificial Sequence: Synthetic oligonucleotide
  Antisense strand to SEQ ID NO: 813130
uuagggcuaaccaucuuug

SEQ ID NO: 813132 - RNA, 19 nt, Artificial Sequence
  Description of Artificial Sequence: Synthetic oligonucleotide
  Sense strand starting at position 407 of SEQ ID NO: 587716
gaugguuagcccuaacuau

SEQ ID NO: 813133 - RNA, 19 nt, Artificial Sequence
  Description of Artificial Sequence: Synthetic oligonucleotide
  Antisense strand to SEQ ID NO: 813132
auaguuagggcuaaccauc

SEQ ID NO: 813134 - RNA, 19 nt, Artificial Sequence
  Description of Artificial Sequence: Synthetic oligonucleotide
  Sense strand starting at position 429 of SEQ ID NO: 587716
uuaauagucuaugccaaag

SEQ ID NO: 813135 - RNA, 19 nt, Artificial Sequence
  Description of Artificial Sequence: Synthetic oligonucleotide
  Antisense strand to SEQ ID NO: 813134
cuuuggcauagacuauuaa

SEQ ID NO: 813136 - RNA, 19 nt, Artificial Sequence
  Description of Artificial Sequence: Synthetic oligonucleotide
  Sense strand starting at position 446 of SEQ ID NO: 587716
aguuuacuccucugauuga

SEQ ID NO: 813137 - RNA, 19 nt, Artificial Sequence
  Description of Artificial Sequence: Synthetic oligonucleotide
  Antisense strand to SEQ ID NO: 813136
ucaaucagaggaguaaacu

SEQ ID NO: 813138 - RNA, 19 nt, Artificial Sequence
  Description of Artificial Sequence: Synthetic oligonucleotide
  Sense strand starting at position 455 of SEQ ID NO: 587716
cucugauugaucgagcuuc

SEQ ID NO: 813139 - RNA, 19 nt, Artificial Sequence
  Description of Artificial Sequence: Synthetic oligonucleotide
  Antisense strand to SEQ ID NO: 813138
gaagcucgaucaaucagag

SEQ ID NO: 813140 - RNA, 19 nt, Artificial Sequence
  Description of Artificial Sequence: Synthetic oligonucleotide
  Sense strand starting at position 801 of SEQ ID NO: 587716
aaccgucacccguaagaca

SEQ ID NO: 813141 - RNA, 19 nt, Artificial Sequence
  Description of Artificial Sequence: Synthetic oligonucleotide
  Antisense strand to SEQ ID NO: 813140
ugucuuacgggugacgguu

SEQ ID NO: 813142 - RNA, 19 nt, Artificial Sequence
  Description of Artificial Sequence: Synthetic oligonucleotide
  Sense strand starting at position 897 of SEQ ID NO: 587716
ggcugagggaugcaaaguu

SEQ ID NO: 813143 - RNA, 19 nt, Artificial Sequence
  Description of Artificial Sequence: Synthetic oligonucleotide
  Antisense strand to SEQ ID NO: 813142
aacuuugcaucccucagcc

SEQ ID NO: 813144 - RNA, 19 nt, Artificial Sequence
  Description of Artificial Sequence: Synthetic oligonucleotide
  Sense strand starting at position 1062 of SEQ ID NO: 587716
gggcaauaauuacuccauu

SEQ ID NO: 813145 - RNA, 19 nt, Artificial Sequence
  Description of Artificial Sequence: Synthetic oligonucleotide
  Antisense strand to SEQ ID NO: 813144
aauggaguaauuauugccc

SEQ ID NO: 813146 - RNA, 19 nt, Artificial Sequence
  Description of Artificial Sequence: Synthetic oligonucleotide
  Sense strand starting at position 1267 of SEQ ID NO: 587716
aaggccuguuucucuaaga

SEQ ID NO: 813147 - RNA, 19 nt, Artificial Sequence
  Description of Artificial Sequence: Synthetic oligonucleotide
  Antisense strand to SEQ ID NO: 813146
ucuuagagaaacaggccuu

SEQ ID NO: 813148 - RNA, 19 nt, Artificial Sequence
  Description of Artificial Sequence: Synthetic oligonucleotide
  Sense strand starting at position 1268 of SEQ ID NO: 587716
aggccuguuucucuaagaa

SEQ ID NO: 813149 - RNA, 19 nt, Artificial Sequence
  Description of Artificial Sequence: Synthetic oligonucleotide
  Antisense strand to SEQ ID NO: 813148
uucuuagagaaacaggccu

SEQ ID NO: 813150 - RNA, 19 nt, Artificial Sequence
  Description of Artificial Sequence: Synthetic oligonucleotide
  Sense strand starting at position 1420 of SEQ ID NO: 587716
aagggaguccugcaaucac

SEQ ID NO: 813151 - RNA, 19 nt, Artificial Sequence
  Description of Artificial Sequence: Synthetic oligonucleotide
  Antisense strand to SEQ ID NO: 813150
gugauugcaggacucccuu

SEQ ID NO: 813152 - RNA, 19 nt, Artificial Sequence
  Description of Artificial Sequence: Synthetic oligonucleotide
  Sense strand starting at position 2028 of SEQ ID NO: 587716
gucgcuucuggcucuuuaa

SEQ ID NO: 813153 - RNA, 19 nt, Artificial Sequence
  Description of Artificial Sequence: Synthetic oligonucleotide
  Antisense strand to SEQ ID NO: 813152
uuaaagagccagaagcgac

SEQ ID NO: 813154 - RNA, 19 nt, Artificial Sequence
  Description of Artificial Sequence: Synthetic oligonucleotide
  Sense strand starting at position 2090 of SEQ ID NO: 587716
ggaacuauguaucccagaa

SEQ ID NO: 813155 - RNA, 19 nt, Artificial Sequence
  Description of Artificial Sequence: Synthetic oligonucleotide
  Antisense strand to SEQ ID NO: 813154
uucugggauacauaguucc

SEQ ID NO: 813156 - RNA, 19 nt, Artificial Sequence
  Description of Artificial Sequence: Synthetic oligonucleotide
  Sense strand starting at position 2431 of SEQ ID NO: 587716
gggauuguuccacggaagu

SEQ ID NO: 813157 - RNA, 19 nt, Artificial Sequence
  Description of Artificial Sequence: Synthetic oligonucleotide
  Antisense strand to SEQ ID NO: 813156
acuuccguggaacaauccc

SEQ ID NO: 813158 - RNA, 19 nt, Artificial Sequence
  Description of Artificial Sequence: Synthetic oligonucleotide
  Sense strand starting at position 2433 of SEQ ID NO: 587716
gauuguuccacggaaguua

SEQ ID NO: 813159 - RNA, 19 nt, Artificial Sequence
  Description of Artificial Sequence: Synthetic oligonucleotide
  Antisense strand to SEQ ID NO: 813158
uaacuuccguggaacaauc

SEQ ID NO: 813160 - RNA, 19 nt, Artificial Sequence
  Description of Artificial Sequence: Synthetic oligonucleotide
  Sense strand starting at position 2467 of SEQ ID NO: 587716
gucauuauguaucuacuga

SEQ ID NO: 813161 - RNA, 19 nt, Artificial Sequence
  Description of Artificial Sequence: Synthetic oligonucleotide
  Antisense strand to SEQ ID NO: 813160
ucaguagauacauaaugac

SEQ ID NO: 813162 - RNA, 19 nt, Artificial Sequence
  Description of Artificial Sequence: Synthetic oligonucleotide
  Sense strand starting at position 2475 of SEQ ID NO: 587716
guaucuacugagugagaga

SEQ ID NO: 813163 - RNA, 19 nt, Artificial Sequence
  Description of Artificial Sequence: Synthetic oligonucleotide
  Antisense strand to SEQ ID NO: 813162
ucucucacucaguagauac

SEQ ID NO: 813164 - RNA, 19 nt, Artificial Sequence
  Description of Artificial Sequence: Synthetic oligonucleotide
  Sense strand starting at position 2702 of SEQ ID NO: 587716
caaugugccugacuggaaa

SEQ ID NO: 813165 - RNA, 19 nt, Artificial Sequence
  Description of Artificial Sequence: Synthetic oligonucleotide
  Antisense strand to SEQ ID NO: 813164
uuuccagucaggcacauug

SEQ ID NO: 813166 - RNA, 19 nt, Artificial Sequence
  Description of Artificial Sequence: Synthetic oligonucleotide
  Sense strand starting at position 3005 of SEQ ID NO: 587716
uaacuacugcgguagcaaa

SEQ ID NO: 813167 - RNA, 19 nt, Artificial Sequence
  Description of Artificial Sequence: Synthetic oligonucleotide
  Antisense strand to SEQ ID NO: 813166
uuugcuaccgcaguaguua

SEQ ID NO: 813168 - RNA, 19 nt, Artificial Sequence
  Description of Artificial Sequence: Synthetic oligonucleotide
  Sense strand starting at position 3070 of SEQ ID NO: 587716
ggaaguggagugugaugua

SEQ ID NO: 813169 - RNA, 19 nt, Artificial Sequence
  Description of Artificial Sequence: Synthetic oligonucleotide
  Antisense strand to SEQ ID NO: 813168
uacaucacacuccacuucc

SEQ ID NO: 813170 - RNA, 19 nt, Artificial Sequence
  Description of Artificial Sequence: Synthetic oligonucleotide
  Sense strand starting at position 3075 of SEQ ID NO: 587716
uggagugugauguaaauaa

SEQ ID NO: 813171 - RNA, 19 nt, Artificial Sequence
  Description of Artificial Sequence: Synthetic oligonucleotide
  Antisense strand to SEQ ID NO: 813170
uuauuuacaucacacucca

SEQ ID NO: 813172 - RNA, 19 nt, Artificial Sequence
  Description of Artificial Sequence: Synthetic oligonucleotide
  Sense strand starting at position 3079 of SEQ ID NO: 587716
gugugauguaaauaaaguu

SEQ ID NO: 813173 - RNA, 19 nt, Artificial Sequence
  Description of Artificial Sequence: Synthetic oligonucleotide
  Antisense strand to SEQ ID NO: 813172
aacuuuauuuacaucacac

SEQ ID NO: 813174 - RNA, 19 nt, Artificial Sequence
  Description of Artificial Sequence: Synthetic oligonucleotide
  Sense strand starting at position 3156 of SEQ ID NO: 587716
uuuauuguaguccagaaug

SEQ ID NO: 813175 - RNA, 19 nt, Artificial Sequence
  Description of Artificial Sequence: Synthetic oligonucleotide
  Antisense strand to SEQ ID NO: 813174
cauucuggacuacaauaaa

SEQ ID NO: 813176 - RNA, 19 nt, Artificial Sequence
  Description of Artificial Sequence: Synthetic oligonucleotide
  Sense strand starting at position 3340 of SEQ ID NO: 587716
gcacuucggcuguugugau

SEQ ID NO: 813177 - RNA, 19 nt, Artificial Sequence
  Description of Artificial Sequence: Synthetic oligonucleotide
  Antisense strand to SEQ ID NO: 813176
aucacaacagccgaagugc

SEQ ID NO: 813178 - RNA, 19 nt, Artificial Sequence
  Description of Artificial Sequence: Synthetic oligonucleotide
  Sense strand starting at position 3359 of SEQ ID NO: 587716
uuucuugauccucacaguu

SEQ ID NO: 813179 - RNA, 19 nt, Artificial Sequence
  Description of Artificial Sequence: Synthetic oligonucleotide
  Antisense strand to SEQ ID NO: 813178
aacugugaggaucaagaaa

SEQ ID NO: 813180 - RNA, 19 nt, Artificial Sequence
  Description of Artificial Sequence: Synthetic oligonucleotide
  Sense strand starting at position 3382 of SEQ ID NO: 587716
ugaagaggcugguucugaa

SEQ ID NO: 813181 - RNA, 19 nt, Artificial Sequence
  Description of Artificial Sequence: Synthetic oligonucleotide
  Antisense strand to SEQ ID NO: 813180
uucagaaccagccucuuca

SEQ ID NO: 813182 - RNA, 19 nt, Artificial Sequence
  Description of Artificial Sequence: Synthetic oligonucleotide
  Sense strand starting at position 3475 of SEQ ID NO: 587716
aacggaggucuaugugauu

SEQ ID NO: 813183 - RNA, 19 nt, Artificial Sequence
  Description of Artificial Sequence: Synthetic oligonucleotide
  Antisense strand to SEQ ID NO: 813182
aaucacauagaccuccguu

SEQ ID NO: 813184 - RNA, 19 nt, Artificial Sequence
  Description of Artificial Sequence: Synthetic oligonucleotide
  Sense strand starting at position 3484 of SEQ ID NO: 587716
cuaugugauuccuuuaaga

SEQ ID NO: 813185 - RNA, 19 nt, Artificial Sequence
  Description of Artificial Sequence: Synthetic oligonucleotide
  Antisense strand to SEQ ID NO: 813184
ucuuaaaggaaucacauag

SEQ ID NO: 813186 - RNA, 19 nt, Artificial Sequence
  Description of Artificial Sequence: Synthetic oligonucleotide
  Sense strand starting at position 3486 of SEQ ID NO: 587716
augugauuccuuuaagauu

SEQ ID NO: 813187 - RNA, 19 nt, Artificial Sequence
  Description of Artificial Sequence: Synthetic oligonucleotide
  Antisense strand to SEQ ID NO: 813186
aaucuuaaaggaaucacau

SEQ ID NO: 813188 - RNA, 19 nt, Artificial Sequence
  Description of Artificial Sequence: Synthetic oligonucleotide
  Sense strand starting at position 3553 of SEQ ID NO: 587716
cccgaaauauuagcuauca

SEQ ID NO: 813189 - RNA, 19 nt, Artificial Sequence
  Description of Artificial Sequence: Synthetic oligonucleotide
  Antisense strand to SEQ ID NO: 813188
ugauagcuaauauuucggg

SEQ ID NO: 813190 - RNA, 19 nt, Artificial Sequence
  Description of Artificial Sequence: Synthetic oligonucleotide
  Sense strand starting at position 3554 of SEQ ID NO: 587716
ccgaaauauuagcuaucau

SEQ ID NO: 813191 - RNA, 19 nt, Artificial Sequence
  Description of Artificial Sequence: Synthetic oligonucleotide
  Antisense strand to SEQ ID NO: 813190
augauagcuaauauuucgg

SEQ ID NO: 813192 - RNA, 19 nt, Artificial Sequence
  Description of Artificial Sequence: Synthetic oligonucleotide
  Sense strand starting at position 3602 of SEQ ID NO: 587716
uauuaaacguauguagaag

SEQ ID NO: 813193 - RNA, 19 nt, Artificial Sequence
  Description of Artificial Sequence: Synthetic oligonucleotide
  Antisense strand to SEQ ID NO: 813192
cuucuacauacguuuaaua

SEQ ID NO: 813194 - RNA, 19 nt, Artificial Sequence
  Description of Artificial Sequence: Synthetic oligonucleotide
  Sense strand starting at position 3726 of SEQ ID NO: 587716
uguuuauuaggagguagga

SEQ ID NO: 813195 - RNA, 19 nt, Artificial Sequence
  Description of Artificial Sequence: Synthetic oligonucleotide
  Antisense strand to SEQ ID NO: 813194
uccuaccuccuaauaaaca

SEQ ID NO: 813196 - RNA, 19 nt, Artificial Sequence
  Description of Artificial Sequence: Synthetic oligonucleotide
  Sense strand starting at position 3831 of SEQ ID NO: 587716
ucuacuagucaugauguuu

SEQ ID NO: 813197 - RNA, 19 nt, Artificial Sequence
  Description of Artificial Sequence: Synthetic oligonucleotide
  Antisense strand to SEQ ID NO: 813196
aaacaucaugacuaguaga

SEQ ID NO: 813198 - RNA, 19 nt, Artificial Sequence
  Description of Artificial Sequence: Synthetic oligonucleotide
  Sense strand starting at position 3878 of SEQ ID NO: 587716
auacuauuguuuguuggga

SEQ ID NO: 813199 - RNA, 19 nt, Artificial Sequence
  Description of Artificial Sequence: Synthetic oligonucleotide
  Antisense strand to SEQ ID NO: 813198
ucccaacaaacaauaguau

SEQ ID NO: 813200 - RNA, 19 nt, Artificial Sequence
  Description of Artificial Sequence: Synthetic oligonucleotide
  Sense strand starting at position 16 of SEQ ID NO: 587717
acaagcuagugauuaaauc

SEQ ID NO: 813201 - RNA, 19 nt, Artificial Sequence
  Description of Artificial Sequence: Synthetic oligonucleotide
  Antisense strand to SEQ ID NO: 813200
gauuuaaucacuagcuugu

SEQ ID NO: 813202 - RNA, 19 nt, Artificial Sequence
  Description of Artificial Sequence: Synthetic oligonucleotide
  Sense strand starting at position 47 of SEQ ID NO: 587717
agcucuucugcacacagaa

SEQ ID NO: 813203 - RNA, 19 nt, Artificial Sequence
  Description of Artificial Sequence: Synthetic oligonucleotide
  Antisense strand to SEQ ID NO: 813202
uucugugugcagaagagcu

SEQ ID NO: 813204 - RNA, 19 nt, Artificial Sequence
  Description of Artificial Sequence: Synthetic oligonucleotide
  Sense strand starting at position 67 of SEQ ID NO: 587717
uacaguaugcaaugggaau

SEQ ID NO: 813205 - RNA, 19 nt, Artificial Sequence
  Description of Artificial Sequence: Synthetic oligonucleotide
  Antisense strand to SEQ ID NO: 813204
auucccauugcauacugua

SEQ ID NO: 813206 - RNA, 19 nt, Artificial Sequence
  Description of Artificial Sequence: Synthetic oligonucleotide
  Sense strand starting at position 68 of SEQ ID NO: 587717
acaguaugcaaugggaauu

SEQ ID NO: 813207 - RNA, 19 nt, Artificial Sequence
  Description of Artificial Sequence: Synthetic oligonucleotide
  Antisense strand to SEQ ID NO: 813206
aauucccauugcauacugu

SEQ ID NO: 813208 - RNA, 19 nt, Artificial Sequence
  Description of Artificial Sequence: Synthetic oligonucleotide
  Sense strand starting at position 78 of SEQ ID NO: 587717
augggaauuuccuagcuuu

SEQ ID NO: 813209 - RNA, 19 nt, Artificial Sequence
  Description of Artificial Sequence: Synthetic oligonucleotide
  Antisense strand to SEQ ID NO: 813208
aaagcuaggaaauucccau

SEQ ID NO: 813210 - RNA, 19 nt, Artificial Sequence
  Description of Artificial Sequence: Synthetic oligonucleotide
  Sense strand starting at position 144 of SEQ ID NO: 587717
guuuacucccuauagcuua

SEQ ID NO: 813211 - RNA, 19 nt, Artificial Sequence
  Description of Artificial Sequence: Synthetic oligonucleotide
  Antisense strand to SEQ ID NO: 813210
uaagcuauagggaguaaac

SEQ ID NO: 813212 - RNA, 19 nt, Artificial Sequence
  Description of Artificial Sequence: Synthetic oligonucleotide
  Sense strand starting at position 383 of SEQ ID NO: 587717
ggagucaucuagccucaug

SEQ ID NO: 813213 - RNA, 19 nt, Artificial Sequence
  Description of Artificial Sequence: Synthetic oligonucleotide
  Antisense strand to SEQ ID NO: 813212
caugaggcuagaugacucc

SEQ ID NO: 813214 - RNA, 19 nt, Artificial Sequence
  Description of Artificial Sequence: Synthetic oligonucleotide
  Sense strand starting at position 386 of SEQ ID NO: 587717
gucaucuagccucauguaa

SEQ ID NO: 813215 - RNA, 19 nt, Artificial Sequence
  Description of Artificial Sequence: Synthetic oligonucleotide
  Antisense strand to SEQ ID NO: 813214
uuacaugaggcuagaugac

SEQ ID NO: 813216 - RNA, 19 nt, Artificial Sequence
  Description of Artificial Sequence: Synthetic oligonucleotide
  Sense strand starting at position 408 of SEQ ID NO: 587717
accauuaagcaauacguaa

SEQ ID NO: 813217 - RNA, 19 nt, Artificial Sequence
  Description of Artificial Sequence: Synthetic oligonucleotide
  Antisense strand to SEQ ID NO: 813216
uuacguauugcuuaauggu

SEQ ID NO: 813218 - RNA, 19 nt, Artificial Sequence
  Description of Artificial Sequence: Synthetic oligonucleotide
  Sense strand starting at position 549 of SEQ ID NO: 587717
uggcgaccauguuuaacaa

SEQ ID NO: 813219 - RNA, 19 nt, Artificial Sequence
  Description of Artificial Sequence: Synthetic oligonucleotide
  Antisense strand to SEQ ID NO: 813218
uuguuaaacauggucgcca

SEQ ID NO: 813220 - RNA, 19 nt, Artificial Sequence
  Description of Artificial Sequence: Synthetic oligonucleotide
  Sense strand starting at position 550 of SEQ ID NO: 587717
ggcgaccauguuuaacaau

SEQ ID NO: 813221 - RNA, 19 nt, Artificial Sequence
  Description of Artificial Sequence: Synthetic oligonucleotide
  Antisense strand to SEQ ID NO: 813220
auuguuaaacauggucgcc

SEQ ID NO: 813222 - RNA, 19 nt, Artificial Sequence
  Description of Artificial Sequence: Synthetic oligonucleotide
  Sense strand starting at position 635 of SEQ ID NO: 587717
aauaaugagguguguaaua

SEQ ID NO: 813223 - RNA, 19 nt, Artificial Sequence
  Description of Artificial Sequence: Synthetic oligonucleotide
  Antisense strand to SEQ ID NO: 813222
uauuacacaccucauuauu

SEQ ID NO: 813224 - RNA, 19 nt, Artificial Sequence
  Description of Artificial Sequence: Synthetic oligonucleotide
  Sense strand starting at position 659 of SEQ ID NO: 587717
gaggaauauccaugaugca

SEQ ID NO: 813225 - RNA, 19 nt, Artificial Sequence
  Description of Artificial Sequence: Synthetic oligonucleotide
  Antisense strand to SEQ ID NO: 813224
ugcaucauggauauuccuc

SEQ ID NO: 813226 - RNA, 19 nt, Artificial Sequence
  Description of Artificial Sequence: Synthetic oligonucleotide
  Sense strand starting at position 672 of SEQ ID NO: 587717
gaugcauuguuggcuaaua

SEQ ID NO: 813227 - RNA, 19 nt, Artificial Sequence
  Description of Artificial Sequence: Synthetic oligonucleotide
  Antisense strand to SEQ ID NO: 813226
uauuagccaacaaugcauc

SEQ ID NO: 813228 - RNA, 19 nt, Artificial Sequence
  Description of Artificial Sequence: Synthetic oligonucleotide
  Sense strand starting at position 673 of SEQ ID NO: 587717
augcauuguuggcuaauaa

SEQ ID NO: 813229 - RNA, 19 nt, Artificial Sequence
  Description of Artificial Sequence: Synthetic oligonucleotide
  Antisense strand to SEQ ID NO: 813228
uuauuagccaacaaugcau

SEQ ID NO: 813230 - RNA, 19 nt, Artificial Sequence
  Description of Artificial Sequence: Synthetic oligonucleotide
  Sense strand starting at position 674 of SEQ ID NO: 587717
ugcauuguuggcuaauaaa

SEQ ID NO: 813231 - RNA, 19 nt, Artificial Sequence
  Description of Artificial Sequence: Synthetic oligonucleotide
  Antisense strand to SEQ ID NO: 813230
uuuauuagccaacaaugca

SEQ ID NO: 813232 - RNA, 19 nt, Artificial Sequence
  Description of Artificial Sequence: Synthetic oligonucleotide
  Sense strand starting at position 847 of SEQ ID NO: 587717
gagggcagguuuccucauu

SEQ ID NO: 813233 - RNA, 19 nt, Artificial Sequence
  Description of Artificial Sequence: Synthetic oligonucleotide
  Antisense strand to SEQ ID NO: 813232
aaugaggaaaccugcccuc

SEQ ID NO: 813234 - RNA, 19 nt, Artificial Sequence
  Description of Artificial Sequence: Synthetic oligonucleotide
  Sense strand starting at position 966 of SEQ ID NO: 587717
guagcaaauucuucugauu

SEQ ID NO: 813235 - RNA, 19 nt, Artificial Sequence
  Description of Artificial Sequence: Synthetic oligonucleotide
  Antisense strand to SEQ ID NO: 813234
aaucagaagaauuugcuac

SEQ ID NO: 813236 - RNA, 19 nt, Artificial Sequence
  Description of Artificial Sequence: Synthetic oligonucleotide
  Sense strand starting at position 1269 of SEQ ID NO: 587717
uggauucucugccuccaaa

SEQ ID NO: 813237 - RNA, 19 nt, Artificial Sequence
  Description of Artificial Sequence: Synthetic oligonucleotide
  Antisense strand to SEQ ID NO: 813236
uuuggaggcagagaaucca

SEQ ID NO: 813238 - RNA, 19 nt, Artificial Sequence
  Description of Artificial Sequence: Synthetic oligonucleotide
  Sense strand starting at position 2257 of SEQ ID NO: 587717
ugaggugcauuccuggauu

SEQ ID NO: 813239 - RNA, 19 nt, Artificial Sequence
  Description of Artificial Sequence: Synthetic oligonucleotide
  Antisense strand to SEQ ID NO: 813238
aauccaggaaugcaccuca

SEQ ID NO: 813240 - RNA, 19 nt, Artificial Sequence
  Description of Artificial Sequence: Synthetic oligonucleotide
  Sense strand starting at position 2357 of SEQ ID NO: 587717
gacugugccgcuuuauagu

SEQ ID NO: 813241 - RNA, 19 nt, Artificial Sequence
  Description of Artificial Sequence: Synthetic oligonucleotide
  Antisense strand to SEQ ID NO: 813240
acuauaaagcggcacaguc

SEQ ID NO: 813242 - RNA, 19 nt, Artificial Sequence
  Description of Artificial Sequence: Synthetic oligonucleotide
  Sense strand starting at position 2990 of SEQ ID NO: 587717
gauccuaagcagugaacau

SEQ ID NO: 813243 - RNA, 19 nt, Artificial Sequence
  Description of Artificial Sequence: Synthetic oligonucleotide
  Antisense strand to SEQ ID NO: 813242
auguucacugcuuaggauc

SEQ ID NO: 813244 - RNA, 19 nt, Artificial Sequence
  Description of Artificial Sequence: Synthetic oligonucleotide
  Sense strand starting at position 3137 of SEQ ID NO: 587717
gugcguuucccuucagucu

SEQ ID NO: 813245 - RNA, 19 nt, Artificial Sequence
  Description of Artificial Sequence: Synthetic oligonucleotide
  Antisense strand to SEQ ID NO: 813244
agacugaagggaaacgcac

SEQ ID NO: 813246 - RNA, 19 nt, Artificial Sequence
  Description of Artificial Sequence: Synthetic oligonucleotide
  Sense strand starting at position 3153 of SEQ ID NO: 587717
ucucuaauaguagguugua

SEQ ID NO: 813247 - RNA, 19 nt, Artificial Sequence
  Description of Artificial Sequence: Synthetic oligonucleotide
  Antisense strand to SEQ ID NO: 813246
uacaaccuacuauuagaga

SEQ ID NO: 813248 - RNA, 19 nt, Artificial Sequence
  Description of Artificial Sequence: Synthetic oligonucleotide
  Sense strand starting at position 3177 of SEQ ID NO: 587717
auuugcuuccaucguguga

SEQ ID NO: 813249 - RNA, 19 nt, Artificial Sequence
  Description of Artificial Sequence: Synthetic oligonucleotide
  Antisense strand to SEQ ID NO: 813248
ucacacgauggaagcaaau

SEQ ID NO: 813250 - RNA, 19 nt, Artificial Sequence
  Description of Artificial Sequence: Synthetic oligonucleotide
  Sense strand starting at position 3190 of SEQ ID NO: 587717
gugugaauucuguucgguu

SEQ ID NO: 813251 - RNA, 19 nt, Artificial Sequence
  Description of Artificial Sequence: Synthetic oligonucleotide
  Antisense strand to SEQ ID NO: 813250
aaccgaacagaauucacac

SEQ ID NO: 813252 - RNA, 19 nt, Artificial Sequence
  Description of Artificial Sequence: Synthetic oligonucleotide
  Sense strand starting at position 3234 of SEQ ID NO: 587717
guaagcuacccuuauaggu

SEQ ID NO: 813253 - RNA, 19 nt, Artificial Sequence
  Description of Artificial Sequence: Synthetic oligonucleotide
  Antisense strand to SEQ ID NO: 813252
accuauaaggguagcuuac

SEQ ID NO: 813254 - RNA, 19 nt, Artificial Sequence
  Description of Artificial Sequence: Synthetic oligonucleotide
  Sense strand starting at position 3250 of SEQ ID NO: 587717
gguuaccuaagguaaguua

SEQ ID NO: 813255 - RNA, 19 nt, Artificial Sequence
  Description of Artificial Sequence: Synthetic oligonucleotide
  Antisense strand to SEQ ID NO: 813254
uaacuuaccuuagguaacc

SEQ ID NO: 813256 - RNA, 19 nt, Artificial Sequence
  Description of Artificial Sequence: Synthetic oligonucleotide
  Sense strand starting at position 3266 of SEQ ID NO: 587717
uuagaauuagaacgucuuu

SEQ ID NO: 813257 - RNA, 19 nt, Artificial Sequence
  Description of Artificial Sequence: Synthetic oligonucleotide
  Antisense strand to SEQ ID NO: 813256
aaagacguucuaauucuaa

SEQ ID NO: 813258 - RNA, 19 nt, Artificial Sequence
  Description of Artificial Sequence: Synthetic oligonucleotide
  Sense strand starting at position 3272 of SEQ ID NO: 587717
uuagaacgucuuuaugcua

SEQ ID NO: 813259 - RNA, 19 nt, Artificial Sequence
  Description of Artificial Sequence: Synthetic oligonucleotide
  Antisense strand to SEQ ID NO: 813258
uagcauaaagacguucuaa

SEQ ID NO: 813260 - RNA, 19 nt, Artificial Sequence
  Description of Artificial Sequence: Synthetic oligonucleotide
  Sense strand starting at position 3342 of SEQ ID NO: 587717
acaugcuagcaaggucaaa

SEQ ID NO: 813261 - RNA, 19 nt, Artificial Sequence
  Description of Artificial Sequence: Synthetic oligonucleotide
  Antisense strand to SEQ ID NO: 813260
uuugaccuugcuagcaugu

SEQ ID NO: 813262 - RNA, 19 nt, Artificial Sequence
  Description of Artificial Sequence: Synthetic oligonucleotide
  Sense strand starting at position 3447 of SEQ ID NO: 587717
uuagguuuaaaguaugagu

SEQ ID NO: 813263 - RNA, 19 nt, Artificial Sequence
  Description of Artificial Sequence: Synthetic oligonucleotide
  Antisense strand to SEQ ID NO: 813262
acucauacuuuaaaccuaa

SEQ ID NO: 813264 - RNA, 19 nt, Artificial Sequence
  Description of Artificial Sequence: Synthetic oligonucleotide
  Sense strand starting at position 3452 of SEQ ID NO: 587717
uuuaaaguaugagugcaua

SEQ ID NO: 813265 - RNA, 19 nt, Artificial Sequence
  Description of Artificial Sequence: Synthetic oligonucleotide
  Antisense strand to SEQ ID NO: 813264
uaugcacucauacuuuaaa

SEQ ID NO: 813266 - RNA, 19 nt, Artificial Sequence
  Description of Artificial Sequence: Synthetic oligonucleotide
  Sense strand starting at position 3513 of SEQ ID NO: 587717
aucugcauucuggaguaga

SEQ ID NO: 813267 - RNA, 19 nt, Artificial Sequence
  Description of Artificial Sequence: Synthetic oligonucleotide
  Antisense strand to SEQ ID NO: 813266
ucuacuccagaaugcagau

SEQ ID NO: 813268 - RNA, 19 nt, Artificial Sequence
  Description of Artificial Sequence: Synthetic oligonucleotide
  Sense strand starting at position 3539 of SEQ ID NO: 587717
gucacauuauuagcuccau

SEQ ID NO: 813269 - RNA, 19 nt, Artificial Sequence
  Description of Artificial Sequence: Synthetic oligonucleotide
  Antisense strand to SEQ ID NO: 813268
auggagcuaauaaugugac

SEQ ID NO: 813270 - RNA, 19 nt, Artificial Sequence
  Description of Artificial Sequence: Synthetic oligonucleotide
  Sense strand starting at position 3585 of SEQ ID NO: 587717
acuccuaaccguuguggga

SEQ ID NO: 813271 - RNA, 19 nt, Artificial Sequence
  Description of Artificial Sequence: Synthetic oligonucleotide
  Antisense strand to SEQ ID NO: 813270
ucccacaacgguuaggagu

SEQ ID NO: 813272 - RNA, 19 nt, Artificial Sequence
  Description of Artificial Sequence: Synthetic oligonucleotide
  Sense strand starting at position 3801 of SEQ ID NO: 587717
uuccuucugcuaugggaau

SEQ ID NO: 813273 - RNA, 19 nt, Artificial Sequence
  Description of Artificial Sequence: Synthetic oligonucleotide
  Antisense strand to SEQ ID NO: 813272
auucccauagcagaaggaa

SEQ ID NO: 813274 - RNA, 19 nt, Artificial Sequence
  Description of Artificial Sequence: Synthetic oligonucleotide
  Sense strand starting at position 3880 of SEQ ID NO: 587717
uuuaaauaagacugcuagu

SEQ ID NO: 813275 - RNA, 19 nt, Artificial Sequence
  Description of Artificial Sequence: Synthetic oligonucleotide
  Antisense strand to SEQ ID NO: 813274
acuagcagucuuauuuaaa

SEQ ID NO: 813276 - RNA, 19 nt, Artificial Sequence
  Description of Artificial Sequence: Synthetic oligonucleotide
  Sense strand starting at position 3931 of SEQ ID NO: 587717
agucuugugggugaguagu

SEQ ID NO: 813277 - RNA, 19 nt, Artificial Sequence
  Description of Artificial Sequence: Synthetic oligonucleotide
  Antisense strand to SEQ ID NO: 813276
acuacucacccacaagacu

SEQ ID NO: 813278 - RNA, 19 nt, Artificial Sequence
  Description of Artificial Sequence: Synthetic oligonucleotide
  Sense strand starting at position 3937 of SEQ ID NO: 587717
gugggugaguaguugaaca

SEQ ID NO: 813279 - RNA, 19 nt, Artificial Sequence
  Description of Artificial Sequence: Synthetic oligonucleotide
  Antisense strand to SEQ ID NO: 813278
uguucaacuacucacccac

SEQ ID NO: 813280 - RNA, 19 nt, Artificial Sequence
  Description of Artificial Sequence: Synthetic oligonucleotide
  Sense strand starting at position 35 of SEQ ID NO: 587718
uuggucucuguggauuaau

SEQ ID NO: 813281 - RNA, 19 nt, Artificial Sequence
  Description of Artificial Sequence: Synthetic oligonucleotide
  Antisense strand to SEQ ID NO: 813280
auuaauccacagagaccaa

SEQ ID NO: 813282 - RNA, 19 nt, Artificial Sequence
  Description of Artificial Sequence: Synthetic oligonucleotide
  Sense strand starting at position 38 of SEQ ID NO: 587718
gucucuguggauuaauuaa

SEQ ID NO: 813283 - RNA, 19 nt, Artificial Sequence
  Description of Artificial Sequence: Synthetic oligonucleotide
  Antisense strand to SEQ ID NO: 813282
uuaauuaauccacagagac

SEQ ID NO: 813284 - RNA, 19 nt, Artificial Sequence
  Description of Artificial Sequence: Synthetic oligonucleotide
  Sense strand starting at position 172 of SEQ ID NO: 587718
auaaucagugauugccuuu

SEQ ID NO: 813285 - RNA, 19 nt, Artificial Sequence
  Description of Artificial Sequence: Synthetic oligonucleotide
  Antisense strand to SEQ ID NO: 813284
aaaggcaaucacugauuau

SEQ ID NO: 813286 - RNA, 19 nt, Artificial Sequence
  Description of Artificial Sequence: Synthetic oligonucleotide
  Sense strand starting at position 175 of SEQ ID NO: 587718
aucagugauugccuuuauu

SEQ ID NO: 813287 - RNA, 19 nt, Artificial Sequence
  Description of Artificial Sequence: Synthetic oligonucleotide
  Antisense strand to SEQ ID NO: 813286
aauaaaggcaaucacugau

SEQ ID NO: 813288 - RNA, 19 nt, Artificial Sequence
  Description of Artificial Sequence: Synthetic oligonucleotide
  Sense strand starting at position 178 of SEQ ID NO: 587718
agugauugccuuuauuauu

SEQ ID NO: 813289 - RNA, 19 nt, Artificial Sequence
  Description of Artificial Sequence: Synthetic oligonucleotide
  Antisense strand to SEQ ID NO: 813288
aauaauaaaggcaaucacu

SEQ ID NO: 813290 - RNA, 19 nt, Artificial Sequence
  Description of Artificial Sequence: Synthetic oligonucleotide
  Sense strand starting at position 206 of SEQ ID NO: 587718
cuggaaaugaguugcuagu

SEQ ID NO: 813291 - RNA, 19 nt, Artificial Sequence
  Description of Artificial Sequence: Synthetic oligonucleotide
  Antisense strand to SEQ ID NO: 813290
acuagcaacucauuuccag

SEQ ID NO: 813292 - RNA, 19 nt, Artificial Sequence
  Description of Artificial Sequence: Synthetic oligonucleotide
  Sense strand starting at position 208 of SEQ ID NO: 587718
ggaaaugaguugcuaguca

SEQ ID NO: 813293 - RNA, 19 nt, Artificial Sequence
  Description of Artificial Sequence: Synthetic oligonucleotide
  Antisense strand to SEQ ID NO: 813292
ugacuagcaacucauuucc

SEQ ID NO: 813294 - RNA, 19 nt, Artificial Sequence
  Description of Artificial Sequence: Synthetic oligonucleotide
  Sense strand starting at position 321 of SEQ ID NO: 587718
ucagcagugcauuaagauu

SEQ ID NO: 813295 - RNA, 19 nt, Artificial Sequence
  Description of Artificial Sequence: Synthetic oligonucleotide
  Antisense strand to SEQ ID NO: 813294
aaucuuaaugcacugcuga

SEQ ID NO: 813296 - RNA, 19 nt, Artificial Sequence
  Description of Artificial Sequence: Synthetic oligonucleotide
  Sense strand starting at position 360 of SEQ ID NO: 587718
aucugaacaugcuuuaagu

SEQ ID NO: 813297 - RNA, 19 nt, Artificial Sequence
  Description of Artificial Sequence: Synthetic oligonucleotide
  Antisense strand to SEQ ID NO: 813296
acuuaaagcauguucagau

SEQ ID NO: 813298 - RNA, 19 nt, Artificial Sequence
  Description of Artificial Sequence: Synthetic oligonucleotide
  Sense strand starting at position 789 of SEQ ID NO: 587718
agugaucauuagccauaac

SEQ ID NO: 813299 - RNA, 19 nt, Artificial Sequence
  Description of Artificial Sequence: Synthetic oligonucleotide
  Antisense strand to SEQ ID NO: 813298
guuauggcuaaugaucacu

SEQ ID NO: 813300 - RNA, 19 nt, Artificial Sequence
  Description of Artificial Sequence: Synthetic oligonucleotide
  Sense strand starting at position 977 of SEQ ID NO: 587718
aaagucuucccaugagugu

SEQ ID NO: 813301 - RNA, 19 nt, Artificial Sequence
  Description of Artificial Sequence: Synthetic oligonucleotide
  Antisense strand to SEQ ID NO: 813300
acacucaugggaagacuuu

SEQ ID NO: 813302 - RNA, 19 nt, Artificial Sequence
  Description of Artificial Sequence: Synthetic oligonucleotide
  Sense strand starting at position 978 of SEQ ID NO: 587718
aagucuucccaugagugua

SEQ ID NO: 813303 - RNA, 19 nt, Artificial Sequence
  Description of Artificial Sequence: Synthetic oligonucleotide
  Antisense strand to SEQ ID NO: 813302
uacacucaugggaagacuu

SEQ ID NO: 813304 - RNA, 19 nt, Artificial Sequence
  Description of Artificial Sequence: Synthetic oligonucleotide
  Sense strand starting at position 988 of SEQ ID NO: 587718
augaguguacaucaguagu

SEQ ID NO: 813305 - RNA, 19 nt, Artificial Sequence
  Description of Artificial Sequence: Synthetic oligonucleotide
  Antisense strand to SEQ ID NO: 813304
acuacugauguacacucau

SEQ ID NO: 813306 - RNA, 19 nt, Artificial Sequence
  Description of Artificial Sequence: Synthetic oligonucleotide
  Sense strand starting at position 998 of SEQ ID NO: 587718
aucaguaguuucucuccua

SEQ ID NO: 813307 - RNA, 19 nt, Artificial Sequence
  Description of Artificial Sequence: Synthetic oligonucleotide
  Antisense strand to SEQ ID NO: 813306
uaggagagaaacuacugau

SEQ ID NO: 813308 - RNA, 19 nt, Artificial Sequence
  Description of Artificial Sequence: Synthetic oligonucleotide
  Sense strand starting at position 999 of SEQ ID NO: 587718
ucaguaguuucucuccuaa

SEQ ID NO: 813309 - RNA, 19 nt, Artificial Sequence
  Description of Artificial Sequence: Synthetic oligonucleotide
  Antisense strand to SEQ ID NO: 813308
uuaggagagaaacuacuga

SEQ ID NO: 813310 - RNA, 19 nt, Artificial Sequence
  Description of Artificial Sequence: Synthetic oligonucleotide
  Sense strand starting at position 1044 of SEQ ID NO: 587718
acugauuccuggcuaugaa

SEQ ID NO: 813311 - RNA, 19 nt, Artificial Sequence
  Description of Artificial Sequence: Synthetic oligonucleotide
  Antisense strand to SEQ ID NO: 813310
uucauagccaggaaucagu

SEQ ID NO: 813312 - RNA, 19 nt, Artificial Sequence
  Description of Artificial Sequence: Synthetic oligonucleotide
  Sense strand starting at position 1045 of SEQ ID NO: 587718
cugauuccuggcuaugaac

SEQ ID NO: 813313 - RNA, 19 nt, Artificial Sequence
  Description of Artificial Sequence: Synthetic oligonucleotide
  Antisense strand to SEQ ID NO: 813312
guucauagccaggaaucag

SEQ ID NO: 813314 - RNA, 19 nt, Artificial Sequence
  Description of Artificial Sequence: Synthetic oligonucleotide
  Sense strand starting at position 1140 of SEQ ID NO: 587718
ggcaucuaggccuauuguu

SEQ ID NO: 813315 - RNA, 19 nt, Artificial Sequence
  Description of Artificial Sequence: Synthetic oligonucleotide
  Antisense strand to SEQ ID NO: 813314
aacaauaggccuagaugcc

SEQ ID NO: 813316 - RNA, 19 nt, Artificial Sequence
  Description of Artificial Sequence: Synthetic oligonucleotide
  Sense strand starting at position 1231 of SEQ ID NO: 587718
uacaguuguguguauggga

SEQ ID NO: 813317 - RNA, 19 nt, Artificial Sequence
  Description of Artificial Sequence: Synthetic oligonucleotide
  Antisense strand to SEQ ID NO: 813316
ucccauacacacaacugua

SEQ ID NO: 813318 - RNA, 19 nt, Artificial Sequence
  Description of Artificial Sequence: Synthetic oligonucleotide
  Sense strand starting at position 1597 of SEQ ID NO: 587718
gagagaagcccucaagugu

SEQ ID NO: 813319 - RNA, 19 nt, Artificial Sequence
  Description of Artificial Sequence: Synthetic oligonucleotide
  Antisense strand to SEQ ID NO: 813318
acacuugagggcuucucuc

SEQ ID NO: 813320 - RNA, 19 nt, Artificial Sequence
  Description of Artificial Sequence: Synthetic oligonucleotide
  Sense strand starting at position 1627 of SEQ ID NO: 587718
cggcgauuaccugagagag

SEQ ID NO: 813321 - RNA, 19 nt, Artificial Sequence
  Description of Artificial Sequence: Synthetic oligonucleotide
  Antisense strand to SEQ ID NO: 813320
cucucucagguaaucgccg

SEQ ID NO: 813322 - RNA, 19 nt, Artificial Sequence
  Description of Artificial Sequence: Synthetic oligonucleotide
  Sense strand starting at position 3061 of SEQ ID NO: 587718
aaaggaugauacugagaag

SEQ ID NO: 813323 - RNA, 19 nt, Artificial Sequence
  Description of Artificial Sequence: Synthetic oligonucleotide
  Antisense strand to SEQ ID NO: 813322
cuucucaguaucauccuuu

SEQ ID NO: 813324 - RNA, 19 nt, Artificial Sequence
  Description of Artificial Sequence: Synthetic oligonucleotide
  Sense strand starting at position 3064 of SEQ ID NO: 587718
ggaugauacugagaagaca

SEQ ID NO: 813325 - RNA, 19 nt, Artificial Sequence
  Description of Artificial Sequence: Synthetic oligonucleotide
  Antisense strand to SEQ ID NO: 813324
ugucuucucaguaucaucc

SEQ ID NO: 813326 - RNA, 19 nt, Artificial Sequence
  Description of Artificial Sequence: Synthetic oligonucleotide
  Sense strand starting at position 3190 of SEQ ID NO: 587718
agauguguaauuugagugu

SEQ ID NO: 813327 - RNA, 19 nt, Artificial Sequence
  Description of Artificial Sequence: Synthetic oligonucleotide
  Antisense strand to SEQ ID NO: 813326
acacucaaauuacacaucu

SEQ ID NO: 813328 - RNA, 19 nt, Artificial Sequence
  Description of Artificial Sequence: Synthetic oligonucleotide
  Sense strand starting at position 3193 of SEQ ID NO: 587718
uguguaauuugaguguuca

SEQ ID NO: 813329 - RNA, 19 nt, Artificial Sequence
  Description of Artificial Sequence: Synthetic oligonucleotide
  Antisense strand to SEQ ID NO: 813328
ugaacacucaaauuacaca

SEQ ID NO: 813330 - RNA, 19 nt, Artificial Sequence
  Description of Artificial Sequence: Synthetic oligonucleotide
  Sense strand starting at position 3194 of SEQ ID NO: 587718
guguaauuugaguguucau

SEQ ID NO: 813331 - RNA, 19 nt, Artificial Sequence
  Description of Artificial Sequence: Synthetic oligonucleotide
  Antisense strand to SEQ ID NO: 813330
augaacacucaaauuacac

SEQ ID NO: 813332 - RNA, 19 nt, Artificial Sequence
  Description of Artificial Sequence: Synthetic oligonucleotide
  Sense strand starting at position 3363 of SEQ ID NO: 587718
acugauuugugaugacuag

SEQ ID NO: 813333 - RNA, 19 nt, Artificial Sequence
  Description of Artificial Sequence: Synthetic oligonucleotide
  Antisense strand to SEQ ID NO: 813332
cuagucaucacaaaucagu

SEQ ID NO: 813334 - RNA, 19 nt, Artificial Sequence
  Description of Artificial Sequence: Synthetic oligonucleotide
  Sense strand starting at position 3715 of SEQ ID NO: 587718
ucuacuauaugcuugggau

SEQ ID NO: 813335 - RNA, 19 nt, Artificial Sequence
  Description of Artificial Sequence: Synthetic oligonucleotide
  Antisense strand to SEQ ID NO: 813334
aucccaagcauauaguaga

SEQ ID NO: 813336 - RNA, 19 nt, Artificial Sequence
  Description of Artificial Sequence: Synthetic oligonucleotide
  Sense strand starting at position 3716 of SEQ ID NO: 587718
cuacuauaugcuugggauu

SEQ ID NO: 813337 - RNA, 19 nt, Artificial Sequence
  Description of Artificial Sequence: Synthetic oligonucleotide
  Antisense strand to SEQ ID NO: 813336
aaucccaagcauauaguag

SEQ ID NO: 813338 - RNA, 19 nt, Artificial Sequence
  Description of Artificial Sequence: Synthetic oligonucleotide
  Sense strand starting at position 3717 of SEQ ID NO: 587718
uacuauaugcuugggauua

SEQ ID NO: 813339 - RNA, 19 nt, Artificial Sequence
  Description of Artificial Sequence: Synthetic oligonucleotide
  Antisense strand to SEQ ID NO: 813338
uaaucccaagcauauagua

SEQ ID NO: 813340 - RNA, 19 nt, Artificial Sequence
  Description of Artificial Sequence: Synthetic oligonucleotide
  Sense strand starting at position 3730 of SEQ ID NO: 587718
ggauuauacugagcaaguu

SEQ ID NO: 813341 - RNA, 19 nt, Artificial Sequence
  Description of Artificial Sequence: Synthetic oligonucleotide
  Antisense strand to SEQ ID NO: 813340
aacuugcucaguauaaucc

SEQ ID NO: 813342 - RNA, 19 nt, Artificial Sequence
  Description of Artificial Sequence: Synthetic oligonucleotide
  Sense strand starting at position 3731 of SEQ ID NO: 587718
gauuauacugagcaaguuu

SEQ ID NO: 813343 - RNA, 19 nt, Artificial Sequence
  Description of Artificial Sequence: Synthetic oligonucleotide
  Antisense strand to SEQ ID NO: 813342
aaacuugcucaguauaauc

SEQ ID NO: 813344 - RNA, 19 nt, Artificial Sequence
  Description of Artificial Sequence: Synthetic oligonucleotide
  Sense strand starting at position 3789 of SEQ ID NO: 587718
agguaauuauuaguaccua

SEQ ID NO: 813345 - RNA, 19 nt, Artificial Sequence
  Description of Artificial Sequence: Synthetic oligonucleotide
  Antisense strand to SEQ ID NO: 813344
uagguacuaauaauuaccu

SEQ ID NO: 813346 - RNA, 19 nt, Artificial Sequence
  Description of Artificial Sequence: Synthetic oligonucleotide
  Sense strand starting at position 3797 of SEQ ID NO: 587718
auuaguaccuaaguugaga

SEQ ID NO: 813347 - RNA, 19 nt, Artificial Sequence
  Description of Artificial Sequence: Synthetic oligonucleotide
  Antisense strand to SEQ ID NO: 813346
ucucaacuuagguacuaau

SEQ ID NO: 813348 - RNA, 19 nt, Artificial Sequence
  Description of Artificial Sequence: Synthetic oligonucleotide
  Sense strand starting at position 3885 of SEQ ID NO: 587718
guuugaauucuguguaaau

SEQ ID NO: 813349 - RNA, 19 nt, Artificial Sequence
  Description of Artificial Sequence: Synthetic oligonucleotide
  Antisense strand to SEQ ID NO: 813348
auuuacacagaauucaaac

SEQ ID NO: 813350 - RNA, 19 nt, Artificial Sequence
  Description of Artificial Sequence: Synthetic oligonucleotide
  Sense strand starting at position 3886 of SEQ ID NO: 587718
uuugaauucuguguaaauc

SEQ ID NO: 813351 - RNA, 19 nt, Artificial Sequence
  Description of Artificial Sequence: Synthetic oligonucleotide
  Antisense strand to SEQ ID NO: 813350
gauuuacacagaauucaaa

SEQ ID NO: 813352 - RNA, 19 nt, Artificial Sequence
  Description of Artificial Sequence: Synthetic oligonucleotide
  Sense strand starting at position 3887 of SEQ ID NO: 587718
uugaauucuguguaaaucu

SEQ ID NO: 813353 - RNA, 19 nt, Artificial Sequence
  Description of Artificial Sequence: Synthetic oligonucleotide
  Antisense strand to SEQ ID NO: 813352
agauuuacacagaauucaa

SEQ ID NO: 813354 - RNA, 19 nt, Artificial Sequence
  Description of Artificial Sequence: Synthetic oligonucleotide
  Sense strand starting at position 3896 of SEQ ID NO: 587718
guguaaaucuaaccaucca

SEQ ID NO: 813355 - RNA, 19 nt, Artificial Sequence
  Description of Artificial Sequence: Synthetic oligonucleotide
  Antisense strand to SEQ ID NO: 813354
uggaugguuagauuuacac

SEQ ID NO: 813356 - RNA, 19 nt, Artificial Sequence
  Description of Artificial Sequence: Synthetic oligonucleotide
  Sense strand starting at position 3908 of SEQ ID NO: 587718
ccauccaggaggugauauu

SEQ ID NO: 813357 - RNA, 19 nt, Artificial Sequence
  Description of Artificial Sequence: Synthetic oligonucleotide
  Antisense strand to SEQ ID NO: 813356
aauaucaccuccuggaugg

SEQ ID NO: 813358 - RNA, 19 nt, Artificial Sequence
  Description of Artificial Sequence: Synthetic oligonucleotide
  Sense strand starting at position 3915 of SEQ ID NO: 587718
ggaggugauauugguguga

SEQ ID NO: 813359 - RNA, 19 nt, Artificial Sequence
  Description of Artificial Sequence: Synthetic oligonucleotide
  Antisense strand to SEQ ID NO: 813358
ucacaccaauaucaccucc

SEQ ID NO: 813360 - RNA, 19 nt, Artificial Sequence
  Description of Artificial Sequence: Synthetic oligonucleotide
  Sense strand starting at position 71 of SEQ ID NO: 587719
uuuccauuacacgguaaga

SEQ ID NO: 813361 - RNA, 19 nt, Artificial Sequence
  Description of Artificial Sequence: Synthetic oligonucleotide
  Antisense strand to SEQ ID NO: 813360
ucuuaccguguaauggaaa

SEQ ID NO: 813362 - RNA, 19 nt, Artificial Sequence
  Description of Artificial Sequence: Synthetic oligonucleotide
  Sense strand starting at position 73 of SEQ ID NO: 587719
uccauuacacgguaagagu

SEQ ID NO: 813363 - RNA, 19 nt, Artificial Sequence
  Description of Artificial Sequence: Synthetic oligonucleotide
  Antisense strand to SEQ ID NO: 813362
acucuuaccguguaaugga

SEQ ID NO: 813364 - RNA, 19 nt, Artificial Sequence
  Description of Artificial Sequence: Synthetic oligonucleotide
  Sense strand starting at position 189 of SEQ ID NO: 587719
uaagguaggcuuuauuagu

SEQ ID NO: 813365 - RNA, 19 nt, Artificial Sequence
  Description of Artificial Sequence: Synthetic oligonucleotide
  Antisense strand to SEQ ID NO: 813364
acuaauaaagccuaccuua

SEQ ID NO: 813366 - RNA, 19 nt, Artificial Sequence
  Description of Artificial Sequence: Synthetic oligonucleotide
  Sense strand starting at position 560 of SEQ ID NO: 587719
gaguaaagucuagaggcca

SEQ ID NO: 813367 - RNA, 19 nt, Artificial Sequence
  Description of Artificial Sequence: Synthetic oligonucleotide
  Antisense strand to SEQ ID NO: 813366
uggccucuagacuuuacuc

SEQ ID NO: 813368 - RNA, 19 nt, Artificial Sequence
  Description of Artificial Sequence: Synthetic oligonucleotide
  Sense strand starting at position 592 of SEQ ID NO: 587719
acaucucaguucuuuggaa

SEQ ID NO: 813369 - RNA, 19 nt, Artificial Sequence
  Description of Artificial Sequence: Synthetic oligonucleotide
  Antisense strand to SEQ ID NO: 813368
uuccaaagaacugagaugu

SEQ ID NO: 813370 - RNA, 19 nt, Artificial Sequence
  Description of Artificial Sequence: Synthetic oligonucleotide
  Sense strand starting at position 594 of SEQ ID NO: 587719
aucucaguucuuuggaaag

SEQ ID NO: 813371 - RNA, 19 nt, Artificial Sequence
  Description of Artificial Sequence: Synthetic oligonucleotide
  Antisense strand to SEQ ID NO: 813370
cuuuccaaagaacugagau

SEQ ID NO: 813372 - RNA, 19 nt, Artificial Sequence
  Description of Artificial Sequence: Synthetic oligonucleotide
  Sense strand starting at position 1081 of SEQ ID NO: 587719
cugugugguggaugaaaga

SEQ ID NO: 813373 - RNA, 19 nt, Artificial Sequence
  Description of Artificial Sequence: Synthetic oligonucleotide
  Antisense strand to SEQ ID NO: 813372
ucuuucauccaccacacag

SEQ ID NO: 813374 - RNA, 19 nt, Artificial Sequence
  Description of Artificial Sequence: Synthetic oligonucleotide
  Sense strand starting at position 1416 of SEQ ID NO: 587719
acacaaguguuauuacauu

SEQ ID NO: 813375 - RNA, 19 nt, Artificial Sequence
  Description of Artificial Sequence: Synthetic oligonucleotide
  Antisense strand to SEQ ID NO: 813374
aauguaauaacacuugugu

SEQ ID NO: 813376 - RNA, 19 nt, Artificial Sequence
  Description of Artificial Sequence: Synthetic oligonucleotide
  Sense strand starting at position 1497 of SEQ ID NO: 587719
aguuaaacuucuuuaguca

SEQ ID NO: 813377 - RNA, 19 nt, Artificial Sequence
  Description of Artificial Sequence: Synthetic oligonucleotide
  Antisense strand to SEQ ID NO: 813376
ugacuaaagaaguuuaacu

SEQ ID NO: 813378 - RNA, 19 nt, Artificial Sequence
  Description of Artificial Sequence: Synthetic oligonucleotide
  Sense strand starting at position 1498 of SEQ ID NO: 587719
guuaaacuucuuuagucau

SEQ ID NO: 813379 - RNA, 19 nt, Artificial Sequence
  Description of Artificial Sequence: Synthetic oligonucleotide
  Antisense strand to SEQ ID NO: 813378
augacuaaagaaguuuaac

SEQ ID NO: 813380 - RNA, 19 nt, Artificial Sequence
  Description of Artificial Sequence: Synthetic oligonucleotide
  Sense strand starting at position 1543 of SEQ ID NO: 587719
gaggaaugcugcuuugaua

SEQ ID NO: 813381 - RNA, 19 nt, Artificial Sequence
  Description of Artificial Sequence: Synthetic oligonucleotide
  Antisense strand to SEQ ID NO: 813380
uaucaaagcagcauuccuc

SEQ ID NO: 813382 - RNA, 19 nt, Artificial Sequence
  Description of Artificial Sequence: Synthetic oligonucleotide
  Sense strand starting at position 1639 of SEQ ID NO: 587719
agcccuuuggucgacagau

SEQ ID NO: 813383 - RNA, 19 nt, Artificial Sequence
  Description of Artificial Sequence: Synthetic oligonucleotide
  Antisense strand to SEQ ID NO: 813382
aucugucgaccaaagggcu

SEQ ID NO: 813384 - RNA, 19 nt, Artificial Sequence
  Description of Artificial Sequence: Synthetic oligonucleotide
  Sense strand starting at position 1641 of SEQ ID NO: 587719
cccuuuggucgacagauga

SEQ ID NO: 813385 - RNA, 19 nt, Artificial Sequence
  Description of Artificial Sequence: Synthetic oligonucleotide
  Antisense strand to SEQ ID NO: 813384
ucaucugucgaccaaaggg

SEQ ID NO: 813386 - RNA, 19 nt, Artificial Sequence
  Description of Artificial Sequence: Synthetic oligonucleotide
  Sense strand starting at position 1750 of SEQ ID NO: 587719
ugaugaaugucaccauccu

SEQ ID NO: 813387 - RNA, 19 nt, Artificial Sequence
  Description of Artificial Sequence: Synthetic oligonucleotide
  Antisense strand to SEQ ID NO: 813386
aggauggugacauucauca

SEQ ID NO: 813388 - RNA, 19 nt, Artificial Sequence
  Description of Artificial Sequence: Synthetic oligonucleotide
  Sense strand starting at position 1793 of SEQ ID NO: 587719
aggugauccacuugauaag

SEQ ID NO: 813389 - RNA, 19 nt, Artificial Sequence
  Description of Artificial Sequence: Synthetic oligonucleotide
  Antisense strand to SEQ ID NO: 813388
cuuaucaaguggaucaccu

SEQ ID NO: 813390 - RNA, 19 nt, Artificial Sequence
  Description of Artificial Sequence: Synthetic oligonucleotide
  Sense strand starting at position 1836 of SEQ ID NO: 587719
uguaauucccauuggauca

SEQ ID NO: 813391 - RNA, 19 nt, Artificial Sequence
  Description of Artificial Sequence: Synthetic oligonucleotide
  Antisense strand to SEQ ID NO: 813390
ugauccaaugggaauuaca

SEQ ID NO: 813392 - RNA, 19 nt, Artificial Sequence
  Description of Artificial Sequence: Synthetic oligonucleotide
  Sense strand starting at position 1906 of SEQ ID NO: 587719
uucuuaggagucugauaaa

SEQ ID NO: 813393 - RNA, 19 nt, Artificial Sequence
  Description of Artificial Sequence: Synthetic oligonucleotide
  Antisense strand to SEQ ID NO: 813392
uuuaucagacuccuaagaa

SEQ ID NO: 813394 - RNA, 19 nt, Artificial Sequence
  Description of Artificial Sequence: Synthetic oligonucleotide
  Sense strand starting at position 2001 of SEQ ID NO: 587719
accugacuccucugggaau

SEQ ID NO: 813395 - RNA, 19 nt, Artificial Sequence
  Description of Artificial Sequence: Synthetic oligonucleotide
  Antisense strand to SEQ ID NO: 813394
auucccagaggagucaggu

SEQ ID NO: 813396 - RNA, 19 nt, Artificial Sequence
  Description of Artificial Sequence: Synthetic oligonucleotide
  Sense strand starting at position 2079 of SEQ ID NO: 587719
gguagaacugccuaaguaa

SEQ ID NO: 813397 - RNA, 19 nt, Artificial Sequence
  Description of Artificial Sequence: Synthetic oligonucleotide
  Antisense strand to SEQ ID NO: 813396
uuacuuaggcaguucuacc

SEQ ID NO: 813398 - RNA, 19 nt, Artificial Sequence
  Description of Artificial Sequence: Synthetic oligonucleotide
  Sense strand starting at position 2082 of SEQ ID NO: 587719
agaacugccuaaguaaugu

SEQ ID NO: 813399 - RNA, 19 nt, Artificial Sequence
  Description of Artificial Sequence: Synthetic oligonucleotide
  Antisense strand to SEQ ID NO: 813398
acauuacuuaggcaguucu

SEQ ID NO: 813400 - RNA, 19 nt, Artificial Sequence
  Description of Artificial Sequence: Synthetic oligonucleotide
  Sense strand starting at position 2090 of SEQ ID NO: 587719
cuaaguaauguuggaagag

SEQ ID NO: 813401 - RNA, 19 nt, Artificial Sequence
  Description of Artificial Sequence: Synthetic oligonucleotide
  Antisense strand to SEQ ID NO: 813400
cucuuccaacauuacuuag

SEQ ID NO: 813402 - RNA, 19 nt, Artificial Sequence
  Description of Artificial Sequence: Synthetic oligonucleotide
  Sense strand starting at position 2407 of SEQ ID NO: 587719
aauauuagaggcugucaua

SEQ ID NO: 813403 - RNA, 19 nt, Artificial Sequence
  Description of Artificial Sequence: Synthetic oligonucleotide
  Antisense strand to SEQ ID NO: 813402
uaugacagccucuaauauu

SEQ ID NO: 813404 - RNA, 19 nt, Artificial Sequence
  Description of Artificial Sequence: Synthetic oligonucleotide
  Sense strand starting at position 2567 of SEQ ID NO: 587719
cuuguucucgcggcuguaa

SEQ ID NO: 813405 - RNA, 19 nt, Artificial Sequence
  Description of Artificial Sequence: Synthetic oligonucleotide
  Antisense strand to SEQ ID NO: 813404
uuacagccgcgagaacaag

SEQ ID NO: 813406 - RNA, 19 nt, Artificial Sequence
  Description of Artificial Sequence: Synthetic oligonucleotide
  Sense strand starting at position 2798 of SEQ ID NO: 587719
cuugcaauuuaguuggagu

SEQ ID NO: 813407 - RNA, 19 nt, Artificial Sequence
  Description of Artificial Sequence: Synthetic oligonucleotide
  Antisense strand to SEQ ID NO: 813406
acuccaacuaaauugcaag

SEQ ID NO: 813408 - RNA, 19 nt, Artificial Sequence
  Description of Artificial Sequence: Synthetic oligonucleotide
  Sense strand starting at position 2806 of SEQ ID NO: 587719
uuaguuggaguguacauua

SEQ ID NO: 813409 - RNA, 19 nt, Artificial Sequence
  Description of Artificial Sequence: Synthetic oligonucleotide
  Antisense strand to SEQ ID NO: 813408
uaauguacacuccaacuaa

SEQ ID NO: 813410 - RNA, 19 nt, Artificial Sequence
  Description of Artificial Sequence: Synthetic oligonucleotide
  Sense strand starting at position 2860 of SEQ ID NO: 587719
uaacaaaugcgaugaagca

SEQ ID NO: 813411 - RNA, 19 nt, Artificial Sequence
  Description of Artificial Sequence: Synthetic oligonucleotide
  Antisense strand to SEQ ID NO: 813410
ugcuucaucgcauuuguua

SEQ ID NO: 813412 - RNA, 19 nt, Artificial Sequence
  Description of Artificial Sequence: Synthetic oligonucleotide
  Sense strand starting at position 2899 of SEQ ID NO: 587719
accugaaucugaccuaguu

SEQ ID NO: 813413 - RNA, 19 nt, Artificial Sequence
  Description of Artificial Sequence: Synthetic oligonucleotide
  Antisense strand to SEQ ID NO: 813412
aacuaggucagauucaggu

SEQ ID NO: 813414 - RNA, 19 nt, Artificial Sequence
  Description of Artificial Sequence: Synthetic oligonucleotide
  Sense strand starting at position 2912 of SEQ ID NO: 587719
cuaguuaagaggugaagga

SEQ ID NO: 813415 - RNA, 19 nt, Artificial Sequence
  Description of Artificial Sequence: Synthetic oligonucleotide
  Antisense strand to SEQ ID NO: 813414
uccuucaccucuuaacuag

SEQ ID NO: 813416 - RNA, 19 nt, Artificial Sequence
  Description of Artificial Sequence: Synthetic oligonucleotide
  Sense strand starting at position 2958 of SEQ ID NO: 587719
ugagauaaagugugauggu

SEQ ID NO: 813417 - RNA, 19 nt, Artificial Sequence
  Description of Artificial Sequence: Synthetic oligonucleotide
  Antisense strand to SEQ ID NO: 813416
accaucacacuuuaucuca

SEQ ID NO: 813418 - RNA, 19 nt, Artificial Sequence
  Description of Artificial Sequence: Synthetic oligonucleotide
  Sense strand starting at position 3167 of SEQ ID NO: 587719
gggugucuugucugaauuu

SEQ ID NO: 813419 - RNA, 19 nt, Artificial Sequence
  Description of Artificial Sequence: Synthetic oligonucleotide
  Antisense strand to SEQ ID NO: 813418
aaauucagacaagacaccc

SEQ ID NO: 813420 - RNA, 19 nt, Artificial Sequence
  Description of Artificial Sequence: Synthetic oligonucleotide
  Sense strand starting at position 3192 of SEQ ID NO: 587719
acugaaguacuguaguaga

SEQ ID NO: 813421 - RNA, 19 nt, Artificial Sequence
  Description of Artificial Sequence: Synthetic oligonucleotide
  Antisense strand to SEQ ID NO: 813420
ucuacuacaguacuucagu

SEQ ID NO: 813422 - RNA, 19 nt, Artificial Sequence
  Description of Artificial Sequence: Synthetic oligonucleotide
  Sense strand starting at position 3226 of SEQ ID NO: 587719
agaccacuuuggucaagua

SEQ ID NO: 813423 - RNA, 19 nt, Artificial Sequence
  Description of Artificial Sequence: Synthetic oligonucleotide
  Antisense strand to SEQ ID NO: 813422
uacuugaccaaaguggucu

SEQ ID NO: 813424 - RNA, 19 nt, Artificial Sequence
  Description of Artificial Sequence: Synthetic oligonucleotide
  Sense strand starting at position 3227 of SEQ ID NO: 587719
gaccacuuuggucaaguau

SEQ ID NO: 813425 - RNA, 19 nt, Artificial Sequence
  Description of Artificial Sequence: Synthetic oligonucleotide
  Antisense strand to SEQ ID NO: 813424
auacuugaccaaagugguc

SEQ ID NO: 813426 - RNA, 19 nt, Artificial Sequence
  Description of Artificial Sequence: Synthetic oligonucleotide
  Sense strand starting at position 3364 of SEQ ID NO: 587719
aagacaacgucaucugauu

SEQ ID NO: 813427 - RNA, 19 nt, Artificial Sequence
  Description of Artificial Sequence: Synthetic oligonucleotide
  Antisense strand to SEQ ID NO: 813426
aaucagaugacguugucuu

SEQ ID NO: 813428 - RNA, 19 nt, Artificial Sequence
  Description of Artificial Sequence: Synthetic oligonucleotide
  Sense strand starting at position 3370 of SEQ ID NO: 587719
acgucaucugauuaucaau

SEQ ID NO: 813429 - RNA, 19 nt, Artificial Sequence
  Description of Artificial Sequence: Synthetic oligonucleotide
  Antisense strand to SEQ ID NO: 813428
auugauaaucagaugacgu

SEQ ID NO: 813430 - RNA, 19 nt, Artificial Sequence
  Description of Artificial Sequence: Synthetic oligonucleotide
  Sense strand starting at position 3372 of SEQ ID NO: 587719
gucaucugauuaucaaugu

SEQ ID NO: 813431 - RNA, 19 nt, Artificial Sequence
  Description of Artificial Sequence: Synthetic oligonucleotide
  Antisense strand to SEQ ID NO: 813430
acauugauaaucagaugac

SEQ ID NO: 813432 - RNA, 19 nt, Artificial Sequence
  Description of Artificial Sequence: Synthetic oligonucleotide
  Sense strand starting at position 3672 of SEQ ID NO: 587719
ccaugagacuagcuuuaau

SEQ ID NO: 813433 - RNA, 19 nt, Artificial Sequence
  Description of Artificial Sequence: Synthetic oligonucleotide
  Antisense strand to SEQ ID NO: 813432
auuaaagcuagucucaugg

SEQ ID NO: 813434 - RNA, 19 nt, Artificial Sequence
  Description of Artificial Sequence: Synthetic oligonucleotide
  Sense strand starting at position 3686 of SEQ ID NO: 587719
uuaauaugagaccgucaag

SEQ ID NO: 813435 - RNA, 19 nt, Artificial Sequence
  Description of Artificial Sequence: Synthetic oligonucleotide
  Antisense strand to SEQ ID NO: 813434
cuugacggucucauauuaa

SEQ ID NO: 813436 - RNA, 19 nt, Artificial Sequence
  Description of Artificial Sequence: Synthetic oligonucleotide
  Sense strand starting at position 3751 of SEQ ID NO: 587719
gaaggaugccuaggcauga

SEQ ID NO: 813437 - RNA, 19 nt, Artificial Sequence
  Description of Artificial Sequence: Synthetic oligonucleotide
  Antisense strand to SEQ ID NO: 813436
ucaugccuaggcauccuuc

SEQ ID NO: 813438 - RNA, 19 nt, Artificial Sequence
  Description of Artificial Sequence: Synthetic oligonucleotide
  Sense strand starting at position 3755 of SEQ ID NO: 587719
gaugccuaggcaugagaca

SEQ ID NO: 813439 - RNA, 19 nt, Artificial Sequence
  Description of Artificial Sequence: Synthetic oligonucleotide
  Antisense strand to SEQ ID NO: 813438
ugucucaugccuaggcauc

SEQ ID NO: 813440 - RNA, 19 nt, Artificial Sequence
  Description of Artificial Sequence: Synthetic oligonucleotide
  Sense strand starting at position 79 of SEQ ID NO: 587720
aaauguaguuuccuaggaa

SEQ ID NO: 813441 - RNA, 19 nt, Artificial Sequence
  Description of Artificial Sequence: Synthetic oligonucleotide
  Antisense strand to SEQ ID NO: 813440
uuccuaggaaacuacauuu

SEQ ID NO: 813442 - RNA, 19 nt, Artificial Sequence
  Description of Artificial Sequence: Synthetic oligonucleotide
  Sense strand starting at position 82 of SEQ ID NO: 587720
uguaguuuccuaggaaaga

SEQ ID NO: 813443 - RNA, 19 nt, Artificial Sequence
  Description of Artificial Sequence: Synthetic oligonucleotide
  Antisense strand to SEQ ID NO: 813442
ucuuuccuaggaaacuaca

SEQ ID NO: 813444 - RNA, 19 nt, Artificial Sequence
  Description of Artificial Sequence: Synthetic oligonucleotide
  Sense strand starting at position 214 of SEQ ID NO: 587720
uguguuguagcccaggaau

SEQ ID NO: 813445 - RNA, 19 nt, Artificial Sequence
  Description of Artificial Sequence: Synthetic oligonucleotide
  Antisense strand to SEQ ID NO: 813444
auuccugggcuacaacaca

SEQ ID NO: 813446 - RNA, 19 nt, Artificial Sequence
  Description of Artificial Sequence: Synthetic oligonucleotide
  Sense strand starting at position 216 of SEQ ID NO: 587720
uguuguagcccaggaauuu

SEQ ID NO: 813447 - RNA, 19 nt, Artificial Sequence
  Description of Artificial Sequence: Synthetic oligonucleotide
  Antisense strand to SEQ ID NO: 813446
aaauuccugggcuacaaca

SEQ ID NO: 813448 - RNA, 19 nt, Artificial Sequence
  Description of Artificial Sequence: Synthetic oligonucleotide
  Sense strand starting at position 590 of SEQ ID NO: 587720
uucgaagaucuaggcagau

SEQ ID NO: 813449 - RNA, 19 nt, Artificial Sequence
  Description of Artificial Sequence: Synthetic oligonucleotide
  Antisense strand to SEQ ID NO: 813448
aucugccuagaucuucgaa

SEQ ID NO: 813450 - RNA, 19 nt, Artificial Sequence
  Description of Artificial Sequence: Synthetic oligonucleotide
  Sense strand starting at position 592 of SEQ ID NO: 587720
cgaagaucuaggcagaucu

SEQ ID NO: 813451 - RNA, 19 nt, Artificial Sequence
  Description of Artificial Sequence: Synthetic oligonucleotide
  Antisense strand to SEQ ID NO: 813450
agaucugccuagaucuucg

SEQ ID NO: 813452 - RNA, 19 nt, Artificial Sequence
  Description of Artificial Sequence: Synthetic oligonucleotide
  Sense strand starting at position 1288 of SEQ ID NO: 587720
ggauucgguuucuucagga

SEQ ID NO: 813453 - RNA, 19 nt, Artificial Sequence
  Description of Artificial Sequence: Synthetic oligonucleotide
  Antisense strand to SEQ ID NO: 813452
uccugaagaaaccgaaucc

SEQ ID NO: 813454 - RNA, 19 nt, Artificial Sequence
  Description of Artificial Sequence: Synthetic oligonucleotide
  Sense strand starting at position 1293 of SEQ ID NO: 587720
cgguuucuucaggaggaac

SEQ ID NO: 813455 - RNA, 19 nt, Artificial Sequence
  Description of Artificial Sequence: Synthetic oligonucleotide
  Antisense strand to SEQ ID NO: 813454
guuccuccugaagaaaccg

SEQ ID NO: 813456 - RNA, 19 nt, Artificial Sequence
  Description of Artificial Sequence: Synthetic oligonucleotide
  Sense strand starting at position 1430 of SEQ ID NO: 587720
aaggcuaagcgugaaaugu

SEQ ID NO: 813457 - RNA, 19 nt, Artificial Sequence
  Description of Artificial Sequence: Synthetic oligonucleotide
  Antisense strand to SEQ ID NO: 813456
acauuucacgcuuagccuu

SEQ ID NO: 813458 - RNA, 19 nt, Artificial Sequence
  Description of Artificial Sequence: Synthetic oligonucleotide
  Sense strand starting at position 1438 of SEQ ID NO: 587720
gcgugaaauguacauuaca

SEQ ID NO: 813459 - RNA, 19 nt, Artificial Sequence
  Description of Artificial Sequence: Synthetic oligonucleotide
  Antisense strand to SEQ ID NO: 813458
uguaauguacauuucacgc

SEQ ID NO: 813460 - RNA, 19 nt, Artificial Sequence
  Description of Artificial Sequence: Synthetic oligonucleotide
  Sense strand starting at position 1494 of SEQ ID NO: 587720
ucaccaagguuaucaaguu

SEQ ID NO: 813461 - RNA, 19 nt, Artificial Sequence
  Description of Artificial Sequence: Synthetic oligonucleotide
  Antisense strand to SEQ ID NO: 813460
aacuugauaaccuugguga

SEQ ID NO: 813462 - RNA, 19 nt, Artificial Sequence
  Description of Artificial Sequence: Synthetic oligonucleotide
  Sense strand starting at position 1598 of SEQ ID NO: 587720
gaaccugagugcucuguaa

SEQ ID NO: 813463 - RNA, 19 nt, Artificial Sequence
  Description of Artificial Sequence: Synthetic oligonucleotide
  Antisense strand to SEQ ID NO: 813462
uuacagagcacucagguuc

SEQ ID NO: 813464 - RNA, 19 nt, Artificial Sequence
  Description of Artificial Sequence: Synthetic oligonucleotide
  Sense strand starting at position 2157 of SEQ ID NO: 587720
ugugaauugucuucuauaa

SEQ ID NO: 813465 - RNA, 19 nt, Artificial Sequence
  Description of Artificial Sequence: Synthetic oligonucleotide
  Antisense strand to SEQ ID NO: 813464
uuauagaagacaauucaca

SEQ ID NO: 813466 - RNA, 19 nt, Artificial Sequence
  Description of Artificial Sequence: Synthetic oligonucleotide
  Sense strand starting at position 2353 of SEQ ID NO: 587720
gcguuucugagcuugcaga

SEQ ID NO: 813467 - RNA, 19 nt, Artificial Sequence
  Description of Artificial Sequence: Synthetic oligonucleotide
  Antisense strand to SEQ ID NO: 813466
ucugcaagcucagaaacgc

SEQ ID NO: 813468 - RNA, 19 nt, Artificial Sequence
  Description of Artificial Sequence: Synthetic oligonucleotide
  Sense strand starting at position 2506 of SEQ ID NO: 587720
agggacuugucccucaaca

SEQ ID NO: 813469 - RNA, 19 nt, Artificial Sequence
  Description of Artificial Sequence: Synthetic oligonucleotide
  Antisense strand to SEQ ID NO: 813468
uguugagggacaagucccu

SEQ ID NO: 813470 - RNA, 19 nt, Artificial Sequence
  Description of Artificial Sequence: Synthetic oligonucleotide
  Sense strand starting at position 2571 of SEQ ID NO: 587720
gucacuucugcaggaggaa

SEQ ID NO: 813471 - RNA, 19 nt, Artificial Sequence
  Description of Artificial Sequence: Synthetic oligonucleotide
  Antisense strand to SEQ ID NO: 813470
uuccuccugcagaagugac

SEQ ID NO: 813472 - RNA, 19 nt, Artificial Sequence
  Description of Artificial Sequence: Synthetic oligonucleotide
  Sense strand starting at position 2657 of SEQ ID NO: 587720
agagcaguuggcugggaau

SEQ ID NO: 813473 - RNA, 19 nt, Artificial Sequence
  Description of Artificial Sequence: Synthetic oligonucleotide
  Antisense strand to SEQ ID NO: 813472
auucccagccaacugcucu

SEQ ID NO: 813474 - RNA, 19 nt, Artificial Sequence
  Description of Artificial Sequence: Synthetic oligonucleotide
  Sense strand starting at position 2659 of SEQ ID NO: 587720
agcaguuggcugggaauaa

SEQ ID NO: 813475 - RNA, 19 nt, Artificial Sequence
  Description of Artificial Sequence: Synthetic oligonucleotide
  Antisense strand to SEQ ID NO: 813474
uuauucccagccaacugcu

SEQ ID NO: 813476 - RNA, 19 nt, Artificial Sequence
  Description of Artificial Sequence: Synthetic oligonucleotide
  Sense strand starting at position 2799 of SEQ ID NO: 587720
ggaguuugcuaugugauua

SEQ ID NO: 813477 - RNA, 19 nt, Artificial Sequence
  Description of Artificial Sequence: Synthetic oligonucleotide
  Antisense strand to SEQ ID NO: 813476
uaaucacauagcaaacucc

SEQ ID NO: 813478 - RNA, 19 nt, Artificial Sequence
  Description of Artificial Sequence: Synthetic oligonucleotide
  Sense strand starting at position 2803 of SEQ ID NO: 587720
uuugcuaugugauuaacau

SEQ ID NO: 813479 - RNA, 19 nt, Artificial Sequence
  Description of Artificial Sequence: Synthetic oligonucleotide
  Antisense strand to SEQ ID NO: 813478
auguuaaucacauagcaaa

SEQ ID NO: 813480 - RNA, 19 nt, Artificial Sequence
  Description of Artificial Sequence: Synthetic oligonucleotide
  Sense strand starting at position 2804 of SEQ ID NO: 587720
uugcuaugugauuaacauu

SEQ ID NO: 813481 - RNA, 19 nt, Artificial Sequence
  Description of Artificial Sequence: Synthetic oligonucleotide
  Antisense strand to SEQ ID NO: 813480
aauguuaaucacauagcaa

SEQ ID NO: 813482 - RNA, 19 nt, Artificial Sequence
  Description of Artificial Sequence: Synthetic oligonucleotide
  Sense strand starting at position 2816 of SEQ ID NO: 587720
uaacauuacggcuaugaag

SEQ ID NO: 813483 - RNA, 19 nt, Artificial Sequence
  Description of Artificial Sequence: Synthetic oligonucleotide
  Antisense strand to SEQ ID NO: 813482
cuucauagccguaauguua

SEQ ID NO: 813484 - RNA, 19 nt, Artificial Sequence
  Description of Artificial Sequence: Synthetic oligonucleotide
  Sense strand starting at position 2825 of SEQ ID NO: 587720
ggcuaugaagguugagaca

SEQ ID NO: 813485 - RNA, 19 nt, Artificial Sequence
  Description of Artificial Sequence: Synthetic oligonucleotide
  Antisense strand to SEQ ID NO: 813484
ugucucaaccuucauagcc

SEQ ID NO: 813486 - RNA, 19 nt, Artificial Sequence
  Description of Artificial Sequence: Synthetic oligonucleotide
  Sense strand starting at position 2956 of SEQ ID NO: 587720
gagaguaaaucugccuaaa

SEQ ID NO: 813487 - RNA, 19 nt, Artificial Sequence
  Description of Artificial Sequence: Synthetic oligonucleotide
  Antisense strand to SEQ ID NO: 813486
uuuaggcagauuuacucuc

SEQ ID NO: 813488 - RNA, 19 nt, Artificial Sequence
  Description of Artificial Sequence: Synthetic oligonucleotide
  Sense strand starting at position 2959 of SEQ ID NO: 587720
aguaaaucugccuaaauug

SEQ ID NO: 813489 - RNA, 19 nt, Artificial Sequence
  Description of Artificial Sequence: Synthetic oligonucleotide
  Antisense strand to SEQ ID NO: 813488
caauuuaggcagauuuacu

SEQ ID NO: 813490 - RNA, 19 nt, Artificial Sequence
  Description of Artificial Sequence: Synthetic oligonucleotide
  Sense strand starting at position 3009 of SEQ ID NO: 587720
ccaugaauugacugcuuaa

SEQ ID NO: 813491 - RNA, 19 nt, Artificial Sequence
  Description of Artificial Sequence: Synthetic oligonucleotide
  Antisense strand to SEQ ID NO: 813490
uuaagcagucaauucaugg

SEQ ID NO: 813492 - RNA, 19 nt, Artificial Sequence
  Description of Artificial Sequence: Synthetic oligonucleotide
  Sense strand starting at position 3012 of SEQ ID NO: 587720
ugaauugacugcuuaacuc

SEQ ID NO: 813493 - RNA, 19 nt, Artificial Sequence
  Description of Artificial Sequence: Synthetic oligonucleotide
  Antisense strand to SEQ ID NO: 813492
gaguuaagcagucaauuca

SEQ ID NO: 813494 - RNA, 19 nt, Artificial Sequence
  Description of Artificial Sequence: Synthetic oligonucleotide
  Sense strand starting at position 3164 of SEQ ID NO: 587720
gcuacauuuagccgagagu

SEQ ID NO: 813495 - RNA, 19 nt, Artificial Sequence
  Description of Artificial Sequence: Synthetic oligonucleotide
  Antisense strand to SEQ ID NO: 813494
acucucggcuaaauguagc

SEQ ID NO: 813496 - RNA, 19 nt, Artificial Sequence
  Description of Artificial Sequence: Synthetic oligonucleotide
  Sense strand starting at position 3167 of SEQ ID NO: 587720
acauuuagccgagagucgu

SEQ ID NO: 813497 - RNA, 19 nt, Artificial Sequence
  Description of Artificial Sequence: Synthetic oligonucleotide
  Antisense strand to SEQ ID NO: 813496
acgacucucggcuaaaugu

SEQ ID NO: 813498 - RNA, 19 nt, Artificial Sequence
  Description of Artificial Sequence: Synthetic oligonucleotide
  Sense strand starting at position 3230 of SEQ ID NO: 587720
gcgagagagucauuugagc

SEQ ID NO: 813499 - RNA, 19 nt, Artificial Sequence
  Description of Artificial Sequence: Synthetic oligonucleotide
  Antisense strand to SEQ ID NO: 813498
gcucaaaugacucucucgc

SEQ ID NO: 813500 - RNA, 19 nt, Artificial Sequence
  Description of Artificial Sequence: Synthetic oligonucleotide
  Sense strand starting at position 3419 of SEQ ID NO: 587720
ucagaacuauaagagaaua

SEQ ID NO: 813501 - RNA, 19 nt, Artificial Sequence
  Description of Artificial Sequence: Synthetic oligonucleotide
  Antisense strand to SEQ ID NO: 813500
uauucucuuauaguucuga

SEQ ID NO: 813502 - RNA, 19 nt, Artificial Sequence
  Description of Artificial Sequence: Synthetic oligonucleotide
  Sense strand starting at position 3508 of SEQ ID NO: 587720
ucuguauuaagaugggaac

SEQ ID NO: 813503 - RNA, 19 nt, Artificial Sequence
  Description of Artificial Sequence: Synthetic oligonucleotide
  Antisense strand to SEQ ID NO: 813502
guucccaucuuaauacaga

SEQ ID NO: 813504 - RNA, 19 nt, Artificial Sequence
  Description of Artificial Sequence: Synthetic oligonucleotide
  Sense strand starting at position 3511 of SEQ ID NO: 587720
guauuaagaugggaacaga

SEQ ID NO: 813505 - RNA, 19 nt, Artificial Sequence
  Description of Artificial Sequence: Synthetic oligonucleotide
  Antisense strand to SEQ ID NO: 813504
ucuguucccaucuuaauac

SEQ ID NO: 813506 - RNA, 19 nt, Artificial Sequence
  Description of Artificial Sequence: Synthetic oligonucleotide
  Sense strand starting at position 3581 of SEQ ID NO: 587720
ggcuuauuauccuugaaug

SEQ ID NO: 813507 - RNA, 19 nt, Artificial Sequence
  Description of Artificial Sequence: Synthetic oligonucleotide
  Antisense strand to SEQ ID NO: 813506
cauucaaggauaauaagcc

SEQ ID NO: 813508 - RNA, 19 nt, Artificial Sequence
  Description of Artificial Sequence: Synthetic oligonucleotide
  Sense strand starting at position 3582 of SEQ ID NO: 587720
gcuuauuauccuugaauga

SEQ ID NO: 813509 - RNA, 19 nt, Artificial Sequence
  Description of Artificial Sequence: Synthetic oligonucleotide
  Antisense strand to SEQ ID NO: 813508
ucauucaaggauaauaagc

SEQ ID NO: 813510 - RNA, 19 nt, Artificial Sequence
  Description of Artificial Sequence: Synthetic oligonucleotide
  Sense strand starting at position 3597 of SEQ ID NO: 587720
augagacaaucucaagaug

SEQ ID NO: 813511 - RNA, 19 nt, Artificial Sequence
  Description of Artificial Sequence: Synthetic oligonucleotide
  Antisense strand to SEQ ID NO: 813510
caucuugagauugucucau

SEQ ID NO: 813512 - RNA, 19 nt, Artificial Sequence
  Description of Artificial Sequence: Synthetic oligonucleotide
  Sense strand starting at position 3692 of SEQ ID NO: 587720
uugucucuagggugagaaa

SEQ ID NO: 813513 - RNA, 19 nt, Artificial Sequence
  Description of Artificial Sequence: Synthetic oligonucleotide
  Antisense strand to SEQ ID NO: 813512
uuucucacccuagagacaa

SEQ ID NO: 813514 - RNA, 19 nt, Artificial Sequence
  Description of Artificial Sequence: Synthetic oligonucleotide
  Sense strand starting at position 3871 of SEQ ID NO: 587720
cuuguaucuggucaccuua

SEQ ID NO: 813515 - RNA, 19 nt, Artificial Sequence
  Description of Artificial Sequence: Synthetic oligonucleotide
  Antisense strand to SEQ ID NO: 813514
uaaggugaccagauacaag

SEQ ID NO: 813516 - RNA, 19 nt, Artificial Sequence
  Description of Artificial Sequence: Synthetic oligonucleotide
  Sense strand starting at position 3873 of SEQ ID NO: 587720
uguaucuggucaccuuaau

SEQ ID NO: 813517 - RNA, 19 nt, Artificial Sequence
  Description of Artificial Sequence: Synthetic oligonucleotide
  Antisense strand to SEQ ID NO: 813516
auuaaggugaccagauaca

SEQ ID NO: 813518 - RNA, 19 nt, Artificial Sequence
  Description of Artificial Sequence: Synthetic oligonucleotide
  Sense strand starting at position 3897 of SEQ ID NO: 587720
uucuuaguagcuuaaauag

SEQ ID NO: 813519 - RNA, 19 nt, Artificial Sequence
  Description of Artificial Sequence: Synthetic oligonucleotide
  Antisense strand to SEQ ID NO: 813518
cuauuuaagcuacuaagaa

SEQ ID NO: 813520 - RNA, 19 nt, Artificial Sequence
  Description of Artificial Sequence: Synthetic oligonucleotide
  Sense strand starting at position 41 of SEQ ID NO: 587721
uuaccuuagucaccaugau

SEQ ID NO: 813521 - RNA, 19 nt, Artificial Sequence
  Description of Artificial Sequence: Synthetic oligonucleotide
  Antisense strand to SEQ ID NO: 813520
aucauggugacuaagguaa

SEQ ID NO: 813522 - RNA, 19 nt, Artificial Sequence
  Description of Artificial Sequence: Synthetic oligonucleotide
  Sense strand starting at position 649 of SEQ ID NO: 587721
accaguacagacuguguaa

SEQ ID NO: 813523 - RNA, 19 nt, Artificial Sequence
  Description of Artificial Sequence: Synthetic oligonucleotide
  Antisense strand to SEQ ID NO: 813522
uuacacagucuguacuggu

SEQ ID NO: 813524 - RNA, 19 nt, Artificial Sequence
  Description of Artificial Sequence: Synthetic oligonucleotide
  Sense strand starting at position 731 of SEQ ID NO: 587721
ccaccucguucuuggcaaa

SEQ ID NO: 813525 - RNA, 19 nt, Artificial Sequence
  Description of Artificial Sequence: Synthetic oligonucleotide
  Antisense strand to SEQ ID NO: 813524
uuugccaagaacgaggugg

SEQ ID NO: 813526 - RNA, 19 nt, Artificial Sequence
  Description of Artificial Sequence: Synthetic oligonucleotide
  Sense strand starting at position 1060 of SEQ ID NO: 587721
acgcaagugcugcgagaau

SEQ ID NO: 813527 - RNA, 19 nt, Artificial Sequence
  Description of Artificial Sequence: Synthetic oligonucleotide
  Antisense strand to SEQ ID NO: 813526
auucucgcagcacuugcgu

SEQ ID NO: 813528 - RNA, 19 nt, Artificial Sequence
  Description of Artificial Sequence: Synthetic oligonucleotide
  Sense strand starting at position 1071 of SEQ ID NO: 587721
gcgagaaucuaucaagagc

SEQ ID NO: 813529 - RNA, 19 nt, Artificial Sequence
  Description of Artificial Sequence: Synthetic oligonucleotide
  Antisense strand to SEQ ID NO: 813528
gcucuugauagauucucgc

SEQ ID NO: 813530 - RNA, 19 nt, Artificial Sequence
  Description of Artificial Sequence: Synthetic oligonucleotide
  Sense strand starting at position 1200 of SEQ ID NO: 587721
ccgagauucccagaccuuu

SEQ ID NO: 813531 - RNA, 19 nt, Artificial Sequence
  Description of Artificial Sequence: Synthetic oligonucleotide
  Antisense strand to SEQ ID NO: 813530
aaaggucugggaaucucgg

SEQ ID NO: 813532 - RNA, 19 nt, Artificial Sequence
  Description of Artificial Sequence: Synthetic oligonucleotide
  Sense strand starting at position 2568 of SEQ ID NO: 587721
cacgcucacucugugaaga

SEQ ID NO: 813533 - RNA, 19 nt, Artificial Sequence
  Description of Artificial Sequence: Synthetic oligonucleotide
  Antisense strand to SEQ ID NO: 813532
ucuucacagagugagcgug

SEQ ID NO: 813534 - RNA, 19 nt, Artificial Sequence
  Description of Artificial Sequence: Synthetic oligonucleotide
  Sense strand starting at position 2570 of SEQ ID NO: 587721
cgcucacucugugaagagu

SEQ ID NO: 813535 - RNA, 19 nt, Artificial Sequence
  Description of Artificial Sequence: Synthetic oligonucleotide
  Antisense strand to SEQ ID NO: 813534
acucuucacagagugagcg

SEQ ID NO: 813536 - RNA, 19 nt, Artificial Sequence
  Description of Artificial Sequence: Synthetic oligonucleotide
  Sense strand starting at position 2682 of SEQ ID NO: 587721
uguguaaacuccucuccca

SEQ ID NO: 813537 - RNA, 19 nt, Artificial Sequence
  Description of Artificial Sequence: Synthetic oligonucleotide
  Antisense strand to SEQ ID NO: 813536
ugggagaggaguuuacaca

SEQ ID NO: 813538 - RNA, 19 nt, Artificial Sequence
  Description of Artificial Sequence: Synthetic oligonucleotide
  Sense strand starting at position 2929 of SEQ ID NO: 587721
gggauaaugugcugcuuac

SEQ ID NO: 813539 - RNA, 19 nt, Artificial Sequence
  Description of Artificial Sequence: Synthetic oligonucleotide
  Antisense strand to SEQ ID NO: 813538
guaagcagcacauuauccc

SEQ ID NO: 813540 - RNA, 19 nt, Artificial Sequence
  Description of Artificial Sequence: Synthetic oligonucleotide
  Sense strand starting at position 2941 of SEQ ID NO: 587721
ugcuuaccgucuuguugua

SEQ ID NO: 813541 - RNA, 19 nt, Artificial Sequence
  Description of Artificial Sequence: Synthetic oligonucleotide
  Antisense strand to SEQ ID NO: 813540
uacaacaagacgguaagca

SEQ ID NO: 813542 - RNA, 19 nt, Artificial Sequence
  Description of Artificial Sequence: Synthetic oligonucleotide
  Sense strand starting at position 2942 of SEQ ID NO: 587721
gcuuaccgucuuguuguaa

SEQ ID NO: 813543 - RNA, 19 nt, Artificial Sequence
  Description of Artificial Sequence: Synthetic oligonucleotide
  Antisense strand to SEQ ID NO: 813542
uuacaacaagacgguaagc

SEQ ID NO: 813544 - RNA, 19 nt, Artificial Sequence
  Description of Artificial Sequence: Synthetic oligonucleotide
  Sense strand starting at position 2943 of SEQ ID NO: 587721
cuuaccgucuuguuguaaa

SEQ ID NO: 813545 - RNA, 19 nt, Artificial Sequence
  Description of Artificial Sequence: Synthetic oligonucleotide
  Antisense strand to SEQ ID NO: 813544
uuuacaacaagacgguaag

SEQ ID NO: 813546 - RNA, 19 nt, Artificial Sequence
  Description of Artificial Sequence: Synthetic oligonucleotide
  Sense strand starting at position 2991 of SEQ ID NO: 587721
auggcacagaggugucaaa

SEQ ID NO: 813547 - RNA, 19 nt, Artificial Sequence
  Description of Artificial Sequence: Synthetic oligonucleotide
  Antisense strand to SEQ ID NO: 813546
uuugacaccucugugccau

SEQ ID NO: 813548 - RNA, 19 nt, Artificial Sequence
  Description of Artificial Sequence: Synthetic oligonucleotide
  Sense strand starting at position 3139 of SEQ ID NO: 587721
cgugcuugccucugggaau

SEQ ID NO: 813549 - RNA, 19 nt, Artificial Sequence
  Description of Artificial Sequence: Synthetic oligonucleotide
  Antisense strand to SEQ ID NO: 813548
auucccagaggcaagcacg

SEQ ID NO: 813550 - RNA, 19 nt, Artificial Sequence
  Description of Artificial Sequence: Synthetic oligonucleotide
  Sense strand starting at position 3140 of SEQ ID NO: 587721
gugcuugccucugggaaug

SEQ ID NO: 813551 - RNA, 19 nt, Artificial Sequence
  Description of Artificial Sequence: Synthetic oligonucleotide
  Antisense strand to SEQ ID NO: 813550
cauucccagaggcaagcac

SEQ ID NO: 813552 - RNA, 19 nt, Artificial Sequence
  Description of Artificial Sequence: Synthetic oligonucleotide
  Sense strand starting at position 3204 of SEQ ID NO: 587721
ccugcaugccuuggacaga

SEQ ID NO: 813553 - RNA, 19 nt, Artificial Sequence
  Description of Artificial Sequence: Synthetic oligonucleotide
  Antisense strand to SEQ ID NO: 813552
ucuguccaaggcaugcagg

SEQ ID NO: 813554 - RNA, 19 nt, Artificial Sequence
  Description of Artificial Sequence: Synthetic oligonucleotide
  Sense strand starting at position 3261 of SEQ ID NO: 587721
ugauggguggguugugaau

SEQ ID NO: 813555 - RNA, 19 nt, Artificial Sequence
  Description of Artificial Sequence: Synthetic oligonucleotide
  Antisense strand to SEQ ID NO: 813554
auucacaacccacccauca

SEQ ID NO: 813556 - RNA, 19 nt, Artificial Sequence
  Description of Artificial Sequence: Synthetic oligonucleotide
  Sense strand starting at position 3528 of SEQ ID NO: 587721
ggguuuguuagcugcggga

SEQ ID NO: 813557 - RNA, 19 nt, Artificial Sequence
  Description of Artificial Sequence: Synthetic oligonucleotide
  Antisense strand to SEQ ID NO: 813556
ucccgcagcuaacaaaccc

SEQ ID NO: 813558 - RNA, 19 nt, Artificial Sequence
  Description of Artificial Sequence: Synthetic oligonucleotide
  Sense strand starting at position 3530 of SEQ ID NO: 587721
guuuguuagcugcgggaag

SEQ ID NO: 813559 - RNA, 19 nt, Artificial Sequence
  Description of Artificial Sequence: Synthetic oligonucleotide
  Antisense strand to SEQ ID NO: 813558
cuucccgcagcuaacaaac

SEQ ID NO: 813560 - RNA, 19 nt, Artificial Sequence
  Description of Artificial Sequence: Synthetic oligonucleotide
  Sense strand starting at position 3548 of SEQ ID NO: 587721
gugccagcgcuccaucaaa

SEQ ID NO: 813561 - RNA, 19 nt, Artificial Sequence
  Description of Artificial Sequence: Synthetic oligonucleotide
  Antisense strand to SEQ ID NO: 813560
uuugauggagcgcuggcac

SEQ ID NO: 813562 - RNA, 19 nt, Artificial Sequence
  Description of Artificial Sequence: Synthetic oligonucleotide
  Sense strand starting at position 3604 of SEQ ID NO: 587721
aggccucagcccugauaug

SEQ ID NO: 813563 - RNA, 19 nt, Artificial Sequence
  Description of Artificial Sequence: Synthetic oligonucleotide
  Antisense strand to SEQ ID NO: 813562
cauaucagggcugaggccu

SEQ ID NO: 813564 - RNA, 19 nt, Artificial Sequence
  Description of Artificial Sequence: Synthetic oligonucleotide
  Sense strand starting at position 3605 of SEQ ID NO: 587721
ggccucagcccugauaugu

SEQ ID NO: 813565 - RNA, 19 nt, Artificial Sequence
  Description of Artificial Sequence: Synthetic oligonucleotide
  Antisense strand to SEQ ID NO: 813564
acauaucagggcugaggcc

SEQ ID NO: 813566 - RNA, 19 nt, Artificial Sequence
  Description of Artificial Sequence: Synthetic oligonucleotide
  Sense strand starting at position 3683 of SEQ ID NO: 587721
gccaguggguucugaggaa

SEQ ID NO: 813567 - RNA, 19 nt, Artificial Sequence
  Description of Artificial Sequence: Synthetic oligonucleotide
  Antisense strand to SEQ ID NO: 813566
uuccucagaacccacuggc

SEQ ID NO: 813568 - RNA, 19 nt, Artificial Sequence
  Description of Artificial Sequence: Synthetic oligonucleotide
  Sense strand starting at position 3687 of SEQ ID NO: 587721
guggguucugaggaauggu

SEQ ID NO: 813569 - RNA, 19 nt, Artificial Sequence
  Description of Artificial Sequence: Synthetic oligonucleotide
  Antisense strand to SEQ ID NO: 813568
accauuccucagaacccac

SEQ ID NO: 813570 - RNA, 19 nt, Artificial Sequence
  Description of Artificial Sequence: Synthetic oligonucleotide
  Sense strand starting at position 3696 of SEQ ID NO: 587721
gaggaaugguuguuuccag

SEQ ID NO: 813571 - RNA, 19 nt, Artificial Sequence
  Description of Artificial Sequence: Synthetic oligonucleotide
  Antisense strand to SEQ ID NO: 813570
cuggaaacaaccauuccuc

SEQ ID NO: 813572 - RNA, 19 nt, Artificial Sequence
  Description of Artificial Sequence: Synthetic oligonucleotide
  Sense strand starting at position 3940 of SEQ ID NO: 587721
acaccugucucaggugaca

SEQ ID NO: 813573 - RNA, 19 nt, Artificial Sequence
  Description of Artificial Sequence: Synthetic oligonucleotide
  Antisense strand to SEQ ID NO: 813572
ugucaccugagacaggugu

SEQ ID NO: 813574 - RNA, 19 nt, Artificial Sequence
  Description of Artificial Sequence: Synthetic oligonucleotide
  Sense strand starting at position 243 of SEQ ID NO: 587722
ggaugcaagaggugucuga

SEQ ID NO: 813575 - RNA, 19 nt, Artificial Sequence
  Description of Artificial Sequence: Synthetic oligonucleotide
  Antisense strand to SEQ ID NO: 813574
ucagacaccucuugcaucc

SEQ ID NO: 813576 - RNA, 19 nt, Artificial Sequence
  Description of Artificial Sequence: Synthetic oligonucleotide
  Sense strand starting at position 247 of SEQ ID NO: 587722
gcaagaggugucugacuca

SEQ ID NO: 813577 - RNA, 19 nt, Artificial Sequence
  Description of Artificial Sequence: Synthetic oligonucleotide
  Antisense strand to SEQ ID NO: 813576
ugagucagacaccucuugc

SEQ ID NO: 813578 - RNA, 19 nt, Artificial Sequence
  Description of Artificial Sequence: Synthetic oligonucleotide
  Sense strand starting at position 254 of SEQ ID NO: 587722
gugucugacucagguucua

SEQ ID NO: 813579 - RNA, 19 nt, Artificial Sequence
  Description of Artificial Sequence: Synthetic oligonucleotide
  Antisense strand to SEQ ID NO: 813578
uagaaccugagucagacac

SEQ ID NO: 813580 - RNA, 19 nt, Artificial Sequence
  Description of Artificial Sequence: Synthetic oligonucleotide
  Sense strand starting at position 312 of SEQ ID NO: 587722
gcauucccgaucugugacu

SEQ ID NO: 813581 - RNA, 19 nt, Artificial Sequence
  Description of Artificial Sequence: Synthetic oligonucleotide
  Antisense strand to SEQ ID NO: 813580
agucacagaucgggaaugc

SEQ ID NO: 813582 - RNA, 19 nt, Artificial Sequence
  Description of Artificial Sequence: Synthetic oligonucleotide
  Sense strand starting at position 321 of SEQ ID NO: 587722
aucugugacucacugcaau

SEQ ID NO: 813583 - RNA, 19 nt, Artificial Sequence
  Description of Artificial Sequence: Synthetic oligonucleotide
  Antisense strand to SEQ ID NO: 813582
auugcagugagucacagau

SEQ ID NO: 813584 - RNA, 19 nt, Artificial Sequence
  Description of Artificial Sequence: Synthetic oligonucleotide
  Sense strand starting at position 477 of SEQ ID NO: 587722
gacagccucuaugaggaau

SEQ ID NO: 813585 - RNA, 19 nt, Artificial Sequence
  Description of Artificial Sequence: Synthetic oligonucleotide
  Antisense strand to SEQ ID NO: 813584
auuccucauagaggcuguc

SEQ ID NO: 813586 - RNA, 19 nt, Artificial Sequence
  Description of Artificial Sequence: Synthetic oligonucleotide
  Sense strand starting at position 479 of SEQ ID NO: 587722
cagccucuaugaggaauga

SEQ ID NO: 813587 - RNA, 19 nt, Artificial Sequence
  Description of Artificial Sequence: Synthetic oligonucleotide
  Antisense strand to SEQ ID NO: 813586
ucauuccucauagaggcug

SEQ ID NO: 813588 - RNA, 19 nt, Artificial Sequence
  Description of Artificial Sequence: Synthetic oligonucleotide
  Sense strand starting at position 580 of SEQ ID NO: 587722
gggcauaccuuucccagaa

SEQ ID NO: 813589 - RNA, 19 nt, Artificial Sequence
  Description of Artificial Sequence: Synthetic oligonucleotide
  Antisense strand to SEQ ID NO: 813588
uucugggaaagguaugccc

SEQ ID NO: 813590 - RNA, 19 nt, Artificial Sequence
  Description of Artificial Sequence: Synthetic oligonucleotide
  Sense strand starting at position 584 of SEQ ID NO: 587722
auaccuuucccagaagguu

SEQ ID NO: 813591 - RNA, 19 nt, Artificial Sequence
  Description of Artificial Sequence: Synthetic oligonucleotide
  Antisense strand to SEQ ID NO: 813590
aaccuucugggaaagguau

SEQ ID NO: 813592 - RNA, 19 nt, Artificial Sequence
  Description of Artificial Sequence: Synthetic oligonucleotide
  Sense strand starting at position 1340 of SEQ ID NO: 587722
caggaacugugcuuggaaa

SEQ ID NO: 813593 - RNA, 19 nt, Artificial Sequence
  Description of Artificial Sequence: Synthetic oligonucleotide
  Antisense strand to SEQ ID NO: 813592
uuuccaagcacaguuccug

SEQ ID NO: 813594 - RNA, 19 nt, Artificial Sequence
  Description of Artificial Sequence: Synthetic oligonucleotide
  Sense strand starting at position 1341 of SEQ ID NO: 587722
aggaacugugcuuggaaau

SEQ ID NO: 813595 - RNA, 19 nt, Artificial Sequence
  Description of Artificial Sequence: Synthetic oligonucleotide
  Antisense strand to SEQ ID NO: 813594
auuuccaagcacaguuccu

SEQ ID NO: 813596 - RNA, 19 nt, Artificial Sequence
  Description of Artificial Sequence: Synthetic oligonucleotide
  Sense strand starting at position 1342 of SEQ ID NO: 587722
ggaacugugcuuggaaaua

SEQ ID NO: 813597 - RNA, 19 nt, Artificial Sequence
  Description of Artificial Sequence: Synthetic oligonucleotide
  Antisense strand to SEQ ID NO: 813596
uauuuccaagcacaguucc

SEQ ID NO: 813598 - RNA, 19 nt, Artificial Sequence
  Description of Artificial Sequence: Synthetic oligonucleotide
  Sense strand starting at position 1372 of SEQ ID NO: 587722
agagccuugcccgugcaaa

SEQ ID NO: 813599 - RNA, 19 nt, Artificial Sequence
  Description of Artificial Sequence: Synthetic oligonucleotide
  Antisense strand to SEQ ID NO: 813598
uuugcacgggcaaggcucu

SEQ ID NO: 813600 - RNA, 19 nt, Artificial Sequence
  Description of Artificial Sequence: Synthetic oligonucleotide
  Sense strand starting at position 1373 of SEQ ID NO: 587722
gagccuugcccgugcaaau

SEQ ID NO: 813601 - RNA, 19 nt, Artificial Sequence
  Description of Artificial Sequence: Synthetic oligonucleotide
  Antisense strand to SEQ ID NO: 813600
auuugcacgggcaaggcuc

SEQ ID NO: 813602 - RNA, 19 nt, Artificial Sequence
  Description of Artificial Sequence: Synthetic oligonucleotide
  Sense strand starting at position 1425 of SEQ ID NO: 587722
cugugaauguucccagccu

SEQ ID NO: 813603 - RNA, 19 nt, Artificial Sequence
  Description of Artificial Sequence: Synthetic oligonucleotide
  Antisense strand to SEQ ID NO: 813602
aggcugggaacauucacag

SEQ ID NO: 813604 - RNA, 19 nt, Artificial Sequence
  Description of Artificial Sequence: Synthetic oligonucleotide
  Sense strand starting at position 1479 of SEQ ID NO: 587722
gggcucuuguucuaguaau

SEQ ID NO: 813605 - RNA, 19 nt, Artificial Sequence
  Description of Artificial Sequence: Synthetic oligonucleotide
  Antisense strand to SEQ ID NO: 813604
auuacuagaacaagagccc

SEQ ID NO: 813606 - RNA, 19 nt, Artificial Sequence
  Description of Artificial Sequence: Synthetic oligonucleotide
  Sense strand starting at position 1585 of SEQ ID NO: 587722
caaggucuguuccugaagu

SEQ ID NO: 813607 - RNA, 19 nt, Artificial Sequence
  Description of Artificial Sequence: Synthetic oligonucleotide
  Antisense strand to SEQ ID NO: 813606
acuucaggaacagaccuug

SEQ ID NO: 813608 - RNA, 19 nt, Artificial Sequence
  Description of Artificial Sequence: Synthetic oligonucleotide
  Sense strand starting at position 1774 of SEQ ID NO: 587722
uuaccuuagucaccaugau

SEQ ID NO: 813609 - RNA, 19 nt, Artificial Sequence
  Description of Artificial Sequence: Synthetic oligonucleotide
  Antisense strand to SEQ ID NO: 813608
aucauggugacuaagguaa

SEQ ID NO: 813610 - RNA, 19 nt, Artificial Sequence
  Description of Artificial Sequence: Synthetic oligonucleotide
  Sense strand starting at position 2382 of SEQ ID NO: 587722
accaguacagacuguguaa

SEQ ID NO: 813611 - RNA, 19 nt, Artificial Sequence
  Description of Artificial Sequence: Synthetic oligonucleotide
  Antisense strand to SEQ ID NO: 813610
uuacacagucuguacuggu

SEQ ID NO: 813612 - RNA, 19 nt, Artificial Sequence
  Description of Artificial Sequence: Synthetic oligonucleotide
  Sense strand starting at position 2464 of SEQ ID NO: 587722
ccaccucguucuuggcaaa

SEQ ID NO: 813613 - RNA, 19 nt, Artificial Sequence
  Description of Artificial Sequence: Synthetic oligonucleotide
  Antisense strand to SEQ ID NO: 813612
uuugccaagaacgaggugg

SEQ ID NO: 813614 - RNA, 19 nt, Artificial Sequence
  Description of Artificial Sequence: Synthetic oligonucleotide
  Sense strand starting at position 2793 of SEQ ID NO: 587722
acgcaagugcugcgagaau

SEQ ID NO: 813615 - RNA, 19 nt, Artificial Sequence
  Description of Artificial Sequence: Synthetic oligonucleotide
  Antisense strand to SEQ ID NO: 813614
auucucgcagcacuugcgu

SEQ ID NO: 813616 - RNA, 19 nt, Artificial Sequence
  Description of Artificial Sequence: Synthetic oligonucleotide
  Sense strand starting at position 2804 of SEQ ID NO: 587722
gcgagaaucuaucaagagc

SEQ ID NO: 813617 - RNA, 19 nt, Artificial Sequence
  Description of Artificial Sequence: Synthetic oligonucleotide
  Antisense strand to SEQ ID NO: 813616
gcucuugauagauucucgc

SEQ ID NO: 813618 - RNA, 19 nt, Artificial Sequence
  Description of Artificial Sequence: Synthetic oligonucleotide
  Sense strand starting at position 2933 of SEQ ID NO: 587722
ccgagauucccagaccuuu

SEQ ID NO: 813619 - RNA, 19 nt, Artificial Sequence
  Description of Artificial Sequence: Synthetic oligonucleotide
  Antisense strand to SEQ ID NO: 813618
aaaggucugggaaucucgg

SEQ ID NO: 813620 - RNA, 19 nt, Artificial Sequence
  Description of Artificial Sequence: Synthetic oligonucleotide
  Sense strand starting at position 43 of SEQ ID NO: 587723
aucgguacaagugauacau

SEQ ID NO: 813621 - RNA, 19 nt, Artificial Sequence
  Description of Artificial Sequence: Synthetic oligonucleotide
  Antisense strand to SEQ ID NO: 813620
auguaucacuuguaccgau

SEQ ID NO: 813622 - RNA, 19 nt, Artificial Sequence
  Description of Artificial Sequence: Synthetic oligonucleotide
  Sense strand starting at position 53 of SEQ ID NO: 587723
gugauacauucucuccauc

SEQ ID NO: 813623 - RNA, 19 nt, Artificial Sequence
  Description of Artificial Sequence: Synthetic oligonucleotide
  Antisense strand to SEQ ID NO: 813622
gauggagagaauguaucac

SEQ ID NO: 813624 - RNA, 19 nt, Artificial Sequence
  Description of Artificial Sequence: Synthetic oligonucleotide
  Sense strand starting at position 74 of SEQ ID NO: 587723
aucagauacccuugggagu

SEQ ID NO: 813625 - RNA, 19 nt, Artificial Sequence
  Description of Artificial Sequence: Synthetic oligonucleotide
  Antisense strand to SEQ ID NO: 813624
acucccaaggguaucugau

SEQ ID NO: 813626 - RNA, 19 nt, Artificial Sequence
  Description of Artificial Sequence: Synthetic oligonucleotide
  Sense strand starting at position 204 of SEQ ID NO: 587723
cugacaagcuuguuaaauu

SEQ ID NO: 813627 - RNA, 19 nt, Artificial Sequence
  Description of Artificial Sequence: Synthetic oligonucleotide
  Antisense strand to SEQ ID NO: 813626
aauuuaacaagcuugucag

SEQ ID NO: 813628 - RNA, 19 nt, Artificial Sequence
  Description of Artificial Sequence: Synthetic oligonucleotide
  Sense strand starting at position 212 of SEQ ID NO: 587723
cuuguuaaauuaguguaga

SEQ ID NO: 813629 - RNA, 19 nt, Artificial Sequence
  Description of Artificial Sequence: Synthetic oligonucleotide
  Antisense strand to SEQ ID NO: 813628
ucuacacuaauuuaacaag

SEQ ID NO: 813630 - RNA, 19 nt, Artificial Sequence
  Description of Artificial Sequence: Synthetic oligonucleotide
  Sense strand starting at position 215 of SEQ ID NO: 587723
guuaaauuaguguagaagg

SEQ ID NO: 813631 - RNA, 19 nt, Artificial Sequence
  Description of Artificial Sequence: Synthetic oligonucleotide
  Antisense strand to SEQ ID NO: 813630
ccuucuacacuaauuuaac

SEQ ID NO: 813632 - RNA, 19 nt, Artificial Sequence
  Description of Artificial Sequence: Synthetic oligonucleotide
  Sense strand starting at position 452 of SEQ ID NO: 587723
aagagagccguccauucuu

SEQ ID NO: 813633 - RNA, 19 nt, Artificial Sequence
  Description of Artificial Sequence: Synthetic oligonucleotide
  Antisense strand to SEQ ID NO: 813632
aagaauggacggcucucuu

SEQ ID NO: 813634 - RNA, 19 nt, Artificial Sequence
  Description of Artificial Sequence: Synthetic oligonucleotide
  Sense strand starting at position 470 of SEQ ID NO: 587723
uacugaugugcuuagcaga

SEQ ID NO: 813635 - RNA, 19 nt, Artificial Sequence
  Description of Artificial Sequence: Synthetic oligonucleotide
  Antisense strand to SEQ ID NO: 813634
ucugcuaagcacaucagua

SEQ ID NO: 813636 - RNA, 19 nt, Artificial Sequence
  Description of Artificial Sequence: Synthetic oligonucleotide
  Sense strand starting at position 716 of SEQ ID NO: 587723
ucuggaaaugccuagccau

SEQ ID NO: 813637 - RNA, 19 nt, Artificial Sequence
  Description of Artificial Sequence: Synthetic oligonucleotide
  Antisense strand to SEQ ID NO: 813636
auggcuaggcauuuccaga

SEQ ID NO: 813638 - RNA, 19 nt, Artificial Sequence
  Description of Artificial Sequence: Synthetic oligonucleotide
  Sense strand starting at position 979 of SEQ ID NO: 587723
gcagguaguuaagugaaua

SEQ ID NO: 813639 - RNA, 19 nt, Artificial Sequence
  Description of Artificial Sequence: Synthetic oligonucleotide
  Antisense strand to SEQ ID NO: 813638
uauucacuuaacuaccugc

SEQ ID NO: 813640 - RNA, 19 nt, Artificial Sequence
  Description of Artificial Sequence: Synthetic oligonucleotide
  Sense strand starting at position 1121 of SEQ ID NO: 587723
ggcagagaugcucauuaga

SEQ ID NO: 813641 - RNA, 19 nt, Artificial Sequence
  Description of Artificial Sequence: Synthetic oligonucleotide
  Antisense strand to SEQ ID NO: 813640
ucuaaugagcaucucugcc

SEQ ID NO: 813642 - RNA, 19 nt, Artificial Sequence
  Description of Artificial Sequence: Synthetic oligonucleotide
  Sense strand starting at position 1123 of SEQ ID NO: 587723
cagagaugcucauuagagg

SEQ ID NO: 813643 - RNA, 19 nt, Artificial Sequence
  Description of Artificial Sequence: Synthetic oligonucleotide
  Antisense strand to SEQ ID NO: 813642
ccucuaaugagcaucucug

SEQ ID NO: 813644 - RNA, 19 nt, Artificial Sequence
  Description of Artificial Sequence: Synthetic oligonucleotide
  Sense strand starting at position 2624 of SEQ ID NO: 587723
ucgagaguagcuguugcuu

SEQ ID NO: 813645 - RNA, 19 nt, Artificial Sequence
  Description of Artificial Sequence: Synthetic oligonucleotide
  Antisense strand to SEQ ID NO: 813644
aagcaacagcuacucucga

SEQ ID NO: 813646 - RNA, 19 nt, Artificial Sequence
  Description of Artificial Sequence: Synthetic oligonucleotide
  Sense strand starting at position 2638 of SEQ ID NO: 587723
ugcuucguucguuugauac

SEQ ID NO: 813647 - RNA, 19 nt, Artificial Sequence
  Description of Artificial Sequence: Synthetic oligonucleotide
  Antisense strand to SEQ ID NO: 813646
guaucaaacgaacgaagca

SEQ ID NO: 813648 - RNA, 19 nt, Artificial Sequence
  Description of Artificial Sequence: Synthetic oligonucleotide
  Sense strand starting at position 2732 of SEQ ID NO: 587723
gcaagagggaguugugaug

SEQ ID NO: 813649 - RNA, 19 nt, Artificial Sequence
  Description of Artificial Sequence: Synthetic oligonucleotide
  Antisense strand to SEQ ID NO: 813648
caucacaacucccucuugc

SEQ ID NO: 813650 - RNA, 19 nt, Artificial Sequence
  Description of Artificial Sequence: Synthetic oligonucleotide
  Sense strand starting at position 2741 of SEQ ID NO: 587723
aguugugaugagggaauua

SEQ ID NO: 813651 - RNA, 19 nt, Artificial Sequence
  Description of Artificial Sequence: Synthetic oligonucleotide
  Antisense strand to SEQ ID NO: 813650
uaauucccucaucacaacu

SEQ ID NO: 813652 - RNA, 19 nt, Artificial Sequence
  Description of Artificial Sequence: Synthetic oligonucleotide
  Sense strand starting at position 2751 of SEQ ID NO: 587723
agggaauuaucucuguagc

SEQ ID NO: 813653 - RNA, 19 nt, Artificial Sequence
  Description of Artificial Sequence: Synthetic oligonucleotide
  Antisense strand to SEQ ID NO: 813652
gcuacagagauaauucccu

SEQ ID NO: 813654 - RNA, 19 nt, Artificial Sequence
  Description of Artificial Sequence: Synthetic oligonucleotide
  Sense strand starting at position 2754 of SEQ ID NO: 587723
gaauuaucucuguagcgua

SEQ ID NO: 813655 - RNA, 19 nt, Artificial Sequence
  Description of Artificial Sequence: Synthetic oligonucleotide
  Antisense strand to SEQ ID NO: 813654
uacgcuacagagauaauuc

SEQ ID NO: 813656 - RNA, 19 nt, Artificial Sequence
  Description of Artificial Sequence: Synthetic oligonucleotide
  Sense strand starting at position 2769 of SEQ ID NO: 587723
cguagaugugugcucacgu

SEQ ID NO: 813657 - RNA, 19 nt, Artificial Sequence
  Description of Artificial Sequence: Synthetic oligonucleotide
  Antisense strand to SEQ ID NO: 813656
acgugagcacacaucuacg

SEQ ID NO: 813658 - RNA, 19 nt, Artificial Sequence
  Description of Artificial Sequence: Synthetic oligonucleotide
  Sense strand starting at position 2776 of SEQ ID NO: 587723
gugugcucacguucucuga

SEQ ID NO: 813659 - RNA, 19 nt, Artificial Sequence
  Description of Artificial Sequence: Synthetic oligonucleotide
  Antisense strand to SEQ ID NO: 813658
ucagagaacgugagcacac

SEQ ID NO: 813660 - RNA, 19 nt, Artificial Sequence
  Description of Artificial Sequence: Synthetic oligonucleotide
  Sense strand starting at position 2902 of SEQ ID NO: 587723
ccauuucuguuccaugaga

SEQ ID NO: 813661 - RNA, 19 nt, Artificial Sequence
  Description of Artificial Sequence: Synthetic oligonucleotide
  Antisense strand to SEQ ID NO: 813660
ucucauggaacagaaaugg

SEQ ID NO: 813662 - RNA, 19 nt, Artificial Sequence
  Description of Artificial Sequence: Synthetic oligonucleotide
  Sense strand starting at position 2915 of SEQ ID NO: 587723
augagauuguuuccaccuc

SEQ ID NO: 813663 - RNA, 19 nt, Artificial Sequence
  Description of Artificial Sequence: Synthetic oligonucleotide
  Antisense strand to SEQ ID NO: 813662
gagguggaaacaaucucau

SEQ ID NO: 813664 - RNA, 19 nt, Artificial Sequence
  Description of Artificial Sequence: Synthetic oligonucleotide
  Sense strand starting at position 2921 of SEQ ID NO: 587723
uuguuuccaccucagauga

SEQ ID NO: 813665 - RNA, 19 nt, Artificial Sequence
  Description of Artificial Sequence: Synthetic oligonucleotide
  Antisense strand to SEQ ID NO: 813664
ucaucugagguggaaacaa

SEQ ID NO: 813666 - RNA, 19 nt, Artificial Sequence
  Description of Artificial Sequence: Synthetic oligonucleotide
  Sense strand starting at position 3030 of SEQ ID NO: 587723
augggauaguggcuucuga

SEQ ID NO: 813667 - RNA, 19 nt, Artificial Sequence
  Description of Artificial Sequence: Synthetic oligonucleotide
  Antisense strand to SEQ ID NO: 813666
ucagaagccacuaucccau

SEQ ID NO: 813668 - RNA, 19 nt, Artificial Sequence
  Description of Artificial Sequence: Synthetic oligonucleotide
  Sense strand starting at position 3067 of SEQ ID NO: 587723
cagauagagcauugcacuu

SEQ ID NO: 813669 - RNA, 19 nt, Artificial Sequence
  Description of Artificial Sequence: Synthetic oligonucleotide
  Antisense strand to SEQ ID NO: 813668
aagugcaaugcucuaucug

SEQ ID NO: 813670 - RNA, 19 nt, Artificial Sequence
  Description of Artificial Sequence: Synthetic oligonucleotide
  Sense strand starting at position 3082 of SEQ ID NO: 587723
acuuaucuucccuaguguu

SEQ ID NO: 813671 - RNA, 19 nt, Artificial Sequence
  Description of Artificial Sequence: Synthetic oligonucleotide
  Antisense strand to SEQ ID NO: 813670
aacacuagggaagauaagu

SEQ ID NO: 813672 - RNA, 19 nt, Artificial Sequence
  Description of Artificial Sequence: Synthetic oligonucleotide
  Sense strand starting at position 3103 of SEQ ID NO: 587723
ccaauaaguugacuuugau

SEQ ID NO: 813673 - RNA, 19 nt, Artificial Sequence
  Description of Artificial Sequence: Synthetic oligonucleotide
  Antisense strand to SEQ ID NO: 813672
aucaaagucaacuuauugg

SEQ ID NO: 813674 - RNA, 19 nt, Artificial Sequence
  Description of Artificial Sequence: Synthetic oligonucleotide
  Sense strand starting at position 3300 of SEQ ID NO: 587723
ccagguuacccauggaacu

SEQ ID NO: 813675 - RNA, 19 nt, Artificial Sequence
  Description of Artificial Sequence: Synthetic oligonucleotide
  Antisense strand to SEQ ID NO: 813674
aguuccauggguaaccugg

SEQ ID NO: 813676 - RNA, 19 nt, Artificial Sequence
  Description of Artificial Sequence: Synthetic oligonucleotide
  Sense strand starting at position 3301 of SEQ ID NO: 587723
cagguuacccauggaacuu

SEQ ID NO: 813677 - RNA, 19 nt, Artificial Sequence
  Description of Artificial Sequence: Synthetic oligonucleotide
  Antisense strand to SEQ ID NO: 813676
aaguuccauggguaaccug

SEQ ID NO: 813678 - RNA, 19 nt, Artificial Sequence
  Description of Artificial Sequence: Synthetic oligonucleotide
  Sense strand starting at position 3401 of SEQ ID NO: 587723
augggcuucccauaaauug

SEQ ID NO: 813679 - RNA, 19 nt, Artificial Sequence
  Description of Artificial Sequence: Synthetic oligonucleotide
  Antisense strand to SEQ ID NO: 813678
caauuuaugggaagcccau

SEQ ID NO: 813680 - RNA, 19 nt, Artificial Sequence
  Description of Artificial Sequence: Synthetic oligonucleotide
  Sense strand starting at position 3488 of SEQ ID NO: 587723
gaugguguagccuagugau

SEQ ID NO: 813681 - RNA, 19 nt, Artificial Sequence
  Description of Artificial Sequence: Synthetic oligonucleotide
  Antisense strand to SEQ ID NO: 813680
aucacuaggcuacaccauc

SEQ ID NO: 813682 - RNA, 19 nt, Artificial Sequence
  Description of Artificial Sequence: Synthetic oligonucleotide
  Sense strand starting at position 3494 of SEQ ID NO: 587723
guagccuagugauuaagag

SEQ ID NO: 813683 - RNA, 19 nt, Artificial Sequence
  Description of Artificial Sequence: Synthetic oligonucleotide
  Antisense strand to SEQ ID NO: 813682
cucuuaaucacuaggcuac

SEQ ID NO: 813684 - RNA, 19 nt, Artificial Sequence
  Description of Artificial Sequence: Synthetic oligonucleotide
  Sense strand starting at position 3495 of SEQ ID NO: 587723
uagccuagugauuaagagu

SEQ ID NO: 813685 - RNA, 19 nt, Artificial Sequence
  Description of Artificial Sequence: Synthetic oligonucleotide
  Antisense strand to SEQ ID NO: 813684
acucuuaaucacuaggcua

SEQ ID NO: 813686 - RNA, 19 nt, Artificial Sequence
  Description of Artificial Sequence: Synthetic oligonucleotide
  Sense strand starting at position 3636 of SEQ ID NO: 587723
gcuguauuaagagaguuga

SEQ ID NO: 813687 - RNA, 19 nt, Artificial Sequence
  Description of Artificial Sequence: Synthetic oligonucleotide
  Antisense strand to SEQ ID NO: 813686
ucaacucucuuaauacagc

SEQ ID NO: 813688 - RNA, 19 nt, Artificial Sequence
  Description of Artificial Sequence: Synthetic oligonucleotide
  Sense strand starting at position 3652 of SEQ ID NO: 587723
ugacauauauagcuugcua

SEQ ID NO: 813689 - RNA, 19 nt, Artificial Sequence
  Description of Artificial Sequence: Synthetic oligonucleotide
  Antisense strand to SEQ ID NO: 813688
uagcaagcuauauauguca

SEQ ID NO: 813690 - RNA, 19 nt, Artificial Sequence
  Description of Artificial Sequence: Synthetic oligonucleotide
  Sense strand starting at position 3654 of SEQ ID NO: 587723
acauauauagcuugcuaag

SEQ ID NO: 813691 - RNA, 19 nt, Artificial Sequence
  Description of Artificial Sequence: Synthetic oligonucleotide
  Antisense strand to SEQ ID NO: 813690
cuuagcaagcuauauaugu

SEQ ID NO: 813692 - RNA, 19 nt, Artificial Sequence
  Description of Artificial Sequence: Synthetic oligonucleotide
  Sense strand starting at position 3656 of SEQ ID NO: 587723
auauauagcuugcuaagaa

SEQ ID NO: 813693 - RNA, 19 nt, Artificial Sequence
  Description of Artificial Sequence: Synthetic oligonucleotide
  Antisense strand to SEQ ID NO: 813692
uucuuagcaagcuauauau

SEQ ID NO: 813694 - RNA, 19 nt, Artificial Sequence
  Description of Artificial Sequence: Synthetic oligonucleotide
  Sense strand starting at position 3798 of SEQ ID NO: 587723
uucuauuguuagguacuaa

SEQ ID NO: 813695 - RNA, 19 nt, Artificial Sequence
  Description of Artificial Sequence: Synthetic oligonucleotide
  Antisense strand to SEQ ID NO: 813694
uuaguaccuaacaauagaa

SEQ ID NO: 813696 - RNA, 19 nt, Artificial Sequence
  Description of Artificial Sequence: Synthetic oligonucleotide
  Sense strand starting at position 3932 of SEQ ID NO: 587723
ugaagcugugaguggaauu

SEQ ID NO: 813697 - RNA, 19 nt, Artificial Sequence
  Description of Artificial Sequence: Synthetic oligonucleotide
  Antisense strand to SEQ ID NO: 813696
aauuccacucacagcuuca

SEQ ID NO: 813698 - RNA, 19 nt, Artificial Sequence
  Description of Artificial Sequence: Synthetic oligonucleotide
  Sense strand starting at position 3953 of SEQ ID NO: 587723
aagaguuucugcuuuauga

SEQ ID NO: 813699 - RNA, 19 nt, Artificial Sequence
  Description of Artificial Sequence: Synthetic oligonucleotide
  Antisense strand to SEQ ID NO: 813698
ucauaaagcagaaacucuu

SEQ ID NO: 813700 - RNA, 19 nt, Artificial Sequence
  Description of Artificial Sequence: Synthetic oligonucleotide
  Sense strand starting at position 30 of SEQ ID NO: 587724
aucgguacaagugauacau

SEQ ID NO: 813701 - RNA, 19 nt, Artificial Sequence
  Description of Artificial Sequence: Synthetic oligonucleotide
  Antisense strand to SEQ ID NO: 813700
auguaucacuuguaccgau

SEQ ID NO: 813702 - RNA, 19 nt, Artificial Sequence
  Description of Artificial Sequence: Synthetic oligonucleotide
  Sense strand starting at position 40 of SEQ ID NO: 587724
gugauacauucucuccauc

SEQ ID NO: 813703 - RNA, 19 nt, Artificial Sequence
  Description of Artificial Sequence: Synthetic oligonucleotide
  Antisense strand to SEQ ID NO: 813702
gauggagagaauguaucac

SEQ ID NO: 813704 - RNA, 19 nt, Artificial Sequence
  Description of Artificial Sequence: Synthetic oligonucleotide
  Sense strand starting at position 61 of SEQ ID NO: 587724
aucagauacccuugggagu

SEQ ID NO: 813705 - RNA, 19 nt, Artificial Sequence
  Description of Artificial Sequence: Synthetic oligonucleotide
  Antisense strand to SEQ ID NO: 813704
acucccaaggguaucugau

SEQ ID NO: 813706 - RNA, 19 nt, Artificial Sequence
  Description of Artificial Sequence: Synthetic oligonucleotide
  Sense strand starting at position 191 of SEQ ID NO: 587724
cugacaagcuuguuaaauu

SEQ ID NO: 813707 - RNA, 19 nt, Artificial Sequence
  Description of Artificial Sequence: Synthetic oligonucleotide
  Antisense strand to SEQ ID NO: 813706
aauuuaacaagcuugucag

SEQ ID NO: 813708 - RNA, 19 nt, Artificial Sequence
  Description of Artificial Sequence: Synthetic oligonucleotide
  Sense strand starting at position 199 of SEQ ID NO: 587724
cuuguuaaauuaguguaga

SEQ ID NO: 813709 - RNA, 19 nt, Artificial Sequence
  Description of Artificial Sequence: Synthetic oligonucleotide
  Antisense strand to SEQ ID NO: 813708
ucuacacuaauuuaacaag

SEQ ID NO: 813710 - RNA, 19 nt, Artificial Sequence
  Description of Artificial Sequence: Synthetic oligonucleotide
  Sense strand starting at position 202 of SEQ ID NO: 587724
guuaaauuaguguagaagg

SEQ ID NO: 813711 - RNA, 19 nt, Artificial Sequence
  Description of Artificial Sequence: Synthetic oligonucleotide
  Antisense strand to SEQ ID NO: 813710
ccuucuacacuaauuuaac

SEQ ID NO: 813712 - RNA, 19 nt, Artificial Sequence
  Description of Artificial Sequence: Synthetic oligonucleotide
  Sense strand starting at position 439 of SEQ ID NO: 587724
aagagagccguccauucuu

SEQ ID NO: 813713 - RNA, 19 nt, Artificial Sequence
  Description of Artificial Sequence: Synthetic oligonucleotide
  Antisense strand to SEQ ID NO: 813712
aagaauggacggcucucuu

SEQ ID NO: 813714 - RNA, 19 nt, Artificial Sequence
  Description of Artificial Sequence: Synthetic oligonucleotide
  Sense strand starting at position 457 of SEQ ID NO: 587724
uacugaugugcuuagcaga

SEQ ID NO: 813715 - RNA, 19 nt, Artificial Sequence
  Description of Artificial Sequence: Synthetic oligonucleotide
  Antisense strand to SEQ ID NO: 813714
ucugcuaagcacaucagua

SEQ ID NO: 813716 - RNA, 19 nt, Artificial Sequence
  Description of Artificial Sequence: Synthetic oligonucleotide
  Sense strand starting at position 703 of SEQ ID NO: 587724
ucuggaaaugccuagccau

SEQ ID NO: 813717 - RNA, 19 nt, Artificial Sequence
  Description of Artificial Sequence: Synthetic oligonucleotide
  Antisense strand to SEQ ID NO: 813716
auggcuaggcauuuccaga

SEQ ID NO: 813718 - RNA, 19 nt, Artificial Sequence
  Description of Artificial Sequence: Synthetic oligonucleotide
  Sense strand starting at position 966 of SEQ ID NO: 587724
gcagguaguuaagugaaua

SEQ ID NO: 813719 - RNA, 19 nt, Artificial Sequence
  Description of Artificial Sequence: Synthetic oligonucleotide
  Antisense strand to SEQ ID NO: 813718
uauucacuuaacuaccugc

SEQ ID NO: 813720 - RNA, 19 nt, Artificial Sequence
  Description of Artificial Sequence: Synthetic oligonucleotide
  Sense strand starting at position 1108 of SEQ ID NO: 587724
ggcagagaugcucauuaga

SEQ ID NO: 813721 - RNA, 19 nt, Artificial Sequence
  Description of Artificial Sequence: Synthetic oligonucleotide
  Antisense strand to SEQ ID NO: 813720
ucuaaugagcaucucugcc

SEQ ID NO: 813722 - RNA, 19 nt, Artificial Sequence
  Description of Artificial Sequence: Synthetic oligonucleotide
  Sense strand starting at position 1110 of SEQ ID NO: 587724
cagagaugcucauuagagg

SEQ ID NO: 813723 - RNA, 19 nt, Artificial Sequence
  Description of Artificial Sequence: Synthetic oligonucleotide
  Antisense strand to SEQ ID NO: 813722
ccucuaaugagcaucucug

SEQ ID NO: 813724 - RNA, 19 nt, Artificial Sequence
  Description of Artificial Sequence: Synthetic oligonucleotide
  Sense strand starting at position 2611 of SEQ ID NO: 587724
ucgagaguagcuguugcuu

SEQ ID NO: 813725 - RNA, 19 nt, Artificial Sequence
  Description of Artificial Sequence: Synthetic oligonucleotide
  Antisense strand to SEQ ID NO: 813724
aagcaacagcuacucucga

SEQ ID NO: 813726 - RNA, 19 nt, Artificial Sequence
  Description of Artificial Sequence: Synthetic oligonucleotide
  Sense strand starting at position 2625 of SEQ ID NO: 587724
ugcuucguucguuugauac

SEQ ID NO: 813727 - RNA, 19 nt, Artificial Sequence
  Description of Artificial Sequence: Synthetic oligonucleotide
  Antisense strand to SEQ ID NO: 813726
guaucaaacgaacgaagca

SEQ ID NO: 813728 - RNA, 19 nt, Artificial Sequence
  Description of Artificial Sequence: Synthetic oligonucleotide
  Sense strand starting at position 2719 of SEQ ID NO: 587724
gcaagagggaguugugaug

SEQ ID NO: 813729 - RNA, 19 nt, Artificial Sequence
  Description of Artificial Sequence: Synthetic oligonucleotide
  Antisense strand to SEQ ID NO: 813728
caucacaacucccucuugc

SEQ ID NO: 813730 - RNA, 19 nt, Artificial Sequence
  Description of Artificial Sequence: Synthetic oligonucleotide
  Sense strand starting at position 2728 of SEQ ID NO: 587724
aguugugaugagggaauua

SEQ ID NO: 813731 - RNA, 19 nt, Artificial Sequence
  Description of Artificial Sequence: Synthetic oligonucleotide
  Antisense strand to SEQ ID NO: 813730
uaauucccucaucacaacu

SEQ ID NO: 813732 - RNA, 19 nt, Artificial Sequence
  Description of Artificial Sequence: Synthetic oligonucleotide
  Sense strand starting at position 2738 of SEQ ID NO: 587724
agggaauuaucucuguagc

SEQ ID NO: 813733 - RNA, 19 nt, Artificial Sequence
  Description of Artificial Sequence: Synthetic oligonucleotide
  Antisense strand to SEQ ID NO: 813732
gcuacagagauaauucccu

SEQ ID NO: 813734 - RNA, 19 nt, Artificial Sequence
  Description of Artificial Sequence: Synthetic oligonucleotide
  Sense strand starting at position 2741 of SEQ ID NO: 587724
gaauuaucucuguagcgua

SEQ ID NO: 813735 - RNA, 19 nt, Artificial Sequence
  Description of Artificial Sequence: Synthetic oligonucleotide
  Antisense strand to SEQ ID NO: 813734
uacgcuacagagauaauuc

SEQ ID NO: 813736 - RNA, 19 nt, Artificial Sequence
  Description of Artificial Sequence: Synthetic oligonucleotide
  Sense strand starting at position 2756 of SEQ ID NO: 587724
cguagaugugugcucacgu

SEQ ID NO: 813737 - RNA, 19 nt, Artificial Sequence
  Description of Artificial Sequence: Synthetic oligonucleotide
  Antisense strand to SEQ ID NO: 813736
acgugagcacacaucuacg

SEQ ID NO: 813738 - RNA, 19 nt, Artificial Sequence
  Description of Artificial Sequence: Synthetic oligonucleotide
  Sense strand starting at position 2763 of SEQ ID NO: 587724
gugugcucacguucucuga

SEQ ID NO: 813739 - RNA, 19 nt, Artificial Sequence
  Description of Artificial Sequence: Synthetic oligonucleotide
  Antisense strand to SEQ ID NO: 813738
ucagagaacgugagcacac

SEQ ID NO: 813740 - RNA, 19 nt, Artificial Sequence
  Description of Artificial Sequence: Synthetic oligonucleotide
  Sense strand starting at position 2889 of SEQ ID NO: 587724
ccauuucuguuccaugaga

SEQ ID NO: 813741 - RNA, 19 nt, Artificial Sequence
  Description of Artificial Sequence: Synthetic oligonucleotide
  Antisense strand to SEQ ID NO: 813740
ucucauggaacagaaaugg

SEQ ID NO: 813742 - RNA, 19 nt, Artificial Sequence
  Description of Artificial Sequence: Synthetic oligonucleotide
  Sense strand starting at position 2902 of SEQ ID NO: 587724
augagauuguuuccaccuc

SEQ ID NO: 813743 - RNA, 19 nt, Artificial Sequence
  Description of Artificial Sequence: Synthetic oligonucleotide
  Antisense strand to SEQ ID NO: 813742
gagguggaaacaaucucau

SEQ ID NO: 813744 - RNA, 19 nt, Artificial Sequence
  Description of Artificial Sequence: Synthetic oligonucleotide
  Sense strand starting at position 2908 of SEQ ID NO: 587724
uuguuuccaccucagauga

SEQ ID NO: 813745 - RNA, 19 nt, Artificial Sequence
  Description of Artificial Sequence: Synthetic oligonucleotide
  Antisense strand to SEQ ID NO: 813744
ucaucugagguggaaacaa

SEQ ID NO: 813746 - RNA, 19 nt, Artificial Sequence
  Description of Artificial Sequence: Synthetic oligonucleotide
  Sense strand starting at position 3017 of SEQ ID NO: 587724
augggauaguggcuucuga

SEQ ID NO: 813747 - RNA, 19 nt, Artificial Sequence
  Description of Artificial Sequence: Synthetic oligonucleotide
  Antisense strand to SEQ ID NO: 813746
ucagaagccacuaucccau

SEQ ID NO: 813748 - RNA, 19 nt, Artificial Sequence
  Description of Artificial Sequence: Synthetic oligonucleotide
  Sense strand starting at position 3054 of SEQ ID NO: 587724
cagauagagcauugcacuu

SEQ ID NO: 813749 - RNA, 19 nt, Artificial Sequence
  Description of Artificial Sequence: Synthetic oligonucleotide
  Antisense strand to SEQ ID NO: 813748
aagugcaaugcucuaucug

SEQ ID NO: 813750 - RNA, 19 nt, Artificial Sequence
  Description of Artificial Sequence: Synthetic oligonucleotide
  Sense strand starting at position 3069 of SEQ ID NO: 587724
acuuaucuucccuaguguu

SEQ ID NO: 813751 - RNA, 19 nt, Artificial Sequence
  Description of Artificial Sequence: Synthetic oligonucleotide
  Antisense strand to SEQ ID NO: 813750
aacacuagggaagauaagu

SEQ ID NO: 813752 - RNA, 19 nt, Artificial Sequence
  Description of Artificial Sequence: Synthetic oligonucleotide
  Sense strand starting at position 3090 of SEQ ID NO: 587724
ccaauaaguugacuuugau

SEQ ID NO: 813753 - RNA, 19 nt, Artificial Sequence
  Description of Artificial Sequence: Synthetic oligonucleotide
  Antisense strand to SEQ ID NO: 813752
aucaaagucaacuuauugg

SEQ ID NO: 813754 - RNA, 19 nt, Artificial Sequence
  Description of Artificial Sequence: Synthetic oligonucleotide
  Sense strand starting at position 3287 of SEQ ID NO: 587724
ccagguuacccauggaacu

SEQ ID NO: 813755 - RNA, 19 nt, Artificial Sequence
  Description of Artificial Sequence: Synthetic oligonucleotide
  Antisense strand to SEQ ID NO: 813754
aguuccauggguaaccugg

SEQ ID NO: 813756 - RNA, 19 nt, Artificial Sequence
  Description of Artificial Sequence: Synthetic oligonucleotide
  Sense strand starting at position 3288 of SEQ ID NO: 587724
cagguuacccauggaacuu

SEQ ID NO: 813757 - RNA, 19 nt, Artificial Sequence
  Description of Artificial Sequence: Synthetic oligonucleotide
  Antisense strand to SEQ ID NO: 813756
aaguuccauggguaaccug

SEQ ID NO: 813758 - RNA, 19 nt, Artificial Sequence
  Description of Artificial Sequence: Synthetic oligonucleotide
  Sense strand starting at position 3388 of SEQ ID NO: 587724
augggcuucccauaaauug

SEQ ID NO: 813759 - RNA, 19 nt, Artificial Sequence
  Description of Artificial Sequence: Synthetic oligonucleotide
  Antisense strand to SEQ ID NO: 813758
caauuuaugggaagcccau

SEQ ID NO: 813760 - RNA, 19 nt, Artificial Sequence
  Description of Artificial Sequence: Synthetic oligonucleotide
  Sense strand starting at position 3475 of SEQ ID NO: 587724
gaugguguagccuagugau

SEQ ID NO: 813761 - RNA, 19 nt, Artificial Sequence
  Description of Artificial Sequence: Synthetic oligonucleotide
  Antisense strand to SEQ ID NO: 813760
aucacuaggcuacaccauc

SEQ ID NO: 813762 - RNA, 19 nt, Artificial Sequence
  Description of Artificial Sequence: Synthetic oligonucleotide
  Sense strand starting at position 3481 of SEQ ID NO: 587724
guagccuagugauuaagag

SEQ ID NO: 813763 - RNA, 19 nt, Artificial Sequence
  Description of Artificial Sequence: Synthetic oligonucleotide
  Antisense strand to SEQ ID NO: 813762
cucuuaaucacuaggcuac

SEQ ID NO: 813764 - RNA, 19 nt, Artificial Sequence
  Description of Artificial Sequence: Synthetic oligonucleotide
  Sense strand starting at position 3482 of SEQ ID NO: 587724
uagccuagugauuaagagu

SEQ ID NO: 813765 - RNA, 19 nt, Artificial Sequence
  Description of Artificial Sequence: Synthetic oligonucleotide
  Antisense strand to SEQ ID NO: 813764
acucuuaaucacuaggcua

SEQ ID NO: 813766 - RNA, 19 nt, Artificial Sequence
  Description of Artificial Sequence: Synthetic oligonucleotide
  Sense strand starting at position 3623 of SEQ ID NO: 587724
gcuguauuaagagaguuga

SEQ ID NO: 813767 - RNA, 19 nt, Artificial Sequence
  Description of Artificial Sequence: Synthetic oligonucleotide
  Antisense strand to SEQ ID NO: 813766
ucaacucucuuaauacagc

SEQ ID NO: 813768 - RNA, 19 nt, Artificial Sequence
  Description of Artificial Sequence: Synthetic oligonucleotide
  Sense strand starting at position 3639 of SEQ ID NO: 587724
ugacauauauagcuugcua

SEQ ID NO: 813769 - RNA, 19 nt, Artificial Sequence
  Description of Artificial Sequence: Synthetic oligonucleotide
  Antisense strand to SEQ ID NO: 813768
uagcaagcuauauauguca

SEQ ID NO: 813770 - RNA, 19 nt, Artificial Sequence
  Description of Artificial Sequence: Synthetic oligonucleotide
  Sense strand starting at position 3641 of SEQ ID NO: 587724
acauauauagcuugcuaag

SEQ ID NO: 813771 - RNA, 19 nt, Artificial Sequence
  Description of Artificial Sequence: Synthetic oligonucleotide
  Antisense strand to SEQ ID NO: 813770
cuuagcaagcuauauaugu

SEQ ID NO: 813772 - RNA, 19 nt, Artificial Sequence
  Description of Artificial Sequence: Synthetic oligonucleotide
  Sense strand starting at position 3643 of SEQ ID NO: 587724
auauauagcuugcuaagaa

SEQ ID NO: 813773 - RNA, 19 nt, Artificial Sequence
  Description of Artificial Sequence: Synthetic oligonucleotide
  Antisense strand to SEQ ID NO: 813772
uucuuagcaagcuauauau

SEQ ID NO: 813774 - RNA, 19 nt, Artificial Sequence
  Description of Artificial Sequence: Synthetic oligonucleotide
  Sense strand starting at position 3785 of SEQ ID NO: 587724
uucuauuguuagguacuaa

SEQ ID NO: 813775 - RNA, 19 nt, Artificial Sequence
  Description of Artificial Sequence: Synthetic oligonucleotide
  Antisense strand to SEQ ID NO: 813774
uuaguaccuaacaauagaa

SEQ ID NO: 813776 - RNA, 19 nt, Artificial Sequence
  Description of Artificial Sequence: Synthetic oligonucleotide
  Sense strand starting at position 3919 of SEQ ID NO: 587724
ugaagcugugaguggaauu

SEQ ID NO: 813777 - RNA, 19 nt, Artificial Sequence
  Description of Artificial Sequence: Synthetic oligonucleotide
  Antisense strand to SEQ ID NO: 813776
aauuccacucacagcuuca

SEQ ID NO: 813778 - RNA, 19 nt, Artificial Sequence
  Description of Artificial Sequence: Synthetic oligonucleotide
  Sense strand starting at position 3940 of SEQ ID NO: 587724
aagaguuucugcuuuauga

SEQ ID NO: 813779 - RNA, 19 nt, Artificial Sequence
  Description of Artificial Sequence: Synthetic oligonucleotide
  Antisense strand to SEQ ID NO: 813778
ucauaaagcagaaacucuu

SEQ ID NO: 813780 - RNA, 19 nt, Artificial Sequence
  Description of Artificial Sequence: Synthetic oligonucleotide
  Sense strand starting at position 25 of SEQ ID NO: 587725
uaguacauggacugagauu

SEQ ID NO: 813781 - RNA, 19 nt, Artificial Sequence
  Description of Artificial Sequence: Synthetic oligonucleotide
  Antisense strand to SEQ ID NO: 813780
aaucucaguccauguacua

SEQ ID NO: 813782 - RNA, 19 nt, Artificial Sequence
  Description of Artificial Sequence: Synthetic oligonucleotide
  Sense strand starting at position 147 of SEQ ID NO: 587725
aucgguacaagugauacau

SEQ ID NO: 813783 - RNA, 19 nt, Artificial Sequence
  Description of Artificial Sequence: Synthetic oligonucleotide
  Antisense strand to SEQ ID NO: 813782
auguaucacuuguaccgau

SEQ ID NO: 813784 - RNA, 19 nt, Artificial Sequence
  Description of Artificial Sequence: Synthetic oligonucleotide
  Sense strand starting at position 157 of SEQ ID NO: 587725
gugauacauucucuccauc

SEQ ID NO: 813785 - RNA, 19 nt, Artificial Sequence
  Description of Artificial Sequence: Synthetic oligonucleotide
  Antisense strand to SEQ ID NO: 813784
gauggagagaauguaucac

SEQ ID NO: 813786 - RNA, 19 nt, Artificial Sequence
  Description of Artificial Sequence: Synthetic oligonucleotide
  Sense strand starting at position 178 of SEQ ID NO: 587725
aucagauacccuugggagu

SEQ ID NO: 813787 - RNA, 19 nt, Artificial Sequence
  Description of Artificial Sequence: Synthetic oligonucleotide
  Antisense strand to SEQ ID NO: 813786
acucccaaggguaucugau

SEQ ID NO: 813788 - RNA, 19 nt, Artificial Sequence
  Description of Artificial Sequence: Synthetic oligonucleotide
  Sense strand starting at position 308 of SEQ ID NO: 587725
cugacaagcuuguuaaauu

SEQ ID NO: 813789 - RNA, 19 nt, Artificial Sequence
  Description of Artificial Sequence: Synthetic oligonucleotide
  Antisense strand to SEQ ID NO: 813788
aauuuaacaagcuugucag

SEQ ID NO: 813790 - RNA, 19 nt, Artificial Sequence
  Description of Artificial Sequence: Synthetic oligonucleotide
  Sense strand starting at position 316 of SEQ ID NO: 587725
cuuguuaaauuaguguaga

SEQ ID NO: 813791 - RNA, 19 nt, Artificial Sequence
  Description of Artificial Sequence: Synthetic oligonucleotide
  Antisense strand to SEQ ID NO: 813790
ucuacacuaauuuaacaag

SEQ ID NO: 813792 - RNA, 19 nt, Artificial Sequence
  Description of Artificial Sequence: Synthetic oligonucleotide
  Sense strand starting at position 319 of SEQ ID NO: 587725
guuaaauuaguguagaagg

SEQ ID NO: 813793 - RNA, 19 nt, Artificial Sequence
  Description of Artificial Sequence: Synthetic oligonucleotide
  Antisense strand to SEQ ID NO: 813792
ccuucuacacuaauuuaac

SEQ ID NO: 813794 - RNA, 19 nt, Artificial Sequence
  Description of Artificial Sequence: Synthetic oligonucleotide
  Sense strand starting at position 556 of SEQ ID NO: 587725
aagagagccguccauucuu

SEQ ID NO: 813795 - RNA, 19 nt, Artificial Sequence
  Description of Artificial Sequence: Synthetic oligonucleotide
  Antisense strand to SEQ ID NO: 813794
aagaauggacggcucucuu

SEQ ID NO: 813796 - RNA, 19 nt, Artificial Sequence
  Description of Artificial Sequence: Synthetic oligonucleotide
  Sense strand starting at position 574 of SEQ ID NO: 587725
uacugaugugcuuagcaga

SEQ ID NO: 813797 - RNA, 19 nt, Artificial Sequence
  Description of Artificial Sequence: Synthetic oligonucleotide
  Antisense strand to SEQ ID NO: 813796
ucugcuaagcacaucagua

SEQ ID NO: 813798 - RNA, 19 nt, Artificial Sequence
  Description of Artificial Sequence: Synthetic oligonucleotide
  Sense strand starting at position 820 of SEQ ID NO: 587725
ucuggaaaugccuagccau

SEQ ID NO: 813799 - RNA, 19 nt, Artificial Sequence
  Description of Artificial Sequence: Synthetic oligonucleotide
  Antisense strand to SEQ ID NO: 813798
auggcuaggcauuuccaga

SEQ ID NO: 813800 - RNA, 19 nt, Artificial Sequence
  Description of Artificial Sequence: Synthetic oligonucleotide
  Sense strand starting at position 1083 of SEQ ID NO: 587725
gcagguaguuaagugaaua

SEQ ID NO: 813801 - RNA, 19 nt, Artificial Sequence
  Description of Artificial Sequence: Synthetic oligonucleotide
  Antisense strand to SEQ ID NO: 813800
uauucacuuaacuaccugc

SEQ ID NO: 813802 - RNA, 19 nt, Artificial Sequence
  Description of Artificial Sequence: Synthetic oligonucleotide
  Sense strand starting at position 1225 of SEQ ID NO: 587725
ggcagagaugcucauuaga

SEQ ID NO: 813803 - RNA, 19 nt, Artificial Sequence
  Description of Artificial Sequence: Synthetic oligonucleotide
  Antisense strand to SEQ ID NO: 813802
ucuaaugagcaucucugcc

SEQ ID NO: 813804 - RNA, 19 nt, Artificial Sequence
  Description of Artificial Sequence: Synthetic oligonucleotide
  Sense strand starting at position 1227 of SEQ ID NO: 587725
cagagaugcucauuagagg

SEQ ID NO: 813805 - RNA, 19 nt, Artificial Sequence
  Description of Artificial Sequence: Synthetic oligonucleotide
  Antisense strand to SEQ ID NO: 813804
ccucuaaugagcaucucug

SEQ ID NO: 813806 - RNA, 19 nt, Artificial Sequence
  Description of Artificial Sequence: Synthetic oligonucleotide
  Sense strand starting at position 2728 of SEQ ID NO: 587725
ucgagaguagcuguugcuu

SEQ ID NO: 813807 - RNA, 19 nt, Artificial Sequence
  Description of Artificial Sequence: Synthetic oligonucleotide
  Antisense strand to SEQ ID NO: 813806
aagcaacagcuacucucga

SEQ ID NO: 813808 - RNA, 19 nt, Artificial Sequence
  Description of Artificial Sequence: Synthetic oligonucleotide
  Sense strand starting at position 2742 of SEQ ID NO: 587725
ugcuucguucguuugauac

SEQ ID NO: 813809 - RNA, 19 nt, Artificial Sequence
  Description of Artificial Sequence: Synthetic oligonucleotide
  Antisense strand to SEQ ID NO: 813808
guaucaaacgaacgaagca

SEQ ID NO: 813810 - RNA, 19 nt, Artificial Sequence
  Description of Artificial Sequence: Synthetic oligonucleotide
  Sense strand starting at position 2836 of SEQ ID NO: 587725
gcaagagggaguugugaug

SEQ ID NO: 813811 - RNA, 19 nt, Artificial Sequence
  Description of Artificial Sequence: Synthetic oligonucleotide
  Antisense strand to SEQ ID NO: 813810
caucacaacucccucuugc

SEQ ID NO: 813812 - RNA, 19 nt, Artificial Sequence
  Description of Artificial Sequence: Synthetic oligonucleotide
  Sense strand starting at position 2845 of SEQ ID NO: 587725
aguugugaugagggaauua

SEQ ID NO: 813813 - RNA, 19 nt, Artificial Sequence
  Description of Artificial Sequence: Synthetic oligonucleotide
  Antisense strand to SEQ ID NO: 813812
uaauucccucaucacaacu

SEQ ID NO: 813814 - RNA, 19 nt, Artificial Sequence
  Description of Artificial Sequence: Synthetic oligonucleotide
  Sense strand starting at position 2855 of SEQ ID NO: 587725
agggaauuaucucuguagc

SEQ ID NO: 813815 - RNA, 19 nt, Artificial Sequence
  Description of Artificial Sequence: Synthetic oligonucleotide
  Antisense strand to SEQ ID NO: 813814
gcuacagagauaauucccu

SEQ ID NO: 813816 - RNA, 19 nt, Artificial Sequence
  Description of Artificial Sequence: Synthetic oligonucleotide
  Sense strand starting at position 2858 of SEQ ID NO: 587725
gaauuaucucuguagcgua

SEQ ID NO: 813817 - RNA, 19 nt, Artificial Sequence
  Description of Artificial Sequence: Synthetic oligonucleotide
  Antisense strand to SEQ ID NO: 813816
uacgcuacagagauaauuc

SEQ ID NO: 813818 - RNA, 19 nt, Artificial Sequence
  Description of Artificial Sequence: Synthetic oligonucleotide
  Sense strand starting at position 2873 of SEQ ID NO: 587725
cguagaugugugcucacgu

SEQ ID NO: 813819 - RNA, 19 nt, Artificial Sequence
  Description of Artificial Sequence: Synthetic oligonucleotide
  Antisense strand to SEQ ID NO: 813818
acgugagcacacaucuacg

SEQ ID NO: 813820 - RNA, 19 nt, Artificial Sequence
  Description of Artificial Sequence: Synthetic oligonucleotide
  Sense strand starting at position 2880 of SEQ ID NO: 587725
gugugcucacguucucuga

SEQ ID NO: 813821 - RNA, 19 nt, Artificial Sequence
  Description of Artificial Sequence: Synthetic oligonucleotide
  Antisense strand to SEQ ID NO: 813820
ucagagaacgugagcacac

SEQ ID NO: 813822 - RNA, 19 nt, Artificial Sequence
  Description of Artificial Sequence: Synthetic oligonucleotide
  Sense strand starting at position 3006 of SEQ ID NO: 587725
ccauuucuguuccaugaga

SEQ ID NO: 813823 - RNA, 19 nt, Artificial Sequence
  Description of Artificial Sequence: Synthetic oligonucleotide
  Antisense strand to SEQ ID NO: 813822
ucucauggaacagaaaugg

SEQ ID NO: 813824 - RNA, 19 nt, Artificial Sequence
  Description of Artificial Sequence: Synthetic oligonucleotide
  Sense strand starting at position 3019 of SEQ ID NO: 587725
augagauuguuuccaccuc

SEQ ID NO: 813825 - RNA, 19 nt, Artificial Sequence
  Description of Artificial Sequence: Synthetic oligonucleotide
  Antisense strand to SEQ ID NO: 813824
gagguggaaacaaucucau

SEQ ID NO: 813826 - RNA, 19 nt, Artificial Sequence
  Description of Artificial Sequence: Synthetic oligonucleotide
  Sense strand starting at position 3025 of SEQ ID NO: 587725
uuguuuccaccucagauga

SEQ ID NO: 813827 - RNA, 19 nt, Artificial Sequence
  Description of Artificial Sequence: Synthetic oligonucleotide
  Antisense strand to SEQ ID NO: 813826
ucaucugagguggaaacaa

SEQ ID NO: 813828 - RNA, 19 nt, Artificial Sequence
  Description of Artificial Sequence: Synthetic oligonucleotide
  Sense strand starting at position 3134 of SEQ ID NO: 587725
augggauaguggcuucuga

SEQ ID NO: 813829 - RNA, 19 nt, Artificial Sequence
  Description of Artificial Sequence: Synthetic oligonucleotide
  Antisense strand to SEQ ID NO: 813828
ucagaagccacuaucccau

SEQ ID NO: 813830 - RNA, 19 nt, Artificial Sequence
  Description of Artificial Sequence: Synthetic oligonucleotide
  Sense strand starting at position 3171 of SEQ ID NO: 587725
cagauagagcauugcacuu

SEQ ID NO: 813831 - RNA, 19 nt, Artificial Sequence
  Description of Artificial Sequence: Synthetic oligonucleotide
  Antisense strand to SEQ ID NO: 813830
aagugcaaugcucuaucug

SEQ ID NO: 813832 - RNA, 19 nt, Artificial Sequence
  Description of Artificial Sequence: Synthetic oligonucleotide
  Sense strand starting at position 3186 of SEQ ID NO: 587725
acuuaucuucccuaguguu

SEQ ID NO: 813833 - RNA, 19 nt, Artificial Sequence
  Description of Artificial Sequence: Synthetic oligonucleotide
  Antisense strand to SEQ ID NO: 813832
aacacuagggaagauaagu

SEQ ID NO: 813834 - RNA, 19 nt, Artificial Sequence
  Description of Artificial Sequence: Synthetic oligonucleotide
  Sense strand starting at position 3207 of SEQ ID NO: 587725
ccaauaaguugacuuugau

SEQ ID NO: 813835 - RNA, 19 nt, Artificial Sequence
  Description of Artificial Sequence: Synthetic oligonucleotide
  Antisense strand to SEQ ID NO: 813834
aucaaagucaacuuauugg

SEQ ID NO: 813836 - RNA, 19 nt, Artificial Sequence
  Description of Artificial Sequence: Synthetic oligonucleotide
  Sense strand starting at position 3404 of SEQ ID NO: 587725
ccagguuacccauggaacu

SEQ ID NO: 813837 - RNA, 19 nt, Artificial Sequence
  Description of Artificial Sequence: Synthetic oligonucleotide
  Antisense strand to SEQ ID NO: 813836
aguuccauggguaaccugg

SEQ ID NO: 813838 - RNA, 19 nt, Artificial Sequence
  Description of Artificial Sequence: Synthetic oligonucleotide
  Sense strand starting at position 3405 of SEQ ID NO: 587725
cagguuacccauggaacuu

SEQ ID NO: 813839 - RNA, 19 nt, Artificial Sequence
  Description of Artificial Sequence: Synthetic oligonucleotide
  Antisense strand to SEQ ID NO: 813838
aaguuccauggguaaccug

SEQ ID NO: 813840 - RNA, 19 nt, Artificial Sequence
  Description of Artificial Sequence: Synthetic oligonucleotide
  Sense strand starting at position 3505 of SEQ ID NO: 587725
augggcuucccauaaauug

SEQ ID NO: 813841 - RNA, 19 nt, Artificial Sequence
  Description of Artificial Sequence: Synthetic oligonucleotide
  Antisense strand to SEQ ID NO: 813840
caauuuaugggaagcccau

SEQ ID NO: 813842 - RNA, 19 nt, Artificial Sequence
  Description of Artificial Sequence: Synthetic oligonucleotide
  Sense strand starting at position 3592 of SEQ ID NO: 587725
gaugguguagccuagugau

SEQ ID NO: 813843 - RNA, 19 nt, Artificial Sequence
  Description of Artificial Sequence: Synthetic oligonucleotide
  Antisense strand to SEQ ID NO: 813842
aucacuaggcuacaccauc

SEQ ID NO: 813844 - RNA, 19 nt, Artificial Sequence
  Description of Artificial Sequence: Synthetic oligonucleotide
  Sense strand starting at position 3598 of SEQ ID NO: 587725
guagccuagugauuaagag

SEQ ID NO: 813845 - RNA, 19 nt, Artificial Sequence
  Description of Artificial Sequence: Synthetic oligonucleotide
  Antisense strand to SEQ ID NO: 813844
cucuuaaucacuaggcuac

SEQ ID NO: 813846 - RNA, 19 nt, Artificial Sequence
  Description of Artificial Sequence: Synthetic oligonucleotide
  Sense strand starting at position 3599 of SEQ ID NO: 587725
uagccuagugauuaagagu

SEQ ID NO: 813847 - RNA, 19 nt, Artificial Sequence
  Description of Artificial Sequence: Synthetic oligonucleotide
  Antisense strand to SEQ ID NO: 813846
acucuuaaucacuaggcua

SEQ ID NO: 813848 - RNA, 19 nt, Artificial Sequence
  Description of Artificial Sequence: Synthetic oligonucleotide
  Sense strand starting at position 3727 of SEQ ID NO: 587725
aaguaauagcagggcugua

SEQ ID NO: 813849 - RNA, 19 nt, Artificial Sequence
  Description of Artificial Sequence: Synthetic oligonucleotide
  Antisense strand to SEQ ID NO: 813848
uacagcccugcuauuacuu

SEQ ID NO: 813850 - RNA, 19 nt, Artificial Sequence
  Description of Artificial Sequence: Synthetic oligonucleotide
  Sense strand starting at position 3740 of SEQ ID NO: 587725
gcuguauuaagagaguuga

SEQ ID NO: 813851 - RNA, 19 nt, Artificial Sequence
  Description of Artificial Sequence: Synthetic oligonucleotide
  Antisense strand to SEQ ID NO: 813850
ucaacucucuuaauacagc

SEQ ID NO: 813852 - RNA, 19 nt, Artificial Sequence
  Description of Artificial Sequence: Synthetic oligonucleotide
  Sense strand starting at position 3756 of SEQ ID NO: 587725
ugacauauauagcuugcua

SEQ ID NO: 813853 - RNA, 19 nt, Artificial Sequence
  Description of Artificial Sequence: Synthetic oligonucleotide
  Antisense strand to SEQ ID NO: 813852
uagcaagcuauauauguca

SEQ ID NO: 813854 - RNA, 19 nt, Artificial Sequence
  Description of Artificial Sequence: Synthetic oligonucleotide
  Sense strand starting at position 3758 of SEQ ID NO: 587725
acauauauagcuugcuaag

SEQ ID NO: 813855 - RNA, 19 nt, Artificial Sequence
  Description of Artificial Sequence: Synthetic oligonucleotide
  Antisense strand to SEQ ID NO: 813854
cuuagcaagcuauauaugu

SEQ ID NO: 813856 - RNA, 19 nt, Artificial Sequence
  Description of Artificial Sequence: Synthetic oligonucleotide
  Sense strand starting at position 3760 of SEQ ID NO: 587725
auauauagcuugcuaagaa

SEQ ID NO: 813857 - RNA, 19 nt, Artificial Sequence
  Description of Artificial Sequence: Synthetic oligonucleotide
  Antisense strand to SEQ ID NO: 813856
uucuuagcaagcuauauau

SEQ ID NO: 813858 - RNA, 19 nt, Artificial Sequence
  Description of Artificial Sequence: Synthetic oligonucleotide
  Sense strand starting at position 3902 of SEQ ID NO: 587725
uucuauuguuagguacuaa

SEQ ID NO: 813859 - RNA, 19 nt, Artificial Sequence
  Description of Artificial Sequence: Synthetic oligonucleotide
  Antisense strand to SEQ ID NO: 813858
uuaguaccuaacaauagaa

SEQ ID NO: 813860 - RNA, 19 nt, Artificial Sequence
  Description of Artificial Sequence: Synthetic oligonucleotide
  Sense strand starting at position 112 of SEQ ID NO: 587726
cugacaagcuuguuaaauu

SEQ ID NO: 813861 - RNA, 19 nt, Artificial Sequence
  Description of Artificial Sequence: Synthetic oligonucleotide
  Antisense strand to SEQ ID NO: 813860
aauuuaacaagcuugucag

SEQ ID NO: 813862 - RNA, 19 nt, Artificial Sequence
  Description of Artificial Sequence: Synthetic oligonucleotide
  Sense strand starting at position 120 of SEQ ID NO: 587726
cuuguuaaauuaguguaga

SEQ ID NO: 813863 - RNA, 19 nt, Artificial Sequence
  Description of Artificial Sequence: Synthetic oligonucleotide
  Antisense strand to SEQ ID NO: 813862
ucuacacuaauuuaacaag

SEQ ID NO: 813864 - RNA, 19 nt, Artificial Sequence
  Description of Artificial Sequence: Synthetic oligonucleotide
  Sense strand starting at position 123 of SEQ ID NO: 587726
guuaaauuaguguagaagg

SEQ ID NO: 813865 - RNA, 19 nt, Artificial Sequence
  Description of Artificial Sequence: Synthetic oligonucleotide
  Antisense strand to SEQ ID NO: 813864
ccuucuacacuaauuuaac

SEQ ID NO: 813866 - RNA, 19 nt, Artificial Sequence
  Description of Artificial Sequence: Synthetic oligonucleotide
  Sense strand starting at position 360 of SEQ ID NO: 587726
aagagagccguccauucuu

SEQ ID NO: 813867 - RNA, 19 nt, Artificial Sequence
  Description of Artificial Sequence: Synthetic oligonucleotide
  Antisense strand to SEQ ID NO: 813866
aagaauggacggcucucuu

SEQ ID NO: 813868 - RNA, 19 nt, Artificial Sequence
  Description of Artificial Sequence: Synthetic oligonucleotide
  Sense strand starting at position 378 of SEQ ID NO: 587726
uacugaugugcuuagcaga

SEQ ID NO: 813869 - RNA, 19 nt, Artificial Sequence
  Description of Artificial Sequence: Synthetic oligonucleotide
  Antisense strand to SEQ ID NO: 813868
ucugcuaagcacaucagua
